United States Patent Application Publication US 2013/0129668 A1 - sequence listing, part 12

SEQ ID NO: 188802 - DNA, 122 bp, Homo sapiens
aggaaggaggtgaatctctggggccaggaagaccctgctgcccggaagagcctcatgttccgtgggggctgggcggacatacatatacgggctccaggctgaacggctcgggccacttacac

SEQ ID NO: 188803 - DNA, 122 bp, Homo sapiens
ctgaatgtccctgtgcccactggggactttgggaacagaaacatgccaagatgctacaaccggccctgggcacaaagccacctctccagctttccatgcccagcattagtcctggcatggag

SEQ ID NO: 188804 - DNA, 122 bp, Homo sapiens
ggggataggggaggtgggcaggggaggacactgatgtggttggcccctccttttgggggccgtgaaggcctagttagtgatgactcagccctgggccacaccaggctgggggtggccgcagc

SEQ ID NO: 188805 - DNA, 122 bp, Homo sapiens
cccacctagttctttatttcttggaagcttggactggaacagatcacttccttgttttggcgtctgtatcaggaaccatgattagttctgtatttctgcttgtcaaccctgggaacagcagt

SEQ ID NO: 188806 - DNA, 122 bp, Homo sapiens
atcccgatctcccctccctgataaagtgccatttttggggggataacggttgatttcagtcgttcgaatcaaaacgggccaaagtttataataataatttggtactttggatcttgaatgca

SEQ ID NO: 188807 - DNA, 122 bp, Homo sapiens
actcatgaagctgtgtctgcctggggtcagtggtggagacattgcgttaaccccagcaagcgagccatcaccagagctttgcacagggagacaccacatagaaaggcagatgaggcaacaca

SEQ ID NO: 188808 - DNA, 122 bp, Homo sapiens
acgctggcaggccctgtgtttgcggagaggccagccgggagcaaatcagggcattaggaccgggcaggagccgcatggtgggagggtttctggccccctccgccccagagtagggcctggta

SEQ ID NO: 188809 - DNA, 122 bp, Homo sapiens
ttctagtgattctagtggaggaagtgggtggggcagagatgagccagactggccagaagtcgatatttgattgaaggaggatggcagggtctttgtactattctttctgtttatacatttga

SEQ ID NO: 188810 - DNA, 122 bp, Homo sapiens
ggctgccttcgctggactctcgcccgcacgactccgccctttcactgtgctctgctgaagcgttcctgactgccctcccccagaacgcctccccgtgttcgtggcactctatcctctcactg

SEQ ID NO: 188811 - DNA, 122 bp, Homo sapiens
caacgaatggaggcgaccaaagccaggcctcgacccaaatcctcgggggccagggtggggcgggagcccacctgctcaaagccggctcctcgtcgctaggctcttcaaccgcgtaggggtcg

SEQ ID NO: 188812 - DNA, 122 bp, Homo sapiens
ggtgatctgcccgcctcagcctcccaaaatgctgggattacaggcgtgagccaccgcgcccggccttaactttgcctttatgaaattaagcatgaaagatggtggagataatggcaattaat

SEQ ID NO: 188813 - DNA, 122 bp, Homo sapiens
cgcagcgcagtggcgaattcgatcttctgggtctccgggtggttcccactggggctctcgcgccgtctctctggagccaaaggcccccctcacacggctttcgccagtgcatcgcttttccc

SEQ ID NO: 188814 - DNA, 122 bp, Homo sapiens
gtactagaaactaattctcactccactccacagaaacagggctcagcaggctggagtgatcgacaaggcaggtgtagacatgtccaagttcaggagtcatttctagcatcaccacagtctga

SEQ ID NO: 188815 - DNA, 122 bp, Homo sapiens
gtgctaatatgacaaatgcaaagatcgaaggagcttgtgacgcaggcaatgctgcttcctcgcccgtctccctcctatccggctggcggcaggcaggcccgccccccgcgcccccagcggca

SEQ ID NO: 188816 - DNA, 122 bp, Homo sapiens
tacctaagggaggctgggaggcgtgtcctcaggaccgtagttcttattggtttcgctgctcgctgtggggtgggctggtgcagccgcagctgttgcttattggcccaccgattccatgggga

SEQ ID NO: 188817 - DNA, 122 bp, Homo sapiens
tgactgagctactatgttctcttttaaggagtgtgatatggcttggatctgtgtccccaccgaatctcatgtcggaggtggggcctggtggaggtgactggaccaggtgggtgaagttctca

SEQ ID NO: 188818 - DNA, 122 bp, Homo sapiens
cctttggctggggctgagcctcttgggcacctctcaagtcaagtgaggtgaagaaggaggcgagttcaagaaagtgagtgactcatcacttgagctgcaggactagcaatgctgcacagaag

SEQ ID NO: 188819 - DNA, 122 bp, Homo sapiens
ccctgaccagcctgtagtaactggcccctaggccgcagttctttgtccttagcaggaggccgtttcttgccgggagagagggattagagggattgtccggcgtgggtctagggtcgttgagg

SEQ ID NO: 188820 - DNA, 122 bp, Homo sapiens
gccagctgtaggggcgggggcgggcagggaggtatttatttatttattcgcaacagccagcgctaaaagagggggaggccgagccaagaggaccccaggagcccagagcagcgggagagggt

SEQ ID NO: 188821 - DNA, 122 bp, Homo sapiens
ccgagaatgcagggcctgggaacagaggcgggagggctcacctgaacacactgctggtagcgcttgaagaggtcggtgcacgggtccccggagctgtcccccttgagaaatttctcggcgaa

SEQ ID NO: 188822 - DNA, 122 bp, Homo sapiens
attcctcacgcccttcaatgctgcaggatggactggcccctgacccagggactctccaaacgggatacaggagagaagctggtctagactgtttgctgatccccaacctgcacggggcattc

SEQ ID NO: 188823 - DNA, 122 bp, Homo sapiens
tctcaagcttctttttcgccttatgcatcactttgttcacaacatagctaatgtgaatgacggaaaatctaaaagagctgtccggttctaaatgatgagctgagctgtcttttgccaataat

SEQ ID NO: 188824 - DNA, 122 bp, Homo sapiens
tcccaatgctaaccgaatcttcccaatcctccagcagctccgtgacagtcagtacatacacgtacgttctgtgcttgcgatcctggttctgttcgaagacgcccaggagccggcctaacttc

SEQ ID NO: 188825 - DNA, 122 bp, Homo sapiens
gtgaatgctgttaggggctgggtctcttgctagtagggggtgaagcggctgtaccctcctcggcagaggctagcctgcaacatcaaagatgaaaaacagccaatcagtaccgtcttttggaa

SEQ ID NO: 188826 - DNA, 122 bp, Homo sapiens
ggtgatccacccaccgcggcctcccaaagtgctaggattacaggtgtgagtcaccacgcccggccgagtattttattagcagtgattagggctgggaaaagaaaagcattacctaagtgatc

SEQ ID NO: 188827 - DNA, 122 bp, Homo sapiens
tgccccagccttcgccatcggcacagaattcagaggccaaagctgtgtgggccaagctcccgcattcccctgattattatttatttgcagagtgcccacggggcaccgggtgccacgcagtg

SEQ ID NO: 188828 - DNA, 122 bp, Homo sapiens
agtggtaagagctgcagaggtacaggagctgcagaccgtttgcgctacaaataaagcagccgtagtgggacatgagctgcggagtacaattcctctgttttcttggagcaggaccccaccct

SEQ ID NO: 188829 - DNA, 122 bp, Homo sapiens
atcaacaccggagcacttctgtgctccctttacgtagtttattgttgttaaaacgtgtggcgctcctgttagctctggtttcatacctttgtgttttagtattactaattttgagacaaggc

SEQ ID NO: 188830 - DNA, 122 bp, Homo sapiens
tgccccctagcaggcgcgagatgccagagccctaggatgtctgaagggccgggcaggaggcggacgggcgtgggccaatggctgtcgcagtgcctcatcttgccgtctgtgtgagcccaggt

SEQ ID NO: 188831 - DNA, 122 bp, Homo sapiens
tggaaaacccgggaattgcaccctctgcccttggcaaggtgtgagcttccaggatctctccgctgcgacttcgggtgttagggtttttgggctctttccgggacccaagttccagggcaaga

SEQ ID NO: 188832 - DNA, 122 bp, Homo sapiens
tgcgctggcccaggccctcagcgtgtccatccaggtggagtacatggaccgcggcgagggcggcaccaccaatccgcacatcttccctgagggctccgagcccaaggtctaccttctctacc

SEQ ID NO: 188833 - DNA, 122 bp, Homo sapiens
ctcggctctcggcgggaccggcggtgacaccggagctcgccgtgcgctcccggccgctctcggtgggtgccggtctctgcacctgatgcgttcgggatgcctttcccaccctggcgcgcccg

SEQ ID NO: 188834 - DNA, 122 bp, Homo sapiens
taggggctgcgaccctgggagaggccccacgtggggccgggcaggggccagcctggcgcgcgggccgcaacccgaccgcactcatccctctgcagccgtgccggtgtgcccgcgctcggcct

SEQ ID NO: 188835 - DNA, 122 bp, Homo sapiens
caaccatatcttgcaagtgccggctgaacttccccataatttttaaccctttaactagctcggagagggtagcgtgcagatgagcccaaatcccggggagctggcctgctctaggtgcgttt

SEQ ID NO: 188836 - DNA, 122 bp, Homo sapiens
cccagatggagggagcgggtgcccaggtctcgtggggcggagggtctggccacggctccacgcccctgacgtggaggctgtgaacaggaggcggcccctccgaggcaggcatttgagtgtgc

SEQ ID NO: 188837 - DNA, 122 bp, Homo sapiens
cccgctcacccagcctcctgcctggacccggctcagaaccacagaagtgatgggtgtcaccgcaggccaacgagtcgcctggcgctgcagggcgcgtggccgcggcgggcaccagcgcttct

SEQ ID NO: 188838 - DNA, 122 bp, Homo sapiens
ccattttagggtaggaaaagggaagcacagaaaaatcacgtaaccaaacatagcaggggacgtaaagtgagattttcaaagcagcagtcagacttaagatagccactgtacatactgctgtc

SEQ ID NO: 188839 - DNA, 122 bp, Homo sapiens
ccccaggtctagagatgcgggcagggggccggcacccaagggcaggggtggcagaggctccgcctgctgcctgccgtggggccgctccgaggtgccaggaactccggtaagggtcccggcgg

SEQ ID NO: 188840 - DNA, 122 bp, Homo sapiens
gaagggtactaagatctcaggtaaacaattacaagcctcaatgtctgttccatctccaaacggaattactattttaaaactgaattgggaaaaaggcatcctgaactattcatgctcaaaga

SEQ ID NO: 188841 - DNA, 122 bp, Homo sapiens
aagtctccttttgaaattcaaaatcctcaggagaaaacaccatattaaccctttattgtccggtacagttgagcttaccagttaactagtgtttacttaggactctagagagcgaggtctgt

SEQ ID NO: 188842 - DNA, 122 bp, Homo sapiens
tggcattcctaccattttgaacacaagtccaatgcatacctggaaaggggacattcatgtcggcatgtagcatttcaattaactgtgtggtctttgagccaggtgctgcacacatatctaag

SEQ ID NO: 188843 - DNA, 122 bp, Homo sapiens
ctgggcaagcattttctggaatagtaagttatattgataaagacagtagaatagtggtcgcgtggaaagctttgtggtgtgatagcggagtttccaggtgtttctacctactaacgtgacag

SEQ ID NO: 188844 - DNA, 122 bp, Homo sapiens
tgctgccagggtgctcctgctgctctttgctctttgcaagactgaacctgcgggagggttcgggcccacgaaggccgcttctgtggggcttctgtctaaggaggccgccgtctgccgaggtg

SEQ ID NO: 188845 - DNA, 122 bp, Homo sapiens
ccgtgactcacccctcccggctttccccgcgtgtgactcaggcccctggggagggggctgcggagtctgggacccctacagacagtggggccgagaaccaagttctggggacttcgctctcc

SEQ ID NO: 188846 - DNA, 122 bp, Homo sapiens
agggggggatccgcagcccgggattggccgccgccccgccagccggtgacgcgaggcgggcgggcccctttgtgacgtcacaatcagctgtttgaacgttccaatttgtgccgtgagccccg

SEQ ID NO: 188847 - DNA, 122 bp, Homo sapiens
aggaatctgatccaatacccgcgtgcagcaatttgccagcagacgtgtcattttgtaaggcgcagtgagggaaggaagtcgtctcgcctacctgggttttccacttgctacgcgattttggt

SEQ ID NO: 188848 - DNA, 122 bp, Homo sapiens
gtctctcgcggcgacggtgacgcgctctggctctgacaagcctggctccccccaccctaccgggtggcgccgttgctgaccccacgcccagccgttcccactcccgcctgaaactcctccga

SEQ ID NO: 188849 - DNA, 122 bp, Homo sapiens
tccattaactctttcagtacatggcttcatgaaatctcagcaaggccgttagtattgtttcgccttaggctttacattttttaaaagtcagctgtcactttcaaagcaatccagaatagcac

SEQ ID NO: 188850 - DNA, 122 bp, Homo sapiens
tcgcaaagccggtagaccagggtgttggaggacgggatggccaggctggtgcagggcggccggggagggcagacgggccctgcgaggggcgaggctcatgggcaacagtgggcagcctggca

SEQ ID NO: 188851 - DNA, 122 bp, Homo sapiens
cccccgtacgcagcaggatgtgcggcctccgagggaggcccccgtatgcagcaggatgtgcggcctccgagggaggcccccgtacgcagcaggatgtgcggcctccgagggaggcccccgta

SEQ ID NO: 188852 - DNA, 122 bp, Homo sapiens
agccgagggaaaggcttcctaacagccagcagctcaccacagcgaggaactgggcaagaacgtggcaccgagtacggcgtgtcccagccgcgccgcgccagcagctcccgggagacagaggc

SEQ ID NO: 188853 - DNA, 122 bp, Homo sapiens
aagccatgtcttccatcaaattaatgtcttccagcctacttgtgtcttccaacaaaggtacgtcttccaacaaaggtacgtcttccaacaaaggtatgtcttccaacaaaggtacgtcttcc

SEQ ID NO: 188854 - DNA, 122 bp, Homo sapiens
tgcacctgggtggcgcacagctggagtcccagctacgcggaggcagaggtcgcagtgagccgagattgcacctgggtggtgcacagctggagtgccagctactcggaggcagaggtcgcagt

SEQ ID NO: 188855 - DNA, 122 bp, Homo sapiens
cctgggaacatgcttcctttcctgctcccgctggctgccaccaccccaggacctgggcagcgcttgccgagctgctaaccacactccgggctgtcccagctgcaatgagctctagaggctgt

SEQ ID NO: 188856 - DNA, 122 bp, Homo sapiens
ctctggagccttcctgacccctaacaggtagcatcctcttcatacacctatggatactcacggtttctcccatttttaaagttttcactatattagatactgggctaagcattttatattgt

SEQ ID NO: 188857 - DNA, 122 bp, Homo sapiens
gggtggaggagacgggcctggagagccgctaagtggtttctgagccagcagagcgtggcccgggccggcaggtgcactcccagaaggtcgttagcaaccctaactctttccccgacaataat

SEQ ID NO: 188858 - DNA, 122 bp, Homo sapiens
gaactgaccctaagaccttaagagtggtttctccccccacatctggcctggtctgtgactcgtgtgaccgcggctgatctgctgagatttggggcaagtcttgcggttgtcccgtgtcccat

SEQ ID NO: 188859 - DNA, 122 bp, Homo sapiens
ggaagacacaaagtgatgtgggcaagtgccaggcccacatggtaagtacccaactaatctcgcccctctcaggacctaccgggggcgggtgctacacttaatcaccgggaaacgcagctttc

SEQ ID NO: 188860 - DNA, 122 bp, Homo sapiens
tcgccgccttctcgctcatggccatcgccatcggcaccgactactggctgtactccagcgcgcacatctgcaacggcaccaacctgaccatggacgacgggcccccgccccgccgcgcccgc

SEQ ID NO: 188861 - DNA, 122 bp, Homo sapiens
cggcaccacacagctagtgccggaactttttgtgcagagaaagaagaccctgcacccgcgcggagggagcccttttgagattgcaggagagaagatgagaatgggactattttcaataactg

SEQ ID NO: 188862 - DNA, 122 bp, Homo sapiens
aacatggttatttaaaggttcacaaggactcaagtaaagcaagtaacctgtatttttccacgctgttaactactggaaaacactgaaggacttaatcatatactctgaaataagtcaagtag

SEQ ID NO: 188863 - DNA, 122 bp, Homo sapiens
cttttgaaaatggctgaaccgtcccctaaacagtgcgtatgctctaaggatgaaattttccgtccttgaaacgttcaaaatttgaaagaaatacaaaatgaacctagaagctaggtagaaag

SEQ ID NO: 188864 - DNA, 122 bp, Homo sapiens
aggaggcggaggttgcagtgagctgagatcgcgccacttcagtccagcctggagacagagcgaaattcctactcaaaaaaaaaaaaaaaaaaaaaaaaattcttaaactactacttatccgg

SEQ ID NO: 188865 - DNA, 122 bp, Homo sapiens
gcgttgctcattcagttctttcccttttataaattctgcagagcggctgagcgaatttggcgcggctagcggaactgtggagaggcggctgcgcttctctgtccgccacactccaggtcaca

SEQ ID NO: 188866 - DNA, 122 bp, Homo sapiens
ggctgcagtgatggggccgggctgaggcacctgccggcggggtagcagggcagtcgagcacggagggaggggcgggcctccaggggacttcagcgggagccgggcctggggcggtgccgcac

SEQ ID NO: 188867 - DNA, 122 bp, Homo sapiens
cccctgaatccctcaccttcccaagtttcagagctgggccgagctgttgagtgaaatgaccgaaggcagagtttgtatgttctccccgtgtcgccccatccatggaggagttgaagtttgtg

SEQ ID NO: 188868 - DNA, 122 bp, Homo sapiens
tcctcataattcttaaacctgtgtagaagttcaatacatatttgtggaatagccttattacgcctttagggaatggagcaatgccttgcctattaatctatacttctatcagagtttcctgc

SEQ ID NO: 188869 - DNA, 122 bp, Homo sapiens
attcaccctcaattgacctggaattgagaaaaagatgggaaagagaattattgagatgctcggtttatgagtcaccaccactttgcatcataataggtttggtaaagtctcattggtagaaa

SEQ ID NO: 188870 - DNA, 122 bp, Homo sapiens
ggaaagagaaaataccgtctgaagtccacaggcttatctatcccaagcatgtctaccccacgcatgtgggcatcatatccaggttgtaacaaagaggtgaccatggcgtttatttttggctc

SEQ ID NO: 188871 - DNA, 122 bp, Homo sapiens
ggggagccctcccgagtgggctggtttcctctctcacacagcccgtgtcctcaacacgagcgggcttttcggtttgtctactcagcgtctctcaaccacacgacaacaacgaccaagtctgc

SEQ ID NO: 188872 - DNA, 122 bp, Homo sapiens
ctcacaaagctcaggacaaaggcctcctcccccatgaagctttgcccaagctagaatgaccgtcaccctcctaagtgttgccacagggcattatgcttccattcggctcacattacaagtat

SEQ ID NO: 188873 - DNA, 122 bp, Homo sapiens
gaaacaggagtcggccaagttcgtgatcctgtgggccaactccagctcactgcctgctttcgtacagcttatgagctaagaatggtttttgcatttttatatggttgagaaaaaaccaaaag

SEQ ID NO: 188874 - DNA, 122 bp, Homo sapiens
cacaggtcccacagggcaggagcgcaggctccccagagtgggagtccatgggatgggacccgtttcctgaaaccagccaagacctgcagaagggatcaagggcaggggaaaggcagaggagg

SEQ ID NO: 188875 - DNA, 122 bp, Homo sapiens
ctggacgctgagactgggagcgaagtgggcaggagtcagcgaggccatctcgcgcccgtgcgcaccgctgtagggtcatctccagcgctggcacctggctcagccctcagccctcctggccc

SEQ ID NO: 188876 - DNA, 122 bp, Homo sapiens
agaatgagggttgtggtgccttcgtcggctagctccctaacagccgagaaccgccgacgccgtcctttgaccctgcagtgtggtgacactccacggatccacggggttattttgcaggtcgt

SEQ ID NO: 188877 - DNA, 122 bp, Homo sapiens
ggtctgtggaatgatctgcggggcagcggtgtgagcagactcctcaggacagtcagtttgcgctttgttttattagcctctgcttaaaagaaaaatccaagggtcggagaggtcctctcttt

SEQ ID NO: 188878 - DNA, 122 bp, Homo sapiens
ggcaggtggcacggccaacgacctgctccgcgccaggtcctaagcccagtctgaggccgccgcagctctgtggcaacaggaccatggctgggacggcgctcctgcccctccgacctggaggt

SEQ ID NO: 188879 - DNA, 122 bp, Homo sapiens
aactagatgctgtctgaatccaatggtccaatgcaatgactaaagaatgtatttttccagcgtgaatgactcttaaggtgcaagccccagacttcctatttgagaggaaaatgctgttagaa

SEQ ID NO: 188880 - DNA, 122 bp, Homo sapiens
gttggcgtgaactgtcgccgttcacttgtggttcagggcggctgagcactgtggcgaagccgtgggcccccacccagcctgccttctggggtcctcccaggcccgttggtctctcctgtgcc

SEQ ID NO: 188881 - DNA, 122 bp, Homo sapiens
ccgggggaaggtgggtcaccagcccagcccagagccagacccgagcctgagcctaagaagcgaggaagatggaagccaagaccagatgccgctgggtcagagcagccccacctcgttcattc

SEQ ID NO: 188882 - DNA, 122 bp, Homo sapiens
acatcatcttccaggaagaggaggaggagctgctttggggacacccacttcctctccttacgtaacaacacactgcatttgcacaagtgtccttggttgtaaagggttccacactcactttc

SEQ ID NO: 188883 - DNA, 122 bp, Homo sapiens
cgtgtcaattaacttccccagacaagtaagaacgagctgcactagggcctgcgctctctccggggctaacaacaagcagcaccagtcccccaagctgtccctggaggtggaagagccactgc

SEQ ID NO: 188884 - DNA, 122 bp, Homo sapiens
ggagacgcgcagagccgggagggcgcgggcgcggcgggaggtgtgcggggctggggtgcgcggagagcgcgagggaggagattctgagcgagggaggggagcgcgcccgggcagcagtgcgt

SEQ ID NO: 188885 - DNA, 122 bp, Homo sapiens
gcagggccccgggccgcgggctgagctggggaacctgcaggccgccgtgcagcagctgggcgccgggcggaggcgcgcggcggccctggccggcggtggggggtgcgtcggggtcgctggcg

SEQ ID NO: 188886 - DNA, 122 bp, Homo sapiens
ggactgtgtcgggaaatgagagtctatttctttctctggggatgactaggtctgcctcttcgctgtgctccagaagcctcggggtgcagggaaatatgagtggagttaattaaagatctctg

SEQ ID NO: 188887 - DNA, 122 bp, Homo sapiens
cctccgccggtacacatcttcggcctcagcctaacgcactctagcaggcacagaccgccacgcccccacccctccagacggaaggactgcaatccccacaaggcaccgcgactcagcgccac

SEQ ID NO: 188888 - DNA, 122 bp, Homo sapiens
ccggccggacgtcaccccccagtggtgctgggtgaggcacgggtctcgtggtggatctgtcggtcgggcgggacgggccgcgggcggggctgccttcccggtctgcttctgttccagtcacg

SEQ ID NO: 188889 - DNA, 122 bp, Homo sapiens
ttttcccaggtcacccctttctttgactaggaaagggaactccctgaccccttgcgcttccggagtgaggcaatgcctcaccctgcttcggctcgtgcatggtgcgcacacccactgacctg

SEQ ID NO: 188890 - DNA, 122 bp, Homo sapiens
ggccaggtccccagagtttggtgatcatggctgagagatggactgtgcacctatttggtgcgtttggacagggtcgttttttctatgaagctcaggtttactgagcatttagtatgtgctgg

SEQ ID NO: 188891 - DNA, 122 bp, Homo sapiens
agaaaagaaacactttaatatggaggcagagacagaaggctctgtgacaaattacctgtgcgtgctaaacgggtgcttcttctgtgaaatcagttaagggaagcctcttggcctcatatgac

SEQ ID NO: 188892 - DNA, 122 bp, Homo sapiens
acctgggaaagtgggaatgggacgcggaggtggtggctgagggcggggtccgggcaggcccgcgccgaggagggggcgtccgcgccgagccaggaatggcgccccccgatgtccacaccacg

SEQ ID NO: 188893 - DNA, 122 bp, Homo sapiens
cgcagagtctctgccagggtaccaattccccaggggcggccagccagctcaatgcaagcccggggtgatcaccacctatcgtccaagccaggagtcccactgcgttccagtcactgctccgg

SEQ ID NO: 188894 - DNA, 122 bp, Homo sapiens
atttaactccagcacgtgttttgagacaagtctatactccactggacactttgttttacacgacttcctcttattcttcattctcctcctgtttaaaaaacatgaatcactagcatttatga

SEQ ID NO: 188895 - DNA, 122 bp, Homo sapiens
cagaaagaagcagaagcgtttgcttattatcgccggacacacactgccaatgagcggcggcggcgtggtgaaatgagggatctctttgagaaattaaagatcacattgggattacttcattc

SEQ ID NO: 188896 - DNA, 122 bp, Homo sapiens
gcctcctcggggcctcgtctccttcctcccagggaagctgtggggcagggacctggtggacggcgggtgggacccgactccctcccatcccctcacggtggggtcgcggctctgggggctcc

SEQ ID NO: 188897 - DNA, 122 bp, Homo sapiens
tccacccgctgtgtccctcagcccctccattccgcccccgcaaccctccacagacacaaacgccagcctgcgccccacccgggatcacggcgtcccccacccacgcccaggaaagggccccc

SEQ ID NO: 188898 - DNA, 122 bp, Homo sapiens
ggcagggtactgtcaaaccgtacaccagtctttagaaaatgaaagcggagacggtgcgcccgctgtaccctgctccctaatatccagtccctgacaatgcctgagctgtcagatgagaggca

SEQ ID NO: 188899 - DNA, 122 bp, Homo sapiens
cttgtcccccgtgtcagggctctggtgcaggcaaagtgccgggttgctctgctgctgtcgcgcccttgtacaggtggcagctgcagctgagctctcagtagaagccggcagggttggtccca

SEQ ID NO: 188900 - DNA, 122 bp, Homo sapiens
caccatgtggggtgggaacgtagctgaatttccacaaggaagaaaaaaaatatggatggacgtcaaaaggctcaattaattacaggctagtgaaacgatgcgagacacaaaggcatctcaat

SEQ ID NO: 188901 - DNA, 122 bp, Homo sapiens
cagcgtctccaccttgctcagcttcttgctggcgccgccgtgcggcacgtgctgccgcagcgcctggaagcccaagttcaccagcttcacgcggttgcgctcgcgctcattgcgccgcgcta

SEQ ID NO: 188902 - DNA, 122 bp, Homo sapiens
tctagctcaaatgaaccttttagtttttgaggagggcaataatagtagtgaacaccaaaacgaaaggggatctgggcttcaaaatactaacagttctatttcctagccagtcgtctcccggg

SEQ ID NO: 188903 - DNA, 122 bp, Homo sapiens
cgctccgtagagccaaactgcttgattttcatatatctatgacttgcgtgttctttacatcgcctgctttattttcaaacctgtcaacaggcctctgaaaaggttgcacacatgagcaaagg

SEQ ID NO: 188904 - DNA, 122 bp, Homo sapiens
cctgagagccggatctgtttacacagggtactaattagtctttgaggaatcattcacccacgtgccaaagtaattgtccgtgtcaggaaggtaggcgtgccaagccgcggctctgcggagaa

SEQ ID NO: 188905 - DNA, 122 bp, Homo sapiens
cagggtggcgtctctctggacgcctgtgagcgcagggtgtgaggaggcaacgcatctctgcgcacatgaggaaaagggggttcagaggtcgcagcatcgcggagcccctgaagtggctcgca

SEQ ID NO: 188906 - DNA, 122 bp, Homo sapiens
aagaatgaatgagtccttattcctcaccactgtcaagcagggcctgaggttcctgagatacgagatcagcctgagtttccatggaagggcaaggtgctctctggtctcctgggtgcagactc

SEQ ID NO: 188907 - DNA, 122 bp, Homo sapiens
gcgccctggggtggttacagcaggaagtcccaactctggggtcagaattggcctcaatgacggggctcacgcaaaatgaaaacgagagtcccctgattcaaaatgtatttaaaatgtcaaga

SEQ ID NO: 188908 - DNA, 122 bp, Homo sapiens
tacatggctacaaacagatgattacatttttagttaaccaagcattgcttctgctaaacacgtttaagtgtagtactttccttctcaatttgtctcaaaatcacttacactataaattactt

SEQ ID NO: 188909 - DNA, 122 bp, Homo sapiens
cctggccaacttaaagccgaatcccggctccaagaaaccggtaaatgggtggtggcggtgcggggaagcgctggggacccgggcgatgaaagcggcccttctctccctgtcattaggagaac

SEQ ID NO: 188910 - DNA, 122 bp, Homo sapiens
atcaccaagctggctaaaatcatcaacaaaaggaaagccatttctacaaatgtttttcaccgggaaccccattttgtaaactgacatgaacatctaatgccaccttgtggtatttgggagga

SEQ ID NO: 188911 - DNA, 122 bp, Homo sapiens
aacgtgaggttgcggatgggccggcgctctgagcaggtctgcacctcgcccctcgagctgcggtaccacgtcttgtagaaggtcacatcgtgccctttgtccacagggcccaagagcctgca

SEQ ID NO: 188912 - DNA, 122 bp, Homo sapiens
caccacgagggagcagcggcttgctcggctcccgggggcagagccaaggcgcgggcgcggcggcccggggccacctgcccgccctcccgctcgctccccacttggcccgagaagccggccgc

SEQ ID NO: 188913 - DNA, 122 bp, Homo sapiens
gtaaaggaaaggagtcaagagtaacacacgcttgcgtcctacaccaaaggaaagccactgcggtcagcgggagccagggaagaccctgggaagggcaggtggtttgtggttttggtggatgg

SEQ ID NO: 188914 - DNA, 122 bp, Homo sapiens
tttgggccatctgtcaaacccccacctctccatccttggctttatctctgggaaatggcccgctcatatatgtgatctctgaggttccttttggggctgatccatttggttataagttatgg

SEQ ID NO: 188915 - DNA, 122 bp, Homo sapiens
ggcagtcctgaacattgcaagttatttcacatcctggccacttaacccactaaatgccagcgaccctccccattccaatatgcaccctccccatttccaaacaccctcaggacaccctctct

SEQ ID NO: 188916 - DNA, 122 bp, Homo sapiens
tgctgacagcagttccaaaaagttgaatgaatcaccttaaccttccagcaacagcgaatgcgagtgtaaaatattatcacctcaccaacactgtattttttttttttttaactcttccagct

SEQ ID NO: 188917 - DNA, 122 bp, Homo sapiens
aaagaaggaaaggaggaaggaggggagaaagggaagaaggaaagaggggtcaaagggggacgaaagaaaaaaactgaaagaaagaggcctctggccctagggggagcttacaatcttgggtt

SEQ ID NO: 188918 - DNA, 122 bp, Homo sapiens
tgctatcacttatcatcatgacagggctcgatagaaaagaaaaattatgacaggaatctgcgtgtaaatcttcaatagaaaaccagagtctgtccatttggacccaacaagagaaagggatg

SEQ ID NO: 188919 - DNA, 122 bp, Homo sapiens
gccagaggatgtgggactgctgggggctgctgctgtgctgacacattaactccctgaggccgggaggagggtggatggtcatttattactgcggacacttatgtaacctggggtgtatatag

SEQ ID NO: 188920 - DNA, 122 bp, Homo sapiens
cagagaccagtgcaagagaacaccagacactggatctccacgcaaggccaagctgcacaccgctgagggtcggcagcctccccgcccaccgcctgcagtcacggtgtccacgcacaaggcca

SEQ ID NO: 188921 - DNA, 122 bp, Homo sapiens
ccaactcccgacctcaggtgatgcacccaccttggcctcccaaagtgctgggattacaggcgtgagccaccgcaccaggccccagaatccttatgattacaagaaactgctggtttgttggt

SEQ ID NO: 188922 - DNA, 122 bp, Homo sapiens
tacaggaacagggactgcaaggctggaagtccggtggggaccgtggctgtgtgagtgtgacgagtgggagtgggggtggggttgagacacaactctgtgataagaggcttcagctcccactt

SEQ ID NO: 188923 - DNA, 122 bp, Homo sapiens
gtaggagaaagaggcggagctccttgttaacgacatccccaacctctgctaacgcgcaggcgcacttcctgaagctgaaggtcagcatagacaaagggcctcagaatcgcgcaggcgcaatt

SEQ ID NO: 188924 - DNA, 122 bp, Homo sapiens
caggcactcggtgtctgtgtctcacctgcccaatatcgggatgcccagcaacaggagggccgtgttattaaaggggattagagtgacacatattgatcctgccatgcaaatttcattcactg

SEQ ID NO: 188925 - DNA, 122 bp, Homo sapiens
atctcttagcccacaatttaaggccctcccagaccttagcctacctcagtagtctcatttcgccacttcttggaacaacccatttcccagctgaatcaaaatcaactgcaagctcatttttt

SEQ ID NO: 188926 - DNA, 122 bp, Homo sapiens
aaaagtctttaacgaggagggaaacaaatcataatatgtccttctccggcttcccacccccgttgcctggaaaggcacccctgtaggacgctcaccccctgcagaaccctgtcgccctcaga

SEQ ID NO: 188927 - DNA, 122 bp, Homo sapiens
caccgtccccacctttggaaaggacccccagtaggggcagcttgagaacctcctgggtgccgggtgctctccatgctcaggaactgcgacacagtcactaagtgccaaggcattagacttcg

SEQ ID NO: 188928 - DNA, 122 bp, Homo sapiens
tttcttcttttcctccctattggaaacacataacgtttcagaagaaagatcgcccaagagcgctggtttgggaagaggttctataaaagtgccatttggctggcccagtcttagaacccagg

SEQ ID NO: 188929 - DNA, 122 bp, Homo sapiens
aagaggtgggaataagcttatcttaaaatttggaaagagtttccccaacctgctatgccccggcttcctcttcccaggccacacaggtaaacaaggaaggccatgatggcagttaaatgaca

SEQ ID NO: 188930 - DNA, 122 bp, Homo sapiens
taatatgcatagacactgcctgatacttcacatgcattttctcattaatcctcaaaataacgcaatgaggtggacgcaatcattgtcccatcctacagatgagaacactcattcctaaagat

SEQ ID NO: 188931 - DNA, 122 bp, Homo sapiens
ggagctccggagcgggacgcgagggggtgacgagtgcacctggtgactggagccgggctccgctgtcgtgcgcctttgcagccatctgttctgacagaggcactgattgtcattcttagttg

SEQ ID NO: 188932 - DNA, 122 bp, Homo sapiens
cccggccaacacggcaaaactcggtctccaccaaaaaatacaaaaaccagtcaggcgtggcggcacgcgcctgcaatcccaggcactgggcaggctgaggcaggagaatcaggcagggaggc

SEQ ID NO: 188933 - DNA, 122 bp, Homo sapiens
gcgacgcccggcggggcgaggggcacaggggcagcagtagggcctcgggggcaggaggcgcgaaggcggagggcgcgcaacccgcgcgggccccaaacacacacgacacacacgcccggcgg

SEQ ID NO: 188934 - DNA, 122 bp, Homo sapiens
tcgcggggacaaatgccgcagcgcttgtcacagccggcgcaaaaaaggcggggccccgggcggggcctcaggaacacgcccccagcgggaggcggcactgcccccaaccctatcccccttct

SEQ ID NO: 188935 - DNA, 122 bp, Homo sapiens
ccggaggccaggtgtcgcggacgggccccgggctaaactctcgtctggcgaagtgaagagcgcaaagtctccaggcccagcgcgccttcgcggggcaggccggacaccctagccccgggccg

SEQ ID NO: 188936 - DNA, 122 bp, Homo sapiens
tccgagtcttcagcactgggccgcgtatgacagcatcttagtgggtgcggagcgggacagcgcgccgggggcgtggcaggggcgtggcctgtccgcggggcggggagtgcggggcggggctt

SEQ ID NO: 188937 - DNA, 122 bp, Homo sapiens
ctgaagagaggtatcattaaggacgagacccccttggccagggaagccctgcgtaagcaacgcccctctcttcaaagggatgccccgctccctccgcccactcccagccttccagccttggc

SEQ ID NO: 188938 - DNA, 122 bp, Homo sapiens
caggcaagcgccattatgggcttttccttctgtttaagcagaagtaagcagtacaggactcgttctgagcctgacccacttatttaaccttttattcactttgttgtattaacatatattaa

SEQ ID NO: 188939 - DNA, 122 bp, Homo sapiens
gcaactgcagatcggtagccggaggccgccacggtaaaataagcgcctcgcagatgtccgcgccccggttacgttagacctgggaggcagaatccacgccctgcgctcacgggcccacgcac

SEQ ID NO: 188940 - DNA, 122 bp, Homo sapiens
tggcaactcagccccctgacctgaagacagccagcctaggcctctagggtgacctagagccgccttcagatgtgacccgagtaactttcaactgatgaacaaatctgcaccctacttcagat

SEQ ID NO: 188941 - DNA, 122 bp, Homo sapiens
atcctcccgggaagccgagactcagggggaacaggtttcccagagcccagcctgcagggacgcggagggcaggagccgccggcgaggagcagccaacttgccatctctggcggctgcacttc

SEQ ID NO: 188942 - DNA, 122 bp, Homo sapiens
ccaaatctactccttggataaaggcatggtcaggtctaatgctgttgctgctgctgctgccgctgctgctgatgatgatgacgacgatgactcagcgtaatgttagaaatcattattaatca

SEQ ID NO: 188943 - DNA, 122 bp, Homo sapiens
attacaggcgtgagctaccatgcctggccattttttttttccagacagagttttgctcgtcgcccaggctggagtgcaatggcgcaatcttggctcactgcaacctctgcctccagggttca

SEQ ID NO: 188944 - DNA, 122 bp, Homo sapiens
tgtctgtgataatgtcacgcaacacctcttcggggaccagtgcccaggatctaatggaagcggaattggggcaactgggcccatgtggccagagctcagttagccagtgccgggcggccaca

SEQ ID NO: 188945 - DNA, 122 bp, Homo sapiens
gcgatggtgtcgtaaatgcgcgtccacctcgagtcacgcccactgcgaggcggcgggaggcggcatgcaaggtgtttctgagttgaaaagaatgtctttactcagtactaacatattcgcgt

SEQ ID NO: 188946 - DNA, 122 bp, Homo sapiens
cctgggccagtcctgccttaccggagagctcaaggcttaaaatcaatgtccatgtgcaaccgtgacaaatggaacaagagggtgcatcatgctagcttatgatcacaatgacacatttaacg

SEQ ID NO: 188947 - DNA, 122 bp, Homo sapiens
ccccgtgggccccagtgctatgatcctgctggccaggccctcctcctcggccagtgggggcggcgtgctgagcttctggggcttgaccaggcggcaggtgatgcgggtgggcgctgcgcacg

SEQ ID NO: 188948 - DNA, 122 bp, Homo sapiens
aaagtatcagagtacagggaaatcaggagagctttgatccaggtgtcctcattctcaggacggccgtaaaggtggactgtgggggtctggaagcaaccctttccccttggagggcagaatcc

SEQ ID NO: 188949 - DNA, 122 bp, Homo sapiens
catcccacgtagatactatctggaagccccctccccaaaatgaaaacaactggaattctacggcttgcccaaaatgcatagaacactcatatctggttaaaaccatagaaatcaaaaagaaa

SEQ ID NO: 188950 - DNA, 122 bp, Homo sapiens
gcttttctgaggaggtaggaaggccaggaataaaccgtaaattagccacctcacgaagtccgagaggctaagtcctcatcagacctttcagagttggaggaatgagtcagacactggtatac

SEQ ID NO: 188951 - DNA, 122 bp, Homo sapiens
ctaagaagaacacaacaataccctaggcattttgggaaaagtgtcactaggcaaccgcgtcggcgtctgcttttaacctgtgggagaacccggcgagctaagccaaacggagggcgggagag

SEQ ID NO: 188952 - DNA, 122 bp, Homo sapiens
tatcaggaccaggtagtctcgcccaactgggacagagcggtcgcccgaggaccggatctgcgcggcgcagtggcctaaaaaggaggccgagccagtccctagctccgccttcccgggccctg

SEQ ID NO: 188953 - DNA, 122 bp, Homo sapiens
tcgtcattcctcacggctagttgcagatggcgagggatgatgcgcgtcttcttgttgtcccgagccgcgttgcccgccagctccagaatttccgcggtcaggtactcgaggaccgccgccag

SEQ ID NO: 188954 - DNA, 122 bp, Homo sapiens
ttgcttcctttccgctctcccatgtgaacaggtgttaaaatgtccacaccaaaacctatccgaaaacctctcagtagtgctgtacgtggcctctatcacactctgcgtgtggcctctatcac

SEQ ID NO: 188955 - DNA, 122 bp, Homo sapiens
ctgaggagtgcagagttggagggccatttccaacgggcctcagagggagctggtctatcccggccctgtcattactccactgggttctggtaagtaggtgcctccctgggctcacttccctc

SEQ ID NO: 188956 - DNA, 122 bp, Homo sapiens
ggcggctccgaggaggtgggagggcgagcctcccctcccgggttcttctgcgtcctctcccgggagggacccacacacacctgagcccggacccacccttggtcggggccacgctggatcct

SEQ ID NO: 188957 - DNA, 122 bp, Homo sapiens
aatagcctgtgtgccagaataaaactaatctttatcacctgaaactagacttgagcaatccgctgtggacaaatagaaatgaggttataaaaactggattcagcatgttcaagagaaggaga

SEQ ID NO: 188958 - DNA, 122 bp, Homo sapiens
atctcatgcacactcatgcttcaattctctgttgacccgaagttatgcctccagcccagacgtctctgaactccagactcatacatttcctgcctagtggaggtttccacttagaagtctct

SEQ ID NO: 188959 - DNA, 122 bp, Homo sapiens
tggactaagaggtgcaggcttggagggtgcagggcggtccgcctctcagacgtagaggcccggcctcggatgaaggcggaagggagggcaccgcctgttgctgggcaactgtgccccaactc

SEQ ID NO: 188960 - DNA, 122 bp, Homo sapiens
aaaaatgcaggtagctaagaggaaacatctttgacacgtgatgaagatatttgggaaaatcgatgcagaaaaaaattatgtcagacttgtcacaaagagagtgaaaaatgtatttatattgc

SEQ ID NO: 188961 - DNA, 122 bp, Homo sapiens
gcccgggcgcgagcctgcggccccgccggccgctggcgtgcgtgcgtgcgtgcatgcgtgcgcgccaccgccatcgccatcgccttcctggtttggacagctctaccggctcctcccgcacg

SEQ ID NO: 188962 - DNA, 122 bp, Homo sapiens
tttcgctccgtctccttgcgaaaatgctctaacggcaggaggtcacgcgagcgctggacgcgtttctccccgcgagcccctttccgaggcctttcgggtccccccggttatccccgcccggg

SEQ ID NO: 188963 - DNA, 122 bp, Homo sapiens
tgtcctcagtcccctttgccccagacaccaccagagatgcggcaacagaactctgaggcgcgccccggcttccaagtagctgggggcggggccgcgcctggaggtgagcagcaggcggtggg

SEQ ID NO: 188964 - DNA, 122 bp, Homo sapiens
tccaggtctgaagtcctggagcgattctccacccaccacgaccactcacctactcgcctgcgcttcacctcacgtgaggattttccaggttcctcccagtctctgggtaggcggggagcgct

SEQ ID NO: 188965 - DNA, 122 bp, Homo sapiens
ttctctgagctcactctgtagtcactactggtatccaccaaatatttttagttctgctctcgcaaagctgaccccttctcatgctggacaagcaaataaaccctcaaacatgtcagacagga

SEQ ID NO: 188966 - DNA, 122 bp, Homo sapiens
ccctccggccttgtccagcttctgtggttcgccagccatctgcggcattcctggacagatcgatgcgtcactgcaatcctccgtcttcctccggctgcctcttccctgtgcgtctccacctc

SEQ ID NO: 188967 - DNA, 122 bp, Homo sapiens
tgtggattagggtcctgctgtggacaaggtttgccttgattgggagtccaatttgaacgccgtgtgtttgagattgggaagtccctctgtggccaggaccctaagtggcccttccatctggg

SEQ ID NO: 188968 - DNA, 122 bp, Homo sapiens
ttcgagaccagcttggctaacatggtgaaaccctgtctcaacaaacatacaaaaatttgccggacgtggtggcgagcgtctgcagtcccagctcctcgggaggctgaggtaagataattgct

SEQ ID NO: 188969 - DNA, 122 bp, Homo sapiens
tggaacatgttatagggtgagtccctggatctttgctcaccagatccaagcactgcttctcggtgtcattgcagtgtgctgcttgtcacccagaatactactatcatgtgaattctttttgt

SEQ ID NO: 188970 - DNA, 122 bp, Homo sapiens
ggggagcctggacgcggggaatcgcctccgtttctcaccctgacagcagggagggcttcccggagctgacagtgaggcagacatcccggatccctgttatcacaggtgcagccacgcaactt

SEQ ID NO: 188971 - DNA, 122 bp, Homo sapiens
ctcccagacttggcaccagaacacccgccagagaggggagctggcagatctggccgggaccggggtggaccctagcgatcactcctcccgtaactcagaggttactggcctgggctgacccg

SEQ ID NO: 188972 - DNA, 122 bp, Homo sapiens
gaagggaggagcagaggtctcaggggccatggcataccgggctggggctgcaggcagccacgagaaggcagggatctttctcaggactgacaacaaagctagaggcaactgtctgggtttct

SEQ ID NO: 188973 - DNA, 122 bp, Homo sapiens
gggatgcaggcccccgtctctggaaggcatgggcattgctgaagaccaccaggtaggaagcgctgggtttaccagtctgacacccaagggacaaagagcaagcaaaaggaagggaaatcagt

SEQ ID NO: 188974 - DNA, 122 bp, Homo sapiens
tgcttgaggcggtgctacaaatgaagtccttctccaaatgcattgagccccaagaaaaatcgctgattctgaggaaccttccaactttaacaatttcaggacgtccctaagctgagctagga

SEQ ID NO: 188975 - DNA, 122 bp, Homo sapiens
aatattcactttacagatatatgaagcttgtctactcacgttcaaaggttttccttaattcgtcttttatctaaatcagtcaagtctcttctcataaatgagaaatattaaatgagtggcag

SEQ ID NO: 188976 - DNA, 122 bp, Homo sapiens
gggctttgtggtcaggctccatggcccgccctggccctgatctgtcgaggatgcgcaggacgtcctctccaactgcaccatgccccattgggctcaggcgagttccatctacaccggagagg

SEQ ID NO: 188977 - DNA, 122 bp, Homo sapiens
ggattgggtgtcccggccgctccggaagacccgcctccatgcaaataacggcagaggacccgccttttatttaaattaatgtctcggaaagcgctgttcggccccattggcctccgggagga

SEQ ID NO: 188978 - DNA, 122 bp, Homo sapiens
gtttagcagcttgattgaggcgtcattggcacacggcgaactgcgcgtcattaacgtgggcggttcagtgagttctgaggaacgcatagcaggtggatccgtcgccacagtcgggaaagcga

SEQ ID NO: 188979 - DNA, 122 bp, Homo sapiens
ccctttccccactaatgtaaacaagtggcgtgactttccagtgttttcgtgaccacttcacgggacacatcatggaagccttggtcctccctaacaggctgccaccacaaagagaatggcag

SEQ ID NO: 188980 - DNA, 122 bp, Homo sapiens
tggcacgggctttaaggtggcccttgcagatcttgcagacattttcgtgggctccagggacgacacttctaaaggagaggcgaggttcactggacgttttgggaaactgtaaggcaaaaata

SEQ ID NO: 188981 - DNA, 122 bp, Homo sapiens
caggactcagcccccatcaccgtggagccaaagtgtttgcttctccctttctgcggccttcgccagcccaggctcggctgccacccagtggcacagaaccgaggagctgccattacccccca

SEQ ID NO: 188982 - DNA, 122 bp, Homo sapiens
agcattgccaccaccacaggcaattttcggttgcaatgaatcactaaatctccataaccacggggtggctctacatgattctgttgttaattgaattttttccccaaatagaatgagggctt

SEQ ID NO: 188983 - DNA, 122 bp, Homo sapiens
tttttgctcatttgtggccaaactcgaaataaaacttaggtcccccaactcccaaccctgcgttttctggtttccttccaccactctttctagtatccattttcctggtctccaagttgtaa

SEQ ID NO: 188984 - DNA, 122 bp, Homo sapiens
gcatctggctggtctgtaaagaggcctataaaaccacacagcaaagacatgtgtaggtctcgctctcactcttctttaataacccactgaggtgactttgcaccaacatacccaaatagtgc

SEQ ID NO: 188985 - DNA, 122 bp, Homo sapiens
cgggccgggctgcaagccgggcagcgcgtgcttaatgtgattgaaaggcagttaaaatggcggtgaccttttcaggaggaattagattgcctgccaagaccggttagagggagtgataacgc

SEQ ID NO: 188986 - DNA, 122 bp, Homo sapiens
aagagccaggggggcaagaggggctggctcttactccccgcatcatagcggggggcgcctcgcccccctgcgatgggggtcctaagagccagggggggaagaggggctggctctcactcccc

SEQ ID NO: 188987 - DNA, 122 bp, Homo sapiens
ctcctccgggcggtgtgttgggagggcccaggtcaaggcgcgcgtgggcggaagcggcggcggcggcgaaggcggcggctgtcagagctggagggccgggcaccgcggccatggagggtcaa

SEQ ID NO: 188988 - DNA, 122 bp, Homo sapiens
gtcaacatccagcagctacttgatgagcgccctccagtgggccttaggtccctatgccggcgcggggttacagcagtggacagacaggccagtccctgtcctcgaggagcccatgatccgcg

SEQ ID NO: 188989 - DNA, 122 bp, Homo sapiens
gccatcatgcagttgacacagggaccccgctgatgccgcgtcatttaccttcgggggactcgcagccgcccccgcagcctgggttggcaggccggtggaggtcggccagaggcgtgctccct

SEQ ID NO: 188990 - DNA, 122 bp, Homo sapiens
gtgagaaatgaagtgagcggactccgcttgacaggctggattttgggggaagagagtcagcgatgccggtgaggaacgctccagaacctgacccacttggttgaagacatcgatctacaacc

SEQ ID NO: 188991 - DNA, 122 bp, Homo sapiens
ttgtatggttaacaagtaactattcttttctatgtatatcttaccttttctatagctgtccgtggtatttattttctctttcacacattttgtgcttactttgtttatgtattcattagatt

SEQ ID NO: 188992 - DNA, 122 bp, Homo sapiens
tactcgcggctgctgcgggagcgcatcgtgtgcgtcatgggcccggtgagcgccccgcgccgggaccctccccaggactctcccaagcgcctgccgacactccctgcgcccctccttccctg

SEQ ID NO: 188993 - DNA, 122 bp, Homo sapiens
cttcttcttcaatgggtcccccgatagctgaagcagcggtgctctcattggctggtagttcgtcctgacgaggcgggaccgcgcttgaggaagcctcctacaattggcaggaatctacgtcc

SEQ ID NO: 188994 - DNA, 122 bp, Homo sapiens
cctgctgcaggctgactcattcccttctagacagacagattgtgtcctgcgtgggagtcgcgatgcagagcccaaagctgttccctgagagttacaggaattacaacctgctgaagggaata

SEQ ID NO: 188995 - DNA, 122 bp, Homo sapiens
aatgtttttgaaatgaatgaatgagtgaatgaccgacaaggggagctaaggggaaggcagcggtgcggtccgcgtcgcaggcagaagagctgactctccaatctccgctcctctctccgccc

SEQ ID NO: 188996 - DNA, 122 bp, Homo sapiens
tttagcagctggagataagcaatgttcatatcagatagaaattctcattctcatgaagctcgtagtatgctaaatgctagcattattaattgtgttagcacctcatttctttctttttcttt

SEQ ID NO: 188997 - DNA, 122 bp, Homo sapiens
cctgggtgtctgacctgtccctctgcccacaggtgaatgtgacctgcgtcctgaggatcccgagtatcaggagagctggcagaggaagtcatgcagaggcaaagccaggagccccgacaggg

SEQ ID NO: 188998 - DNA, 122 bp, Homo sapiens
tctgctgctcgccccaggcttgggtttcctggcggtcacctggttggcgtgaaccttgggcgtgcgccagggtccctgtgctgtcgtggagtgcaggcaggtgggcaggcgcttgggagtta

SEQ ID NO: 188999 - DNA, 122 bp, Homo sapiens
gctcatgtgcacctgccctgccggcttctctggccgacgctgtgaggtgcggacatccatcgatgcctgtgcctcgagtccctgcttcaacagggccacctgctacaccgacctctccacag

SEQ ID NO: 189000 - DNA, 122 bp, Homo sapiens
gctctgtggctgtcagaggggctgggcactgggttacttcatcagttcctgggtgttgatcggcaggaaacagtggtttcctgttcatatcctgcctgagcctgggccgggtggaggtgtcc

SEQ ID NO: 189001 - DNA, 122 bp, Homo sapiens
gtcatccctgcacatgccctggtcctccaggtgaagagcacataggagccaaggagttcacgaaagtcattgaatttcaccctcaaaccccagctgactgtgaggccatcccacatgcttca

SEQ ID NO: 189002 - DNA, 122 bp, Homo sapiens
gctgcccatgctgcaggagctgggtgctggcgaagccctgtgtgctgcagaagccagactcggaagaagtcacccgtcatgccggagcctagagagaacacaccagaagcaggaagggaaac

SEQ ID NO: 189003 - DNA, 122 bp, Homo sapiens
agagaaagacacttcttaacatcctccgagactatgtttagggtatcaaactcaactgatcggtacagaaagccaggctgtgtgatttaactgcagaagtctttgctatcccttaaaaagca

SEQ ID NO: 189004 - DNA, 122 bp, Homo sapiens
caagccctctcccagcttagaattattagttgaggaatctcctgaagaggtcgtggaagacgtcatcgaagacattgttgaagaggttactgaagaggtcgaagggtctctggagtctgagg

SEQ ID NO: 189005 - DNA, 122 bp, Homo sapiens
cccgacgtgggctcccgcacagtgagcctctcccctacaggtgcgccccctgctccgcggcgcctggtcccgtcgaccacccaaggactgagaagtgtaggcgtgcgccccgggactggctg

SEQ ID NO: 189006 - DNA, 122 bp, Homo sapiens
gagtggacagaaagacaagaccctgaccgtggggaatttaaaggccggccagcgtgcttccgaaggccgggggtggaggcattaccgcctctccgtgccctcttctcttaacctgccctggg

SEQ ID NO: 189007 - DNA, 122 bp, Homo sapiens
gggcaggaaaacgccttgagagagtggctgacgcaagccagcagagggtgtcagggacagcgtgtgcgggctgccatgcgctcgggtgctgcgcagggtggagtcctggggcttggcccatg

SEQ ID NO: 189008 - DNA, 122 bp, Homo sapiens
cacagacctgggctcagagcagtcaggtgacacgctggaggtcactcagcccgagaagagcgggcaggaccggagcgaagctccatctgggctgtagtccagcttttgcggctgcctggacc

SEQ ID NO: 189009 - DNA, 122 bp, Homo sapiens
ccagccaggacctatgtctcttagctgtgattcaggaacttagtcacctcagcttgggcccggatcccacaccaggcccccgtctgccctgccttgccccctccggttttgacatcccccca

SEQ ID NO: 189010 - DNA, 122 bp, Homo sapiens
tctgttgtcccagccaccagtgtccctaatgcccacttctgggcttaatacaccagggggcgctcaacctgtggtccggacctcatcactttgtgcagtggaatgagctggcaatgggccac

SEQ ID NO: 189011 - DNA, 122 bp, Homo sapiens
agccggacaccaggctccactgcctcctgggccagagctacagcatccagcagggcggggcgtgcgaaggaggcactgcttgctctgagggagtgggtgtgagtccagagaaaagggaaggg

SEQ ID NO: 189012 - DNA, 122 bp, Homo sapiens
ccaggaggcagcatctcccctcgtgggcgcttacctcggagaactccgggcatgaatgtgcgaaaggcaggaacagacgtccacggcggctttcatcctcatggcgcaaacgggacccctac

SEQ ID NO: 189013 - DNA, 122 bp, Homo sapiens
gctgctttcaacgcgcaggaaaaccttcatctttgacacggcctctttcctttgtccagacgttcttgcatcctcagcctgtgtcagcacagacggcggcagcctccattgccacaacccca

SEQ ID NO: 189014 - DNA, 122 bp, Homo sapiens
aaaaaatcagcagctagaatgggtgctacccacacccgggcgcagcgagctcggacaccacgctccctccctgtgcggcgcctgtggctcctccacagcagcgacacccacgcagctggatc

SEQ ID NO: 189015 - DNA, 122 bp, Homo sapiens
gcagggccagcatgggctggcagtacatggcagggctccctcccctaggtggagtggctccggaacgaggacctggtggacccgtccctggaccccaatgtatacatcacgcgggagcacag

SEQ ID NO: 189016 - DNA, 122 bp, Homo sapiens
ccagaagagcgaacggaaccagtccagcaggcgggagatgagtgccagcatgatggcggccggcagcgaggacggacgggaggacggagagtggaggcgaccacgacttccacacgagcagg

SEQ ID NO: 189017 - DNA, 122 bp, Homo sapiens
gactggaaatcgttaaatgcagtggaaattctaatttcagtgtttggctccagcagcaagcgtacatgaagaacacctaggggccagattaaaatcatctttatgtatggactctctgaagg

SEQ ID NO: 189018 - DNA, 122 bp, Homo sapiens
ccacctacagtttgagaagggagtgggtgataaaagcctggaagggaagggaaatcgggccgggcattaggctccatcgctcatcaatagacaaggcctttaggaaactgcgacaacggctt

SEQ ID NO: 189019 - DNA, 122 bp, Homo sapiens
cccgcgaggcggggactgagttgcagcccctcttccccgcctggctcttaggatcaccatcgcagaggcgagaggaaccccccgcgaggcagggagtaagagccagcccctcatcccccctg

SEQ ID NO: 189020 - DNA, 122 bp, Homo sapiens
agaggccaaagcaggcagatggcctgagctccttcaggagttcgggaccagcctaggcaacgtaacgaaactgtgtctctatcaaacatataagaaaattagcctggcgtggtgccacacat

SEQ ID NO: 189021 - DNA, 122 bp, Homo sapiens
aaggtgacggggcgcactcctcctgctcgggacgccgcctgaggtctgggacagtgctaacgcagtccctctgccccatctagatccacctcagacatcggcagcaagaccagaatggccga

SEQ ID NO: 189022 - DNA, 122 bp, Homo sapiens
ctctcccgacccttcagcgccagctctccggttttctccaggttaggtcccttctggagccggcgtcgaccttctttttgcgtcctaacccagctcctccatcccatggtatcgttttctgg

SEQ ID NO: 189023 - DNA, 122 bp, Homo sapiens
tcctgttgcaggcctgccgtgggggtgagcggcccggcctcctactgccctcactttcctcggccaagcttcagcccccgggactcactgtctaccttctccagggagcccgggtacctgcc

SEQ ID NO: 189024 - DNA, 122 bp, Homo sapiens
aaatatttactgaaagactactttgtcacaggcaccatgcaggtgatggttatacaaagacgaagcagactagatagctaccatctgtgctcttagatcctcttttttttttttttgtgagg

SEQ ID NO: 189025 - DNA, 122 bp, Homo sapiens
gccggtgcccaccgtgtctctcgcgtcccgcgagctgcctgtctcgtcgtggcaggtcaccgagccgtcaagcaagaatctgtgggagcagatctgcaagggtaggaaacctgggctggccg

SEQ ID NO: 189026 - DNA, 122 bp, Homo sapiens
gagggggcctgtgcttctcggggtctgcaccccaggcacagcggtgtcaccccgcaggaccgcgggcctgccccaacccccagcattcccgggtgggcccagaccccatcaccaagactggc

SEQ ID NO: 189027 - DNA, 122 bp, Homo sapiens
cgtcccaccgtcgaggattaacaaaacgccaaacaagattttaacagtcggcagcgaaagcgcgcactcgagcgccaatgagagcggaaggaggggcaccgcgcctgaggaacactccgtat

SEQ ID NO: 189028 - DNA, 122 bp, Homo sapiens
cctggctgcaagaagatagtcccacaggcgccctagagatggggatgccaagtggcttctcgggaagctgtaagaatccacagggcattgtaagatggagggaaatattaagttttcttcgt

SEQ ID NO: 189029 - DNA, 122 bp, Homo sapiens
tcggaacctcacggagtgctttgtagtagcctggagacttcctaatagactttgccacatcgggggccccagactccagagtcccatagtggccctgggagcgcgacccagagagcctgggg

SEQ ID NO: 189030 - DNA, 122 bp, Homo sapiens
aaaccctggacctacgtgggcaggccctggggtgcggacatctattttgcccttcttagccgaggtactttagctgggatatgaagagtgaagaggcaaaccgcagccaacacccagctacc

SEQ ID NO: 189031 - DNA, 122 bp, Homo sapiens
tctttttaaaaagggtgttaaaaggctactttttaacacccttctcatggtgtccctgcccggtttcctttaggctcacctgttcctagagcaatgtcttcccagcagcagcagcggcagca

SEQ ID NO: 189032 - DNA, 122 bp, Homo sapiens
ccaaaaccacaagcagaacaagcaggcgtgagacactcacaggttgggtttgatcgcatgcgtgtcggagaggagagagcagagagagacacaggaacaagaacagcaaagggtagagcaga

SEQ ID NO: 189033 - DNA, 122 bp, Homo sapiens
cagatcccgcgccggctcccgctctggatcccgccccggcctcggcctcggcccagcacccggccgaccccgcactttgggcccctgccccgcccggcccttaaggctgcggcggccaggcc

SEQ ID NO: 189034 - DNA, 122 bp, Homo sapiens
ccgctcctcggcctgcccatccccaggtcgcggccctttggcccgcgcggcgtctccaagcgactggggaactcagaggaggccagcactcaaactcctgctttccaaaggaaaacgcagtt

SEQ ID NO: 189035 - DNA, 122 bp, Homo sapiens
ccttgtacggcacgctttatatactgtagtacctgctcctgtctacgtgcctgccctgaccgccctgcagaggctccatgggcgaggctgacagctgacacccacagggccatgtactctaa

SEQ ID NO: 189036 - DNA, 122 bp, Homo sapiens
ggtcatggatgaccacgcggatcaccagcgtgttgccctggctctcctccgtcctggcaccgcccggcttctccgcagtggcccggatcgtgtcatagatggtctcttctttggagctgtct

SEQ ID NO: 189037 - DNA, 122 bp, Homo sapiens
aatgtagtgccctgccccgggcctcagtttccccatctgtggaactgagtgtggcctcgacgtcaaaaatgtggactctggtccggtcgcggtggctcacgcctgtaagtaatcccagcact

SEQ ID NO: 189038 - DNA, 122 bp, Homo sapiens
ccttcaaagtgagaacggaaaagagaaacgctgggcacacttacctctgcgcacagacagcggcgattattaaggggaaggaccaaatcccaaagtagccccttttccgcactctccacatc

SEQ ID NO: 189039 - DNA, 122 bp, Homo sapiens
attccccgaaaagtgcacgctggctcactctccagctttgcttccatttagcgacagtgacgacctggtagtggctttgggaaaggactccctggccatcctcctctacgtgacacagtggt

SEQ ID NO: 189040 - DNA, 122 bp, Homo sapiens
atatagaggaggctcaacaactgtttcttgactggcagaaagaggggctggaagcatagacgaataccaatatctgtggagtatttactgcaccccagagcccatgcaaatactttcacata

SEQ ID NO: 189041 - DNA, 122 bp, Homo sapiens
aagttccggggcgttccggggcgttctggggcctttggagcgtgggataagcagtaatggcggaggctgcagctcccggaacaacagccacaacatcgggagcaggagcagcagcggcggag

SEQ ID NO: 189042 - DNA, 122 bp, Homo sapiens
gccccgtccggcacgttcgcgccgagcatgctcccgcccactcacctgtgctgtcttgatcgtcagctcaagtgtcgtgggatcgacgtgctcatttcaagtcacctttattttacttaatg

SEQ ID NO: 189043 - DNA, 122 bp, Homo sapiens
ttctctgaggatacataaggcccaacagaaggagaagttgtaaccaggcctcactccccacgtccacctaaaggaatattgccgtgtgagctttcagcttattgtacagtttgtctttcaat

SEQ ID NO: 189044 - DNA, 122 bp, Homo sapiens
atctccagaagctgagcaaagcgcgggtcggtggccaggttctgggtctcgtgggggtcccggctccggtcgtagagctcccagcgcgcccggtagtagtaatgacggaggtccttgtacca

SEQ ID NO: 189045 - DNA, 122 bp, Homo sapiens
gctgtgcaccaagccaagtctctcttcggtgccaccggcgggcgaggccggattaatcaccgctgcttcggccgcccatgtgtcctgatgtcctgggacccgaaccccgtgccccgtacctt

SEQ ID NO: 189046 - DNA, 122 bp, Homo sapiens
aatgactcactacatcttcacgaaaactcggaaaccgaggcaactgtcattcagttggtccgtggcagagctaggattgggaagctggccttcttgctgcagattctgtgttctacaccatt

SEQ ID NO: 189047 - DNA, 122 bp, Homo sapiens
gctatgtgaatctgcctcagggcaggatttgtgctgagtacacgttcctatacaagaaaccgtagataaaatagataaaatagaggcattcgctgagctggggtgaatccgaagtcagtagg

SEQ ID NO: 189048 - DNA, 122 bp, Homo sapiens
acgccaacaggttagcaggtgatttcatttcagtgtgtgtctgggtggctagcattcaaacgcagctcacactgggagctatttctagtccaattttgctacttggtaacgtattaatagca

SEQ ID NO: 189049 - DNA, 122 bp, Homo sapiens
gactttgttgaggaattaagttttaaattccgccccaggcggataacaccagggctcagccgcaggaatgaaaaaggagtgggagggctgcaaagtgtacgtggggcttggaggccttgtgc

SEQ ID NO: 189050 - DNA, 122 bp, Homo sapiens
tggcacaaacacacattctctttaaacaggcttgggccaacagaaccagcctccgtgtctcgggtttgaatgaacccttgaggtgaagcttaaagacagagaggatgcccctgattcccacc

SEQ ID NO: 189051 - DNA, 122 bp, Homo sapiens
cactctgtgctcagtcgggccatggtcccggtgccggggacaaagacacagacctcgtgacgaagaaggtcatggtctagtggggtaaatggagaagcaaaaatcatgagtggagtggggca

SEQ ID NO: 189052 - DNA, 122 bp, Homo sapiens
tttaaatgtgtgtaaagtggcacataactgttcaacatcattttagaggttatctgagcacgaagaaaatcattaatcccaaaggctctgcactgtgctggctgcctcatcctcaccatctc

SEQ ID NO: 189053 - DNA, 122 bp, Homo sapiens
atagtaggcagttggtaagtgcttgctaaataagcaagtgaatgccttttctttgagccccgtcctctgctcccaagccgcaatcacaccatttacactgggcccatgtgggccctacggta

SEQ ID NO: 189054 - DNA, 122 bp, Homo sapiens
tccttctggcccaacaataagtgccatttggaatcttctcggccttctctgtgccttccgcgcgtctgggctccccggtaccgtagacccggccccgagctccgccccctcgccctgggctt

SEQ ID NO: 189055 - DNA, 122 bp, Homo sapiens
ggcagggatgtcattcacttctgtgactcagtgctctgaatcaggcccagtgaagactgacgtgcagcctgtattggcagaatgaatgaataaatactacacacgcatattttgaattgaaa

SEQ ID NO: 189056 - DNA, 122 bp, Homo sapiens
aaagaagcctgggagggactgggggaagggggcaggacaatggccttggctggacaatcccggtccccagagggggcagctctaaccctaaacaagtgctcaacccttgaatgggcctggat

SEQ ID NO: 189057 - DNA, 122 bp, Homo sapiens
gtaagtcccaaatgcaaactccccaaaagctcaccaatggcggaatggatgaacaaatgacggaatattcatccatagactactatacagcaatcaaaaagaacaatgtactgcttcaggaa

SEQ ID NO: 189058 - DNA, 122 bp, Homo sapiens
gtcacagttctgggggcatgtggaggatagtcaggtgtcactgccttaattcactggaggcgagtgtttccgggtcgctaggcggccgtggtctggcggccgggccgtgctccgtgcgtgcc

SEQ ID NO: 189059 - DNA, 122 bp, Homo sapiens
gcactcccctgcatgtccagccccgagccctgtgtcaagcacacctccttgggaggagaccgccccagcctgcaaggaagtgctcattatggagagtggagagtgacaggccactcccggcc

SEQ ID NO: 189060 - DNA, 122 bp, Homo sapiens
ggctgggtctgagcttttcattggtttttctggtttgagaggtcggtacagagacgcacgcgcacatcagcaaaacacgcacttggaacgaagaaacacggaactaggcaggaagaactatt

SEQ ID NO: 189061 - DNA, 122 bp, Homo sapiens
ctgggtgtgggacagagctgacaccttcctgtctgggctcttccagccttcactctagaacgaagcgggaagcctcaggtccaaggggagagccgccgcaaaggccgcgttgaacgccgagg

SEQ ID NO: 189062 - DNA, 122 bp, Homo sapiens
tcttccagctgtcaggaaggaaatggcctggagggcgcctcggggtcctctgtgatgttgcgctcatctctgcggattttggaatacgcttcagtctacgaagttttctgggattttgatgg

SEQ ID NO: 189063 - DNA, 122 bp, Homo sapiens
caggggggagtgcttatattactcctcttaatacttcctctgcctggctccttcctggcccggaggaaacgggggctgcgggttatcacaacactcccactctggctgtgagaaggcggggg

SEQ ID NO: 189064 - DNA, 122 bp, Homo sapiens
gcccagttcttacctggattttgaatgtggaatttgccagccctggtgactccacaatctcgatcaattagtggcccttcagtaggagtagtggaaatgagatcacctttacttgcaggtgg

SEQ ID NO: 189065 - DNA, 122 bp, Homo sapiens
agggcgcggaagcgagagggggccaccgagaaactaaacctgttactgctgcgaatacgccggcagggtccgggtggcggggcgggcggggcggacgcagcgtccgctgggcggtgggaaga

SEQ ID NO: 189066 - DNA, 122 bp, Homo sapiens
gacacaattaaccaggtcataaaagctagggcaccttcgaccagggctctggccctccagcgatcgttttgcgttgtttctcttctcaaaagtagtctcagacccctgcctttccgctgcag

SEQ ID NO: 189067 - DNA, 122 bp, Homo sapiens
cctgcccccggctattatttgcaggcccagcctcccttccctggaagccgggaggatcttcgcacggtgggcgcctcccacttagtcttcccaggcctggggaaacttcggtctgcagagaa

SEQ ID NO: 189068 - DNA, 122 bp, Homo sapiens
tcagtcactgggcagccagacccccacctatagcttccctaggccccagtgcagagatgccgtccacccccatctaggtgagggcttggggccactcttagcattagtatcattttcttcta

SEQ ID NO: 189069 - DNA, 122 bp, Homo sapiens
gggccccggctataggcggagaggcggcggaaggcgggacctaaagggggccccgccccacgggctctgatttccgcccaatggagggcggtctgagcttcgctcacgaaaggagccgggag

SEQ ID NO: 189070 - DNA, 122 bp, Homo sapiens
attccttgtctctggtcactgggccctgggctgatcaccaccttctgagcaggacccagacggacaagctagactacacccagaaaggagaaattgggatggggaagggtcaggaaactgcg

SEQ ID NO: 189071 - DNA, 122 bp, Homo sapiens
aagcgtgaagaagcggtggtcactggcacggagtcctccttgagagtccggccggggatccgtaccagtggtccctgcccacctgggttaggaaaggctgactggcctggggaggctgtgga

SEQ ID NO: 189072 - DNA, 122 bp, Homo sapiens
ttcggggcgctgcggcgggagaccctgaaaagattcgcaaggccggtttctttgtccctccgcctcttcaggttgggctagggacttaggccattgggtatttcttggaaatggaattccag

SEQ ID NO: 189073 - DNA, 122 bp, Homo sapiens
aagttcacacagcccagggagatgctggctgcccactcccctcaacccaggcaaattcctcggggttaaagttatctactgcaagtgacgatctctgggtttttctgtgcctgtgtttgtgt

SEQ ID NO: 189074 - DNA, 122 bp, Homo sapiens
cgtcatcgacgcccccgggcccggtactgtcccccggctgcaggacccggtgctcctcagcgacgcccctcagcccaggaggccctctccgccttgagtcttccaagaccctctgcgacgcc

SEQ ID NO: 189075 - DNA, 122 bp, Homo sapiens
gacttaatgtttaaatatattacagttaggccccctatgtcaaaaggtgaagcaggaacacgaaggcattcaagagtgcagcctatgtaaaccagccagaaccaggccagggttggtggtct

SEQ ID NO: 189076 - DNA, 122 bp, Homo sapiens
cgtgatccgcccgcctcagcttcccaaagtgctgggattacaggcatgagccaccgcgcccggcccccgacacctagttttaaagggtaagccggctcctggcacctgcctacttgcagtag

SEQ ID NO: 189077 - DNA, 122 bp, Homo sapiens
gctggagagaaggcagtgggtcatgggctgtgggccaaaagccatgggctgtggcatccccgggatccgtccctcccatggtggaggcgagggcccctctgagaagcctgtttgggagcctc

SEQ ID NO: 189078 - DNA, 122 bp, Homo sapiens
ttcgaggagctcctggtcttcgtgccccacatgcgccgcttcctgagcaggaagaagatccggcaccacatctacgtgctcaaccaggtggaccacttcaggtagcgcccgcccccaccctc

SEQ ID NO: 189079 - DNA, 122 bp, Homo sapiens
ggtccagccacatggaatccactgaagctattccaggagcccccaaacacgcgtggggtccggctacatggaaccgactgaagctattccaggagccctgagcagctgcagagagaaacgtg

SEQ ID NO: 189080 - DNA, 122 bp, Homo sapiens
ctgcgctgctgcgccttttcttggccatggagcgtggtagccacttcagcctgggctgtccgcagctgggctacgccgcggcccgtgccttccgcctagagccgctcacaccacgcggcgtg

SEQ ID NO: 189081 - DNA, 122 bp, Homo sapiens
ccagctcagagatgacctggtcacgctcactcatgatgagcttgtactcgctgtacacagcgtcccgctcctccctgtatttctccgactcctttgctgtcttcacctgcgtggttctcagc

SEQ ID NO: 189082 - DNA, 122 bp, Homo sapiens
ttattattattttttttcccatcgagataacttcaccattttaatcatttaagagtataccgtacagtagcttctagtacattctcagtgtaccattcttgctaattccaggatattttctt

SEQ ID NO: 189083 - DNA, 122 bp, Homo sapiens
tgctgatgctgcacgccagcctggaagctgcagaggggaagggctaagggctgcttgtctcgttccacttggggctcagcaggtggccagcacatgtgtctgcgatgttggtcatgggggta

SEQ ID NO: 189084 - DNA, 122 bp, Homo sapiens
gagaaagggcccttgggtctggtaattatgaagccatggtgacttgtaggattggaaaagcggaagtcagactgcaaaacagtaagtcagttagtagccataagattgattgaccactgcct

SEQ ID NO: 189085 - DNA, 122 bp, Homo sapiens
cctttccaccaaccagcctaagccagcagtagcagctccaggacctgtttcaggtggtcacggacagggggcccgcaaggtctccagagcccgagggatctggggaggggacaagcaggcgg

SEQ ID NO: 189086 - DNA, 122 bp, Homo sapiens
aaagattttttactgtgatataaataaaaacagcgacacatcctaaatgtgcacctgtgccgtggctgagccgctgcagtgagggctagtgtgcaacaccgatgctgtgctggacgcgtgcc

SEQ ID NO: 189087 - DNA, 122 bp, Homo sapiens
tcaaagaaaagtcccacgaggtggggggcgccgcctgggccgccggccagggggacccgtcgccccagggcacaaagaaagagcgcgcctacagggtgtcccctgaccccggcgactcgggg

SEQ ID NO: 189088 - DNA, 122 bp, Homo sapiens
catcaatacatattgattatcaagtggtcttagaataaaaatcatcaccctcatcattaacgtattttgggctacaggttatctcaagtaatctcaccataatcccttgaagtggacactaa

SEQ ID NO: 189089 - DNA, 122 bp, Homo sapiens
gacgtcgaagtgcctcagcgcttccctcatcttctctgtgtaggtgttcaggtcccgcagcgcctggtcacggagggcgccccgcacgtcctccaggctgcgcgtcagctccttggccagcg

SEQ ID NO: 189090 - DNA, 122 bp, Homo sapiens
aggactgagtcccccagaggcactcaggtgtctccaattgttcactatctcccacatcatcgatctgtggcaatgtgataaacacatactgcatttaaaacatcattcatcataaaagatag

SEQ ID NO: 189091 - DNA, 122 bp, Homo sapiens
ggtcggggtatttgggtgcaaaagtttactatcacgcacaggtgtagagatgtacaaatacgatccaatttagtggaaactgtgtcttgtaagagatggcccccagggacctcccacatccc

SEQ ID NO: 189092 - DNA, 122 bp, Homo sapiens
ggagcagaggaagagagaacgtgagggggagggaccgcacacgtttaaaccatcagatctcgtgggaactcactatcacgagaacagcaacgggaactccgcccccatgatccagtcacctc

SEQ ID NO: 189093 - DNA, 122 bp, Homo sapiens
ttcttaccctggaatagtccaggctggtcatagccgggttggagtcgacatgggccctgacgagggcactgatcagactcaccgggggcgaagggggagagggctcctgtgggctcttcggt

SEQ ID NO: 189094 - DNA, 122 bp, Homo sapiens
actcggcgtgcgagaagtgtccatggcccgtggggctcgaggcctcaacagcaagccaagcgcttggcctcccatgctgtccttcacgagccccagcttccttccctgctctcgttcactcc

SEQ ID NO: 189095 - DNA, 122 bp, Homo sapiens
tggctgtttggtctagcaagcacagagcaggtgagtgatgcagggaaaatggaaagtgggcggcaggtaagggtagagctgttgctttgtgaaaggcccacgccctacatatcttccatcac

SEQ ID NO: 189096 - DNA, 122 bp, Homo sapiens
gctcctatatagctgggcggacctggctgccaagagggtgtgctgggggactgtgcagctcgaggctccagaggcacactccagagagagccaaggtacgtggggggccacttctgtggtca

SEQ ID NO: 189097 - DNA, 122 bp, Homo sapiens
cctcgcgggtctgtcccgaaactgacgtgaaaccgatttggtgcaatgcgaatgagctcccgcccgcctccgcctccatcccagccgccgccgccgcccgtcgccataacaaccggccccca

SEQ ID NO: 189098 - DNA, 122 bp, Homo sapiens
cctggggcagagctggaatctgggcgcgcgccggccccaccggtcccggtctcacaggcgcgtctcaggcttcacgcctccctcagtgtcagtggcatcaccccgtcctcctaaacacggcc

SEQ ID NO: 189099 - DNA, 122 bp, Homo sapiens
ttggaatctggcacgacctgtcatgcagtttggcgggcgggtccccctccacccgcttcgcgatgaaccccatgggcgtttccagggagacgtgagccatgtgtcccttattcatttacact

SEQ ID NO: 189100 - DNA, 122 bp, Homo sapiens
taccagcaccaactcggcagcaaagagacggatggaagcctcaggaaagcagccaacagccgaccaaagggagtacagatctgtgctgcagtagctacacactgcaaagccagtgtggagct

SEQ ID NO: 189101 - DNA, 122 bp, Homo sapiens
ttcttgtattcaatgtcgaagcccgtgatgatgctgttcccgtcgaatcgctgggtccagcgcaggttcatgctccgggccttcacctcccggatctccagctctggggggtcggggggctc

SEQ ID NO: 189102 - DNA, 122 bp, Homo sapiens
acctggttcccgcttgcccgctcgccggaagtcggcccaccgggaccggcgcgggaccagcgcggcaccgcccctcactgccccgccctacgacggcttccctgccccattggtccgcgcgg

SEQ ID NO: 189103 - DNA, 122 bp, Homo sapiens
ttccctcccccggggaatgatcccagcatctctcgcagtgatgtcagtgtaatcctgagtcggatcgggctcccggctgggtggcgggggggcagatgatgctcccgccagctgggcagagc

SEQ ID NO: 189104 - DNA, 122 bp, Homo sapiens
gtccaagttgtggacctaccttgtgggacttccgttattaacctgccactcacagagcatcgactacttgacctctttgagtgtaattcatctatactgtttaccttgcaggattctgagaa

SEQ ID NO: 189105 - DNA, 122 bp, Homo sapiens
tgatttccccttcctcgaaataccaatagtacgtgcaacacagacttgtagctcagaggtcgcatgctgtttcaaattcttgggatatgcatgttacttttttttaaagaagtggtatatca

SEQ ID NO: 189106 - DNA, 122 bp, Homo sapiens
aatcattggttcttcagaggagacacgtgtcatcctcacatcagtgacagctgggactcccgaggatctaggccttgaaggtgggagaggagttgagagccggcaggctctagggagacagc

SEQ ID NO: 189107 - DNA, 122 bp, Homo sapiens
gagaggattccccggggaggggcccaggggagattagcagcggggaggttcaaaccccagcgcctccctttccaaagtcagtctgcttctctttaaaatggatttgaggaatggggggacat

SEQ ID NO: 189108 - DNA, 122 bp, Homo sapiens
ttttcaatgagaacattcatatttgtcctcttgcagaactgcagggctcctacaacctctcgggtgacttgtatcttaatgactactcgagtgtccactgccctggccagcaagctctactc

SEQ ID NO: 189109 - DNA, 122 bp, Homo sapiens
agaatctgagagacgggggagtcaagccgctgctaggccttctctatgactgcgggggttcgaatacagtgagacccgacaaaagcgaccccattctgggtgatagcacagtcctggcaaaa

SEQ ID NO: 189110 - DNA, 122 bp, Homo sapiens
ttctatgcccacagtgagtgccacctgggtgagggggcggtgaccaattatgtcggccaacgaagagccacagtcccggggaggccgggagggggcggagtggggaccgggcaccaggcagg

SEQ ID NO: 189111 - DNA, 122 bp, Homo sapiens
tgtggcacccttcaggctggctagcctctctggtttcatttccctcgtatataaaataaccgagttcaccagatacactctaaagtttctccaggcgttgacattttttgatctcaaggtct

SEQ ID NO: 189112 - DNA, 122 bp, Homo sapiens
tatggcagctgtttccttgaatcatcagagggaatatgatattcatgaaactgaccaggccgtgaatgatcatcctggaactctattcttctcagactgattcaaagggctttggattcgtt

SEQ ID NO: 189113 - DNA, 122 bp, Homo sapiens
ccctgtcctcctccccaggccgggacctccgcgcctcccacacacagtacaactctaacacgaaactgggccaggactgcaggtaggtcccgtccaatgcgacacgctcgcgacggcccacg

SEQ ID NO: 189114 - DNA, 122 bp, Homo sapiens
ggacaacgcctcctcacttgctcctctacggcaaggccccttccttctccctgccggctgcggtggtgtgtagggtggtccctttacagagtttccttaatccatctagcctgacctcacct

SEQ ID NO: 189115 - DNA, 122 bp, Homo sapiens
tacctttgctggggtacctgatgactttaaagagactgtttctttggagaaggtggaatacgcttaaaggtgagagtcaagttttggcattcacaccaggtagtaggctttctcctagttcc

SEQ ID NO: 189116 - DNA, 122 bp, Homo sapiens
gtgggacttaacaagggcacaaataagtaaagggcccagagcctaccctcagggagcttacggatccagtgaggcagatccagacacctgggaagaggggagccagcgtgccaggccagagg

SEQ ID NO: 189117 - DNA, 122 bp, Homo sapiens
acagaggcgggtggagagagaagccggcgggatccaaggccccagggcaggccctggcagcgatgtggcagcccctctgcagtttccacgctggtagtcgtgaagtaaattctaggccctgc

SEQ ID NO: 189118 - DNA, 122 bp, Homo sapiens
tctgtctcaaaaaaaaaaaaaaatccaaaggggaaaacagtaactggacagtgcaggaaccggcagatgccctgaccacgtggtcaaggttattaccatcagcacgagacaggccgaagcca

SEQ ID NO: 189119 - DNA, 122 bp, Homo sapiens
ggggggtgtagtggaaggggacagccggacccgggcctgcaggtccgcccgggaatcctgcgcctgtacgaatggcaacaacggaaaagtgaagttgcaaaaacagactcctaacttttacg

SEQ ID NO: 189120 - DNA, 122 bp, Homo sapiens
cttgtcaggaactgttatccctccccgaccaggtgctggcttcctatgcaaacctgtgtccgcttccctaaaaatggggaaaacaggggtgacgtcgcttatagaatcccacctcccttgcc

SEQ ID NO: 189121 - DNA, 122 bp, Homo sapiens
gcgcccagactgcgcgccgcgccgctgcgcccaacattcccgaggacggcttcgcgggcgcgtatcgtccagaccggagcaccgccccaccgctagcgcaggagacctgccggggaagtcgc

SEQ ID NO: 189122 - DNA, 122 bp, Homo sapiens
gcgtagatacacacaggtgaagccgtccatccagttatgaccacagtttgggacgtttgacgtctgcgtagatacgcacaggtgaagccgtccatccagttatgaccacagtttgggacgtt

SEQ ID NO: 189123 - DNA, 122 bp, Homo sapiens
ttgctgagccagtggctgccccgtgccctccttcccagcactatcatgtgtcacgtttcccggactctgcccctacatctcagctgaatctccagggaggctgcagagcatcgtggagacca

SEQ ID NO: 189124 - DNA, 122 bp, Homo sapiens
tctgtgtgggtacccgcttggctcctccagtggggcccctcaggtgccacggtgatgccccgtggcccacatcagccgcctcctcacaggaatcccgcagcaccagcctcctctgcaccagc

SEQ ID NO: 189125 - DNA, 122 bp, Homo sapiens
cacctcagtctggtgtgcagaagtcactgggctaacaaggaatatattcatgttgtacatcgtgatgcagtacacacacacacacacacacacacacacacacacacacacacccctggaaa

SEQ ID NO: 189126 - DNA, 122 bp, Homo sapiens
agcagggctagactaggggtggagcgggaccaccgctcccctccccctctccccctggcgcggagccccggcgcagctgggagtcttggaaacctgactcccgcccaatcagcagggagggg

SEQ ID NO: 189127 - DNA, 122 bp, Homo sapiens
gcgagttacccagctgtcgccgatggcagttcgtccgcttgtcaccacctactgtgtgcccgcatgctttcagacgctggacacacagcactgaaaaacatgggcaagaccgatactgcctg

SEQ ID NO: 189128 - DNA, 122 bp, Homo sapiens
gggggcggggctcgtgacgttgccgggacagccaatcacgcctggttttatcagtggccccgcccttttaccgcacatttcccctcccctagttcatttcgcacgacgcagcggttgggaac

SEQ ID NO: 189129 - DNA, 122 bp, Homo sapiens
gcaggccaagcaaagccaaagagcgagtgacagcccagtgcgagatgtgcccagggagaacggggtcccgagcctggagtccccacggccccgccggctgtagaggctggggggcggaggct

SEQ ID NO: 189130 - DNA, 122 bp, Homo sapiens
caacacgaaagcccgtgtggtcgcgccgggagctcacggcgttccaagcggcacttatcccgcgttgatgcccaggcaccccgcgcgccctgtttcaccaggcccagtcactccagctccag

SEQ ID NO: 189131 - DNA, 122 bp, Homo sapiens
tccagtccttgggtcccgtagcacacagttacagtgtcctaagatactgctatcattcttcgctaatttgtatttgtattcccttccccctacaagattatgagaccccagagggggaaggt

SEQ ID NO: 189132 - DNA, 122 bp, Homo sapiens
cctcactcgggaagcgcaaggggtcagggagttccctttcctaatcaaagaaaggggtgacggacggacggcacctggaaaatcgggaaaatcgggtcactcccacccgaatactgcgcttt

SEQ ID NO: 189133 - DNA, 122 bp, Homo sapiens
gccatgcgcctggcactacgtcctcaacttcacgtgaccggattgcatcccccgcactgccggcaagcctgtggttatcagtatccccagcttacagacgccgaagtggaaagtcaaggagg

SEQ ID NO: 189134 - DNA, 122 bp, Homo sapiens
gggagagttcttccaggatatgtctggctgtggactagcaagtccagcctcaccgtgtatcgccaaattgctctccaaacgataccaatctccaccagcagcatctgaaagttcccattgct

SEQ ID NO: 189135 - DNA, 122 bp, Homo sapiens
tgccagtaaataagtcccccgcttctaacccctgtaataaatgcatttggagtaatctggcgatcacgcggtgtaattgctggctgtcagggcagatggatgctccgcgcgccgactttgca

SEQ ID NO: 189136 - DNA, 122 bp, Homo sapiens
gagagccacctgtgtctcctgcagtgggcagcggctgtgggccacgggcactgttgttcccgggagatgctccctgcgtagaaaatgggagggggaggaggaggtgcgaccaccaccctgga

SEQ ID NO: 189137 - DNA, 122 bp, Homo sapiens
cccaggggcgggggcggcaagacgcggaagtgcccggcaggttggcggaccggcgggaggcgcagcctgggcagagctcagcttggtcccgccgcccggccggtgctccctggcgcagccac

SEQ ID NO: 189138 - DNA, 122 bp, Homo sapiens
agccagctttccccagcctctgggagtcgtttcggtggtgcatgctggtcctgctgccgccgccgccgccgccgccgccaccgccggcggggaggatcgccgaggaggaggaggcggaggag

SEQ ID NO: 189139 - DNA, 122 bp, Homo sapiens
ccccgatggacactcggcaggccccgcccagcgcccctgattggacgaagcgccgggccccgccccctcagccgtgagtgacaatagaagcccttggtaacggggctctgaaaacgggtttg

SEQ ID NO: 189140 - DNA, 122 bp, Homo sapiens
tgcttgctcctctctttccctccctctctcttttttttctacccttcttcttgtccttgtcgctctggttgggggctggttggtttagatacagcgagtgctccctggcagcctgaactgcc

SEQ ID NO: 189141 - DNA, 122 bp, Homo sapiens
gacaattctttgatgtaggggctgtcctctgcactgtaggatgtttagcagtatccctggcgtctacccactagatgtcactagcacttcccacttgtgatatccaaaaatgtctccaggca

SEQ ID NO: 189142 - DNA, 122 bp, Homo sapiens
agggcgcgcagcctccgcgttcccctgcaaacttgcgcgcagccgggggcgtgtccgtcccgggagggtccccccaacacccgggtccccaaggctcttaccgaccagtaagcacagcacgt

SEQ ID NO: 189143 - DNA, 122 bp, Homo sapiens
cggcgggctgtgcggatgccaccagggagacgccgcgagcggccacgccgccccgctgaccggtctccacagagaagctgcgaagagcaccccgccaccctcagggtcggcctatactggcg

SEQ ID NO: 189144 - DNA, 122 bp, Homo sapiens
gtgtaaattaatctctacttcatatcttatcaaaatacgatcttcatcctttgatcacatcgagtgtttcacacactccactccagtacacccacaactaagagcagaatacttcattacag

SEQ ID NO: 189145 - DNA, 122 bp, Homo sapiens
gttggtgacccgtggtgtcccgcagctagtggctgcatcaccctgacccctggctccgtccgcccatggcgtcctccctgtgagctctgtgtcttcttttaaggacacctgtcattggatcg

SEQ ID NO: 189146 - DNA, 122 bp, Homo sapiens
cccttggaagggtacattcgcttcatagaaagttgtggccttgacaaagaaaggggtgggcgaattaggtaggtggggaggcaagaagaagccccctatgagaagagattgtcaggttgcac

SEQ ID NO: 189147 - DNA, 122 bp, Homo sapiens
ggggacgctggatgagcccatttctgaagtgcggaggggccgggcttcttaggctgtgggcggagcctgggcctgggagaggaacagggccctggagcacctggtttcggggacagtagggt

SEQ ID NO: 189148 - DNA, 122 bp, Homo sapiens
ggagactgaggcaggagaatcactttaaccctggagatggatgttgcagtgagccgagatcgcgctactgcactccagcctggcgacagagtgagactctgtctcaaaaataaataaataaa

SEQ ID NO: 189149 - DNA, 122 bp, Homo sapiens
tcgcgatgccaggctctgctggcttctgctgggcactttgcccaaggtcgtctccctgtgcggggacgtgggtgagggggcccctgacgttctgagtcggcgaagggtccgctgcagcgggg

SEQ ID NO: 189150 - DNA, 122 bp, Homo sapiens
ccagggccccactctctcgctgcctctgcagggcagggtctgcggcctgtgcgggaacttcgacgacaatgccatcaatgactttgccacgcgtagccggtccgtggtgggggacgcactgg

SEQ ID NO: 189151 - DNA, 122 bp, Homo sapiens
gacaatctggaagatgggccagaaccatgcgtgcaccgcggaatcgcagatctttacagccggaagaagcctcggaggcagagcctgcacgtttcagaccaagaaacggtggctcagagggg

SEQ ID NO: 189152 - DNA, 122 bp, Homo sapiens
agggagagacaaatcttgagggctctacagaggaaacttctgataacgaacacagaacaccgactgtgtgcccggcttagcgtttcgttcactagcgtgatctcaccgtgaatgtcactgtt

SEQ ID NO: 189153 - DNA, 122 bp, Homo sapiens
aatcgtggcgctgctgtggagatctgagttgatgtagcacctgcttcctcggatgtagtccgcaccccggaccagatgccgctcggtcgtgggtctggagaaccggtatgggggagaggagc

SEQ ID NO: 189154 - DNA, 122 bp, Homo sapiens
ggactgggcgagacccgtggaggctccaggggtccgtagagctcttcgctctcaccgacccgggccacacccgccaagctggtagttctccgaacggatccctcacgcccagcaatggccgg

SEQ ID NO: 189155 - DNA, 122 bp, Homo sapiens
ttgttttgcagggagtaaaaattttggggggcttctcagtttcttttattctgtgccaaacgtttcctaggattagatcacttttggaacttcaggtcctcacagagcagttgatagataag

SEQ ID NO: 189156 - DNA, 122 bp, Homo sapiens
ccccccgagacgggtgccagtcccactcgaggccggagaaagagggccgcctaccgcggccgcctgggcacccctctgagggccaagattgtagtcccacctctggccccgtctccgccgcc

SEQ ID NO: 189157 - DNA, 122 bp, Homo sapiens
ggtccccgatccggcccctgggagagccgcgccgttctggaacccgggagcccccaacttcgcgccaagttcggagccgccttctgagggagacatgaaaaagatgagcaggaatgttttgc

SEQ ID NO: 189158 - DNA, 122 bp, Homo sapiens
ttccggccgagaggtgagtacgtgggaatgcggtggggagtctggtgggcttggccctgacgcgacttcctccgcccccttccctcccctctgccatccggacttcggcagtctcaacttac

SEQ ID NO: 189159 - DNA, 122 bp, Homo sapiens
cccagaaactcaagggcaggggccattggggtcacttggagaggagcacctagcacagggcggggccctggggactgagggggtgggtggtgctcattcgcctcccgctctccttccagcta

SEQ ID NO: 189160 - DNA, 122 bp, Homo sapiens
acacaggccaacctcgaaggcattatgcaaagtgacatataacagtcacggaagcgcagacgcggtatcactccacttagatgaggtgcgtagtatattcagattcgcggaaacaaagaaga

SEQ ID NO: 189161 - DNA, 122 bp, Homo sapiens
tgacctttagggactgcctctttgggggaagagatatctcgggcttcggagtgcgtctcccgggtacagtcaaaattatgtccgctgactctgggacactggccactgtctatgtggggctg

SEQ ID NO: 189162 - DNA, 122 bp, Homo sapiens
cagtctccaggacgcgaggccttccgtccgccgcctctacgtggagccctacgcagcggccgtggtggcccaggacgaaaaaccatgggcaagcttgagcccgccctctggaggccgcatca

SEQ ID NO: 189163 - DNA, 122 bp, Homo sapiens
agcttcagtgaatgttatatgactcatttaacagctcacatgagtattgtcaaagagcaccgtgaagaggattaagcattggattcagaggaccttttgtgaaccacctctttcctctctcc

SEQ ID NO: 189164 - DNA, 122 bp, Homo sapiens
caaggcggagcagagtgggtggtggaagggaggggagtttgtgtggtcttggaggccccacgaggacctcggctccgttcctggagagctgtgactggcctttaatgggttccatctggctg

SEQ ID NO: 189165 - DNA, 122 bp, Homo sapiens
tgcctaggtgagggggctctcagggtcagactcctctgcatcccgtctcaccggcgagaccgttggtgtgatgagctgcaagcatccaggtttgtttgcttcctgccacacgtggcaattct

SEQ ID NO: 189166 - DNA, 122 bp, Homo sapiens
agcagccccgacatcccgatcccgcacgcctctccgctacagccgcctacccagagggcgcgctacaaatcccaatgctccagagtccccgggcggcccaacccgggccccaacccggctca

SEQ ID NO: 189167 - DNA, 122 bp, Homo sapiens
aatgtattttccactcagatattttcaactcatgatgggtttattgggatataaccccatcgttaagttgaggaacatctgtatctccttactggtattttaattagatgtcctaaccttcc

SEQ ID NO: 189168 - DNA, 122 bp, Homo sapiens
aatgtctgaatgcctacagttatttggccatcctgaaaagtgcaacttatcctgacgtctcgagggacggaaaagttaccgaagtccaaggaatgagtcactttgctcaaatttgatgagta

SEQ ID NO: 189169 - DNA, 122 bp, Homo sapiens
gggcattcccactccatagtaaccgacactcagcactgggcattcccactccatagtaaccgacactcagcactgggcattcccactccatagtaaccgacactcagcgctgggcattccca

SEQ ID NO: 189170 - DNA, 122 bp, Homo sapiens
aggcacacacacggatactttaaacacgtcggtgatgaatcggtacccagctgccagtggcggagcttcctgggcggggccgcgggcgcgcggcggcttcatttcctcgcgcgcgccggaag

SEQ ID NO: 189171 - DNA, 122 bp, Homo sapiens
ctggaggctctccatacttgactttctcaagtctaactctttctttgcttcctagctcctcgccttaatcctctttttcctgtggcccttagatcaagcctggcttcctcttcattttcagt

SEQ ID NO: 189172 - DNA, 122 bp, Homo sapiens
taatgaagtgcagctgtgaactccggttttgggtcagaaaggcaatttctcatctctacgcgcagcaattgagtcgaaaatccaggagctgtttgcctctccccgcccctccacccgctcag

SEQ ID NO: 189173 - DNA, 122 bp, Homo sapiens
ccgtgaggtcacctggtgggcgcggccaggccgaatccccagtgtcgtcacgggagggggcgggcccagagcgtgtcagtgcagccgaatcaaaacaagccggagacccgccttttccctcc

SEQ ID NO: 189174 - DNA, 122 bp, Homo sapiens
catcgtctccagtgccctcaccacggtcatcgccacagtgcccctcttcttctgcatcatcgccccatttgccaagttcggcaagattgtggcactcaacacgggcgtgtccatcctctaca

SEQ ID NO: 189175 - DNA, 122 bp, Homo sapiens
gtcctcgcgtggtgagtatgcggtgaggacgttttttttttaaagatcacgttcattccccgtgcttatcgggagctgcgggagatggagtagcaccccagaatgtctccacgcaaaacttg

SEQ ID NO: 189176 - DNA, 122 bp, Homo sapiens
aaatgtatacacagtcgtgcgccgcgtagaaacattttggtcagtgactaactgcacatccgacaggggtctcatgagagattgtagtggatctgaagattccctgtcgcctggtgctgtgg

SEQ ID NO: 189177 - DNA, 122 bp, Homo sapiens
gggcaggagtgctgctaggacctcgtggcgggggcggggtgtagcctctcgtcgcacttccgcaccgcaggtggaagccccagctgcaggagctgctgaagctgcccgccttcatgcgggta

SEQ ID NO: 189178 - DNA, 122 bp, Homo sapiens
ataattgtgacatgaaagaggctggaccggttgttacaacaattttttccgtctagaattcggcggtaaggtctgagacaacacctcagcttagatcagtgccttctctgaacagcgttcac

SEQ ID NO: 189179 - DNA, 122 bp, Homo sapiens
ggtccgcagcttcactcctgagccagcgagaccacgaaccccaccagaaggaagaaactccgcacacatcggaacatcagaaggaacaaactccggacacactgcctttaagaactgtaaca

SEQ ID NO: 189180 - DNA, 122 bp, Homo sapiens
ttctccatgatgtcattaataaggcaacactgacctcagaacctaattcatcttgagcatcgtacatatcaagcagcactttctcttatttctgaggagagagaaaatgtattttctgctgg

SEQ ID NO: 189181 - DNA, 122 bp, Homo sapiens
accgcggattgaagtggaaggcgacgtctgagcccggatcctgcccaaccacaaagttcacgaagaacctggcgggacacaaagggctcattcccctggtgccacctcccggggcctggggg

SEQ ID NO: 189182 - DNA, 122 bp, Homo sapiens
aggttctaacatcatttaattccacttccttttgactgaaacaagttcccagctcatactcgcccttatcccttgaggcagcaaagcaagtcataaataatcacggtaataatgccatgtaa

SEQ ID NO: 189183 - DNA, 122 bp, Homo sapiens
tcttttttggttccatatgaactttaaagtagtttttccagatggaggtggcgggcggcacggagcgggcgtgctgagccccggccgccggcccggcatgggcgtctcccgcgggccctccg

SEQ ID NO: 189184 - DNA, 122 bp, Homo sapiens
atgccttacttgtggcaggagcacactaggatttaacggcaagtaagactagactttccccgccatccttttcatctgccccctgccaaacgtctgttaaatctgtatcccctgggagacgg

SEQ ID NO: 189185 - DNA, 122 bp, Homo sapiens
gtgcccgaatcgcccgctggtttaagtgcagcctgtcaatcagagcagctctcgaggccccgcccaaggccgtgctgcgtttctccttacgtcacttcctctccagcccctgcgtaatcgat

SEQ ID NO: 189186 - DNA, 122 bp, Homo sapiens
tcgcagaggcagtgagccgccgctcccagatcgccaccagccatacaaccatgaggggaacgacccatctccatagtgtgctgcatggccagatggttttgtccaaatccaagctaatgtga

SEQ ID NO: 189187 - DNA, 122 bp, Homo sapiens
cggccgccagctgcaccagcgtgttgagcacctccatgcgggtcacggccttggggtggacgcagagcggccgtagtgagtagaagaagggctgcagcaccagccagagcagcttgcgggcg

SEQ ID NO: 189188 - DNA, 122 bp, Homo sapiens
gccggccccgcgaaagactgcgcgtgcgtagagcacgccggcgcggccccgggactctcgcgataactgtactgagataaagtgtggcaactcgagctggctggtgattcatcctcggcgag

SEQ ID NO: 189189 - DNA, 122 bp, Homo sapiens
gcatgcatgcctgtgtgcccctgcccaatcaaggttcagctgtcctgcaaagcaacccagcgggtcctgtgagctggaggccagtttgccctgtttgtctccatgggtcttttccctgatgt

SEQ ID NO: 189190 - DNA, 122 bp, Homo sapiens
caaggaaccaaaccaaacagcatcagcaccaggctgagtcgcggaaaggatctgtcagaccgctccactggcatcgactcagctcgggagctacgttcaaagaagggtgagttgcccgggag

SEQ ID NO: 189191 - DNA, 122 bp, Homo sapiens
ccctgagatggggtcctggtaacagatagactctaggataggattccctcctggggattgcggcagagtgtacttgcaagtggagccttgaagggtaagatcataaatgttctacattgtgg

SEQ ID NO: 189192 - DNA, 122 bp, Homo sapiens
ggtccctgaagttttgcggctgcacccacagacagcaatagcgccacgttccctggaaggcgcacgggacggaagcggaagcagtaacgctggctccggctgcccggcggccaggaacggaa

SEQ ID NO: 189193 - DNA, 122 bp, Homo sapiens
agctaataacacaaatgaagtgccccttcctgcagggttatagatcttcaaattaaagatcgttcctgtaccctgcaccacccttcagccactctaattaatcaattcacagctttccgtcg

SEQ ID NO: 189194 - DNA, 122 bp, Homo sapiens
gaagacaccccacagcctgcagtctctgatcaggagcaggcctggggcagtcacagctgccgttaaaagggctgcaatgctggtcccctcccttccctttacccttctgctggagtactgtg

SEQ ID NO: 189195 - DNA, 122 bp, Homo sapiens
caaaaatctccaggcatttggatacacaaaggaaggaatactcttcagagtatgttttcacgaagactggagagacagcagtgtcttccagggccatcttccccacctcgcctcactcacac

SEQ ID NO: 189196 - DNA, 122 bp, Homo sapiens
ctccttcccttgatcatgctgccctccggaggtcagtttaggtatcgccgctccctttcacgctgttttgtctcttcaccgtctgttctggatcatcctgtccagagagaccgttgggtcag

SEQ ID NO: 189197 - DNA, 122 bp, Homo sapiens
agagcgccggcctccgagacggttagtgattggacgaagcagggcgcgggggcgcaagcccgggtcctgcaggggcgacgcgaggcctcttttgaaagatgcggccctgaccctgtgaacct

SEQ ID NO: 189198 - DNA, 122 bp, Homo sapiens
ctactctgcagtcccctaaggctttttctctccctcccagaatcttaaagtgcattcgaacgcacaggcaaaatcctcccagaaacttgtgaaaacataaatgatctgactagtttggcatt

SEQ ID NO: 189199 - DNA, 122 bp, Homo sapiens
gctgtgttttgtggatctcttttcttctttggcttagatcacaagtgtgggtttgactcacgtgttcagcaccagagaatcaggcaagccactgcaagcaggccagtgagttacagacgtgg

SEQ ID NO: 189200 - DNA, 122 bp, Homo sapiens
ccttcccccatcctttccagtatcctgcctgagcaaccttttgtttctggtgcacaaatacgactgctgggcctgttttcttgcaaaggtactttcaaacatagcttgtattgcctttattc

SEQ ID NO: 189201 - DNA, 122 bp, Homo sapiens
agacaaaggcaaggaggactgtctgggagccacgcgggcgatacagtttccgaggcacgccgcgtcccgcctagcctgttgaacaggtagacatgagcgacccaagcgtaagtgccgctgcc

SEQ ID NO: 189202 - DNA, 122 bp, Homo sapiens
agccataggacttaagaacccaaaacaaaaccagcaagtctgagaaccagggctggagaccgacactgagaagcgctgagccctcccccaggagcacgctttcccccaaatcagaaaaacac

SEQ ID NO: 189203 - DNA, 122 bp, Homo sapiens
cacagtcggctctgaaactacgtatcccagagaggggaacatctcctgcatctgttcatccggaaagacaggcacacttcagacccttaaaaccagaccgtgcgttaagggcaacgcacgcg

SEQ ID NO: 189204 - DNA, 122 bp, Homo sapiens
ttaatggaagaggatgcgatgcggagatgcttgcttccttcctttggtccaccgccaccccgcctttggagagggcacccacgtaatagacctcatttgtctccaccagagctcactcttac

SEQ ID NO: 189205 - DNA, 122 bp, Homo sapiens
gagagtgacccagaatgtacatatagtatatgaagaaagttcatcttctctctttcttcacgtcttgttggttactgctacctggcttccaactgttgcgctgggcagtctgacaacacgaa

SEQ ID NO: 189206 - DNA, 122 bp, Homo sapiens
ggagggacctagggacagcggcccctccctgccccgccccgccccgccgggtgcgttcgacgttcccactggagagcgtccccaacctgcaaggccgcgagctgcgctcaaaggggcccgtg

SEQ ID NO: 189207 - DNA, 122 bp, Homo sapiens
ggctccattcccacatggacctgggggggacaaacaaagtctcctaatcttggacagctgcgcccagcccttcttcacctgccgtccaggtatcatcctagtcttccctccgtctctggggt

SEQ ID NO: 189208 - DNA, 122 bp, Homo sapiens
agagacagccccattgttctacatctcgttatactctggccttttcccgtttttgtcattcgaactcatatacatattgaaatcgaagcacacacaaatccctgaaatgacaaacttaaatg

SEQ ID NO: 189209 - DNA, 122 bp, Homo sapiens
tgaatggagatagaaagggagaggacatctattctgttccgtgggccgtcaccatgacatcgtacatgccgcccaggcagggctttgcatttcacattctagtttgcatcccggttccagac

SEQ ID NO: 189210 - DNA, 122 bp, Homo sapiens
ttcacctttcctttcctctgacactttcttggtagttccctgcgtccccaagtaagcctgcgcagactgggaagtctgggaagtcggagaaggaaggcgctaccaagccggcaacgcacgac

SEQ ID NO: 189211 - DNA, 122 bp, Homo sapiens
cttagttatgcagaggcaggcactcctaagacttcagacaccaattttcttacggcagggcggggaggggaagtgcccaactaaggaaaagattctagcaggcggcaatttcgcactttgaa

SEQ ID NO: 189212 - DNA, 122 bp, Homo sapiens
gaacgtctatcactactgaaagttactaggttgggaccaattttcaagcttagcaacattcgagatcaggataccgtgtgacagctttgaccatctcccgtttgcagaaactggtttgggac

SEQ ID NO: 189213 - DNA, 122 bp, Homo sapiens
agggtgcgcggggggcgggtcctccccgccccgtccccgccccgccccgcccctccgcctcgcctccctcgactcagtcccactgggccctttaccccggcgctcccgggccccgccgttgt

SEQ ID NO: 189214 - DNA, 122 bp, Homo sapiens
cacgggtgcagccacggggctggttctgacccaggccacgcccgcccactctgcagcctccgtcctcattggtacaacaggggcaacggggctcagtttgcgtgtcctgttccagaaagttc

SEQ ID NO: 189215 - DNA, 122 bp, Homo sapiens
tgcgttacggggcccgcgctgaggtccccaatggggcgggccacacgcccatggactgtgcgctgcaggccgtccaggactcccccaactgggagcctgaagtccttttcgccgcactgctg

SEQ ID NO: 189216 - DNA, 122 bp, Homo sapiens
agcacaattttctcagcctctgacaccccatattttcacggctttcttattgccacctcccgacctacaagccctggacgctagctccaggaggatgggacctcgcctcctggagtccccac

SEQ ID NO: 189217 - DNA, 122 bp, Homo sapiens
ggagacctcccaaggtccatgtggtcctataggggctgttcagcctccctagccccttaacgtgtcaggtaatactgtatatattccatgaaatgtgaataattagttatataattcctaag

SEQ ID NO: 189218 - DNA, 122 bp, Homo sapiens
gtgatctggttcgaaatattcatggaaggagagggtgatgttactacccatatcccagggcgtgtaaaacatcctgtgatctggttcgtaatatccggggggcagagagtgatattactcct

SEQ ID NO: 189219 - DNA, 122 bp, Homo sapiens
atttgtccagcaggccaaaactagataaagctctaaacgtttcccagtgtgggaggcatgcggggtgagagagccatgttctggctgtcacatccttgctaggctgctgtgcaacacttttg

SEQ ID NO: 189220 - DNA, 122 bp, Homo sapiens
cagcgggtcatcatctggtcattcggcagaaaccgccttcgcggtcatatctgtgttttccgattcccagcacccctcccggccccccgacctggccgcgtccctctccccgcccgcagctg

SEQ ID NO: 189221 - DNA, 122 bp, Homo sapiens
ctgcccaccgagtcatgctcgaactccttactgtgacctgagaccatgtctacccagacccggaccatctcagccctggcacctgcctgcctccctagagatggaccagccctcagcctgct

SEQ ID NO: 189222 - DNA, 122 bp, Homo sapiens
acatcccatgtgtctcggctttcaatttgggcagacctacctctctcctactcgctggttcgtcagccgctctgttcaatcgtaggagcgctcctggtcggttcccgcagtgccttgcggct

SEQ ID NO: 189223 - DNA, 122 bp, Homo sapiens
tgccttgggatgtcctcccaacacaggccattaatctcactcaagggccagtgctggcagcggttatgctggggacatctacataccttgcattcctcccctttcacagaaaggaagaagaa

SEQ ID NO: 189224 - DNA, 122 bp, Homo sapiens
atgaacttagtgacctcttgcttctcccacgaggcctcccaaagctttcctgaggaaaatcgaccccaaggacgaggctctggccaagctgggtatcaacggtgcccactcgtccccgccgg

SEQ ID NO: 189225 - DNA, 122 bp, Homo sapiens
gaggaaggtggattccgcttgctccattttttgccaaaaatatttacaaatgggaagggtcggaaatgaagatgagcgcccccctcccaccccgcgctctcccccgctcctctcatctggtc

SEQ ID NO: 189226 - DNA, 122 bp, Homo sapiens
ttaaaccaggtcagtcctatctttttgtagctgaaggctatcagtcataacacaatttcgcgtacacctctgctcattatggaattacacttaaaacgaatctcaagagggtgaccattgtt

SEQ ID NO: 189227 - DNA, 122 bp, Homo sapiens
agcagggacgtgcactgaatagatggcgtcgtcctctagctcctggggatgttagcacagcgagcgtcatggtggaccctgcggcagccccacccatctccccacaccttgagacccatagg

SEQ ID NO: 189228 - DNA, 122 bp, Homo sapiens
aatgggcgtaggacccttgggttccaagggagtgcagcacagggggccccggagcggcagcgccaccgcacccatgacgccccgagcacatgcggacagcagcttttccataaggacccggc

SEQ ID NO: 189229 - DNA, 122 bp, Homo sapiens
catgaggaaactgaggcccagggtggacacagggctgcccagcgagttagtgatgggcaccgtctgtgacccaggtgtcttgtcttataggtcacagcacttcctgctccatcagcctcttc

SEQ ID NO: 189230 - DNA, 122 bp, Homo sapiens
agtaagaaggggccagaaagtcagcaactgtgtgattaaaaaaaaaaatgtcttagcctccgtatgcaagaacttgctgtgtgcaggcgagtgggccaggcgcttacttaatcttaacagcg

SEQ ID NO: 189231 - DNA, 122 bp, Homo sapiens
gtaataagtgtgtgagtgaatcaatgaaggtaaaaatgagtaagtgcctgagtaattgaacgaagagatgattgcataaagcagcaaatgaatttgtaaatcacaatgactaacacttttga

SEQ ID NO: 189232 - DNA, 122 bp, Homo sapiens
cagtaggctgtactgatactgtgggttgcttgaggaagcaatagagcagcggttctccgccgtggttgcactttctttttcttttttatttttttagacggagtctcactctgtcacccagg

SEQ ID NO: 189233 - DNA, 122 bp, Homo sapiens
gcccgctgtgctgtgccgccccgggtagatcaaagaccctctctggtcattggctgggcgcggtggctcacgcctgtaatcccagcactttgggaggcggaggcgggtggatcacgagatca

SEQ ID NO: 189234 - DNA, 122 bp, Homo sapiens
ttaggccagtgtgtgctggggtgccccggccaactccctccttatgtgtgtaggtgtctccgggggtgacgcacagatggaaaacaccagcgtggggcaatggctgcgtgagggttcacgat

SEQ ID NO: 189235 - DNA, 122 bp, Homo sapiens
tgtcccccttgcgctgtccctgctagtgacaggaagctcttctcaccctgttcgtgggcccggctgtgtctcctcctcgccttcacctgccgttgtgacctgcagtgccctccccagcttga

SEQ ID NO: 189236 - DNA, 122 bp, Homo sapiens
agggaacaggggtgagagaaaagaggcaaccgggaaaacccagcggtcgcctggaattctcgacggtgataactgaaagttctgaggtgataactgaaagttctgagccgcagagatgttca

SEQ ID NO: 189237 - DNA, 122 bp, Homo sapiens
aaggaggcggtgacgtgtcttgcagagaaaatgcatgtgtgagatgagcttggttcaggccgcagtgacagtgctggcggccgtgggtttcgtgttaatgaatcaatcatacgtagtcaata

SEQ ID NO: 189238 - DNA, 122 bp, Homo sapiens
ctggaaaacctcgcccccgaagaagctgcagaacgacatggcgccaccggaaccgcagcgcgcttgccgctgccaactgaccaaaggctgccgacccgacgaccgccggtacccgcgtccac

SEQ ID NO: 189239 - DNA, 122 bp, Homo sapiens
acccgctggctccctctgcccgcgcccgcacaccacagactccgcttaccgtaccctacccggtcctagagggcccagaggggatctcctgaaaccaactcgcctgcttggagccagccccg

SEQ ID NO: 189240 - DNA, 122 bp, Homo sapiens
cacccaagttctgtgtctgcctggcctgatgaatggattgcatgacaaacaaaatcacagcgttcttaaaactcaatagaaataggcgatgtttaagctgtgcttgttcgcttccttctctc

SEQ ID NO: 189241 - DNA, 122 bp, Homo sapiens
atgtgattgatacaaacgtcagtgagttcacattctccttgctgcgccctcaggaagtcgcgtgcgctctgcgcttgtaccgtgtcttgattctggccagcgatgtgcaaacgctccgtggc

SEQ ID NO: 189242 - DNA, 122 bp, Homo sapiens
cccctctgcagaggcggggggccttgcctccggccccatctgacatcttccttgaagaatcgctgcctcacctagatgtcctttgggtggcgcagttcgttggccttctaggaaggctggtt

SEQ ID NO: 189243 - DNA, 122 bp, Homo sapiens
atggctgatgctttagccagtctttgatgggccggggggttgctgaacctggacgagtcccggggggttgctgaacctgggtggatgagtcccgtccattcacagatggggacttgtgcccc

SEQ ID NO: 189244 - DNA, 122 bp, Homo sapiens
ttatttataccttttaaatatctagacaagtattgtggagcatccatttgtgtacttgcccggattctgcaaacgccagggtggagataaaaccaccctggataaaatggaatggaaagcga

SEQ ID NO: 189245 - DNA, 122 bp, Homo sapiens
gtagctaacagatcttgagcgtaccaggccctgagctgagtcctctaacgggcagaatgtcgctgcatacggacagcagcctcaagaggacaaggtgatttagtgactctagcctcttcccg

SEQ ID NO: 189246 - DNA, 122 bp, Homo sapiens
cccattccagtcctgctttgtcattcacctgttgtcataacctctgccagcctccttggccggctttcccgtcctgtctctgctccacggtaggcggaggcccctccgcatgtgcgccgaga

SEQ ID NO: 189247 - DNA, 122 bp, Homo sapiens
ctccctccgcccgcgccccccgccgcccccctcccaggacacggcgcgcggccgctcgcccgccacagcaaacttggagcagtctcccggccctctggaaagaaacttagggcaattgggat

SEQ ID NO: 189248 - DNA, 122 bp, Homo sapiens
gttagaagaaaaaagtggtagtaacttggagcttgattacccaccagcgctgctcacaaccgacatggataatccagaaaggactggccctgaactgtcccagctcacggcgctcaggagcg

SEQ ID NO: 189249 - DNA, 122 bp, Homo sapiens
tctgtgcagagggaaggcggggtgtggggcccgtcccacgcctgggcgacccccatgcagcgaacctcgaggccgtcactctaaagctcagtctcactcagggtgccagaggtgcgcgcccc

SEQ ID NO: 189250 - DNA, 122 bp, Homo sapiens
cgctcctctccagcctccccttccgggttctcgtcccgaagcccgctgggaattgaagtccgggcagccacggactacatcccccagaaggcagcacggtcaagcttggaggtggggtagga

SEQ ID NO: 189251 - DNA, 122 bp, Homo sapiens
tggaatccatcatcccccaagactctccctcagaccccaccctcctctcccacgtcggtccgggagttcctgatctcactcttgggtccctgaacagcctcctaaatgctgggtgtctctcc

SEQ ID NO: 189252 - DNA, 122 bp, Homo sapiens
tcctagagggagaggatgacagcaggagacatccacggcccagctgagaaagcccgaacccgccccctccaggcctggccctttagaacaacccaccttccagagcccgccccctagacggc

SEQ ID NO: 189253 - DNA, 122 bp, Homo sapiens
agccgctaagcgcctctcctggtcggtgtcccaggcagaaaggtgcagagacccatctgacgcaggactccaggtattttaggagggacccatcggcttgcttaattccctgggggattcgt

SEQ ID NO: 189254 - DNA, 122 bp, Homo sapiens
aataatccttccaagaaagcttccctgtctcggtttagcctttgcatatcctctctttcacgtgggtccaactgggggtcggttcctggcaactgggtgcttccatactcttggtggttttg

SEQ ID NO: 189255 - DNA, 122 bp, Homo sapiens
ttgcaggggaggaaggcggggtggggttagggaccgggaggctgggggaggggagcgggccgcctcctccagctgcaggctccgggctgagacccctggctgcagtgcaagaaagcaactta

SEQ ID NO: 189256 - DNA, 122 bp, Homo sapiens
tcaagatcatcttgggacagtttaggaatacgccatttaggtctgtattgatctgtaatgcgtggaagaggcatcacatagaactgttcccatcttgaaaggcggatgcgcttgggtcgttt

SEQ ID NO: 189257 - DNA, 122 bp, Homo sapiens
ttcaagtccagctgcctgcaaactaaggcagcattattcagacctgggctaccctggtcccgggctggcgatgccactctcttactctgtgacctttacatccctgtgcctcagcttcctcc

SEQ ID NO: 189258 - DNA, 122 bp, Homo sapiens
cagcaggcgctcagggggctgggcccgcctccgggaaggagccttaaagaaccagctgcccggtggtgtccgcgcccagtcccccagagtggtcgtgcaggtatacgttagaaattttattc

SEQ ID NO: 189259 - DNA, 122 bp, Homo sapiens
gacttctaggtaagagacttatttgcccatcttgggccaggggactcctggccagggtcacgtagatcagaccgtgctccagagtcccagtcccctaggtgggaggcagagcaggagggttt

SEQ ID NO: 189260 - DNA, 122 bp, Homo sapiens
ggccgctgcggaggacctttctagtgcccgagatcaagtcgctggaccagtacgatttctcgcgggccaaggcggcggccagcctggcgtgggtgctgcgggccgcgttcgggggcgcaggt

SEQ ID NO: 189261 - DNA, 122 bp, Homo sapiens
cgcgggacacgcctcgcaaagagggaagagtgggcggggccacgtgccgttgtcagagttcgcaactcgagcgcccagagggctcgcgaaaagtcccagcctgcaagccaacctcgctcagc

SEQ ID NO: 189262 - DNA, 122 bp, Homo sapiens
gccctaaggaatgtgtgacaaattcaagtttattatatcataacatgatagattaatagtcgtgcttgtttagtgcacatattaactggtctggtaaggcaaagaagttttcatgataaaat

SEQ ID NO: 189263 - DNA, 122 bp, Homo sapiens
tgtgctcaccgtgtgtctggtggtgcttggtggtgatggtgcgtacccaccttggtatagcgggcagcacagccaggggcttgttctttcttgtctggctttggagtctgcaggtccccagg

SEQ ID NO: 189264 - DNA, 122 bp, Homo sapiens
catccagcaggatcaggtcattcgtatccacattgtgactactgggtccccatccagcagcgtcaggtcattcgtccccagattgtgagtcgggtcactcgtatccacattgtgactactgt

SEQ ID NO: 189265 - DNA, 122 bp, Homo sapiens
cccgcaccccgagctgggggcaccacagggtccccgagggtccccgaggtcggggcggagcgcaggccgttcggagcggggggctccgggcccgggcgctgctcgggggagtcgggtgcagc

SEQ ID NO: 189266 - DNA, 122 bp, Homo sapiens
gtcggtctgttaatttttattgacggtttccacggccgcctcctgctctcctcggtggatcgggctccactctgctgagaggcaccctcttgggggcccacccctacccgggtggaagctct

SEQ ID NO: 189267 - DNA, 122 bp, Homo sapiens
gtggaaagcaggagggtgggactgatgacctccaagactcctcttccagtgtccgcaattcggtgtcgctggaccatgaaatagaaatgaggagctgcaaggttttgggtgctccactcctt

SEQ ID NO: 189268 - DNA, 122 bp, Homo sapiens
aagggtgtaacactatcaatacggaacttcagggacaaagtaggcccctcacaaagacaccgccagcacctgactccgcccgagcggaggaggctccaagtgcggtaagaatatgggactga

SEQ ID NO: 189269 - DNA, 122 bp, Homo sapiens
cgagccattaaccagaagctgggggacacgcctggtgtctcttactccgacattgctgcacgagcctatggttgtggccgcacggagctggccatcaaggtgtgggtgcccagccctccaca

SEQ ID NO: 189270 - DNA, 122 bp, Homo sapiens
ctaaagattggatgtaaattacataggttgggggatggtactgtatggggtggatggggacgagataacgccaaggcagagagaacatttgcaaaagccggagacccaggggtgttggtttc

SEQ ID NO: 189271 - DNA, 122 bp, Homo sapiens
gtttcactgacgtctagcccagctcaaatgaccggttttcttaggcctcattgttgctggcgactgctggtgcctcttggtgttcaaattcagaagaaagcccggactgagagtggcattag

SEQ ID NO: 189272 - DNA, 122 bp, Homo sapiens
gcgcggcgccgaccgttcaaagcctaagtcgtcgggggtgggcgtgaggggcggtggccgcgctgagataggctgcggagggatgattggcgtcttggcgcccaatgggcgctggcgggcgg

SEQ ID NO: 189273 - DNA, 122 bp, Homo sapiens
ctaccaggggccctcccactcttcccggactccggaggagctaagccggcagggatcgctcgcccaccctgagcactttacctgcatggtggccaagacccttcgtccggaccctactcctg

SEQ ID NO: 189274 - DNA, 122 bp, Homo sapiens
tcaggaaaactactggagatcctggccctgactacccagcaataacatttctggaactcccgaagcaatcagtgctctctgatcgctaaacatgatgggcttctattagagagattacagta

SEQ ID NO: 189275 - DNA, 122 bp, Homo sapiens
ggagacaatctcagtatgtgtgagatgaatctgaaccctcatcagaacgtccacagctgacggtgaacacattggcaggtgagatatgtggagacatggcacgtggtgaaaatgcttggcaa

SEQ ID NO: 189276 - DNA, 122 bp, Homo sapiens
caaattcctgacctcaggtgatctgcctgcttcagcctcccaaagtgctgggattacaggcgtgagccactgcgcccagccagggtgagtcttgttcttgtccttgagtgccacttggctag

SEQ ID NO: 189277 - DNA, 122 bp, Homo sapiens
cttgacgcccactctgctttcagacccatcagtctttcattctactccagctttccattccgatctccaggtcagcatttccatcttctccaattcatttccctatcagttctatacatcat

SEQ ID NO: 189278 - DNA, 122 bp, Homo sapiens
catggctcaagaaaactccaaacatgcttggtatagctattttatgctgaatttgcaaagcgttctaggccgaaagttaacatagactatggaactatagtctcacccaaatcagtttaaac

SEQ ID NO: 189279 - DNA, 122 bp, Homo sapiens
gagaacagggcagggggtgtgaagagctgatgccctggccctccccactggctagctttccggggactaaggactaaggctgggccaggattctggggttctaggggctctgcctccacacg

SEQ ID NO: 189280 - DNA, 122 bp, Homo sapiens
cccacctgccccggccccgcccatcgcccctagagcccgcacctgcgcagagcgcgcccgcgtcctcgtggtggccgcagttgtgcacaccccagcccaggctctggcaggctgccaggcgg

SEQ ID NO: 189281 - DNA, 122 bp, Homo sapiens
cttcctgtgccaggcacaggccaggggctgggtggcaggcagaggggcagcctccagggccgcagggcccagccaggcccacctccatcacctctccttccccgccccagacttggcccaat

SEQ ID NO: 189282 - DNA, 122 bp, Homo sapiens
ggaacaggacggacaggccccgggctctggcacatcctggggaacaagggaccacaaggacgggggcagtctccagacttcccctgggcgcttgaccccaggccttgcaggggagagagcca

SEQ ID NO: 189283 - DNA, 122 bp, Homo sapiens
tgatccgtcttctcagagccattagcccccacgtccttgacggtggaacagttgtaaactcgagaccatccgtggggtggctgagactgacaattcattacgcagttggatggagaaggcgg

SEQ ID NO: 189284 - DNA, 122 bp, Homo sapiens
gcggccaaagcctaagatgtgaagaaactcacctgaggccactaaattggaaagtggccgcgcggagatgcaggtgaggcccatgccttccaggctccaaagcccaggcccttctcagacgt

SEQ ID NO: 189285 - DNA, 122 bp, Homo sapiens
attaatttgcaacctggattttgggagccactgagatggaggacacccactcatcatcagcgtgggggtggggtgtaactgtgagtcactcagggaatgatggggtggggggtctgaccttt

SEQ ID NO: 189286 - DNA, 122 bp, Homo sapiens
cctctgtggtcatcttcttagagagcaccccctccgcccccacacccttttcctcagagccgttgcttagtgagtccctgccatggaccaggcttgggaatggtccccaagtattagtttag

SEQ ID NO: 189287 - DNA, 122 bp, Homo sapiens
ccgtctgcacacggggaggcctccgatttccccattgtttggaaactgtgatgtggaagtcgtggggaatcatattctctctgttccactttggggaggggaggagggagcagaagtcagga

SEQ ID NO: 189288 - DNA, 122 bp, Homo sapiens
catagctccccacccaggtagcggagctcctggtcagcggcggctgctgcgttcccctgtcgccgtctgcatcctccaggcatggccagagcaggttccttgaacccctgaggaagctccct

SEQ ID NO: 189289 - DNA, 122 bp, Homo sapiens
gcccaagccacacccttcctggggcagtcacatctcatgtctaaaaggcaggagtgtaagcgccttggcatttcgtccaaggcagatgctctgatggacagatagtccttgctccaggcatc

SEQ ID NO: 189290 - DNA, 122 bp, Homo sapiens
cgtcagcccgctggtgaaatacctgctcttcttcttcaacatgctcttctgggtgagtctcggggtcgagggcacctgggcggcggggtccccccgcggggtggaagggtggcccggggtgc

SEQ ID NO: 189291 - DNA, 122 bp, Homo sapiens
cccagcacgagcagaccttccgctggaacgcctacagtgggatcctcgggtgagtggggccggggcagggatcccaaagcagcagcgcagctccccacccggcctcacgtgccgtgcccgtg

SEQ ID NO: 189292 - DNA, 122 bp, Homo sapiens
agacccatacttaggaatccctcactgttatctctggggcaagcagtttaatattcccagcggcagtctcaaagccaggagatgcatgcctaagacctgccctcccaacccccaccaagtca

SEQ ID NO: 189293 - DNA, 122 bp, Homo sapiens
acgcttcctgtgagcctgaggccgtgttctcattgtattaggttgttaagggtaataccccgtaagaccagcagatggggagcctgctccttgtaaattaagttctcccatttgtcttttca

SEQ ID NO: 189294 - DNA, 122 bp, Homo sapiens
ctggtgtagagcggagcccttggcccagcagagcttgctgtgtggtttcttcagtgctgccgtcgctgtgccgtctatatgtgttgtggtctttaatgtttaataattggcactgtcagaat

SEQ ID NO: 189295 - DNA, 122 bp, Homo sapiens
attccttgcaccatcacacatttttcatgcatcagaagtgtttctagagctccagaaccacgagtacctcatcacgtcctgagcgctcacatcccccagcaagccgcctgcaccaggccttt

SEQ ID NO: 189296 - DNA, 122 bp, Homo sapiens
aaaacaaaaaaaggcttctgcaatgacttctaagagttagaaacaggttttgagaggttacgtggcttgctcaaggtcacagcaattttgttgcacaggtgagctgaaacccaagcctacct

SEQ ID NO: 189297 - DNA, 122 bp, Homo sapiens
agctgggcctgcgcctctgggtcagctcactgcgaacctcagcccaggtacctaccctgccgggcttcctggtgctgtccggtccggtccagcagcccacgggctcctctcgagagccgccc

SEQ ID NO: 189298 - DNA, 122 bp, Homo sapiens
tgcaagaacctttagcctcaaagcagaggccaacccaggacgggcaacacaggagacccacgttcctcaaatctgttctccacgtgggctcctgggaccccgcactcaccaaagtcgtaaag

SEQ ID NO: 189299 - DNA, 122 bp, Homo sapiens
gagacaggaaagggatggagagaaacggagctttgaggagagagaggaggtacccaggggcgtctgtagcatcagaggactggacctcccccttggggaaactggcttagcagcgttgagag

SEQ ID NO: 189300 - DNA, 122 bp, Homo sapiens
tgattcggccttagagaggaaggaagtgctgacacgcacaacggcatagatgaacgctgacgacgttatgctacaaaagacaccagacatagaaggccccatattgtgtgaaccgttgatat

SEQ ID NO: 189301 - DNA, 122 bp, Homo sapiens
acttgggcccttgcaatccagatccctgcagaccctgcacagagggatcttcagaggccacggggcacactgggccatggcaatgctgacctggtcaagcttggccttggtggtggggcccc

SEQ ID NO: 189302 - DNA, 122 bp, Homo sapiens
tttgcattcggctgccttagcactctgcgtcctcgcaccgaccctggggtcctgtttgtccggagacagcgtggcaccaacccagctgtgtgtgctttggagctggatactcctaaacacgt

SEQ ID NO: 189303 - DNA, 122 bp, Homo sapiens
acctggcgggcgtctgctccggttcagctgcaggaggtttcttgggagttcagcccagcgcgcagccccgccgcgacgccgcgagccgagaactctcctggggcgaagggagcgctgagaag

SEQ ID NO: 189304 - DNA, 122 bp, Homo sapiens
gagcccatggacccggaggagatcgcgcgcaaggagctggagaagatggagaagaagaagcgcaagcacgagaagaagctgctgaagagccagggccgccacttgcactcgcccggcggcct

SEQ ID NO: 189305 - DNA, 122 bp, Homo sapiens
atttggactgttcaaccagtaagtatcatgcaaatatttcaaaatccaaaaaatctgaaacgcaaaatacttctgctcccaagcattttggataagggataatctgtatttcagttgccctg

SEQ ID NO: 189306 - DNA, 122 bp, Homo sapiens
gtctccctgcgtggctcactcccttccgccttgtttgcctctttgctttgtcaatgaagacgctgccacattaatgagcaggcctgtcctctgtggaggcacaccggctctttgtcgctcac

SEQ ID NO: 189307 - DNA, 122 bp, Homo sapiens
gcggaaaagagggctgaggaggggaggggaggggaggagaggagggcagaagagaaggaacgagaacaagggaaaatcccccgggaacacagaaagatagagacccaggggactcccgcaga

SEQ ID NO: 189308 - DNA, 122 bp, Homo sapiens
tgttgcctttagggagctcacagtctagaggtagagggggagccagctgatatacaaatacgcaaatagcttatcattgcaactagggtgacttcctgggagatgggtggagaggcgcccca

SEQ ID NO: 189309 - DNA, 122 bp, Homo sapiens
tgtgtgtgtgtgtgtgtgtgtgtgtgtgaataagccagaggctgcctggtggggccccgccgtggcccagtgactgagataattgtcttcgtctgtggggtaatgcgaacaagccccgttcc

SEQ ID NO: 189310 - DNA, 122 bp, Homo sapiens
tgacaaggaagcagattgcctgggtttaaaattccgttgctggcgtcttctggaaccagccgctccatcctttcccccaccacccccgccccgttttccttgtgtgacagagtggaggagta

SEQ ID NO: 189311 - DNA, 122 bp, Homo sapiens
gttgagacagtagaggtgggttgaagcacttttaatcacaaacaaacaatagtataagaccgtgaacagctcacccagtggctgttgccctcctccagccctcagctcaccctcttcccatg

SEQ ID NO: 189312 - DNA, 122 bp, Homo sapiens
ggcccgaagcctggcgctcagggggcagtccttcctgtttgcctctccagcgagtggccccgcagcctcccctgcccgctgcctggcttcctgctcttaggagcctctcttcccagccccct

SEQ ID NO: 189313 - DNA, 122 bp, Homo sapiens
cgcgtccaactcacagaccccgccgccgctgaggggctccatacccagcttgaagccgcccgcactctccatgcgccgcccgagctgttgccgtccgttgccacggtaaccacggagccgca

SEQ ID NO: 189314 - DNA, 122 bp, Homo sapiens
ctctcattcacatcaggtagcatccatgtatcctcaccccgaagtcgcttaagttctttacgcctttcttctttttcaaaattggctttagcctacaaccaaagaaaaaaaaaagacaaact

SEQ ID NO: 189315 - DNA, 122 bp, Homo sapiens
ggggtgtcctgctcagctctttatgaacccgggaagatgacaggctctgttgggggcccacggcacacatttcagggggtctgtgggacttagctgaccccacctcagacagatgcagacag

SEQ ID NO: 189316 - DNA, 122 bp, Homo sapiens
tacgccacagaggcagccctgggggttaggattggcagagctctcgtggagacctgccatcgtgctgatccagagccaccttgctattctctctgtagaggagaaggcagagcccccccagg

SEQ ID NO: 189317 - DNA, 122 bp, Homo sapiens
ggacctacaagcatttcccttctcgcgcgtgactttggtagctgagcctcatatctctctcgttttttggggggaggggggagacagcctcactctgtcgcccaggtgggagtgcaggggcg

SEQ ID NO: 189318 - DNA, 122 bp, Homo sapiens
ccctcctagggctgcaaccaggacacaaggaggaagcccaggtgagcatgtatcacactccggcacatagcagagccgaatgaatgacagttctcacagtgagccagtgttgctcttaaaaa

SEQ ID NO: 189319 - DNA, 122 bp, Homo sapiens
agtggcgtttctggtttctctttgcttccaatccccaccaagcggagcgttggaatgcgccgcttatgtcctctgaggacacatccatatttataatttatttttaggagaagttgtgaaaa

SEQ ID NO: 189320 - DNA, 122 bp, Homo sapiens
caaactcctgggctcaagggatcctcctgccttggcctcccaaagtgctgggattccaggcgtgaggcaccacacctagttggaatctgcattttaaaatggactctcagatctttctgacg

SEQ ID NO: 189321 - DNA, 122 bp, Homo sapiens
ttctagtttctaaacctcctgagcctagaggccctgaagacggaccaagtgcaaagtccccgaccccatacaccgtcctccgctccctccgcaccacacccttcattccctgagcaccgcgg

SEQ ID NO: 189322 - DNA, 122 bp, Homo sapiens
acggtgttgatttagacatccctggctgctggcatctccagccccagcatgaggaggtgccgtgtttgctaaaacctggtcaacatagttgagcagaggcccccaaattcccaaggagtgga

SEQ ID NO: 189323 - DNA, 122 bp, Homo sapiens
agaaaaaggactgcagcctcggggagccagggtcccctcgcagacgagctgccaacgccgcggagccatttctgttccaccctaggggaggagtagggggatatcttttaaaagtttaattg

SEQ ID NO: 189324 - DNA, 122 bp, Homo sapiens
ttccaacttggctgcaagagcttctggaggtggattaagtttggcaacttggaggtttaccgcagcgtcacttaagaataagaagactgtgatctcagaagcaacagctgggcagacaagag

SEQ ID NO: 189325 - DNA, 122 bp, Homo sapiens
cccagaggaagcagggctttaccaacaaaatgatcccccgccccggacctcctagggacccgagtcctccaggccctttggggctgctctgaaagaagggtgagccaggcaagccgggccct

SEQ ID NO: 189326 - DNA, 122 bp, Homo sapiens
gggtgcccgaggaggacagtaggtggcaatcgagagcgttcccccagttgggtggccgtccggggccggagggggaagggagcctggaatcccaaccacctcccttgcagacccaggcctgt

SEQ ID NO: 189327 - DNA, 122 bp, Homo sapiens
tcatgactggcgctcagatcctgttgaactatgcatgaaataatgaactttgacagaagacggcgccagcccacggccctcgagctcaccatgcagtgcacgacgcagacgttcttgtggtc

SEQ ID NO: 189328 - DNA, 122 bp, Homo sapiens
tgcaggggaccacccggctgcagctcccagctcccggcccttcgccctaggctgcccactcgctccggctcccgacctccccgctgccgaagcaactgggtcagcctttcagacttaaaacg

SEQ ID NO: 189329 - DNA, 122 bp, Homo sapiens
attacaggcgtgagccaccatggccggccgacaatggaactttatttctcacagttctggcggccggaagtctgaaaaggggtgtcagcaggcttgggttctccagaggccccctccttggc

SEQ ID NO: 189330 - DNA, 122 bp, Homo sapiens
tcccaaacgtccccgtcccctgcacgtccagatctgatctcccggactcttgactgattccgtcaatttcataagaaattctatggaggcttctgaccgcgggggcgtaagaatgcagcctc

SEQ ID NO: 189331 - DNA, 122 bp, Homo sapiens
catgggcggctggactccgggaggcctgtgaagccagggcatgggcctgcaacccccaggcgttggagaccactggcccggcatgggtgtgtagtgcagcctgctttgtggtgtacttaggg

SEQ ID NO: 189332 - DNA, 122 bp, Homo sapiens
gtgaggtagagcttgaacttctcatactcgtccttgtaggcaaacctggggggcgcaggccggtgagacgggtggggtgctggtggggcccatgtgtgcccccaccccgggagggcagctga

SEQ ID NO: 189333 - DNA, 122 bp, Homo sapiens
gaactggcggcaggcggctggcccgcccggggatggggcagaagctggggcggctgagagcgcagcgcgggctcccgggagacgccggcccactgcccgcccgctcgccgcaggtaggcccg

SEQ ID NO: 189334 - DNA, 122 bp, Homo sapiens
ctaacaagtcatatgatcattatagcaatgtatctgatgatgtatatatatacatacacacgcagcaggtaatgcttatcaagtctgcagctcacgcaaagctgggagatatagatatagat

SEQ ID NO: 189335 - DNA, 122 bp, Homo sapiens
tgggcgccgtggagaagggggcggcattcgtcggggaggctcgggccgcacaggagcctacggagggggtgggaggctcaggcatggcgggctgcaggtcccgagccctgccccgcgggaag

SEQ ID NO: 189336 - DNA, 122 bp, Homo sapiens
cagccctggagccccaagcagctcggccgggagtgcaccctcctaccttcccaacccagtcgcagtcagttatgaaaaaggaacagtgcatgattccaaagttatatttaaatgccaactgc

SEQ ID NO: 189337 - DNA, 122 bp, Homo sapiens
gggacaccctggttcccaccattccctgccttgctgacaataaagatatttccaagaacccggcccacgctgcctggcccctgcctgcggccccgccttcccctccaggccatgactggggc

SEQ ID NO: 189338 - DNA, 122 bp, Homo sapiens
gtcactgttgttccataatagaggaaacacgcttgttgaaaattaaatgtcccggctgggcgcagtggctcatgcctgtaatcccagcactttgggaggccgaggcgggtggatcacctgag

SEQ ID NO: 189339 - DNA, 122 bp, Homo sapiens
ccggttattccgggatccagctgggcgctggggctggcccgggcttcgctggggaccgggcggcgcggggcgggcgcggagacgcacgcccccgcccgccccgggcccgccccgcgccgccc

SEQ ID NO: 189340 - DNA, 122 bp, Homo sapiens
gctgcccctccctatccaggcctccgggtgggggctgatggggactgagccaccggcagacgacagggactctgctggctgcagagctggcccctgggtcctgtggtgacctccccttccgg

SEQ ID NO: 189341 - DNA, 122 bp, Homo sapiens
ccaggaggttgatcaggctcagaggtttgatctaatctcacaggggcagtctggggctggcgttcaggtgccatcgggcatggggctgaggtgtgaagcagcttgtgaattcactggctgaa

SEQ ID NO: 189342 - DNA, 122 bp, Homo sapiens
taccaagcgcgaaatgttcactgactgttagcgattgttcttcccttccctgatgatttacgtacttcagaccttggatcccaacagtgcccgagacgcgaagcaattcgaggttcaggttc

SEQ ID NO: 189343 - DNA, 122 bp, Homo sapiens
gagggagagtcacttgacagtattgaaacctgacaagcagcagcgtgtttggcggtcccgcggatccgtctcttgcttccacagtgtttggatggaacagatccgggaactcacttccagcc

SEQ ID NO: 189344 - DNA, 122 bp, Homo sapiens
attgtaattctgaaaatacacattttaagaagaaactattttgcactggatcttttgctgcgacatggtgtgacaacagtatgtaatgtgaagattttattgttttatctccctagtccttg

SEQ ID NO: 189345 - DNA, 122 bp, Homo sapiens
agttcaagcccagggaatttgcatatttatattacagccaactgatagtaattgtgggaacggcctgtaatgctgttcgtttgtcattttcagcggggtgtgcttctgccggggacctcatt

SEQ ID NO: 189346 - DNA, 122 bp, Homo sapiens
gccatttgccaggaaggtatctaacttggctttgtgcctgaagaactgtttcttgtctttcgctgtagcagtgggaaactccttaagctgtggttcagcctgggccctccctctctcctatt

SEQ ID NO: 189347 - DNA, 122 bp, Homo sapiens
ccagggcgcggtctggaggctcacgggagagaggctgtagccctgggcaatcccgggggtcgttacaggaaggtaggaaaatgccaccctcagggcactggttgggctaaaggtgacactgg

SEQ ID NO: 189348 - DNA, 122 bp, Homo sapiens
cagctgggtgaccctggataaattactataagtctcggttttcccaccagtaaaatgtggcgaaaggcttttgaaacattccttactatccagaacctcgaaactaagctcagcacctaggc

SEQ ID NO: 189349 - DNA, 122 bp, Homo sapiens
ctccctccatccacggcaaggcagggggagcctcaccagctccggaaccccgtctccctccgtccacggcaacgcgggagcctgaccagctccggaaccctgtctccctctgtccacggggt

SEQ ID NO: 189350 - DNA, 122 bp, Homo sapiens
ccgccgtcctgggggcccgttaggacgcaggagcgtctccgctacgagagcgaagcagggcgctccggggcgtgcgccgggccgggccgggccgccgggtctgagcgcgacgaaagcagtgg

SEQ ID NO: 189351 - DNA, 122 bp, Homo sapiens
gacatttgtcttccaaaatagataaacctaattaattcagaataatcttttcttcagaaacgtttgagtcatcaaacgtagataactgtaaatctgaggttatagctcttgagactagaata

SEQ ID NO: 189352 - DNA, 122 bp, Homo sapiens
agacacctaaggtccccgcctccctcctctcccccccgccacacccctacccccggcaggcgacgtccccgcccctcgaccatggcctggtgaagaagccggccaggcccgatcagccccat

SEQ ID NO: 189353 - DNA, 122 bp, Homo sapiens
aggcgggtctggaatacaggctggggccttcgaggaagttccctggagctttgaccgggccgggaacattgaatagcatttgcataggtggaggaaagtgggtgaaaggaaagggttctgag

SEQ ID NO: 189354 - DNA, 122 bp, Homo sapiens
tgaaccggccgccacgtccgaggcacacggcccgaaaagtcgctgggagaagcccagtggcggtggtaggcaattcggagtagtcaataaagtttattcaaaacaatgaggaagttgaggcg

SEQ ID NO: 189355 - DNA, 122 bp, Homo sapiens
tttcaagcatagaatagggacaggggctcttcaaaggcatccatccaattgttacaagaccgactttcagaaggcagtcactccggagcctgcttccctccggcggtgaacaagaaacgcct

SEQ ID NO: 189356 - DNA, 122 bp, Homo sapiens
ggcgattcgagcagctgaaaaggccaagtggggtaagagatgacaaagaaatgagtcatccggccagcagaaaaacagtgcagtctgaaaacaagaaagagcgaagagagggaggaaaaatg

SEQ ID NO: 189357 - DNA, 122 bp, Homo sapiens
ccagtctggaaagtgaggagcgtctctgcccggccaccatcccatctaggaagtgaggagcgcctcttccctgcggccatcccgtctaggaagtgaggagcgcctcttccctgcggccatcc

SEQ ID NO: 189358 - DNA, 122 bp, Homo sapiens
gagtgcagtggcgcgattggcctcccaaagtgctgggattataggcgtgagccactgcgccgggctcacgacacagcttaataggacattcagtgaaggacttagatttcaaggaaaaaaat

SEQ ID NO: 189359 - DNA, 122 bp, Homo sapiens
tgggtcccattgccatgtctctggatttgcgaagatccaccggaccttctgtggaactcccgtgtcggtgaacttttgtgccacgtcccctaattctgcccatggtcatctgcagctgcacg

SEQ ID NO: 189360 - DNA, 122 bp, Homo sapiens
agcggtggggccgctccccacgatggatggcccggtgtttgctcagggaggaagcgtggccgaagcccttgccgcagtcagtgcagtggaagggcttctcgccagtgtgactgtagacgtgc

SEQ ID NO: 189361 - DNA, 122 bp, Homo sapiens
cggagacagaacctgccaaagagccggagaacaggtcagacgatcttgattcaggaacttcgaaatccagcatcggtgactgtgcacagccctgcctagatgctgcctgtcactttggtcat

SEQ ID NO: 189362 - DNA, 122 bp, Homo sapiens
ggacgctgtcaatgttgttggtcgcagagcacgcatactctccgctgtccccctgtacgacgttctgtatgtaaagcccgccagaaggcgtgatgttcacccgcgggtcaactggcaagggt

SEQ ID NO: 189363 - DNA, 122 bp, Homo sapiens
tcctgtgagctcagtccggtgaggtgcgctcccgagcaggtgccaggtgcgacacaggagcggggacatccctgaccccagacgcaggcgggtggctgcgcttcccttcagttctcagagag

SEQ ID NO: 189364 - DNA, 122 bp, Homo sapiens
ttctcctgcagaaataagttataaaatctagagagagctcagtcatttagttctacttgccgtacttcaagaggatcttcactgcagttgttttggtatggagtgataggaaaaagtcaggg

SEQ ID NO: 189365 - DNA, 122 bp, Homo sapiens
tatttgttcccctggcttttcaattctgtcttagttggatatgacaagaatgacccaattcgtatgatcagctttcagaatggatgaagatctttcacagagtgtgacttcaatttatctcc

SEQ ID NO: 189366 - DNA, 122 bp, Homo sapiens
ccagcttgagtcctcgggggctccccgccccgccccctcccctgtaggtgatgcggggcgcgcctacaaggaagggaggagcctgcattttcgtggtacctactccctgggctcctgttcca

SEQ ID NO: 189367 - DNA, 122 bp, Homo sapiens
ctgagagagaatcgttgggccccaaatcccgtgcttttacctttgcatagcgtttatgatcgaaaagccctttttatgagccaggtggtagatgtggggcccagtttcgaacaacagatagt

SEQ ID NO: 189368 - DNA, 122 bp, Homo sapiens
gatcgggacacctcagctgggtgacttccctcgttgcaatcggcctcgggagcggtgcggcgtgtaccgagcggcgcccctgggctcagcgcgctgcaggcgccccgggcggatccttcacc

SEQ ID NO: 189369 - DNA, 122 bp, Homo sapiens
cagacctcctccccttgccacggggctgtgtgtgggcggtggggggtgcatccctaggttcgcgcagttcccacctggccctcacaggtccctgcacgtgtgtgtggcccccgtcagccagg

SEQ ID NO: 189370 - DNA, 122 bp, Homo sapiens
cttcacaggcgttgcattactccttttgccttgacccgcctcctagaaggggtagaccaccgtcctttcgttggtattcgaggcccccagacttcccagggacccagcctctcagtcctgcc

SEQ ID NO: 189371 - DNA, 122 bp, Homo sapiens
atgggttacgaagggagcgagagggaacttcatcggaaatgcctttaaacttttctcacacgcacaagctgcggtgttgaatggtgtgtcttagacccgggtgcctagtgtggctcggtgcc

SEQ ID NO: 189372 - DNA, 122 bp, Homo sapiens
cggacagacacagtggggccctccatgcgtccatcacggacagacacagtgggtcctccacgcgtccatcacagacagacacagtggggccctccacaggtccatcacggacacatggacag

SEQ ID NO: 189373 - DNA, 122 bp, Homo sapiens
gaagtgcgaggaagcgcacacgagagggagcagtggtggacgaagcgccccacccggccacggggacttacacccaccacatcagaaaccccctcaacacgggtgcgctgaacgctgcagtg

SEQ ID NO: 189374 - DNA, 122 bp, Homo sapiens
accccacacaggccgacaggagccacgtggaggacacaaaggctcctgccggctcagctacgccccctagttagggctgaccccctcttgggaacacctgtttctgtccgttcgtgtcttta

SEQ ID NO: 189375 - DNA, 122 bp, Homo sapiens
cggggaggtgcccttcggcgagtgtcaggtcatgtgaccggaaagggcactctgccttgtcgccatcttgagtgagggcaggagactgcccgagtatcatctgtcctacctttaaatattga

SEQ ID NO: 189376 - DNA, 122 bp, Homo sapiens
aaaggaaaccacgcctttaccacttttttaggaggggtggagtcacacattgagcatttgcgtgcttttatgggaggtcaccctcctgtgacctcttaagagtgaagttaaaggcactcact

SEQ ID NO: 189377 - DNA, 122 bp, Homo sapiens
tccccatatataccagcattgtacctagggtggacgcgttcctcctcttactttcgggaacgctctactctgtctacgaagtagctgtccttttaccactttacttccttaataagctcgct

SEQ ID NO: 189378 - DNA, 122 bp, Homo sapiens
ggagcctaaccttcgctgggtctgagccccaccacacccctccgcctggcctcgggctcgcggggctgccaggcacacctccagcttcccagggaagaggctctcgaacttcttttgcaggc

SEQ ID NO: 189379 - DNA, 122 bp, Homo sapiens
gacctgatgcggagcccgagggtggctgttggcctggggcggggaaggggctctctagatcgggggtcccacctgctgggcttggggagcccatttggccttctctgattggtctggagttg

SEQ ID NO: 189380 - DNA, 122 bp, Homo sapiens
tgaggtccatgctgcctgggattttggcaaacaatgtcactctaagattgctggtctgaccgttttatatagctgccgctgacatgtggcttccagatgtgggtgagaaggatccaactgca

SEQ ID NO: 189381 - DNA, 122 bp, Homo sapiens
gctaggtgctgcaaagtccctaggcgagtgccactgaaggatgaagccagctgggcttctcggaccggtggggacttggagaccttttctgtctagctaaaggagtgtaaacgcaacaatca

SEQ ID NO: 189382 - DNA, 122 bp, Homo sapiens
taatgaatgttttctggtgaacaaatgcctaaatacaaagatctgcacacttttagccttcgcccataggtatatccacttaatactgctttagaccttcttgttccctatcttcattccag

SEQ ID NO: 189383 - DNA, 122 bp, Homo sapiens
gagcagaggtttggaggggcgcgggcggggattgccgttccagtcagctgagccttctggcgtcggggggctctgctagggtctcagggagtgggattggcgcggcccggtgtgccctactt

SEQ ID NO: 189384 - DNA, 122 bp, Homo sapiens
cggctggcaccgcaggactgaggagctgccgctgggccgggagctgcgggtgaggctgggcggggacccgggcaccgcggggaccctcattccctccccgctgttacccagggttgacgtgg

SEQ ID NO: 189385 - DNA, 122 bp, Homo sapiens
ttggggttggggagggggtgtcgggatgaaggagggaatgttaggatccagcggcttttccgggctggtgttctgtgctgcgtagtgcaggtatgaaaccaaagaaaatatcacctctgtgg

SEQ ID NO: 189386 - DNA, 122 bp, Homo sapiens
caaccactgagccttagctctgctgagattaaggtgactgcatttgacagatactctaaccgacgctcaaagaagcaaacccattcaaggggtcacccgttttgggcctctaggtcagccat

SEQ ID NO: 189387 - DNA, 122 bp, Homo sapiens
tcaaggaaaacctgggacgcagctaatagatgcgcatcgagtgtatcgacgctctaagtacgagggctggaacagtgagcaggatcagtccattgcttttgcctacctgctgagcgctgatt

SEQ ID NO: 189388 - DNA, 122 bp, Homo sapiens
ttccaggtgtttgcacttgtgacagcagtatgctgtcttgccgacggggcccttatttaccggaagcttctgttcaatcccagcggtccttaccagaaaaagcctgtgcatgaaaaaaaaga

SEQ ID NO: 189389 - DNA, 122 bp, Homo sapiens
tctcatttcttctcgttttcacaggcggcatgcgttcctgcggacgatcgcatcttgtgtcgctgaagcgcctcccccagggaccggcggaccccagccatccagggggcaagaggaattac

SEQ ID NO: 189390 - DNA, 122 bp, Homo sapiens
tgccggtctcctccctccctctgccgggctccagcccgacgccaggccgctgggggcaagcgctgtgctttggaagaggagaaaagccccaaataaacaaaaacccaaagcccattcaagtt

SEQ ID NO: 189391 - DNA, 122 bp, Homo sapiens
cttctggcgggactttgggcccagtatgttgacctggaggggccagtgcaggcctgggaccgacttcccgagctacttcgcaggtgcgtccccggtacttcgggggccgctgagtgggctct

SEQ ID NO: 189392 - DNA, 122 bp, Homo sapiens
ctagctctggaggtgctgctctagggcagggaattatgggagaagtgggggcagcccaggcggtttcacgccccacactttgtacagaccgagaggccagttgatctgctctgttttatact

SEQ ID NO: 189393 - DNA, 122 bp, Homo sapiens
agtgagtggcaatcttaatagtatctcttgagagcggtaagattcttctcagtcttcatacgtgcagcctgatgacctcacaaaaaagtgtcagggccgggcacagtggcccatacctgtaa

SEQ ID NO: 189394 - DNA, 122 bp, Homo sapiens
cttttccctacttcccttttaggcaaggttaggagcagactcagagaaagtgatgtaaggcgtgccattcctttgtcctgcagtattgtttttaatggctgccatggcgtcattgtgggaat

SEQ ID NO: 189395 - DNA, 122 bp, Homo sapiens
gtgccgtgagtgtaacaggaatagcccgggcccccgggggtggtgccgcagtcggccggccgggacatgtgtgtacaacagcccaggggacaatagccatcctgcccgctcctccccagcct

SEQ ID NO: 189396 - DNA, 122 bp, Homo sapiens
cgcgcacgcacgcacgtggctcggcccgcgcgcatcctccccttgcaggggcggggccagcgcagggactccatttcccagcgtgccccgcggcaacgccaggagcctccgaggagaaagga

SEQ ID NO: 189397 - DNA, 122 bp, Homo sapiens
aggtaatagtgctgttcataaatctccttgtagcagccattcccaatctccagagatatccggagatggcctatttgactaaatgccttccacttcactccccgtctgttgcagaggagctg

SEQ ID NO: 189398 - DNA, 122 bp, Homo sapiens
gcgccgacaatggcggctgcgtcggcctgagcagggcttagtttagaagtaatttcctgacgttgccgagggagccgcagtcgcctcagatccggtcggcggcggcggcggtggcggcggcg

SEQ ID NO: 189399 - DNA, 122 bp, Homo sapiens
ttgtcattcccagagtcacaatatttcaaggcagaatttgaatccaggtctcactgatttcgaaccccaggttgattattaagtgacagcatctcctgtagtccaggaggcccaaagaatgt

SEQ ID NO: 189400 - DNA, 122 bp, Homo sapiens
atttatatgccacctaacatcaaaacctagagcccttctgagagatcatattcccttgtacgatacttggtcagtgagtcactaacctccatcacacaggccaggctggctcttgcagtccc

SEQ ID NO: 189401 - DNA, 122 bp, Homo sapiens
aatcagcatgccatttttttgctttattccagtattgtaattacttgtttccaggagtcccggatctaaaacatgcccatgaccgcaaaatgcaactttaaattacaataattcatagagca

SEQ ID NO: 189402 - DNA, 122 bp, Homo sapiens
gcggttcgaggaccaggacagcagcaagccgaaggatgtacagaaggccagcacccacagcgcccgccgctggaaggagcccccagccgccgtgcgcccggcacacatgtgccgcagcccgt

SEQ ID NO: 189403 - DNA, 122 bp, Homo sapiens
ccagctcgcagcccagggggctgggggggcacatggagagggctttctcgtcgcagggctcgcagtgcacgaaggagcccaggctctgggccggccccgcataggcggccagcagcaggagg

SEQ ID NO: 189404 - DNA, 122 bp, Homo sapiens
ttgcttcgttttctaaaaaaggacggaaacacaccctttccttaggcgtcctgcgtcccccgattcctgctccctggttgccgcgtccttggctggcgtcagaaaaatggctacaaactttc

SEQ ID NO: 189405 - DNA, 122 bp, Homo sapiens
atttcaataaggctctttttaaaactaaataaaattgaaaatttacttcctcactcacaccggcaacacttccaagggctccagaaccacatatggttaggggctgccacaatggacagtac

SEQ ID NO: 189406 - DNA, 122 bp, Homo sapiens
gcttctttactctggaagcataggaagcttgtgttgacgtcacggtggtgggttgccctccgatatccctcccctccacctctcttagtaacctctcaatttgttttgggcagcaatgcaca

SEQ ID NO: 189407 - DNA, 122 bp, Homo sapiens
ccagaggtaagagccggatcctgcttggcacggggcagcattgtcacagaccgggagcctcggtggcactgagcctgagaatgacccgatttggacacttttatttgatgtagatacttgtt

SEQ ID NO: 189408 - DNA, 122 bp, Homo sapiens
gcccatggctgagcatgaccagcacggagctgcccgcaccctccttctcctcctcgaggccggtgcagcgttctgcaggttgccctgcagttcccacagaggaagtggcaggaagtccagag

SEQ ID NO: 189409 - DNA, 122 bp, Homo sapiens
gccacagacggcacgtcagtggaaacgggggtgcagcaggcatgacaccaaggcagagcccgcagcagggggcccggggttccacagctagggaagcttgctcagacaggcagcacacccag

SEQ ID NO: 189410 - DNA, 122 bp, Homo sapiens
catgttacctctgagttgtagtgaggatcaatgagggtatgaatttcatcgtgcagtccacgtgagaggcttaactgggtgcctggaacttaattgctcaataaactattaatattagtagg

SEQ ID NO: 189411 - DNA, 122 bp, Homo sapiens
gctttgcagctcggtggccgcagcggtgtcccgggccccctctccgccgctcttgccgggcgtgtgaaggtttaatcccgacagcttcagataaagggagcagttgtaaaacgctcataggc

SEQ ID NO: 189412 - DNA, 122 bp, Homo sapiens
cctcccagatggggactcacagaaagaccggattctctacctgtttatctctcatccccacgctctcctctgccatcagcagacttccagctgtctggttgtccctagtgctagaacagtgt

SEQ ID NO: 189413 - DNA, 122 bp, Homo sapiens
tatgcttgtagacatgatttatcatctttcattttaatgaagcatatacactttaaaatacgatctttgggatcatgtgtattcttttcagaatacaagcttgtggagaaaccagctgggcc

SEQ ID NO: 189414 - DNA, 122 bp, Homo sapiens
ggccggggtggccaggcccccaggtttagaatccggaggccggggtggccaggccccccacgtttagaatccggaggccggggtggccaggccccccaggtttagaatccggaggccggggt

SEQ ID NO: 189415 - DNA, 122 bp, Homo sapiens
ggcccgtgccacccctcccttcacaatccacgcagagaatgaccggctgccgctggccatcgccagcgtccgccaccctcccagatggcccccctgccacctctactgggaccaagggaggg

SEQ ID NO: 189416 - DNA, 122 bp, Homo sapiens
acaggggctggaatgagaccgctcctctgagcggccgcccaccgcaccagtgcgcatgggcgcacccggccaccgggccgcccaccccgccccacgggagaccacgcctccggctcgcaacg

SEQ ID NO: 189417 - DNA, 122 bp, Homo sapiens
cacacagtggataatgcatgctcattgtgacttatctggagctggtttcttttacatcctcgggctatataaagtcaaactaggactggggcagcagatttggggagcatccagcagccagc

SEQ ID NO: 189418 - DNA, 122 bp, Homo sapiens
gtgggccctcatggggcagccggaggagcggactgccccgccggcaggtaggtcatgttccgagagcctccgcggcttccaacttgcacagctccatcaggccgtcccccgcggtggccagt

SEQ ID NO: 189419 - DNA, 122 bp, Homo sapiens
aaaaaaaaaaaaagaaaacaagaagtggccaggagggctctgtgcacatggccccggcctcggctgtcccctgggcactcgtgctacgtgtcccggaactcaggtgaggtcaggagtttgct

SEQ ID NO: 189420 - DNA, 122 bp, Homo sapiens
aagatttcctggggtcaggggcgccaaggggcttcggggccggatgcagcggagggggcccggggcctggggggcgtggtgagagctcagaggggtctcgccaagcagccggctggcgctga

SEQ ID NO: 189421 - DNA, 122 bp, Homo sapiens
tggatccaggtgagggccgagcccaggtccctgccaagtcctcggcaccctacctgggaccggcatgcagcaggcactcactaaatgtttgctgagcaacagaatgaatcttccctctctgg

SEQ ID NO: 189422 - DNA, 122 bp, Homo sapiens
ctgtccattcgggccctgttttccttgttaaatatgatcccatcgtatattatatgttatcgagttaaatgtgctacccacagcatgcagagctccagccagcagccctcagagctgcagga

SEQ ID NO: 189423 - DNA, 122 bp, Homo sapiens
gtagcctaaatgacagccgaagaggcgccgaagacatgcagatgtgccaagcggcagtcacgttgctgccgcgttgtccgaccccgcttacctcctgatgtggaaatccctgtgggtaggag

SEQ ID NO: 189424 - DNA, 122 bp, Homo sapiens
cctcatgtccctcaagaaccaccggcgcatccatgcagatccccgacgtttccgctgcagcgagtgtgggaaggccttccgcctgcggaaacagctggccagccaccagcgggtccacatgg

SEQ ID NO: 189425 - DNA, 122 bp, Homo sapiens
cagagtcgtttgagtcccctcccctcgtgccctcctctctgttttaatgacttctgcctgcgccctggcttggcgggggtctgcgcgtgcctcacttctgattaaagagactgagcagggat

SEQ ID NO: 189426 - DNA, 122 bp, Homo sapiens
caggcactcgggctggcactggctgctagggatgtcgtcctggataaggtggcatggacccgccatggcgcggctctggggcttctgctggctggttgtgggcttctggagggccgctttcg

SEQ ID NO: 189427 - DNA, 122 bp, Homo sapiens
ttccggatggaggcctcacggggtgggaccacggggcagggctcacgtccatctgcctttcgaaagaaggcctctgacttggcatacaggggcaggttgcagtagtcacctggaatcacaga

SEQ ID NO: 189428 - DNA, 122 bp, Homo sapiens
atgcaaacctctggtcctcaggcccctccggagatgagtattaattacccgaaggcaggccgggccaagctcattcattcccagccggtttcaagacccgggggaagcaggatcccgctgag

SEQ ID NO: 189429 - DNA, 122 bp, Homo sapiens
ggaacagggataaataaataattacaaaacacccttcccccaccatggcactcatgcatgcgtgtgcctgtcttggtggtgcatgtatgttgcagtactatacatctgacccatgccaccaa

SEQ ID NO: 189430 - DNA, 122 bp, Homo sapiens
cttctcgacctttgccccggctaagggctgccctgaaccaggaaaaggggcacagggtcgcgagaccccactgagaagtcctctgtccacatagccaggggaacatgttccccaagacctgt

SEQ ID NO: 189431 - DNA, 122 bp, Homo sapiens
ggacccaggggcagggaaagcccagctcgtggtctgtgggtagccggacccccgatggggcggtggggggcctcgccttgactcccagagctggggccggggacaggagctggggcaggagg

SEQ ID NO: 189432 - DNA, 122 bp, Homo sapiens
tctcccctgtatgtgtgtggcaggcttgagcttgccaggtcccagcagtgaccaacccagcgaccccatgggcctggagtgatgagagagtgaatgagtggatgggagagtggatgggagag

SEQ ID NO: 189433 - DNA, 122 bp, Homo sapiens
accttccaaaggagacccttaactgaattaccaaagggggcttcccagagcagggaaacccggttaactttctatttcaggtcaacagtatacttgagatgtacttgaactagaaatgattg

SEQ ID NO: 189434 - DNA, 122 bp, Homo sapiens
ccaccactcatttattacaaattacttccagggagattagctcttggcacttccagcttgcgctttgacaaaccaagcaaactttgatggccagagacagctctcaggcggagggacacagg

SEQ ID NO: 189435 - DNA, 122 bp, Homo sapiens
aagatggaaaggtcagggaggagaatgagggaggggtctgccgcggggagccgcaaactccgtggggcacagaatagtgcaaccgtctcccattgaggaaattctccccaccgggcggcttg

SEQ ID NO: 189436 - DNA, 122 bp, Homo sapiens
cgcggccgcactcggtcacctgtggtcctggagcagccgcgcccggcgggcggcacttaacgaaggacaaactccaaaacccaggcctccaaaggacccatgggaagatccgggggctcagg

SEQ ID NO: 189437 - DNA, 122 bp, Homo sapiens
cagcacggcgccgccgaggcgcccgggttatgctggttgtacagggccaggacctgcgggcggcgggcggggtcagggctcagggctcgtggagggaggaaaacggccctccactgccccat

SEQ ID NO: 189438 - DNA, 122 bp, Homo sapiens
tggggggctcatttttccggccaatcacttttagagaaatgagcgcattgcagcagaatgcgctgacgtcagagaccaccccttctgcgcctccatataaaccccacccagccagcccctag

SEQ ID NO: 189439 - DNA, 122 bp, Homo sapiens
gagacccctctgggtccagctcaattagcttctccacaaagagcagcttccggcgatgagcgcaggatcctcctggctgatgaactaaacacgggagcattgtcaatgttttcaatctctga

SEQ ID NO: 189440 - DNA, 122 bp, Homo sapiens
aaatgcagatgctgaagttggacaaggagaatgccatcgaccgcgcggagcaggcggaggcggataagaaagccgctgaggacaagtgcaagcaggtgaggtgccctccgctgggccgctcc

SEQ ID NO: 189441 - DNA, 122 bp, Homo sapiens
cttcagctatggcctctgctttctcatttatgaactaggatgttgcatctagtagtatatcgtggagttgtgtgatgctaagtcattcatcatgaagtatttgtaaagcagtaaaataaaac

SEQ ID NO: 189442 - DNA, 122 bp, Homo sapiens
ggatgactacatgtttccagtgagctcagctggttgcttttgtgggtccctgaggcactgcgagcccctgatggggcaggaagcctaaagttccagggaccgtggggagttgaggggctgga

SEQ ID NO: 189443 - DNA, 122 bp, Homo sapiens
gagggggcagtggctatggtgtcccagagagtgagaggatatatgatgcctcattatgagcgacagggtaaagaggtaaaatggagggtccatcactgcctaagaccacctcctcctctcag

SEQ ID NO: 189444 - DNA, 122 bp, Homo sapiens
tcctataaagtaactcactgcatatgcaggcattcatctgagcccgtcttgtcacacctacggaacttggaggaacaggagaagtcccaaagtataaaaatatatgtaaaccaggtcaggtg

SEQ ID NO: 189445 - DNA, 122 bp, Homo sapiens
cttcagcatctccgagggccacctctctggcctgggccggggccgaagcggggtcggctgcgcaagaggcggcaactttggcttatactgactcagcccagcgccccctttttatcccacat

SEQ ID NO: 189446 - DNA, 122 bp, Homo sapiens
gcttgcaatgacatgactccagagcaaatggctacaaatgtgaactgttccagccctgagcgacacacaagaagttatgattacatggaaggaggggatataagagtgagaagactcttctg

SEQ ID NO: 189447 - DNA, 122 bp, Homo sapiens
tcatagccatagccccagagtgcaatcgtgtctgctgcagggctggccgattgcatcccacgtaggctgtgcagccccacctgtctgcccctcattttgtatcaccaaatctataaatgtgg

SEQ ID NO: 189448 - DNA, 122 bp, Homo sapiens
cagtgtgaggagctgctatggtgctgagtttcctggtagagccggccgagctgaggcggtcgcggccatgaaggtgaggggccggtggagccggacagaccctcctcgccaatcctatcctg

SEQ ID NO: 189449 - DNA, 122 bp, Homo sapiens
attcagtgaggcgcctttcactccccctccgcgtaagcacccaaatctcgcgagacagagcgggtctctagggcaaagacagttggtaggctgcctgtcaatctttcagagagctcttcgct

SEQ ID NO: 189450 - DNA, 122 bp, Homo sapiens
tcagaggagagctcctgatggaaagtgctggggatgcctcgcaggctggcctcacggggccgcagcagggagatcatgagggagaagctctctgtcgtagtggggagttctctggttagtct

SEQ ID NO: 189451 - DNA, 122 bp, Homo sapiens
ccctcgagccgagctcaactggaaactccacctaagtaagcgtcgtgggccctggagccccgcggctcagggcaggccggggcggggcggacgcagcgcggtttgcccgcctgtgcggaagc

SEQ ID NO: 189452 - DNA, 122 bp, Homo sapiens
tgatgccctgctagtttgtttgttttttttttttttgtatttttagtaaagatggggtttcgccatgttggccaagctggtcatggactcctgacctcaggtggtctgcccacgtcagcctc

SEQ ID NO: 189453 - DNA, 122 bp, Homo sapiens
acccacacccgagaaaccccaggccatcacctcttctcccccgagacattcccattcacgcgcatggctgatcacgtgcacccgggtgctctcgggtgagccaagtcagctgccgaatggtt

SEQ ID NO: 189454 - DNA, 122 bp, Homo sapiens
cagtttatttgtctgtgaaatgggatcattggtaagagaaccccagactccctttcctagcgattgtaaagatctattgagaattttgtcagggataaggtctaaggcatttgtgaggggtg

SEQ ID NO: 189455 - DNA, 122 bp, Homo sapiens
cgggtcccaggcattgggagttcagcaccttcgtgatgtgtctggaccctggaacccatccggtctgggttcaaatctaaatccagcacggactcactgaactaacgatggctgtcacgcac

SEQ ID NO: 189456 - DNA, 122 bp, Homo sapiens
gattattggaaaggaactgttgtgtaaatgtccagcaattctgataagatcccaatgcagcgtgcagaaaatactggttcttggagtgtaatatttacctagtactagaattatctgcattt

SEQ ID NO: 189457 - DNA, 122 bp, Homo sapiens
tcattggccaatcattgtacgaagctcccacaccagctttctcggttggaccacgactcacggacatggccccagctaattggtagcccctgggttcaaccggaatcagcgcgtgagtccaa

SEQ ID NO: 189458 - DNA, 122 bp, Homo sapiens
ctctgcgtgccctcagggaacagcaaggtccgagccggtgtcgtcgagggggcgacgggacggagggaggagcctgaggggtcccggtcgagggaggggaggagtgggcggggcgggggtgg

SEQ ID NO: 189459 - DNA, 122 bp, Homo sapiens
cactgtgacgccagcgcgggaggagggccgcgggaggggcagcggaacgcgcagagggcacggtgcaagcacgggacagctctgcattggccaaagggatcccaggaggcctggccctcttt

SEQ ID NO: 189460 - DNA, 122 bp, Homo sapiens
agggagaaggccccgcccaccccggtgagagagcacgtagcggggagagaaggccccaaccgccccggtgagaggccacgtagcggacagcaaggacaatatccccttgtccccagcccaaa

SEQ ID NO: 189461 - DNA, 122 bp, Homo sapiens
cgtctgggaaggagagagcagaagcccccaggagtgacatggggagaatgatcatcccgccggacaaaaccttcactaaaatatcctcaaatgggccgggtgtggcagctcacacctgtaat

SEQ ID NO: 189462 - DNA, 122 bp, Homo sapiens
tcggccacgaccactggatcttcgcccagggctggggctgggccggccactgggactccacgtccccggcctcctcctccgattcgtcgggttcgtgcccctgcgacggcgcccgcggactc

SEQ ID NO: 189463 - DNA, 122 bp, Homo sapiens
tgcttcgccgtcccagccccgcagccttttgtgtctttccacttctcccctggcccgctgcgctctcgctctagagaaggcagagactgccttgggtgtggcagccaggagtggacggttgc

SEQ ID NO: 189464 - DNA, 122 bp, Homo sapiens
ctcctcctgggcgaattcaatcggagctgcagaagagacaagcatttccaaactggcacccgctccgagcccaaggtgagggtggagaagggtccctggtggaagctgcaggaacactttgg

SEQ ID NO: 189465 - DNA, 122 bp, Homo sapiens
atgggtgtcagcgtggccgggtggccctacctcgctggagtcctcctgctggttgatgaccgtcagggcgtcctcggaggcctgccgcttcgcctcggccagggcccgctccatcttggcac

SEQ ID NO: 189466 - DNA, 122 bp, Homo sapiens
tcctgccgcctgagtgcaccgcctcccgcccggctgttgtcacttgcacccacagacctgcggctcacagtgggcctgtcgacagccggaggcaccgtaaaaaactgcagggaggaggcagt

SEQ ID NO: 189467 - DNA, 122 bp, Homo sapiens
tccttgaggtccaggtagtacttgcggttctcacgcaccaagaattcgctcttgagcgcgcgccgcggcccgccgccctcctcggcgccagccgccagctgctcggggctgctagggcccag

SEQ ID NO: 189468 - DNA, 122 bp, Homo sapiens
aaaaaaagaaaaaaaatcaatcaatcaatcaatcaatctcagggattgggctaatgagcccgggcatgcgcattaagagacaaaatggcagagtccggggcgcggtggctcacgcctgtaat

SEQ ID NO: 189469 - DNA, 122 bp, Homo sapiens
atgttccacaaaggctcaatccagatttactatctttacctcaagcaactgtgtacatagcgtcatcaaagttgagatttaaaaatttttttttttcttctggagacaagatcttattctgt

SEQ ID NO: 189470 - DNA, 122 bp, Homo sapiens
agcagtaccagcccaccggcgctgtgctagatttctcgccgggccttagctgccttccctcggggcaggcctggggactgcagcccgccatgcctgagccttcccccacctccgtgggttcc

SEQ ID NO: 189471 - DNA, 122 bp, Homo sapiens
tcagggacaaagaattggtccgttaatgttcctcaaattcgaacgcgcctaggaatagttcggggatcctgttgaagtgcagatcaggattccgtaggtaggggtggggttccaaattctac

SEQ ID NO: 189472 - DNA, 122 bp, Homo sapiens
gggcccgggggtggggtctgcattccctggctgggcagggggacctcggacgtgggggtccgcgccccggggcaggggtcggcgtcctcgggccggagccgggtctaggggcggaggtctgc

SEQ ID NO: 189473 - DNA, 122 bp, Homo sapiens
tctcgcctgtgtgcgtgcgctggtgctgggtcagctccgagctctggatgaagctcttcccgcactcggtgcagcggtatggcttctcgcccgcgtggatcttctggtgcttgaggaggttg

SEQ ID NO: 189474 - DNA, 122 bp, Homo sapiens
aggagaggcggagaaggaaccgagcgggcagttgagggaaatctcggaggaggttacctgcgatcaaactggggctgcgtagtgttagggtcaggcagctttgaagtggaatccggatccgc

SEQ ID NO: 189475 - DNA, 122 bp, Homo sapiens
tgccacagccaacagcaagaagcacagggctggccgctcagatgggccatccaccaacatcgggatgcctggactaggaaagggctcagatggagactccacgggactgcaaaggagagtgg

SEQ ID NO: 189476 - DNA, 122 bp, Homo sapiens
gggagccctggcgttccctgggcccccgggaccgagagcttacccgcgtgggactgaactcgcccacgacccccgacaccaggcaagagaggttgtgccgcagaccctccactccccagcac

SEQ ID NO: 189477 - DNA, 122 bp, Homo sapiens
cacgcacatgtgctcacacgcgcacatgtgaacacacgtgaatgcacgagcatgtgaacacgtgcacatgtgaacacacgtgaaggcacgaacatgtgaacgcacgagcatgtgaacacaca

SEQ ID NO: 189478 - DNA, 122 bp, Homo sapiens
agtctgatgggaagggttcaatgcagggtttgcactttcccagccattagccagctgcaacgcatttcattaacttaggagtgttttgtacatcaaagagagccccaaacagtgtgatcaag

SEQ ID NO: 189479 - DNA, 122 bp, Homo sapiens
cagccaagtatgcggtggaatatccagaaacaacacggggcttgtcgggtgcagacggggcgcctcaccggcccggcgcagccccgctcgcccctctggcctcccccgcagttcccctttcc

SEQ ID NO: 189480 - DNA, 122 bp, Homo sapiens
accatcactagaagcagcaacaaaaatacccaaacccacccaagccagaacagagccactcgatctgggtttcctgttaaatgttcttaagcgaggagcaaattatcatataatcccagtaa

SEQ ID NO: 189481 - DNA, 122 bp, Homo sapiens
atagaggaaggccactgtctcctgcctgcccctgggaacggaatgtctcggtataaaacccgattgtacatttattctattctgagataggagaaaaaccaccctgtggtgggagacgagac

SEQ ID NO: 189482 - DNA, 122 bp, Homo sapiens
ccccatcgcttatgcctattggcttactttgtcaaaccgggcttatgaaccaataaaaaacgcctactgtgtcaggaactagccaataagaactggttctatagtaatgacgaatttttgat

SEQ ID NO: 189483 - DNA, 122 bp, Homo sapiens
ggcagccgggcgcaccctcgccagccctgctggagtttgctgtgggcactgaggcgcgggcgcccttccaaagcacatactcaccgaatgtttacagactggctgtcctggcagggctttca

SEQ ID NO: 189484 - DNA, 122 bp, Homo sapiens
gcagcttccttctctcccagtgtggctctggaccctggaccctggctcctgcttccaccacggagtccaaacagccttacctggggccggacactcaccaactgacgccattttggagtcct

SEQ ID NO: 189485 - DNA, 122 bp, Homo sapiens
tgtatttatgaatgcgcgtagtagctgtttatggtcttaagatgcaggggaatgccaccccgggtcgctcggaccaaggtgctgcccctccaagccgcccagccccactggccgcggcggct

SEQ ID NO: 189486 - DNA, 122 bp, Homo sapiens
gctggcgcagggccgtccttccagagagcgcggggtgggaagggctgggctccttccgcgcggctccacctgcagaaaccgatggagctgatccatcgtggtttgcacagaggagcctgacg

SEQ ID NO: 189487 - DNA, 122 bp, Homo sapiens
aaagactgccccgaaacattcatcggaactgggcgctcgaaggggatcagttctagggcccgcgactagagcgtccctgtcttacaggtgcggggacctgtaccttacaggcgcggaggtca

SEQ ID NO: 189488 - DNA, 122 bp, Homo sapiens
ggtccgggagcgccctgcgccgtctttgtccttcgggagcatgtttcgttcccgggaggtcggaaccctgagctttcctctgaggcgcctccctggtgagccttcccgggattccggtccgg

SEQ ID NO: 189489 - DNA, 122 bp, Homo sapiens
tgctgcggctccataaatattaaatgggcattaaaagaagccgttgcgtttccagtttcccggatttctctgagcagggcccgttgcgaaccccctttatgtgaaatgcagcatttcagcgc

SEQ ID NO: 189490 - DNA, 122 bp, Homo sapiens
gctaggaggaagataccaaacattcccaaagaaatgatgcacgctcccgatctaatatcccgatctgctaactacatgttatatgtattgaaacatataccctatgagttgcacaattatgt

SEQ ID NO: 189491 - DNA, 122 bp, Homo sapiens
gctgtttgatggtgggtaataaaggcagccgtggtgaccgctctcctgagcagccgccaccgccaccatgctccccgttctgctgacggagggaaacgctgctgcctgtctgaggttcccat

SEQ ID NO: 189492 - DNA, 122 bp, Homo sapiens
tgccttcgatccgtcagattcccaagatggccgtcgggaaagcacatccgggaaccctgccgtggttgtccagggctgacgcagcgtcaatgtggggcggggcctcctctctgaggaggaac

SEQ ID NO: 189493 - DNA, 122 bp, Homo sapiens
gactacagcccttggcggtctctccacacgcctccgtcccaccgagcggcccggcggccacgaaagccccggccagcccagcagcccgctactcaccaagtgacgatcacagcgatccacaa

SEQ ID NO: 189494 - DNA, 122 bp, Homo sapiens
cgggggcagtgaaatcaggtgagtgctctgccgcatccggagctgggaaggggacggggacgtattctaagaagggcacccaataataataatgcatcccgaacaaacataaggcagatata

SEQ ID NO: 189495 - DNA, 122 bp, Homo sapiens
cggccggctttgctggggccacagggacctcgtcagggaggcgtctccttgtgggtggcacgtgggcatgtgttgctctgagggctgtggccatgttgcccacctggccagggacccccgac

SEQ ID NO: 189496 - DNA, 122 bp, Homo sapiens
ctgcgggctacccgctacacacgcactctaacccgccacgcatgcactgtcttactcctgcggggtacccactacacacgcactctaacccgccacgcatgcactgtcttagtcctgcgggc

SEQ ID NO: 189497 - DNA, 122 bp, Homo sapiens
tacatatttaagatacacaacatgacattatcagatacatatatagtaaaatgattactacgatgaaaccaattaacatattcatcatgccatctagctactcacccaccccacatcccccc

SEQ ID NO: 189498 - DNA, 122 bp, Homo sapiens
gctgcacaactgtgccaggacagccttacctttgccgggggcttcgtgccctcccagctgcgtgtgtccatggacggggggacctggtagatgtcatgccccatcccggcagaaggtggcac

SEQ ID NO: 189499 - DNA, 122 bp, Homo sapiens
cttcgaacccactgaaaaagcacagggcatggggagtcctgttggttcatgcccagggtacgaataccaaaagcgcctcccgctggagaggctgcggggaactcgaggcaaagacagaggca

SEQ ID NO: 189500 - DNA, 122 bp, Homo sapiens
ctcctcagcccgggagccaagtgcgagcgctgccaagtgtgcaatcctgggtccctgggccggggcatggacattgctcaccaggcagccttcccatgacccctggcatccagggtccccag

SEQ ID NO: 189501 - DNA, 122 bp, Homo sapiens
tgagccaactgaattaccaagtaatgggggccccatggcatcccatgacaggtggagagccggctcttcaccctggatggacctgaaatgcctgctaaggccttgctccaccgagtagcaca

SEQ ID NO: 189502 - DNA, 122 bp, Homo sapiens
ccgacccaccctctgcaaaaacaaattcttaaatccagctgcccaacttgcttccttgggcgataaagggggggctgctaaagaagtggtcaaattcctgcggccagcgaggggccgggggc

SEQ ID NO: 189503 - DNA, 122 bp, Homo sapiens
cttggctcatccaatcagagcggcggatccaggcgcctgtctgtcgccttggcaacgggacgcataagcacgcgaggcgcgcggtggcggtttggatctggcccctggggaatcgcgttatg

SEQ ID NO: 189504 - DNA, 122 bp, Homo sapiens
aggctgctaaagaggggctccctgcgagaatgcgttcaccagctgtgaggacctggctggcgcacgaacttccaaagacctcacatctggttggtgtaggggcgaccagtggtaagggggct

SEQ ID NO: 189505 - DNA, 122 bp, Homo sapiens
aggcacacaagcatgcacgctcgtggcagtaatgacgtgtgggtgtacccaggcttcactcgacatgccaatgatgcaaacttgagctaaacgggaaattaaagagggaccagggctgggcc

SEQ ID NO: 189506 - DNA, 122 bp, Homo sapiens
gagccaatcctcaccctacatctcctcttgggtctctctctatccgccggctcctttcctcgggagagccctgacgcacacactagctgagtttgcttttcaacaggcctttccgtctgggg

SEQ ID NO: 189507 - DNA, 122 bp, Homo sapiens
ccttcatggggcgggacgcctggaatctcgaggggcgggggcctggcgcaggctcccgcccggggttcccgagctgctccactctgcgcgaagccgccacgctattgtcctgaccaggaagg

SEQ ID NO: 189508 - DNA, 122 bp, Homo sapiens
ggcaacaggtaccaagggaccataattagtacaaggtaaaatataagtgtgggagtgtcacgtagtggttagcacttgttctcagaagtcagatttggtttacagtcccaattatgcgactt

SEQ ID NO: 189509 - DNA, 122 bp, Homo sapiens
cagaggctgaggcaggagaatcacttaacctgggaggcggacgttgcagtgagctgacatcgtatcgctgcactccagtgtgggagtcagagtgagactccgtctttaaaaaaaaaaaagaa

SEQ ID NO: 189510 - DNA, 122 bp, Homo sapiens
tgcagcgcagctcacgtttcaggcgcagttcgcagggaggctggggagatgctccctggccgggctagcgctttcccagttcacagcctggtcttccgccccgggagggcaatggctccgaa

SEQ ID NO: 189511 - DNA, 122 bp, Homo sapiens
gggccaaacaccgctcagcctggtacccctaagacctcactcaaaaagtcagggagttttcggccacttcagaaagactttgttgttacccctccgtcttaacccaggtgagttaagtgaca

SEQ ID NO: 189512 - DNA, 122 bp, Homo sapiens
tcatatggacaagatgaaattaatgcttatcaccatctgaagaccaaatgaatttatgaacgaagagatatttcaagtatttcaatacaagaaaatggggggccaatttgaggttccacctg

SEQ ID NO: 189513 - DNA, 122 bp, Homo sapiens
cccatgcctcgctaagtgggcaggagcagggcccacgggacccagaaccaggctggactccgtcacagtgctgggtgttttcagtgtggaggggctgctctcagtactgaaagagttaagaa

SEQ ID NO: 189514 - DNA, 122 bp, Homo sapiens
attcccacagaggggtatctgcagggcaaaactggtttccagcagagcggtcaggcaacccgtcacccaggagaccgtagccatccgtgcacagacgcacctgttcatgatgatggagtatc

SEQ ID NO: 189515 - DNA, 122 bp, Homo sapiens
attcgtccttttgtgactggttagttcactttgtataattctctcagggttcatccatgtcgtagcatgtgccagaattgtcttccttttaaaggttgaataatattccatttcattgatta

SEQ ID NO: 189516 - DNA, 122 bp, Homo sapiens
ctgatgacgcgagacgctgctgccgagtcaccgctgcgatgagtctgagcgagaaagatccggcctaccccgtagcggacggacattggttccgcttggtgagggggtaggggggtgggggg

SEQ ID NO: 189517 - DNA, 122 bp, Homo sapiens
aaaaaaagaaagaaagaaagaaaaagaaaaagaaacaaatctcttgctgggcaagaaacacgctccagtcaggaacctgcttctaaactttcaatttacacaggaatgattaatgactcaat

SEQ ID NO: 189518 - DNA, 122 bp, Homo sapiens
cccacaataagagatgactgctgcttgctctgctggtcactgcagttgtcaggaatgtttcgcctcagaggcaaacggcttagggccgtctcaacttggagacagaaaaacccacctcctac

SEQ ID NO: 189519 - DNA, 122 bp, Homo sapiens
tcacgcctagaacactgaaatttaggtataatcatgagctcagaggtcaggcgacttgctcgaggtcataggggacggcatcagaagaggaacacagacatttagcctgacggcagaactgt

SEQ ID NO: 189520 - DNA, 122 bp, Homo sapiens
gccggaagcacaagccacccaaggtgcaggagaaatgccagctggagatcaacttcaacacgctgcagaccaagctgcggatcagcaaccgtcctgccttcatgccctccgagggcaagatg

SEQ ID NO: 189521 - DNA, 122 bp, Homo sapiens
aggtgaatggacccgcaggtagcgctagaacaaagcggctagacgcaggcggcgcgcttgcgtaggacctgcagtgctttccctacggagccagggtggcagcttgaggctggaccctgccg

SEQ ID NO: 189522 - DNA, 122 bp, Homo sapiens
gggggaaccgcgatcggcctcacgcccacctctagcggccaggtgcgccttgcacgcccacgaacgtcctcagaggtctacgcttgggatcccaaggctggcagtggagggaggacccggtg

SEQ ID NO: 189523 - DNA, 122 bp, Homo sapiens
gtgcggctgcgcctgacagtgcaaggcaggggcacggtggtggggcacggagggcagtcccgggtgggcttcttccagcccccgcgggaacgggggtacacggtgggctgagtacagtcatt

SEQ ID NO: 189524 - DNA, 122 bp, Homo sapiens
tattccgatccatccaccggtaacacgctgatacttcgaaatactgcaggcaggagtggacgggggagaagccccccccctccccgggcttctttcgtgttcgggcctctgctgccgcgatc

SEQ ID NO: 189525 - DNA, 122 bp, Homo sapiens
ctcactctgccctgcgtccaaggccaccatcagagctgtgctcccatcctgcaaagtatccggtgctatgaatgacgtccccatgctgtgctcccgccctccccggggtgcacctggttgga

SEQ ID NO: 189526 - DNA, 122 bp, Homo sapiens
cacagtccacattccctaccaagcgctcagcgatataggattcgttccccatgggcagtgcgggaatcgtaggcaaggagcaccgcggagtcccatcgcttttccctgaagggtgagattct

SEQ ID NO: 189527 - DNA, 122 bp, Homo sapiens
gtcgtccggggagaactaaaactacatttcccagcatcccgcgcgccgcagacccacttccggagacctcacacaagatggcggcacccgaggaacacgattctccgaccgaagcgtcccag

SEQ ID NO: 189528 - DNA, 122 bp, Homo sapiens
ccctcacgaccctttagcgcatcctaaaagacctctgaatatctctgcctctcccgctaacggctccaaaccgcagataacggtcaatcgcctccggttgtcctggtaacagccagcaacca

SEQ ID NO: 189529 - DNA, 122 bp, Homo sapiens
taacattattcaggcttaaaacagtttccaatccagtgggaaaagtcactccatatattccgtgaagtcaaccagttccatcaaggagaaagtcagggccgctgggagcgcgtggaccgtgg

SEQ ID NO: 189530 - DNA, 122 bp, Homo sapiens
catggtgactcatgcctgtaatcccagcactttgggaggcagaggcaagctgacttgagccgaggagttcgagaccagcctaggcaacctgccaaacctgccaaaaccagcctaggcaacct

SEQ ID NO: 189531 - DNA, 122 bp, Homo sapiens
cgagaagagtgccccgcggagtggctgtgatgagcgggatgcggaaggtgtccactgagccgatctgtctcccgctcacccacagcagttgctccatggtcaccagcggctgcacctgtcat

SEQ ID NO: 189532 - DNA, 122 bp, Homo sapiens
tgctagctgcacaccttgccgaagggcatgagatagtgttccacgtaggggccactaacgcgctctggcttgtcgctgtcgtcagcgatgaccacggtaaccgttgggtagaagcggcggat

SEQ ID NO: 189533 - DNA, 122 bp, Homo sapiens
ctaaacctcaccctctctcggtgcatttagtatctcagttacttacttacttactgaatgcgggagttcacaatctaaacaaacataaccagaagattgcaggattttatttaaattattga

SEQ ID NO: 189534 - DNA, 122 bp, Homo sapiens
taagctttctggggaacctgcctcagaaatgctgtcctttctcctcaggcctgtgtccctcgagttctccatccagccaaggagatacataggcacttacctatttatctgatacaaaaacc

SEQ ID NO: 189535 - DNA, 122 bp, Homo sapiens
agatgcctggagttgaggaatctctaagacaccagccacaccccgcaagggtctgcaagacggtcaaccacggcagtggactgaggaatgtcccccgagaatcacgttcactcgagacctca

SEQ ID NO: 189536 - DNA, 122 bp, Homo sapiens
ctgcgggagggagcaggctgggcgcgtggtggggggcgcgcgatgcggagggggcggcggcgcagccaatccgagaggcggccggcgccccctcataccgccccgcggcctcgccgcctcct

SEQ ID NO: 189537 - DNA, 122 bp, Homo sapiens
ctaactggaacccctctgaaggaccactcatgtcttgtgtgtgagtaacagccatggaaacgtggttgaagaactgaactttaggacctggactacccagagcaacagctactgcattcaag

SEQ ID NO: 189538 - DNA, 122 bp, Homo sapiens
cagccgcggcggctctgggccggaggagggctgtttcctgcctccctcccgccccactggcgtctaatcagattacccagcatcctcgggaagctagcctgccctcagccgttgggaaaaca

SEQ ID NO: 189539 - DNA, 122 bp, Homo sapiens
gccctggcttcccactcccaaactggttacctggtcacatcccttcgcctcactgggcctcgctctgtcctcctatgaaacgggaataatgatccccaacacacagagataccagctgtcac

SEQ ID NO: 189540 - DNA, 122 bp, Homo sapiens
tagcaagaaaatgagatgttttccatcagagacagtgcacacaggcggtttctgctattccggagagcattcaaacaggtaaggccaagagctgagagcttgcccatccagcagaatagact

SEQ ID NO: 189541 - DNA, 122 bp, Homo sapiens
agaattggacctagcagtgctgacagttattttttttgcccttagggtttgctgacatcccgacaggaaagactagcccatatatcctgcgaagaacaaccatggcaactcggaccagcccc

SEQ ID NO: 189542 - DNA, 122 bp, Homo sapiens
cctccccgtggaagagcaggttttcgtccacgagcctgagcagcacaagccgcaccagctcgcccatgtacttgccacctatgagcttctcatacctggacatagggcaggtccattacatc

SEQ ID NO: 189543 - DNA, 122 bp, Homo sapiens
gaggttagttccctcataacaagtgaagaagataatctgaaataggctgattgaactaaccgaacttctgggtagactcccactatagctccgtcttagaaagtctatgtgattactgcttc

SEQ ID NO: 189544 - DNA, 122 bp, Homo sapiens
gcaggagggctgggcccagagccaggattccgggaagtacctgtacagagccccgggagccgagggcccagtgatgagctcccgtgccctgccctgcgggtacctggatgaggaggctgtga

SEQ ID NO: 189545 - DNA, 122 bp, Homo sapiens
cgtggaggaagagggggaagttggcgcatgcgcctaaagctgacgggtttgaaatggcttcgatgttagccgggacccgactcaggtgaaggtctggtccccgtagttggagcagtgggcgg

SEQ ID NO: 189546 - DNA, 122 bp, Homo sapiens
tattaaaattaaactgattttattcaatcaacaacaataaatactttactcttacagatgcggccaacctgttatttctgtgcctatttccacagcccttcaggcagtttgcctctgcctct

SEQ ID NO: 189547 - DNA, 122 bp, Homo sapiens
tacaatattcggttaattgtggacgggctcaagctgtgctcatccctgcgaaggctgccgcggctgcacggtgctcacaggagcaggctcgtttctccgggacccgccagctccacagcctg

SEQ ID NO: 189548 - DNA, 122 bp, Homo sapiens
gccatttctctctgccacttcatggttctatgactccaggcaaatcccttggcctccctacgccttcgtttccccacctgtgagggtcaggatcgccacctcatgagcgcattctgagggtg

SEQ ID NO: 189549 - DNA, 122 bp, Homo sapiens
ccttgacaggctggggtccagccccgagacattcctaggctccgcccccgagcagacgcgcgcgctcagccccagcgcagagaaccaatcaccatccgtttccacgctcagtcccttttggc

SEQ ID NO: 189550 - DNA, 122 bp, Homo sapiens
ccaccaacacacacatacacacacactccctcttctgacgtcatggttaccaaggcaactcgacatgagtcatcatatctcaaggtggattagcagagcaggagaaaggcttttgtttgttc

SEQ ID NO: 189551 - DNA, 122 bp, Homo sapiens
tgtgcagtggcttggcctcacccacagacaagggaggcggtaagaaatgccataaagagacgctgagcctgaaggacagcaccttacacctgtgcagtccacacttgcctttccaattcgcc

SEQ ID NO: 189552 - DNA, 122 bp, Homo sapiens
ttgttaccagtccatggcctgttaggaaccaggccgcacagtaggaggtgagcagtgggccggtgagctactgtgtgagctccaccccctgccagagcattactgtgaactccgccacctgt

SEQ ID NO: 189553 - DNA, 122 bp, Homo sapiens
ctgccccaggcttgcttttccctgcgtcccttgcagcgcagcctctcggtgtttttcctccgctgccctccacctcgtccgggaatcccagatacttcaacctgatgtatggctcttttcgt

SEQ ID NO: 189554 - DNA, 122 bp, Homo sapiens
tctgctcgcgcaccagctgcagttgggcagggccgggcgaagcaggggcaaggttaggggcggggctgctgcggccggacccgcgtgggctgcgcgggaccccgcggccggggctgggcgcg

SEQ ID NO: 189555 - DNA, 122 bp, Homo sapiens
gcaggagacgaggggagggatgggtgggcgaagtctgaaacggtgcagaaattcatattccggttctacaggaatctaagaacaaggacgatttgtattcttggagaagcacatactgaaga

SEQ ID NO: 189556 - DNA, 122 bp, Homo sapiens
agtaactgcaccctcctgacagttctcacaactccagattctattctgagtaaagccatccgtcattgtaatttactgtttctatcttccccaaaggcagcaagctcgagcaagataaactt

SEQ ID NO: 189557 - DNA, 122 bp, Homo sapiens
aagcctgcggtccacacccacctctcacctagctctccacccccaacagcgaaggtgccacgccgagggctggcacacacgtctcctgcctgacacaccacgcaacacctccgtgggctgac

SEQ ID NO: 189558 - DNA, 122 bp, Homo sapiens
ctcacgtgccttaccccagcaactaactccgaacgggcaacgacagcagcctatcctctacgaaacccgcccctatcaaccaatgggatgggcagggcttcgagcacccagccctccaaggg

SEQ ID NO: 189559 - DNA, 122 bp, Homo sapiens
ggagcatgtgggctcgatagattctgtttacattacactgtagaatttgctcaaggaaaacgagggggttggataaaaagacagattccttccagctttgagtctactattccacaactttg

SEQ ID NO: 189560 - DNA, 122 bp, Homo sapiens
cttccctgcatttgctgttcccccaagtgcccttattttgaagcaatcagcagacaaaagcgcatatccctgtgttccaatgaaattttatttacgtacgctgaaatttgaatgttttattt

SEQ ID NO: 189561 - DNA, 122 bp, Homo sapiens
cagtctcttctgaggtagacagaccacaactgcagagcatcgtcagacaggagataaatacgtccatgtacaacacgcagcaaaatgaggtagaaatggttacagcgggaggagaggatccc

SEQ ID NO: 189562 - DNA, 122 bp, Homo sapiens
gggcgggggggcagaggctgtggaatcaggaatgggtggtatcggaagccagcaagccaccgtggagtgcgcgcctgcctgcgaggtggcggcaggacctcgatcacacaatcatgcaaacg

SEQ ID NO: 189563 - DNA, 122 bp, Homo sapiens
cagtgttgggctcaggtcgatacccgtcatcagtgttggactcgggtcgatacccatcatcgctgttagacttgggttgatacccatcatcagtgttggactcgggttgatacccatcatcg

SEQ ID NO: 189564 - DNA, 122 bp, Homo sapiens
ttgtgcaaccccttccagttcctctgagcagataatagctgaatccagatggtgacagcccgtgtgtcaccgtttccagttgagtctaggatatgagtaactggactgaacaaaaggccttt

SEQ ID NO: 189565 - DNA, 122 bp, Homo sapiens
tgtgggtgtgcatgtgtgcatgcctgtgcataagtgtgcatgtgattgtgtgtgtgcagccgagtgtgcaactgtgtgtatgcatgtatgtccatgtgtgcatgtgatcatgtgcaaaagtg

SEQ ID NO: 189566 - DNA, 122 bp, Homo sapiens
gcctgtttggagagtgaggggtgaccgtggctttgagcagagtgctggtgggacaggtgccgtcaggtgtcagggagcgaccacagcagcaagccagaaataaaggttaagccgttactctg

SEQ ID NO: 189567 - DNA, 122 bp, Homo sapiens
cgattcccggggctgtgtcagagctgggccaggggctgaggaccccacccgcccggcccccggcccccggcccccggccccaggcctggcctcccggccccgtgccacttaccctcccggag

SEQ ID NO: 189568 - DNA, 122 bp, Homo sapiens
ttgaaccctttagggtttatacaaatgctactccaaaagtcgggccccattccattaacacgtgctatggttagtaagtatggattatagggtatgttaacattaatttgcgctatggttag

SEQ ID NO: 189569 - DNA, 122 bp, Homo sapiens
atggcgccgtgtctagttacgtctcacatggtgccgtgtctagttctctctcacacatagcgtcatgtctagttctctctcacatggcaccgtgtctagttctctcacatggtgccatgtct

SEQ ID NO: 189570 - DNA, 122 bp, Homo sapiens
tgaacctgttgtaacaaatttaagcaataggttctttgcagacataagcattagtttaaacgtagcataaaaggtggttctttcaagggagggttattcagtctctccaattctgttagagg

SEQ ID NO: 189571 - DNA, 122 bp, Homo sapiens
ttcggcaaagtgaagagttgagtacgcgctccggaccgctgtgcggggctgcctgacttgcgggaggccgaggggagaggcgggagccccgggcctccggcgggcgcggggctcggcggcag

SEQ ID NO: 189572 - DNA, 122 bp, Homo sapiens
ctaggtcgtaattggaataatcacagtcaaaatacacccagatgctctcacacacccagacgcgcgcgcatccccgggccatggggcgcacgtgagcccgcaccccgcgcacccagccctgc

SEQ ID NO: 189573 - DNA, 122 bp, Homo sapiens
tgcgcgcggctttccgcacccttctgagcgggatatgtgggcctggtgcgtctgggtccccgaatccctagacccccgcactctggttctggccgcccgctggcactaaggacccagggccc

SEQ ID NO: 189574 - DNA, 122 bp, Homo sapiens
acatccttagagaattgcttttctctagtacaggtattagtactttctcttctctttcaacgtaaaggaatgcacatgacacagttcggatgtgtgtctctgcctgaatttcatgttgaaaa

SEQ ID NO: 189575 - DNA, 122 bp, Homo sapiens
gctggaggattatcgctttgggcggcagcagctcgtggagctgtgcggtcatgctagtgccgtggctgtgaccaaggtacctgacccctgacccccaaccctgaccccaaccagacggccaa

SEQ ID NO: 189576 - DNA, 122 bp, Homo sapiens
agtcccagccggcactccttcccaccggcctgtgtcggcggcagcgcgcagctccggccccggagtcgaccccaaagaacgcgcctggcagccctgcccatccctacctcggaccaggatcc

SEQ ID NO: 189577 - DNA, 122 bp, Homo sapiens
cagggcccacgtggggatacggaggccccgcgagcctagaagttaacaacggaggacggccggcgtggtctccggggactcctagcgggcgcagaggcgtctagagatcgcccacgtgaggg

SEQ ID NO: 189578 - DNA, 122 bp, Homo sapiens
caggctggccacttcagtgagaggctgtacccggagtttcgttcggaggggttcggggcgcgcccaatccttgtctggccacttgacgccctggcaggaagaatcctcccgccgccggctcc

SEQ ID NO: 189579 - DNA, 122 bp, Homo sapiens
ccgggagcaggtgagtggcccatgggggatggagaaatatgcagagcggatgaatgaggacggggcactctgccagcagatggacctgggggatcaaattcaactctgcccttgcagctggg

SEQ ID NO: 189580 - DNA, 122 bp, Homo sapiens
cagtgacgcccccctgtacctcctggctgccccaatgctttgtctgtcctgtgaggttggcgattcgtccaactcctcaccagccaagcacacgcaaccacagggagaaccagttggcaccc

SEQ ID NO: 189581 - DNA, 122 bp, Homo sapiens
accacaggtctgctaagtagggctgcctcaggctcccatgaaggttctcaggatgtcacccgtgctccacttgcgcttggtgtggccttgttgctccagtccagcagcagcaattgtcctag

SEQ ID NO: 189582 - DNA, 122 bp, Homo sapiens
atggtagctagcaccaccacaccccgagactgtgcccctttctggggaacctggggaagacgtcgaggcaaacctccctaggattattgaaaacgggcgccttcctcaccacccagcccctc

SEQ ID NO: 189583 - DNA, 122 bp, Homo sapiens
ctcaggtgatctgcccgcctcggcctcccaaagtgctgggattacaggcatgagccgccgcgccccgcctcttctgagcttttaaggttggtactaagggattctgaaagttacagcctcct

SEQ ID NO: 189584 - DNA, 122 bp, Homo sapiens
tcaaagtacagtaaactggattttacgacaaggttaaaagtgctcttaacattactcccacgctatcctgttgttcttccaaaagaaaacaagagttcacagtcaagtgcatcccagaagga

SEQ ID NO: 189585 - DNA, 122 bp, Homo sapiens
gcgccggtgctcacctgtctctgcacgggcacatgcactcactgccttgtggaggcgcttcggcgttagggatccctgtgcttctgtctacctgggtttctttgcatggggggacacatccc

SEQ ID NO: 189586 - DNA, 122 bp, Homo sapiens
ccgggcggcgagcggggcgcagtaggaggctcttagagacctcggaggaaaccagcccagcgctacgggactggcaagaatgcgaagaggaaccgagagtgaacggagtgcgaggcgccggg

SEQ ID NO: 189587 - DNA, 122 bp, Homo sapiens
agcttcgaagagttggggtggtctctgaggccttctaagagaggcgttccccctgcctgccgcggttgttaaagttccaagccgccctagcaatgcgtggggacacctccggaaaacccagt

SEQ ID NO: 189588 - DNA, 122 bp, Homo sapiens
agtggccaatattttttaaaaagaatgccgataccaaatgcatattattattttcaagcacgtggtgaaataggagctctcatatcctgctggtaggtgtataagccagtacagcctttctt

SEQ ID NO: 189589 - DNA, 122 bp, Homo sapiens
ctttatagcaatcagatttccccttaactcattaccatggggcatgcagcaagccattcacgagggatcctcctccaatacccagacacctgccaccagaccccatctctaacattggggat

SEQ ID NO: 189590 - DNA, 122 bp, Homo sapiens
cagttccacgtggaacagtgcagctggcacaagctcgtccatgttattcacatgccccaccgtggtgggcctgtcgacggcatccaggctgattcgattctcggctgatactgcagccctgt

SEQ ID NO: 189591 - DNA, 122 bp, Homo sapiens
caagtagctcggacagctcaccctcccagacacgcctgggctacctcatttcgtccgcatcgactctgctgacatcccaggggaagcgtcagcatttcgggagagcaccccttgccacccga

SEQ ID NO: 189592 - DNA, 122 bp, Homo sapiens
gctcgcacccgcggctcgcccgcgcccgcgcccactcgcgattgggccgggcccgctcgacgctgccgcccaccccgctgcccccgccgtccctgccgcacccgccgttgcccggcctgccg

SEQ ID NO: 189593 - DNA, 122 bp, Homo sapiens
ggcacggaggcggccgtctgttccccaggagcagcacagccatagcggtgagtaagcctccgttcttgtggacagtcgagtggctgggcagggacctagctttgtcaccggcgttgccctaa

SEQ ID NO: 189594 - DNA, 122 bp, Homo sapiens
gggcgggtgtcggaggcggcgttggagagatgagccagagggtggccctggacgccaaaccgccctgcagtcctccgagctgcgctttgagggctgttgagagaggggtggaaggtggaggt

SEQ ID NO: 189595 - DNA, 122 bp, Homo sapiens
tcctcgaacgtcttgtcccctgctcgagacagagccaggctgctgggctatgccaggccccgcggtgccccctgcctacccacggcctgcccacctgggcctcaccgggttcaaacacgggc

SEQ ID NO: 189596 - DNA, 122 bp, Homo sapiens
ctccattccaaaccttaagaagagtttgagggaaagacaccaggttgtgtctctagggcacggggtcaggtgggcttgaccttggttccctgtcagctaaactaggtcattccaaagtgcag

SEQ ID NO: 189597 - DNA, 122 bp, Homo sapiens
aagggagccaggcgcgagcgcgacctggggaaagtccagagtgccagccacggggaagggcgggcagtgcagagtggaagagaagccagcaagttagacacagcccctctctgggaggccgc

SEQ ID NO: 189598 - DNA, 122 bp, Homo sapiens
gagctgctacagttatgagcagttccagggtttcctgcatcccatgagtgctgggcagatcgggtaagtgggttaactatctggaaagaaatacctagtatgaatgtgtacctctaggggtg

SEQ ID NO: 189599 - DNA, 122 bp, Homo sapiens
aagttcagggtgagttttgtcttaatgaagaccaaagctgcagccctcatctcctttaatcggccacatctccatcttttgtattttcttctttgaggacagatgctctcattctcctctgc

SEQ ID NO: 189600 - DNA, 122 bp, Homo sapiens
tgtccctgtccctcccaaagcacagagcacagaaatgaggccgtttacatggcgagtctccgtgctggtgtttaagtcattaaaaagatactcaaagagaatggcctgcctgatgcgtcctt

SEQ ID NO: 189601 - DNA, 122 bp, Homo sapiens
tagagagtggtcacacaagccatccaccggtccattcatcttctcacacttctccactcacgcttctttcagtgaacaattttgaggctgtgactttgcctgagtttttttttcttcttctt

SEQ ID NO: 189602 - DNA, 122 bp, Homo sapiens
tagaagatgaagaagtcctcggggatccgctggatgcggttgccggccaccagcagcttgcgcacgtccagggggaaagggtctggcacgctgggcagcccgcggtcgcggcagtccacggt

SEQ ID NO: 189603 - DNA, 122 bp, Homo sapiens
gcgcatcctcggggtgcccgatggggctgcctgggggtcgcagggctgaagttgggaccgcgcacagaccgcccctgcagtccagcccgaaatgctgccgccaggcagcaacggcaccgcgt

SEQ ID NO: 189604 - DNA, 122 bp, Homo sapiens
tgctcagcggtgggaggaggcggaagaaaccagagcctgggaggtgaggggcgggcccgtcgttactttttatttgatgttagtcccagaaacaaccagagctcagttcctactaaactaac

SEQ ID NO: 189605 - DNA, 122 bp, Homo sapiens
tacagcaattttattcatcatcgccaaaacttggaagtgcccaagatgtctttcaccaagcgaaagaataaacaaactgttgtagccatacaaggaaatctgattcactgattttaaaaaac

SEQ ID NO: 189606 - DNA, 122 bp, Homo sapiens
gaaggactgagcctcactgcaacgttaaagagtccttctttgttcagccccagtcggggacgcagggcgcggtgttcctccgcgctcgccgcgcagtccctgcccccccgcggctttggaga

SEQ ID NO: 189607 - DNA, 122 bp, Homo sapiens
gggagtcgcaggcaccctgcctggacgctgttgtggggcctgaacgaagttcactgctgccggcgcccaaaagcgctcgctccagctcctgcacctgctcaactgtgtgctccctttcacga

SEQ ID NO: 189608 - DNA, 122 bp, Homo sapiens
tcagagctccccgcccacctcgtgccgggccgtccctcccgcttgtcccaccctcaccggcgccgcgtcagcccccaggccgcctgcaggtgtgcgctcagaactagcacgtgtgccggaca

SEQ ID NO: 189609 - DNA, 122 bp, Homo sapiens
cagctggtggagcgaggccgggcctgccccaggatcccagtgctgccccatctcctgctgcgtcaatgctcagaactgcgcagagcaccctgacttgcttggattctgtctacaggatgcag

SEQ ID NO: 189610 - DNA, 122 bp, Homo sapiens
aggaacaggactttcttccaaaggctggggccaggcaatggtgttgggtccctcaacaagcgtgtgtagaaggcagacaggcagacaggcaggcagacacaacctacacttccaccagctgc

SEQ ID NO: 189611 - DNA, 122 bp, Homo sapiens
tcaaagcaactgatgggggcgaagctgagctgacaggcaccaaagcattatatatcacagcgctggatgtaaatgatgatgcccagtgtttgacaaaggagtctatcatgtgaaattactgg

SEQ ID NO: 189612 - DNA, 122 bp, Homo sapiens
ccggcagattaatgggcgcgcacagctagccggcccggctctcttcccgaacgccagcggcgggcacggccctttcagtggcgagcagatcaggccagagtagggacactaatgcttgggcc

SEQ ID NO: 189613 - DNA, 122 bp, Homo sapiens
taataataataataataaagtgactaacagcagcagtgaagagtggggcttctggacgggcgcacaccatcagcgctcattaaatgcatgagtcagaatgcatgggccagccttatggaatg

SEQ ID NO: 189614 - DNA, 122 bp, Homo sapiens
ccctggaattgatgcagtgtccgcccgtggcaggtgggaggccgcaccatgctgcccattcgctggatgccgcccgagagcatcctgtaccgtaagttcaccaccgagagcgacgtgtggag

SEQ ID NO: 189615 - DNA, 122 bp, Homo sapiens
taaacccacgtcctcccggaggagccaatgcttgcaaaccattcccctgcctccagggggcgctgcttagccccaggctggggagccacattgaattaattgaagtaaagcgtttacactag

SEQ ID NO: 189616 - DNA, 122 bp, Homo sapiens
ccatccatcattcatgccctgagcgtgcgttgtgttctgggcagggcctgtgctgggcaccgattgtgtaatatatcatctctcccttcaaggtgcacccaatctgggtgggtgggtagaga

SEQ ID NO: 189617 - DNA, 122 bp, Homo sapiens
gcgcttctcattggcgtcagtcaagcgcggggcaggggcggagcaccggcaggcaggctccgtccaactgccattctcgcgcgtcgtctccgcggcgcatgcccctaacgagtggcgctcat

SEQ ID NO: 189618 - DNA, 122 bp, Homo sapiens
gctccttccccctcctctgaggccttccaagtgctacagcatccttgccgtcatccttagcgtgacttgaaaaggaagacagcgctgttacaaaatggtgtacattctctaaattatataag

SEQ ID NO: 189619 - DNA, 122 bp, Homo sapiens
atattgaagtcatggtggcagcctcagccttgcgctgcctgaccctctcccctgctccaccgcagggaaggcaggttgactcacgggatgtttgactgagtagttcataatgatgtaatcag

SEQ ID NO: 189620 - DNA, 122 bp, Homo sapiens
gagagccaggcttccttgtcctgcccagggagctgaggatggaggaagtggctcgttgcacgggcactctgttagacttaggacatggaatttgctactaagctgtgcatattggcagagat

SEQ ID NO: 189621 - DNA, 122 bp, Homo sapiens
tctacccctcccttctgccttgaagtgcctgagtcttatccataccagatatgccactatcgagaagcagatgacaggctcaggccttaccagggatgcacttgccacattttggaaagact

SEQ ID NO: 189622 - DNA, 122 bp, Homo sapiens
ggtggaggtggaggcaggaggcggagcggagccgggtgcggtggagcagcagaggccgagcggagccgtgggcggcgggccgggaccccggggccgggccaaggactggcggggcagccgcg

SEQ ID NO: 189623 - DNA, 122 bp, Homo sapiens
cgatcctgaaagcagccttgacagccagaggcgagtcaagtggaaaggctggccgggcttcgagaagggagggggcatcgaggtacttaaaggcctgaatcgcgcggcgtgacgtcgggggc

SEQ ID NO: 189624 - DNA, 122 bp, Homo sapiens
tgcgcgcgctcgggtgtttacgcggcgtcttggcaacggtggagctgcgcgccctccgctcgaccaaaagtgacccacgcagaacgtggcctcccattggacgcgataagatacaatcggca

SEQ ID NO: 189625 - DNA, 122 bp, Homo sapiens
cccccggccggcagggagttgtagttatctttgaaagccttctctctcttttggcataggcgggaaatgtggcgtcaagaggctgggattccgagaaagaagcgaggctttcacgaaaatgc

SEQ ID NO: 189626 - DNA, 122 bp, Homo sapiens
caggacgtgctacagacaaaactcctcagacaccgggttaaagaaggaagcggctttattcggccgggagcttcagcagacttgcatcttaagagctgagctccccaaaaaaaaattcttgg

SEQ ID NO: 189627 - DNA, 122 bp, Homo sapiens
acacgcacgcgcaggcggccaggcgcgctgctgataagagcctgcgggtttgcagagaagcgcagcagcgcgcaggtcctcaccagagctctggtggccacctctgtcccgccatgctgctc

SEQ ID NO: 189628 - DNA, 122 bp, Homo sapiens
ggcccaggggagcagctctgagcagagcagccagagccaagcaggtagagagctgacagccggggaattgctaagaggcgccgggctggtgggggcaggatggtgaaacagttggactcgag

SEQ ID NO: 189629 - DNA, 122 bp, Homo sapiens
tccaccctccctgctccagatacacatcactggggagtcgggagaataccgtgcggaacccggccctgaagtgcctgagcccaggaggacaccccacataccgtccagcctatctactggag

SEQ ID NO: 189630 - DNA, 122 bp, Homo sapiens
ccggcgcacctgtggacaaattctggaacgcgtttggcgagggaggaataggcgcagctccggaaggcagtgacctcgaggcagcctcagcacggcactctcttgggtcctcttccaggctc

SEQ ID NO: 189631 - DNA, 122 bp, Homo sapiens
cgggtatggtgagttcccctcagggattgtgctgagcgccttggcctggcttcttggctccgcccacctgctctccctgccaccaagttgtcttccccgggtggcatgtgccacttggctgc

SEQ ID NO: 189632 - DNA, 122 bp, Homo sapiens
ctttggctgggaaagtggctacagcctgaacagtgccagacacctgcctgccagatgtggcgattccccattcttccccccacccccctatgtctattctttccctaccccactgagctcag

SEQ ID NO: 189633 - DNA, 122 bp, Homo sapiens
ccagcaaactcatgagccggcgcccgcgccgagtcctgggccggccgggctctcctcccccggacccctacccgccagccccggccgggcctcacctggtgccctccccgaggcgggggagc

SEQ ID NO: 189634 - DNA, 122 bp, Homo sapiens
aaaggtctgaacttggaggtgtgaaaatggaacctctctagaaagctgcaccctggccagcgacaccacagctgtgtctcctggagctgggagcatccccactcacacctcagggagggagt

SEQ ID NO: 189635 - DNA, 122 bp, Homo sapiens
caggtggttcccaggggatgcacagactggtggtgtcctgacaaggcccaggcaggagctcggagccccttggagggaagacaagggcaggaagggggctgagaagcagcagaggctgcatt

SEQ ID NO: 189636 - DNA, 122 bp, Homo sapiens
attttgactgatgagaaaagggttcagacagtggggaaaagatgggctaggcaaggaaatcgctctgtgaatgaacacacagaggcttcaaaagacccttttggggaagagcaagcaaggca

SEQ ID NO: 189637 - DNA, 122 bp, Homo sapiens
agcccctcgctcaagcctctccctcccgcccgtgaggccggctttccccgggcccctctgcgcagtgtatggggttatttttactttcggttatctagctttatgaagactccacaccactc

SEQ ID NO: 189638 - DNA, 122 bp, Homo sapiens
aaggaaactatgccacattcccttgatggttgatggttattttccagagcagcagctccacgcttatatctgatcatttatgtttgtgtggaaatgaaaataatatcctcaggctccttaac

SEQ ID NO: 189639 - DNA, 122 bp, Homo sapiens
gcacaggacttttctcttagagagctgacagccagcaacctcatgagcctcgcttctcggcgccatccactccccggctctgtcccccacgccgccatccactccccggctctgtcccccac

SEQ ID NO: 189640 - DNA, 122 bp, Homo sapiens
gaatcacctgactcagagccgcggaggggggaggaggagtcacgaggagggcggcccggccgcgcctctagccccggctcgggccctcagccctccgccccggcccgcatacaacgctgtct

SEQ ID NO: 189641 - DNA, 122 bp, Homo sapiens
gcttctgaggctctggcaggaagaagctgggcagaaggggtggtggccccccaaacctcccggccacagaagccacttcctcggagggagggccagagcagcacagatgccagagctcctgg

SEQ ID NO: 189642 - DNA, 122 bp, Homo sapiens
cctctcggcaaaccactgcaggacctggcagaagtcatagcctgggtggagagaaggacacgtcagtgtagccactgctgcaggagacacgtttaatgggcggctcaggaacagtctcgctc

SEQ ID NO: 189643 - DNA, 122 bp, Homo sapiens
tggagcgctcttttcttcctaccgtgcacatttggaatttcccataagaagtgaaattttcgaggccggggctctgaagatagacaatctggttcaaatcccagcctggcctcttactggca

SEQ ID NO: 189644 - DNA, 122 bp, Homo sapiens
gctgtcgccgcggacccaggcccagaggcggctcaaggtgcgtgtgtggagagggcggaacgtgggtctgtgaccccgcgggctccgggactcggcatggggtccccgtccccgcgcgccac

SEQ ID NO: 189645 - DNA, 122 bp, Homo sapiens
ttagttcatgctgaggttggtcgcttgtttcattcactgtctcctacgcagtccatgccacgggggataagtttttcacaagtggctttttttccccacagtgaagagacgtggcctgggtc

SEQ ID NO: 189646 - DNA, 122 bp, Homo sapiens
ctttatccaaaagacagacaatcacaattgctcgcgaggatgtggggaaaagggaaccctcgtaccccgttggtgggaatgtaaattaaaacagccgccgtggagaacagtttggcgtttcc

SEQ ID NO: 189647 - DNA, 122 bp, Homo sapiens
tacttcctgggggacagagaggctcccccgagaggccgcagcagggctggagggctgggacgccgagggcgcagggtgggaagacgcactctgggcagtgaccggcggcatcctgggtcctt

SEQ ID NO: 189648 - DNA, 122 bp, Homo sapiens
ctgaccatccttccctgtcttgggcaccctcctttcatacctccacccttgacacctttacgcaccaagcaaaaagcacacaagcatacatgatgctagcactcagcattgctagagagata

SEQ ID NO: 189649 - DNA, 122 bp, Homo sapiens
ggagacccgagaggagcagctgggtttcctggcgctgggagcccagaagtagggcgcaagcggccgcggcacagcggagcagccaggtccagccgctcggatcgcgctcgcgccccatagcg

SEQ ID NO: 189650 - DNA, 122 bp, Homo sapiens
cagttttaatttctgttaattccgaggtagcctacacaaatcacaaaacgtagaacaaaacgattagatcaccaattctgctgtccaaagatttgttatggaagtagattaattaaagcaca

SEQ ID NO: 189651 - DNA, 122 bp, Homo sapiens
agctgtcaggatgacctcaaatgagtctggagctgaactcagttcctgaccccaggtcctcgctctgtcagtgctgggctggtccaatctctgtaccaggtccttccaccccgcccctctgt

SEQ ID NO: 189652 - DNA, 122 bp, Homo sapiens
gtttattttggttcctctgcatgacatggaaacaaatgtgctaggtcccccttgctctgtcggctcctcagtgggtggtgacaagggagctcaggcctacccctttcttcatagagagattc

SEQ ID NO: 189653 - DNA, 122 bp, Homo sapiens
acagatgtggcaccagcgtggaaggccctaggggtcagagtcccgcctgcagaggtaccacgtgcgtccttctgtggcggactctaggcccagatgtcactggacggacacactgctgcgtg

SEQ ID NO: 189654 - DNA, 122 bp, Homo sapiens
gtactacagtctgacacattgtgggcgctcacaaagatgtgctgaatgaatgactaaatacgcagcccagtgaaagaatgaagaaacgatgaagtcccttgtcacaggatacatcgcggtgg

SEQ ID NO: 189655 - DNA, 122 bp, Homo sapiens
ctctactcccaactgtactctgcccaagctggtccaagcccggatgggtggaaaggtccccgacaggcgtcctgaagtctgccttcgggcctgccacaggctcagcacagcagagtgatgcc

SEQ ID NO: 189656 - DNA, 122 bp, Homo sapiens
tcccattaaagggcacagcaagggtgtttggaaacacgatctgaaatttggcctgcaatccgtggcatcgattccaaccacagggcgggggagtcaccatgatctagagcacaggagccacg

SEQ ID NO: 189657 - DNA, 122 bp, Homo sapiens
ggagagaggcgggattgacagcctctctggcggtccggaggcgggactaggaggacgtcccggtaacgattgggcagggtcctgcgtaagggcgcatgcgacactggaagtagcgagcaact

SEQ ID NO: 189658 - DNA, 122 bp, Homo sapiens
gctgagctgggcccggccccgagctgcgccagacccgcgcgggggtgctggccttggcggcggagctggatcccttgctggttggcgtcaatgcacttgttaaaaatttgtgacagcgctca

SEQ ID NO: 189659 - DNA, 122 bp, Homo sapiens
ggtggggcgcggcgggctgggcgggcgaagtgggtgcggccgggtgcggcccgggtcccgcgtcacctcccgcaggccagcccgccccctcgccgccgggtcccagtccctcgcgacgcccc

SEQ ID NO: 189660 - DNA, 122 bp, Homo sapiens
cccccagcaacgcccctcccggagctcctccgcggtctcccccactccatccccgcgcagcggaggagcttgccggtgatgtcactgctgctagctgggagggaatcccaggacctgcgtcc

SEQ ID NO: 189661 - DNA, 122 bp, Homo sapiens
tgaagccactctgattctatagtctgtataacctggaagggtgtgggatctctttttcctcgatgttcagaaaattcacaatgatatgccttgacgtggatgctttaatatttgtgctgggt

SEQ ID NO: 189662 - DNA, 122 bp, Homo sapiens
tctagtctgtcttgtgaactctcaccgtgaaaagaggctagaagtccaggatcgctgtaccgctcctgtaattaggtgatgactggatttgacaacttagtcccctcagacaagtaagatac

SEQ ID NO: 189663 - DNA, 122 bp, Homo sapiens
ctttacttcaattttaaaggaacgtattacacagaggtggtatctcaaaatgacagagaacgcgagctctggaagtcagactgcctgtgttcataacccagctctaccacctagtagctctg

SEQ ID NO: 189664 - DNA, 122 bp, Homo sapiens
agccagtggctgttaacaatatattaagtacggaagcactaatggcaaacgccaagtccacgctcatgttctatgtagttggattcttgtggcagccgggtgggggcgtggccacaaggctg

SEQ ID NO: 189665 - DNA, 122 bp, Homo sapiens
acggcacagtgggccggagggtcggctgactctccaaggagatagaacatggccactgtccggccagactccagccagggtgctcagcgactcccccacagcacccccctcacatcttcagg

SEQ ID NO: 189666 - DNA, 122 bp, Homo sapiens
cagcactgtaaaaccagcgggtcagccaggcagcccgggaaggcaccccacatgaacttgcgacggaaagcatcctccaccgttcgctccgccgcatggtcctccccaccagggttccccgc

SEQ ID NO: 189667 - DNA, 122 bp, Homo sapiens
tccatccaggacagagggggacccgctgccgctgccaccgggggtgagggtcaggaggtccgaggctttggaggaggccctgcgaaggaggcggcccagagacattgccgggcaagtgtttc

SEQ ID NO: 189668 - DNA, 122 bp, Homo sapiens
ctaaccaaagtgttgtatttcatgcaatgaatcaaatgaacatttttatactttttttctcgcaacagtgaaatgcagactgggcagctgtgttgattaattggcatttaatgttaatgcta

SEQ ID NO: 189669 - DNA, 122 bp, Homo sapiens
gtgggtcagctgggatgggacctgggaagatgcccgtttgcagatgtcctgggtgaacagcgggaggaggaggccctgcttgctgccccgggcactgtttgttctcagcctctctctcgacc

SEQ ID NO: 189670 - DNA, 122 bp, Homo sapiens
gcacccgcacagtcccttcatcttctgagtgtcatgggaacggggacttctagccctcggcggtggccagcagcactggcagccgcccagccgcaaggggacgctgtgagggcagcgagcag

SEQ ID NO: 189671 - DNA, 122 bp, Homo sapiens
cttcttgcatttctggcttcggagcatggtgtctggtggcttggcctggcctggggtccccgggaggccctgggtcttgcccctgcggacattgggacttgcagaggtctgcgtgggggagg

SEQ ID NO: 189672 - DNA, 122 bp, Homo sapiens
gggcagtcatcctataccaagtaccaagaagatgcagagaagtctaatgcctcctgaacccgcccatctcctgttttggctattgtctgttcaccccagtgcatgggtattgacaatcattt

SEQ ID NO: 189673 - DNA, 122 bp, Homo sapiens
cgtgcggtgcttgtgctagtcctgtctgaatgatgaatgtgtgcgtgtgtgctgatgtcacgcgtgtggatgtcacacgtgtggatgtcacgcttgtgcgctgatgtcacgcgtgtggatgt

SEQ ID NO: 189674 - DNA, 122 bp, Homo sapiens
tgactgtgccaaagctgagaaacccaggtttctcctcagcaaaaaggaaaatccctgcaacgtggatgcacctctacaggagccccaggctgacaataagcttcctgatctggtttcaaccc

SEQ ID NO: 189675 - DNA, 122 bp, Homo sapiens
gcccggccccttttgagcatcagctgaggctggacttggaggagatctcgctgtggagcgcgaatgagttcttccaccgggaccagctgcggccgggctgcagccgctgtctggttgctgat

SEQ ID NO: 189676 - DNA, 122 bp, Homo sapiens
gcagctgggcctcataggtgcccccttctccagcaaacttccctcacccaggggagctgccggaggggatggcccactccccaccctagggtagctcacagccaacatcagacagtggtggt

SEQ ID NO: 189677 - DNA, 122 bp, Homo sapiens
tcaagctcacttcaaagaatgtagctatgagagcatgaaaccgtgcgctcacgccgcacacgagttgggtaaatggagcgcctcattttccagatgtgttacagaaactgtgctggaggatg

SEQ ID NO: 189678 - DNA, 122 bp, Homo sapiens
gcgtctcgcggcgcctgaggccccggtgggcgtgggttccaggctgcacggctggtttgccgtctgggggtggtttgtgctgggacccccgcctcgccgcaaggaccgacgctttccgtatc

SEQ ID NO: 189679 - DNA, 122 bp, Homo sapiens
gcgtccacggcccacagagtcaaagacgtggtaggcactgaccgtgcacccaccaagccgcgtgaaggagccattcgcttcacgaggaaactgcctgcacggaccacccaactctgctctca

SEQ ID NO: 189680 - DNA, 122 bp, Homo sapiens
aaggccaggaaaggggcgcagcaccgggtgttccctcctagcctggtcgctcggggggagcgttggttggcggggtgcaggtctggtgctcgctcaggtgggccaggcacccgcgcgccagg

SEQ ID NO: 189681 - DNA, 122 bp, Homo sapiens
cctactgaagatatatttgcagcccctggaatgacacttgggatcattcaaggtaaccaccggaaccgctcgcatgcgacctcctggaaaggttgagccacgctgtcttcctcggtgccctc

SEQ ID NO: 189682 - DNA, 122 bp, Homo sapiens
agcagactgttcccgacgcagaacgtgaaggctcatgctgtacctaaggcagcacaggcccgggccaggccatccgcgatctctcccaccacggcgtgctctgcccacaggaagctctcggc

SEQ ID NO: 189683 - DNA, 122 bp, Homo sapiens
ctcatccccatgcctcccggtgggttctgtcttcatgcatgcagcgctggaatcacgcaccgagagaatggcccaccccttagaggtttttggtcattttagcaataccgctttgcatttta

SEQ ID NO: 189684 - DNA, 122 bp, Homo sapiens
acctcctcccgggaggagccaaatggtccagacgtgaaactcttagaggtggggcttccacgtgtggaacggcaccctgcgaaaagctaagcctgcttgctgctctggggagagactgactc

SEQ ID NO: 189685 - DNA, 122 bp, Homo sapiens
cacgtaaaagccaagtatatctgtatccatcacagtggtgtgtgccttaatgacaaagctcgtgttgctcagcctcagcaggagcctgcagaatatgccttcctgagattgtataggctggc

SEQ ID NO: 189686 - DNA, 122 bp, Homo sapiens
cacttgccggagagggtcttggttttgcgcctttttccgtggcccgggaggcttgccaggcgctcgcagcagcgagccgggtgcttgcatctcagagagcagccgagctcccttccctggcc

SEQ ID NO: 189687 - DNA, 122 bp, Homo sapiens
cataagtcacatgcatgtgtgtctcacacgcctgcatacaccacaggtatgtaagtcacacgcctgcatgtcacatgtgtctcacacgcctacatgtgtcacatgtatgtgtatctcacacg

SEQ ID NO: 189688 - DNA, 122 bp, Homo sapiens
cagactatggttgattcagttcgagcctggaaccaagccccatgccttgcatatcagagacggtcaatgacagtcataaccacagtcctttctccttctgtgacttcatctccccatctata

SEQ ID NO: 189689 - DNA, 122 bp, Homo sapiens
cacacaacagacggtgcacgggcacagcacagagatgacacaaaggcagtagcatggctccgtgtgcaggccccgggctgagctaggcctcttagtgatgcgtttaccttcacaacaacatt

SEQ ID NO: 189690 - DNA, 122 bp, Homo sapiens
gtgggggcgcctctgcccggccgccccgtctgggaagtgaggagcccctctgccctgcggcgaccccgtctgggaggtgtgcccagcggctcattgacaacgggccatgatgacgatggcgg

SEQ ID NO: 189691 - DNA, 122 bp, Homo sapiens
caccccctgcttggggtcgggggctctggggtctgcgtaggctgggagccgttccggaaccggacacctggcgcgcacgtcccgggaaaggcggagggtgcattgcccctcctcacgccccc

SEQ ID NO: 189692 - DNA, 122 bp, Homo sapiens
catggtcctcgtgaaaccgttacgagtgctgtacatgaccacccactgtgcaaagagctacgattgctttcgttcgttaattctcacacaccacatccgactcgcactcacatccagctcaa

SEQ ID NO: 189693 - DNA, 122 bp, Homo sapiens
gccggctccgcgcccgctccttgcgcacacgccaggcagcgccgccgcagccccacggcgcgcaggccacgcccgtgccacgcccactctcacgcccctcctggcggccccgccccgcgccc

SEQ ID NO: 189694 - DNA, 122 bp, Homo sapiens
tgccggcatgcgctacctctcagacctgggctatgtccaccgagacctggccgcccgcaacgtcctggttgacagcaacctggtctgcaaggtgtctgacttcgggctctcacgggtgctgg

SEQ ID NO: 189695 - DNA, 122 bp, Homo sapiens
gcctaatcaaatgctgtggaggcgtcaggaccgtgatgggaatgagagtgaatgtttacgcgtgcccactcatccgcactctgccaccccagaaacctgcacacgacccagtggtgcgggtc

SEQ ID NO: 189696 - DNA, 122 bp, Homo sapiens
accctcaggccagggggaaggaagaggctggggagagaccgaaggcccccctcccccacacggggatcccttctgctgaggtttccggcatcgctggctctcccaccctcaagctccccggc

SEQ ID NO: 189697 - DNA, 122 bp, Homo sapiens
gaggccgaaggcgggagactctgatcaggggccttcctggggacctactggccccaaagccggaccgccccgcaggttcccgagtggtcccttccctcccctcccaggtgactcacgagggc

SEQ ID NO: 189698 - DNA, 122 bp, Homo sapiens
aggcatgcgcgtttgcttctgtggggctgggcgtgcacgtgtatgtgtggttgtgagcgtcggtgtttgtaatttgcttttctgcatacgtgttgggtgtaaatccatgggggaaaggcttg

SEQ ID NO: 189699 - DNA, 122 bp, Homo sapiens
cccagcaacccaaccagctaccaccgctttcccagcctggctggcagcctaccgcggccacgcccaccgcggctcaggaagccgaacttcaccgcgcaactccgacgtctcctcccattgga

SEQ ID NO: 189700 - DNA, 122 bp, Homo sapiens
taatctgcctgcctcagcctcccagtgttgggattacaggcgtgagtcaccgcgcccggccggcataggcccattttctgagagcaggatacatatgtacacacacctgtcgtcgggtggac

SEQ ID NO: 189701 - DNA, 122 bp, Homo sapiens
accccagggcctgctgggaaatgtagttcgaatgcaaacaaccaatggacgaccgtcaggcgcggcggttggggcggggcaggcccccccaccgccccaccccccgcccacccagcgcccgc

SEQ ID NO: 189702 - DNA, 122 bp, Homo sapiens
agacttgtgctatttccagcctcagcacattatttaggcacttccccactgcattgttttcgtttctgaaattgtatcacattccctaaattgaatccaacttttaatgtagtgcccttcag

SEQ ID NO: 189703 - DNA, 122 bp, Homo sapiens
aagccaacagatgtggccctaagccacggcagatgtggagactgagggggcgtcccctgacgtcaccgggccggccacctggacagtgtggccagcaagaggcacagtctgaggttgactgt

SEQ ID NO: 189704 - DNA, 122 bp, Homo sapiens
ccccaaccagttctgtgttgtgtgtagacatcgctccattactgtgcttcccattaaatccgtaataagccagctgtccactggcctcgctgggtttcttgggaatcgaggggctcccattt

SEQ ID NO: 189705 - DNA, 122 bp, Homo sapiens
ccagacagaagtggccgccgcgcccggagccggtcccgcggcaaaggcccggcaagccagcgggctgcacaatgccacggctgctccgccagctcgcccctgccccgtcctgcctgcctacg

SEQ ID NO: 189706 - DNA, 122 bp, Homo sapiens
ctctctggcgccctctgctggccgctcacgcgcacctccgccacgccgggcccgggcctgcgccgctctcacctgtcctggcccgggggtcgctgtcccttgcccgtggccaggcccgctct

SEQ ID NO: 189707 - DNA, 122 bp, Homo sapiens
ggtgtggagggagaagcgtgggcaggaaccaggactgcgcgcagcactcatgggccagcacgagttccgggtgggtgtgggcttgatgggccccgcactcagagtggccagctgatgccgcc

SEQ ID NO: 189708 - DNA, 122 bp, Homo sapiens
cccagagctagaaggtcccgggatcgggagggcgggtcgtttccgccaggctggaggggccgggctagctatctgacagcccctccccaaagctcaggaccgcgagggcggggcctgtccag

SEQ ID NO: 189709 - DNA, 122 bp, Homo sapiens
cttgtaatcccatcactttggtaggccagggtgggcggatcacttgagcccctgagtttacgaccagactgggcaacataccaagaccctgttctctacaaaataaataaatactacccccc

SEQ ID NO: 189710 - DNA, 122 bp, Homo sapiens
ttaaaatgagcaatcagcagcaagatgttttaaaatattttgtttcagcatgtaaaatctcgttttattacagaattattttgttaaaggcacagctatgccaggttgctgccagagtgata

SEQ ID NO: 189711 - DNA, 122 bp, Homo sapiens
ggctgaggctggttgggggtctggagtccagtgcctttgttccaggtgagtgggacaggccgggtcagagctacccagagagcccgccccttgcctcccagtgagcacttccttgcagcaca

SEQ ID NO: 189712 - DNA, 122 bp, Homo sapiens
cggatccaggcctgggaatttcccttttctgatgccagcttcaggcccagtgtctaagggcgacccctgttggtgggacttaagtatgctcattattcgtgagctgcttctccaagggtgga

SEQ ID NO: 189713 - DNA, 122 bp, Homo sapiens
gtaagccttttactcctgtaggaccacgcatgcagggcctggcagccctctaaattaaaccgtgtacatcgctctggtatagagaggtcactgtgaaaagcgcgagctgccaactcacttta

SEQ ID NO: 189714 - DNA, 122 bp, Homo sapiens
agggatccaggcttctaggtctgcgtgcctagggctgcgtgttagtggcttcaggcgctgcgccaaacacttcgtttgagtctcatctcctaacccctcccctacccccaacagggccttgc

SEQ ID NO: 189715 - DNA, 122 bp, Homo sapiens
ttaataaaattaagagagagatgcacaaaagcacgggaaaatagctggatcaccaacctacggttcaatggtggtttagtagcacccaaaatatgtgttcctaaaagtctgtatttttatta

SEQ ID NO: 189716 - DNA, 122 bp, Homo sapiens
gccgccccgcgaggccacgccctgataccgaggggacggactggcgcgggtgggaggtcacgtggggcgcagctgtcagcccacgtctcctgcggtgcttgcttgcgtggggtctcggctgc

SEQ ID NO: 189717 - DNA, 122 bp, Homo sapiens
ccagcctatgatggaccggaacaaggcggccgagctccccaagctgcaagtgggcttcatcgacttcgtgtgcacattcgtgtacaaggcgagtggttcacgggtgttccgagctgactggg

SEQ ID NO: 189718 - DNA, 122 bp, Homo sapiens
tggttgtccagtttatacttgagtgtgagtgcctcatgggtgaaggagttgttacctccccgttcctggagaaagagtatgtctcagtgttcagactatccccagaaaacccaggtttgggc

SEQ ID NO: 189719 - DNA, 122 bp, Homo sapiens
ccaaaatacctttccattcacacaattgacaacactgatgttagcaggaagtgtcgcacccgcggctgtgtacttatgtgtgctgtcatctggtgcgtgcacgtgtttccacacaggtgctc

SEQ ID NO: 189720 - DNA, 122 bp, Homo sapiens
gaggcctggcaccttttaagtgctccattagagctcactgtgatgattatgaagtggcagcgctgggactggcgcccagcccgggcgggcttacccgcctcgctgcaccgacctcctcggca

SEQ ID NO: 189721 - DNA, 122 bp, Homo sapiens
gtgaaatcaaagggctgtggagggcactggaggcgtggcaggccccaggctggacacacacgtgggaggtgtcgttctccagccaagaaatggccacgggccaagcacccccaggcgccctt

SEQ ID NO: 189722 - DNA, 122 bp, Homo sapiens
tggactacaaaccatgtagatacatagatctggaatttgcaacactgagcaggattagtacggtgcatatctgacctacaagttatatattttacaaatcatgtttgtttgctcaggacttt

SEQ ID NO: 189723 - DNA, 122 bp, Homo sapiens
tccattccggcccctttgtggccagaagaaagtggcccatctgtcgccagttagagactccgcggacctgtttttacccgcaggagagattaaccctttcaggcggcagaagggacggggat

SEQ ID NO: 189724 - DNA, 122 bp, Homo sapiens
cgagagcgcaccaggtcgctcttgttgcccacgaggatgatgggcacatcatctgtttgccgtgcacgccgcagctggacccgcagttctgaggccttctcgaagctgcccttgtccgtcac

SEQ ID NO: 189725 - DNA, 122 bp, Homo sapiens
gggcgctccgcggtgccgaccattggctggctctgcaggtctcactatcctcactccatccgcggagccaatggctgggaccgccaggagctcgttcgcgcgagtcacacgatgtcggcaac

SEQ ID NO: 189726 - DNA, 122 bp, Homo sapiens
ctgcagggccgtccatagtcatttctcagctgcccctggcttcactttcttgttgggtctcgggggtgccttcccacagcaggtatctcgtcaccccagtccagcatacatttatcactttg

SEQ ID NO: 189727 - DNA, 122 bp, Homo sapiens
ggtcctgcgcccaccagtcgggtgcagcgcagccaccgcccgccgtcaccccaccgagcccgagcatgccgggaattgtagtcctgcctttgttaaccgggttctggcaggttgctaatgcc

SEQ ID NO: 189728 - DNA, 122 bp, Homo sapiens
cgctctaccccgtgctgccactggagacaggcaggatgggagcccggctctctggctgcccgcagctccacgaggagacgatgcaggtggcccaccgggacagtgggaagctcactgggcgt

SEQ ID NO: 189729 - DNA, 122 bp, Homo sapiens
tcccacagggccggagcccagaggtgctgtccggggcgactgagctgggtgcgaggctgacgctctccacgctcccacccctgcaggtcttctcccctgggtgcggaaggacgcgctgggag

SEQ ID NO: 189730 - DNA, 122 bp, Homo sapiens
ttttttaaagtatctgttgaacactggtaaattttgttccccgcctctctggtaatcgctcgacctgttctttccagcaggtatttctcctgcagaacctgctggctggcccccgcccttat

SEQ ID NO: 189731 - DNA, 122 bp, Homo sapiens
aatgacagtcccatttattgagcacctactacttgtcaggcacttatctcacttaagcttcgcaatagtcctacaaggtgcacattatcatcctcatttttcaaaggaagaaactgaggagg

SEQ ID NO: 189732 - DNA, 122 bp, Homo sapiens
ccgttaaaaggccggtggagcggcccctgaggggcgctactttgcggcgcggaggagcatcgtggcggcgatgcgtcccccgttggtcgttgagcctgcctctgattggctggtttgtacct

SEQ ID NO: 189733 - DNA, 122 bp, Homo sapiens
ttgtaatctgactgctggggaacaggatgattctaggcaatgaaactcccacagccttcacggacaccactggaaaaagtagatgtggggcacaggagcatctgcagggggcccagagccct

SEQ ID NO: 189734 - DNA, 122 bp, Homo sapiens
ctcagaggaaaggatcacagtttcacaggaatttcccctcatattgccaatatttcttagcgaggtccctggccagagactgttataagcaaatctccatgtcatcgtctgtgaaatgggga

SEQ ID NO: 189735 - DNA, 122 bp, Homo sapiens
aaactggaaaaatgccaccatctaagccttcttccactgttgcataacaatatctagccccgagccataaaattagactactttagtggtgctgtcaagttgcttggcagtatttttggaat

SEQ ID NO: 189736 - DNA, 122 bp, Homo sapiens
tttaatcctcacacagcaacctttcccatgtgggaatggtaatccctgcaggtctgctgccggctgcgcctcccctactactcacccaacactttgagaacactggctccttcctgccttgc

SEQ ID NO: 189737 - DNA, 122 bp, Homo sapiens
gtttctcaagttactccctcaggcagcttgaaccagttaaactacatcctttcagctcttcggagcttattgacaaccagccatgtggtttcctaggaaacaaaaccttggctggaaatagt

SEQ ID NO: 189738 - DNA, 122 bp, Homo sapiens
ggtgagctttcacctgagtgcggcagttacggccccagtagcagtcaggacgggatgttacggccactggaaaaagagaaggggtacgcatctatgagatgtattgcacgcacccactcagc

SEQ ID NO: 189739 - DNA, 122 bp, Homo sapiens
gctggggatgaggtgacaaagctaatcgaggtggcaattggggaaggggttctgggctgccgcaggcacacaggccagagcttcgtggatacctgcagggcccaaaggtccctccctgtttt

SEQ ID NO: 189740 - DNA, 122 bp, Homo sapiens
gccttgagaacaccgcggagctcgttacgcgctgacaaaggaccctcaggataaaacatgcgtatgtacgcagtactccatcatgacgtgagaaaaccccggaacccagggcagaggacaca

SEQ ID NO: 189741 - DNA, 122 bp, Homo sapiens
ggaaagagggcagcgccggggtccagggaagctccttgggaatgaatggcctttgccaagcggttccggatcctctgggtcctttgggcccacggcacggtgctgcgcgagccctcagtgcc

SEQ ID NO: 189742 - DNA, 122 bp, Homo sapiens
catgcaatttctccccaggaaatccttccataagggtcgccacctgcaccctagagagagcgccctggcccctacaacttcagctttactgctgccctctgtgcgtggatatgaatttagtt

SEQ ID NO: 189743 - DNA, 122 bp, Homo sapiens
gacaccagcctcctgggtgttgggactggcgctagacctgggaatcactcagcaccggcccggcacacagcagatgctccgtgaactcagcctcgctcccagggacacgccccccacaccca

SEQ ID NO: 189744 - DNA, 122 bp, Homo sapiens
cgatcggggctgggactggagccctctcatggggttctcctcttacggagccctcttatccgcctcccaccccgggtggggctggtggtgatggagggcaggatttaggtttgactagaagg

SEQ ID NO: 189745 - DNA, 122 bp, Homo sapiens
ggagagggaggcacggaggcatacccaaccttgagtgcgtccagcatacgtgggtgtggacgaaggtgagaaagggttctttccaaaggttcaagacagagcttccagtaccttctaaatcc

SEQ ID NO: 189746 - DNA, 122 bp, Homo sapiens
cacacttgccccccgggctcgggagcatgaagtaggggcctgccatgggagcgggatcggcgcggggggcccgaggcacagcggcggcggcggcggcgcgcggggggtgagtacgaactcgg

SEQ ID NO: 189747 - DNA, 122 bp, Homo sapiens
ctgctgggccttgctctcacccagattctgctcctcggatttctctgaaccacctggggccgcgacgaaccacctggggccgcgacgccgtaagagttgggacgataggaccagtagaagca

SEQ ID NO: 189748 - DNA, 122 bp, Homo sapiens
ccgcggctcgaaatggaccccaactactcctgcaccactggtaagagaagcccaactctgcgccctgggattcccatttcccagccccagtactgagggtctctgggtttgaggaggttgca

SEQ ID NO: 189749 - DNA, 122 bp, Homo sapiens
tccctctgccccccccaccacggccgctcactgccgctctgcccccaggcctacgagaagcgtttccccacgtgcccacagatcccagtcttcctgggcagcgaggtcttgcgcgagtcccg

SEQ ID NO: 189750 - DNA, 122 bp, Homo sapiens
gtggtgggaaccgcgtggaaccgaagggctcccacgggaacaagggcatcactgacggtacggcctctcgggtctattgacccttctctgcctccccggtccggactcatacaacttggagg

SEQ ID NO: 189751 - DNA, 122 bp, Homo sapiens
gacacacaggaagactacactttccaatgttgctcacagtgatgttagggccatgtgcctcggttctgaccaatggaatgggagtggacacacaggcacctgtcaagtccagctccaattca

SEQ ID NO: 189752 - DNA, 122 bp, Homo sapiens
actttacacagaggctgacacccaaatccccagttctcggacaagcgagtaagtagttggcggagcaaagaacaactccaggtgcctcctgccagaacagatgccagcgtggaggaggtgct

SEQ ID NO: 189753 - DNA, 122 bp, Homo sapiens
agggagggctggagagcctccatctggtgccgtcggtggccactcctcagacagcgcgggcgggttcgcaggccctgggcaaatgtggtgttgccacagccccgccctacagggacagcggt

SEQ ID NO: 189754 - DNA, 122 bp, Homo sapiens
gtcacccacacagtgcagaggagcacagggcaggccagaattggcaccccctggtttggccgtggggaaggagcctgggcctgcacccgcacccaacgctgcagccgaccagctgaccgtgg

SEQ ID NO: 189755 - DNA, 122 bp, Homo sapiens
ggctagacaggtagagtcaaggaagtaaccctgtccttgtggtgcagcaactgtggtgaccgtacagtcaacacaataagccccaggattcgcactgtggtccagctcattcaagcaaggct

SEQ ID NO: 189756 - DNA, 122 bp, Homo sapiens
cccaatgctttccacccttaaggcccaaagagctggccctgggtgtgcgggtaaccgagacgccagtactagggctgtggtggccctcctccccatcgattgtaagttacagagaaaaagaa

SEQ ID NO: 189757 - DNA, 122 bp, Homo sapiens
tttagccttcgcacaccggggcatgctaaggtcgcgctggccagcgggaagtatttccaccgttagaggaaggggaacccggggcagcctctatttagtgcggagcctgggctgaggcctca

SEQ ID NO: 189758 - DNA, 122 bp, Homo sapiens
caataatgagcaaaccctccaagaaaccccaacagaattgattactctgacttccagcctcgccctaacatttgcaagcccagggcttacctaccctatgtttaaaattttacaaggactat

SEQ ID NO: 189759 - DNA, 122 bp, Homo sapiens
tggcccgtctgcgtgtccgctcccggcgtactccgcgctccctgttcccggcattccccgcgctccccgagcttcccgcgctcccctgctcccggcattcccggtgcttcccgttcccggcg

SEQ ID NO: 189760 - DNA, 122 bp, Homo sapiens
ctacacctgcgctgctgaacactgcttgagaaagtcatacacagggcctccagcctctcccgggatcacagcatcccgtaataaccctcacccatatcccaccacagctattccaaacagtt

SEQ ID NO: 189761 - DNA, 122 bp, Homo sapiens
ggaacaagggcatcactgacggtacggcctctcgggtctattgacccttctctgcctccccggtccggactcatacaacttggaggcccagaggtcgtccagtctcatcttgacgtcaggtc

SEQ ID NO: 189762 - DNA, 122 bp, Homo sapiens
gccaattagggaaagagaccataaacagaaatgcctttaaaacgttatgtcttggccaggcgcggtggctcacacctgtaataccagcactttggggggccgaggcagacagatcacctgag

SEQ ID NO: 189763 - DNA, 122 bp, Homo sapiens
atttccatctcctggcctttccgctgccgtctctctgctggatgctttatccttagtccccgctgagggcagaaggactttccaggaggaattgaccagaacgcagaacagcaggatgtgga

SEQ ID NO: 189764 - DNA, 122 bp, Homo sapiens
aagcatccagaacagcaccaccatctagcggccgctcgagggaagcacccgccggttggccgaagtccacgaagccgccctctgctagggaaaacccctggttctccatgccacacctctct

SEQ ID NO: 189765 - DNA, 122 bp, Homo sapiens
tttccagatcgccctgcgcagatgctcccctcgcatgaaatcactgctcagcgttagccgcgggccaagccccggcccagccccagggaatacttaggggactgcaggtgcaggccgtgggg

SEQ ID NO: 189766 - DNA, 122 bp, Homo sapiens
cggccgaggtcctgctttggcttcatacttggggtcccagggcgctagtggagtcatcctcgagggggccacctcccaggccacctggggggaacggggatctggggggacgcttggggatt

SEQ ID NO: 189767 - DNA, 122 bp, Homo sapiens
ggtaaaacctctttttctggatgtccactcgtttggaggccagctcctggatttcggctgcgcccccggcctgattaggggtggctgaggccgcgtagtgggggtagtgggagtgctgggcc

SEQ ID NO: 189768 - DNA, 122 bp, Homo sapiens
aaggaccttaggtttcttcagttgtaacaaccatcctctgtgttacatgttattgttcaccggcattttgtttccatcttgttttcaatttttttttttttagacaggacttgctctgttgc

SEQ ID NO: 189769 - DNA, 122 bp, Homo sapiens
agggtgcagggaggaggcgagggggcagccgccaggggattccagctgtcctccctgagtcgggccgagctgccggcctaggggctgcccagctggttccggttctgcacaggggtcccagg

SEQ ID NO: 189770 - DNA, 122 bp, Homo sapiens
tccaacttgtgggtgctggagactggaaatatcttgcccgccccccaccctggcccccctcgcccttcctaccagacctggctcagggcaactgctaaggccccgcccctctcctcattcca

SEQ ID NO: 189771 - DNA, 122 bp, Homo sapiens
aggggctgcacgaggggcttccccaggtgcagtgggctgaggacagtgtgtgacggtcgccgccaaaagcagttctactctacctgttattgcattatacgctggttagactcaggtggtgc

SEQ ID NO: 189772 - DNA, 122 bp, Homo sapiens
cctcaaggctggaacagcgcgcagtggccaccgccgccgggtctccagcccccaggagcgcggcctcctcccggactctctccgatgcggtcctgccctggggacacggcaggaagaaggga

SEQ ID NO: 189773 - DNA, 122 bp, Homo sapiens
ccagctccccatgaaggctgagaaaatagtcaagtaagaaaataggagggtagccaagaccggctgccctctctaggaaagatgcatagtctccatgacatctcttgctgcctgtcatagca

SEQ ID NO: 189774 - DNA, 122 bp, Homo sapiens
gtcttctcaatgaatatggccagtcgcgggggaaccagttcgcagtcgtactctatccgccgtgccccaaagatgaacttcccatccgagttgtgtcccagctggccatattcagggcaccc

SEQ ID NO: 189775 - DNA, 122 bp, Homo sapiens
gaacctaggaggcagacattgtgctgagccgagccaagatcatgccattgcactaaactccgccttaaaaaaaaaaaaaaagattcccacatctttactagtttgcagaaataagatcctag

SEQ ID NO: 189776 - DNA, 122 bp, Homo sapiens
agcggctttgttatttaaaagaaatgcaagggaagagtggggcggaggcggccctttcaccgtgaagagccctgctcagcgccctgcgccatgggtgacgacatttcctggcagcaggtggc

SEQ ID NO: 189777 - DNA, 122 bp, Homo sapiens
agccgccatgctggtgtcacttggtgtggtgcgctggctcccgctccctcgttacaaatccggaaacattttcccatgtgtaaagctcaggacacatgagcctgagcttaatttagtagctt

SEQ ID NO: 189778 - DNA, 122 bp, Homo sapiens
atgctcaagctctgactcccagatggcggtgctagagctctggcgagactgggacagccccgttgatggccacaggctttctggagctatgcctaagtcacagcaggatggtttttttccct

SEQ ID NO: 189779 - DNA, 122 bp, Homo sapiens
ctaagaccggacaacttgttcaaggacacaaagccaacatgtgttagaaccaggacctgccgggtatggtggctcacggcagtaatttggcgcttcgggaggctgaggtgggaggaccactt

SEQ ID NO: 189780 - DNA, 122 bp, Homo sapiens
ccgagtgcggctgtgccggtggctggagtgccgaggggtgcggggtgccgggggcggccgcgtctacgctgtccggagggtgaacggccgcgggcttgtcggggctgggggtggcgcccgag

SEQ ID NO: 189781 - DNA, 122 bp, Homo sapiens
cacccacctctcccccggcagccttccagcgagttccacatccccgtgagcaaagacgtgcgcctggctctggcggggctgtccttttgcacctgcgctgccatattccctttgtctgcggt

SEQ ID NO: 189782 - DNA, 122 bp, Homo sapiens
actatcttagcccagtcagggagctctgcttcctagaaaggcatctttcgccagtggattcgcctcaaggttgaggccgccattggaagatgaaaaattgcactcccttggtgtagacaaat

SEQ ID NO: 189783 - DNA, 122 bp, Homo sapiens
ctccgtttaaggattcttgactcctgaaatccgcaaggaagtgggttcttttagagccagcgccaagagcttcaaaaaatccttctaaggtgaacccctccggacccggatagcgagatggg

SEQ ID NO: 189784 - DNA, 122 bp, Homo sapiens
tgcatctgacagccgcttctccacagcaacgccggaagccggaggtcggcggcctcacgtcgaaagagggctgaaagcaagccaaccaagaacacgacacacagcgaaaagctctgccaaga

SEQ ID NO: 189785 - DNA, 122 bp, Homo sapiens
tcgcagtggagccgcccgtcgtccggaaagagctgttgggtctgagccggcaggcgaaggcgaaagggtctgggactacaaggtttagctcccagccagagcaggaaaggaacgactgactg

SEQ ID NO: 189786 - DNA, 122 bp, Homo sapiens
agaactcgtgtttggatgcgctttcttcttttatccattgtgtcttctcctctgccgaggcgtctcccattagtgcctccccctctgctccctcctttcctggcgacgacgctcatctcagc

SEQ ID NO: 189787 - DNA, 122 bp, Homo sapiens
aatgtatttacagctattgacggcctgaacgtggcctattgatccacgcctgagcctggccgggcggcgcgtgcacttggccagggcagccctgcgtgacgaatgggcagctcacagcccac

SEQ ID NO: 189788 - DNA, 122 bp, Homo sapiens
aatccatggtctctcaaaatattcacaagagaaggcatcttggaggaactctatgttccccgtcagaaaagacatttggctttagacctatcagatctcttcaaaccactgggaaatctggc

SEQ ID NO: 189789 - DNA, 122 bp, Homo sapiens
tggtcagcaaccacgctctggcccagccgttcaataactttcccatcttccatttcgtaccggtcatctaagtattttgcggtggcctcagaaatgtgaactttgccggccactcccagctg

SEQ ID NO: 189790 - DNA, 122 bp, Homo sapiens
agacgaggcgtccctgggcccgcgggagagttgtgtcacggggcactgagctgttccctgcgctaaggtgcttcttcctaagtgctgttcagatttttaaaatagccagacaagttgctgct

SEQ ID NO: 189791 - DNA, 122 bp, Homo sapiens
gttggactcctgttgactcactctcaatctctgatcagtagagacctgggtgtagacgatcgggatttctgggcaaaggggctcctgatgatgaaacaaagccgacaggtggtacctgcaaa

SEQ ID NO: 189792 - DNA, 122 bp, Homo sapiens
actcgtatgctcccggacgccctctccggcgtcccttcgctgagcccggcctggctagcccgccaccccgcccgctgttacccgactgcccgcaccgaccacctgcggccgccaaggtgcgg

SEQ ID NO: 189793 - DNA, 122 bp, Homo sapiens
caatcgccaaggctccggtggtttccaggagtaacgaggggacctggcgggctcctgccccgttaggcgtccccgcgcatgcgcaccgcttcccgtggcaacccggcgcccacgagggctcg

SEQ ID NO: 189794 - DNA, 122 bp, Homo sapiens
ggctgcgaaggaggggcggatggagctgcatgctccgcggagctggcgggagccgggagccggggagcaggcaacagcccaggttggggctgtgggcctgggcctctgtgtgctcttggggg

SEQ ID NO: 189795 - DNA, 122 bp, Homo sapiens
ggcaatagtcaccaataattgtgggtcacggaagagcatctttccccaccccccggtgggcggggcctgaggcgtaccggaggccctgaagaggtgaaaggtgaagtgagcattgggaggag

SEQ ID NO: 189796 - DNA, 122 bp, Homo sapiens
agtggcccaactggtttctgcgtttagagggcggtttagaagtgggaaggatgggttaagcggggtttatgcggcatttagggggccacccagcacgcacattgaacagtgagatttaaacc

SEQ ID NO: 189797 - DNA, 122 bp, Homo sapiens
atgtgatgacattcaggtatttgtcatcagccagtgaaggaaggggaggcagggaccagacgcccatcagctcagagaccggggaagccgccattggcctccccaacaagtgactactttga

SEQ ID NO: 189798 - DNA, 122 bp, Homo sapiens
gcaaatgcattcctgataaaactgaaagtacttattcaagtacctaataaaactgagtcacgcaccactgcaataaggggccactggcctgaaaaatccccaaatttgtaagtgggcagcct

SEQ ID NO: 189799 - DNA, 122 bp, Homo sapiens
gaggcagaacatgggccagaggtgtcgtcgggtgagggtactgagaatcagccgggtaagcgctgggatgagaaagagcgggaacggcttgtggagaggggaagaagtttgagttttgtgat

SEQ ID NO: 189800 - DNA, 122 bp, Homo sapiens
ctttcaattaccatcaacctaggaaccgacattttcacgggtctatatcctcacccaggacggggccaactggggctccatctttcagcacgtcactccaaaagggcagctccgggccctat

SEQ ID NO: 189801 - DNA, 122 bp, Homo sapiens
gcctggtggttgtttgtccttctcaggggaaaagtgaggcggccccttggaggaaggggccgggcagaatgatctaatcggattccaagcagctcaggggattgtctttttctagcaccttc

SEQ ID NO: 189802 - DNA, 122 bp, Homo sapiens
ctcaggtgatccgcctgtcttggcctcccaaagtgctgggattacaggtgtgtgccaccacgcctggcccatcgaaggattttatacaggaaagtgacttgagtttaaaatgataaatttga

SEQ ID NO: 189803 - DNA, 122 bp, Homo sapiens
gttatacatctcagatttcctgtttggaggttgcactgaggaagctgcaatcctgccttccgttcctccgggtgcatcgaatacagactctcacttcagagaggatcccggagctttggccc

SEQ ID NO: 189804 - DNA, 122 bp, Homo sapiens
cggcgaacctattccagggcgcccttcattttcatttcttgaaacaacagccttgcaggccgagccgctgttcccgagaactcggcagccacagggagcaggttgcatggacccaggagcgc

SEQ ID NO: 189805 - DNA, 122 bp, Homo sapiens
tcagaagactcccagagattggggacggccgaggcaggtcgggggtctggtttggatccccgggttactttctgtttcattttgaaatgttccctgtttctgcaaccggttgcctccaatgt

SEQ ID NO: 189806 - DNA, 122 bp, Homo sapiens
gccagcgtcgatctcgcttgtctatcacgatagtcgcggtgctgcgactgaacgcgcctgcgcggaaagggaagcatccacccttgccgattgccacctctttaaacgctgttccttcactt

SEQ ID NO: 189807 - DNA, 122 bp, Homo sapiens
tttatacaaagcactttcaaatacattacattatcttaaatttataataggagtttctttcggattcagtttaaaaatgacaaatagcatttgttgtgcccaagttagaattacaccaaaat

SEQ ID NO: 189808 - DNA, 122 bp, Homo sapiens
ttctccgaaggtgtccttccactccccaccagcgcgcccatcctgtcactcggcccttcccgccaaagcatctggtgtcagcattattgtatcccaggcatctggtgtccgcattattctat

SEQ ID NO: 189809 - DNA, 122 bp, Homo sapiens
agcagaagaacgcaggcggtgtcggggaccatggcggtggcggggagctgggtggctgctcgctttctaccgcccacgaggcccgcggggcctatttatccccaaggcacggccggccccag

SEQ ID NO: 189810 - DNA, 122 bp, Homo sapiens
caggcctgccgctgtcccccagcgcttccctgggtcctcagcctgtgcagatgtggtggccgtgctgtcacagcattagttcaagtcagtcttttgataggtaccactcggatggccagcct

SEQ ID NO: 189811 - DNA, 122 bp, Homo sapiens
tttaacaatctttttgaaggcccgccatgtgccaggcaaattgtgcctggtgctggaaatcgcctgaagcagctctcagtggcttgaaaaacaggaaaagagatcattccaatacactgcag

SEQ ID NO: 189812 - DNA, 122 bp, Homo sapiens
caccctcaccgaccagcaaggctgcaggataacagcccctttcaaacgaggatgccaaagcgcccgaagagtcagtgacctgcccagggtcaccagagtaaggacggatgcggccaagctcg

SEQ ID NO: 189813 - DNA, 122 bp, Homo sapiens
ctgcagcccaggagctcatcctccgtcttcctgaggcgaacgggggcctgggggaccatgcgggaaaaccccttctcatccccaggcttttgggaccccctccctgcctccagcctgttctg

SEQ ID NO: 189814 - DNA, 122 bp, Homo sapiens
cagggaagtgaaataatccataagcacgtttttaaccgaggacggctggcaggagccctgcggcatccggagatgggggagcggggttgccaggttttaatgcctctccccacccacccttg

SEQ ID NO: 189815 - DNA, 122 bp, Homo sapiens
tgacctggtgatccacccgcctcggcctcccaaagtgctgggattacaggcgtgagccaccgcgcccggcctacatcgtgctttcttggtcatcacagaatcctcagcagtcaataaacttt

SEQ ID NO: 189816 - DNA, 122 bp, Homo sapiens
tcacctaggctggggccaagccgcagagcggagttggcatttccagattggggctcgggccgcgcctcctccgggaccctccccttggaccgagccgatcgccgcggggcagttcgggccgg

SEQ ID NO: 189817 - DNA, 122 bp, Homo sapiens
tcattgtaagctgccaatcctcttgggaggctgctcccagcttggactgagctgagtcttcgcatgccttgaacaatgaatttgcatcctggttatgttccccatgggggccagccctgtcc

SEQ ID NO: 189818 - DNA, 122 bp, Homo sapiens
acaggaaggcagtgatgatccattgcatgggcaggtaactttctgtggtccctcacatggcgtgtccaagaagctcctggggtttcccaccctcattctgtccctgtacccacttaggactt

SEQ ID NO: 189819 - DNA, 122 bp, Homo sapiens
tcacacacgcgcacacacgcgcacgcacacgaacacacatgcacacacacgcgcgcacaccgcacacacagaggtgtggtcttgttctactcccacagtttatgttctcagcagctccagcg

SEQ ID NO: 189820 - DNA, 122 bp, Homo sapiens
ggggaagctccgctccctctacagaggacaaccgccccgccgccccggcagcctccgaggcgccctctccgcgcttcactctcggccgctcccccggagccacgcgagccggtcgtggcggc

SEQ ID NO: 189821 - DNA, 122 bp, Homo sapiens
agccagccgacttggccctctccccttctgaagttttttgatcaggactacaggcgcggacgataacctctggattttgaatcccaacagtgtcctatccaccaccgggggtggcagccacc

SEQ ID NO: 189822 - DNA, 122 bp, Homo sapiens
agattgatcaggtcctacctctgcacagccctctgcagggtgccgtgttagatataaaagcgcaagaggagggcccactctggaagagctcacaactccagccagaaaaccaagaggagaac

SEQ ID NO: 189823 - DNA, 122 bp, Homo sapiens
tcctttctaagtcgggcaagaatgttctggagagatgtcctccacagatgggcacttgctcgtacaggaacctttccgccgggctggtggacggagatttctactctgtggacacacttaac

SEQ ID NO: 189824 - DNA, 122 bp, Homo sapiens
gtgaaataacacttgtatacccatttgacagatgagcaaactgaggctcagactacttaacgacttgcccaggtagtcatctacgcagccaggatttaactgcttttccagatacacaagtg

SEQ ID NO: 189825 - DNA, 122 bp, Homo sapiens
atgacaggctccggtgccgacccaggtcctgcgcccaccagtcgggtgcagcgcagccaccgcccgccgtcaccccaccgagcccgagcatgccgggaattgtagtcctgcctttgttaacc

SEQ ID NO: 189826 - DNA, 122 bp, Homo sapiens
cctgccccagcctgacatgcgctgacaggagtgcaggccctctgagtcaaccccctggggcggccccgcccccctgcaccctgactcatgtgctgggaacggcctcccaccccagggcctgg

SEQ ID NO: 189827 - DNA, 122 bp, Homo sapiens
tgggcgtgattgacttagcaaggagcatcctgtgtgtcccgcaggcagctctgcagcccacgaagatagagaccagatatacgaggggtccgtgcaccccaggcggcggccggctcgctgag

SEQ ID NO: 189828 - DNA, 122 bp, Homo sapiens
acgtggagaggaacacaggccgacagtatagaggacctgagcggagagtcctggggaaaacgctgacttctttttcttcacatagttccggctcgctgagctcggcggaaggagacggtggg

SEQ ID NO: 189829 - DNA, 122 bp, Homo sapiens
aagggaagatagccctattttacaaaataagcagaagacttggagtcacagatccaggcacgagtccaggttccaaccttcctcactgtgtaaggggccgggagcaccttattgctaactcc

SEQ ID NO: 189830 - DNA, 122 bp, Homo sapiens
gacaccaggatggccccgatgcagtgacgtggtagccagccggcgatccactccagcaggcgcttggtgcaggccatgacgtcctccaggaagaacaccatcctgcgagaggcatgggggtt

SEQ ID NO: 189831 - DNA, 122 bp, Homo sapiens
gcaaacccaatcttggttcactttggcgtctcggaactgacagggctccgtcagatcttccgtttccctcctgcgcgtccgtgatattgattgacagcctctcccctcccaccctccctggc

SEQ ID NO: 189832 - DNA, 122 bp, Homo sapiens
ttttatgttggttaccttcactccctcagcaccaccacaaaattcaaaatttatggggggcggagaagacagagaactagtaacctgggcaagaaaaaagagaggaaaaagctctttctcat

SEQ ID NO: 189833 - DNA, 122 bp, Homo sapiens
tgcccacggagctcccagctgaggcgctgcttctccgggctgtcgattggacccgccctccggtgcctactgagctgatatcagttctcattttacacactggctcagttcagcaggaacag

SEQ ID NO: 189834 - DNA, 122 bp, Homo sapiens
ccacgtagcacacgttcttccgcagcccgcacggggcgccggcggctccccggccggcgccgagtcgcagctgtgcacgctggacccctggccagccagcacggaagccagcgcccccgcca

SEQ ID NO: 189835 - DNA, 122 bp, Homo sapiens
cggagagtcctagatttttgctcttagttgtaacacatcaggagtgacatcctgtctccacgatgttttctccttaagatggagacagatatagcgctcctggatcagagagcactgccacc

SEQ ID NO: 189836 - DNA, 122 bp, Homo sapiens
tggcccgccccacttcgcaacctgagggcgcatgaccgttactgttatcactgaaaaaagcgactcataaggctttaaaaggaggctacttcagccagtagcatccagggcgagaagaagaa

SEQ ID NO: 189837 - DNA, 122 bp, Homo sapiens
gagaagggctcagatcactcctcggacaagtccccgtccacaccggagcagggcgtgcagcgcagctgctcctcccagtccggccggagcggcggcaagaattccaaggtgagcgggacccc

SEQ ID NO: 189838 - DNA, 122 bp, Homo sapiens
tttgagcggtgtggctgggcttcccagcgttcgtctgcccgcacccccgcctgcccaactcgggacctgccagggccccaggccccacccccgtctggcctgcagggcctggatgacctcgg

SEQ ID NO: 189839 - DNA, 122 bp, Homo sapiens
ttttccgcggagaccccagagcctggactttgcctgctgggggagctttccgcacagtcccgcagcctgcgcccagcggaggtgtagccggggccgcgcacccccgccccgcccttgcacgt

SEQ ID NO: 189840 - DNA, 122 bp, Homo sapiens
cacatctgcctccttgtgtcaccagcccccacccggggctatatatcagaatgacgtcttcgcgcagcgctgatttttgtccggggtttgggtttgatgtcattggcgcaacttctccccac

SEQ ID NO: 189841 - DNA, 122 bp, Homo sapiens
agtcccctgtggggggtggccaaggccacccagcgccgcttccccccattgtccccttcccgtctgtcccctgttctcgcccgaggacccgtggctccggcgcccctgcttcgctggtggtc

SEQ ID NO: 189842 - DNA, 122 bp, Homo sapiens
gggctgagagtctccagtagttaaaaaaaataagcgttcggagaggatggggcctcaggtcgttactgcggtctccagcagggggagcccaggtagtcatcacttgccggctccagacctca

SEQ ID NO: 189843 - DNA, 122 bp, Homo sapiens
tggtgggcggggcgtcagtgccggccggggtcccggggcccccgcagcccagcgggcgctcggtccgtccagactggcccagagcgcttgcggaagaaatatttctggaacacttgttatgc

SEQ ID NO: 189844 - DNA, 122 bp, Homo sapiens
ctggcgtggattctgcataatggtgaccacacgttccacctcatcctcaatgagctctcccgccctcttggtgaggtcaatgtctgctttcctcaataccacatgagcatatcttcggccca

SEQ ID NO: 189845 - DNA, 122 bp, Homo sapiens
tgcctgactccccaggcaccttgggtgccacataaacaacaagcacagcccagctcctgacgatagagcccaatctggcagcaaattgagaccagcagaaaccccagttgggggatttctgt

SEQ ID NO: 189846 - DNA, 122 bp, Homo sapiens
caatctcgagcgagcggccttttccacccccgcggtctcttgcgccctctggtggcctctcgcgagaacgacgctgaacttgttcaggtgggacgccaataaagatttcttattcaaaaaac

SEQ ID NO: 189847 - DNA, 122 bp, Homo sapiens
atggggtctctctcctgactcccaatctcccagctcacaaagtgattctgcaaacccatccgcaaagccccacctggagtacatacagctcccgatgtgcagatgcactcacacaatacaca

SEQ ID NO: 189848 - DNA, 122 bp, Homo sapiens
cctttctggcgcgcaaggagggcaccaagcgcggcttcctgagtaagaagacggccgaggcgagccgctggcacgagaagtggttcgccctctaccagaatgtgctcttctacttcgagggc

SEQ ID NO: 189849 - DNA, 122 bp, Homo sapiens
gggctgccctcctgtgatggccaggctcggctcactgtgtctcatagcggctgccttcagcgcccccggcttccccaggccttgctgacgcttgcccttctgaagccagtcatgaccagcac

SEQ ID NO: 189850 - DNA, 122 bp, Homo sapiens
gctttgagggagggcagaatgtcaggtaccgaaagcaggaatccgtgaagaaacccaaaccggtttccatttacaagccctaacactgggacaatgagaatccgtttcacatggtagagcag

SEQ ID NO: 189851 - DNA, 122 bp, Homo sapiens
gccgcgggctgcaaacggcagaggcgcgcggggtggcgacagtggcgcgggcgcagtgagcgcgtccgagaacagaatgggacgaaacggggcgcttagaggcccgggaatctgtgggtctt

SEQ ID NO: 189852 - DNA, 122 bp, Homo sapiens
ctgtgcggagcagcgcatcgggcccctggcgttcctgacagcctccccggagcaggtgcgcgccatggagcgcactgtggagaacatcgtactgccccggcatgaggccctgctcttcctcg

SEQ ID NO: 189853 - DNA, 122 bp, Homo sapiens
aatacatgtaacataggatgagtcaatccacctcccctagctggactcccctgctcggtacgtggagatattatcataacactggttggttgtgagatatgagtgacacatagcaagtgctc

SEQ ID NO: 189854 - DNA, 122 bp, Homo sapiens
aacgttgtaagttttctaaaacacataagctctcaataaacgttagcttatcattgtcaccgttttgttcgtaatgtttgaaaactccaactgtgatccactacactacccttgtgggatgc

SEQ ID NO: 189855 - DNA, 122 bp, Homo sapiens
tttgggggcaatggagagccgttggaccttttttttttttttttttttgagacagagtctcgctctgtcacccaggctgcaatgcaatggcgcgatcttcgctcactgcaacctgcgcctcc

SEQ ID NO: 189856 - DNA, 122 bp, Homo sapiens
ggattctcggaggccaatggcaatacagaggaggcgggtgcttccttaccactcaccttgcgctcagagaagccacatttaaaaggtcgtgccgggccgggctttcgcaggcagtgggacca

SEQ ID NO: 189857 - DNA, 122 bp, Homo sapiens
ccacgtgggacgtcactagtgacaggtttggggatctggacccgccatgccacggttaaacggcccagatcatttttctttttcaagatttatctgctcgtgccaagctggggaccgggttg

SEQ ID NO: 189858 - DNA, 122 bp, Homo sapiens
ctggcaagtgggagatgtcctcactgggacaagacacaggtgctgaattacatcacaaagcgtaacctccctgcagggcgtggactcagaggggcaagagagaccgcagaccaggacccaca

SEQ ID NO: 189859 - DNA, 122 bp, Homo sapiens
ctgtgcgcgcacggctctctgcctccctctcccccgccgcggccgcctcctcccactctgcgttctcgcgctcactgtgccctgcccgggctcgcaccttgcccgtgcccttcactcgctct

SEQ ID NO: 189860 - DNA, 122 bp, Homo sapiens
ccgcggcggccctgccctttcccccgggagcagcagggacagccttggagcagcagctcccgcagggggaggaatggcgcagtggcccgaggctctggagctggccccctgctcgcccgggg

SEQ ID NO: 189861 - DNA, 122 bp, Homo sapiens
gaccccttgacctcagcaaaacttcacttccacagaaagcccccaactagattaagttcccgttacacatcctcaaagccctgtatgtctttccttcaaaacttttctcacaattttaatta

SEQ ID NO: 189862 - DNA, 122 bp, Homo sapiens
tgtgtcaggaggctggggtgggctggagagggccccccagcggtggctccaaagcatctccgcagcgatggagaactggggttcgtgggcagagtggtgagcgacggagaactggggttcgt

SEQ ID NO: 189863 - DNA, 122 bp, Homo sapiens
ctccccctccccatttgtccccctcacctgggggtccccgaagtagatctgcatgaccagcgccacggtgacaccggtagcgaaggtgagacaggccgtgacgatgaccgtgagcccatcct

SEQ ID NO: 189864 - DNA, 122 bp, Homo sapiens
aggtggtgtttacagccacgaggccgggtgagatcatccaaggagtgggtgggtgtagaccgcggagccggcgcgggtgagggatagtgcccgcaggtgaccgcgacgaggcaggaatgtct

SEQ ID NO: 189865 - DNA, 122 bp, Homo sapiens
cttcccccagggagccttcagaactctcatcgacatccctcccttggcacagaaagccctcgcggctccccaagcctgtttgggtcccctggttatttgctgctatggcaccccgcagtgct

SEQ ID NO: 189866 - DNA, 122 bp, Homo sapiens
agaaacactgtgtcaaactggggcaaacaacctcttctttgggactggaacgagactcaccgttattcccctgtaagtccttacctcttgacaaaaaagctcttagtctgtaatgacaagtt

SEQ ID NO: 189867 - DNA, 122 bp, Homo sapiens
ttggactcaattcatcttgggggtgaatcccagctctgtcacccactgactatgtgacctcgagcagactgcttaattctctgagcctcagtctcaacatctgcacactggggatgataata

SEQ ID NO: 189868 - DNA, 122 bp, Homo sapiens
ccccactgctacagggagctgaggaccagtcagggcgtgcctgtcccatcgctgccatgccgggccccactgccgacgtcctccttcccctgggcagcgtgggggatgctgaaatccgtggg

SEQ ID NO: 189869 - DNA, 122 bp, Homo sapiens
gtgctatagaagtaccgcagagagaggaattcgttttgaatggtgtaaaaggtagattggcgcaaaactcacagaggcaacattttagaggaggaccttatagaacgaggaggagctcacaa

SEQ ID NO: 189870 - DNA, 122 bp, Homo sapiens
ttggtcggggggagggatttggggtggggctagccgcctcttgaggctttaaaagctcatcggagaggggcgggatgctgtcatttgctctctgactctcagagagggaggcacgctttcct

SEQ ID NO: 189871 - DNA, 122 bp, Homo sapiens
ttcacttcctctgtgaagctcaggggtggaggccccgcggaagcccactgtggatccctgcggcaccccctgtgaccctcacggtaccccccgtgactcccacggtcgtgccccccacgtgg

SEQ ID NO: 189872 - DNA, 122 bp, Homo sapiens
gagaacacagggacgtgccactcgagggggaggatggtatggatttctgcttttgtcacacgggcatccattggaaaagagaagcaagaatgaacgtgggccctcgggtgggaagactagga

SEQ ID NO: 189873 - DNA, 122 bp, Homo sapiens
agcgccgctgaaacccgctcctcgttctacttggaggacttgttccagccagcgctagtgcgtgagtataaggagagacgggaaggaccggctccatccagccctgaggatcccgaagaaag

SEQ ID NO: 189874 - DNA, 122 bp, Homo sapiens
acttgttcagctacctggaagctccctgaacccagttctcctgggtttttatggaagcttcgtgacaccagcattccttctcccaatgtatagtgtgggaccctctccagagagggtcttaa

SEQ ID NO: 189875 - DNA, 122 bp, Homo sapiens
taagctgataatgttagtgagaatgacaatagcaaaacatagcagtgtggctgttgtccacggagcactgactatggagccaggtgctttcaagaacatgcaaagcttaaatcagccacgcc

SEQ ID NO: 189876 - DNA, 122 bp, Homo sapiens
gacagagccaagttacaactctggatttacacagcttttggaaaagtcacgatgagtgtgcggggaatccctgggacctcccctgcccataatgaactagcacgggagggggtcatggggct

SEQ ID NO: 189877 - DNA, 122 bp, Homo sapiens
gggtgggagcaccgcttcatcgggaccgagttctgggtgggagcactgcttcacggggaccgagttctgggtgggactgagttctgggtgggagcacagcttcacagggactgagttctggg

SEQ ID NO: 189878 - DNA, 122 bp, Homo sapiens
gaagcccatagcccaaggcaggcaggtggaaagaattccagagcagcagcgacagtgccccgcctgaacctcagctggggcttcaagactgtttggttccatgggacagcccattctcttta

SEQ ID NO: 189879 - DNA, 122 bp, Homo sapiens
gggcagcagctggaagaagtttggacatgctggccgggggacatatgagtggttaaccagcgagcccggcctgcctctcctggagacccagctgcaggtctgtacttatgacttaagtcttt

SEQ ID NO: 189880 - DNA, 122 bp, Homo sapiens
gggacgcggcccagccgggaatcggggtgcccagggtgcgatgtgcgaggggctcctgagcgcgtgtgctccgcccgaccccgccctgtccccccgacacacaggtggacccagggtcagct

SEQ ID NO: 189881 - DNA, 122 bp, Homo sapiens
tctttctcttttgtgcctttttagcgcgaaaagtgtatgggaagactaggtgctcgttagcggctcggttagaactacattgcccacaatgccccagggaacatttgtagctctagaactac

SEQ ID NO: 189882 - DNA, 122 bp, Homo sapiens
gacgtcggcgtgtgtctacaccacggcctctgcacacccacttgcttcctccccacaccgcgatctgtctacaccagggtctctgcttacaccaccgactgtgcacccacgcacggcgcggc

SEQ ID NO: 189883 - DNA, 122 bp, Homo sapiens
atcttttcccagcttaccaccacacacactgccccagcacttacctctcccttgttcaaccgtttacacagaggtgccatattcaggccgccctgatgctgccaacctgcataggagttgag

SEQ ID NO: 189884 - DNA, 122 bp, Homo sapiens
acagagtctgtcagggaggtggctagagaggcccggaagtggcttctgtgccccgccctgcgggtggtttgctagtttcaagcactttgtgagtatggggtgaatcggcgtcggccttccac

SEQ ID NO: 189885 - DNA, 122 bp, Homo sapiens
tgtgtggagtgagggggcacctcccagggacgcccctgccggctctgcacagggcaaggacgccgcagacgcctgcccaccagtcatggctagccgggcagggccagctggggcagaggggc

SEQ ID NO: 189886 - DNA, 122 bp, Homo sapiens
gctgctcttctggtttaggttctggcctttcccactggggttttccagcagcctctgtagcggtcttcgttgttgagcacttcactgttcatccccaggttctccatccagctgctgttgga

SEQ ID NO: 189887 - DNA, 122 bp, Homo sapiens
ccaatgtaacacagtgcaggggctcaagagaaattgaaatccagcctgcatactggctatcgaatgccagagggttttcatctacttgggcaagtacctaggtcttcttgagtagctgttta

SEQ ID NO: 189888 - DNA, 122 bp, Homo sapiens
ctcccagggggcgctgaggccccgcggctggctttccgcctgcccaaaccctgaaaaatgcggcgtgtgctctgcaaactcactggtgctgtgtgtgtttttccaatcaatagaagatgctc

SEQ ID NO: 189889 - DNA, 122 bp, Homo sapiens
cacttgctgtgataggaagacgatctaggcgtgctttgggtgtggctagatttccttttacggctgcagccccgtttctcatcacctgcccctcacattcttttctctggcctgttccacag

SEQ ID NO: 189890 - DNA, 122 bp, Homo sapiens
tccagtcctccagttttctacccccaagggatccctgcccatagccgtgagggtccaccccggagtccaccctcaggtccacagcccattctctgcccgacaccgcggctgactgttgtcat

SEQ ID NO: 189891 - DNA, 122 bp, Homo sapiens
gttgcaaaatgctagtaggtctgggactcttcaactttctcttctagggccaagtagactcggtgtaacttattttgtaagaaatgggtatgggtgacaagaggggccaccttccacccctg

SEQ ID NO: 189892 - DNA, 122 bp, Homo sapiens
ttaaaatataatgatgtgtcaacttcaaccatggataaggccatttagccttagtaaggccgatcgtattaagattgtgcctgtttggcaaaatttcaagtcatcccacttaatattcagga

SEQ ID NO: 189893 - DNA, 122 bp, Homo sapiens
caaaaaccaaaaagctcttcagacctctcctagattagaaaaccgtggtgtctctacggccgggccctctgcctctgtcccagcgtgccctcactcccgcccctctgcctctgtcccagcgt

SEQ ID NO: 189894 - DNA, 122 bp, Homo sapiens
aggccaagggtgtgagaccagtctggatatcaaagtgagactgtgtctctgagactttctcgctactaaataaataaataaataaatttttgatagaatgaaaagatccggagtgcttacaa

SEQ ID NO: 189895 - DNA, 122 bp, Homo sapiens
ttctgagcatctattttgatccaggcacagtgggatcctgagaaaaatgaggtattctcccgacctttgaggaacagtatttcagaggaaacagtcatgtaaaaaaaatacttctggccggg

SEQ ID NO: 189896 - DNA, 122 bp, Homo sapiens
aggccagggccaccgcgggaggcacggtgcgctggagaaccgtcctggcaagcgaggaaccgcttctgtttcacttttgtttggcaaggcaagaaagttaaaaccaacagcgtccgtggcct

SEQ ID NO: 189897 - DNA, 122 bp, Homo sapiens
gtgggacccgggcccgggacccgaggcgtgcccgctcggcccctttcggtcttgggtccccgctgccgccccggccccagactcgcgtctcccagcctctgccgccccgaaccggcgggcga

SEQ ID NO: 189898 - DNA, 122 bp, Homo sapiens
ttaaagtagccctatattcccaacccttttattttccaaatagtacttcttacctcctgacgttgccttgtatgcttattgtacttatttggtacccttggaatgtaactccctggcagcag

SEQ ID NO: 189899 - DNA, 122 bp, Homo sapiens
agtgggcgggtcttgtccctgggggcggtgcctgcttcgaagtgggcgggccttgtttctcgaaagaagatactttttttctcaaaccagaaagcatgtctggtttttgagtggcggttgca

SEQ ID NO: 189900 - DNA, 122 bp, Homo sapiens
aaaaaaaaaaagaggaaactgtcacttccgtcccccacccccgcccccgcttctttcagacggatgtaagattagctgtgtcaagcgatcttgagacaggagactactacataaagttatga

SEQ ID NO: 189901 - DNA, 122 bp, Homo sapiens
tggccacaggctgtgcaaatccttctaagctgacgaacttccccagcactttgccatgcacggtgtccaccacaggtggcgaggacggatgccctgctggacatggagaataaatcaggatg

SEQ ID NO: 189902 - DNA, 122 bp, Homo sapiens
aaaggggtctaggtgggcatagcctctagccagttgttgctaggctgttgtcaggactggcgatgcgtaggccactgagagcacccggagtccgagtgacggaatcaggcgggcgcccgcgt

SEQ ID NO: 189903 - DNA, 122 bp, Homo sapiens
agccccgtggaagaagcctcttgtgaggccagccccagagccttgaactctggcctgcatcgaagcattccacttccccgaccacagtctttctttctctgctgtttcgcccaagcgctccc

SEQ ID NO: 189904 - DNA, 122 bp, Homo sapiens
aagctgggcctcatctgcccggatgatgggagccaggtgtggggaattaagtggcttcctcgggggccgggagttgaaggcacttctgaggagcaggacaggcaggcggattcgggggcgcg

SEQ ID NO: 189905 - DNA, 122 bp, Homo sapiens
cccagtttcctgatctttttgttttgttgatggtgtttttctccagaccattttttcctgcgcctgtggggtcaggcgtggatagtcccccgcgtctgtagggctgggcgtggatactcccc

SEQ ID NO: 189906 - DNA, 122 bp, Homo sapiens
tggctaaagagcgccctgtggggaggaagcagggccccaggcggaaccgggaaaacacaccggggctttaaacagaccgggccactcccatcgaatttggaaagcggttaaaagaggtcgtg

SEQ ID NO: 189907 - DNA, 122 bp, Homo sapiens
aaaatagctaaaggcccagttgaaggagtcccaccaaagagcgcatctgggtgggagtaccggccagtgccaagtcaaagtgttgcatatactcatccttcactatattattaccactccaa

SEQ ID NO: 189908 - DNA, 122 bp, Homo sapiens
ctccccggcctctggggccatgggggcagccgcggagaggctgggcctggcgctggtacccggggaaccgcctggctccaaagagcagctcagaaaagtcagtggagccagttcctgaacag

SEQ ID NO: 189909 - DNA, 122 bp, Homo sapiens
cggtattccgcgggcagcctagcacctggactcttcagaactgcgttgtctgtggcctcccgcatccagaggagggaggcggaagtggaggagcagggcacctgggagcccactgctcccag

SEQ ID NO: 189910 - DNA, 122 bp, Homo sapiens
acagggtagtaaacaagacaaatccatctccattcttttttttcttttgagatggagtctcgccctgtcacccaggctggagtgctgtggtgtgatcttggctcactgcaacctctgcctcc

SEQ ID NO: 189911 - DNA, 122 bp, Homo sapiens
gacaaaggggtctcatgtgagcccccaaccaagtgagtcgaggagggctggccccacccccgtggattcggagtccgtaggaggggtgtcacccgtcatgtccccaccccgtgggcaccttc

SEQ ID NO: 189912 - DNA, 122 bp, Homo sapiens
ggccgccgctgaggggacgcaattttctgacggaggggaggaggacgaggaagacgagggcgagaaattgtcctatttgaactcactagccgcagcagacggccacggggattcagggctgt

SEQ ID NO: 189913 - DNA, 122 bp, Homo sapiens
agaaaaaaacaggcaccacactccaaagcctttcttgtttgtctgcatgggccatgcatgcgtgctgggccaggagccgagtttggagacggtttaagtgaaagtgtgtgcctcctcagctg

SEQ ID NO: 189914 - DNA, 122 bp, Homo sapiens
ctcggcgtgagttgaggccggtcttggtctacccctcctagtgaggcctgcccaggccaccgcccatcccttcttcatcgcctggaacctgctgagcaacggccgtcgggagtgactgatga

SEQ ID NO: 189915 - DNA, 122 bp, Homo sapiens
cttccgcctggtcctagtggcagcggattctttccgcccccaacgctcgcccgcgccccgcgtggcagaaaggagttcctcagctgctgtatctggtgggaaagcgaatgctttagcgaaaa

SEQ ID NO: 189916 - DNA, 122 bp, Homo sapiens
ggcggccactttgcagcaaagaagccctagaccttgggagtcaatcaggccagcccaggccgcaccacggtctcctagttgacagttcgaggggcctcgcgggccgcttgcttcgtcagctt

SEQ ID NO: 189917 - DNA, 122 bp, Homo sapiens
ttttgctttgcttcagtggtcaaaatgaaggacccattcaagggtaagaccagtcatagacgcacaatgggaatgctggaggaacactgtgagggggagggagttgggaagctaaacaaagc

SEQ ID NO: 189918 - DNA, 122 bp, Homo sapiens
gggaggaggacgagaaggagtcattgtcggcgtcctcgtcctcatccgcgtcatcatcctcggggtcctcaaccacctcaccctcgtcctcggcctccgacaaggaggaggaacaggagagc

SEQ ID NO: 189919 - DNA, 122 bp, Homo sapiens
cgcacggggaggctgttgtggcagcggaacagagacgtgcacggtgagaggcctgggggccggctgtccagggctcccgatggcttttctcccagccagcaggatcagaggagccaaggtcc

SEQ ID NO: 189920 - DNA, 122 bp, Homo sapiens
atctgactgatgtatcattctgaagatgttagctggccaatacaaagtccaagcgtatggcgacaaggcagatgatgggatacttcagaccagaacaagaaggttcaaagctgaaagtagaa

SEQ ID NO: 189921 - DNA, 122 bp, Homo sapiens
cagccccatggcgtgagaagcagttctctgcgggctgagcctcccgggcgtggcactgcacggtggggcagcagccccagcaggcgaaagaccccgtcagaattcctcttcctgttccattc

SEQ ID NO: 189922 - DNA, 122 bp, Homo sapiens
gtaggaaccacggacggccctccctgggcagggctcagaatggatggctggattttaactcgtggtttcctgatggtttgggaaggacatttgaaacatcctcctctgtggagtctcccttt

SEQ ID NO: 189923 - DNA, 122 bp, Homo sapiens
cctttactgagattttgcagtaaatctaattcccagtcttaaagcctggtcccagaggtccgtgcgcgggtcttggcattcattgttctccacctcaccttcgagcaggtcccatcctccga

SEQ ID NO: 189924 - DNA, 122 bp, Homo sapiens
ctatagagaagtcattgtgaatggtaacaattttttaaaaatccgcttgcttttcagactcggcatataaattaaattaacaacaacaaataaccatgagtccagaagttggcccaagattg

SEQ ID NO: 189925 - DNA, 122 bp, Homo sapiens
gcttgagtggtttactctgtgtcccctatagaagaaacaaactcccccgtcctcatgtaacggaggctatgtgactttaaaaaacaaaccataaggtgcctgtttggcccctccctttctct

SEQ ID NO: 189926 - DNA, 122 bp, Homo sapiens
cagcacagagaccccaggactgtttcatcttcagtgggtccccaaagaaaaagaccacctcgactaaacagactgttgtaactatgcattaggccttatacagaaaagacgctgaaattcgg

SEQ ID NO: 189927 - DNA, 122 bp, Homo sapiens
aggtggtcgcgcacggtatgggccagagcaaagtagtagtctcgtggggtggccacattgcggtcctttacgagtgtgaaatgcaggtgccggttgaagttctttttcagctcagtcacgtt

SEQ ID NO: 189928 - DNA, 122 bp, Homo sapiens
agtggagctcgaacccgagccagactaaacaagcgaagggcattgtttaggcggcgacaccgaagaagggttcagggtatttgtagcaagcaaacccccattcggaaaaagaagtggagctt

SEQ ID NO: 189929 - DNA, 122 bp, Homo sapiens
gctgccacacgcaggagctcgtttccaggctgggaggagactggcaatggaaagattaaccgctccctgagttccacatggggatcagtactttcaatagtactttgtgagttcagcctcaa

SEQ ID NO: 189930 - DNA, 122 bp, Homo sapiens
agttttcctctttggggatctcaaagcctctgtcactgacacacaagagttttctctgcacgggctgtgagaaacctggttcatgatatttgcctccggaacgacctcagagaggcagggtc

SEQ ID NO: 189931 - DNA, 122 bp, Homo sapiens
ctaggagagctaagtaagagtttggagaagggggcaaaaaaggagggagggacccatctgcgctctgcagggactggctggacgaaggggttgaagtttatgtccttattgggcggagggag

SEQ ID NO: 189932 - DNA, 122 bp, Homo sapiens
acataaatgcctagaggaagggcatttgagaagacttgaagaagaagaggaagcagggcacgctgtgctcccctatcatactttctggtgcgatcatatgaattttttaattgagcatctac

SEQ ID NO: 189933 - DNA, 122 bp, Homo sapiens
cacattctctggatttatctgagtgacgcaacatagcatggtggtaaagaacgtggccttcggggttggacagatgggctgtgttcagcaagcttaagtaaatgcttaacctttccaatccc

SEQ ID NO: 189934 - DNA, 122 bp, Homo sapiens
gggggctcaccaggcgagtggtctccaagcccccagcggctggagagggctccatgttcccggtgccccgaccgtctaggccccaccgaggaagagagaggccgggccggccccgcgccaag

SEQ ID NO: 189935 - DNA, 122 bp, Homo sapiens
cgtgcaagtgctgcgaaccacgtgggtcccgggcgcgtttcgggtgctggcggctgcagccggagttcaaacctaagcagctggaagggtaagaggtgttcgggatcctgagaggaaaaaga

SEQ ID NO: 189936 - DNA, 122 bp, Homo sapiens
cgcgcccgggatcctgcagaggtgcgcgcccttcttgtacgccagactttggaccagggccgccgttccctgagcttcactttccctgttgggtcatattccatctctaactctggaatctt

SEQ ID NO: 189937 - DNA, 122 bp, Homo sapiens
gcaacatcgggttactatattaaatccagtttcacggatcgcggccacggggagcacaagcgccacctgctggcccacagcgagattccaagagaggacgagacctgagcacaaccagctca

SEQ ID NO: 189938 - DNA, 122 bp, Homo sapiens
ctccagagtccacggttgatgtggggctcccccctgggctgcacgttcccgggactgggacgggtgtgcataggtctgagtccagcactccggtgtcccccagggcggtttccccatgtgac

SEQ ID NO: 189939 - DNA, 122 bp, Homo sapiens
cttcaaagtgttaatccatctcactggatgcttatctgggttccaaggaatgacatgccccggggtgaatttggctcaatgaaatatggctttagcacgtgcaagcaacagtactgttcaat

SEQ ID NO: 189940 - DNA, 122 bp, Homo sapiens
caggggacgggggcccctaagcctttaatgctgcaggaatgggtacataatgtggaatgtcggtgccggccgtctggcagcagtgacgccatcccctgggccaggccggctccccagcactc

SEQ ID NO: 189941 - DNA, 122 bp, Homo sapiens
ctagccttcaaatccagacagacagcaagacagcctaaggggccctgcaacaagatgctccgggctgcaggtacgctcagccactcccccagcctccgaggacactcacacacagaggcaca

SEQ ID NO: 189942 - DNA, 122 bp, Homo sapiens
tatcaagcagggttggtgctatccctcttttttcatttccatcatcttctggagagaaggcggtgtattaacgggatggcttgtagggtttccccatttccaaacctttggtgtttttattc

SEQ ID NO: 189943 - DNA, 122 bp, Homo sapiens
agaacgaattcctatccagtcccaaccaacccttccgttagatgggagcctgaggccccacgcggggggaaatcggggacccccggcgcgccgacgggcagggaggctgctggatgggagtt

SEQ ID NO: 189944 - DNA, 122 bp, Homo sapiens
gagcagtgggctgacaccaggaattccaaatgctggtgaggcagaagtttgggggtaaaccgtggcatctcaccactcacttcccgaacctgctccaaagagacccagcatgaaggaaaaag

SEQ ID NO: 189945 - DNA, 122 bp, Homo sapiens
ttcattgtccccacctgaactgagccatccactcttcttgggaattttgctaatttcaaccgatcaactttccctccctccctcatttcaaacatcgtatctgcctctaccccatcttatca

SEQ ID NO: 189946 - DNA, 122 bp, Homo sapiens
tcctacctaccctcagcaccaaacataaatcagagctgctaagcagccatcacaatgcatcgatttatggctgcaggtgagcagcacagtaggcagaattagaattggtccctgaccttaag

SEQ ID NO: 189947 - DNA, 122 bp, Homo sapiens
gtgtacaggtggccctgctgacacacagaatccttgggagaacaaagcctccccggggttcggggacaggtggatgggaggtagtcctggccagaggtatctggggaggctgggggccttgc

SEQ ID NO: 189948 - DNA, 122 bp, Homo sapiens
gccccgggcgcgggagcttttcggactctcgccgcgcactggcagactggaggtaagcggcgagttggactatgaagagagcccagtgtaccaagtgtacgtgcaagccaaggacctgggcc

SEQ ID NO: 189949 - DNA, 122 bp, Homo sapiens
attttattcttcaagcggtgcgcggtctccgttctgtagcacgattcctgagagggagaacgggtctctaaggaaagagcttcatggctgtttccaacacactctgctaggggacttgggaa

SEQ ID NO: 189950 - DNA, 122 bp, Homo sapiens
gccaccctgctctccccggggaccctccgccacccactctcccccgggaccctccgaccacgttgctcttcccagggttctggcacagcccacaggacatcgtgggaatgcctggactgcgc

SEQ ID NO: 189951 - DNA, 122 bp, Homo sapiens
taatttccaaagacaacaagggaggcacagccttggagctggaaatgtggcctcctcccccggctccatgccagctgcaggacatcatttagcttttgattccaaatggtactgaaagacca

SEQ ID NO: 189952 - DNA, 122 bp, Homo sapiens
tcacaggcctctaactcatgacccactaatcccctagacccccgttggaaaaaaggagaacgtgtaaccctggagatcgatgggtcagggctaaacccccaagttgcctttttagtttgagg

SEQ ID NO: 189953 - DNA, 122 bp, Homo sapiens
ctgcagggcggctcttgttttctttcccacttctgtgcccacgtgcatttgtaagggctccgggaggagggggcttcccttttctgtgggtctctttcaggtcctccttccacagagctaca

SEQ ID NO: 189954 - DNA, 122 bp, Homo sapiens
ccactctgagacctgaaacttttgtctagaacccacaggggtggatgtgttttctaggcccgagggcccctgcctacaagagttccattgttggctattggaaaacacacagccacacccct

SEQ ID NO: 189955 - DNA, 122 bp, Homo sapiens
tccctggcttctatttccagctctccttggctatttatagctgcgaccggccggcaattgcgtcagtcaggggcaggcttcggccggcgatgccaacggtgccaccagtccccctacattcc

SEQ ID NO: 189956 - DNA, 122 bp, Homo sapiens
cgggctgtgtccggggccgcgtgagaaagctctgcgggactgagggctgggtgggtcgaccgggaacggcgcgcgctcccgccgccatcgcgcctccgtccccgcctgcggcctgtctgggg

SEQ ID NO: 189957 - DNA, 122 bp, Homo sapiens
gccgtttcccctccttggctttatgcaaatacaatcagcccagtgcaaacggctcgtctccgtggtctttggggtggggtagggtagggtggggactgtacaaatgaaatgtttctctaggt

SEQ ID NO: 189958 - DNA, 122 bp, Homo sapiens
caaactctgggctcaagcaatcttcccacctcagcctcccaagcactgagatgacaggtacgatccactgtgcccagctccctggcattttttactaccagaaagcagggcctgagtggaga

SEQ ID NO: 189959 - DNA, 122 bp, Homo sapiens
attttataggcttcaactcaaaattttccttcatggcacagtggaaagctttgaagacggcggttctggggtcagtgttgcccctcgggggataagtgaccttgggaaggccattttccttt

SEQ ID NO: 189960 - DNA, 122 bp, Homo sapiens
agggcgcatgcgcagtggcagcgactaaggtttagtgaggcggcaccgcgcggcccgaggcgggtcttgaagcactcgttttcccactcgttttccggggttcccccgcggtgggacagtga

SEQ ID NO: 189961 - DNA, 122 bp, Homo sapiens
tctagatctactatgccagtttctctctggctttagcctttgagaacctgtataagaatacgtaagtaatccagagctgtgaagagtttaaaggccaacttctccagtgaactcaacctctg

SEQ ID NO: 189962 - DNA, 122 bp, Homo sapiens
cacaggatgcaggcagtgagccggggctggctggttgtcaggttctgggtcagttctacccggttctgcccaggccctactggagatgaaaacttgtccttgagaagccttcaatcccccac

SEQ ID NO: 189963 - DNA, 122 bp, Homo sapiens
ccctgctcacccgggggacctctctggcaaaaatagcagacataggttagtggagcacatcgggcaacagggagcaactgagcgcggtgccctgaagcccccgcctccgtggggtaaaagtt

SEQ ID NO: 189964 - DNA, 122 bp, Homo sapiens
ctttagagaagaagggaggcttgggccagttgcacagtatataagggcttgaccacagagcggcttcagtcccaagctaagaaattaggactttgttgcataggtaataaagagtcactgaa

SEQ ID NO: 189965 - DNA, 122 bp, Homo sapiens
cgacccagctcggagcacgtgcgtcgtccggcctagcctggcaggcgattcccaggcccgcgtggtcctcgaaggcccccgtactcctgcgccatggagaccccggcctcgcgacctacccc

SEQ ID NO: 189966 - DNA, 122 bp, Homo sapiens
ggtatttcctttgatttaagccagaaagtcctgagagcggatcggggagcatttgcggatcggtcactttttcctcctttctgagtctcttatcccctaccacagggacggcccaggtggca

SEQ ID NO: 189967 - DNA, 122 bp, Homo sapiens
aaaaacaaccatgaatgatatggaattgacagtctacaaagtgcatttatatgcatcatccgattaggtcctaatgagcaactgaggctcagaaatgttagcaggactagggctagagcctg

SEQ ID NO: 189968 - DNA, 122 bp, Homo sapiens
ctgacgaccttcccgtggcccctgaacaatctgggaaagacctgtgggtgcagagctgcccggagagggttccacgccagggcacagtcactgcgcagggaaaagacaggacaccccgggga

SEQ ID NO: 189969 - DNA, 122 bp, Homo sapiens
caggagtacccttagtctttaatgggggagatctctacttaacaccctgcagtctccaaccgcctccctaccacaggtgaccatgttaaatgttgaccccattctaaccgggaaaagtcaca

SEQ ID NO: 189970 - DNA, 122 bp, Homo sapiens
gcggtagcgggtcttgatcaccttgctggtgggtgcagtccgcacggcatgcaggctggacgctgtagagaaaacccagggcacagacatgggtcagggaaggccggcaagggtagggtcag

SEQ ID NO: 189971 - DNA, 122 bp, Homo sapiens
cggtgtttcgtcctttccacaagatatataaagccaagaaatcgaaatactttcaagttacggtaagcatatgatagtccattttaaaacataattttaaaactgcaaactacccaagaaat

SEQ ID NO: 189972 - DNA, 122 bp, Homo sapiens
cccctcacgcgttacgataggccagacctcaaagcccgctctcccattgggcagatgacccgtccctcctacgccacgtctcccggctctagcgagaggcccgggcggcggccgtgggccct

SEQ ID NO: 189973 - DNA, 122 bp, Homo sapiens
cccgcccccgcgcctgtgtcactgcgaggccgggggtggagagcggccgggcgggacatccggcccgggtccctcgccgcgcccgccgcccgccgcccgcttcggcgccgcagcccgggagc

SEQ ID NO: 189974 - DNA, 122 bp, Homo sapiens
caggagagccacgtggctgcagcagaaaatgcatgaagttgaacttgagcccttgggggccgccgggaaggtggaggtggcagccgccagtcctggtcagcctgctgccgagcaagggtacc

SEQ ID NO: 189975 - DNA, 122 bp, Homo sapiens
cgctagggttccagggggctgcggacgcttccgaggggcccaaggcgaaagaacgcagcccgcttgtcggccacgtgaccgtccccgtccgcgtccgcagcgaccacgtgactgtgcgtccg

SEQ ID NO: 189976 - DNA, 122 bp, Homo sapiens
gcatcaccatggagtgagattggaaagagctgggcccctgaaaccaaagcacagaatgtgcggctgtgccattatctaacaaatcccaggggatcaacaaagctccctgaaaaaagcatctg

SEQ ID NO: 189977 - DNA, 122 bp, Homo sapiens
tctttgcttaggttggcaaagcagcagctctttgcagcaatgacaggcagggcagagtgtcgactgggaagcgagtcccaatcttgaataatggtgagcttgagtaatccttaatttacaat

SEQ ID NO: 189978 - DNA, 122 bp, Homo sapiens
accgccttgtactcgtattgcagactacgggcggttacatccgccatggccgcggctgctcggaggcttcagaccaccacgcctccctaccgcaagctgcaaacggccgcagatctctgctc

SEQ ID NO: 189979 - DNA, 122 bp, Homo sapiens
gctccaaacagacacacgcgcacagagacgcgcccggagaggagcagccgagggcgcaggcgcgagggcagccacccagcccagccctcccacagccagccaccccgctgcccttcacctgc

SEQ ID NO: 189980 - DNA, 122 bp, Homo sapiens
gtggctcccaggatgggcgggtggccccgggctggcttcaggggtccggccacttggcaccgggcaagaccctggttcagggctggccgtgtccatgccacctccaggctggggaccctggt

SEQ ID NO: 189981 - DNA, 122 bp, Homo sapiens
tcctcctccttcagaaagcccttctgcagcatccacctgtcgctcaggaacttggtcctgcgggatgggggagtcaccgagtccccgcagggccccaccgggcccccgcccctgctgagtgg

SEQ ID NO: 189982 - DNA, 122 bp, Homo sapiens
ttcttaaagtgaggtcagtgaaccgcctgcatcaggatcacttggggcacttgtttaaaacgcagattcccgaacccctcccccagcaccgtggaatccgcctctcttggaaggcgggacct

SEQ ID NO: 189983 - DNA, 122 bp, Homo sapiens
catccagatgaccgtgcgtgccgccgtccactgggctttctcattaacccgtggtcacaccgtccaattcgtcaaagaaacctgaagcaaggggacggacggaaccggcacatgcatgggtg

SEQ ID NO: 189984 - DNA, 122 bp, Homo sapiens
gaggggctctaccgcagtgcaatggggtggcctgttccaggtgccagatcctggaggtcccgccttaggggctgtgcctggacgtggggctgccccgaggacgggatcccaggttgtcgggg

SEQ ID NO: 189985 - DNA, 122 bp, Homo sapiens
ctagcattgagaagctaaagctggccactgacatactgtgattttaaggacagtctccttcgaaattatctgcctttcaaaatctttgccattggagacactggttggggttatgttagtct

SEQ ID NO: 189986 - DNA, 122 bp, Homo sapiens
ctctagtccggagttcatctgcaagcggaattgggaagtatttcagagccagcatctcctcgcgccatccaggtacctacacacttgaggccaccgagtcacctgcgcagccgttgctcctc

SEQ ID NO: 189987 - DNA, 122 bp, Homo sapiens
agctttgcttctggaggtaaaatcctgagtcattcagaaaagcctggaaatcgaattccacggtaagagtgcttgccatgagccatttatcaagcagggtctcaaggggacagagagttgaa

SEQ ID NO: 189988 - DNA, 122 bp, Homo sapiens
tgcactcctgggctcaagcaattttcctgccttggcctcccaaagtgctggaattacaggcgtgagctgctgtgcccagccctgtaactaacatctttagtaagtgcttggtaatcgttttt

SEQ ID NO: 189989 - DNA, 122 bp, Homo sapiens
ggcattaaacttaggtaccaatctacacaaagtcctcgaaggggcctggcttggaccgaacgcgcttttgtgccgccccgctcgctcgcagcaccctgaaggccactgagcttagggcgcta

SEQ ID NO: 189990 - DNA, 122 bp, Homo sapiens
gcaaagcccggagaactggaagaaattgctgctggaaggcagagtttgaggtggtggagccgggagggatggactagaggagccccccaagcaggcctttcatcctgaggacaccgggcgac

SEQ ID NO: 189991 - DNA, 122 bp, Homo sapiens
actacacgctgtttaaatataattagccctacggtatggcatcgcgtggatccacggtgacggctctttggtcctgcattgtttgagatgctgtaggtggttcaacattgtgttaagttgca

SEQ ID NO: 189992 - DNA, 122 bp, Homo sapiens
gacttgggtgtggggcggtaagtggttagtttggggccaggggcctgacccgtgtctccccgctccccctcaggagcggtggtgccccccccgggcacggggccatgtacaacgggatcggg

SEQ ID NO: 189993 - DNA, 122 bp, Homo sapiens
gatgcggagggcagcgctggatttcccgggggagcattccaggtttagtccctacctggccggagtctaattcctggccttaatcctgtctgtcatgttccctagctgactacctgtcttca

SEQ ID NO: 189994 - DNA, 122 bp, Homo sapiens
cttatgtgaaagtctgggaggccccggaaccacaggcactgcaccctgcaccccagggcccgagcacagagcaggccctcacagtttcctccggcagtaggacacccacggtgctctttcgt

SEQ ID NO: 189995 - DNA, 122 bp, Homo sapiens
ccctcaccctgtatctgatggggaacaaggtcggaggccagggcctgcgagtcccagccacgccggccctccgcgtgggcagccacagctcagcgcagccagcagattcgttccgcaaggcc

SEQ ID NO: 189996 - DNA, 122 bp, Homo sapiens
cagcatgcagggagaggaacgcagactagccaaggcctaaggtaccccaagactcactttcgccactggtccttggccttgatgacctgagttggcatctgaggttggcacgcatcccatct

SEQ ID NO: 189997 - DNA, 122 bp, Homo sapiens
ggaaggcttcaggcgggtagcggggactcggtactgccccctcccaagctgggagcagggcgcgtgacgtctcagacatttgttgttgggatttgggcctcattaattattcattaggtact

SEQ ID NO: 189998 - DNA, 122 bp, Homo sapiens
ggcgagggtgccgccctccacggttttccaggccccagggtgggcacatgtgccggctcacggtgggtctgctccaactccagtgggaagaagagatgccgaggatgcagcagcaccatacg

SEQ ID NO: 189999 - DNA, 122 bp, Homo sapiens
ttggattaactagtttagcactgattgtttgtgatgctaagattcttccttccctctcaccgagatgtgtgtgcttggatgacaaggaaagatggagtccccagcagttgttgaaacacagc

SEQ ID NO: 190000 - DNA, 122 bp, Homo sapiens
ctgcgccgctcgggttatttttttttccttccttcctttctctcttgccttttacaaatgcggtgcctcctctttgcctcccgcccggctcgcctctcctcgctggcaggctgttactgagg

SEQ ID NO: 190001 - DNA, 122 bp, Homo sapiens
gacccttggccggtggctgggtcacagtttcacacactggatggggcagggaactgggtccggcgggggcgctgtgcctcgaggctcagtgcctcgaagctagatttgcatttggctgcgcc

SEQ ID NO: 190002 - DNA, 122 bp, Homo sapiens
gcagctcggcgccgtggcccttcttgcccgcgcacaagcgggcctggagcggcgcggggtcgtgacagggcctccgcttcttgcgcagccctcccagcacctgcttccagaagtgcgcgcgg

SEQ ID NO: 190003 - DNA, 122 bp, Homo sapiens
aggtacttaatttgcttgggggtgggggcgaacatagagagagagagttctaggaaggaacggaccacattgcattctggcagaggaacagctagcacagaggttcagagatgtgaagatgt

SEQ ID NO: 190004 - DNA, 122 bp, Homo sapiens
catgcttggtgcctggccagccttccacctagtcggggaggagctgtttctcttcctggccgccagggggcagttagctcatggctgagaagtctctcaagggttcagttaaacaagcttcc

SEQ ID NO: 190005 - DNA, 122 bp, Homo sapiens
gcagctctgcactcgtgctgcgctcatgtctggggccagccagcagggggatgagccgcacgctggccgaggggctacgcttgcccagaggtgcttgtctgggaaaagggagagtggtttca

SEQ ID NO: 190006 - DNA, 122 bp, Homo sapiens
tggccgggtgcgcatactcaggctctgagcgcactttggggtgcgcggattcgggcttcccgggattcgtctgcgcatgctcaagattcaggcggagcgccgggctgcagtgcgcggaggcc

SEQ ID NO: 190007 - DNA, 122 bp, Homo sapiens
ggaagctccacaataatatgcaagggggcggaaggcgtaagtgcgtcacggagagcatctcgggaattgtagtgtgtttctgcaagccaatgggatccggggaaacatgataaggatgcggt

SEQ ID NO: 190008 - DNA, 122 bp, Homo sapiens
taaagaacctgggggcttgtctcaggagggcgatgacagccaatgaaaagcagtcatgggcgtggcgctgtcaaacttcgaggggcgggaccgaggacacagagccggggcggagcccaagg

SEQ ID NO: 190009 - DNA, 122 bp, Homo sapiens
accctgcctggcccacgcccaccagcctggctgtcgctgggcgctgcccctgctgccccccgccaggcagaggtctgccctccgcaacggggcccagtggcctcctggccctgctgttcctg

SEQ ID NO: 190010 - DNA, 122 bp, Homo sapiens
ccataacctaccacagacagggtctctctctctctctctctctctttttccctgttcttgcgccagctgcctgacaatttgtgggattaaagctctaagctgcttactggctcttctgacta

SEQ ID NO: 190011 - DNA, 122 bp, Homo sapiens
ataaagacaaaccttaaaagtccccagaacaaacgttattagcaaaggaggagacagcaccggccccaacagcagacctctcatcagcagcggctctcggccggggacaggggagccctcgg

SEQ ID NO: 190012 - DNA, 122 bp, Homo sapiens
cctgcagtgctatgacaagttccgtatggatcagtgcatacgggtggcttgggggtctcccgacagtcacagaagggggcttagtccaggaaaccctgcactgcaggaaaccctgtgttctc

SEQ ID NO: 190013 - DNA, 122 bp, Homo sapiens
ccgcctgccgttctgggagggcatcatccttcatcccgcaggcccggctgccgccgccgccgcgttaaggacagatggattacagctaatgagcctgctcgcaccattagcactcgagagcc

SEQ ID NO: 190014 - DNA, 122 bp, Homo sapiens
gcgtgctagatttccaggggtgaaatccaatctacacttttaaccctcttgcagtccgagcgcgctggccgtgcttgccgaggccgccgccgccgccggtgttggctgcttttcgcctgggt

SEQ ID NO: 190015 - DNA, 122 bp, Homo sapiens
gcctcccaggttcaaatgattcttctgcctcagcctcctgagtagctgggattacaggcacgtgccaccacacccagctaattttgagtagagacagggtttcaccatgttggccaggctgg

SEQ ID NO: 190016 - DNA, 122 bp, Homo sapiens
caaacccgcgcaaggatcggctcatcgccccctttcgggctggaggatcttgcgcaggcgcgagaaaaccccgagagaggccagtgcctctgtgcatgcgtcagtggcgagcgcaccgcccc

SEQ ID NO: 190017 - DNA, 122 bp, Homo sapiens
tggcgggaagggatcggggaaccggcgaaaccgtcccgggccggacgccgcccactcccgcggcctgccgcgcccacctacccagcagctcggcccaggccctccggcggccccctgggtcc

SEQ ID NO: 190018 - DNA, 122 bp, Homo sapiens
gttgcatgggcagctttcctcgtgagccaaaggtccctctggacacttgatgcctggccacgccccctttccctttcatctttctcattaaccaatgggcttggagcattaaggccacgccc

SEQ ID NO: 190019 - DNA, 122 bp, Homo sapiens
gctcacaaaaacttccctcaagatctggatgggtcgacatttccgagacccgcaaagcaccggtgggtagggaagttccgtcctccacccacgcattcttctgcctggccgctgaggtggcc

SEQ ID NO: 190020 - DNA, 122 bp, Homo sapiens
ctcgaccaggtccgcgtatatctcctgagcgatggcctgggccccaggggagaacatctacggtcacaagagtcacagccccctggactctcaccaaccaaatctgctgccaactggcccca

SEQ ID NO: 190021 - DNA, 122 bp, Homo sapiens
tcccacagccccctgggaacgtgaagtcaaagcaatgcgcacgcgcagtggctttgaaggcggggcaacaaagcctgtggccgatgtggcgctcctcggcccgcgcttcagtggttatgaca

SEQ ID NO: 190022 - DNA, 122 bp, Homo sapiens
aagccagtctcctgggactctggcagcctgctccccggcgctggaccctaagggaccaggcgtgatgccttctggttctagcctctgagtgccccccacaactcagtcgtccccctcagctg

SEQ ID NO: 190023 - DNA, 122 bp, Homo sapiens
aggtaagtcatttgctttaggacatcatctgtagacttcagttccttctgttttgtcacacgatcatacccaagagctatgatgtctaaaatgtgtgctgaggcacctcagggctttacatg

SEQ ID NO: 190024 - DNA, 122 bp, Homo sapiens
tggggctggctgaggccgaagccggctccctctgctggcggggaggtgtggagtgggaggcgcgagcgggagccggagctgcgtgccgcactcgccagctggctcggtttctgggtgggcgc

SEQ ID NO: 190025 - DNA, 122 bp, Homo sapiens
ttgatcttcccgacgagccaggtaaaagtgcggctgtacacagccttggcgagggcgtctcgtgcgtacgcggcctgctccaggttcagcgggctcaggagctgtggacgcagcgtgagaca

SEQ ID NO: 190026 - DNA, 122 bp, Homo sapiens
tgccagaacaatgcctcacagacgcgtggtttcgcagttctgggtgtgggcagggccgtgcgccctctgaaggttccttgggaggctctttcccaggcctgtctcccgttcctggtggcggc

SEQ ID NO: 190027 - DNA, 122 bp, Homo sapiens
agtttccgcttccgggctatcctttgccggaagcagtatgtgaatgacgtagaagtattgcgccgttggtgattacggaagaaccaggagtttggcgtgaccatggtgagagaagacggtcc

SEQ ID NO: 190028 - DNA, 122 bp, Homo sapiens
ccccactcgctgcatttctatagatatccatatgatggcatttgcagacttctagctggccgatagctgctctgcttgtccctgcgcactgacgtccccaactcctcttcgagtctgggctc

SEQ ID NO: 190029 - DNA, 122 bp, Homo sapiens
atcatctcccatctctacctggcaattccagtcctctatcacatatgtagtgtttctcaccgatattttaaaaattgattgcatatgaaaaagtcatgagttcccagaaatattgtaagcaa

SEQ ID NO: 190030 - DNA, 122 bp, Homo sapiens
cgctccgccctcctggccggagtagcgcgcagtcttccgtggaaactctgacaacactggcgaccggccatttccggaaatcaaaggacagccccagcacccagtaactgcctgtattgcgg

SEQ ID NO: 190031 - DNA, 122 bp, Homo sapiens
gggcccatctgccgcctggggctccggtgcggtgcactggtccgaggagtgtgctcaggccgggctttccagaaggccacaggccactgcaaaccctgctgcctgccggccgcccagacacc

SEQ ID NO: 190032 - DNA, 122 bp, Homo sapiens
atctcctcctccgtgtttgatcctgatgccccctcagcagtgggtatgtgctgagattctcgagacagctgacactcctgccggctggtcttggccgctgccgtccctgcaggcctgagctg

SEQ ID NO: 190033 - DNA, 122 bp, Homo sapiens
ggcagccgagatgctttatggattgatccacgcccgctacatccttaccaaccgtggcatcgcccagatggtgaggcctctctgctcctacctgcctccttctgagcagtaagagacacagg

SEQ ID NO: 190034 - DNA, 122 bp, Homo sapiens
tccttcatgctcggcaccgccacaggctgcccttccgcatcgcgcgagaagaagacacagcgcctttagacagaagcacacagaggaggagaggccacagcagcctggccatggccagacga

SEQ ID NO: 190035 - DNA, 122 bp, Homo sapiens
cccgaggtgatgctaccaggcagttaggatgaatcactgaagatgcacactacagagatgcgacaaccctgcaacctggagctaagccatagaattttatttttatttttaattttatttta

SEQ ID NO: 190036 - DNA, 122 bp, Homo sapiens
attttggtaacgagagcatggcaacggccacactgcagaacagaaagtaaaattcaacaccgcccagaggtgtggggcaggcgaggcacgagctggccagggaggcttcacactgcagccac

SEQ ID NO: 190037 - DNA, 122 bp, Homo sapiens
ccctgcctgagcgcgggagcctgaggaccgggtggaggcggtggggacccagccgcgcgccgggagcgctccccggaatgagccgccccacccaccccaaggctggagccgctgcaccctgc

SEQ ID NO: 190038 - DNA, 122 bp, Homo sapiens
acgacgtaggattttcaatatcgctatttttcttaaggctgcctccaaattaaagctgcacggagtagatgccagggagccccagggggtcctaggctgggccagaacctcacccaccaccc

SEQ ID NO: 190039 - DNA, 122 bp, Homo sapiens
ttttagtaggtcttattatattattctcaattcatggagaaatagtgtatagttcagatacgaagtgagcaataactttttcctaagcctacagtcagagtgtacagcataatttcctccct

SEQ ID NO: 190040 - DNA, 122 bp, Homo sapiens
atgaatcagcactgtggggtggccaactcaaacccctcctggggtggaaaacgaccgtcccgggtgccccggtgcccttgccaacgtccaccctcccctgctccctggacggccgcctccaa

SEQ ID NO: 190041 - DNA, 122 bp, Homo sapiens
caaactcctaggctcaagcaatcctcccacctcggcctcccaaagtgctagaattacaggcgcgagccactgcacccagcgaagaacactttttaaaaaataaataggccgggcgcggtggc

SEQ ID NO: 190042 - DNA, 122 bp, Homo sapiens
gcggggcgggcgcgactggttctggcagctgcgcgctgcgaccccggggctcgcccgccccggggccgagaatgtgtcaccgtaggcaatgtgctttccgaggtttattttcgaaacacctc

SEQ ID NO: 190043 - DNA, 122 bp, Homo sapiens
cactgttatgaccattttacagatgaaaagtggggggctcagaagggtttggtgtcttgccgtgtttcatgtaattcagattagaggtgtgtggcgggaggtaacacaaggggtaggctcca

SEQ ID NO: 190044 - DNA, 122 bp, Homo sapiens
ggtcttgtttctcattttcccttctgtgccctcatcctaatgggatgagctgtccagccccggacactgggggactgactttgatagtttgaggctctgcacatctccaagggactggaacc

SEQ ID NO: 190045 - DNA, 122 bp, Homo sapiens
cttcccttctgaaaccacagagggctagcacttcaacccaaattagagcccaaagattcacgcagtcaccaagtttctgacctggtagagtcttagagatcctaagtcctgattcccatcta

SEQ ID NO: 190046 - DNA, 122 bp, Homo sapiens
tagagtttgaaatgaattaagaaacactctaatcttattcagaggtgctattcacaacaccgaacaacaggcaatccactgccccttatcaaggctgagacactgtagtaaatgagtagttc

SEQ ID NO: 190047 - DNA, 122 bp, Homo sapiens
ccaccccacaggtttgggaaccctaggacttgcagtgctcctgggccatgccccaccagccggagacttccgcactctcaggctcgctgagtggagaaaagggctccagaagattccacgag

SEQ ID NO: 190048 - DNA, 122 bp, Homo sapiens
tcccgagaagctgagcgacatcacggtttccgtgtactccggtgattgcagagttctcctcgccaccaccccatccatctgccgggcacccacatccacgccggttccgtaagctgctctcc

SEQ ID NO: 190049 - DNA, 122 bp, Homo sapiens
tgggagatctggtggctcctgggctgaggctgcagtgggccctggagtaggggaggagggcggaggcctgcccacctgcccttggtgttactgttggtctggtctgcaaggctccccgggag

SEQ ID NO: 190050 - DNA, 122 bp, Homo sapiens
ttttatggcctagaatatggtttatcttggcacatgttccatgtgtacttgaaaaatctgcgtgtcctgctgtttggggtaaagcattgtgtaaatgtcagttaggttaagcgtgttcatag

SEQ ID NO: 190051 - DNA, 122 bp, Homo sapiens
agagcagtccctggagatggaacgggcattctcccagggtgcccagagcccagggaaagacggggacggcagaaggaactgcaggtggcgcccacaggtgcgcagctgagaccccatcacca

SEQ ID NO: 190052 - DNA, 122 bp, Homo sapiens
aatggcaaggaatgttcaggttaaggtaaagctttgtggagaccaagttttattgtgcaccggtatctctcagacaccagacgtcagagagagagcaggttgtaaaatatgtcttagaccta

SEQ ID NO: 190053 - DNA, 122 bp, Homo sapiens
tctgctccagccctcgggtaggggcgggggtggattctgaaacaagcacaagtgtgagaacgtatccaagcaccaaggcttccgcctgccggaaagaacaatgagcttaattgtgttcgctt

SEQ ID NO: 190054 - DNA, 122 bp, Homo sapiens
cagccaggtggaagtactgcgcgtagcccgcgatggcctcgttgccccacttcatgccggcggccaggaaccaggtgagcgacaggatgacccaccagatggagctggccatgccgaagaag

SEQ ID NO: 190055 - DNA, 122 bp, Homo sapiens
tctgcccctagaaaacactgaacaggtagaatcttgctgggagaagcttggcacaagacccggtgctgtgtcataaaagcaaaacaaaacatgaaacagaaaggagattctgcttttaaaaa

SEQ ID NO: 190056 - DNA, 122 bp, Homo sapiens
cttggttcctttttctccctttttcccagtgtgaatcctctcatggatcatgaggcacctcgccccactagaagagtaattttggagtttaactgaatcatgtaaaatataatctgcctaag

SEQ ID NO: 190057 - DNA, 122 bp, Homo sapiens
cgcgcacgctgggcgcccttacccggcccggccactccgcgcagtgcgcatcgcatcgcacgccccgcatgtgcacacacgcggctcacccggccatttacacgcctccccgcgcccacgct

SEQ ID NO: 190058 - DNA, 122 bp, Homo sapiens
aaaaaaaaaaaaaagcccgctacagacatcccccgcagaggctccaaagcccccgagcgacggtgtgtgtggaagaaattcccggcttcccaagatgagtaagacgtcgcggtcatcttggt

SEQ ID NO: 190059 - DNA, 122 bp, Homo sapiens
actaactccgcccttgccccaccccgactccgccctcacctcacctagtgtccatataagcgagctgcacctccaacacagtgcgacttccctggccctaccctgcggaccagtgaacctcg

SEQ ID NO: 190060 - DNA, 122 bp, Homo sapiens
cggttgaagggctcatgctcctttgctctttggctctttcctggtatgctcctcttaacccgggctgcagacctggccggctggcttcttgtcaggttcaggagttacggagcatgactggt

SEQ ID NO: 190061 - DNA, 122 bp, Homo sapiens
ttcaccgacatcctgcaaacatctttctccatatatttatatctatctctgtattacacacgttcctgaaaaatcacctcgtaaataagaaactacacgtgttaacatttcattgacttaca

SEQ ID NO: 190062 - DNA, 122 bp, Homo sapiens
gtagcaagatctaccatttactgagtcaccccaaaatgcctgatgctgaagacttactgccgccctgggagatcagagtgggttagagcccatttgacagatgaggaaacaggctcagagcg

SEQ ID NO: 190063 - DNA, 122 bp, Homo sapiens
agaagagggaggaagagggggagggggagaaggagggggagggagagggcaatcccgccacggtacccctggcacctgctccgaacccgccgcgaacccggagctctgaaccggaccaggcg

SEQ ID NO: 190064 - DNA, 122 bp, Homo sapiens
cccagccagttctatttcctccagcctggccgattcccttccatctgtgcttgcagtggccggcgggcactgccctaaacacactatacatgagtctcacgccagcccatagcccacccttc

SEQ ID NO: 190065 - DNA, 122 bp, Homo sapiens
ttaaaaatgcagatagtgcacagggtgtcagttcagctattgatgtaacagtacttggaccgttcctgctcggaaacatgagagcaagagcatcatcagcatgactgacggtgaaagacaac

SEQ ID NO: 190066 - DNA, 122 bp, Homo sapiens
ttaaaactaaagttgaccatgaaataccatccagctataacttcaccagaaatgctgcctcggtgagaatgaatagccacatgggactacagacccccgtctacacacctatgagtccagct

SEQ ID NO: 190067 - DNA, 122 bp, Homo sapiens
tatgttgatgattttttttttaatcacagcagcccccagtttagcggactgatttactcccggtattggtaaatatgatcacgtgggccgcgcgaccaatggtggaggctgcagcctgcgaa

SEQ ID NO: 190068 - DNA, 122 bp, Homo sapiens
cagccgggccggggggcggggagatggcggtctccgagggtggggcgccggccggtcttgcggtctggaggcggggaaagaggcgtggaaacagggacgcagcgaaggggaaaggaaagctg

SEQ ID NO: 190069 - DNA, 122 bp, Homo sapiens
caggagagcagggattccaattcacggccccaatgacacagagacagcactgtgtttcctcgacagcagagggtttttcagattcccagaagcagccactcatttgatgaacaaatgcttat

SEQ ID NO: 190070 - DNA, 122 bp, Homo sapiens
acctcctctgctcgtgcctttcaccatccccaaggatatctagagcaggaccctgaacaccggataatcagtttatactgctgagtggcaggctgatgttctgggtggtgtaacattctgcc

SEQ ID NO: 190071 - DNA, 122 bp, Homo sapiens
cggccgccgtgttcccggccaacgcctcgcgctgctcctggacgctacgcaacccggacccgcggcgctacactctctacatgaaggtggccaaggcgcccgtgccctgcagcggccccggc

SEQ ID NO: 190072 - DNA, 122 bp, Homo sapiens
cagagccgccctgaccgccgggcacccagaggctcccgagtttgtgccacagggctgctgcgggcagtgccgctgcataactgacaacgaaggcggtagggtgacttccccagtgcagtagc

SEQ ID NO: 190073 - DNA, 122 bp, Homo sapiens
attccccacccccatccccgctaacaacccagctccaaccaggtctgggcaaggttatggcgccctcggaaacggagaaagggctcggtgaacagcgcggcgcacagacatggcggcggccg

SEQ ID NO: 190074 - DNA, 122 bp, Homo sapiens
gccccgcgacggcccccagatctctgacccgcgttaccggcactcacctgccgctgcccccgaccaactcaagcgccactgcctctacctcggccgccagtggccaccaagcgccaccacct

SEQ ID NO: 190075 - DNA, 122 bp, Homo sapiens
ccgtgggcagcactcaccgatgaggttgggcacgaacaggaagatattttcgtctggcatcgcggcgcctcccttgctgccccgggcctgctctggagatgccagtgctgtcccagccccgc

SEQ ID NO: 190076 - DNA, 122 bp, Homo sapiens
cctctggagcagctgggaaaggcgtctctcggagcttccgccattcagaaagtgtttccccgcccctgacggccccagcttgatgtttaccttgcgcgcttagttaggattgctctttctag

SEQ ID NO: 190077 - DNA, 122 bp, Homo sapiens
tttaggattagcctccatctctctcgaccccaaacagtggaatttggctgtgccttgggtcgtcttgctttgcaatatcgcctatagttgttggcggttttctgctgaggctgagccgtttg

SEQ ID NO: 190078 - DNA, 122 bp, Homo sapiens
cgccgggtcctgcagagttgagggggtcagcgccgggtggagttgccgacgggcggggggcgtcactagtccgcgtaggcacctccggggtccgcaggcgaggtgggcgtgcgggccgaggc

SEQ ID NO: 190079 - DNA, 122 bp, Homo sapiens
cattcgtccagccgcgcggcccacagaagcggaacgcgcgtcgagagcgccctgtccgctcgccccagacagatgcccggttattcattaccgcgaggcctagaggaaagagtggctgccgt

SEQ ID NO: 190080 - DNA, 122 bp, Homo sapiens
ctttttcacctgatttcatgtaactgctgatgaatggctccgtcgtgttctgctgtgtttcgatactgcactcagctctgtcacttcctgcctcttgtgagcagtcacggacgcctgggttt

SEQ ID NO: 190081 - DNA, 122 bp, Homo sapiens
gcaccacctcccagcgctagaagcggagcggccctgggcatggtctgcgagctaggggtgcggggccgccggcgggccgcagccaggtgcccctcgctgctcttggctcttgcactctcgcc

SEQ ID NO: 190082 - DNA, 122 bp, Homo sapiens
gtgagacccccgaagggtctgggccagcatccaaggctaaagccttggctatcctaacgccgcagtggggcacttaaagctcctcacgcccaagcccaggcctggtgggagcacggttctct

SEQ ID NO: 190083 - DNA, 122 bp, Homo sapiens
tatcctggggctcccgggtgaagaacctgtcctggaagagctcgtctatgatgctggacgcgcggctgaagtggtcctgcatgacatccagcatgtgcgtctgctgccggtcgttctccagc

SEQ ID NO: 190084 - DNA, 122 bp, Homo sapiens
gaaggaggagccgctgagccaaggacagagcggcgggctcccagctcagctggcggataacgcgcgcggccgggaaggcggcaggcgggcggcaggcgggcggcaggcgggcggcaggcggg

SEQ ID NO: 190085 - DNA, 122 bp, Homo sapiens
aagtcaaacctactctcactggcgtaaagcatcaagaaaacgcagagggtaggaagaagtcgagcctactctcgctggcgtaaagcatcaagaaaacgcagagggtaggaagaagttgaacc

SEQ ID NO: 190086 - DNA, 122 bp, Homo sapiens
tgacagaggcttcccaagtggctcagagtaaaatcccagtgacagccttggaggcgagggcgtttggtcactctctgaatccacctgccaccacttgcccctggcgacagcagtcccctcac

SEQ ID NO: 190087 - DNA, 122 bp, Homo sapiens
acgcttggggaaggggtcctccagtctctgggggaaagtccctattcccggggacgtgggcgcgcatcgggtccgcgccgggcgacgtcgcgctcgcgcccagcaggccccatgacttggca

SEQ ID NO: 190088 - DNA, 122 bp, Homo sapiens
tggtctcgaactccgcaggctccaactcccggcagctcccactgccgctcagcgccgatgcgccgcccgcctcgagctcacattggtcctggcagccttcccgccacaccaaccaaccaata

SEQ ID NO: 190089 - DNA, 122 bp, Homo sapiens
tgcgttttgggcaggaatcgcaaagggaggttgtgttcgcattcccctcttatcaggctgcgtgtgatcgcagtgtgtccattactgccgatactcacttccgttatttgattaaggtggtg

SEQ ID NO: 190090 - DNA, 122 bp, Homo sapiens
gtcgtcatccattggaacagctgcctatactttgccctatcccggtacctgggcttcgggcgtgacgcatgggtgtacccggaccccgcgcagcctggctttgagcgcctgcggcgccagta

SEQ ID NO: 190091 - DNA, 122 bp, Homo sapiens
cccctcctgacccccaggcacctatacctgaaggaaaacaccgacattctttccaagccacgctcctgggcgggaaattacctaatgtggcctgaaaactggacaactctttcaaacagagg

SEQ ID NO: 190092 - DNA, 122 bp, Homo sapiens
ttggtctcgtccagagacgcgcgcacagccgtccccgcgcacacgcgacacgcccagggccggcgtccacgtgagggcagcaccctaggtcgggtcagtcaaaccccacagcggggtttcaa

SEQ ID NO: 190093 - DNA, 122 bp, Homo sapiens
ggtatgaatcgcagcgtttgaggaacttagggcagtactccctgttctggggtgaccattcggtaactgatgttccagcatcccgagccctcagcgccgtcagctggatgatctcacaggga

SEQ ID NO: 190094 - DNA, 122 bp, Homo sapiens
gtgtgttgcatgcagctacccgtaggaagacttcgcgcatatcactaataaacctgaagtcgtgatgaaaagccgtgtgtgtgactggtctgttacctcagcggcgggtgcccgcctgtcct

SEQ ID NO: 190095 - DNA, 122 bp, Homo sapiens
ttccttcagcatgtttcaggcaacaggtaagaggggtgtctacgagggaaatcatagcagcgtcattgcaaacagcctaagatgggaagcacctatgtacccaccagcaggggctgggcaaa

SEQ ID NO: 190096 - DNA, 122 bp, Homo sapiens
tcgacccgaaggttcttcgtattgtccaccgactcagtatttgatcccaaagaatcagcccgttaccccgtgctcccacttccgtgcagccccaaatgccccgaccggcccctccccctcgc

SEQ ID NO: 190097 - DNA, 122 bp, Homo sapiens
cctcgtgatccacccgccttttgccaaggcgctgggattacaggcatgagccaccgcgcccggcctacttcttaaagtgattgtactcaataaatagtgtggagaccgcaactccgggcctt

SEQ ID NO: 190098 - DNA, 122 bp, Homo sapiens
ctaaaccgaaaatgaaaccgggtaaaggcgactggggctctctccggtcgagggtctgggcgggttccgcagatccaccttggggtggatctcagacggggagactctgggcgacccgggcc

SEQ ID NO: 190099 - DNA, 122 bp, Homo sapiens
ctcttaagccgaagcctcctggaacagaattgctgtactggcatctatctccaagtggtccgcgaacgcttctgcgccggcgatggtttctgttcctcagcaatagttccttgaggcatttt

SEQ ID NO: 190100 - DNA, 122 bp, Homo sapiens
acaaacgtgtgtccctaagcagcggacgccttttgaaaacaagtcaactgtatcatgctacgatattttttctgatgtttgtgctgtttctgagacggccttatgacaccttcccctattct

SEQ ID NO: 190101 - DNA, 122 bp, Homo sapiens
ggcccgggctccgagaagaccacaagccccggcatgctccgcggcccgccccgcccggagcgctgttccactggcctgcggtagctggcgcttgaggttagcaaatacgtgggcctggacaa

SEQ ID NO: 190102 - DNA, 122 bp, Homo sapiens
agatgcacaaatgggagtctaaggagggcaaggactgaggactggtgactaggagacctccggaaacctttcagagaactgattcatcatggcaggagaggctaaaaccagacattaatgag

SEQ ID NO: 190103 - DNA, 122 bp, Homo sapiens
cagaagcaagggaatcggtgttggcggagaaagcagggcttcagggagagccctgcaaagcggggtggcccgcacgcttgggcgccctggcccaactcctttgaagaaagactcctaggcgc

SEQ ID NO: 190104 - DNA, 122 bp, Homo sapiens
gagagggagggagcagttaaaaagccgcaagtgaatttcattgagaacagaagcctccaccggtgtggctgcttttgcaaagcaaatggagagagcgaagtggggcctgttttaaaaacaaa

SEQ ID NO: 190105 - DNA, 122 bp, Homo sapiens
tgcttcgtccgctcggcggtggcccagccaggcccgcgggactcagaccagcggggagcgcgacctccgcccttggggctctcccgctgggccggagacccaagcccccaacgctaggccct

SEQ ID NO: 190106 - DNA, 122 bp, Homo sapiens
ccaaagtgacatacaaaagcatgtaaaaacacatgatgcaagtagaaaaataaagagaaacgctcgccgggtgcccgtgtatgactgagcattcaggtatatgcatgccacaatatatgtcc

SEQ ID NO: 190107 - DNA, 122 bp, Homo sapiens
aactgtatgtttggacgtcggaaacatgcccatggggtgggcagagctgctctgaggtgccgcgggcctttggggagaccggtgtgagggcaccgtgcaggcagggcggacaggagggtgct

SEQ ID NO: 190108 - DNA, 122 bp, Homo sapiens
gtgctcactcgtcccctttgaatctggctgcaggctcctttaccctgcagcgtgttttagcgcgggggctccaagcagggtgcgggcttgcctggagttggcctcttctctcctggtctctg

SEQ ID NO: 190109 - DNA, 122 bp, Homo sapiens
gtaacatagcaacaacttgttgctacaaaaaattcttaaaaattagctcctgctgctgggcgcggtggctcatgcctgtaatcccagcactttgggggccaaggtgggcaaatcatgaggtc

SEQ ID NO: 190110 - DNA, 122 bp, Homo sapiens
ttgtcaaagttggagtccaagaatcgcggaggatgtttaaaatgcagtttctcaggttctcgccacccaccagaagttttgattcattgagtggtgggagagggcagagatatttgcgattt

SEQ ID NO: 190111 - DNA, 122 bp, Homo sapiens
ggcaaaggaggagcaaggtcacgtcttacatggtggcagcaagaaaaaatgagagccaagcggaagagaaaaccccttacaaaaccatcagagacttattcactaccaggaggacagtatgg

SEQ ID NO: 190112 - DNA, 122 bp, Homo sapiens
ctgattcctgcgggaaatggcagtgcctttggtcgcgctgtgtgttcttggcctgagtctcgttgccaccttaggacgtggcgatggtgagaggccaccccagccacgcacagtctcggagg

SEQ ID NO: 190113 - DNA, 122 bp, Homo sapiens
tgcgctcatggatggccacacacaccctgaaaacggcgtcagcctccgggagggtccacgcgtgctcacagcactcatagatgaccatatgtgccccgaagacagtgtcagcctccaggagg

SEQ ID NO: 190114 - DNA, 122 bp, Homo sapiens
taagtactattgtgtgctccattgcagataaggaaactgaggcacagggaagtaaatgaacgtgcccaaaaccacacagctagaaagtaggggagacaagattcagaccatagccatttggc

SEQ ID NO: 190115 - DNA, 122 bp, Homo sapiens
aggtaaggtgacatgtgaagatattcctattaccattgtcagggtttccaattaatttgtcggtgtgggagcaatgggtatattaacagttctgagggaaacatgccttgatcccagaatca

SEQ ID NO: 190116 - DNA, 122 bp, Homo sapiens
cggcggtctaagagctcaaaccctttcaggcgcgcgcaggaggaggagcggcgggggcggcggaacaagacgaccctcacttaacgtggccgctgtcgccgtgggcatgctgggggcgtcct

SEQ ID NO: 190117 - DNA, 122 bp, Homo sapiens
ggtagctcctggcccaggtcagagactgcaggtggacccagtaccgccaaagtgggtggacgtttacatccaagcccagccaccctggctcccaaagcctctttcagcctcacatcgctgca

SEQ ID NO: 190118 - DNA, 122 bp, Homo sapiens
tttctaaggtgtgaaaaaaagcttcatttagaatacatgttcacatcaaaaccaccaccacgactataaacaagctatgttgtcaaacagaaaagcaccaggctacacttcttactgtcagc

SEQ ID NO: 190119 - DNA, 122 bp, Homo sapiens
gagggcgttgggggccgggggatacaggggacagctcgggagcagccgggtgggggtggccgagggcgcggggagcagcttgggggttgggggcagccttgggcgagggaatgttgggggac

SEQ ID NO: 190120 - DNA, 122 bp, Homo sapiens
gcaggacacaggctgcacatcacaggttccaaagtgtgcagcaaggcttctgaccaggcccgtccagatctggagcccctgtggagccacatctgagccctcctcccaagactcacacacag

SEQ ID NO: 190121 - DNA, 122 bp, Homo sapiens
acacagtaggtgcctgttaaagtgtcagaatctctaagcagtgttgttgcaacctcagcccgctaagcaaaaccctgtgtcgtcatcgtttttttaatgcgaagagtctggggtaggggaaa

SEQ ID NO: 190122 - DNA, 122 bp, Homo sapiens
accccaaactgcttccctctacccataccttagcaaccatcatctgacaagtaacagacacgttaggtgacccaggaggcacctttgccgccatctctccttggaggcggtaccctcccagg

SEQ ID NO: 190123 - DNA, 122 bp, Homo sapiens
gatccagttcatcaaccaaactgagacaccaatacaaacaacttttaccatgtcactactcggaacaaaagagaaaatgcagaaaattcccatcactctgtgagtaggaggtgtagccccct

SEQ ID NO: 190124 - DNA, 122 bp, Homo sapiens
cgtcgaagagaacggccctcgggcgcgtcgcggccgcggctccagagcccctgggcctcgcgctctgagagcctgagccgcttgaggaggccaagcgcccacgaaccgcattccctgccttg

SEQ ID NO: 190125 - DNA, 122 bp, Homo sapiens
ctcggcacgggcaccaaccactgcctccaactgccccatgctgcctgagaaggcactgcacggccacccccaactgccccgcactgtccctacccgggcagccatgcgagcggctggaactc

SEQ ID NO: 190126 - DNA, 122 bp, Homo sapiens
ggatacaggcacttttacatagagggtacaacagatcttgacctgcaggtgttcaaaaatcgactcataacttccctcctcttatatctatcttatcagtaaacaaatattaataagtcata

SEQ ID NO: 190127 - DNA, 122 bp, Homo sapiens
acaagggcccaggtttttgctgagagattcgaagcatgagagagcatttggagggggccacgtgacaaggaactgcaggagtcctctaggtgatgagttgctgccccttgttgacagccagc

SEQ ID NO: 190128 - DNA, 122 bp, Homo sapiens
actcttggccgcctgcaaagccgcctccaagatgatcttctcgttctgcaggaggcagatcgtgtcctccctggaggcggcctcgccctgcagctcccccagcctggcctgcagctcatcgt

SEQ ID NO: 190129 - DNA, 122 bp, Homo sapiens
tgggggcgtggccatgctgcatcagaccggtccagaggtggagggcaccttggggtctctcgtgtggctctcctgttgatgagggacctatgaatatcccacagcgaccttttcagatgctc

SEQ ID NO: 190130 - DNA, 122 bp, Homo sapiens
ggcaaggaacaaggaattccaaaggccccgcaccctcagcatctcccgccatttccctgacgagtttcccggatgtaaccccttacccgaggcggtttagacaccagacggtggcggctccc

SEQ ID NO: 190131 - DNA, 122 bp, Homo sapiens
ctacaacgcgctcatcgagaatgagctcctgggcttcttccgcagctcctatgtgctccacggggagagaaggtatggagggaggcggtgccccgcgctgccccaccccggcgcgcggctcg

SEQ ID NO: 190132 - DNA, 122 bp, Homo sapiens
tgtagtccgccgatgggagggactggttccagccccaacgggctgcgcggagtgcgcatgcgcgggggccggagccccgggtgcgctcggggcgggaaggccctccgcgctgcgtggggctg

SEQ ID NO: 190133 - DNA, 122 bp, Homo sapiens
gccgcgccgagaactaaatccgcgggctgaaattacgttttaaaaattaacatgttgaagcgtgtgccatttagtgagaggtgttttgggcaaagaatcaatttaactgtgactgaccgacg

SEQ ID NO: 190134 - DNA, 122 bp, Homo sapiens
gcggcgcgggtctggtcgggtgaccccgggcgcggccagggctgtaggaggcgagggcgtcgccccgaggccgtggtctcgggtccatggtgggggacctgggtccccgcccccccgggccg

SEQ ID NO: 190135 - DNA, 122 bp, Homo sapiens
gacggcacggggagaagcagcgttctcaggaccgcacggggagaagctcgttctcaggaccgcacggggagaaggagcgttctcaggacgcacggggagaagcgccttctcgggaccacaca

SEQ ID NO: 190136 - DNA, 122 bp, Homo sapiens
gcccacgtgccgcacgcagaccaatcacccgtgaggatgcgagtgtcgtgaagcgaagagcgagtgaacgccggggacacgtgaccttggtagcgcgtcctcctagcttctgttagcgggcc

SEQ ID NO: 190137 - DNA, 122 bp, Homo sapiens
cagctccgccgctggcatctccaagagctccagcatttccttccgtgccaagtcctgcagcgccttgagctccttggctgctttgcttttgggcacctgggggataatggggccagagacgt

SEQ ID NO: 190138 - DNA, 122 bp, Homo sapiens
gaggaggggaacagaaccacatcaaatggcagatatcatagaatgagaactgaatatacgcgttttgtgggaaacgcgttcttttcccctttctctaagattcgcttttaattcactagcca

SEQ ID NO: 190139 - DNA, 122 bp, Homo sapiens
gcggtccgcgaacgtgcctcttgccctctgcaggttctcccaaccgcgggaagagaggtccggcccgcgacggagttcccaggaagaaggctggctgcaaaaacattcccttcgcagcaact

SEQ ID NO: 190140 - DNA, 122 bp, Homo sapiens
ttacacacgtatttgtcacaacagtaaaaagcttgaggaacttatatcatcagcgagaaccgagcgaacacgaatctgagtaggtagaaacatttgctaaaaaaaactcaaggctatcctac

SEQ ID NO: 190141 - DNA, 122 bp, Homo sapiens
ccacagctagaaccccaaatcgcctagtcccaacccatgcactctctaatcggcgccacacgacgggccttccccacaacctcatctgcttggggacgtaaagggctctgtgggggagctgc

SEQ ID NO: 190142 - DNA, 122 bp, Homo sapiens
taaaacagagtaatttaagctcctcagtaagcttaaacatcacagaaatgtgatgaagtacgttcactccacgaatatttatcaagtcctcttaagcactgctcagtggggatgcacagtga

SEQ ID NO: 190143 - DNA, 122 bp, Homo sapiens
acctagaacaatgtttgagttttccgttgcaatcaatggcactatcctgactccagacagcgagatggtataggatagcataggatggcggtgaggaacttagtccttctcctcactagctt

SEQ ID NO: 190144 - DNA, 122 bp, Homo sapiens
cgagccggttttattgtgtggatcagccgagcctgtctttgagagaccctattagaactccggtgcagcacgactgggccctggtgtgcagagattatgggatattctagttggcgcttctt

SEQ ID NO: 190145 - DNA, 122 bp, Homo sapiens
acatggtagaggcaggagtggaggcaggcgggccgaaccaggcggagatcctagaaggagcggagaagctgcttcttggtgaggagagctctcaggaatggccttttataaaagagatccca

SEQ ID NO: 190146 - DNA, 122 bp, Homo sapiens
ttgtcccacatcctttcaatccgctcctctaagcgccgtcctgagctttcgtcccagatacgcagaaggaagcggcctgaatcttacccagtcctcgacgcgcccagcttcttaactgcaga

SEQ ID NO: 190147 - DNA, 122 bp, Homo sapiens
cgaaaagcacttcgcatttcatatctcaatatgtattcctcgctactgtgctgggaggtgcgtcttgttatcacaaaattactgataaagaaacagagactcagagaaatttcaatagcttg

SEQ ID NO: 190148 - DNA, 122 bp, Homo sapiens
acaccagctgagggaggccgctcctcagcaccacgaaggacaggatgggcagcaggtcatcggcaccactgtcgggagggcatagcggccttgggttggggccaggagcctctcactccgca

SEQ ID NO: 190149 - DNA, 122 bp, Homo sapiens
aagagaagagagagagagagtttcctctccctcagaggtgtttattaggaggcaggagttcgggtggctgtgcagatacagactttcctcagttatctgtgcttcctccaaagatgatgaag

SEQ ID NO: 190150 - DNA, 122 bp, Homo sapiens
aggccgcagctccccaggtccctctcagcccgggctccggtgggcgcggagggggagggtcgcgttctgtcagtttctagctcgctcccctcagagctgcagccaaaacccggagagtggaa

SEQ ID NO: 190151 - DNA, 122 bp, Homo sapiens
cacggaggggctgtcgatctactgggcacctaatagccgcacattctgtccagtccctggcgccggaacgtgaaggcccgggtcctggctgctatccgggatccggacgctcccttcggctt

SEQ ID NO: 190152 - DNA, 122 bp, Homo sapiens
aatccaaaacctggggaaaacggccctctttgatgaggctaaatcaggctagaagaaatgcgtgcctggaagaaggacgccttcacccaatcttcatttctcctgcgttgcatccgccgccc

SEQ ID NO: 190153 - DNA, 122 bp, Homo sapiens
agtgagggtcccatggtagattcctgtcaagcgacagatctccccgccttggccttttcccgtttcgccgttgcctccccactttgagattaattgacttccctttagagtcatctcatgga

SEQ ID NO: 190154 - DNA, 122 bp, Homo sapiens
cttctcagaaactcagtttgctcctctggaaaaagaataaaaacgctgacctcggaaggtcgttttgaggattaaagacatgaatcagtacaatgcctggcataaactggtggtacccaacc

SEQ ID NO: 190155 - DNA, 122 bp, Homo sapiens
ggaagaaatatcatcatctccacttttggatgttagggacagtatctcgtgggaggtgtccgcctgctgcgatattgggagtcatatcatccgctcccacccaggatattaggaacaagatg

SEQ ID NO: 190156 - DNA, 122 bp, Homo sapiens
ttagccccagtgctgggaaattaggagtcaagcgacaaacctcgttagcgaggagcgcgccggctgcaggagagcaattcccacccttaaactcggaggccgtgctccggattactaatttc

SEQ ID NO: 190157 - DNA, 122 bp, Homo sapiens
ggacttaattttttttttttattaaatgcaaatcagtcacaagacttgccgcagcagagccgctggccgggctagctcccctccccctaatgggaagatgcggctccgcaccgtgcaggcac

SEQ ID NO: 190158 - DNA, 122 bp, Homo sapiens
agaatggcagcaactgccacacacctaagcaacttggctggctattcgccctgcagctcccgccagcgcgctgcccaagctggcaatcaaaagtctgggaaagcgcgaaagcgccacgtgcc

SEQ ID NO: 190159 - DNA, 122 bp, Homo sapiens
tatgcgagaaggtttgaatagcagtgtcttccctggtgcatggcaggtccttggtacctccgccaactctcttctctacacacctgccagcatcccttcctcatcctgtgttcaatgtggct

SEQ ID NO: 190160 - DNA, 122 bp, Homo sapiens
tttcttgtctttttttgtttttcatcttcttcctctctacctataccccaggagggacatcgtcctaaaagtcaggccaggctaaacttattatgatattaagtctttcagataaatatgtt

SEQ ID NO: 190161 - DNA, 122 bp, Homo sapiens
caggccgccgggctcgcccttccttcctccctcgccgccggggaaggtccccgatgggcgcgcacggtgcccagcgcagctgcccttggcctcccgtgtccttacccacttccctcctcaga

SEQ ID NO: 190162 - DNA, 122 bp, Homo sapiens
cagggcggggaccaaaagccgcgcgcttgtgacgatgtcgctgcggggcacgctaaggggcggagaggaaatttagggcctgccttttgtacattcggttattcagcccagaaatatgtatt

SEQ ID NO: 190163 - DNA, 122 bp, Homo sapiens
cgccagctcgggctgaggcccaacgcctggggctcgaagggccggtagttcgagaagctccggcccagagtcaagcccgccgggcccgaggagccttccgccgctgccatcgcctctccgca

SEQ ID NO: 190164 - DNA, 122 bp, Homo sapiens
ctacagcccccaaacctcagaaggccccttctgctgtgcccagaactccccgcccctgcccgcccttccgtctgtcgacctcacttcctgactggtgagtttcaaacccacagcctgggaca

SEQ ID NO: 190165 - DNA, 122 bp, Homo sapiens
ccaggaggggctgggctcggagcgcgctctcggagacgcggtgatgcgcggggcccgggccgtggacaagactgcagtgtcctgcactacctgccgcccactcatcaggccgattctcctca

SEQ ID NO: 190166 - DNA, 122 bp, Homo sapiens
tctgctcgcttcggctgaactgtgctgacttcccaacccttcggtatcacaccccatgcccgggaaagcccaggaaaaccaacgcaggaaataaacgattccatcgggccgtggtgctccca

SEQ ID NO: 190167 - DNA, 122 bp, Homo sapiens
tgcactttgttttatatatgccacaatttcctgagcaagctggctcctgcctgccaaaaccgcagtcattttgtcctgcctttgagaacactggaagggcactgaaggctgaccagcatgca

SEQ ID NO: 190168 - DNA, 122 bp, Homo sapiens
ggggcgggagttcgcggcagcaaacctgcttccccctcccacgcgccaccgcccccgccccgcccccgtccagaggccccgcccctagccgggcctggccccgcctctctctcccgagaggg

SEQ ID NO: 190169 - DNA, 122 bp, Homo sapiens
ccgccggggccgagagcgccgccagcgtggcccgaatgctagccgtttctgtggctgacacgtggcagcccaggccccatagcccggcctggctccaatgtcctgccccttccgaggctact

SEQ ID NO: 190170 - DNA, 122 bp, Homo sapiens
tagatggactgagtgtttgaaacctcatgttccatttcctgtagctcaggtggagttgtacggtactggaaatgccagctctgggcagcttaagtatggtggacgataccatatttgagatc

SEQ ID NO: 190171 - DNA, 122 bp, Homo sapiens
acaacaaagaataacgtcttacctggtgtgttttttgttctgggcttctttttcttaggacgactaagtggaatatcatctataaagcaagaaaaaacgtcaacagaaaagggtgcctaaaa

SEQ ID NO: 190172 - DNA, 122 bp, Homo sapiens
gctcagccctctaacacgtctcttctcttttgacctcctcagccaaaacagagtggagtacgagaaaagggtccgagcacaagccaagaagtttgcgccctcataagcagcgaccttgtggc

SEQ ID NO: 190173 - DNA, 122 bp, Homo sapiens
caatcggcctccgccacagccagcgcagccttgccccttaaagtcacaggccccctagcgcgaaatcccacgcccccctggacggctgcggccgcactcgccaccagggggcagaggccaga

SEQ ID NO: 190174 - DNA, 122 bp, Homo sapiens
gtaggcggggtatctggaggaggcgcagggaacctggagagggtccagccctcagtgccccggccagaggcgggaaggggctctagagcttcggtgagtggagctgcccgccccggactggg

SEQ ID NO: 190175 - DNA, 122 bp, Homo sapiens
tccccgagataacgctgcggccgggcggcctgatttgctgggctgtctgatggcccgggccgaggcttctccctgcgcctgggactgcggccgcctctctaaatagcagccatgaggcgcct

SEQ ID NO: 190176 - DNA, 122 bp, Homo sapiens
tcggcctcaacccattagatatgtgcactccccctaaaaactgtcgccagacattggaaacgttccctgggggcaagattgctgcctttagagaagcactgagctaaggcctttgggacatg

SEQ ID NO: 190177 - DNA, 122 bp, Homo sapiens
cttgtcccatcctctgtcagcatcctggccacagggcctttgcacatcctgcctcccccacgcctggtaagcttccacttacgaaccttgcctccagcaagcccaggcctcttctgtctccc

SEQ ID NO: 190178 - DNA, 122 bp, Homo sapiens
aggccatgaaaagtgttgtttccaacctatcaattgccagtactacaagcaggagttagacgtttggaggttttcacacggtgctataaatacagtttccagggccccggtacacgtggcct

SEQ ID NO: 190179 - DNA, 122 bp, Homo sapiens
ggaccatcctcgctaacatggtgaaatcccgtctccactaaaaacacaaaaaaaattagccgggcgtggtggcgggcacctgtagtcccagctactcgggaggctgaggcaagagaatggcg

SEQ ID NO: 190180 - DNA, 122 bp, Homo sapiens
gggatgtccagggctgacctgaggaggcagcagggcaccgaggggaggctgtgggcccagcgctctcaggtctactgcaggaacactcgggtctgtccctcgcttatgtggatagtgtccgc

SEQ ID NO: 190181 - DNA, 122 bp, Homo sapiens
ccgccccgcccccgccgcagctgctgcacccacccccaccctgcccggccctttctgcaccgtcatctcctgccccgccgaggcttgacccgtgagtggggacgcccaaaacgggccagacc

SEQ ID NO: 190182 - DNA, 122 bp, Homo sapiens
gtgcgtggcccccaagactgagcacagctcctcgggtgtttgcatccaaggtgcccacagcgccccggcctcctcccttccccatggcagccccgggggttgctctgggcagggcggtccgc

SEQ ID NO: 190183 - DNA, 122 bp, Homo sapiens
ggaatgctgggccagctgtgggcggggggctggccatggatggggtggggacagtgggggcgacaggcacaatagacattctgggtgccaggcaacggggaagcagacgcttcttggcgggg

SEQ ID NO: 190184 - DNA, 122 bp, Homo sapiens
aatttaggattaggttagccaagctgagtagatcagaagtgttccaggcagaaggaacagcgtatttgaagacctgggggtgagagaaagcatgacacttctcaggaactggaggacattta

SEQ ID NO: 190185 - DNA, 122 bp, Homo sapiens
aaaacaggcccataaagctataaaacctgggtcccctgcctgccatttcagtgctcctcccgagtcctcccactacgcttctatttatggtagtttatccaggtttactagaagtaaaattc

SEQ ID NO: 190186 - DNA, 122 bp, Homo sapiens
tcagatgtgaaaggctggagagggcatggcgagggaggcaccacgggccgccggcaggagcgtggcggagccaccaagcacagcagttggcaacatctgacacaggcagagatggggacaca

SEQ ID NO: 190187 - DNA, 122 bp, Homo sapiens
ggtgctggctctgcacggccatggtctgttccggagtgctgtgcaggccgctgtgggagccgctgtccccgaggctgtccgtcttctgggctggccggtacctaggccaggaacacgcatac

SEQ ID NO: 190188 - DNA, 122 bp, Homo sapiens
cgcccaccctcccgagcgtctttcggcgcatgcgcggactggagctgtgtgcagggccagcgcggagcccgagcagccgcggtgaagcgcctgtgctctgccgagactgccgtgcccattgc

SEQ ID NO: 190189 - DNA, 122 bp, Homo sapiens
cgtcactgacttggggacacccaggctgaaaaccgagcacagcataaccctgcaggtctccgacgtcaatgacaacgcccccgccttcacccaaacctcctacaccctgttcgtccgggaga

SEQ ID NO: 190190 - DNA, 122 bp, Homo sapiens
cgggagaaccgcacagacacggccagcaggctgaagcagatggtccacgagggcaaccagcgctgggacaaccttcagaggcgggtcacagccgtcctgcggagactcagggtgagctcctc

SEQ ID NO: 190191 - DNA, 122 bp, Homo sapiens
cacttaatcccctttatacacacagtttccaagccaacaccaccaaactgcctgcacgtccgtccccacgctgtgctgattcacatctctggggttttgctcctgctgttgctgttacctct

SEQ ID NO: 190192 - DNA, 122 bp, Homo sapiens
ccaggaacagagccggcttaagccagtatggtttacatacacgctgctccccttcccagccggcttggctgttctgcaatccgcgtctccagagttggaccccaggacccccgacagtggca

SEQ ID NO: 190193 - DNA, 122 bp, Homo sapiens
ccatctcattgtctaccagaccctcactgggtgaacacaaccagagccagaaatgcgagtcgagggctgttgacccaggctgtagaagccagcctccggggctagagcaaactgaagaaggg

SEQ ID NO: 190194 - DNA, 122 bp, Homo sapiens
tcctctcccagtactgtcaggaaaatgggcgccacgtgatgctgcaccttgagtgtgactcgatgtctctctccgggtatctataaggtcttctccaggcccccagcgttccgaaatttcga

SEQ ID NO: 190195 - DNA, 122 bp, Homo sapiens
ccgcaacaggcactgcctggggctgcccctgtgcatccttgtactggaccatgaatgagtcgaaggggccctgggccactgtccatgagagacgcaaggagtctggggtcacgccggtcact

SEQ ID NO: 190196 - DNA, 122 bp, Homo sapiens
ggttgggctgcgtgggtgggggctgtgcggggctccgggggccacactcacgccctgtgtcgcccgcaggcggcgcctacgctgcggagccggaggagaacaagcggacgcgcacggcctac

SEQ ID NO: 190197 - DNA, 122 bp, Homo sapiens
agggcctgcgccgctgtgttcgatgacattgacccgtgactctgagcaagagcttagatgcggagctttagacccagcgccaggcccttgggtgtcccgtaaggattcgtagatacattcgt

SEQ ID NO: 190198 - DNA, 122 bp, Homo sapiens
cataaaagcctcttgttttatttcctctcgtttcaaggtaagagtgaggatctagcaggacgaagaatggttccacacagggcgcagagagggctggtaaatgagagtgccaacccgtctaa

SEQ ID NO: 190199 - DNA, 122 bp, Homo sapiens
ctggagagccttaagacacagttgatctttcaggaaggaatcccgtagcttgccaatttccgaaatctgcaggaggccccgggtgcattcctaactgtcccactgtattgcctcctctggct

SEQ ID NO: 190200 - DNA, 122 bp, Homo sapiens
ctgcaggaactgttgggattcagtcccttgaaaccgctttgtcgcgtgtgggctgctctgcgctctaacttgcgcactgtggcctgtcaccgatgcggggtccatgtattacaaagtgcttt

SEQ ID NO: 190201 - DNA, 122 bp, Homo sapiens
ccccctccccgcctatcctccacccacgcgtaccgccccgttcccccaccgtttccgacccggcagcttctggaaaacagcgcccttgatcctcccgggcaggaagaagggccaaggaaggg

SEQ ID NO: 190202 - DNA, 122 bp, Homo sapiens
cggtggcggcgccggcgatagcagagggatcccgttctcttctgggtcccagtccgggcgcggaacccagggagtttctgggacccatacttgtccgcttctgcgtgggtttcactgcccgg

SEQ ID NO: 190203 - DNA, 122 bp, Homo sapiens
caacctcagttgatgccttcccagagtcaacctcctgtgacgccctcccagagccaacctcgggtgacaccctcccagagtcaacctcatgtgacaccttaccggagtaaaagtggtaaaca

SEQ ID NO: 190204 - DNA, 122 bp, Homo sapiens
aagtgtatttacgcaagttccctctttcaatacaggcaacttaaacacagaactgtcccccgcccaggctgatgcaatttcttttcgtctcattatggctgggaatatctttctcacagcct

SEQ ID NO: 190205 - DNA, 122 bp, Homo sapiens
gcggcggctgaggagcctaactcaacctggactagtcgtggaagagctaggacttagaggcgcgaaagtgactcagcgaggccggagcgcagggtggcgtccagggccccggggacgtcggc

SEQ ID NO: 190206 - DNA, 122 bp, Homo sapiens
cacacacacacacacacacacacacacattggacaggaatcccagagatctgggttctggcgtgacagcatgtttttcacaaatacttcttggtttccattccttcaaatgtaaataaaggt

SEQ ID NO: 190207 - DNA, 122 bp, Homo sapiens
cttttcgagcaacagagtagaacaggttcttcttggcttaggctggagtcctcgaagctccgtgctgtgggaagtgacaactgagcacccctttgctgtccctgccctgctcagagccctag

SEQ ID NO: 190208 - DNA, 122 bp, Homo sapiens
ccctacacgtggaggtcggtggtgcgatttcctcaccctcaagggactcaagggaccacgcgctcgcaaagaacccagggcctcttccatcagctcgcagcaggtacgcagtaaacctttac

SEQ ID NO: 190209 - DNA, 122 bp, Homo sapiens
cgggctgagtctgtggtttccagcttctgattaggaaaccaaacaagccctctgcacggacgtgcacaaaggaggaagtggcaagtgattctttattagcccctgagttttcagaggggcct

SEQ ID NO: 190210 - DNA, 122 bp, Homo sapiens
ctagccggggggcggggcctgagggaggggaccgggcagggccacagcggaaggcggtgtcgccgcaccgagaaggctcttgggaattgtagttctccggttgaagaaaaaagggattcatt

SEQ ID NO: 190211 - DNA, 122 bp, Homo sapiens
gcacccaggcactagggctcccctaggcaggtttttgaggcatgtattatttttgcaacacggacatacatgtacctcctcctggtactgcctggggctgctgcaataagttaccctttccc

SEQ ID NO: 190212 - DNA, 122 bp, Homo sapiens
agaagttgcccttggatttaacaattaggtgctcgctggtgatcaaggagaaggcagtttcgctgtagtggtgggaacagtttcttagtgcttaataacaatgatgtaatcgtgtatgtatg

SEQ ID NO: 190213 - DNA, 122 bp, Homo sapiens
tgcacccgacacagatctgggctggggcaggacgggcaccactgagacctcacctgagctcggggttgtcgatctccacagtcaccgtgtgctgtgtgttgtgggggttcttaagcacaaac

SEQ ID NO: 190214 - DNA, 122 bp, Homo sapiens
gaaggggggatgccgtggcggctctggggtgtggagtggtatcgccgctgcagaggtccacgctggcggtggtcgtggtattcaggggctcgccaccaccacccgcaggctcttcggcttct

SEQ ID NO: 190215 - DNA, 122 bp, Homo sapiens
caaagctcggaactgcagcaggatcctgggggcggggcttgtgttcagcagcactcgccacgcgcccagccctcagccctcgtctcgccttctgctggctggcccggcgacgttgtgcgcca

SEQ ID NO: 190216 - DNA, 122 bp, Homo sapiens
ctcgtggcccgtgccctgctgctagacgccctgacctccgcgcccggaggccttgctccccgcctgtgcccaggccaggcctgggactccattgctgcatcccgctcacctccagactgcag

SEQ ID NO: 190217 - DNA, 122 bp, Homo sapiens
gcttggcacttaagtatgctttaatagctatcactctacggaacagatgtttgtatgtttcgtgggcatcataaatattaagaacgatgctataaggtttagaaagcattttccattaattg

SEQ ID NO: 190218 - DNA, 122 bp, Homo sapiens
gcaaagctctgatgctggggccatgttctgccgttaccactgtgaggctccctctctctccgaaccgctgctccagcaggtaagggagcaaaatgtcagcccttgccagtgtcactaaagca

SEQ ID NO: 190219 - DNA, 122 bp, Homo sapiens
agcagagtggttgaggggctgggaaccagaatccaaaacaaagtttgagtgccagccctgcggccttaggcaggttaccttatctaccctacccataccttcctcctataaagacagtacca

SEQ ID NO: 190220 - DNA, 122 bp, Homo sapiens
cagaagcagctcagagaactgaggttggaatcctgccccaagcacaggttttggggacagcgagtgcctagacaaggcaggtaacgtggcagccaccgggctggtccagaaacaaggtgctg

SEQ ID NO: 190221 - DNA, 122 bp, Homo sapiens
agcgggtacatcaatgatagataatcgacagacgcagactgagtggccagtagtcaaaagcgcaaccgagggccagtggcgcaatggataacgcgtctgactacggatcagaagattctagg

SEQ ID NO: 190222 - DNA, 122 bp, Homo sapiens
ccggggctcccgcgtacccggaaatatcgcgagaacaaaagcgactatcacagctgaaaacgtcagaaaagagacaatgtacagatctcgcgatattccctttgcttacgacgtgcttaggg

SEQ ID NO: 190223 - DNA, 122 bp, Homo sapiens
cccctggggaccccgcagcccaggcctcggtcagcaacggcgaagacgcgggcggcggcgcgggcagggagctggtggacttgaagatcatctggaataagaccaagcatgacgtgaagttc

SEQ ID NO: 190224 - DNA, 122 bp, Homo sapiens
cctccttgtgtccagatcgattccctcctgaggtcttttcccatcattccccttcttctacggagcactcatctagacaagtcaagagtcactccataaatcccagggccacccactttctt

SEQ ID NO: 190225 - DNA, 122 bp, Homo sapiens
cctttttgtggcaagaggattcatatgcaaaagcactttgaagacaccacagggggactgcggagagggtactgggggcatggaggagaccccaaagcatcaggcctaaggcactaaaagaa

SEQ ID NO: 190226 - DNA, 122 bp, Homo sapiens
gggttcaggataggtgacctttctggcaggcgtctcggcagggagtggggcaggcaaccacgaggactagagacacacctgtgaggaggaggagggggaggaggcggaggaggaggaggggg

SEQ ID NO: 190227 - DNA, 122 bp, Homo sapiens
gggaaggcaaaggagtggccgcgagggggcgccaggacctagcccaagccctcctccaagcggagactgggacgctctcgtctttactcaatgtgtttccaaggggatgtgagctgcgatga

SEQ ID NO: 190228 - DNA, 122 bp, Homo sapiens
cccttggtctctctttatgggcagcagcgacccctgtcgggtctcaaattcaacctcaatcggcgacttaatctaggtggaggtaaagaggaagcgacccctcgacctttgagtacgggaat

SEQ ID NO: 190229 - DNA, 122 bp, Homo sapiens
ctcagatttaaagcaatagcttctaagacccagcaggtggtaacatcgaccccaggaagtcggaggatgtacaggacggggcacggggttgcctgaggacctaccgggccaacagcgctgaa

SEQ ID NO: 190230 - DNA, 122 bp, Homo sapiens
gagcaggtggggccatcgctggcagagatcacagagatgtcgttcccagagtgagggcatcgagtgtagggaaagaaaaggggagaaagacaggagtggatgttgggggagatgatttgcca

SEQ ID NO: 190231 - DNA, 122 bp, Homo sapiens
gtttccttgcatctaaaatggggaatgtcttgaggcttaaatatggtcctgtttgtaaagcgcatagaacagggccaggatatggcatgtgggtcgacccgtggagtacaggctcctcccat

SEQ ID NO: 190232 - DNA, 122 bp, Homo sapiens
agtcgtgccaagcggacctcgtgaaggacaacggccacaagtacttcctgtcggtcctggcggacccctacatgccagtaaggacggggcagcacgctctccacgggcttgggactcagcac

SEQ ID NO: 190233 - DNA, 122 bp, Homo sapiens
acacatggcccagacacataagagcaactgagatttgacaaaggtgcaaaggtaatccaacgtgggaaagatagtctattccagtctatcaaatggaaacaatttgatatccatatgaatca

SEQ ID NO: 190234 - DNA, 122 bp, Homo sapiens
ccccgggttttccgcggcgcccggagtcgggactgcgtcgggcgtcgccgccggacgtgccggcagcttggtgcgacgtgtcttgccattggcctgcttcggtagccccactgccgtacgcc

SEQ ID NO: 190235 - DNA, 122 bp, Homo sapiens
ctctttggtgtacagacttcttggtacccagtcacctctgtcttcagcaccctcataagtcgtcactaatacacagttttgtacatgtaacattaaaggcataaatgactcatctctctgtg

SEQ ID NO: 190236 - DNA, 122 bp, Homo sapiens
tgattcttcgctctccctggaatgcagatgccacgtgaaaatgaatcaaaaagggcagcgcgggcagcgcttccaggcccagctcctcagcgcggtgtctctcctccgtgccagcgccaaag

SEQ ID NO: 190237 - DNA, 122 bp, Homo sapiens
ttacacccggggaagccttcgcttagatcctcaggctctgccctccctctgatgcacccccgaagaatgcccctgaaggtgagagagaaacttggaaaataaagcaaaagctcatttcactc

SEQ ID NO: 190238 - DNA, 122 bp, Homo sapiens
gcgcgtgctgcagacatcaatcacagaaggcaccacgtcactgaagcgccaggcctgggccgtcccaggctccgctgggtccctggtatgccgtcggtgctcaataagcacttgctgcagaa

SEQ ID NO: 190239 - DNA, 122 bp, Homo sapiens
gctttgaaccctcaactctggagaatgttagggtgcccagcagtctcttgcgcctgcccccgctccccgactctgacagtgtgaggctcctctagacggctgctgaagccagcactctggca

SEQ ID NO: 190240 - DNA, 122 bp, Homo sapiens
gttgtagacccaactaattctaaagctgggactcagtgattaatataatgtgtgaacaatcgaaatatagaaacatgggaacaacaaaaatgaagagaaggaggatttgcagattatatgtt

SEQ ID NO: 190241 - DNA, 122 bp, Homo sapiens
agtggcggcggagtgtggacacatctctccgggatggagacccgggcgctcctgctgtcacgctgcaaggggaattgagcagaagaaattttgagttgtggcccctcgggtacgggctgggg

SEQ ID NO: 190242 - DNA, 122 bp, Homo sapiens
aggcggtgctttccaagggtggtccatggtgtttcctgcccagcacgcttttcgacactgcggtctgacgctccttctgagataggggaggtctgtgtcccctccccttgagtctgggcagg

SEQ ID NO: 190243 - DNA, 122 bp, Homo sapiens
gagacgtcggttgagcggcggcgaacatgcgcttttgacacattggaggtgagcctgcagcgcggggccgctccctaaggggctgcgctgggccggcggcgccgaggcctgcccttggggag

SEQ ID NO: 190244 - DNA, 122 bp, Homo sapiens
ggaacctcagattttgcaaccagactgtttactcgctccctaagcagccatgcgcaggcgcgaaactcctccccaggccagacccggcctgcgcatgcgttcaagtgagcgcgcagacgcta

SEQ ID NO: 190245 - DNA, 122 bp, Homo sapiens
gatcccagtccacctgtgtgcatgtcagggctcggccgggaagaagccagcaaagtcccccgtgtcccttgctgagtattctgtcacagacaagcctccattaaagccacagcagtgctacc

SEQ ID NO: 190246 - DNA, 122 bp, Homo sapiens
tcgaacttgagtcgtccacagcactaggccgccgccagcccgggcgagctgcctagggaccgcggacgccgcagcaagcagctccctgctcccgccacacccgccgagccagccgcgcggaa

SEQ ID NO: 190247 - DNA, 122 bp, Homo sapiens
ccagctcgctcccatcccatctctcccagctgtgtttgtttagtctcgtctggatattttcgttggcccttcccatgtatcctgcctccccagctgactgtcaatgggaggacccccagcct

SEQ ID NO: 190248 - DNA, 122 bp, Homo sapiens
gtatatatgctctgcctttttgtttccagaaagaatttcaggtaattcctgattgcaggccgcagaagccaagaaataaaagacttcttacccgaactaatgtgactttactttccagctca

SEQ ID NO: 190249 - DNA, 122 bp, Homo sapiens
cgcccacactgggtttgcggtgttccggggtgggaagtcgctccgggctgcgaagcacctcgagggatccccccggcccgaactctccctctgtgcccagctaaccgcggttcattggctct

SEQ ID NO: 190250 - DNA, 122 bp, Homo sapiens
cgtggagcggctccagcctgactggcaagtgtggcttgcaaaacgcggaaaaccgagacacgcccagagataggaggagggaagtgcaggccccgtccaataagtattcaggccccgcccgc

SEQ ID NO: 190251 - DNA, 122 bp, Homo sapiens
tgtgctagacaggattgatttcccctgctgtattgctagaaggtagacacggcatgtctgcgtctcaggctgccgagagagccgtgcccttttctggggaagcacagagctcctgagcttcc

SEQ ID NO: 190252 - DNA, 122 bp, Homo sapiens
cctccgtcagacagatgtgaaacgtgccaagcccagccctaaattgagctttctaaacaccgagtcgcggtcaggctttccagcactgtcctcaagcctgagtgcgtccggagtgcaaacta

SEQ ID NO: 190253 - DNA, 122 bp, Homo sapiens
atactcacatgcagccgcgaaacctactcaggtcgttgtttggcttctcgcattcgatcacgctggtgaacgtcaaaggattgaattcggagacctaaaataacagcacgtagacattagag

SEQ ID NO: 190254 - DNA, 122 bp, Homo sapiens
attatctacagttctggacatctgatgtccaaaaatgggtcttacagggctaaaatcaagcgttggcaggactgcctcccttctggaggtggcaggggagaatccattctttgcctgttcca

SEQ ID NO: 190255 - DNA, 122 bp, Homo sapiens
gggggcctccaggagactgtagagcactgcatcaccatccccatggaggaggagagtgtgcgtccaccaactcctgtccctcactggctatgcgctgctccccacggtgttaactctggctt

SEQ ID NO: 190256 - DNA, 122 bp, Homo sapiens
aaacatccccgtcttggggtgggggtgggggtcaggactgtatctcccttcccttccccacgtcatcagttcctacccatggcagcaggttcttcaggtaccagttcttgaacaattatcag

SEQ ID NO: 190257 - DNA, 122 bp, Homo sapiens
ttgggcctaggctcagctggatttgaggatttgagacttagactgggtcagggtcccccgcgtcgccagggggcgctgcaggccgctccccggaaggcctcatcctgcgcggctggacagcg

SEQ ID NO: 190258 - DNA, 122 bp, Homo sapiens
gcctcagcggagcgtcccacggcagtcccggacccgcgcctctcccgcccggctcctgcacgcccagcgagcctgcagcctgggatcctccgctcctgcatcccggctcgggatgggtcccg

SEQ ID NO: 190259 - DNA, 122 bp, Homo sapiens
gctgggcagcggcaacaagctgtagctcctggtcagccaccgtatgtggctgaacaactccgtgaatcatgcccagctggagtggatgtttattttgacaatgaccataagggtaaacaact

SEQ ID NO: 190260 - DNA, 122 bp, Homo sapiens
gtgtttatgcagagctgtgtttctgagaaaggccgaacacagatgctcatgtacacacttcggtggtttgctgagaaatgtggtagaagctttcaggaaatggcatgaaataatgaagggtc

SEQ ID NO: 190261 - DNA, 122 bp, Homo sapiens
ccactaaaaactaaagtgtttccaaaagaacacttaaagcttcagcctcggagtctttcccgcgcccccaactcgtccctctcccaaattaaccaacctttctgcatacgtctcttagggtg

SEQ ID NO: 190262 - DNA, 122 bp, Homo sapiens
tggcactgttatactgttcaaatgactctctttgtaaaagttaccgaaatggaaaaatgccgtagaggtatggtgaagaaaactggcatacattcgtacaagtcacattatgcctaataaat

SEQ ID NO: 190263 - DNA, 122 bp, Homo sapiens
acctgcggccgccccggcggctcctggaaccccggttcgcggcgatgccagccaccccagcgaagccgccgcagttcagtgcttggataatttgaaagtacaatagttggtttccctgtcca

SEQ ID NO: 190264 - DNA, 122 bp, Homo sapiens
ccaaagtccgcttgcagacgcagacacaggcgcagaagcagcagcggcggctttcggcctcggggccgttggctgtgccccccatgtgtcctgtgcccccagcctgcccagagcccaagtac

SEQ ID NO: 190265 - DNA, 122 bp, Homo sapiens
cttggggtccaccagacgctgcacatttgccactcatctgaacggggtcgagtcgcagggcgggcgccttgtaagcgtcacatttagttttgctgtgaagcgagtcaggtggtggctgtaag

SEQ ID NO: 190266 - DNA, 122 bp, Homo sapiens
caatggcactatcttggctaactgcaacctttgcatcctgggtccaagcaatcctcctcccgagtagctgggattaaaaatgtgggccaacatgcccagctaatttctgtatttttagtaga

SEQ ID NO: 190267 - DNA, 122 bp, Homo sapiens
tatcaaggttgcgggggcgtggtcacggagcggagccaataaaagcggggcgtgcacggccgcgggccagtgcctatgaagggcgaggggtgtggtcacagggcgggatctacgaaggatgc

SEQ ID NO: 190268 - DNA, 122 bp, Homo sapiens
gagtggcctccgccgcctgtgggcctgggcaccaggtctcagggtgcgcctggtggtccccggaggtgctgcggaaccgccctacataattaacacacggaatggcttccaaaaataacacg

SEQ ID NO: 190269 - DNA, 122 bp, Homo sapiens
tctgagtttccataggcagtttttcataagcccttaagttcgacttttctgtagtctctacgttgaaagtgaaaatcagcctattaatcatcagaccccgatgtgcccaacacaggcaaaca

SEQ ID NO: 190270 - DNA, 122 bp, Homo sapiens
tcctaactctggcaacgccattggacatttgggaacagaaggcaggccttggcattgatccgctttactctgggcccccgggccctaaatccctgaggccctggtcaggttgccctcttctt

SEQ ID NO: 190271 - DNA, 122 bp, Homo sapiens
cagctttaggagcagggaccgtgtgtgggggctgcacccttgcagtgcgtggcctggacacggcccaagccctccgccgcccacagacaacactttcacattgataaatatgcatgcccatc

SEQ ID NO: 190272 - DNA, 122 bp, Homo sapiens
cccacgactggcaaacaatgaccttacagaccgtgaagaggctgttggctctgccctcgccggtgcctccgaagacggcgacccgcagcggcccctcaggggagtcccccctgctagaccga

SEQ ID NO: 190273 - DNA, 122 bp, Homo sapiens
tcagcatccccacaggactcgctctggtctctgggttccgttttgctgcatttcttggggcgtcacctcctgcccccagcctgggaagggctgcccggtctcatgcctgagggccctccact

SEQ ID NO: 190274 - DNA, 122 bp, Homo sapiens
gcctctcctcgccccccaacccccatcgagctcacggtcgccgtcgatgtcgtcgtcgcacgcatcgccccggccgtcctggtctgtgtccttttggtcgtcgttcttctgggaccggcagt

SEQ ID NO: 190275 - DNA, 122 bp, Homo sapiens
aaatgtatgcattcaatgaacactgtccagcactaaccccatggcaggccctgtgcaagacgcaaggattgaagttcatgagagacagtcccaggccatagggatcttccaggtgagaggag

SEQ ID NO: 190276 - DNA, 122 bp, Homo sapiens
catttttagaaccctgtgtgtgtttacactgacagcacattccacttgagaccagtgctgcgggactggggagtgcaagcgtcagggtcccagccgaagccctttagcttgggacttcacag

SEQ ID NO: 190277 - DNA, 122 bp, Homo sapiens
accccagccgcgtcctctagcctcacaggacccgcctgcacctcttctggtttcttccctcgtggctcgggctcacccctggctcgtcaaacctcgcccgttgtccccgagaccccttcctg

SEQ ID NO: 190278 - DNA, 122 bp, Homo sapiens
atcttcgcagggagtggggtttgtatctgcaggcaggtagaagagccagggctccgggcgcggacgccgtaggggtagcttccgagtccctacttggccaagggccggcacggaggggctgt

SEQ ID NO: 190279 - DNA, 122 bp, Homo sapiens
gccccccggacaaaatatgaagtggttggcggtcagtgaggagtcccgtcgcgacttggacggccacacacgttttgcaggagtttgcatccgagagagaggcaggcagagcgtgggattga

SEQ ID NO: 190280 - DNA, 122 bp, Homo sapiens
tgttacatgtgtcccattggtagtgggtgacagtcagtactgcagctctagggggaaacacgtgttctctgacaccgggagaagatgtggaagggacgtctaaaggtgcagtgtagaccgcg

SEQ ID NO: 190281 - DNA, 122 bp, Homo sapiens
gtagaggacctggagggagggaggcccctctcagagcctcagtttcccttatctataaaacgggtacaacataacatgagaagttggtgctatggtgcatgtccagagagaggaatgcctcc

SEQ ID NO: 190282 - DNA, 122 bp, Homo sapiens
gcccggggacttccccggcggggctcagaagtgtgggatcggtcgcttggcttcccctggcgtcagcgacccagggtaacctcctccactgctgcgtgccgtgcaggcctgcctgtgtgaga

SEQ ID NO: 190283 - DNA, 122 bp, Homo sapiens
acagattgtcttgttattttctggattttggggactcgccatgggagcctttccgagcagcgtgcaaataggtaaggtgtgctccgatggggtgtgcatgtggctggttgtagcagatatcc

SEQ ID NO: 190284 - DNA, 122 bp, Homo sapiens
cgggtctccccgtgtggcatcaaggcgggctccctataggagctggtgtggacgtccgggcgtggggttagggcggatgcggggatcgcggggcgggtgttgacattgtgctctcaccaggc

SEQ ID NO: 190285 - DNA, 122 bp, Homo sapiens
cagtgactaaggggaaaactgacccccttctttctaggagtctggagctctccagagccccgtccccagccctgggcagctgggagtgaagggcaccaggcccctgaaagcccaagtcaagt

SEQ ID NO: 190286 - DNA, 122 bp, Homo sapiens
gcccgctgcgtgtttgtgccacccagcgtactgggtgctttttcaaaattttatcatggacgtctcaaaacacacgtgtgacttagatggtaaaagtttcatttttcatttaaagaagttga

SEQ ID NO: 190287 - DNA, 122 bp, Homo sapiens
agccgtgggagaggcagccatgctcagtctccctggataaagccagggttcccttggcaacgggaccgtgtggacattcgcaaaggggtttccctccaccccccaggtcctctttcaactca

SEQ ID NO: 190288 - DNA, 122 bp, Homo sapiens
ccctggatgacgtcaccaacgactccagcctttggcatctgagcgccggctccgcggaggcgtctcttgcaattgctgggaaataggaatgagagttttaaggctgttttaacaaccaaatc

SEQ ID NO: 190289 - DNA, 122 bp, Homo sapiens
aagaaactaaccttttgggggtttgaggcaagaagaaccctgcatgtaaaactccacagacgttcgcggcctcttgcatacacgtgctcggctcgtggttttcataatttcacgtgtagcga

SEQ ID NO: 190290 - DNA, 122 bp, Homo sapiens
tgcatgcactgggcatcacacaccgagacctcaaacctgagaatctgctctactaccatccgggcactgactccaagatcatcatcaccgacttcggcctggccagtgctcgcaagaagggt

SEQ ID NO: 190291 - DNA, 122 bp, Homo sapiens
gatcatgccagctggtaaaggaaaaactaaagggccagaaccatttcacagagcaggcaacgcaggagctgggacgtaatcaataactagcacaggtttatattatgattcgtctgtagcgg

SEQ ID NO: 190292 - DNA, 122 bp, Homo sapiens
ggccggggacctgttgatcgcaggtatagccggctggcccgggctccctcgggactggggcgactgcgcatgctcgctggccgcgctgggccagtagccgagccgcggtgacgaaccggctc

SEQ ID NO: 190293 - DNA, 122 bp, Homo sapiens
tgcgcctctcgaccaaagaggcacgcactgggcatgtgcggccccgggcgcaggagaagccggagatccgtcctctactgtgtgacttgttatttttatctgatgcttgcattctcgggcca

SEQ ID NO: 190294 - DNA, 122 bp, Homo sapiens
cacagctctggccttgttagcgaaatgaacaaagacacagctacccatgtgcttccttcccgtgcagaccatttgtctctaaaatgaaatgaaaagctgcatactccctcagcagaggaaag

SEQ ID NO: 190295 - DNA, 122 bp, Homo sapiens
cgacctgggcgggtgagagctggacctgcctggccgggctgatgggatagcggcggactccgccgccgtcggcccttgctgcagcagggcgccatgtgctggagcgcgcctgcgcgagggat

SEQ ID NO: 190296 - DNA, 122 bp, Homo sapiens
gcgtggctgtgggaatccttggggcgcctttgggttccaggaagctggggctgtgtgggccgggctgctaactggggctgtggagcaatctgccagccgagccccttccggagctgtgggtt

SEQ ID NO: 190297 - DNA, 122 bp, Homo sapiens
aacaatgcctcatttatttatttaactcattccaatgtattgagtcaactactatgtgcccggcacagaataagatgctaaggatattgcagtgaacaaattccctgcccaagaagagctta

SEQ ID NO: 190298 - DNA, 122 bp, Homo sapiens
cccatgcacgttcaagacgactggcagctccgcagaggccttcgctgctgggaacacagccgtgacagtgtcggaactcatctacctcaacgctgaatggcaggctccaagttgaaaagttt

SEQ ID NO: 190299 - DNA, 122 bp, Homo sapiens
acaagaatgaatggcagacctggaagtcacttttggatcattagcactttggtgctatcacgaaagaaagaataagcctgtataagcctcctctatccaaaattgtttttgatacttatccc

SEQ ID NO: 190300 - DNA, 122 bp, Homo sapiens
gtctgtggattccagcctcccagaacagacctttgcccagcaggaaccaggtttctgcagcgtctggatgagcgtgcacgaagcacacgcccgaaaatcctgagcacgtggctctaccgagg

SEQ ID NO: 190301 - DNA, 122 bp, Homo sapiens
ggaaacacttgctcatctttgagcaactcacatactccaaatacctctggtgttgaaagccgtctggtcattagtatgttcagctgctcagtgtctgaaattcctttgggtcagacctctag

SEQ ID NO: 190302 - DNA, 122 bp, Homo sapiens
ctccttgtaatgatcgttgtacccttttctccggtaggaagatggagatgtttcctcactcgtggactgcacctcaggaaagataaagccagtgaattgaggattgcggagtattgcacaca

SEQ ID NO: 190303 - DNA, 122 bp, Homo sapiens
cacgtgtctgtcacaatcacacgggcacctggtgcaccggtggcaaacttgtcaatccgccggaactcagtgttgacagaggaggcaacagcctgccagccagactgtgggagggcgtagag

SEQ ID NO: 190304 - DNA, 122 bp, Homo sapiens
gcctgattgaaaagcaaagggtctgcttctgtcttcctgcagggcgcagtcctgccctggcgggggccggccaagaagggaagggccttgggagagcaaagtggggtttgccattcgccctc

SEQ ID NO: 190305 - DNA, 122 bp, Homo sapiens
tccaatggcctctgccttcctcagacacctccctcgcttcagcggtttcagtaaccataccggggctgcttcctgcccatgtttttgcccatgctttttacagcatttaaaaatgtatatgt

SEQ ID NO: 190306 - DNA, 122 bp, Homo sapiens
ctatcgcacaaaatgggcgctagcgggggtcattctagtccggctgcctcactctcccgacggtcctccagggtggcaccatcaccgttctcgcccgcctccagccggcccattcctgctgc

SEQ ID NO: 190307 - DNA, 122 bp, Homo sapiens
gcggtcatgcgggacagggacgtgacctgtcacacgggtgaggactgaagtctgtggctgcgtcagggagaaggactgtggcggggacaggaggagccgcgggagtggggaggattttcggg

SEQ ID NO: 190308 - DNA, 122 bp, Homo sapiens
atgactctccttgtcctctctagagggcctcagttttcctatctataaactgaggcttatcgtgcagggggatcagtccaggagaagcaacctgcctaaggtctcaagacagagtctagcct

SEQ ID NO: 190309 - DNA, 122 bp, Homo sapiens
cccgcgggaggaggtggcggggcgcgggggaggaggcggggagccccggcggcgagggggcggtgacagcacttggaaaggaggctgcacgcggatttgcatgaaacacagactgggagcgg

SEQ ID NO: 190310 - DNA, 122 bp, Homo sapiens
ttcgctccctccgttctcagccctgcacaccgcctcccctggctcctccttgcccttccacgctccagcgccgtgcaggatttcctaaacttggaatcgctcttcccgctttcccctcctca

SEQ ID NO: 190311 - DNA, 122 bp, Homo sapiens
tgttgtccgtaaccagaggtgccaggagtgaaggacccccccactagagggcaggcggcccgaatgaatgcctgatgtgcccagaaacactcaaccgtctgggaatatttttctcaaaggct

SEQ ID NO: 190312 - DNA, 122 bp, Homo sapiens
cacaacaggggagtgcctcgtttactcaggccgctgctctcaattccttgcaggagtgagcgtgcgagcagacaaggcgggaactggagtgcacgagcgctggaaccggatggccactttga

SEQ ID NO: 190313 - DNA, 122 bp, Homo sapiens
tgggcctcactcccagctgagacctacaggctcagcccctgcccagccctgcctggcacccgctcaatctggctgagctccagagaatggcagggctgggctgtcacatgctgagccacgtg

SEQ ID NO: 190314 - DNA, 122 bp, Homo sapiens
cgacatcttcccggtgtggcctctgtcgctcagtgaggccttttgcccacagttcggaagcgtcagctccagctgctagatgcatttgaacccccagcagggagcacagacccgggggcctg

SEQ ID NO: 190315 - DNA, 122 bp, Homo sapiens
ttcctgagggcacccaagtgaagatgtccatcatacagctgaatagatggttccaaatgtcggaagaagacgctggattggaaatacaaatatgactggaaaataagttgaaaaaactttct

SEQ ID NO: 190316 - DNA, 122 bp, Homo sapiens
gaaactgaatccccagtgtggcggtattggaaggtggggcccaatgggaggtatgtgagtcgtgggggcagacccttcatgaatatattagtgccttccctcagggatgagtgagttcacac

SEQ ID NO: 190317 - DNA, 122 bp, Homo sapiens
gccagagacatttaaactgcaaaccaggatgagaaattgctgacatcatgttgtggacagcgttttccaagactgtcagaataagactcgctaccatgataagactccttcccttcttaatt

SEQ ID NO: 190318 - DNA, 122 bp, Homo sapiens
acactgttgatagtgattgctatctgggagaacctttttgggtaaaaagattactactgtcgcttttatgattgcccttctgtaggatctttgacttgtgccattttcaaattttgactttg

SEQ ID NO: 190319 - DNA, 122 bp, Homo sapiens
ttcatcgtttaatagtctcaccctttcttgttgaaggaccatccggccattagccatgggcgtggcctcactctcagccgcctgactgtgtagctttgccagggcctcccacactgacccac

SEQ ID NO: 190320 - DNA, 122 bp, Homo sapiens
ggacacacaggccgctcccacccaggctttgttcagggagggctcaaaccccccaccgcgcgcgcctttcccatgcacacctccacccgccccgggcccggccggtcctgaccccagagagc

SEQ ID NO: 190321 - DNA, 122 bp, Homo sapiens
gtcagcatgatcttaaaggaaaccttcgacatggtggtaccaggatgaatctagaacacacgccaactctgcggggtagcacgacttcctccactgtgctgaaaattattcttaaaataatt

SEQ ID NO: 190322 - DNA, 122 bp, Homo sapiens
ccggccagctctcctcctcaaacagttcctgcaacctctggttatctgtgtgggcagaggcgggagtgtgggtgtgtggccctgccctgggacagggatgacgagagagcatgtgcttgtgt

SEQ ID NO: 190323 - DNA, 122 bp, Homo sapiens
ttgtggcatttcccaggcagaggtggcccgggaggtttccgaagcggtcccttcccgagccggcgaggccctggatgtgcgactacattttcttaaacacatatacaggcggcttgctgttt

SEQ ID NO: 190324 - DNA, 122 bp, Homo sapiens
cacctacgaagggagaaaggcacgaggagcgcctgaccaaagtggttttgccctgcttcccgcaagaggtggcacccacggctggaacgcaggagtcagacccacagtccccagctctggac

SEQ ID NO: 190325 - DNA, 122 bp, Homo sapiens
cccttggctgagaagaaaaccaaataaaccttgaacagccttggcttcggatgtctcaagcggcctcatcctctcccgcgccttggtggggtgggggtggggatggcggtgggggtgtcggc

SEQ ID NO: 190326 - DNA, 122 bp, Homo sapiens
caggggagggggcgggggcatgagaccgcgctcagagcggccccggcccctccccaacggcgcccaaccaaaagaggccaccctcagcccagaaccttcccagcaagtttctcagctctccg

SEQ ID NO: 190327 - DNA, 122 bp, Homo sapiens
cggcctctgcaggcccaaatcgtcctgaagtcggcctctccaggcccagctccggcctcccggcggcctctgcaggcccaagtcatcctcaagtcagcctggaattgggcctggaagagagc

SEQ ID NO: 190328 - DNA, 122 bp, Homo sapiens
tgcctgtatccgggcagcttaccgagggctccctggtatgacttcctttgaagcccatagcgcctcgtggggccgctagaagtttgtgttgcaggaggaaccgatgcaccttcctttccttt

SEQ ID NO: 190329 - DNA, 122 bp, Homo sapiens
accactgactcctactcctcgcttcttccgcgttatctcatcttctcggtttgctagacacgatctagcagctctggcacaaatccaactgcgcagcaaattttactgaaggtttaaaagta

SEQ ID NO: 190330 - DNA, 122 bp, Homo sapiens
aaaaaaaagacaagaggaaaccgaaaaaggaggggtgggggcccctcccggcacagagttcgagtccaagtgctcggtcgggcttgcagtctgcctagggcccatgtcaccccccccactcc

SEQ ID NO: 190331 - DNA, 122 bp, Homo sapiens
gcgcttcgagagccaagggactacggatcaaaggatcctgcagccggggaaaagcaaactcgcttcgctgggagctcagatagggggttgcaaaacggtgggcgccggaggcaggggcggcg

SEQ ID NO: 190332 - DNA, 122 bp, Homo sapiens
acttcaggcacagactacaaccacctgacccctgaccctgtgactgcaggatgttcaacacgccccctctccctccctccatgtgcaatctactctgtggagcaggggcttcagtgtaccca

SEQ ID NO: 190333 - DNA, 122 bp, Homo sapiens
gctgatggcaatgggatcaggtgtgctcaggatggagaagagctttcctgaccagaggaccgtctgagaatccaggggtggatattgtcctttgaggacccccagagggtgctgagtggtcc

SEQ ID NO: 190334 - DNA, 122 bp, Homo sapiens
ccggaggggagtcgcgggagcggcagagacccctccccgctaggcctagccgtcctggtgcggggtcctggcgggcaacagactcctgcctggcccagctgtcccaggggtttcccggggac

SEQ ID NO: 190335 - DNA, 122 bp, Homo sapiens
ctacaagacgggggagtccgggctgctttctttgacactggtcatcactccacacctagacgctatgtccatgtctggaagatgcttttaaggaagttttgatgcagagaagagtggccggt

SEQ ID NO: 190336 - DNA, 122 bp, Homo sapiens
ggctctggcctcctggggctccctgcagctgaggccaaggctggggtgtggccgcctccgcggcaggccggcgggctgggctcgggtgggccggggcgctccctcctttccacgcccccacc

SEQ ID NO: 190337 - DNA, 122 bp, Homo sapiens
tgcggcggtgtgctgacaagccaattgaggggactccatcttacaaaacgcgcttcatgtcgccgccattccactgcctaacccggggagggcaggcacggcggggagcagtctcgaaggag

SEQ ID NO: 190338 - DNA, 122 bp, Homo sapiens
aaatcagtagggtggcgcatgaatcactgagaacagcccacggtgtgtggtcagtgccatcgtcatcatcgtcatcagcaacggcagctcaagaccagcaaggccgcggttgtgtctgtcat

SEQ ID NO: 190339 - DNA, 122 bp, Homo sapiens
gtggctgggagctgtggctgcacgagacccggaattcgaaaggctctgcctccccatggacggagacttccgttgttttctttcctttctctccgcagcggagagggctggagcggatttgg

SEQ ID NO: 190340 - DNA, 122 bp, Homo sapiens
ttttttgggttactttgaaaatgagccagagccttcttgaggatattttgcacaaagtcacgctgacaaaatcattagcagtgcaacccaagcttctggctgagcaagattcagtttccact

SEQ ID NO: 190341 - DNA, 122 bp, Homo sapiens
atctgaacaggcagctctggaagttctcatgtggggctagccttgctcaaaggccaggaacgattcaggtcagctcctaatcctttttctttttaatgaaacctgtgagcaaacctgagaag

SEQ ID NO: 190342 - DNA, 122 bp, Homo sapiens
ggtaaaaaggtgcgcggtgaaaagaacagcgcgatggggcacggcctcgtcctagaggggcggggccacagcaaggggcggggctctcactttctaggaaactggatgagcagcgcgactgc

SEQ ID NO: 190343 - DNA, 122 bp, Homo sapiens
tccctggcctgagggtggggccttactgaggacccgcccccttccacccgggaatcgatacgcctcccgctgccatccatggcccccccagggctcgaccccaacccggctccgagatttga

SEQ ID NO: 190344 - DNA, 122 bp, Homo sapiens
aaagagaaggagcttcaggtcatgaggccggcactccaccattgtcttgggatttcattccgggtcagagagtgtgagcagcaataaagtcggatatggctgaggataaaatctggtgaggc

SEQ ID NO: 190345 - DNA, 122 bp, Homo sapiens
caggaagcgcgtgtggggaggctcggggccggggccagcacccacactgggtctccacagcggcatggaggcctgcgtgtcttcactgctggtgctggccctgggggccctgtcagtaggtg

SEQ ID NO: 190346 - DNA, 122 bp, Homo sapiens
agctggaaacttcagagaggtttagtttcgtttcccagaagcatcagttcggtcccaaaacgctgcaaacgcgcgctgcctgcagtaggagagaggaaaccgcgaagcgcgagaaaaggcgc

SEQ ID NO: 190347 - DNA, 122 bp, Homo sapiens
gtcccatagaaaatcactgtcgtgtcttctgacaccataaaacagttttgcctgcttttgcgtgatacataaacagattctagagcacacactcccgtgcctggtaagaatttcctcagcag

SEQ ID NO: 190348 - DNA, 122 bp, Homo sapiens
tcgtacctgtcctgtgtgttgtggtaggggaatgtgttattctgtgtgacgttgtggaaccggttgtttatgaaagtgatagggtccctgcgtgtcttaagttttaatttaaattagatgcg

SEQ ID NO: 190349 - DNA, 122 bp, Homo sapiens
gaggtcctgttgtgcgtgctggtgttcctctcgctgggcctggtgctctcctaccgctgtcgccaccgaaacgggggtctcctcgggcgccagcagagcggctcccagttcgccctcttctc

SEQ ID NO: 190350 - DNA, 122 bp, Homo sapiens
gaacacccaacaacttcgcagcctaagaggaatgcacagctcaccacttccgctagatggcgctacttcccctactccgcccgcgagacacccaatttataaaataaatacaacccaacacc

SEQ ID NO: 190351 - DNA, 122 bp, Homo sapiens
ggagccggccgggcgcgggtaccggaaaccgtggagacctcagaggggcgggggcaagggcgtcccgctcacctttgacgtcggcactagttaccccaccccacgttaacccttctcctgcc

SEQ ID NO: 190352 - DNA, 122 bp, Homo sapiens
caggcagctctggtggctgtgggtgagggtgcagacgcagaagctggttaaaagtctccacgtggagccactgcattacaagtttcaacagaggctgagacagctctatcctcagaacacgg

SEQ ID NO: 190353 - DNA, 122 bp, Homo sapiens
cgctgcgatagctgctgctaaccacagggtcccctccacacacacccgagccccgcctcccgaccgcattggctcataccggcctcggcttcacgtctattggaaggaaccgctgtctatct

SEQ ID NO: 190354 - DNA, 122 bp, Homo sapiens
gattaaaagttccaagaactggtgccgcccgtgccatttgggcgctgggaaggtgctcggcggcggggttcccggtcccaccatgtgcaccaacatagtttacgagtggctcaaagcgctgc

SEQ ID NO: 190355 - DNA, 122 bp, Homo sapiens
cagttttattaatcccatgtgaataagtgagagcaatgaggccaaagggtttaggtaattcgatcaaagtcacacagctagcatgtggtcagctgaggattggaatccaggcagtctgactc

SEQ ID NO: 190356 - DNA, 122 bp, Homo sapiens
gggggactgtccattactaagcgggaaggcatatccggacttgtctgggcatggcaaaggcgggaaggttgtttacagaacaggtagcttggagacaaggaagtacaaggaagttggtcttg

SEQ ID NO: 190357 - DNA, 122 bp, Homo sapiens
gtccccagccctttgttgtcccctccgcaggaaggtgaaggctgtttatgtaatcggcggcgcctcgcgggcgactgggggaagtggatgggggagcctggccagggctgactgagcgcccc

SEQ ID NO: 190358 - DNA, 122 bp, Homo sapiens
gaggagatgtgaggtccagcagctcaccagtccctcctccggccccagggtaacctgcttcggggcatagacagcttattctctgcccccatggacttccggggcctccctgggaactacca

SEQ ID NO: 190359 - DNA, 122 bp, Homo sapiens
gagagaacccggatgagggggctagtgtagtgcgcgaggcacgacgggaacggcgagacccggataaagggatcgcggcaccggttcgagaaccctcggcggcggaggcggcggcggcggcg

SEQ ID NO: 190360 - DNA, 122 bp, Homo sapiens
caggtctcaaggtcttgcctggcagtaaatctgcccctgtccactactgagtgtgacaggcgtggaaaggtaggggcctgaccaagtggtggggccttttgatcaacccctctaacaccgcc

SEQ ID NO: 190361 - DNA, 122 bp, Homo sapiens
cgggatctttgcagaaagctgtttggcgcgtgatctagaaccacaggttccgcgggggagcgggggcctgagtcggaagaggggctgcaggccgggaggcaaggaggagccattcccagggt

SEQ ID NO: 190362 - DNA, 122 bp, Homo sapiens
ttttattagctcctgtttacagagacactgcctgaattccttctgccactcatcccacaccgcctatgctggtggttaacagtgccattttaaaatctcaagcaggaggagacaacataatt

SEQ ID NO: 190363 - DNA, 122 bp, Homo sapiens
tgacagggggagagggcggtgagatctacaggggaactcagggcggatgtctgccgggtccgcgttgggctttctggtagcttctccgcgaagcgcgcttgttcctgaggcggtgcctgcct

SEQ ID NO: 190364 - DNA, 122 bp, Homo sapiens
cggggctgcagccccccaattaaagcacttttgcagctcggacacccagagagctgcctccgcgcacgccaggccggcacctcctgctcccactcccctctccgcccagccgtgggcagctg

SEQ ID NO: 190365 - DNA, 122 bp, Homo sapiens
agagccctctctgagtcacaagtgggcaaccatgtcatttgcaacctgcaagcaatcccacgagaggtgagaatctaaacaacctcctcagaagccaagagcacctgccccgagccagcctg

SEQ ID NO: 190366 - DNA, 122 bp, Homo sapiens
cctgcttccaaactgtgggttattttctaatgtcttaaagcaaactaagccacgccttcacggagtctctgcacatagtacatgagcacaggtgcagtgtcctttcgccgccatcctctaat

SEQ ID NO: 190367 - DNA, 122 bp, Homo sapiens
atggaagcttcattacttagacatgactaattaaaccagtgacgctggtggtcatcagctcgtctgccttctcctctccccagaggttggacattggttgaaggtcccaaccctctaatcct

SEQ ID NO: 190368 - DNA, 122 bp, Homo sapiens
tgccttcctcaccatccaggagtttggcttagtcatcacctccagccctcagcacagacacggtgcacagaaaccagcaaccacttgggtcaataacaactgggtgatcacaacagggggtc

SEQ ID NO: 190369 - DNA, 122 bp, Homo sapiens
tcgccatgcactcgatgccggtcttcacggcacgctggcccctccggcgccttcatcaagcgcatttgtcttaacccttaggagctactgaccctgtgctgtctgcagaggccaggctgggc

SEQ ID NO: 190370 - DNA, 122 bp, Homo sapiens
ttcttccatcaactttaaagtgatgaagtaatcggcgctcagagcgggcgcaggcaacgccgctgaggagcccgaggctaggctctcgggggaagggccgggcgacctcccaccccggccag

SEQ ID NO: 190371 - DNA, 122 bp, Homo sapiens
tacaggtgcacaatctgcaaaacataaaatactccataaatggaagcagtaaatcttccccgagctcgagactccaaaggccctgagcccagtaccagtaacagcacccaggtaagtaggct

SEQ ID NO: 190372 - DNA, 122 bp, Homo sapiens
acttgcacacttttatgcaggctgcagcagccttgtgcatgagttgatccctctggtgcccgacttgccagccctctcccatacagagagaggaaaaagtctgaagacacacatatttccca

SEQ ID NO: 190373 - DNA, 122 bp, Homo sapiens
agctctggctctctggcgccatctagaggtctctgagtagcttgggaactccctctcctgcgcttgcggtttggtaacccaggctaccaagtgtcccagttcaacaggacctcctgccttct

SEQ ID NO: 190374 - DNA, 122 bp, Homo sapiens
tccccccaccccggggcggccgcggccaggccccgcctcaccagcagttgagcttgcgcacgctgtgcagctccgaggccttggcccgggtcagaaccatcttccgcgtcagcttcatggcg

SEQ ID NO: 190375 - DNA, 122 bp, Homo sapiens
atcctctctgtgaatgttttatttctttcccccactctgctgcctatgaatttgggtttgcggtttcaccatgagacattcttgatacagtttcatagataaattcagggaggagttaatgt

SEQ ID NO: 190376 - DNA, 122 bp, Homo sapiens
gcgtttgtgtcagagccccgggcggtgtctcacagggcaacagtgtgaaccttaagaattcgaaacaggcgtgtctgccctctggcgggataccttctctgaacaatgggacattctcccca

SEQ ID NO: 190377 - DNA, 122 bp, Homo sapiens
tgtctccgtgtatgtggtctgagtgtctgtgtctggacgggaatccgtccactgctgcggcgggtgtgtacctctggttctgtgcaggtaatcaatcacacacatccccacgtaggtacagc

SEQ ID NO: 190378 - DNA, 122 bp, Homo sapiens
ctttgtgcaggggcagtgtgggcgagcctggcagcctcctgagcggcaggactatgcaggcgccttattgagctgtcagcggctggcagctgctcccaggtagcaggaagaagggccgagct

SEQ ID NO: 190379 - DNA, 122 bp, Homo sapiens
ttgcctcttttattttattcttgtaaaatgtattatcaatcagttgcgcactttcccattcgattggtgctttctgggcaagagctggacgtcttccaagtccgcgatctgtttgggaaagg

SEQ ID NO: 190380 - DNA, 122 bp, Homo sapiens
ccatcaaagttaggctgctaccctcccacagagattgggagataggagtgctatctccttcggtgtttacatttcaaagtgatggttcccaggtccttgagaaagacattgcctagattgca

SEQ ID NO: 190381 - DNA, 122 bp, Homo sapiens
agggctatgcccctcacccacccactccaccggtgctggctaccgcaatctctacccgggcgtccagattcctggccttgtcctttctgctggaatcatcaatgggatcgcgccgccgccgc

SEQ ID NO: 190382 - DNA, 122 bp, Homo sapiens
tgggcttcagctccgtgttgagcaaacagctcccccaaatgagtagggcctggacctagccgtggcctgtgacctcaggaaggagttctcactttcctgttttccaagactgaagttctgct

SEQ ID NO: 190383 - DNA, 122 bp, Homo sapiens
gattcgaattccagatgagcgtgaatgacacaaaatccgttttacttgcaaattctgaaccgtgcgcaggaacccagcaagctctgcatcacaacatgtttctccaagcagccgttgggctg

SEQ ID NO: 190384 - DNA, 122 bp, Homo sapiens
gagcaggcaggggatgatgaggttgatggtgtagaacaagggcaggcgccggatgtacagcgagtatgtgatgtcggggtagatctcctcgcagcagttgtacttgatgtcgtgtttgtagc

SEQ ID NO: 190385 - DNA, 122 bp, Homo sapiens
ccgcctgcctcggcctcccaaagtgctgggattacaggcgtgagccaccgcgcccggccgcggcttggttttatacattctagagaggcatgagacatcaaatacatttcagaaatacactg

SEQ ID NO: 190386 - DNA, 122 bp, Homo sapiens
gcgggagcgggagcgggagcgcggcggcggcggcgaaggtgcgggcggccgagcggggggcggggctgcggtgcctgcagaaccttggacagaagctccctagctgccgccgccgccgccgc

SEQ ID NO: 190387 - DNA, 122 bp, Homo sapiens
agccggagctcccacgtgagcaggcgcaggaggttgaagaccacgctggctttgcggcaccgaggcgagtcctggagccagggagggagggcagcggggctaagccaggctcttccccccgc

SEQ ID NO: 190388 - DNA, 122 bp, Homo sapiens
ccgcagcgctgcgccctctgaacgcccggcccccgcgcctgctgcggggcgcggcctggccgggccctggccccggctggcctcagtgcccagcagccccgctccgctctgcccagcgcgtc

SEQ ID NO: 190389 - DNA, 122 bp, Homo sapiens
gccccggctccctagcttcccgctccctcgcgccctcgcccccaatcccggctcggccctcgctccccgcagcctcccgtgccccccgcccgcggcctgacctgcaatggcggccgccgagc

SEQ ID NO: 190390 - DNA, 122 bp, Homo sapiens
gcctgacgttttactcaaagttcagtgctctgtggcatgctctgtcataaaatccagttccggcaggatgagggtagatgatgttgctgtcatcccaccaggacatttaccatgcgagtctc

SEQ ID NO: 190391 - DNA, 122 bp, Homo sapiens
cgcgagcgagacgggtccacactgtgcccacccagggctgcccggcaccccgcgcgcccacgcagtccactcttcacagtaaacgccgcggcccccgagggttagccctaagtggcgctctc

SEQ ID NO: 190392 - DNA, 122 bp, Homo sapiens
cgcagcacagctgctttcctgcggagcgttcaggagactcgggcacctctggaagcgctgcggactgagctgcccgcggctgcccccgccccgagggccgggacagcacctcaggagaagag

SEQ ID NO: 190393 - DNA, 122 bp, Homo sapiens
ttcacctgccacccaaatgatgatgctgacgtcacagcccgtgggcccggatgtggcctgcggacatgtccatattcttggtaactctgttcccaatgtttggttttcagacaacagcccag

SEQ ID NO: 190394 - DNA, 122 bp, Homo sapiens
gagggggtgagtacggatcgggcgtgcgggccggccggctaactgcccgggaccccgggtcggttttccaccctgctgcttctgggagtctcaggttgagatttaatttttttgtagtagtt

SEQ ID NO: 190395 - DNA, 122 bp, Homo sapiens
caggagtcaggctcagccatgctcagacacacattctcctgagggtgtctcccaacaccacggtcttgttttttggcgagtaaaaggctgtttcgtcagaaaccctcctggccctggccgac

SEQ ID NO: 190396 - DNA, 122 bp, Homo sapiens
ttcttagggttagagtgacaataaaggtaggtcacagatgtgtctgcagcctctgattgacggctgggaggcccccaagtctgttctagcaagagtgccaaacaaaggagagggaagtcagc

SEQ ID NO: 190397 - DNA, 122 bp, Homo sapiens
ggacgtcaagttcggggtctgcagaggccgccgaaagtcaaaagcggggcctgggaaggccgccgggaggcatgagctgggctgggccgaaagaggccactgggagacaggaggagctgggc

SEQ ID NO: 190398 - DNA, 122 bp, Homo sapiens
gagtcaccgcactcagcttagaacattcttgatttctgagtctgctgtttatacaatgttcgtattttccagtttttatagtaactaggtctttactactaaacacaattaatcttaggctt

SEQ ID NO: 190399 - DNA, 122 bp, Homo sapiens
catctgcctctaacctgctaacaccacacagccctctcaagacacgggcgtcaaaaggaacgcccacacgacaggctgcacccaaatgtgatgtccccctgtacacacatgcagcacacagc

SEQ ID NO: 190400 - DNA, 122 bp, Homo sapiens
gtggaggacaatcaacttccagggaatgaagcccagagccctgagacagctctgcagaggcggcttgcctgtggcaatgggaaacggtcatgtgtgggggcgatgtgccagcgccgcgctcc

SEQ ID NO: 190401 - DNA, 122 bp, Homo sapiens
gcccgagcggcggcgcagggaggcggcagcctggcggagcagcccccaccgcggccggcgcgccccctcgccacccctgcgcgccagcgccggcccgcccctcccgctggcctctggcggct

SEQ ID NO: 190402 - DNA, 122 bp, Homo sapiens
gagcaccaaacaactgtgcgccgcagtgcttgagcgagtcaggtcctgaggccactctggcgatcctccttacaattcatgtgaaatacctactgcaggacaaagcatctgacggtttggag

SEQ ID NO: 190403 - DNA, 122 bp, Homo sapiens
gtggttaaggcgatggactagaaatccattggggtctccccgcgcaggttcgaatcctgccgactacggggtggtttttgctcccagtgagctaacttaacccatctgtttggcagtgtgaa

SEQ ID NO: 190404 - DNA, 122 bp, Homo sapiens
ttgagcccacagcagtaggaaaacattttgaaacgttatttaaagtgctattatatataacgaatggtccatagtgagatgtcttggagcttatgaatatttattatagtacattcttgaaa

SEQ ID NO: 190405 - DNA, 122 bp, Homo sapiens
gacgcagcggtctccgggctccagaaacctccttagccttttgtggtaactttggtccggcggcggggggccggtgagcaggaactggagggaggcggtggggaaaccgtggatccgtccgg

SEQ ID NO: 190406 - DNA, 122 bp, Homo sapiens
ggtgatccacctgcctcggcctcccaaagtgctggcattagaggcgtgagccactgcacccggccaggcaccaccactcttgagggcagaggctggcatcttgttgcatttgcacaaggaag

SEQ ID NO: 190407 - DNA, 122 bp, Homo sapiens
cctgcccatttaagtaggcgggccgtaccaccgcaactttcttgacagggggtatcccggcggactcggacaacttcaagtgagcccagaggcaatttcttttcctttctaactgtggcccg

SEQ ID NO: 190408 - DNA, 122 bp, Homo sapiens
cctacagaccagaatctgagggagagcagattcggccttgagaacgcctacaacaacttccggcccaccctggagactgttgactctggcacagaggtgactcagctgcgagctgcccccac

SEQ ID NO: 190409 - DNA, 122 bp, Homo sapiens
gcaatcttttctttaggagtgatactcaaaatatttaacaacctgcaaggcccccacccccgctgagccacacattaacccacagtggctgggtatgtgaaggggtgggggatgaagtcctg

SEQ ID NO: 190410 - DNA, 122 bp, Homo sapiens
ggatgtcctgacctcgtcaccaccacaccacgcctcaagggctccccactgcctatgggacgatacccgtgctctggcagggctggctctgtctgctctcaccgcccctcccactgcctcct

SEQ ID NO: 190411 - DNA, 122 bp, Homo sapiens
attagcggaggcggcgggggaggggcgccggggcctttacgggaacgggggcgggggggacgccgctcattgcgctgccgtccacagggagctgcctcagccgccccccttgctgtcgccgc

SEQ ID NO: 190412 - DNA, 122 bp, Homo sapiens
gatatgtatccatttggagatattttaaatgccaggaccaaatttggctcttgcaggttccgacccctttctgacctactttctcccttcacaagttagctttgtatataccaaaattccaa

SEQ ID NO: 190413 - DNA, 122 bp, Homo sapiens
agctccccgtgggcaacggctggctgaaggatctgtaccctggcgctgcagggagctgggcgttcagcccctcagtgtggtgcttgtgaaattaacgaggggagcgtgagagtgaatataca

SEQ ID NO: 190414 - DNA, 122 bp, Homo sapiens
cagcttgcccattacctgccggccttggtgatgatcatctcagtgcctatctcatgaaagcgcttccagagctcggctccctgcagatccacccgcggggcctgcggcgagggcagaggggt

SEQ ID NO: 190415 - DNA, 122 bp, Homo sapiens
ggggcaccccgcccactgcgcacgcgcggcggccgggtgctggcccgggtgcccctaggccggatagagtgcttcccaaccgattcgcggccccaccccggcatctgtgccggccggccagg

SEQ ID NO: 190416 - DNA, 122 bp, Homo sapiens
agcgtccccacaccgcgcaccttctgcgggacgtgctagccgtgccggggaccgtgtggacggcaggctttgtgctcacctacaagctgggtgagtgaggcctcgagccaggcaacagcagt

SEQ ID NO: 190417 - DNA, 122 bp, Homo sapiens
atataaacttaccagcaaccatacagacaccaagaagagcccatcgcaacccctggggtgcgcctggaccatccttcctctccgaagccccgtccagtattcttcagctcccaagttcagtg

SEQ ID NO: 190418 - DNA, 122 bp, Homo sapiens
gaagggggtgggagcagggggaggggacgggggcttggggggagacgaagaagaggtaaccgttgaaagctcgtctccccaagggtgaaaggaagcctccctcgggttcgagtgattcgggg

SEQ ID NO: 190419 - DNA, 122 bp, Homo sapiens
gcagttgagttgatttacattacaagttgcaaatcagggtctgtgcattgagtttccctccggttgtgaaaggggtctaagcgctttgctggggcctggcaggcccctccctgggctgcaag

SEQ ID NO: 190420 - DNA, 122 bp, Homo sapiens
atgatcacttccaggtcctcagtacacaaccaccacgagggaaacccagacctaggtttccggcgccgactctgaggcccgggagttttcttcttgcgtcaccccagcgtgggcaccccggc

SEQ ID NO: 190421 - DNA, 122 bp, Homo sapiens
ccagcctgggcaacaagagcgaactccgtctcaagaaaaaaaaaaaaatcacctcccaaccgtatggaccacgctgacatcctgccatcaagaagcaaagctttccagcgtcccccaagcgc

SEQ ID NO: 190422 - DNA, 122 bp, Homo sapiens
ctggagtggcttctcccatgctgacctcacttctgggaggggccaggaggaacctgcctgcgtttctgaagcccagctctagcacatttcacccagaggccaggatcccatgcagaatgcca

SEQ ID NO: 190423 - DNA, 122 bp, Homo sapiens
ccagtcagagggatgggatggaggggccagtgctgacactggggctgctggctgccctggcggtgtgtggtaagggaagacaccctccccaccctggggtcccccgtgatgcttacccaggc

SEQ ID NO: 190424 - DNA, 122 bp, Homo sapiens
cctcccgaagttagtgactcccagtttgctgaacctgactcccagcccctcacttctaggcgacagaggccaaaagagtggagatggctgggtcgggaggcccccttcgcagattgggagac

SEQ ID NO: 190425 - DNA, 122 bp, Homo sapiens
cacgtcgctgggctcaggatggcggggcgtgttgcaggtgtacagttgcacgccgccgggcggggagcgcgggaatggcgaggtgcaggcgcagagacacacgtccccggcggcgcagcgca

SEQ ID NO: 190426 - DNA, 122 bp, Homo sapiens
tatggggtgggaggtaaatcaaggccacaacctcccacctggggaaggatgagcgcgcagcgtgccctgagaaaacacaccctccctgcaaggttgctctaaaagatcacttcctggcccta

SEQ ID NO: 190427 - DNA, 122 bp, Homo sapiens
gaggacatcagtggtctgtggcaatctctgggcaccatttagtgcttatcttggcctctccgtggctttgagactgctgtccgtgtcttctttgcaactgctttcaaatgttgtttttctgg

SEQ ID NO: 190428 - DNA, 122 bp, Homo sapiens
aggggaaggcggggctagatacgatagagagagaccttactgaactgaaaaaagtgcgggcggggtagagggaggaggggacacatccaagctatttaaagacgcccgactggcctggaggg

SEQ ID NO: 190429 - DNA, 122 bp, Homo sapiens
agaaagagaaacaactacatcactgcagtagtttgaaagtgctagggcaaagcccggcaccgatgggagtgcagagccagatgtacaggaaggcttcctggaggaggtgaatcctgggagcc

SEQ ID NO: 190430 - DNA, 122 bp, Homo sapiens
gcatttggagtgtgagtgccttagagagactgactattctggccccagggagttggcgaccgttaatcttggtggttttgaccgctaactgccccagaggtcccagcctgctggatgactca

SEQ ID NO: 190431 - DNA, 122 bp, Homo sapiens
aaggagcagcccccagatcagagagcaacgcatgactatctgcgtgtgcttctgtgactacgcggatgttgtgggcggctacatgcgtgcgggggcccggcgagctgggcaggtgccccctc

SEQ ID NO: 190432 - DNA, 122 bp, Homo sapiens
aatttttctacatccctcaggaccctcaaactcaatgcgtctgcaatgaaatatgtcagtcgctcctcccccagacctgcaaagcccccagttcactgaatgccccttacccagggacctgc

SEQ ID NO: 190433 - DNA, 122 bp, Homo sapiens
tagtctctcaaatcactgtgtcttctagcctgggattgttctcccgccctggtatcatgacgttagtaagtcgcgctcatggagctccgactgctgaatccccgctaagtccacgtcctgcg

SEQ ID NO: 190434 - DNA, 122 bp, Homo sapiens
ggactcaaaagtttctgatccctggccacgagaagaagcagtggtaccctcaccccatggcgtgggtgctgtagttgtgaccaaagcagcctggcctggggccaagtgttattgggtgtttt

SEQ ID NO: 190435 - DNA, 122 bp, Homo sapiens
atgggggccggggagacaggacacacagaagatgagttcgtgggccagccctgagccccgcgcccgattctcgccggcccaagagagcccgccgcagcctcccccattttgcagccagcgga

SEQ ID NO: 190436 - DNA, 122 bp, Homo sapiens
cgaaccccgcgcagcctgggaaaggcctgagattccccgctattgggattcacatcacgacgcggcggccccaactcggggaggaattagacacggcgtgagtgtcccaagtgcggggcggt

SEQ ID NO: 190437 - DNA, 122 bp, Homo sapiens
atgtgaggtacatctgggcatggctagctgggaaggaaagaggatggcagagcctcgagccgttgccagggactggttgcgtgtcccagaacgtgccaaaagcctgcctcgtgagcacggca

SEQ ID NO: 190438 - DNA, 122 bp, Homo sapiens
gtctacgtgagagggagtgtgcaggctccctgtgtccccagctcagggcctttccctctccgctctctgcagcttacagcggcctgaggctggatggagggcttccagacatatggtggcag

SEQ ID NO: 190439 - DNA, 122 bp, Homo sapiens
tgctttgcctcctgttctgtcttgactttgccagaaaaatcgagttgagcagcaacttcacgagcatttgcaagatgcaatgtccttcttaaaggatgtctgtgaggtactatttcttttag

SEQ ID NO: 190440 - DNA, 122 bp, Homo sapiens
gggtggtcagaaaatacccatgctgatgaaatgacctatgcccaaagaacaaatacttaacgtgggagtggaaccacatgagcctgctcagctctgcataagtaattcaagaaatgggaggc

SEQ ID NO: 190441 - DNA, 122 bp, Homo sapiens
catttcccagagtgctgcaagaactgggtgtgactcggaatccctcccaaccacttccggcgcaagtggcttctgataatcatggcgcccctcggaacaactgtattgctgtggagcctctt

SEQ ID NO: 190442 - DNA, 122 bp, Homo sapiens
gcgccttcactcttctggcaccccatttggctttttgggtgggcctcccacttccgccgccgcccctcactcagccttgggtctgcgggaggcagcagaggaaaaggagccccggaaacact

SEQ ID NO: 190443 - DNA, 122 bp, Homo sapiens
tgtatgtgtgggccaaagaccgccctgagatctgggagggagagcctccgtgtctcccaccgagggacagcctgaaccagagcctcagccagggtatggtgatgactggggagatgccggga

SEQ ID NO: 190444 - DNA, 122 bp, Homo sapiens
gcaaacaggtagagcggcagccaccccagtgatgactccctgctccttagattgtagggacgctggcacctcactcatgctcctaagtggccattttgcgccctggctgggcgagttaggca

SEQ ID NO: 190445 - DNA, 122 bp, Homo sapiens
actttatgtgaagaaagccaacaaggggcatggagtgagttccgcaggttttagcggctgcggcggctggtgctcagtggggatgatggcgggaaggcgcctccctctgtgggccccgaggt

SEQ ID NO: 190446 - DNA, 122 bp, Homo sapiens
tccctccatgggaaatggagaacatcagctatttcccattgccttcaaacctaaagatgtcgccaggcctcttggcttgttactgaagcagcgaaataagtcagaaatcaaagacttagaag

SEQ ID NO: 190447 - DNA, 122 bp, Homo sapiens
gtttggttaccaccctcctccctcccttcagaagagctctctcatcttaggcccaaggcacggcccctgtcccagccaggcttggggtccctggagaaatattgccgctggactgtgccgtc

SEQ ID NO: 190448 - DNA, 122 bp, Homo sapiens
ctttggtctgtctggagtcctattcaggctttgttgtgggagaagaaggcaaagagcccacgacttgcccagacagtctgaggcctggccatgtagcttgcagttccctagacactctggag

SEQ ID NO: 190449 - DNA, 122 bp, Homo sapiens
cccgagtggatgctgccgccctgcgcgccgccgctcggcccgggcccctcgggcgccccccgacccgcgccggccctgcccagcgttcctcctgcacgcagccccatcgtcgccgccgccgc

SEQ ID NO: 190450 - DNA, 122 bp, Homo sapiens
agccaacaaacccaaagaagaccggttgctaggaagagaaagccgagcgttgctccgtgacgtcatcactccgcgccacccgcgacagtttcccagcagggctcacagcagcgttccgcgtc

SEQ ID NO: 190451 - DNA, 122 bp, Homo sapiens
cagctttcctgggagctggccccgctcccgcgttccccaccctgccgcaccccgttgctgcggcagacgcgaccccgccccccgcaacggactaagcacccccacttcgccccgcctcggcc

SEQ ID NO: 190452 - DNA, 122 bp, Homo sapiens
gcgggaggccaggggagaatgagctggggatgagagaagtcgcaggaagaatcctctgcccggagcctgcagactccaacccctcagcgtgagggtcaggagccccacagtccccacagcag

SEQ ID NO: 190453 - DNA, 122 bp, Homo sapiens
tctcagccaggtccaccccacctcccagcctccttctcccagatccccttccctgaccctcggaggcccctcaatacctgaatcggggcctgttccatgttgatgtgaacatccacagcaga

SEQ ID NO: 190454 - DNA, 122 bp, Homo sapiens
tcgttcagtctaacacaaccatatagggacctcagcacaaaactctctaatctgggtggccggaggcctgggtctcttccactgcattccactggtctgctcatgaaacgggaggcggttca

SEQ ID NO: 190455 - DNA, 122 bp, Homo sapiens
acctcccaagaagcagtgtcttgggctcagtggttccagtgaggtgccaggcacagatgccgacagtcttagagtgtgtcccaagggcgcccatccatgtccctgcaggtgtggctgaggtc

SEQ ID NO: 190456 - DNA, 122 bp, Homo sapiens
tagcgtgacgtaatgcaacctcagcatgtcagcagcaatataaaggagaatgaggcggcgcgcctcccagacgcagagtagattgtgattggctcgggctgcggaacctcggaaacccgaat

SEQ ID NO: 190457 - DNA, 122 bp, Homo sapiens
gaggtgaggagcacctctgcccagccgcccttcgtctgggaagtgaggagcgcctctgcccggctgccccgtctaggaagcaaggagcacctctgcccggccgccccgtctaggaagcgagg

SEQ ID NO: 190458 - DNA, 122 bp, Homo sapiens
ctgttaaggtctacagcaaaccaatcctcttcctccgttagtacgagttccggccaatgacgttcgccctcttaggtttttttttttagcccgccctccaaaagcgtgacagccgttgggtc

SEQ ID NO: 190459 - DNA, 122 bp, Homo sapiens
ctgtcctgcctgcctgccgtgtggtcctggaggatgaggcttaccaaaggctcaaaacagcgtccccgtggagtgacatggttaaagtcttgaaagaaaagaactgttggcattgaattctg

SEQ ID NO: 190460 - DNA, 122 bp, Homo sapiens
aatggcagggcgctgttgagtgcagcggggcggggccgggcgcgggggtggggcgagcggcgggcggggcggggcggccggccggggggtgggaggagaggggcggggcgggccggccgggg

SEQ ID NO: 190461 - DNA, 122 bp, Homo sapiens
cgcctggcgccctcacctgcctatgccagacggccaggcagctgccacctggtggggacacgtgggagaggtctgcggcaggccaaggagggccgggctgcaggaggaggggtggagagcta

SEQ ID NO: 190462 - DNA, 122 bp, Homo sapiens
ctgccgagggcgggagtaggggctggagcagcaccctgcggcgaggccccacaggagaatcgatggttctgatgctgtcagcctctgggtgcaaattctgagggcccgggagcgtctggcgg

SEQ ID NO: 190463 - DNA, 122 bp, Homo sapiens
ctgaccgcggcgaataacatttcctacagcggtcctgcaacttgcaatctaacgggctggcgtgactgcggtgagggggaagacgcaacagcaacatttacctcatcctgatccagcccggc

SEQ ID NO: 190464 - DNA, 122 bp, Homo sapiens
cacaatgaaatggtcacgatgattaaacactaagcactgcagaaggcaacatcgtgcgatcgaaaaccctgagtgaatgtcggccttcctccgccgcaggggttgcagcgcagggtacgcgc

SEQ ID NO: 190465 - DNA, 122 bp, Homo sapiens
ctgaattttcagttcagttcattagtcagccattttggtcaacaccctgcttactgcgcacggccaatcctatgagaactcagcatcccagctcatctgagcagatcctggaagtgatttct

SEQ ID NO: 190466 - DNA, 122 bp, Homo sapiens
ccgcgcctcctccgcttcgccccctcctgccgccgccgccgccgcctcccttaacgtgcccgaccccatcccccgcccgcgcctcggtccccgggctacgcccatgcccggcccgccggatc

SEQ ID NO: 190467 - DNA, 122 bp, Homo sapiens
ttggctgtgggtcgggctgcgtcgcgcctttcctggccgcggtgcggggacctctgggaccgctccctccagcggactctctatttagtctctgtttacttagagggaaagcccgggggctc

SEQ ID NO: 190468 - DNA, 122 bp, Homo sapiens
tggtgctcagtcaactagtctggaagtttccctcccccaaataactgagcgtcactccctcgcaggttgccggtgcagtctaaaactgtggcggagtgatactcaaattcccttgtgctggt

SEQ ID NO: 190469 - DNA, 122 bp, Homo sapiens
tgaggtggccgactcctgtttcacaagtgaagacctggttaccccagcagcaaggcattccggagtgggagaattcctgagtcctggggaggaagccgtggttacagggctgtggccctgag

SEQ ID NO: 190470 - DNA, 122 bp, Homo sapiens
caagccgctcgatctgtttgaaatcatccgtttgaaggcccaaagaagagcctgcctcaacgagaagccctagcacagagatattctcacaaagagcgctccgtaagtacaaatgactgttt

SEQ ID NO: 190471 - DNA, 122 bp, Homo sapiens
gattaaattaggtacttgctaattttttccgtcagtacttgctgtgaagatgtattacaccgcatgacaaaccgcctccccaccattctgaagtcccaaagttagaggcactttatgttctt

SEQ ID NO: 190472 - DNA, 122 bp, Homo sapiens
gttagcgcttggaagcaccgaccaacgtgagcgcaacgcggcagggacacctgaccccggcggcgcccagcccctcggattgccagtcactgctcgctttggggcacggaggtgcccagtcc

SEQ ID NO: 190473 - DNA, 122 bp, Homo sapiens
gaacacgacaggggtagcagatgcgcgcgcaccactgtcggggcggaggcggggtgcaggcgcgccatggggtgggggatgaggggtagagagtgtgggggtgggggatggggtatgcaggt

SEQ ID NO: 190474 - DNA, 122 bp, Homo sapiens
tacacattcgtgagctctagaagcttggctcacggcatgttctcccttgagaatggcggccgggccaccttacttagccatcacacctgcattacagcatggcctcaccatgtccatttggc

SEQ ID NO: 190475 - DNA, 122 bp, Homo sapiens
cctttccgagtcaaagaaaggggtgacagacagcacctggaaaatcgggtcactcccacccgaatactgcgcttttccgacgggcttaaaaaatggcgcaccacaggattatatcccgcacc

SEQ ID NO: 190476 - DNA, 122 bp, Homo sapiens
gtcccgcctgcgcccgcctccccgggctccacgtgccccgcaggcctctcgtgggcaggacggggctggtcgtcccctactgaccttgcatcgtggggaccctcttgaacactttgtcttag

SEQ ID NO: 190477 - DNA, 122 bp, Homo sapiens
attttaaaatgcacattttagattgaagggaacttaaaactacagtcttccctcggtatacgagggggactggttccaggatcccctcacacacccagatccttacataccgaagtcctgct

SEQ ID NO: 190478 - DNA, 122 bp, Homo sapiens
accaggaactcggtcctcaccgggaggacacaaagtccagacctgggagtgccaccgccacgcactgtggaattttgtcacagagctgctgttctttatcagagtccgttttaatgtaaatc

SEQ ID NO: 190479 - DNA, 122 bp, Homo sapiens
tacaaaacacagcttctgccaaggtggttatgatgaccatgctcacaaatgatgcctgtgcgtgcagttctgtaaactccaaagtcaaaagcaaagagggtgggtggtgaaggagaatagat

SEQ ID NO: 190480 - DNA, 122 bp, Homo sapiens
ccagggagcaagctagtggtgcaaccaggactggaactcaggtctgcctatcaccagactcgcttcctatgacccagatgctgctccatggcccgagtccagcagccgtcttccctctgctg

SEQ ID NO: 190481 - DNA, 122 bp, Homo sapiens
acaccactgatgcctttggggcagaaggcagaggcctcgggagaaatgcgcaggccccagcggcctggtggagggtgcagggggcgcaggggcagccaggaccgccgaggacgctgggggca

SEQ ID NO: 190482 - DNA, 122 bp, Homo sapiens
cttgcacatcccagaggtacatgagctacactggcagggaaatgagcgcctgggtctgcacgttggcagttttattatttagcatttttccaaggagatgagatttacatatacttgcaagt

SEQ ID NO: 190483 - DNA, 122 bp, Homo sapiens
gtgaccatccaggccgcaaccttatcctcagagcccagtttgacgcaggccaggcatttccgcttactccccttgggttggactttgcactcgggtttcttccagttcttcttccggcacct

SEQ ID NO: 190484 - DNA, 122 bp, Homo sapiens
ggaaggttccgcgcggcgaagggctggcccgcgaggggtggggccggacagtcagcctcgcgctcccgggcccgcgcccacccggctcgcagcccctacacaaacctccccgcccgtcacgt

SEQ ID NO: 190485 - DNA, 122 bp, Homo sapiens
ttccctcccaacagtccgttctcttttctcctccttgaattatctccatatttcaccctccgatgagtctcctcaaactggggctttaggttgaagatattttacccaagtcccctcccttt

SEQ ID NO: 190486 - DNA, 122 bp, Homo sapiens
cgccgcaaccaatgggcgtggaggaggtgggtcggctggcggctgtcaccctccaggggacgggagcgcggagaccgggagcgcgcgagctgtcgccgcgccccgggccgagggggaggagc

SEQ ID NO: 190487 - DNA, 122 bp, Homo sapiens
ttgggtacattagtactgctgatttcttgtgatgttttcaggccataagatctctcaaaacgtttttacgctttcattgcaggccgcataaagaggcttgcatttggaattcaaatagttta

SEQ ID NO: 190488 - DNA, 122 bp, Homo sapiens
tgtgcgccctcccggtttggaccccctcccgtgtgtcttggctgcaggtttgaactgatgcgcatgtgctggcagtataaccccaagatgaggccttccttcctggagatcatcagcagcat

SEQ ID NO: 190489 - DNA, 122 bp, Homo sapiens
ggttgcagtgagctgagatcggaccactgcactccagcctgggcaacaagagtgaaactccgtctcaaaaaataattgtgctggacgggtgcggtggctcatgcctgtaatcccagcacttt

SEQ ID NO: 190490 - DNA, 122 bp, Homo sapiens
tccgtcagccaggagctgtaaaggattggctcctgcatgtgagacacgtgtgtgtgtgcacgtatacatgtgcacatgagagagagagtctatagaactttgatctccatgagcttgtggtc

SEQ ID NO: 190491 - DNA, 122 bp, Homo sapiens
tatggtataggcaattgaaaagatgaccccaaatttcatttattacatacaattctgccccgttgatagaacagagaatgctcaaaggaaggtgcctaagagaagccaataaggttaggttt

SEQ ID NO: 190492 - DNA, 122 bp, Homo sapiens
ccatgaggcgacgtggtgcgcgcacctgcagagaagacaccccaatctgcacgcccacagcgcctcgcccgccacccagtcccgcagcgcctcgccccccacgtgtctgtctgtgctcatgt

SEQ ID NO: 190493 - DNA, 122 bp, Homo sapiens
agagaaggggtgacaagaagcaagcagtggggcagggagtgtcactgatgtccgaaaccccgggtcagaccaacacgcagcacagccactgcaaaggaaagggacaagattgagttcttggc

SEQ ID NO: 190494 - DNA, 122 bp, Homo sapiens
agctctttcatgtctattactgcctttgagactcttgaaagctggtgaggttaggcacagcgggtatcctctagcagagagagcaggagctcaaagaggttaagtggtgtgtgcccagggcc

SEQ ID NO: 190495 - DNA, 122 bp, Homo sapiens
tgataaaaactagggaaaatgggagctcgaagtagcttccgttattaacagacatacaaacgcccctaaccgccacacgttccttagggatgacagtacgttacaaaagtgcttctaaagta

SEQ ID NO: 190496 - DNA, 122 bp, Homo sapiens
ccacaccgcctagctttggggccctgaagagcaaagaggtctgagaaccgggatcctggccggaccgccgccctgtttcacctggtaatttatgcacaattaattgagatatcttttatact

SEQ ID NO: 190497 - DNA, 122 bp, Homo sapiens
tcgtcccaaatccccctccggccccccccagaacggcagctgctcaggcggcagatgcgccggctaaatccgcccagctggtcctccgcggagctaaccgcctggagccccggggctggggg

SEQ ID NO: 190498 - DNA, 122 bp, Homo sapiens
gtggctgcaggcgcaggcaggcggcaggtgctagaagcggggctgggcgaggtgtgtgcccgctgggctcccgggccgccgccccctcactgcccaggtctttccctcccttcgtgctcccc

SEQ ID NO: 190499 - DNA, 122 bp, Homo sapiens
ggtgtcctcccccagctcatagtagatagagcccacgtagacgcggcacatgatggccagcgcccgctgccgctgagccgccatctgcagcaggacagaggggagagaaccgctggctcgtc

SEQ ID NO: 190500 - DNA, 122 bp, Homo sapiens
gtaaactcttaatttgaggacattttactcagaaatggtcatgaccctatcatctttcatcggaaacatttacttatactgacggattatgatttttgttgttgctgtttgttgatttctgt

SEQ ID NO: 190501 - DNA, 122 bp, Homo sapiens
gtgcaagggaaagagacaggcaggagagacccctcctaagacgcaggatctgcctgtaaacgcccaaagtcctgaggtttaagaggaatcgtgcccttcccaggcccgcgacctccggtgcc

SEQ ID NO: 190502 - DNA, 122 bp, Homo sapiens
taaccgtttagggaagaataacatccagtgaagtcaagaggttggcgtaattggaacactcggcgtgaggcgcaccaggtttccagcgcccctggtttccacgtcgctatggtaacgactca

SEQ ID NO: 190503 - DNA, 122 bp, Homo sapiens
tttgtgaggctggcctcagcacgcggcccaagaaacagaactgaaagcggttgcagtgggcgtggccaggagggtggtttggctcctgggtgggagactccttcttaattaaggccagcatt

SEQ ID NO: 190504 - DNA, 122 bp, Homo sapiens
tggcctccaggtgagctctgaggtcgtgttctggcgtgcccaggactagatggagcctaccggggcattcctatgtgtgacacagagccctgccaggcccggtcgggctcagagtgggctta

SEQ ID NO: 190505 - DNA, 122 bp, Homo sapiens
tctcctctgaacaacccttatcactcatgctaatatgttggatcctgcaagtcacaaatacgaaggtatgagcattggccgaatcccaacagggaaacttcaccgggaaggtgaagacccct

SEQ ID NO: 190506 - DNA, 122 bp, Homo sapiens
gacaaacaggcgagcggtgagcacggaggagggaaaactcttccgttcaaggacgccggccgcggatcagaatttgacagcagacagacacagctggctattaagactaaggggagaaggtg

SEQ ID NO: 190507 - DNA, 122 bp, Homo sapiens
ggagacatggagggtgtgtgagcaacaggtgagactggagccagctgaaaactgggagaccgacccagccaacaaacaatgtcggtctctgtcttggcacctgcaggaaacaagctcctact

SEQ ID NO: 190508 - DNA, 122 bp, Homo sapiens
attttacagagtttgattcttttcatcaacaagttgatttaaaaaaaaaaatccagaaggcgtttagagaaagttagggaaataatctaaacacagcccagaaaacaaggggattgtgaact

SEQ ID NO: 190509 - DNA, 122 bp, Homo sapiens
taatctgcccatccgcccgccctcccgccggctccatggctcctgctccccgctctgcgacgctgctgggcagtggccaacgcagtcctcagcctggagaccctgggtggcggccgcagcgg

SEQ ID NO: 190510 - DNA, 122 bp, Homo sapiens
cgttcttcatgcacactcggatgtaggggactcggggagctgttcgggctgttagattttcgtgaggcttccctcacctgcggacttcgtgcatcttagtgtcagatgaactaccgactagg

SEQ ID NO: 190511 - DNA, 122 bp, Homo sapiens
aaggaccttgacctgtgggaactgggaggagggaacagctccactgggggaatgctgggacgatattgtgccttccatgctgtgacaaagccagagccaaggagctgggaatccaggaaagg

SEQ ID NO: 190512 - DNA, 122 bp, Homo sapiens
ggggagggcagagtgctgccaggagcacctcgacagttaaaccactgaccagagggatttcggcagaggagtaacttgatcggatttctgtttataaaagattgccatggctgcacattgca

SEQ ID NO: 190513 - DNA, 122 bp, Homo sapiens
aatgcgaagaattgaaaatgactagtgttttactgcacagcccttagtcacagtgctgaacgtcccctttgcctaaaccatcattgctcccagaagactttgcccccacaaggccaaggaca

SEQ ID NO: 190514 - DNA, 122 bp, Homo sapiens
gacgggtgggcccggctggggcccgtcattccttcagtgaacatcccatgagctctcgctcggtgttgagccctgtggtaggcacagatgcacccgaccagcacctggagctcaagaagccg

SEQ ID NO: 190515 - DNA, 122 bp, Homo sapiens
gtaatagaacatgaagtcctagaagtctggtgccttgggagccacttgtcaagatcttaccgtgtcttctgagtaagatgagaagccagtgtaatattttcaatagaagggcagcataatct

SEQ ID NO: 190516 - DNA, 122 bp, Homo sapiens
aggtcccgcgggcccagcccggcggcttgaccccgggagaccctgctttgaggcgggtatcggttgccctggcccaggcctcccggccctcaggttgtgtgactgtgacgggcagcctgggg

SEQ ID NO: 190517 - DNA, 122 bp, Homo sapiens
aaacaagggaaggttttttttccttttgcatcatggctcaatttggaggacagaagaatccgccatgggctactcagtttacagccactgcagtatcacagccaggtcaggcttctaaatac

SEQ ID NO: 190518 - DNA, 122 bp, Homo sapiens
tacgtccgcgctcctgtggaggtcgccgggctggggttggcggcagagtccgcacctggccgggccagcggcttttcggtctaaatatcggggttttcagcctggccttagctaagggagca

SEQ ID NO: 190519 - DNA, 122 bp, Homo sapiens
gcccacgaaggtgttccttttgatctgggtgtctgtcagctggccagccacgccaaagtccgccagcttcacctcgccatgctcagacagcaggacgttggccgctgcaaaagaaagccaag

SEQ ID NO: 190520 - DNA, 122 bp, Homo sapiens
gtcaccaaggaatggcatacagtgcaggcagggccaagtcctcagctccaggtctcctgccgatgctgtttgcttgacaacaccacgtggctgggtcaacatgcaccacatggagagcttgg

SEQ ID NO: 190521 - DNA, 122 bp, Homo sapiens
cttcaccctccagtcattgaggtctgagcagatgacctgccctggacagtaacaagcctacggagagggagaaaaccgtcagagtcctgggaccatccccaccctatgctgaccaggagcct

SEQ ID NO: 190522 - DNA, 122 bp, Homo sapiens
aggatgaaaagatgtcctttttagcaagttctaccattctgccattttgcatttgaaacacggcccaagtgttctgactaagtgaagtgtacaaattgtgtaagcttttatataagcaatgg

SEQ ID NO: 190523 - DNA, 122 bp, Homo sapiens
acgtaaaccagactgttacttgagaccatactcaagatacttaactgccctgaaactgcacgttttcaataccagtttttccaatttgctatttcaaggaaatagcaactctactgtgatca

SEQ ID NO: 190524 - DNA, 122 bp, Homo sapiens
ctcgggctccttccacccttgcagggagcctgacactgagggctggcggcttttctggcgcgggccagggggaggaggagaaaggagctcccgggatcccctcgccccctcccccaactgcc

SEQ ID NO: 190525 - DNA, 122 bp, Homo sapiens
aacactattcacaagagataatgctagtctcacatttaataaactgaacaattggccaggcgcggaggctcacgcctgtaatcccagcactttgggaggccgaggcgggcggatcacgaggt

SEQ ID NO: 190526 - DNA, 122 bp, Homo sapiens
cagggccggagcctgggccagggcaggggctggggctggagccgaggccggagtcggagccgagtccagagccgaatccggggccggagctgggaccccagccgagtcccgggccggggtcg

SEQ ID NO: 190527 - DNA, 122 bp, Homo sapiens
ccggtggggagggggttccgcccgggaggccggggctggaatgaggccggcacccggcggcggggacctttgggcttcaggcctccggccagggatctgccgttcctcccgcccacctggcg

SEQ ID NO: 190528 - DNA, 122 bp, Homo sapiens
actacgggcacaaggcaccatcatgctgggctaacttcttgtagggatggggtttccccacgttgcccaggctcccaaagtcgttcttaatgaccaagacacaccagctgtacctggggtgc

SEQ ID NO: 190529 - DNA, 122 bp, Homo sapiens
ggagaccatccaggcctcagacgacaatgacacggaggccaccatggccgatggcggggccgaggaagaagaggaccgcaaggctcggtacctcaagaacatcttcatctcgaagcattcca

SEQ ID NO: 190530 - DNA, 122 bp, Homo sapiens
ttaaggctcggtttggcctctgtaggcagccgaggtccccatcccccgataggtcacagccgcgatgctcaaatcgcacactatagcccacaggcagcttacctgttttttttaaaaaaaaa

SEQ ID NO: 190531 - DNA, 122 bp, Homo sapiens
attttccgttgatcccttagtcttgtagtcgctactttataaccggtccctagaagggggcggttctttccggaaattatgactgcagctgttttcactccgctgtgactcagagcgctccg

SEQ ID NO: 190532 - DNA, 122 bp, Homo sapiens
aaaccggccctgccccacgcatctctgtgattaactcactccctgtacagtagagggaggcgtggcccagggaggctcccgggctggcctgaggcccatggcaagcagccccacccaagcag

SEQ ID NO: 190533 - DNA, 122 bp, Homo sapiens
aaagtcagcatgtctgcgtgaaagggaagcaatgaagtagcgccaactcctcccccgtcccgggcaccgtttagggagaggatcagagttctgccagagaatcagaaccagaaggagatata

SEQ ID NO: 190534 - DNA, 122 bp, Homo sapiens
gtgttaatggaaacccaattagtagccaacatctgacttggtcatctaatatattgatctcgtttgatctttgtcacattgctgaatgttaagaactattattatttactccatttaacaga

SEQ ID NO: 190535 - DNA, 122 bp, Homo sapiens
ctggcagcgggaggggcaatagcgctggcggagcttagggtttcgcgggagcaaccagcgcgcgcctctctctctcccctcccctcgctcgcgctcgctctcccccgccctctgtctctccc

SEQ ID NO: 190536 - DNA, 122 bp, Homo sapiens
agatgagcagtgggggaggagccccgaggcccccagatgagcagtgggcggggcagggagcgccgaggccatcccccttgctcttgcagcgccccatttgacaggatcgcggagatcaactt

SEQ ID NO: 190537 - DNA, 122 bp, Homo sapiens
cagggtgtctaacaagttgaaaatgagataagaccattcagaatatgtgcatgtaagaagcgctgtgttgaactagcagcacatgtgtctagagtaggaggaggtaccagagatgaacgggg

SEQ ID NO: 190538 - DNA, 122 bp, Homo sapiens
gcccctccctttcctccaccaccatctctgcccctccccaccctctctcactgaggctcccgggaggccaggtctgttcctagttaaggacaggaaaagaatgaggtgaagtctttgctatt

SEQ ID NO: 190539 - DNA, 122 bp, Homo sapiens
gttcatctgcattccaatcgctctgcctgccctctttaaggattgtgaatttgtcctaaacgggatatttgttttgttttgtttgacaggcggaaaaagaaaggcttgaagaaatcaagcaa

SEQ ID NO: 190540 - DNA, 122 bp, Homo sapiens
aacagctctgcccaccagtctgtctcttccagaccacgccactgaagggcgtggtgttcccgtgacagggaggaggcaggcatcactgggaatctcagaacctcatctgatacttgccctgg

SEQ ID NO: 190541 - DNA, 122 bp, Homo sapiens
tctgcagaggggagataccatctcccctcaagtaaagtgggcctgtgcccttttgcactgcgggacacggctcaggaccagcaggcatgcctccttggtctcatgttgaccttagagtttgg

SEQ ID NO: 190542 - DNA, 122 bp, Homo sapiens
ggacgacagactaaaggagcaccccttacccgagaacatcaccgagaacggccgcatgaacgtacattctggtgaaatcaccaaaaaaacacatgcggctgctaaccgagaacggccacacg

SEQ ID NO: 190543 - DNA, 122 bp, Homo sapiens
agaaggctccagaaatgtcactcccatcccttaaaggttggtatatggtcctggtacagtcgtggaggtccatatgggtgaaaagcccagaagtctacctgagctgaaagcactcccaagga

SEQ ID NO: 190544 - DNA, 122 bp, Homo sapiens
caaacgttaacctttcttgtcagcaaatttaaaacctcacagcatattctgcactcattacgccagtctgttggagctgagtccatgcctttttctctctgcgttgggaaagccatgctagc

SEQ ID NO: 190545 - DNA, 122 bp, Homo sapiens
attggtctgaagatgccgttttcgccttcttattggccggccaaagttgaaaggcattcccgtttcaaaatatttagctttcttacttttttgtgcttttatcttttgccctcctctcctcg

SEQ ID NO: 190546 - DNA, 122 bp, Homo sapiens
ccaggccaggatggcggggtgggtcccttttgctgggctggactgtacatatgttaatagcgcaaacccgacgccacatttttataattgtgattaaactttattgtacaaaagtgtttggt

SEQ ID NO: 190547 - DNA, 122 bp, Homo sapiens
agaaaagcatcccccgagagacagcgaagccacacaccctctccgggccagctaccagggcgggcaacttcacccctcgaagcaaacgaaagcccctgttctccaagcaaaggaaaagggga

SEQ ID NO: 190548 - DNA, 122 bp, Homo sapiens
tgcctctttccctccctggctgccgtccacacatcgttggtggcagactgtgagggaaatcgttaaaatgactcaaaagcaatgtgtaacacaagtgatagagcagggagcttttccccaca

SEQ ID NO: 190549 - DNA, 122 bp, Homo sapiens
tgcagccaacggaaaagcaggtgggcggggcggggcgccgagcagggctggcggggtccacggactaccccccagtagccccgacccccaaaggattccacgtgcagggtttttccttcttc

SEQ ID NO: 190550 - DNA, 122 bp, Homo sapiens
gcccagcagccgcagctcccaaccacaatatcctttggggtttggcctacggagctggggcggatgacccccaaatagccctggcagattccccctagacccgcccgcaccatggtcaggca

SEQ ID NO: 190551 - DNA, 122 bp, Homo sapiens
agtattcatggatgtggcgcgccaccgacgtgtaagtctggttggcccgcagtgggtagccgtgagcccgcaggtggcgctccaggtcctgcaccgtgccgcggaaacggctcagctcggcc

SEQ ID NO: 190552 - DNA, 122 bp, Homo sapiens
tgcacacactgcctgcgcccctgtccccatggacctcgggttcccagggaggcggcctgccgggcctctggggaaagccacacccttggccgagggctggctctcttgaagatcatggccgt

SEQ ID NO: 190553 - DNA, 122 bp, Homo sapiens
tgaatatatctgatgctcactactgctatagcttcaaggtcattttaaggttcttagtttcgctacaagtgggttgtgaacattagtgagttacacatgttggacactttggtttgttcaga

SEQ ID NO: 190554 - DNA, 122 bp, Homo sapiens
attattcattgaactcaagcgctcctattttgggttttctcgttcggatttctgcgcgagcgagtgaggaagaactggacacccgggcggtgccctgcggctcggggcggggccagccgcgg

SEQ ID NO: 190555 - DNA, 122 bp, Homo sapiens
aagccgccggcccactgtcatcgtcttccctttatcgagaattgatcattttccaggtggcgtctcggctcctcttctgagaaattatagatccacggggagaaagtccacacccagaaaga

SEQ ID NO: 190556 - DNA, 122 bp, Homo sapiens
ttaattctggaacagtatggataaatttctcaaacaatggtaaactaaagaggacagaatcgaaagggtatatacactgtacacttccagtcacaaaagctcaaaatcaggcaaaactcatt

SEQ ID NO: 190557 - DNA, 122 bp, Homo sapiens
ccgattccctctcccgagggctgccagaaagctccttctagaatataaacatcatcccaacgttccgtaaaccctcccatggctccccatcaccacaaaatcaaaataagctttcgctgctt

SEQ ID NO: 190558 - DNA, 122 bp, Homo sapiens
taggtttgggaatcagggagccctctgaataggagactgagttgggagggaaaggggcttcgctgggggagcctcggcttcttctgggagaaaattcccacggctacctagtgagcctgcaa

SEQ ID NO: 190559 - DNA, 122 bp, Homo sapiens
cggcctgggtcccccgagccccaacccactgcgcctccatctccggtgactttcctgcctcggtttcctcatctggaacctggcattgaagcagcacctgtgagtgtcgcccccagaggaca

SEQ ID NO: 190560 - DNA, 122 bp, Homo sapiens
gagagcgagtaacaggaggcaattccacggccaaacaggtttatttacaggaaaagcctgcgaagagttccagttaggaatctggctgagatcctgatcgcttacaagctgaggcttttata

SEQ ID NO: 190561 - DNA, 122 bp, Homo sapiens
ctggcatgggcagaagaagcgagcccctccttggcatcgggctcttcctttcctcctgggcgccgcacaggtgcccctcccccagggcctctcccacgttcatctgggtgttgaaggcggga

SEQ ID NO: 190562 - DNA, 122 bp, Homo sapiens
tgagcgccaggtgcgcaggcagcgcttgagagcggaggttgctcaagccaagcgtgagaccgacttctatcttcaaagtgtggaacggggacaacgctttcttgcggccgatggggaccctg

SEQ ID NO: 190563 - DNA, 122 bp, Homo sapiens
cctccagcttccaagccgaagtctccctggtctgaccaccaggatcccaggggcccaaggcggcccctcccgccccttcccactcaccccggcagacgccggggacagaggcctgcccgggc

SEQ ID NO: 190564 - DNA, 122 bp, Homo sapiens
ggggtagtgagaaataaggaagatgacttctgtacatgcttgccaccgtcccaggacagacgaggcccagctgccatacagaggaggtgacagcatggagcggggtcaggggtgcagaagga

SEQ ID NO: 190565 - DNA, 122 bp, Homo sapiens
accctcctgggccacacaggctagcagggcaacagtgtttgtgatgaaacccggtgattgcgtgaatgtgtgggtgattgacagtgttgttggaactgtgagacactgtgagcgttactgtg

SEQ ID NO: 190566 - DNA, 122 bp, Homo sapiens
gctgttatatgacgacaccatctctttaaaagcaaagtctcaccctggcgtggtggctcacgcctgtaatcgcagcactttgggaggccgaggcaggcggatcgcttgaggtcaggagtttg

SEQ ID NO: 190567 - DNA, 122 bp, Homo sapiens
tattgcattgacttgtggacctgtttcaggttccctacagttgcagggtaggagtcctggcgcctctttgcctgtctcccattgcctagtatgttaccttggatgcagtcataaaaaaacag

SEQ ID NO: 190568 - DNA, 122 bp, Homo sapiens
ttggtgtcactcctagtaccgggccacagagggcaaatggaagttccctttctggccagacggggtgggctgcgggggcttgaagtctgggagtgacaggccccgaggccacatccagtctg

SEQ ID NO: 190569 - DNA, 122 bp, Homo sapiens
attggaatgttctctttcatcatcgtggccatcctggtgagcactgtgaaatccaagagacgggaacactccaatgacccctaccaccagtacattgtagaggactggcaggaaaagtacaa

SEQ ID NO: 190570 - DNA, 122 bp, Homo sapiens
taggcagaagtcagatggtgccatttgcctcatacaaatactatctaatgcttctcatctcgctcaaggcagaagtaaaatccccacatcaatgtacaaagccctgcatcttctgcacctgt

SEQ ID NO: 190571 - DNA, 122 bp, Homo sapiens
agcagatctccacagccttgctcttcccactttgtgtcatttaaagtcctttctccaggccgggcacggtggctcatgcctgtaatcccagcactttgggaggctgaggtgggtggatcact

SEQ ID NO: 190572 - DNA, 122 bp, Homo sapiens
ccagtcacgggcccgcggccttcgcagcagcctctctcgggcctcctcccctcccgcccgcgacctccgccttaggagagcgcgcccatggccctcgcgccccaatcccgcgccggcgacag

SEQ ID NO: 190573 - DNA, 122 bp, Homo sapiens
atgagagatctccaggaataacaagggagagagatcacagaagaacacagtaagagaaaacggcagctttacacatcttggtaaccagaggagacaaccttggctcaccatgctgcccattg

SEQ ID NO: 190574 - DNA, 122 bp, Homo sapiens
aaaatcaagaatgctttagaaaggatagccaagaacgatgaggtttcaggttggttctaccgattggtgaactaaatttaacaggccaatttttttagtcaagtgatggtttcagggtgttt

SEQ ID NO: 190575 - DNA, 122 bp, Homo sapiens
tgacccccactgagcgtgtccctcaaagtggaccttcctaagcatcggcgctttgctttgcgctgggtggtgcggctgagtcactaattagcagtgagagcctgggctgtatctcctaccaa

SEQ ID NO: 190576 - DNA, 122 bp, Homo sapiens
ggaaagccggcaagacctttttttccgccatcatcgctcacgcgcgcaaccctggcgacgcgtggtggcgaggctccgcctccccacgccattggccagcagctcctcgggcacgcgtatac

SEQ ID NO: 190577 - DNA, 122 bp, Homo sapiens
gccagaggacagggcgcggcccaggccagttccacaggtggctctgactgcccatggtttcgcgcgagtggtgggcacgcttcggtttacctcccccgcgggtgacagcccagtgcttccac

SEQ ID NO: 190578 - DNA, 122 bp, Homo sapiens
tattatctcatttaatcttcaccacaatcttaacgactgtagcaaaagaaacaactacaacgcaggggctcgtaattaagcactctaggttacagtgcctccttggtgtttgtttaacaaat

SEQ ID NO: 190579 - DNA, 122 bp, Homo sapiens
atgcctaggcataaaaccctttccagaacaatcatctaaacggagccttttccaaagttccgtgttaccgggtcacagtgagatggaatctatgtggagatggaattgagggaaagccctgg

SEQ ID NO: 190580 - DNA, 122 bp, Homo sapiens
ttcattcccgggcagtttcgttttcttgttggtgtggcgccggggcacgctgctaagtagcgcccgtctaagtggcgtggccagtttcctttccggcgctgacaggcgccagtttgcttgtt

SEQ ID NO: 190581 - DNA, 122 bp, Homo sapiens
agagaccacctatgagtccaccaagatgatcgagggcatcctctatgagatgcgtgtcttcgccgtcaatgctataggggtctcccagcccagcatgaacaccaagccttttatgcctattg

SEQ ID NO: 190582 - DNA, 122 bp, Homo sapiens
ggccaggagtgggggggtggtgggacggaaggtacccacgagggtggcgtgtggggccatcggccaggagtgggggggatgggacggaaggtacccacgagggtggcgggtggggcagatgc

SEQ ID NO: 190583 - DNA, 122 bp, Homo sapiens
aggatacagaaccatcagttccctttgtgataatactggaaagagcattagaccaggagtcgggaatctcaactttaaagtggggtggcttctgtctttgtctgctgctgtaacaaattacc

SEQ ID NO: 190584 - DNA, 122 bp, Homo sapiens
agctgaggcctgcacagcgccgggaaagacgcagagtcagtccagcctagctggggcctgcgcaccgccgggaaagacgcagagtccgagaccagcctagctggggcctgcgcaccgccggg

SEQ ID NO: 190585 - DNA, 122 bp, Homo sapiens
ggactgtctctcatgaataccttgcccctggtgggagtgcctacttggtcctgggcttcccgcttgggagtgcgcttggtaagcccggtgcagatggtgtcttccttgttgaagatgccacc

SEQ ID NO: 190586 - DNA, 122 bp, Homo sapiens
tatctgcagatggtgggcatgtatgcctcctcctacatgatcctggccatgacgctggaccgccaccgtgccatctgccgtcccatgctggcgtaccgccatggaagtggggctcactggaa

SEQ ID NO: 190587 - DNA, 122 bp, Homo sapiens
cagatacgcagtattttggcccaggcacccggctgacagtgctcggtaagcgggggctcccgctgaagccccggaactggggagggggcgccccgggacgccgggggcgtcgcagggccagt

SEQ ID NO: 190588 - DNA, 122 bp, Homo sapiens
ctgtgtgctgctggcgctgacatcctgatagagttcaggcgcctggtgaagctacacagacggtgcctggtctccagaccacatgcttttcatctacgtcataaacatgaaatttctgaatt

SEQ ID NO: 190589 - DNA, 122 bp, Homo sapiens
ggatggccgcccacaggagggtcgaaaggagagaggccctgagacaaatggtggggggctcgtttgtttgctgctgggcttgtctagagtctcaagccatatggctctccttcctggcctcc

SEQ ID NO: 190590 - DNA, 122 bp, Homo sapiens
ctgagtcagtctggctgtgaccaggggcgggcccagcagaggacccacacagatggagggcgtggcggcacaggacgccctggggtcgcggcctggaggggtccgcgggggctaagccgagc

SEQ ID NO: 190591 - DNA, 122 bp, Homo sapiens
tcctgcaactcttggcaggccatctctgctactcttttctctggtgctgcagctggtccacgagctggatctgcagaaataactgcctgtgcagtgcctcctcctcagagatcagctgctga

SEQ ID NO: 190592 - DNA, 122 bp, Homo sapiens
agtcaccgaattcactagttcattcagtagttggtcacttaccaatttcctagatgcagacgtttccctaactgcagtaacactgtcatcactttcaccatattctagccacttgtattatc

SEQ ID NO: 190593 - DNA, 122 bp, Homo sapiens
accttgaagtcgatgcccacggtgctgacgaaggcaggcgtgaacgagtcgtcagcatagcggaagaggaaggacgtcttgcccacgctgctgttgccgatgatgagaatcttgaacatgta

SEQ ID NO: 190594 - DNA, 122 bp, Homo sapiens
cgccgccgccgccgccccctttcctccctcctccctcagtgcgtccctcccaccgaggcccgcctcgtatttcctagatccggtctgagcgagagcttggcaagcaagctctggcttcaggg

SEQ ID NO: 190595 - DNA, 122 bp, Homo sapiens
tttctccttcccagcttggaggctgctttatccaaatgctttcttcagtcctcaacttggcgtttcaacccgaatccgccttttcttccatcttagatctgccttcttatgtgtttctccag

SEQ ID NO: 190596 - DNA, 122 bp, Homo sapiens
ccaaggccccagcaccaccgtccctcctgcagggcatccagcacctacccttccactgggcggctcctggttctggtcccggctggctcactcaggctgcctttggaccagattcttgaact

SEQ ID NO: 190597 - DNA, 122 bp, Homo sapiens
tcctcctcacactcactcacacttcaacccctgggaagactggcctgcggacctaccggccgtgtctcagtaggacagaaaaagtccagacagcaggagcgcgaccctcacaccctcacagc

SEQ ID NO: 190598 - DNA, 122 bp, Homo sapiens
caaaaaggaccccctttttcctctccggaccacgtgaccccgcccacgtgacgtcccctccgccaatggccgggccgtctccccacggctcccggtaatgtggaaaaaattgtgtggcgttg

SEQ ID NO: 190599 - DNA, 122 bp, Homo sapiens
cgcatcgcgctgcggttgggagagaccgtcccttcgtctagctttccttgttaggaagtccgggttgtaggtgcgacttccaggatatcccgctgtttgatgtgcttgagtgaggaggtgat

SEQ ID NO: 190600 - DNA, 122 bp, Homo sapiens
ccggggcacctgttaccgcaccgctcaagaccggaagcggaaatggaatcgagatagcctcgcgcgtttagctggccgccgccacctccacgccctaggccgggccgacttacggagtcgcc

SEQ ID NO: 190601 - DNA, 122 bp, Homo sapiens
ccctcacagagccacaaagccggtaaatgtcactcgatggctacaaaaataaagtcagagcgtcatttcgcttccctggcacctgagatcaaaagagaatcagcattacagtgggattttgt

SEQ ID NO: 190602 - DNA, 122 bp, Homo sapiens
aggacttaatattactattactccataacaaagagggcgccacagaaagtcacgccacgccgcccttgctggcagcccttcgggccgtgggcaggatgcccggatgtcacgtacacttccgc

SEQ ID NO: 190603 - DNA, 122 bp, Homo sapiens
tgtttgtatgttttgtagagatggggtttcgccatgttgcccaggctggtcttgaactcccgagcccacacaatccgtcggcctgggcatcccaaaatgctgggattataggcgtgagccac

SEQ ID NO: 190604 - DNA, 122 bp, Homo sapiens
acgcggctgggcgctgggggcctgcgggcggagagctcgtctggtgcgcccgccccaggccggcaggtccctgccccgccccgcccgcccggagtcagcccccagctccccagcctcccagc

SEQ ID NO: 190605 - DNA, 122 bp, Homo sapiens
gactggctcctctctttacaggcttagctactgcgcatgcctctggccctcttgaggtcccggcgtgccccgcaacagcttccggcgtgctccgcaacagcttccggcgtgacgcagtagaa

SEQ ID NO: 190606 - DNA, 122 bp, Homo sapiens
gcccaggagacctgggccggagaggctgcggggactcgggggcgggggtgcgcggggctgcggcgcggcggctccaggttcactaatcacatcagcagcgctctgcgccggctccgagcttg

SEQ ID NO: 190607 - DNA, 122 bp, Homo sapiens
ttcactgctctccaggtggccgctgcagctgcccgagagcgcaggcgcagaggcagaccacgtgagagcctggccaggccttccggcctagcctcactgtggccccgcccctctcgaacgcc

SEQ ID NO: 190608 - DNA, 122 bp, Homo sapiens
caatggagatgtgatcacagcactctcctccctgtggagtgggtgtgaggttacaagagccgggtgttgaaggcatcaaagcactggcaaagtctccatctgcagctttgttatgttttcct

SEQ ID NO: 190609 - DNA, 122 bp, Homo sapiens
cacagatacctatagaattggccagatgatcatagtatccataaaaatatatacgtaggccgtctattaaattcttacatgatctgtacagatagggagttgtaggttgagtggacataagt

SEQ ID NO: 190610 - DNA, 122 bp, Homo sapiens
agtcggctgtggaagtgtgggcggccattttgagaccgggcaagaggggcgggactggtgcggccgagtgacagttgaccggttttaaccaagtgactggtaccacggggccggggaaaaag

SEQ ID NO: 190611 - DNA, 122 bp, Homo sapiens
gcctggggagaggaagcgggggcaggaaaaggccgacaggaagtgcactttcctggggggcggctcacggggctcttctgtcactgatctgtcctcacagaaggatttccgctcacttcatc

SEQ ID NO: 190612 - DNA, 122 bp, Homo sapiens
agcagcagctcccagaagccgtaaagctatcccagagcgaggcaccatacgtaaatcttccgcgtcgctacgtgacgtcagtgcgagcgaccccgggccggctgcgtggagctggcgctgcc

SEQ ID NO: 190613 - DNA, 122 bp, Homo sapiens
taaatctgtccaagcggggtcaagagcggcctcccctgcctgttctggtaaaaaggcttgcgtgtccctacctcaccagcagccgcacagcagctgggcttttccaagcttgcccacacccc

SEQ ID NO: 190614 - DNA, 122 bp, Homo sapiens
gcggcggcggaacgaacgcggtgcgggcggggcgcccgccgcagggcccatggcctcctgcgcgagcatcgacatcgaggacgccacgcagcacctgcgggacatcctcaagctggaccggc

SEQ ID NO: 190615 - DNA, 122 bp, Homo sapiens
gcaaagaggtgtcaacacagtttcaatagtgcaaagagacattaatacacttttccttaccgaaaattggtaacgaactgaaaaagctgaacaccaagtgtggggatgagaaggcaaataca

SEQ ID NO: 190616 - DNA, 122 bp, Homo sapiens
acttcccacaatcccttgcatctttgtctctagtctgtggcctggcttcccccaagaagacgtgtctcatgagatgtggaaggagagggtgaacagcattaagtgacactgtttccactgct

SEQ ID NO: 190617 - DNA, 122 bp, Homo sapiens
agctgcccctggtcctgaccgctgcgtggcttaacaccctccctcctcccggccccgccccggaactggccctgaagagccccttaggagctgggcagcgcccaggccagtggggcaaagaa

SEQ ID NO: 190618 - DNA, 122 bp, Homo sapiens
ccgttaagcaccgagcttttttctagactagcagctgaggccggaaggaattctggggaacgtagtgcagacttgcagagaacgagtctcttggtcctgtgccgtagcatttccggcggaag

SEQ ID NO: 190619 - DNA, 122 bp, Homo sapiens
gcccgacaaacgcctggacagacacacacgatgctgtgagccccagtggggcagcacagacgctcgtgttcagggggtggagggacacagacccagcacgaaggtgatggcctcggggggct

SEQ ID NO: 190620 - DNA, 122 bp, Homo sapiens
gctcttctgctcctctttttctctactcgtgactcgcggagcttagggtttatatgggctcgaggtagggatgtggcaagccacagtggccttggaaaaagcaacatgtgggcgcaaaaaca

SEQ ID NO: 190621 - DNA, 122 bp, Homo sapiens
cgtgtgtgtgcccctgtgtcaccgggctctgcttgtgactgcggaacctgctgggtgctccgcggggctgccctgcactgtcctccaagggccgctaggtggcgctcccgcccttcccgggg

SEQ ID NO: 190622 - DNA, 122 bp, Homo sapiens
taaagacatcgaaattcagttccagagactgaggatttccgaggacccagacgttcaccccgaggctgagcagcagcctggcccggagtcgggtgagggtcagaaaggaggagagcagccca

SEQ ID NO: 190623 - DNA, 122 bp, Homo sapiens
cacaggtgttttaaaggaaacctacagagcgttactcaaaaggaaatgaccattgtccaacgtcggggatgaagcagccattggtcggcgcgcacacgtccaggagtgcagggatgcaaagg

SEQ ID NO: 190624 - DNA, 122 bp, Homo sapiens
gtggttatttcaaaatactcaatgaattactaaaaaagtgcatactataatcaaagatgtcgagtagtattctagcaataaatgtgggactcatgtgaagcattgtattgataatgcatcta

SEQ ID NO: 190625 - DNA, 122 bp, Homo sapiens
taagaaggcatccctccaaactgtacctaactagctcagtgtgtgggcgtgtaccagagacgcctgtccactaggggctagactttcaccaataaactgcttttaactacagcacttaaatc

SEQ ID NO: 190626 - DNA, 122 bp, Homo sapiens
catattaattagtatgttaggataacactttgttatgagtcctgtccatttctacagctccgtctgtcaaatcttgtactctatctgcctgcctatttgcttgtcaccaaacaacatactaa

SEQ ID NO: 190627 - DNA, 122 bp, Homo sapiens
gcctccggcaggtgcagggaccgggccaggccggggccggggcaggggcggggccggggtcgcggcagagggcgggtcaccgcgcggcctttgtgcgggcggggccggcgcggtggcggtgg

SEQ ID NO: 190628 - DNA, 122 bp, Homo sapiens
ggcgcagacccggggttcagccaggcccaacgaggggcttaagactcaactcagaggcagcggtcacccttctaaggccgctccagtaccaccgttgggtcacacgcgggggcactaaaggc

SEQ ID NO: 190629 - DNA, 122 bp, Homo sapiens
acactaaggggccaggagcaaacgcagccctgggccccggccctggggagatgtcaggcccgtcacatcccaggcaacatgtcaggaagatggaactcaggggtgctttcccgccccaggtg

SEQ ID NO: 190630 - DNA, 122 bp, Homo sapiens
ggcgggcactgcagcggtaacgcacggttcctgccggttgtggctcgggggactgagggccgggagtgggggcttctgtgaagccagaagagaagtctgcagcagagtggtgatgaggggcg

SEQ ID NO: 190631 - DNA, 122 bp, Homo sapiens
ggccccgccccggcaccccgctcccgccctccgctgcgctccgcgccagccgccccggggcgcacggctcgctcccgagagtcccgctgcctgactgtcgcaactgccacctccctccggcc

SEQ ID NO: 190632 - DNA, 122 bp, Homo sapiens
tgctagatcacgtgatgttcaaggcttcagtgatgatgatcatgtgtcgatgctagatcacgtgatgttcagggctccagtgatgatcatgtgctgatgctcgatcacgtgatgttcagggc

SEQ ID NO: 190633 - DNA, 122 bp, Homo sapiens
tccccatttcccctaagtcaaagccatgactaggatgtaccagccacctgcctctgatgtcggcgaatcctgaagcacctgcacccgaatctggggcccagggctgcccgacccccactccc

SEQ ID NO: 190634 - DNA, 122 bp, Homo sapiens
agccctatcctcgaccgccccgcccctacctttttcagtcaccacgaagcactgcttcaccggccccacctgactgaacagttcctccagctgctcactgcgggccgagggcgggaggcggc

SEQ ID NO: 190635 - DNA, 122 bp, Homo sapiens
aaattcagttcagatctcaagttcagataagtctgaaaaaacacttcaaggtcatctgaacgaacatattctaccagtactttatataattgtatttacctgttcctaaaactttccgtgaa

SEQ ID NO: 190636 - DNA, 122 bp, Homo sapiens
cctggtgatgaccaaaggctggttgaagtctatgccccctgagagcctgaagccccagggcgcagggcccgggaggatcaccgtctggggcatgccgccttcctcccgcccaccgggctcta

SEQ ID NO: 190637 - DNA, 122 bp, Homo sapiens
agtgtcggtcagccgtcaaggagcgagcgacgtgggaaaccctgagataggacattggcccggcgctgggctcgggtaacgatgcggggcggggagcgcgggcggccggggagggcggcggc

SEQ ID NO: 190638 - DNA, 122 bp, Homo sapiens
acgctcaggtcccaccgcgcgtgctcatcggcggtccctagcgcgagttcggacaggcagcgcccccctccgactgtgagctgggacgctcccgcacgcttcccggcaccccttcagtcttc

SEQ ID NO: 190639 - DNA, 122 bp, Homo sapiens
gcgacaaagatttaatgggatgcgtaagaatgggccgaactgcaaggcgagtctcaaccccgcggagccttcctcaagcgcctcctccccgccagccctcacgcgcccggccgcccgctcca

SEQ ID NO: 190640 - DNA, 122 bp, Homo sapiens
ttttagttaaaactaacatgtgtttaaactgcaatcttagaatgtactgggaaggccgggcgcggtggctcacgcctgtaatcccaccactttgggaggccgaggtgggcggatcacgaggt

SEQ ID NO: 190641 - DNA, 122 bp, Homo sapiens
atgtcagacactgctgggtttgtgctcccctctataatctactgattgtgggacttcacacgaggtacaaaacataagtgacctaataagccctctagacagggcttcagggaggagccaag

SEQ ID NO: 190642 - DNA, 122 bp, Homo sapiens
gtactgagtggtttctccttgtagctctcagccatgggtcctagttccgccatttgaagccgcgcatagcaaatgtggcccttctccgtattctctcagatgtttgagggcagcattagaca

SEQ ID NO: 190643 - DNA, 122 bp, Homo sapiens
cggaaccggggctgtgcgcggtgcttccaggccagcctgaattctgggtgggcatgggctcgccagcccgcactcggagcggccagccggccccgccgcctcgggcagtgaggtgcttagca

SEQ ID NO: 190644 - DNA, 122 bp, Homo sapiens
cctcaaagagcctcgcccagtgagaagagcctcgtgtggctctggtcaggccacctcagacggctttgctcctagcctatctttccttagcatctgtcctggaggggactttgatgcctcta

SEQ ID NO: 190645 - DNA, 122 bp, Homo sapiens
gacatcacttcaccccggttaaaatagcctttatccaaaagacagacaatcacaattgctcgcgaggatgtggggaaaagggaaccctcgtaccccgttggtgggaatgtaaattaaaacag

SEQ ID NO: 190646 - DNA, 122 bp, Homo sapiens
ggtcactgccctcatctgcggagtcgggagaccggcgatgtgggaggagagcgccggctacggccctggattcagagcgggacgccacccaccctgccagggcaccctcctcctcccccgct

SEQ ID NO: 190647 - DNA, 122 bp, Homo sapiens
ccaagtccggagtcccggcgaatctatgctaattatttcaaacctgcgcctggtccccagcgcagtctcaatgcccccggccccgcccgccctgtccctccagcccggcgctttcttccctc

SEQ ID NO: 190648 - DNA, 122 bp, Homo sapiens
cccaaagggatgcactgcaggggaggtctgtgtgcagcaagtgtgcaggttagacacagacgcctcaaggaaaggacagctgtgtgtcagtttcactttaaatgttaggaagtagatcttat

SEQ ID NO: 190649 - DNA, 122 bp, Homo sapiens
ccagcctgggcgagagagcaagatcctgtctcttaaaaaaatttcattatgggctgggcgcggtggctcacgcctataatcccagcactttgggaggccgagtcgggcagatcatgaggtta

SEQ ID NO: 190650 - DNA, 122 bp, Homo sapiens
cctgacccacggccactcactcctcagagacgtctcccacaacctgctccgggcgctggacgttgggctcctggcgaacctctcggcactggcagagctgtgagtgtcccccagtcgtgcca

SEQ ID NO: 190651 - DNA, 122 bp, Homo sapiens
agagggaattgtgcttcagaatcaccaccagctgttgcaacatcgggtgccactccatcccgcttctgaggcacgacggagcactttgggaggccgaggcgggtggattacctgaggtcagg

SEQ ID NO: 190652 - DNA, 122 bp, Homo sapiens
tcctcccttatctccgcatacctctcaaagtgtgtgatcttgctgcctggatagatttcccgatgaacaaagtacctgaagaggtcaaagagctccagtagctggttggccccttctatctc

SEQ ID NO: 190653 - DNA, 122 bp, Homo sapiens
gcagacactgattcctctgcagttgttgggcttttgagctacttccctcctggggagatgcgtgttaactgtttaatgactggcaatgccgtaacagtgagcaagcaatgtgaccttacaaa

SEQ ID NO: 190654 - DNA, 122 bp, Homo sapiens
ctcccacttcctcaccctgagccgcagggagaagcttgttcttcctaagctacgaagaggcgtgcagggctccagacaaggacggaagaataaccaggaagcaaacccatcaactgtgcgcc

SEQ ID NO: 190655 - DNA, 122 bp, Homo sapiens
ctctcctgctccccgtcccgctacctcaggaaactttagcccagcctctccgatacaagccggcctccttgagggctttaggcccctcttcgccagtgtataccccacgacacgcctgcgta

SEQ ID NO: 190656 - DNA, 122 bp, Homo sapiens
ctgcgcctttgagcctggtcggccctgccagcccgggcctgacgacacggccgcgccctgcgctccagctaggatgggcacatgagtgaccaccctggcacataaggcctccctgcgagctt

SEQ ID NO: 190657 - DNA, 122 bp, Homo sapiens
cagaatcagatgggcgtttgtgactctgctgcgggcagtgcatgcccagtccttttgagacgcagcgcagggaggaagaagaacctctattgcaggctcgcgtagagcatgagcagctgttg

SEQ ID NO: 190658 - DNA, 122 bp, Homo sapiens
ggtgtgcggggaggctgagcctgttgcccctggagagcagaagatccatgttctggagatcgatgcggcctcctgccgcactcctgacccctcactctttagtccttggacattgctttcag

SEQ ID NO: 190659 - DNA, 122 bp, Homo sapiens
gagttctagacgcgcagcccccatgcaacgcgctcatcacagacacgcaaacccatccatcgccctcttcaccactggaccacacctcagcagggccacagaaatgggacccagacgtgacg

SEQ ID NO: 190660 - DNA, 122 bp, Homo sapiens
cccatgccttctgtaaagtcctgccgtggcctgaagtgtagcccttcctggagtacacagcgagcatgctgtgccggctgtgggccccccacccccgagccgcaaagccccaggccgcctct

SEQ ID NO: 190661 - DNA, 122 bp, Homo sapiens
cttcaggaaccagtcaacgctgaagacgcacatgcgaagccacacgggggagaaaccgtacgaatgcgatcactgtgggaaggccttcagcataggctccaacctgaatgtgcacaggcgga

SEQ ID NO: 190662 - DNA, 122 bp, Homo sapiens
ctccgacccgcccagacctaggccccgcctccctgcccctccctctgcggcccgcgcccgcggcccagccccgcccgcaggcgcccccaagactctcccgcaaagcccaagcccactctctc

SEQ ID NO: 190663 - DNA, 122 bp, Homo sapiens
gctccaaccgcccaggcgatcggccttgtcccaacgggagggtcccgcggagggacggtccgagccccctaccattggaaatgccaaaccctgccctaagccgggcccagccacccaggctg

SEQ ID NO: 190664 - DNA, 122 bp, Homo sapiens
tcctgactcggaatagttccgagcagttatcaaagcccaaactgggaagggatctgtaggcgcccagatgcagatgagggtggcaaaggggtgtctcggaaatgcccaaaatggggctggag

SEQ ID NO: 190665 - DNA, 122 bp, Homo sapiens
cgcctccgcccagccccgatctcccgctcccgggcgtgggttcccccacgcctccatctccgcccgcacccttccaacgcctcacgctaccttgcctggcggcggccccagccgaccctggg

SEQ ID NO: 190666 - DNA, 122 bp, Homo sapiens
aagctggggggcccccccgcgcgggaaggacctgggggcgggattacatcagggatggggcgtggccaaaccagaggcagggctggtggtggccagtgttggggaggggctggtcctcacca

SEQ ID NO: 190667 - DNA, 122 bp, Homo sapiens
tgtttaattaatgccacctcctgatggcagtttctttctgggaagaggagaaaagagagccgtccccaagtgaagggtgcagggaagcctccacgaatagtttcaactaaggactgtcccag

SEQ ID NO: 190668 - DNA, 122 bp, Homo sapiens
attggataatttgccttcccctctctccatctttaattaatcccttaaaggaaaagaggacgacagcacttttcctgcagtcatctgtgtaggcctcagccttaactcatgacataggctgg

SEQ ID NO: 190669 - DNA, 122 bp, Homo sapiens
gggcggttgggtcgggtgggggcggcggccgcggaaggccaggccggtgccctgcggggacgcccagcgcagcccagccccgcgcagcccagccctgccctgccctgccctgccctgcgccc

SEQ ID NO: 190670 - DNA, 122 bp, Homo sapiens
ggtttgtgtagtcccaagtatcctgatcattcttgaacacattcaagcgtgtaggctttgcgtattccatcttcagagtgcaacagccagaatagataccagccccattgagagaggccttg

SEQ ID NO: 190671 - DNA, 122 bp, Homo sapiens
gttgcccaacatcactgctcccgggagtggacggcgggatcagcctgcggcgccaagcagcgtgcactctgcccagccgaccactcgcaccgacccggccaaagaatagtcgtagccgccgg

SEQ ID NO: 190672 - DNA, 122 bp, Homo sapiens
tcttccttctccctggcctgttggaggaccttcatccttcaccaaaacgcgccagtgtaacgtaccttgttcagctcttggtcataaagtcgtcctcagcctgtctgtgtggtcccggaggg

SEQ ID NO: 190673 - DNA, 122 bp, Homo sapiens
tgctgcctcggaaggggtcagggctccctctgcagggagcccgtggttctgccgcagcagcggagcctccagcgccagtcggtgaccctcctgcccatgcctgggaggatgtgagctctggt

SEQ ID NO: 190674 - DNA, 122 bp, Homo sapiens
agtaaatgtgttctctgtcatcctgaggcaataaaatggaaactagcaggtgaagctccacgaaggaagattttgtctaaatataaaaaactctctaggagtcatggctgctcaaagatgaa

SEQ ID NO: 190675 - DNA, 122 bp, Homo sapiens
gaacagccaccactgggaacccagtggcctctgtgggactgaactcctaaacgcagggtgcgggagctgggcaggagaggtgacctccaactgtgttcctaaagttcgtctttcgcttggct

SEQ ID NO: 190676 - DNA, 122 bp, Homo sapiens
attaaaacctgtatgtttcagcgaataatgaaaacgcagtctggatgaaagaccccatgacgcttaatcaggcatccagtacactggctgtggccccgccccgccaggcactcgctccgcct

SEQ ID NO: 190677 - DNA, 122 bp, Homo sapiens
gcaaggggaaagggcccagggagccggctcatgacgatgagcctgtctgaagcttcaacgcgggctgtccggcagtctgcattcctgccgagttcctcagccctctgttgggtcaccttcca

SEQ ID NO: 190678 - DNA, 122 bp, Homo sapiens
cgccacccgcgcccgctctcttttctctctgtctctgcctctgcctgtctctgacagcatcgcttgtttccactctgataccaggaattatcccgaaaagttaacatgtcacctccacgagg

SEQ ID NO: 190679 - DNA, 122 bp, Homo sapiens
ttctgtctcctgttctgcatccccatcctaataggtggaagggcatcaagcctactgtcacgattctctcgagaggaatttccgaccctgcaggcggctggcgaccaggacaaggctgccaa

SEQ ID NO: 190680 - DNA, 122 bp, Homo sapiens
aaaaatcctccctagctctctatttcagctttagcagaaccaccccttagttctctgctccgaatccattccttcaacagctgacactgaggggtggggggaaagccatggagttaagctgt

SEQ ID NO: 190681 - DNA, 122 bp, Homo sapiens
agccggcctatgagctgagggtagagccagcgcccttccaacccgtattcagtactcttgcgccgtacccttgctttgcaagtaagccgaccttgggacctattccaggacaggaggcacac

SEQ ID NO: 190682 - DNA, 122 bp, Homo sapiens
accgcggaggccgctcttccccggaggagtctgcacaagtgctgggaacgggcggcagcgcgcgcgccccccctgcgcttcgcggccagtggtgtcgccggtgggggcgggtccggcagccg

SEQ ID NO: 190683 - DNA, 122 bp, Homo sapiens
gaaggcagagtgatctcctcaaggaagagcttccccagccttcgggagcagctggcagggcgtccgggaataagccctacacgccgccgcctgcctccaactcactaaccctgcgcctcttg

SEQ ID NO: 190684 - DNA, 122 bp, Homo sapiens
tctggcttcacagtctggcaggagttcaagtcctgcctccaggcaacccagggcctgggtcgagacatgactgacaggagtaggaacaaactatctaactgtgctggggattacccggtcag

SEQ ID NO: 190685 - DNA, 122 bp, Homo sapiens
catcctcacagacactctgtattccccaactagaccgagagctcttgatgagttaattaacgccgaggttttagtggctccattcccagcccttcgggaagggtataaatttcagaaggaaa

SEQ ID NO: 190686 - DNA, 122 bp, Homo sapiens
ggggagactccttggaaggggcttcggatccagccaggctcccgcgcagtcctcagggggcgtggcccggctcgtgggggcggagtccatggggggcggggtccgcggggaggagcctgcgg

SEQ ID NO: 190687 - DNA, 122 bp, Homo sapiens
agaggggagggtggtcattggccaagttcgcctcggcagctggagaagtcaccactggtgcggagtcccagcggggaagatccccgcaacgcgctctccaggtggccgggggaccccgaggc

SEQ ID NO: 190688 - DNA, 122 bp, Homo sapiens
catctacaaaatagaggagattctgcccacttaggggcttattgtagagcagtattacaccgaggtgctcccagaagctcctccctgcccctaggcctgtgagtgatttcatgagtcagagg

SEQ ID NO: 190689 - DNA, 122 bp, Homo sapiens
tggagctcaaagaatgagcaatttttcaaagctttctccgcaggcctgggcagacacacacgcacacacacacacaccgcacccccaaaactcaaaagaatgttatggttgacctagtctgt

SEQ ID NO: 190690 - DNA, 122 bp, Homo sapiens
gatctgcaagtctggaaaggccacgttgtggaccttggcgcagaggttatgggggcgacccggagcggatggtttcaggaaaactagaacccaccctcatggcctgaacaactggagagaag

SEQ ID NO: 190691 - DNA, 122 bp, Homo sapiens
ctcacaggtgcttcctgggacttcctgtggctgcacagggcttggctttgtcttcgttcccggtggaaaaccgtgggagaggaagcttgggcctctactccaagtatcagagcctgttcacc

SEQ ID NO: 190692 - DNA, 122 bp, Homo sapiens
gtgaggccaacaaaaagatcgagaagcagctgcagaaggacaagcaggtctaccgggccacgcaccgcctgctgctgctgggtaagggcgggcggggggcgccggccccggcccgggggccc

SEQ ID NO: 190693 - DNA, 122 bp, Homo sapiens
ggggccgtggccagtgggtgagtggcagcgtctgtgagcagcacagagcagcacaggaaacgactccagcgcggccccacggcccctgcacgcgtgcagacctgctccgaggttctgttctg

SEQ ID NO: 190694 - DNA, 122 bp, Homo sapiens
acagaaatgccaagggagagaccgctgagcaggatatcttccgcccacaaggtggcagcacgaggaggagcctgccactccggaagtggggaagggcagtccaggcaagggaactgtaaagt

SEQ ID NO: 190695 - DNA, 122 bp, Homo sapiens
taattcacacagtgggagggaatcacagtgccatgtgacaagtgactctgcctctagtcccgacttctcctgagccctgtgcctgtgggatagcttaacttgttccacaaatgtctgaagtt

SEQ ID NO: 190696 - DNA, 122 bp, Homo sapiens
caaatttacaggctgaagcaatcctcctgcctcagcctctagggtagctgggaccattggcgcgtgccactgtgcaggccaatttttaaattttttgtagaaatggggtcttgttttgttgc

SEQ ID NO: 190697 - DNA, 122 bp, Homo sapiens
tcttttgaggcccctctgcttggcttgtggatggccgtcctcctgtgttatcacgtgattcgggtctttgtttttttaaccaagtttttctagttaactgcattgagtgttttcatcagctg

SEQ ID NO: 190698 - DNA, 122 bp, Homo sapiens
ctaggcactccctccaggcctccacaaacaatgggctaaggcgctggggacagagatgcacgcactccaggccaggcaggggagcagctgggaacagcccactgagccggagttggtggggg

SEQ ID NO: 190699 - DNA, 122 bp, Homo sapiens
ctcgtccacgcttccctggtcggtccctggggggtggggccggggtgacacgcgtcccatcgtgagaacaagcgctggacatgtccacgaaagcaaatggtttcctgccccctcccccagtc

SEQ ID NO: 190700 - DNA, 122 bp, Homo sapiens
ctcaggtgatacacccatctcggcctcccaaagtgctgggattacaggcttgagccaccacgcccagcttaaatgtgattcttgatactgttttaagtatttaggttgcaattaactttggc

SEQ ID NO: 190701 - DNA, 122 bp, Homo sapiens
gctgcaggctcgctcctcctcctcgcagagcttctgttgacaccagtcccagctgatttccgaattgcccagtggccccaggatggacggtgagggttgactcaatgctctcagtgcaaaca

SEQ ID NO: 190702 - DNA, 122 bp, Homo sapiens
gagccatccaggcagaggtcacactgggggctcctgagtttgtgtcagaagggaggagcccgaagtacattcactccataggcatttcatgaacacctacttcgtgccaggtttgtgccagg

SEQ ID NO: 190703 - DNA, 122 bp, Homo sapiens
gggggcaggcgatcaccaccccagtgagtccctccgtccacccgggtctcgctgccccagcgctccgtattcccccagcacacttccgcagggcgacccgtgcctcctgtccccttccttcc

SEQ ID NO: 190704 - DNA, 122 bp, Homo sapiens
agcgcgtcgctattggctgtggggggtgcctgttgctggacggcacattcggttggtcagcgcagccgcagactccgcccacaatcccgggccgcgctctgggcgcggggtcaagctgtctc

SEQ ID NO: 190705 - DNA, 122 bp, Homo sapiens
gccgctggccgagggtggaacggattgcgccacctggctgtgagtgcgcttggtcctgaccgcaggactgcagctcccagcggaggcagctggtcctggacccctctgaacaagactgcgct

SEQ ID NO: 190706 - DNA, 122 bp, Homo sapiens
atccacaggccgaagcaaagaagctggaagatgctgccacgtacttgagtctgccctccacgaaggcagagttggaagaaaagggccactcggccaccggcaagagcatgcagagccttggg

SEQ ID NO: 190707 - DNA, 122 bp, Homo sapiens
gtccagcacctcggctccaggcatgtgtgccagaggaagccccagctgtgggatcccatccgttcctggagcccagaacacttctctcccagacgccagctcatagtcatcagcctggatgg

SEQ ID NO: 190708 - DNA, 122 bp, Homo sapiens
tggggcgcaactgggcacagctgccaccggggtgctcgggaggcaggtccacacacacgccggccaagtcgctcatctcaaatgcacgagtcccgtgatcttggaaagtggtgcacaggccc

SEQ ID NO: 190709 - DNA, 122 bp, Homo sapiens
taagacgcgcatgcgcgggagaggaggcgtgggggtcgaggctgatgcgctgtctccgtccgccccctactggtgagtctgaaaatgaagacaaagggaggcgatggacggtagcgacggtt

SEQ ID NO: 190710 - DNA, 122 bp, Homo sapiens
caggcctttcttcctgcctgtggcagccggtgtcctcggcgtccgaaccctgaggcgccccgaaagaccagtaaagaagcactatccaggcaccagggtctcctccacccactcccgggagt

SEQ ID NO: 190711 - DNA, 122 bp, Homo sapiens
gatctgtaaacgatgcaagccctagacagcttttcccagtccggggtagggacgggcggccgcgagctggggcagaggacctgcgggagcccgcgcagcgcctccgctctgccaggcccctc

SEQ ID NO: 190712 - DNA, 122 bp, Homo sapiens
tgtccggagtttacctctgtggctaggctcagaatgagtcaggcttccaccttccagcctcggccaaagaacctcaaagctctatatgtaatgaagtcaccggaatgtttacagggcaacca

SEQ ID NO: 190713 - DNA, 122 bp, Homo sapiens
tggcaactttatgtctgggagcaagttacttaacctccccaagcctgtgtctgtgaaatgcgggtaaatgaatgtagatgtttggcagcagctactccttgttgagctctcacagtgaactc

SEQ ID NO: 190714 - DNA, 122 bp, Homo sapiens
aatacgcggggggtgcgtcggggcgacgttttactttaaaggcaaaaaaaggggacgccgcgatgcccccagaaaagtcacgactgaaactcgctgcgtcatgaccctcccaccttcttccg

SEQ ID NO: 190715 - DNA, 122 bp, Homo sapiens
gtggagaccaagctgagcaggagagagatcgactcctggttctcggagaggcggaagcttcgagacagcatggaacaagctgtcttggattccatggggtctggcaaaaaaggccaagatgt

SEQ ID NO: 190716 - DNA, 122 bp, Homo sapiens
tccagctggtcccctacggcgtggtagcggtcggtgagggctcgcacctggcgctgctggcgaggcaggtcttggcagaactcctggaagttgttctgcagggcagcgcatgcgtgctccga

SEQ ID NO: 190717 - DNA, 122 bp, Homo sapiens
cccactatgtattgaatgcacacgattgccttaagtggaatccagggactttccctcggtcgctgaaagtgtggttccaacaagcagcaaaacaccctcaactcagactccagctccttagg

SEQ ID NO: 190718 - DNA, 122 bp, Homo sapiens
cgaactcctgacctcatgtgatccacccgcctcggcctcccaaagtgcagagattagagacgtgagccacatggcccagcaggaccactttttagcagattcagtcccagtgttcattttgt

SEQ ID NO: 190719 - DNA, 122 bp, Homo sapiens
gccattgtctcagcctcgggggagggagtggctctagaggcgccacttgctggaagagggcgagagagacatttaaaaggtaccgcttgggcatcagactaaactgccagacttaaaaaggg

SEQ ID NO: 190720 - DNA, 122 bp, Homo sapiens
cagtgcttgggaacagcgaggatgatcgtggcgggcacttacaagcacatcctcatgccacgcactggttccttagacacccaccaggcacctgccacgtgccccactctgggccacgcagg

SEQ ID NO: 190721 - DNA, 122 bp, Homo sapiens
cttcgccaggcgctcccgggcactcttgccttctctgcttttaggcaaggcctggctgaccgactctggcgagtcgctgccctctcggagcgccgtagttctgagatgcagttcacaccgcg

SEQ ID NO: 190722 - DNA, 122 bp, Homo sapiens
acccctgcgctctcccctagttggtgtacatgggttttgatgcactcgtggccgaagctgcgctgagagtgttcagaggcaacgtccagctggccgcccagacccttgctcacaacggagga

SEQ ID NO: 190723 - DNA, 122 bp, Homo sapiens
gcagggagacaacggagttgagacaggacaaaattaaaacccacgtgcgcacactcactacggtggggtcggattttcctggctgcaggctttagaggtccttgccatttgggggttggaat

SEQ ID NO: 190724 - DNA, 122 bp, Homo sapiens
tgagaggaagggggagtcatgtgactctgtggttactggtcaccaggacaacgcaattgacgtgcccctctactctaagctctaaaatgagctgtgtcttcacagcagacccacaaggattt

SEQ ID NO: 190725 - DNA, 122 bp, Homo sapiens
ggagggttctatcccccgtgatctctgtggtgccgggtccaggtcaccacaacacaagggcggctctgttctgctcaagctgtaaggtcactgccgactcctggggccccggggtgctcatc

SEQ ID NO: 190726 - DNA, 122 bp, Homo sapiens
tggttacactatgactactgctaggaccattgccagtactactcatgtactgagttgttgcggatactgccaggatcactctcggcagcaccactgcggctacaaggactgcacctggggct

SEQ ID NO: 190727 - DNA, 122 bp, Homo sapiens
atgtgcatgtgtgtgtgtgtaatggtcttttaatttagaattacaacctttattcaccagcgaatcctgcaatcattagagggacttcaagtattttaggacacatgagctaactcaatttg

SEQ ID NO: 190728 - DNA, 122 bp, Homo sapiens
cccgccccttctcggaggtgctggttctgttctgaggaccaagttctttttagtgagccccgagtgattctgatcctatgctttgggaaacactgctgtcagcccagaagagtcagcgggtt

SEQ ID NO: 190729 - DNA, 122 bp, Homo sapiens
ttcatgttgttaataacacccattgacatttattgtggtttgttggactttttatcctttcgtttatcagcagcattaaagacaacatttaagaaatgtgtaaacactgcatgtatgttcgt

SEQ ID NO: 190730 - DNA, 122 bp, Homo sapiens
tgacccgttcactcccaagaccctcagggacaggcaggcagtcagtggacactgtcggcacggtgggctgggggcgtaagggccccggtggtcctagggaccccatggccatggttgagcgg

SEQ ID NO: 190731 - DNA, 122 bp, Homo sapiens
gcaggaagtacatgggggtgtggaggcgggagtctatgtggatgagaatgatcttgaccacgttgctggctatggaggtcaaaaagaccaggagaatgagggcaaagagaagccaggggaaa

SEQ ID NO: 190732 - DNA, 122 bp, Homo sapiens
ttatggaccgaggttactccacaggcatttcagaccaaggctccgaggcctgcggcttcacgcggaaatgacgggggctgggcatggttaacaggcaggcatcttggctgcggtccagtcct

SEQ ID NO: 190733 - DNA, 122 bp, Homo sapiens
cttcaccccgaagctggaaggtgttccgctcccagtgcctgcaggtgccagagagagaggcgcaggacgctcaggtaaaggttgtgattggcatgttattgtttttctgtcatttgaggata

SEQ ID NO: 190734 - DNA, 122 bp, Homo sapiens
taaaggatgtctgtttggaggcaaggaaggtcgcccagaggtcaggcacgctccccttggcggacacagctgggcttctcagagactcctaaatcctgcctcgcatctcaaatcggcttaac

SEQ ID NO: 190735 - DNA, 122 bp, Homo sapiens
ccaactcaaccctgtctagtgctgagcagtatcaagctgtcatccagtgggtgcagagaccgacccccactcctggaactaactccctgagctcactggccaaacaagaactgctgaggtct

SEQ ID NO: 190736 - DNA, 122 bp, Homo sapiens
cctcagccctggccctgccagcagcctcactcctccctgggctggtctttctgctcggtgcgtgtacctgcagtgtgccctcaacctcccagcccacgagcagctccttctgcaaggccagg

SEQ ID NO: 190737 - DNA, 122 bp, Homo sapiens
gaggggagtgaagtcgcggcacctcgggccttcccggaggccaagcatgagactccgcggcggtgaagtttgattggggttccagggacccgtattccccgctcagtctgtgaagaccgccg

SEQ ID NO: 190738 - DNA, 122 bp, Homo sapiens
acagctgagtcagaatttccactgtgatgattatgtggttacggacgcagcctcggtctgcgagacattagcatgaaacatattcattaatcacctacccatgacgaggcctaaatatagat

SEQ ID NO: 190739 - DNA, 122 bp, Homo sapiens
attgataatcccccgagttgggttacctgatccagacaggaagctggtctaggcttcccccgtcacccggagctcctgacaagtgagcaggaggcggcgggtggttgccctaaactttgatt

SEQ ID NO: 190740 - DNA, 122 bp, Homo sapiens
cagggaggtcccgcaggcaatgccgcctttggtgaagaggcatctcggtgtgttcttgcccgtgctgatgtttgacccttgagcagaggttgcccttggtgaattcgctttatttatgttga

SEQ ID NO: 190741 - DNA, 122 bp, Homo sapiens
actgagcacagctgggacttctgcacagagtgctggagcagctcccttgggaccgggaggcggcagtgggagcaggctggaaaggagtccagcccagcagggagcttcctgtgtcctcactg

SEQ ID NO: 190742 - DNA, 122 bp, Homo sapiens
tatgccacatacgaggccattcgcaaggcgttccgcgtgtgggagagtgccacaccactgcgcttccgcgaggtgccctatgcctacatccgtgagggccatgagaagcaggccgacatcat

SEQ ID NO: 190743 - DNA, 122 bp, Homo sapiens
cttgtgcacccatgaaaaggggacacccacctactcccggccgagatgcctacaggcaagcgctgggacaggcaagcacaggacagatgtgcagagggagttactgaccctctttagaaact

SEQ ID NO: 190744 - DNA, 122 bp, Homo sapiens
ggcggctccccaggaagacggcctggcggctgtgccgagggcatcgtctggcaaagggtacgcaaagccagcggagctgccctctggtgcgttcagcagggagccagcgccccagttccagc

SEQ ID NO: 190745 - DNA, 122 bp, Homo sapiens
cattgtaatttaagttctcatctgcatctcattaccttaatagtccaaacaatagttcttcgatgtcttgcacagaaggatgggaaataatttccttggacagggtacccagactctctatc

SEQ ID NO: 190746 - DNA, 122 bp, Homo sapiens
gcgcattcccagtctcgcgcccgccgcctcctccagcttggtagccgccagcgtgctctacggtgtttttgtttgttttttaccagctgattcacaactcaagtagcacagtgaaggtggac

SEQ ID NO: 190747 - DNA, 122 bp, Homo sapiens
agttggttgcacgacctttattctgtcttgtcccatagatttagaaagaggctgacacatcgggtaactagtttaaggtcatctgatcatgcgggtaagcgacatttttcagaaaccaaggc

SEQ ID NO: 190748 - DNA, 122 bp, Homo sapiens
ggcagggtcctggtgtcctcgccccacaaggctcccccagggtggcccgaccctgctgcgcgggagggaaagagccacaacaagttgaaggtgcccaggagacttgggtacattttgctcat

SEQ ID NO: 190749 - DNA, 122 bp, Homo sapiens
acactgagatagagctcagggtcgaggtccggccggggcggcggttcccccggtccctggcgcaacagcagtgcaccgggtctcttggccaggccctttccgctcgcatcctccacgaacca

SEQ ID NO: 190750 - DNA, 122 bp, Homo sapiens
agtctgagaagggattatgcctgggaattcccacggctggattttcattgcagaacctgacgaaaggggctttgcagggtccagaatgaagaggaggcaatgagaattatccctggaggatt

SEQ ID NO: 190751 - DNA, 122 bp, Homo sapiens
gtggcggcgacggcggcagcagtggagactaggagcgcggagccccgccccttccgcttccgccgagcgcgggaaaccccgccctgtgtgacgtcacatccctagtaaccgcggcagcggca

SEQ ID NO: 190752 - DNA, 122 bp, Homo sapiens
agtcagcgccagtttcacgtcctcctgtagctgcgtggcctaaggtcttaggcgccgcggcgctatctgtccctgctgtccacgctgctggaggcggggacagggtcaagggttgccactgc

SEQ ID NO: 190753 - DNA, 122 bp, Homo sapiens
cgtgccacctccgcggccatgacggcgacccggggaagcgccccgcgcgccaaggccccgcgctgctgagctgtgagcacggctgccccgtccgtccgtccgtccagcacccgcccggagag

SEQ ID NO: 190754 - DNA, 122 bp, Homo sapiens
cttccgcagcaccggcgagagctgtggtgtgctggccttgtcgtaggtaagtttagaaaccggagcagctcgagcggacttcacactgtccccaccacagggtggggtgcgcccacctgccc

SEQ ID NO: 190755 - DNA, 122 bp, Homo sapiens
agtagccgccgtgggagggagccatgaagcattacgaggtaagaagcgagaaacaggggccgtgtggccactgctgacccattctttttccttctttgcgggaccacgggaccccactttct

SEQ ID NO: 190756 - DNA, 122 bp, Homo sapiens
ggtgcgcagggcgccctccaggtcctgggtcctcagctccaggccctccagcttgccccgcgtgtccttcagctgtgccttgagacccaggatctcgctagccttggcgttcacctccgtct

SEQ ID NO: 190757 - DNA, 122 bp, Homo sapiens
taggggattgaaggagagaggataggcacttatgtagaagcgtgaggatataggaagctacgtagtttctgggaaacagtgggaagatgagggtttctggaaatctgagggaacgacaaaga

SEQ ID NO: 190758 - DNA, 122 bp, Homo sapiens
tgcaacctcctgcctgattctcctgcctcagcctgccgagtgcctgccattgcgggcgcacgccgccacacctgactggttttcgtgtttttttgggggagacggggtttcgctgtgttggc

SEQ ID NO: 190759 - DNA, 122 bp, Homo sapiens
tcttctcaatcatggcctggctggccaagaccccaggctgcagatccgggaccccttccccgccgcccagctggccgttctgcaaggcttcctgggcctgcagctccctgcaagccgaggac

SEQ ID NO: 190760 - DNA, 122 bp, Homo sapiens
acgtctgagctaaataatttccagcatttgtctttcttgctactataataaaaagtcacacggaaatcaccatgtgagctgtcatttgtatgcctccattttcttgcctttgtgctacctta

SEQ ID NO: 190761 - DNA, 122 bp, Homo sapiens
cgctggctaatttttgtattttcagtagagacggtgaagccatgttggctaggctggtctcgaactcctgacctcaggtgatccacccacctcagcctcccaaagagctaggattacaggcg

SEQ ID NO: 190762 - DNA, 122 bp, Homo sapiens
ccagaggagccctttcccatttcggtgttaaaagctacctgaaaacaccaccccaggcaacggtggccgttccgcctgaactccgcgcccgagttccccggacgtttcaattgtgtgggaat

SEQ ID NO: 190763 - DNA, 122 bp, Homo sapiens
gaactgggtgtcatttcaggacagagaataccgggagtcataaattggccctgaagcaaacgaaagtcttccaatcctgcatgacatagcagattgttttgcttggggctttggcttggtct

SEQ ID NO: 190764 - DNA, 122 bp, Homo sapiens
cttacactaatgtcccttgccactgtccggttcaggccctccccacccctccctggatgacggcagcagacgtgtctctctggtctacccgcccctgacttcgccctcaagctgtgctcctc

SEQ ID NO: 190765 - DNA, 122 bp, Homo sapiens
aaaattattactcctttaaaggattattcaggtaaaggaagccgcatctgctgacggttccgaaaacaagaggattaggagcccgtccacagatccaggcccgcagacccccaccccctctg

SEQ ID NO: 190766 - DNA, 122 bp, Homo sapiens
tcgttcttagcttaccgagaaacagcgcccgacacctggcccttcgcagctctcgcctttcgcagctctcgcctaacaggaaagggaagaaacaggcggaagtgggaactgcacctgagcga

SEQ ID NO: 190767 - DNA, 122 bp, Homo sapiens
ggccaggcctctgcaaacagtcagcacagaccgggagacagaaaactacactccctcagacgctttattgtttacaaaacagatggatcccatagggaaggaacacaatcattatgctgaca

SEQ ID NO: 190768 - DNA, 122 bp, Homo sapiens
gcccctctgcagtttccacgctggtagtcgtgaagtaaattctaggccctgctccccaaccggcgcgggccgccctcgccttcagctccaatgctgctgcgccccaggccgccccgctcctg

SEQ ID NO: 190769 - DNA, 122 bp, Homo sapiens
actcccactaggagggcagaccctcagccggagccgaggccgcgccccgcagccgcgccccggggctgcccctgtgggtggagcctcttaggacgacatccaaacaccccgggcgggcgcgg

SEQ ID NO: 190770 - DNA, 122 bp, Homo sapiens
tgtccccgaggcatctctcagaatcctctggaaaacccctgagcacaaagcaagaggcatcgaagccccctcggggatgcccgcaagccaacaggggtgtcgtgcggtgggagtacttccgc

SEQ ID NO: 190771 - DNA, 122 bp, Homo sapiens
gtgcgtgtggccgtgtgcccgtgtccctggtgtgtgtgtggcctgtgccctgcccatggccgcgcttccactagttcatgtgagtccacttcctttggaaagtgccagggcgtctggggaag

SEQ ID NO: 190772 - DNA, 122 bp, Homo sapiens
ccgcggccgtgtccccgcgctcccgtgcgggtctcgggtgcgctgggcgggcgggcggcgcgaggggaggttgtgccactccagcaactcaggggctcatccaggtctcccattctctccct

SEQ ID NO: 190773 - DNA, 122 bp, Homo sapiens
ggccatggccattagtgccctcagagctctgcccgctgccggcactgcggatgctgcccacgctgccctcactgcccacactattcctgtcacctgctgtggggggcagaagccaaggggtc

SEQ ID NO: 190774 - DNA, 122 bp, Homo sapiens
tttgcctctgtctaattagcacctttggacatttgcgtcaggctctgtgctgacaaagagcgcactgacgaccacagtagggccctgccagtcctgtgatggcacccagcatttaagtgtga

SEQ ID NO: 190775 - DNA, 122 bp, Homo sapiens
agctcccgcggcctgcgctggacaagcgagagctggacggaaacggtgggaggccgtaggcggcggctgggggcgcgggacccgcgcgcgggcgcggaggcgggcggggaggccccgcagcc

SEQ ID NO: 190776 - DNA, 122 bp, Homo sapiens
attgctaatatacattctccattggtcttttaatgtcgtttacagaagctgactctctaccgcctccttctctccgtctcaccctctctgcctcgcctgctctgtactgttctgttctcttc

SEQ ID NO: 190777 - DNA, 122 bp, Homo sapiens
ttccgtttttaaagtgtcaacttgtttacttggaggagccgccgcctgccggacacagcacgtttgggagcctctctttccactgtaggctcgtaactgcagactactcccgaacaacaaga

SEQ ID NO: 190778 - DNA, 122 bp, Homo sapiens
ggggtagctgcggcctccggaggtcgcccgggggtgcggatggagtgacttctgtcccggcgaggtggcggacagaaagactcccataccacaggaaggctgcccttcccaaatactcctca

SEQ ID NO: 190779 - DNA, 122 bp, Homo sapiens
gagagggcaaagagaaggttttggtgaccaccaacgtgtgtgcccgcggtgagcagaggacgtgtcccacctggtctgccaggcttggggtcccaggcccagttagagccagaaatccttgt

SEQ ID NO: 190780 - DNA, 122 bp, Homo sapiens
ggaagcgaggaaatcaccttcttctttcatgaccccggtttcactgccatgcctggtttccgatgttgacgtacctggtgcttcctctgttggtggcttggcggctctcctggaaccacgct

SEQ ID NO: 190781 - DNA, 122 bp, Homo sapiens
cagggcgcaggcgggggcggacagctcattgggaggggcgccggggcacagtgcggggctcgccccacccccaggtgccccttccccgctctcgcctcgcaggcaccgcatcgggcccggga

SEQ ID NO: 190782 - DNA, 122 bp, Homo sapiens
aaggtccgggcgtcgtgccgcaaacccagggctgggatgccgttccggaagcacctggcacggggagagtatgtccttcccaggaaggtggacgtgaccccagccaagggcgcagctgccct

SEQ ID NO: 190783 - DNA, 122 bp, Homo sapiens
ctgcgggacttgtgcagagctggtgtcccctcgggttcctggaggctggagctgaggagccggcggcgggaggagccgggcaggctgccgtggcctggggatcctgagtcccgggagtgctg

SEQ ID NO: 190784 - DNA, 122 bp, Homo sapiens
ttctggtaaggcagtaatgctaatcttgacctgtggatttttcagtggctctgcaagccccgggataacaaaaaagagtcacgtcattagcaaagaggataacagtgagcaattttaaggac

SEQ ID NO: 190785 - DNA, 122 bp, Homo sapiens
gtgtgccctcctgtcagtgactggaggcagcacacaaggcacacagtgagacagccctcccgctccgatcttctaatcacagaccctggacagatccgggggccctgggcgccccgtgaggc

SEQ ID NO: 190786 - DNA, 122 bp, Homo sapiens
tgcagtgactggcttgaaagagcctccacggtgtggagaaaaaagtctgccatgacctggcgctccagctataaagcagccgcgttcttcagcaggaactgctctaggacaatactctacat

SEQ ID NO: 190787 - DNA, 122 bp, Homo sapiens
ggctgggaacacctggaagtcccaattccaaggcgtcccaagggcagtgcagaacccagccgaggagggggcttgagggagaagtcccaggacagcccgaagagagggtacgggaagctcca

SEQ ID NO: 190788 - DNA, 122 bp, Homo sapiens
gactccgtctcaaaaaagaaagaaaaaaagaaaaagtcctcataagtagggcagaggtcacggcagagtggaggtaccccagacttcgacctttgctcactgagggctggaaaaccacaaaa

SEQ ID NO: 190789 - DNA, 122 bp, Homo sapiens
tttcatttccctgaataaaatattcaagatccgaagtccttaacctggcatcccaggctgcgctacactcactttccctctgtgccttagttttcatatgtgtgaaatgaggacattatgag

SEQ ID NO: 190790 - DNA, 122 bp, Homo sapiens
tcagtcctgggccacggagcagacggtgggaacacaggcttcctggcaggcagcacggcccgatgcgggctggtctggtgggtggctgtggcttccgtcgtggggaggcacaagccctgaat

SEQ ID NO: 190791 - DNA, 122 bp, Homo sapiens
ctaagcaggtcatgtgaaagaattatgggaaaagtgctaagcacaagcctggtacacagacggaaatctaggagagaacccacaacccctggtttccaaatccagtgagtgtccaaaccaca

SEQ ID NO: 190792 - DNA, 122 bp, Homo sapiens
accagaatgaagaattctacaagaaagtagaaacatgacagaaagaagagtacaggagaacgggtgaaacttgaaaactgatagaaatgatagaacaggatctatacttctgcaggtcactg

SEQ ID NO: 190793 - DNA, 122 bp, Homo sapiens
cccgccacactctggggataataccttgaggccggtagttgggctgagaggtccgcaccgcgcccggttctgcgatcttccctgggagagaggttccccgcgcagtcccctcaggccgggat

SEQ ID NO: 190794 - DNA, 122 bp, Homo sapiens
ttgcaatccttgtgttttatgtgtctgggcagctcttccttgaaaacagcctcactgcaacggtaacactttccaaacccgtcttttttgtcacattccgtcagcaagtgctccgtcagact

SEQ ID NO: 190795 - DNA, 122 bp, Homo sapiens
gtgactgcggagggctaggtgaccccggccgccgccatgatgggcagcgagtttgggaatcggacgtagatgcaacatgtgatctcctacagcttgtcaccttttgagcagcgtgcctcccc

SEQ ID NO: 190796 - DNA, 122 bp, Homo sapiens
cagtcattcgctcggggctggctccgccccagaactgcgcaacctccccgcccacatccgcgtcctaaccaatgagcgctcgaaatttgggtccacacccccgtcacgccccgccccagact

SEQ ID NO: 190797 - DNA, 122 bp, Homo sapiens
tagcaggatggataattgatcctcagcaggggaaacgtcccgtgggttttgacgcagaaccggctctcggtaaacctgtccctgccacaccctgcaaagctcccgcccctgcctcctcttgt

SEQ ID NO: 190798 - DNA, 122 bp, Homo sapiens
cagcactttgggaggcggaggcgggtggatcacctgagcgtggccaacatggtgaaaccccgtctctactaaaatacaaaaattagcccggcgtggtggttcaagtctataatcccagctac

SEQ ID NO: 190799 - DNA, 122 bp, Homo sapiens
aaatgtgtaaccacatcactgaagcatgaatggacttcatgaccacgttcctgggctaaacgggcttatgactctccacataggcctaagttttcttaagaactcatttaggaagggaaaac

SEQ ID NO: 190800 - DNA, 122 bp, Homo sapiens
ggaagccaattgagaagcagtgaatgaagcaacccaatcaccctggaggcagagataccccgtcctcttacttggaggctgtctcagctcaactgagtgcagtgactctttacctgcatacg

SEQ ID NO: 190801 - DNA, 122 bp, Homo sapiens
ttagacacgcatatttaaatatcgaggtaaaatgacaggtctgcaattcactttggaaaacgtccacaaagaaaaggggcatatttgaagcaaatgtggagaaccctgatgactgctaaagc

SEQ ID NO: 190802 - DNA, 122 bp, Homo sapiens
gtcctggagatgatccgctgccacaacttggtggacgttttctttgctgccaaaaccctccggaactacaaacccaacatggtggagaccatggtgaggggctgtgtcccgtgcccagccac

SEQ ID NO: 190803 - DNA, 122 bp, Homo sapiens
tatgctgccattcgagaggcaaggaaaacatatctccaaatttccttccaagcggtctaccggcattgacagtaccgcggacaaaggagagtaccaaataaatactccttcgaaccaacggt

SEQ ID NO: 190804 - DNA, 122 bp, Homo sapiens
atttgtcagcagggcctggttttcagggaccacggctaccgcctccttctgcccgcggggcggctcctgcacctctggcgggcaccggttccagccacggtttagccgagaacagggggaac

SEQ ID NO: 190805 - DNA, 122 bp, Homo sapiens
ttttagtacatatgttttgtgtatttaaaaaactgtgttgaggcgccctggctcgccctgcgccagaggctcgcgcactcagcaggttgggctgcggcggcggcggctggggaagccgaagc

SEQ ID NO: 190806 - DNA, 122 bp, Homo sapiens
cacacctggctcacggcgagtgcggagcagaaagcactactggcgcgggccacagccagccgctttcatctgctaagacctcacctgaaagtcgcaccagtgccctcaaggatcctcccgcc

SEQ ID NO: 190807 - DNA, 122 bp, Homo sapiens
acgtgaagtgcggcgtcagctgagcccctccgggtgccaatgcatggggcggggtaagggcggggcagggggcggggcatggagtccttgacccacctcctccagagccaaattccacggga

SEQ ID NO: 190808 - DNA, 122 bp, Homo sapiens
gcctcctgccatctgtgggcggcgttgggaactgcggccaccgctgcttgggaatcaggacgtcccagctcccaaccggcggtcattcattccctcaacacacactctgggccgcccgcctg

SEQ ID NO: 190809 - DNA, 122 bp, Homo sapiens
gactctggttggaagggtccagggaaatggggtcactcggggacgtgggccgcctccgggcgggcaacgcctgagaagcacgcagcgctcggcgcccagtgcgcccccacgagcgggcacgg

SEQ ID NO: 190810 - DNA, 122 bp, Homo sapiens
taaccgcaaggggtgaggaagagatggctggtctcaaactccagttcaggcccatgaggccgctgcagcgcttgataggcttctgcaggtacttgcggtggtgcctctcctgaggcaagaag

SEQ ID NO: 190811 - DNA, 122 bp, Homo sapiens
aatgagtgaatgtatacatgaataaagagcgtgtacggagaaagttgccgcattatttagcgcaaattaaggcagacatcagcctgcccaggacgcctctttggctctggcgcgaaacaccc

SEQ ID NO: 190812 - DNA, 122 bp, Homo sapiens
atagacatgaccaattgaaatacttttcatctatatccaactactttccctctattactacgccaaccttcatctactcaaaaccttcacttctaaactcaacctatctttcttccatatca

SEQ ID NO: 190813 - DNA, 122 bp, Homo sapiens
attatttattcccactagaggttccaggctccgtgtcctcgtcctcacccacactcagcgcgggacagctttgtaattcagtcatcccagtaggcgctcattctggttttaatttgcatttc

SEQ ID NO: 190814 - DNA, 122 bp, Homo sapiens
catgatttaaatttgcgatactgtatgtcacgtacccgttctcaccctcatcagggtctacggcactcaggctcatgacagtagtaccaatgggcacgttctcatcaaaagcagctttgtac

SEQ ID NO: 190815 - DNA, 122 bp, Homo sapiens
gtagtacgccacaacgatgctgtcacacggctgggcactcccgccgcccaccttcctctgcgatcttgtcctggggaaagagatgcagcggtggtacctggttttggactgaggtcccacag

SEQ ID NO: 190816 - DNA, 122 bp, Homo sapiens
gtccacccgggtctcaagccccgcccaactcaggcctcgcgttccttccaggctgggcaccgcctttggtcacccacgtggcccgcagtaaggccccgccctttgtgggtgtggcctttcac

SEQ ID NO: 190817 - DNA, 122 bp, Homo sapiens
gaggcggcatggatctcagcgagctggagagagacaatacaggccgctgtcgcctgagttcgcctgtgcccgcggtgtgccgcaaggagccttgcgtcctgggcgtcgatgaggcgggcagg

SEQ ID NO: 190818 - DNA, 122 bp, Homo sapiens
taccaatcaggcgcagtgccgtctgcgtgagggccagcatgccggaattgagcagaaggtcgaggttgtttgcgccgtgctgcagggtgagcatgctgagcatcaccaggaggaagcgggct

SEQ ID NO: 190819 - DNA, 122 bp, Homo sapiens
gtaccggacgccttacccggatgccttccagtgcgccgtggtggacaacctcatctactgcgtgggacgccggagcaccctctgcttcctagcagactctgtctcacccaggtttgtgccca

SEQ ID NO: 190820 - DNA, 122 bp, Homo sapiens
cccaggtttcggctcaccccgggacccggccctagcccctacccacagcccaggaccatgcggagcaacgctcgcccagccactcgccgcctaggccccgccccgccccgctctccggccac

SEQ ID NO: 190821 - DNA, 122 bp, Homo sapiens
ctgctttagtgagaagtatgtggccccatccgaggatgcaatttcacagccaggagcagccgcggtccccgccagggatgcggtcacgggcgctcgcacccggaagccgctcaacaagttcc

SEQ ID NO: 190822 - DNA, 122 bp, Homo sapiens
gggtcttgcgataccacatacttacacaactttactcggcactactgttactgaattttacgttttggttccttaatattttggatgtagtcatagtctctacattcttcacaaaagctcac

SEQ ID NO: 190823 - DNA, 122 bp, Homo sapiens
tccctgctatccaggctacacctgtgcggcgtagcagccgtccccgtctcgcctgcacagcgccagatgacagcagcccagaggctgtcctctgccacctgcactgctcaccttttccgagg

SEQ ID NO: 190824 - DNA, 122 bp, Homo sapiens
cctccctcccatcccccacacagtttaatgtctagaaggttgcctggtgcatactggaggcgctcgattactgctgcgcaggcgactgagccagcagggccactgggaggagttcctcctct

SEQ ID NO: 190825 - DNA, 122 bp, Homo sapiens
agccagagccgcagccaaagcctcagagagcaggagttggagcgcaggccctgctggatccgcgcctagctcgccgccaggcaccggccggaggacgggccgtggtgtcagctcactgcccg

SEQ ID NO: 190826 - DNA, 122 bp, Homo sapiens
ttcctccgccctccctggtacattctgtgtctgcctgtgtgagccctgccccatgtgccccgttcactaggctgtgagctccagcaagcgtgtcttctcagcacctagtccagcacccagca

SEQ ID NO: 190827 - DNA, 122 bp, Homo sapiens
gcagcccggaagtggaggggggacaacaggtccaacagctcccgagggaggagggagccacgggcttgccccacccgtggcctcggcatccggccatcccggccccaccggccccggcccgg

SEQ ID NO: 190828 - DNA, 122 bp, Homo sapiens
aactgcttgaaaatttagtaaccctgctcctaatcccgtgcactgctatatcctagtgtgcggcgggacacttgagagttttgaaagaaccctcaaacaagttcacgttccgtaaactactt

SEQ ID NO: 190829 - DNA, 122 bp, Homo sapiens
cacagcagagagcaaattctcccacctcaggatctaagccattatattaaagataaaactcgccagacaattcccaggattagaaattattacttttgtagtttgccccgaaaatataggca

SEQ ID NO: 190830 - DNA, 122 bp, Homo sapiens
ttgctgtatatgtggtccagggatttctgcaccattctgggctcactacttacccatctgcgaaatgggcggatgagaggcgatgttgtggggggaggggcgcaaaagagcttttgtgagtg

SEQ ID NO: 190831 - DNA, 122 bp, Homo sapiens
ctaatagggccaagctttgcctactggtgaatctgagcaggatctgtggaggccaggcagcgggagtctgtagaggcacagctacagtgtgttctagaaatgtggggggctgagaggcaggg

SEQ ID NO: 190832 - DNA, 122 bp, Homo sapiens
ccccagaaaccaagcccatggcaggaggcacgcgcgggcagggggtaaatgggccctcatcgcgtgggaccaaaggcaggaggcggcaagcgggaccctcgggccacccagccaggatagaa

SEQ ID NO: 190833 - DNA, 122 bp, Homo sapiens
acctttggcttcagcatcactaaactatcacacgtctgggttaggtttgcatctgaattgcgatttccccatttgaaaatcacctctttagcagttagctaaatgtgactgcagtgactcac

SEQ ID NO: 190834 - DNA, 122 bp, Homo sapiens
agtggtagagggaaggaggcttcatttcccccttttcttatcaaacaaagagcacagaggcgctgaaaatgtatacacacctataaacttacatatgcataaaatgtattctgaatattcaa

SEQ ID NO: 190835 - DNA, 122 bp, Homo sapiens
ttggaagaatggcgaggggcggcagtggggagggtggtgaccctgagcgaccggccagggcgaggaggctgtgctgtccctgcaggccatgtgctcatttccacttacctggcaggggagag

SEQ ID NO: 190836 - DNA, 122 bp, Homo sapiens
agtggtttatttgaaatacgttttcaagatggaacccataggcttctagcctcctgggctcggctgcctgttggacacctgcatgttcccctcacacctcagactcatcatatcagaaactg

SEQ ID NO: 190837 - DNA, 122 bp, Homo sapiens
cccaaaacccatcacccagtctaattgcgagaaaacaccagacggacccaacgtgggggacgctctacagacaccatgacaggcctgctcgacaccgtcaaggtcggaaaacacaggaaagt

SEQ ID NO: 190838 - DNA, 122 bp, Homo sapiens
tgccgtctgtcaccactttctttgactaggaaagggaactccctgaccccttgcccttcccgagtgaggcaatggctcaccctgcttcggtttgcacacagtgtgcgcaccccctgacctgc

SEQ ID NO: 190839 - DNA, 122 bp, Homo sapiens
gggcggcccggtccgtccgagcgggggcgggagaggtgagcactgggcccccgaactccccgaaggggcacccacctagcaccttctcgtagtcctcgtctaacaggaatggcaccagcgcc

SEQ ID NO: 190840 - DNA, 122 bp, Homo sapiens
tttaagttataaaccttgagtgaggtgccagactctaggcttcgttggacgtctacaggacggtcaaggattaccaactcaaagtaaagaaggaaatttgagtacttgcccccttggaggtt

SEQ ID NO: 190841 - DNA, 122 bp, Homo sapiens
ggtcctggagacactctctgtagcagaacaaactgtactttcgagatcctcacagacgcccgggaacaaaaggccagccagcgtgaagtacagcgtgagccgtactttgcaccctattcgtg

SEQ ID NO: 190842 - DNA, 122 bp, Homo sapiens
aagattttagcagggaacagacccagtagttggcttggatctcttaactccagaaaaggccgagtgaggacaagggagaccacagggataatttctgtggctctggtaaggggatgacaagg

SEQ ID NO: 190843 - DNA, 122 bp, Homo sapiens
acttgaagtaatcttttgttggagagagaattctggaggtgtctggtccctatcaggatccgacctctgaagcttttaaggaaacatatgaccagagaagtgagtatgaggtgtgcttaaca

SEQ ID NO: 190844 - DNA, 122 bp, Homo sapiens
gggtgcctgggattctgcatttctaacagtctcccaggtgaagctcatgctgctggtccacgagccacactttgaatcaaagtaatgatggttaaaattatttaacttgtcagggtctcagc

SEQ ID NO: 190845 - DNA, 122 bp, Homo sapiens
aaacttgggattttcacggggactcagtccagaggaagttgagaaaaccaacttaaattacggtctcgatcgccatctggcggtggaagtccacattacatccgcggagcaatggctgggaa

SEQ ID NO: 190846 - DNA, 122 bp, Homo sapiens
tccagcctgggggcagcgaggctgctgcacggcccacgggactctgtcttgaagcgagaccgttaccatgactggcgccgggcgcccacatactgaggtgtttctgtagcacagacaccctg

SEQ ID NO: 190847 - DNA, 122 bp, Homo sapiens
cacacatgctccctgggcagggggagccgggccttcctggtgtagcacctggggccccatcggccccacctggtcctcccactctcatggacaaactccagagaaaggaggccaaggctctt

SEQ ID NO: 190848 - DNA, 122 bp, Homo sapiens
accaagcaggaggtagaggtctcgggcccagaggggccctgcatcccccacctcctgctgcgagaggcatcagccggccttgtccctaaagcccctgctcgctttcctgtcaccactcgggt

SEQ ID NO: 190849 - DNA, 122 bp, Homo sapiens
caggctccaaggctgaccggggtggggtctccgcaggtaactgtgctgagggtctgggtacgaactaccgagggcatgtgaacatcacccggtcaggcattgagtgccagctatggaggagt

SEQ ID NO: 190850 - DNA, 122 bp, Homo sapiens
gaatatggccagggatgttttctaggaaccgaggcccaacctgctgtgattttcctcccacgaccaccagagtaccgagcgcagatccaacccagcctgaccccctttgggcaccgcagctg

SEQ ID NO: 190851 - DNA, 122 bp, Homo sapiens
ctgcttcctcctcgccgcatccctgagggaagcgccgcctctgctcccgggttctccgcccgccgactccttcctggccggaccccgctgcgctccaccccagtggctggaggagcagctct

SEQ ID NO: 190852 - DNA, 122 bp, Homo sapiens
gcgtggagaattcctccccagcactgcgcatcgccgggggcactgcctgccccgtgcggccgctgcccacgcaccgctggccaccggtgcctgctccccggagggtaaacaccgccccacca

SEQ ID NO: 190853 - DNA, 122 bp, Homo sapiens
ccatttggttaaatcatttaattatttgtatcatacacaaaaactgttatctcatatgcacgcatctattcatctacaccagtgatcaaataagaaataatgccccaaaccagggtttccaa

SEQ ID NO: 190854 - DNA, 122 bp, Homo sapiens
ccccgctctcctccaccagcggcctgactgtgtctcaaaaaggggataattaatatagcacgagttgatatgggcactgggcactgaactcgatcgtgtagcacacgtgggccgggcgcctg

SEQ ID NO: 190855 - DNA, 122 bp, Homo sapiens
gtgtggctgtggaggtcactgtgtgaccatggaagtcgcgttccgtgtggctgtggaggtcgctgtgtgactatggaggtctctctcgtccgtgtggctatggaggtctgtgtgggagtatg

SEQ ID NO: 190856 - DNA, 122 bp, Homo sapiens
ccccacccatgaggcactcacggaactctggatgtgctgggttggagaagaagacaatgccggagctggtgactacagctcctgcagctaccacagggtccacgagctcagggtcgaaggtc

SEQ ID NO: 190857 - DNA, 122 bp, Homo sapiens
aattttgcacttggactctggtatcagacactgcttttaaatccccactctgctcttactcgctgtctcaccttgggcaaattacttcaccactccgggcttcatttcctcttctacaaaat

SEQ ID NO: 190858 - DNA, 122 bp, Homo sapiens
aggtgatccaccaggctcagctttccaaagtgccgggattacaggcgtgagccaccttgccgggcctatatttcttaagctctatgtttcgttctgaagcttgaagtgggtggaagcaaact

SEQ ID NO: 190859 - DNA, 122 bp, Homo sapiens
agagaggttccggccggtgccggaactttttcttctcctgcacggtcttgaggggctcctcggctttgggcacactcggctgatgcttcctggggatttcctaaaaccggaacaacgatctg

SEQ ID NO: 190860 - DNA, 122 bp, Homo sapiens
tgactgggttcattgaagcttggttggaggcctggtggggggtgagcggccacagagcctcggggacaggacggaattcgagtgactctggggaagtgtctctggcatctacagtgtacgga

SEQ ID NO: 190861 - DNA, 122 bp, Homo sapiens
cgcagaccgaaaataaccattgaaacgaaaccaacaaaatgcaactattttccaaaaccccgagcgtttgctggtgggtgaccaccccgcgcaggtagcgcggatctgctttggttttgact

SEQ ID NO: 190862 - DNA, 122 bp, Homo sapiens
agttctcagaccacatcagctgcatctcggggatcttcaaattcaacaaaagcaaagccgcgagggtttctagcaacccacacgctttggagtggtccatactagccaaaagcccgttccag

SEQ ID NO: 190863 - DNA, 122 bp, Homo sapiens
ctccccagttaacgcaaacagcccattgttctggagccccagggacaaagcctcggagctcggtccaccacgggcctccagaggccccggggtccctggacgaccggccgagccctcccagc

SEQ ID NO: 190864 - DNA, 122 bp, Homo sapiens
atggctaaaagtatggaagaatctgctcagtggccctggataggggagaaaagggggtcccgttaatttgcaaatttggaattccagatactaaatatgttaagcttagtaggaagtagatt

SEQ ID NO: 190865 - DNA, 122 bp, Homo sapiens
ctgtccaccctgcgccccatgtccatgcgccccctgtccacccgctcactgtccaacccgcgccccatgtccacccgcctgctgcccaccccgcgcccccagtgcacccgcccagccccgag

SEQ ID NO: 190866 - DNA, 122 bp, Homo sapiens
tgaatgcagccctaaactccagtaagccctaaactctagcactccttctgccccgcccctcggaggaaacacaccccctttgctgagccgctagccaatcaggtgtctctcagccaagttgc

SEQ ID NO: 190867 - DNA, 122 bp, Homo sapiens
ctggaatctggagtgaaatggctggttacggatacgtgcgccagagcctcgtggtgatggcgctgctggtgattttaactcttctgtgcttccctcccgctgaatttccccaaatttctgaa

SEQ ID NO: 190868 - DNA, 122 bp, Homo sapiens
acagttccccagatgctgctccagtgcctccgacctctctccgtcacctttctacagccccgtcactgctacctggtgtttcattttgtggatgccctggagcatatgtttttacatttaca

SEQ ID NO: 190869 - DNA, 122 bp, Homo sapiens
ggagcctacctggatgacgaagtctcggccccggaagtcggcgatggtcctgggcagcctcgtccggccccagacgaagcgaaggaaaagagagcgctctgtgttggagaaggactccatca

SEQ ID NO: 190870 - DNA, 122 bp, Homo sapiens
cccgtgcgctccggctgcgccgcagggaccgcggacagcttcgccaaggcactgcctgcccgcccggctccgggtccccgctcccactcccagccgcgtggcccaacctctcctgggcttca

SEQ ID NO: 190871 - DNA, 122 bp, Homo sapiens
cagaaggactggtacccggcagaggcgatgagacaggccgctgatgatgcacaggacttgcggtacatgatccctgtaacacagacccaaaggagctgagttaacgtgcaccggcaaaagaa

SEQ ID NO: 190872 - DNA, 122 bp, Homo sapiens
tcgcattgcataccttcggggtacaagtcagtttctacactgggtgctgatccttgcacgcgccctttctaccatctcacggtggggatggccgcagggctgtgcacccagaagaagatggc

SEQ ID NO: 190873 - DNA, 122 bp, Homo sapiens
aagcactctccacccaacagccctgctgggcagtcccgaatacccgttattttgggggcacgcacgggctcgtgctctgagttcctggaaggaggcctcggggagtgacgagaaaccagggg

SEQ ID NO: 190874 - DNA, 122 bp, Homo sapiens
cccgccaattcatgtaaaatcaaatcaggccaccaactgaactactctcagggccatcaacgataaagtctgggatttattccaggtcccttaacaaagcattgcaaaggacatctccagat

SEQ ID NO: 190875 - DNA, 122 bp, Homo sapiens
gcctggatagccgcgtggtgctccgtgccttcagggccataaagagcactttcatttccacgtctctttatcttatgaagagtgagatgaatgttggggaccccaagcgcggtgtgaggatc

SEQ ID NO: 190876 - DNA, 122 bp, Homo sapiens
taccaaaagcacctcccgctggaaaggctgcaggaatctcgaggcaaagacagaggcaaacgcaacgctgggaagagcgaggggtgctgccatctgcaaaagcagagacgcgtctcccttcg

SEQ ID NO: 190877 - DNA, 122 bp, Homo sapiens
gctgatagtgacatcagtcagaacaaatgtaccaaagttcagagagctgtttactaggcacgactgcgaaggcaagggggcaccagctcaggactgcatctgcctgccatttcccttccact

SEQ ID NO: 190878 - DNA, 122 bp, Homo sapiens
gcggcctgacggtggcggcagatggcggggttgctgtcgctgctgtggcctttcttccagcgcttcaacttagctgagacaccagaaggcaactttcccgagcgacccatgttgactaagcc

SEQ ID NO: 190879 - DNA, 122 bp, Homo sapiens
aagaggacactggaattaggagacctcgttctccactgatgagctctgtccccttggacacgtgatatttaccctctccaggtctgtttcctcatctccaatagagagttaataataacctc

SEQ ID NO: 190880 - DNA, 122 bp, Homo sapiens
actccagtctcacctcggcttgcaatggaccccaactgctcctgcgaggctggtaaggaacgcccgggttctgtgccttaggatgccaaattcccagacaccatagagagtgtccctgggtt

SEQ ID NO: 190881 - DNA, 122 bp, Homo sapiens
aacccaaagcaaaacgttacatccaatggctgctggataagacactgctgtacaaagtcccgcgcgagaccgccttggcgctgccccagcctgtctctgggggttatagaggaaggcgtggg

SEQ ID NO: 190882 - DNA, 122 bp, Homo sapiens
ctcagtttctgcatagatgggattgggtagagaaaaaccaatgccctgagatacagatgccggacgtcagctgggctcattcatgcagcaattggtttgctcttgcgcaccagccttaggta

SEQ ID NO: 190883 - DNA, 122 bp, Homo sapiens
ggttccaggacccccttcgttaccaaaatctaaggatcctcaaaggccctgatatgaaatcgcataatatttgcatataatctgcgcacatcctcccatatactttgaatcaactctagatt

SEQ ID NO: 190884 - DNA, 122 bp, Homo sapiens
agcactagggggatgaaaaggcgttaagtgcaacccacagggcgacatggaaatataacacgaagctggccgcttgcccttcattgtcagctctcttaaatttatgcccggtaggtgagagc

SEQ ID NO: 190885 - DNA, 122 bp, Homo sapiens
accggcccgggtgttcgggtttccgagagtgccaggtcgacctcctgagggaccaatgtccggccagataaagtgccgactggcatgcaaacaaatgaccagattcaacgaaagttcactct

SEQ ID NO: 190886 - DNA, 122 bp, Homo sapiens
cgctgggcagggccgagcggggtggggccgagcgagctggggcggagctccgcctcctgccggtcaggtggttccagggccgccatgttgcggagactctcagagatcctagcccgctgctc

SEQ ID NO: 190887 - DNA, 122 bp, Homo sapiens
ctgccaccggcaccacctggagccgaccatccttatccttgtactggaccacgaaggagtcgaattcgccctcagggaccgtccacgagaggcccacggagtcaggggtcgcatctgtcaca

SEQ ID NO: 190888 - DNA, 122 bp, Homo sapiens
gcttgtagagctccttctgccagtcctccagcttgccccactcctgctcggagaaatacacggccacatcatcaaaggtcacgggcacctggaaccacaagtgtcacactcgctcacccaca

SEQ ID NO: 190889 - DNA, 122 bp, Homo sapiens
gaaaatagagcattaggctgactccaaacagaaaaactcacttgaagtaaaggaccttgtcggtattgcaattctttgcgtaatctcattaagtttcacccatattgccaacaagaaacact

SEQ ID NO: 190890 - DNA, 122 bp, Homo sapiens
tctggccgcgacagcaggttctgttcgcaggcaaagtgccggaggctgcagccaggaccccgagggctggaccctgttccattttcagcacggattttggcgtcagtatgcgtctcctcctc

SEQ ID NO: 190891 - DNA, 122 bp, Homo sapiens
attttaaaaatgtgtatgttactggatagctttagagtaaggttgggtcagtttggcccccgctgagtgggggtacctcttctcccccatgcttaccatcaccagctgttgttagacctttt

SEQ ID NO: 190892 - DNA, 122 bp, Homo sapiens
cccactcagcatgtggctgcagcccttcaccctgccttgctctcatttcttgtttatagccggagtgttgatatagtcagcaggatgcggtcatcagccaagggtcagagggcctatacagt

SEQ ID NO: 190893 - DNA, 122 bp, Homo sapiens
gataccccttaaatttttagcactttccaaaccaatgtggtcacaaccaatgctaacaggcgtggtgtgaagtaggcaggcaaggtaataactatgcttattttatgaatgaggaaaagact

SEQ ID NO: 190894 - DNA, 122 bp, Homo sapiens
aaaaaaaaaaatcactaagaccgtaccaggcagacacacaggcggctggacgtcgagaggcgcacaccgacaggcaccagcatgccagcaggccaccgaccggcagaagcagaacgacacag

SEQ ID NO: 190895 - DNA, 122 bp, Homo sapiens
caggacatgctttacaccccagttccattcttcaccagattaggctaggccttccatgcacgacagggtatgtgtgctcataaaactggagttggtaaggataagttttaagaccagtaccc

SEQ ID NO: 190896 - DNA, 122 bp, Homo sapiens
cacgctcctcagccggcggggcagggtccacggagaggtagggtcccgccgccggctccccgccgtgctgctgcagccactccagcctgcgcacggccagctggcaggtctcggccacctgc

SEQ ID NO: 190897 - DNA, 122 bp, Homo sapiens
ctattgtaggccggaactacttcccccgctggccccgggaaagacacattttcagtgttccggaaggtcgctccgaggcctcaaaaccataatcgggtctcaacagactctgggactttata

SEQ ID NO: 190898 - DNA, 122 bp, Homo sapiens
aaagccctgccagtgagtggggcaaaggctggcccttgctcagcttgggttttctggctgcgggaatgcccccattaggcctggaggtcctggcagtgtgaaggaacaccctctaacccaga

SEQ ID NO: 190899 - DNA, 122 bp, Homo sapiens
tagggtcactcctcagggtcactcctcgtcctggggaccagattccaggcttcacaggaccggagaaggaggagcgcgtcctcccttcccaaagcgccagctcatttagatacaggtgcctg

SEQ ID NO: 190900 - DNA, 122 bp, Homo sapiens
atcaaaattaaaatatgaggtttgtaaatacaatggtaatagaaatttgacgttagcatacgaggctccccattgtttggaaccctggtttaaaagctagaatcaaaagaattttgtctaga

SEQ ID NO: 190901 - DNA, 122 bp, Homo sapiens
ataaggtcctgtcagtatcaagagactacagtaacctcaaacgagtagtgccactaaactcggatcctcaacattacttagcttctcttctgctcttgcaacaattcccagtgctgagtttc

SEQ ID NO: 190902 - DNA, 122 bp, Homo sapiens
agcgatcctcctgcctcggcctcccaaagtgcctagattacaggcatgagctaccacccccggccaggaattgccttagatattaactgcagaataaggtgttttaaaaattttcacattac

SEQ ID NO: 190903 - DNA, 122 bp, Homo sapiens
ataagctcatctcaccattgggaaaagcagctctggggagttaagtacccaaatcacccacggagccaacattacagtcctgagaatgagtgtgcatcttctgactcccaatccattactct

SEQ ID NO: 190904 - DNA, 122 bp, Homo sapiens
gccctagtttcctgtgtttcatgtattggcttttcatgtgaaactcgaggagagcttgtccgttgtcagaagctgttttttgaacgtctctacacagtccaggcaggaaatagaagcactca

SEQ ID NO: 190905 - DNA, 122 bp, Homo sapiens
agtgacaattagagctctgggggagaatgaaggagcaggaagaggcagacgaggaggagccggggctgccaggtgcagtagcccaggttgcgcactgctcaactttgctgtaggattcacat

SEQ ID NO: 190906 - DNA, 122 bp, Homo sapiens
ggttgaggtggttcaggctgtctttgaggggtacaatggcggcccggctggcccgagggtcgacctcgctgacttccaaggcgtccagcccagaggcccccagagcttcctcgatccgtggc

SEQ ID NO: 190907 - DNA, 122 bp, Homo sapiens
gagggcaagggcccgatgcagcgctgggcgccgttatctcctcccgagcgggggccgctccgagttcgggaggaatgaatgaacgactgaaccaatgagcctttgtggacgcggcccgccgt

SEQ ID NO: 190908 - DNA, 122 bp, Homo sapiens
agggaaggcttgactggggcaggtggagatgtgccaatgtgtcacatcccaggaggacgccggagactactgagaaccacacattcacaggacccgggaagcgggagcgagggagagtggat

SEQ ID NO: 190909 - DNA, 122 bp, Homo sapiens
gtgtaatttttaggtcaccgcgccatgggaacacgctaccaggggaagggagctgtgagacgcgcagggaggctccagacaggctggcctgggacaccagccactgctcttccatgacatgg

SEQ ID NO: 190910 - DNA, 122 bp, Homo sapiens
tgggccgagggccccgtttcctgaacagcaattggtggacggcaacaaagccttagcaaccggctcctagtgacccgcggggcgcctggtaactggggctgctgcggagaaaggagcggggc

SEQ ID NO: 190911 - DNA, 122 bp, Homo sapiens
ggatcctattccaaaacatgggcaaagagccatttggtgggcactgctggcctagtggtgcgtgaggagttggggaaacagaggagcatcatgtcttagcttcacacgcagactttccaggg

SEQ ID NO: 190912 - DNA, 122 bp, Homo sapiens
caggctcagctcaccaacacctttgaaggtgcaacagcatctcactctgcaggggaagtgcgaaaagtcagatgcagttcacactctcatgccgctagaacccggtagaagttgccagggca

SEQ ID NO: 190913 - DNA, 122 bp, Homo sapiens
tggctggctgagctacagctcccgcagcgcgcccaggagtgcgccggagattcggaaacccgcagagacttctcaagtcagcaggaacttggaaaccgctgttccctccaaacggcttcaaa

SEQ ID NO: 190914 - DNA, 122 bp, Homo sapiens
tgtagttcccgcataagccacagagagagcccgcgtacgccgccggcacgcgcaggcgcacgaagctgtccccgtcgaaagccagcgagagccctgaggttgtggtcaccaccacgtcggcg

SEQ ID NO: 190915 - DNA, 122 bp, Homo sapiens
tctgggcttgggcaggtgcctcagccaggaaggccagggcagcgtcagtgacaacgttggcgtgttggcacagcaccaggcccgtttccagcacctgcaggaagttggctgcgtcgatgtcc

SEQ ID NO: 190916 - DNA, 122 bp, Homo sapiens
tccgagctaagaaaggcccgggcccagcgcagggagggcagaggagggggcacagtctcccgccggcctcggccaagccaggtcactcggtgacccacccaggcagctggtcttcggaaccc

SEQ ID NO: 190917 - DNA, 122 bp, Homo sapiens
agccacaacctttaacaacatacctccctcccatctgtcagtctatgagccagaagaaggcgagtgcccttgccctacctagtcaccctcgaggctgagtgcccagggacagtgggaatcag

SEQ ID NO: 190918 - DNA, 122 bp, Homo sapiens
atttcaggagtgaaggatcacagaatgcttgctataaatagtggtagttgatcggcaggacggccacacgcagctgcagctggtggatctcagacctgagtgtgactcagaatcacctggag

SEQ ID NO: 190919 - DNA, 122 bp, Homo sapiens
ctgcgggtcacagctctggaggttgaagagaagaagccgcatcctgttaactgtcctcggcgttggaggcagagaacaacgtccacctgagaatcgcttccgcgcgtagtgactccagccgc

SEQ ID NO: 190920 - DNA, 122 bp, Homo sapiens
aagcggctggacgtcgagaggaacacacattagcgaaagaacacacaggcggctggacaccgagagaagcacatgggctggagagcacagccggcaggccattgatcagcggaaccacgcgg

SEQ ID NO: 190921 - DNA, 122 bp, Homo sapiens
ctcccaaagactgggcgcttactagttaggggaggcagctgtcccggagggtgtccagctcggatggctgactgctctttcacttgtcgttaacttccacccagtagtcttagtctcccctt

SEQ ID NO: 190922 - DNA, 122 bp, Homo sapiens
tggaggtcatttgacctgccaggcgcccttcgcaaagagtgacgaggccccgtgggagaacggactcctcagactctccccaatagcggaagtcgatcttctgaaggatggccaatctgctc

SEQ ID NO: 190923 - DNA, 122 bp, Homo sapiens
ggtccgtgacagccagaagctgggagcagcccccgccactgccgggcgggggttcgcacccgccacagggtactgcagacccacatgctcgctccaaccaacacagagcctgacgccccggc

SEQ ID NO: 190924 - DNA, 122 bp, Homo sapiens
gccaggagttcaagtccagcctgggaaacacttcgtcagccccacctgacccgctgcccccgctgattctgctatggacacgccagccctctgaccctgggtggcttctgtccagatccagt

SEQ ID NO: 190925 - DNA, 122 bp, Homo sapiens
tttgtgaaacacttctctacctcagcaaacagctctcagtgcacacacacatggggcggccgactccagaaatagggaagagcttgtttagggcctaggttttctgtctgaatacagaacac

SEQ ID NO: 190926 - DNA, 122 bp, Homo sapiens
aaaatgcttgaacggctcagtactttaaggttggggacaggtggctgggggtgtcactcacggaagcagaggaagagcgtgtccacacacatgccgaaaacgctgaagaagccgctggcgat

SEQ ID NO: 190927 - DNA, 122 bp, Homo sapiens
atctatatgatagggacaagccagactctacctccctggtggtcatggtctccgcttattcgggttcataaccttaaaggcccctcgcaccacctcagtgagccatttatgcctggcacagg

SEQ ID NO: 190928 - DNA, 122 bp, Homo sapiens
taattttcggggaaattcctccagttatttttctagctactacaggtcactgcaacaaagcgaggcacatgaattttttcatttcctggtgcatataaatgttatggttctggctgggcatg

SEQ ID NO: 190929 - DNA, 122 bp, Homo sapiens
gaacgcgctgcgcaggggatcctaggcttcctgggagtcacattaaaaagcaacgtgagacgggcggggttaattctgacggtgatgtgtcctctgaccacatatcgctaacgcaccatcat

SEQ ID NO: 190930 - DNA, 122 bp, Homo sapiens
tcacccactcaaccaaccacatatatcctcgtccctacccacgtactcaagtgtaacgtccgtatgcatatctatttgcggccacctcccaacctgtcatttactggtagtgcctctgacag

SEQ ID NO: 190931 - DNA, 122 bp, Homo sapiens
gtgggggaccggggtctgtttgcactgtaccccaaaaccaacaaggatggcttccgcagccgcctgcccgtccctgggccccggcggcgtaatccccgcaccacccaacacccattagctct

SEQ ID NO: 190932 - DNA, 122 bp, Homo sapiens
accccccaccccgccaccgccaccagacaccaccatcgctgtgtagtgtgggtttttattcgtgttcgtgtgtgtgtgtggacacattttccttttcggttgctctgtcctttggttcgtgc

SEQ ID NO: 190933 - DNA, 122 bp, Homo sapiens
ggctggcacagcttcccaagctaaaacagcagcactgctggtgcaggctccttaggcccccgaggctttctctttttccaaactagcctcgatttcttctctcccaacccttagaggcatct

SEQ ID NO: 190934 - DNA, 122 bp, Homo sapiens
actccttgcttgtcagaagtccagcattaccaggggtcttgcctggtttcaagtatttcccggtgcctttcctcgctctgtagtcaagtttctagccaggatttcttggctctgggaaagat

SEQ ID NO: 190935 - DNA, 122 bp, Homo sapiens
caaaagttattatattgaaccatatgaaaatgccaatatacggctgggtgcggtggctcacgcctgtaatcccagcactttggaaggccgaggcaggcggatcacgaggtcaggagattgaa

SEQ ID NO: 190936 - DNA, 122 bp, Homo sapiens
ccccaccaccaggcagcgttagtcacctcaaaattcaacccttggctgggcatggtggctcgcacctgtaatcccaacaccttgggaggttgaggcaggtggatcgcctaaggtcaggagtt

SEQ ID NO: 190937 - DNA, 122 bp, Homo sapiens
gccaggctggggtggggagagctgctggagggcggaggcatcacttaccaaccaggcacccgtagccggggctgctccgtgggcagcaggctgaagcggtccacctggagatagaactctgc

SEQ ID NO: 190938 - DNA, 122 bp, Homo sapiens
ggggagtgggctgcagggcccggaggaagcttttctaccgtcctccttcctcaggaagaacgcggctgggtggaagacaccggggcagtgggagcaggtgggcggagctgttcgggccccta

SEQ ID NO: 190939 - DNA, 122 bp, Homo sapiens
cctggggtccctgggcccacctggcatccaggaaacgggagcgcaggatcatcacagcctcgcaggtgctctgcttcagctgcatctggatggcgctgaactttcgatggatgatgctcacc

SEQ ID NO: 190940 - DNA, 122 bp, Homo sapiens
ccaagcgcaagtgggaggcggcccatgaggcggagcagttgagagcctacctggatggcacgtgcgtggagtggctccgcagatacctggagaacgggaaggagacgctgcagcgcacgggt

SEQ ID NO: 190941 - DNA, 122 bp, Homo sapiens
ccctcaaaaaaattaaaaccacctccgccatttactagaggccaaggcagggccgggacacgagaacgcgctccgggcggatgcgcgctccctttgtcccgcctcccagcggcccgctcatt

SEQ ID NO: 190942 - DNA, 122 bp, Homo sapiens
tgccctgtgcctgcgagccagccagccgtgctcacaaggagccttggagagggctgcgtccgcctctgtgcaagatgctgaaccagtgaagagggcacgctgggcagggggaggggctgcct

SEQ ID NO: 190943 - DNA, 122 bp, Homo sapiens
tgccaagagggctgctgtggggagggagccctggcccggcccaggccctgccttgatggccgtctgtccttagcagagccctgctctgcctcgctggctgtgtccacagatgtggctggatg

SEQ ID NO: 190944 - DNA, 122 bp, Homo sapiens
gccccgccgtgagctgcccgcatggccgggccgtgggccgaggctccagctcgggcctcacgggctgcagatgctgggccgaggctgctcagcggctgtcctgccccacacaggagtctctg

SEQ ID NO: 190945 - DNA, 122 bp, Homo sapiens
acttccatcctcttccttcccaaagagcagatcccaaggcatttactccttggtctgtctcgctttatctgtcgcccctcccagcgctgagagcctcccctggctgtcagcagcactgtgtc

SEQ ID NO: 190946 - DNA, 122 bp, Homo sapiens
ggcagctcccaggggactccaggagttggggaccgcagactaggccagctgcgcgctcgccgcctcgactccccgcttggccgccgcctgtccccgcccaggggcagggacgccggggttca

SEQ ID NO: 190947 - DNA, 122 bp, Homo sapiens
ttctcctctgaaaaagtcttaattcaagtatgaatgtatttgagactcctatatgctagacggtgtgcggggcacctgggatacccagcggaataataaaagattcatgccttccaggaggg

SEQ ID NO: 190948 - DNA, 122 bp, Homo sapiens
ggtagcctcttctgtattgctcagctcacatctgactttaatttggcctggccagagcaacgctcaccgcccagagctcacaaagatctgccacaggagagaagccgctggaaagattgtct

SEQ ID NO: 190949 - DNA, 122 bp, Homo sapiens
acacctgcagttctttaattaagctctagagatgagacatcccctaccctgtgtcccctacggagtagtgaccagacgagttaatttgccttgagtcgttaacctgagaggaccattagctc

SEQ ID NO: 190950 - DNA, 122 bp, Homo sapiens
tttcacctagatgcattttctcaacaggctgtattttcagactacacctgtcccacctgccgggatgcgcagcgggaccagcgctgcccgcgcctctcaccgcactgcatccgcctcccgcc

SEQ ID NO: 190951 - DNA, 122 bp, Homo sapiens
gctttccacgtccccctgacccaaggcgcatcctgtactgttgtacttcttatttctcaccggatgttggggcttcctgcaatgaatagttctctgactcctgctgccttcatcacggtgct

SEQ ID NO: 190952 - DNA, 122 bp, Homo sapiens
taagctcaatatgtggctcctttgggtgttcccgagcgtgacgcaataacaaaacaatggcgtcatcgtgaggtcactgcagaacagggggaagggggtggggaagggccctccttctacgg

SEQ ID NO: 190953 - DNA, 122 bp, Homo sapiens
gcgccactgctgcagcatctgtggcaaggcctttcggacagctgcccggctggagggccacgggcgggtccatgcaccccgggaggggcctttcacctgcccccattgtccccgccacttcc

SEQ ID NO: 190954 - DNA, 122 bp, Homo sapiens
tattaacctaactcgttagtgaacactcattagctcaattcaagctccagaacatagtttcggaatacagcacccgttctgcctggccgactgccctggtcagcacaggcactcgctctcca

SEQ ID NO: 190955 - DNA, 122 bp, Homo sapiens
aaaataccgacagggtcattctcccgcagcggctgcagagccctcggaggtcgggtaagacgccacctaaagacagggccatgaggggtcagcaggactttatctgataaacaccggaaaga

SEQ ID NO: 190956 - DNA, 122 bp, Homo sapiens
taagggggtgggtgtgtgggaggcccgggagagactgtccaacggcttcgggacaacgcccgtctgataagacttttagtgctagggaacagctgctaagggttttttaataatgtgaaaag

SEQ ID NO: 190957 - DNA, 122 bp, Homo sapiens
tagtatctggatgacaaaaccgtattgtccttcttcatcttctttgccaagatcatggcccgaggccaatggggcagcatgcaagaaagttgttattgacaagggagtgaagaaaggaagag

SEQ ID NO: 190958 - DNA, 122 bp, Homo sapiens
cacagggtcacctcacgaagcaagtgtatgctggcaccaaagaactgagcagaaggtcaccgagaatacatacttgcgtctgcacctgacacacacatttcataggtaaagcacaacagaaa

SEQ ID NO: 190959 - DNA, 122 bp, Homo sapiens
cctaacctgctcgaacctgttgtgcagtagaggccgccgagtccctttaaggccccgccgcgcctgcgccttgggttctcctgacgcggcccatccggaccctgaggagccagtgggctgca

SEQ ID NO: 190960 - DNA, 122 bp, Homo sapiens
cgtgatccgcctgcctcagcctcccaaagtgctgggattacaggcctgagccacctcgcccggcctagtctgttaatttaaaaacaaccatagactgggcacagtggctcatgcctgtaatc

SEQ ID NO: 190961 - DNA, 122 bp, Homo sapiens
cgccggtgggtggagcttcgttgcacgaaatgaacacccagtagtgatctgcccggctaacgctggggctttgcggacctcaggtcttaggcaggagcttgcgggcctaaaatgcattagct

SEQ ID NO: 190962 - DNA, 122 bp, Homo sapiens
acagatactctctagtcttcctgggagtcctgaaaagtgtcccggaagagagctccctgccgcatcaggacccgccatgggctacccttcttcttgtgaggacacttggcttatttattctc

SEQ ID NO: 190963 - DNA, 122 bp, Homo sapiens
accatcttttcgagctgcgctggatacagggaagcctatggatcgctgggcggagagctgcggtttgggcaggtttctctccgcccttgggcttggggtcggacagggacgttcaaggagag

SEQ ID NO: 190964 - DNA, 122 bp, Homo sapiens
gagaggtgggcaaggacgagggcgagggcacggccgggtcctggctggccaaacgaggctcgcggaagcagcagccgccgcctgaccgcaggtaccgcgccccggggccgcccctccgcccg

SEQ ID NO: 190965 - DNA, 122 bp, Homo sapiens
ccccaccccatcccaattcccaagaaacccagatgtccgcaatccgcgccccaccccctccgccttacctgtttatacaagagttaaggagcctcccgcatttcagtggagcgctaagcctg

SEQ ID NO: 190966 - DNA, 122 bp, Homo sapiens
gggcatggtcgctatccagtgcatctacgcgctggtgtgcctggtggggctggtgggcaacgccctggtcatcttcgtgatccttcgctacgccaagatgaagacggctaccaacatctacc

SEQ ID NO: 190967 - DNA, 122 bp, Homo sapiens
cgagtagaggggtcgcccgcgggcggtctctcctgggctgtcccgttgttccgagttccccgtccctgttcgcctccctgatagatcagtttctgggggcaggaaccccaatgctcgctgca

SEQ ID NO: 190968 - DNA, 122 bp, Homo sapiens
acttggacttttatggtcctgtttctcattcactacttgggtataggtggttgcctataccgaagatcatggattcatatgtccaaaacatttttatgttggtttctcaggttagggtttcc

SEQ ID NO: 190969 - DNA, 122 bp, Homo sapiens
ccagaaccgcttccctttcagacttggttccgcccctcacgccagggtcccgccccaatccggcacccctagcccaggccccgccctggacccacctctctgcatagcaggcccctcccttt

SEQ ID NO: 190970 - DNA, 122 bp, Homo sapiens
tgtgagcgggggttgaggtggggctagaaagtcagtcccctacttttgctaactccaggacgctcccccatcccacgcttcgagaacgccccccgccccgccaccgccttggaggctgacct

SEQ ID NO: 190971 - DNA, 122 bp, Homo sapiens
gtgcggggatactgacgcgcgtccagacggccgcagggagccaggggcagcgcgtccgtccgagagagccccgagggctgccggcttacgcaccaggcttctaattagaacccgccgccgcg

SEQ ID NO: 190972 - DNA, 122 bp, Homo sapiens
gccctgagtgcccaggagtgccccacgttctgagaaggggccggccggagggaggggacccggcagggagatttcggttttgaggtttctaaatacattaaagttatttcttaagaacctgg

SEQ ID NO: 190973 - DNA, 122 bp, Homo sapiens
cggcgtgtgcctcccctgtgagggtgccctggcgggtgtgagcccggcgggctggagaaccgggtctcggcgccgcaggtgggtgaccgtcctccccctccttccctccgggggcagcctcc

SEQ ID NO: 190974 - DNA, 122 bp, Homo sapiens
gggaatgaggatcctgcccttgctgaccctcttttgagaagctgcacttcacaacgctcgcgggagtggaaactcctgaactgggaatccgaaagccatcctggacctacaaacctgtccac

SEQ ID NO: 190975 - DNA, 122 bp, Homo sapiens
ctgagcttacctggggcattaaggaggcctcatggccctggggctgaggggctccctggccgtccccaggagtggctctgctctccgcctggtgtcccccactctggtcagtcaagacccat

SEQ ID NO: 190976 - DNA, 122 bp, Homo sapiens
aggcagagccagggttggacccgggtcttctggctcccaactctggcaatttccactacccggagcggtctctgaggcaccgcgagatgtgtgaacattcaggggctttcgcccgccttatc

SEQ ID NO: 190977 - DNA, 122 bp, Homo sapiens
accacccctgaagccagtgaaggctctctcgcctcgccctctagcgttcgtctggagtagcgccaccccggcttcctggggacacagggttggcaccatggggcccaccagcgtcccgctgg

SEQ ID NO: 190978 - DNA, 122 bp, Homo sapiens
gggcgtcaaaagggggaccggccctgtgacccctcaccgggggccgtgggcccgagcccccggacttccctgtaaatgtcagaggcccctccgctgggatagggtcggtctgagggcgcagg

SEQ ID NO: 190979 - DNA, 122 bp, Homo sapiens
gcgcggggcccccgattggcggcctagccccgttacgcactcgcctcgcgttcacatacccggggagggcagtagaaaggtgatcaatcttcatcaggctacatttccaatcacctaaacaa

SEQ ID NO: 190980 - DNA, 122 bp, Homo sapiens
tcgtcctctcagtttcgtagttctgatgcaaactacccagcgtattatgaaagctggaatcgctaccagcgccatacttcctacccaccacgccgggccacacgggaggaaccccctggagc

SEQ ID NO: 190981 - DNA, 122 bp, Homo sapiens
tgggtacagcccgcgagcgctgggctctgggcaaggctccactcaactctgagcatctgtcgtccaagcaaggctgagtgatcctcactcgggagttggaagaaagggctgggggctgcatg

SEQ ID NO: 190982 - DNA, 122 bp, Homo sapiens
gaagtacccctttccaggctgagggctgcggggcggatggtccggggctcggggtttggacgggggctagggggtgcccggctggggtgggagtgagtggagcggggcctggggagtggcgg

SEQ ID NO: 190983 - DNA, 122 bp, Homo sapiens
ctgtccccaggccacaccccactccacgtggccgttatccacaaagatgtggagatggtccggctgctccgagatgctggagctgaccttgacaaaccggtgagccccaacctcggggaaga

SEQ ID NO: 190984 - DNA, 122 bp, Homo sapiens
gtcaggggctccgggtctcgggcccagccgccaggcgggctgctgcgggtgggtggggagcgccgcctagctggagccgaagcggggcgaggcgctagttgggagcctggaggttcccgccc

SEQ ID NO: 190985 - DNA, 122 bp, Homo sapiens
ctgcaggccacaagcccgggcttctgccctgcctcagcacccatagctgagggcaaattacgttgctttgccctgcctcagtttctccatttgcagtcagggatgaacacttcatgcgcagg

SEQ ID NO: 190986 - DNA, 122 bp, Homo sapiens
tccgggcagagctgaagccaggcagggacccaaagaagctgcccagggtctgcatgggggcggggggtgtgcaggatgagcaggccaagcctcggcaggaacgggtcagaggaagcatcgat

SEQ ID NO: 190987 - DNA, 122 bp, Homo sapiens
aatttccctctcttcatcaatcaacaaatatttatgaacatggtcctgtgctcagcctcccggccatgtgtatttggttactcattatcctgatttctctaagctgtctcctttcaagcaaa

SEQ ID NO: 190988 - DNA, 122 bp, Homo sapiens
acataaatcataggttcgatgcctatactttgggaacccacacataatgtgtggttaagtcgtgtcatgagaaaaataagagtcatttctacatacccagcattgttacacagggatgtgcc

SEQ ID NO: 190989 - DNA, 122 bp, Homo sapiens
tagcttctctctctactcgtcttttatccctagcgacttaaggatctggttagagtggcccgaatgcattcttccagggtgagggcagccgcagcacacaccagcctcagtccccagggtgg

SEQ ID NO: 190990 - DNA, 122 bp, Homo sapiens
cagggcttacagtgagcaacgagaggcataggatatagtggtatggactggggagaccatcgcataactcgagtagatttgagccaccaaaaacatgtatgaaaagtgacagaaaatgtgct

SEQ ID NO: 190991 - DNA, 122 bp, Homo sapiens
cagcaccgactactggctgtacctggaggagggtgtgattgtgccccagaaccagagcaccgagatcaagatgtccctgcactcaggcctctggcgggtctgcttccttgcaggtaagggtg

SEQ ID NO: 190992 - DNA, 122 bp, Homo sapiens
ataaccatattcaaggagctacatcttcttgtgggtgtacatttccattatacgtatgctcgtcccaaaaatgacacatacataaatatatgtaatgaatcacatatatttacacagatttt

SEQ ID NO: 190993 - DNA, 122 bp, Homo sapiens
tgtgcagatctctaactgaaacaccagatggcaccactgaccagcatttgactagccattcggccatggccctctgtgtacaggcagtaaagaaaactgataatctcagtagaaccaggggg

SEQ ID NO: 190994 - DNA, 122 bp, Homo sapiens
agtctctggctcacagtaagtgctacgtaagtgttaaatccaagttttaaaagatgattccgtccctgggtagagatgggtggagctggctcaagaccctatgaattctattgatttaccct

SEQ ID NO: 190995 - DNA, 122 bp, Homo sapiens
aacagagttgcatattagcaacagtaatggcctgtagccaagaactgcacacagtgtgggcgttaacgcaattgctgattaggtaggaaccaccacactcaaacatggaagcacttattttt

SEQ ID NO: 190996 - DNA, 122 bp, Homo sapiens
caacacacaggctcctatgcgaacccacacactgagggcatgtttcacaggggagagctccgttcttagctacagactcaggcaggcttggagtcactcctctctgcagtctgagctccgcg

SEQ ID NO: 190997 - DNA, 122 bp, Homo sapiens
gggttttgccctcacctccctccctgctggacggcatccttggtgggcagaggtgggcttcgggcagaacaagccgtgctgagctaggaccaggagtgctagtgccactgtttgtctatgga

SEQ ID NO: 190998 - DNA, 122 bp, Homo sapiens
attgggccgacgagaggtgggtaagtgcctgtgttctcacgctgggcgcctggaacaaaccggttccgaggccaggggcgggcggggcagggtgaggagccgccccactgcaggttgtcccc

SEQ ID NO: 190999 - DNA, 122 bp, Homo sapiens
atctgtagaagcgacgtcaaggtgtggttccctctgtaaggcggagctaaacggtgcattcgcccagcggggaagctagaactaaatgaccgctctgccgactggagccaacgagaatcggc

SEQ ID NO: 191000 - DNA, 122 bp, Homo sapiens
aaccgctgccaccacgaggaataacacagtaagttgtgtaagtggagaccacctctgggccgtttggggtaccttgagtgtgtcactatggggttaggcagtgactaatttaggcaggaagg

SEQ ID NO: 191001 - DNA, 122 bp, Homo sapiens
agggcccacccctctggggaaaaataagtcagaacattaaggaaacacaaggagtccacgcgtctctgcattccaagccgttgcacctgaactcccaacaataacagggcgctctgagacct

SEQ ID NO: 191002 - DNA, 122 bp, Homo sapiens
aaactctctttaaattagctagaaatgggctgggaacaacaggaacccaccatttaactacggcggctaatcccccaagtatggtaacatactgtactgcaccccctaaaagtgtgttacca

SEQ ID NO: 191003 - DNA, 122 bp, Homo sapiens
atctcggcggtggatgcagctgatggtcggagagccgggtgtgctgccctcgaaagaagccgcctgcctctcctggataagggggtgcagacttgggctgggctggggcagtgcctggtcca

SEQ ID NO: 191004 - DNA, 122 bp, Homo sapiens
ggccccgctttcacccaggatcagaccccacgagctgctcacagctcagggtcccactttcgcccaggatcagaccctgcgagctgctcgcggctcagggtcccactttcacccaggatcag

SEQ ID NO: 191005 - DNA, 122 bp, Homo sapiens
ccggataaggccagggctgccggacccgctgcgggcactggaggacccggggctagagggcgccgctctcgcccggctcgcgcctcggctcccggaaaagcagctctgtccgccgttcggct

SEQ ID NO: 191006 - DNA, 122 bp, Homo sapiens
ggctttgtccccaaattcccacttatacgaaatgatgaaatttcagggctgagcatccatcgtgggccccgggaaccggcctctcagcctctcttttcgcttctctctagtcataagcatta

SEQ ID NO: 191007 - DNA, 122 bp, Homo sapiens
gtgttccatgtctcgcggggaaactctggcccacaaatatggaaccacaggatgctgacacgcaaagcaagccgcctggaaaatgactcagacgctcccgccggctgagcgcagcccgcaga

SEQ ID NO: 191008 - DNA, 122 bp, Homo sapiens
ggtcagcgggggacacgggcggagctggggagaccgggcctgggataacttaactgggctcggggaggcagacagtagggccgggagactgggaagccagtgcgggggagggaagcgctaaa

SEQ ID NO: 191009 - DNA, 122 bp, Homo sapiens
ttaccatataggataataacaataacagcagcaatgatttcttaaacatttcctgtgtcccgagtactgtgctaagtgcttaactaacagaggatctctctctctgaggtgtgagactcaga

SEQ ID NO: 191010 - DNA, 122 bp, Homo sapiens
aaagcacgcttgatcccgtcacgaacacatttagtacgcatggaaccactacaggccctgcggacatgtttctttgttttggacaatctcctaagaactttaggtcttacagcacgaacccc

SEQ ID NO: 191011 - DNA, 122 bp, Homo sapiens
cagcgagccttggcttcgcctaggacattgcctcgctcagcaagccgacgccccgcccaacgagccgagcgctgcacagatttatatcctacgcagctgcctgcctgctcccgccccttctc

SEQ ID NO: 191012 - DNA, 122 bp, Homo sapiens
gggtggcatggcacccaccatcggtgccactgatgtaaagtccaggtacagagcacaacccgtgcacatatttgggggcttggccatgcttggctgcaggggattgaggagggattgggcct

SEQ ID NO: 191013 - DNA, 122 bp, Homo sapiens
tgccatcgaggttcaggaggcggcaggagtactgcacggcatacgtgtcgtagtctgtgtcgacgatccagtggtcatcatctgcaagccagaaagccaccatgccgatcaatgcctttccc

SEQ ID NO: 191014 - DNA, 122 bp, Homo sapiens
agactctgacctgtggcatcaggcttctcccagtacaggagggtgccatcccccagcatgcggcttctctgccattagcagccctgggcgggccgaccacactcgaggctgcggtgctacgg

SEQ ID NO: 191015 - DNA, 122 bp, Homo sapiens
ctctgactacctcgcgccagcaagacccaaactacggatcccgattgactccgcgcggcgcgtcacgctgtcagctccagccaatcggcttcagacaagtcggaggggagggagacgcagag

SEQ ID NO: 191016 - DNA, 122 bp, Homo sapiens
tcttcccttctgatctggatggattgttttcagttcagcctaggggaggtctggcttccccggggctttacctcgagactggatctctgcagtcaggcctctggtgagcccctgtggccggg

SEQ ID NO: 191017 - DNA, 122 bp, Homo sapiens
gctgagcgcgcgacccggcagggcggcgggtgtaggatccttctgcgcactggagaccctcgctgcttctgggtaagcgtggagttcccaggtgcaggggcttaagtcgtgacgagcgcagt

SEQ ID NO: 191018 - DNA, 122 bp, Homo sapiens
tccttaagtgcttcagagcattacaacttaggggaggaaagactggtgtgtcttctgagacgccctgagcagcacagacgactagaaatgcgtttacgctcggctgcttgggctgattgcct

SEQ ID NO: 191019 - DNA, 122 bp, Homo sapiens
ctcgctccagtgcaggtgacgtgtgaacgcaaaatgttcccaaaggcctgcatgcgtgtgcgtggtaggttacaaacaagctcagacactgtccgaggtactcatccctggaggacgagaaa

SEQ ID NO: 191020 - DNA, 122 bp, Homo sapiens
ctagatttggtaaacacaaggacagcataacttttagactgaatgtgggctgaaaagagacgtcctcgttgggagcagcctagttttgctttgttgccaaaacattgtaactatatattttg

SEQ ID NO: 191021 - DNA, 122 bp, Homo sapiens
ccagaggattctagtttcttgttcaactgatggtgtttagtgctaaggtggactatttatcgtagcaaataaatgatgcagattcaggcattttttgttgctttgttagaaataaactggcc

SEQ ID NO: 191022 - DNA, 122 bp, Homo sapiens
ggtgagtgttacagctcttaaggccgcgcatctggagttgtttgttcctcccagtgggctcgtggtctggctgggctcaggagtgaaactgcagatcttcgtggtgagtgttacagctcata

SEQ ID NO: 191023 - DNA, 122 bp, Homo sapiens
aagaccaggaagaactaaactcaattacactactgactgtggatgaacctggctgaagggcggaaattagtgtatccttggaaacgaattatttgccaagcctctcatcccacagacacccc

SEQ ID NO: 191024 - DNA, 122 bp, Homo sapiens
aaacgcttggccgaagccgtccatccccaatcctgagaacagagttgtctgtttctctttcgggggtcaggtcagcccaagtaagaggccaacaacctacctgggccgatacaaggcgacac

SEQ ID NO: 191025 - DNA, 122 bp, Homo sapiens
gctggtgtcgtttgcctaaatgtgttcaacctcgtcttcccatgagaccgacacggccaccgccaacatctgcggggacaatgacagaggaatgcctaatgagggcccggcgtggccccgcc

SEQ ID NO: 191026 - DNA, 122 bp, Homo sapiens
agaagaaaggagtggtcagccaggctgggagatggagccctgtaaggacagcaaggcccccgatgctggccaggacagtttccctggatcagtggggagggcagaggtcagagcagagcctg

SEQ ID NO: 191027 - DNA, 122 bp, Homo sapiens
aaaaattactcccccaccctcaaaaccccattcgaggcctggctgagactgccatggctccggcactggaggcgcccagcccaagacaggcctttccccatgagggttccagggtcaccccg

SEQ ID NO: 191028 - DNA, 122 bp, Homo sapiens
gaggccccgggactcagacgtggccgcttcgcagaacgacggggtcctaagtggatctggcggtcgcgtcccgctggcaccccggctctgactgtcgccctccggctcccaccgcagcgccg

SEQ ID NO: 191029 - DNA, 122 bp, Homo sapiens
ggaaatctcgggaaataggcaataactcgagctttggcaacgtcccccagcctagggaggcgctaacgcaaggtatctttccactgaagctgccctttgcctaccctcagccatcgctagca

SEQ ID NO: 191030 - DNA, 122 bp, Homo sapiens
cggtgagtttgtctgcgttcctttccatggactgtgcaactgcactgatatagccgagaacggtctccagcaacctgaaacacagaggctcgctcagcaaacggcagctgaaggcactcaga

SEQ ID NO: 191031 - DNA, 122 bp, Homo sapiens
aatgggaggaggctgagggcggtccagacaagccacatgctaacgaaggcaggaacgtggcggggtgaacagatgctaaggaaggcgggagcgcggcggggtgaacagatactgacgaaggc

SEQ ID NO: 191032 - DNA, 122 bp, Homo sapiens
gcacacggaggcaccggcgagaagggctgccccatgcccctcggcacatggaggcacgggcgagaagggctgccccacagtggctgctcaggtcacaggaggggccgacttgggcccatagg

SEQ ID NO: 191033 - DNA, 122 bp, Homo sapiens
caatgtctgggcatagtagatgctcactaaacggcccgtgttgtcaataattactaaatacgcgagggttcgggaaagaaagaggtgacaccgccccccacccagatacgggcctgggaacg

SEQ ID NO: 191034 - DNA, 122 bp, Homo sapiens
tgacggttcctgattggctccgaggagggggacagctccgggtgaagcctgaggagaatccgccccttctccagaaggaggaagaagggccctgctggtcacacaggacccagtctgcggtg

SEQ ID NO: 191035 - DNA, 122 bp, Homo sapiens
gaggagctctcggtcctggccgcgattttctgcaggccccacgagtgggaggtgctgagccgctcaggtgactacccgcgcgcgggagggacagggcgccctcaggggccacccgcgttcgc

SEQ ID NO: 191036 - DNA, 122 bp, Homo sapiens
cctctgcctgcccacgggggtttacccagcactttccttgatagcctctcagttttcccccgtgagtgtgagccaggctgtgaagtgggaggcccagggtatgtgggtaggggtattaagtg

SEQ ID NO: 191037 - DNA, 122 bp, Homo sapiens
ccccgtgggcctgaggcgccacgtgggcatgatccagggatgccctgggccccgtgcatgcgcggtggggacggtgaggaggcactttcgcccgtggttagggacctctgcctcaccgtttg

SEQ ID NO: 191038 - DNA, 122 bp, Homo sapiens
ggagccgcagaagccgctactgcagcgtgggcgacaatgctaggcgcccaggagaactaccgctcccaggttgcctttcgcgccccgagggctgctgggactctcggactcccgggccgaga

SEQ ID NO: 191039 - DNA, 122 bp, Homo sapiens
cacttagacgagtactgaacgtttcaggatggaggaacgtctgccggccagtttcccacccgtgtctcctggcttctgtccagagctaggggcattttactccagggccagggtctcctttg

SEQ ID NO: 191040 - DNA, 122 bp, Homo sapiens
ctcacatacgtgtcggggtctgggtacgtgcacatacgtgtaggggtctgtgtgcacatgcgtgtcgggctctgctgctgtctgcgcgctgcggccgctgggtgcgcgtgcgcatgcgcgct

SEQ ID NO: 191041 - DNA, 122 bp, Homo sapiens
gtgctgggcgtggtgagggcctgacctgctctgctcagcctgtatgataggaaaggtgcacgtgcgttcagacacgtagtgcacaccctccgccacctcctgcatgagagattcctgctcct

SEQ ID NO: 191042 - DNA, 122 bp, Homo sapiens
actgtggtttttatcaggaaagcctctttcaaagggcacagacacgaagctccgcggactcgttcatttcctccgttgacccacacacacctccccgccctcccctacacattcccaccgcc

SEQ ID NO: 191043 - DNA, 122 bp, Homo sapiens
acaaggttgtttctagtgtttggaaaacactactcaaacagattccaatatccagagattcggggccatgaagaacctgtgtgcccttggcagaggctgacctggagactgctggtgggcca

SEQ ID NO: 191044 - DNA, 122 bp, Homo sapiens
ctcaagcgatccacccatctcagcctcctgagtagctgggattacaggcacacaccaccacgcctggctcattgttgtattttttgtagaggcagggtctccccatgttgcccaggctggtc

SEQ ID NO: 191045 - DNA, 122 bp, Homo sapiens
gccgcgacgctctccgccccgagggcacgctcccggggctcttggccgcccctcgcccaccgggctctgggtagcccctcaccaggctcttggcggccacctagcccggcgcccggccccct

SEQ ID NO: 191046 - DNA, 122 bp, Homo sapiens
ctgcagaaaagggacagaggagcagccatcaactagcgcccctgcaggctcagcccgccccgtgcccctgcatcgcactgtcggcaggtgctccttccagggaaacgcagggctctgagagt

SEQ ID NO: 191047 - DNA, 122 bp, Homo sapiens
ctgctttctctggctcacggtggcgggggcagggtggctcctcagagcaagggaggtagtcgggtcgagggaacctggctctgcccaggtgccactgcccaaacccctgggccccatccatg

SEQ ID NO: 191048 - DNA, 122 bp, Homo sapiens
agcatgtatcagtactttattctcttctatggctgagaaatgttccactgcatagctgggcgcagtggctcaagccagtattcccagcactttgggaggctgaggcgggtggatcgcttgag

SEQ ID NO: 191049 - DNA, 122 bp, Homo sapiens
gcttttggtgttgagtgttggagtctgtgagtacagggtgaggtcacggggtccaatggtcgccttgcctgacgccctgtggggtgactcccacctccttggtcccctcctcctcaaccacc

SEQ ID NO: 191050 - DNA, 122 bp, Homo sapiens
ttcgaactgcaaaccaggtcgcgaataggacgtttcatgctgtagacggctttccctagacgccggcgaacaggactcctgtcatgatgacgctcttacccatctcaatgcccacctctccc

SEQ ID NO: 191051 - DNA, 122 bp, Homo sapiens
cataggtgaagcccgacaggagacataagactttgctggtatgtgtgggtgggagtataacggtcgagatctgtggaaagaaaggtcttaggaaccaggagctgaggcacgtgatgtgctga

SEQ ID NO: 191052 - DNA, 122 bp, Homo sapiens
ttttttccttaaccacaggaactaacctcagaaaacttttaactctaccagaacctagtgcgtgcagagcagaaaagttaaagtgagtgaaggaaaatgagtgtgtgtgtgtttttccaccc

SEQ ID NO: 191053 - DNA, 122 bp, Homo sapiens
tggcttttttgtttcaaatttcctttcttcaacctcacaccagagtgccccggtcaggctcgacttatccattaggaacagtgtgggcagtgaaggggaccctccaaactgtaaagctacaa

SEQ ID NO: 191054 - DNA, 122 bp, Homo sapiens
ggttgaactccaggcggcgcacctggcgggcaggccggctgttgttgagctcctggggggcggccgtgcctcccccgcccccgcgtgccccggcggtgccacccccgccgctgccgctgctg

SEQ ID NO: 191055 - DNA, 122 bp, Homo sapiens
tttcctttggcagcgtgtttccttttccgagtatgtgctgttaaactagattggccggttcgctttccatttcctgacacttgacatggaatgcctttgaccattggtgctctgacagagaa

SEQ ID NO: 191056 - DNA, 122 bp, Homo sapiens
ggctccgcctaccgcttcgtggacgcgcttgttgattggctccgaatgtcgaccaatggtcggcgaagcgggttgcttgccgcacggtcaatggccgcaaaccgggaggaaggcgggaagag

SEQ ID NO: 191057 - DNA, 122 bp, Homo sapiens
gccgccccccggccgcggggaggacatggccgcgcacaggccggtggaatgggtccaggccgtggtcagccgcttcgacgagcaggtaaccggcccgtggcgggcgggaggtgggagcggag

SEQ ID NO: 191058 - DNA, 122 bp, Homo sapiens
ggaaggagcgattgagggcttcaaggggacgggctggggtcaggctggagctgggctgcccgggactgagcgtctccgtgcggagagtggggggcgggggcagagtgcggggctaacagtcg

SEQ ID NO: 191059 - DNA, 122 bp, Homo sapiens
gtggctgacagcagggaggccatgtgctcagcctggccacgttgccgttacagtctgctccgtggctcctgtggcctgcccttgtctcgcagccaggcagggtcgtgtgtgggtgtggggct

SEQ ID NO: 191060 - DNA, 122 bp, Homo sapiens
ggaagaggtgtggggactctgagctgttctctctcctcctaaggggctggtctcaccctccgccagccacgggcccgggcggtgccagggtacctgcgccatgacgtcatgggaccgtcacc

SEQ ID NO: 191061 - DNA, 122 bp, Homo sapiens
cccatagtacgacctcatactcaatcacaaagcaaacctttggcccggcacagtggctcacgcttgtaatcccagcatattgggaggccaaggctggtggatcacctgaggttaggtgttca

SEQ ID NO: 191062 - DNA, 122 bp, Homo sapiens
agggccctcactccacccccttggaagcacggcctccaattgtgtctgaacatgcagcttcgggagaaccataccctgcaggccggcggtctcagagcccccaacagtagctgcccgctggg

SEQ ID NO: 191063 - DNA, 122 bp, Homo sapiens
tgtgtaggtacaccctgcagcttgcgcttttaactgcttgtggttgagtggcagcatgagcgagctctgcgtattccaacccggcgttaagaatccttcactagcttttcttcccgacgctg

SEQ ID NO: 191064 - DNA, 122 bp, Homo sapiens
gcacaggtgcccagcacagatgcacaactactgatcttaccgagacatttggatgcctggcgtccaaagtgcacggtatccagacacacagcacactttgtggctcgcatgttcagtcctac

SEQ ID NO: 191065 - DNA, 122 bp, Homo sapiens
ggccacaagggggctcccgagcccggctctgggtccctttgaggagggagccgcgggacccggctgtgagaccgggacctgccagtggtgccccgaccccccgaccccacaggaccctgcgc

SEQ ID NO: 191066 - DNA, 122 bp, Homo sapiens
aggccgggcatcagtggccccggtctcctgctcaccggagtctccctcctgctcctcctccgctgccaccccctctgcgtcctctcgctgggtgatcatgtcatcgggcaaggtggtggccg

SEQ ID NO: 191067 - DNA, 122 bp, Homo sapiens
ttcctcccagagagcaaacacaggtctagactcaatatcgtgtggagctatcgatgaccacgggtcacttccatctccagcactgcaggctgtgcgggctggtccaactggggtacggttga

SEQ ID NO: 191068 - DNA, 122 bp, Homo sapiens
cacctaagtgctctgcctcgcatgacttgctgcaggctgccacggattagagctatcgatcgctgcctgcagaagggtctcgctgtgcgaaaggaaggtgagcgctagagacagacagctca

SEQ ID NO: 191069 - DNA, 122 bp, Homo sapiens
gtccttggacaaagaaccccttgcctggtggtggctgctctacaggtgtgtcctgcttgacgcaataggcctggaaacaataggggtgtgtctagagtctctgctaattcaacattttccat

SEQ ID NO: 191070 - DNA, 122 bp, Homo sapiens
ggaaagggttgagctaccttaaccagggagctgctagtgagaaagtgatcaagcctcaagcggacctgggagactagattactagagaagtattattacagggcaccggttgggggcacagg

SEQ ID NO: 191071 - DNA, 122 bp, Homo sapiens
agcttgcagtgagccaagattgcgccactgcactccagcctgggcgacagagcgagactccgtctcaacaaaaaaagaattccaaaaggtaaaaggtgtattcgtgagctgtgggacaaatt

SEQ ID NO: 191072 - DNA, 122 bp, Homo sapiens
cagccttgggaattcgttcgcgtccccttccacctgggtccccttccccagtttgcgccccgtaacactcagccaaggacttcctgtgggtcccaggtcaggggccaaggggtcctggaccg

SEQ ID NO: 191073 - DNA, 122 bp, Homo sapiens
ccccaggccaaggatgggtcacatccagacccccagtgggacctcctccaacatcagtgacgacaggagactggcggctcggggaggggcaggactgctccctgttcaaccgggtggaggga

SEQ ID NO: 191074 - DNA, 122 bp, Homo sapiens
aacacagggcctcgggcagcgcttgtgtaactgccctgaattagttcttcccagccagggcgtgcccagcatggacctgggtccaggggaggtaaaggacctctattgcatgtctgtgtggg

SEQ ID NO: 191075 - DNA, 122 bp, Homo sapiens
gaaacgaataggcgcctgagatattctcccattttatgggctaacgctgctgtctgtcttcgggcggcggcctctgggaaatgtagttccggagaacacggagtccttctggggctaggttt

SEQ ID NO: 191076 - DNA, 122 bp, Homo sapiens
tgcttttgagatcttttcccacctcttctccctttgtcctcccagtgactctgagggaagcgctgagctgctacaccatgttccttctcaaccaaggagccagcactgagcagagaggagct

SEQ ID NO: 191077 - DNA, 122 bp, Homo sapiens
tgcctgccaggaggaggggaaagagggggtcaccagcccgcgcctctccatcgctccctccgactcctccaagctctgggcggaacttgattctgcctcaccggcttcaggcatcccaggac

SEQ ID NO: 191078 - DNA, 122 bp, Homo sapiens
aaggcgaggtcagtgcgaatggagggcgcccaacttcggtgttgcagttgactctgtgctcgggctctgccctccactagccctagagtcttgggcagcaggattgagaaatatatatattt

SEQ ID NO: 191079 - DNA, 122 bp, Homo sapiens
ctcagatcagccgtcctccccgcaggtggatggggacatcccgccccgggtgaagaaggacgctcacgagctcatcctggactttatccgctcacggcctccactgaagcaggtgctgcccc

SEQ ID NO: 191080 - DNA, 122 bp, Homo sapiens
cacccctctaagcacgcccaggaggtctcaagacacacttctgggggcagtcaaggtgggcgggttggtgggccaggcggacgggcctcccccgtcatcagctccagggccccacggagccc

SEQ ID NO: 191081 - DNA, 122 bp, Homo sapiens
cacaggcggccctggcagagcttggctagggcgtagcggggacccgccccacctgcgccgcgggatggtgcccagaggggacccctcccactggattcctctggggtccgcgaagcccgcgg

SEQ ID NO: 191082 - DNA, 122 bp, Homo sapiens
gcctttcccaggccagcgcctgggccctgacgccgaggcctccgggatttcccaattcctcgccctcggcctccccacggctcccaacaacgcagcaccccacccgagagccaggccttggt

SEQ ID NO: 191083 - DNA, 122 bp, Homo sapiens
aatgtagagatgtgggagccaggggcgtagtgatgcaaggatgcagggacccagggactacgacctcccaacccccggcccgcgccccgtactcacgcacggagtggcaggctacgagcttg

SEQ ID NO: 191084 - DNA, 122 bp, Homo sapiens
ctttccctgaaaggcaattggttagttgactcctctctttccctcttttactcagctgtacgctcctccagagcatggtggggtctgagtcttgggattctgagtgtttagcacagtgtgta

SEQ ID NO: 191085 - DNA, 122 bp, Homo sapiens
tcggccgaggtaaaagtgctgaaaccatgtgaataaaatacaggtgggttccgccagcttcgctcctgaacctacccgcgctcgggatccagaagctgcgccgggagagaggggctcaggcc

SEQ ID NO: 191086 - DNA, 122 bp, Homo sapiens
ctaccgttcccagagggcgccgctctgcaaattacccaatcagctctaagtacaaagcatcgcgagtctttagtgctctttggcgctataagcccgtgggaacgagcattggagaccctttt

SEQ ID NO: 191087 - DNA, 122 bp, Homo sapiens
gtggtaattatgactgacacaatgtcggcctgcgcagacatgtaaccaccgaacaaaacacgcagttagctaacaagagatcggtggaaggttttttgctggcactgtgtctcctgtctgac

SEQ ID NO: 191088 - DNA, 122 bp, Homo sapiens
cccaggcctccgtaacactcttcaggatgggagggacagatcacatttgtcttgaaaaaccgtcattctaacaaaagtgcatgtctgttcctgtcagttgctatggatttgaagaagttagc

SEQ ID NO: 191089 - DNA, 122 bp, Homo sapiens
atctggttcagagaggagattgacttaaagttaacacggctagtttagatagatacgggacgagggctcggtgttcttttcccggtatcccttagttgtaacctgaaagccttcaggaaatc

SEQ ID NO: 191090 - DNA, 122 bp, Homo sapiens
gaggccaaccaaccccatcactaaaatctggactctgtgctgattgttgtggactttttgcgtgttcatcctccctgcagacaactgaagattcattctctccagagggtagaagagaagat

SEQ ID NO: 191091 - DNA, 122 bp, Homo sapiens
tgcatccccgctgcaccacagcctgaggcagccacatgggtgggggtgtgtgtgtgcacgcgtgggtgtgtgtttgtaccaggaaactgaaagtgaaacaggccagtgacatttccagggct

SEQ ID NO: 191092 - DNA, 122 bp, Homo sapiens
tgagacagctccacacatagcactggactccagagttggtctgcacgcctacgacatcagcgtggtggtcatctactttgtcttcgtcattgctgtggggatctgggtaagtgggccctgag

SEQ ID NO: 191093 - DNA, 122 bp, Homo sapiens
ggctgtttctgctggcttggtcctgctgtcctggaccctagcatgtgtacagtaagcctgcggtggatgctgcctgttaaattttgtttgccagcttcctgggtggttaatggttagagggg

SEQ ID NO: 191094 - DNA, 122 bp, Homo sapiens
agggttgggtgactggactatgcatgggatggccttctcaaagcgggtggacaaccccaacggccggtccctccgtacctttccattttgcacagacaggaaccagcatggcagggggtgct

SEQ ID NO: 191095 - DNA, 122 bp, Homo sapiens
attagaccgctgattttctccggaagcgcgaagcactaggccgtttgaggatctccgctccgctttgcctgggaccaggaaaagacgcgagagacggaactcggcatcaggcactgcttggg

SEQ ID NO: 191096 - DNA, 122 bp, Homo sapiens
ctcaggtgatccgcctgcctcagcctcccaatgtgctgggattacagatgtgagccaccgcgctcggctaatttttattttttatagggatggggtgtcaatatgttgctcagtctggtctc

SEQ ID NO: 191097 - DNA, 122 bp, Homo sapiens
ggtcccccgcgccagacgcaaagtccgcgctgcgccccgggtggccccgccgccagcaagcgacctggcggctgtgtcctgccgcctcctccgcgaagcccctgattgcccagcccgctcag

SEQ ID NO: 191098 - DNA, 122 bp, Homo sapiens
aaaactcacctggggcatatttagagagaccggcccctctgaataggatctccactccgccggaaaggggcggaagccgaggaagaggatgcacacccgggtctttgctttccccctttttc

SEQ ID NO: 191099 - DNA, 122 bp, Homo sapiens
gtctgtcaggcgggcagtggatagctcgtcctctccctggggaagggagacgaggccatgcgagatgtccctggaggctccctcctgagtaaccgcacggggtgcacattcccgagaacacg

SEQ ID NO: 191100 - DNA, 122 bp, Homo sapiens
ggggagggggtggggagtcaaaggcggagtcacgggctccgccctctttctcctgcttggcgcgagcacaggcaccgcgtggttctcacaaccagcagctcggctcactgagacccggtggt

SEQ ID NO: 191101 - DNA, 122 bp, Homo sapiens
gttaggtgcaggcttagaaccctgcacttagctgtgctgctttgctctggctccggggttcgttttcatgtgctttttcggtttttaagattcatttgtgctcctgtccatgaacaccatca

SEQ ID NO: 191102 - DNA, 122 bp, Homo sapiens
cgtgatccgcccgcctcggcctcccaaagtgctgggattacaggcgtgagccaccgcgcccggcgaaaccatcattctgagtaaagtatcgcaaggacagaaaaccaaacaccgcatgttct

SEQ ID NO: 191103 - DNA, 122 bp, Homo sapiens
tggtccctcatctgccaccgaggccaaggaagacccagagacctgcctcaccagtgctgccgttgtgctgaaagacaaccatgaatgctgattttctgctgccgtattatacggcccagagt

SEQ ID NO: 191104 - DNA, 122 bp, Homo sapiens
ccgcctccggccgccgcggcccccggggagggaaccgacgccgcccgcaacccaagacggcgggaaaagcaagcagcgaagcctgggaagccccttcgagcaactgcagctccgccagcggc

SEQ ID NO: 191105 - DNA, 122 bp, Homo sapiens
ctgctccaatcattgccattcgcccagagtttagaaggggctgcagaataaggaagtgcacgggctggggagaaacagcatgttaggtaaggagaattccccttagacagaaagaggaaaca

SEQ ID NO: 191106 - DNA, 122 bp, Homo sapiens
agccgctccgtcgcttccttctcctggctgggattggcaaaggcaggcagctatggggggcggggcctcaggagggaggacaggctggtggacggggcctacggacacctcgccccgccccc

SEQ ID NO: 191107 - DNA, 122 bp, Homo sapiens
ggaggagcagatcttcgtggtcatcaaagacaaacctctgagctccatcaaggctgacatcgtgcacgccttcctgtcggtgaggccacagggcgctgggggaggcgggcagccctcccaac

SEQ ID NO: 191108 - DNA, 122 bp, Homo sapiens
aaaacaaggatcctgcagaggcagcaattattaacattcagttgcacatcttcccagacacgcttctgcttcttgaagaaggctcacactgtgtcttcttttgtaaactttttttttctttt

SEQ ID NO: 191109 - DNA, 122 bp, Homo sapiens
gggaagcaggccagggatccaaagccactggcacaagcctggccggcggcccatgaactccgcgccaagaccccagacctcgttggcccagcgtcccgccagctgcgcggcgggtttaccta

SEQ ID NO: 191110 - DNA, 122 bp, Homo sapiens
tttttaaccccaaggggaagtgatatagtttatagaaaacattaagtattcaagacaaaacgatacaaaactcattgaagaaaatctttgtggttgtgaggggtggcatatataaatgtgtc

SEQ ID NO: 191111 - DNA, 122 bp, Homo sapiens
cggcgagcgcggttgctatgacgcccaggtctccgtaggcacctgcagctagcagctgagcgcgtaggggccgagcgaccccgggacgctcgcggcaccctccgcaggaaaatttccgactt

SEQ ID NO: 191112 - DNA, 122 bp, Homo sapiens
ccgtccctcgggccccacgcagcagctcacgatggcttccagcacctcggccacctgcaacgccgccttcacagaccctgcagcggccatagaacttaacatatctgggccgcttccccttt

SEQ ID NO: 191113 - DNA, 122 bp, Homo sapiens
ttgcacagaagggggacatgggcaagttgtgtgagatgacacacagtgggcaccacttgccgttgggtagaggcaagaggcattgctgaacaggctcaacttggccaaggatggtgtctgat

SEQ ID NO: 191114 - DNA, 122 bp, Homo sapiens
cccgcgagcccaccctgcctaagcctgcgccacaacgccccgcctgcttaccttcctgaccgtgccctgcctgcttgcctacccctcgtggacacaccctgtagggaggcgttgctctgcga

SEQ ID NO: 191115 - DNA, 122 bp, Homo sapiens
gaacgacctcgtctaggactcctagagtgccttctattccagacaggtctataaccacctcgatgatatctacctcctcctccttgataataccctctaccccttcctctgtacccataagg

SEQ ID NO: 191116 - DNA, 122 bp, Homo sapiens
gacgtagtagctgcgtcaggagcgcgcccgcgtttctaaactttgtctggataaggcgcacgcttggcgacgtcgaaggtccgtccgcagttaaggaagcttttgcagccggacaggtcgcg

SEQ ID NO: 191117 - DNA, 122 bp, Homo sapiens
ggacagtggttatcttttgcctgttgatatcttaaagcagcagagtggtatagaaatttgcggttatgacagacccgggttaaaaatcacagctgtgccatttgctttgatattttgagcaa

SEQ ID NO: 191118 - DNA, 122 bp, Homo sapiens
caaaccacagtccctcgtctccgcaggcagaaacaggcaccgtccggaggttgcgcgggccgggaaaacctgccacaggttgctaagaccagctgtacccaggagacagcaggattcccagc

SEQ ID NO: 191119 - DNA, 122 bp, Homo sapiens
ctgggggaaaagaagagttagtgtctgtgcagagggagccccgagccacagccctctcagcgtctttccggggttggacacgccaccctctgcctcttctcgaaacagcacagagcgcgagg

SEQ ID NO: 191120 - DNA, 122 bp, Homo sapiens
cgggttgaggggcggggatatgcaaatatggtttgaaaagccggcgggaaatccgagtttcgcgggaggaccttggcgcgtaaaccgtatcccttcattcattgtcagcagcagcttcctgg

SEQ ID NO: 191121 - DNA, 122 bp, Homo sapiens
agaggaacaccatgccaacatgtacagaagtaacttacttagtcctggcaagctctcagccgagcttcattgttggagaatcaagtggaaacacataagggaagatataaagcttccattca

SEQ ID NO: 191122 - DNA, 122 bp, Homo sapiens
tggagaagggaagacagcatttaacaagtcctccagattagtatagccaagtttctccttcgagcttcaagactacatttcagtttccatctcagacataacccaaaatgtaagctcaggct

SEQ ID NO: 191123 - DNA, 122 bp, Homo sapiens
gaagccaactcctgccagcaccagaagcaggaccacaccgacagccacgccgccaatcaccgccaagttgccagatccctccggggctggtggaagaaatcagctgatgacaagggagttcc

SEQ ID NO: 191124 - DNA, 122 bp, Homo sapiens
gaaaggcagcccggcgtgtctgagtctgccttaggcagctctgggcgcaggccccctgctcgcaaacaccccagggggcgggagcttgccggaccgcaggcgacagtgaccgccgcgtctca

SEQ ID NO: 191125 - DNA, 122 bp, Homo sapiens
attccactactagcctggcttggttgcccgctaaccagaaacttctaccttcagtgctgccgtgagtgaatgctgttcattcccttaaatgtccctgagcactcactatgtgctaggcaccc

SEQ ID NO: 191126 - DNA, 122 bp, Homo sapiens
ggatgctgtccgaggtagctgatgccctagggccagtgagtcaggaaggtgttctgaatccgagcgggaagacggggtctggattcggccccaagtgttaatagtagggcttgagggttata

SEQ ID NO: 191127 - DNA, 122 bp, Homo sapiens
ccctggctcccaggctcttatttctatgatattaagtggcctgcaatctctctggaaacacgaacccctttcttttggtcatgcagagagagagtgacccagaatgtacatatagtatatga

SEQ ID NO: 191128 - DNA, 122 bp, Homo sapiens
caaacaaaacaaacaaaaaaccacaaaagcaaaatccagttgcctgagatcggagcttcccgcaggattcgcgcagagcgaggagcggggaggacgccgtttgcgggaggcgggggccggga

SEQ ID NO: 191129 - DNA, 122 bp, Homo sapiens
cttggtggttatctccgtaataataccctcattctataattttttgatgtaccaactttacgcattgtgattgacttcctactgtgagagagcgtgagttagctctcttatgtcaccaccaa

SEQ ID NO: 191130 - DNA, 122 bp, Homo sapiens
gcaggtggggaacctgtggcgcctacaacaagcaacacgtggaattgaatgttgaagagccgcgcggggccgcggagtgcgcgtgcgcgcgccgccgctgctgcccgggcccgcctggagcc

SEQ ID NO: 191131 - DNA, 122 bp, Homo sapiens
cggggccgacagtaagtgcggtgcgggctccggtgcgcgggcaggactcaggggcagggacgccccaggggcgactggccgggcggggtgcccacctctcgcgcgtgggcgcctccgggagt

SEQ ID NO: 191132 - DNA, 122 bp, Homo sapiens
tccacacccttctctctggtcccatcccttctgctgccaagccccagcgttcctccggctcggcctggtcagcttgagcctcattttgttcgcgtgcccctgggctgggaaaggagtgtgtg

SEQ ID NO: 191133 - DNA, 122 bp, Homo sapiens
cctcaccgccctgcccggaggcgccagccgcactccttggcttcctttcctagatagtgacgtccaccaaccttggaggtgccttttcaaaacacccgggaggccgtgcctcagcattctgt

SEQ ID NO: 191134 - DNA, 122 bp, Homo sapiens
agtcggctctacaggacgcgctcatctcaaacccagagctcaggcttttagggcagagagcgagagaaaggcttgctttacagaaagggaaactgaggtccaaggaataggattgcctgccg

SEQ ID NO: 191135 - DNA, 122 bp, Homo sapiens
agtagatggtagaataaacagtctaaagctatattgctttaaatgtggtctcaagaccaccgacattagaacttgttaaattctggggaactcgctaaaatgaagattaatgggccccacat

SEQ ID NO: 191136 - DNA, 122 bp, Homo sapiens
agcattaccacatctattgagcaagaagttggtattgtacacattttagaaatgtgaaaccggtacacacagagaataactttacagaggcagtcatctaataaatgctggatccaagactt

SEQ ID NO: 191137 - DNA, 122 bp, Homo sapiens
agaggctcctgcgatggccccggagtgagtcccccagaggagccggattagggctggaggcggccgagtcccccgagaggcccctcccgacattcccgcccccgcgcgccgctccccgggtc

SEQ ID NO: 191138 - DNA, 122 bp, Homo sapiens
gaggcctggggtggcggcggcgaggtcctgggagacgtgggggcggggctgtgtgggctccggccgctttgcatgccgcgttcatgattaatttcccaccgaggcttgcagaacctcagctc

SEQ ID NO: 191139 - DNA, 122 bp, Homo sapiens
gtcacgcatcccttacatatccccagtcccaggatggctcggtggccgtaagaagtgggacggcctattaggatcccagggttggtcctggcttccccaggacgaagcacaacggccactgc

SEQ ID NO: 191140 - DNA, 122 bp, Homo sapiens
tttgttctcaaaatcgaagggtgctttccacccttggtcttggagtctcaccccaaaagccgcgctcacgcgtggttttccttaatttgcgtgcttttcccactggctttgatatgctgtgg

SEQ ID NO: 191141 - DNA, 122 bp, Homo sapiens
cggggggtgcagccacctgtgcttcttcacaccccacgcaacccggtgtggctgccccatcggcctggagctgctgagtgacatgaagacctgcatcgtgcctgaggccttcttggtcttca

SEQ ID NO: 191142 - DNA, 122 bp, Homo sapiens
tcgaagggctgagtggctgccagatccagcggggtgggggcgggggcggacagggtgtcccgccccggcccctcctcaccgggctgagagggggagggagacgcggaaacctgggttcttcc

SEQ ID NO: 191143 - DNA, 122 bp, Homo sapiens
cgttcggcgtcgggagctccagggctggccgtgggtgctgcgccctgtctgttgggatcacgaagctgcacctctgggtccgctgttgtatttggaaattagcagcagcattttgatcattt

SEQ ID NO: 191144 - DNA, 122 bp, Homo sapiens
aggagcagagctggtcccagggccactgctgggagcaactgagcagagggctctgctagtcgggttccctcccaggccagcccagggggcgggccaacagtgcaccgcctccttcccggagc

SEQ ID NO: 191145 - DNA, 122 bp, Homo sapiens
tcatgtagtaaaaacatgttggaatgtatattcccactcaagcagtcaagttccaatgtccgcactcttaaacactatgctctatactatgtgtggagatcagcatttgataagtattcttt

SEQ ID NO: 191146 - DNA, 122 bp, Homo sapiens
actcatttgtgcaacaaatatttgccgagtgcttgctgtgtacaaggtcctgccccagggcgggagacagagccatgaccaaagcaaacagaatcctgccccatcgtccttacttccagagg

SEQ ID NO: 191147 - DNA, 122 bp, Homo sapiens
cggctgccgggcaaaaacctcatttatttccttccttcccgagtgagctcacttcctccccgcgccgctcccttccgtcggccggaacccgctcctgggccgcgcggctgcagccgggagcg

SEQ ID NO: 191148 - DNA, 122 bp, Homo sapiens
ccggatcccagaacagccttgctctcctcttcgggagcgcaagccaggggccgggatggacgctcgtagcccgtgcctggtgtaaacacaccgagcccccttgtccctcgagctctcccgct

SEQ ID NO: 191149 - DNA, 122 bp, Homo sapiens
aaaatgttaattcggttccccatgcagcccgctgggcagcatcttgcaaattaagaatctcgtctatgtttccataaaacagtaaagggtgattttctcttgtaaagtggcttgaaccccac

SEQ ID NO: 191150 - DNA, 122 bp, Homo sapiens
cactatagcagaactactgctggggaatgtggcttcttgctcctgaatttaagatgctctcgttggatgcccagagaaggttctggacaaagaaactggaataataggctgtaaaggcctaa

SEQ ID NO: 191151 - DNA, 122 bp, Homo sapiens
cgggccgcagccccccggcttcgcccaccatctccctaccatggacccccgcaaagtgaacgagcttcgggcctttgtgaaaatgtgtaagaaggatccaagcattctgcacacccaggaaa

SEQ ID NO: 191152 - DNA, 122 bp, Homo sapiens
caatctcctccttgctcaggcggcccttgtcattggtgatggtgatcttgttcaccttgccggtgctcttgtccgtggctgtgacattgagaataccattggcatcaatgtcaaacgtcacc

SEQ ID NO: 191153 - DNA, 122 bp, Homo sapiens
tggggccttaacccagtaggcccattgtctttataagaagagaaagaccagcgatctctccgcatgcacacagaggaagggccctgtgaggacattttgagaaggtgactgtctacaagcca

SEQ ID NO: 191154 - DNA, 122 bp, Homo sapiens
acaatctcccctgaagacttcttcatcttttttaactgagatacgaagtaccagaagtcccgggacttggcgacaacgtgattaggcgcaaagattcgcatgtggtagaggggcggtgtgtg

SEQ ID NO: 191155 - DNA, 122 bp, Homo sapiens
tgcttaatttcggcgtggttcctaattttctctctcccatcctctctcttagactggaaacgcttcccctatttcttccgtagcggaccgggagagcttactggcgctctgcgaaccggctg

SEQ ID NO: 191156 - DNA, 122 bp, Homo sapiens
ctagttcatcttttctttatatatctcctttgattttatgctgttgctctggctttatttcgtaagtcagtctcaaatatttttgaatacaaagcactttaacctggaccacagaggtgcca

SEQ ID NO: 191157 - DNA, 122 bp, Homo sapiens
aggggaggcgctgtcatactgccccacactgagcttgagctgggagccaggcgtgctgcccgcctccatgcccgtcactgaatcctcccactacccagtcggcagctgggagttgtttctgt

SEQ ID NO: 191158 - DNA, 122 bp, Homo sapiens
cctgagaagtggctcatttctcaggtcaggatgactgaaaaaaaacttttagaggaagcccgtaagatgaattttccaagaagatctgggatcagctgtgtaaaagagaaaaagaaatattt

SEQ ID NO: 191159 - DNA, 122 bp, Homo sapiens
gcagctccccagggtgaggccacggtaaattctgcctaatcccttctgcatacaaatgagcgcctggcaggaggagggaggggggcagacgccgcagcccctgcccgctcctcctccccggg

SEQ ID NO: 191160 - DNA, 122 bp, Homo sapiens
cttcaaccattccccatgggaaatgtcaacaagtatgaataaagacacctactgagtggccgtgtttgccatctgttttagcagagcctagacaagggccacagacccagccagaagcggaa

SEQ ID NO: 191161 - DNA, 122 bp, Homo sapiens
tcccacaggccgccggcttctggaggcgcagatggatcgtgtgtccagcaggtggcgccgcggcccgactcgggcgccccagcagaaccagcctgccagttgagtctgtgccaggctggaga

SEQ ID NO: 191162 - DNA, 122 bp, Homo sapiens
gacagtagggttggtgggagttgcgatgatattgccacctacctcttacatcttttagtgcgtatgttctgtccacccagctactggttcatttgagtagatcggagtcagatgagtacatg

SEQ ID NO: 191163 - DNA, 122 bp, Homo sapiens
gaggaagctgctcatctgcccctttaatggctcctccacctccacgtcaatgtcatagcacgccgtcttcttctggtctgaagggtccacgctgccagggaagtccagcccttcgtgtccac

SEQ ID NO: 191164 - DNA, 122 bp, Homo sapiens
atggcaccccaactggtgttccagctcacctgtgccacgcccacctgcgccacgcccacccgagcccatgcctacctgagccaagctcacctgcgcctgaggcccgccccctcggccttgtc

SEQ ID NO: 191165 - DNA, 122 bp, Homo sapiens
accgtgggccggggtatggatagacatggaagtatgtgagcgtggacatccatgcgcacgcgcacaggcacacggggagaaccctcttcctcttccccatccagccctctggtttttggtgc

SEQ ID NO: 191166 - DNA, 122 bp, Homo sapiens
gccaggagccgagtttggagacggtttaagtgaaagtgtgtgcctcctcagctgattgtgcgtgagggtgatgtggctcggtctaatatcaaaacaaaacaaaaataaaatgaaaaatcttt

SEQ ID NO: 191167 - DNA, 122 bp, Homo sapiens
tcctaatagcttttattccccagcaagggcaagaccacactcctcaagcacattgccaaccgagccctgagcatccctcccaacattgatgtgttgctgtgtgagcagggtgagaccactgg

SEQ ID NO: 191168 - DNA, 122 bp, Homo sapiens
tcagctggaggacaccagcctgtggagggactgtgggtctcagggactgccaaaaatccccgcatcgggccggaacccaccccacacaggaggcggggggcgctccctgcatcactgcagcc

SEQ ID NO: 191169 - DNA, 122 bp, Homo sapiens
cggctgcccgtgcggctccggacgaggcttcccgggggctccgggccggggcagccgcggcgccctctccccaggtccaccgcgggcgctgctttcaaacaaaggcaggagacggagcggga

SEQ ID NO: 191170 - DNA, 122 bp, Homo sapiens
ataaattcactaaagagatgtggttaaatttctgctgtagttagattacgttgagtgaaccgttaggagtttaggcaggcagtggaaatgcttttgtgtggctcttaaaaacagcatgcaaa

SEQ ID NO: 191171 - DNA, 122 bp, Homo sapiens
cccagttagttgcccccaaaatcaaaagctgcccattgcactttgaccctttaagtttgacgcgctccttggcgccccgcgcgcttgtccccgcacgggtcccagtcgagctccacgcggtc

SEQ ID NO: 191172 - DNA, 122 bp, Homo sapiens
agggttgggcctgtgcgtgccaagactgccgtgtttttgctgggggtcttgtctgtccctcgtggaggaaataactgctcccttttcttctctctcaggtgtgacgtatgcagccaaaggct

SEQ ID NO: 191173 - DNA, 122 bp, Homo sapiens
acattggatggtgggcgagaacagaaggaaactgagtccacgtccacattggacggtgggcgagaacagggaaactgagtccacgtccacattggatggtgggagagaacagagggaaactg

SEQ ID NO: 191174 - DNA, 122 bp, Homo sapiens
cctttaaaaactgcggagcacattttgtgtacatgctgtttttattgttactcatgaagacgcgggggaagctttggttgtgtaaagctgagaactgcacccaagcttccccgttcacccca

SEQ ID NO: 191175 - DNA, 122 bp, Homo sapiens
ggagaaggatgcccccagtcctagatggagaaggatgcccccctcagtcctggatggagacgtcatgagtaactgtcggtaggaaacatcatgttcttcattctgcccttgctccttgggct

SEQ ID NO: 191176 - DNA, 122 bp, Homo sapiens
cagtcgctgagcgcttacccgcagtatttccaagtgcggtaactgagacaccgaggcatacgaaagctaagaaaatttgctggagttcatggtgttcacaaagcctcaaagcaagagcataa

SEQ ID NO: 191177 - DNA, 122 bp, Homo sapiens
aggaaggaagtaggacttttaaaataaagaacgtcatctattctctgccacagactggaacgtcgtggtgtctcagcaccagcccaagcactttggagagcttattgaatcccatcctgaac

SEQ ID NO: 191178 - DNA, 122 bp, Homo sapiens
agttgaaatggcaaccccaaagaaaaccaaacctgcgcccgaagcaacagtgaccatcaacgcgagcggctctgatcttgctccagtccccactgctgtcaagggccccgccgcggagttta

SEQ ID NO: 191179 - DNA, 122 bp, Homo sapiens
cgggtcttggccagcagtagaggaagagataaaggggatgtctcatcacccaagcaaggtcgtctgtgttcaagtgagagaagaaccttagggttttggacagagtaaactggggcagcaga

SEQ ID NO: 191180 - DNA, 122 bp, Homo sapiens
tcagtactctggacaaatattatctctccattgaaaccagtctactaagccctcagtccccggggtcagctttcctgggtagctcccaatgtcaaaatgtattccactagtgactgcacccc

SEQ ID NO: 191181 - DNA, 122 bp, Homo sapiens
gtgagaagtagaataaataaaggtgatgggggaaaagtgcttactaacagaagctttaaacgcaactacatagaaaggcacgttgaagagatagtttttgtttgtttgcttgtttgttttca

SEQ ID NO: 191182 - DNA, 122 bp, Homo sapiens
tcggatgtgtttattttccagacccaggttcctgtcatggctaggggtggctgttggcctcgtccttaccctccactgggaatgtctttgtcttatgcacgtagtctgccttgttgttgcaa

SEQ ID NO: 191183 - DNA, 122 bp, Homo sapiens
ttgttacaaagagaactgtgtcaacttttataactgacacaaagatctgtgctataagggcggggaaggttttttcctactttccacagcactgtggattgttccacagtttaatttgatct

SEQ ID NO: 191184 - DNA, 122 bp, Homo sapiens
cactgggatatgcacaaaggcagagaaagagttttctggagagcaggggaagtcctttaacgagctcttatgcccagccagaaaaggaagaactcggtgcagcctaaccctgaaattaccac

SEQ ID NO: 191185 - DNA, 122 bp, Homo sapiens
cctcggccgcagctcccacctctgaggagctcagaccctgtggaacccagactagtgggtcgagggaaacactctacagctcaggtggaggttccgcagacacacccgcagctgtgcccgta

SEQ ID NO: 191186 - DNA, 122 bp, Homo sapiens
ggtggccgcgcgacgcgagagaactgctgggatgcgtggccctggtatgggcgcacccagcgtccggggcgcaggttctctcagcccagcttctcctcccactcactcgctcggatctcctc

SEQ ID NO: 191187 - DNA, 122 bp, Homo sapiens
ctcctcctcaaggaatgctcctgccctcccaacacccccaagaaacacctaggccgtggacgcacagagcaaactgcttcatgttctaggggcctatctggagcttctgtccagggcctctg

SEQ ID NO: 191188 - DNA, 122 bp, Homo sapiens
tctccttgtacctcttgtcttgctagagcctggcagccaaagttctgcttataaaagcatcgcagactcctgatgagatagttgccttggcctctttgatatttatttcctcgggaacctgg

SEQ ID NO: 191189 - DNA, 122 bp, Homo sapiens
agagcattaagatggtttattacaggaagagtttttatagggcttgggtttcagtgagctcgcctgtgacaaagcaaattgatggcagtgataggctagtgatgtcattgtgatgtcagtcc

SEQ ID NO: 191190 - DNA, 122 bp, Homo sapiens
gggtgccacgcagtgctccttagacaggcaggccccagctttgccaggaggaccttcccccgctccccccgccccccatggctctgcactcagggatttgcattttgttacaacactgtgac

SEQ ID NO: 191191 - DNA, 122 bp, Homo sapiens
aggggcaacgacctgcttgggatcaggaagcagctccatgtgttcttggaggagactgcacgcatcctcaggaggtgaatcggctgaacaagccatcttccgtgtgcagaggccccttccag

SEQ ID NO: 191192 - DNA, 122 bp, Homo sapiens
gggcccaaccccgagttttgcttctgtaggtccggggtggggccagggactctgcactaacggaggccacactttgagaaccacagccctgggctgtttttggtgccaggcccattcgtctt

SEQ ID NO: 191193 - DNA, 122 bp, Homo sapiens
aaatcgggagtgtggggtgcgggcatcgcgtggacacgctgtgaactgggatttggagcacgggtgatgccagagtgggtgatgtcaggggctggcctgtgctcccaggagtgctcaccccg

SEQ ID NO: 191194 - DNA, 122 bp, Homo sapiens
cccgtgggcccagccctgagccgcgccggcgctggggtcttctctgcgtgcaggacccggcggccacggagcttcagcctgacagcccggtggcctcgcctccgctgtctcctcggaagaag

SEQ ID NO: 191195 - DNA, 122 bp, Homo sapiens
tgttattagcttctgtgtgccttttcctcattcataaggtgaaggtaacagtacctgcctcgcatacctaacagaatcttggcaagcattaaatgagatggtatatatgcaagcacttcgat

SEQ ID NO: 191196 - DNA, 122 bp, Homo sapiens
acggatggtttcatcgtgtatgggaattatcgggtatctggaaatgtattgtggaaaatacgtgggaaaggaggctgtgatgttctatgtgtatgccacatccacagtccttaactgctgtt

SEQ ID NO: 191197 - DNA, 122 bp, Homo sapiens
tgttggttcaaaggattaccaaaaagaatggagccattcatggccaggcacggtggttcacgcctgtaatcccagcactttgggaggctgaggcagggagatcacgaagtcaggagttcgaa

SEQ ID NO: 191198 - DNA, 122 bp, Homo sapiens
aacttaagctggatccgtaaaggcctgacacgaagtcccggctgtataaaacatgatccacggaggtactaaataaataacctggctgtgggcttccaggccgctctatttatcactgcagt

SEQ ID NO: 191199 - DNA, 122 bp, Homo sapiens
tcacaggagagcgtccagctgctctgctcctggtataatcctgggcctccaaaactgaaacgagcacatggtaacgcaagcggcaggcatgctcggggtgtgcaggagatgcaccggcttgt

SEQ ID NO: 191200 - DNA, 122 bp, Homo sapiens
ttcctcttccgagacagcctggcgctctggacgcttggcttccgctcgctggctcgccgacgccctctgctgtccacggttgggagacctgaaagtcgcaagagcgtgcccgtgacaggagg

SEQ ID NO: 191201 - DNA, 122 bp, Homo sapiens
ctccccgccccttttcccgggttggtcttccctctaatcattctctgccctcgcctctaacgttgctttggagccctggcagtcaaggctcaccctcccgcctccggaaagcgaactttatt

SEQ ID NO: 191202 - DNA, 122 bp, Homo sapiens
gctcagccctcctgcaggggctcccagggccctttcctccgggagcgttcctcggttcagcggggcctcattcatgcagtcactcagctgtgtgtccaaaaatgcctgtggggcgctcccta

SEQ ID NO: 191203 - DNA, 122 bp, Homo sapiens
ctccagatctttatttctcttttactttgcaacttgttctctctgtagttctactctcttcgctctctctctcttccctcagcacaaccctctccatctctacacttcctctcacctctgcc

SEQ ID NO: 191204 - DNA, 122 bp, Homo sapiens
gagtggcagggggctggagagtaattattattttggcttatgcaactgaaaagcagggttcgttattacccgaagaggaggaggagtctggggcagttaattatataatgctcctgcctgtc

SEQ ID NO: 191205 - DNA, 122 bp, Homo sapiens
ggccaggtatcacacaatattcctctttggtctgaagggttaaaggattaaaattcctgtcgataaaggcaatgctatttgcctcctccaggggctggtgagcttgtgccatatattgccat

SEQ ID NO: 191206 - DNA, 122 bp, Homo sapiens
cctctagctatccacgccccctccttggtcactagttataggtaactttcacccttccgccggccaccccagccccagggaagaacgttcctttggtgggtgtcggcaaatggggaccggac

SEQ ID NO: 191207 - DNA, 122 bp, Homo sapiens
ggggcggggagggggtgggacgaggggctagggctggggctgcggcccggccggccgaggcggcgcagggagcgaggccggcgcgcagggccaggccatgagccgcggccccgccgggtagg

SEQ ID NO: 191208 - DNA, 122 bp, Homo sapiens
acactatgtcctcagtatccagttcacggcctggctcacagtaatggctcaataaatattcgagaaacgaatgaatgaatgaatgaatgaatgatgatatagccttaaacaagaaacaataa

SEQ ID NO: 191209 - DNA, 122 bp, Homo sapiens
aaacatgattcctttccctactcctacccttggtcccctcctttgtgaacaccaggggaacgtggaacagacacctgtatattttcataaaacctatcagatgattctggtcaccttgccag

SEQ ID NO: 191210 - DNA, 122 bp, Homo sapiens
caagtgcctaaaagatctcattgtaagtgggtagtgttaccggaagccattgtgttcacacgggggaaatgccgtatatatttttcaacaaatattaacgtttatactttcatgtttgaaaa

SEQ ID NO: 191211 - DNA, 122 bp, Homo sapiens
cagatggttctcattcctcctttctcatcccaatcacaggtctcctatatgatgcggacacgccgcacactaacccagaacacccagtacaatgatgcagaggatgagggtggccccaattc

SEQ ID NO: 191212 - DNA, 122 bp, Homo sapiens
cggcgcgggttccaggtgagcgcggactcggcgagccccgcactcggcgcggccggccggcgcctgctgggcttgatctgaggctgaatcccgtgtgtggaccgccgttccctcttcgcggg

SEQ ID NO: 191213 - DNA, 122 bp, Homo sapiens
agacgcagccgggtggaggccatctggatcctgtcccggtagaggcccaggctgtccaggcgcgcggctttccggaggtgctccgtggcgggctccagccggtcctcgtcctcctcgatctg

SEQ ID NO: 191214 - DNA, 122 bp, Homo sapiens
atcccccaaatggcttcattttcattccctctgatttgtaatacttttctcaaaggagtgcgaagccaagtgaaagaatctttcagttaaatatatgtaaagctttgaataatgaacctggc

SEQ ID NO: 191215 - DNA, 122 bp, Homo sapiens
taactaatcactattgtttttcccatgggatttcattcttagtactaattaccaaaaactcgggagatgatctactcccactcaactgactaactgcccctctgagtccgaaccagcaggac

SEQ ID NO: 191216 - DNA, 122 bp, Homo sapiens
tgcgggccagcgcgagttccgggtgggcgtggacttggcggaccgcgcactcagagcggccgacaggccccaccggctcagggcaatgaggagcttagcacctgggccagcagctgctgtgc

SEQ ID NO: 191217 - DNA, 122 bp, Homo sapiens
ctgttgtgggcgaggcggcttggagggggcgcaggcgtcagcggggattcagagcggaaacgcatttcgcctgtaatggactcggcgattttacgataccaggagctagatccacggggaag

SEQ ID NO: 191218 - DNA, 122 bp, Homo sapiens
cagacgctggcagcccccatgctcgcccacagccgcagcagccaacaggcaagtgcgtgccgtcgagaggccgccggctccctgtatccttgaggcatgtccacgtcccagagcaggaggtt

SEQ ID NO: 191219 - DNA, 122 bp, Homo sapiens
tgagttccagggcagcacacttcctggcacttagtcatctctcagtctctgctgaatgagcgaaggaatgagggaggaaaagaaagaggttgaaagaaatgaagtcagtcttcacttaacgt

SEQ ID NO: 191220 - DNA, 122 bp, Homo sapiens
agaccaaagcaaaagcccaacagcaactggtggttctgactgaggtgacttttaatgtatcgtgaaaccagtaggccaaaagcagttaaagttgagcagatgtcctcagtcatgggtggtta

SEQ ID NO: 191221 - DNA, 122 bp, Homo sapiens
agatggcgtgccggtggccatgcctcacaggctgctgccgagaagaacaaggccaagacacgttaataaccaaagagagccgggtgcaatggcttatgcctgtaatcccagcactttgggag

SEQ ID NO: 191222 - DNA, 122 bp, Homo sapiens
ctcccgcgcgccccaggccccgggttggggtgcagggggcgcaggggttggtcgggccagcgccgcagctccggccccggagtctctccgccttcacaaggaagcggaggggatctggctcc

SEQ ID NO: 191223 - DNA, 122 bp, Homo sapiens
taattaaagttttcataggaaaagcaaacacatatctacacatgtatgtatgaacttgcacgctgattgtatttcagaagcagtgggctgaatgctttggttgctggctttctttgactcca

SEQ ID NO: 191224 - DNA, 122 bp, Homo sapiens
gggccccttgactgaggggctctgctcccaggtcctcagaacaggagcagatggagcaggcgatccgtgctgagctgtggaaagtgttggatgtcagtgacctggagagtgtcacttccaaa

SEQ ID NO: 191225 - DNA, 122 bp, Homo sapiens
ccagccccaagcgtgcgccccgtggagcgtccggcaggaagggcggccctgccagcgccacgtacaatgccccctcgaatgcctccgactgttccaacactgctcctaagcttagagagggc

SEQ ID NO: 191226 - DNA, 122 bp, Homo sapiens
aggcgtctgtcctcttgcgaccgacacttccgctgagcaacggaagcggctttcaagatccgggcagaaactttactaattcgcttgaatcgttccgcttgcctgtggaacctgcatcccac

SEQ ID NO: 191227 - DNA, 122 bp, Homo sapiens
ttgaaaatctgaagttctgaaattttggctatgaaccagggattttcattctcagaatctcgttcatcctcaactccagctttcccacactatgtttttgtcttgtatcaatccagggacaa

SEQ ID NO: 191228 - DNA, 122 bp, Homo sapiens
ggcgccggaaacggaaacgtctgtgcagaccaatggggtgccgagagagaacgctgactccggaaacgtcctggctgtctggggaggtgagtcgcttcacaggaagcgtcccccggtggcca

SEQ ID NO: 191229 - DNA, 122 bp, Homo sapiens
catcagcgactcgggctccatccagtggtggatgctgctgtgcctggcctgcgcatggagcgtcctgtacatgtgcaccatccgcggcatcgagaccaccgggaaggtactgcatgggcccg

SEQ ID NO: 191230 - DNA, 122 bp, Homo sapiens
gcccatgatctgggcccgcccccctcgtgcccgtgtccagcgcgtggcccccatcgtgcccgtgtccagtgtgtggccccaacagtcagcgttgttgacgtcaccttctgggagggaggtcg

SEQ ID NO: 191231 - DNA, 122 bp, Homo sapiens
tagaacaattaagtgagaatgcctggagtgggctttaaagttgatctttaagggcagctgcggttgagaatcaagaagtaataggaaacaaataaatgaaaagttgtgagtatagaaagaaa

SEQ ID NO: 191232 - DNA, 122 bp, Homo sapiens
cccgcgctctgcactgcgctttattcgctcgagcctattcagggactgtcactccggggccgcgaggtattcagggccttaatcaatcaaaaggatgagaatcgggcaggtttttccctttg

SEQ ID NO: 191233 - DNA, 122 bp, Homo sapiens
agacgtgtagacgtggcgcaaagaagggaggatccagaaactgggcccagggttcgtacacgccatcagtgtccacagcagcccagccccgctcggcccctgacaagggacatcaagccagc

SEQ ID NO: 191234 - DNA, 122 bp, Homo sapiens
gggttagggcgtccgcccagagggcgactgcaatgaaggaaattgtgccctgcgacttcccgtaacagagctgtgtgtccacgctcccttttccgagcaggcgcggacgcttgtgccggaag

SEQ ID NO: 191235 - DNA, 122 bp, Homo sapiens
actgcctggctgacttttcattggctcagagtcacaaaggctgcaggttcttcccccttccggtcgctgagtggttgaggccggaagacaacgctcatcgtcattggctgagcccggctgtc

SEQ ID NO: 191236 - DNA, 122 bp, Homo sapiens
agggaaacagagagagagagagagagaaagagagagagagagagagagagagagagaaaccgtgagcagcgcggacttttcctgtacgcatgtagagggagatgacacaagatcccacagac

SEQ ID NO: 191237 - DNA, 122 bp, Homo sapiens
tcagtaaaaccaaatatcttccacccttggttctgcggcaggatatttttgtagtctgggcgtctttccttgggataaatgtagcttgcaatgattttgatggaaatggacttttcttggat

SEQ ID NO: 191238 - DNA, 122 bp, Homo sapiens
tgcaaaagtgcagtccctcggacttgaaaattgcagttttgtctctattttgtttctccacgggggtcagcatttgcctggatgtgcttataagtgaatatcggaagtctctcagagaagct

SEQ ID NO: 191239 - DNA, 122 bp, Homo sapiens
ccgggagcgggcaataaaccggctaaattattgacctggggaactagccacacaggaggccgggagacagggactggtgagaatggggctgagtggaggaggtggtgatatttaaaccattt

SEQ ID NO: 191240 - DNA, 122 bp, Homo sapiens
atgcaatcttaacctgggctacagagcccgacattacttgggtgaaccaatcactttgaacgggctttcacatatttcctccagtagccagtcctttaacaacccgtgattcctgaaatgtg

SEQ ID NO: 191241 - DNA, 122 bp, Homo sapiens
gcagacccaggacctggcgctctcgccaccccgttcctccctgctccgaactcccaattccgtgtggtgagccccaactgtcccgggctgtgtacaacttagagggccacggggattcgggc

SEQ ID NO: 191242 - DNA, 122 bp, Homo sapiens
agcaagatctctggtcatgtgtcgagtccaggggcacatgctggctggcagggcctggggcgctgagctgctgtggctttgggcaggtcgtttgacttttctgagccccagtttcctgttcc

SEQ ID NO: 191243 - DNA, 122 bp, Homo sapiens
tctgggggttgctccctgagcccccatttctcaaactgccccacccaacaagaactctaacgcgtgcagagggaagaaaattggcccagaagacaagaggcttgagtttgagtttctgttct

SEQ ID NO: 191244 - DNA, 122 bp, Homo sapiens
acccagtgtgcggcgtttgccatggcagccccgtgaaacacagaagcctgccttctcaaccgcactcacctttgctcgaatatgagcagcccccattcttccccgacacacacagtcaaatc

SEQ ID NO: 191245 - DNA, 122 bp, Homo sapiens
tctaccaatgaaagtttcacatgtgttgaaaagagcaggcttcggcttgtccgctgcactcggccctggggcgctcagattcagaaaggccgccagccatcgggtgtgatctagagcggcgt

SEQ ID NO: 191246 - DNA, 122 bp, Homo sapiens
aaacgagctggactggtgaagagccccggggttcggtagccagtggcctgaaggccaggccgcagcgtcccaatagtccggttgctggggcaacgccgtgacgggaagagcgagccaatcag

SEQ ID NO: 191247 - DNA, 122 bp, Homo sapiens
gcgcgccgcgctcttcctgccgccggatgagtagtctgcccagaatttggtcgagctctgcgacccccaccggcccctttcctgtcctgggaatcgcgtgattgtggaacatccctgaactt

SEQ ID NO: 191248 - DNA, 122 bp, Homo sapiens
actctgtctcaaaaaaaaaaaaaaaaaaaaaaaagtatatttggggccaggcagctcacacgtgtaatcccagcagtttcggaggccaaggtgggcagatcaattgagcccaggagtccaag

SEQ ID NO: 191249 - DNA, 122 bp, Homo sapiens
tatgaggccgccatactggaaaagcagaagctgcaggaagaagccgagatcatggagaggcggctgattgccgcagacaaactcatctcgggtctggggtcagaaaacatcaggttagcgct

SEQ ID NO: 191250 - DNA, 122 bp, Homo sapiens
agtcaggcatagacccagcagcctggtgcttcatgcaggttccactacaagagaccttagcgtctctcaagtgttgagtactttgcccgtcctgaatgccttcgggaactctgaaaagcgca

SEQ ID NO: 191251 - DNA, 122 bp, Homo sapiens
tggggacccactgtctgacctgtggccccagccgcgagtccttctcaccccagaccccagcgtctgtgtttcatgagggttgtgaagtccctgccttcccgggttccctccgccggcccagc

SEQ ID NO: 191252 - DNA, 122 bp, Homo sapiens
gcttattcagtagacaccgtgacctgcttcttctcagcgtcaaatgcagcctagaagaagcgccctcaggcaacttcgtggacatgagccttcttccagccaccaccaccaccatcgtgcgg

SEQ ID NO: 191253 - DNA, 122 bp, Homo sapiens
aacaggagctcacgtcaccacggggaccaaaatgccgggattcatcctcctttttttccacgtctgcacccagtccagtacaaatcctgtctacgacaccttcaagatctgcatctgaccaa

SEQ ID NO: 191254 - DNA, 122 bp, Homo sapiens
ggcccgggccgctaggaggcggcaggaggcgcagagcatgtcgggaccgggagggccggccggcccggggcgggggggactgggcaggaggggtcgggctcagggaactgcaactcccagca

SEQ ID NO: 191255 - DNA, 122 bp, Homo sapiens
ctcctcagcccttgggtggtcgacgggactgggcgccgtggagcagggggcagcgctcaccggggaggctcgggcacaggagcccacggagggggtgggcggctcaggcatggcgggctgca

SEQ ID NO: 191256 - DNA, 122 bp, Homo sapiens
cgagccgttttaaggtgccgtgagatcttgtgtgaagaaacccgttggcatagcccaaaccgaagcccccaaagggaggagagttgctggcctgacatcagctgctcttaaataaggatccc

SEQ ID NO: 191257 - DNA, 122 bp, Homo sapiens
ttgcctggaacactctggggccctcccctgggctcccttcctgtgtgcacagcctgagcccggccctgagcccgtctctgcccacagagccagtggcttgaacgccccccggagaagctgcc

SEQ ID NO: 191258 - DNA, 122 bp, Homo sapiens
ctctctctgatttaaaagttttttattaagggaaaaatttaaaagtcatactgggtacatcgttaggcataggactctgaggttaccacttctgatcctcaaacataatccatgtagattat

SEQ ID NO: 191259 - DNA, 122 bp, Homo sapiens
gacccccgcccccgccaggctaggacgagcagccgccaccgctgccaccgccaccaccgccgccgcagcgcctcagtgcggccccgcctccgccgccccaccaccttcaccacctccacgct

SEQ ID NO: 191260 - DNA, 122 bp, Homo sapiens
attttaatattcatcaaggtcttgaaatgatgcattcttcttttctttactctctgcctacggtagagtgctgtacatgtatttggaaattgtgatggcattaaatatagctttaaagaaga

SEQ ID NO: 191261 - DNA, 122 bp, Homo sapiens
agggtcagctctgaaagtgtcaatgagggacgtaagttcaagtaggtgtagggaaggattcgactgggactcatttcacagcccagctggggactgatgtcacgcccgaggacaggaggttt

SEQ ID NO: 191262 - DNA, 122 bp, Homo sapiens
tgtttcacagtgttccgcagccaccaccgccacccagcaccggaatgtttcacagtgttccgcagccatcaccaccacccagcactggaatgtttctgtgttttgattcttttttttttttt

SEQ ID NO: 191263 - DNA, 122 bp, Homo sapiens
gggctgaggcggaggcaggggagttgcagcgcgcgaggctccgtgagtgtgtctcctgcgcgctgagaggcggggggaggcggaggaccaggaggaggaggaggaggaggaggagggggaga

SEQ ID NO: 191264 - DNA, 122 bp, Homo sapiens
acatcactgaaggagaagccaaagctgaggaaacgtgcaggggacgggcctcgaagcggccgcggaaggaggacgggaacccggggccacagcatctcccggcaccagcctcgtgggggtcg

SEQ ID NO: 191265 - DNA, 122 bp, Homo sapiens
aagactctaacttggactacgtgcccctttacaacctaatctacctccctggccctccatcggcaatgtccaaggacagtgctcaaaatttctggaaaaaacaatgttctttcatatttatg

SEQ ID NO: 191266 - DNA, 122 bp, Homo sapiens
tgaggtccccatgcccagaggtgggttccagtagatcaggggtccctttagatcccccagcgcctgagacatggagacctgggagggactgccccatgagtccttggtgcccacaaattcca

SEQ ID NO: 191267 - DNA, 122 bp, Homo sapiens
ggaaaccttttatctaaggcggagcgctgaccgcctccccagtctctaaggaagtgggcacgagaggctctttccagggactttagtccccagatcagtgactgcaaacagaagtggcttgt

SEQ ID NO: 191268 - DNA, 122 bp, Homo sapiens
atggaaactgaaatcaggcgggaccgaggctgcgccaagagccgcagcctgagtttggcgcgtaattggggtggcctgttacacggtctaagggagtaaatgctaaggcttaggagtcacct

SEQ ID NO: 191269 - DNA, 122 bp, Homo sapiens
ggtttcccttgaaagggctgggcatcatcttcctccaggatggtgctgggttcctggcagcgtgtgagtcctggccatgggggctctgatggtggcctgacaagagcaccagaagagtgccg

SEQ ID NO: 191270 - DNA, 122 bp, Homo sapiens
ccattgagatgcctgtttgtactttgtttcagcttttcagttctatgtggctggctaagtcgtgccttcagggcacactgacctgtttttaactggggcagggagaatagaaatcttctcct

SEQ ID NO: 191271 - DNA, 122 bp, Homo sapiens
cctcccgctccacctcgcttcttctctcccggccgaggcccgggggaccagagcgagaagcggggaccatgttccgacgcaagttgacggctctcgactaccacaaccccgccggcttcaac

SEQ ID NO: 191272 - DNA, 122 bp, Homo sapiens
gagtcggggggtccttgctggttgttgcggctgagggggcccctgggctcgggcggggcgcgcagccgccacctgccccagcaggaggagccggccacgcggcgcttggagcctcagccaga

SEQ ID NO: 191273 - DNA, 122 bp, Homo sapiens
tctcaaacagcagatcctccaccccaggatccctgaacacagcggcatcgcctcctacctcggtcgggaagcccaccccccacccaccagaccgaggattccaaaagggggcgaaggcggag

SEQ ID NO: 191274 - DNA, 122 bp, Homo sapiens
gggctcgggaatgggcagagtcctaccgaaaaggccatgaggctccgactggcgcctctccgtgcttcgattttggtccttgtgtttcttgttgctcctgaggctcccaaagcgcttcatgg

SEQ ID NO: 191275 - DNA, 122 bp, Homo sapiens
actgtgctgggtctgaatttttcagctacccttcttcagccggcaacacacagaacctggcggggaggtcactcttaccagtccccactctgatgagaaaactgcccagctccaggcaccat

SEQ ID NO: 191276 - DNA, 122 bp, Homo sapiens
acctggggctccttcacatctgtccattgctgtgttaaaagtacttttaaacaactttgtcgaaatgctcagcttgtaaagttttaatgtaggcccttgtcaatgcttcagaaataagcctc

SEQ ID NO: 191277 - DNA, 122 bp, Homo sapiens
ccaagcaccaggcatgtggtgctgcctcagaggtcagtgccctcctctcagatgtctgagcgtggccgcaggcgccccctgagagttccaagcacagatcttgcagtgtcctgccctgaagg

SEQ ID NO: 191278 - DNA, 122 bp, Homo sapiens
ctaagactaaccataatttcaattaacataaaataatctaaagacatgctgattagacaccgtgtggctttaacaaagcattctgggcagggggttggggaatagagaagctttaactattc

SEQ ID NO: 191279 - DNA, 122 bp, Homo sapiens
gttaaccttccacccccatcagcccaaggtccccggctcaagacaaccctggcttgtttacgtttaaagctgctgactcttaaagctccagccgttataagcaaaacgcagctagacacttt

SEQ ID NO: 191280 - DNA, 122 bp, Homo sapiens
cctgatgagagtcccaatcagcaccttcagcgcattactcaatgatgtgctcagagcctgcgtgagctcccgccgcacaaacatcctatcccatctcagcccttctatcgcatccccagtgc

SEQ ID NO: 191281 - DNA, 122 bp, Homo sapiens
aaaaaatacaaaatttagctgtgcatggtggctcatgcctgtcatctgatcccagctactcgggaggctgaggcaggagaatcaagaatcgcttgaacctgaggggcggaggttgcagtgag

SEQ ID NO: 191282 - DNA, 122 bp, Homo sapiens
cgacgagctcggctgcgtagtcctcgtagtaggaggcgaccagcttgtcggtgaggtccacgatatctagctgcccgagcgcgccccgcgggatgcgctcaaagccctcgcgcagcggcacc

SEQ ID NO: 191283 - DNA, 122 bp, Homo sapiens
tgagaaagttgtactggctccaagctcttcggtgtccaggacgtacgcgtcttggatccacggaagggggtcatcgtatgggtgtctgaccctcttaggagcctgtttcctttgttttatcc

SEQ ID NO: 191284 - DNA, 122 bp, Homo sapiens
gccgggactcggtggttacacagggctgctgggcatggctcaggcgcggagcaagcggagcgcggcgccccctgtcttcgtcgaggcaaccgggaagcagccgctcggagctacttgcccgg

SEQ ID NO: 191285 - DNA, 122 bp, Homo sapiens
ccgggcaggtccagggcttctagatctccggccgccttgaccttggagttcagcaggctccgccgccaagcccagtcctgccgctcacctgggtccctttaccggccccgggaggccccagc

SEQ ID NO: 191286 - DNA, 122 bp, Homo sapiens
gactttgaatgtggacctctgagcatccacgcaggatggctctcaggtcccagtcacagacgtcgcttcctgggattccagcacgatgcctccatagttgaaagactacacaaaaagccaca

SEQ ID NO: 191287 - DNA, 122 bp, Homo sapiens
tctcactccttgggcgcaatgctactatcctggcagaaccctcgccgaaccctcgcaggacgccccatcgggtccgccagcggctaggaagcccgattgtgtcgttcctttttccctctgcg

SEQ ID NO: 191288 - DNA, 122 bp, Homo sapiens
ggccagcagagggcgcccttcccctccttggcctccgctcctctgcagttcccaggcctacggggcttggtcttttaatggccccccgggcaggcccaggcttcgtatggagccctgggctc

SEQ ID NO: 191289 - DNA, 122 bp, Homo sapiens
agcagccaatgagtgtgcagtttgttgcgatgtggcacccggctccggcattataaagggcgccacgagtcggcattgtcaggcggcggcaccgcgcgggacggagcttggctgttggtcgg

SEQ ID NO: 191290 - DNA, 122 bp, Homo sapiens
tccaagcgtagttcttctatagtcctgggcaaaccccagggaattgtgctaaggtgattacgggacaggaaaagcagtcggagatagttgctgtctcggaatgctccctcttctatgctaac

SEQ ID NO: 191291 - DNA, 122 bp, Homo sapiens
ctttagtgctagaaagaatgcgctgtaatctccagtctgggacattcccccatagcaaggcgacttccacagaaagactagcaagcgtccactggggcatggctgagaggactcccccccca

SEQ ID NO: 191292 - DNA, 122 bp, Homo sapiens
ttgagcgctggggggcggagcctgatgcgggatgattggcgtccgagcgctgggctgttccgtggacccgcgcggccacgccagtgtgctgtgcacgggaaatgtggacgtgggagcacgga

SEQ ID NO: 191293 - DNA, 122 bp, Homo sapiens
tcgggtctgctccccgcggacgccccaacctccccggccgaatggatggtggtgcgcgcgcgtcctactccggcggtgccggccttttctgttgccaaaactagacccaaacctctgcatgg

SEQ ID NO: 191294 - DNA, 122 bp, Homo sapiens
ccggccggcggaaggaggtgctactgccggaagcgccggcgcgcttgcgcagtagctgaacgcgggcgtttctttcctccctttttttcgaattggttttgggggtagattcgagttacaaa

SEQ ID NO: 191295 - DNA, 122 bp, Homo sapiens
cttttcctcctttgacatgaagtcaagttcgcttttgtattctgagagatgctgggtggtcgtaactgggcgaagcaactcttcatcctccctctcagccatgattctttgccgttgctttg

SEQ ID NO: 191296 - DNA, 122 bp, Homo sapiens
cctccccgagtcatactcattcaggatatctgccccaggcctcttgggcaggagaggaggcgtctgggcttcctgccctggcccaggcagcctcttgtgtggctttgcattaatcagttttc

SEQ ID NO: 191297 - DNA, 122 bp, Homo sapiens
cccctcccaccccatccagaggccaacaggttccagcctgtcccgggtagggcggagctgcgccccctccccaccggcagcaggcggcggaggccaagtcccgccctccccgggatcccgga

SEQ ID NO: 191298 - DNA, 122 bp, Homo sapiens
aactgcagacgtgcaagtgggctttctcgggtctctcatcttatgtctcagcaaccttcccgggagcctgagagctgtccaggtcacaatgttgataaccggctgccatagataggttgcag

SEQ ID NO: 191299 - DNA, 122 bp, Homo sapiens
cacctgccctgtgtcatcactgccctaaccccaccattggccacagcttattgcacctgacgggaccaccggaaccaagcaaggtctgcagagaaagccacatagcacacacaaagatgcag

SEQ ID NO: 191300 - DNA, 122 bp, Homo sapiens
gggaggacggagacatggatgcctgcaggtgcacccccacggggaggacggggacacggacgcctacaggtgcacccccacgggggggacggggacacagacgcctgcaggtgcacccccac

SEQ ID NO: 191301 - DNA, 122 bp, Homo sapiens
gcactttcttccccttgatggtgggggcagggatggaaaattacctggagaaaatggtggcgagtggtgtatttaagcacgtagatcattccagacgcccaggtctggccaagccccaggat

SEQ ID NO: 191302 - DNA, 122 bp, Homo sapiens
actgcctggaaccatctgatttgtttgccagcacccaacaccttcacggttctccccccacgttctcaagaagccgtcactgaaatagtcggcctgtgtgtgcggtggctctgcagagggat

SEQ ID NO: 191303 - DNA, 122 bp, Homo sapiens
tggcacactccgcgcacatcaaaccccttgcgcctttattgccggcgatgccccggcccgcgttatcagccccacacacgcagccctctctgcccgccatcaagaggtcacttctaatgact

SEQ ID NO: 191304 - DNA, 122 bp, Homo sapiens
agggttgcacttctcaaacttggcccaaataaactctatttttttttcaagatggagtttcgctctgtcgcccaggcttgagtgcagtggcgtgatctcagctcactgcaacctctgcctcc

SEQ ID NO: 191305 - DNA, 122 bp, Homo sapiens
cggtggcaccggcgggcgcggggaggagttgccgtcccctttcgccgccgccgcccaccgcgttctttgtgtgtctctcgccgccctccagccgcttcgccgctcgcctgacagctgatggg

SEQ ID NO: 191306 - DNA, 122 bp, Homo sapiens
gtctcctgattataacaaaccactcgacctcaggctaaccaggccctgcaactgggcaatcgagctggcccttctaggagcaggccttgagcctggctgcccttctcaaggcaggttgactc

SEQ ID NO: 191307 - DNA, 122 bp, Homo sapiens
ggcctgcagcacttcttctcctgccgaggaattgccatggcagtgcagtttttctggaaccggggacaccgagaggtcactgtgtttgtacccacctggcagctgaagaagaaccggagggt

SEQ ID NO: 191308 - DNA, 122 bp, Homo sapiens
cctgccgggagctgttggggaaaaagtaccagcttgagctgccgccgctccccgagaggccgcaaaagcccgagggctccaagaactgcctgcagaggctcagggactgcgagctgtccgcg

SEQ ID NO: 191309 - DNA, 122 bp, Homo sapiens
gcagcctgggacataggaaagggtcttagttactgccttctgacgttacttgaaagcgctcggagaattgtgcaggtgtaatttatttatgaccaataggaagagaaaccagttactattag

SEQ ID NO: 191310 - DNA, 122 bp, Homo sapiens
aggcagccccagtcagagaggctcacccggaaggaggcagccccagtcagagaggctcaccgggaaggagggaccctgttcagagagacacacccggaaggagtgagccccggtcagagagg

SEQ ID NO: 191311 - DNA, 122 bp, Homo sapiens
gtcttttgggtgggtttacggtttcaggcctatttctaactggaatcaaagactgtccctcggtgaaggaatttcaggcacgaatgagcagatgcgtgaggtattttgggggcagagagttt

SEQ ID NO: 191312 - DNA, 122 bp, Homo sapiens
agctttcctaatggtgagatttggatcaaaatgcctttgcttttcctaaggctgcccaaccgtaaagggagctgtccctaaggagacgtcaggccagaagtgaaatttggctgaaagtaatt

SEQ ID NO: 191313 - DNA, 122 bp, Homo sapiens
aggcgtcatctacataagcctggcccagacagcttccagcctggtgctgggctctgtctccggcaccttcttttaaggggtaatcattttaataaatagggattgtgggcctcttgcctgag

SEQ ID NO: 191314 - DNA, 122 bp, Homo sapiens
caggatgatatacggctccttttatttcttttctctcaggtaaaacagtccacagctgtccgttgtccaatgtctgaataggtgtctcctatattttgttccgttttctaattgtttatagt

SEQ ID NO: 191315 - DNA, 122 bp, Homo sapiens
tgtcagcttaccaacatgacattttttcagtcagttgtggtaggccagccttgaagccatcgcacagtctagaaacttgtgtagctgagtgtgcagctcacctttaagggtgaagttaggta

SEQ ID NO: 191316 - DNA, 122 bp, Homo sapiens
ctctgttaatatgaactggcactggtggggtgctctgggcactggcaagacagctcttggcgcttgtcatcaattagcccaattctcaccacttttttctccatccccgcgtcagtgggtgc

SEQ ID NO: 191317 - DNA, 122 bp, Homo sapiens
agctctcagatggcgcccattttgatgtgcttgtcattgtcagaaaggccattcacaagccgagatactttcctcaacgagacaaaaacacaagcgatgcttgccttccctccactcggagg

SEQ ID NO: 191318 - DNA, 122 bp, Homo sapiens
aaagacgctcgttcacgtggtttgtctgctccctcctcgcagaagccagccagcaccgggcgctggagcagtcacagagcctgcccctgccggccccgaccagcaccaggtgagaatggaca

SEQ ID NO: 191319 - DNA, 122 bp, Homo sapiens
aggttggctatacagattctacaacttcccagacgagtggccctgagacttggggctgaacgcgcgagcacggaaagaaatcccaccgtaggacggaacccagtctcttcagctccatccta

SEQ ID NO: 191320 - DNA, 122 bp, Homo sapiens
ggaaagatctgggattctgaccagggcctctcgcctgcctggccagggctgcgaggtgaccggcagggcttacagaagttatgccttcagcatgacacattggataatcatctccttgtcca

SEQ ID NO: 191321 - DNA, 122 bp, Homo sapiens
ttcttctgatggcttttctgcctccttttcaaaggcatggggctgggggggtggggtgttcggtgtgaccctgtgacatagctcaaagccaccacctgctcctgggcagaggtctgggcttc

SEQ ID NO: 191322 - DNA, 122 bp, Homo sapiens
cagtccatgacagcacctcccttttcaaaccctaggcctggctttttaaactacagggaccgacagagagaagacactatcatccctgcatgggctgggagtggggttggagggataggaat

SEQ ID NO: 191323 - DNA, 122 bp, Homo sapiens
agtccaaagaggaaaaaaagggaggccgcaggcacatgatggatctgtgcaatagtcatacgtaagccgccgtgatgtccacaccacggagaccccgtctgctatgcatcacccatagcacg

SEQ ID NO: 191324 - DNA, 122 bp, Homo sapiens
cagcgcgtcgggggcgggtgggcttgggtgtccgtggcggaggttaccccgggccccacgcgcccgctctctcccggccttggtctttgtccccgcgcccccgcaagggccgcccgccgcgc

SEQ ID NO: 191325 - DNA, 122 bp, Homo sapiens
aaataattcatttccaaccagaagcaagtccatgaaaaaaatcacaatatcacttgaacccgcaaggcagaggttgcaatgaaccaaggtcgcgccactgcattccagcctgggcaatagag

SEQ ID NO: 191326 - DNA, 122 bp, Homo sapiens
agagagataagagaaaaggcagctgggcccgggggaccactaccaccaatgcgcggagaccggtagtggccccgaatgtctgactgcgctgttatttatcggatacaagacagaaggggcag

SEQ ID NO: 191327 - DNA, 122 bp, Homo sapiens
tgcagagacgcgcgctccatggagcagttcgattctgctccttttgtataagatcgcgcgcgatcagaaccaggaatattgctgttattatatcattccgaaaggactggaacaaccgactc

SEQ ID NO: 191328 - DNA, 122 bp, Homo sapiens
agggtgtcagccttcaagaagatctgctaggttgacccagaggatggggactgggagccccgaagtaaaggcaagttcagatgcacttagaaaaaaaggtcgcgttcctctgtcgtctctac

SEQ ID NO: 191329 - DNA, 122 bp, Homo sapiens
cgccagcgcctacagtgcctacgcctgcctggccattgtcatcttcttctctgtgctgggcgtggtgagggcctgacctgctctgctcagcctgtatgataggaaaggtgcacgtgcgttca

SEQ ID NO: 191330 - DNA, 122 bp, Homo sapiens
gagatgggcgggggcgggtgtaagtaggacagcgctttgtgcgcgttgctatggcgccgccgccgcccgtgcaggcttcctctgggcgcgttcccaggacgcagagcctgccagttggccct

SEQ ID NO: 191331 - DNA, 122 bp, Homo sapiens
ctacaaatgcctggaaggggttgcaaagaacaatgcaggatgctctctatcaatctattgcgttcctcattagtcatgatcactgcctccacaatgccccagatccctttgtggcattcaag

SEQ ID NO: 191332 - DNA, 122 bp, Homo sapiens
tctgcagcaggtgcacacctcctcacccagcaagtctcgccccatctgttcctagcacaccgggcttcctgccgtgccccacaggtcggttctttcacacttctgaccacctgcccatgctg

SEQ ID NO: 191333 - DNA, 122 bp, Homo sapiens
taagttcatactggactctactgtcagtagaaggtaaaactgccctgctgacgctgttcacggagcttggttcagctcggcacggcagggcacgcttgctcgcccagagagagaataatgct

SEQ ID NO: 191334 - DNA, 122 bp, Homo sapiens
ctcagcatacatctgcatactagaggctcacagttaaatcctcacttatttctacttattcgtcagtgggggggaagaaatcagaaaaagaggaaaagaaaatcataaacagcccccaatgc

SEQ ID NO: 191335 - DNA, 122 bp, Homo sapiens
tgcagagacggggatgggaaccactcttgtggactagggaagtgcctgacttgaagaagacgtgagagggcacaacagcagaaggcgtggtcagggccttggagaaaggcatgttcagaaag

SEQ ID NO: 191336 - DNA, 122 bp, Homo sapiens
tgcaagagcttcttcaagcgcagcgtgcggaggaacctgagctacacgtgccgcgccaaccggaactgtcccatcgaccagcaccatcgcaaccagtgccagtactgccgcctcaaaaagtg

SEQ ID NO: 191337 - DNA, 122 bp, Homo sapiens
catgggtcctggccctttttgcttctgccagcatgtgtgaggagatgcagagacaaattccgtggcagttagagaactaactgccaagatggagcgaagggaacatttaaccttgactttcc

SEQ ID NO: 191338 - DNA, 122 bp, Homo sapiens
tggaatttgaaaagccaaaggtctagtaaagtaaaaattagcaggagcctcagtcagggacgtaaaggaaggacattattgctaaacgaaaaggtgaggtgctgtaatgagtgtcacatgtg

SEQ ID NO: 191339 - DNA, 122 bp, Homo sapiens
ctctctggccagcacccccaccccttgctttgtttttaatttttaacttttgtttgggtacgtagtagatatatatgtatatatttatggggtacatgggatattttgacacaggcctacaa

SEQ ID NO: 191340 - DNA, 122 bp, Homo sapiens
gaaaaaaaaggccaggcgtggtggctcatgcctgcaatcccagcactttgggaggctgagcggtggtggatcacctgggatcagaagttcgagaccaacctgaccaacgtggagaaacccca

SEQ ID NO: 191341 - DNA, 122 bp, Homo sapiens
actgtacctgtttgccttggaatgcgtctgcttcatctgtggaaacgtagcctgtgaggacggagctctgcactccaagctcctggaaacaataacgtccctggacctccccaaggggtgtc

SEQ ID NO: 191342 - DNA, 122 bp, Homo sapiens
taaacactataaaacgctttataaagtttctaaagactttataatcacttgaaataacgccgcgttggccgagagtagggtgaaagaaaatgtttcctcacactaagcaaatgccaccaaag

SEQ ID NO: 191343 - DNA, 122 bp, Homo sapiens
ctggctatctctgcttcagccagaacacattctgtcccccaccgaggctttaagggccagcgcgcagcaccctcacctttcagcaggtccgggtgcacatagcccaacacgtcggagacccc

SEQ ID NO: 191344 - DNA, 122 bp, Homo sapiens
tgtgcaagagagggaactgattagaacttcaggaaaagattgacatagtccgaaaaggcccgttgggggtggatactaatggtgagtccaaaataataatagctaacactcatgtagttact

SEQ ID NO: 191345 - DNA, 122 bp, Homo sapiens
cacctgtagtcccagttacttaggaggctgaggtgggaggatcacttgagcccaggagttcgaggctgcagggagttatatcatgctactacactccagcctgggcactacagcaaggccct

SEQ ID NO: 191346 - DNA, 122 bp, Homo sapiens
taccctgcctccggctgggtttctgggcagaggccgaggcttagctcgttatcctcgcctcgcgttgctgcaaaagccgcagcaagtgcagctgcaggctggcggctgggaaccggcccgag

SEQ ID NO: 191347 - DNA, 122 bp, Homo sapiens
ttgcaaggggagccggggcagcaggggctgcagtttcagaggcttctgcgtggccgtgtccgccaggacagcttccgggacaccgagaaacccatgtgggcgttttccaggtaccacgcgcg

SEQ ID NO: 191348 - DNA, 122 bp, Homo sapiens
ctgctggagagtgttgcagcatggcattcttagtttttctgactctggccttcaaaattacgggtgggtaaaatactacaacttttaaaacacagtgtctgccttcatttgatgccaaaatc

SEQ ID NO: 191349 - DNA, 122 bp, Homo sapiens
aaagggcaggctgggctgcagactcggagtgtgagtgcacagcctttgcccgccgggcagcggggctgagcggagggagggtcgcctgggaacactagttctgtgctcgtccaggcagcggc

SEQ ID NO: 191350 - DNA, 122 bp, Homo sapiens
agccatgcggatggattgtggtcgtcagaggctcccgtagtctttagcggcgctggcttccgcaggctccgccctctcttgcccacccggaaacagcctcgccccgcctacgcgggacccaa

SEQ ID NO: 191351 - DNA, 122 bp, Homo sapiens
acactcaaggacttgtttacccaagaggcaacccaggatggagagaagggtggtttcccacggacagcaaaggtcatagccttcctaagagtgctgcaatgtagctttgcagtcacattatt

SEQ ID NO: 191352 - DNA, 122 bp, Homo sapiens
cctggctggccgactgcgggagaagagcctctggtactcccgggaggccctcggtaaaagcgtgagcaccacaatcacctctcaggacaccgcacacgttagggtcgcccacagacggccgt

SEQ ID NO: 191353 - DNA, 122 bp, Homo sapiens
ttcctgcccggcagccccgcagccccgcagccccgcagccccgcagccccgcaggcctggcgcccgaggtcccgctccactgcccgcgccccccgcgcagccttatatctaacggtcaattc

SEQ ID NO: 191354 - DNA, 122 bp, Homo sapiens
gaacaggcaggcattgccccaggttggatggtcacctgctggtgttaaggctctgacatccgacttcccccacaacttttaggtcagtcaaggtcatctggggtcactgactgtgctcccac

SEQ ID NO: 191355 - DNA, 122 bp, Homo sapiens
ggaatatacaaagtgaagccacattgccaaacttgcagcagcgattgcagcagttgctgccgctgcgccgcgcctgaagccgcgccgcgcgggccgagggctcctgcagctgctcgcgcgca

SEQ ID NO: 191356 - DNA, 122 bp, Homo sapiens
ctggacccaccccagcgacctaactatagccctctcagccagcactccactctacccgcccggccgcatcatccacgtggtccacaaccaccctgcagagcagtgctggtaggttctgccag

SEQ ID NO: 191357 - DNA, 122 bp, Homo sapiens
cagcactttttttttcagttcttcacatggtttggatcaatgcagctgccagataaacagcgttacctaccacaataaagcaaagactgaatccgaatcctagactgttgagaatattaatg

SEQ ID NO: 191358 - DNA, 122 bp, Homo sapiens
gacacaaatgacccgagaagttgcgaggctccccggtggcggggacggggggcaccccgacggagccctcggacccttcccgccctaggacgaccctgcccgcaccgagccccggcccagct

SEQ ID NO: 191359 - DNA, 122 bp, Homo sapiens
cactgctcatcgttattctagtgtttttggctctagcagcaagcttcctgctcatcttgccggggatccgtggccactcggtaagggtgtcctcatagtgcaggtagagtgggggaaggctc

SEQ ID NO: 191360 - DNA, 122 bp, Homo sapiens
ggtccactttcactcctacaatgaaacttcctcctaaaagaaccagaaaaaccagccgggcgcggtggctctcgcttgtaatcccagcactttgggaggccgaggcgggcggatcacgaggt

SEQ ID NO: 191361 - DNA, 122 bp, Homo sapiens
gccatcatttccttgttgtgcaatgcttatactgtaaaaactgacacttccactataacccgcgatggttggacctggctctgtttacccgattgaaaacatgtgcttaaaaaaatggctca

SEQ ID NO: 191362 - DNA, 122 bp, Homo sapiens
ctaggacccgaggaggaagagctgcagggagacagtgcctccagcgggtgctgccgcgagcggccagccgaggggctggaaatgaaagtaaagcgctccagagccacatggacggagctgcc

SEQ ID NO: 191363 - DNA, 122 bp, Homo sapiens
ggattaaataaaccgctctacaattctgtatgaaggtctgaaaacactaagctaatctgtcgtattagaaatcagaacagtggcttctttgcatagtacagactgagaagggcacagggaac

SEQ ID NO: 191364 - DNA, 122 bp, Homo sapiens
caaccagcaaccaggatgcagtcacacagtttgtgaggcaagttctcaaacgctggacagcgcgccgtgggtggtctgtgaaggacgtgaaaccagccgggggagcctggtgatcttccagc

SEQ ID NO: 191365 - DNA, 122 bp, Homo sapiens
tgggacagctgggagctgtagcgggcctcgctctctgtcagcgtgttttccagagagtatcgctgtggtgggaaagatcaggaatgtcagagagctgctccttatagggttcctccatgggg

SEQ ID NO: 191366 - DNA, 122 bp, Homo sapiens
gggcccacgggcgccgcctgcacgtgcagctgcccgtagaagtagttgttgtagccgaggcgggagccgctgaccgcggccgggaggcccgcgccgccgggggccacggggcgcgggtagaa

SEQ ID NO: 191367 - DNA, 122 bp, Homo sapiens
ctttggtgcccagctccagctcagcagattcaggatcccccttcatcatgacttggtcaacgccctgctcaggccaaggtcctctgagagttccaagcttctccactccctataaaaggccg

SEQ ID NO: 191368 - DNA, 122 bp, Homo sapiens
cgacctgtgggtgggggagccgctcacctccggcgcctccttttcgggggcctgggctgccggccgcgcctcctgctgcaactgcctcagctctgagccctgcagctgcacgcgggcccgca

SEQ ID NO: 191369 - DNA, 122 bp, Homo sapiens
aacccgaggaaggtcgtgcttcgtgcagggccagcgagggaaggtcacctcccggcgccccgagcctggccccatgccccaggctccccgcgtcttcctcggagcgctggccccgtcccagt

SEQ ID NO: 191370 - DNA, 122 bp, Homo sapiens
taatgttctccaggctccttatctcgtgtagttctttaatttcgtgttggattttcaaagcgaggatgttttccaccgcgatggcttctccttgacttcagggtaggagtcttgaatcttgc

SEQ ID NO: 191371 - DNA, 122 bp, Homo sapiens
gccctgctcttcggagtcttcgtgtaagtagtggcgcaccgcgggcagggcgcactgacgcgggggaacaaccgaccaagcctctctgtgccctaacttagtttgcgcagccgcttcccact

SEQ ID NO: 191372 - DNA, 122 bp, Homo sapiens
attgtccctctctgagcacccttcattgtctctagcatgagacaataacagtccccaggtcgctgagttttggtgaagatgggttgagataatgcccttagcctagtgccgggcacacagtc

SEQ ID NO: 191373 - DNA, 122 bp, Homo sapiens
ccccagcaacacgagagacctcacagagggagtcacactaacgtggtcggggctccagagcgaaaccccaaccactatgctcacagccaggaccgagcaggctgggccaacggcagtccctg

SEQ ID NO: 191374 - DNA, 122 bp, Homo sapiens
gtccctaagagaagtcaggggggcgggcccaacctctccatatttacatatgtatgaggtcgcctgggccagtggcgaggaggcggagcttctgggggtgggaagggggcgggcacccccag

SEQ ID NO: 191375 - DNA, 122 bp, Homo sapiens
tgcacgcggtgttgagcatggtcagtttagcctgcgaggctgggttgggctgcgggtactcgatggtcctggacagtacttacgtcaccgccttgctgatgacatccaccttctccatctct

SEQ ID NO: 191376 - DNA, 122 bp, Homo sapiens
ggcaccctggcctccccccacccgccccgcgaagaccgagggaaagcagacgcgtctccgcggcaacccggagcctgcagcccgcagggaccccaccgccccaggtgcaggcgtgtacatgc

SEQ ID NO: 191377 - DNA, 122 bp, Homo sapiens
catgcccctcagattctttacagggcacctcccatccggcacctggagctcctgagtgcgcgcgccccgggagagctgtgctccccgcgaaatccgtgcgctccagctcagggctcccggga

SEQ ID NO: 191378 - DNA, 122 bp, Homo sapiens
gcccggggcactggcagagtcacaccccccatggccagctctgagctctgtctactccgccgtctgtcctgctgtcgctttgtcctgcaggatcctcggcccagagccgtgagggggaggcc

SEQ ID NO: 191379 - DNA, 122 bp, Homo sapiens
aaggtgtgccgggggctggttggaggcgcgggcggcggggccaatgtggcggtgacgtcacggggcgggcggacgctggcgcgggtaggtaagagcagcggcgggcggtggcgctcactccc

SEQ ID NO: 191380 - DNA, 122 bp, Homo sapiens
ggctctgtctccccatctgctccttggctcagcaatgccaagcatcagaatgagctgtttcggacccggccagcgaggccacgcttgtctcagtgctgctccctgggttttgagcgtgcctc

SEQ ID NO: 191381 - DNA, 122 bp, Homo sapiens
tgtttctctcatggtgtggggcagaaggtggcccaggaacctgctgtcgaggtgtccccgcgggacccagggacctgagctgagtctgggctgggcgccgcccccgtcccttggctcgtcct

SEQ ID NO: 191382 - DNA, 122 bp, Homo sapiens
ctgtcattacacatatgccacatttcagagtgctttgcttatgcatctttcttccctgcacggagggagagggacaggatgagacaggagaggaacacagtaccctgcagggggaggcagga

SEQ ID NO: 191383 - DNA, 122 bp, Homo sapiens
cacctaagaaattattttgagtagtatggaaaaattgaagtgattgaaaacatgactgaccgaggcagttgcaagaaaaggggatttgcctttgtaacctttgatgaccatgactccgtgga

SEQ ID NO: 191384 - DNA, 122 bp, Homo sapiens
cattcaagataccatccttgaagcagagacagggccctctccagacaccaaattggccggcgcctagatctcgggcttccagcctccagaaccgtgagcaatacatttgtgccatttccaca

SEQ ID NO: 191385 - DNA, 122 bp, Homo sapiens
cccatgctttacagcccccgggccccccattctcactccactctgcaccccgcgccaagccggggagagaaggtgtgggtgcagccatccctggggactctcattcacacttagccgggcag

SEQ ID NO: 191386 - DNA, 122 bp, Homo sapiens
cctcctccccacttccgcgaggaagagcccagccccagcaagccgtgcggcgtcggcgggcgaacaccgagcgagtcgattttctcgcttcaaaaattccagctgggcggagaaagcgggga

SEQ ID NO: 191387 - DNA, 122 bp, Homo sapiens
actcccagctgcacagccccttctcggggtctctccacgcgcccccggcttttcactcaccgtcttctggccttgccaatggcctgcagctgctatgcccttggacacccctgcccaggccc

SEQ ID NO: 191388 - DNA, 122 bp, Homo sapiens
cacggttcctccggtacagattgaggatgtggcagatggtggagtcggctgtttcttcctcggctcggaagggatgttgcacacagcaatcccgagctcacagccagccttgatgtccatcc

SEQ ID NO: 191389 - DNA, 122 bp, Homo sapiens
agagaaagtcgagcgactgtggggttagacggaggcagacagagcgtgggccgagcgatgcggggctgtgcgcccaggcggccgcgagttgtgactggagccacgatgcacggccaggcgcg

SEQ ID NO: 191390 - DNA, 122 bp, Homo sapiens
tggaggatacactctccagggggttcctgttaaaaaccagagcttcagcttccaaaattacggctgagcttcagtttttccacaagagattgcctaaaggaaccatggagatcagaggggca

SEQ ID NO: 191391 - DNA, 122 bp, Homo sapiens
gggaggctaagctgcaggctataaaactacttagcagcagtatagaaatggctcctctggcgcggtggctcatgcctataatcccagcactttgggaggccgcagcgggtggatcacttgag

SEQ ID NO: 191392 - DNA, 122 bp, Homo sapiens
gtaaagtcgggatgactgtcaccacagaaataaatccacaggaactggatccaagtcactcgttgatttatgtaggcagttggagagacatgcgtttgaaagggtatggtaagaaaatatca

SEQ ID NO: 191393 - DNA, 122 bp, Homo sapiens
tggaagcgagctcccagcggcggggagcgctggagcgcgggtctggcttgggaagccgggcgccccaggggactcgcgccgcgaggccaggaggagcctcccccgggagtacctggacttgg

SEQ ID NO: 191394 - DNA, 122 bp, Homo sapiens
cccaacctgccccctgccgtgggccatgcagccacggattggacccccaaccaactccctcgccgctggcagtgacgccccagaaagcgctgcaacctgatccccgccgtgaatagtgcagc

SEQ ID NO: 191395 - DNA, 122 bp, Homo sapiens
cgaaaacacaggacaatggcaatgcatttggagagggcagtgaccttttctagctgagggcgtcaggaccccttcccccacattccttcctcccttcctccctccctccctccctcccttcc

SEQ ID NO: 191396 - DNA, 122 bp, Homo sapiens
cagaactgccatttgaacaaagtcagttctataggtcatggacgattctttaccttaagacgatgagttctacagtacctcaatcactcatgcatctcactgaacaaatcaattgcattgat

SEQ ID NO: 191397 - DNA, 122 bp, Homo sapiens
gcgcctggccagcaaattcttaattgcctgtaaaattactatctcactatgtattattttcggaagcagatatgaccgtgtacagttttcttataaaagtgccatagcaacatgaatactca

SEQ ID NO: 191398 - DNA, 122 bp, Homo sapiens
gtgtggaagaaggaaacaccgagtctctgtataatctatttacataaaatgggtgatatgcgaacagcaaaccaataaactgtctcaatgctgattcattctctcggctcggctctcacgtc

SEQ ID NO: 191399 - DNA, 122 bp, Homo sapiens
ggtctgaggcctccagcctcacagccagtgtagttgcatgttaggtaccacttccatcctcggctgtcaaagaacaatgctccttatctgaagaatgtggtctggagataattagttctaac

SEQ ID NO: 191400 - DNA, 122 bp, Homo sapiens
ctggatagtccatgaataatagcctctgcgctgttgcgggtcctgcggaagtcctccgagcggccatcgcggaaagctcagcaaagagagaggcagaggaaatcgagcatccagccggcagc

SEQ ID NO: 191401 - DNA, 122 bp, Homo sapiens
cttatgtagcaaaaatgagcacatcctggaagggcccgggagaaggtgctcctggggcagcgcggagagggagctctgaggctggggcggcagcggtgcttgccgccgtccccctggtcgct

SEQ ID NO: 191402 - DNA, 122 bp, Homo sapiens
ctagttccacaaccgctcctgccccgccgcacccccggccccgcagggcgccactcagcccgcacccccggccccacagggccccgctcagcccgcacccctggccccgcagggcccccgct

SEQ ID NO: 191403 - DNA, 122 bp, Homo sapiens
cacccgggttcagtctctgtgaggagccaacaggagggggcctggcctggtctctgccctcggccctggctggccggtcctgggcatctgggctggagaagggcagggcttaccctgtctgc

SEQ ID NO: 191404 - DNA, 122 bp, Homo sapiens
aggccggggcgggtcccatcaaccaatagcggcgcggggctggcgggtggggcggggcctcgccggcgccgtcaagtagcctgggggacaggccggcgcggctgggagcgggtgggcggccg

SEQ ID NO: 191405 - DNA, 122 bp, Homo sapiens
cggcctcggccccaggccggctcaggctctgggatcccgcggggacgagggcggagttggcgagtttggctgtcagcggccggtgttcctgcaccgccctcgctgcagcgccgcgcgccatt

SEQ ID NO: 191406 - DNA, 122 bp, Homo sapiens
atggtgaaaccctgtctctacccaaaaatacaaaaatgagccaggcatttttgtggtgtgcgcctgtagtcccagctcctctggaggctgaagtgggaggattgcttgagcctgggaggcaa

SEQ ID NO: 191407 - DNA, 122 bp, Homo sapiens
ggcaggggagagcaaggggctttggggtcgacctcctgggggagggtagccctggggccccgctgtgccctcactcgcccttcttgtaggcgttcttgatgatggcgtttttgaacagcgtc

SEQ ID NO: 191408 - DNA, 122 bp, Homo sapiens
cttcggcagcaatgtccctgagtgaacacggaacctgaaatccccgtgagtcaggatccccgagacacaggggcacgtgcaactgccgatcacagaagctttcagacagtgactccaggcag

SEQ ID NO: 191409 - DNA, 122 bp, Homo sapiens
tccgggtgtgtttccacggcttttcctgcatagaacagagaggcacaaagtcaaggcatgcgagtaagggccggggatccggagaggacgcgagccacgctgtggccgctcccactcagcgc

SEQ ID NO: 191410 - DNA, 122 bp, Homo sapiens
ggccctagtctgttttatatttgtatcctaggaacttaaacctgaacagtctaggtcaggcgcagtggtaacgactgtaatcccagcactttggaaggccgaggcgggcggatcacctgagg

SEQ ID NO: 191411 - DNA, 122 bp, Homo sapiens
cgcatgcccggaagccttaagtgtttcagcctccgacaggggcgtaattaaaggggcaggcgcccacgtaaagacgcgccctacgcaatacgtggagtttctcactttgtggagccgcctgg

SEQ ID NO: 191412 - DNA, 122 bp, Homo sapiens
gagctcccaggaaacaagaattggcatgctgcatcattcctaccccaccaaccagcgcagcgcctcctccatgccagggctccacaggtatttgttggatgaagagtacacaaccagaaagt

SEQ ID NO: 191413 - DNA, 122 bp, Homo sapiens
gcctgcgcagtgatatgtactcgccgtctcctgcaactccatccgtaccgaacactgccgcgccccgccccctcacacagcccggcgcccgcctacccccgcaacgagagtagagggcgcat

SEQ ID NO: 191414 - DNA, 122 bp, Homo sapiens
atgggctcctgcttcacctgcacgccggcctgtgcgtgcgcctccttctgccccggcagccggtccaggtagggctcgtccagcagagcctggtgctcacggagctcctcctccgtctcctc

SEQ ID NO: 191415 - DNA, 122 bp, Homo sapiens
tcacaagtctgccaggggaagtccctggacttcttgcttctttcgtgtaggacaggctgtcgaaacctcagtggataaaagacctagagaatgtgtatcccagaagaagctggccaaggata

SEQ ID NO: 191416 - DNA, 122 bp, Homo sapiens
gccttggtgaacggggtttctctgcaagagaagcaaagttagaccaaagccacataccttcgccactcctgaaagcctcagagagaaccctatctcatctgcatttctcacctcggaaccca

SEQ ID NO: 191417 - DNA, 122 bp, Homo sapiens
agctgtggctgcgtcgtcctgaggctacgagtgggacccgccgcccctttccccgcccctcgcctgggtctgatgctgcttagcaaagtgggtgcagatgcacgttttaaataatagggcac

SEQ ID NO: 191418 - DNA, 122 bp, Homo sapiens
agccgccactgcacttcacctctcggccaccaggggtcagaacgactgcatccacagccacgtcaaggcccaaaccttgattcaaaaagcctttatcaaaaggtggtaatttgctttcaatg

SEQ ID NO: 191419 - DNA, 122 bp, Homo sapiens
tggatcatctctatccccagctactgttaaatgacccgcaattatgatgttttctgactccgggtctcgggcctccggctggtattcctgcccctttgccaagacccctaatcgacagacgt

SEQ ID NO: 191420 - DNA, 122 bp, Homo sapiens
atgattttatacgttgtgaggccgtgcttaagtctgtagcttttccctgggttttggcctcgttggtgccatgatgttggtgccaaggcagcgtttttatcgttgctgtccttttcattcac

SEQ ID NO: 191421 - DNA, 122 bp, Homo sapiens
tcttggaaggttatgaagtcctatgctattggtgcttctgaactgaccaagccacttccccgctctacgccttctcttcttcaccctcccctaagttccgtagtgagctgctgggacttcca

SEQ ID NO: 191422 - DNA, 122 bp, Homo sapiens
gggaggttgtcgggaggggccggcgaataaaacgagcggcgaaagaaccgaaaaaaggctcgacgctaccgtgtatgaggaactttgatccttgcgggccaccattccggaagtagaattta

SEQ ID NO: 191423 - DNA, 122 bp, Homo sapiens
tcttagcatttagtatgtgccacctactgttctaagcctttatgtatttcatggactcctcgaatccttcaacaactctgtgcagcaggtgctttttaagaccagccttgagaaactatatt

SEQ ID NO: 191424 - DNA, 122 bp, Homo sapiens
gctaacggggttggcgggggactagaattttatttttgttttacagtctcaaaggaatcgcgataggtgcaggggccactgcagtgggactaggctcaactctgagtgtaagaagaaaaacg

SEQ ID NO: 191425 - DNA, 122 bp, Homo sapiens
cagggcgcgggaggaggggcagggcatccgcgttcgtgtctgggccctggcggggagtcgcgtggtccaacccctcgtttttaagaggagggatctgaagcccagctaggcttctaattcca

SEQ ID NO: 191426 - DNA, 122 bp, Homo sapiens
gacccactgggtcctaagtgccgggaaaggccgcagggcagatgctggggaggcgctctccgcttgtcctctcccggcctgcaggaccccaacgggttctctcctcaaagttaatccgagga

SEQ ID NO: 191427 - DNA, 122 bp, Homo sapiens
ctgaccacacattcagaaggagccacctttgctgggctcggcctctaccaagcagaaatgcgattacactctgaggtgggggtgcaacgatgaattgtgtattcctccaggattctcagcgg

SEQ ID NO: 191428 - DNA, 122 bp, Homo sapiens
ggaatttccggataacgtgatcccggatgcgcttgactgacttacacggaacgagcaaagcgcaaagcagtccctgctaaggacttagtttatgccctcaagcgcaaaggtcggaccctcta

SEQ ID NO: 191429 - DNA, 122 bp, Homo sapiens
gtgcaggagcagagaggtgggcggggccgtcaccgggcctcgtgtgcttgggggcagggccggtgccccatcgcgctcctgcgggaaccggggctccccaccccggggaggggaagtttccc

SEQ ID NO: 191430 - DNA, 122 bp, Homo sapiens
cccaccccagcccaccccaccccaccccaccccacccacaccgcccccgacgccgagctccgccaggtggaggagagcgtcccgagactgctgcccgcagcccctcaccccgccctcggccc

SEQ ID NO: 191431 - DNA, 122 bp, Homo sapiens
ggggagacaaaggggagccagggaacaatcccagccttgtccagcctccagggagcagcacggggtggcccagccccattagcaggcagctcactcggccgcctgcacacagccagctcctc

SEQ ID NO: 191432 - DNA, 122 bp, Homo sapiens
tgcttgaacccgggtttcaaaaattgcttgaacctgggaggctgcagtgatccgagatcacgtcactgcagcttggcaacagagcaagattctgtgtcaaaaagaaaaaaataaaaaggata

SEQ ID NO: 191433 - DNA, 122 bp, Homo sapiens
tcacattgtatgttaccatttgtccttgtatgtttctgtttctgttaagagatccctgttcggctctcattgtatgcctttagtatacagagctcggttgcttttgtctagaatttgctttg

SEQ ID NO: 191434 - DNA, 122 bp, Homo sapiens
gtgaataaactcaggtactacttatagaactttattgcttgagatctgactttgcaattgcgattttctctgtgcttttgaattgaagaagagattaagtgggacccctggaagtcagaaac

SEQ ID NO: 191435 - DNA, 122 bp, Homo sapiens
ggcgcggggaggagcagggatcttggcagcgggcgaggaggctgcgagcgagccgcgaaccgagcgggcggcgggcgcgcgcaccatgggggagaaacccgggaccaggtaagggaggtggg

SEQ ID NO: 191436 - DNA, 122 bp, Homo sapiens
atctgtcatagacacacactctttctctctctctctctctctctctcacacacacacacacgttcagcatggctgctttgcagtggaaacctgtactgcacatccacaggtgtggcaggagt

SEQ ID NO: 191437 - DNA, 122 bp, Homo sapiens
tccaactcccggaggccctcccctccccctctccccgggggcgcgggctccgcaaggctgcgactggcctagcccgctcgctcccgagttgtttaccggccccgccgaccaagggtttgttc

SEQ ID NO: 191438 - DNA, 122 bp, Homo sapiens
cgccaccctgggtgtctataggctcatctggccctgctgataggccctgcccaggacgggcgttcacagagcaaagtgtgttttagagttattgtcaaaaagaaggctctttgtactgcttt

SEQ ID NO: 191439 - DNA, 122 bp, Homo sapiens
acgtttccttaacgtccaaatgaggcggcctgggtgcccaccccacctgctgggaggacccggcaaatcccccgcagcctgtcagaagcccgaggaccccggcccccatctcctgcctcgtc

SEQ ID NO: 191440 - DNA, 122 bp, Homo sapiens
ggacggaggacagccatggaggacgcggccccgacagcgcccaccaagtgacacggaggacggaggacagccatggaggacgttctctggacgtggctatttcctctgcagagcaagcgccc

SEQ ID NO: 191441 - DNA, 122 bp, Homo sapiens
cacgctgctcctgcgcaggtcctagactcctcccttcgggaggctcaccccctcccttctcggctacttccggccctcaccgaacgccctcaacgcgcttgcgccgttttgataggcttctc

SEQ ID NO: 191442 - DNA, 122 bp, Homo sapiens
gacctgcatttacagcagggggaacatctcacacccttgcataagttaaaataaatattacgtacacatctccatcacctaggaggacgtacataaatacatataaatattaattaggagca

SEQ ID NO: 191443 - DNA, 122 bp, Homo sapiens
gatcgcgtccctcctcccctttccctcgccctcccgactgggaagggaggttctcgcccgcggccgtgacgcaccccatttggcaccctgtctgggtcaccaccttctcctttggcagtgag

SEQ ID NO: 191444 - DNA, 122 bp, Homo sapiens
agacattattctccatctgttttttttgtaggagactgtggaagacaggagggagttgggcgtgcacacagaatttaccctaacagctttgttagggaggtggtcccaaatactttatattg

SEQ ID NO: 191445 - DNA, 122 bp, Homo sapiens
cgttcctggaaaacggtaggcctgtgggtgaccagcttccctatctgtcttcccacagtgcggctgggatccggcggccacctgcacctgcgtatctctcgggccgcccttcccgaggggct

SEQ ID NO: 191446 - DNA, 122 bp, Homo sapiens
aacaacggtcccaactgatgcaaatggcccaatgcaaacacgttgacaatctcccgttagcgacagtaacagacgctaagcgcccaatgcgaacaaaactcccgcttcgaaaactacacctc

SEQ ID NO: 191447 - DNA, 122 bp, Homo sapiens
aggccgaccctgccacgccaggccgcgtgcactaccacccggactcgcctgccaagggcgcgcagtggatgaagcaaatcgtgtccttcgacaagctcaagctgaccaacaacctactggac

SEQ ID NO: 191448 - DNA, 122 bp, Homo sapiens
aagttatgagattagtaatagagcctggctgtgcttcccatgcttcctccgcggtgactccgggtatgacagtgttggagccgggactgcggtgtcgaggccctgcctctaactggactgca

SEQ ID NO: 191449 - DNA, 122 bp, Homo sapiens
gagaccacaacttgtcgaggataatttttttatggttcccctccaaagtagtagttcatccgtggttcttacttgatgtctttcatcttcagtagatttttttgaataggtaagacgtttac

SEQ ID NO: 191450 - DNA, 122 bp, Homo sapiens
ttacgctgttctctgtgtatacagcatcgtttttgcttgcatctcctgcagttgtgaatccgcatttatctttgtcttttttctttctccctatgatcatacgctctttcaaaaacagttat

SEQ ID NO: 191451 - DNA, 122 bp, Homo sapiens
actgggagaatgacaacacacttgtttcaagttagggaagagcctgtggttctcttcctgcgttcaggggaaagcgaacacacaatgttcgtttcctaaatacgggatgtgctgtgctggca

SEQ ID NO: 191452 - DNA, 122 bp, Homo sapiens
gtgagggtctcagcgaggcctcttcatgccccaggcaccaccagctccccctccccagctcgttcccagccaggaccctcagctgtcctctcaggccccctgcgacagctgaagagtgtgcg

SEQ ID NO: 191453 - DNA, 122 bp, Homo sapiens
gaaggatagccccacctgccaccacccaggaccatcccatgggctgcccaggctcagaggcgaccactcgaggtcttcatcattgtgaatgtggcctcctgcaggctgtcttcttccattct

SEQ ID NO: 191454 - DNA, 122 bp, Homo sapiens
ggagagaagaggctcggtctgcaagagttgtcatttgttggctgcggtgagaccacgccccgtcgccctcccacacctgaccccgccctcccgcgtccattgggaacgccaccggaagtaat

SEQ ID NO: 191455 - DNA, 122 bp, Homo sapiens
agcaggtggattacttgaggtcacgagtttgagactagcctggccaactttgggaaaactcgtctctactaaaaatcctaaaattagctgggcatggtggtgggcgcctgtaatcccagcta

SEQ ID NO: 191456 - DNA, 122 bp, Homo sapiens
ttgtcttgattagggtctgatttgtcatcttgcaggctgttttgcttttaaagtttaaagcgtttagatctgtcgtcaaaattgccctaaacctgaatgaggaaaaattcagaattttaaaa

SEQ ID NO: 191457 - DNA, 122 bp, Homo sapiens
actttagctttccccaaccccatgcccacctccctgagtttttactcctgttctagtcaccgtaatacccagccctgataggaagcttacacaaagacacagttttaagaacttaatgggaa

SEQ ID NO: 191458 - DNA, 122 bp, Homo sapiens
gccgcaaggttttgtggcgtgctggagcctggagcgttgggctgctggcgctggggaacccgcgtgcccctggtgattatggctcttttgagcgtccctatagcctgtcatcttgtgtgact

SEQ ID NO: 191459 - DNA, 122 bp, Homo sapiens
cagtgacaccagtgatgctgttaaacaaggacaatccggttcatggattgtgacaacgcacgctgacatcaagcagaccctgccgtcaggtacagagggcaccacagtgaccaggaactgct

SEQ ID NO: 191460 - DNA, 122 bp, Homo sapiens
gagctggggtgtgtgggagcgggatgcttctaaggcgaaaagaagcgccagcctcgtaagcggcctctatctgggctgcccaggccggatgctcaggagcccacagcaggggggatggagcg

SEQ ID NO: 191461 - DNA, 122 bp, Homo sapiens
tacaaactctaggccatttcacatccgggacttgaacatcctcggattttgttatcagagcggcgtcctggaaccaatttccctgaggatgccgagggatgactgtattgtataccaaattg

SEQ ID NO: 191462 - DNA, 122 bp, Homo sapiens
tccctcagaaggctactgggcggctcctccctgcctcttcccgctgcctgtggctcagggcgctccttggctgtgattacatcagtccactctccgccctggtggtcacatggcctcctgcc

SEQ ID NO: 191463 - DNA, 122 bp, Homo sapiens
gaagtctgagaagggtggctccggtgatcccagccctagctgtttcccatattcctttatcgtgagtgtcaccccggtccccgtcacccaatcccagagccccgcccctcccctgaggggtc

SEQ ID NO: 191464 - DNA, 122 bp, Homo sapiens
atacttctccaggccgctcttgtccaggaagggctgcacgtaggcggcagctgcagaaggcgagaggaagcagaagggcaggcagaagggggccgcggcggccgcgggctgcgggaagggcg

SEQ ID NO: 191465 - DNA, 122 bp, Homo sapiens
cactaccgcggctgtggccgggccgagccgcaggtcttgcctcgcctcctactccgctgccgcctcctgtcagcagctcagccactgcggtgactcggcaactccacttccgggtccgggac

SEQ ID NO: 191466 - DNA, 122 bp, Homo sapiens
ggggagagcctgccatcagggaggctcctccctgggtgtgggagggaagcgcaggcatggcgcgcccctgagcactaacacccatgctcctttgcaggctccgtacttctggccttcgaact

SEQ ID NO: 191467 - DNA, 122 bp, Homo sapiens
tctccgcctccctttctcctcgcgtcacccgcaccagcggctgggatgcggcgcgcgttccgtctttccgtatggaaacatggcgcctaggggcgggccatccccagcttcgagccaccgcc

SEQ ID NO: 191468 - DNA, 122 bp, Homo sapiens
ttaaaagggtcctgtcttaatcatgtctgcatcccttccccacagtggtgcctattttagcgcccgtacgtaatagagactcaatatgtatttctcagcatgaatgcttgaaggaacaagta

SEQ ID NO: 191469 - DNA, 122 bp, Homo sapiens
aacaggaattaggattcttccgattcaaattgtttgtttcaatgttaaagttaaagacaacgtaagtgagaggccattggtttctatgagtcattctacaactccctttaagggaatacgag

SEQ ID NO: 191470 - DNA, 122 bp, Homo sapiens
tctttacttcccttttgtattttttagaaaacagccactcctcgcagtcttttcaccttgcgagtaacagtaagtaccaagttttatgcctttcaacattctgactcctaggttcatcagaa

SEQ ID NO: 191471 - DNA, 122 bp, Homo sapiens
gaggccaactttctagcagggctaaaagtgtgccccagggcctctctacccaaccgcagacggctagttggatgcgtgttctgagagtcgtggtcctgatggatgagtacatcaggtttctt

SEQ ID NO: 191472 - DNA, 122 bp, Homo sapiens
gcatatcccatgtctccacagaggccacggtgtcttcacaaagctaactgcaacgattttcgcaggtgatattttcccttcatgattttccattttctacttgagcattaaaatatcaggaa

SEQ ID NO: 191473 - DNA, 122 bp, Homo sapiens
catcctccaccttggctaactgaaccttatcgataggatgagtcgctgcggcagtctgctcggtctgcgcggaaggcagggagcctcgcagagttttaaagatgcagagctcctttttcgga

SEQ ID NO: 191474 - DNA, 122 bp, Homo sapiens
atcactcgggtctcaaggaaggcgggagatgaagccggtaccacagaaagccgagcttcccggtgaaaacagctctccccagagaagacccagctctggcgggaaagccccggaatcgcaac

SEQ ID NO: 191475 - DNA, 122 bp, Homo sapiens
agaaggcggtcctcctggggcgaagggtcttctctgcactctccgcctcccaccagagcccggaaaaccagtcctgagaagagcccccaggcctcctagcgcgggaacgctgcgctcgcgtc

SEQ ID NO: 191476 - DNA, 122 bp, Homo sapiens
gtggccacccccttgcaccccggcctccttaaaggggcagcaccttcgcaaatatcgcgccgagatagcttctgagtgggttggggtcttccagccttccagatgtacagatgggaaacgga

SEQ ID NO: 191477 - DNA, 122 bp, Homo sapiens
gcgagggtgaagcaggtaggggcgagatttccggggtcgcgggtggggggcgccctggagcggccaaggtgcagggtcctcgcgtggcacccttgggatctgcccagtttgcggatggagcg

SEQ ID NO: 191478 - DNA, 122 bp, Homo sapiens
ggcctgtcctcattcaggtccacattcaggcaacaaagctcacttggtctttgcatcccacgcctcatgttacctaaggaggccagcccatctcagaggcacagttcgatgtccagctcgat

SEQ ID NO: 191479 - DNA, 122 bp, Homo sapiens
cagcgcttcgctgaaggacgaataaaaaccttgaaaagggacttaactgcgaggttaaatcgtggaggtgagcaaggcccagtgtgtgcggagaactcacatttaagaaggagtccattgag

SEQ ID NO: 191480 - DNA, 122 bp, Homo sapiens
ttccgggccctgcacactggtctgagcaccatgtttttaccccaggtgggctctgctgaccgaagatcctgtcctgacctctccccaccattccaggtctgacttatccaagaagccaggca

SEQ ID NO: 191481 - DNA, 122 bp, Homo sapiens
ggacgcaaagagggcgcccggggtcatctggagccctggaggctaagctcggcagcctggcgccccgagtggcttcgagtccccgcgaccgccgccaggcccggccacctccttgccacctc

SEQ ID NO: 191482 - DNA, 122 bp, Homo sapiens
atgattgtgcttttaatttgtgttgtttgtatagtctgcagatgcggatcctgactcccgcgagaagtagctcaccatgacaaagctgccttggcttttattgctttgcaaatcaaagaagg

SEQ ID NO: 191483 - DNA, 122 bp, Homo sapiens
caagtcaaggtgagcccggacatggccatcttcatcaccatgaaccctggctacgcgggccggtctaaccttcctgacaacttgaagaagctgttccggagcttggccatgaccaagcccga

SEQ ID NO: 191484 - DNA, 122 bp, Homo sapiens
gctgtgtacctcgggggcgtgtgtgcgtgtgttgtgcttgtgtgtgcgtgtccgcgcgcgcgctccctggggcctgtacaccagcagtgtgtacctcggagagggcgtgccctgggccggcc

SEQ ID NO: 191485 - DNA, 122 bp, Homo sapiens
aaaacacacacattatggtttaggagtcctgcagctggaacctacaagattctgaccccacgtaaactgctcctaagatcagtgcttgagatattttgcagacctgatggatcagttggccc

SEQ ID NO: 191486 - DNA, 122 bp, Homo sapiens
gagccacggtggagaaggtggagaagagcgatggagttctcagcgaaatcagagctgcctcggtgggtttcgaatcagaaattcctaagggtaaccctacagtgagtgcataaagccactca

SEQ ID NO: 191487 - DNA, 122 bp, Homo sapiens
tattcaagactgtgagtcatatttgactcctcacttgcattccctcctgtgtgcagtcaccgagccctttagagtcttatgtttattcatttcacatttattgactgtaaactgtcttatgg

SEQ ID NO: 191488 - DNA, 122 bp, Homo sapiens
gtggggggacatcctggggcgggcggctggacggaagggactagagtcggggcgcgtccacggccaaccgccccgaaccaagcaggggaggccagggaccaggagcttccggggccccgcgg

SEQ ID NO: 191489 - DNA, 122 bp, Homo sapiens
gctcggtggtgggctggtacgggctgctggcgcccgagatcatggaggtgctcgaggcctcgccctcgaagccgtccagctcctcgccgctccgcatgctgccgcccggcccgggccgcctc

SEQ ID NO: 191490 - DNA, 122 bp, Homo sapiens
cccacccttcgcagactccggcttcagttgttactccaacagggccgcgtctccagcctccgagccacactggagacacgtgcactgtagaatacacctgagccagtcccagtgcctcccaa

SEQ ID NO: 191491 - DNA, 122 bp, Homo sapiens
tgtaaaataagtacaaaaatgacggtgcaatttatgcaaatgctgtttgcagaagggttccgttcgagcgctgtgtttgcagaagggttccgttcgagcgctgtgtttgcagaagggttccg

SEQ ID NO: 191492 - DNA, 122 bp, Homo sapiens
aatactgatttcggcattaccatcgtcgctgtgagattaggcagagggagcggggctgaccgccagagaaccggtaccaaccaccgcaagcaatcgccgagcctcccaccccagctttcaag

SEQ ID NO: 191493 - DNA, 122 bp, Homo sapiens
atagccattaccattattcacatctagaagtttttcattttcccaaacagaaactctctccgttaaacactaactccccattcattctccctctccacagtctctggcaaccaccattgtct

SEQ ID NO: 191494 - DNA, 122 bp, Homo sapiens
gggatctctccggcctcagggacggggaaggccggtccagtcaggtttcccctgcaggagcgcccggctgggtctgagcttgtcgggaggctctcctgctgcagagctgggagggaacttat

SEQ ID NO: 191495 - DNA, 122 bp, Homo sapiens
aaactttgtagcccaattcattcaacttttggagtgtttgttgtgcgacgtgcagtcgggcgttaccctggagaagaattgggccctttctgttgacgaatgctggctccaggtgttgcagt

SEQ ID NO: 191496 - DNA, 122 bp, Homo sapiens
aaaggccagtctttaaaaactgagtgatctctaaacactctgcactagtcataccaccaccgtcccgttcaagagtctgtgcctctaaggctgttcattctgtctagttcatgatccctttc

SEQ ID NO: 191497 - DNA, 122 bp, Homo sapiens
acctgagatttcttctcttccctccacaattctcctcccgtttctcagaccacaaatggtcgccagtttcacttcgccaaacttggattctcccgcgcttgagcgtcactttcaacgacttc

SEQ ID NO: 191498 - DNA, 122 bp, Homo sapiens
atcattaatttctccatccctcctttcatttattccttcatcattttgagggccagctcccgcgaggctattgtgagaggatccagggcagaatgaaaaacctgtccttgtctgacccttga

SEQ ID NO: 191499 - DNA, 122 bp, Homo sapiens
ggatgtcagtctgcaatgaaaattcataggcaccccagtgaatcgccgggggtgactcagcgcaaaacaccaagcacaaaagagtgcatggcccggttccattcataaaaagttccaaaagt

SEQ ID NO: 191500 - DNA, 122 bp, Homo sapiens
cggggagatggataaactgaccatcatctcaggatgtctctttctggccgccgatatcttcgccatcgccagcatcgccaacccggactggatcaacaccggggagtctgcgggtgagccgc

SEQ ID NO: 191501 - DNA, 122 bp, Homo sapiens
ctccatggaggaggcggcctgtgaaacccctggaacggcaggaaaagcactgtctgagggcgcagggtattcttcaggggagagtgtccatagtgctcctggctaagtacagggctcagggt

SEQ ID NO: 191502 - DNA, 122 bp, Homo sapiens
tgtgcccagaaagagacacacaaatgttggtgtgtgttgtggagcactagtagtttctggcgcaggcagggagaatggctgtgcatcttgtaggggtcgtagtagtgtctgtcctgggctgg

SEQ ID NO: 191503 - DNA, 122 bp, Homo sapiens
taagggtccacttggttaaacatttgcatgacaactcgccataagtattttgcaggtacccggctggagtttctaaaggtggagctttatgttgcacagctgctgggttttagccaacctag

SEQ ID NO: 191504 - DNA, 122 bp, Homo sapiens
cagaccccaaacgcagagtctcaggtccggagcccgatgcccagatggcggagaccggagcgcacagccaggaaccgggttcccaaagtctggttacccgcgcctggggcgcttctggaagc

SEQ ID NO: 191505 - DNA, 122 bp, Homo sapiens
gcagtgggggcggtgggcggtggggggagacacactttcccggaatgcttccttatctcccgccaatgtcagcaaagcggatcatgggtcctggctttttccaccaccaagaatcccagccg

SEQ ID NO: 191506 - DNA, 122 bp, Homo sapiens
tactggagaaggcgcaggccgagcggctgctccgagaattagcggacaacagggtaaccgcgccaccgcacccgcctggcccgccagccaccttgccctttgatgccccctctggcttctct

SEQ ID NO: 191507 - DNA, 122 bp, Homo sapiens
gaatcacagcggccaagcgggtagggagtgtagccagaaaaagaactgagaagcttgagacggctgaggccccatcgcctctggaaagcaggggaattttgccctcagggtcgccttaatca

SEQ ID NO: 191508 - DNA, 122 bp, Homo sapiens
aacacccgatgtgacctactctctgttgatctctcccttcagaggctgctgcccttcccgcggactttcaatttggccagagagagagaaaatgtgcagtaatgacagaatgtcctgcccgg

SEQ ID NO: 191509 - DNA, 122 bp, Homo sapiens
ctgttgacccgcaggactcgctggatgttgaggtcgtcagcaccttctgcgggggtcaggcgtccgggcccgctgcccacaaacacgggatagtggttcaggtctgagtgagggggtggaga

SEQ ID NO: 191510 - DNA, 122 bp, Homo sapiens
cgcccaaggtgctggcagcgagcaagagaggagaaagaggagagggctggaggagaggcgcgaagcggcccccgcgagcctgtgttccgcgtacccagtctctgggcctctcacctcgctcc

SEQ ID NO: 191511 - DNA, 122 bp, Homo sapiens
cgcgcctccctgagccccgcccggccaccaccagcgctgctctgaccgccaccatcttaacgctgcttccccacaggctgcaacgtgcccgcggtctagactgcgaggccgcgggctgcacc

SEQ ID NO: 191512 - DNA, 122 bp, Homo sapiens
tcacctacttcgtcgtgctccccggagtagcatacagcatgctgaatgtgttcctgaagtcgcaccacggagagcactagggacacgagttcatcccctacccccatcttagcatcaggacc

SEQ ID NO: 191513 - DNA, 122 bp, Homo sapiens
agggtcccctgggtaggttccgataccttggacaggtgggcctcatcctgacttagaactcggggaggggccactcttccttccccttcttccagcagcagctccaccaccctccaccttct

SEQ ID NO: 191514 - DNA, 122 bp, Homo sapiens
cgcccgcgtggcgcacagctgcctgggagttgtagtttgctcgccccggcgttgtccgcgcgtcacctccccagccctacgcgcgtgtccatcccgagcccgcgaagcgagaaccgccagag

SEQ ID NO: 191515 - DNA, 122 bp, Homo sapiens
acctgctttctttctcctggctctcccagtcactcctggggttgttagtaggcttcagcacgcctgaaggaccccgtcctacggagactcctagccaagggaaaagcagaaaacacaagaac

SEQ ID NO: 191516 - DNA, 122 bp, Homo sapiens
atctgtttagttaacggttgttacgaagtcttcaaaagacacatctggcggcctgtcacgcgtccatccatggcactttctctccgacttctgctgccgtccttgtctcgtttccttctttc

SEQ ID NO: 191517 - DNA, 122 bp, Homo sapiens
accctgcgaatggttttggctatatcttcatgtaggacctactccctatcccgtcggccgcggtgaatcccacctgcggtgctttaacttgtgtaacagagatgctgcctctgggagaggcg

SEQ ID NO: 191518 - DNA, 122 bp, Homo sapiens
cacagccacgtcccgccacgcgggcgggaaaacgtggaagcaaatgcgattgcctcgactcgaggctcagctaaggagcagtcaggtccgtgtcacctgtggcttccactcccaggaagtct

SEQ ID NO: 191519 - DNA, 122 bp, Homo sapiens
caccgagctgctggggtgggggctccagcctaacttcggggcgaggggtgcgggccggggcggtgggctctgctgcagagcgggccgtaccccaacggaggccccacccccgtgaggggccg

SEQ ID NO: 191520 - DNA, 122 bp, Homo sapiens
cgccaccccctcccctccgcactataaaaacacaaatatgccataactcagccgcccggccgcccagcctccaacatgccccgcgcccgggcctctcaggaaggtcattacaaacgactttc

SEQ ID NO: 191521 - DNA, 122 bp, Homo sapiens
gtctagctgctcactcccaaagcctgacaagttgatgccactgctgtctgagggctcctccggctcaataatcagctcagtgcttgtgtaattcttccgggcttgtaacaccttcatgaacg

SEQ ID NO: 191522 - DNA, 122 bp, Homo sapiens
gcgtaaccaggcaaccgtcattactcatccccatggccactgggtcttccagtggagcaccgtgctcctgggggtcagggctccccagagggacagggcagcctcctctgcagaacagcggg

SEQ ID NO: 191523 - DNA, 122 bp, Homo sapiens
attgatatatttaaacagagctacaaatacagacagttcctaacgaccaaattattttaccgtctcgcaggagcagcgttggcgagttttaataaccggaggttgcttccagatgtcaagca

SEQ ID NO: 191524 - DNA, 122 bp, Homo sapiens
ggaatcaaggacctggaggtgatgacccagaacctgatcacctcagccttcgagttggtgcgggacgtgccgcacggcgtgcttctgctggacaccttccacaggcttgcctcccgcgaggt

SEQ ID NO: 191525 - DNA, 122 bp, Homo sapiens
cattctaaaacccttttccttatctgtttgattttgtgttggtgattgtctttttagagccgtaatatcctttgtctttagcaggaaatgaaatatgggtctgattatttatgcatactctg

SEQ ID NO: 191526 - DNA, 122 bp, Homo sapiens
gagggagaaagggaagtcccagggcccggggtccacagaggatgagggttgtggcagggccgtccatcagcgctgaccttccgggggcccagagcttcccagccctgagtcaagctggccat

SEQ ID NO: 191527 - DNA, 122 bp, Homo sapiens
gcttaggggggtcagccaggatgaggcagggcagagggtattacaggtgggaaggacaggcgggcaagaaaataccaagtttgggtcctgggaatatcctataggataaactcagaaaatct

SEQ ID NO: 191528 - DNA, 122 bp, Homo sapiens
ggcgggccccgggtcgggcgcgagctgggggtgccgcggggtctggggctggggctggggcgcgggcggccggagcaggcacacggtgagcagccccgcgcacgccatggcgccgccacccg

SEQ ID NO: 191529 - DNA, 122 bp, Homo sapiens
caggattgaaatcattttcctgcttgggctgaccgtaggggatgccgctgaccccacttccgtagcgccaggaggcaccatgatcatcgctgaggagacagaagactccgtcccgctccagc

SEQ ID NO: 191530 - DNA, 122 bp, Homo sapiens
gggagcggcacctggaagatgcgcccattggctggtggtgagtgcgcccccgcctcggggcgagggtaggggcggggaaggaggaccccaggggaagcgtcgctccccaaccctgcctggga

SEQ ID NO: 191531 - DNA, 122 bp, Homo sapiens
ggcgcggcccgcgattggctggcgtgggcagagcgtcttctcgggcctgggcggcgcagacgaggcctgaggcggcggcgcgaggcaggtgagctcccggcgggccgggccaagggcacccc

SEQ ID NO: 191532 - DNA, 122 bp, Homo sapiens
gaggctcctgccgggccgtagagcccttcgccccctggggacccacccgtctataaggtccgtttggcctgcagcagcctgagtccgtaatgctgggcactgttcatgggatcggcccccta

SEQ ID NO: 191533 - DNA, 122 bp, Homo sapiens
ctctgccacagttgtcccattttttttttttttaaatggtgacccaagttccattatggacgatcaggcattcaggggaaggagggatccaaagcagagacaaaagcagccagccagctcat

SEQ ID NO: 191534 - DNA, 122 bp, Homo sapiens
atccccagcatatgccagccacagcaagggctccaaacaaaaaagagcttcaacagcttccgcatactctgctgctgttgactcagacacacatcacaggcagctaataattacttttccat

SEQ ID NO: 191535 - DNA, 122 bp, Homo sapiens
gtcttccccaacagtttccagactgggagaggaatataaatacagtgtcggaccatgtcccgggtcaacaactaaaaaacagtgatcgaatgaaagaggttgtgggagcagggtattcgcca

SEQ ID NO: 191536 - DNA, 122 bp, Homo sapiens
tcttcagctttatatttctcagcatccagaaccatgcgctcaatctcctccttgctcaggcggcccttgtcattggtgatggtgatcttgttcaccttgccggtgctcttgtccgtggctgt

SEQ ID NO: 191537 - DNA, 122 bp, Homo sapiens
ctggttacaccctggtcactggaggggtggttttctgagctaacttgtcacctttggctgcgagaacgtgagaaagactcagcgaactgacatttcttgctcatcatatggccacattcagt

SEQ ID NO: 191538 - DNA, 122 bp, Homo sapiens
gatttttgctttgtaaaaggagcccaaacatctctcctctatctgaagtagtatctctgccgtccccacagagcttagttgtgggcaaactccctagtcctccccacataacagaaaatcgt

SEQ ID NO: 191539 - DNA, 122 bp, Homo sapiens
caaagttacattttggatatgctgttagagatgcctgctaggcattcccctggagatgcacgtagaccgttggacatatgaatctgaatctggagtttaggggctggaagaaaacatttgag

SEQ ID NO: 191540 - DNA, 122 bp, Homo sapiens
tggtatggaaagagccatccactaaagacaccatttgtgaaaaagcgagcacccaattcacgccttagagcagggagcctttatctgaagtcattgaacttctggggaaaccatcgatggca

SEQ ID NO: 191541 - DNA, 122 bp, Homo sapiens
ctggaaaatcgggtcactcccacccaaatactgcgcttttccgacgggcttaaaaaatggcgcaccgcgagattatatccggcacctggcttggagggtcctacgcccacggagtctcctga

SEQ ID NO: 191542 - DNA, 122 bp, Homo sapiens
ccggacgtctgtcctccagagccggaggaagggccactctgctgacactgcgatcccagacgtctgtgctccagagccggaggaagggccactctgtgacaccgcgagcccagacgtctgtc

SEQ ID NO: 191543 - DNA, 122 bp, Homo sapiens
gtatcctgaggggcatttctaggtcttcgagcgtccggaagcataggggttggccgaggccgagggtcggcgttgacctgtcccctcttgcgcgcaggccgcggcccctccccgctcgcggg

SEQ ID NO: 191544 - DNA, 122 bp, Homo sapiens
cagtgataaccgacagcacagtgaggcctggaaacttccctcggagggactgttggctctcgcaggtgcggggccgctaggatcaataaacggcctgagaaacatgcctggcgcgttttctg

SEQ ID NO: 191545 - DNA, 122 bp, Homo sapiens
tgcacccaggcgcccaataaaacagcatgttgctccacaccaccttgtgttgtttgttggcgcgctcccggggttcaaacagatacaagaacctttaatctggtgccgaaacccaggagggg

SEQ ID NO: 191546 - DNA, 122 bp, Homo sapiens
gaagggtcccgctattactgctcctggtacctggagctgccaagcacccctgcgatggggcgccccgggggctgtgcgccaggctgggagtatccttggggggcggggcgagggggcttccg

SEQ ID NO: 191547 - DNA, 122 bp, Homo sapiens
ggccagctgtgaggccgcggtgacaccacctccctgcagtcagtttctgcaaccatgagacggggagaaggacagccctgcctcacaggctctgaaggagggtgacctaagatcaagcacgc

SEQ ID NO: 191548 - DNA, 122 bp, Homo sapiens
gggcccgagccacgtcacagcgatccctggcggccggcgggcggagcggcgtgggctcagcggaggtcgtggaagaggatgactgcacagtttacctacgcccagcccttgctgcgcttcat

SEQ ID NO: 191549 - DNA, 122 bp, Homo sapiens
ctgatggtggagacctgggtaggtccggaggacagacacaggagagggcacaatcccaagcgcagctctcctgcactggctcgcaccacagccctcatctgagtggccgacacaagcctgga

SEQ ID NO: 191550 - DNA, 122 bp, Homo sapiens
acaattagtagtttaatcacagggtgtgtgtgtgtgtgtgtgtgtgtgtgtttatgtgcacgcatgtatatgcatcaccacgtagccaggaggggcctgttggggtttgagtcactgggatc

SEQ ID NO: 191551 - DNA, 122 bp, Homo sapiens
tcaatgagatgccataagctgtggtggcactatacacagtcacagaacaggaagaaccaccgggtgggggctgggggttgggaaaagccatttcctgagaagtgtccggctcctgggtctca

SEQ ID NO: 191552 - DNA, 122 bp, Homo sapiens
agtggtagcaataaacagttacaataataaacccagcagttaacatttaccaagtgcccacgatgggcggcagttccttatggtgttaggatgactctgtatagtggctactgtcatccacc

SEQ ID NO: 191553 - DNA, 122 bp, Homo sapiens
ccggtggtggttcctacacccagcctcctgggagtttgcctatgtgtatttatgtgtttccgggctggggagtgtagctactttcacaagattgggccctgagcctgtgaaacccactagcg

SEQ ID NO: 191554 - DNA, 122 bp, Homo sapiens
cggccgcgcctcaccgatcagtgacgcatcgcccccgcccgcacgtgcagccgactcccgcgccgagccaaccgccgccaacagccggccccgcccactcgcccagcactgcggctgcgcgg

SEQ ID NO: 191555 - DNA, 122 bp, Homo sapiens
ggattaaccatactttacccacacaaccttagcttatccaccttatgtgatcccctttgacgtcctaaatttgtgtgatctgcctggctcccagaaaaatggatctccagagagactatgtc

SEQ ID NO: 191556 - DNA, 122 bp, Homo sapiens
tccttactggttgccaacctccacctttgaatcttgcttgcttgcttgcttacagggcctcgctctgttgtccaggctgaagtgcagtggtgggatctcagctcactgcaacctctgcctcc

SEQ ID NO: 191557 - DNA, 122 bp, Homo sapiens
tcccggcaggtgcgatgaggtgcacatagctggacgggccggtgctgcctacataggcagcggctacggggtcgggggacagccttgaggctggagctcagaagtgcgtagagaatggcggg

SEQ ID NO: 191558 - DNA, 122 bp, Homo sapiens
tttggctttgcaggcggccacccaggccggccggcttccacccgtgtccggtggcccagccgcaaccccgatcccaatccacatcgggcctccctgtcgccccagacggcggcttttgtgta

SEQ ID NO: 191559 - DNA, 122 bp, Homo sapiens
cagaagggaaatggttttctcccggagtcgggcgctcggtgacctgggctctcctccaaccgtcccagccaaactccacgtcgttctgctggccgacggcctcccagcgtgctggcatctgt

SEQ ID NO: 191560 - DNA, 122 bp, Homo sapiens
tatcccggtccagctattccgaggacatcgtgggctctcggagaaggcgacgcagctcctcggggagcccaccatccccgcagagcagatgttcctcttgggatggctgttcccgctctcac

SEQ ID NO: 191561 - DNA, 122 bp, Homo sapiens
gtgacttctttgtttgaccataaaatcctttactgtgtttcttacccaagaccgcagggacggtgtgcattgtgtgatgcctatttcatgacagcgatgagcgcgggggtggaggcacagtt

SEQ ID NO: 191562 - DNA, 122 bp, Homo sapiens
attgttcccttcgacacacacataacagttttattggctgtatttgagtagagtctacaacgttaaaactgcacactgaaacatgcaaatgcaccagaaaaaaacccattcagagatgggat

SEQ ID NO: 191563 - DNA, 122 bp, Homo sapiens
gtaggtgcttcacgtcgtgaggcgggcactcttccatcttctggggatttcattctgggacggagagtgtgagcagcagtaaggtcagatgggggtgaggatacagtctggtgaaatgtggt

SEQ ID NO: 191564 - DNA, 122 bp, Homo sapiens
aattagattttgctaaaaacatttcaaacttcactgcaattttaatcatgtcctcaatttcggcaagcctgtcttccaaacttatgcttttaataacttgaatccatgacaatttttcctat

SEQ ID NO: 191565 - DNA, 122 bp, Homo sapiens
ttccactgcaggtactgtccgtgtctacaggaggccgcagggtcacggggatcgcgtatgcgcaaagtcccctaacattaaaatgacatttgaagcaggatacacgtgttaatttacacttt

SEQ ID NO: 191566 - DNA, 122 bp, Homo sapiens
tgggctatggacttcagtaactagagtcacgtgttaccggcgacacaaccaatgagggcgcgagatctgtgtaagcagggggaggcacgtgccgggccgcacgtgtctgggagggggggaag

SEQ ID NO: 191567 - DNA, 122 bp, Homo sapiens
gtccaaacattgcacactcgcgtgtttctgggacaccaaagtaaaacgaatgcagggaaccggccgacccgccacgtcgccccccagacacggtcccatccctccagcgtcccgctcagctc

SEQ ID NO: 191568 - DNA, 122 bp, Homo sapiens
tttgtcagctgtttgtctgcacaagataatgaggttacactaggatgtaaatcagttttacgctcactgcttacttaaatggacagttttaagtttcagttttaagctcactgcttagttaa

SEQ ID NO: 191569 - DNA, 122 bp, Homo sapiens
ctggtagcagtgtctgtctgtgtttttcattcagatcttgctatccacacaaacatcatgcggccaaagagtaacttgggatcatagtactggtctagtgttgtctctggacacatctacca

SEQ ID NO: 191570 - DNA, 122 bp, Homo sapiens
cacacacacacacaactgtgtaactatagagcaatatttgtactattttaaagaaaaaaacgcaaaattcaacatggcatgtatttgaagatggtaacggttaaaacaatgtatacaagcaa

SEQ ID NO: 191571 - DNA, 122 bp, Homo sapiens
cgcccgggccggaagagaggttgcttagcagcgtgtgtttctcccttgcctctgcggcggcggaggcctggcgatgcccaagaacgcagtggtcatcctgcgctatgggccctacagcgcgg

SEQ ID NO: 191572 - DNA, 122 bp, Homo sapiens
tttcgagtgggccaggaaaagaatttcacactacctgggaatggtaggacaggaacatgacgggacatgcgtgaaagtatctgccaaacccaaccaggaagagggtaaagagtcgggggatg

SEQ ID NO: 191573 - DNA, 122 bp, Homo sapiens
tggctcctggcgttgggattcccggggtggggtgccctgtgcaaagagggatctgctgagcggcaggtgcaggcagtggaagcagtagctgctgtccagtcggtagccgacttgcggatcca

SEQ ID NO: 191574 - DNA, 122 bp, Homo sapiens
ccccacgtgttaacatcaacacagccaccccggcccagctcatgagcgtgcgaggcctctcggagaaaatggccctcagcatcgtggacttccgccgtgagcatgggccctttcgcagcgtt

SEQ ID NO: 191575 - DNA, 122 bp, Homo sapiens
gaggcagtggaaggaaaaacactcagcgggggctgcctggcagaggcctcacctcacagccggcggttccaaccccgcagccagcagaggcctcaccccacagccggcggctccaacgccac

SEQ ID NO: 191576 - DNA, 122 bp, Homo sapiens
tgagcccaggccggggccgggggcgttgcatgagatcggggtctgtctcagcctgtactgcgcggccgcagaaccacagggccgggcacgtcagggcggcctttgccaatcctggaacgggt

SEQ ID NO: 191577 - DNA, 122 bp, Homo sapiens
agaaggattatttgatagaaaacgaggagttacccagtccttgagaaggaggtgcatgtacgtacctatgtgcatacacttattttatatgttagaaatgacgtgttttaatgagaggcctc

SEQ ID NO: 191578 - DNA, 122 bp, Homo sapiens
gggtctttctagacacgtggttgtagattctgatcaatagacagagggttgctggagagccggggcaggaatgggggtgccctttcaggcatgaatagaggggaagggacctagacacatct

SEQ ID NO: 191579 - DNA, 122 bp, Homo sapiens
ctggacatctttgtgtaaaccataatccacatgtgccgtaaatgatcttcactccttatccgagggcaaattcacaaggatccccaagatccacttttagaagccattctcatccagcagtg

SEQ ID NO: 191580 - DNA, 122 bp, Homo sapiens
gggccttttcctgtcactgccctgtgtatgtcagactggctaagcaacacacatgtctaccggcatcggtgaagagcgtcgttggcgtgcgaggctgtgtgtctgagcagctcctcccacct

SEQ ID NO: 191581 - DNA, 122 bp, Homo sapiens
cactcactttgtggagcccccggttcctgtttgcagaggggggcacagtggcacctcgtccgctgtggagtgagaacagggacccgaccacgtgaagcacagagaatgctcagggatcggca

SEQ ID NO: 191582 - DNA, 122 bp, Homo sapiens
ggcgggcggtgcggggaggggcccagggcggccggccgagccgggaggacggagctggggcgcggcggctggggagccgggaccggcctcgccaacgccgcggcttcgcttccgggtgaggg

SEQ ID NO: 191583 - DNA, 122 bp, Homo sapiens
taaaagtttgccaatctctgaagcaaagccatgagtgagattatcagtgttaatggaacacggaagagggaacaattatttctgtttaataaagttggggaaggcattccaggagtgatttt

SEQ ID NO: 191584 - DNA, 122 bp, Homo sapiens
gagggcggagcaggatctccctacctctgagctcttagaggcggatgatgggaaaatcgacgctgggaaaacggagcccagttggaagattaacccaatttggaaaattgacacagagaaaa

SEQ ID NO: 191585 - DNA, 122 bp, Homo sapiens
agtgagggactgactccaggttacaaagtgctgtgtttatgtgacctgagaatacgtgtgcgcagagtgttcccacagtgtccttgtaaagttgagcatgtacatgtcctgccagtgtgtag

SEQ ID NO: 191586 - DNA, 122 bp, Homo sapiens
cccaccaagctgagcgccacctctgtgctctactatgacagcagcaacaacgtcatcctgcgcaagcaccgcaacatggtggtcaaggcctgcggctgccactgagtcagcccgcccagccc

SEQ ID NO: 191587 - DNA, 122 bp, Homo sapiens
ccgcaaaactcactttgcatccaaactaaatttttcttaatatagaaatactttctgggccgcttctccggcgccccctccaaggggtccgaatacatccaagtctatactgaaaagagaaa

SEQ ID NO: 191588 - DNA, 122 bp, Homo sapiens
tctccctcgtgcgcctctcccgcccctgcgcctctccctcgtgcgcctctcccgcccctgcgcctctcccgccgctgcgcctctcccgccgctgcgcctctcccgaaattacaggctggtgt

SEQ ID NO: 191589 - DNA, 122 bp, Homo sapiens
agagccaaaggttccaggacaatcagtacctggaatgatttgcctgccttacttctagaacgtgaggcagccatgactcagtaaagagggctaaacatcacagatcccagattctcctctgc

SEQ ID NO: 191590 - DNA, 122 bp, Homo sapiens
agtgggatcttggcgcacctggtagctttgggcttcaccatctttctgacagcgctgtcccggccaggaaccagtgagtgtgcggggcggggttgcggaagggggcggagtggagatgctgg

SEQ ID NO: 191591 - DNA, 122 bp, Homo sapiens
gacgcttcatgaaatataaatgcaacaaagactcagagagctcaataaaaaccttccacccgtcagtctagaaggataagagaaagaaagttaagcaactacaggaaatggctttgggagtt

SEQ ID NO: 191592 - DNA, 122 bp, Homo sapiens
ctttggttaccgaaaacagcccggctgggactgctgggctgggaacttagctaagcagtgcggaggctgaaccccaccatctctgggatccgcagcaaatcagaagcccccacccacgataa

SEQ ID NO: 191593 - DNA, 122 bp, Homo sapiens
ccgtaaccgctcttctagctggccaaggcggcgggaagaaaccccaccctcttgcgcaaacgcccagtagcggaatccgcggggtcgagggctttagtgtgcgcatgtgcaaccagagcggc

SEQ ID NO: 191594 - DNA, 122 bp, Homo sapiens
ttgtgggtagcagagccacaggtggctcaggggtggtggctgcactcttgtttctcccttcggcctacagggtcccacagatgatggagtttgagactccacagaaggtggctggagacagg

SEQ ID NO: 191595 - DNA, 122 bp, Homo sapiens
ggatccgcggggaccctgccgagggggctgtcatgcggtttccaaggtgcacattttccacggaaacagaactcgatgcactgacctgctccgccaggaaagtgagcgtgtagcgtcctgag

SEQ ID NO: 191596 - DNA, 122 bp, Homo sapiens
ggcattgagacatgagtcctgtggtggggctgtgcctggtgcaggtgcaggctggagccccggtcgcccccaggcagctcagcccctggacggcctgcaatggcctgcaccctgcctgcttc

SEQ ID NO: 191597 - DNA, 122 bp, Homo sapiens
tcttgttgcctctccaagctcatcttgtgctgctttccctgttgttcttgctgcaccagccgaacaggcttcttacaggttccttcagcaaacctggtagccctgcttctgcctccagtcct

SEQ ID NO: 191598 - DNA, 122 bp, Homo sapiens
aaggactgggtaggccggctggtgcggtggaagcgaagcccaaaatggccgcagggcccgcgcgccggcaggacacccccctagacgccggaagagacgcaggactgttgggcgtctacgtc

SEQ ID NO: 191599 - DNA, 122 bp, Homo sapiens
gttctgttatctgttgatttcccatcacctgacagtaactttcatgacataggattctgccgccaaatttatatcattaacaatgtgtgcctttttgcaagacttgtaatttacttattatg

SEQ ID NO: 191600 - DNA, 122 bp, Homo sapiens
cataaaagtgcctctacagggtctgattcctgcccttgtctctgttcagatgctcagttacgagcaataaggtagctattgtttaggtttccagggttcgagcactgaagggaaggtataga

SEQ ID NO: 191601 - DNA, 122 bp, Homo sapiens
tcaaaaacacacagagagaaatattcacattctgagagaaaatccaccaagtgaaccaaccggctaggggagttgagtgatttggttaatgggcgaggccaactttcagggggcagggcttt

SEQ ID NO: 191602 - DNA, 122 bp, Homo sapiens
atctgattctccttcaggaggcgcacctgcttcttcaggtccgcgttctcgctcaggagccggctcatcagctcgccgccttcagccatggcgggtgcgtccctccttgtccctcacggctc

SEQ ID NO: 191603 - DNA, 122 bp, Homo sapiens
aagtgaattcccttctcggtgtttaaggggagcagtcattgctgggtgatggtcgcagttcggatcctgggcacggggttatgtctttgctttctgaagatgactgcattagttgcagctct

SEQ ID NO: 191604 - DNA, 122 bp, Homo sapiens
gcctccaagagctcctacctggggtccagaaggtagtctggggagcaagctccggagagacgagcgggggagactggggtcccagcagacgcagaatggtctctccacaaagaggggttagc

SEQ ID NO: 191605 - DNA, 122 bp, Homo sapiens
ttcaagaatgcctctgcctgcattttaataaaaggtaggagggatttttgaagctcttttcggtcctaaaacctgttccaccactgtgttccttcactgagaagcggtactgctgcagacga

SEQ ID NO: 191606 - DNA, 122 bp, Homo sapiens
ctgcctgtgtggcctaaggtttattcaacgtattatctcaggagactattcctgttttatcgctgtgcattcaattccatttgaactttgaagacagtatgtcaactgtggatgatctgtga

SEQ ID NO: 191607 - DNA, 122 bp, Homo sapiens
ggcgggtggagtgaaggggaagaggtccaggagaggggtacctccctctctctcctgggacggaaaggtcagcccaaactttcagtcataggaatcttggcagagccctctcttggtgtggg

SEQ ID NO: 191608 - DNA, 122 bp, Homo sapiens
atcaacacagggtcaaggtcttcatttttggctctatgcaatgtttttctatttttcattcgttcctggttattgctgtcactataaaatttcaacaacttgtctgtttctttaagtcatat

SEQ ID NO: 191609 - DNA, 122 bp, Homo sapiens
gccggagctccgggagggcgggctggcagggagggggcgcggcgccggctccgaggaacccggccccggaaatgggacacccccagggggtgcccccgaacttccctcctgtccggcctggg

SEQ ID NO: 191610 - DNA, 122 bp, Homo sapiens
ggtttcgggaccgcgacactaaagccgctggcgaggtgaattgccgcgtccttaccgccccgcgctccccggtccggacagaacttgggcccctagagtcacccagcgcagaaacgcgcggg

SEQ ID NO: 191611 - DNA, 122 bp, Homo sapiens
ttacttgctaactcctctacctagggcaagttacttaaacatcgcaagtctcagtttcttcgctgagaaagtggggagagtaacagtgcctactttgtaggattactgtgaagattaaacta

SEQ ID NO: 191612 - DNA, 122 bp, Homo sapiens
cacttgccaccgtggccctctccttcctggggcccggcagcggggaggcggcgggggccgcggggctgagctccgtcctgctcaggctcagcctgtacctgagctgcgctgcggccaccttc

SEQ ID NO: 191613 - DNA, 122 bp, Homo sapiens
tggccaggggacgccgcctaggattgtgggatgtgtagttttggtgtactggagcttgggcggggagcgacaataacgaaccttggggagctatttcatacagccttttctctcacttttac

SEQ ID NO: 191614 - DNA, 122 bp, Homo sapiens
agcccctttaattaggtgctctgagaagaggtcagaatggcaggcagggggtggggaaggcggtgcttcttgagccccacttagcaactggtcactcatcctctggcagctggatcttgctg

SEQ ID NO: 191615 - DNA, 122 bp, Homo sapiens
ttctgggtgatcctggtgttggttgtggtggtcggctccagcgccttcctcctgtgccaccggagggcctgcaggaagcgaattcggcagagtaagtggctgtgtccttggggccttgggga

SEQ ID NO: 191616 - DNA, 122 bp, Homo sapiens
agtggcaatgcagcgggggcgccagcgtgaagatggggtccgaggccatgcccagagccacgaagagcaccggcaggcagcagaggccgagctgcagctgctggccgccgcccagcgccccc

SEQ ID NO: 191617 - DNA, 122 bp, Homo sapiens
tgggcccctctgtcctcaggccccttcgacgtgctgagcatccagacgtggcgaggagcccgaagggtgtggggtcccctctgcagggtcctgcttgttgcctgtttccggcgggcggggtg

SEQ ID NO: 191618 - DNA, 122 bp, Homo sapiens
caaactcctgagctccggcaatccgcccaccttggcctcccaaagtgctaggattacaggcgtgagccactgcacctggcctaattttcaatgtttaatggttttatagagactgggtcttg

SEQ ID NO: 191619 - DNA, 122 bp, Homo sapiens
ccgtggacagacagtctacaggcatccctttaaaatccagctctgccctttagagtgtggcgatcttgggcaagtctcttcatttctcgaaatgcttttcctcatctggatatcctgcagga

SEQ ID NO: 191620 - DNA, 122 bp, Homo sapiens
tgaacaccaccaaagccccttcaaatggcagttctggtgcctcttccccccttttatggacgagagcctcccctgtcgctcagcccttgctgagcacaggctgctgggagccaatggggaag

SEQ ID NO: 191621 - DNA, 122 bp, Homo sapiens
cctgaaccgtgaaagccgtattcatccaatatgcagtggctgagggaacagtgtaccaggcgctaaggagaggaaagagccatgacattgttcttacaaacctctatctgctggggagagcc

SEQ ID NO: 191622 - DNA, 122 bp, Homo sapiens
tgaacacgggaggcggagcttgcagtcagccgagattgcgccactgcactccagcctgggcgactgagcgagactcccgtctccaaataaataaattaattaattaaagaatacacaaggct

SEQ ID NO: 191623 - DNA, 122 bp, Homo sapiens
agaagaaaaacacctgtagttctgagtcttctctttcatgtggttactttggaatgttcacggcacataatacaatcggtatatttactgattgtgtattggtgaattggtgctggctctca

SEQ ID NO: 191624 - DNA, 122 bp, Homo sapiens
agcacctgggagaaggcagaccgtgtgagggggcctgtggccccagcgtgctgtggcctccgggagtgggaagtggaggcaggagccttccttacacttcgccatgagtttcctgatcgact

SEQ ID NO: 191625 - DNA, 122 bp, Homo sapiens
ggccatccctcacggcctgggcgatgctggccttggccccagagggctgtagcagcacaccggccacgcagcctgtgccccacaggcaggccttcaccgccggctgctcggcgacctgggcg

SEQ ID NO: 191626 - DNA, 122 bp, Homo sapiens
aatttgctaggcaggacaaatagtgtgtagtctaggcctgtttttcctctgctacaaaggcgagaccttcctgagtgctccttgtgatgcctcaggagttaggagagtctctagtctggcgg

SEQ ID NO: 191627 - DNA, 122 bp, Homo sapiens
gtggtcctcaaaggcacgcattgtgggtaacgtagtccagcacctcggtgaccgcgcgagcgtgcggcgactctgcagcctctgggctactttcccagtcactgttccacacccgctccgct

SEQ ID NO: 191628 - DNA, 122 bp, Homo sapiens
ttcctgttgttcttctattttgtcaaaaaacacactgtagactttatagatctgtggtatcgaatactctcgattggatcctcaggaagaaagtgttttaaagtgtgtaattagggcacttg

SEQ ID NO: 191629 - DNA, 122 bp, Homo sapiens
tggaaggccattacagaggtcctttcaccacctgtgagaggtttgattttgggggagctccgggactctcaaggctacagtgtggactgctggcccaaggagaaggttggtttcctgaagtg

SEQ ID NO: 191630 - DNA, 122 bp, Homo sapiens
cctgctcgacccgtatcaccgcacaggcaccccacctgcatgttacctcctggtaatgctcgcccacttatatagtgcacattttgttgcagttgtttcaaagatgagaaaaacagggcaat

SEQ ID NO: 191631 - DNA, 122 bp, Homo sapiens
attgacccttttttaggtccccggtgttctgtgactgaaaatccggtcagctggaggctacggacctccttgctgaggctagtttttttgtttttgtttttgttttggaagagtcaggcact

SEQ ID NO: 191632 - DNA, 122 bp, Homo sapiens
cggcggggacccagaacccgggaggccaggtgcgcccaggccaggcgctggaggctggggcgccggatggggcggggcggccgctgagtcagggccacccccgcgcgggcgcgcggagcagg

SEQ ID NO: 191633 - DNA, 122 bp, Homo sapiens
acggggcggttgccaggcagagggtctcctcacttttcagacggggcgtccgggcagagacgctcctcacatcccggacggggcggcggggcagaggtgctccccacatctcagacgatagg

SEQ ID NO: 191634 - DNA, 122 bp, Homo sapiens
gctccggcagcgcgagttgcttgtcccgcagataatccagcacgtacctgaaaaggaagccgtcccggtcgatgaagaagcgcgcccggctgtccctgggcagctcgccccggcgccgggcg

SEQ ID NO: 191635 - DNA, 122 bp, Homo sapiens
tcaccgaggctcttgggacagggctcaaagctgcccctagcctcctgcgtctcaactcaccgccgccaccgccgcgcagccccgcggccgctgctccatagccctccgacgggcgcccaggg

SEQ ID NO: 191636 - DNA, 122 bp, Homo sapiens
tcagcctggcctccttcctcctcctactcgcttctctcaaggtagagaacttgctagaggcggcctgagaggggcaggcctttgccatcacatcctctcccagacccctgccattcggagac

SEQ ID NO: 191637 - DNA, 122 bp, Homo sapiens
gaaccagagcatgcccgttccggggcgcgcgtctggccccgctctagggagccgcgtcggcggggccccacccgggcaatgtcccgaagctcgacgcgcactcaccctcttgaccaggaagc

SEQ ID NO: 191638 - DNA, 122 bp, Homo sapiens
gccccaccccgccgggtgcacttgggctgcgagatcccccttcatctaaggcagccacaacgtgagctttacatatcagctgcatttgaatcgatgatgggagcgatgtttgtaattccaca

SEQ ID NO: 191639 - DNA, 122 bp, Homo sapiens
ggccggccttacacccggctgtcctcaatcactgcacatctggtactttctttccggacacgaggtggagatctgcaagtcgggtctgggcagtctgtctccaccgtaatctctttctgagt

SEQ ID NO: 191640 - DNA, 122 bp, Homo sapiens
agttagttcagctgctgggcctagccactgaaagcctgtggggccctgcagcggggtggtcgcaggggaaaggttctccagggcgggggagcgctccgtaggaggactcctggcccgccgga

SEQ ID NO: 191641 - DNA, 122 bp, Homo sapiens
ctccaataatttctgccgtcgtgggtccaggctatgcaattcttccatcatttctactgccgccgccgccgctgccgctccacgctcctccctggagggaccccgacccgacccggctgcgg

SEQ ID NO: 191642 - DNA, 122 bp, Homo sapiens
acgtaaatagcagtgtctcgggaagccggaggggcagagcgccagttatcagcctgatgccgggaggggaggggaaacccacccacgggcatttatcaggcacagactgaggctttccaatt

SEQ ID NO: 191643 - DNA, 122 bp, Homo sapiens
gcactgaaagatttgagcaggggagtaacctgatagcgtttatgtttagtcctgccacttcgacagataaacgcaccaatgggcttgatgagatttaggccaacccataaccgcccctcaac

SEQ ID NO: 191644 - DNA, 122 bp, Homo sapiens
cagcaccatgccggaggcgtgggcgggggatcgcggcaccgtccgggaaagcctggggcccgccaaggtccatgcttctcactactgagtccccagagaagccctagctccctcccccagcc

SEQ ID NO: 191645 - DNA, 122 bp, Homo sapiens
aaaccccattccttgttgcactcaaagagcttttctctctctgcttgttctacacggcctcgtagaattattctcttgtctctcgttgtatcagaaactaatattcccccactttccctccc

SEQ ID NO: 191646 - DNA, 122 bp, Homo sapiens
ggtttactgagtcaattcgatgaaaataaaaataaatcatctgcagataataagcacacacgagcagactcacaaaagtagaacttgaatgtgtgaactttgggaaatactgctctaattaa

SEQ ID NO: 191647 - DNA, 122 bp, Homo sapiens
gctgcgagagtgacacatggtgagccgagcggagtgtaaggccaagtgagggtcggctgccggcagaggtaatttatgtgctcctgaaaattgggcgggtccttctaactcctcctcccgca

SEQ ID NO: 191648 - DNA, 122 bp, Homo sapiens
gtttccactcagccccacagtgcgggcttcctgggcccgtgtccggctggaggagcaccccgggtccgagccagccatcccctcaagagtcctgcgccctggaggacaccccaaatgccacc

SEQ ID NO: 191649 - DNA, 122 bp, Homo sapiens
cccagggcctgctgggaaatgtagttcgaatgcaaacaaccaatggacgaccgtcaggcgcggcggttggggcggggcaggcccccccaccgccccaccccccgcccacccagcgcccgcgc

SEQ ID NO: 191650 - DNA, 122 bp, Homo sapiens
ctgcaattaccagttgcgttaaatgcaccaaataaagctcctaaaattgatactataaggcgccaccttaagtttttccaggctgcaactgtgcattatttaaaatggttttcttaaattta

SEQ ID NO: 191651 - DNA, 122 bp, Homo sapiens
ttcagaaagtgtttggaacatgtggagctcatcttatggctgtatctctctttttcattccggccatgtgcatgtatctccagccaccatcaggaaattctcaagatcaaggcaagttcatt

SEQ ID NO: 191652 - DNA, 122 bp, Homo sapiens
ttcagcctgactgggctggagaggcggtgcgtcctcctggccggggggcgggggccgtcgcgctcacgtgacctttgctcatggcggcggcggcggcggcggcggtgctggtggtgctcggc

SEQ ID NO: 191653 - DNA, 122 bp, Homo sapiens
gtggcgctactgcgggctgtgcactcaggaaagtggccacggtttaggacgacctcgacacgaccctgtataggacgcaactaactccagagaaaacgagcgagccccatgcaactcttcat

SEQ ID NO: 191654 - DNA, 122 bp, Homo sapiens
taaataaaataagtaaaggaaaataagttgcatgatgtattgcagagatatatcacaccccggcaaatggggaactgaaaccctccagcagaagcacttagcacacttcatttgattcccat

SEQ ID NO: 191655 - DNA, 122 bp, Homo sapiens
ccagcaccccaggagcctctgaatgaaacacactgggctcgcaggcgggggactcgttcacgtgtgcctttggatttgcttcagaacctctgatagagcccaggtcccggggctcatggtgg

SEQ ID NO: 191656 - DNA, 122 bp, Homo sapiens
tcagcgtagagacagaagatgaaagttaacctgaattgctcgtcgcaagcaagctctgcccgggtcagccccagagggttgcagaacactgtgtctgtgtccgctgtcttaaagagcctagt

SEQ ID NO: 191657 - DNA, 122 bp, Homo sapiens
gttgccgggccgcagcgtaggcccctcgcccgggacctgagggaaggccctggacggctgcggcacgcccgcctacccaccctgtaggccccgtgccaggctagcctggttggcgttgacct

SEQ ID NO: 191658 - DNA, 122 bp, Homo sapiens
acgttagatcccctcatcgccgttctgaagcccgtagctgttcgccatagaggagcaggccgcggcttctaagatggcgtctttttcctcgtttcagattcttcgctgctgctgccttaccg

SEQ ID NO: 191659 - DNA, 122 bp, Homo sapiens
gagagagaaataatttgttttcaataggaagtcggtgacctatgggatctcttccattgccggtgggttaggaaaattgttttaaaatagatagtgcttgtgttgtccgtggctggaagaca

SEQ ID NO: 191660 - DNA, 122 bp, Homo sapiens
cgtaacccatgcacccttgcacatcggtcgttgctcagtagtgagttgattttaataaaacggtaggttttctacaggaaatccccccgcccctttgcttttatttggatcctccgggctcg

SEQ ID NO: 191661 - DNA, 122 bp, Homo sapiens
gcagctagcagtcaccttgctccggcgtctgcatctgcccacagtgaaggcagcgtgacacgggagccaggcacaacgcctcgcagtccccgaaatccactctctacgtccatcatgggtct

SEQ ID NO: 191662 - DNA, 122 bp, Homo sapiens
cctgccattgccctgggcccatccatgcatagggctctgccctggagccaggccaccccccgcatcagcagccagcccacctgctgcaaggagccacccagcttgtctccccagctgtgaac

SEQ ID NO: 191663 - DNA, 122 bp, Homo sapiens
cccccgacccccgtgaagatcgccgtggcgggagcgcagcattacctcagtgccatcctgcggctctttgtggagcagctgtcccacaagacacccgactggctcggctacatgcgcttcct

SEQ ID NO: 191664 - DNA, 122 bp, Homo sapiens
gccaactggtctggtgactcatactgggaagcttgtagcaaaccccatttttggagaaaccgggaaatctctttggggagataaacaagtcactgtagcactctgctctctgaagtgcctgg

SEQ ID NO: 191665 - DNA, 122 bp, Homo sapiens
ggctatcaacatcttaagcgccacaaattaacaaatcaaaaccaaatctctctctccctccgaagccacggctaaggaggctcactgcccagttagtggctttcaaactacccttacaagtg

SEQ ID NO: 191666 - DNA, 122 bp, Homo sapiens
aattactttggagttttagggaaaccatatggatggccgtctgatgtggaaaagctagggcgcctgtcggcagtccacggccatagaactgcagctgccaggatgcagctggagaattagga

SEQ ID NO: 191667 - DNA, 122 bp, Homo sapiens
gaccagttagttgaatgaggaggcttggctgaaacactttgacagctggagctccaaaatcggatgggtaaactagaggaattgcaatttggatactgctcaacaccttcgagtccttctgg

SEQ ID NO: 191668 - DNA, 122 bp, Homo sapiens
gctcaacatctgaaaacacttgtttcatatattttgcccagttttctagttgataacagccggagggtaagcctgatcccacttattccactatggccagagtggagattgattcatttatt

SEQ ID NO: 191669 - DNA, 122 bp, Homo sapiens
agctcagaacacatgtgggagggcacgacttacatcctttccctcttcgccagagttgcccgagtgtgtgagcagtgggatggacagctctaagttggagttcagcacagctgtgaaaacaa

SEQ ID NO: 191670 - DNA, 122 bp, Homo sapiens
gccctcctggattctttctcgacaagtcagctgggaccctgggaccggccctgcgaatgacgagatcaaaaccaggtcccgtagttactggcggggaggcggggctggagtgggaggaccac

SEQ ID NO: 191671 - DNA, 122 bp, Homo sapiens
cagctcacattatttctgtgtttgtgtgttatccctctccgtctatccacatgcatgcaccgttgttacattttcattgtgattggaagctacagttcgggcaaagggtacaaatctcttta

SEQ ID NO: 191672 - DNA, 122 bp, Homo sapiens
gattacagacgtgagccaccgcgctcggctgtcactgcagactttgatgggggccacactcggggtataaattaggatcctcactgaaagggcgggaccatggaggctttttcttggcccct

SEQ ID NO: 191673 - DNA, 122 bp, Homo sapiens
acgccctggcacgtccttccctcctgcttcccccgcccaaagcgctcccggttcccggggcgtcaggttggctgacagttcggggtccctgcgtcctgtctcctcagctgggcttcgaggat

SEQ ID NO: 191674 - DNA, 122 bp, Homo sapiens
gccccacaaacgctctgataacagtctgtccctgtctctctcctgctgctcctatggaagcgaagttttccgctcctgcagaaagcaaagttacggtaggaaactggctcctgctctagccc

SEQ ID NO: 191675 - DNA, 122 bp, Homo sapiens
ggctgtgggctgcatactggccgagctgctggcgcacaggcctcttctccccggcacttccgagatccaccagatcgacttgatcgtgcagctgctgggcacgcccagtgagaacatctggc

SEQ ID NO: 191676 - DNA, 122 bp, Homo sapiens
gctccgagctgtgcgaacagaggaagtatgtgccagttagaagggttccgccggccacctcgtcgcagccgcggcgcaaggtcttggagccgcagacctgaggcccggctcctccctcctcg

SEQ ID NO: 191677 - DNA, 122 bp, Homo sapiens
taaagaatttgagcatcccaatttgaatttgaattctccaggttagagaggtttgtgcaccgagaacaggaaagttaggtggtgcaacattaagacggggttagggaaggcctcccttggag

SEQ ID NO: 191678 - DNA, 122 bp, Homo sapiens
gggagtggggggctcagagccgggagggcctgggccagtcctgcagctgcccagtgggcccgggtgcgggaggcacctgcatgcagtgatagtgggtgctcttcccattgaggtggcagccg

SEQ ID NO: 191679 - DNA, 122 bp, Homo sapiens
gggcacgctgactccctgatgagctcagacttgcccctagcaggatgtatttggtttatgcggtggagagaacaggaaggaactctagtctacactctgtggtctggagcatatagcactct

SEQ ID NO: 191680 - DNA, 122 bp, Homo sapiens
tcgtagccacgaaaatacgccgcgtcagtccctgactcgaaaggaagtcctccagagagccgcactaaccatctagcttcctccaccttcagcctgccaggcccgcggccaccgccggcgcg

SEQ ID NO: 191681 - DNA, 122 bp, Homo sapiens
ggatcccccgctgcgtgcactgcgttctgagaggccggggagagactctgggcccgcggtcggggcggagccaaggtcccaacccacattgaacgggcttgaggattacttggagggctcag

SEQ ID NO: 191682 - DNA, 122 bp, Homo sapiens
aattccattgccttccactctttttcaacgcagccgcacccacatctcatcctaaacgaccgcagcagcctctgaaactagtctaaacacgcccagatctgccgacgccgcagacccccttc

SEQ ID NO: 191683 - DNA, 122 bp, Homo sapiens
ttgaccaggtggtttataaattccagaaacttatttctcacaagaagtccaagatcaaggcgctggcatattctttgtctggtaagagctggcttcctggttgatagatggctgtcatttca

SEQ ID NO: 191684 - DNA, 122 bp, Homo sapiens
gtggtgcaatcataactcacagccacctcaaactcctgagctcaagtgatcctaccaccacgcctctgctaattattactgcattttttggtaaagatgggtcttgctatattgcccaggct

SEQ ID NO: 191685 - DNA, 122 bp, Homo sapiens
tgagcgagactccgtctgcaatcccggcacctcgggaggccgaagctggcagatcactcgcggtcagaagctggagaccagcacagccaacacggcgaaaccccgtctccaccaaaaaatac

SEQ ID NO: 191686 - DNA, 122 bp, Homo sapiens
cccttatttaaaatcttccaaacttctaataaggcagtctaccctgcactaaagcagacacgaaagagatgacctccctaaaaatactgctgttggaatacgtccttccttcccgccccctc

SEQ ID NO: 191687 - DNA, 122 bp, Homo sapiens
caacagcttaaaattcttccttctataaccactgattttccaagagatggaaatgtcaaccgtgaggggagggagattgtaagtagctgctctgtgctatggcagaatagtctcattatcag

SEQ ID NO: 191688 - DNA, 122 bp, Homo sapiens
caacatactgtgtgacttgggcaaattatttcccccgccccgttcctgccagctttaaaacggtcatcagtggggggtgctgcgtatcccctttcactggggtggcttcttcactgaggaga

SEQ ID NO: 191689 - DNA, 122 bp, Homo sapiens
caagttgctatgaaagcctgataaagttaggttttgcatttgttaatggcacagtaataacgctcatctactctggactgttgcatagatacacagactgtggtgatgtaccatccaggtag

SEQ ID NO: 191690 - DNA, 122 bp, Homo sapiens
acgggatgggatcccactgggagtgggtgacaaaggggtagcagagaatttatgctgaggcgtctgagcttcacagcagaaacaggactcagaagaaagatggtgtcggggaaaaagactaa

SEQ ID NO: 191691 - DNA, 122 bp, Homo sapiens
ggtcacccctcctggctgccctcttggagctgaataacagaaggggaggggttagtaacccggacatagtattgaggccagacagacagagcattgatgggaacagaccccctttgtcatgc

SEQ ID NO: 191692 - DNA, 122 bp, Homo sapiens
ccttgctttggttctttatttctttggtgctccagaaactagggcatgattcactggacacggcagtatgcagagaaagaaaagattgtcaattgttgcccattatgtcatgtttttagtct

SEQ ID NO: 191693 - DNA, 122 bp, Homo sapiens
ggtcgtgctgctggtcctcagagtacacgggccggtagttctgcagctgcagtgcgccgccgcacacctcctgcacacgcaaagggcagcaggtggtgaagaccttggtgaagggcagcgcg

SEQ ID NO: 191694 - DNA, 122 bp, Homo sapiens
aagaagtaaaaaccactgctaaatgtacggaacatgcttaacctgcccggtaatgagaagcgcatcccagaaagcagggttctgcaagcaggtgttgggtgccctgggcccccccggggagg

SEQ ID NO: 191695 - DNA, 122 bp, Homo sapiens
ctctgggcccgtccagctggcagagccaccctggcggtaacgctgtttgggggctcaggacgaggatggtcccaggcagagggaactaaaggagagttgatggcaaacaggctgctcctttc

SEQ ID NO: 191696 - DNA, 122 bp, Homo sapiens
gaaggctggctgcccgcggagaggcgctgcgtccggagcgctggcccaggggaggcggcgcgggccctacctgcgttcctgagcttcttgttccgatacaccgacaggatgaccaggaggtt

SEQ ID NO: 191697 - DNA, 122 bp, Homo sapiens
ggacgtttatgaatttgtgttgggccacattcaaagccgtgctgggatgcatgcggagcacgggccatgggctggacgagctcggtggagacgaatgtggaggatgtgactctggagatgac

SEQ ID NO: 191698 - DNA, 122 bp, Homo sapiens
ggtaggagatgctttcgcatgggagcaggggatgcttttcactgggggaagggtcctggtcgccagtcagcctttcagaggccaaaggggagatgcattctctgggtattacgtccccacgt

SEQ ID NO: 191699 - DNA, 122 bp, Homo sapiens
ggacagccgcgccggggaccggagccggcacgggcccgcgagccgtgttggaacaggtaccgcgaccacgacaccggccgtcgcctcagcagcctcagacgagcagctctgactaagggagg

SEQ ID NO: 191700 - DNA, 122 bp, Homo sapiens
ctccaataggcgcctagcaccctgagtgggctacaccaatcagagacgaagcggcgctaacgtgactgactaactaaccaatccaaagtctcaatctccctgagaggggcggagcgtacccg

SEQ ID NO: 191701 - DNA, 122 bp, Homo sapiens
ggtgctcctcatcaccttcgtggtcatctggtcctactacgcgtacgtggtggagctgtgcgtgtttactatttttggaaatgaagaaaatggaaagaccgtgttttaccttgtggctttcc

SEQ ID NO: 191702 - DNA, 122 bp, Homo sapiens
tcccctactgtcaatagttgctgaataaaatctgttttcatcgctttgactgatggtcaacggctatgtttatttttgacagtacctatgttctgccaggcactatgctaagtgttttgcag

SEQ ID NO: 191703 - DNA, 122 bp, Homo sapiens
tgaattgatggcgtcatcgaagcgacggcccggaaggaagtcgcgtgctgaggggtgtgacggttttcttgctcgtgggctcggacgagtacggagcgcctgcagggacagcctggtacgcg

SEQ ID NO: 191704 - DNA, 122 bp, Homo sapiens
gaaaaaaaagttttatctgctataattgtcaacttctgaagaatcttcctaaataacccacgatagttctacactgtctaaacaataaagtcaatgcctttcagcatgctgttggagacctg

SEQ ID NO: 191705 - DNA, 122 bp, Homo sapiens
cccttccctccaattcccacttgccctccacctgctactctgttatctactggctctgcccgtctatgtgtacacatgcctgacacctcagacaaggtgactcatgaaggatgcccctgact

SEQ ID NO: 191706 - DNA, 122 bp, Homo sapiens
ccaggagcccgggaccccgattctgcggccgagtccactgcagaggcggggatggagctgcgcgctaggcgccaactccctccccgcagctccggccccacctggcagagcgccgctcacgg

SEQ ID NO: 191707 - DNA, 122 bp, Homo sapiens
agggctttgctttgatatggcaagcgcttagtcagggaatggagtggcagctccaagttccggaagcttctcacagcccttctaatcccctagccggcagccacccacacttggctgtctgc

SEQ ID NO: 191708 - DNA, 122 bp, Homo sapiens
cacctctgagagtgggattccaagaaccagagtaccgagtgccttatgaattccactctgcgaaaaaattaatagtaccttggggtctttcatgccacgttagaggttggcttctgctgcag

SEQ ID NO: 191709 - DNA, 122 bp, Homo sapiens
cctcggaggcctcgggccgccccagcccggcgcgccccgatcagctactcaccgttggcgcgtttgagggcattttccggcctctgaaaataggccggcatcttggcggcaggctcagctca

SEQ ID NO: 191710 - DNA, 122 bp, Homo sapiens
tctcatcgtcattaatttgcacaaagccattaaaaatagcatttaccagcaggggtccagcgttaattagaacccagcctgggagcagctggaactctcggcgctcctggctcagtcctcgc

SEQ ID NO: 191711 - DNA, 122 bp, Homo sapiens
agtgtgagaactgaattatcaccttgtagtcctgactgggagagttggaatttcagcatccgttgtgttgttattggagatgatcttgatgcagtccttgctaacatggctttccagtaggg

SEQ ID NO: 191712 - DNA, 122 bp, Homo sapiens
ctggacgttaataaatgactgttcttgatgcataatgactgttcttgatgcataggcctgcggaggaggcaagagcattgtatcattgtccaggatctgggaaactttgccaaaacctggct

SEQ ID NO: 191713 - DNA, 122 bp, Homo sapiens
atggaagctcctcacaatggaacattagaaagcaggaagcgggccgcagccaacgtgcggcgcccgcaccgctcgcggctcttgaaaaaaagagaaggggagaagaaacaagaagaatgcga

SEQ ID NO: 191714 - DNA, 122 bp, Homo sapiens
ggcttaggttggaggacccactttcagattggctcattcacatggccagtaagttggtgacggctttcagctgggacctgagcctgggatgtgggccagggttcttggtttttcttcatttg

SEQ ID NO: 191715 - DNA, 122 bp, Homo sapiens
ggttaactacgcactttcgcaggcacaaatgcattcagccctcaccaggaggctggattacgtggttaaggtcacgtggttgtggagtggaaggggggtggggggggagagagagagcacaa

SEQ ID NO: 191716 - DNA, 122 bp, Homo sapiens
ggccggaactacttcccccgctggccccgggaaagacacattttcagtgttccggaaggtcgctccgaggcctcaaaaccataatcgggtctcaacagactctgggactttatacgtcgccc

SEQ ID NO: 191717 - DNA, 122 bp, Homo sapiens
catttattcaggacctatctgtaatccctgttacccaggtggtcacggcattgaattgaacgtccagttctgtttttaaaaaatctacttccaacatggtgcaactccatctctactaaaaa

SEQ ID NO: 191718 - DNA, 122 bp, Homo sapiens
acttgtttgaacaaccttaaggcttccaacacacactattgaaatctaaggagaagggggcgatgagaggaatgatttcctaataatgccatgttaagtggcaatctgatgggggagagggg

SEQ ID NO: 191719 - DNA, 122 bp, Homo sapiens
tgagccgagggggtggcggttggcaggtctcatccaagatagctttgtctgtgtctcagccgctttggaactggaggggatcccgatagagacttaacacagtgttagtaagaggcaaatgt

SEQ ID NO: 191720 - DNA, 122 bp, Homo sapiens
ttcagcgtgaaggtacggcctcggggcagctccttgagcagccgggccacctcgtagtgccggcagcccagcaggctctgcccgttaatggcctcgatcatgtcgcccacgctgatgaggtg

SEQ ID NO: 191721 - DNA, 122 bp, Homo sapiens
tgaactcctggcatcaagcaatcctccggtcttggcctcccacagggctgggattacaggcgtgtgccaccacgcccggccttgatggtattttgttatggcagccccagacctaaaaaaat

SEQ ID NO: 191722 - DNA, 122 bp, Homo sapiens
ggcgcaaagggcgcagggctggggccaggctcaccgagccgcagggagaacacggcagtgcgtgcggctgtgtctgtcggctggcggagggcgcgtcggacgagccgggcgagcgtggacag

SEQ ID NO: 191723 - DNA, 122 bp, Homo sapiens
gcaggaagaaggcattccaaccggcttctttcgctcttgccaggttcaaacatggcgggccgcagccggcccttcccgtacactcggcttgctttcccacaacccccgccaatctttagcgc

SEQ ID NO: 191724 - DNA, 122 bp, Homo sapiens
gctcctggccaaattttaatcagagcaatgacgtgatcaaacttaagcttcagaaaggtccgtgtgggtgcatagtgggggctggaaggaaaccaatgacaggttgttgcagtccaggtgag

SEQ ID NO: 191725 - DNA, 122 bp, Homo sapiens
ttctgagaaactagcttctcactctctcagttgtcagtcaaaactttaatggtctttggccgggtgcggtggctcacgcctgtaatcccagcactttgggaggccgaggcgggtggatcaca

SEQ ID NO: 191726 - DNA, 122 bp, Homo sapiens
gaagagaggggtttgccttttatactatttccctagggaggtagtataatcatagccctgcggtgattcatgacagtcttggtgagtcaggatgtctgtgacaagtcagtctccctgggcct

SEQ ID NO: 191727 - DNA, 122 bp, Homo sapiens
ccccagcgtggagatacagcacaggggccaacatggcgtcagcacgctgggtctcgcctgcgacccccgtgactccgcactgctgcagcccgggcgaggctgcgccccattggccaactgca

SEQ ID NO: 191728 - DNA, 122 bp, Homo sapiens
cagtcctcagctgtgagtgctcgggctcgggtctgagtgtcttaagcagagtaagtttgtcggacaccatcttgacagaagcattgaagatgtggtctgtgtgacccagcgagaggcctcac

SEQ ID NO: 191729 - DNA, 122 bp, Homo sapiens
ctcctcgaccaaacttttcccctttcctgagcaaggcctgaatctgagcaggagtcatcccgagtctctccaccagcagctcccgacaggcatcgccttcccagtccctgtgagcaatgtgg

SEQ ID NO: 191730 - DNA, 122 bp, Homo sapiens
ggcgtggggatgttggcagcggggtctcttgaaagcgtttcgccttccgctgtcccgcgccgggggcctgctgggaagcctgttggccccaaatcggccccctgcaaaccctctcactctga

SEQ ID NO: 191731 - DNA, 122 bp, Homo sapiens
cccgcccccgtgcaagcccctggctgcaattctgggttccgtttccatgggacactccgccgccaatcctcgtgtcgaactgctcttcctgacccctcaattcaccaatcagtgcccagtca

SEQ ID NO: 191732 - DNA, 122 bp, Homo sapiens
gcccccagaagccccccaggcccctctcactgcccccgcaccccccaaggtagtcatttccggacttctaagggcacaggctgggtttgcctggtttggacttgacttaaatgaaaccatgc

SEQ ID NO: 191733 - DNA, 122 bp, Homo sapiens
tttcattttaacggcgcggaggggacaccctccccgccccatgctgcccacccgctgaggcgccacccaaccgcgccgggaggggggacagcaggcatcaccaccgccccttccacgccgtc

SEQ ID NO: 191734 - DNA, 122 bp, Homo sapiens
gcccgattggcagattgtagccgagtggtttcaacggtgacgccccccacccgaatgcctcgctgggattggctcatttcttggttcagacctggacggtggccagaggaggacaagaggct

SEQ ID NO: 191735 - DNA, 122 bp, Homo sapiens
aagagacgacccatttgaaagcagctgggaggaggaagacagtgactcacagaatccaaccgcttgtagcctcggaaccataacaagaatatgaaactagcaagtccagtgtgaggcagaac

SEQ ID NO: 191736 - DNA, 122 bp, Homo sapiens
caccggaacgtggccgcagcgcttatctgtgaagcaagtattaaacctcagaacaggggccgcgcggcgtaaggcaggagagcagagcggaggtttcagggagcttcgtttgccctccacac

SEQ ID NO: 191737 - DNA, 122 bp, Homo sapiens
tccggagccgaggccgcggcagggctcggcgcaacatgtgtcgctgcctgtttttcggggcgctggggctctttcaaagggcatgtgtgtggggatcaccccaactttgaggggtagctcag

SEQ ID NO: 191738 - DNA, 122 bp, Homo sapiens
ccttgactctcgcttcaatccactttcctcgcttaatatgcagcccaaagttttgcagctcgctgtcagatggtagtgctagactttcacaccgatcccaaagcctccgctggggctgtttc

SEQ ID NO: 191739 - DNA, 122 bp, Homo sapiens
cgagcccgcgcgtcctggccgtcccgcccgccgtccgccgtccgccgtccgcccggccctcgccccctcccgagctgtccagcgcagccgccctctaccccggatccagaagtcccctcccc

SEQ ID NO: 191740 - DNA, 122 bp, Homo sapiens
cgccgcggagctgctgcaggagttcggctggaactgggtggccgccctgggcagcgacgacgagtacggccggcagggcctgagcatcttctcggccctggccgcggcacgcggcatctgca

SEQ ID NO: 191741 - DNA, 122 bp, Homo sapiens
ctcaatgctgtggggcctggtggaagcaacctcctgttgttagaccagaaacgtcccctgcgacaaagcctttggttttgctttgtgttcttctcccgtggggtggaagagccgccctccct

SEQ ID NO: 191742 - DNA, 122 bp, Homo sapiens
cccaaacccaccggagcgggggaagactgagggacgaatcacagacagaaacgcacgactcggctccaccatgcgctgtcagctgtgcgggaagcaccacgtgtagaaataaaagcatgaaa

SEQ ID NO: 191743 - DNA, 122 bp, Homo sapiens
acctgctcaacagagaattcgattttgcaaacatttattgagcgccctccaggtgccaggcgctgtgccaggggccggggcttcaaagacgaccaaggcacagatcctgggtttgaagatct

SEQ ID NO: 191744 - DNA, 122 bp, Homo sapiens
gccagtcaggagaacacttgggctggagctggttggggaagagtggccacctctccctcccgctacccctccatggtgactgtgccttctgtcacccccaggagcaccccttcttcaccttg

SEQ ID NO: 191745 - DNA, 122 bp, Homo sapiens
ctgagagtccagaagcagcgttcgaatcgttctgcgccgaaccgagtgacagcattaaaccgctgcaggaacccacaaattcagaatctgcgcaaaatacacatatttgtatttaaaatccg

SEQ ID NO: 191746 - DNA, 122 bp, Homo sapiens
gcctacccagcgcctggcgacgctcagcaacaccgtcccatccctgaaatatcttggcctcgtgggcttgtcactccaattaaaacttaaacatgaaagcggctcaggctgcttctcccttt

SEQ ID NO: 191747 - DNA, 122 bp, Homo sapiens
gcggagacttgcagttctaaatgattagaacatgattggtcagtttcacagggttggcaccggctctgtttctcaagagtctataataacctagctcccgtcttctgggatgtggtgttggc

SEQ ID NO: 191748 - DNA, 122 bp, Homo sapiens
tggttccgtgattttgtcatcgcgcgtacatcctagagtgactcacacgaacgcagatggcggagcctaccccacgcctgggcctcgcggtacagcctgtggctccggggctacacacccgc

SEQ ID NO: 191749 - DNA, 122 bp, Homo sapiens
gcctcactgcctccagccctctcaagttaaacgaactgaactaggcctggtggaaggaggcgcactttcctcctggcagaatgctagctctgagccagttcagtacctggaggaggagcagg

SEQ ID NO: 191750 - DNA, 122 bp, Homo sapiens
gtccgcttgctctgttacatcccagaactgattctcagggattgggatctggaagatgctcggcaggaggctgcggccgcagcggcgctgggctggagagaaggtggcggcgtgagggtccg

SEQ ID NO: 191751 - DNA, 122 bp, Homo sapiens
cgccgggagaaagggctggcagggccggggcttaggaatcacgccaaggactgggcggggcgctcgcggtaccgggaacggcgtggggatccgcacacccagcagggaacaaccatgcctgt

SEQ ID NO: 191752 - DNA, 122 bp, Homo sapiens
ctatgaagagggacttgtagggagaaaaggaataatctccctatagagcaatggaaacctcgatgaacctatctgcaaaatgggggtattaacaatagatgactttcctgttataaacctca

SEQ ID NO: 191753 - DNA, 122 bp, Homo sapiens
cattgataaaaaagtaagcaatgaaataccttccccttttctttagtgtgggagcacagccgctcttatttctctttgctcaaggatctagctagattatgatggctgaaaacattattgat

SEQ ID NO: 191754 - DNA, 122 bp, Homo sapiens
ggcggtagtgacacaggcacaactgacagtggcagaagctcagctgacaaggactggggacggcggtgtccttgtcttgcctttgtcgcccccgcccctctcttccctggctggacttgcgg

SEQ ID NO: 191755 - DNA, 122 bp, Homo sapiens
caacatgctgatctgctttttccaactcaacacgaggcaaacacattcttcaggagcagacgcaagaagagtctgagaaaggtcacccagagtcccctgtttatactacatggtctgcacgc

SEQ ID NO: 191756 - DNA, 122 bp, Homo sapiens
gcttttattgcacagaaaggtcattgcagtcagaggttggggattgcttgctgctacagccgaatggattctattctgaccaatacagaaggaaagaaatcatagacgccctgcctgagcag

SEQ ID NO: 191757 - DNA, 122 bp, Homo sapiens
cagccaagttcccacccttgtgcctaaacccagctcaggtctttctgaagctaggagcaccggaactacggaggagaaacagctccgcgctctcaccagcgggccctcttcctcctccatat

SEQ ID NO: 191758 - DNA, 122 bp, Homo sapiens
caaatattttacagtttgattgttttcatcaacgaagtattaactcaatctctggcttcacgggccaagcacagcgttccatgtccataaacctggaccgaggagctgggcccaagggtatc

SEQ ID NO: 191759 - DNA, 122 bp, Homo sapiens
caaggcggagttccgtgcgccaatcatcggtgggagacagggagggggcgtgtccatccccgccccccgcctccgctggcctcgaaagcggagtgcgaagcttcctcaaacctaatcggcgg

SEQ ID NO: 191760 - DNA, 122 bp, Homo sapiens
agagtgtgggaactccgggcgcgggtgcccaccccgccgactcccagggcgaccccagaacgttcgtttcaggcgggtcacagctgcgccacccaccagacctgtgccccagcgtccgaccg

SEQ ID NO: 191761 - DNA, 122 bp, Homo sapiens
tctcacttcaagaatgaagccgcggagccccgcagtgagtgttacagttcttaaaggcggcgtgtccggagtttgttccttctgatgtccggatgtgtttggagtttcttccttccgctggg

SEQ ID NO: 191762 - DNA, 122 bp, Homo sapiens
aaggatccgcccctctattccccagataaattcctagtgtccaccaaattcctcagcgctcgctcaccctcctctacggccacgactctgggagtggggaaacagagagccggttcctctgc

SEQ ID NO: 191763 - DNA, 122 bp, Homo sapiens
agctgggacagctccaccttcaggtcgtccagctgtttcagcagctcctccttcttcccgcgaagatctggagccttgatcttggccattgctgcacaggccgctgccgcctccgccgctgc

SEQ ID NO: 191764 - DNA, 122 bp, Homo sapiens
tctctgccccacaatgcgcaagtcagtggcgtcacatccgggcacccggatgtttcctggcgggaaccggatcctgcctgggtgggggtgggagtgggcgtgggggtgggggtgggggtgag

SEQ ID NO: 191765 - DNA, 122 bp, Homo sapiens
cagccacatttggcttcatttggggaagagagaacctaaaggtacagagaacagcttaagcgataatgacagtaattcagatgtgatagtagtctgatctaggatggggaacagtaaaaatg

SEQ ID NO: 191766 - DNA, 122 bp, Homo sapiens
atcttggaaggttaccccagagatgctcctccagggcagagttccttggcttggcatctgcgtgtgccccaccccatttttttttaatccacatgactttgaggctctattctcaaaacagc

SEQ ID NO: 191767 - DNA, 122 bp, Homo sapiens
atttctcaatgaccggcgctccgaggacacttccgacgcggagggagggggtgtcattagcgctcggttatcagttccttccggtctccccgagctcaaccctgcgcgcggccgggccgcgc

SEQ ID NO: 191768 - DNA, 122 bp, Homo sapiens
cgtggccacaaccgagagggcgtggtcattcgtgcagtgggcgtggtcatcaagaaagggcgtggctgcagccggaagggcgtggctatcagctccagaaggcccttcttgctgtccttgga

SEQ ID NO: 191769 - DNA, 122 bp, Homo sapiens
cagttcgtgcccttccgggagctcaagaacgtgagtgtcctggaggggctccgtcaaggccggcttgggggtccctgttcatgtcactgcccaagaccttcccaggccaggctcacgccagt

SEQ ID NO: 191770 - DNA, 122 bp, Homo sapiens
cacggcgtcccttgcgggacccgccagagtgtgcttggcttccgcgtgtccgtgtgtctgcgcgtcgccggcgtctgtcccgtgttccctgtgaggctgccacgcccaggcgtgcatgtgcg

SEQ ID NO: 191771 - DNA, 122 bp, Homo sapiens
tctcgccagctcccttatcaaaaacactaattaggatgctggcagcttgaaagccagcaccggagctgctggagcgcacgcctgtgccgggcacctggcaggcctcttctcacgcttcttcc

SEQ ID NO: 191772 - DNA, 122 bp, Homo sapiens
agcggcggcgctggatcccgggtgcctggaggctggagctctgggaggagctcgtagccccgcctctttccgcgcccccgctcccgaattggtccaggccctcagacggatcccgcctcccg

SEQ ID NO: 191773 - DNA, 122 bp, Homo sapiens
ctggtttcaggatgaaactgttccaccccagatcattaggcattagattcccgtaagaagcgagaaacttagatcccttgcatgcacagttcacaatagggttcgagttcctatgagaattt

SEQ ID NO: 191774 - DNA, 122 bp, Homo sapiens
ggttgcgcacctgacgtacatcgttcaaaacgtgcccagtgtttccctccgagggcactgcgtgccgcgcaggcgcaaagggccaggtgctggaggtgctgtcatggcctgcctcaacccgg

SEQ ID NO: 191775 - DNA, 122 bp, Homo sapiens
ttccttcagcactggtctttgcactttagctcccacttagcactctatcctccctatcaccgtctgaccactcttaccatgtacgtaggactcattaaaatagcagtatataaacttctgat

SEQ ID NO: 191776 - DNA, 122 bp, Homo sapiens
gtatttgcccaaaccatcacgagcacctcttaccctgatgggcaatacttcagtgtgctgcgttctggccacagagcaaacagggtgctcccaggcactgccctctcggatttcttgccttg

SEQ ID NO: 191777 - DNA, 122 bp, Homo sapiens
aggagagacgagtccgcagacagcgttcagaggccgcgctgcctgggtgctgagccgtcccggggttcacggtcgcagtttgtccttacaaaacgcccagccgccccgacctgtggtgctta

SEQ ID NO: 191778 - DNA, 122 bp, Homo sapiens
gctggctacggcagcatcaatcgggcagacacagggtggccacggccactagcggcaaggcggctgccccaagagcgcggtggcatggccaccaaagccactcaatcgagaaagaccgcggc

SEQ ID NO: 191779 - DNA, 122 bp, Homo sapiens
gaataataacatccgtttgtcatctgaagccataccatctctcatccaggtttgtgaacacgtgattgtgcggattgacatgtttcggcgccattttttttgtgggcaaaaccatctctact

SEQ ID NO: 191780 - DNA, 122 bp, Homo sapiens
actggccctgccgtgcgggctcagcctgggcttgttgcagatggtggtggcctggggcaccggccaggtgggcctcggtggcgaggtggtcgttctggcaaaggcgcacactgactttgacg

SEQ ID NO: 191781 - DNA, 122 bp, Homo sapiens
ggagaaagaaaggaggagagattaataaagtttggacggctccctcggcctccgctgggccgcgggcgcaagaaagacgcggaccctcgaggcggacgagttgcgggaacttcgcttgcctg

SEQ ID NO: 191782 - DNA, 122 bp, Homo sapiens
gaacagggctccgtccttcttcacgggatgcgcggagcctagaagggcgcccggccacggcgacccccaagtactggctgaatagtgaatgaactccgcttggccgcacttcagtctatctg

SEQ ID NO: 191783 - DNA, 122 bp, Homo sapiens
ctgcccctgtcttagctttggcaccttggtcgagtgacttacacatatgtgatgggagctcggccatatcacttacaaatactaggggaaaaaaacacatcatagtaataacaaggttattt

SEQ ID NO: 191784 - DNA, 122 bp, Homo sapiens
aggggaaggggcacagagctttcatgccctctctggatgcaccaccactgtccagcagcccgcaggtgttcagctgtcggaaagctccctaaaccctgtccttttgggtttttaatggaggc

SEQ ID NO: 191785 - DNA, 122 bp, Homo sapiens
cacgtggttcccgtttctagctctcccaggtctacgtgcagacgtggagttgcggggtcacgtggtccccgtttctagctctcccgggtctccgtgcagacgtggagttgcggggtcacgtg

SEQ ID NO: 191786 - DNA, 122 bp, Homo sapiens
ttgtgctgtattcatccagcagattttgaaacaattctcgtgtaaaaaggcattttactccgcgcgtcttccttacagccatttagttgggagtttgcggtgggcagggggagggagaagaa

SEQ ID NO: 191787 - DNA, 122 bp, Homo sapiens
cgttgcgacacaccggagaccaggtgatgagcttggggtcggtcatgagctcagtggcgtcgtccctgggggctggccggcgtcccgcagaaaggcggagagagggtgcgcccccgcaccgt

SEQ ID NO: 191788 - DNA, 122 bp, Homo sapiens
cctctaccttccgttgtagagctgtctatctgggtgtgacctgacctctcccagggggaacgggctgctaagagttgggactgcaggggcttgtttcatgctgtgaattagttcctggcatg

SEQ ID NO: 191789 - DNA, 122 bp, Homo sapiens
atgaagtgcaataacaatgtctgggtagacaggttattattttataaacttgaaaaacgacgacttgaggcaggatataacacaaagactccctaaattcacactgagtgaactgggaaggg

SEQ ID NO: 191790 - DNA, 122 bp, Homo sapiens
aagcctggatagccagtgctccccttggggcggtgtctggggctgagatggtggagggagcgcagaggcaagtctcccaacctcaactctgagtggaacagcaggagctattaccacaccat

SEQ ID NO: 191791 - DNA, 122 bp, Homo sapiens
ggcttatataaggcataagctgtttcccgggctaatgtttgactttcttttgcggattaacgtcactggcagggagagtgctgtggacccaccaagcccagctctcctcaaagggctgcctc

SEQ ID NO: 191792 - DNA, 122 bp, Homo sapiens
ccatctgcctgatccttttgtcccggtgcggagtcgctggagaggagagtctcctggagccgcttcgcggatcccactgggtcacctggtcctggcttattttctttgaggcccattctcgg

SEQ ID NO: 191793 - DNA, 122 bp, Homo sapiens
cctcctcagcccaaccccccactgctgtcccgcccacgggggcgggagccgtgtgcgccacgccgaacactagtctacgcctcggcatattctattggctggaaggccgtgggaagcggcta

SEQ ID NO: 191794 - DNA, 122 bp, Homo sapiens
tcgggttccgcaggttaacagcatctcagtccggactctgatgccacttgccttgcatctcgcagcccggagaccggtgggtttaagggaaccttcgtcagaagttgggtgctaggtcatct

SEQ ID NO: 191795 - DNA, 122 bp, Homo sapiens
ttgtaaaaggaaggagggaacttctgttttatgcctgattctttaggtagagcctgctttcggggctgtaggcaagatgctattaccttctcaccacagctatgacctcttccagggaagaa

SEQ ID NO: 191796 - DNA, 122 bp, Homo sapiens
attgcactaccgcaccaaaaaaaaaaaaaaaaaatttaattactgtggaccttatggggacgctacatcaagctgtttcccaattgaattggaatgccacaacaacggctgaacactgtaaa

SEQ ID NO: 191797 - DNA, 122 bp, Homo sapiens
cgttgcctttcatctccgcattagtctcctgccttcttcatgtcctgtgtatccccacaccgtgcttggatccattctgttcctattggctaagtctctgtaatgcccaggaagtccaggtg

SEQ ID NO: 191798 - DNA, 122 bp, Homo sapiens
catgtggagtgggcatggatggaggcagcagggagggtagtagctgggcttcctggggcccgtggaggctgagagcaaagccatatgatcaaggagcatgaccaggaagccagtgggggtcc

SEQ ID NO: 191799 - DNA, 122 bp, Homo sapiens
tgggagctctggctttgaaggtctgtggtcagaatggactacaacttctacaactgcccccgtgtgtgatacagttccaattaatcaaaattcaattaacaagaacttacctctttacttct

SEQ ID NO: 191800 - DNA, 122 bp, Homo sapiens
atgtatgtatatatatgtattatacacacacatatgcttttttcttttgaaggggaaaagcgatggctatcttccactgaagtattctggaggaagctgtgggaagaaaattggtggatttt

SEQ ID NO: 191801 - DNA, 122 bp, Homo sapiens
catgagaggcccgaccgtcctcctcactgtggctctgcccacgctcctggctcccagggccggggcaccggtacaaagtcagggctcccggaacaagctgctcctggtgtccttcgacagct

SEQ ID NO: 191802 - DNA, 122 bp, Homo sapiens
gaactgggccaactccgggcgtctactttgaagcgggcacgcccaggccacgcctgcaaacggcgtcagcttcctctgatcaaccgcggtcagcgccatccaccgaccaccactaagcctat

SEQ ID NO: 191803 - DNA, 122 bp, Homo sapiens
aaacgattttgagaagaatgcaaatttttatagcagccttttttcacagtcacgcaaagtcggatcaacccaaatgtccatcagtgggaaaatgtatccagaacaaatcgtagtatagtaat

SEQ ID NO: 191804 - DNA, 122 bp, Homo sapiens
gcagagagcccgccggcactcgcggacgcttctaggctgggagcggggaggaaatgtcaccggccccaaactcggccctagggaaggccatccgcgtctatacttctcagtgtccctgtcgt

SEQ ID NO: 191805 - DNA, 122 bp, Homo sapiens
agtagaccctgttctctcaccagatctccctggctctgtttaacttttcctggtgcaatgcgatggcaccaccagctccccaggcaggcaccactccctcaagataccatttggggtaggga

SEQ ID NO: 191806 - DNA, 122 bp, Homo sapiens
agtctcactctccctcctttccctcttttccctcctctttccccccggccccctccaccccgtcctgtgattcctgaagatttttgactttttagaattataagttttgcacagtagtcttc

SEQ ID NO: 191807 - DNA, 122 bp, Homo sapiens
gagaggtgcgtgtatgtgtgtgtgtgtgtgtgtgtgtgtgtgtgtgtgtgcgcgcgcgcgcgcgcgctcgcacgcaagttccaaagagtggcccctgttaatgtggcagtggctcaggggtc

SEQ ID NO: 191808 - DNA, 122 bp, Homo sapiens
ctccgccgcccgttgcggcctctacctgggaccaggctaaccctcctgcgggccggcccacggcgctactaactactccttgctttgttcgtgtcttctaataagagcaagccgatcattaa

SEQ ID NO: 191809 - DNA, 122 bp, Homo sapiens
acgctcactttctcacgctcgctccctcccggcgccgctttctgacgggcgaacaaggtgcgggaaaactctctccaccagcacgccgccgtttggaaaggcagctggggagagtggcaggc

SEQ ID NO: 191810 - DNA, 122 bp, Homo sapiens
ttgccccaacagtgaggctaccagtgtcatctgttccttaaatgtctggccccctgggggcgattccttagtcaggctctgcagctgtctcagctagatggcacactgcttggttgtggggg

SEQ ID NO: 191811 - DNA, 122 bp, Homo sapiens
gaaagaaagaaagaaagaaaagaaggcaaaccagtaaaacaagaatttctgtacagtccgcgcctatccatagcaaaatggaggacttctccagggaactgcaactcccaagaagcaatgcg

SEQ ID NO: 191812 - DNA, 122 bp, Homo sapiens
gccccacaccatgaggcaagggctcagagggagttcagtgagaaaagaatttggaaaaaacgctcaggcatcaatattcaaagtccttgtttagaaataggaaactaaggaagacaggagcc

SEQ ID NO: 191813 - DNA, 122 bp, Homo sapiens
ttggtggaccggttcccaggcacccgaaggggactggggtctggtaaactgggtggggcccgcgcggggtgcggggagcttgcggttccctggcacaggggtggggccgcagacgccgtgag

SEQ ID NO: 191814 - DNA, 122 bp, Homo sapiens
ccttgtggaaagagacagaaaaagaggaagagagcttgaattggaggccgtgcctctcagcgtggcctcccgatccttgaatcggaggccgtgcctctcagcctggcctcctgatccttgaa

SEQ ID NO: 191815 - DNA, 122 bp, Homo sapiens
gcggaggctgccctggccgcctttgcggtcaggtgaaggcgcagaggcagggaggccgggcgagcgcaggcgggcggagagcagaccacgcggaagaggccgagagagaaagcggggcaccc

SEQ ID NO: 191816 - DNA, 122 bp, Homo sapiens
gatatggggcggaaccctgaaaaggcgagagctgagatgccgctccgttctgccttaccacgccgccccccagcgtccgccaattaggagagcccggagccggatccactctcagcctcagg

SEQ ID NO: 191817 - DNA, 122 bp, Homo sapiens
cccgcagcgccgacgctccagctggccttcggcccgagtcacatctctgcggcgcggccgcggcccccgctccacgcacgcccgcctgcgggtccagcttcactgcagcgcctgccagagtc

SEQ ID NO: 191818 - DNA, 122 bp, Homo sapiens
ttgtttccatgcgggtgcattcctcttgcacggccatttgtgtgggcacatggctaatggcgccctcttattaatgcgttaattaatatcggggcgacggactgcggaacagcagtgttttc

SEQ ID NO: 191819 - DNA, 122 bp, Homo sapiens
tgagcacccctggtggttctcagcacactctagtggttctgaaccacctggtgtccctatcgccccctggtgtcctgagcgccccctggtctcctgaaaaccccctagtggttctgagcccc

SEQ ID NO: 191820 - DNA, 122 bp, Homo sapiens
gccgtgactccgacgcccaggcctgtgtcctggatgggccgtgtgcagcgaatccgttggcgactcctaactaccaagaaaaggagctctcggaggagatttcgtcgagtgctacgtgtggc

SEQ ID NO: 191821 - DNA, 122 bp, Homo sapiens
ccccgtcaggctcggaggctccagcaatggttgaacaactggacactgctgtgattaccccggccatgctagaagaggaagaacagcttgaagctgctggactagagagagagcggaagatg

SEQ ID NO: 191822 - DNA, 122 bp, Homo sapiens
cgacctggtgaacatgtcttcgactgctccacagccggcattagaaacaactcaggtggccgctgatggtcatggtggacacagggctgccatgcccatgcccacgagagggaggggcaaaa

SEQ ID NO: 191823 - DNA, 122 bp, Homo sapiens
cacaggggaacccatagtgcatccctgggggcccagccagaggcacctacacagagcagacgtgggacacacacctcatgcccatagatgcacgcagaggtggggaccaggggtcatgggat

SEQ ID NO: 191824 - DNA, 122 bp, Homo sapiens
ggccaggactgaacccaactctcgaccaactcccggcagcaaaactaagcaccctacttccgttgtccccacctgttcccggcgtccccttcggctactcccggcgtttgcgcaagcggtcc

SEQ ID NO: 191825 - DNA, 122 bp, Homo sapiens
ctagaatatggccaattttacccaccttatttttaaacagatgccagagattgtggttgacgaaaattgtttttagaatgactatcaagaagatctattttagaaatcactattcactttat

SEQ ID NO: 191826 - DNA, 122 bp, Homo sapiens
gccatctaccttttccgccgggtcaggcccagtcaagcctgaggaggcggccgcggccctcgtgagcccgctctaggcccggttacacctgtttatcaccaagtcgcttcatttcccttccc

SEQ ID NO: 191827 - DNA, 122 bp, Homo sapiens
acctcaggtgatccacccaccttggcctcccaaagtgctgggattacaggtgtaagccaccgcacttggccacagttaattgtatttttagtagagacgagggttcaccatgttggccagac

SEQ ID NO: 191828 - DNA, 122 bp, Homo sapiens
ggagcccctgcaccctgaaaagtcctgctactgctctccttcgtaggccaagtgtgaccgcggggagaggggtgccccggcagagatgcgctccttgatctccatggggtgacacatcccag

SEQ ID NO: 191829 - DNA, 122 bp, Homo sapiens
tcctgggccttccacgtgcctgactctgtgtttggaaacggcccgtggcccatcgcatctcggcctcctcagggctacccaatcaagcgactacccaagggtccccacatgggtggggaaac

SEQ ID NO: 191830 - DNA, 122 bp, Homo sapiens
ggggctggtgctgggggtctcggtcctagggagcaaagaaccaggggaccctcatgccaacgccccccgagccctcactgtcctttccacttccatccaggccccggggtcggcccaggtgg

SEQ ID NO: 191831 - DNA, 122 bp, Homo sapiens
tgagagtgacgtaacgttggggcacctccttcccctccattggcttaattgcctagggggcgggactaactagcaaacggggactagaaatagggatgctgaaaagcaacggggagagacgc

SEQ ID NO: 191832 - DNA, 122 bp, Homo sapiens
aaggagccttgctcattgcccggcagacacaagactgggccctcataaactcagacagcccggcatgtcacctgttgtacctgccctttcagctctgtgacccgggacaagtcaccctctcc

SEQ ID NO: 191833 - DNA, 122 bp, Homo sapiens
gcaatgccaatccaaacgggtggcaagctgggcccgggcaccagggaagatcagccttcccgcttcctccctgcacctcaaggaaggcagcccttcccgccggcatcttccaccttcaggag

SEQ ID NO: 191834 - DNA, 122 bp, Homo sapiens
atacatgatccggatcatgaagaaatgggccaaagaaaacagagtgtccatctaaaatagcgccagcgtcctaggaaccagcttctactttgacataaaactggaaatcattttcactccag

SEQ ID NO: 191835 - DNA, 122 bp, Homo sapiens
cgggggagactagggcttatatcagcccagatccaggcaaaaatggtagggagggtgcggcgctctgctaacactatcaattatgcatcatgttgaacgtggcttcggggaggaggcggcta

SEQ ID NO: 191836 - DNA, 122 bp, Homo sapiens
tgggtattttcagttaatgatcctttggttatggtggttggtaaaaaatgtgagcattagcgacatcccttgccagtcttgggtctttggatgcccctaagctttcactttgtgtgtgcaag

SEQ ID NO: 191837 - DNA, 122 bp, Homo sapiens
ctctatagtcttgattttgacctttctctccagtatagtacagggaaatagatcgcccatcgatctctgttccctgcttttcttcaaaggttttctctgcatcagcttctgtcttaaattca

SEQ ID NO: 191838 - DNA, 122 bp, Homo sapiens
tgccagccttgtaatggggcggcggaggggaccagccaccggttgggcagaagcagccggcgtcggcctgggattggaccacgtcacggggccagcgcgctccactccttcctccccagcgc

SEQ ID NO: 191839 - DNA, 122 bp, Homo sapiens
ccgcttgcggcggcgtggaaggcttcgcctccggagcaaggaggacgggccgctggttagcgggccctttgcccgagggtgtggacctctacccgctcccctgccccttcccgcagccttct

SEQ ID NO: 191840 - DNA, 122 bp, Homo sapiens
ttcctctggggcttcaggggtcacgggctccctcccctagatactgccacaggaccaatacggagttgggtcttgctggtgcccaaaggtgctcgtcccagctcctgcacacagtcacctgc

SEQ ID NO: 191841 - DNA, 122 bp, Homo sapiens
tctattttgattttccaaggaaccattacactgtttttcataacggctgtaccaattacacgtctgtcaacagcgtttaaaggtcccgttttctgcacaccgtaaaagggtttcactttctc

SEQ ID NO: 191842 - DNA, 122 bp, Homo sapiens
aaagacacatgcgtgggcacgggcaggtacttactgaaaagatgttcctcgaggggacctcgtgggcgcctagaacctggcagagaccaaatgccagcggttggtttgatgtctaacccaga

SEQ ID NO: 191843 - DNA, 122 bp, Homo sapiens
agacgcagttgtctctgggcgcttgccagagccacgaaccccagacctgtttgtatcatccgggctccttccgggcagaaacaactgaaaatgcacttcagacccacttatttctgccacat

SEQ ID NO: 191844 - DNA, 122 bp, Homo sapiens
cctgcatatagcaccagtctcattaacacaccctaatactggcctttcctccttgcctgtcgcactcttcctgcttcctctctccggcttctagggatcaccctaaatacaccaccagcagg

SEQ ID NO: 191845 - DNA, 122 bp, Homo sapiens
taagtcagaaagtgagtgaaaggaacctacagggacgcgcattttatagcagctgctgggcgcgaaaaagaagctgggccattggctaagcttgcagcttcctcttaatgcaaatgagcttt

SEQ ID NO: 191846 - DNA, 122 bp, Homo sapiens
gccgtaggcatggcgtttttcctgcagttgcaggcactctcacttgaggcgtgtctttttcggcagtaggatgttgcccggggaaggtcatagggtagtgaaacctggccggtatgcctgtg

SEQ ID NO: 191847 - DNA, 122 bp, Homo sapiens
ctttcgcttctagtcgctcagtaagcctctcaatttcctggcgcatctgggcctccgcggcgccgttctcctgccgctgcagctgctcccggaagtgcgccacctgctccagcagcgcatcc

SEQ ID NO: 191848 - DNA, 122 bp, Homo sapiens
ctcgccccttcataaccctgcgccaagagcacatctccccggccctaatgcgtgttcattcgttcattcggctgttatttattgggtgccaggcactgtgaccacagaggtgagaaggacac

SEQ ID NO: 191849 - DNA, 122 bp, Homo sapiens
acatgctcacagaaggatttcacatggttattggtgctgggagggaaataaacagaatgacgtgataaaaagaatatgggcagctgggcacggaggctcacacctgtagttccagcaattgg

SEQ ID NO: 191850 - DNA, 122 bp, Homo sapiens
aactcaggcttagggcagcccctggccacccacccgctcaaggcggcaccttctgaaagccgaccctgcccagggcaccacttgtttgtgaagcatttcgtgaccactcgtcactctaataa

SEQ ID NO: 191851 - DNA, 122 bp, Homo sapiens
gcttcatccacagctccagggcctgctcccgaccaggaccacagaacaagggaacctgagcgaatagaaagccactgagacctgctactactatacagatccttagcccatctccaaccttg

SEQ ID NO: 191852 - DNA, 122 bp, Homo sapiens
aaacagatatattggagccccaagggttcatgggtagcgtatttacaaaggagcctcctccgccagcccgtgccaccgctgctaatgagagcagtcattaagtaaatgagacgtcgccttta

SEQ ID NO: 191853 - DNA, 122 bp, Homo sapiens
gttcgcttgagctcaggaactcaagaccagcctgggcaacatggtgagatcctgcctctacgaaaaatacaaaaaattagcctggtgtggtgatgcgcacctgtaatcccagctactagggg

SEQ ID NO: 191854 - DNA, 122 bp, Homo sapiens
ttcatcagtggctctgatgccaagcagcagcctgtggacttcaaagtcaggtcttgatgtcggcagcaccgctccacgtctgcctttcagcgccgcccatgacccacacctcccatgggctg

SEQ ID NO: 191855 - DNA, 122 bp, Homo sapiens
ggtagtgagccacacctccaaatgccatgtgaggctccagtagccacaaactggcaaccacgggtgctatttcctcagaggaagagtgtcaagcacactaacactcactcatctctgcaacc

SEQ ID NO: 191856 - DNA, 122 bp, Homo sapiens
cgggcctgcccctgctgcggggttttcctgggaaggctgtactgagtcaggatctgcttccgggaggatctgcttccgggaggatctgcttccgggagaccggcagatacacccagggacac

SEQ ID NO: 191857 - DNA, 122 bp, Homo sapiens
gtgactttctcctgtgccgagtttaactggaagctccacatgttgaccagcgtagctaagcgggactggccgtgtgggcgggtgaggagagctgccctgctctgccctagtgacggtacacg

SEQ ID NO: 191858 - DNA, 122 bp, Homo sapiens
gccacgtccgagttctgccgcaccttgggggagatccccacctacgggctggctggcaatcgcgaggagcaggaggagctcatggtgcgtctggggcggccccgccctctgcttccctcggc

SEQ ID NO: 191859 - DNA, 122 bp, Homo sapiens
gccctagccggtccggcctctctccagtccatcctgaacccctggaaaacccataaaggccgctctcctggccggctctgtctctctggactgcagtccagccccccaccctggccaacacc

SEQ ID NO: 191860 - DNA, 122 bp, Homo sapiens
cggtttgattttggtcctttccctccgggggtcaagtggagtctgagatctctcagacagcgtgggaggctgcgggccccggagcctgccctcccgtgggccgagcgtgcagcctccctctt

SEQ ID NO: 191861 - DNA, 122 bp, Homo sapiens
cacaattcacagtagtgattgcgatcagggtcacatgtggctgaatgtatttacggaggacgccacagccgatctggctggacggagagcatttccccttgtatagtcttacaaggccattt

SEQ ID NO: 191862 - DNA, 122 bp, Homo sapiens
agccgcgcgttcagcctcctgggcagaggcagctgcgggataccgcggccagggaaagcgcgtggagagccgaaaggtgcggtgggcgcagagggcgggctggctgcggggcgaccgcgcgc

SEQ ID NO: 191863 - DNA, 122 bp, Homo sapiens
tcaagaccagcctgggcaacatggcaagaccccgcctttacaaaagacaaaagcattagccggggatggtggcgagcgcctgtggtccgagctactctggaggctgaggcaggagaatcact

SEQ ID NO: 191864 - DNA, 122 bp, Homo sapiens
tcgtttctcctctggagccagttgaaggtgacaggctcctgccacctcgccgagtcctcacgcacgcgttccctaagaataaaggaccctctgcagccgcagaaccatcatcggcagacaag

SEQ ID NO: 191865 - DNA, 122 bp, Homo sapiens
ttcctcccatctttatccatctacattcaaaaaccatacattaagtatgtatcggctgggcgtggtggctcacacctgtaatccgagcactttgggaggccaaggcgggcagattatgaggt

SEQ ID NO: 191866 - DNA, 122 bp, Homo sapiens
ctttgtttcagcaaacaatgatatttaagcctgaagtttatactcttttttttttaagatcgactcgtttctttgggtcatctcccacgtatacaggagggataaatgtttttaaatttctg

SEQ ID NO: 191867 - DNA, 122 bp, Homo sapiens
gcctcccaaagtgctgggattacaggggtgagccacctctcctggactaagtagcaattccggctcccttttctgtggctccctgccttgtgcgtgtcacagcctgggcgactcctcgccct

SEQ ID NO: 191868 - DNA, 122 bp, Homo sapiens
acgcttccagcaatggcggcggctcggcggtgccggcctccaggcagggcattgcgcctgcgcagccggagcgtcggaactacagtgcccagaatcctcagcgcctgagccccccgcccctt

SEQ ID NO: 191869 - DNA, 122 bp, Homo sapiens
gcccggctcttcacacctacccgcctcccccggcggaccccgcgccagctcccgcggccccgccgccaccagaaccagctcctggccgcagcgccatcttgctcccgacctgccgctgcctt

SEQ ID NO: 191870 - DNA, 122 bp, Homo sapiens
tatgggatgtgattgtggtattggttacatccaccttagccaatccttccgcctcagtctcgggactacaggcaggaaccaccccacccccactcatattttttgttttttgattttttaat

SEQ ID NO: 191871 - DNA, 122 bp, Homo sapiens
agctccaattcctcggctgcagggcttggcgcggggtttctgggcagcgtcgcttgcgcccggcacatgtgaaagggttttgtgctcgtttcctctgcatctgccgagggcaacactgaatc

SEQ ID NO: 191872 - DNA, 122 bp, Homo sapiens
gcccaagggatgccttagccctgatattgtagtattcgtaggctgattcatgatccctgccgacatatccttaaaagactggatagatgctacacacagctcagcccagccctcttctttct

SEQ ID NO: 191873 - DNA, 122 bp, Homo sapiens
gtcactacatgtatcattaaaggtcctaaaaggaattgttaggcggcaggctttgtgttacgtgttacatggagtgagggtagatgtgaagatttaaaacgattgatggatttaaggaagtg

SEQ ID NO: 191874 - DNA, 122 bp, Homo sapiens
caaccccgcggcggccggaagaacagcctggagtaggagacagcgcctggaggtggagggcgcccagggccgagctgccagggccggacacctaggctgagccctcaggtgagagccgagcg

SEQ ID NO: 191875 - DNA, 122 bp, Homo sapiens
acgcagggcacatttaaatcatttctctcaatcattctccagtttttagcctgctagcttcgctacaaaaatgaagtataatgtctcaaagtaaagccagaaactgaatacagattagctat

SEQ ID NO: 191876 - DNA, 122 bp, Homo sapiens
cgttagtatcccgcgattgtccttcctaacgcctgactgaatcctgaggctagccttcagcgaacatgtacaccgccttgcccttcacgtgaagccgagcctgtgactacacttatccttcc

SEQ ID NO: 191877 - DNA, 122 bp, Homo sapiens
gggccgcagatggaacacaggactccgcttcccccaccttcccgagacgcctccctcgcccggttcagtgagttcacgtggagagagtgtgccgttcgcccccaaaccccggtgggcatcag

SEQ ID NO: 191878 - DNA, 122 bp, Homo sapiens
ggagtgaggcgtccagcccctgagtgtggctgagtgatggggaggcgttccaatcgagagcgcgggatctgcgctcggtgactgcgcgaggggacaatgggtgggcgccgaggtgggggcga

SEQ ID NO: 191879 - DNA, 122 bp, Homo sapiens
tcatcttctctgcctgtttcccatggaagagagattaaattgacaatactgaacacgcttcgacttgagaaataagctctgtaccattttatgacatggaataagagttgccttcttctgag

SEQ ID NO: 191880 - DNA, 122 bp, Homo sapiens
ccctgcgctccgagaagcggcccttaaagggcctgaggaagtcgtagctgtaggtggccgcgtgagatgaatgccagaaagataagaaaggggagggggcccccagcttctgggtggttgag

SEQ ID NO: 191881 - DNA, 122 bp, Homo sapiens
gaaagagtcaagctggtggataaaggcagtggctgggcagccaggatacctggcttccctcggaacttctttttggctttgctgggcacagcattcgggcttgcctcgcatcactttcgcat

SEQ ID NO: 191882 - DNA, 122 bp, Homo sapiens
ctggcactcaatcagtccctgcacacagtcggcgctcaatcaatccctgcacacagtcggcgctcaatcaatccctgcacacagtcggggcacaaccaatccctgcacacagtcggcgctca

SEQ ID NO: 191883 - DNA, 122 bp, Homo sapiens
ccggataagccaccgagggcgctggggagacctgcaccaggtccctggcctaggaggcggcggcctccccccgcctctccgcccgggcgccccggactgcgagctgtgcggtgtggggcgcg

SEQ ID NO: 191884 - DNA, 122 bp, Homo sapiens
tcacgttaatgaagatggaaggcactaactgtccttggaaagcgatgagtcaaacttgaccgcgcttcaaactcgttcccagattcgtttccagtccgaacagaggcgcgtttctccgacgc

SEQ ID NO: 191885 - DNA, 122 bp, Homo sapiens
cacccaggtgcacaatagagcccaatccacgtctgtctgaccccagcctgtgcccttagccgagtcaggtatcccctggatcaatggggtggtcactgttgtcattactgttagcattatta

SEQ ID NO: 191886 - DNA, 122 bp, Homo sapiens
agcgggccccaagttcccccatcaaggcacgcatcagattgtgtggtcagcgtggggtgacgtaactgtctgcatgcagctggtctggagcccggaggctgtgactcccctccgcccgcctc

SEQ ID NO: 191887 - DNA, 122 bp, Homo sapiens
ctcccggaagcctttccttctctgaaatgcttgggccgggtgagagttacctgagtgcttcgcacctccccctcttccccttcttcatctccctccaggtacccgcatatgccctgcacaca

SEQ ID NO: 191888 - DNA, 122 bp, Homo sapiens
tgacacctagaaccggaggtgaagttggtagagaccattcagggaagacagggacctttccgggacatgacgatataaacagcagttacagtaatagcgagagacgaatcttcttgttgctt

SEQ ID NO: 191889 - DNA, 122 bp, Homo sapiens
cccgccgccgtcgggctggccgagcgagctgggcatggcgggagctagcgctggggcccgcgctcctgccgcccgcgccgccgccgccgcccgcgccgccctccgcctctgcgagctgggcc

SEQ ID NO: 191890 - DNA, 122 bp, Homo sapiens
cctccagagttgttgaaagctgaaaagcatacaagattcttccttttaacttggatttctcgttccagaaattgtgggataatctgtattcttgctttagaaaacattcttagagagggtac

SEQ ID NO: 191891 - DNA, 122 bp, Homo sapiens
ctggtgagaaccaccttcccagttcagttttctccctgtctgcaggtccatctatcttctcgctcaggatgtgggtatctcttagagggtgaagggaagtgatttgtcaaatggttaccaag

SEQ ID NO: 191892 - DNA, 122 bp, Homo sapiens
agtcatagctgcgtgtagctaggagcagggtttagtgccacgttctgtccagccctttcccggccctggcaaagcagagagacagagctgctgccaggtctggatgaaagcaagctgctcct

SEQ ID NO: 191893 - DNA, 122 bp, Homo sapiens
tgaaggaaccaaaaatagtggtaataatattagaagtctagaaagaaaataaaaaatttgcgcagactcaaaatagtccatgaaaatgaaaagcttttgagctatggaaaacatctgagagg

SEQ ID NO: 191894 - DNA, 122 bp, Homo sapiens
gaatctaatgctattcttagatgaggaaaactggaaactcagatgagttactgagggtcacgttgaattattgactgagccgcctctagaatggagtcctaattctgaccttggacacgttc

SEQ ID NO: 191895 - DNA, 122 bp, Homo sapiens
ctgcggacggcggggggggagacgtggccgctcccagggccgcgcgtcggccccgcctggcgacaggccctggcttccagaagttcccatggcagtgtccccagctgcctttccttggggac

SEQ ID NO: 191896 - DNA, 122 bp, Homo sapiens
cggtacgtttttaaatcgaccttgtgtgtgtttcaacttcggtcatccctagtgtcaggacgcgcagacagctaagcacagaacacatctctaaggccacttgcccctctgtccgctcagcc

SEQ ID NO: 191897 - DNA, 122 bp, Homo sapiens
acagggccagccaagctttgggccaaacctctatcatcaccaagatagaatcaacagcttcggacttagactgagtatggaaatccatatttaggaggtggttaacaatggtcaaatagcga

SEQ ID NO: 191898 - DNA, 122 bp, Homo sapiens
aatctcagtaattgaaaagctttctggaaatatacaaagcactaaatatcaaggatgtttcgtttaaataggctgttggcagcctacggcaggagtccagagtgacaaaacgtgccaccagg

SEQ ID NO: 191899 - DNA, 122 bp, Homo sapiens
ggatgctgcccagcaaaacagcacccagggagagggcgactgaggaagacagcctgcaagcgcgcttcagaaaggactgggaccagagccctagaaaactacagcgagtggattccctggca

SEQ ID NO: 191900 - DNA, 122 bp, Homo sapiens
gtgcaacgccctgagtgacggaaagaggtaggaccgcgcctgcagcgccggctggagggacgttctggtccccagacgctcctatcagggactgtttgatcccgatcgccggcagcgggaat

SEQ ID NO: 191901 - DNA, 122 bp, Homo sapiens
ctgacggtggtgggaggcagacaggtttgtaggcgcgaaggggtggttcgctggtgaaaccgttccttcaggccaggaacggcctgaagcctgggggccaggctaccagttctgggcgaagt

SEQ ID NO: 191902 - DNA, 122 bp, Homo sapiens
aggggcagagggggacaggagcaggatacagacagatcacgcgggttctctgctgccggacggagcgcccctagctgccactgagcccacggtgaagggcacggtgccacccagagctcctg

SEQ ID NO: 191903 - DNA, 122 bp, Homo sapiens
cggacgtccctccgaaccaagtccgcagcgaagatcacccgtcgctaccacgctcctcgacgtcttagccaaggggcgcctggctctacccaagtagggactgcaggttcctctccccgtcc

SEQ ID NO: 191904 - DNA, 122 bp, Homo sapiens
cgtggtctctacccctttgaatgatggtggcagccgaatccacggccgcagaataagccgcggagaagagcctctgggtcagctcaggactgagaaggtaggagggtgcccgccatttagca

SEQ ID NO: 191905 - DNA, 122 bp, Homo sapiens
agaggggactgggtgggaagcagagtgggcagccgtggccccacccagcagggccctggtcgccctccgtggagggagtgggcggcgcatgagttagccgacctgtgtcatttgaggccgga

SEQ ID NO: 191906 - DNA, 122 bp, Homo sapiens
tcctcaaggccaaagacatcaggtgagaagcgggaacccagagcccccgagcaaacccagcgcctcacaggagcccgggaatgtttaacatctggggcgccctgctcagcttttacaagggg

SEQ ID NO: 191907 - DNA, 122 bp, Homo sapiens
tcgcgtcggcgtcagggtcggggtcggtaaggggtgcggcaatgctgcaactgcgggactcggtggactcggccggtacgagccccacggcggtgctggcggccggcgaggaggtgggggca

SEQ ID NO: 191908 - DNA, 122 bp, Homo sapiens
tcggcacgccgacctgtttcccacctgcattcagttcaaggcaaaaaggctgtgagagcacgctacagcgcagcgcgaaaggggcgactaaggtggagaagagagaggaaaacgaaataaac

SEQ ID NO: 191909 - DNA, 122 bp, Homo sapiens
cacattaagaggatattgtctgtccatgtcctagaaacgttgtagcatcatgctcctattcgattaaaaatctcattattaaaatgaaccatcgggtaaatgttgtctcgggaaaagaagca

SEQ ID NO: 191910 - DNA, 122 bp, Homo sapiens
tgagtgtctcgcagtcttggctctgctgtttgggacgtgccagggtgcgccaagcctccgcgtatgctcgcgagcccaggcgccttcacgctcccggggacttcggagggacctggccctgc

SEQ ID NO: 191911 - DNA, 122 bp, Homo sapiens
cgattcattcttcggcccccctaaaagggttccatgcctacaaatgaacttcacctccttcgtttctccaagcatcaagtgcgccttctggctgggagcagctaagggaaaagggactggaa

SEQ ID NO: 191912 - DNA, 122 bp, Homo sapiens
ggctgccacaccccagggcgctggcttccaggggcagcagtgtgtgggctccttgcctgccggggtcacggaggaaggtcagctctgcccagcagtgtgtcctgagatgaaaccttagaccc

SEQ ID NO: 191913 - DNA, 122 bp, Homo sapiens
aatctcatagcctaggagttgaactgaattgaagaaagtcccataacaagtcaggggcagcgccaggattaaattggaatcggggttcattgatgactggcccagcgatactccctcaacag

SEQ ID NO: 191914 - DNA, 122 bp, Homo sapiens
gggaatcccaattactgtgttcgctgctcagggctcctcattcccctttagagtaaagggcgagggcaacagtggacggggtgtctccagacatccccctcattaccgtggccgcggaagcc

SEQ ID NO: 191915 - DNA, 122 bp, Homo sapiens
ccggtgactcggcctcagctgactccggccgggcaaagtctccagtggcgtagcgcgcagcgctcacccggctcgtctcagagccctgaagtccgcccaagttttgagtcttgccatgaatg

SEQ ID NO: 191916 - DNA, 122 bp, Homo sapiens
ttccaccagacacccatccaccacccaccgccggcagggctgctggactccacgagagtgcgtgaatgacagcatgagctggtgccaaaactttccgttcggagcctcatgggctttcagcc

SEQ ID NO: 191917 - DNA, 122 bp, Homo sapiens
tgaccactgcagcgaccatgggtgggcggtgggaggggccctccccggtgcagggcgtcacggctgctgggacttggcagctccaggatcggcagcattttgtggagaacgacgagatgtac

SEQ ID NO: 191918 - DNA, 122 bp, Homo sapiens
ctttgctggtggctgcttggtgagccccgaggagacggcaaggctgcgcctggtattgggcggaggtcgcctctctccgccgtccttacagagaccccgggcggagacgaatgaccagatcc

SEQ ID NO: 191919 - DNA, 122 bp, Homo sapiens
atatcccggggccggcaacgagccgggcagggacgccgaaggaaggccgtgaggagccctcgctggccggccaagatggccaccttcacatggccgaccgccaccggctccctgccacccgg

SEQ ID NO: 191920 - DNA, 122 bp, Homo sapiens
catgagaaaaacacccagcttccagtgccatgcacttcagagttgggacagcgtggttgtcgaggttgcctctgagctcaggtaagtattgatatctccaggaatctaagatgcagagaaag

SEQ ID NO: 191921 - DNA, 122 bp, Homo sapiens
tggcgccccccggtggccgtgccaacatcaccagcctgggctagagctcctgggctgtgccgtccactggggactggggatgggacacctgaggacattctgagacttctttcttccttcct

SEQ ID NO: 191922 - DNA, 122 bp, Homo sapiens
gagagccacggctgacgcttggggacagaaggaggagcctgaggaggagacaggacagagcgtctggagaggcaggaggacaccgagttccccgtgttggcctccaggtcctgtgcttgcgg

SEQ ID NO: 191923 - DNA, 122 bp, Homo sapiens
agccctaccaagtaggcctcacaagcctcctgcagcgccatcaccgcagagctctggaagcgaagatcggtcttgaagtcttgggcgatttctcgcaccaggcgctggaacggcagcttccg

SEQ ID NO: 191924 - DNA, 122 bp, Homo sapiens
gtctcctggggcttgctggggtcactgctggagaactggaggccgggccctttgggccttcgcttcgccttccggttaactcctcttagagaccaccgttttcccctttgctctgacgggcg

SEQ ID NO: 191925 - DNA, 122 bp, Homo sapiens
ccgcaaaatggagaaaggcttggcccgatgctttccggcagatgtagtcagcaggcccttcgtgtgtacgtgcgcgcgcggcgcgatgacgttcctctgtgatcatgggcgaggggcgggcc

SEQ ID NO: 191926 - DNA, 122 bp, Homo sapiens
cagggattctgggagggtccctgttgcacaaacaaggaaaccgagacacaggacggaaaacgggccacggaaaacgggccggcctctgctgcctgggttgtgatgaaggcctcgggaaacgg

SEQ ID NO: 191927 - DNA, 122 bp, Homo sapiens
aggaaaacaaagtcaaacggaaaagctaatgttgcttcccatctgtttgaaggcatgaggcggaagagagacaggttctgtgcagaggcactgtcggaccctggggaaggaaacctgtaggc

SEQ ID NO: 191928 - DNA, 122 bp, Homo sapiens
tacaggtggaggtgggcagtgggcgggcgagcattctcacctgagctccgcctcccgacacgtcagcggcgggattcgattctcccaggagcgcaaacgctactgagaactgcgcctgcgag

SEQ ID NO: 191929 - DNA, 122 bp, Homo sapiens
ggtgcgtagacgtgccgatcatggtgaaggccgctgcagagcccgcgagactcgcgttagcgggggacccaccttgcgcccttgacattcatccagtccccacccccagcctggcatcccag

SEQ ID NO: 191930 - DNA, 122 bp, Homo sapiens
actccggggcttgcgctgcggctcctgcgcctgtcatgcacccagtttcccagaagcttccggggttaggttgtcagtgttgagaggcagtgctagttcagacttgaccttgtgatggtctg

SEQ ID NO: 191931 - DNA, 122 bp, Homo sapiens
ctgcactccagcctgggcaaaaagagcgaaactccttcttgttggagtgcactcccagaccggagtgcagtggcatgatctcggcttaccgcaacctctgcttcctgggttcaaatgattct

SEQ ID NO: 191932 - DNA, 122 bp, Homo sapiens
attgtatgttccatctactgagataggggaaaaccgccttagggctggaggtgggacatgcgggcaacaatgctgctctgtaaggcattgagatgtttatgggtatgcatatctaaagcaca

SEQ ID NO: 191933 - DNA, 122 bp, Homo sapiens
cctttcagcaagtaccagctttctctgctgaggctgatacagctccatacctcagggggccgggaatcagctgccagcagccaatgggcttctgagcattcataagcagaccaggtgctgat

SEQ ID NO: 191934 - DNA, 122 bp, Homo sapiens
ttgcacaacctcgtcgacggaactgaagggaggtgccacagtcaagggtgaacttctaatcgctaacccctggtgtcatttgccctgagcagtcagcagtcacatggcacattgtctccatc

SEQ ID NO: 191935 - DNA, 122 bp, Homo sapiens
agcaaccaccagcaccttgaaattcaaattacaaaaaaagccccagcaaaacccctttagcgcgagtgtgggattgaagggcccagatttcccaggcagaggccgacgggaaggcgggggga

SEQ ID NO: 191936 - DNA, 122 bp, Homo sapiens
tctcttggcatcacgggacagaagaatcgatgcataccctttccggctattcagaccttgcggggtatgaagttttaaagaggggtgggggcaccggcaggtgcagagtaacattctttttt

SEQ ID NO: 191937 - DNA, 122 bp, Homo sapiens
cctctccccgcccggggcccttggtgtgagacatgtcttttgagagctgcgaacttggtccgccggccgggaatctgggggtgccgcccctcggagagtctctggggcctctctcttcagtc

SEQ ID NO: 191938 - DNA, 122 bp, Homo sapiens
ttcagcaccccgggggcgaggaattcaggaccctcggcggggcaagggcctatagggttccgaactcgcaggagggtcgctcctcccctactcgctttttcccggcaccggaaggccccgcc

SEQ ID NO: 191939 - DNA, 122 bp, Homo sapiens
tgagagccgtcacttctttgggtggccgtggcagccctgcactgccggcctctctctagccgtgtgagctccatgtacaaagtggaaaagtccagccccaaacgcgccgtccgtgtccgtca

SEQ ID NO: 191940 - DNA, 122 bp, Homo sapiens
acactgaacttcatgacactgacacctaacaggttttatttcctgatcacacatttggggcgaatctttacctacactggatttccacattgtgctggtggttctcaccctgcagcaatatt

SEQ ID NO: 191941 - DNA, 122 bp, Homo sapiens
ttggagaaggctttactgcgcaggagcagtacctgctgggagaagggacttgctggaagacgtgggtagagccggtccattggtccagtgcaccaagaagtcaagaagttttcaggggctca

SEQ ID NO: 191942 - DNA, 122 bp, Homo sapiens
gaatggtttgtgtagtattggtgttagttctccttcaaatgtttagtaaatttagcagttcggccatcttaagagttctttatcagacgtatgttttgcaaatatttcttccttgtatttca

SEQ ID NO: 191943 - DNA, 122 bp, Homo sapiens
atgttccccaccctcccgcactccccaagataggttggtagtgttaggaagagtggatggcggagtcaacctcctccggtcacgtgtggtacttggcatgcagcgattggtcgccagagtta

SEQ ID NO: 191944 - DNA, 122 bp, Homo sapiens
atagaggagaggtttggttcagctcccaacaggcaaagacagctgtgatttgcagccaaccgcaaaggagtctcgggatgggaagtgaccaagagaagacttcatcaagggtgggagattct

SEQ ID NO: 191945 - DNA, 122 bp, Homo sapiens
ccaggaataagagtaagtcgagtaatgagcatgccccctcccctgtggctcctgggctgtcggcgctctgccaggcatgacggggtgcaccatgcgctcggggcccgcacaccgccagtctc

SEQ ID NO: 191946 - DNA, 122 bp, Homo sapiens
ccgggagcgccacgaattctcgcgtcgtctcgcgagagtccaagttaaagaacatggcgacgtctaatctgttaaaggtaagaccctcactccagcttgggttttactgtgtggccgccggg

SEQ ID NO: 191947 - DNA, 122 bp, Homo sapiens
gcgtccaggacttgcaggtgagggtcacacctgcccacgttgttgtacagagggggggcccgtgctcagccccgagccctgggatgccccttcggcaaccttgccctcccagagccctacgt

SEQ ID NO: 191948 - DNA, 122 bp, Homo sapiens
tcggggcgggagcagacttcgctggctctggcatagcactgtgtagctataaagcgccaacgaaaaggaaaaacagcgtgagcagggtatgacaaggcgcttttatatagaatcgcttatgc

SEQ ID NO: 191949 - DNA, 122 bp, Homo sapiens
gcaggagctggggcaggtggagatggtctagtcctcctggggcctctccacagtgagaaacgtgtccaggactgtggcctgccgctcggggtcgcctaggggctgcttctcgtggctctgct

SEQ ID NO: 191950 - DNA, 122 bp, Homo sapiens
ctccaagttcttcagctctgggacttggaggactggcttccttgctccttagctcgcagacggcctattgtgggacctcagcttatgatggattgtgtgagtcaatactccttaataaactc

SEQ ID NO: 191951 - DNA, 122 bp, Homo sapiens
aacttactttaaaaatcaaataggtaaaaactaaaacgtcaatgaaacaaattttaacatcgagctagcactttaaaatgagagttgtggggctggcaaaggtgcagagaactgtgaaatca

SEQ ID NO: 191952 - DNA, 122 bp, Homo sapiens
gcctctcctcttggcctcgaatggtatccttgtcatcagtgagcaagtccccaaagaccacggtcttgtccattgtcaggataattcactccacaagctgggactccaggtgctgctctacc

SEQ ID NO: 191953 - DNA, 122 bp, Homo sapiens
gtaaaagtcctggggtcttaactagcttcaagatggggaatgccctcaaggtgtcagttgcgggtccacactggctgtggctgagacacccattatcccaggttctgctgcttctttgccaa

SEQ ID NO: 191954 - DNA, 122 bp, Homo sapiens
ctccaggcctgagggtgcggcggccacgggggcgctgctgagacggtggccagatcccagcgccattcttgcctccatccaccccccatccccccggtttcctcatctgagagcgaggcgtg

SEQ ID NO: 191955 - DNA, 122 bp, Homo sapiens
aggaagccactccacagaaaggggtttaaacttgtctctaccctttttgtcgctctgacgcgcccttacagccaaacctacgtactccaccccagctcctaaggcaccggatatacacagtg

SEQ ID NO: 191956 - DNA, 122 bp, Homo sapiens
agaaattggagcacctggtaacagtaaaattaaagggtttgaagctactggataatataacggcatactaacaattatttttttattaaggacatgagtgtggaggtgtcgctaatggtacc

SEQ ID NO: 191957 - DNA, 122 bp, Homo sapiens
ggcggggaaactgagatgggggcgacctgcgcattcgcctccacgcctaagggtgaggggcggggaagaggcgtctccaggtggcaggtggggaacaggagagtgcgagggaggcccagggt

SEQ ID NO: 191958 - DNA, 122 bp, Homo sapiens
ttttctttcccaatctcttctctcctgcattttgctcaagaccctcagaggtgcctcctgcgtcggagagaagctcgctctccgctcatgcagggcttccctgtggtctcacgctggcgccc

SEQ ID NO: 191959 - DNA, 122 bp, Homo sapiens
ctcttttccctctctgcagttcccaggctctaaagagcacagttagggaacttggcaatccggagtttctcgattggatttatacccagctcccaggatcctggctgttcacgacaatagac

SEQ ID NO: 191960 - DNA, 122 bp, Homo sapiens
acctggcccaacctctgccttggtccaacgcccccggtttcctccagggccttggtccaacgcccctcggaggtttcagcccatttcacagaccgggccgcagggccccggcgtaggcctcg

SEQ ID NO: 191961 - DNA, 122 bp, Homo sapiens
gaagaaagagggcctttctcaaagaagcctttacactttttctctaatgtcttcatttcccgcaagcgatttctgagagggaaaaaatcttccagtcttcaatgagcaccaaaagtttgaga

SEQ ID NO: 191962 - DNA, 122 bp, Homo sapiens
tgtggccgccgcagcagctcgagaacacgaatccgtttggccaaaactgaaacaaacacacggatgcacatatgtctgtttacttctaggccaggtgcagagggaacgtctggaatgacact

SEQ ID NO: 191963 - DNA, 122 bp, Homo sapiens
aagtgaacacccattgtgtgatatggttcctaatacgcgcaggtgtagaggatgatattacgtttcatatcgcaggctgggtacacacaccctgtgaaattgttcctaatggcaggaaaaaa

SEQ ID NO: 191964 - DNA, 122 bp, Homo sapiens
tcgcgtcctctgatctcgcatttggggactgggtctctttactcaatcccaagtaactttcgaggtagatgagctcgaaaaccgtcgggagggaacccgcacagaccttattgtgacccacc

SEQ ID NO: 191965 - DNA, 122 bp, Homo sapiens
ttttaaaagagagagggaagtcacaggggacggcccattaggaggaacaggatgtcgacacggcctgaaaatgagttcctttgtaataggaaatgcattacaatgcctggagattcacttct

SEQ ID NO: 191966 - DNA, 122 bp, Homo sapiens
ccaaatgttgcattttctaggactaccctggcccaccatgcccccatcttgataaaaacccgagaccctagtgggcagacacacagaagcagctagatgtggagaggaacacatccggggaa

SEQ ID NO: 191967 - DNA, 122 bp, Homo sapiens
gagcgctcttctagccctagattctataaaactgtccttacctgctgtggaaaacaggtgcggactgagtgctctgtgtaaccaaaagatggcccttcaaagacagctgttgggagcttcag

SEQ ID NO: 191968 - DNA, 122 bp, Homo sapiens
gccttttcagaggtagttagggtaactgagccgggagtgtggggtcctgatcccatgggccgtggcctccaggagaagaacagacaccacgtgctccctgcctgtgcagagggaaggcgcga

SEQ ID NO: 191969 - DNA, 122 bp, Homo sapiens
aaagagcaggtctggctcagtgcttatttcagggaaaactcttgtgatgaatgggccatccgggataaacagatgggacggagagtgcaatttacataacaattaagctagtttagtacatc

SEQ ID NO: 191970 - DNA, 122 bp, Homo sapiens
ctttgttttttctttgatctaagctctaagactagcagctagcatctgaaacttttttgacgagagtgacaaaccaactctaatattaaaggcaattgatgattatgggcactgaagggaag

SEQ ID NO: 191971 - DNA, 122 bp, Homo sapiens
gccgagcggctcctgggcgcctgcgggaggagcccccggcccggccgctgccccagctcgcgttccagttgctttttctacagttgcagcggaggaaggtcctgggcttttgtgtgagcccg

SEQ ID NO: 191972 - DNA, 122 bp, Homo sapiens
ccggcggtgatggaggagcctgtgggttggggcagggccggtggtggagggcggggccggcggggaggggtctgtgtgtgggcggggctggggcggggcggagcggggctggggcggggcgg

SEQ ID NO: 191973 - DNA, 122 bp, Homo sapiens
tggctggcaccgcgtgccatgcatacgaccgggaggtccacctgcgttgtgagctctcaccgggctactacctggctgtccccagcaccttcctgaaggacgcgccaggggagttcctgctc

SEQ ID NO: 191974 - DNA, 122 bp, Homo sapiens
ctgccacttcgacagataaacgcaccaatgggcttgatgagatttaggccaacccataaccgcccctcaacttctttcctttcaatttcaaaactcctctatggcttcctccatctgttctt

SEQ ID NO: 191975 - DNA, 122 bp, Homo sapiens
tgggctatcagaggtttaatttttgttcacagcctcaacacccggggcggtggatcagtccgtttattcagattccacgggacgctgcgttggcatctctgttcaacaagccctttattcta

SEQ ID NO: 191976 - DNA, 122 bp, Homo sapiens
gtttccccctgcccgtgctgagatccttatttggtcaagcttctacctatgccctggcctcggagcgagcccgatagcgctggatcacagcagagggagcgaggcggctgacgtcccatccc

SEQ ID NO: 191977 - DNA, 122 bp, Homo sapiens
tctcagtcctcctgcacaacttcgttctgtcttttctctcttctgtgctgatctgtttcccgttgttctaatcgctccccttttctcttccccagggctctggctctccaggtccccctccg

SEQ ID NO: 191978 - DNA, 122 bp, Homo sapiens
agacctcagcccgacagactgaggctcccacctgcctgggttacatatcaggcttctctccgaagctcggctaaggcaacgtgcatccctctagagacgcactccggaaaccagccccgtgt

SEQ ID NO: 191979 - DNA, 122 bp, Homo sapiens
tctgctctgagacgatgcttcaagagcccggatgcaaaacaaattctcccaaacaccgagcgcccaggatccccctttcaaaggcgtgccactgagcctctcatctctaccattatttactg

SEQ ID NO: 191980 - DNA, 122 bp, Homo sapiens
tgtaagcgcggcggctccggtccgctcgcttcccctccccccgcaacccccttcctacggcgcaagcacagaggcctttcctagattgcagtgcctgtcagggcgagccgggatctctcgcc

SEQ ID NO: 191981 - DNA, 122 bp, Homo sapiens
atcactgttttctgataaaagtcaggagctgtcatcatgtaaattgttaatctaacatcccgtgatttattcctttgttcctggcttaccttactaacctctggtccttcatctacatacca

SEQ ID NO: 191982 - DNA, 122 bp, Homo sapiens
ggtgaggaggaggttggcagtgatttagtataagtataaaaacaacagtcgggccgggcacggtggctcacacctgtaatcccagcactttgggaggccgagatgggcggatcacgaggtca

SEQ ID NO: 191983 - DNA, 122 bp, Homo sapiens
cccacacgtggcctcacttaaacttcccattgacagccagagaagcaggcacaacgaggccggcgtgccctggctgtgggggttgcatccagatcacggcggatctgggtcggcctgacccc

SEQ ID NO: 191984 - DNA, 122 bp, Homo sapiens
ctctgcggcaggtgctggggccacaggaggaaccagcaaagtcctcgtcactggggatcgcgtcctacccgggggcacagaccataaaggaaaactgcagggaccagcatataaggtggtgg

SEQ ID NO: 191985 - DNA, 122 bp, Homo sapiens
cccctcctcccaccttgggactgcccccacactgttacctgtccctggtccaggaggattcgggcagctaactcagcctcctggagagacacacacggattcacacagaaacacatgaccat

SEQ ID NO: 191986 - DNA, 122 bp, Homo sapiens
agtaaccccagctggaaactacccagatgtccaccagcggatgaacagataaacgaactgcggtccatccatacaacgtgacatgctttggcaacaacgcagatgaaacgctgagacatgcc

SEQ ID NO: 191987 - DNA, 122 bp, Homo sapiens
acctacgcgctggtgcagatgcagcgcaagggtgcgccacgtgtcctgctttactgcaagcgctcgctgcaggagtgggtctgaccacccagcgctcctgctaacggtgctcagggggcgcc

SEQ ID NO: 191988 - DNA, 122 bp, Homo sapiens
gacctagcccgggtggggcgaacgaagagcgggcgtggtgggcgcctgctagctccggctcgcggtgttaggccttggggacatcgctcggggacaggagagccccgggcccccgccgcccc

SEQ ID NO: 191989 - DNA, 122 bp, Homo sapiens
tgaggggagctgccgggcctttcagcccggtggtctccacgatgctcccatctgtgtggacgacaatcagtgtcgctttttcggtgttcaggctgtccccgatctgaagggccgtcctacca

SEQ ID NO: 191990 - DNA, 122 bp, Homo sapiens
ccctagacctgacatcctgcggggcagcctctgtgtccctagacctgacatctggcggggcggcctctgtgtccctagacctgacatcctgcggggcggcctctgtgtccctagacctgaca

SEQ ID NO: 191991 - DNA, 122 bp, Homo sapiens
tcaccccgctccccgccctgagtgagcctgtcccctctcaggggcgcgcccgagtcgctccgggttggctgcgccagtccagagttaaactttcagccaatgaaaaagggcgcgaggcgtga

SEQ ID NO: 191992 - DNA, 122 bp, Homo sapiens
tggtgttagcatgtgtttattcagagagagttggcccatgagaatctcattttcctttgacgaatcttgccctagatgaatacttctgagtaacaactaactgctcagatggctttctgaat

SEQ ID NO: 191993 - DNA, 122 bp, Homo sapiens
gcctctgtgattatctgctgcagacgccgaggcctggagtccctgagcatcgagcctccccggggagcaaatgcactcggcactcgtgaggtccaccgccaactccataacagcgctcctag

SEQ ID NO: 191994 - DNA, 122 bp, Homo sapiens
tcacgggtcccctgagggcgctctgtctcctgggctgcctgctgagccacgccgccgccgcgccgtcgcccatcatcaagttccccggcgatgtcgcccccaaaacggacaaagagttggca

SEQ ID NO: 191995 - DNA, 122 bp, Homo sapiens
ggtcacgtgacgcccggcccggaagcgctcgcgcaggagaccccgggtgacggggcccggcgccgctaactggagcgaaccccagcgtccgccgacatggcctggaccaagtaccagctgtt

SEQ ID NO: 191996 - DNA, 122 bp, Homo sapiens
agtgtcattcccatcacggccacaaggtggagcccacctccctgctctgggacctcaggtcgcgaccccggaagcacatccttcatcctctaccttccttctagcagaaatggcggctgcgg

SEQ ID NO: 191997 - DNA, 122 bp, Homo sapiens
ggaagcccagcgggagcgggtaatgggggctggggtcctcccgcccacggcggcaccccccgggggtctctgggaagaacacctgctgtccatccatccgcgcgtccctgggtctgagggtc

SEQ ID NO: 191998 - DNA, 122 bp, Homo sapiens
ccaccaaggtgagaaaaatgcaagttcctcccaggcctcaacatccactaagagcccaagcgaagatcctctaaccaggaagtcagggtcgttggtgcagttcctgttgtacaagtataaaa

SEQ ID NO: 191999 - DNA, 122 bp, Homo sapiens
cgcccacagatgtttatcctggtgctttagcattttctgccttctggtccagtcgttggccgtccagaccactccactcctcccgccccaacacacacgacacacaccctgtatagcccaaa

SEQ ID NO: 192000 - DNA, 122 bp, Homo sapiens
gcctcggcaaagttgtgcctcggcacgatgctaattcggcagtgcccggatggagcgggccggggcggcggggggcggtgccgggaccctcagcccgccgcgccccgcccccgccccgcccg

SEQ ID NO: 192001 - DNA, 122 bp, Homo sapiens
tcaccccacctcctatttagctctttaggaatgcaattatagggtgggtgctgtggctcacgtctgtaatcccagcactttgggaggccgaggcaggcgagatcggcctgtagtcccagcca

SEQ ID NO: 192002 - DNA, 122 bp, Homo sapiens
tacagccccaccccagcaaaatcctcgcttcctcttccccgggacgtagccccagaggagcgaatctggaccaagcccaagacaggctgaagctactgctgcgctctcacctccggcagtga

SEQ ID NO: 192003 - DNA, 122 bp, Homo sapiens
agtcagaatcccgcccaggcaaaatgacatggcagccaactgtggagcctcggttggcctcggatagctggtccccccttcattcacaccacatatctgaggaccagatatggaaagcctct

SEQ ID NO: 192004 - DNA, 122 bp, Homo sapiens
aaactttcttaggtttcccataacgccttaaatctgttcctatcctcagactgagtaattcgacatgtggaaatctttcgtaaggaactaggaatgaggacaattatttatgtataggggtg

SEQ ID NO: 192005 - DNA, 122 bp, Homo sapiens
actgcggccaatggggagccaggcttgaggactcgcgagatgacacctgccggtgggacgcgggcttgaggactcacgaggcgatggcggctggtggggagcatggcggcccttgctagggg

SEQ ID NO: 192006 - DNA, 122 bp, Homo sapiens
agggatgatttcataccagaagcaacttttgggctaagaatttaaacattggtaggcgttcgttacataaacaggtaagagggcattttagagagagagagggtagcatgtgcagaggcttg

SEQ ID NO: 192007 - DNA, 122 bp, Homo sapiens
tctgttcccggcagggcgcatgctgctgcctgggctctcgtcagcacctgtgtttgcgcccggctttgtcatacccagacaggacatgaacacagagagctctagactcactgccttgtccc

SEQ ID NO: 192008 - DNA, 122 bp, Homo sapiens
cttcccccagccacagtgacatctggaggctctgaccacagctggcaggctctgtggtaccgcagaggccaatcttcaacaggaagtcttgggggaacatttcttcccccaaaacaccaggc

SEQ ID NO: 192009 - DNA, 122 bp, Homo sapiens
agattatttggtttgatccgtaaatgatgggatggggcgtcgcgctccgagcgtgtcccacggcgggcccctggcaccacactgtggccgcatgtgcatattgcagcctccgcccgtatctg

SEQ ID NO: 192010 - DNA, 122 bp, Homo sapiens
gtcattctgaactccaaattcccatccaaatccttgtttgtctcctggaacccataatgtcgaggtccaggcacgggaagtgatcaggtggtttactgactagggatgcctcttccaaggaa

SEQ ID NO: 192011 - DNA, 122 bp, Homo sapiens
gaggcctgggtggtgggaaattctgtttctctgaagcactggggatgtaaggagggctctcggtgtgcccccaccagctggcacacctgagatatgcctcagaggcacacatctaggaaaaa

SEQ ID NO: 192012 - DNA, 122 bp, Homo sapiens
gggcagaggcagggtggaggcgttggcacgggacatgtgggccgcggttgccgactgtggcgcgggcagtggaggaggaggcggggctggcgctgaagtcggatccggatccgttgctgtgc

SEQ ID NO: 192013 - DNA, 122 bp, Homo sapiens
agcaccggggtttcagtgtccatgtctctctcagcgtggccagcagcagccgggagaacccgattcatatctgggacgcattcactggagagctccgggcttcctttcgcgcctacaaccac

SEQ ID NO: 192014 - DNA, 122 bp, Homo sapiens
cgaaggctaagctcacatggctggtaagaaatggcgacacagcgcgcagaccccaggacccgaaggctttatctaaaacactcagtgcaaaatggaaaaagataatgtgtccaaggctcata

SEQ ID NO: 192015 - DNA, 122 bp, Homo sapiens
ggctcaggtaccaccttctcttccgccttccaagtgactagagttcctgggccagtctcccgaaatcaaaaggcgctccggcctccagcagaaatttttgctgagggcttgcaccgtggtcc

SEQ ID NO: 192016 - DNA, 122 bp, Homo sapiens
gacaccagacagagatcaactccagggactcttccggacctgcagggcaggcagagcattcggttgctaggcagctgcgcctcctgggagggtgggggaccccaggggcaggtgtctaactc

SEQ ID NO: 192017 - DNA, 122 bp, Homo sapiens
ctaagtgcagaaaaaggcaacaggggttatatgaaaatggtaatggcagacagaggcagacgaagggactgagttcagtgtactttgtccaaggggtcacgtggacttggacattgtggctg

SEQ ID NO: 192018 - DNA, 122 bp, Homo sapiens
gggacatgtgtcccccagcatcggcgtgtctctcaggttccgcgtgcatgtgtgtgtgtgcgcgagcatgtatccagcaggcccatgtgcatgtgtgcgcgcctgtgctcatgcacgccccc

SEQ ID NO: 192019 - DNA, 122 bp, Homo sapiens
tgtcacaaactaatagaccaaagctccccaggatatatgggcctctatcctggaaaccaacgtatgtctaactgaccacgtcagtgagtttttagaatacaaagtatttccataccttcttc

SEQ ID NO: 192020 - DNA, 122 bp, Homo sapiens
atgctgtatcagaatcctagagggctcctccatcagttccccgatgacggtgtggtgctgcggtggtggtggctgcagtgagggtgctgctggtggtcgtggggatactagccacagagggg

SEQ ID NO: 192021 - DNA, 122 bp, Homo sapiens
gaagttctccttctgctaggtagcattcaaagatcttaatcttctgggtttccgttttctcgaatgaaaaatgcaggtccgagcagttaactggctggggcaccattagcaagtcacttagc

SEQ ID NO: 192022 - DNA, 122 bp, Homo sapiens
agagcctaaaaacagaaacacaggctttccataacctatgattagcaagatattaatcagcggtaacagttgcagcaaaagctggttacaaacaatctgtagaaacaggacgtgaagctaga

SEQ ID NO: 192023 - DNA, 122 bp, Homo sapiens
tgatcttccagctcactatgcaggttatggggacaagaggccagaggccaaggaaccaggcggccccagcaggacgttccctagctgtgcatcctatgcacagccatgataagtgaaggcgg

SEQ ID NO: 192024 - DNA, 122 bp, Homo sapiens
gcttctcttctgcagctttgggtgggcggctggatggggaaagcaatccctaggtcacagcgcccagaaattaagcaacttctgccgtcaatagctggtaagtgacagagcagggatgcaaa

SEQ ID NO: 192025 - DNA, 122 bp, Homo sapiens
agcattagactggtcccagcagccctgggctttgggactaccatagaccaggccagcccccgagtctccatctctaggctgccacctgtggacccaggctgcaggcccaccctaggttccag

SEQ ID NO: 192026 - DNA, 122 bp, Homo sapiens
ctggcccgtgacacagccctcaggaaatcctgagactatgtggccaaggtggttggggtacggcttggttttatatactttaggaaggcatgagacattaattaaatacatttaagaactgt

SEQ ID NO: 192027 - DNA, 122 bp, Homo sapiens
aactctctcttcctggtatctaacaggatgatctcattcatagcatggtgaaactggaggcgccctgaagattcctcttcaagggaggactgaatgccccagcaaccagcagaggcctccag

SEQ ID NO: 192028 - DNA, 122 bp, Homo sapiens
gggtaagggaacagggtcggtatggtctcgcccaatgcacttacaacccaaagccattaccgagataaggtttgttgccccatctgggccctcgcgtgcagagacttccccgcctcagtctc

SEQ ID NO: 192029 - DNA, 122 bp, Homo sapiens
ccagggctgcctcctctgtccgggtctcagcttggatgtcacctcctggggaggtcctcccggccacacctccgccccttcctggcctgcatctctcattcctggactctactccaagtctg

SEQ ID NO: 192030 - DNA, 122 bp, Homo sapiens
agaccgcctccgacttcgaggtctcaatcccacaggcaccaaagaataaacagaggagcccgaccaagcgtcaccgtttaggggagattgcaagaagcgccccataccctaggccgcgcccc

SEQ ID NO: 192031 - DNA, 122 bp, Homo sapiens
ctgctcagctggaggaagaatgtaggcgttcccgctcagctggggcctccagccaaggctcgggggtcgctggtgcagtacacatcccatgccctccccgccaccccggagccttgccctca

SEQ ID NO: 192032 - DNA, 122 bp, Homo sapiens
cctcaggggcctcaggcgcccagcggtgctgggcggggctggggcacgaccgggagcatgcgcagagcgcgcgtttcgcccatcgcgcacgcgcacacacctgctccgcccccacgctgcgt

SEQ ID NO: 192033 - DNA, 122 bp, Homo sapiens
attcttaagaagctatgaaatgcctctgaaaattccttgcaaccttggagtaacttgatccggagcctagacacttgattctagtccttgattttcttatcactttctgtaaacattgaata

SEQ ID NO: 192034 - DNA, 122 bp, Homo sapiens
ttagaattaattcagcttttctcttggattcctttcttgtttcctttcctcctgcattgtcgtgcctcttttcattttacttagggccatttgcatgaaaacagcatttcagctacttgggg

SEQ ID NO: 192035 - DNA, 122 bp, Homo sapiens
tttgagcctctgatttccaattccctgctccttcccactccattaagaggctaggtgaggcgcttctaggttgctggggctctgctggttaaggaacaggaagcctgaccatctccctccac

SEQ ID NO: 192036 - DNA, 122 bp, Homo sapiens
ttatttctggtatgtatttttgagatctgccatcactacttctgaattgttcagaatagccggcttcatttgggccaggaaatgattctggtcccaattagaaaggacctcatgttcttata

SEQ ID NO: 192037 - DNA, 122 bp, Homo sapiens
gaaaacagaccagggacacggctggtcctgatgttctgtggcgcttggccctgtcactggcgcttcttggatgaggcccttaaacacacacagtggcagagcaagacttcatgtgagtgaca

SEQ ID NO: 192038 - DNA, 122 bp, Homo sapiens
gatcaccacagtaaaacaaaattttatccattcagcctgggattttgaagccatgaaaaacgtagacattgtttgttgttactgctgcttgaaatgatgcctgataatatgtaagatgaact

SEQ ID NO: 192039 - DNA, 122 bp, Homo sapiens
catgagccttcttccagccaccaccaccaccatcgtgcggtacttgaagaaatggtttaccgtcccacatacattttgaatatgtatgtgggatggtaaaccgcttcttggtatccagccca

SEQ ID NO: 192040 - DNA, 122 bp, Homo sapiens
ttgagacgaacaaatgccagctcataccaggtcagggattgataatggaacaatgccattcgtcaatagtaacacctacatgtaagccaatcaatcagcaggccattggttatcacgttggt

SEQ ID NO: 192041 - DNA, 122 bp, Homo sapiens
ggcctggtcagcaagtggcaaggacgcggcgcaaagccaggctttctaatgtacaatccgcggctctttcgatactgaacacccacctcttcaacaaattcgagcgcctggcaggccctgca

SEQ ID NO: 192042 - DNA, 122 bp, Homo sapiens
gacaaggcctcgggcttccactacaatgttctgagctgcgagggctgcaagggattcttccgccgcagcgtcatcaagggagcgcactacatctgccacagtggcggccactgccccatgga

SEQ ID NO: 192043 - DNA, 122 bp, Homo sapiens
gagtgctccagagatgctgggtgtgggcgtcactgtctctgacccaccagatcttgggaacgccccttctccttcctgggcctcggtttcaccgtctggctagtgagtgtgggtgcttcggg

SEQ ID NO: 192044 - DNA, 122 bp, Homo sapiens
ttgactaactcttgttgttcactctggacattaacgaaaaagactggaatagggctacagcgctgcttttatgctacacgggttatgcttggactctgactcccagcagcaggtagattcag

SEQ ID NO: 192045 - DNA, 122 bp, Homo sapiens
cgcagctgggtctgcgcggcagccggcggctggccctttaagaactgtccgcggcggcagcggaatgtaacaaaccccacatttgattcacaacattcgaagcggcggggtcgcgcgccaga

SEQ ID NO: 192046 - DNA, 122 bp, Homo sapiens
atgaacttccacatgccccggcgcttgttgatgacgtaacttccggttgctgtgctgagtcggaagtgggaacccttcggccgctgagattctgtcgtgtcgtcgctgctggcacttcaggc

SEQ ID NO: 192047 - DNA, 122 bp, Homo sapiens
acgatacatcttccattgtgatagaaagtggcagtggacagctttgttctagagtatttccgtttctgaaatacatgtttaagaagtttggaaaggaattagtgtagagtatgagaagggtt

SEQ ID NO: 192048 - DNA, 122 bp, Homo sapiens
aagctgaggacctactgtgcgccttgcatgccgggtagagaacagagccccaggagcgcacgaggtgctgaccgagctgagggcctactgtgtgcctcgcacgcggggtggagcatggagcc

SEQ ID NO: 192049 - DNA, 122 bp, Homo sapiens
gtccttctgtaaagactttttttgagctctccaggtgaaattttctttccacaattattccgcaaaacgttattgcttttgttagtctgacatttgcttctgtatttctgggttaattgcta

SEQ ID NO: 192050 - DNA, 122 bp, Homo sapiens
ccacccctgcccactaaagaattacagggcccgcagttttgcacatgcgcgttactggatcgtgaagctagccgcccagagaagggtaggaggaccggctgcgtggcagctgggcgtgggga

SEQ ID NO: 192051 - DNA, 122 bp, Homo sapiens
gaagccatcctgatggccacagtcatgcctgccatcagagcagggttcaggaggagtggacgggtatgcctgacagcagattacagcaaacagacatctaccaccgagcaaaccatcagaga

SEQ ID NO: 192052 - DNA, 122 bp, Homo sapiens
caaagaacctgaattccaagtgactgcacagacacgcagcaagttctggaagcacacctccgggttcttacaccaataggtgactctcacaccgtgttccaccatcaggaagctcctcgatg

SEQ ID NO: 192053 - DNA, 122 bp, Homo sapiens
ggggggctggtcctgccctgtcccacatgtggctgtgtgggcagcatggatcttcttccgcggtgaccctgtatgcccacccccgccaacttatgcctgcttcccaaggccatgggcctcac

SEQ ID NO: 192054 - DNA, 122 bp, Homo sapiens
cctcactaggttgctaagagatttaaataatatcaagtgaataaaaggcatagctgagggcgtgttcattaattaatatgtatgtagtaataatcatagtaacagaagcagcagcaacacta

SEQ ID NO: 192055 - DNA, 122 bp, Homo sapiens
gctcgcgtccagccgagacgcagaaggcggggttgagggccggactgccgactgtagggccgactcgcgcgggaccgcgcgccgcccccgcccgccgccaaccactcacttccggcgcaggc

SEQ ID NO: 192056 - DNA, 122 bp, Homo sapiens
ccttggcgggactgcttccgccagcttcccggccagacccaagggtggagctccaggccacgttcccatggagggagcgcctggtcccctggggtggtctctaatttgggccacggcagctg

SEQ ID NO: 192057 - DNA, 122 bp, Homo sapiens
tcttttcagctcgtctcaaaatcccttttagagaaaatgctcctgtcaagttttatttcccgttgcaaaccaccttccacgctgccaagaattaagaccgggagagattaaatacccgatta

SEQ ID NO: 192058 - DNA, 122 bp, Homo sapiens
ggcagtaagtgatacatgtgctgtgccgaggtgtgtccgtccgtctgtctttccatctgtcgtgggctgggggtgggagacgggaagacgggggtggggtggggggcctacggccatgcccc

SEQ ID NO: 192059 - DNA, 122 bp, Homo sapiens
tctccgttgcgacctgggtggtgggagggagggtaagagggatcgcccatcacccactcgcgcacttgtcgcagtgacccggcaggctgacattacttcccacctagccttttcttttcttg

SEQ ID NO: 192060 - DNA, 122 bp, Homo sapiens
ccagctcctctccctgccttgttcaggacctttgagaccatctttgaggaaccccgggagcgcaatgggactctgattttcaccagctcaaggaagctccggcgggctgtggaatttcggga

SEQ ID NO: 192061 - DNA, 122 bp, Homo sapiens
cagataaagcttggacaatgcctactgcagcccagctttcctgctgtcagctctggaacccgagacactttggctcttccgggactcagagacccaggaacacaaataaggccccctcaaga

SEQ ID NO: 192062 - DNA, 122 bp, Homo sapiens
ctccgagctctgcatccagtgctcgctccccacagcaccccccaactcacccacagcagccgacacagccccaggctgactctaacaagcacgcacaaaagcagcgagaaatggcccatgct

SEQ ID NO: 192063 - DNA, 122 bp, Homo sapiens
tatgatggatctgtcattttgtcactcagctcaccataaatacatacaactttcatagaccggtcctgccaggcaacagcacttgtattctggagctttctgaattatatatttgctctctt

SEQ ID NO: 192064 - DNA, 122 bp, Homo sapiens
gaccctccgcctgaactgagactgggtggggaaaggggcagactgctgtctgtgactctgcgggaggtggagcacgaaacacaaaagctgtttgaaccacaaacgccaggctggacacccaa

SEQ ID NO: 192065 - DNA, 122 bp, Homo sapiens
tccgagatctgaagttagaaacgccggggctccgggtgcgggtgtaggaggctggcgccccgaggtcgccaccgagctggggctggcgctgccaccctcgccccttgcctgtccgcctccct

SEQ ID NO: 192066 - DNA, 122 bp, Homo sapiens
cctccaatgagggcctaggaggactttcttagccaatcagtagccaagcccctgcaattccgggtgggaccaggcgtccacacctatagctggactgctcgttggtcccttatggcgcttct

SEQ ID NO: 192067 - DNA, 122 bp, Homo sapiens
ttttctgtctctctcttcctctgcgagctggcttaggaggagctgttttgcatcccttcacgtcagccctgcctcattcccttcttccagggagggagagagcgcgagcgagagagcgagcg

SEQ ID NO: 192068 - DNA, 122 bp, Homo sapiens
cctcccgggacagctgaaaagaactgtccattcagaagtgattcatccacaacagagctgcgcgcagaagccggagggctaattccaaccttttccgagtgctcgttaagcctctttgagtt

SEQ ID NO: 192069 - DNA, 122 bp, Homo sapiens
tcctctcacacacgctttgatattttctcagaggtgttcccacctctacatgtctctcaccgcactgcctgaggcaccctccagggtgggctgcatgtaccccaagcctgcctggcacctag

SEQ ID NO: 192070 - DNA, 122 bp, Homo sapiens
gagccggagccggaggtggtggtggtctcctggcagagcggtgggaccgggagcaagctgcggtggttcaccaccttgatgctgtgtgcctccttcctggggctggtgagagccggggctgc

SEQ ID NO: 192071 - DNA, 122 bp, Homo sapiens
ggggctggggggaggccagacctggaaggctgggcacacaggagcaccctaaccagcaagcgggggacgcagcctccgcggcatactcccacagtctgtctgtgttgccgggcagattccct

SEQ ID NO: 192072 - DNA, 122 bp, Homo sapiens
gattcactacggactgacgagttcaggccttgggaactcatgtgccaggaccaagatgaacgtctcagtactgctcatgcccactccaccacagagggaacccctgttctctcagccccact

SEQ ID NO: 192073 - DNA, 122 bp, Homo sapiens
gttcttattcagattcatctgcctccaatgggccttaccccactccgaggccggggacttcgaagccaagagaaactgaggaaactttccaaaccagtatatctcagatctcatgatgaagt

SEQ ID NO: 192074 - DNA, 122 bp, Homo sapiens
cgccgctcgcgtccctgcttccagctgccgcacccctctccaccctcccagccgggagtgcggggccctgagccactgcccctggagcctggtgggcagagttcacgctccgcaggcctggt

SEQ ID NO: 192075 - DNA, 122 bp, Homo sapiens
cgtgaggacacttaggataatgagcaggggtctaagctacaggagggtggaaggggaggacgtctgaagagcttgaagtgatctctgcaagtttaaaacaaaagcacagttgtctcctgtct

SEQ ID NO: 192076 - DNA, 122 bp, Homo sapiens
tccaaacctcgcgatagctactggccctgggcgagccgttgggattgcgcttgcgcacagcgtgtcttgtacgttcccgcgcttttctggaatctttcgcccccggaagggcagcggcgggc

SEQ ID NO: 192077 - DNA, 122 bp, Homo sapiens
catcctgggcggggtggaccagatccacatcaagcccaagtccaaggtgctgtacctgggcgccgcgtcgggcaccaccgtctcccatgtctccgacatcattggcccagacggcctggtct

SEQ ID NO: 192078 - DNA, 122 bp, Homo sapiens
ggggccctccgggaatttctgcaggagcggcggagcgccctgagagaacaggacgaacttcggacccagagtgccctgaatcgccaactggccaagatggaggctgagagggacaccacaac

SEQ ID NO: 192079 - DNA, 122 bp, Homo sapiens
gctgggcgtgtgtatgcaggtccctttggggtcagccatgtgtgcatgcgcctgcctgtgcgtacccaggaggggtcgcagtaaaggcatcagtgtgtctgcacctgtgtgtgctgtagtgt

SEQ ID NO: 192080 - DNA, 122 bp, Homo sapiens
ggtgccctcgcagggcctgtggctgctggggctgcgcgagggcaagatcctggaggcacacgtggaggccaaggagccgcgcgctctgcgcagccccgagaggcggcccacgcgcattggcc

SEQ ID NO: 192081 - DNA, 122 bp, Homo sapiens
tctcctcatctagatgggggtgtgactcgggggagctcagaattccctgagaagaggtcacgggcacgtagaatcaattttaacgtggttccccaagcacgccaaagaagatgctgttctag

SEQ ID NO: 192082 - DNA, 122 bp, Homo sapiens
gaaagatcatgcaattggtaggtatcactttgccttttatttttcaaaagggtctgctctcgtttatgttgagtttattttcagcttcaagtcacttttggcagttaaatcataagtcttta

SEQ ID NO: 192083 - DNA, 122 bp, Homo sapiens
gtccatctggaaggcccagcatgagaggcctggccgtcctcctcactgtggctctggccacgctcctggctcccggggccggagcaccggtacaaagtcagggctcccagaacaagctgctc

SEQ ID NO: 192084 - DNA, 122 bp, Homo sapiens
aatataaatgagagcatctcttgtttcagcagggtctcaaaacccatctggcaaaataaacggcctcagcatatttatggatactgtgggaagaagcagagagtagtacattttttacttca

SEQ ID NO: 192085 - DNA, 122 bp, Homo sapiens
ccaggcaatgtgcaacggggtcctcagtgtggcagtgaagcctccatggacgaagcaagacgggacggagcttgcatgaatgggcacaggagagaactcggagccggcctacctaaatcccc

SEQ ID NO: 192086 - DNA, 122 bp, Homo sapiens
acctcaccgcgatgcccgaatgctacttctactccgtgttcctgcaccagttgacctcaccgcgatgcccgaatgctacctgtactccacgttcctacaccggttgacctcaccacgatgct

SEQ ID NO: 192087 - DNA, 122 bp, Homo sapiens
cgttcttctagccctagttacgcagtaatataacgacaggtggaaacctgcaggttgccacgttcattgcaaagtgtccacagtaaagataaaggagaaattcccccggcaatgaaaacgag

SEQ ID NO: 192088 - DNA, 122 bp, Homo sapiens
agagacccatgctggaggggcagacatggggcctgcagtgagcccacccaggcctctcttcggtctccagcttccaagcccttcagcacgttcagtgggcaagaacactaggttcaaatcca

SEQ ID NO: 192089 - DNA, 122 bp, Homo sapiens
ttcctttactttatccattaagagtcctaacacatagtaaaggcaattttactgccaagccgaagatgttttaaatattggcactcatttcatttctgttgatcaattacttgatattaaaa

SEQ ID NO: 192090 - DNA, 122 bp, Homo sapiens
ccctcccccgccaggcgacgcgctgtcggtggccggctgcggctcgtgcctggagggcagcgcccagcagatgtaccagagcctggccgagctgggtaccctgccccccgagacggtgagcg

SEQ ID NO: 192091 - DNA, 122 bp, Homo sapiens
tacgaagcgtctagagtataattcggtagcgctttgaaatccaccctgggattcggaaaccgggtagaaaactacctggttcagcaaacgagaattcaaacagaggaggggcttggaggagg

SEQ ID NO: 192092 - DNA, 122 bp, Homo sapiens
attattattattattattgagacggagtctcagtctgtcaccggctggcgtgcagtggcgcgatctctgctcactgcaagcttcgccccccgggttcaagccattctcctgcctcggcctcc

SEQ ID NO: 192093 - DNA, 122 bp, Homo sapiens
gtctgggcagagttgtgatgaactggggaccgagcagccccagctcgcctcggaggttcccgagccgggcgggagatgcggggagagggagggggcggggagggaggggagggagagaggaa

SEQ ID NO: 192094 - DNA, 122 bp, Homo sapiens
ccgcccctcaatactcccaggtgattgacagtgcggagaccaatgggaggcactcttggccgacctacccagcggcgccggtaggaacgcgggagtggcggtagggagcgcgcgagggatcg

SEQ ID NO: 192095 - DNA, 122 bp, Homo sapiens
agagcagcaccggcgtgggcaccacccggcctgacgcatcggccgccaaaacccagtctccgcggtgcagttcccgcagccctttccgctcgccgctccacaggcgcacagttgcatttccc

SEQ ID NO: 192096 - DNA, 122 bp, Homo sapiens
tctgcagaacagccaggaaacaagcccggcccatggcgccacctgctgcctgcctgcctccgctcatgcaccctgggctgggatggtacttctgttcgtctggcattattgcccttggtcat

SEQ ID NO: 192097 - DNA, 122 bp, Homo sapiens
ccattgtgtgtcaggttttcccacgggatccgtgatgggggaggccatataaagggagctcggatccgggcctctccggcattggtctctgggagggtctacctcgtttgcccaaggggaag

SEQ ID NO: 192098 - DNA, 122 bp, Homo sapiens
ccatgcccatggccatggccacactcacgagagcatctggcatggacatacccacgatcacgaccatggacattcacatgaggatttacaccatggccatagccatggctactcccatgaga

SEQ ID NO: 192099 - DNA, 122 bp, Homo sapiens
atgttctttttcaaaacagtgtatggaagtgcatgatgggtggtcctcacaatgactacacgaacaaaggactcctgtggattttaataacactgatccacttatgaatcataaatcaaatg

SEQ ID NO: 192100 - DNA, 122 bp, Homo sapiens
tcagtttaagtcatgtgcttttttgaagttaaaattcataccactctgagctctacctagcgagtagagtccaaccttctgttgaggttcttctccctaggtatccccagtgatcctacggt

SEQ ID NO: 192101 - DNA, 122 bp, Homo sapiens
gtggcgagacaccctttggtaactcccactgaccagtcttgggagccttcctggaatgatcgtgggctgagcggagatgttttttgcaaaatgaaactgaagctgaaagaaaggagaattcg

SEQ ID NO: 192102 - DNA, 122 bp, Homo sapiens
tcctccagcctgcccgatgacatctcagtaatcagggtggaggacagcttcaagggcgagcggtgccgctccaagaagatctgactggtacctatcgacttggacaaattggagatccccag

SEQ ID NO: 192103 - DNA, 122 bp, Homo sapiens
catctcaaaaaaaataataataataagttaaatatgtggtaaatgtgactttcagtgaaacgtatttgaacttttgtttgggagagcagatggtttcaagcaaatgttattcctgattttag

SEQ ID NO: 192104 - DNA, 122 bp, Homo sapiens
gctgcaaaggaccgatcggcgggtacgccagcccggcccacccctcgcctccgtgagccgcgtctgtaaaactgggttaagagccgcctgtctgtgctgtggggggttcccaaggaaggggg

SEQ ID NO: 192105 - DNA, 122 bp, Homo sapiens
acctgaagcctccccagcccgaggtatttgaacttacattcagtgcttcacgtctctgtccggggtgcctctgtctctcaactctgacttctgagtactggcagttagaacaggaaggaagt

SEQ ID NO: 192106 - DNA, 122 bp, Homo sapiens
cacttagtgccacaaatgtacccattagagtccctcaacagttctgtaattactgttatacggagcttggcagttaggcctttgcatatgctaaagaaacgtaggcattcatatttaaatcc

SEQ ID NO: 192107 - DNA, 122 bp, Homo sapiens
atgatcctcgccagaacgtctccccagccccggaagggcaggtctgagccagcaccagggcggtgggagactcctgtccacacctctgccccagagctgcctcctgcctggcactgccgcca

SEQ ID NO: 192108 - DNA, 122 bp, Homo sapiens
aaaaaaaaaaagaatgcggtggaagtctaagattgcctcccctatgacaaaacacagccccgccggccgcccgggcccgactccgcccgcccgcccgccgcagtttcggggctgcggcccgg

SEQ ID NO: 192109 - DNA, 122 bp, Homo sapiens
ggtgtacgccggcgggctggtctcactatctcaagatcatcttgggacagtttaggaatacgccatttaggtctgtattgatctgtaatgcgtggaagaggcatcacatagaactgttccca

SEQ ID NO: 192110 - DNA, 122 bp, Homo sapiens
agccagccgtgactctgcccctccctctgaagaagagaactttatagaagggaaatcaggcgacaaagtcaaggaaagaggtgatagatttagaagaccttgaagggaaaatgaatccattg

SEQ ID NO: 192111 - DNA, 122 bp, Homo sapiens
actaggcaatcccgcctactgttctgaggtttcccctccaggtgcagcttcagagccaggcgagccaggaaggaccagcgggcgaggtggtgagttgtgaggcgcgcccagtccctctgttc

SEQ ID NO: 192112 - DNA, 122 bp, Homo sapiens
gatatggctgcaggagagaaaccccagccttccccagcgcccctgtccgctcggtatagacgtcaagtaggaaggagcccaaagggagggagaaaattaagagtttcggcccactccccacc

SEQ ID NO: 192113 - DNA, 122 bp, Homo sapiens
agtgccccaaggggaccttgcagccactctacatccccgtttcacagatgaggaaactgacgctcatagggtggaagcagctggcctatgcgcccacaactcctaagaagcagagacaggac

SEQ ID NO: 192114 - DNA, 122 bp, Homo sapiens
gacctcggacctcaggagttggggacagggacacaaagttggccccgaccccggctcccacgtggccgctgctggctgcacgtcctccaggcacggccaggagctcaccgtcatggaatgcg

SEQ ID NO: 192115 - DNA, 122 bp, Homo sapiens
cgaatggaaaacagcacagctgacttcacagtagtagatactggtgacacttcatggctgcgacccagaatgaacttaatgcacacagggacgcagggtgtcactggtcctgggcctttgtc

SEQ ID NO: 192116 - DNA, 122 bp, Homo sapiens
cagcacctgccgttctccatttgcatgtgtattcacgatgtcccatgaacctagaattcccgcagcgccctgtgggagctcagtgagacataaagcaagcacaaggtaggtgtgatatgagt

SEQ ID NO: 192117 - DNA, 122 bp, Homo sapiens
ctggaacgtggaccagagctcggatcccatcgcagctaccgcgatgagaggcgctcgcggcgcctgggattttctctgcgttctgctcctactgcttcgcgtccagacaggtgggacaccgc

SEQ ID NO: 192118 - DNA, 122 bp, Homo sapiens
ggctgccgggaacaggtggtggggccggcgtagcgccccgaattaggaactgtcgggaagcgccgcggccgctggctcgagcctccgatgcttgcccttttttagccagcggggccactgac

SEQ ID NO: 192119 - DNA, 122 bp, Homo sapiens
gcgccgcgggccacacatggctgcgtgaccgcgggatgctgtctgtccccttgctcagggcggcgtgccggcgatggagcgcgcggtagagccttggggcccagatctccaccgcccggagg

SEQ ID NO: 192120 - DNA, 122 bp, Homo sapiens
caccagcagccagctccaaggggctgaagcgactctggctgggggagcacgtgaggcccccgcgaccagggctctcagggagacagtcaggggggtggccagacagagcgggagcagcagtg

SEQ ID NO: 192121 - DNA, 122 bp, Homo sapiens
cagtctagcagggggccggagtggggctcaggtgggaggggtctcagcaggctcccagctcgggctggcctgggggaaccccgggagccaggggccaactccagcaacactggcctgtctgc

SEQ ID NO: 192122 - DNA, 122 bp, Homo sapiens
cacgcaagccccagcaacggccacttccggcgcctaacgttgggaggtggggcgaggggccggcacttcctgtgactgggagtctcggttctggctgagtgtggggcagggtggatcagctg

SEQ ID NO: 192123 - DNA, 122 bp, Homo sapiens
tcgtcagctgcgagcccgggcgctccgggggagggcgacgccgagcggctttccacgccgcgcaggtctcgaggggcccagctcccacgcaggcgcctctcccgttcgcaccaaccgcttcc

SEQ ID NO: 192124 - DNA, 122 bp, Homo sapiens
ggacgtatcaacgctctgtgggtcgtgtgcgtgcgaggggggcgacgtaagggcgctccgcgagcccgtctctcctcgaatgaaaggaaacaacctccggcgacagagccccgctctcaggc

SEQ ID NO: 192125 - DNA, 122 bp, Homo sapiens
gtcgcggagggccgaccgggatgaagaaacctcaggtagaggggtcccggggaagcagcgcgccatccaagcctcaggcctgccccagatggtgtgtgggagagtctcaccacaagtcgtgc

SEQ ID NO: 192126 - DNA, 122 bp, Homo sapiens
ttttcaaaaccagaatctgggacttaccagggttagctctgccctctcctctcctctctacgtggccgccgctctgtctctccacgccccacctgtgtccccatctcggccggcccggagct

SEQ ID NO: 192127 - DNA, 122 bp, Homo sapiens
cgggcggccgactcacatggcgggggcagcgggtggaggacttggcagcggcagtgatggcggcggcggctcgcgctggctccgactggcgctggctgcccgggacggaaagatggcggccg

SEQ ID NO: 192128 - DNA, 122 bp, Homo sapiens
gaccctgacactgtgatcccggagtccggagtcctcctgccgggccacgagccctagcaccgcacacatggtccgcactacgaatctggggacacaggaggtggtgactgtgtggcctcggg

SEQ ID NO: 192129 - DNA, 122 bp, Homo sapiens
ggtgatccgcccgcctcggcctcccaaagctctgagattacaggcgtgagccaccgcgcccgggccctcctgagcttctaagagcttctgttcttgcacacattctttgggacctcactgct

SEQ ID NO: 192130 - DNA, 122 bp, Homo sapiens
ctgttttgttatgtgtattttgctgggatggaaaatgttaatttggtttcccatgcagcccgtcaggcagcatcttgcaaataaagaatcttgtcttacagggtgattttctcttgtaaaat

SEQ ID NO: 192131 - DNA, 122 bp, Homo sapiens
gggatgccggcttccaggtctgcatctgccacctccatgaggcatcggccccagcagtcacgtctttctgtgacatttatcacagaagcaatgaagcctcatgtcattccgtgtttaacacc

SEQ ID NO: 192132 - DNA, 122 bp, Homo sapiens
cctctgaacacattgccatccgtggacccgtgtccagaacatttgtgcttgctggttcagcggactcccctgagctaggcaagttagcagacagcagcagaacgctaaggcacattgcacca

SEQ ID NO: 192133 - DNA, 122 bp, Homo sapiens
tttttctgatttggctggaaacaggcagagaccaccccagataaccagttctcagccttgcgtgggacaccacgagtcccacgtgtttacgtgtttaaggcactggcaagcaggggaatttg

SEQ ID NO: 192134 - DNA, 122 bp, Homo sapiens
gtattttttgtgccatacagtaagttttccaagttaaagaaatgaccagagccacgagaacggtgccatctggagggtgcgtggaggcacgtggaggtggcctctttctgtggggagcgaga

SEQ ID NO: 192135 - DNA, 122 bp, Homo sapiens
caaataaaactgcccaaaatgtctgtcctttgtgagtttagtattctggtgaatcctgttcgatagtatttttattgatcagtagagggcgtgcttgactcaatataattgtaggtacagcg

SEQ ID NO: 192136 - DNA, 122 bp, Homo sapiens
ctgcttcagggcttctcgaattttttttttttttcttttttcttttttgagatggagtctcgctgtatcgcccaggctggagtacagtggcacaatcttggtcgctgcaacctccacctccc

SEQ ID NO: 192137 - DNA, 122 bp, Homo sapiens
tcgaaggaccggggacacgggccgcgcggctggacaggaggctcatagtggtcaagagagcgctgcgagcggtcgcgggttcctgaactgggtggaggagcggagattggaggagcgaagat

SEQ ID NO: 192138 - DNA, 122 bp, Homo sapiens
gagtaggttagttgccagagttccagcccagaaaaaccgttaatgtagttagtcgcgtcccggttgcagctctgccctgggctggaaaggtcccgcccattacctgtggccagcacgaaggc

SEQ ID NO: 192139 - DNA, 122 bp, Homo sapiens
tttcagatggttgttgacttattgcaatatcatgtgttatataatccatctttactgattcgttgctaattggtttctggacttttaaggctatctgatgaactgttgatctggtaccacac

SEQ ID NO: 192140 - DNA, 122 bp, Homo sapiens
ccgcccaagcgtctctcccagggcacccggaaggggcacatgaacctgttaccaggcatccgggaaattttttgtctcaacactcgaaaggcacccccaggggctggctcccagacacccag

SEQ ID NO: 192141 - DNA, 122 bp, Homo sapiens
gcgtgtccgtcggtggccgagctctgggcgcacaggtggaatttcctgttcagcgggtgccgggccgcgggcgggcggggctggccggacctttggtaccggaccggctgcgccccgccagg

SEQ ID NO: 192142 - DNA, 122 bp, Homo sapiens
tggacagacaaggtccccctgacctgggggctgcagcccgtgccctcctacctccctcctcggctggccccaccctgcagggtgcaccctgatgttgggggctgtcctctcacagaccctcc

SEQ ID NO: 192143 - DNA, 122 bp, Homo sapiens
ggaccggaagtgacgcagagaagtttccgggactggtgagtagtgggcgatttaaaaacccgcgagtgtagttgtgaccttcgcggtaggtgccggttggggccggctgtgattgttatctt

SEQ ID NO: 192144 - DNA, 122 bp, Homo sapiens
acgaccaggcggccctgggggcgcaggggctcggggtgggagcggcggagcgcgcggagtcgccgcggggtggcaggggtgggccgggggcggggccgcgggcgtcggggaggtggcagtgg

SEQ ID NO: 192145 - DNA, 122 bp, Homo sapiens
cggctccggagggcgccctcccgcagtcgcacccgctttccctcacacacaccggccgcccggcccacaagccaagaagctgcctgcttggcccacaagccaagaagtcggcgaagctgagg

SEQ ID NO: 192146 - DNA, 122 bp, Homo sapiens
cgccggagggcagcattctctcggcggagctgctggttgtcagccagtactgcttgcagccgagcctccagtccctgcagatactctttcttctttctccgggactggcaggctgactcccg

SEQ ID NO: 192147 - DNA, 122 bp, Homo sapiens
gtgggacctgggggcccctcctgcctgcctgcctgagtgctccatctccggaagggtccccgaaagacagggccccacaaggggaggctttggagagcctgattgcatgacaaacaccacac

SEQ ID NO: 192148 - DNA, 122 bp, Homo sapiens
tccggacccttggccagccggcgcccgccttcgctgagggcctccccctgcagcaggccccgccgaagctccgccagccgcttcacccccagcatgagcttcttctgatgccctgagatggg

SEQ ID NO: 192149 - DNA, 122 bp, Homo sapiens
tccccacttccacccggcggccgctggaagccgggagaaggaacggcaccaatcccctcacgcttctcccaggacgtctgatcccattagcgcacctgaaatcacaaccttggccacaaatg

SEQ ID NO: 192150 - DNA, 122 bp, Homo sapiens
taaaataaatctgttgtaatttcatcttttgacatgatttcatagggctgaggtgagtcccgagagtctgcctttctaagaggtgacgttgatgctgctacacctatggttttcaaatcaca

SEQ ID NO: 192151 - DNA, 122 bp, Homo sapiens
tcccctggctccctgatgtcttggggctgccaccctctctttggatcaggccctacctctcgctcccaatggcatccccttcctcactgtcccgggggtccagcccccatttgcttccacct

SEQ ID NO: 192152 - DNA, 122 bp, Homo sapiens
gcagaaacctccacaactacgtgatttagcaagttcattgcaggttatgttatgggtcttcggtttgggcttcttgtgacatctcttctccatgttcagtgtgtgaatgtgggtgtagacgg

SEQ ID NO: 192153 - DNA, 122 bp, Homo sapiens
agtccccttttgagaaccactgagctacagtattctcctgtactgtggcttaccttgccacgtatcacagtgatttcttcttccaaacattgaactgtgcagtatgcatagtaatcagtatg

SEQ ID NO: 192154 - DNA, 122 bp, Homo sapiens
cgggagctgccctttatttatttatttcagtgggcaaagcggggtcatttgtgttgaggacgcaaatctttccaggaagtttgtgcctattaatatttcagttcctggcagccgcctcgagt

SEQ ID NO: 192155 - DNA, 122 bp, Homo sapiens
cttctcagaaggacgttttaaacgcgtgaggtctgatgcacagccacagggagacacagacgagcagatgtgggcatccgagtatttacaaggtctggtggctcctgcagccgcgacacggg

SEQ ID NO: 192156 - DNA, 122 bp, Homo sapiens
ggggaggtgcagcattaggggcgctgaggtgacacccgagaacttcccagggagagggtgcgcgggggggtggatttccacagtccttcccgcggcccccgcgggggggcggtgttgggagg

SEQ ID NO: 192157 - DNA, 122 bp, Homo sapiens
gcttctgcctagcgcctctctgctgcgcgaggtcgtcccggccttacaaaaggagctcctcgctggtgagctcaagaccccaggcgggctctccccgaagggtcacttctccgagtgtgtcg

SEQ ID NO: 192158 - DNA, 122 bp, Homo sapiens
cctctcgggatcggggcgctgattcaagtttcggagcctgttaaggctgcgcttggagcccgcgcaggcgagacgcggcggggcagggagaaggcgcccggagcggccacttaggggcgctg

SEQ ID NO: 192159 - DNA, 122 bp, Homo sapiens
cacaccgccccacaccgccccacaccgccccacaccgccccacaccgccccacaccctggcggtgggctcccgagtggcctgagcctccccagtagccccagcctcccctacgggcaccacc

SEQ ID NO: 192160 - DNA, 122 bp, Homo sapiens
caccctccttctctctcctgccctttccccgttgccccacagggagccaggtgtgccgcccgcctctgcttcatggatccctaccctggctggacggcggcaaagccctgggcagccaccac

SEQ ID NO: 192161 - DNA, 122 bp, Homo sapiens
cagcagaagggggattaagaagtcacacacactaatagcccctgttaacaaaacctaaaccgtgcaagaatgcttcatgctatgatgtcttctctaggagccggaagcagtccatgaggaaa

SEQ ID NO: 192162 - DNA, 122 bp, Homo sapiens
gcctgcagtactgacctgtgaccatagccagggcagcaatgcaggagaaggcagaaatgtcgatgttcatattctgcaagttggaggagaattcaacaatggaatcaatccattccccaaag

SEQ ID NO: 192163 - DNA, 122 bp, Homo sapiens
cccaggtagttttcgtcttattcggaggctggacatttgctactggtccctgaagttttgcggctgcacccacagacagcaatagcgccacgttccctggaaggcgcacgggacggaagcgg

SEQ ID NO: 192164 - DNA, 122 bp, Homo sapiens
ctggaaaattgggtcactcccacccgaatattgcgctattcggaccggcttaaaaaacggcgcgccacgagattatatcacacacctggctcggagggtcctacgcccacggagtctcgctg

SEQ ID NO: 192165 - DNA, 122 bp, Homo sapiens
tgttgcccaagttggagagcaatgacgtgatctcggcttactgcggctcccgggttcaagcgattctcctgtctcagcctcccgagtagctgggattccaggcgcctgccaccacgcccggc

SEQ ID NO: 192166 - DNA, 122 bp, Homo sapiens
cagagacagcagctggctgtcagcagaggagctgggctgaggcgcccaggggagcagcggcgcccacgaaggaagtacgaggacagcacgtggaggctccgcgctggggcactgctgctcag

SEQ ID NO: 192167 - DNA, 122 bp, Homo sapiens
gctctcgcctttctgccgacttcttccaattctcatcttcttttattttttggacaggaccggggtgggtggagcagaggtggagagaaatcgggacttggcattttctccctctctctctc

SEQ ID NO: 192168 - DNA, 122 bp, Homo sapiens
tcagacccctctcctctcccatccttctatccacccattctacaaatatctcacaagaaacgaatgctgcacttggtactggagttttaagacttatcaagacagaaacgttccttttctgt

SEQ ID NO: 192169 - DNA, 122 bp, Homo sapiens
tccatttctgtaacaggtctagttctagccaggtgttctatttttttcctgagtcaatatcggtaatttatgctcttctagtctactgattattccatctaaaatgtcaaacgcattggcat

SEQ ID NO: 192170 - DNA, 122 bp, Homo sapiens
tacggagtgcgggagacgaccctttgttgtcggtgctgtcaccctatccctccctgcttgcgtaggcgtaggagagttcctagggcggtggaagactgggctggtggagtgggataggcgac

SEQ ID NO: 192171 - DNA, 122 bp, Homo sapiens
ccggcacaaagtcaatatttggaaatgttagcaatcatttggaaggtgcttgacgcacagcgttgatcgataaatgggacctattcttcttggtagcactgctggtctagagcaggattctg

SEQ ID NO: 192172 - DNA, 122 bp, Homo sapiens
ggtcgacacccatagggtctccgcatgtagtaaggtgggaacctttgcctgcggtagggccggcattgttgggcctggccttcgggagcattctccgatccctcggtcttttccccactctc

SEQ ID NO: 192173 - DNA, 122 bp, Homo sapiens
gttgttcccagttgctttttaggagagatattatacatactcagcaatgcatatgaaaagcgtctgaaaggacacacaggaaatttagcagtgggtgaactatgaaaaggaagagaaactca

SEQ ID NO: 192174 - DNA, 122 bp, Homo sapiens
agggtttcatcgtgttagccaggatggtctcgatctcctaacctcatgatctgcccgcctcggcctaccaaaggaggcattactgtaatcaaggattacaggcatgagccactgtgcccggc

SEQ ID NO: 192175 - DNA, 122 bp, Homo sapiens
gcctggagaagacttctgatcaggagtggggagtgtgaagaggttgcaatacatgctcttcgaagtgcattccatttccgcctgacagagccttgcttcttgacatgcagaggcatgtcact

SEQ ID NO: 192176 - DNA, 122 bp, Homo sapiens
gcctcgggccacttcatctgaggcctcatggaccacccagggtgtgactgccatgcagaccgaccacaaaagcctttctccagggggaaatggacgatgacagtaacaagctgctcttttaa

SEQ ID NO: 192177 - DNA, 122 bp, Homo sapiens
tcagagctgcccttcaaatgggcacggttagggacagcagagcggccgtggccgcagccccgggatccggcttcatccagcagagggtggtggtgcgcaggccctgatgggggaggacttcc

SEQ ID NO: 192178 - DNA, 122 bp, Homo sapiens
cacgttagtctcctactcccaggcctttatacacccccacagttgtgaataaatgggacacgttaccactattttggcctttgtacacattgaatgcaacaatgtaaaatgcatctgataag

SEQ ID NO: 192179 - DNA, 122 bp, Homo sapiens
acggtggcaggatgtaggcgctggacgcgggatgcagtggcatgtgggctttgatcagtccgggggttgttctcacctcttcttcacactgctccaacttctttttttttttttttttgtct

SEQ ID NO: 192180 - DNA, 122 bp, Homo sapiens
gcatagagctacctcaattccatcttctgaggagcagagattgcaatttccatgctaccacgtgatctcacaatgacaggaaagcctgaggacccaggaggaaaaataagtgatatgcatcc

SEQ ID NO: 192181 - DNA, 122 bp, Homo sapiens
tggtcaccggggaagccggaggcccgagcccatggcttcatgggaaatgtagtttgaggtcgctggaggctgttcttcctgggggtaactcgtgttgacattggcagacagacacaagtgag

SEQ ID NO: 192182 - DNA, 122 bp, Homo sapiens
ctggatctttgtcaggtatgggagcttactctattaactggaaagttcaggagggacttacgaagaatctgctgtcttcatagcacttcttattctaggtactatattggacacaaaaatgt

SEQ ID NO: 192183 - DNA, 122 bp, Homo sapiens
ggagaccgactcacttgagtttcttgaaggcttcctggcctccagccacgtaattgcccccgctctggatctggtctagcttccggattcggtggccagtccgcggggtgtagatgttcctg

SEQ ID NO: 192184 - DNA, 122 bp, Homo sapiens
tactatcgagaaagaacatttcaaaagccgagttctcctaacacacacgttctctgctcgcgcctcctagctccgcagggtgggcaacttggcctcgcaggcacagcccgttttcccgctgc

SEQ ID NO: 192185 - DNA, 122 bp, Homo sapiens
ggcagcagctgccacgcgggaggcctcgtccgagtccgactccatcctgtccttcgtatccgggctgtcagtgggatccaccctacagccccccaagcacaggaagggacgacaggcggagg

SEQ ID NO: 192186 - DNA, 122 bp, Homo sapiens
aagcacctctctccccccatgcacctctccccaacaacacacacagccccctgcaccgcccgccccccgcccccaccaaggccccagcctctggccatcagtcctggtgccagagctttgcg

SEQ ID NO: 192187 - DNA, 122 bp, Homo sapiens
accttattagaggccctgccatatccacagccccagaaagttattctccccactgatattcggtggctccagctttctgaccatagcattcaggaactgggacggactttgacccaagctgg

SEQ ID NO: 192188 - DNA, 122 bp, Homo sapiens
tggatggatggatggatggatgaaggagaagcaaatctgggagatgatgatatgttatgtcgttttagccatattgagtttagaatatggcggaaaagcccagtaggtagttgaagattaaa

SEQ ID NO: 192189 - DNA, 122 bp, Homo sapiens
agccccaggagggaagcgctcagccccagcgaggctgggagtgtccttgtcgtctgtaaccgagttccttgtcatccagcatccagcacgtctgggctagggcacccttgactgcacgtgac

SEQ ID NO: 192190 - DNA, 122 bp, Homo sapiens
agcccaaaggtggcattccttatctgctgaatatagttctggtccatatattaaaaaggtcggccttgttacaatgcagtcatatcatacatacattttcttacctaaaatacctaactagc

SEQ ID NO: 192191 - DNA, 122 bp, Homo sapiens
ggaagggtggaaaggggaggggaggatactgtacccatatgcctcatagccacttgagaacgctcaaaagattctctaaagggttaagataatttgattgaaatatgaatcagggtgaaaat

SEQ ID NO: 192192 - DNA, 122 bp, Homo sapiens
cgccgggctgctcctgggtcacatagcaggtcttcccttcaggggcagtccaggtgacctcgcgttttcaaagggaaacgcagcgccgcaggcaagcacgcaggggaggtgggagggtgggg

SEQ ID NO: 192193 - DNA, 122 bp, Homo sapiens
agtgccagctctaaacaagtccctttatgcagagccacagctgtgcatgctcagccctgccgaggtcccaggccaggctttgttgcttccgttcatggaagcgcacaggatagggccgacgc

SEQ ID NO: 192194 - DNA, 122 bp, Homo sapiens
gactccggggggaggagaaacccacgaagctggggaagatactgcttctgctcccaggggcgggtgtgagcgcgcgtgtcctctttctccacaccccccaccccaccccacccccaagcccc

SEQ ID NO: 192195 - DNA, 122 bp, Homo sapiens
ctgccttgccgggctcccctctcttctggggctgtcggactctgacctgaggtgggcagacgatggggcttgtggggccacctccaggctcctgccggccctgccccgaggccacgtccatt

SEQ ID NO: 192196 - DNA, 122 bp, Homo sapiens
attttgatctgtaccaggaaaaattgtttctgctttgataccataccccagcacaacacccgtaaagggtctctgctgaggaggagtagtgaaagagggaggtctctttgcagttgagataa

SEQ ID NO: 192197 - DNA, 122 bp, Homo sapiens
ctcccaagggatctctgagcccaggagggaaatgtaggagggaggagggaaaaccaaggccggcctgcaggatgtttcctttgctatcttctgctgagtgctctaaagcaggtgcaggtgca

SEQ ID NO: 192198 - DNA, 122 bp, Homo sapiens
gtgggccaacgggccttggctaaaccgtccccacatttgtcaggtaggcctgtagggtgacgggtagaggaagaagggcgatgggaacgtagccctccaagttaaacacggaaaaggtacgt

SEQ ID NO: 192199 - DNA, 122 bp, Homo sapiens
tccctcggacccgcgcccgccgctggaaccgcacccatggcccgcgccccgtccccgacccggctttagtttccacccacacgaagaaactcagcctcggtcctgtttaggcacggaaaggg

SEQ ID NO: 192200 - DNA, 122 bp, Homo sapiens
gcaggagggggcactggtttgttttccttccttgagcaggtacaaaagaagccacattcacgtaaccctgcctttgaagcttgcctttgaaatctggactcctgggtctgtgccaatcaggc

SEQ ID NO: 192201 - DNA, 122 bp, Homo sapiens
acccccatgcacacccaagttggtttatatgtccagatacagacccttgcttggtggccccgggtaagcaccttcccaggctggagcactcacagtttgacggctgatgtaaagggtgagca

SEQ ID NO: 192202 - DNA, 122 bp, Homo sapiens
cctcctgccctgcctcgcctgtccagaggccttcctgccctcacattttactctgagaagcgtagtggtacgggagttgcccaggctaaaggtgacctcgccagcatcctctcgggtgaccc

SEQ ID NO: 192203 - DNA, 122 bp, Homo sapiens
tccgccgccgcggcgcggagcgagggagggggccgggcgcgcggcgcggaggggagggggcggccacgggcctgactacaccgacactaattcccaggccgcccttaaggaatgaggggagc

SEQ ID NO: 192204 - DNA, 122 bp, Homo sapiens
cagccgagaagcggcagctggcgtctcggaggccgtcacgcgctgtcactccgcgcccttcggagttgccgctaaaataccaacttcaacccggggccggccactgagactcccgccgcccc

SEQ ID NO: 192205 - DNA, 122 bp, Homo sapiens
agttactagtcataacaagaataaactacaactcccaaaatgcccagaggaagaggctgacgccagtccaggagacagttccagctttagggcaaaggtgaccccactgggtcccgtggcga

SEQ ID NO: 192206 - DNA, 122 bp, Homo sapiens
gccatcctagcaaattaactgaacccaaggagtggaccacgggaaccctcatttatagcacgttggttagaaccgcaggttaggtctggcgattgccatctgaagtaggggagcagtcttgt

SEQ ID NO: 192207 - DNA, 122 bp, Homo sapiens
atgttaatgtatttaatctcatttagttgttaaaatatgcctaaatttcctctttgggaacgcaagacttgcagagatgactccatggagagcggactctgccggcgggaactggagtcgtt

SEQ ID NO: 192208 - DNA, 122 bp, Homo sapiens
agggagctttagctacaggactcagaggacaaggtgcatgtttcagctaaagcacacccccgttctcagtgcctcagcccaaagcagctgctgtgtaagagcggtgacggccggggaacacc

SEQ ID NO: 192209 - DNA, 122 bp, Homo sapiens
ctaccttggcctcctaaagtactgggattccagtactcaaatcagtctccccaagcattccgggagttgtttgtttgtttgtttgttcagacggagtctccctctgtcgcccaggctgaaat

SEQ ID NO: 192210 - DNA, 122 bp, Homo sapiens
cccaactggccgagtggatgctggtcaccatcctttggccatgaggccccacagcccggtcgccgtcctggtgagaggtatgaccaggtggcgctgaatgacctccgctcgccctgggttgg

SEQ ID NO: 192211 - DNA, 122 bp, Homo sapiens
ccttttcctttcccttattccttacagtttcacagcctgaactttgccacagtcactctccgccacgctacctcctgcttcttgccctctcccacctatagaggcagattcttcctgaaaag

SEQ ID NO: 192212 - DNA, 122 bp, Homo sapiens
gtcgggagctgcagccacccaggccctcgtggaccaggagcgtgccggccgccgacaccacggaccctgtgggcagaggcggctccagttcctcagcagccccccacactgggctgccagag

SEQ ID NO: 192213 - DNA, 122 bp, Homo sapiens
gattttagaactaaagcatgtttaattacgaaggcagacttggacacgaatttatagcagcgaagctctaggggctaacatccagattgaaagcacactctgagggtaactctcatttaaga

SEQ ID NO: 192214 - DNA, 122 bp, Homo sapiens
cctcccccgccccctccaaccacgccaccctgggctcctgtgtggcccaagcctccccaacgagcaccatcccctgctctacggcgcccggtcccaatgaccacgcaaaggctgaggcgtgc

SEQ ID NO: 192215 - DNA, 122 bp, Homo sapiens
gctacggggcggccggggggctgggcggggccgtggggcggggcagggcctgggaggggccggatgggggtggaggccgggattgggacggatgggggcggggcataggagggggcggggcc

SEQ ID NO: 192216 - DNA, 122 bp, Homo sapiens
aaagacagccttgactcaagcatgcgttagagcacgtgtcagggccgaccgtgctggcggcgacttcaccgcagtcggctcccagggagaaagcctggcgagtgaggcgcgaaaccggaggg

SEQ ID NO: 192217 - DNA, 122 bp, Homo sapiens
agacgtgacgttaggtgacaatttaagtgtactgtacaattcaccgacctcgatgcctcccggccgccctttaactgatctgtgggaactccagcatgccccgggccgcgccccagggcgcc

SEQ ID NO: 192218 - DNA, 122 bp, Homo sapiens
ggcataggtgagtgcatcctgttttgatcatgggccatgagtgttgcagcatggggtccccgacattcagccttcaggccactaggcttttctcaggctgcaaacctactctccaccaggga

SEQ ID NO: 192219 - DNA, 122 bp, Homo sapiens
ctcttatcttgctatcaggtacagtgaaaagggcctcttcttcattgtccaggctttctacgtgcaagttccagaaggtgatggttgtgttttatgttccaatgtgaggataaagagagaaa

SEQ ID NO: 192220 - DNA, 122 bp, Homo sapiens
agctgcgaagactagaagaacttgatttaggaaacaatgaaatatataatttggtaagtccgtattagagatttgaatttaactttgtttttagttatgatcacacagtatttgggggagtt

SEQ ID NO: 192221 - DNA, 122 bp, Homo sapiens
tgcggggccaagtgagcgagggcgggcaactgcggagcatcaacggggagctgtacgcgccgctgcagcatgtgagcgccgtgctgcccgggggggcggccgatcgggccggggtgcgcaag

SEQ ID NO: 192222 - DNA, 122 bp, Homo sapiens
gttgaccatcccagtgcctatactggctgcccagagacactactgttccaggaatgaaatcgagcactgcctctgctctaacttgggggttatcagcctggcttgtgatgacatcactgtga

SEQ ID NO: 192223 - DNA, 122 bp, Homo sapiens
gcctgaccatcagcaagcttgtaatcagcaccacctccagcatgcctgctcctggatctccgtgaggctcccctgcctgtgtcacccaggggcctctaggggtgctctggagctgggagcca

SEQ ID NO: 192224 - DNA, 122 bp, Homo sapiens
ggaccagggctttcctgatgcctgctctgtccccaaattcacccagcagagaagtgtgcacgcagcaggcactcagtacacatatgctgaacacctgagtgtcaccgacagctgcggaggca

SEQ ID NO: 192225 - DNA, 122 bp, Homo sapiens
agccccactgcataccccggaaaagtccctggcaaaacacctttcttccattatctgcaccggccccggtaaaacgctggcgcctttgaaatcagaggccagggtctcctcttcacagttcg

SEQ ID NO: 192226 - DNA, 122 bp, Homo sapiens
ctctccatctaaccgtggaaccgccctgctcgggagcccactcccctggagggccgagggcgtcttaggccagaacatgaggaggctggataaatgggaatcgtctctctccagtcgcagca

SEQ ID NO: 192227 - DNA, 122 bp, Homo sapiens
agaaaaacagcagagcagtcaagtaaaatgcaacaaaaacctagcagcagctttcttctacgccttaaccttataattgcataactgagtctacaccttttgggctttgctgcactgaagac

SEQ ID NO: 192228 - DNA, 122 bp, Homo sapiens
cggcgaggagcgcttcccggtggtgaacacggcctacgggcgagtgcgcggtgtgcggcgcgagctcaacaacgagatcctgggccccgtcgtgcagttcttgggcgtgccctacgccacgc

SEQ ID NO: 192229 - DNA, 122 bp, Homo sapiens
gggacgaggaggcccagagggcgagcttcctgcagaacgccgtcctggcttacgtgcaggcgtcccccgtgaggaccctgagccccccaaagtgagacaggccgggaggacccgggcgcagt

SEQ ID NO: 192230 - DNA, 122 bp, Homo sapiens
gcggggcggtacgtggtggtggctgagagccccctgccgcctggcgagtgggagctgcgccgcgcagccccgggccctgcttacgaggaggagggcactcccctgcgctaccagcgtctggt

SEQ ID NO: 192231 - DNA, 122 bp, Homo sapiens
tctatggtttgctgttcatcatgtgctgctactgttctatgaacagtcatgagcagtcagcgctggacactgctgtttacccctgaacactgcccatcataaccaggtgaagccagacataa

SEQ ID NO: 192232 - DNA, 122 bp, Homo sapiens
tctccagctttacaccaatgccctaggggatgcggggaggcatagtcagctcagcttctgcgaagagagacagcaatgatgttctgctcaggtgcctgccagcagtaccagaagttaattct

SEQ ID NO: 192233 - DNA, 122 bp, Homo sapiens
aggaattccagtggagcgctgagagcgctgcccagatttcagcaggctgaggtttggagacgaggggtgtagggtgtggtgggaagatgggaggtgaagtcagtccacgtgtgtgattagct

SEQ ID NO: 192234 - DNA, 122 bp, Homo sapiens
agaggacacgggggagcgggcctttcccaggtcacctcaccctggctggaggcagcttctcgctttagagcctccctcgtgtggggcagtcgtggcccacgagccaattcccccggctgccc

SEQ ID NO: 192235 - DNA, 122 bp, Homo sapiens
aatgggagtgggggtcatggtaaccagttactcaggctcttccctgatctctcacacctacgcagaccctaaggcacctccacagacctaagattccacagaacacaaaataaaaacactgg

SEQ ID NO: 192236 - DNA, 122 bp, Homo sapiens
caggggctggcccaggtgctaagcccctcactgcccggggctggctggctgctccaactgcgggtcccgtcaagcccacgcccgcccagaactccagctggcccgcaagcgcggggtgcagc

SEQ ID NO: 192237 - DNA, 122 bp, Homo sapiens
tcgcactccctggcggaacctttcagtgctgcgctcgcgttgccaacccggcgcgcctcacgcagttgcgcccgctgttgggactacttccggcttccccgccccgccccgtccccgggcgt

SEQ ID NO: 192238 - DNA, 122 bp, Homo sapiens
tccatcaggagcgggggcctgagccaagaccgtgggtaaagcaagatcgggacttaggcgcgcctgtgcggtgacagccaggatttagtcgcctcgattgctttctgacatgttcatagctc

SEQ ID NO: 192239 - DNA, 122 bp, Homo sapiens
gatgtcagctgcctttccatccctttcccggcgatgcgaagcttgaataagctagcaacccggcagagtggcccttcattgctgtaaatgtgctcatctatagccgcatcttaccggctttt

SEQ ID NO: 192240 - DNA, 122 bp, Homo sapiens
ttcagagcatggctctccgcctattccccgcccccgccacggtagcgcgcgctggcttggcgcctcagagagctcagttgacctagtggctgaagcaccgcccaggaggaaaaaccggcggg

SEQ ID NO: 192241 - DNA, 122 bp, Homo sapiens
tatcatctacatcgcaaaagcctacttcttgttgttgtcttattttgtttaaggaaagatcggtgagactattagcctgcatctttcaagaaagactgcttagattttaaagacgtgtgcaa

SEQ ID NO: 192242 - DNA, 122 bp, Homo sapiens
actcccccagtatccctgaagtggcctcttttgctggtagagaaacttttgcccaagagtcgggacacatcgacacatccacttttgggggggcttggtgcactcctgggacagtgtggggt

SEQ ID NO: 192243 - DNA, 122 bp, Homo sapiens
tgcagtgtgggaggagcgggaggggagggtccccttgacttgctcccttccgtggggagacggtcaggctttccccaggaagcgtgctgtaggtttccatagattcgagacggtcaggcttt

SEQ ID NO: 192244 - DNA, 122 bp, Homo sapiens
tacagggacaaattggaggtggtgtattagggtctaggagctagaatcactcagaggaagcgtgagaatcagtaagggaaagtaatggccacctctaccttctgaggcttctagagaagaga

SEQ ID NO: 192245 - DNA, 122 bp, Homo sapiens
cctgaggcagtgccctctcttttccctccttgttatctactccagtacttgtggctgggtcggcccgtggctcagctccagcggaacgggacgtgacgagggcggtcgcctccctccttcac

SEQ ID NO: 192246 - DNA, 122 bp, Homo sapiens
cggccagagtgcggtgctcctgctgagcagttttgcgcccactcccctctcatcccctcccgcccttgctaactcacagcattgcaacagtcatgagtccccacctgccgaaaggaagctcc

SEQ ID NO: 192247 - DNA, 122 bp, Homo sapiens
cagacctgccagcgcgccggccatggctgtcgccgccgcaaccgcctggtccctgctccgcgcagcgcggggaacagctcttggccagccgggcctcattaacatagccccgcccccacacc

SEQ ID NO: 192248 - DNA, 122 bp, Homo sapiens
gctgttcccttgtgcctctgtcacttcaaggcctgggacccgattcgatctaagccagttcggtctggcttcccctgaccatatgggtgttgggtaagaaagagctatgaggaaggtcatag

SEQ ID NO: 192249 - DNA, 122 bp, Homo sapiens
gaggggggtcttcgttaattagcctcttaatcctgccatgctggatcttaatgaggtgcacgggtcccattagacagcccggagccctggcattagcacattagtcacacgctctgtcaggc

SEQ ID NO: 192250 - DNA, 122 bp, Homo sapiens
tcccgcccaagcactgacaaggtttcgcggcaaaggagctttattgctgcggcggcagaacgagctctgcgaagggcgagggggcggcgaatggcgcgcggtcggagagtacgagcgcctcc

SEQ ID NO: 192251 - DNA, 122 bp, Homo sapiens
ctctccagtaaaaagacagatgcctgcaagacctcacgccctcccttgcacttgtttcaacgtgattgccaatgtttgtactcttcaaagttccaagggtcataaaacagctttgtattagc

SEQ ID NO: 192252 - DNA, 122 bp, Homo sapiens
ccggttaggggatgcaggactccccagcgctgggagcgcgaggcctatctaaaggccagacgttctcagagtccgaggctcgggtacaggtgttgcgcctccgacgtggaggggcgcggggc

SEQ ID NO: 192253 - DNA, 122 bp, Homo sapiens
tttaatacaagtgactccattttaattctgacaactttcacagtagcttatctccaaaggcggtgcacctcctaggatcccagcactttgggaggctgaggcaggcagactgcttgagccca

SEQ ID NO: 192254 - DNA, 122 bp, Homo sapiens
agatgaactaacacactcccagggctcaaaacagcagctccgggctcaccgcagcccggccggacttgtgggttccttggctcaagtacgcaaaaaccacggctctggaggttcactgacgc

SEQ ID NO: 192255 - DNA, 122 bp, Homo sapiens
agtgtgtcaggaaagccaacggacccgcaggcccgcccgtggtgcccgcggcattaggaacgtctctgctctcctacgatcgctggggtatcggacagtcagtgcccgctgtcaatgcggag

SEQ ID NO: 192256 - DNA, 122 bp, Homo sapiens
ccaggccccagccctgtggattgaaaccacagcctacgccctgctgcacctcctgcttcacgagggcaaagcagagatggcagaccaggctgcggcctggctcacccgtcagggcagcttcc

SEQ ID NO: 192257 - DNA, 122 bp, Homo sapiens
acgcccacactgagcatcttctcccagaggtgaccctggtgacacaaggcccagttcctgcgaacccacgccgaacctcagtgaggaacttgctggtatcttacggcatatcgacatgttcc

SEQ ID NO: 192258 - DNA, 122 bp, Homo sapiens
tcctcgtgggtcttctgcttcttggtatcgacatcgtcatccgcatcatcttcagctgcccgcttgcctgtagccaactcagcttcctcgtcgtcacctccatcctcttcttcaccgtcacc

SEQ ID NO: 192259 - DNA, 122 bp, Homo sapiens
tccagagcttgttccttctgaccttcagatgcattcggagtttcttccttctggtgggttcgtggtcttgctggctcaggaatgaaactacagaccttcacggtgagcattacaactcttta

SEQ ID NO: 192260 - DNA, 122 bp, Homo sapiens
gcagcagttcccgcagttccacgtcaagtccggcctgcagatcaagaagaacgccatcatcgatgactacaaggtcaccagccaggtcctggggctgggcatcaacggcaaagttttgcaga

SEQ ID NO: 192261 - DNA, 122 bp, Homo sapiens
tggtgggcctgtgggatgctcggaggccggcgggccaagcccagggggtcctggggatcccggggaaggacctaggacggaaggcctagtgagccggcggcttcgggcctacgcaaggcgct

SEQ ID NO: 192262 - DNA, 122 bp, Homo sapiens
tcagcaccacgcatgactggcagcctggtgtctgatcgaagccacgacgacatcgtcacccggatgaagaacattgagtgcattgagctgggccggcaccgcctcaagccgtggtacttctc

SEQ ID NO: 192263 - DNA, 122 bp, Homo sapiens
actagaatcgcctcatttgcattcacgccacttcccattgtccaatcagattttggataccgaacgcggcgtttgagggccgtgcctataaataccgcatctttcatcctccagttctgttt

SEQ ID NO: 192264 - DNA, 122 bp, Homo sapiens
cactgctctatttctgggccaggagaggcccaaaggtggctgctgctgcagccttcttcacgaaggcacaagggcaaagtctgcagagaggaggaggcccctgtgaaccaggctgggggagg

SEQ ID NO: 192265 - DNA, 122 bp, Homo sapiens
ctgggatgctgattgtggggctcttggccatcctggacagacggaacaagggagtccctgcgggtctggagcctgtggtggtggggatgctgatcctggccctcgggttatccatgggtgcc

SEQ ID NO: 192266 - DNA, 122 bp, Homo sapiens
ttccctgatgagcctctctacctttgctcagatgacccagctcatgaaggccgccaagagcgggaccaaggatgggctggagaagacacggatggccgtgatgcgcaaagtctccttcctgc

SEQ ID NO: 192267 - DNA, 122 bp, Homo sapiens
gctcaaaggtgccaggggtagccccctaaagcccaggccttttgggaagcccttccctcccgctcgccgccttacccggcaccccccgcagtgggccccccagccccgtctgtggctggccc

SEQ ID NO: 192268 - DNA, 122 bp, Homo sapiens
actggcaaatataatgaaagaaataagtctccttccagataatcttctcaggacaccatccgttcaattggtacaaagctggtaagattctcatcttgtgtttgcaatttgatggagttgtg

SEQ ID NO: 192269 - DNA, 122 bp, Homo sapiens
cgcccacgccaacccaccggcgcacatcggccatccctcgcgcttttacgcgggagcgtccgcagggccggaaggaggcccctgccccgtccaaggctgcaccagctgccccgccgcccgcc

SEQ ID NO: 192270 - DNA, 122 bp, Homo sapiens
tttatacagtggaattaacaggttctaaagaaaaaaccaatcctaagaatcacctgctagcgttgttcctggatctgggggtttcatggacctgtgtcaagtaggaagtagacgaagagatt

SEQ ID NO: 192271 - DNA, 122 bp, Homo sapiens
atgctattaatttatttccgaggcccttgaacactttccttagtttctctgtcagtgatacgggacagagtatgtgacataatcatagatgtatttaagaactcttaatatttcaaagcaaa

SEQ ID NO: 192272 - DNA, 122 bp, Homo sapiens
cccactcggtctcaaggctcacgtggctgtccaccgaggcaggggaggtggctgggctggcggcaccctcggcagcctcaaagggcgactcccaggtggtaactcccgtgtctgggttgtag

SEQ ID NO: 192273 - DNA, 122 bp, Homo sapiens
gggctaagactggtctgcaactgaccatcagcaaggaaatgaggatgtaagttctacaaccgcaaggacttgaacttgaccaactgtcccatataagcctggaaactgattcttcccccaga

SEQ ID NO: 192274 - DNA, 122 bp, Homo sapiens
atttcctcccgtgtgtgtcacccatgaggtggccgtgcccctggcctgtttacagctgtgcgcaagctcctcgcgacccgaaagcgagacctttgtctgcggcagctccgcgccgggctggg

SEQ ID NO: 192275 - DNA, 122 bp, Homo sapiens
tgaagtggaagaggtggtgcagagggggcaccgcccatgctgccctgcttccaactgctgcgcatagggggcggcaggggcggtgatctctacaccttccacccccccgccggggctggctg

SEQ ID NO: 192276 - DNA, 122 bp, Homo sapiens
tcatgactggaccagtgagtgtccactccctggtccctggcgagagaggcgggacccccacgccctcctggcgctctttgcagagatgttcctcaggcccaatccgggatttgggatgtctg

SEQ ID NO: 192277 - DNA, 122 bp, Homo sapiens
tccggggggccagggccagcttacctgctttcaccgagcagtggatatgtgccttggactcgtagtacacccagtcgaagccggcctccaccgccaggcgggccagcatgccgtacttgctg

SEQ ID NO: 192278 - DNA, 122 bp, Homo sapiens
gactgaggcgtacacttaggaaaggacacctggtctaaatggggaaaccatgggtggatacgtgtgaaggaagtgaggagaatgtaaatatgatgcaccaatgccaggtaaagagtgagtat

SEQ ID NO: 192279 - DNA, 122 bp, Homo sapiens
cgtcccgggggtcggctggagctgcactgggactcggtcctcagtgtgccgaagcctaagcgctgcggggcgcggggcgggaacgggaggcggtgcctggggccacggggtcgtcccccagg

SEQ ID NO: 192280 - DNA, 122 bp, Homo sapiens
gtctggctttcgcagccgaggagactctctggaaaatgggctactcgaagagagatgctccgttgcctcaggcggagggcggggacgccgggcctgcgacacttcatcttttcctggccccg

SEQ ID NO: 192281 - DNA, 122 bp, Homo sapiens
gtaattaaccaaatagtcctttaataggcaattttcattgtcattttttgaaggcgacttcgtattactgtattctcgatgcgttgggattctagcttatctctgcaatctaaacacttttc

SEQ ID NO: 192282 - DNA, 122 bp, Homo sapiens
aggtctgattttgtccagatttccaacctgtaaatcagcagtatttgcataaaaattcaacgattctactattaataaaacccaaagcccacttggaaccaggaaaaccagaatgctataag

SEQ ID NO: 192283 - DNA, 122 bp, Homo sapiens
acacccacccggaactcacgctggcccgctagtgctgtgggcagccccagttcccgcccgcgactctccatgctcacctccctgcaagcagagggagctggctccagcctcggccagcccag

SEQ ID NO: 192284 - DNA, 122 bp, Homo sapiens
atcagcccaggtggggttgtgggtctggataacagtttggagtaaatcaattagggcttgcggcttttcgctctaggacagggtattgttttcccagttgagaaggtcggcagaggtgaagg

SEQ ID NO: 192285 - DNA, 122 bp, Homo sapiens
gaagcaccacctcagaccaatcaaggagccaaaaggagcctgccctagctcaccctttgccggcatgttgctgcaggggacagagggttaacccagaattcagccaatgtgcttgttccata

SEQ ID NO: 192286 - DNA, 122 bp, Homo sapiens
gtgtgaaaaacacacaccctaagactaataagcactttttcaggaggctcgcacggcccacgccaacgtttgcccacccgcacccagctctcctacctcatgagcttcatgtccagaggttc

SEQ ID NO: 192287 - DNA, 122 bp, Homo sapiens
cccccttatctgtctccgcttgagaatctatttttggaaaccctgctggacagggacgatcgtactgagtgtcctcaaacagcatttaatcagcgctggggctgcagaccagatgcacactg

SEQ ID NO: 192288 - DNA, 122 bp, Homo sapiens
cacaaaggcacgatgtgggccggcaggagacctgaacccggggtcccttcctggaaagtgcgtgggcagctcgtgaacccggtgtcccctcctggagaggacgtgggcagctcgtggacccg

SEQ ID NO: 192289 - DNA, 122 bp, Homo sapiens
gggcgaggggtcagtcctggtggggggaaggaagtaatggccgtaggatgcttatcgtggcgccttgttgccaataaatctccaagacagcagttggtgtattattgtctgaatttcataga

SEQ ID NO: 192290 - DNA, 122 bp, Homo sapiens
cggaagcggcggggcccaaggtgctgggcggggtggggagcctgggacggtccctcccaccgcggcctccgcaggcgcgcccaggcccgggtcaggaggggcggcggccccgggcgccctcg

SEQ ID NO: 192291 - DNA, 122 bp, Homo sapiens
ataaattgtgactaactgctgtccgagcaaattggtgtctaaatgatctggaagatatagcgagcgatgacaggaatgaatatatagtgttagaaattcattgctcgacgatgatgctcagc

SEQ ID NO: 192292 - DNA, 122 bp, Homo sapiens
aaatattttctcatgttgctgagtggtggcaatgagccataataactccagtcagtgagccgtaactcccagtcagccatttgatcatgagggtaaaccagtactcttcagtgtactgtctt

SEQ ID NO: 192293 - DNA, 122 bp, Homo sapiens
atgcctgaaaaggtgctcaatctcatcagtgatcaggcagaagcaaataaaaacacaaggcggggtgcagtggctcacacctgtaatcccagcactttgggaggctgaggcaggaagatcgc

SEQ ID NO: 192294 - DNA, 122 bp, Homo sapiens
cagccatcaaagaaaatgaggtcgaactaagtgggccaatgtagaaagctcccgggacatcgtgttaaatgtaaaaagcaagttgcagacaacgcatgaaatatgtatgattccatttgtga

SEQ ID NO: 192295 - DNA, 122 bp, Homo sapiens
ctggatgcacaacagctcgtggctcaactcccgaagttaccagtttcaaacttcccgccacgccccctgccctgaccctattggctgagccgacgtagttcccataggccctccacgtaaga

SEQ ID NO: 192296 - DNA, 122 bp, Homo sapiens
ctctcctcccagacggttcggaagcagggacttctgctcctaaccccagccccgcagcctcgccctcagccacggggtggaaatcaggaccacaggcttcaaatcccctccccactccggga

SEQ ID NO: 192297 - DNA, 122 bp, Homo sapiens
tcagcaaggaaggcgggtgaggggcggggagagccagggggagcctccttcgccccgccccgccccgcttcggaccgtatcacgactcaaaggggggatcaactcttagcctccttagtcct

SEQ ID NO: 192298 - DNA, 122 bp, Homo sapiens
gatcgcgggaccgaacgacggacgcccggggccggcgtggggctggtcggctgcccggggcgagggcgggagacttcctgctcagaaccagtccgaccagcttggcgctgggacgcctcccc

SEQ ID NO: 192299 - DNA, 122 bp, Homo sapiens
cggctccccgcggaagatctggatcggggagtccatggtggggcgattgcagcaggaaggcgaggacaggcggcacctgcggcgctgcgggagcgaaagaaccggctggacgcggagaggca

SEQ ID NO: 192300 - DNA, 122 bp, Homo sapiens
ttttggaaaggaagggaaggtttttgaaaaggaagggacctattgcataaatagaacatacgcctttgcttctaaagatgtgtactttcgttgtgataggtagaagagaaaaacgagttcaa

SEQ ID NO: 192301 - DNA, 122 bp, Homo sapiens
cctctgttggcaatgatcaggcagcccaaaagatttaaatgatctataataatttccaagcggtagattatgtggcattttattgctcaggcaataattggtttaatgctggtagtgtcaaa

SEQ ID NO: 192302 - DNA, 122 bp, Homo sapiens
ggggggcaagaggcggttgctattactccccgcatcgcggggggcgccctcacccccctgcgatgtggctcgtaatattcagtggggagagcggttgatattactccctttctcctattatg

SEQ ID NO: 192303 - DNA, 122 bp, Homo sapiens
cgctgagccgacgtttgagttccaaatgaacgaggggcgtctggaaacggtgtcccaggccgagggcgcagtcccggagccgggggcacccctctaatctggagtgatcgcaggggtgaggc

SEQ ID NO: 192304 - DNA, 122 bp, Homo sapiens
gctaaactatcatgtgcctgagttaggccacataactcaggcctgatatattattgatgtcggtttcttcaaagaatctcatgggaaaaaattctaagttgcttaagcaggcccatttgctg

SEQ ID NO: 192305 - DNA, 122 bp, Homo sapiens
caaggcaatcccatcctctcttcacacatttgtgcaggtgcagctttatttcccaccgtgcggtcccaggaggccgcctggtcttctgcgctcacttcctaggcatccctggccgcccctcg

SEQ ID NO: 192306 - DNA, 122 bp, Homo sapiens
ggagctggcagttccccctgagaaggtgagcgagccgacgcctggccagaccagctgaatcgcagtgtccttgaaactcgagttgtttgggctcctaaacaaggttcagaaactacctgtaa

SEQ ID NO: 192307 - DNA, 122 bp, Homo sapiens
ttctgtcccctcccacaaccacagcgactcttcccataaacaaccgtgacctggtcatgccgcctcagccgcctccagcatggcccgagtcaccgtcactcgcccctagagctggggcagtc

SEQ ID NO: 192308 - DNA, 122 bp, Homo sapiens
aaccagttggcatagaggcccgacttcaattcatcaaacttcaactgaggatggggaacacggggggtggccagccctgaagttgccctcccagggaggaaccagctctgggagggaggggc

SEQ ID NO: 192309 - DNA, 122 bp, Homo sapiens
cgttggagccgcggagctggcgcccaggggaggtccgggtgtctgcgggaaggaggggaacgagcaatgaaaagatgagcgggagacagaggagtttcaccaactgcacccccgcctcccct

SEQ ID NO: 192310 - DNA, 122 bp, Homo sapiens
cgtctcacctccagaaggacagggactacagtgctaggctgaggggcagccctgtgcaggcgccgccccgctgcgtcctggccaatcagctccagggagaagggtctaggggtggacagcag

SEQ ID NO: 192311 - DNA, 122 bp, Homo sapiens
ctactctcgaataaactaggaggcttttctttttgggaatcgtgatccaggctctcgcagcggatctcagatagttctgagcttacaggtgtgacgccccaaagtgaaagggatttctaggt

SEQ ID NO: 192312 - DNA, 122 bp, Homo sapiens
gatggcgccgctcgggcttgccttcggctgtggcttggcggtagctttccagccaggagccgggtccgcgctgccaagtgaagctggggaggggggcggggaggcggggcggggagagcgcc

SEQ ID NO: 192313 - DNA, 122 bp, Homo sapiens
cccaggggcctcccacggccacctcggcgccgccacgcgtggccccgcccccaggccgcccgcccgcgcgtcccctggccccgcactcacacttcgccctcgggggtatacgtggtacccga

SEQ ID NO: 192314 - DNA, 122 bp, Homo sapiens
aggccgagagcgatgagagtacagggaagtgaggaagagggggtggccgccaggctcctccgcttccctgggtccaccgcggatccctcccgcttgtcaggaggcggccagcgggtaagccg

SEQ ID NO: 192315 - DNA, 122 bp, Homo sapiens
gctgacgaggagagcagcaggtgcctggcatgggcaacaaggcgtgagcacctgctctcacgggtggctgccacacaggcaggtgtgtcaggacttggcaggacgtggtgtccatgcgggct

SEQ ID NO: 192316 - DNA, 122 bp, Homo sapiens
gcagagacagagtctcacgcagaggtgtgcccagacaccctgaaccaagttacttaacctcgtccaccaccgtggcacccgtggggtccgtgggcccgtcggtcttccaggagggattctgt

SEQ ID NO: 192317 - DNA, 122 bp, Homo sapiens
cacccttcaagcatcccttgtcacaattcactttcagtatcactaagtgataactaaaaacgacattaacttacagcttgtcttgtaagctcatagggcagaagccttaaagagcagtattt

SEQ ID NO: 192318 - DNA, 122 bp, Homo sapiens
agctgcaggcagcagaaggaagtgcctggcaaccagctctgtagatttaataaagcaccacgttggccatgtctatagaattaagaggaaaagaaggaaattaaaatctgaagaagttgtgg

SEQ ID NO: 192319 - DNA, 122 bp, Homo sapiens
tctaagcaaaatgacttagaaagttagcccagcttcatggggaaggaggctgaagaggagcgggatcccagggaggggtagtttatgagctatgcctgtcacagggtcagatggccttcctg

SEQ ID NO: 192320 - DNA, 122 bp, Homo sapiens
agactcggccctctcctgtgggctgggccctccccgcggggctggggtctgggggtggggcgggacatcggcgacgggagctgagccaggagagccgtgtggactgggctgctcggcctgtg

SEQ ID NO: 192321 - DNA, 122 bp, Homo sapiens
cgtaagcctcgcccaccataccccgctcagcgcaatcccctcccactgggccacgcccaacgtgttcagagggcttgtccgccacaagccctaccccgcagctccacctggcccagactcgt

SEQ ID NO: 192322 - DNA, 122 bp, Homo sapiens
tcacacaatgatgacactgcctagcgatgcgtttctcagaatgcatccctgtaagcaacacgtccaccatctatattgtaacaaatgtgcctcatacgtctattctgcagccgtctgtgtgg

SEQ ID NO: 192323 - DNA, 122 bp, Homo sapiens
ccctagcaggcgcgagatgccagagccctaggatgtctgaagggccgggcaggaggcggacgggcgtgggccaatggctgtcgcagtgcctcatcttgccgtctgtgtgagcccaggtatgc

SEQ ID NO: 192324 - DNA, 122 bp, Homo sapiens
ggtgtgcccatgtctcctttgtgtaagtggatcccttggcaattaaaagtacatcactggcgttttgtccagacctctgcaaaacatcaatgatgtgtaaagacaccattttataaaaataa

SEQ ID NO: 192325 - DNA, 122 bp, Homo sapiens
gcagccggagcccgagccgcggggcgggtgcgaagatgcacacgacccagaaggacacgacgtacaccaagatcttcgtcggggggctgccctaccacaccaccgacgccagcctgcgcaag

SEQ ID NO: 192326 - DNA, 122 bp, Homo sapiens
ggaacacggtgcggtgacacctagcctcggagacagtgggagctccgagcccacggagagcgggggagttccgcttcctcccgccccagcggctcccgccccgcctgggcgcagccggccgt

SEQ ID NO: 192327 - DNA, 122 bp, Homo sapiens
gagagctccttggccccccacccccctgccccgagacgggtcgacccgctcgggggccggcgaccaccgcgacgggttccgccgcttgcctccgctccttggcctttgctgccgtgctgcct

SEQ ID NO: 192328 - DNA, 122 bp, Homo sapiens
gtctcagcaaatagcacaaactttcctgtcctccaaaatctggccacctcagtgatgctacgtccccccatagagccttggcacaacctcagcctccaattggtagggctgttgaggcaagg

SEQ ID NO: 192329 - DNA, 122 bp, Homo sapiens
gtacagaaacaccacactgtttattaaatcacaatgatttttattaaccatgtctaactacgtatctgtgccacagcttgcagtgaggcaggccactcgtggcagatacaaggggctcctga

SEQ ID NO: 192330 - DNA, 122 bp, Homo sapiens
ctttggacttcctctcgccaaagaccttccagcagattctggagtatgcatatacagccacgctgcaagccaaggcggaggacctggatgacctgctgtatgcggccgagatcctggagatc

SEQ ID NO: 192331 - DNA, 122 bp, Homo sapiens
cgaacgcaccgggaggaacgaacaactccagacgggcccccttaagagctgtaacactcacggtgaaggtctgcagcttcactcctgaagcccgcgagaccgcgaacccaccagaaggaaga

SEQ ID NO: 192332 - DNA, 122 bp, Homo sapiens
cacaccgctgggacctcggccccagtcccctggaccgggccccacctcccaggcagggcccggggcaggccgccctgagcaccctctggaaaatgggccccaacccgcccctacttcctggg

SEQ ID NO: 192333 - DNA, 122 bp, Homo sapiens
caggaaggccccttgtctcatctagaagacataaggacaggccaggcccagtcagggatccgcacagggcgggcagccagggaagcaaggtggtcacgcacgccgttgggaaggcccagctc

SEQ ID NO: 192334 - DNA, 122 bp, Homo sapiens
tgcgaaaccagttgggactagaactaaaagggttaattaagtggggtccccgccctcctccgcctaagggcttgggatctgtgttttgctggggggagggggctgcggaatgaccaccagat

SEQ ID NO: 192335 - DNA, 122 bp, Homo sapiens
gcatgcacggcccccggtgtctgttaaagccgatgaggaatgctgcccgcagagcaaaggcgagtggttgtggacgtgcctgttgataatctgatcttgacatggcgccgcctgcgttgaga

SEQ ID NO: 192336 - DNA, 122 bp, Homo sapiens
accccatccagcccttcctaacacggacagccaagctgacagaggtttgagccccatggccgtctgggaaggtgggtggggggactataattagaccatcctggcagttctctcttcactcc

SEQ ID NO: 192337 - DNA, 122 bp, Homo sapiens
tcccccatgactggatgtagcatcacctgggaggtacagctgacatgtcccctgctgtgacgggcggaggacagcgtctcctgtgagtgttgctgcacaaaacaccacacccgaatttcacg

SEQ ID NO: 192338 - DNA, 122 bp, Homo sapiens
gctaattccagagggctggccctttgtcctgggacgctcccaggttttcgggccgcggtgcggagaactcaggtgggtgcccggcaagttacctaccaggggctgttcccccgcgaccctcg

SEQ ID NO: 192339 - DNA, 122 bp, Homo sapiens
tgtgcgttggtgaagcagggtggaatcacggctgtcatattaatctacaggcccgcaagacgccgcaagtccacactgagttcaacacgggcacctgcccagaaacccgcccccagggaagc

SEQ ID NO: 192340 - DNA, 122 bp, Homo sapiens
cgttagccagtctccccactattccgaaaagtggcttcgctcgccctgaataaacaatcccgagcacctcgacaccatgtaccagattcaaaaggaaaacaaaaaaagcttagtcgtgtgca

SEQ ID NO: 192341 - DNA, 122 bp, Homo sapiens
tttaaaaagtttgaggctagcagagtttggttcatgaggtttaaggaaagaagccatctccgtcacatgaaagtgccaagtgaagcagcaagtgccgctgtagaagctgcagcaatttatct

SEQ ID NO: 192342 - DNA, 122 bp, Homo sapiens
accacgcccgctcggcctccgactacaggccccgcccctggggctgagcctctccgccctcgccctcggagtagggggtagcggcttgggtctgacacatctttgaaccttgtggccaggcc

SEQ ID NO: 192343 - DNA, 122 bp, Homo sapiens
ggtgcggcaaggatggggtgttgcatagagagtcaggccggccgctctaactcggccctccggcctctcggcccagctaagccagaccagcctcccggccgcccggcgccctgggctcgccg

SEQ ID NO: 192344 - DNA, 122 bp, Homo sapiens
catgctcacagaaaactgccaagtgtgaggggtgggaaaacagagttcagcctggctgaacgtaggaatctggatgggaatggtagatcttaggctcctgtttttcagcttgccgctctagt

SEQ ID NO: 192345 - DNA, 122 bp, Homo sapiens
gcctgcatggagtcctaatggcacagctcaaaccatttatgtataaagcatgcttaccttcgccctctcatttaggctctaacactcctgtggggctggccggatgatgatcagtgactcca

SEQ ID NO: 192346 - DNA, 122 bp, Homo sapiens
gtaactgcttggctttagattttaaaaggcatcacatacctcttggtgaaaggtcttacgcgtactgccactgtcacttgactattctctacttttaaggggtcttttcctgcagaggtgtt

SEQ ID NO: 192347 - DNA, 122 bp, Homo sapiens
tgcctctcggaagcttctgtttccagcctgagcgttgctttgagtgttaggggctgtaggcgccagctgctgatttttatgatgtgtggagagaaaaaaaacatgttcacggtggctcctcc

SEQ ID NO: 192348 - DNA, 122 bp, Homo sapiens
agatagattggcttagcctttgcctatattaaggcaacactattttctaaaatgattacccggataggtgatatcaaaagtccagacgcacttaggtggaaaaaaacaaaacccaggataga

SEQ ID NO: 192349 - DNA, 122 bp, Homo sapiens
ctggcagaacagcatccgccacaacctctcactcaacgactgcttcgtcaagatcccccgcgagccgggcaacccgggcaagggcaactactggaccctggacccgcagtccgaggacatgt

SEQ ID NO: 192350 - DNA, 122 bp, Homo sapiens
caaccaggacatatgtgacaaaccactcacagcaaggcatcctagaaattgggatgtgtccgggagcatctggagtgaccacccaggctgactcattgcttgcccagctgttaagagttcac

SEQ ID NO: 192351 - DNA, 122 bp, Homo sapiens
taaaatttaaaaagccattgaagatccaacaaactgcagccttggggtgctcatggagtgcgtgggatgagaaagaaatcaagtagcagcattcagaagcagtcctgggttcatcctgataa

SEQ ID NO: 192352 - DNA, 122 bp, Homo sapiens
accgaagctctcatccgtcaatgggcgggttcgttcagcaagcagccactgcgaagtcttcggaaggggtttgcgggagagaagacgggtcatgatcttggagccataagtcctgcccgccc

SEQ ID NO: 192353 - DNA, 122 bp, Homo sapiens
cggtccgcgcactgggccgaggggaccttgccagtgcgtctgggactcggggaccacacccgccaggtgagcggggagcagcggctgagaggttagctacaaataataaaggtaatagcgat

SEQ ID NO: 192354 - DNA, 122 bp, Homo sapiens
catttcttgtgaaaaaccagcttccaggcctccttcctgggagggactctgtgagtgccacgcccagggccctgcagcaggtcgtgagcagatgcctctaatgattcaaagctaccaacaat

SEQ ID NO: 192355 - DNA, 122 bp, Homo sapiens
ggagtctgtaacctaagccgccccagcctccggggggcagaccccgcggccgccggccggcgtccggccttcccagcacccggcccagggctggagctggctgcagggctggcccgcggcga

SEQ ID NO: 192356 - DNA, 122 bp, Homo sapiens
ctccccagggcccatctccagggtgaggagcagagccaggccctacttctggagggggcccggcaacccagcctagtccaggcccaggtcccgtctggcctcctgttgaccgctgggctgag

SEQ ID NO: 192357 - DNA, 122 bp, Homo sapiens
tggggcgggcaggggcgggaataaggttgctaggagaacgcgatgacgctacgggctcggcgctcttctccaccaatgggcgacgcgtacttgcagtggcgcgctgtgtgcgtcacgccgac

SEQ ID NO: 192358 - DNA, 122 bp, Homo sapiens
ggaaaagcattcgagacaaatatttttgggctcagaacacgtgtgaggtcactttgccctcgtagaagtctcctagtggtgatgttgaatggtgatacgagatggaaatctggagtctattc

SEQ ID NO: 192359 - DNA, 122 bp, Homo sapiens
tgcagggcaaaggggaaagttttcacttaataaagacaatttcacttctatttcctgggacgaataacccctagaaccctgacttccctttctccccagttatgatgggaagcataattatt

SEQ ID NO: 192360 - DNA, 122 bp, Homo sapiens
agcgaagcgcctctggggaaaagggaagttaaaccaacaaccccgatgtcgaatccttggcgagtggaaccaggaaggaaaggcttgtttaatttgattttcctgatagaggtcagcttgct

SEQ ID NO: 192361 - DNA, 122 bp, Homo sapiens
ctcgtttccaggctggcatctgggacaggcgctcccgttctgctttctctcggcctcgaacggacgcctcctcctgccggcgccgggctagcagctgtagcttccagtctgggatggtggcc

SEQ ID NO: 192362 - DNA, 122 bp, Homo sapiens
ctgcctcctcgctcctccttcagcagctccacgcagcacagagcggaagtgtcggtagaccgtgttgattgactgactgggccccagcgcgccgtgtgctaatccccgctaagagctgttct

SEQ ID NO: 192363 - DNA, 122 bp, Homo sapiens
tctttttacccgggtcccgagctctttggggcagagaatgcagtttagcaaggtttacaccggtgtaaaccttgtctctggaggcagatcatcggggtcttgggggttctttgagcgggcgt

SEQ ID NO: 192364 - DNA, 122 bp, Homo sapiens
ccttcccacactgaggtctcgcccgttctcgcggacctgtccgtgcgcccagcggcatcacgttccgggatgccctttgcagccactggactcccaagaccccggccctggccaccgccatc

SEQ ID NO: 192365 - DNA, 122 bp, Homo sapiens
ggcctgctcctctcaggtcctccccacaccctgtctccctgactgagtttcactgaaacacgttgtgacattcagcccaggtgtgccagaaagcccccgcagcactgagggtgggtgggggg

SEQ ID NO: 192366 - DNA, 122 bp, Homo sapiens
agaaataaaaaacaaaacaaaatattcaagtcctttttgatcctgaagtcaattaggtgccgctgttgctgctcatattgactctggaaccgtagccagacatgggactggaggatgagcaa

SEQ ID NO: 192367 - DNA, 122 bp, Homo sapiens
ccttcctgtgaatgactcccatgggtaagatgctgatctggccctatccagagggggcatcgggaccgaggcgcctacagacccacagggagcccaggccccgcggcgccggctcaggctcc

SEQ ID NO: 192368 - DNA, 122 bp, Homo sapiens
cttatgttttgtggcgaaagaacatcagcatggttcacaatatattttgcccagaatgttcgttacccaggtacaggaggttagttcaagctactcatctttaaggatccagttttctctgt

SEQ ID NO: 192369 - DNA, 122 bp, Homo sapiens
aaggatctctggagtttggatgaagtttagcttgtgaatttgtggtgtatggtaacaactcgcagggttaccaacagatggtgagaaggaactgagaggaaattcagagcatgtacttgtta

SEQ ID NO: 192370 - DNA, 122 bp, Homo sapiens
tccctgcgctgcctcctaatcctcaaagtggagaaaataaaacctaatttctgtgagctgcgtgagatactgtttctgaagctccaggcacagagtaagcccccgctcattaattgccttcc

SEQ ID NO: 192371 - DNA, 122 bp, Homo sapiens
ctccagtcctcttggaggtgaagagacctgaagggtaagggggtgtggaggttgtgaaggcgggaaggggggtagccccttcaccaatgtaaacaaggatgtgggttctgcggccacactct

SEQ ID NO: 192372 - DNA, 122 bp, Homo sapiens
tcagtctcttcctcctctacaacctcctccaagccgaagctcaagaagcgcttttccctgcgttcagtgggtcgctctgtccgaggctcagtccgtggcatcctgcagtggcgggggaccgt

SEQ ID NO: 192373 - DNA, 122 bp, Homo sapiens
tttttttcttcttgagccttctagagccagtgttcagccggccttgagcctggtcccttacgccttttcctaccagcctttctttcttcctgcctaatctcacaaaagagcaactcacacat

SEQ ID NO: 192374 - DNA, 122 bp, Homo sapiens
aaccgcttaagtgggggaatgaaatgcccaccgaagggcagggcagggaccctgctgtcccgtcactgaagatattcccagcccgtggggagaagtgtaaacgaatgaatgaaagaaacgca

SEQ ID NO: 192375 - DNA, 122 bp, Homo sapiens
tgggagtgaaggagggtgggctctgtaggagttaaagaaagaggaaagaaacatgaaaagcggctcaacaaaggcaggtttattttggagaataaacctgaaagggacttctggccgatttt

SEQ ID NO: 192376 - DNA, 122 bp, Homo sapiens
gcactaaggacccacagagatgtcactcggtttaatgctgtctcattttgatgcctggcccgtttggggttgccgcccctttactacgccgggaccctcctcggcctcaggctcccaggcac

SEQ ID NO: 192377 - DNA, 122 bp, Homo sapiens
aggccctaaggcctccaggcctgtccgggccgcccagctagggaggctgagatggccgctcggccccagccagcatatgcattagtaatggccactgatcctgctggccccgcgccctgttt

SEQ ID NO: 192378 - DNA, 122 bp, Homo sapiens
ttttagacatgatgggagcctatgggacttctttccatcctgtttgatataatttgcatacggtaaattcatccttcttagtgtgcagttctgcgcagtttgacaaacgcacatagtcacat

SEQ ID NO: 192379 - DNA, 122 bp, Homo sapiens
tgctgtatccttaattttctgtgctacgtccagagtatcttcttaggttatatattgaagcgttttgttttgttatatactcaaatgactccatgtcataatacagacatgatggtggtacc

SEQ ID NO: 192380 - DNA, 122 bp, Homo sapiens
ataaagtttgggaattacttgtatggatttaatttcctcagaataccctcattgttccttcgcaggaaatattcatgagtcaactatccagaatcatagttattattcaagcggtgtgggtt

SEQ ID NO: 192381 - DNA, 122 bp, Homo sapiens
gctgggtcctgagctttctctgtagtctggtaattattaaacaggaaaagtaggctctcccgctgcttgatggaagttcctaagtgtaatctgaaataggctcatctcagtgaaagagcaca

SEQ ID NO: 192382 - DNA, 122 bp, Homo sapiens
aacgtctatcatggtgactgtaggtgtcaatggactgatgctaggcttgcccaggggtgacgcctccttgataagggtacttctgttcagtatcggcctgcgagccgtccgtggcaggctga

SEQ ID NO: 192383 - DNA, 122 bp, Homo sapiens
tgcttttatgctccataaggttttacaggatgtgataaaataaaagctaaaataataagacgagagtctggaggaaaggtgctaggtgggatacagacagaaataaaaaggaagcaatatga

SEQ ID NO: 192384 - DNA, 122 bp, Homo sapiens
ccccggtgggggaaggaggagtttcctcttggcctgaacttggctgacctccgcagcttccgcccggtgagggacgtgagttgccaggcgtgttctagggggctggggggactccaggattc

SEQ ID NO: 192385 - DNA, 122 bp, Homo sapiens
tgccctttggccgcggggctttagcctgccctagcttcagcatccccgctcgcctcccggcggtcctgcgtctcactctggattaactggaggcttcgagatgggatagagaggggtgcagg

SEQ ID NO: 192386 - DNA, 122 bp, Homo sapiens
agctcggatgcaatgcagaggacgagcctatgtaacgagggaggctggtctagcttcccacgaaaatcgccctgctttgcctctcccttgcattctccacgcatcaaagggacacgtgtaag

SEQ ID NO: 192387 - DNA, 122 bp, Homo sapiens
gtgtctgccccagggacatctccctgggcttccatgggcttctgtgctcccctgagctttcggtgggccctgatgggggaggagacaagccatttcacagggcatcacaggagatttctcgc

SEQ ID NO: 192388 - DNA, 122 bp, Homo sapiens
ctccaaaaaaagggcactcaccgagccgttgatgcacgggacatcgtcataatgaagtgccgtcccgctggggtgggcatagccgttggaggtgccccctagatatgggttagcagatataa

SEQ ID NO: 192389 - DNA, 122 bp, Homo sapiens
cgtggtctctaggatcccagtgttctagtgcagtctctgggtgggttccataatctcgctcgtatcttgtttcttcttctcccgtttacaaaatgagggcactgaaagagatgatctctaag

SEQ ID NO: 192390 - DNA, 122 bp, Homo sapiens
ctatgaagtctgtgtgagccagtccaggtaaattaggaagacaaggatttaggactggggcgaaaagagccagaacggaagaaggacgccagggggagcaagaacctacactctccagatat

SEQ ID NO: 192391 - DNA, 122 bp, Homo sapiens
gtgggagcgcgcctggccttcctcgttgttaagtcacttgctcttccaggtgccaccctgcgggaagtttgggcagcacggagtccgccagcattctacaggaagtttgggggagcacaagg

SEQ ID NO: 192392 - DNA, 122 bp, Homo sapiens
cgccgcatgcccaggctctgccccaacctccgcgcccaggctctgctgtccctgccctcccggctccccaccctcaggccccaggagcggcagtttctgcaggagctcctgacccggggcct

SEQ ID NO: 192393 - DNA, 122 bp, Homo sapiens
gcgcggttctggcttcatctgcatcgctctggcggcccctgctgggctggcggtgaaaggcgacccgggatggggcggtgccccgagctctggctggagtaggagacactgcgtgggggtgg

SEQ ID NO: 192394 - DNA, 122 bp, Homo sapiens
catgcctgagcccccaccccctccccgccacccccagcccactgctgtggactcctgcgccgcccgagcctcctcgacgagcaccgccccctgctccagggcgcccagtcccatagaccgcc

SEQ ID NO: 192395 - DNA, 122 bp, Homo sapiens
gtcttgtagcggctggagttgacctggccgcccccgggctgcttctgggtgggcagcagccgctcgcccccttccgagaaggagcggtctcggaagcggctgtctcgcgagctcagagcggg

SEQ ID NO: 192396 - DNA, 122 bp, Homo sapiens
tgtgagtctcttttgaccacagtttattttgtgttgcttcttttagctgcatggtccatacgccaaaggtgggcaggtggagggctgctactcactaacttggtagtgcagaaatggctttt

SEQ ID NO: 192397 - DNA, 122 bp, Homo sapiens
ggagaactctgcccagtggttcgccgggcgctgtagtccccgggatcctagggaccgaggcggccaggccctggggccccttgagtgcggcagctaatgctctcaccgcggcgggggaagga

SEQ ID NO: 192398 - DNA, 122 bp, Homo sapiens
cagacccactgaatcagaatctgcattttaacaagaacctcctcctctcattcatttgcacgttaaaggctgagaagccctgctgtggagactggttccaactgcagcaggtcatgatcagg

SEQ ID NO: 192399 - DNA, 122 bp, Homo sapiens
cagaatgtactttactcaattaagtgtgtctgtttttgcacaagtttcctagacactgcacgttgtcggagacagacatagtgtctgccctcattgtatagcctactggggaaagagagatt

SEQ ID NO: 192400 - DNA, 122 bp, Homo sapiens
gaacgacaagcggagccgcgtggtcgcgaaaggccttgcgtgtgccccgtcagtgtgtggcgcctggcagggctgatggagcgcccctctcccctccaaggtttatctctgctcacagagga

SEQ ID NO: 192401 - DNA, 122 bp, Homo sapiens
gctacttggtagaaacaaagaacaatattaatcatagagggcttcctggaggaggtgatacggttgggctgatgctaggccaaagaagaattacagtagtgaacgatttcgcctcagtgccc

SEQ ID NO: 192402 - DNA, 122 bp, Homo sapiens
caggagttcagtgccatcatcctggcaacagctggcctgcagcgcatgggctggcacaaccgggtggggcaggtagggcctgcccctatcctctccccagctcatctgcatctcctttctgc

SEQ ID NO: 192403 - DNA, 122 bp, Homo sapiens
gacctctgacccagggccaaatgctggtttaagtggcgggactgaaatgcagcccagccccgtgagactctggagcttaaccaccaagttctatacctctagattagctggagagaccagtc

SEQ ID NO: 192404 - DNA, 122 bp, Homo sapiens
cagctgggcccaggcgctcctcgggccgggttccctgcattcctcctgccagcacagccccgacggccctttgaatgctgcgccaggcccggctctgccccgcccctgccggggctcaccac

SEQ ID NO: 192405 - DNA, 122 bp, Homo sapiens
atttccttactttcaagcaccataagatttttcaggctcatcttgtattttctctgctcccgcactaaatcagccacttctctaaaaagtcctagttcctttaaaaaccaagatctgaatgc

SEQ ID NO: 192406 - DNA, 122 bp, Homo sapiens
tcacttgttgttcccattttgaatcaattctgtatcctcatgtgttagacttccacttcacgcttggtttcctttaacagacagtgatgtatctgactaaagtcaaggtgtgtttttctaga

SEQ ID NO: 192407 - DNA, 122 bp, Homo sapiens
gtcttatctgagctcctttctcaggaaaccaaccatcgggcctcccagacagtatcaaggcgctgaaactcagtaggtccttgaggccagacccctcaccagtcatgactgcctagctgcct

SEQ ID NO: 192408 - DNA, 122 bp, Homo sapiens
cctccctcgcggtaggtattcagcaccctatacccctccctctcggtaggtttacagcgccgtatacccctccctcgcggtaggtatacagcgccctatatccccttcgtggtagctataca

SEQ ID NO: 192409 - DNA, 122 bp, Homo sapiens
ttttcactaagaagaatgactgagagacaaacatgggtacttggcagacatcttctcaaacgtgaacaaagttagcatgtcacttccgggaaaacaactgcaacaaaaatggagtttccaag

SEQ ID NO: 192410 - DNA, 122 bp, Homo sapiens
gagcccagcgaccgcgcttggagtctgcggaagccgcgcagttcagcggcagagatgccacggccagggccaccacacaggccgggcctggggagaaagcacagcactcccaccttctcgtc

SEQ ID NO: 192411 - DNA, 122 bp, Homo sapiens
cgatttcggggcagggacccaggccctagcaacagtccgaccattggcggagcggggacacgctggcctgtgattggctcttgccatgcccgaggggaaggcggccgcccccggggcggggc

SEQ ID NO: 192412 - DNA, 122 bp, Homo sapiens
gttcagcctgccccgccctccgtcctggtccccaccctccatcctggctccgttcagaaacgtgccccagggaccaggtttgctcagttgacaggttgtctggcctgcagcctgtgcagctc

SEQ ID NO: 192413 - DNA, 122 bp, Homo sapiens
aaccctcagccccttttcactgactggtaagacccatatttaattcgatgccctacatgccgtgcacaagtttcagttttctgaagcatcgcttagatgcttaggtgtttagcaccactctg

SEQ ID NO: 192414 - DNA, 122 bp, Homo sapiens
cgtctccctcaaaggtgcaggtgtctcgggcacagggctgtccatcgcctcacacggtcacggccatggctgcagcgaggctgcccctctcctcttcctctgggcaccacaaggccgcgcac

SEQ ID NO: 192415 - DNA, 122 bp, Homo sapiens
atctgaaaggaaaagaaaaccctcctataagagagcaggttagccctaccctcacctccccgcactcccgccctatctaaatgccatttttcttactctccatgcccacggcatatatatgg

SEQ ID NO: 192416 - DNA, 122 bp, Homo sapiens
aagggcagtgtgactcagctagaaaaggatgaactttccccaaagataaagtgacctatgcggtaagtcctacgggacttcatatcctcattggagagaggtttagggtgtttctagttgta

SEQ ID NO: 192417 - DNA, 122 bp, Homo sapiens
gcaggaggaggtgggcctggagaggctgactcgaggaacatttgcacccagagaggctgccgagaggccggagctgggcctggggaggccgacttgaggacgacttgggcctgcagaggccg

SEQ ID NO: 192418 - DNA, 122 bp, Homo sapiens
gaggcgccgccactgccggcaactttgtgagcgagttcagtgcgtgcgtgagcgagtgagcgaaaagtcagtgcagcgccgagtccccggctggagggtccccggggagggccaggtctggg

SEQ ID NO: 192419 - DNA, 122 bp, Homo sapiens
gccatcattcttgaggaggaagtagcgtggccgccaggtcttgatgtactcccctacagacgtgcgggtggtgagagccacgcacactctacccgtcagaccctcgccaggcagccaggcag

SEQ ID NO: 192420 - DNA, 122 bp, Homo sapiens
aaggttaaaatgatgactttgcatctgggaacacttgtacataatgtctacatatttggccgttggatgtccaaggcaagtctgtgcagcacctgccaagtcacaagacccaaataagcact

SEQ ID NO: 192421 - DNA, 122 bp, Homo sapiens
cataaacacagggagagatacacccgagataggagtgcattgagctgcgatctatcctaacgatcaacagcagcaaatggagtggtgtttaaaggctggttggtgttatttcattggttata

SEQ ID NO: 192422 - DNA, 122 bp, Homo sapiens
aatgaagaatgagtaatctggatgagtcggccctgaaatcgacctgcaacttacccggaacgtgagctgtctctctctgacctctgctggctgcttcacctggagtctgagtccgactcatg

SEQ ID NO: 192423 - DNA, 122 bp, Homo sapiens
attagatggtctgattggaggagtccccagtagcaggggacatttgaactgagccttgaacgataaagagataaccatgaaaagaactggggaaaggacattccagccagcagagagcaaat

SEQ ID NO: 192424 - DNA, 122 bp, Homo sapiens
ggaccaggtccaccgctgcagcaggctgtgagaggggaaggcacgttcctggctaagcagcgtccaaaactcccgtaataggacccagtctggtggacccgagagtaaaagtgagagtgaaa

SEQ ID NO: 192425 - DNA, 122 bp, Homo sapiens
cacgaaacagccgccgcagcaatcaccgctaagacccagacttccaggcgctttaaaacgcgtcctagttctggttattaaatgaagcctgtcctttactgcttaggcacgctgtcaataat

SEQ ID NO: 192426 - DNA, 122 bp, Homo sapiens
agaggtaaagagtgactgatttacaatataaaaaagagatttacaatataaacaagattccggaagagaaaacagatgtgaaattattcactgaagaaaaaaatgggattatgggattacat

SEQ ID NO: 192427 - DNA, 122 bp, Homo sapiens
agccagccccacagcaagcttaggggtccctgcgctgctgtcgccatcttacgcccaccccgaagccaccgccgccacaagcgtcagctgccgccacagccaacggaacccgcggggaggcg

SEQ ID NO: 192428 - DNA, 122 bp, Homo sapiens
ttcgcccctagatacacccgcctggtgatgaggcgctcctcgcgttccttccggtaaccgcgttgcgaagaccacgctgccgggttgcaaacttggggggacttcctccctcccctccccct

SEQ ID NO: 192429 - DNA, 122 bp, Homo sapiens
aattatacctggggatcccactaatttacacactctgaccctataatcttgagagggtaacgacatataacagtttttaaatgcgtatgcctcaatttaagtgtagccttgcctaaatttcc

SEQ ID NO: 192430 - DNA, 122 bp, Homo sapiens
ccatgttacgctttgtctaattcccctcgttacagagtcatgtgctgctgctcccgtcgccgctgctgccgctgccgctgccgccgcccgtggtgccccggctcctccgccgcgcttcgagg

SEQ ID NO: 192431 - DNA, 122 bp, Homo sapiens
gggaaatggagtctgggctgggcagctttttcctaacctcctaggtggattgcgcaggggcggcgatgcacgtgaccggaaaagcaactaacacgccgctcaggaaagcagcaaaggctgcc

SEQ ID NO: 192432 - DNA, 122 bp, Homo sapiens
acagaagcatctacatgtttcagcctgcactctctgggcatggccagtggctccaggccccgaaatgagccactccgcctcatctgcaccctccccgttccctaaaaatccgaacgaactgc

SEQ ID NO: 192433 - DNA, 122 bp, Homo sapiens
ctggaaaatcgggtcactcccatccaaatactgcgcttttccgacaggcttaaaaaacggcggagtttatatcccgcacgtggctgggagggtactatgcccacggagtctcgctgattgct

SEQ ID NO: 192434 - DNA, 122 bp, Homo sapiens
tgacccagccgggatgagtgcccgccaaagtgaaaatgccaacattctcaagcgcgttctcgcagggctcagagcctcgcatctgattatttaaaacatccaggatacaaccccaaattacc

SEQ ID NO: 192435 - DNA, 122 bp, Homo sapiens
cgtgcgaaacaccggtctgggaaatacagcaatctaaggtactgtgggactgtgtactcccgagtgggagatgtggcagggccacagggagctgtgtccagctggggcatgcctagcaccag

SEQ ID NO: 192436 - DNA, 122 bp, Homo sapiens
caagcaggtaggaaggaagcaagcttggtgtccatcaactgggtaaacgtttaaaaaatacggtatctttgcacagtggagtactactcagcaataaaaaggaaggaactgatatgaactac

SEQ ID NO: 192437 - DNA, 122 bp, Homo sapiens
gtgatggggcctgccatttggagcctctgtgtttacgatatggaaaactagcactgagcccggcacacaatattttattgaataaaggaaatgattgttctaatcagggacaactgttttta

SEQ ID NO: 192438 - DNA, 122 bp, Homo sapiens
agccagcgcaggcagatgccggttccggggcttggagaacgtggctcggtggcacagagccgccgggcgaggcgggggcagggaggcgggcgacgggattggctggaggcggggcagcgggg

SEQ ID NO: 192439 - DNA, 122 bp, Homo sapiens
gggccggtgggtaggggtaggagtccccaaatgccttcatctcagcccatccttctccaccgaaaaataaagcaggctggcgagatcgcctcctcacccgctcagtcctgaagtgtccaagg

SEQ ID NO: 192440 - DNA, 122 bp, Homo sapiens
gaagctccccaacagggaatgaacgcaacccaacataattaaaagtgaatatgggccgggcgcggtggctcacgcctgtaatcccaacactttgggaggctgaggagagtggctcacatctg

SEQ ID NO: 192441 - DNA, 122 bp, Homo sapiens
catttactcctccaggctgtgtgcatgcttctccctcttacttgtcacaaaatctcctcccgattcttcaataccagctgcaatgaatcatctcattcattaattcactcattcaacatatt

SEQ ID NO: 192442 - DNA, 122 bp, Homo sapiens
tcttctgagggcgaggagcactaggcttaagttggatttggatgagggaggtgtttagtgcgtttcccagagcctgtgtggcccaaacctcaggatttacttgagacaacacctcaggtggt

SEQ ID NO: 192443 - DNA, 122 bp, Homo sapiens
atacattgggctcatttgtgtctgcaatgcatcagttcccagtgcaagaaaaaaaagccacgaatatggacagactcaaagtcttctccaaatggaagatccaaatcagaacctttgaggag

SEQ ID NO: 192444 - DNA, 122 bp, Homo sapiens
gaaagcgttccgagcagcttttaaaaaaatgtttgagtccaagtccactaggaagggctccgtggagaggggagggaggtgaagggtcggggagcaaccctgtaaatcgctccgcaagggtc

SEQ ID NO: 192445 - DNA, 122 bp, Homo sapiens
cagtggagccttattaaaaaggagaaaaaaaaacaaaggtctatataattaaaatgtgatcgctagcgatgagtatgtaaaatcagccctgagaggcattagtgatgggaaaacttttctaa

SEQ ID NO: 192446 - DNA, 122 bp, Homo sapiens
atggcgcgaggatggcgtgaggctgggctggggcctcccaggtagaactgaggggggcaccgcgcggccgcgggggagcggcgccggactctagaggctttggagggggcctgagggctgcg

SEQ ID NO: 192447 - DNA, 122 bp, Homo sapiens
tgtacgctccctcccccgccgtcctggggcgccgacagccccgcggccggccagggtgcgcgcctgagtgtgcggtgagcccgcgaggctgcaagcagacaaaataaacaccccgtcccatg

SEQ ID NO: 192448 - DNA, 122 bp, Homo sapiens
ccggagccggaccggggacgcgtgatgggtagggcgcggggcggggtctgtggtgggaagcggcccgcaggccgggagagagggtgcggccgggccctcgggccactggggatcagtggtgg

SEQ ID NO: 192449 - DNA, 122 bp, Homo sapiens
tcacatcccagacagggcggtggggcaaaggcgctccccacatctcagaagatgggcggccgggcggagacactcctcacctcccagatgggatggtggccgggaagaggcgctccccactt

SEQ ID NO: 192450 - DNA, 122 bp, Homo sapiens
cacatcaagtgttcatgaacaactctgatgccactaagtttcgttcacaaacttgcacctcggtcgttcttttacaaaaaaaaaaaagaaaggttattttgcaaaaggcaatagatttaatc

SEQ ID NO: 192451 - DNA, 122 bp, Homo sapiens
gcgttctgaccccaaacgtcacactacccgtccctggaggagcgggttgcagcccagctgcgtcgccccgcgcagagctccaggcagaagaaaactacatttcccagagacctctgcgcggt

SEQ ID NO: 192452 - DNA, 122 bp, Homo sapiens
acatgtctatgttaccagactggcccctgaaggggatctgcgtgccaggccctgacctgccgggctttggaaacatccttgccagtgtcccctgacctgcgccccgccctgtggagtgaggc

SEQ ID NO: 192453 - DNA, 122 bp, Homo sapiens
tgtcttccctccccaacagacttgcaccaggatcaagttttctttccagcccctttgtgacggtttcactggaggtgtggaaagagctcaaaatggggagtgagatttggacccacattccc

SEQ ID NO: 192454 - DNA, 122 bp, Homo sapiens
ctcctagagggtaagagggtgtctggaagcacagcagatcttccaacttctcagagcaaccgaagtcactaattttacagacatcctgctcactgatcaagatgttcgcgggcttcaggtcc

SEQ ID NO: 192455 - DNA, 122 bp, Homo sapiens
aatagaaggcaggaataatcagagctgggtctggacaggccagtggagcagattacgctacgtctgggatttcgtgtcgagacatcaggacttcatctttaggggcatgggtacctttgaag

SEQ ID NO: 192456 - DNA, 122 bp, Homo sapiens
ttcaaagaaacgttttgagctttacattgattggaccacccttgaattagaatatggcaacggtgctctccaaacactggttcatttctgacccagtaactgcagtaatgaagacagaattt

SEQ ID NO: 192457 - DNA, 122 bp, Homo sapiens
acacttaaaaggagttcacgttccttcatcagctgcttccggtaaagctcaggacaaagacgggacaggacagggatctgagtcagccacctctcaagggcacagggacatgaaaaccctcc

SEQ ID NO: 192458 - DNA, 122 bp, Homo sapiens
aattatcttcattgttgtatttcctaaatcatcagtatttgttataatttcctctttgaccgaaagattatttaagaacattaaaaaaattccaagtgtgtgatttttcagggttgaaaatt

SEQ ID NO: 192459 - DNA, 122 bp, Homo sapiens
aaggcgtgtggattcccacgcccgccttggccaacgtcactgtactccttcgtgatgtcacgttccgagttggcgtccccacccaaaggaggctcttaattagtcctaattagtcctatgag

SEQ ID NO: 192460 - DNA, 122 bp, Homo sapiens
ctcgcctgctgctgggctgctctcccactccatgccggagcactgtaggctgccgcgctgcgccttccgccggcctccaagagcctcccgccatcacaggcaaggccacgcactggaccacc

SEQ ID NO: 192461 - DNA, 122 bp, Homo sapiens
caggcagcagaaagtccaccattacacttcaggctttatcacagcatcatatcctggctccgcatttactagttgcgtggccttgggcaatgatatggtttagttctgagtccccagaattg

SEQ ID NO: 192462 - DNA, 122 bp, Homo sapiens
tcctgaatagctggaatacaaatgtgtgcctccacacctggctaagaaaatatctttatgcgacttttcctcagtcatcatttgactctacagagcactatgttaaatactttctcaggaat

SEQ ID NO: 192463 - DNA, 122 bp, Homo sapiens
gggtcctcggtctatgtgaagtgagagctgccctccctaaatgtcgttgtcctctcaaggcggccccagcggctgcacatctggctgtgcgggggccccttggacttggctggcagccgcct

SEQ ID NO: 192464 - DNA, 122 bp, Homo sapiens
cacctgcctgaacagtcaaactgaatatttcatccccaccggaggactgtgggctcctgtcgccctgctggcaggcacaatcagagtgtcaatttctgggaatctgatccaaagttcaaact

SEQ ID NO: 192465 - DNA, 122 bp, Homo sapiens
tctattcactctgttgattatttcctttgctgtgcataagctttctagtttgatgcagtccgatttgtctaattatgcttttgttgactgtgctcttggggttgtatccaaaataatctttg

SEQ ID NO: 192466 - DNA, 122 bp, Homo sapiens
accctaaggtccccggagccaccagctgattccgaattccattcattctgcaaaatttggcgcctaccacgtggccgagattcccgaggctgcagccaatgagcagcatagtccgatggggg

SEQ ID NO: 192467 - DNA, 122 bp, Homo sapiens
ctaacaggacaggccgaagcggcgctgcgcctgcagttacggcgcgtggccggcgggcggcgctgtggcaccgctccccatcgcctcaccggaggctagcggctgcgcttctccacgccccg

SEQ ID NO: 192468 - DNA, 122 bp, Homo sapiens
ttaccggcttcagacttcccgcacctgaaggggcggaggcagtgccgtaaagtagcgctgcgggtttttgcgacaccatccgcgcctcttcgaggtggccctctggtccggctttagaactc

SEQ ID NO: 192469 - DNA, 122 bp, Homo sapiens
aaagcccttcccgcctctggggaagggaacttccgcttcggaccgagggcagtaggctctcggctcctggtcccactgctgctcagcccagtggcctcacaggacaccagcttcccaggtga

SEQ ID NO: 192470 - DNA, 122 bp, Homo sapiens
gaaggaagtcaggctcaaggaagacgtttggcaggaactgtgaccccgcatgccagaggccgagcagcggccggtgcatagccgcgcattctggttttctgtggcgcagaggactaccagcc

SEQ ID NO: 192471 - DNA, 122 bp, Homo sapiens
cagacatgacgccgagaacaccggctttgccaccaaggacagaagacagtctgccccacccggggtcacctgcaggtcctgctctgaccagggtccaggccctgattccggggatgcgacag

SEQ ID NO: 192472 - DNA, 122 bp, Homo sapiens
cctgatagagactttgtagaataaatcagccattgcccggatggcttctagaaggggtggcggggctcagacggtgttctcaatgttgaggatgtgatgcaggaatcagaaagcatctagag

SEQ ID NO: 192473 - DNA, 122 bp, Homo sapiens
gggggggggggggcgcagagaggcacgaaggccggaggcttgcgggagggctgccccacgcgccgagaggaatgaatggggaaggggcgagagggcgggaggcgtcccgggcgcggccgctg

SEQ ID NO: 192474 - DNA, 122 bp, Homo sapiens
tcacttgttggcaacacgcagcataccccatgcagcaccgggtttctgacttgcaactggcgtgacttctagtgaatgtgccgcccagaaacactcgacggagactacactgctatcactaa

SEQ ID NO: 192475 - DNA, 122 bp, Homo sapiens
gctgagctcctggcttagcttcttgggttcctaattcctggtgtttaataattctctccacgatcatgtttttctgattttttttttcagaaataatgttttttaaaagacaaaaacaaagg

SEQ ID NO: 192476 - DNA, 122 bp, Homo sapiens
tcccttgctttttggcagcttgaggctagggtgccaggggatgtggaaactcaaaagagacgtgaatggagcctgatatctgcaagctacaccgacagggggcgccagcccctacaggtgac

SEQ ID NO: 192477 - DNA, 122 bp, Homo sapiens
catacccttatgtcctggaaaaagttaaaagaggaactggattacaggctttcatagcttcgggctggctgagagccaccccacattcgcctacactctctggctcatgtttgctgctgatg

SEQ ID NO: 192478 - DNA, 122 bp, Homo sapiens
ggctgggaagatgtgaaggaagattttcccagtctgtgaagtcaagaatcacttgccggccgggtgtggtggctcacgcctgtaattctagcactttgggagactgaagcgggtggatcacc

SEQ ID NO: 192479 - DNA, 122 bp, Homo sapiens
gggagaacatggagaacttctcaatactcacggatcattgggaatgttggccatgcttctcgaaccagttttctctcacggaggacctagccgtcgcgtggggctagaaaaggtcctgaagc

SEQ ID NO: 192480 - DNA, 122 bp, Homo sapiens
gggtatagggctcctgcatccctctgggatctgagcctagaaggctcgggcagagtccggcgagtgcctcaatggaagcggtactttctggctggcttgaggttgatgtatgtggccttcat

SEQ ID NO: 192481 - DNA, 122 bp, Homo sapiens
ccgtctgcctccacctgcttctcggcttggtccttctccacaggaatcaccctctggggccgggtgttcacggccgcctccaccaggacaagactccagctgccctgcctgtgttccccaca

SEQ ID NO: 192482 - DNA, 122 bp, Homo sapiens
atcatctgccaagcctagacaactactaatctacttctgtcactatggatttgcctattgcggacatttcctacaatatgtagtcatattgaaatagaatcctatagtatgtgatcttttgt

SEQ ID NO: 192483 - DNA, 122 bp, Homo sapiens
gacaaaaggaaggggaggagtgaaaccaaacccagcttgcagcgcacttcgtgttcaccgcgggtcggcctgcgctcccacctgcttcctcgtgttgtttgctgcctattgacctagaatcc

SEQ ID NO: 192484 - DNA, 122 bp, Homo sapiens
gaggccaagcttgtttgctttgtggtcatctgttctcagccaagagaggcctaagcagggcgtggggagcagctgcaagtcaccttgggtgactgatgttatctaggcctaacggtttcctc

SEQ ID NO: 192485 - DNA, 122 bp, Homo sapiens
catactcaccactaatacattggcactgataattcccagaaaacagctcctttcctgcctcggctacttcagtcaggttcttgccactatgttcccagcagcagaggacattgcctcctttt

SEQ ID NO: 192486 - DNA, 122 bp, Homo sapiens
cagcacccaccgcgttcatcctgtgaacacttccttagtgataaccttgtgccaggcctgcgctgcctctaggaatccaaacgagggaaaacagacctctccactctgctgggggagcttaa

SEQ ID NO: 192487 - DNA, 122 bp, Homo sapiens
ccccgcccgcgcccctgcaggccccgccctgcgcccactcggctcccgggcggcaagggacgggaggtcccaccccctgcacacatggcggggccaggatgactaatccctccgctccgtac

SEQ ID NO: 192488 - DNA, 122 bp, Homo sapiens
aacttggacaagtgcttcacagaaatgtgatcgtggttacttccttcctagaccccatggcgaaaaatgcttgcggctttcctgttcttcaaagggcatcagacacgactatcgctcagcat

SEQ ID NO: 192489 - DNA, 122 bp, Homo sapiens
gtggacttctgccgcaacgtgagcgcggccggcctgcgccgcctgcgcgccgcgtgcccgcgcctggccctgcgggcagagcacagcgccgccatgctgcccgaccagcccccgcgcccgcg

SEQ ID NO: 192490 - DNA, 122 bp, Homo sapiens
ccatagtcacatataaaatgacaaatgtcacagtaatgtcaaattatgccttgtcacatacgtacaggagacaactgtcacaatcatgtgaaatcacagtgcaggagcaggatggaacagag

SEQ ID NO: 192491 - DNA, 122 bp, Homo sapiens
acaactaacccctcccagcagatcctgagggaccttgggggtcaggaacagataggcatccgtctctttctctggggttcctccagagctgaggctggtcacatgtggtacctgctccccat

SEQ ID NO: 192492 - DNA, 122 bp, Homo sapiens
agtgggaggaatgactattgtgttaaaaatgcctgtgctaagtcttcataataaaagcagcgtgggcagaagccaaaactgctccacattgttgaaacctcaatttgtgccacttggagaag

SEQ ID NO: 192493 - DNA, 122 bp, Homo sapiens
gccccagtccacaccccccaggaccccgccccccagccacccctcccggccccttcggaacgccccacccccggcccgctcctaaggttcttgcctgcttggctcccgctcctccggtggcc

SEQ ID NO: 192494 - DNA, 122 bp, Homo sapiens
caacgtactaggtactgctcacacacgtactaggtaaacgtactaggtactgctcacacacgtactaggtaaacgtactaggtactgctcacacatgtactacgatgctctacaaactgcct

SEQ ID NO: 192495 - DNA, 122 bp, Homo sapiens
tttctctttatcagaaagttgttagggacttttaatcgcagaattggcctcgggtgcccacgctctagtattgaaatggcggttttgggacaaataagcaacatccgtgggagtggaaagcg

SEQ ID NO: 192496 - DNA, 122 bp, Homo sapiens
cccgatagaggagccccactctctcctcccctcctcctgcttcaaaggctcaggccctggcgctacgctccgaagcccaggcgcaaatgcctcgactccccgcgccccgagtccgccgctcc

SEQ ID NO: 192497 - DNA, 122 bp, Homo sapiens
gtggcagggctggggcgctagcgcgggcgcggggttccgggacgcgaaggtcccagtgtgcgaggggctccgtgcgcccgccccgcccccagctccgagcgtcccaactttgcgcggcgcgg

SEQ ID NO: 192498 - DNA, 122 bp, Homo sapiens
ccggcacctcgggaggccgaggctggcagatcactcgtggtcaggagttggagacaagcccggccaacatggcgaaaccccgtctccaccaaaaaatacgaaaaccagtcaggtgtggcagc

SEQ ID NO: 192499 - DNA, 122 bp, Homo sapiens
atgaggatttgtaaacgaaaacagactcgaactattgtgtaccaccacatagcacatgcacgtctgtcccagactttgacaacctgcacaagacaagcagcctaaagcaggagagacctccc

SEQ ID NO: 192500 - DNA, 122 bp, Homo sapiens
atcctacctctgacatgtcttagttgtatgagcttgggcaaattttctaacctctttgagcgcctgttttcttgtatataaataaggatgtaacagtaaccagtaggattattattaggtgt

SEQ ID NO: 192501 - DNA, 122 bp, Homo sapiens
ctaaccctcaccccccgaaacccatctaaagtaaccctccaagacacttcatattttctacgtagcatccattcctatctgtcattatctccctcccttacctctgtcaatggtcaccccgt

SEQ ID NO: 192502 - DNA, 122 bp, Homo sapiens
gccctgctgtgccacagtccagggcacggctgggcgcaggttctctcctgcaagagtccgcggctctgcagagcaagagttctccagtgccttagtccagggtgaggcaggggtgaggctcc

SEQ ID NO: 192503 - DNA, 122 bp, Homo sapiens
ccacgttgctccactcccggaagaggatggctgaggccagcaggaccagcgtggtaaacacgacgtagtagatggccccgaacaccgaggagtcgaagcactccagcgccttgttgatgtac

SEQ ID NO: 192504 - DNA, 122 bp, Homo sapiens
gtgtcttcctaggaacagtccagttagaatgccactgtaagctccactcttgcctcttctcgtcaacccctccgtatagtagctgcagtgatctttctaaaatttaactcagattatgatat

SEQ ID NO: 192505 - DNA, 122 bp, Homo sapiens
gtgcactgaaggtgttagcgcgtggcaccggagacaccaggctggatgaggctggacaagcgcctccgccagaagcagcacaggcctgacacaggcaaacctcccggagaccaccccacgga

SEQ ID NO: 192506 - DNA, 122 bp, Homo sapiens
gtgtcgaagaaacctgactgcgccctgaggagaacagcggagaaggtccaccgagcctggcgaaaggtccgctgagcgggctgtcgtccggagccactccgggctgcggagcacccagtgga

SEQ ID NO: 192507 - DNA, 122 bp, Homo sapiens
gggtggctgctccacctcctcccgcggtcactgctcgtggacaccagcagagggcggccacgcaccacgcacagctgggctgtccacgccggagcccccctccaggtgcgagtcaaggggag

SEQ ID NO: 192508 - DNA, 122 bp, Homo sapiens
aaatatttatcaagttaatttatggacttatggattttttccattccaggacttcatttgcggggagccttcagaaaaaacaggtcacttgcagtaatatagaaggactaaactgtgattct

SEQ ID NO: 192509 - DNA, 122 bp, Homo sapiens
ctcagtcatgttcagcgcacacacgtggctgtgcaaccatcacgccgtgctgcccccgcacgctttctgcttgcacggctaaagctctgtgcccagtatgcgccaacacctcgtccccacct

SEQ ID NO: 192510 - DNA, 122 bp, Homo sapiens
agaactgggagcacttaggccgagaagcagtcgtgttaggagcagaagctgcctggctcccggccatctcagccgctcttggcgctgtcctgcatggggtcagagtcctttaacctccctcg

SEQ ID NO: 192511 - DNA, 122 bp, Homo sapiens
atgaaaaacttcaaacacatggcaaagttgagataattttacagtgaacatctgaatacccgtgactgagattctactatttttactatacctgatttatcacatatccatctattcaatcc

SEQ ID NO: 192512 - DNA, 122 bp, Homo sapiens
ttatggctttcaatttagaagattatgcttctggttagttatgtatcatatgtgcgcgcgcgctctcgctgggtggctcatctcatcagtgcgggagcattttgccagggttataaaaaatg

SEQ ID NO: 192513 - DNA, 122 bp, Homo sapiens
cagatggggtggctgccaggcggagaggctcctcacttatcagacggggcggctgtcgggcggaggggctcctcacttctcagacggggcggttgccaggcagagggtctcctcacttctca

SEQ ID NO: 192514 - DNA, 122 bp, Homo sapiens
gcgattttagttttatgctcaccatctgattggcctaggtaaggtgcagagctcgggtgacgtaatagcagagaagggctagggagcggttgccgagcaggggctctaccgcgggcgggcag

SEQ ID NO: 192515 - DNA, 122 bp, Homo sapiens
acatttctcatcttgctctttggcactgaacacagggctgagctcctgctgatttcagggcgctgcattgtgtttggatcagctttgtgaagtattacaccagatgagaaatgggcccaagt

SEQ ID NO: 192516 - DNA, 122 bp, Homo sapiens
gagaaatcatttgagcacctgagaccagttgtgcccaaaggcagacaaccctgggacttccgagttgagcgagccagtaaattcagtttagctgaaagcagttttaggttagttttttgtca

SEQ ID NO: 192517 - DNA, 122 bp, Homo sapiens
cttttctccttccatcattgctccgaaacatatgcatcaccgctgcaggaccctgggggccggacggtgggatacggccaatctccggggagatgctgtggctcttaccgagcgggagaagg

SEQ ID NO: 192518 - DNA, 122 bp, Homo sapiens
gagcttcttccacctcctctaactgcttaaaacatcagcattgccgagcgcggtgactcacgcctgtaatcccagcactttaggaggccgaggcgggaggatcacgaggtcaggagatcgag

SEQ ID NO: 192519 - DNA, 122 bp, Homo sapiens
aggcgtcacgtccgccctgatccgcggcagctatggaacgggcggagccgcagcggagggcgctccgctttgacgtcacttcctgtgagcccggcggtgacaacggcaacatggccctgaac

SEQ ID NO: 192520 - DNA, 122 bp, Homo sapiens
gtcagtggcccttatatgtcacctgggagactcacctggggggtgaggcgagggaaagcgcggattattgagtttgatgcccagaatcagatcaacccatagtctcacagatacataaacag

SEQ ID NO: 192521 - DNA, 122 bp, Homo sapiens
gcccttgcagtcccagagcgttttgcgctgtgtgttggttgcagggatgaaaagcgctcgcgacgttgttcccgaagtgcacctgccggcttccagtccaagtgatgcaggcgatgctcctc

SEQ ID NO: 192522 - DNA, 122 bp, Homo sapiens
tgccccaccttctcgtggctgcccacctcggccaacttgcgggcccggtccttggggccccggaatggtgacatggaacgctttaccgcatagagccggccgtcctccttggagcgcacctg

SEQ ID NO: 192523 - DNA, 122 bp, Homo sapiens
ttgcctttatgatactggatacacactggtgttaacaaggagaacgatgtacgtggcagacgttcggagagtactggacatgttggttctaatttgggtttatcctggcaggctctaggtag

SEQ ID NO: 192524 - DNA, 122 bp, Homo sapiens
ccagtccatcagccagaacatcatgaaacatgtgttaaatccccatagtgtgccaaggtacgtgcccgaagctgcatgggttggggccctgtgtgggctgggatcagaggaggcgggaagca

SEQ ID NO: 192525 - DNA, 122 bp, Homo sapiens
agggagaggagaggtggtcctcgagtgggagtcagttcaggatgcgggctgtgccacgcgcggaggtccggggaccccaccgccgcctcctcgaggcccgccccgccccttacgacccgtcc

SEQ ID NO: 192526 - DNA, 122 bp, Homo sapiens
cctcaattagaggctgttaacgcctgctgtgagctgacaaggccactgagaaagccccagcgcctggagctggtctgacagttcccacaagccaaactggtgaagcttacctcaagtgggag

SEQ ID NO: 192527 - DNA, 122 bp, Homo sapiens
ccaggggaagggcgtggtctcctgcgaaggggcggagctccgcctacgaaggctgagcatcgccgcaagaggcggagtctggagcgaggcggagctctcctaggggcggggaaaatggggcg

SEQ ID NO: 192528 - DNA, 122 bp, Homo sapiens
gtctcgggtggccggtcaccagagacgcccgtccccgagggcttccggggccaggcaccgcggtgttctttgcccccagcgtttctgagagcaaactcccaaggaagtaaatcccctctctc

SEQ ID NO: 192529 - DNA, 122 bp, Homo sapiens
ccaggaccctttagacctccaaggctacagaactcagtcggatccgcaataacgacaggccggggactgcgaaacgtgagcctgccgcggggactggggattgggggcgtccctcccctcct

SEQ ID NO: 192530 - DNA, 122 bp, Homo sapiens
cgacgagcagcatgagcgtgagcttcaccatgtggctgacctgcaccagcatgatggtggcgatgagggacagcacggccacatagttgtaatacttggggttctccaggcagctgccctcc

SEQ ID NO: 192531 - DNA, 122 bp, Homo sapiens
aattagctctcacacttgattgccatcattaaaacgagttgttcgggtgctgctcaaagccgattcttactagttattaacttgaaatctctttccattgaaatgtaaaaaaaaaaaaaaaa

SEQ ID NO: 192532 - DNA, 122 bp, Homo sapiens
cgctgtcctgcgcctcagccatcctatgagacgggaaaggtttctgtctgcagctgggcccgtgctctttaccagctcctggctttcttctctggaaggttcctgcctgttttgccctcaca

SEQ ID NO: 192533 - DNA, 122 bp, Homo sapiens
tcgcgtttcctgcccccaccccgcccctctgcgctatttaaggcgcccccgccgctcgtgcggtccagcagggctcccgcgggcgtcactccggccatcgtccccacctccacctgggccgc

SEQ ID NO: 192534 - DNA, 122 bp, Homo sapiens
ctgttaaccgcacacctgcgtgcagcacgggcacactcgtatacaacgggcacacatgcacgtcagccgcacactcatgcacgttcatgtgctgtctctagtgttttctgagaaacgggatt

SEQ ID NO: 192535 - DNA, 122 bp, Homo sapiens
cgtgatccgtccgcctcggcctcccaaagtactgggattacaggagtgatccaccgcgcccggctgtagggtttcttattcaggtattaccaacacctagggagttgcctggcatacagtag

SEQ ID NO: 192536 - DNA, 122 bp, Homo sapiens
aataatataattgtaatatgctcttatcaggatataagaattattttctcttggcacccacgggtcaccaaagggactagagtggcatgtctcaaaagatactgcatcaaggtccaggagac

SEQ ID NO: 192537 - DNA, 122 bp, Homo sapiens
agacagggttagcgggggcagtcgaaggagacaacggaaaggcagaaaacagaaaaataacgcaagagagagaaaaagtaaaggaaactggcaacaacgtttcaaatttgccattaaaaaat

SEQ ID NO: 192538 - DNA, 122 bp, Homo sapiens
cagtagcttataccacccacgtggagtagcatacactactttgtaatatcgtggttgtgtcgtgagaactttaagattttgcagttccttgtaggcaggagtcctgtttgctgctactttac

SEQ ID NO: 192539 - DNA, 122 bp, Homo sapiens
atccagcatggccaagccaggacaagggtcagagctgcaaatagctgggtgtgtggagggcgccaggaatgcaaataaacaacctcaggctgggcacccgccatgcagcactcccatgcagg

SEQ ID NO: 192540 - DNA, 122 bp, Homo sapiens
gaactggcctgttgcatatgaagagtccagagattttgaacaagggaaccccttcagcttcgaatgaccattaccgttgatgatcccagaagttccctttccaagcagtgacccatggactt

SEQ ID NO: 192541 - DNA, 122 bp, Homo sapiens
cgctggcacaatgacacaccagggaaaaataattttgcatatagttacttatatgtaattcgcatataccatctgtatcttcgcagccaggcctgagtggcactgaaggaactgagggaagg

SEQ ID NO: 192542 - DNA, 122 bp, Homo sapiens
gcatgcctaacgtcacgcgaagtcttctaacccatacgcgctgatgaatcctggcaactccgttagggagacacgacttatcaaacccttttcatggcccagctgaaatgacacactgacgt

SEQ ID NO: 192543 - DNA, 122 bp, Homo sapiens
cctctgctgatggggccgggtgctgggggcggggcctctggattgggcggttgctgggggcggggcctctgcggatggggctgggggcggggcctctgctgatggggccggcggctgggggc

SEQ ID NO: 192544 - DNA, 122 bp, Homo sapiens
gcaaaggccaatgaagcgctggaactggagagtctctcgcgtgtctgggagggtgttttgcgcggggcggggtggagcagagccggaagcgggaggggagcgtcaaacaggaaaagaaggga

SEQ ID NO: 192545 - DNA, 122 bp, Homo sapiens
gttctcggaaccacagccctgaggtgggccctgggtggggtctccacgctgcctggcagacgtggcggtcattcacatgggatggcgtggtcagccctgcacaatcccagggaagagtcagg

SEQ ID NO: 192546 - DNA, 122 bp, Homo sapiens
ctcccaacaggaacacgccccaaccccaattgtgcttctccagatatctgcggctgaaggcgcctgaagagcagcaccacacatgagccctcaccggcaccagggatcccgtctagcctcat

SEQ ID NO: 192547 - DNA, 122 bp, Homo sapiens
gcgacagaccaagagtccgtctcaaaaaagaaagaaagaaagaaatataagctacctatacgtggggctgcctattaactccgccaagtgacttaactcctgcctctttatctgtaaaatgg

SEQ ID NO: 192548 - DNA, 122 bp, Homo sapiens
cctgcccgccatgttggggagccctccctgccccccgcgccgggctgggcggccggggctcgctggcagccgggggagggcctttcataacccggagaattttctaagtgcgaggaagatga

SEQ ID NO: 192549 - DNA, 122 bp, Homo sapiens
tctggggcccttgtcagagaccgcggggtcagtgggattggcgcccaggccctgctgtgacgccacgtgtttcccactcagcgaggctgttcctgccaggcgtggggactcggaccctggtc

SEQ ID NO: 192550 - DNA, 122 bp, Homo sapiens
tagccaaatctgccaactcagctttcatggggtgggggtggggtcactgtgaggtggctacggggagctggcagcaagctggatacatatcttttattgtaagaagtaagcaatacctgatg

SEQ ID NO: 192551 - DNA, 122 bp, Homo sapiens
taaatgctgatttctttacctcagtaagtgtcacatgttttagttggctaatgtgtgcaccgactcccgtgatcgggttattaattaaaatctaatgttttccaaactcatttgaccatgaa

SEQ ID NO: 192552 - DNA, 122 bp, Homo sapiens
cccgcgtggctgaggtgtgaccgaagcgtggggcagaggcgctgggccctggcgctttaacgctggtgtttctggttttaaatttcacgacccagtgacactgccaccctgctacctcgcca

SEQ ID NO: 192553 - DNA, 122 bp, Homo sapiens
cggtccccgcctcttcatcagccaagctggggagatgcggcccttactgggacttggcaccgccctggtgggtgggttctatcagtttagaaccttggcctctgcctggcgcactgtggtca

SEQ ID NO: 192554 - DNA, 122 bp, Homo sapiens
aaatcccccccggactggaggtccgggcccccaatcgcgctgccctccagaggacggcggcgatggaccctctgcagctccctccgggcaaaggtccaggcggtggccgtggcggcggcaag

SEQ ID NO: 192555 - DNA, 122 bp, Homo sapiens
cttttctcttttcaggagcatttgcaattatacggtcattgctttctttttggagcctcccgtgcagttttaatctactttcagaactggagagcacatcacattttggtcaatagcctaga

SEQ ID NO: 192556 - DNA, 122 bp, Homo sapiens
tactgccatagggattttgtaactgagtcacaccgggccgaggcgggacctcattggctgcgaccgaccacgtgccgcagtcgccccggcggtcggggccccgcccctcggctaccgttctg

SEQ ID NO: 192557 - DNA, 122 bp, Homo sapiens
gcccagttcttcaggccaggatcgagaatgcgcatgctcaactccggattgtactggtcccgccccagttcaaggcccggattgtgcaggcccgccccggatgcgcaaactcagctctccca

SEQ ID NO: 192558 - DNA, 122 bp, Homo sapiens
agagttcacggtgtctgactccttttataaaaagaaggctcccaggaatcagaagccagacgggacagcgcagtaacgcccaatggcccggattacgcagccctcgttttcctctagctgag

SEQ ID NO: 192559 - DNA, 122 bp, Homo sapiens
tgaggcggcggcgtcactgccaggaaacaaccccaacagtcagcgcgccggcggccgcggcggccctgagagctgactctgcagctgaggtagagagacaacgatcaggaaccctaagaaga

SEQ ID NO: 192560 - DNA, 122 bp, Homo sapiens
cacctcagcctcctgagcagctaggactacaggcacacaccaccaagcccagttaattttcgtatttttgttgttgttgttgcctagggtgatctctaggctcaggttatctgcccacctca

SEQ ID NO: 192561 - DNA, 122 bp, Homo sapiens
tcccccggtttataaggttgcgactgcgccggatgagtgaattgaattgcctggtggatccgggagcgggaaggcaccgcgaacggcagggaatcctggcctgcaccttagtgatctgaggc

SEQ ID NO: 192562 - DNA, 122 bp, Homo sapiens
ggctgtgtggactgccccccacgtcgccgcagcgcctctgcttctgctcgcagccaccgccgctcggaagcttgttcggtttgctccaccagccacttgacaatgacctggatatccaaccc

SEQ ID NO: 192563 - DNA, 122 bp, Homo sapiens
cccaggcgctggcgttactgctagaccaaggagccctctggtggccctgtccgggcgtaacggaaggctcgcactcttgtcttccggtcgcttctcactatgtcccttcagctcctatctcg

SEQ ID NO: 192564 - DNA, 122 bp, Homo sapiens
aaaaaaaaaaaaaaaccaccacaacaaccaaccaaccaaacaaacaaaaatttagcagggcgtggtggggtggacgcttataatcccagctatcaggaggctgaggcaggagaatcacttga

SEQ ID NO: 192565 - DNA, 122 bp, Homo sapiens
cgattggagcttattaatatgaagtagggctttacatatgcagtcccaccggcccagccgcgcagccgattggggggcctctgcccaatcaggagggaggcgacgggaggctgcacggagcg

SEQ ID NO: 192566 - DNA, 122 bp, Homo sapiens
gcgcccacctccctgcacctaccctattcgatctacaggggagcggagtcgcttcgtggccgccagcccgggaaggggcgccagccagctggcggacgcacggcttagaggggcgtctgggc

SEQ ID NO: 192567 - DNA, 122 bp, Homo sapiens
gagataagacaagtctttccttgcaaggatacctctatgctcatacaacacctcccctaacgttactatagcttccaggtcactaaccagtgtcagagagcagcctatgcaactacaaattc

SEQ ID NO: 192568 - DNA, 122 bp, Homo sapiens
ctcccacgtgcgttgcctgctctaggaacatctgtggttgccgcccgctgttgatgtctgcgcgctcctccctctaggggtcatcactctggaccctcagaccgccagccggagcctggttc

SEQ ID NO: 192569 - DNA, 122 bp, Homo sapiens
gcgacattctgtaaatgagataatgatccataaacccggatgatagatgtggcgtgcctgcgatgtcttctctaaatgagctgctcgcatcgactgctaataatggtgagtttatggaagcg

SEQ ID NO: 192570 - DNA, 122 bp, Homo sapiens
agtaagagctccttgtggtcgacccttctgacttccatcccgtttccctgtgctggaagacgcacgccaggtggggtcgcaggttgtttctggtgccggcttaaccggcgcagcaccgaaac

SEQ ID NO: 192571 - DNA, 122 bp, Homo sapiens
gggtgcgagctccgattccggactctgcttgggtttaaaacccagattgagggctgggcgcggtggctcacgccgggaatcccagcactttgggaggccaaggcgggtggatcacgaagtca

SEQ ID NO: 192572 - DNA, 122 bp, Homo sapiens
caaaaaaaaaagccctgccctgttgctcgtgggtgctgtgtttactctcccgtgtgccttcgcgtccgggttgggagcttgctgtgtctaacctccaactgctgtgctgtctgctagggtca

SEQ ID NO: 192573 - DNA, 122 bp, Homo sapiens
gtctctactaaaaatacaaaaaattagccgggcttggtggcgcctgtagtcccatctactcgggaggccgagacagagaactgcttgaacccgggaggcagaggttgcagtgagccgagatc

SEQ ID NO: 192574 - DNA, 122 bp, Homo sapiens
acttagcacgtttccaaggttcatcgtagcatatgcagtgcttcattccttttactgccccgtaatattccattatatggatataccaccttttttttttttttctagagacggagtctccc

SEQ ID NO: 192575 - DNA, 122 bp, Homo sapiens
ccagcagccgccctttgatctgcggccacagcgagtgcggcacgtagagacgcgagcacgcggaacacttctggccaccgtactcgaaggctgagcggagggtcccgctcaccacgctctcc

SEQ ID NO: 192576 - DNA, 122 bp, Homo sapiens
atcagcaattgcctctccgcaagcccgcctgcttgcgtcaccgacggacagcaccggttccgaatgggagagccgataacgcttaacccccagctcactctcaccaatcgctataaagattg

SEQ ID NO: 192577 - DNA, 122 bp, Homo sapiens
tttttctttcttgggccacagacataagaactgggccctcaggtttggaagagcaccaaccgcacggcaggtgatcagaacatgtgtcctgacccctgcccacaggcatggtggtccaggcc

SEQ ID NO: 192578 - DNA, 122 bp, Homo sapiens
tataaaaatgtcaaagtctgctacagtttcatcctgacaattgctgggaaggaaaagtagcgggtattctgaaaagatacagcaagaggtccaatttagattagagaacaggaagggattgg

SEQ ID NO: 192579 - DNA, 122 bp, Homo sapiens
ttggaccatgaggccaccttccaggtgacttttctccagtttcccatggcctgatcctggcgagtccccttcactcccatgactctcgcttcctcccaggcaccactggatgtataacgcga

SEQ ID NO: 192580 - DNA, 122 bp, Homo sapiens
gtgagccggggaaggccccaaagcccagggctgagagaggccaggacccaaatgttggcccgggttcaaaactctgagcagcactagactacctcctggaggtagttcatctcattgggcag

SEQ ID NO: 192581 - DNA, 122 bp, Homo sapiens
ctcgggaactcgagatctgcccctccctgcagcagctgaaggagctgccgctgaagaccacggcggagcaggacagcatcctgagcctgtctgcccgctgcctgctgctcacctggcgcgac

SEQ ID NO: 192582 - DNA, 122 bp, Homo sapiens
gccctgacatagtccagaaagggttaaacccgggcaagcaccagctccacgcagttaatccgggattctcggcactgatctctgtgcctgtcatttgcatttctcttctttgtgcaggcttt

SEQ ID NO: 192583 - DNA, 122 bp, Homo sapiens
ggtttaactctattagctttgaggctgagataaactggagtccacaggagccatccacagcgctggggagaatgagtacagatgaagctcagggtatttggggtgttagctgctaccaaact

SEQ ID NO: 192584 - DNA, 122 bp, Homo sapiens
agggccaccgccatcccgggcccagcccagcccgctccggccgttcgcccaggcgcggcccggctcagcgcctctgctggctccgcccccaggcacgctggccctttaagactccagtgcgg

SEQ ID NO: 192585 - DNA, 122 bp, Homo sapiens
acgaggagcacacctacctgagcgtgtgcacccctgccccggacccccactcaaggcattcggggtctgcacgaggagcatacctacctgaccgcatgcacccctgccccggacccccactc

SEQ ID NO: 192586 - DNA, 122 bp, Homo sapiens
gtgcagctctcactgacgaattggaagagtttgcagaggaggtcgccgaagttccagggccggtactgccagaggcgaacgaggtccaggggcatgcagaggaagatgagcagatcggagaa

SEQ ID NO: 192587 - DNA, 122 bp, Homo sapiens
gggcacgcactgcccattggttggaaggcccttcgctctagctgggaggctgacggcccgcgggcgtaagcggactgcagccgcgagctcctggaggcggcgggatggaggcggcggccggt

SEQ ID NO: 192588 - DNA, 122 bp, Homo sapiens
aaatggatatagggctttagaaccgctagcgggaaatcctgtgaggggacccaatcttgacgttgagtggtccaaacgacatattcccaagtatgacaaaacggaaagctaaacaaggtaga

SEQ ID NO: 192589 - DNA, 122 bp, Homo sapiens
gtgagccttgcctcctgggccagagcccctgtgtctggccctagtctctgcgattctgagcgcagaggctccgccagctgcccaggcctcccgcagccgtggcagcatgcagtgggggcagg

SEQ ID NO: 192590 - DNA, 122 bp, Homo sapiens
ctgggagggagcagcccggagccgaccacgccaccacgagccaccgtgtccagccaggcccgacgacctgcccggcctcgccaaaggtgggactgcccaggaaaccgcccttccgtggggcc

SEQ ID NO: 192591 - DNA, 122 bp, Homo sapiens
tctttcttgttctcagagacgctagctggcatgtcacgaggacactcaacacacaagcagcgagccctatggcaaaatccacgtggtgaagaatgaagcttccagccaaaggctggtaagtg

SEQ ID NO: 192592 - DNA, 122 bp, Homo sapiens
acttgtggaacttctgcccgcagaatgcctggtcgagctctttagggccttagcatgcctcgccttgatgggtagcaaaggcacgtgtcggaagcaggtggcctttctgggagtgcgcaggc

SEQ ID NO: 192593 - DNA, 122 bp, Homo sapiens
ggcagcccgcgaggctgcggggacagagctgggcggggcgcggcggcggggctgggaccccgggatccagcgaggagcacctggagagttaccacacgaccccgacctcgccagcccaggcg

SEQ ID NO: 192594 - DNA, 122 bp, Homo sapiens
ttcagagggagatggctctggaccccactttagagtctggctgatttgctctcccaggtgcgcctggcacagctctcaggttctgcaggagccgctgggcttggacgaagggccctcccgca

SEQ ID NO: 192595 - DNA, 122 bp, Homo sapiens
gggtctctctcagctcctgcacacaagagctgcttgttaccagctctgggatttcccctgcgtattcctcctgattagcttgttcttgcttctgccttatcacctggccaatatttacggat

SEQ ID NO: 192596 - DNA, 122 bp, Homo sapiens
aaaccgcaggcataacagaaaaacctcaacttaaatagtgctgagctgcaacttgttttccgcggcttgtagtcgaggaggagcccacgaggctttagctgctgcaagatccaagcgcgctc

SEQ ID NO: 192597 - DNA, 122 bp, Homo sapiens
gccgccccctggcctgaggttccaagcagggcctcagactgatgtggggacagatgagaccggtggggccagaagggctagctctgagcctgccgggggctgaccaggagccctgtccccac

SEQ ID NO: 192598 - DNA, 122 bp, Homo sapiens
actcgggctgggctggagcggcccctggtggcagttcggtgaagagcaacgtagcccgcgcggggcgcacgcatttcaggaagacacagaggcctttttactggaaatgccagcgggtgtgg

SEQ ID NO: 192599 - DNA, 122 bp, Homo sapiens
ctcctggccaaggcatggcagtgactaagtggtcattcattgctgaatgtgtggatagatcgtggaatcccttcacctgttccctcccccactgctgtgctttttctttcccttgctttctt

SEQ ID NO: 192600 - DNA, 122 bp, Homo sapiens
aaacacagactcagcagggcagacatgaggggcttgggtgccaagctccatccagggctccgctcagcctgcagggaagtggctgctcctcagacgtctgcgtcagcctttccaggggcggc

SEQ ID NO: 192601 - DNA, 122 bp, Homo sapiens
gagaccgcgctgtcctgcagggggcgcgctgcagtcgggctgcagcgtctgcgccgccaccgcctgtgccacgtgacgctctaggcctcagtggccccctctgtaaaatgggaatcataaca

SEQ ID NO: 192602 - DNA, 122 bp, Homo sapiens
cattccttggggagagcaggaccctgtcatgcacccaatgaaacaccaggtggggagccacgcctcgaagccagccaggaacgtggctgtgttggcaggtgtgtccccacggcagccacgct

SEQ ID NO: 192603 - DNA, 122 bp, Homo sapiens
gatgtaagttgagggtttctagtaaagttttgcttcctcagtataggcaccccttttcctcgttttctttctgtctagaatgctgatgagaggttggaggtggagtaactatcatatgacca

SEQ ID NO: 192604 - DNA, 122 bp, Homo sapiens
cctattatacaaggagagatccagtcagtgaaatgattccataaactgagcagggaccagcgcagtggttctgcacttttctggcatcaagtgatccctttgggaatttgatgaaagcatgg

SEQ ID NO: 192605 - DNA, 122 bp, Homo sapiens
taataggctcagtgggcttgcatactaatgcttcaggtagcttgcagcacatgcagcctccgtagaaaaatcagcttcctttgtttatctgatggaagccttggaatctctcctgttaggta

SEQ ID NO: 192606 - DNA, 122 bp, Homo sapiens
accaagcctctcattttacagatgaggacactgaggcccattgacctggtgtcccttgctcggagcagcatgcaagcagtgatcagacaatgctggggctcagaagtcatccccctcagtct

SEQ ID NO: 192607 - DNA, 122 bp, Homo sapiens
cccagccatctgaccttcaggtttttgacgggcacagctggatctgagaagaaactctggcggaaagtaatctcaattccagcctccttcactcgttcctccaggtcgtccagagtcttggg

SEQ ID NO: 192608 - DNA, 122 bp, Homo sapiens
agaggggtgcttgccccaaggctggcctctcgagtggagggcccagggcagagacctgcacggctcaggtaggggccaggcctcttccagaaaggctccaccctcgcccaggccctggtgcc

SEQ ID NO: 192609 - DNA, 122 bp, Homo sapiens
ttatatttatacgcctctcccagataacgttgaggagccatggagaatgatgtggataaacgcacatctgaaaactatacaaaatttggtaagtttggaattttatgaattcagatgtgcat

SEQ ID NO: 192610 - DNA, 122 bp, Homo sapiens
ctatttctccttgtttccaccctcctgtgtctggtaaagcgaccaagaactgcctctccacgtccccacccccatgccccttggccagctaccactcacgcatctcctatgaaaaggttggg

SEQ ID NO: 192611 - DNA, 122 bp, Homo sapiens
taggcatcctttggtagtccggacggccttgcccctccttcccctggcagggtcgcggcccgacccccagacacggccaccttgggtcgcagcccacctgggggccctgaggcggtggtcag

SEQ ID NO: 192612 - DNA, 122 bp, Homo sapiens
tcctccacacctgccacactgctctcactcatcaggaaacttctcatcagaaaaacagctcgtgggccaggcacagtggctcccgcccgtaatcccagcactttgggaggccaaggcgggca

SEQ ID NO: 192613 - DNA, 122 bp, Homo sapiens
aaaaataaaaataaaagatattagccgggggtggtggcgcgcgcccgtagtcccagctaccggggaagatgaggtgggagggtcgcttcaaccagggaggtcgacgctgtagtgagccgtga

SEQ ID NO: 192614 - DNA, 122 bp, Homo sapiens
gtggtcgcgcgcggtgacgccatcgcagcgcgccgggagtgtggcgttctgtgaagagttcggtgctaacctccctcacgcggcggtggctgccgggaccctagcaggtttcagctggagcg

SEQ ID NO: 192615 - DNA, 122 bp, Homo sapiens
tctagaaaaaatcttactgaggcagtttgcaaaagttttatgttgctaaatattcattaacgcaatgtaggtaattaaattttaacttttattttgagtttagggatacaagtataggtttg

SEQ ID NO: 192616 - DNA, 122 bp, Homo sapiens
ccggactgagcctaattgatccagacttcctcggaaaatgcccgaggaacaggactcctccggccgtatttgcgcgagcgcgagcgcacatacatcgtgccttggatgcctcccgccagccc

SEQ ID NO: 192617 - DNA, 122 bp, Homo sapiens
acaagtcaagccccgactcaaattctgtacaggaagttcccgctgctgtcaaataactctcgcccctctgcactactttgttgctggttatctggctcccctgcctttaactcctccagctt

SEQ ID NO: 192618 - DNA, 122 bp, Homo sapiens
ctgttgcatagattgtatagggactggggtagttacagatggtgagggtgaatagttaggcggggaccaaattgtgaacttggtggtgaatttggacttggacatataaggagtactcatgg

SEQ ID NO: 192619 - DNA, 122 bp, Homo sapiens
ataataataatcttttcactgatggttatctatattttctaaaatgaacattatcattatcgtacactcatacacaccttttttttaagtgcctcatattttaacgcagagacttcaggccc

SEQ ID NO: 192620 - DNA, 122 bp, Homo sapiens
ctaggggacatagaaatagaacatgccatcttcttgtgacccaaaaagtaacgtcaggaacgaggctaaatcactgttggaagtagttcctgcctcgtgcacagagggcaatagatcaggcc

SEQ ID NO: 192621 - DNA, 122 bp, Homo sapiens
tcgcctccttatgatgctgctgctgaaggctctgccggaccttgtcctggggaccggagacggggaggacacaggcacagagtgagaagtggcaggctgacaagggcagaggcacaagcagg

SEQ ID NO: 192622 - DNA, 122 bp, Homo sapiens
caaagcttgagagggggcaactttgctacatttcacagacgaggaagctgaggcccagaacgatgaaggaatttacagagctgggattcgaaccccgcgctaccgtcagtccatcccgggct

SEQ ID NO: 192623 - DNA, 122 bp, Homo sapiens
tcgccgttaagagctaaaacgaacgccaaggctctaagtggccctggggtccaggctcgccggaggcaccagcgtgtgcaggcccggagcgccgtcttctgggcgaggagtgtcattagtaa

SEQ ID NO: 192624 - DNA, 122 bp, Homo sapiens
tccactctctgtctatatgcatttaattaagtctgtagttcactatgttttgggcaaagtcgtggtcacagtgagacctgaggctgatcccacggaggagacgggcaggtgactgtgttaac

SEQ ID NO: 192625 - DNA, 122 bp, Homo sapiens
aggggcttagacatagtgaaactagagatagggaggatggtctggcagtgagaaagggaacggtagatactactccagtctgcagatgcattgtgcagtggagttaggaatttacctggggt

SEQ ID NO: 192626 - DNA, 122 bp, Homo sapiens
aaagtgctgggattataggtgtgagccactgtgcctggctcaatcctgtatttaaatacccgtcctcagcaaggcttgccctcttctctgagtgcttttcatcacacatgtcttcatatcct

SEQ ID NO: 192627 - DNA, 122 bp, Homo sapiens
taggacttcaggtgcttcttggcacaaagctagactgcgacctcctaccatagcgcttggcgtcacctgctctcccggtcctgccccagggccgagggattgcgtcccgaaccgggcttggg

SEQ ID NO: 192628 - DNA, 122 bp, Homo sapiens
caaacgaggtcgcacgcatgaggcttctccgccgccgccgccgcagacgccgcggcgatgcgctacgtcgcctcctacctgctggctgccctcgggggtaactcctcccccagcgccaagga

SEQ ID NO: 192629 - DNA, 122 bp, Homo sapiens
aggggcaggggcaactccggtgaatgatgcggttgggggctggggggcatctgggccccccggaatgcccctgactggacttagaggctgggagcggattgaagccccagggcggccggggg

SEQ ID NO: 192630 - DNA, 122 bp, Homo sapiens
taattggttaatacatatggccaagttgcagtctgaactgtgtcaactcacaatttgatacgttgaacaagatatgttgaagtctcaacctctggtatctatgaatgggccttatttggaaa

SEQ ID NO: 192631 - DNA, 122 bp, Homo sapiens
ggtcggtgggaccctgggcgcctgggccttgtggagagaggtgccagacacagagttctccgtaagcaatcctgcagagccgccccctgggtgcagaaatgaaatacgggagagcttcacat

SEQ ID NO: 192632 - DNA, 122 bp, Homo sapiens
ggttttatcatcatcactatgagacgtttaagagcaaagcagaatatattatccaggtttcggaagagaggcaggaattttagcaaatacttccacgtgaaatttttgtctagcttacttaa

SEQ ID NO: 192633 - DNA, 122 bp, Homo sapiens
tgagaacctgaggcacgaagtcaaactgaaaatgtgaacatatccagaatacaatctcaacggctaccacccttgtctgagccaccatcacctgctatctcccctcctttccattactgcgg

SEQ ID NO: 192634 - DNA, 122 bp, Homo sapiens
gagagtccctcttcagggcccctcagtattcaggctccctcttggtctggggagttcccccgggttccccatcttggacccccatcttggggttgtctcaattcaggagccaattttcagag

SEQ ID NO: 192635 - DNA, 122 bp, Homo sapiens
tacctacaggcattatgcaaatgcatccactacatgtcagcaacctgtggtaagatgaatcggaggtgggagtgtatgtgtatgggaggtggtggtgggtgctcagttgccctccagagctg

SEQ ID NO: 192636 - DNA, 122 bp, Homo sapiens
gagaaggctgctggttaagcctgcggatatgatgggtcacagactccccgtccgaggtgtcggtctgttcctctcgccgctcccggctcccgctgcggctgttggaactggagcgcagccca

SEQ ID NO: 192637 - DNA, 122 bp, Homo sapiens
gatgcgctctttcttctgtcgtttcaattggcatctggtgaactatgcctaacagcttaacgcccaactgaaaaaaactgtaaactaggatggtaaggaagagatggggtttgagcagtgac

SEQ ID NO: 192638 - DNA, 122 bp, Homo sapiens
atgaggtttaaaacaaaaaccaccaccacgcaaggcacatgtacagaaggcgcttctccacgatgaacagacgagaccctcatgactcacccgcagtctcaatcctgcccaagcagagatcc

SEQ ID NO: 192639 - DNA, 122 bp, Homo sapiens
cctccccgcagcccggctactcaccagcgaaaagaggttggagtgacaatcctccaggctcgccccgttcgccacccagttcgctgccgcagtcatgatcctccgcgagcccggccgccaga

SEQ ID NO: 192640 - DNA, 122 bp, Homo sapiens
cccccatggctgccttcgattggctaaacctgctgggccgcggcggggatgcggcgcagccgcattctgattggctagacttaggcctggaccctagtgattggctgataggaggagccagc

SEQ ID NO: 192641 - DNA, 122 bp, Homo sapiens
caagaggctggggagccgatgactcaccctgccggctaattgcagcgttaaataactttgcgccggattcggtggctgcagcagggaacgcgctccgggcgccgggggaggtggagggacgc

SEQ ID NO: 192642 - DNA, 122 bp, Homo sapiens
ccttcgctgattggacacagggcgcgcgcgtctgccaacgccggttcccattgggcagtacgctgtgacgtttcacgagcctccccgcctcgctcctcgaattgttgttgcttggcggggag

SEQ ID NO: 192643 - DNA, 122 bp, Homo sapiens
cctcctgtccagctctgcaccagcgacgctgccctgcatgcactatgtcagggattctagcgacagctggcttctgctgggttcagccaatgggaggtgctgccaggagaccagaacatagg

SEQ ID NO: 192644 - DNA, 122 bp, Homo sapiens
ctgtgcccccacgccgggtccatcaaccaccaaggggctcccctaatgcactccgaaccccgcccctgcaggcggtgggacctgaggcagcctcccaagcctctctgtgcaccggctcactc

SEQ ID NO: 192645 - DNA, 122 bp, Homo sapiens
tagccatgcagtgtggctgcagagtacaggattttaatcacccgttgcatcctctggcgtcgggcagggctggacttcaggctgggttttccccgttcccagctgcacccacgtcgtgtctc

SEQ ID NO: 192646 - DNA, 122 bp, Homo sapiens
aaagctaagcgagagctctgggacgtcccttcacctgtcagagggtggccttggggcttccgcctaaggggagtccctggtccggtttcgccagcttttgggccatttggggagtttggcga

SEQ ID NO: 192647 - DNA, 122 bp, Homo sapiens
acttgttggacggcagtggcgagcccgcgtcgccacccgcggacgcgatgccgcgcgggacgccccccagaaagactgtctaccgcatctccgtgaccatggtcaggaaggagcagctggcc

SEQ ID NO: 192648 - DNA, 122 bp, Homo sapiens
acggcgctgggtgccggcgtccttcccaacggaagcgggcagcccggccagctaggggcccgtgagaggccaaggggcccggccctctgttcctggggcacccccaccaccgacgggcctgg

SEQ ID NO: 192649 - DNA, 122 bp, Homo sapiens
tgccatcgccacccgcactgccatccccacccgcactgccatccccacccacactgccatcgccacccgcactgccatcgccacccgcactgccatcgccacccgcactgccatcgccactc

SEQ ID NO: 192650 - DNA, 122 bp, Homo sapiens
gcctgcgcggccgactgtaacaggatgctggggctccaggcgctcgccccgagctttgggcgacgagaaagagccaatgaggagcgagggcaaaatcgggtgcagtaaacccgaaaaggggg

SEQ ID NO: 192651 - DNA, 122 bp, Homo sapiens
ccgctggccgggggagcgtctcctggaagtcccgtcccccaccgacctgcatggtttctgcgctcgggacttgcaggctgagggccaagcaccgcgagaccaccctctgtcccccattatct

SEQ ID NO: 192652 - DNA, 122 bp, Homo sapiens
tggtgtttgggtcatggaggtcgatctctcgtgaatagatcagtgttgtccccttggaggcgagtgagttttcattctattatttcccaagagtgctggttgttcaaaagagcctggcacct

SEQ ID NO: 192653 - DNA, 122 bp, Homo sapiens
tatgaggtggagggcccattagtctcattttaagggtgaggaaaaggaggctgaaggagtcgacatcttctccaagatcctacagccaggaagagatggagtcaaaattcaaccagctccaa

SEQ ID NO: 192654 - DNA, 122 bp, Homo sapiens
gctggaccacagtgctggggctggaccaacctctgcgtccgggctgggacatggttccatcgtccacgccccacctggctatgcactccgagggactcctctgggccgggcctggtcagcac

SEQ ID NO: 192655 - DNA, 122 bp, Homo sapiens
gtttgaatccgcaagtgaggagtgtaatggagcactcagttgttctaaaaggtcatcctgcgtgtgacaggctgcggagctggaggagctagagaagctctccaaaacccaaatccgttcct

SEQ ID NO: 192656 - DNA, 122 bp, Homo sapiens
ctctgcccaaactgcagactgataagcagagtaaatgagtgttgttattttaagccactacgttttatagtaatttgtttagctgcagcagatagccggaacagcatgggatataacatgac

SEQ ID NO: 192657 - DNA, 122 bp, Homo sapiens
aaaaaacaaacaaacaaacaaacaaacaaaaaaaaagagctagccactgacctcctagcccgggcagagctgccaccaggtagggcttactcacctgggccttcgccctgagtccggggtga

SEQ ID NO: 192658 - DNA, 122 bp, Homo sapiens
gacttgggggacgacttgcctttcttctgaaacacggctacagactataactttaaaacacggggcttagctccccctcaataacgacacggccgtcagtatttaccacgttattgaccctc

SEQ ID NO: 192659 - DNA, 122 bp, Homo sapiens
gggcttcaaggagccaggcccagcatccttttggcgcctcttcccgacgtttggttgctacgtccgggcctcggcgcccacacaagatttccccggagagaaatgtgtcctgtaccttgttg

SEQ ID NO: 192660 - DNA, 122 bp, Homo sapiens
ttcaagagattctcctgcctcagcctcctcagtagctgggactacagatgtgtgccaccacgcctggctagtttttgttatttttaataacaagggcaactggaagttgactttgaagtacc

SEQ ID NO: 192661 - DNA, 122 bp, Homo sapiens
gataattatggagctccttctgtgtgctaagcattattttaggtcatgggatttggcagtcgtaaactgacatgttctcatgcagcttttattctggtgggagagacacacaataagcagat

SEQ ID NO: 192662 - DNA, 122 bp, Homo sapiens
agtggtggcgctgggagcacgtgagcactggggcacatggggcacgtctcagcgtccggccgttttgtgattttgaagtttgaattctctgtgggcaaaggcagccatcacaggcctagtgg

SEQ ID NO: 192663 - DNA, 122 bp, Homo sapiens
cgggggtccgatcaatgcggcccaccctagagcttcagctgctgcaggcctattgcttcccggcctgatcaatacacgctcacaatggccagaagaaagccaggggcaggcccggagctcca

SEQ ID NO: 192664 - DNA, 122 bp, Homo sapiens
gtgtgcttgtgcctcgggacacatgtgcctcgtgtgccggagggtgggtttcttgcaggtcggcctttcttctggtcagcctctccccgcgtctctgcctcggtcgtgtggccggttagcag

SEQ ID NO: 192665 - DNA, 122 bp, Homo sapiens
cctgggtgccctgaggtgtttgttcttcccaaaccctaaaggcgttggggcagtctgccgcggggggtagctgccatgtttcagcatcgcgtctctcaactccccttaactcccacggaggg

SEQ ID NO: 192666 - DNA, 122 bp, Homo sapiens
cgtgcccatggcacctctctctgttgccacattctacctcctgaatcaaggggtgcccctcgcccgtggggaggtggggcctgtgaccaacacccttggggccagcgtggggcagacacccc

SEQ ID NO: 192667 - DNA, 122 bp, Homo sapiens
tatgcatttgccaacctactggagctacagcacccagagtggagaccctgacgtgacctccgcactggggtgacagagacgtgccactgcaggctcatccaccgtaatcaatgtcccactct

SEQ ID NO: 192668 - DNA, 122 bp, Homo sapiens
aggcggcccccggggcgggttgagcgaagatgtgatggcggcgcgaattcgagctgggcccggatcctggaggaggcgtggggctgacgaatggggcgcccgggacaaggcagcctaaagtg

SEQ ID NO: 192669 - DNA, 122 bp, Homo sapiens
tgggccaaaacagcaccccctttcccgcgatcccccgcccccccgcgacacacagacacccgggatttgaaactagcttcactgaaagcggcatccatagcgtctattcgagctgccatgag

SEQ ID NO: 192670 - DNA, 122 bp, Homo sapiens
tacgaacccaaccaagttaaagccctcttgagggtcctgccgctgtccccatgacaagtgcgaggcagccctgccccctggtggcagcactcagaactgcatcagcaggtgggctgccctag

SEQ ID NO: 192671 - DNA, 122 bp, Homo sapiens
cttcaagctttggcccaaataaactctctacttatttaccccagctttttccttttaggtcgaaatattcttcagaatgtgttgaaggagcctccatgagaggctctctctggttttactct

SEQ ID NO: 192672 - DNA, 122 bp, Homo sapiens
ctcaggaaaggctccggcaactactccagtggaaaataacaaaaacaaaacgtggcctcgcgggggccgctcctcctcccgccgcagctgcagcccagctcgctgctcctcctcctgccgtt

SEQ ID NO: 192673 - DNA, 122 bp, Homo sapiens
ctgggcccggccagggtccccgctgcgggggagaacagtgcttgtgtgttcctgccaaggcgagtgactcactggggaaaacacacttcaggaaaaggccaggcagacctctgtggaaggaa

SEQ ID NO: 192674 - DNA, 122 bp, Homo sapiens
gaggaggcagggccctcagggggctgtgcgcagggaggctgcggcgtggctgtgtccacccgaacccacactcaggcagccggcgggctctccgagtgaacagagctaggagaggaaagaga

SEQ ID NO: 192675 - DNA, 122 bp, Homo sapiens
agagaaccctggccaagccatttatggtcaggggagtagccaagccctcagtccatccctcgggaaagatgggctgctgctgcatggccgacgtgtatggcctggttcacccaccctctttg

SEQ ID NO: 192676 - DNA, 122 bp, Homo sapiens
ttcatctcactagggagtgccagagagtgggcgcaggccagtgtgtgcgcgcaccctgcgcgagctgaagcagggcgaggcattccctcacctgggaagcgcaaggggtcagggagttccct

SEQ ID NO: 192677 - DNA, 122 bp, Homo sapiens
atcaggtgcatggctgtgcgtacatgtgtgcgtaagagtcggtgcatttgtgtttcagcgcggctaaggccctgactgagatgctgtgtgtgcgggggtgggtgtgactgaatgcgggcacg

SEQ ID NO: 192678 - DNA, 122 bp, Homo sapiens
gtggacacccagatgctaggctctgagaccccttcctatggaagcacaaagtcccccctccgggctgggccgcccaccactgtgctgtccacaccttccggagggaggcaggtacctgtggg

SEQ ID NO: 192679 - DNA, 122 bp, Homo sapiens
agtccttcagacgggacgagcggggtcacatggctgggcgcagacacactcacacgcgcacgcaggagctcgtctggagctcacgctccgcccccaggtggtgcccagcccatccctgggca

SEQ ID NO: 192680 - DNA, 122 bp, Homo sapiens
gatgcacacaggaccccgaggacttggaattgcattctgtcttgacccatcacatttctccgactgccaacttcagactctcccactgcaacctcagacttaaagtaaagggagcttaaaat

SEQ ID NO: 192681 - DNA, 122 bp, Homo sapiens
gaagaagaagcagctgaagccgtggtgctggtatcctttgtcggtttgaagtcgaggtcgcgttggggtgccggttgttggggcctgggactaggaggcctggatttggcttacggcgtgga

SEQ ID NO: 192682 - DNA, 122 bp, Homo sapiens
cgtcaccccggccctgcgaagcgggtgtgcgcccctcagctctccgagcccgccgggagccgcctcctcccgtgccctgcccctgggggaaccatgcccgcagaacgctgggcagaggcgaa

SEQ ID NO: 192683 - DNA, 122 bp, Homo sapiens
tacacggatgtcataaggtttccatttacagttttgaaacttgcttcctctcttaatccccgcccagccctagggttcctgagatcacggtgtggcagcggccccgccaccccaggacagct

SEQ ID NO: 192684 - DNA, 122 bp, Homo sapiens
gaatgatcacagacattttcctaggaccttcagatcccacttcacctgtttcacaggaaacgacagccagctcctgccgtgtgtgagccttccctaccagactccggccatgatggggcaga

SEQ ID NO: 192685 - DNA, 122 bp, Homo sapiens
aagaaggtgatgagcaggtcactgagcgccaaggagcagataaagatgttggtgacggtgcgcatggccttgctgcgggtcaccacgtagaacaccagagcattgccaaagagcgccagggc

SEQ ID NO: 192686 - DNA, 122 bp, Homo sapiens
gccagggccgtgacacctgcgacgagccccgcctggcgccagggggcgcggaagcgcgtccgcccccaggccccatgccgggctcgccccgcccctgccggccacacccccctaccccgccc

SEQ ID NO: 192687 - DNA, 122 bp, Homo sapiens
ggggagtgtggaaggctctcaggagcgggtcggcgtctggttggatgcgggttcgagccgcgtgtacgtactggagggagatggtcagactgggccgggaatccacctcacagccaggcgcc

SEQ ID NO: 192688 - DNA, 122 bp, Homo sapiens
agggtccaccttatataccagtaaaaattaaagagcaatacagactggaatgcaacgaagcgcccaaatatgtggctcaggggtaagggtcggtcaccagcctttccacataagccgatgtg

SEQ ID NO: 192689 - DNA, 122 bp, Homo sapiens
tccaccctggcctctaggtcatggcagatctcttctaattcctgcttcttggcggtcaggcgggcccggagctcctcagcctcggcacacagctcggtttctgcctggagctgctcctgcag

SEQ ID NO: 192690 - DNA, 122 bp, Homo sapiens
gtaggatgtcctacagctttgcaatgttaggattctatccttgggtatcagtcatgtacccgggtaaatgatcattttcttcatagctagagggaggccatgccccttcattgcgtctctga

SEQ ID NO: 192691 - DNA, 122 bp, Homo sapiens
agaagctcacaccagctcgggttcagcagcctccctctccacacagcagcagcggggtcacgtcatccagcttgtgcataatgtaactgcttgtgtttagccttttcaggcgttccccaggg

SEQ ID NO: 192692 - DNA, 122 bp, Homo sapiens
gctttagtctcctcctggctctctgcgatctcctgtttttagctccaacagctgggatctcgaagccctcacttgtaggctcagccctatgtttatatttgggaacaattctttggcagggc

SEQ ID NO: 192693 - DNA, 122 bp, Homo sapiens
agccggatgcccttcaccacggtaatgttctcattctcgtccgcctcgaaggtgacccggcgggtgctggtggtcccacccatggctccggttcctgccccagcggagacctagcgcggaac

SEQ ID NO: 192694 - DNA, 122 bp, Homo sapiens
gtggcttcgggggcaaaaagccacagtggcaaaaaaccgtagcagtggggcaaaaagctgcggcagtgggtgcaaaaagcagcaggaacaggggcaaaaaaatcacaaaaacccgtggagac

SEQ ID NO: 192695 - DNA, 122 bp, Homo sapiens
acttcattgtctatattactaacagtattttggtcaaagccattcaataagtctttaggacgttccaaactttcccacattttcctgtcttctgagccctccaagtctctaggaggtttcaa

SEQ ID NO: 192696 - DNA, 122 bp, Homo sapiens
gcttcaaaatactaacagttctatttcctagccagtcgtctcccgggctggatgtgccgccgtcccagatctcagcggcggccgcagagcgcagaggtagggagagaaaaaggaggcgtcgg

SEQ ID NO: 192697 - DNA, 122 bp, Homo sapiens
ggagacccgcgcgattcgcctggctgcattttacatttctttctccggcagctggggtcacgaaggctgctctcgccggcggtgttggaacgtggacacgtgcgctttggtaatagggcagc

SEQ ID NO: 192698 - DNA, 122 bp, Homo sapiens
gtgacagtctgggaaaatcctcggtctctgtattttgtctttgcccaaaagagtttggttcggtttgacaaatgttaaccaagctcccccctccacgccaggggcgatgccaggcactgaga

SEQ ID NO: 192699 - DNA, 122 bp, Homo sapiens
ccgtaatttcacgagcagagctaagatttctgccatttaggccccaggcattgtctgtcgcggcagcagctgagataaaccctcacccagaacaaagtcgaaatgaccttttacaagtagaa

SEQ ID NO: 192700 - DNA, 122 bp, Homo sapiens
tgacgtatatcacttgttctcatgttttctaaatccgcaattcagacctattccaaaatgcgtttcctcatgggtctggtttgttgtctgtttctcctgctttgcaccttccagtctagaat

SEQ ID NO: 192701 - DNA, 122 bp, Homo sapiens
gggaaaatggggctacatcactggggtgttgccggtctcaaagccgtcaatgcctgaacccgccagggttgttcttggaggtttggctgcatggctgcaaggttccccatgttgccatggcg

SEQ ID NO: 192702 - DNA, 122 bp, Homo sapiens
aaagcctttgttcagaaaatgcaaaacgtgccaaatagactgtggtttcaaattatgtttcgttaaggaagaggggaggggaggcgagggggagggtactgaagaagggcagaaaaggcctt

SEQ ID NO: 192703 - DNA, 122 bp, Homo sapiens
cgctgattatggtttggctgatgcgggtggagcctgcagtggagggcgtccccacagccacgcctaacgagacccagcattccctaccagcacctttgcgcctctttgacttgcaagaagca

SEQ ID NO: 192704 - DNA, 122 bp, Homo sapiens
gaggcgggcagcgggggccgcgagcgggcggactggcggcggcggcagctgcgcaaagtgcggagtgtggagctggaccagctgcctgagcagccgctcttccttgccgcctcaccgccggc

SEQ ID NO: 192705 - DNA, 122 bp, Homo sapiens
ctcatgggtttgaaacaaataatttctcagtagtaattgcttgctttccagaaagagctacggttcaagaagaagggttggtgggaaacttgtactagttacaaacctgattggctaacatc

SEQ ID NO: 192706 - DNA, 122 bp, Homo sapiens
tgggcggggatgccggagaggattccctctcactgtctaattccagtctttcttgctgcacgggcgtggggagttcggaagggcagagaagcccgttaatgcattgcttctttccctcttag

SEQ ID NO: 192707 - DNA, 122 bp, Homo sapiens
tgcccctgcttctcctgtcgagacagttcttgggagattctcgtcgacccaggaatcggccgctttccttgccccttctgcaggagcggggcttgattcttagccagaataggaaggaatct

SEQ ID NO: 192708 - DNA, 122 bp, Homo sapiens
ttaccggacccagccactaccaagatactgagagactcccggggcgtaacgtccatggaacgaagcactacccatattcgcaggattaggaaaaccgccacagctcctgcggccgcagctag

SEQ ID NO: 192709 - DNA, 122 bp, Homo sapiens
caggccagggcacttccgggaccggggaactgtgggatcacggcggactgagactggcggcgttcctgtcacgtcaggtgtctcccgggcaacgcagtatcccggcggccccgcgtggcctc

SEQ ID NO: 192710 - DNA, 122 bp, Homo sapiens
tggaatctgttgctaatagccacagcatatcccttgcataatatgacctctagattactgcgccttaattgcttcccagctcttctatgctttggtttagaaaaatgaagtactgacttacg

SEQ ID NO: 192711 - DNA, 122 bp, Homo sapiens
cttcttcctctccccttccccctgcgttcacttacttccttcttttccttcacctcggcccggctctgaaaggatcgggcccctccggcccgcacccacccccaagaggggccttcagcttt

SEQ ID NO: 192712 - DNA, 122 bp, Homo sapiens
ccacgggggggacggtgacacggacgcctgcaggtgcacccccacgggaggacggggacacggacgcctgcaggtgcacccccacaggagaacggggacatggatgcctgaacgtgcactcc

SEQ ID NO: 192713 - DNA, 122 bp, Homo sapiens
cggacagtgggggcagggcctggcggtgggacgctaaccctcttcagtcgcctcagatcacgttcgggactccccaccccccttctctgggactctcattaaccgcttctcctgcctcgtcc

SEQ ID NO: 192714 - DNA, 122 bp, Homo sapiens
tcccgtgctccggggacgcctgtctttgactctgttctcctgggccgcaaggctgaggcccgagtgcggaggctgcacctgctcagctccactgtgacctcttggtgccggggacacgcctg

SEQ ID NO: 192715 - DNA, 122 bp, Homo sapiens
ctagtaagaaaacaaaaaagtaaataaaaaccatatttttaaatgtgggatgtgtgtttccgtgtgatactgtgtgtatgttccttatagggatgttagacttgtatgaaaagttgggtcta

SEQ ID NO: 192716 - DNA, 122 bp, Homo sapiens
agcgaaataatagagtgatccggcaatgcgctcctgaccttgcaggacagctaatccatccgcacatctatcttaattattcccggttacaaaagagaaactccaccatccattcattccag

SEQ ID NO: 192717 - DNA, 122 bp, Homo sapiens
gaaggtcaccctgttttggggagctcatcagtgatggaaacctggctatggatcttggttcgggccagctgagccaacggtagcataagtgaggaataagaacacagggaaaattctggaag

SEQ ID NO: 192718 - DNA, 122 bp, Homo sapiens
gatgccccaccccaaggctgggcagtggtcaccaatgcagcctagccctgagccctgccccggcccccagttccagcctttatcattcattgcgttatttggccctttatggattggggacc

SEQ ID NO: 192719 - DNA, 122 bp, Homo sapiens
tgaaacaatcataaccaggcatatggctatataacctgctttaattcattcatagcataccgttactgtatttccatgccagtaattgtatatagagagagctgggctcagtagcatgagcc

SEQ ID NO: 192720 - DNA, 122 bp, Homo sapiens
ccccctcccgctcctctataacttggctggcgtggaggaggcgccgccggagtcggagggcggggagctaggaggagggagctcgagagttgtggagactagtgactgggagaagtcgcagc

SEQ ID NO: 192721 - DNA, 122 bp, Homo sapiens
caaacgatggaacaccggctttgcccttctgagggtctccatcccttggcattctgcctgcgcccctcagcctggccctgggctaacctctccactgtgtctcattcagaagaagcttttcc

SEQ ID NO: 192722 - DNA, 122 bp, Homo sapiens
tgccctgctcaggctctctactatgctaaagtacatgggagacacattgtgttattagtacgctgtgtgttagtacaagggacttctgatactttaaaatgtccaatattccaccctgtctt

SEQ ID NO: 192723 - DNA, 122 bp, Homo sapiens
ttgccacctgtctgcccatggtgtgatgtatctataatccacttgttcataaaaaatattcgtctgacacctatgatatgctagggaatatgggagacaataggaaagtaagacagacatgg

SEQ ID NO: 192724 - DNA, 122 bp, Homo sapiens
ggcgacttcggcgtgagaccccgcccctggaggatctggcagccaaccagagtgaagacccgcgaaaccagcggctgagcaagaatgggcggtaccagcccagcatcccgccccacgcggca

SEQ ID NO: 192725 - DNA, 122 bp, Homo sapiens
ggtcgcacacgtgcgtgatgaggctcttggggtcggtgcggttcatcagcagagctaccacgttcacgtccaggggcagccccgccgcctgctcggggccccacagtgttcgaagttcgcgc

SEQ ID NO: 192726 - DNA, 122 bp, Homo sapiens
ctcgcctcctcctcctcttacccctccttccctccgcctcgagcgtgtgaggaggagccgcgggtctgagaaacgccatagcagcgctcccagcactgactaatcaacaaggtgcgagcaac

SEQ ID NO: 192727 - DNA, 122 bp, Homo sapiens
tgatttaaagacagttggtcctcattacatgtggattctgtatctgcaaattctaatactcgctaaaatgtatttataatcttcaaatcagtactcatggtacttttgcagataagcacaga

SEQ ID NO: 192728 - DNA, 122 bp, Homo sapiens
aacccgcccaatcgcccaaatacttcagaacgtttcaggcagaggaaatatgccaagacccggtgctcagaaggtgggggagcgtggccaaagctaaagcagtggctggcagctggtggcgc

SEQ ID NO: 192729 - DNA, 122 bp, Homo sapiens
tggggggtggggtctcgggaggcacgtgatgcgccgtgatgacgtcagtgggagcggaggcgatttggcctagagctggggctgagcacgtgggatggtcggggcctgtttgcccaatgtac

SEQ ID NO: 192730 - DNA, 122 bp, Homo sapiens
ccaagccaaagtgctgagggcgcagggagacccgcgagacagggccccctgaagtcctggcggtttctagccagcctcttgaaattgacttgaaggtgtttaccttgcagattattttttcc

SEQ ID NO: 192731 - DNA, 122 bp, Homo sapiens
ggggtaggctgggccgggaactgtccgaggtgctgagctggggcgggaccggaatcctcccggtagggtaccagggactgagttgggcctggggccgtgtccaaggtgccaatgatgcgggc

SEQ ID NO: 192732 - DNA, 122 bp, Homo sapiens
gccgtggcggagtctctggaggcgccggggcagccttggatggggcttgctggtcttggccggccgtgcgcggtggaggagggctggcgaggcggcagcagccgtgtactcgccgtctccga

SEQ ID NO: 192733 - DNA, 122 bp, Homo sapiens
gcccctggctgagcatgtagccggtgttgcaggtgccgcagcgggtgcggttgtctggtgcgcatgtcaggcaggcagaggcgtctcccactgtgcagggcaggaacgcggtgcagaccacc

SEQ ID NO: 192734 - DNA, 122 bp, Homo sapiens
gggagaggagttagttgtattgaaagccagagagagcacagaccagagcctgaccagcagcgggagaaggggcatcaggtcctcgtgcttgtggggctgcagagggagcactagcatggcag

SEQ ID NO: 192735 - DNA, 122 bp, Homo sapiens
cctatcaaggtgagagttcattggaaaagtggtcacaggagcaaatagcaggggcaggggcgggggaggcctgtggttctccaggggcacagatgttcctttctacaaaatcccaaggaaaa

SEQ ID NO: 192736 - DNA, 122 bp, Homo sapiens
tcgggggcggccgttgggcgccggctggcgggcgcggcgtgggaggctgcgggctggatgcgcagggcccgggcagccgggctggggatgcgttttcggttttgccgggcgagggtttacgt

SEQ ID NO: 192737 - DNA, 122 bp, Homo sapiens
ggaaggacagcgcgcacatctcctgcagaagcaccagcttcccggccgccaggaagctcacgatcaccccgaaggcgctggggctcctgtcgaagaagaactcctggctgtcctcgtcgtaa

SEQ ID NO: 192738 - DNA, 122 bp, Homo sapiens
tggaaccggatggccactttgatgccggcaggagcgaactctgtgtgggtcctgcggcaccgtccagtagaggtacctgcaactccggaagccccagagggcgcattacagtgctcttttag

SEQ ID NO: 192739 - DNA, 122 bp, Homo sapiens
cagattaagagctgagcagagtttcctgtgccctgtgcttcattagcacattggtggtgtcgtttccggtgactgactctctgtttccattctggcaaagtggtttgctcttttcactctgc

SEQ ID NO: 192740 - DNA, 122 bp, Homo sapiens
ggtttgtctggcctggacagtgagcttactgttgtcacctccaggttgccctgggagaaccgggtctagagcaggacctgtcaccatttccaacaccatttctcttctgaaagggtgcctaa

SEQ ID NO: 192741 - DNA, 122 bp, Homo sapiens
ttgatcttaattctacaattactttctcccatactcccactcccgcccagaacaagatagcgacaggccctagcgggccaccgtccacagggcggatccgccagaagctctcctgcgacgcg

SEQ ID NO: 192742 - DNA, 122 bp, Homo sapiens
ctggtacacgggcgagggcatggacgtgatggagttcaccgaggcggagagcaacatgaacgacctgctgtctgagtatcagcagtaccaggacgccacagccgaggaggaggaggtggcct

SEQ ID NO: 192743 - DNA, 122 bp, Homo sapiens
ctgccacggtgtcctatgccccccacctccctcctcccggggggcttctggagaagctcccggcatggttgctaagtgtcctggctggcagcagagttccccacccagccaggacccgtggt

SEQ ID NO: 192744 - DNA, 122 bp, Homo sapiens
cttcagcaggggacagtgaggtgtctgcggttgttcctcttgtgaacaacgccttaaaggcgagaaacagcctactgtacagtgtgccagggaaagcatcacatcggtgggcgtcggtggca

SEQ ID NO: 192745 - DNA, 122 bp, Homo sapiens
gcaacatactgagattctgtctctataaaacaaacttcaaaaattagctgagtgtggtggcgtccacctgtagtcccagctactagggaggctgaggtgggaggattgctggagcccaggag

SEQ ID NO: 192746 - DNA, 122 bp, Homo sapiens
tagcacatacacactcatgcctacctgcaatcatgccagcaaattatgtacttactagtgcgcctcacacatgcctgcaaatatatacatatacccttgcacacttgtggaggcacaccctt

SEQ ID NO: 192747 - DNA, 122 bp, Homo sapiens
gaacagaggtctttagggaatgcctcaaaccacagctgaatggggagtggctttagaaatcgccggtggaacttgcctgttaccttcttacaattccccccgcccctgggcaacgcaaaagc

SEQ ID NO: 192748 - DNA, 122 bp, Homo sapiens
aggacccgcacatttgggccgggtccatggcagcaggagggcgaggccccgagcagctgtcggaccccgggagcccccaggccgccccagtggggaagggcgctcaatccgaccccagactc

SEQ ID NO: 192749 - DNA, 122 bp, Homo sapiens
aaaagtggcattgtcacgaagagagggttatgggagttcagtacccttggatcatgtgtgcgttttgtgctgggaccccgtactctccaaccactcactgcatccctataaatcccgcattt

SEQ ID NO: 192750 - DNA, 122 bp, Homo sapiens
ttcttctctccgagccgcgcgccccgcccggccccggctccctagcttcccgctccctcgcgccctcgcccccaatcccggctcggccctcgctccccgcagcctcccgtgccccccgcccg

SEQ ID NO: 192751 - DNA, 122 bp, Homo sapiens
tataactttaaaaccagtggaagagaaagtacagcaaaaaatagttatcaatccagctcacgcagagaagggaaaaattagaaacataataaacaggcaagaaaataaattgaacaaagctt

SEQ ID NO: 192752 - DNA, 122 bp, Homo sapiens
tctactcgatggtagggcaggaagccgccttgtctctgggcgcggccatgttggaggctccgggcccgagtgatggctgcgagctcagcaaccccagcgccagcagagtcagctgtgccggg

SEQ ID NO: 192753 - DNA, 122 bp, Homo sapiens
cgcctgcgcactgtgccgccgatgccggcccgggaagggcagctgcccgcagctgcgcgccgcctgccagttctcgcgagaactccggcccgccctgttgctgtccggaatttggcgggagc

SEQ ID NO: 192754 - DNA, 122 bp, Homo sapiens
ccagcttggcagccttgcttgtgcttcctgctgcgattgctcctccaacatcaaagtcaccgctgtcgggagctgaaaatgagggacaagtataggccaggagagcagcgccttctcccagc

SEQ ID NO: 192755 - DNA, 122 bp, Homo sapiens
tagccttcactgggtgacaagcgtgctgatgctaaacaaagcccgggaagtcccaagcctcgcctccctccacaacattcacagtagaccttgtaaccttttgtgtaggtccttgcttcctg

SEQ ID NO: 192756 - DNA, 122 bp, Homo sapiens
ttcttctcctcctcttcctcctccttcctttccttctccttcttcttctcctccgcctcccgctcctgctccgcgctggctctcccagagtccggagcctgggctgcctccggcggggcgct

SEQ ID NO: 192757 - DNA, 122 bp, Homo sapiens
ctgcaaggaaagaagattctaaagtccgtttatggaggcaattccatatcctttcttgaacgcacattcagcttaccccagagagcaagtgaggcaatctggcaaaagattaataaagatgt

SEQ ID NO: 192758 - DNA, 122 bp, Homo sapiens
tgtgctaactggctcctgctgtactggctttcagcagaggaaatggccctgagcctcacccgagcagtggcgggcggggatgaacaggtggcaatgaagtgtgccatctggctggcagagca

SEQ ID NO: 192759 - DNA, 122 bp, Homo sapiens
ggagaaggaagaaggtcccctgtacagagacagagggtggggggctccaaagctgagagacggaacctccaggagttgattttataaataaaataacatgcgttgaggtcactctgtgttgt

SEQ ID NO: 192760 - DNA, 122 bp, Homo sapiens
ggaataaaaaatagaagtcctactggctttccaagatagcaaggataacagaaagcaacacgggtttgaaagcccttggctcattttgtacataaatgcatccctaagacccagaatgtgtc

SEQ ID NO: 192761 - DNA, 122 bp, Homo sapiens
agcatgaaatgctccggtgatgccgcgtgggtctccctgagcacgagcttaccagggggccgcgctcaaagcagcctcaaaaataccgacagggtcattctcccgcagcggctgcagagccc

SEQ ID NO: 192762 - DNA, 122 bp, Homo sapiens
ccctctcccgcctccctgcttaggagtcccagtttctcattgtttcgatcttcctgttcccgggtacccactgttcagccactgcttgtaagcaagagcaggcgctgtgcggtattgtttct

SEQ ID NO: 192763 - DNA, 122 bp, Homo sapiens
aacttcgatcctgcggcggcccgagagaagccgtcgccgccccgcccgagctgggtgccgcggcactctgctctgcgccgcgcgtctccgcggctgcctctttaatcaggaacacagaaggg

SEQ ID NO: 192764 - DNA, 122 bp, Homo sapiens
aacatctgactgggccaagggtccagggactggcatggaacagggctgggtgggtgaggccgcctgggagaccccagcttgcctctgtttccccctgtactggggcctcctgcgtgaaccag

SEQ ID NO: 192765 - DNA, 122 bp, Homo sapiens
aaaacccagccacaaaaatccaccagagcaataaaaaaaaaggcacaaactcgcatcttccgatggcttttgagaaactcaagccagctcccccagctcacattcctgtttctgtccagttt

SEQ ID NO: 192766 - DNA, 122 bp, Homo sapiens
ggtgagccagcttctcatgttttgtgaatttgagtttcctcctgctcagctccgtgcacacgagagcctcccagagcgccagggacaatgtgggaggttatcaaagttctgtttcactcccc

SEQ ID NO: 192767 - DNA, 122 bp, Homo sapiens
gctctgctccaagtatgcctcccgcgatgaggcacgccgagcagggggcggccggccccgcggcccacccgtcaacaggagccactcggtgccggagaacatggtagagccacctctgtcgg

SEQ ID NO: 192768 - DNA, 122 bp, Homo sapiens
gtttgctgttgtattcgggcatcctgttattcatcagcttagttagcatctgtcttcccccgaagtggtaccaaagccggtcccttggcgacgggtcttgcatgtgacactcttgccctcta

SEQ ID NO: 192769 - DNA, 122 bp, Homo sapiens
ctgagggcaccgccgccctgttctcaccgcacccctctgagggcacggccgccccgtcctcgctgaccccccgctgagggcacggccgccccgtcctcgctgacccccctctgagggcacgg

SEQ ID NO: 192770 - DNA, 122 bp, Homo sapiens
ttttgtaacaaggtctggttaccagcaaggaagcggttttcacgttgctcactctgggcccgagtgtggtgcatcgcgccccctggtgcccaaaaagtgcaactacgtgccatgccagccag

SEQ ID NO: 192771 - DNA, 122 bp, Homo sapiens
aaatgctaaacagttcttgtttgtgattcctctcatctgaaagcattccccccccccccccgttttagactctccaaactagtcagttgtgaaccaggacatagcctttgtttacactgaaa

SEQ ID NO: 192772 - DNA, 122 bp, Homo sapiens
cctgcccagtgccccccagttgcggcgggagggtgttctggggtgcgcacgcccaggtgccgccccctccctgctgagatggcccctggggccatgcttactgtgatgatgtcccctgcctt

SEQ ID NO: 192773 - DNA, 122 bp, Homo sapiens
tgctgccctcaaagatgtgtactacagaccttttaaggaattaaaaaatgtactcttaatcgccaaattaaagaaaggagagaagtgaacaaaaaccacaaggagtcacctaaaacctattt

SEQ ID NO: 192774 - DNA, 122 bp, Homo sapiens
cagcccccagtgctgggctagctctgttcggggagaaggcattccaagcctgcctcgccgcgcacagcaggggccacctgtgttggccccacggacccctcccacaccctcccatcctgcgg

SEQ ID NO: 192775 - DNA, 122 bp, Homo sapiens
aaaggctttgccattgcctttgttgttcttctgtttctgttcctaatagtgatgatttttcggtgtgccaagctggtgaagaatccctacaaggccagctccacaaccacagaaccatctct

SEQ ID NO: 192776 - DNA, 122 bp, Homo sapiens
ggaaggggcctggagtcttcctcctggggcattgtgctgggaccttgaggactggggacccggagggagggtaggcgtgccctcaactcgctgcgccggaacggcgtctgatgagcggcggg

SEQ ID NO: 192777 - DNA, 122 bp, Homo sapiens
ggttaatgtaatacaggagtgtaagaatttgttctttccactaaagagaaaacaaggccacgcattcccaattatatgctcacaaagggcagccagggagtgcagttcttggcagcagcagg

SEQ ID NO: 192778 - DNA, 122 bp, Homo sapiens
tcaaaggcagggttcttaattttgttgcctgatgtatccaagggtctttagaacactgcacgtagtagcacatagtagatactaaataaatatttcgtgaatcacacaaatgagtatgagtt

SEQ ID NO: 192779 - DNA, 122 bp, Homo sapiens
aaagcaacttgcaaactctgctgaggacgtgcagcatcctcacagccactcacagagccgcgctgtcgccgtcccccctcgagaggtcatttgtagtggaagatagggctcaaagccactga

SEQ ID NO: 192780 - DNA, 122 bp, Homo sapiens
cacggccgtctcccagccccggcgccggcctctccccacccggtcaccgccggggtcacgcggcccctcgtgctgcggccctacccctggggccgccccctgaccccgaccgcccctcgggc

SEQ ID NO: 192781 - DNA, 122 bp, Homo sapiens
tgactccagggccctgcgtcccaggccgagtccggtcctccgccatctggagctgctggacgagtttgccagggagaacattgactccctgtacaacgtcaacctcagcaaaggcagagccg

SEQ ID NO: 192782 - DNA, 122 bp, Homo sapiens
atgaactcatctaaccctaatcacgtccccaaagccccgcctcctcgcaccatcccactgcgggcagggcttcaacatcgaaatctggggagacacaaacattcagtccatgacgggccatt

SEQ ID NO: 192783 - DNA, 122 bp, Homo sapiens
cccgtggagttgggggttcagatctaagagggggctgcatttcgcaggagttgggggccccgcccgcttgggtggagggaagaggatgggtagggggtggtcctggatccttcgcaggtttg

SEQ ID NO: 192784 - DNA, 122 bp, Homo sapiens
gttcgctggatccatgggagcggagtgcgcgcgcattatttttgctcgtcggctgggagccgggcgtcgggtcgctgggagtttgcctcttgtggcagcatcctgcttagtccagcgaattg

SEQ ID NO: 192785 - DNA, 122 bp, Homo sapiens
caggaaatcgtgcttcaacagtccatgactgaaaggagggcctgaaactgtggccataggcgggcccttttgttagggccttgacctgggcttccgctacagggcccggtcacgaggccaac

SEQ ID NO: 192786 - DNA, 122 bp, Homo sapiens
ccaccacctgagcctccgggctatgtgtgctcactgacagaagacctggtcaccaaagcccgggaagagctgcaggaaaagccggaatggagacttcgagatgtgcaggcccttcgtgacat

SEQ ID NO: 192787 - DNA, 122 bp, Homo sapiens
ggtggccttggcttttgctgcagccgtcaacgacctatcatcggggtcctgcgtaaggtccggctggctgggacttggctgtgggtgggatggactggctgccggaccgagtgccctgcagt

SEQ ID NO: 192788 - DNA, 122 bp, Homo sapiens
tgactgctttttagtggatatctaggctcatgattgtaatttcataataaaacctgttaccgcagtggtcggatttttctgggccacccgagtggagcggccgggttgggccataaagaggc

SEQ ID NO: 192789 - DNA, 122 bp, Homo sapiens
gggcgactggggtggggcgtctcctagagcgaggattgctgcagagtgcgcgtgcacgcccgcacatccacacccacggctacacatcatatctgcacacgcacaaaaccacacaccctccc

SEQ ID NO: 192790 - DNA, 122 bp, Homo sapiens
gggaatgctcaggcctggaactgacccacagggatgcgtcctcacagcctgggggagccacgaggatttggctctgattctcatcttccccctcttcatcccttgccctcccactcctccat

SEQ ID NO: 192791 - DNA, 122 bp, Homo sapiens
aaggaagagaagatcgagttccaaattgcttccgaggcttcagttctgtaccatttaatgcgtgcaaaggacattccatggtgtctgctgggttcagggcaactggctttcccaaggcatac

SEQ ID NO: 192792 - DNA, 122 bp, Homo sapiens
cccagtgagacataggaaacgccaaactgggttacgtaagtgggttaggcaggtggcgggcgaggtgcgttctacaggaaagttgtgaatcaggagtctggcaacgtgaattctcagttctc

SEQ ID NO: 192793 - DNA, 122 bp, Homo sapiens
atttgcgcaggcgcagatcctaactttggcgtccctgtgggcggcctttggtgtgagacgcgtggtattctgggaacgtcggagacggaagttacttcgtctttagctcctggcgctgctgg

SEQ ID NO: 192794 - DNA, 122 bp, Homo sapiens
agacattcaagaaactataacaataacaacttcttaataatgaaattcattcaaacaaggcgtgaatcaaaatcaaaagagaacagatattacatcacttgcctccttaaaacctggctaga

SEQ ID NO: 192795 - DNA, 122 bp, Homo sapiens
ggcggccttcgcgggatttctcctggcgtcggctttcagactcccgagggtgggataaatcgagagggtggcatcctttggcttttcttctcccaggcagctctgaaccatgtttatgcaac

SEQ ID NO: 192796 - DNA, 122 bp, Homo sapiens
ggcttctcagtaaagactatttatagctctgattattgcagcaaggttatgcaactgctgcgtggggcaggcaggacagctgtcccgagcccttgccgggtgagtgaccgtctgaccgtctt

SEQ ID NO: 192797 - DNA, 122 bp, Homo sapiens
ggcccggcccgctggggcctgggttcctttgggttggggaagtgggggtacgaacccacgcggctgtgccaaggggtcccaactccggagtccaaccccacccaccagtcctctgtgcgcac

SEQ ID NO: 192798 - DNA, 122 bp, Homo sapiens
acggggtagtaaattgcataaggaggagcaaaaggacattttgtctcatgagaaggtctccgaggatctgggcacctcccctgcacgctaaggttgtgcctgggaatcatcttgggggtttt

SEQ ID NO: 192799 - DNA, 122 bp, Homo sapiens
ctttccttccttcctttcctttccttctttcctttcttttctttcctttttttgagacagcgtttcgttagttctgtcactcaggctggagtgcagtggtgcaatcttggctcactgcaacc

SEQ ID NO: 192800 - DNA, 122 bp, Homo sapiens
tcctagtgttcttttggtctgtgcttctcattcaggacttagctgtgttgcctttcaccccggcttatgtatttgtcatgtttatctgttgcctcttatttacattgtaagctccagaaaag

SEQ ID NO: 192801 - DNA, 122 bp, Homo sapiens
ggctaaacaactgcagagatgttctccaactctcacatgctgggccatgggttagcaccgcggcttaggcttcaaaaagggaaggcacacacagacatgcacaattccagaacaaaaaaacc

SEQ ID NO: 192802 - DNA, 122 bp, Homo sapiens
gaggcccacagcgacaaggccaaggagagcattcgagccaagtgcgtgcagtacctagaccgggccgagaagctgaaggattatttacgaagcaaagagaaacacggcaagaagccagtcaa

SEQ ID NO: 192803 - DNA, 122 bp, Homo sapiens
cggcttggcggctccccccgccaccccgccacctttcaggacccaggccaagccgcctcacgaagaccaggaagcggcctctgccgggaagccacctgcagcctatagtcccctccccaagc

SEQ ID NO: 192804 - DNA, 122 bp, Homo sapiens
agagaagggattcctcggattcccaaggcacccagcgcccctgcctggggggtcgcctttcgtccattttgctcccccaggagagagatcggattttgctttcgctgccgcgagccgggctg

SEQ ID NO: 192805 - DNA, 122 bp, Homo sapiens
gcccatggggctgctctgggccttggagcccgagaaacctttggtgcggctggtgaagcgcgacgtgcgaacgcccttggccgtggagctggaggtgctggatggccacgaccccgaccccg

SEQ ID NO: 192806 - DNA, 122 bp, Homo sapiens
gattaagctggatgtctgggttccaggcaaatggtgaaatgacagaaaatgtgttttgttcgctttgacccaagaaggtcatttgttgctctgttgtttgttgctagtggtcaaaagctgac

SEQ ID NO: 192807 - DNA, 122 bp, Homo sapiens
gcaccccaagccctcagccagggatgccccgccggccagcagctcctgcctttgccaggacggcgaggatgccggttccctcgagccacagctgccaaggagcccacctggcaccgctgaga

SEQ ID NO: 192808 - DNA, 122 bp, Homo sapiens
ggcttggaagagcagatcacgcttcacgctgacagtcggcatggtgtgtcgaactcactgcgcctgcgcagcgagctgacccgggcttccctagcgaagcgcgtaggacccgcctcttcttg

SEQ ID NO: 192809 - DNA, 122 bp, Homo sapiens
agctgtacaggaggttgaggccctgagtttttggttaaatgcaggttgccaggtggaggccgttagggggagggggttaaatgaaaatgctgggtaaactgcacgatgtttgcagacggccg

SEQ ID NO: 192810 - DNA, 122 bp, Homo sapiens
gatctgggcagtagagaaacacatgtcagagcccagcactgtctccaccaccgggtgctccgttccttcttcctttgtctgataattcaacaaacattcactgggagcccacttcatgcaag

SEQ ID NO: 192811 - DNA, 122 bp, Homo sapiens
cctggttcagactgttggtaagagctgtccagatacccagatgggaaggaaggagacagccgcgcgcttcactccatttgtcacctcatgcatggaccatactctgggtttgagatcattct

SEQ ID NO: 192812 - DNA, 122 bp, Homo sapiens
tctgctccataaaggtaaacacagcctctctttacatcttctcttagccagtctctttctcgagaaccaaacctacttctcctattcaaacaatttctgctcccattgcgtttcatatttct

SEQ ID NO: 192813 - DNA, 122 bp, Homo sapiens
tcttggccagagggtgggtggcagacccttcgtgcagcccgttggcctgggctctgtacccgagctccaagcctgccaggatggtgggggatgacccatggctaatgagggctccgactcat

SEQ ID NO: 192814 - DNA, 122 bp, Homo sapiens
caccccgttcgggttgagatccctaaggaaagaaagttctgagaggagaggatgggtggacgtcacaatgaggcaaaaagcatcaaagggggaactttctatcagaactttctaacaaccag

SEQ ID NO: 192815 - DNA, 122 bp, Homo sapiens
ggcggggcccgaaagccgggcgttccaggccattgtttgggctgagcctgtttccggtggcggcgggaggggcgggatggagtggtggaggcgaggccggggcggaaccattcccgctggag

SEQ ID NO: 192816 - DNA, 122 bp, Homo sapiens
ggaggaaaaaacagggttggaaggagggaggagaaatgagataaggctggaaaattcaaccggagcctgatcagaaaggttctgtaaccatgtgagaaatgtattacttatgtgaactatac

SEQ ID NO: 192817 - DNA, 122 bp, Homo sapiens
cctgtgaatgcctggcaccaagaggcctggctcacaggtgctcaaccaatgctgctgatccgtggatgagggcgtccccataatcgtcatgttcaaatcctggctccaccagctgctctcct

SEQ ID NO: 192818 - DNA, 122 bp, Homo sapiens
tccccagaccgccatgtctgcttccttctttccctggagcctcattcttcagggcctcagcggggtgagccagctccccactgtggctggtgggctcctaccatatggtcgcctgagccctc

SEQ ID NO: 192819 - DNA, 122 bp, Homo sapiens
ctcactgggcgggggaggaagaggacctgaacgtcctggcgaaggtaacgggggcgtggacgaactgagggacagattccgctgtgggagtcttggggtttcgtcattgccgctggaacttg

SEQ ID NO: 192820 - DNA, 122 bp, Homo sapiens
ccccgataagcgcctcggccattatgggccaaatgattcattttaatttggcaatttcaccggagggagtggggactggttgagcggcgctaggaccggctccggaacgcgctgcggggagc

SEQ ID NO: 192821 - DNA, 122 bp, Homo sapiens
gacagcacattcgcatttggcctaaggtcaggctgagtctctgacaattgcagcaaaaagcgctgtactaatactgactctgagaaaatggagcaggataggacacgggatgagaaggggct

SEQ ID NO: 192822 - DNA, 122 bp, Homo sapiens
taaaaactcatggcacgcgggggcctccctcttctcccggatctctctctctcttcttgacgtgaccgtgcttcccactcttcgagattgaatcttggccccagatacccaaacccacagaa

SEQ ID NO: 192823 - DNA, 122 bp, Homo sapiens
acaggcaacaccacttccgcgtttctcttgcgccctggtccaagatggcggatgaagccacgcgacgtgttgtgtctgagatcccggtgctgaagactaacgccggaccccgagatcgtgag

SEQ ID NO: 192824 - DNA, 122 bp, Homo sapiens
attcctggtgctttatggtcccctttgctttgactattaagacacagtcctgacctggtgcggtggcccatgcctgtaatcccagctctttgggaggccgaggcgggtggatcaccttaggt

SEQ ID NO: 192825 - DNA, 122 bp, Homo sapiens
gaggaaaacgacaggtccatttcagaaccagactctcaggcaccaggttccaaacaaagacgttaacgaatcagccccccagtcccatgtcaaggagttctctcaaggaacgtcggtggaag

SEQ ID NO: 192826 - DNA, 122 bp, Homo sapiens
ttcagaacaaccctaatgcctttgactttgggctgtgctgagtctcactgtccaccccttcgctgtccagaattccccagcttgttgggagtctacgtcacggcttgtcttgggaaccaatc

SEQ ID NO: 192827 - DNA, 122 bp, Homo sapiens
ctttgaacgccgagtgtaaggaggattcctggcatcgtagatcactggccatttacaacccgctttcatgtgccatttctgcgtgtgtgcttgtgtatatgtgcgagtaaatgcacacgtgc

SEQ ID NO: 192828 - DNA, 122 bp, Homo sapiens
gtggccgtcggaggctgtggccgggaggtggccccggtgccggccgggccacacggacagcgtctggggcagccgcgcccctccgtccccaggccgcaggctggccaccctggccgggcgcg

SEQ ID NO: 192829 - DNA, 122 bp, Homo sapiens
acttccagcccaggaggtaggtagcgttcagaagaagcctggggcgggcgcggtggcgcacgcctgtaatcccagcactttgggaggccgaggcgggcgaatcacgaggtcaggagatcaag

SEQ ID NO: 192830 - DNA, 122 bp, Homo sapiens
cctgactgttgaaagcatggaacagtagactgtgtctcattagaataagaaggacggtaacgctcagctattgaaagcagggaacagtagattatgtctcattagaataagaaggacgctaa

SEQ ID NO: 192831 - DNA, 122 bp, Homo sapiens
accgagtgataaagccgggggtcctcttctgctttgtactcgcctggggccactgcatcccgcacgatgtcgatggtgtctgagggagttcggcaagcattgagcagcgccagcccctttga

SEQ ID NO: 192832 - DNA, 122 bp, Homo sapiens
ctttttcagggcgggcttcccgcctgaattcccaatcaccaccggacttgggtcagtccccgcgctgggcactcactgccccggcaccagcatctctgcagcaagcacccataacaaccata

SEQ ID NO: 192833 - DNA, 122 bp, Homo sapiens
ttcaacactcatttgccagaacccttaggatagcacatgaggtgtaaccggaaatcgaggcgttgggtgtcatggttactttgcagggctgggccccgggacttttctgcaggaagttcatt

SEQ ID NO: 192834 - DNA, 122 bp, Homo sapiens
cacacgcgagaggctggatttccttcacagacgtccaccaaagccacacatcgcgacacacggaggcagaaagcagcggtctcctaagaagttagacacgaggaatctcgggcagcgaggtg

SEQ ID NO: 192835 - DNA, 122 bp, Homo sapiens
ggttcacagatgccgacctggtcggtctatgcggaccacccttttctccaacgtgaccgccgactattggaagttttttgtgatctgtcaggccctgatggcttaaggaacatagccagatc

SEQ ID NO: 192836 - DNA, 122 bp, Homo sapiens
tttcctttccaatggtttcccatctggccattcttccccaaagcataagtagatctcaaacggtggctgcttctctatctgtcctttctggtgggcaatgagatctgcagaaagtggaagag

SEQ ID NO: 192837 - DNA, 122 bp, Homo sapiens
acattgccaagcctcatccgctgttgtcattttgcccacctccacagctgcagggacagccgtaggcccggaactgggatatctcttcctaggggcctgcctatctgctcagctgcactgcg

SEQ ID NO: 192838 - DNA, 122 bp, Homo sapiens
agcagcaagggcaccgcggcgcggcccgccgaacccgcggccgcagtcatagctttcgctcggcgttgccaggaagccgagagtagccactcagccattgtgtgggtcacatgactccggcg

SEQ ID NO: 192839 - DNA, 122 bp, Homo sapiens
ttatctcatcaggttttgctcctcggtttaagcaggaagagaacttcatgcttggaagagcgcatccgtcccagcctaggtttgcttgagagctacatccctggggagggaggggagcgatc

SEQ ID NO: 192840 - DNA, 122 bp, Homo sapiens
tttaaaaaactttttgtttttttttttaaaaaaacggcagcgtaatacaatatttggacacgctatactatgggctttgaagaacgcctgtccagaacacccaacaagctccattatgtcaa

SEQ ID NO: 192841 - DNA, 122 bp, Homo sapiens
atgctcttcattgcagggaggagcttcccaccatctacaagtgtccttaccagggctgcacggccgtgtaccgaggcgctgacggcatgaaggtgagcactggctgtgcctgacccaggccc

SEQ ID NO: 192842 - DNA, 122 bp, Homo sapiens
gtgaacggcatcatcctgaataagaagaatcatggctgccatcctgtcacctagtgtccccgatgacacaattgccttcatccaggtagaagaggctcccttttgactattcgtcttacttt

SEQ ID NO: 192843 - DNA, 122 bp, Homo sapiens
ccgaccaatcagggagggcgtacgcgacccacgtgcgtaaacggcctcgctattggccggcgccgccagaggcctgccccccccggagcccgaacccacgtgcagctactgcgccttcattg

SEQ ID NO: 192844 - DNA, 122 bp, Homo sapiens
cagccttccgcgcacagagccgcatcccgccccgccctgcgctggactggttcaagcttccgcctcggcgggaacgctgtacatagtcaggtccgttccagggaccacttaaactttttagt

SEQ ID NO: 192845 - DNA, 122 bp, Homo sapiens
gcctggccttgtttaaacacaaaacagagtcagcccccaacacagggctgcagaagcaggcggcagcagcattgggtggacacagccatcctaatggtgtttgtttttcccctgtgtaaact

SEQ ID NO: 192846 - DNA, 122 bp, Homo sapiens
gtctctgtggctgcttcagagttttcactgtctctagatttcagaagtttaattttgatgcgtctcggagtggatttctttgggcttatcccatcaccttttcccaccgcgtgaatgctggg

SEQ ID NO: 192847 - DNA, 122 bp, Homo sapiens
tctaattgcgtggcgtccccagatggtaggcggggtgtcggagctgggggtgcgtagtcccgggcctaaggctagggaaggggcctccagcgccgtgtgagggccctgaccgacagtgggga

SEQ ID NO: 192848 - DNA, 122 bp, Homo sapiens
ccgtgcggccgcgcttggcgggctcagaggtcttgctcctggggaagctgagaatctccgcgcggtggactgtggccggccaaccgaaattggcgcgaaacgtcgccccccacgtgaccggc

SEQ ID NO: 192849 - DNA, 122 bp, Homo sapiens
cccccagggtccatcccaagcccagccttcagcagatgacagtgacagagtacagcctgacgggactgccacttggggaggtgggagggctgaggtggcacaaggctcttcccgcatgggga

SEQ ID NO: 192850 - DNA, 122 bp, Homo sapiens
tcttcgaagggttgccgcttttcggtggcgcagttctcgcgagaaggtgactttctttctcggtatttcctggtttccagaatccttagcgcgaggcggaaaaaatatttctcccagcttgt

SEQ ID NO: 192851 - DNA, 122 bp, Homo sapiens
tgcagagccgctggccgcgtagcccacccgacgccttggggggcccctcaggtctggacacggcgttgacgcccccgcctccccagcatcgttgggaaggaaaagggccctgcaggacccat

SEQ ID NO: 192852 - DNA, 122 bp, Homo sapiens
ctttctctcatacacacacaccctccgccccccccgcccccccaccgccacacacacacacgggctttatcagaagggttctcagtctgactttggttgatttagcaacagcagtgtactga

SEQ ID NO: 192853 - DNA, 122 bp, Homo sapiens
ggcgccgcgcgcggggttcccccctgcccctctggctgggagggcagggtggtgtcaggtcgcccgccgctcttgggcctcctcggctcccttcctccttccttgcggtcttcatgcacagc

SEQ ID NO: 192854 - DNA, 122 bp, Homo sapiens
tgcatcgactctaaggcgagaccagaaacttgctagtggagcaattctggtgcccctgcccgggctgtgaaccctctgagatcatccctcaatcaaacgaatagaaatcctcgggaagaaaa

SEQ ID NO: 192855 - DNA, 122 bp, Homo sapiens
ggggctgagggtcccgagactaggatgggactggttggaaccggcaggaatagaccgtggcgggacccgggcctcttcgtagttgactctgggttctgagacccaagtccccctggcgcacc

SEQ ID NO: 192856 - DNA, 122 bp, Homo sapiens
ctcagattcttttcccatgataaaatgaacactccatttctaaagggaggctcttgtgcacgctgtgaggagacgttccccaggaaagttcaagtgagcatgtgatttccactctcttctct

SEQ ID NO: 192857 - DNA, 122 bp, Homo sapiens
cttctcagattctctaccttgttgtgagtgagttcaggctcctttaacacacaccagggacgccatcccctttgcccaacaaagtctggcaataccactcattctcctgcacgagggtgtgg

SEQ ID NO: 192858 - DNA, 122 bp, Homo sapiens
ctggacacataggatgatctcacaccaacgacctatgcaggccctacctcaaccactggacgtctctgactgacactattacttctgccgtctctgattgaaactattacttctgccatctc

SEQ ID NO: 192859 - DNA, 122 bp, Homo sapiens
cgccagggttgttcttggaggtttggctgcatggctgcaaggttccccatgttgccatggcgggggtggggggcaatacggggccgccaagactggttgaggggcaggtcataagtctaggg

SEQ ID NO: 192860 - DNA, 122 bp, Homo sapiens
tgcggcggcgcgcggaagtgacgtcaggtcccgtcgtcgctgcgtggaggggttccttctcgctaacctcttcgcccggaagtggcaacaagactgcaacatcccctcacgcctagtctgta

SEQ ID NO: 192861 - DNA, 122 bp, Homo sapiens
gtatcatttcttgactcagacattttttacagctagcaggaaactagatgtcatttactccggaggtctcaacctggcagcctgttctgcaattgtgttttctttgtttggcagtgttttga

SEQ ID NO: 192862 - DNA, 122 bp, Homo sapiens
caggctaatttttgtatttttagtagagacaggatttcaccatattggccaggctggtctcgaactcctgacctctgatccgcccaccgcctcggcctccaaaagtgctgggattacaggtg

SEQ ID NO: 192863 - DNA, 122 bp, Homo sapiens
gatcgccgtactcaccggcccggactcggtttccatcttcctctctgctcttcagagacgcggggtagggaaaagaagcctaaagtttgaaaccaccttcacgccaaggcagcagcgctgct

SEQ ID NO: 192864 - DNA, 122 bp, Homo sapiens
gtatagatattatgattatacagagttagcacagacttcacaagttaagttcacagcccccgataagattactctcacttcagacatcagccataatttcaagctgttcccaggtcacctgc

SEQ ID NO: 192865 - DNA, 122 bp, Homo sapiens
ggagtggggagaagagggaaatggccagtgtaagtaaagagctccccgccgaggcctggacgccggcagctagtgagagccctgaggccgagaagcagggagagaagagggctggaaccgtg

SEQ ID NO: 192866 - DNA, 122 bp, Homo sapiens
acctagagtgtggctccgtgtgtgcggcgcagacaccgtgggggtgtttggagcttcctgcgtggctcccagatgtctttactacacagtgcccgccgtggaagggacagatgagcaatgta

SEQ ID NO: 192867 - DNA, 122 bp, Homo sapiens
cgcggggctgggctctgggctgcgtccgggggccccgacttggttattgatcggcccaagcgcaggagaactgactctataatgcatcgcctgaccaggaaaagtgtttgcttttgtgggag

SEQ ID NO: 192868 - DNA, 122 bp, Homo sapiens
ccaccctgtcttcccagtttccagtgaagaaacttcctggcgagggaccagaggcctctgcggagttaatgactgctgcagctgacaaaatggctcgttctgggcctgctgagccctctaac

SEQ ID NO: 192869 - DNA, 122 bp, Homo sapiens
tgagcgggggctggggtgggtgccaacgaggaaagcacagttgatctgcaagttagtgggcggggagccagtagggagggactgcggagccgcgctggtcctgattcttcctcactcagcta

SEQ ID NO: 192870 - DNA, 122 bp, Homo sapiens
agaggctcccacagagaggggattgtgtggagctgtccggagcgccattcagctgggggacggagcttccctggaacatagtgccccgcttgattcttgaagagaggacgtggacagcagag

SEQ ID NO: 192871 - DNA, 122 bp, Homo sapiens
atagtttcaggatgaaactcttccacctcagatcatcaggagcacacaacctagatccctcgcatgtacggttcacaatagagttcatgctcctaagagaattaatgccacgagtgatctca

SEQ ID NO: 192872 - DNA, 122 bp, Homo sapiens
cgcaatctgcatgactgacgcacgctccgagtctccctcagcagttcgccaggttcttggcgccaacaccagacctaggatccgtcccctgctggaactattcagacgcgcaagatacgtaa

SEQ ID NO: 192873 - DNA, 122 bp, Homo sapiens
agcgacggcgggtatcccagaatagaagagctggggaactcgccgacacgcaggcgggagcggcccagtcaccaagccccgtctcccgggcagcacgtgggaaaccccgcctttctgccggg

SEQ ID NO: 192874 - DNA, 122 bp, Homo sapiens
tgggtgggcaggagggcggcagggtctgtccgggcggggatgggcgggcgtggggatgcgcgggctggggcgcgggggtcgcagagccgcaggtccggccctgccggcgcgcacttacccca

SEQ ID NO: 192875 - DNA, 122 bp, Homo sapiens
tcaggatcctggtgagggtggcaggtcaggattgtaaactccaggaggggacttaagcgacggaacagggaagaaaagtggctgagcttagcgacaggccggcctcagaagtgacattcacc

SEQ ID NO: 192876 - DNA, 122 bp, Homo sapiens
gcattgggtgattccaaagctggaagggcagcggaatggccttagccccgtcctgcccttcgcaggcgtcagagccagcgtcccgggaaacgcccgggtccgcgacttcccaaaggaagcag

SEQ ID NO: 192877 - DNA, 122 bp, Homo sapiens
ctcaggtgatcagcccgccttggcctcccaaagtgctgagattacaggcgtgagccaccgcgcccagccaggactaatttctaagagtgtgcagagataccgaaacctaaaagtttaagaac

SEQ ID NO: 192878 - DNA, 122 bp, Homo sapiens
ttcctgaagaaaaagcccagtcccggcagcgttcttctccggctccgcccttcttccgctcgactttctttgccattggctgacaacggagtacataaggacgtcatttcctgccgcctgtc

SEQ ID NO: 192879 - DNA, 122 bp, Homo sapiens
catcttcggatcctgtgttccccaccggggctccaccagggcagggatggtggtgagggtcgctcctgggtcccctcgcggggagcagggtctggcactcactaaggcgcacgactaggact

SEQ ID NO: 192880 - DNA, 122 bp, Homo sapiens
ccacctcctcctcgttccccgcgcttttaagacgtcctaactagctcctcacttaggctgcggctaatatttttcctcatgaattaaattggcggcggcttccagtttggaactttgagacc

SEQ ID NO: 192881 - DNA, 122 bp, Homo sapiens
caaaagaagagaccctggggtaacatgagattaatgtgaaccgtgccagcctgcagagggcgcagggcgggggccggacagggccgggcacacacacgtaccattctgacttccctcaggat

SEQ ID NO: 192882 - DNA, 122 bp, Homo sapiens
gaagcaatctcggtgtttactgactcctcctggacactaggggtggcgggtggctttaggcgtctctagtcttcgagcgtttgaatacgttttagcccacaataatggggtaaaccttgaag

SEQ ID NO: 192883 - DNA, 122 bp, Homo sapiens
gcgatgagggcgatgccgatggagagcttgcgcctcatgcccccgctcaggaagcggctccgtgagttccacttgtcctccaggccgatgatgtgcagcatctgcttgacttcttcagggca

SEQ ID NO: 192884 - DNA, 122 bp, Homo sapiens
ggaggagaggggtgaaggcaggagtgaggggctccttggactgggaggactcttgtggggcgcagaggaaaggccatactcaccagcatagaccagggcccctgctacagctgccaagaaga

SEQ ID NO: 192885 - DNA, 122 bp, Homo sapiens
aaccagagggggaaaaggtgctggctcttactccccgcattgcggggggtgcctcacccccgtgcgatgggggtcctaagagccagggggggaggcggctagctctaactcccctcatcgcg

SEQ ID NO: 192886 - DNA, 122 bp, Homo sapiens
gcccgtgagcggccaggagcccaccaaagtctcccaggtggagagccccgaggccaaaggcggccttcccgaagagaggagctgcctggctgaggtctccgtgtccagtcccgaagtgcagg

SEQ ID NO: 192887 - DNA, 122 bp, Homo sapiens
acagcagagatcaagacaaacatcttgtacctcctcttccccacctgcctctaaagcaaacgctgatctgatgacattgtcatgaggcctgctcaccctcagcagcttcctagtgtgtcctg

SEQ ID NO: 192888 - DNA, 122 bp, Homo sapiens
agggacctatattccttctattagggttcctgtttcttccatttgatcaggggaactttccgttccagagcttattgagtcaaagtggcaaatagaaagaaatgagtttataccatgtgtca

SEQ ID NO: 192889 - DNA, 122 bp, Homo sapiens
cgcaggcgcagtcggcggtcggcgtggggcgctatgccggggcggcacgtttctcgagtccgggcattgtacaagcgcgtcttgcagctgcaccgtgttctgcccccggacctcaaatccct

SEQ ID NO: 192890 - DNA, 122 bp, Homo sapiens
aagcatggcacacacagcgccaggaaaacagcccgccttctagagtgggggggggcagcacgtgcttcctgagtttaacggtggcccatggcccatctcaggacccaacaccagccccaacc

SEQ ID NO: 192891 - DNA, 122 bp, Homo sapiens
attttctgtgggagaaattctctctccctggcctatttagttgtgactttctctaacaaccgtatcagattgtgtgctgcttttactaatacctctctttctggacttctaacaccccagcc

SEQ ID NO: 192892 - DNA, 122 bp, Homo sapiens
atcgggtgtgcacgaggagatgcgaacaccgggaacagtcgcgtgggtagaaacagcacacgtaagatcgggtgtgcgtgaggagatgcgaacaccgggaacagtcgagtggatagaaacag

SEQ ID NO: 192893 - DNA, 122 bp, Homo sapiens
agcatccatgaatctggtgaccaaacactgccatgctgttgcagtggggaacccactgcccgccccaactgttcctgcctcaagtgtctgtgaccttgctaggcagcagaaaacaccaaaga

SEQ ID NO: 192894 - DNA, 122 bp, Homo sapiens
ccgtcgccggaagcctgtaccgtatttcatggactcctaggcgccatcgattttaagacgcgctcgcattccacgcaccactgagcagaacgttcgaaccggacaaaagtgcgagtcaaggc

SEQ ID NO: 192895 - DNA, 122 bp, Homo sapiens
ccttcccccacggtggcacgcacatcatccggcaccatttccgtgccccgaagacgcccgcgcgggacctgggaccgccagtgaagaacccctcctgggctctttaacgagcagcagatgcg

SEQ ID NO: 192896 - DNA, 122 bp, Homo sapiens
gctgtgtgactgctggaccaagacgtggaagtggccctgtgccaggatctgcatctaggccggcatatgccactttctgtatcataggacactccctcatggaatccagccgccacactgcg

SEQ ID NO: 192897 - DNA, 122 bp, Homo sapiens
ccagtggaaaatgagatcaggccaaggacaggaaatgaggtcagaaacagaagaaataaacgcacacttggcaggaatgtacaggaagtgaaggaggaaagggcttcacaatccaggctgct

SEQ ID NO: 192898 - DNA, 122 bp, Homo sapiens
cgagagttgggcgggccgagcaatcgcagcagtctattccctcactctccctggaggagccgctggccctggactctccaaattctgagctctcatcatggcggcggcggccgcggcggccg

SEQ ID NO: 192899 - DNA, 122 bp, Homo sapiens
gagatgatgaggtttctttcagcctcccatgctctccaccaatgatcatgagtttccattcgagacacagaatctggctttgagaataagaaacagttccctccagcttttcttcaagagcc

SEQ ID NO: 192900 - DNA, 122 bp, Homo sapiens
tcctcctgcctcagcctccccaaagtgccgggattataggcgtgagccaccatacctggtcgaccttgttttactttgaatgtgcttatgaatcaattggggatccttttaaagtgcagatt

SEQ ID NO: 192901 - DNA, 122 bp, Homo sapiens
ctcccactcagtactccctcctggtgcctgcctggggctcgaggggcgtcatagcagccacgccctggaccaggccccttccctgacgctttgcctgacgctggcctcctgctgcctcagct

SEQ ID NO: 192902 - DNA, 122 bp, Homo sapiens
aaagggcgatactttggtgagatgggcacgaagaagagggcaaaagaaaacgtgcgctggcgtcacctggccccttagaggcacctggggaaactgaggtggaggatgaggacagggcggtc

SEQ ID NO: 192903 - DNA, 122 bp, Homo sapiens
tttaatttatggaaggggaggggagttgaggagcagggagcgggaagcatgcggtttcaccggtgcctagagtttaagttaaaaaagaaacaaaaaaagtacaaaagctgagaatgctggat

SEQ ID NO: 192904 - DNA, 122 bp, Homo sapiens
tggagtcagtacacagtgttggggtgggggcagcgtttgggggcgacgagttttgtgcaccgcgctggagtaccctgcacataaggtccgctcatgggcttctcagtacggactcgccggcg

SEQ ID NO: 192905 - DNA, 122 bp, Homo sapiens
acacatttccaccgtgcagatcctcacagaaggcttccctcctggaggtaaatgccagcacgtcctttcctaagccaggagggtttggtgccatgcgtgggtgacaagaggagcatgcactt

SEQ ID NO: 192906 - DNA, 122 bp, Homo sapiens
ccccaaccccccagaccccccaacctcccaggcccccagaccccccagctcccttgctcccgggagctcccaggcccgtcctgcatgcgccttggggttgttcctccttgatggacgccgcc

SEQ ID NO: 192907 - DNA, 122 bp, Homo sapiens
taaaacaccgtgttttaggcagcataatgcaaacaaacttttccaaaattacttccactgcgcatttgatgaaaaacccgacctcttagcctccagctgtcctcttgaagcccaagttgatt

SEQ ID NO: 192908 - DNA, 122 bp, Homo sapiens
gattttgaacttctagactctagaattgtaaggcaataaatttttgttgtttaaggcacccggtttatagttctttgttatggcagccctagaaaactaatataagaagaagaaaaataatt

SEQ ID NO: 192909 - DNA, 122 bp, Homo sapiens
agcgggaagaggggggtgggtgggatcggtgggggagaccatgacctccagctacgggcacgttctggagcggcaaccggcgctgggcggccgcttggacagcccgggcaacctcgacaccc

SEQ ID NO: 192910 - DNA, 122 bp, Homo sapiens
ggggaggggccggcggtgggggagtgtctgctgcccccgcccctcgagtgagtgactgagcgaggagctcccctccctcgctcgctcctcgcaagctcccgctcgctccctgcccactcccg

SEQ ID NO: 192911 - DNA, 122 bp, Homo sapiens
tgcacgcgcgcacactctccctcccagccccctcccctgcgccctgcctcccgcctcccgcgccgcccgccgcccgcgctccctccgcgcactcccccgcgcacacacacttcacactcaca

SEQ ID NO: 192912 - DNA, 122 bp, Homo sapiens
tccggagcctgagcaagttccaggagctcgagccgccacgacggcccgagccggcacggacggccccaggagattcgtcacggaaacctcgccccaccaaggcggcccctaaagacaaaacg

SEQ ID NO: 192913 - DNA, 122 bp, Homo sapiens
tactagcgagcccctgagctcaaagatgtacaccacttcaataacaagtgaccctaaggccgacagcactggggaccagacctcagccctacctccctcaacttccatcaatgagggatccc

SEQ ID NO: 192914 - DNA, 122 bp, Homo sapiens
cccagtccagtccagagtccttacctgcagcaaaggctgcggtggttgagacaagcgggccgtggcctggggggaacagtgaggggaagcaggacaggaccaggaagctcacggacaccagg

SEQ ID NO: 192915 - DNA, 122 bp, Homo sapiens
caccaactccatctttagctctccctgccaggtatgtgtgggcataaattagcaaggaaccggcctgaacaggatgagaaatcttcagagactgccctgagcataacccagaatcaggacct

SEQ ID NO: 192916 - DNA, 122 bp, Homo sapiens
cagaggaagcgtgagcgaggggcccgctgcctgcggcgcctgcctgcttacctccctcatcgtcctggccagcgtccttgggtgtctccatccgcccctgccgaggctctgggccaagtcca

SEQ ID NO: 192917 - DNA, 122 bp, Homo sapiens
ttcaaggtgggaaacagtgaaagctggagtcacaggtttccataggaagcaccctccatgcgcatgctgagcagatggaaatgggggaagatggcaggcatttacaagtgggcagagcttac

SEQ ID NO: 192918 - DNA, 122 bp, Homo sapiens
taatagtttgtaatctaccaaacagcaactgccagaagccagtcccagctaacctactggcgtgcacgaaagaacccagcgatgctgatctcgtttcgttatttttctgacttaaacggtta

SEQ ID NO: 192919 - DNA, 122 bp, Homo sapiens
cggggcgtcacaggtggcgtagaaggccaggctgcgctcgttcagcttcatggtggcaatcgcggggcctggaggggagcctggggcctggaccccatagaagggctgttatgcacaaggcc

SEQ ID NO: 192920 - DNA, 122 bp, Homo sapiens
agggaaccgaaatcggacacaacagttgcagtgaacccgactcagggttgagcgcatcagcgctaaacccaagacaaaggctgccctgtgtcttccgtactcagcgctctcctttggtaatc

SEQ ID NO: 192921 - DNA, 122 bp, Homo sapiens
tcactgtttgaggaattctcctcccagctaccatgccagaaaaacacttacaccctgccccgtggatccccaaaaactaaggatgtatccacagacctaactgaaggcagatcagccttcag

SEQ ID NO: 192922 - DNA, 122 bp, Homo sapiens
gaacacaagggggagtaacagagccctgcagctactgttacgcagggagcgccaggtgggcgtggccggaagtggttcctcttgacttccacctaataaaggggtctgagccggtcgcctga

SEQ ID NO: 192923 - DNA, 122 bp, Homo sapiens
tcgcgacgggagagagctttacggcttctgttgcggctaacgggcggggcgtctggtcagcggcgggaaggcccttaggcgctcagagcgggcgggccctgtgaggcggaagtggcgggctc

SEQ ID NO: 192924 - DNA, 122 bp, Homo sapiens
tgaccctgcaattcgctgatttccccggccacttgaaccgcccctgccaggttaaagaggcgggagacacaccccctcggaagcccggagctaccccgcgtttaggactgcaggcttcgcgc

SEQ ID NO: 192925 - DNA, 122 bp, Homo sapiens
gctgcttctccggacttagtggcaggagggtgaagagcgaggcatgcggagtcccggattcggtccttctatgtgcaaggagcctttgcccagggcgctcacatttcacccgggcgagagga

SEQ ID NO: 192926 - DNA, 122 bp, Homo sapiens
gtggccatcatttacctgctgagattggaagaacgctgttgatgaaagtcggctgagacacgatagagaggaagaaaagctgaagataaattcccaaagtcattggattcaggacaaccatg

SEQ ID NO: 192927 - DNA, 122 bp, Homo sapiens
gagggggccgtgaaggctcagagaagccaggagacagctcccttcagctgcccgtgaattcggcagaagggcttgtttttcccatcacctgaggatccgagccagtttgtggaaaaacagac

SEQ ID NO: 192928 - DNA, 122 bp, Homo sapiens
gtgccggggcggggccacagcgggcgggtcctggagcggctcgggagagcggagggtcggcgagggtgcctgcgcgcggctgggcctggggatgcaggttccagcctgcttgcgcgtctcac

SEQ ID NO: 192929 - DNA, 122 bp, Homo sapiens
cacagcaaatcaggggccaaggccactccctctactcactggaggtcagaaagctgcctgcgggatgttgtgtagctgggacttctcttgactgactcccagcacagcccagcctccagcat

SEQ ID NO: 192930 - DNA, 122 bp, Homo sapiens
ttgaccacacgcaggctctggctgcggattaggggcttctctcggggccgggctggcgcccgggggactgcctcagtatctgaccaacactcatcctcggtgtcgctgtcctgcaggccccc

SEQ ID NO: 192931 - DNA, 122 bp, Homo sapiens
gaacagggaggcaacccaccaagccaaggcgccaggctgctgtggggaagaaagctggtgcggctctgaaacccgtgggcggaatgaagccagttcccggaacttcatcctgcctcaccctc

SEQ ID NO: 192932 - DNA, 122 bp, Homo sapiens
tgctttgaatgtgctccagtgcttgaacaaatgcttaattgagtccctagagatatacagcgtttgggcatagaaaattttcaaagctggtgtttcctaatcaccgacagtggctggcggaa

SEQ ID NO: 192933 - DNA, 122 bp, Homo sapiens
aatttgccagttggctttctcttcctttagccttcccagaaagtttagggaatagagctccgaaggccaggggctcttcgcctgggaggagcgtgcgccgtccttcaggtgcccgcgagccc

SEQ ID NO: 192934 - DNA, 122 bp, Homo sapiens
agctgtcaaggtacagagttcacactcaaacactcccagaggacggcactctacatgggacgccatctgcaagatcaagagatggggtgtccctgggtcacaggctttctcaggaatcctgc

SEQ ID NO: 192935 - DNA, 122 bp, Homo sapiens
atctgctcctgctcacctgtttctcccatggtagggggcccctggggtccagtggggggacgttctccaagagcactaggaagaaggcctcctccaggcccacccacagccccagaccccgg

SEQ ID NO: 192936 - DNA, 122 bp, Homo sapiens
gtcacgcggggtgggggttcctatgagcatcactttacaaaaccaggagggacggaagtgcgagggggcagagtcttggaaacaggtcctgggccaactgcaacagaatatacccgccgcgt

SEQ ID NO: 192937 - DNA, 122 bp, Homo sapiens
tgggcaggggtagtgccaacggacacctcatggtgtggtagcctaaactcagagcctaaacgcaggaccagggctaggagcccaggaccagaaggcaaaacttcctacctgatttatggatg

SEQ ID NO: 192938 - DNA, 122 bp, Homo sapiens
gtaagtttaaatgagtaaatatggtcccacctgggtgtggccagcgacaggccagagcttcggacatgtccctcccctcccagcctacagcagaaagaaaagaagtcagacaggcacaagtg

SEQ ID NO: 192939 - DNA, 122 bp, Homo sapiens
gtggtctgtggtctcgtgtccacgctgacctttgaacctcgtaactcttcgggtctccagcggccacctcttttaggctagcccgaatgtttgactttccggtcctcaatcttcctcaccta

SEQ ID NO: 192940 - DNA, 122 bp, Homo sapiens
ggcagaagaaggtatatggattggggccagaacttaaaagaaatgtcaagtaaaaaaaggcgcatgtgtagaaaaattaaaaagaaaaggaattatcaatcaaagttgtttttgcctacaaa

SEQ ID NO: 192941 - DNA, 122 bp, Homo sapiens
caggtgtggacattgcgacacgtgtaaagatgtcagtggggcctgcgttcgaggatgttccgaccaccatgctggtcgcaccctccagcgatgggtcctcggtgcagtgatctcaagcgtcg

SEQ ID NO: 192942 - DNA, 122 bp, Homo sapiens
ggctgggagtctgctgctgctcactctgcagagctggttgccaagggaacggttggcaagcggaagtggggctgcgctggcgcttcctcttccgggtcggcgctcctgcctccctgcaggga

SEQ ID NO: 192943 - DNA, 122 bp, Homo sapiens
tggaaacaagtgggacccccgccagcacagctcatgcaactgcttcccctccaacagtttcgcccatcccgactcaattgagggacccgagacgtttcttctctgggccaatcagaacccag

SEQ ID NO: 192944 - DNA, 122 bp, Homo sapiens
cacagcccgacccgcggcgcgcttgccgctcaccctcgtccgggccctcggcacccgccacggccagcagctgcaccagccccaagagcagcaggagcaggaaggctttccggggcctcatg

SEQ ID NO: 192945 - DNA, 122 bp, Homo sapiens
cttctcctgctgatcctggtcctgctcacccccttccaaatttaaagacacaaggaagcccgggcctgggacggtagggagagcagacagtgggggaagggggggggggtgggggcagaagc

SEQ ID NO: 192946 - DNA, 122 bp, Homo sapiens
cggacaccacgcggcgcgcgccccaggcttcagcggacaccgccgcgcgacgtggccttccgggtcctcccaagcggctgccccagtcagtgtcggcggcttccatccccaggcgcccctcc

SEQ ID NO: 192947 - DNA, 122 bp, Homo sapiens
gccgcggctccaccccctctggctggccagtagccttcatcatgggggacgtgagcagaccgagtgagagctgccatttttctgggtgtgggcggacagttgtgcaggcccatgttatagac

SEQ ID NO: 192948 - DNA, 122 bp, Homo sapiens
ctgtgaaaatgtgtcacaaccatgatgcccaactcaggttcttcttagttgttcaagtgccgccatgtgtttaagggatccatagaagctggttagatacatatgtaggcttatcttgttct

SEQ ID NO: 192949 - DNA, 122 bp, Homo sapiens
gaccgtgcaggaagacagtcagggacaagcgatggcttggtaccctccgtagcccgaagccggccggcagggagctctgggcagctgtccacagacctgggggagccctgtcctaaatggac

SEQ ID NO: 192950 - DNA, 122 bp, Homo sapiens
gagcgcgactccctggggcagggctgggccgaaagcggggatgcgctggacgtccgcaagcgggggcggagaggagaggggtcccattgacggacccccggcttctctgcattaaagacttg

SEQ ID NO: 192951 - DNA, 122 bp, Homo sapiens
aaagtcatgcccttccctttttgatggtgtccaagaagttccacttaggaactcccatttcgtttccatgtaacttggtcacatggacacatctgttgcaaaagagattgggaaatgtagtt

SEQ ID NO: 192952 - DNA, 122 bp, Homo sapiens
atggcaccaagcattatgaaaagcctaatggaccacaccattcctgaggtttaaaattcacggcaccatggaaatgtagctgaacgtctccagtttccttctttggcaacttctgtattatg

SEQ ID NO: 192953 - DNA, 122 bp, Homo sapiens
accagttttaaatcgtcttctctgacatgtcaggcaaatatgtgtaaaaggtcagctccacgctgtggagcagagacctgtcccccaggcaccaaaacctcccctttctaaccgtgcccgag

SEQ ID NO: 192954 - DNA, 122 bp, Homo sapiens
tttgctaatcccagcgtcattcgcagtgcctccatctcaaaatctccttaatgccaaaggcggtaatgggtgtctgctgtgcctgcctaatgagctgtaaaatgaaccagtgggtgatttgt

SEQ ID NO: 192955 - DNA, 122 bp, Homo sapiens
ggtacaggagggtttgtgcgtcctcgtgccctgcactttcttccatcccataccctactacgacaagaactccccagttcatggttactggttccgggaaggagccattatatccagggact

SEQ ID NO: 192956 - DNA, 122 bp, Homo sapiens
tgcttgggaggctggaaggggcgggatgggggatgggaggtaaggagagggcggcgggcccgggctgcagagagcgccaaggcagtttcgatgaaactgacccccatgtccctatcgcccag

SEQ ID NO: 192957 - DNA, 122 bp, Homo sapiens
cgctcccctccccgctgcccgcaccggtcccagcgccgctccccgcagccttcgctctcgcgcccccaccccgaccggcttgggctgtctctcttcagccgccgtaactgcagcccggccct

SEQ ID NO: 192958 - DNA, 122 bp, Homo sapiens
gacgactttccgcgggacggctccctgggggatgattaacacttcatcgtccatctgatgcgcggggcccagcactccatcgcgaacatttgggccgtggccagccgcattaaaggttatta

SEQ ID NO: 192959 - DNA, 122 bp, Homo sapiens
tttccacaggaaagggaaagggggagggacacgggtcagcagtggggggctgtgcagtctcgcagatcttcacccttggttcttgaactctggaccctgagccctgccgagggtcccgcaaa

SEQ ID NO: 192960 - DNA, 122 bp, Homo sapiens
atccaactggcagcattaagcttttgtcccttcgtggctgcttctgaacttttccctccccgcatttgtagtggggggctggaaaggccctttcaggacctcaggcccatcctcttcccaaa

SEQ ID NO: 192961 - DNA, 122 bp, Homo sapiens
agtggaatttgaaagcctagaataaaaaatttattatagagaaaaaaagacactgattttcgagacactggcaattgaactccgcctctgacaagctgtgtgacctcaggcaactcacttga

SEQ ID NO: 192962 - DNA, 122 bp, Homo sapiens
aatttaatactctggattacagttcatatggcttcaacaagcctatttgaagtttcagagcgtcagacccagccatgggttttcaaaggagaaaagccttttctttgaattttggaactcat

SEQ ID NO: 192963 - DNA, 122 bp, Homo sapiens
cctgccaggcacaggcaggtgacgatcctctagcactttataaaatgtgctgaagggaatcgccggaaaggaaggaattcaaagcatttgtacagcaaatatgtcagtgtgtgtcataaacg

SEQ ID NO: 192964 - DNA, 122 bp, Homo sapiens
gccgcgcccggctcccgctccctccgcagagcccgttcccagcggcccggccggccggcccgggacccccacccgccccccgcggcccaaccaactattattaatggagattgatgaggccg

SEQ ID NO: 192965 - DNA, 122 bp, Homo sapiens
acactgttttagactgtggggcatgggaacgttagatcccctcatcgccgttctgaagcccgtagctgttcgccatagaggagcaggccgcggcttctaagatggcgtctttttcctcgttt

SEQ ID NO: 192966 - DNA, 122 bp, Homo sapiens
ccagacacaattgagatgctggtaatatgatgcaggcaaagtaggcccagatccctggcccgaaagaattcacgtactatttatgtattttagtcagcctgtcttttcctcctacattgcct

SEQ ID NO: 192967 - DNA, 122 bp, Homo sapiens
attctctacctctctgaggtctctcaggctgcttcatcatgctccaagatgaattccttacgcttaagacacctatgctcaaactatcccaaatgacttttcaaaattggtaaccattcctc

SEQ ID NO: 192968 - DNA, 122 bp, Homo sapiens
ccagtggttgtctccagctctgcattcttcctcatgctctcctttcctaaatagtctcctcggcttcactgcgttctttgcatcctcaaaggctcaccagaaaccttgtctctggcacatgc

SEQ ID NO: 192969 - DNA, 122 bp, Homo sapiens
cttctactggctcaggagtgaaactgcaaaccttggcagtcagtgttacatcttctaaggcggcgcctccggagttgtttgttcttgcccgagaattcatgtttttcctaacttcaaaagat

SEQ ID NO: 192970 - DNA, 122 bp, Homo sapiens
ctatcgagtaggattcctagtgttcgattcctgtgagaaaaggtagactacgctgcctgtcgcaggttagtttgttgtaaaactgttggtcaatgacgttgcccttttaattgcgtcgttag

SEQ ID NO: 192971 - DNA, 122 bp, Homo sapiens
ggatggtgagggtgcttgtcccgtctctgaagcacctgcccagggcctggcaccagccggcggacactgccttccccatgctgcccatgacccatgctgcccgtgacccatgcaggtggtct

SEQ ID NO: 192972 - DNA, 122 bp, Homo sapiens
taacgcggctctgctagtgttcccacccccgccgggccaaccccgtgcgcaggcgcactccgccaggcccgggtgtccgcactccccagccccgcccctcgggcccagcctccgcgatggca

SEQ ID NO: 192973 - DNA, 122 bp, Homo sapiens
cgcctttccacctacggcgtccggggacgcaggaagtaaactaagttgtttctatggcaacgcacagctttggcggatttagctggctaccattttgccttcccttgttcccaagtagtaca

SEQ ID NO: 192974 - DNA, 122 bp, Homo sapiens
atgaaatgataaatcctgaggtttatttcacatggagtgtttaaagagcagaaggaagtgcgtgataagtgccctttcgcggtgagcacgcgagtctcatgttctctgcccttcccgctctg

SEQ ID NO: 192975 - DNA, 122 bp, Homo sapiens
tcgtaatccagatctcgtaggaaagccccgcctctatccgcatggaggcgggaattgccacgaagctcctgtggagggagaggaagcagctgcggaaagccaataagagtggggaatcgatg

SEQ ID NO: 192976 - DNA, 122 bp, Homo sapiens
caagccaccgctttgacctaagagccaccaggttggggggcagggcgtggagaggactcccggccagaggcgggaaaggcagccgggaggagaggaaagaggaggaggaggggaggaatatg

SEQ ID NO: 192977 - DNA, 122 bp, Homo sapiens
aggcgcggaggctgcgagcggtgcggggtgacctgaggacacccgaagacacgggcgactcgcggggacatcctgccccctgccggccgcgagcgggaccgcagcggcccgcgggtagcgtc

SEQ ID NO: 192978 - DNA, 122 bp, Homo sapiens
caacacttccggggaagatcccaccccttccactcaacgaggcttgcgattggtttgctccgtgcgatatttgaattgattgaaaggtgaagggccagttcaaaagatgggtgagagaggga

SEQ ID NO: 192979 - DNA, 122 bp, Homo sapiens
atgggcaatgaagctgtgagaaggggtggggaagcaacgaacagagcctgaatcccctcccgcagccttctacagtgctgatggtcctccgcaggggtccccgggccttcccacccagccag

SEQ ID NO: 192980 - DNA, 122 bp, Homo sapiens
acacagatacctaaaccgctagagcttggggaggttgcagacaacctgttgcccactcctcgactcctctgagagtcacctgtgcaagagagagggcttcctcctggtagagactaataaag

SEQ ID NO: 192981 - DNA, 122 bp, Homo sapiens
tttaggattaaaaattggagcctgggaggcacgacattcagaccctaaagttcagatcaacgccatttgcagtcagtggctacccataccccatgctgctcttggtatcctttattctaatg

SEQ ID NO: 192982 - DNA, 122 bp, Homo sapiens
gggcagggtcctgtccataaaaggcttttcccgggccggctccccgccggcagcgtgccccgccccggcccgctccatctccaaagcatgcagagaatgtctcggcagccccggtagactgc

SEQ ID NO: 192983 - DNA, 122 bp, Homo sapiens
ttactaagagtgtgctcttcttgccttgttttagccgaacaatggttttccgaaggcgctcgtcttttgtttgttgtgtttcattccccacctccaaaaaacaccattcacattggttggta

SEQ ID NO: 192984 - DNA, 122 bp, Homo sapiens
aacaacctgaacttcccaaccttttgccccactcccgcttttcctagagccttcagtgagcgctcttgcctctcgctgcggccagcggaaccccgacactcactagcctttaccagtacgaa

SEQ ID NO: 192985 - DNA, 122 bp, Homo sapiens
ccgaggaggagcaggaggcggccctgtgtgcgcaggggcccaagcaggcctccggggctgcggccgccgcccccgcccccgtccccgtcccggccgcgagcctccgcccgctgtccccgggg

SEQ ID NO: 192986 - DNA, 122 bp, Homo sapiens
gttctgggaacctacaaactcaacttcagtcagaatcctctgcatttgtcccataaccctcgtgttttgtttctctgggcctggacctctacagtaacgcagcaaggcaggacatggtcctt

SEQ ID NO: 192987 - DNA, 122 bp, Homo sapiens
gtattggcggtcaggtgagatccaggaggctgcccacacctgcgccgaagggaaactgctcggggctaggcaggcagaactcacccagagagagcggactcgggaagccagccagaaagtga

SEQ ID NO: 192988 - DNA, 122 bp, Homo sapiens
tttctctatcagaaaaccccagagcccatcttacttgtctatctccactcttctccctcgcgtggctcgggtggcgtcctctgactacgcctactgccagcctccagcccttggggtggggg

SEQ ID NO: 192989 - DNA, 122 bp, Homo sapiens
ccctgccccccacccccaccatctagggtgtggcctggcagctctccccagatccctccccgccaagttgtcagactttgttttgttaagccaaaataggagaaaggctagggaatatggca

SEQ ID NO: 192990 - DNA, 122 bp, Homo sapiens
ccaaaggattgtaaatatgagcctggggtggggcccaagtcttccagatgtggctgctttcgcattttcagtgtgaattcaagggacctaccctactctctgacggagataacaagtgtcaa

SEQ ID NO: 192991 - DNA, 122 bp, Homo sapiens
gttttggtcactgtagtctttctagcacctagaaaagtgcccagcacatagtaaatacaccgtattttcaataattgaacgaaatctagagtgacctttctcccctagtctccctttctctg

SEQ ID NO: 192992 - DNA, 122 bp, Homo sapiens
taatgagggaaacagataatcccaaacaatgactaatccgtccagtgacctatccccctccggccttccatcaagatggctggggagaaggggaccagcccaggcagaaaccctcgccgagg

SEQ ID NO: 192993 - DNA, 122 bp, Homo sapiens
ggcggccggagctgagaggcccctccgtccttgaggagcaaacctggggctgcggagaaccggggctgtctgtcttctcgctttgggggccgggcgccctgcccctcgcccagaaaagcctg

SEQ ID NO: 192994 - DNA, 122 bp, Homo sapiens
cactccaatcaggggcccgatgctaagcaagccccggaaggtccagcctgaggtcaccgccggtgacacatcaaatcaaaatcagtgagagggaaagtgaggctttccctttatcaagctgg

SEQ ID NO: 192995 - DNA, 122 bp, Homo sapiens
cacctggaaaatcgggtcactcccaccctaatactgcgcttttccaacggtcttagcaaacggcacaccaggagaatatatcctgcgcctcgctcggagggtcccacgcccacggagcctcg

SEQ ID NO: 192996 - DNA, 122 bp, Homo sapiens
tccacacttagtcatctgctcatctttcaagacatgtttcctgagagtctgttatgttctcggggctggtctcctgggatacctgtcactggtggacaggcagtcctgatagaactctgcct

SEQ ID NO: 192997 - DNA, 122 bp, Homo sapiens
agttactcataaactataacttctcatgccttctactcttgaacggaaaggtaatacaaacgaaaaagaaacctggccaatgggcaaggtgttatttctggatggttctaaaagcaacaatt

SEQ ID NO: 192998 - DNA, 122 bp, Homo sapiens
tcagtgccttaattagaatgagaaactgcagaaaatgatgccaggcgggcccacgctgctcgaataatttttactagacagaatttggtagccagggagcccttgatttgaagatggatccc

SEQ ID NO: 192999 - DNA, 122 bp, Homo sapiens
cagggaaaccgccctcttcaggacgcgcttgtatttctgcatcctgtgtcctgagcctggcgcgggaaccgccactcaaaccctcagtgcagccgagatggagggaaaacaaaagtgaattt

SEQ ID NO: 193000 - DNA, 122 bp, Homo sapiens
gtcaaggagaaactagcagcatgcttccaagaggtctatctcagggggaatcacacaagacgttcatcattcctccagcaacaaattctgataacatatgtgcaatgttgtctactaggaaa

SEQ ID NO: 193001 - DNA, 122 bp, Homo sapiens
gagagaggggaaagagggtctgattttttaacgaagggaaagaaaatatgccatttctagcgcttcagccacacaaagaaagcggcggaatgatccgctctcggcgaccgcaagtcccggct

SEQ ID NO: 193002 - DNA, 122 bp, Homo sapiens
ttgagcacagcagctgctggcccaggtgctaagcccctcactgcccggggccggtggggccggcctgccgctccaagtgtggggtccgctgagcccacgcccaccaggaactcgcgctggcc

SEQ ID NO: 193003 - DNA, 122 bp, Homo sapiens
aggtttgagtgtggaggtttgattatcacggactggctcggggccggcttggttctcccgcgaaggttccagggtgtgtgtgtgtgtgtgtgtccgcgcgcgcatgcaaatcccagaggagc

SEQ ID NO: 193004 - DNA, 122 bp, Homo sapiens
tctaacatcgaaacagtaatcctcaaatgtagacaccatacttttccagaaatagttggacgtccataaataagctatcctctacagttctgtctgaatttgggggaaggcaaggatgtatt

SEQ ID NO: 193005 - DNA, 122 bp, Homo sapiens
gttctgaagagttgtccttttgtggaggagatttacatctgtagaggaaatctacattagcgaagtaaacagtagatgcgaacaggatttctctgagaccttatctacattatcttgatcta

SEQ ID NO: 193006 - DNA, 122 bp, Homo sapiens
acacgaggctccagtgcacagaagggctgaacaaaaccgcaggacaggagctggcagcaccggcagggagggaggtgggaccacagggacccccagggagcagccgccctctaaccccttgc

SEQ ID NO: 193007 - DNA, 122 bp, Homo sapiens
gacttccaaggagctcccctctcacccagcctggcctgccttctccacagggtagctgatcgtcagcatcatcttcaatggtgttgtcaagagcactcagtgctcctgccatccctgtccat

SEQ ID NO: 193008 - DNA, 122 bp, Homo sapiens
ctgctgttttaaacaccaggtggttttgtcagtttcttacattgcagtgatttttgaatgcgggcttctgtgcccccagttccgtgattatattactcctatgttacttctccatgtcccgc

SEQ ID NO: 193009 - DNA, 122 bp, Homo sapiens
gggcttttactcacctctcgagtcgtctttgccaaaaccctataaggtaggtggtactggcgttcgcactttgcagataaggaagcggaggttaagtcattctccccagtcctgatgaccac

SEQ ID NO: 193010 - DNA, 122 bp, Homo sapiens
gagacggcatgtcccgccatcgggtttgctgctgaatgagcagatgatctaatgagtgaccgtcctcacccacgagaaaaaacacaacctggtctccgtctgccggttagatcggcccccag

SEQ ID NO: 193011 - DNA, 122 bp, Homo sapiens
tctacgcttgtcccgagtgcacctagggcaggaggctgcttttttccttttcctccccaacgcaaatcccccactcctcgccttccctttgggtccccaacgccctctctctccctctcccc

SEQ ID NO: 193012 - DNA, 122 bp, Homo sapiens
cctttattgcaagtagaaataaagcttggttaaaggcttatcgtacaaaccagcagaaaacgctcgcagttgctgacctgggaagtggctcctgaatgtttacaaaacctggctctgagcag

SEQ ID NO: 193013 - DNA, 122 bp, Homo sapiens
gtttgaaaaggtctccactgggttcacacttggaaacagctggcagagacagtgaatgaacgggctcagagaagaggattcagtcagcaggagactgcgttagagcctctggaattaagaca

SEQ ID NO: 193014 - DNA, 122 bp, Homo sapiens
gagcagcgttcaagggtggatgtgtgaggcacaaaggtgagcaaagcaggcgtgtgaggacgcacagctgaccctgccagcgggccccgcacccaccagcacgagccgcacggggcatcggg

SEQ ID NO: 193015 - DNA, 122 bp, Homo sapiens
caaaggggaattatgtgtttctggaagaattctgagcatctctctgacctgactacgagacggctcactaccaagcgcatgtgagagcagaatggaagggaaactgatgaaaaccactttta

SEQ ID NO: 193016 - DNA, 122 bp, Homo sapiens
cacccaacacctgcctccccaggaaagacgctctgggcccgatctatgccgcccggccgccgggcctgagtgaagcctgtccagcctaggaggggccctcagaacctcccggtccaagcctc

SEQ ID NO: 193017 - DNA, 122 bp, Homo sapiens
gggatgtgaggagcccctctgcccggctgcccagtctgggaagtgaggagcgcctcttcccggccatcatcccgtctaggaagtgaggagggtctctgcctggccgcccatcgtctgggatg

SEQ ID NO: 193018 - DNA, 122 bp, Homo sapiens
ggggtcgccatgaccgagtggcccaggcccgagcgaagcccgcgcgcggtgagtccgccgcggcccatccgtccctccgcccgccagagcgtccatcgggacgcccacccgggagggtctcg

SEQ ID NO: 193019 - DNA, 122 bp, Homo sapiens
gcatggcctcatgttccgggacacatcgtgtatgtggcctagggagataacaaaggctctcggtacagctagtgggtgcaggatttcctttggaagggtgagaatgttctggaactagatag

SEQ ID NO: 193020 - DNA, 122 bp, Homo sapiens
accgcagaacttccttcacagttggcgagctattcagaaatgatacccgagtccgaggctcggccttcactcgctccaagctccggtggcacctgcagccacctgtagggtgtgccttttcc

SEQ ID NO: 193021 - DNA, 122 bp, Homo sapiens
gcacccgggcggaaggatatggagcgcgcccctggttggcggggcgctgaggccagttgccgggtaacggagcggagcggctcccggcgcgccgcctcccgccctccgcggagtggcgctgg

SEQ ID NO: 193022 - DNA, 122 bp, Homo sapiens
cggggcggggcgtccgcggggctaggaggggagggaaactgaggctcgagcgggtgctcgcgtcctcgacctctgccggaatggggtctaggacgagattcctcaccctccgagcctcagtt

SEQ ID NO: 193023 - DNA, 122 bp, Homo sapiens
ggcagagcatcctcttttgaaaccagaattctcttcccattagcaccacttctagacacccgctttccccaccggagtccaatccattcccctcaccttccggagggggcctcgcaccggac

SEQ ID NO: 193024 - DNA, 122 bp, Homo sapiens
tctttctaaatctatgggacaaggcagaataaaggtcgggcaaccaattgacttggacgccgtcccaactccacaagttaacggtcgcagctcttgggcaagacgttacaaaactagaagct

SEQ ID NO: 193025 - DNA, 122 bp, Homo sapiens
ctgaatgcccaccatttgctaggcattgtgctttgcatatgttttctcatttgattctcacgacaacactgcaaggtggatagaatttgccttcctttacaagcaaagaaaaggaggctcaa

SEQ ID NO: 193026 - DNA, 122 bp, Homo sapiens
gtgtgcttagcagaggacaattcaaacgggtgtccagcagagatggtcaggacctcagcccgcagctatgagaaggggtcctccgggtggagggaagagtctagccccgcaggcgaggcggg

SEQ ID NO: 193027 - DNA, 122 bp, Homo sapiens
ctgaaatgaaggaaagcaggagggttgtgaggcttcattgatttctccccggcggagcagcgatgcggatggggatgaggggtggtcagaggagaccagagctagcgaacacgttcccttct

SEQ ID NO: 193028 - DNA, 122 bp, Homo sapiens
ctatcggcttctcagtgtttgaacttcaaagggctggacgctcacccaagaaggggaccccggcctgacctctctcggaattcaaaaaaatctaaggctcagagagggaatgggagctggct

SEQ ID NO: 193029 - DNA, 122 bp, Homo sapiens
ctctggtcggttctgcagacgttctcttctccctccagaaagtgccccctccaaatgccacggtcttaagagatcattggccagggtgatgctagtctccacctggatgccatccctgatgg

SEQ ID NO: 193030 - DNA, 122 bp, Homo sapiens
gcccacctcaacccggctgtcacactggggctgctgctcagctgccagatcagcatcttccgtgccctcatgtacatcatcgcccagtgcgtgggggccatcgtcgccaccgccatcctctc

SEQ ID NO: 193031 - DNA, 122 bp, Homo sapiens
tctgcttagctaggcagggccgggggacaacagcttctgcgagtctgcgattgtggcggccggtatattcggcggtttacggtaatgggcgggccccaaatccccatgtggtcccgacatca

SEQ ID NO: 193032 - DNA, 122 bp, Homo sapiens
gaaaccttggatcttgatttcttcaaccgtgcttgtctgacttctccttcaccatcagtacgttctcagtccctctgggcttaaagcagattttatttttttattttacttctctatttttt

SEQ ID NO: 193033 - DNA, 122 bp, Homo sapiens
ctgcagggaaaggcctcggagggccgccctccgtccatgggagctgtcctgaccgcgggccgagtcctgctgccgggagagcagacctgctagatttgcaaacttccgcaggccgtgcaaag

SEQ ID NO: 193034 - DNA, 122 bp, Homo sapiens
cccctgtgcctgccccagtggcccaagctgtccccacctctgggttgtctatgaagtagtcgtggatggtttccatcaccagcttgggggagccatgagccatgttcttgatcttcttgatg

SEQ ID NO: 193035 - DNA, 122 bp, Homo sapiens
gagggttttctgctgctggaagggcctctgtggctttggggagacggcagcgccagggcccgcggggcggcaggagggactgggaggcccacagcggtcccgtgggaaagctctgtagggac

SEQ ID NO: 193036 - DNA, 122 bp, Homo sapiens
cccttccccatctccctttttccacttctaaacacacacactggctgaagtggagtccagcgaaaggatggtgcatttctgtttgctttctctctgcattttctattttctgaccacaaaat

SEQ ID NO: 193037 - DNA, 122 bp, Homo sapiens
ctgatcatagatccccaaccctgcaggatgggttcttcccagatatgaaggtggctgcagcgataggattttgacgcaactgtgattgatgtcagcaggtccagaccgtgatatttcatgac

SEQ ID NO: 193038 - DNA, 122 bp, Homo sapiens
gggagcgctggggcgtgattctgtcgtgccgctttcaaaccgtagagcacaggaaacgggcggagaagaactcagcagcgcttctctcagagggacagaaaactaacaacgactttaagatt

SEQ ID NO: 193039 - DNA, 122 bp, Homo sapiens
ttccacacctcgagggctcggctcgattcagtcccctggtccaaagagtgtcgtttgacccgggttattcaatacccgaggggttatcgaactaatggctttccttttacttaaaagccccc

SEQ ID NO: 193040 - DNA, 122 bp, Homo sapiens
gaagatgagcagctccaaggccccccagaggggctccagcaaacgcccggccaccaccaccgttgtcaggctgatggccacgtcccacacatgctgctccatcagcccatgggtggccaggg

SEQ ID NO: 193041 - DNA, 122 bp, Homo sapiens
agagccagagggcccacccctacccggaaactgggggtggagaggccccaggccagctcacgccagtcttccagctccgggctgggcctgaggccggcaagccccaccccattcctctgggc

SEQ ID NO: 193042 - DNA, 122 bp, Homo sapiens
aagctcttagcagctgaaaggcaaacaattttacactatattaaagctaagttggcacaccgcggatgttcttcatgctttccctctggcaatcacacctcttcagcctccactgcccagcg

SEQ ID NO: 193043 - DNA, 122 bp, Homo sapiens
ctttgataaatgatagatatgatgatgagcacatgttagtgatattactgctctgcgggacgtctgaatcagtaattgctgtcttttaagcatctgttgtgtgccaaatactgcactaggca

SEQ ID NO: 193044 - DNA, 122 bp, Homo sapiens
aggtctcctcacgcagcagtgggccatcgggcacatccttgctcaccgatggaggaacgtcgtagacctgggggacaagcggtggtcaagactgtccatctgtccatctgcccaccccaggg

SEQ ID NO: 193045 - DNA, 122 bp, Homo sapiens
gggaaggtgatggtgctccattcactgctggggtcctgtcggtgagggcagtgggcagggcggccagacctgcggatatgggtggtaggctgtgactcagccctcggggtgagagatggaga

SEQ ID NO: 193046 - DNA, 122 bp, Homo sapiens
tataattttaatgaacgatttatccagcagtgtgttccaggggttgcctctccttatctacggggattactttgtacatgcagataagttttcgcaaacctatttccattttcttttgtaag

SEQ ID NO: 193047 - DNA, 122 bp, Homo sapiens
atagcgatggtggtaataataataataataataataataattacagctccagcttatcagcggttctgtatgtacccagcattggactaagcacaagcagtttaagaattatacaactctgg

SEQ ID NO: 193048 - DNA, 122 bp, Homo sapiens
tgaaaaaattccaggctttgtcaaatgccctttcctaggctcaaattaaccttttccaagcgtctttcacattcttcaaactcttattaatccctcaaaacccagctccaggcattgccctc

SEQ ID NO: 193049 - DNA, 122 bp, Homo sapiens
cttttaacaggcgatacagcgcattcttactctcttttctcctagatcagcaggtgtccccgccgctccagtagactgagaaaaaggaaaaggagggggcgacaagaaaggaaaggaaattg

SEQ ID NO: 193050 - DNA, 122 bp, Homo sapiens
ccaacacagcgctccaaggactccctaacgccaatggaaatggtcgctactaaagggcgccgggagtcccgcctctaccttacttgcgcacacggaaacgccttcaatgtgaactctcactg

SEQ ID NO: 193051 - DNA, 122 bp, Homo sapiens
tacgttgtttcatcaccgatgctgtgttccaatactgcctctgatcttgggaaacttgagcgcgcgggaatctgagggttgcttctagatcctcccggtccccctccggctgcccagagctg

SEQ ID NO: 193052 - DNA, 122 bp, Homo sapiens
tgcccagggaagagcaggaaagcactgcagacctggaagaaagtgtgggctagtgctgtacggcagctggaccctctggccttcatagctatgggtaaaatggcataaaatgccaacttcat

SEQ ID NO: 193053 - DNA, 122 bp, Homo sapiens
cggattctggacttcgggttccgctgaggacggatttcggaataggcacagtggctgccccgaacccctcaaggcggcctccgcgggctgtggctgaagataattttcggcgggcgcggact

SEQ ID NO: 193054 - DNA, 122 bp, Homo sapiens
agcagtgaagggactgggcaggcaggacagaaggcgctggaagctcagccatctcacccccgccttggcctgcactcacctgaagaagcaggacagacagaagagccccatcctctcccacc

SEQ ID NO: 193055 - DNA, 122 bp, Homo sapiens
ggcctcccaaagtgctagaattacaggcatgagccaccaagcccagcctctcctccacctcgtaagtgttttcaaagtaaagccagaatcctcaactgcttctgcccccatgaaatcattac

SEQ ID NO: 193056 - DNA, 122 bp, Homo sapiens
tggattacagagaaaggaccaaatgggtcagttctgagttagatgttcagttttaaaggacgatggggttactgtgaaaactgtcaggattctaaggaccctggccctgggtgagcctccct

SEQ ID NO: 193057 - DNA, 122 bp, Homo sapiens
gtacatggcagttggctcccatgagggtgaaaacagaagcatgtgtttctaggaaacacacgccaaggcccagagtcatacagtgtcacctgcaccacgtgctatggccaaggcaagttata

SEQ ID NO: 193058 - DNA, 122 bp, Homo sapiens
gaccaaaagcaatgggaggagaccaccagaaagctgatgaggccggaaaagacaaagagacggggacagacgggatccttgctggttcccaagaacatgatccagggcagggaagttcctcc

SEQ ID NO: 193059 - DNA, 122 bp, Homo sapiens
taaaccactgataatctttagctattggtgagtgcctttttctcttttctgcccatcaggcgatgcgtctgcaactactgacagcagtaggggcactggcaggcacagcctgtgcccttctc

SEQ ID NO: 193060 - DNA, 122 bp, Homo sapiens
gtcccaggcccaggtacggccccgaccccgcccaggcggtgccggcgctcacagtgtcctcggtggcgcatgaagctgtctcgccacatgaacttcttggcgcagactccgcactcgtaggg

SEQ ID NO: 193061 - DNA, 122 bp, Homo sapiens
gttcccctccccaacccctgcaccctctgacctattttctcttcccacccttagtctggccgtttcatgactgtcgtataaatggaattatacagtatatagccttttgaatctggctactt

SEQ ID NO: 193062 - DNA, 122 bp, Homo sapiens
ttcccaaaccctgcctgccgtgcccacaggcagcccaggaggtggggcttcaccggcaggcgcagagagctgcctctgcgtggtggacagccaggaagacttgatgacaggaccaatcgtgg

SEQ ID NO: 193063 - DNA, 122 bp, Homo sapiens
tcctggccgcttgacaactctggtgggatcttcccatgaccagcgctgctgtatgactcacggctccacttctttccctgcccttttgtggcaggaagggaagatgctgtgcttctcactca

SEQ ID NO: 193064 - DNA, 122 bp, Homo sapiens
gactcatcggatttcctggggtgggctccgggagaaggctcggggctggcgctcctgcctcggtccgtccagcaccaagacgccaggttcccggcggccctggccctctgggggtactgatt

SEQ ID NO: 193065 - DNA, 122 bp, Homo sapiens
agaccgggcttcgctccagtaccgcgggctcaaagcgccgccggcgcccctggccgccagcgaggtgactaacagcaactctgcagagcgaaggaagccccactcgtggtggggggccagga

SEQ ID NO: 193066 - DNA, 122 bp, Homo sapiens
tccttttatttagtggcttagatcctagaagatagattccctataaaatcattttagccacgaaatattcataagaaaccaacttcaaatgttaatgaggatactgaagttttttttaacct

SEQ ID NO: 193067 - DNA, 122 bp, Homo sapiens
gaaatatggacaagttacttggtcacgttttccagtctagcaaccctggactgatctccacgatggccagtagcagagaccacctgctgtgccctgtgactcccggccacagaaggctgctg

SEQ ID NO: 193068 - DNA, 122 bp, Homo sapiens
atcttctgcttcagccatgtcaacctttttgcagtttcacaaacaggttatgctatttcacgctcctgtacctttgtacagaatgttcttgactccacccccatcctccactaaggaattcc

SEQ ID NO: 193069 - DNA, 122 bp, Homo sapiens
tgaatgcagtcagccagtttattcactagacatggtaagaacaatgagagagcagtgagccgtgatggtccaaacacctagtcattacagttttgcgtgtgaagtactattttgaaagctta

SEQ ID NO: 193070 - DNA, 122 bp, Homo sapiens
ttctgcaggcgatccttttgagtaatttgtttcacgcacgcgccctgctgtggggtaaagcggcagattcatgctgctgtcatttgtcgttaaaacgatgtgtgttatgtgtgtgtacttct

SEQ ID NO: 193071 - DNA, 122 bp, Homo sapiens
gagtcggctttctccaggagctgctaggagcctgggctcccactgagcaatccagagcagcgtctccatttcctgggctctccaggccatcgcagcccccggccctgccacgcaccggcgca

SEQ ID NO: 193072 - DNA, 122 bp, Homo sapiens
gcggccgccggggccccgcatgcaaatgagccgacggctccggcctctctttcctcgcgccggcaaatagactctgataaggggatctttgtaattacacggagctacactggtcaattctg

SEQ ID NO: 193073 - DNA, 122 bp, Homo sapiens
cctgaggcacagcagggcttcgaggaggctcctaaagggtacaggagcactttgcagggccgtacccagaaatcccattctaggcagggttccccatttgggctgtgttttgagaaggcgtt

SEQ ID NO: 193074 - DNA, 122 bp, Homo sapiens
ctgtagtggcgttctcagggctgcgactctcttagcttaagatccccccaaagtagaacccgatgccaaggcttgtgtacagggagtttattttggaagtcattctagggaccagaaatgag

SEQ ID NO: 193075 - DNA, 122 bp, Homo sapiens
ccgagtgagacttctggagccagctggacgtgccggtttgcccagtgcggcgcggctgcacgcaccgtccacaaggtgaggggcgcacaccttccgggacgaccttggcttcccttcttacc

SEQ ID NO: 193076 - DNA, 122 bp, Homo sapiens
tgagtggaaactccatgttcttcgttggagacctctggtcctcccttcccttctttgtgccgtcgtctctgcggccagccctaatctccttctcgtggcttctccgtctctgaccccaaata

SEQ ID NO: 193077 - DNA, 122 bp, Homo sapiens
ggacgtaggggcggggtttcggggcttcggagcggagcctaaggggcgggactggggcttcggggcggggcttcggggctgcggtcgtgtggtcttgaccgcgcggctccgactgcgctggc

SEQ ID NO: 193078 - DNA, 122 bp, Homo sapiens
gtttcctggaggccacaggtcacggcgacggcggtgaccgggagagcaggctgcgaggcgcgcctcatcgggccacagacaaaccaccccggcagcggccgcgccggaacttccctcaagtt

SEQ ID NO: 193079 - DNA, 122 bp, Homo sapiens
gtgcggcacctccctccgcgccaagttagttcacgctcccaactcctgcctgcctccccgcgctgccgactgtccgcaggaccggggaggttccccatcggcagtccccaacctatcccggt

SEQ ID NO: 193080 - DNA, 122 bp, Homo sapiens
gtcagggatgttctagttattactccagtgaaaatccattgggacctttgctgcattctgcgtgatctttaaagagttttcttatcttaatgcctaaaattccaccctttcaaatgtgtttt

SEQ ID NO: 193081 - DNA, 122 bp, Homo sapiens
tccaagccctccataaagccaaaccccacatccactcaacctccaagacccttcccatcccgacccaacccagtcctaccgccaccagctgcttctggggtaaggcagcctgctgtggctgc

SEQ ID NO: 193082 - DNA, 122 bp, Homo sapiens
tttacatctgaagttaggttttagttgtttgtggccgcaaagactcccagtccactttcccgcacacctgagttagcacctgaaggctatatccgcggcgtttatccaaactcttcacacct

SEQ ID NO: 193083 - DNA, 122 bp, Homo sapiens
taggaggatattctcaaaaatcgaaaccttataaatatctacgtccaatggcagaaaatacgaggctcatgaaacttctcaacatgcgctcccatggctaaacgtgtttattaatttagaat

SEQ ID NO: 193084 - DNA, 122 bp, Homo sapiens
atgggatttgtagttttatggccagagttggttagaagtcggtaggcaggaaagatttatcgtggccagaggcctggaattggggaaataggatcctgaattgcaatgtcctcaaggattgg

SEQ ID NO: 193085 - DNA, 122 bp, Homo sapiens
acaacttctttgtaataagcagctttaggacagaacattcaggccaggctcggtggctcacgcctgtaatcccagcaatttgggaggccaaggcgggtggatcacttgaagtcaggagttcg

SEQ ID NO: 193086 - DNA, 122 bp, Homo sapiens
ctgtgcactaggaccctccccaaaagcaagagcctgcatccctgttgcctcttcctcttccgtctccgtagaagcagaaaggcacacagcttccacgacacagattcactgactgcagccgc

SEQ ID NO: 193087 - DNA, 122 bp, Homo sapiens
caacatgaatgactcataaaaacactatgctgagtgaaagaagccaatcagaaaagaccacgtgctgtatgactccattcatattatgttcataacaaggaaatctattgagaaagtaaatt

SEQ ID NO: 193088 - DNA, 122 bp, Homo sapiens
ccgcgcccaaggcagacccagcaccttcatgccttccactgccgcttgcctcgcctgcctcgctcgcctcgcctcgtggctggcactccgccctctgtctgctgctccccaccttcttccct

SEQ ID NO: 193089 - DNA, 122 bp, Homo sapiens
gtttctgcctttcaaagatttcctgctggttattcaaatatgggataagagcatatataccgcttgcatattttatagctaaaggcttgtgagtgggcagacgttcattaatttgtaacaag

SEQ ID NO: 193090 - DNA, 122 bp, Homo sapiens
aaatgcagcagataagttgaaaattcaagtgctgaggaatgtaaaggcccaaaacaatcccgtagaaagcacagaggcagatgacagtcttccgttaaagatttcactgctgtagatttctg

SEQ ID NO: 193091 - DNA, 122 bp, Homo sapiens
ttttacaccccttctccccaccacaaccagtcccattttacagatgaaagaggtgaggtgcgtagggacctttcttggggatggcagcgcgcacccgccccacacctgacctgcacctgccc

SEQ ID NO: 193092 - DNA, 122 bp, Homo sapiens
catcacagaatgaccattctaaagagaaaaaaacatttttgaaaagtagatctgtgtgctcgttacttgccttttaaagttatcttcaggctgggcacagtggcttatgcctgtaatcccag

SEQ ID NO: 193093 - DNA, 122 bp, Homo sapiens
ctgagccagatccggctggagatgccaccagacggcgacgtttctgtgggaagacgggcacgcagaaaggccgagggggctgtgtgtgaccctggtaggagcaaaccgagtgcgaagtcact

SEQ ID NO: 193094 - DNA, 122 bp, Homo sapiens
atagccacctggattcatgcaaccggtgtggaaacatctaccatcatgggctaggcacaacgtaagggactacatgtttctgaggcagaagccaccactgcgtgccagacttgtgactcctg

SEQ ID NO: 193095 - DNA, 122 bp, Homo sapiens
gactgaggacctcagacaggacactcaggcctttagtgtcctctcctaagagggggtagccgtacttgccctaagtcacagggagaccaaggaaacaaaacatcataaaaacactctgaggc

SEQ ID NO: 193096 - DNA, 122 bp, Homo sapiens
ctgggatttgaactcagggatctgcctctagagtgcacacctccaaccactcagcacaaacgacagtgcctgtgagcctcagtcaaggggagctcttatacacttctctccgtcctggattc

SEQ ID NO: 193097 - DNA, 122 bp, Homo sapiens
tattgtgagataataatggcattatcttatcaataattattgtattatcttttttcctcccgggctttgcctggaagaaaaaattagtttaccaaggatcaggaagattgatggagttgggg

SEQ ID NO: 193098 - DNA, 122 bp, Homo sapiens
aagctgcgcaaggtcatggtgagcggggcagacgcagaggggcagcctggatgcagaggtcgtggtgagcggggcggacgcagatgagcagcctggatgttgggcagcccaccccagagagc

SEQ ID NO: 193099 - DNA, 122 bp, Homo sapiens
gtctgtacctgcgtgtgttgccgtcggcggcggggccgcagccagcgacgtgccccaggacgggctgcttctgcacggccccttcgcacgcaagcccaagcggatccgcacggccttctcgc

SEQ ID NO: 193100 - DNA, 122 bp, Homo sapiens
cgtacaccatcaggggcttggggtaaccactctgtgattttccctctatgtatgttaatacgtttgtatgccatttcttctattaatctgccttttgtgagttgattttcagagggtgaagg

SEQ ID NO: 193101 - DNA, 122 bp, Homo sapiens
tttgccacctcctaacacggggtgccacctctccggcatctgccacgcttccctgtctcccgctgcccactgctgagcccacacggcctgtttccggtttctgttatagcaacatccccatt

SEQ ID NO: 193102 - DNA, 122 bp, Homo sapiens
acaaacaagtgaaagtgccgagggataaaatgggctgaaatcgatgagcagcagtgcggccgaccctctggtaaaaagctgccttttgtaagaatcccctgattgtgggggatggggcctgc

SEQ ID NO: 193103 - DNA, 122 bp, Homo sapiens
agaggaaattagccagaagacctttgtgtcgattttaaacggtgtggactgatccgcagtcgcgctcttgccgctgcccagctgagcagcgtgcaccacctctgcgtcgccctaccccgccc

SEQ ID NO: 193104 - DNA, 122 bp, Homo sapiens
ccgctcttctcccttgtggtgtcggaatgggaggaggctcggcgcgggtttgaatcggtgcggaggcaacattcgcatctgagatgaggtggctttttaacccctgagggaccacatttaag

SEQ ID NO: 193105 - DNA, 122 bp, Homo sapiens
gtcccttgcgccctgcacgcagctcgccgggatggtctccttcccggctcccggccggtccgcaagggcacctcccctaaacccggcggctcacctggccacccctgcacggactcggggac

SEQ ID NO: 193106 - DNA, 122 bp, Homo sapiens
gtggggggagaaaaaatacacatacacacaacccaaaggcgctgaagttaagcattaatacgccagattcatgatttatgatcagtatccaaaactccaactacaaacaatgcaaagtagtg

SEQ ID NO: 193107 - DNA, 122 bp, Homo sapiens
aattaaaaaaattaaatgttgcaaagaaaaaattcaaaattcttattcttgaatgaaaaacgttctcttactggtgattgaggaggagaaacaaagactaacaaatgaaaatgggagaatcc

SEQ ID NO: 193108 - DNA, 122 bp, Homo sapiens
cttactcaccctctcccgacccagccccgcgccctccctgtttgcctctggcggctcagacgcctggggaggaagctgctgccaaatgtcagtgcttccattttgctcgtgttcataacttt

SEQ ID NO: 193109 - DNA, 122 bp, Homo sapiens
ggtggcggactgcggagttgtaaagaactcagcggccgcagtagcccgggtggggcagggcgcgctccgccgcggccaaggacactggagtttccgagtccccgcccgcgcggcgcctcctg

SEQ ID NO: 193110 - DNA, 122 bp, Homo sapiens
ggcctttgaacttgttccgccgatcgcgctccgccctctgtctcccagatccttaactcgcggtcccacgaggtcgtgcgtatatccacagacatttgtatatatcttgtagggggaaaaag

SEQ ID NO: 193111 - DNA, 122 bp, Homo sapiens
aacacagccatgatcactcatttatggctgcttttcattgcaatggcgggattgaggattcgggacacacaccaaatagcccacaaagcttgaaatatttattatcttaccttttaccgaaa

SEQ ID NO: 193112 - DNA, 122 bp, Homo sapiens
ctcccctaccaattgaggcgcccttgttgccaggcttgcggcgggggagcggcgggggagcgacggggatgcgctcattggtcaaggaaggggcgcctgttactagaggcgagaaccggagc

SEQ ID NO: 193113 - DNA, 122 bp, Homo sapiens
cttcaggggctatggaaggaatagatgtgtgattcacccacgggcctgcacttcacacctcggtgtgctgctctcaccatgcagatcccatctgtgtctctaaggcttgctcctggagctgg

SEQ ID NO: 193114 - DNA, 122 bp, Homo sapiens
ccggccgcgggttgcgggccacggcgagggctgccgggcggcgcggggcaggtcttggaccgagggaaaaagtcagccggggaagcccgcacaccaaagcaagccgctccagccgctgagaa

SEQ ID NO: 193115 - DNA, 122 bp, Homo sapiens
ataactcccagcgctccttccgcacgaaccgcccctgcacagggaacctgctggaaaggacgagcctctcttgcagatgggccaattagatagcttgctcttgtgaacgacaggtcttgtgg

SEQ ID NO: 193116 - DNA, 122 bp, Homo sapiens
aggggcactgggggtcgaacccagggcgatgggcgcgggattccccacgctcgccaacgacgccgcggtgtggaaccttcaactggctccaagcgctgtgggatctggaagaggcaagggag

SEQ ID NO: 193117 - DNA, 122 bp, Homo sapiens
aacgcgcgcgcgacggcaaggtctgaactctgttacccagaggccctagcaaccaggaggcggcccgcgctggttaaattctcacattataggcagggtggcgagaccccgccccggaaatg

SEQ ID NO: 193118 - DNA, 122 bp, Homo sapiens
cattggcagtctcgcttggcatccattctctgaccgccgccggctttccacccacctgcccggctcatcacctctgactcctgcgggccttccagccggcgctatctcgcagcccccgacca

SEQ ID NO: 193119 - DNA, 122 bp, Homo sapiens
ttctgtttttcccccaactccagcattctgtgatatgtagtccggagttccgtgtagtcgcgcatagctcagctgcagtaaggctgtaaatgtttcccctgcggaatcctgggaactgtagg

SEQ ID NO: 193120 - DNA, 122 bp, Homo sapiens
ggcggggacgcgagggcgaatctataagaagcgtcgttcagcgagttcgctgctcagaagcgccgagagcgcggccgggacggttggagaagaaggcggctcccggaagggggagagacaaa

SEQ ID NO: 193121 - DNA, 122 bp, Homo sapiens
cagtggacagagccccttgccggagggtgtcctgtggaagacagtggcctgggccctgcccggaggaaaacgggcaccacacacctcctccttcacaaacacctctgtctgcctggatggga

SEQ ID NO: 193122 - DNA, 122 bp, Homo sapiens
gcccccagcgtgggaaatgcccccagcgtgggaaatgcccccagcgtggagtgctcccaccgtggagtgctcccagcatggagtgctcccagcgtggagtgctcatggcggttccttgtgcc

SEQ ID NO: 193123 - DNA, 122 bp, Homo sapiens
aaaataaaagaactcttacaactcaataattttaaaaatccggctgggcggggtggctcacgcctgtaatcccagcactttgggagcctgaggagggcggatcacctgaggtcaggagttct

SEQ ID NO: 193124 - DNA, 122 bp, Homo sapiens
caagtctttgatgagggaggccagctttccctctggaaggagatgccttcagttgtaaaccgacaattcataaaaagttgggggcttcgagtacacaattccgcattcccgagaagcctgcc

SEQ ID NO: 193125 - DNA, 122 bp, Homo sapiens
ggtgaagagcggggctgggtgagtgagatacgcaggaatccaaatcacctttccctgcaacggagccactcttctagaaaataagaggagcacaccacactcaagaacagacacctcccagg

SEQ ID NO: 193126 - DNA, 122 bp, Homo sapiens
gaacacggaacgcgggcgggctgtgttctcagtcacaatcagctcggatgagctggggggcgcgggcgcaagcgggcatcggcacctggcagaaagcgccgcgccccccgcgggtgcgcaca

SEQ ID NO: 193127 - DNA, 122 bp, Homo sapiens
ttgcctccttgttttcttcaataaagtgctatttgtgctttgcatttctcattaacgattcgatttatttcagctcattaaagcccggataaaaccaatggaaagggcatattgtccatgta

SEQ ID NO: 193128 - DNA, 122 bp, Homo sapiens
tggcagcccctgacagcaatgaggaaacaaagaggtctccagtgtccttggctcccagcccgtgtcttgagtgagatggcaccagggatgactggccactcagcctctgccccagcctgctc

SEQ ID NO: 193129 - DNA, 122 bp, Homo sapiens
aggagccttactattggtctcatgcagcgagatgggcagttctgccgtgcaatcccagctcgcagttcttgctccgcgtgtactcacgggaggactcgcaggcgttaccgccttcccgcgtg

SEQ ID NO: 193130 - DNA, 122 bp, Homo sapiens
tggcgggcgaaggaacctgccccattgtgctgctgggctgcactagcggagacgagagtgcgtgtgggagtggcccactagcaccacccgccagggtttagcagcgcctggagcacctccct

SEQ ID NO: 193131 - DNA, 122 bp, Homo sapiens
gcctgagtagctgccacctgagggctgatggagcagaggcccgaggaaaatcagatggcacgtttaactgtttaatggatcttaagttaatttttctataaagcagatgtcaccagtccatg

SEQ ID NO: 193132 - DNA, 122 bp, Homo sapiens
tttaatctggcccgtgacagatgcttgcggaggggcgcgttcaaactcagaccgtgaccccgctaggaataaggggatttacacaatgacactgcctcccaattaataaacgacataggcca

SEQ ID NO: 193133 - DNA, 122 bp, Homo sapiens
aagcagaaggtccagagcctgtaccaggaggtgtttgggcggctgcgagatgagaacggacgaccctactcgcccagtcagtatgcgctccagtacgccggggacggcagtgtcctcctcat

SEQ ID NO: 193134 - DNA, 122 bp, Homo sapiens
aagattcactgctggaagaagaaaacagcctatgaggctacagaaacaggcagaaaagaacgtggagaagaaaactgacaaatacacacagttctcctcaagacctatggactcctggtctg

SEQ ID NO: 193135 - DNA, 122 bp, Homo sapiens
gttgctgggggactccatgctgaaccagatccagcgctgcccctgcggcctggtggggggcgggaggttggcactggggttgtacatgatatcccagtggtgcacgatgaccgcgtctgcct

SEQ ID NO: 193136 - DNA, 122 bp, Homo sapiens
taagagccacctgtgcgtttctcctgatcaggagcctctaaagcctgattcttcagggttcgcctcctcgcctccctcctcagctcctccagccctccctctgttcagtgtgcctggcccaa

SEQ ID NO: 193137 - DNA, 122 bp, Homo sapiens
caaggtcgccgaagcgaagaccgagaaactgcggcgaccataccgccgctgcgaccaaagcgccgcgttctcaactcaccccgccgggccgggccgcagcgtctacaacctggggagactgc

SEQ ID NO: 193138 - DNA, 122 bp, Homo sapiens
gggaggcggccggccagcagttgggcgtggcttcctggagaaaggcggccccccagggggcggggagagcgacgtcaccgtcgattcgcggtgctgattggcggaggtgaggtgcgcggagc

SEQ ID NO: 193139 - DNA, 122 bp, Homo sapiens
aaaggaaatgactgacagtctccatcaattagaggcttatttttgccaatattgaggatgcgcccaggaaaaagagacacaggctgcagtagaatctgcggcccatactttttccaaagatg

SEQ ID NO: 193140 - DNA, 122 bp, Homo sapiens
cttaaaccatgaggctgcatagctctggttgatgactgaaggccaaattgcatgcagtaccggggacaggattggtaccgtcacctgtaagcttgggcctggtgggagtggacagacctgcc

SEQ ID NO: 193141 - DNA, 122 bp, Homo sapiens
atccgtcgccggaagcctgtaccgtatttcatggactcctaggcgccatcgattttaagacgcgctcgcattccacgcaccactgagcagaacgttcgaaccggacaaaagtgcgagtcaag

SEQ ID NO: 193142 - DNA, 122 bp, Homo sapiens
ttctacagccaaatgagaggcctaacaggcaggggaaaaagaggcaattaagtaagatggcgttttgggagtcagagcataaataatgaagtctttatatttgtttcctttttttctgatgt

SEQ ID NO: 193143 - DNA, 122 bp, Homo sapiens
cacactccttaccctgccctcttgccttgtatataataaataacatcccagccaggcattcggggccgccaccggtctccgcatcttggtggtagtggtcccccgggcccagctgtcttttc

SEQ ID NO: 193144 - DNA, 122 bp, Homo sapiens
ccgtgcgctccttctgcagctccggctgcctgaataaatttaagaagggttagtgcttgccgggcttccacccggagggaggccaggctccccgcgcatgcacgcccggtgcctggctttgc

SEQ ID NO: 193145 - DNA, 122 bp, Homo sapiens
ccaagtggtgtccggctttcctgaaggagactgcatggatttcacagactgagtgctgctcggcttctctgaggagaatgcaccaagtggtgtccggctttcctgaaggagattgcatgaag

SEQ ID NO: 193146 - DNA, 122 bp, Homo sapiens
ctgcagagagggaggggcggggggctctctcctgtgccggagagaacggagagaacgtgacggtgtttcctcagatgtgcaggcctgggtgggagcgctagttactaagtacccagaattct

SEQ ID NO: 193147 - DNA, 122 bp, Homo sapiens
gcggtctgatccgccaccccgcccccacagcccacttttcccaggcccttggccatcccgcgcccggtaggaattcacctgcacgtaaacagccagggcaaccgtcctccctccttggagcc

SEQ ID NO: 193148 - DNA, 122 bp, Homo sapiens
tcaggcgtctgggctcattcaaaacatcttctgagtgcctgggtccgatctgggggagcacggagctggggtcccttgttggatgcagtcctacagaggtgttggtcacgttaacatgtggg

SEQ ID NO: 193149 - DNA, 122 bp, Homo sapiens
aactcaaatagcatttcacagacctaagaatctgagcgtagctttttgtatacatctaagcgtcaggacagagatagtcctttttgtgccttccccttgagcctttgcccggtttctctgaa

SEQ ID NO: 193150 - DNA, 122 bp, Homo sapiens
cgtggcacgccgggaaatgaagtccacaaaagcctcagagtagaccgcgggaatgatgggcgggaatgacgggtcacgctgtacgtcgggaaatggagtccagggtaatctgtcagccgact

SEQ ID NO: 193151 - DNA, 122 bp, Homo sapiens
acggtggtgaccccatcgtgcaaagtactgcccattcccaagcggaagaatgtgtggaaacgtgtgtggctgtgacacggaacccagcggcagccgctgggcaggaggggctgcagcgtgtg

SEQ ID NO: 193152 - DNA, 122 bp, Homo sapiens
tggcgaaccggaagggcgtccaggtaaaaaacaggaacagcacatgcgcagaaaggcccccgggccgcctttcccggggctctcccgggccccccgccggctttccggaccacagtccccag

SEQ ID NO: 193153 - DNA, 122 bp, Homo sapiens
aaggggacacgtggacacaggcatgcacacaggcagaatgcccagaaaacatgaaggtgtcgggtgatacatccacaagccaaagaacgccaaagatcaccagcatccaccagaagctggag

SEQ ID NO: 193154 - DNA, 122 bp, Homo sapiens
catggcacagaacactgaaaaccacgaccctgtcggatccatcttaatccaggtgggaaacgggcttcccccggccctgccctgcccagccgcgccacttccgagcgaggtcccgcgcgccg

SEQ ID NO: 193155 - DNA, 122 bp, Homo sapiens
agcttgacccaataagaaattcttgggtgccgacgcggaagcagattcagagcctagagccgtgcctgcgtccgtagtttccttctagcttcttttgatttcaaatcaagacttacagggag

SEQ ID NO: 193156 - DNA, 122 bp, Homo sapiens
gtctatgaagcgcaacagtgacgccggagagtcactgcaacttaaaggctgattctgccccgcccccaagacaccctcgccgctcattggctggggcggagggcaggataccaatcgcgtgg

SEQ ID NO: 193157 - DNA, 122 bp, Homo sapiens
tgaaccgtgcgctgacgcccttttccggcgcgggagaggtggtggcggtggcggtggcggcggcggcggcggtggtgggccggggggaggagaagctgccattagccgccgccattttgtcc

SEQ ID NO: 193158 - DNA, 122 bp, Homo sapiens
ttctttggaggcagcagctcccgcagggctgaagtctggcgtaagatgatggatttgattcgccctcctccctgtcatagagctgcagggtggattgttacagcttcgctggaaacctctgg

SEQ ID NO: 193159 - DNA, 122 bp, Homo sapiens
ccttagcccttcctggtggggtattcggtgcagaggggccgagattttattaaggtccgccgttaccctgtgacttgacattcttcccagtcacagtgatggactcttctctgacctgaata

SEQ ID NO: 193160 - DNA, 122 bp, Homo sapiens
ctcactggaccatgggaaggcagcgggggctccgccgggcactcgtcggctggggtcacacgggccacggtgaggacacaggggttctgctagcacatggctacatggaattacggtgatca

SEQ ID NO: 193161 - DNA, 122 bp, Homo sapiens
gcttctgtgctgcgccagaatcatcgagtctcagttctcgctgccttcccggccagtaggcgtctcccccagctggggagggtcccccaaaccctgtgcttctaggaccgcggggccggcaa

SEQ ID NO: 193162 - DNA, 122 bp, Homo sapiens
cctttttagttataacataatgactttatttctcataatatcagcattgccatgcataaccgagggcatacaagaaaaaaagaaaagagagagggagacggaatatattgcagctgcacaca

SEQ ID NO: 193163 - DNA, 122 bp, Homo sapiens
cgcccaaagcgaccctctgcgcaaactacccccggggacgacgtcacccgtgaggtcccgcggcgcctcctcctaaagctcggctgggaaaccgtccgcttccccaagacttgggggcttgt

SEQ ID NO: 193164 - DNA, 122 bp, Homo sapiens
gtcagcccaggacgggcacctgccccaccctgcctggcccacgcccaccagcctggctgtcgctgggcgctgcccctgctgccccccgccaggcagaggtctgccctccgcaacggggccca

SEQ ID NO: 193165 - DNA, 122 bp, Homo sapiens
caaactcccgggttcaaatgatccgtccgccttggcctaccaaaattctgggatcacaggcgtgagccaccgcaccgggccatctcgccagcttctgaatctgagactcaagagctgaagga

SEQ ID NO: 193166 - DNA, 122 bp, Homo sapiens
ccacctccctacgaggcggggtctacatgcccctctcgctgcaacgcggccaaccgcaggcgggtgctgacgacacctccacccccggctcgtaagctaatttgcgtcacatatggcgtaag

SEQ ID NO: 193167 - DNA, 122 bp, Homo sapiens
cacagggcttgggaaatccccacccaaacaggcctcatcctactccaaaaacagagccaacgagacctgagcaactgtccaaaaagagacaagctgtctgtaggaggaacgtgcaggaccct

SEQ ID NO: 193168 - DNA, 122 bp, Homo sapiens
tttacccccacgccccgcctcgccccgcgacccacgtaccccgcctccgagccccgcccccgcccccacgtgccccgcccccgagccccgcccccgtccccgtgcctgcccatgagccgcgc

SEQ ID NO: 193169 - DNA, 122 bp, Homo sapiens
cggatctcagcctgggctgcgcgccctgcgcccggctaagggaccctgtgcacctcagtgcgccaaaggcactggctgtgggtagaggtaggagtaaggatcctgccagtcttctcttctgt

SEQ ID NO: 193170 - DNA, 122 bp, Homo sapiens
ggccagcatgtgatcaggctgctgatgcttcccgctgccagtgacatcagccggctgagccgtgcaatagagagcggcatcatccctcacagaacgggggaggagcaggaggggacgacagg

SEQ ID NO: 193171 - DNA, 122 bp, Homo sapiens
aagaggtggctgctgttatggcagtttgaaagatgagaaaatgtaggctgacatagttgacgtattttgtctgatgccttacagccattaggacccaaggtggccttactttcaaccctaat

SEQ ID NO: 193172 - DNA, 122 bp, Homo sapiens
tccatgttagctgatcaagcatggctttgtttgcatttattcactgctcatccagcactgcgtaagtggttttgcatattaactaagtgcacagtaaccttcctttacctccttagagctcc

SEQ ID NO: 193173 - DNA, 122 bp, Homo sapiens
acactactaacatcattgtgggagtttctcatattcttaacaatatctggtcttatcaggcgctttaaattttgccagtctgagtgaaattgtatctcctgtgtcagaggcatttgaactac

SEQ ID NO: 193174 - DNA, 122 bp, Homo sapiens
ttcccacaatgcactgctcccggcgcaggagggcggggagggggaggggcgaccgggccccgccccgccgggaaccgtgggatccgcaaacccagctccgccttagatccaggggtagaaac

SEQ ID NO: 193175 - DNA, 122 bp, Homo sapiens
gtaatctgaggcgcgccttcgcgccgtcgtccggggagggttttttcccttctaaccacccgcgctctcacactttgcctccgctccgccgtttccatggctccggtttcctactttcctct

SEQ ID NO: 193176 - DNA, 122 bp, Homo sapiens
ctcccagcaccagccagaaggaacttcggatcgatgttcctcccactgccaacacgcccacgcccgttcgcaagcagtctaagcgccggtccaacctgttcaccgtgagtgtcaaccctggg

SEQ ID NO: 193177 - DNA, 122 bp, Homo sapiens
ggtgggcacctggcggtagtcagagcattgctgtactgggcacctgtgagacatcccaggcgttggaggagtaagaagcgcccgcggtccttcccgcggcgagatcgcagcgcatgttccac

SEQ ID NO: 193178 - DNA, 122 bp, Homo sapiens
gcttcccctttttgaagcgcaaaaacccaccccagttttcgttcccttcagtcctcacttcgagaacagcaagcaagttcatctgcttactgtccacacgaaacagaattttgttttctcct

SEQ ID NO: 193179 - DNA, 122 bp, Homo sapiens
ctgcagcgccgggacaggaggtttgtccccgcccgcgcgccgtaccgcggcggagatgggcgagaccatgtcaaagaggctgaagctccacctgggaggggaggcagaaatggaggaacggg

SEQ ID NO: 193180 - DNA, 122 bp, Homo sapiens
attttaacaagctcacttggtgatttatttgtgtacgctatttaaaactctgtgaaccaccggtctaggctatactttgcagtgtattaaggtggtcttcggcacctctcgcagaccccctt

SEQ ID NO: 193181 - DNA, 122 bp, Homo sapiens
gcacagagggagagagttgtgctgctgcctccgagagctccaccttcgtggctctggatccggggccccggcctgtggcggcgagcggcggccgctggagacgagcggcggcggcaggcggc

SEQ ID NO: 193182 - DNA, 122 bp, Homo sapiens
atgatacagattccaaaatgcaaccttttggtattagctttttttttttcccacactcagcgtaagcctctcgagatttattcaactggttgttttgaccaatagttcattccttttacttg

SEQ ID NO: 193183 - DNA, 122 bp, Homo sapiens
ccgtcgccccagctggcgaacttgggcacgtccgagagaaggccgggctcgctgaacaggcgggtcagcatggtgcctgagggcgccccgcgggcgggaaggggagacagacagcacaaagt

SEQ ID NO: 193184 - DNA, 122 bp, Homo sapiens
tgcctaccatgtatgcattcattccattcctttgacaacattttttgagcacctattgtgcgtcagccactctacctgaaactccttcctcacctggtgcctttaacttctcaacaagccaa

SEQ ID NO: 193185 - DNA, 122 bp, Homo sapiens
gccggtggtaaaaccgctggagctcaggctcgggcttcgggggctccatcatagagccggcggccgccaccgtccaggaacagaaagccgaggggttactaaggcaaccaggagcccgacgg

SEQ ID NO: 193186 - DNA, 122 bp, Homo sapiens
gacctcggagggggtgcccaggacagtgacggctgacatgaagctagcggtgagggacagcgccacgggcactgcggtcattctgcggccgcccatcaggaagtccttggaggtctgctggc

SEQ ID NO: 193187 - DNA, 122 bp, Homo sapiens
gaggttacaggatctgcatagtgctaacaactgtgcatcggtagaatgggaatctgaatccggacactccgcctgtgaagtccacgtagctccacctcgctgcactaagatagagtagatct

SEQ ID NO: 193188 - DNA, 122 bp, Homo sapiens
catggtcaataagaagccacagctttacactttgaactgcatgtgaaaccccgtcccgtccgggggctttcagcaattcacagcctttttgtggtgaaaaaaagtggcccgcccaccacccc

SEQ ID NO: 193189 - DNA, 122 bp, Homo sapiens
ctgagtggaaacagaagctgggcctgtgtcccatttgctctgctgggccgacttcccaaacgccctttctcttgagggttggaagcgctgttctgtatttggccacgcgggggagctgctcc

SEQ ID NO: 193190 - DNA, 122 bp, Homo sapiens
gaggtgtgacaagcagcgggaggcatggatgtctccctctgggtagagtaaatggtacaccgaggggaagatagaaagatggagcgtgttaaaagcgtaaataacggaaacagtctttagag

SEQ ID NO: 193191 - DNA, 122 bp, Homo sapiens
atgtgaccgatcccgttagaggctgacgcgcacagaagcatctcacttaacacctcattgcgcagaggagagaatggggtcacaggcgggtgggggaccatgcagagagccaggtttaactg

SEQ ID NO: 193192 - DNA, 122 bp, Homo sapiens
tcaggcctccgctcaagaccccgttcataaaccttaagccccactgctactgaattggtccgatttcctgcctctctcccacggaggcggctggccgacttccactgaggcgccaacggcct

SEQ ID NO: 193193 - DNA, 122 bp, Homo sapiens
gatgtcggctgtgtgtgtcaggggcatcgtgtgctgctccttgtcctgcttgttaaacaccgtcacttctccagtctcccagcccacagccagcaccagccgcgtcgggtgccagcacaggg

SEQ ID NO: 193194 - DNA, 122 bp, Homo sapiens
accagcatccagactgttttctactaactccttcaccgcagtgcttagactcagtaccaccggcccagagcaaatctgatggactgacttccgatcgataggtttgatggccttagcaggtt

SEQ ID NO: 193195 - DNA, 122 bp, Homo sapiens
cgagggcagtgcggcggcagcgcgcatgcccgaacacgcacgccgggagaggtgcacacgcgcaggagtgcaccggaagtccgcctcccagggcccactgctggtctccggacaagtactgg

SEQ ID NO: 193196 - DNA, 122 bp, Homo sapiens
gtgggcggggctaatttcgcgactctggttattccgagcgtgcagaaagcagcgagatcccggggcgggcccaattcctgggctgacgtcactaccctggcttggagaggctgttgctgagc

SEQ ID NO: 193197 - DNA, 122 bp, Homo sapiens
ggctgcagcccccgcctcttgggctggccctgtcatggcagcaagggctctgcgtgtgtacggccgccccctgcaagtgtgcttgttaacggggactgtgaggaactgtgggggactcaggg

SEQ ID NO: 193198 - DNA, 122 bp, Homo sapiens
gagccatgcaaagcttccaattatgacacacctatattcacacagttgtgactgtggacacgcaaaatgcctgaggccctgcgtccaatcccggaagcacagttcctgggaggagtcacttc

SEQ ID NO: 193199 - DNA, 122 bp, Homo sapiens
ggctgggggacaaggaccttccctccctctcagatttggggctcaccagggctgagatggcgtctcccctcagactctgggctccctggggtaggggcagggtcccgccctcagaatcagct

SEQ ID NO: 193200 - DNA, 122 bp, Homo sapiens
gggcggagcagagggcgtggcttcggggcagagtgggccgggtaccgcgcttggtcttagcgcatgcgcactcccggcagctacgcgacctgtgaccatggtggctgtgctgggcggccggg

SEQ ID NO: 193201 - DNA, 122 bp, Homo sapiens
ccacagggaataaaaacagtaccatgtggtccttactctcagtgagccacagcccagtgacgtcccactgctgtggccagagggcatggatccaaacaactgtgatgaatgtcatggccatt

SEQ ID NO: 193202 - DNA, 122 bp, Homo sapiens
ccccactccctgcatccacacaagggttttcattattcacagtgtcagaatacagagcagcgttctgtgcctccaaacccaggccgcgctggcccgttcagagggcccgaggctcaaggatg

SEQ ID NO: 193203 - DNA, 122 bp, Homo sapiens
attcttcagggttgacatcatgctttgggtcacaatgcgttaaatctgtggcctttgcatcgaagccatgctttcaagatgtaaaacctatggagctgacaccaggggcccaacagcaaggt

SEQ ID NO: 193204 - DNA, 122 bp, Homo sapiens
gcaggcgtcattcagactgaggacgcccggtgtggacaaagcatggggtgggtagtgcttcgtcttcgcatggtgctggctgactctgtgtgaggacactgggttgtctgtacccatccata

SEQ ID NO: 193205 - DNA, 122 bp, Homo sapiens
cagagggtgcaggccccagcctggactaccaacaggttcaggggcatctcgttcacatgccgccacccatagctgcccaggcccctgcgtcacaccctaaatatacgtgcttgctggtgtca

SEQ ID NO: 193206 - DNA, 122 bp, Homo sapiens
acaggtttctcctcaacctactcgcctgattggtgggaaaacccccactggtagaagtggcggctgtcagggtaggagggcagaggctggtgcaagatttggaggcttttatccttcttatg

SEQ ID NO: 193207 - DNA, 122 bp, Homo sapiens
gctgaggagcctggcgtctaggggcaatgtctgaggggactggggtcctgagggggccggcggagccgaggaagggaagggcgggcgacccaggagcacagccccggctggaggcacaggag

SEQ ID NO: 193208 - DNA, 122 bp, Homo sapiens
ggctccctgggctgcagaccaagcctgtgtcttcccctctgcagctaccagcacccctgccgcaggcctggctttcatgggctgctgtggtggctgtcagtgtctctccccaccctccctgg

SEQ ID NO: 193209 - DNA, 122 bp, Homo sapiens
tatattgtcttggctaaactgaccagttgatgacaatggaatggatttaaaatttctaaacgacaggttgttaatggctaagtgcttttaagcaagcctcttagattccctgaacctctgtt

SEQ ID NO: 193210 - DNA, 122 bp, Homo sapiens
ggcacttgggagcatctcagaggcgcccaaggccccgtcctttctcctctccaccccactcgctctagagcccaccccctggctgggtcccctggggcatggccgagggacgccagctgtgg

SEQ ID NO: 193211 - DNA, 122 bp, Homo sapiens
gccggaaacgccaccaattcccgggtgcggcgcagggcctgctgggaaggcactggcctacgggagatgaacccagcctcctctttggcctcgctactttgtttcccggcctgccttaacgt

SEQ ID NO: 193212 - DNA, 122 bp, Homo sapiens
tgaagggaccagaatgttaggaactctggagttgggaattgctgcaggagaaccgtgttccgcatttcgttcttctagagcagaggttggtaaagcacggcccatgggtcaaatctggtcca

SEQ ID NO: 193213 - DNA, 122 bp, Homo sapiens
tgctgcctccagccaaggtgtgtgtttatttgattgcttttggtggcgaggcgcggggctcgggctcgtcgcgcgccccatggccggggagcgcatccgccaaccccgggcggaggtgggcc

SEQ ID NO: 193214 - DNA, 122 bp, Homo sapiens
aatagcagtgtcagttccctatgtatcagcccagatggaaagatgttgctttcagctggtcgaacaatcaaactatgggttttggagaccaaagaagtctacagggtgagcgaatcaaatta

SEQ ID NO: 193215 - DNA, 122 bp, Homo sapiens
gaggcggcacggcgtcccttggcagctccgtgcatgctgcggcagttgcaacaggagaaccgagtaccagttgctcaacactttatcactttgcattgctctttctcctcccttaagtgaat

SEQ ID NO: 193216 - DNA, 122 bp, Homo sapiens
ccgcaaagaactgctcagaaatccagacgtttcctgcgtgcaggaagggttttgtgaatccgggtgtttgggagaggaggcaatgagtgctgactcgttttccaaaccgagcaattgtgccc

SEQ ID NO: 193217 - DNA, 122 bp, Homo sapiens
acacttccggaagcagagccccttcccggccgctggagaagcctgggtgggaccccgagtcggccagttacaggataggaggtgccaggcaaggcactgaagccatgcagtgagaacagcgt

SEQ ID NO: 193218 - DNA, 122 bp, Homo sapiens
ccccccaagcccgaaacggcgctgcccatcctcatacagtcacctcagtccagaaaacagcgattttaatttgaaagcgattttatgtatgagaggggaaaggagccccaaagagaagggac

SEQ ID NO: 193219 - DNA, 122 bp, Homo sapiens
gatgcttatttattttttttcccattacagttttgccgacggatggggcaaaagaagcagcgaccagctagagcagggcagccacacagctcgtccgacgcagcccaggcacctgcagagca

SEQ ID NO: 193220 - DNA, 122 bp, Homo sapiens
gggccgcgttcaggccgccctcagcccgtggctggtagccaggagggacagtgcggtaagcgctgctgaggcataccctctggtgataagcaatttattattaataacattatatcaaatac

SEQ ID NO: 193221 - DNA, 122 bp, Homo sapiens
tccagagacataatcctgcctgctctcaccacctcttactgttttggaaaatagaaagagcggggatctattgtgtcccattgaggacttaaatgagctgaataattggctcaagacgatgc

SEQ ID NO: 193222 - DNA, 122 bp, Homo sapiens
tcgacagacccgcccctccacgctgtcgcctggggctacgagacgccattattctgtttccggcagttttacttccgtttgtttaacagctggcccggaagtttaagtgaatatgcggcttg

SEQ ID NO: 193223 - DNA, 122 bp, Homo sapiens
tccctggggcagctcggtgggaagggagcctgggggcaacacccaaaccaccaggcctggcgaggctgggtcagcgcttggcatcggagttctcagcagcgacttccccagcacagaggagt

SEQ ID NO: 193224 - DNA, 122 bp, Homo sapiens
ggtgtacgtggtcgagggccctggaagccccgatggcctaggaggagcaggcgggcggggcggcgggtgtcgctggccggtagagagcttcggcctgacctagcgcaggtctggtgcgcgca

SEQ ID NO: 193225 - DNA, 122 bp, Homo sapiens
gacggtcacatgtttcctttgttgtgagctgcggcagagactggtggctggaggagacgccggcgctggagagtgcgctgcgccgcccgccgctgagggaccgcggggttagccactgctgg

SEQ ID NO: 193226 - DNA, 122 bp, Homo sapiens
tctatgggaccaggtgctcctggagcagggggcggcgctcctcgggcaggctccagctggcgcaggagcccgtggtgcgttgccgtgtgtggggcggcggggggaggaggggcggcaggggg

SEQ ID NO: 193227 - DNA, 122 bp, Homo sapiens
ctgcatcctttcctattaattatttttaaagaaaatcttcaggcctagcatggcagctcacgtctgtagtcccagctacgtgggaggctgaggagggaggatagcttgagcccaggagttca

SEQ ID NO: 193228 - DNA, 122 bp, Homo sapiens
attgtgttcaccaggacggcaggctattaaaatgtcaaggcacattgaattgttgttatccgggagagagacctttccaatcaacctgtgttgtgggggttgcaaaaactccctccgagaaa

SEQ ID NO: 193229 - DNA, 122 bp, Homo sapiens
actgtcttgattcaagctaagatactagcaatactaaacagtgcttttccaccatcaatgcgtgtgtcaacagactgaaaaaaaaaaaaaacaaatatcttagtgttcatagaaagtagttt

SEQ ID NO: 193230 - DNA, 122 bp, Homo sapiens
aacaggttttctgcacaaaagtttatttgtttctcatttctttttcagaaaataaaggatcgctgttgttcccaacaggtttgtagggaagaaaattggagaaacattattaccttttctta

SEQ ID NO: 193231 - DNA, 122 bp, Homo sapiens
tctccagcagccttttattgctagtgataggtgccatcagtgtctggcctgaggaatggtcgtgctcgcaggcacctctgtcaagtatcctattgatctgtgcttcctcttccctggaacaa

SEQ ID NO: 193232 - DNA, 122 bp, Homo sapiens
agcagcgcgaccggatggcatgggtgtcaccacgcggtggccactctcactgctgcgaagcgccggcggcgggacctcggagggggcgccctcggggtgcgaggcccggcactccggaaatc

SEQ ID NO: 193233 - DNA, 122 bp, Homo sapiens
attctaacattgctacagtgacaattccatggacatacaccagctactggcggggaagatcgttcagaccagaagtggtaagaaatccttgaattttaaatatgtcataggtagttcacaaa

SEQ ID NO: 193234 - DNA, 122 bp, Homo sapiens
taatggcagttcattccagtgtgactcaacaatttccaacaaagccttgaaaaatactcccggaatattagggattcatggagtcactgaatcataacaaggttaattgccagggttgttga

SEQ ID NO: 193235 - DNA, 122 bp, Homo sapiens
aaaatggcgatcggctcctcttggtggtttgactgggggctgatctgtgcattgggacttcggagttcgtctttctctggctggcaatcctttcccgctggctcgtgggtggcctgaaactg

SEQ ID NO: 193236 - DNA, 122 bp, Homo sapiens
tgcctggcttcctccacaccccgagatccagctgcgtctcctctgtcccggggaaacttacgggaaacttatgggcggaagtccctctgcagggcccactacccagagccagccacatgcac

SEQ ID NO: 193237 - DNA, 122 bp, Homo sapiens
tctccaccacccttctgtgcccacctgagtcctcatgcacacgggaaaagggggcatggacgcagcagagggccacagttttcagaagggaaggggtccagccctacttactaagaggtcct

SEQ ID NO: 193238 - DNA, 122 bp, Homo sapiens
aatcacttcacctctcaaataagtttaataataaccattctacaagagaagtgagataagcgctcacatatacagtcgtatatgtcctgtatgtcctaagtatagtgctggcatatagtatg

SEQ ID NO: 193239 - DNA, 122 bp, Homo sapiens
cctggtgcgcagcctacaccgccgaggaccgactattgtgaagccactttgggagcgggtcggagtggcggcagggggtgggggaagggatgaggacggccagacaagacagggcgcacaca

SEQ ID NO: 193240 - DNA, 122 bp, Homo sapiens
ttcatgccctatctgctaatagtctttcttccaaatacttgtcttttaaaccaagcacttcggcaaagccatgtgaaatcctgaagtattcacaatataaaagcttgaagggtggtttcatc

SEQ ID NO: 193241 - DNA, 122 bp, Homo sapiens
gtaaatggcggagtaaaaccctggcaatctggcgtccagaacccccaaccttaaattgcgcgcgacatcgcctcttctaaggccgagccggcaacgagggaaatggaggcaagagacggtcc

SEQ ID NO: 193242 - DNA, 122 bp, Homo sapiens
aactccactagtgaccctcagagtcttctccccttaggacaaggcagacaccccaccatgcgggcctcaggtggcagagaggcccagcctcacaggcctgtggccccacacaccagtcccag

SEQ ID NO: 193243 - DNA, 122 bp, Homo sapiens
ggctttgcagatatagtaatcctctttatctgcagtcaatcgtggtctgaaaatattaaacgggaaactatagaaatactattcttaagtttctttttgtttgtctgctttttgagacagag

SEQ ID NO: 193244 - DNA, 122 bp, Homo sapiens
ggacagggatcgggtagggtggggccaggctgagcctgctctgcgggtcccggaccccagcgccaccgtgcgagaggctcgggtccaggccaggccggggaacggtgtgtgtacccggtggg

SEQ ID NO: 193245 - DNA, 122 bp, Homo sapiens
tgggcacctataatcagtctgtggccttcccttcagcttggcagttcagccgctgcgcttcgtgagggagtgaggggtggatactaggggtgggcagcaggggaagcaggagggctggatga

SEQ ID NO: 193246 - DNA, 122 bp, Homo sapiens
tgctgggattacaggcgtgagccactgcgcccagcaaattcttacttttcatatgttgaacgtgcatgcaagtgtgatcctctagttttcttattttctcccactttacaactctttttgtc

SEQ ID NO: 193247 - DNA, 122 bp, Homo sapiens
gaggaccccttcccaggggaggtcaggcaaccatgtcagtgcggaggggcagctgcttcccgggaactttcacctccatccggatgagtgcagtaagaagagcacagccccacaccccagct

SEQ ID NO: 193248 - DNA, 122 bp, Homo sapiens
ctcctttctccaccaagaattggaatctgcccagctgagccccagacgctggaggggtcccgggggtcagtcagccctgcaccaccctccagctcctcttctggccatacaaggaagtccag

SEQ ID NO: 193249 - DNA, 122 bp, Homo sapiens
tccagaaacacctcagcttagcgcggggatggccttcttgtgcgtgagtccctctgcacacgggaactgtgcgccctgggcactgcaccttccagtatgtgggccggagaggcgggggatct

SEQ ID NO: 193250 - DNA, 122 bp, Homo sapiens
gcccggacgtcgctcggaagccaatcagagagcgtgacgtcagtttggcgcggagtttggcggccggggcttacagtggcgggagttggaggcgataacgatttgtgttgtgagaggcgcaa

SEQ ID NO: 193251 - DNA, 122 bp, Homo sapiens
gccacactgcacacccggtacccctggcctcccagccttttcctaggctgccccttctgccggatacactctccagccactagggcaaagccggcctctccaagggccatctctcctggaga

SEQ ID NO: 193252 - DNA, 122 bp, Homo sapiens
gtagctgtaaagatcacctggggactctgcataagactcagcacctgctgcctctggagccggggattatggtcttcttcttccctaaaggctgccacacttacctggctcactcctttctc

SEQ ID NO: 193253 - DNA, 122 bp, Homo sapiens
tagattaggtgaaggactctgaaacctctcagataaatgccaaaatcagtaagatcagagcggtgtgcaaacctgcaatgaattgcccagtgccttcttgtttgtaacgtatcacctactgg

SEQ ID NO: 193254 - DNA, 122 bp, Homo sapiens
tgcccacttattccccatctttctccttatcctgagtcctcagggtctaggggtctctggcgggggtctcccgtgtgttttgggtggggacaccgtgtgtgtttggagttgaggtggcatgt

SEQ ID NO: 193255 - DNA, 122 bp, Homo sapiens
gttgatacagcatctgactgctgcagaaagcaaagctctttgtgcttgcagtagattcaccgcaaaatgaacacaattcttccccccttatatccacacccctttgcaatgtgactctgtag

SEQ ID NO: 193256 - DNA, 122 bp, Homo sapiens
acttctgaccagaaaacccaagcaccctgtatccaggggtagctggagtgagacatattccgggggggaagatggaggcaccaggacagaagttcccagaaagcatgaaggaagggagaccc

SEQ ID NO: 193257 - DNA, 122 bp, Homo sapiens
gccttcgtactccaggaagtcctccaggaggtccagcatcttggtcatctgcaggggagacgggcacgtgaggaactgccaaggagcaaggggccccatgggccatgggcggggaccccgcc

SEQ ID NO: 193258 - DNA, 122 bp, Homo sapiens
tgggtcgagtgagtcatcggccccctctgagcaatcgctgctgcccaggtggagtcggcccgccttatttggggcttctgtgctgagccaggcctccagggctaaggcgtttgtttccccag

SEQ ID NO: 193259 - DNA, 122 bp, Homo sapiens
gtgttcctggtcttctcggtgcgcagcccctcgtgggtgctcaacttcctgctgcagaagcgcacggagcagggccgcggctgcggcttcgtgttcggggcgacctgctgcttccgagtgtt

SEQ ID NO: 193260 - DNA, 122 bp, Homo sapiens
acaaacatggcggccgaggggtgcggggagtggcggggtaaggatgggaagccgagcagacggccccagaacaagcggtcatgtgactgggaagatggccgtctttccttggtaaggaagca

SEQ ID NO: 193261 - DNA, 122 bp, Homo sapiens
gctgctgtacgccgttctatacctggagtttgtgccttatgctctgtttccgcgatttttcgtagcacgtggggactgcttcatcgcccgctgtgacagctgcacagtttcccgtcataggg

SEQ ID NO: 193262 - DNA, 122 bp, Homo sapiens
tcctgctggtccagagagacagagctcagtgtgatcatgaagctgtgtcttgctccttcacgtgaaggcatttctttccagtagagtagataaaataaagcactaattgtttcaacatccaa

SEQ ID NO: 193263 - DNA, 122 bp, Homo sapiens
gaactccaatcagagttcagcccttggttcacccttatctgaggtcaacgtgaaagctgtcgccatttttcatctggttgaggtctgcgcttctgaaaaacaacttagggacatttgtcaag

SEQ ID NO: 193264 - DNA, 122 bp, Homo sapiens
cgcaggagagggagggccagtgtgctgccgacgagggaggctggagccgcggggacgaggcgccccatacagcggcaagagggtggagggcaggagctcgccatcctgggtgaaagcggggc

SEQ ID NO: 193265 - DNA, 122 bp, Homo sapiens
tgatatgttggagtctttaacaccataaacttgatcagaacttcctcagtaataaacagacgggtttaaggggtgtgcccctcctcaccaggcctccggagcccatttgcgtaccaatttgt

SEQ ID NO: 193266 - DNA, 122 bp, Homo sapiens
attagtcacatggtccttctaattgcctgaaatcccactataaatttctagcacctgtcacgcaataggtacttaagaaatgttggtgatggtgtttgaactgaggctccactctgatgaaa

SEQ ID NO: 193267 - DNA, 122 bp, Homo sapiens
cgcggcggccggggtcggcctgggtccatgtcatcgctgccactgtccaactcgaagccacgcccacccgagaaggtctggggcatgaactggcggaagatgctgacactgccatgccagaa

SEQ ID NO: 193268 - DNA, 122 bp, Homo sapiens
gagtgaacttcccagaggagcccagcagactggccagtggggaaagaactggctggggagcgagtctcagacaaaagcaaggttttcatacccacagccccttgctgtcctatgcaaaaccc

SEQ ID NO: 193269 - DNA, 122 bp, Homo sapiens
tttacagagtttagaagggagcacagatttgtgaaaccaagttgagtctggggagcaatgcgtagctcaatattgctgaaatagaccatacaagggattgggaaatggggcagaaaatgaag

SEQ ID NO: 193270 - DNA, 122 bp, Homo sapiens
ccaagccccacccctttccctagtagggcgagagcaggcccagaagccgggcgtcaggtacgagccccgccctatgcgatgacgcaaggagcgaaaaaatgggtctggcgagcgcttcgccg

SEQ ID NO: 193271 - DNA, 122 bp, Homo sapiens
agcggcttctgggccctaaggacaaaagagttaaaacaatgaggctcacccgggaagagacgctgccctgggcacaatagggtcgcctgcattactcctccatacacacatctttaaatgtg

SEQ ID NO: 193272 - DNA, 122 bp, Homo sapiens
actgacacactgtttagcaagtgcccaggagttcaaaggaggacacagtatgcttctctccgctttgtttcctttggtttgccacagagaatgttagtaagtactcaataaatgtcggctgt

SEQ ID NO: 193273 - DNA, 122 bp, Homo sapiens
tgcgcagacgcggactgcatcaacagactcaactacaactcagaaaagttaatgcgtctgcgcaatggccctatcaatgagctggggacgtgtactctttctgttctgtttccgcccgtcag

SEQ ID NO: 193274 - DNA, 122 bp, Homo sapiens
gcccccttgcaggggttggggagctggggatcccagatctgcctattgcgcccgatgccccgaggctctctcttggactctggccctgagttcttctgcgcgatccttcggagacgtctgga

SEQ ID NO: 193275 - DNA, 122 bp, Homo sapiens
gctgcagagtctgggctacaacgggcgggtgcaccctgcgctgaccgagcagctggtgaacgcttatggcatcctgcgagagcgcccggagctggcggcgtctgagggcggcccctacaccg

SEQ ID NO: 193276 - DNA, 122 bp, Homo sapiens
attatctgttccactagagagggaagaggtctcaaggccttgtctcattagccctacagtcgactcaactgtcctaacaaaccactcaattcaggagatgtgaaatgtttgcatcaactggg

SEQ ID NO: 193277 - DNA, 122 bp, Homo sapiens
aacaccgagcagttttcattttgcaggctgacacctgttggaaccataacatcaattttgcgggctgtgacatcaaaatgcccctagtacgcatgagtattatttgctgaaactttcgtttt

SEQ ID NO: 193278 - DNA, 122 bp, Homo sapiens
agagccccaactttttactgagcacaatatagccaaaagatgacattgcccagcctctttcgcagatagctgtggctattccaggatcccagaaaatggtagccacaaatgaaggcctctga

SEQ ID NO: 193279 - DNA, 122 bp, Homo sapiens
tatgaccttaccgcagtgaccttggacctgtaccacagcaatggctaccgggccagagtgcgggctgtggacggcagccggcactccaactggaccgtcaccaacacccgcttctctgtgga

SEQ ID NO: 193280 - DNA, 122 bp, Homo sapiens
agaaaggggcgtggctcgtggcggccggtgggcggagtcgatctctggccgtaaatacggcgccacatggcactggctcgcgagggcgggggcgggcgggctggccgggcgcaggcgcgctg

SEQ ID NO: 193281 - DNA, 122 bp, Homo sapiens
ttttgctggtgttgtgagggagttctcacactagggcctccagctttgtcctaaggccagcgggctggacgctattgcctctcaaaatccaccgacaaatccagccgtggagaaacagcccc

SEQ ID NO: 193282 - DNA, 122 bp, Homo sapiens
tgagttctggagggcattccccagctttacaatgggattcggaacctcccaaagtcagtccgatgccccctcccgcaacccggtgtgtttgtgtatccccgcggtgcaggccgactgcgcgg

SEQ ID NO: 193283 - DNA, 122 bp, Homo sapiens
ttcaaatcaggtgatagtggttaataaggagtgtgggatagagaggcacagaacagcaggcgaaattgctgatacagggacatgtagtccctgaagtcggccacatcatcatgtgcaggcca

SEQ ID NO: 193284 - DNA, 122 bp, Homo sapiens
ccacagaggtgctggggatgggctggcctggtgttcctggttgctgagctcagaagcaagcgtttcagaaaggaagcccaggatcctcgggggaaaccgaggtccctccttatgattgctgt

SEQ ID NO: 193285 - DNA, 122 bp, Homo sapiens
agttgcgaatttagttcttcccatccatctccagttttagagactaggttaaagattatgcggaggtaaactgaggtagcccctcgtgtaaaaatattgttaaagaggctgggtgcggtggc

SEQ ID NO: 193286 - DNA, 122 bp, Homo sapiens
gctcagccgtgtttgctgtcggtcacggcaggttgggccatttgtaacgagtttggtctgcgcggggggcactgaccccactacgcctggcccctcggagcggagcgcggcacaggcgaggc

SEQ ID NO: 193287 - DNA, 122 bp, Homo sapiens
tggaggggcacggggcgtggagggggtgcggcatggagggggtgcggcgtggaggcggtgcggcatggaggggtgtgtctagagcatctgggagcaattgtctttcatgtggatccaaagtc

SEQ ID NO: 193288 - DNA, 122 bp, Homo sapiens
cttttttttcacagataataacatactcctgttcaaaacaacattgctttacatccagaacgtaatccagagttcttcccgtggcctttgaggtcctatgtgtggtccctgatagccacttg

SEQ ID NO: 193289 - DNA, 122 bp, Homo sapiens
atcagagcaactgtgagacgtcatcttggttctaaaatgaatgcaggggactgctgttgtcgtttcttcctctacaacattatgcctgtaacaaatgctgccttttctctttcaggcatctt

SEQ ID NO: 193290 - DNA, 122 bp, Homo sapiens
cgcccctggctgggggcgcccgaagcaacccggcctcgcttgtggggagccctacacccgcggccaggtacgaaaaacccgctctgcgcctccaggccaatcccacgtcttccttctaaaag

SEQ ID NO: 193291 - DNA, 122 bp, Homo sapiens
ctctgtgtctgcagccacgcagaagcgggagctaagaagggtgtgacgggagaggaaaggcgagaagagcaccaaaggggaaagatcgtgagaactttttgaaactgggtactcaacttcgc

SEQ ID NO: 193292 - DNA, 122 bp, Homo sapiens
gatgaaaaacatgacataaggagaagcaaatttctgagggtgagatgggaattaagttagcgttgaagaatatgacaggtcttttactctgcggaaaacaatgaaagagaaacaatttatgg

SEQ ID NO: 193293 - DNA, 122 bp, Homo sapiens
tgggtgttatagtcgagagtcccccacctcctgaggaagcaagacctggcaaacccaagacgatgcgctcttacttgtgttgtttgaaggggccctgctgccgcgcagttgtcattaatgcc

SEQ ID NO: 193294 - DNA, 122 bp, Homo sapiens
tgggaaaggcaacaacttgagtgtccttcacaaagcgaatggagagatgaaatgtggtggcggcagttggaataatgaattagatttacatagagtgacatggaagggtctttaaaatatag

SEQ ID NO: 193295 - DNA, 122 bp, Homo sapiens
gccaatgggagcgccgttttggggagacgggcccgaagaaacattgggggtgctcgcccccgcgttcgtcgccccgccccgcgcgcccgcgcaccccggccccgcccccgcgcgccgtccgt

SEQ ID NO: 193296 - DNA, 122 bp, Homo sapiens
cctagcccaccgcgggcaggtgacgcagtcggcagccaatggcccgcagagccgcgggcccgtccctgccgcctaggattcactgagaaggtccctggggacagccccgccgcggggggagg

SEQ ID NO: 193297 - DNA, 122 bp, Homo sapiens
tgttgtgagaagcacgttgctatcccggatgaagggccatttcagccctaagctcaaagccggagctccgaccagcactctcaggacgcctgggtgctggccacgtggttgagccaggcagg

SEQ ID NO: 193298 - DNA, 122 bp, Homo sapiens
ctgcggggcggctggcactcgttgcctacaaggtctagaagcagcgcagggaagggctcccgctctgggctccccccatgggaggagtcgggaggggcccctgctccgaaataaaacatcgc

SEQ ID NO: 193299 - DNA, 122 bp, Homo sapiens
atctgaaaacgctccatgctacgtggttctaaccgaatggcattctagaaaaggcaaaaccgtggagacaggaagaagatcagtggtagccaagagctcgggggcggggggatgaagagaca

SEQ ID NO: 193300 - DNA, 122 bp, Homo sapiens
cagggcccacaggcgcccctgtgggcagggtccggggggcatgggaggggctgcagaatccgcagctgaggtgccgggatggacccgaaacccaatcacagccaacagggaaatttcacaga

SEQ ID NO: 193301 - DNA, 122 bp, Homo sapiens
gtatccctcccatttttaagcacccctacgcctgggacctctgttccacgagaaggttcacggagccagtatccgagtcctaatttccccccaccgcgtggggaactcgaggtcccccgcgc

SEQ ID NO: 193302 - DNA, 122 bp, Homo sapiens
cagctccgagaaacacggcgactggagtctctgccactctaaaggctcagaagctgacagcgcagggcttttgcccagaggtataccccgaacaatgccttttctcagacgtggaggagaga

SEQ ID NO: 193303 - DNA, 122 bp, Homo sapiens
ctggaagcctcaggagggcagggccaggtctgtcttatccactccgagcctggcattgcccgggacgtggggcgtttgtccagtattattcaaatgaccggacataatgaaggatggcgaca

SEQ ID NO: 193304 - DNA, 122 bp, Homo sapiens
agcatggcttgtggtcggcagcaagttatagaacccccagagaaggatccagagaccccgcggccccttcccgccctgtgccgtcacctccccgcttccccgcgtctccctggacacctgag

SEQ ID NO: 193305 - DNA, 122 bp, Homo sapiens
cacctccaatccttgcagtttactgttacacaccctagacttgacttgggaagtaaacagcgccagcttaaggaagcacgtggcctattgataaaggattgggctgaatgtttagagccaaa

SEQ ID NO: 193306 - DNA, 122 bp, Homo sapiens
agcaccgcccgcgctgcgcgggtcccgagccgttctcgacatcggtggcagcctcagccgcgctcacctgcatctccccggaacgcccaccagagggcgctgttggacagcgcgcagagcca

SEQ ID NO: 193307 - DNA, 122 bp, Homo sapiens
gtgcaggggaaagagatgtcagagcccccgtggactggggtcagagtttggggtgtctaacgaggctagaagaaagtgaacagggaacaacgacctggaggcctcggagctgaaaggatccc

SEQ ID NO: 193308 - DNA, 122 bp, Homo sapiens
gggacccggcgcgggcactgagccctcccgccccttgctcgcgccgcggtgggagcgagtcggggtcctggaagtcatcccggcgcccccagcgctcttgcgtaatcttccccagtacctct

SEQ ID NO: 193309 - DNA, 122 bp, Homo sapiens
ccgtgtggctcagggagatcaactgatttgtctgaagcttgcaagggtagatttcagagacgcttcagatgagggagcctctctttccatgaggagatggcagaatgctgaatccctgttca

SEQ ID NO: 193310 - DNA, 122 bp, Homo sapiens
cttgaatcaggaggaaaccatttgtgacttctcatatgtaagatcttctaagggcagaaacgcaattgtctttgtattcacttccccgcccacccacaccccttccatggagagcctgcagc

SEQ ID NO: 193311 - DNA, 122 bp, Homo sapiens
ggtgcttttccccatcacagcttagggtccatctctgaaagtgcctgggttgggaaaggccgaattaccctggagtagagcatggtgttgccattcgagtgtggtgggaaaggcctgctgtc

SEQ ID NO: 193312 - DNA, 122 bp, Homo sapiens
caggtttctttgccttcttgccagctaaaggtttctcaggagcagcagaagcggcgggggcgggaggcactgtttcagacatggtgactaacacagcacaccaaataaagtggtataaacct

SEQ ID NO: 193313 - DNA, 122 bp, Homo sapiens
cagcctggagattggcctgcgacccgccggtgaggagcacagggggcctgagggcggggtcggggctgtggggccagaggacggtggcgtctccactcagcaccagcagccttggcaggcag

SEQ ID NO: 193314 - DNA, 122 bp, Homo sapiens
ccggttaaactgtgattctctttctaaatcctttgtctgcgccggactcggggtacccgccgggtggtgtggggctggtttccccaccagctctcgaactcctgcactgaagcgctcctccc

SEQ ID NO: 193315 - DNA, 122 bp, Homo sapiens
cggccggcggcggcgggggctacggcggcgcgctgaggacaaactgttagcctcgcgtcccgccttgtctctggtcaggtgacgtgcagctgccatcctgtaagtaggaatggaggcgaggg

SEQ ID NO: 193316 - DNA, 122 bp, Homo sapiens
ggccaggcggtggggcgcgcctccgtgaggaccaggtgtctgtcggcggggacaccatagcgcgcctggtgctcctcgaagagctgcgtgagtcgccccacgtagcgcgcttgcagcgtgtc

SEQ ID NO: 193317 - DNA, 122 bp, Homo sapiens
gtcaaattttgcagagcgagggcatgatttcctcctagactgcccttataaatggcaaggcgcctgcagccatatcatcccacactgcatagtgttgttatagttttccccatcctacctag

SEQ ID NO: 193318 - DNA, 122 bp, Homo sapiens
gaacgaacaaacgaatgaacaaggagacagcaggactcctgctcaggtcaaggcagagtgcggatcgcaactgtggaaggtgcacagagtcccagaaagaccaaccacacagggaggcacaa

SEQ ID NO: 193319 - DNA, 122 bp, Homo sapiens
cgtatttcgtcttcaggaccgcgttgcattgcaggtcgataacctccatctggagctcctcgtgcacactgtcgatcttcgtggagaacggggagctgaacagagtcagttcgctttcgtag

SEQ ID NO: 193320 - DNA, 122 bp, Homo sapiens
gctgtgatggccttgtgatggatgagcatctcatggcttccaggactccagaactaccaccgtctgcatgtaccacttttatgctagctggcatctgcctttctatacaaagttactattaa

SEQ ID NO: 193321 - DNA, 122 bp, Homo sapiens
aagcccgagttcatcgtgtgcacacactcggtggtcaggtaccgcgcacgggcaggggtgcggctgcgtccttgtcgcacctgggggaggggtgcaggatggcgtggcccctgatggccaag

SEQ ID NO: 193322 - DNA, 122 bp, Homo sapiens
aggaagggcggcttgctacctggctggaatggttgcagtaacctttgcatagggctgggccggcctggggacagcggtgggctagacgtgttccctgccagctctctaagtctcctagagaa

SEQ ID NO: 193323 - DNA, 122 bp, Homo sapiens
ttgcctccgcctctggtctagcactgtgccccgttgaggcctctgtggctacatctactacgctccactgcagtgatctgcttatcaggccccttctccaagctccttaggctgagactctc

SEQ ID NO: 193324 - DNA, 122 bp, Homo sapiens
tggattccctgggggagagacgcgctgggtgggaggagaggaccgggagatgctaggcctcgtcttgggagcaaagggcgttgttagtttcaacactggggaggaaaatgggaaaagaaggc

SEQ ID NO: 193325 - DNA, 122 bp, Homo sapiens
ctgagaccatctgtttaacaggctgagatttccatattacaaggtgtgggatttcaagaccggaaggctgtgagactgtgagatcttgttactatgagactgcaagacaacagcctttgtaa

SEQ ID NO: 193326 - DNA, 122 bp, Homo sapiens
tgtgtgaattgtatctaaaaaataaatagccaccaaagggccttgaatgacaccactgaacggggcgcagtgtgcccgtgcgtgttggtgcctggtgtgtatgagatggggcgacgcgtggc

SEQ ID NO: 193327 - DNA, 122 bp, Homo sapiens
tggtaggggctaccctagcggtccagggccagagcctgcacgcggcgcccccacccccaccgctgggctgatcttgggtgtgtcagatcttgcccaagcctcactttcctccacggtggagg

SEQ ID NO: 193328 - DNA, 122 bp, Homo sapiens
actggcccccctcgctccgaactgactccgggatcaatccggaaggccattgggagaagccgagggcagcttagccacggccggttcccgttccctccaggacgcgagggtcgccttgggtg

SEQ ID NO: 193329 - DNA, 122 bp, Homo sapiens
cggctacagcaggcagagaggcccaggcctcctagctacccatcaccacagctggggcgccgaagccgtcggacctgcctcctggagccacttccgggcctctctaggaagcctggaggtct

SEQ ID NO: 193330 - DNA, 122 bp, Homo sapiens
cccctccttccctcactccagactcttgccaatggcctgggtcctggcggggattccaaccggcgcacagcagagctggaggaggccctggagcggcagcgcgccgaggtgtgccagctgcg

SEQ ID NO: 193331 - DNA, 122 bp, Homo sapiens
attgccttggaaattctgccctgcttcctctctttaatcattagtatcgtatttaagctccgtcatcccctgcagttttaggaactagcaagatgtcctccatgagatagagatcttacaga

SEQ ID NO: 193332 - DNA, 122 bp, Homo sapiens
ttttttctggccataaaatggatttgcttattgcaacttttttctaacttgaagagagagcgtcaagggagggagtgctctacctagtagagaagaggtcaaagcatttcagcaacgtggag

SEQ ID NO: 193333 - DNA, 122 bp, Homo sapiens
ttttcctgcaaagccattgaggcatcttcacatgccataatgtctgtactgtttaactcccgagataattattctcaaaggaagaagtcactgatggaaatccctgtagctctattggatag

SEQ ID NO: 193334 - DNA, 122 bp, Homo sapiens
cttgccacaggggcttctccttagggcagctcacatatgacattgtctttcctcagagcacgtgaaggagagctagaaggagcaaacagaatgaaagccacaatctttttgtaacctaacct

SEQ ID NO: 193335 - DNA, 122 bp, Homo sapiens
tcctcccacactgtgcccagtggggcagtcatagtgctgtgtcgaactcctccgggggctcggtccgatcctcttcatggggctcaggctcgagccggctgtcctggtgctgtttcatttgt

SEQ ID NO: 193336 - DNA, 122 bp, Homo sapiens
aattagctgggattataggtgcccaccacatctggctaatttttctatttttagcagagacgggaattcatcatgttggccaggctggtctgaaactcctgacctcaggtgatccgccagcc

SEQ ID NO: 193337 - DNA, 122 bp, Homo sapiens
ttcacctctgcctttataaaacaaacacagcctataaaataacttaaacgcccagagtgccgagtttcgtcgggccctggctgcgccgggccgagccctgccccgcggaggtcgccgcccag

SEQ ID NO: 193338 - DNA, 122 bp, Homo sapiens
gggagcaggcagggaagcggcccgcccttcgtcctgccccttcgccctactctgtcacctcgctggaaggagtggaacccagacttgctggtctgatccatgcacaaggcgcggctacgagg

SEQ ID NO: 193339 - DNA, 122 bp, Homo sapiens
cttgttttatctaaatctgatttttttagaaaagggaaagtgttgcgatcgtgaactccacgttgagatgtcaggaatagataatttactgcatagttttaggagcactggactgaaagcca

SEQ ID NO: 193340 - DNA, 122 bp, Homo sapiens
cagcagcgcggatccatgggccagaagcctctagggcgcctaagtcagggggtgggtccccggctgcaggagggcgggaacggacactcagtgccaccgcggaggctgcacggtgcccagcg

SEQ ID NO: 193341 - DNA, 122 bp, Homo sapiens
gccaaattatactcaataaacaaaatgcacatttaactggaaccagatgaaaacggaacgcgggaacagatttggaaacagaatgaatgccaggcatgtggagtttaaaaagaaacaagtga

SEQ ID NO: 193342 - DNA, 122 bp, Homo sapiens
ctcggccatcagcacctggcatccaggccacactagtgttgccgctggaaagctttgtcacggtgatgttgaaggggactgcaggcagtgcttgaaggagaacagtggctatgcgagaagag

SEQ ID NO: 193343 - DNA, 122 bp, Homo sapiens
cttcctgggagaactacttttttcccaaaacaaaagacgacacaattagtatgataattgcggagtttaatgaacaccttgcttcacttcggggtctcatctgggatttcggagtgaactgt

SEQ ID NO: 193344 - DNA, 122 bp, Homo sapiens
ctctgtgactcagacatgactagggggaggcaaacacagcgccgagttaaagatcttagccgtcaaagacacaccatgacccccaccaccaacccagagcgagtccagggatgcagagttgg

SEQ ID NO: 193345 - DNA, 122 bp, Homo sapiens
cagtgcgcaagagggacactccgggcctcggtccgccctccgtgtggcaaatgaggtgctcggcggggcttcttaactcttcaacctggccttcccacgggtccctctggacaagggatggc

SEQ ID NO: 193346 - DNA, 122 bp, Homo sapiens
cattcaaggcctttctctcccacactggccccagaccctgacctcagaggttcgagtccccggagccaaattcctctagttggaatctagtaaatgatttaatggcaaaggggcaggggttg

SEQ ID NO: 193347 - DNA, 122 bp, Homo sapiens
tactggggttctggaggatagcagtgagaagatggggtaaaaaattagagagaagttttgcgttgccccatggctgcttctgtagtgtagtccgtgcatccgcccttcgatgcttgggttgg

SEQ ID NO: 193348 - DNA, 122 bp, Homo sapiens
ccacaacaacactatatttttatgctactttcctgtttgcactactacttttttattaaacgatgttaaataatctctctgtgaccaaagtgactaaaaagagaaccatgagtttctcaaga

SEQ ID NO: 193349 - DNA, 122 bp, Homo sapiens
ccgtttccagctcggggctactgtaagtcaagctgccacgagcactgacgtagggaacagcgtgtgacacatgcttccatttatccagggtcaacacctacccgtagagagacgggatcatg

SEQ ID NO: 193350 - DNA, 122 bp, Homo sapiens
gcacctccagcgccgggttgcgtcttagtgaccctgggaccgccagccaggcaccgcgcccgacgcaggctcagtcagtgttggtcggatgcatgaatgaatgggaaaaacgaagtctctct

SEQ ID NO: 193351 - DNA, 122 bp, Homo sapiens
ttctctctttctttctttctctctcagtctctctttccttctttctctctctggtgtgtgcgcacatgcacaaacacacatacacttacacacactcatcatcatcatcctcatcctcatct

SEQ ID NO: 193352 - DNA, 122 bp, Homo sapiens
gtctaaaagtgcgtgtgtgtgtgtgtgtgtgtgtgtgtgtgtgtgtgtgtgtgtgtatgccgtgggaatgagggtgttgtttttaagtggggtcatttgcagaccccacttccttgctttgt

SEQ ID NO: 193353 - DNA, 122 bp, Homo sapiens
aactgctgagattccagcagacactgtgcagccctttatggcgcaaaataaaagccgtcccgcttcttgccccggcccccgccgcccctcccggctcccctgacttccaagcccctgtggga

SEQ ID NO: 193354 - DNA, 122 bp, Homo sapiens
ccgcttgcttcattaactggctccatttgtgaagtcttctccaaaccgccctgcttaattcgggacacagcagcacctgtacattcctcccttcctcctcgctctttagccgcgtgctgcta

SEQ ID NO: 193355 - DNA, 122 bp, Homo sapiens
ttcaacgcacagcttcgtgctccgccactcggagtcatcaacaggtcgcggggaagcggacgcgaaggaaaacctaagttcctaacaactatggaaaatctgggaaacctacgaggcccaca

SEQ ID NO: 193356 - DNA, 122 bp, Homo sapiens
tggatcgtggaggagcgggaggacgggaccaacgtgaacaactggcgctggcgcggctggcggcggcctccttccgggatctggggagggccgggccgcgggagccggggctgccctggggt

SEQ ID NO: 193357 - DNA, 122 bp, Homo sapiens
cgcgggggcggacgttgtcctcagagagttgtctgagtttgcctcggagcagttctgaaccgtcatgaaggtgcgcggggcctggttggggatccgcgccctcagccctgcccgcctgccct

SEQ ID NO: 193358 - DNA, 122 bp, Homo sapiens
taggcaccgcggcgcacgccgcccggagcctgctgggacatgaagtcccgcccctagggtcgcactacccgccgggaagtggagtctgggcccacccctgccccgctgagcctggaaatagt

SEQ ID NO: 193359 - DNA, 122 bp, Homo sapiens
accagcccagcgggtcctggacccctaggtcatgtggctacagtggaatccaggcttggccgaatccaggacgaccaggccagacccaccggcagtaccttgcccgcccgctttagtcactt

SEQ ID NO: 193360 - DNA, 122 bp, Homo sapiens
cgctgacccacaggatgtgactcaaatttctaaagctctcacaactctcccctccttccccgtgacactgctctaatcccacctctgggtgtaccagatacctctcgctcctgccttggccc

SEQ ID NO: 193361 - DNA, 122 bp, Homo sapiens
cccgggccccgcaggcgggcgggcgggccttttccccagcgatgcagggctgtgtcaagccgcgggcgccccatgtccaggatccccgcgctcgcgctcggcctcgctcctgcagcagcccc

SEQ ID NO: 193362 - DNA, 122 bp, Homo sapiens
ggatctgctgcttgtaacctgcaggtccccggatgcgcaccccaacggcgcctgcgcctacgggggcctcagccttgcaaaatgtcactcagcagagcctgctgctgaaacgtgggagttga

SEQ ID NO: 193363 - DNA, 122 bp, Homo sapiens
gaaaactgagataacatggtgtagcagacactaatgtctgcctatctaccagccattccacgcttcttccttgctaacaagaaaatagcaaaatgcttagtccgaggggttgaatcctgatt

SEQ ID NO: 193364 - DNA, 122 bp, Homo sapiens
aagcctcgctctccccaaaacgcgcccgaaactcggcctcgacggggcctcggggcccggcgaccctcgcagcctcccctgggcaaatccggagcgcccctgggacccttcgcacgcgcacg

SEQ ID NO: 193365 - DNA, 122 bp, Homo sapiens
gtctccgtcatcccaggctggctgggttccgtcttccttccatgacattccctctctggccgtccccctgctccacatcccacgtcactccaccagatacctctcagatcctcagatatttc

SEQ ID NO: 193366 - DNA, 122 bp, Homo sapiens
cctccttatcttctccagcactcctttgccacctcttcctgcctctcttggcttctccttcggtcccggtgtcttagagctgtgacagctgggctggaaatctctacccgggttggggaggg

SEQ ID NO: 193367 - DNA, 122 bp, Homo sapiens
ctgattcttgtgtgtgtgttttgttgttgttattttttgttttgtttttttcctgttgatcgatcacaataaccaggaaggattttggcatttggcatttttgcaccttggttctgacctgg

SEQ ID NO: 193368 - DNA, 122 bp, Homo sapiens
ccagatttctgtttctcttgctgggcttttggcagtagggggctgtgttggtgggccctacgaagatgctcagtgctcgagatcgccgggaccggcaccctgaggagggggtagttgcagag

SEQ ID NO: 193369 - DNA, 122 bp, Homo sapiens
gcgtcctgctgccgaagtcgggtgagcggtgccggcagccctgctgggagggccaggccccgggtcacacccctgctggaagggccaggccctggtcactccactgatctcagattcgggac

SEQ ID NO: 193370 - DNA, 122 bp, Homo sapiens
tcacgcctagggtggcttctgcgcccaccttccttcctcggccatgcaggtccttctgagcggtctgcacatccacccttgtctgggggagagagctgccagaatccggccctaggctcccc

SEQ ID NO: 193371 - DNA, 122 bp, Homo sapiens
ttcagtaataaaaaaagttactgaatttaatgttgaatatgatgcatatctcattcattacgatttatcagaaaccaaagatttaaattgcctagatttgtggttctttctcttcctaagtt

SEQ ID NO: 193372 - DNA, 122 bp, Homo sapiens
gcagcacccactgcgtgcccagctctgtgcccaggtcctgagggctgctgttggttgtaacgtttcatggaaagaacagggcttgctgctgtacagcagctcagatgacgctgggccaaaga

SEQ ID NO: 193373 - DNA, 122 bp, Homo sapiens
ttgttctggaagctgaggcgagaatgtctcagttctgttcccttcaggcttcgagaccaccgccttgctgtgtcccgtagtggactgagggcctgcaagagggagtgagggctagtggaggg

SEQ ID NO: 193374 - DNA, 122 bp, Homo sapiens
tgagaaagttcggcagtggccaccacatctggttctcgttaacttttctaaggcagcggccgctggagcagcggggctggcggggtaaaagctcctggccagggctgcctggagctgcccct

SEQ ID NO: 193375 - DNA, 122 bp, Homo sapiens
tagagtcttcattgtgttcaattcccagcttccagataatgcagtggtgtgattacagctcgctgcagcctcgacttcagcctcagcctcctgagtagcttgggactacagacacatgccac

SEQ ID NO: 193376 - DNA, 122 bp, Homo sapiens
cccgggggtgtcggtcccacagcatctgggggagaattggggaagggccatcaaggagagcgaatgggggttcccaaggtgaaaatgagtcgtgtagggctctaacatagaaaatggagttc

SEQ ID NO: 193377 - DNA, 122 bp, Homo sapiens
atgtccaagggcaggagaagatgaatggccctgctccagaagagggtgcaaatgtgccttcgccctgcctttttgttctgtctggacccacagtggattggatgatgcctgctcacgtgggt

SEQ ID NO: 193378 - DNA, 122 bp, Homo sapiens
cgtcctccatcagcaggaagtgccgcagtgcctcatagtgcgcctccaggtgcagctccacgaagaagtagtcgacagcggccttgttcaccaaggagatgctggcaggagggagctggagt

SEQ ID NO: 193379 - DNA, 122 bp, Homo sapiens
agttcagtccctagcgactaacagtgagcagaggaagtaaagggggagttgtaagagaggcggtatcaacagcctgctgatgaaagaggcgactctgcagaaagaggcaacttgacatatca

SEQ ID NO: 193380 - DNA, 122 bp, Homo sapiens
ccggtgaaggggaaagaaatccgggattttccgagccgcctgcttcggctctgcgtctggcggagacaattactcggatacgctccggctggccttcccgaggccccaggtcatttcagatc

SEQ ID NO: 193381 - DNA, 122 bp, Homo sapiens
acttgtagtgggtggggctacacgtagggccgagacgaccggatttccggaaatcagagccggcacacgtgacttttgtttgcagaagtgggaaggtaccctaggcagccaatcggggagcg

SEQ ID NO: 193382 - DNA, 122 bp, Homo sapiens
gctcgcggaaatgggaggcgccttctgggcgcgccctatggggctgctccgggaggtggccgccaggggggcgcagtgtctcggaacgcgaggaccgcggggccagctggcgttgccaggct

SEQ ID NO: 193383 - DNA, 122 bp, Homo sapiens
tttggccggggcgccattcccgcagggcgcagggcgagtgtgccccctggagttgtgccgcgcagctgcccggctcccaggccttcaggatggattttgacccctgccaacctccacctgtc

SEQ ID NO: 193384 - DNA, 122 bp, Homo sapiens
catgtcctctgcaaaagcctctgacttccttttgctgatttaagcgttcctctctttacgcgtttatggcactctctcgcatttccttatagctctcatgaagtgacactggaaatcgtgtg

SEQ ID NO: 193385 - DNA, 122 bp, Homo sapiens
gaacctgaattctgccaacaacccgagtgagcttggaagcagattcttccccaactgagccggataagaacctagtccagccaacaccttgattatagtcttgtgagtacctaagctgagga

SEQ ID NO: 193386 - DNA, 122 bp, Homo sapiens
tcggggctgaagtgatcctcccacctcagcccctccgccaagtagctgggaatacaggcgcgagccagcatgccaggctaattttttaattttttgtagagatgaagtcttattatatggcc

SEQ ID NO: 193387 - DNA, 122 bp, Homo sapiens
acactcggagcttttcctaagatgaaatccaaattcacccgtctcgaaggttccgaccttcggggacttgctggaaggctgacacgttgcccttggcaggggcccggtttcttcctgtgcca

SEQ ID NO: 193388 - DNA, 122 bp, Homo sapiens
tttgggaggccgggacggggcaatcatttgaggtcacgtgctcaagactagcctgaccaacgtggtgaaaccccgtctctactaaaaatacaaaaaaattagccaggtgtggtggcaggcgc

SEQ ID NO: 193389 - DNA, 122 bp, Homo sapiens
cctgggggccgggggcggccgcatgggccttgtctttgctgggactgggcctgtgtgccacgtggcagctgctgcttggcttctggcccccttatctgcccccgccccacgcgccctggcag

SEQ ID NO: 193390 - DNA, 122 bp, Homo sapiens
ctgctccagcctcaggggtgtcgagttgagccttggccttcatgcccagggacagcaggacggctcacatcctggcaacagtcctcccatctccatccagacatccggcctgatgacacagg

SEQ ID NO: 193391 - DNA, 122 bp, Homo sapiens
ccatgactttcttgatgggcttatactccaggcgccggacatttggggaggcagcgggggcggtggaggttcggcggattcccaggagcctcaggcccccatggactgttcggaacttcagc

SEQ ID NO: 193392 - DNA, 122 bp, Homo sapiens
tcacttgaatgcccaccgggttccggaatcacgagtctccagagctgtcccttcgccccacggctcacattccaggtctgcccctcagtgacttctgcaacaacacgcgcttctcgatcagc

SEQ ID NO: 193393 - DNA, 122 bp, Homo sapiens
gggtctcctggcagtaaccaggccagctgggggtcagaacccgcggccaggcccagcagccgcctcttggcagcgctgatggaaaccgccgtgcggttccgcgcagacagtcacggaaactc

SEQ ID NO: 193394 - DNA, 122 bp, Homo sapiens
ttagaggcaattatcaacagcttggattcctggtctgtccccccacgctctgtgaactttcggcctctgtagaccttcaaatgccatgactgacaaggagagcttgtttgtggccgtaactt

SEQ ID NO: 193395 - DNA, 122 bp, Homo sapiens
gacgctcggggacccggcgggacacgctttgcagcgcccagggctccagccactgcgggacgctctcggggccgcccaccccgcggtcccagcccggaccccgcccaccccacggacccagc

SEQ ID NO: 193396 - DNA, 122 bp, Homo sapiens
aagaggagcagggtttgacacgtctacacctgcgctgcctgagaggagcagggtttgacacgactacacctgcgctgtctgagaggagcggggtttgacacgcctacacctgcgctgtccga

SEQ ID NO: 193397 - DNA, 122 bp, Homo sapiens
tcccgagcctcctgtaagctgcttctgcgccctgaacgctgcctgttgtcccctccagagcgcctcgcggctcctcctcctcctccccgcccggctggaagaggaacacagccctcccttgt

SEQ ID NO: 193398 - DNA, 122 bp, Homo sapiens
ctgcgaacccggccaagtcccgagcggaagcgccttgagcggaagcggaagtgaacgaggcggctgtggcggtggctgaggcggctgggcctagggtgcagcgggcgcgtctgcggctggtg

SEQ ID NO: 193399 - DNA, 122 bp, Homo sapiens
agcccgagcgccagcggctcgcggcgtgcgcgcgccggccgggctgccgggcgggcggcgcgaggacactcactgcggctcgcgctcccctagctcccgctcgcgcgcccccccagccggtg

SEQ ID NO: 193400 - DNA, 122 bp, Homo sapiens
ataattgtaaagactacaatagttaaaatgagaaggaatttaaatggtaacagataatggcgagcaatgaagtggcacagtgatgtctagaaagattgcattattgtgggaataacagaatg

SEQ ID NO: 193401 - DNA, 122 bp, Homo sapiens
tcacaactctaagggagtccacatgagagggtcgtgatcaatggagcaagcagtgggatacgtgactgggggctgcatgcgccggtaatcagaacagaagagaatacgacagggatttttac

SEQ ID NO: 193402 - DNA, 122 bp, Homo sapiens
tcttttcaattgcagccacgacgttaattttattgggattactgatgggaaatgaggtggcgcaggcttccgagaggaaaagcttgatcattaccccctttggaactatatttttccaccca

SEQ ID NO: 193403 - DNA, 122 bp, Homo sapiens
taactcttcatagagcctttgttgtcaccgagacacacaaagataggagatggccacccacgagctgtccggtagattctgagttgtttcaccttgtcatgctgaccagatggccggccagt

SEQ ID NO: 193404 - DNA, 122 bp, Homo sapiens
ggagcccggacatttggtttctgtctctgcgatcccctaaagggccctttgaccttgctccgggataagttcaagcctccagtctccaccctgattccccagctcctgctccctcctaattc

SEQ ID NO: 193405 - DNA, 122 bp, Homo sapiens
tttccaaacaaggccacagtcgcaggtacggagccagggcttcagcatgtcttctcttctcggggacacagtgcagccaggacgcccgtcttgctctggtcattttggaatttatcctaggg

SEQ ID NO: 193406 - DNA, 122 bp, Homo sapiens
aagttgggacattgtgagaaaatttctgatgtaaatcctggtagaaaacctgaactatgtcgtgtttcatctgggtgtgggagctgccttgctattgactaatccctcagtacactccaaat

SEQ ID NO: 193407 - DNA, 122 bp, Homo sapiens
ggatgcctggcgagtcaaggcttgtatataattggatgccggaaatttggatcttttctacgtttcgcatttctgtctcttagccggatttcttccgcaagcactggggatgtggagattga

SEQ ID NO: 193408 - DNA, 122 bp, Homo sapiens
tatattattcatttaaagttctccggtttccagcctgtaagagttcagagacttgagcttcgctgggctcagtctgcactaggtaagtgtggggctgagctggctccactggcattgtggca

SEQ ID NO: 193409 - DNA, 122 bp, Homo sapiens
gactccagctttattatcaaacctccaatcgagtgcaagatgctaagctggggtagatgccggtaatagcgtgggccttgccctgggagctcacggccagcctggctacaactgtgtggagt

SEQ ID NO: 193410 - DNA, 122 bp, Homo sapiens
cctccaggacctccttgcgcacatcgacgattcggaaccagtgccgtagctgggggaagccgtccagctccgcgttgcgctcctgcaaggctaccttctttttgcaggacagctgccggctg

SEQ ID NO: 193411 - DNA, 122 bp, Homo sapiens
cgttaagactgaaacgtagatcgccgggatctagctcttgtctcattggggcaggaacgccggggcggggacacgcacgcttcgcccccaggaatgacctcatcgctccggagctccactca

SEQ ID NO: 193412 - DNA, 122 bp, Homo sapiens
cagaggctgacgtcagcgggtcccgcggaggccgctggacacaaaggcagctttgtgaggcggcgacggctccgcggccgccccaggacagagcggcctgggcagagggcgggccggggtcg

SEQ ID NO: 193413 - DNA, 122 bp, Homo sapiens
gccttttgactttgacccgaacccggagacggaatcccttggcatggcttctggcatgtccgatgcccttcgctcctcctgcgcgggccaggtgggcccctgccggtctggcacccctgacc

SEQ ID NO: 193414 - DNA, 122 bp, Homo sapiens
ttgctaattagcagccattaatcagggcgctcgcttttttttgttgttgttgcatgtcaccggctcagaggaaccaagtgaataagaagattgtttcattacctccacaagaggtagaatga

SEQ ID NO: 193415 - DNA, 122 bp, Homo sapiens
cctgctgttaaacagtgattcacgcaccgccatcgcgtgcaccatgcagggcagggacgccggaggctagaaggacaaacacatgggacgcttcccgtgggcagacacatgtggtgcccacc

SEQ ID NO: 193416 - DNA, 122 bp, Homo sapiens
agccactaatggtgagcgccctccctcgtgttcccgcccccccagtctgcgagtgcccgacgccgcctcccaagcctgcaaccccggcgacccctctgctctgttatcagcccggtctactc

SEQ ID NO: 193417 - DNA, 122 bp, Homo sapiens
cttccggccgcagcgcggggcacgccgggaagcgccgtcggccagcacacagcgaagccgcgactggatccccgccttcctgcttagactggcagtgagcaccgcccccttccgctctcctc

SEQ ID NO: 193418 - DNA, 122 bp, Homo sapiens
cacagtagtagcttcatgagttagtccagcaacagagggagggcatgggatccaaggtgtcgtctccacttcatgaatgagataaagtgcaggctgagggtctccttcgccccgccccagtt

SEQ ID NO: 193419 - DNA, 122 bp, Homo sapiens
aaataccacctccccgcttctgtatgtgatgaaccctatcgcaggtgaatgtacaccccccgctatatgggtagtaaatgtcaccatctccctctctggatgtcacaaaccataacacgggt

SEQ ID NO: 193420 - DNA, 122 bp, Homo sapiens
tgtgcctctatgaagcatggcttgggtcattcctccagtcccatggccaggtggatccttcgtttacctttcatttctattaaatgagaacattctcaattcactaactggattgttggaaa

SEQ ID NO: 193421 - DNA, 122 bp, Homo sapiens
gcatgtgccctgtttaggtttaatttgaatgtcctgtcctacttttgtaggccatgttttcgcaggcagtcttgctatcagagctgaggggatgctgttttgatcacttagtttatctgatg

SEQ ID NO: 193422 - DNA, 122 bp, Homo sapiens
gattttcaagcttttagatgagaaaactaatcacctgacatcatctctaaattctctgcccgttattctatccctattttctttgttgtcctttcctatatttatctatttatgaattacgc

SEQ ID NO: 193423 - DNA, 122 bp, Homo sapiens
tcgtctgacggtaccaggctacctgctcgtaggtgtccatgtgtgagtcgtcggggagcacgtggggagaagcactcatccctccggtcttcaattctatctgctgagcctgctcccggtag

SEQ ID NO: 193424 - DNA, 122 bp, Homo sapiens
ctcccaggttcaagcaattctcctgcctaagcctcccgagtagctgggattacaggcgtgcgtcaccacgcttttgtaaatttgtaaagttacaaaaagctaactttttgtatttttagtag

SEQ ID NO: 193425 - DNA, 122 bp, Homo sapiens
gctcctacagccacgtggtgctcaaggaggtgcgcttcttcaacctgcagtccctctacccgctgctgaaagacccctccctcaacctgcatatcgtgcacctggtccgggacccccgggcc

SEQ ID NO: 193426 - DNA, 122 bp, Homo sapiens
tgctggcattcgctttaggcgttgggccacccgggagctgtacatcccttcaggcgagagcgaggttgctggtggggcctctcacagctcgggacagcgcactccccagggcccagtgtcgg

SEQ ID NO: 193427 - DNA, 122 bp, Homo sapiens
ttggatgcagggagcagggaagtcattgggagaactgaaaatgtattaactgaagaaatacggaagtgggcactgcaagatatttggttagttgaaaactgggaatctacctactctcctac

SEQ ID NO: 193428 - DNA, 122 bp, Homo sapiens
tcgtaaattctcgctgatgacctcaagaggtaattcatgctctatggttacaaataatgacgatccgagaatcgttagggccgattcaatgcgagcctccgagagagggggaaaaaaggaga

SEQ ID NO: 193429 - DNA, 122 bp, Homo sapiens
gctcatctataaagtgagcgaaagtaatgtaatctttattgggagtagggaacatgaaggcgagtcgatacagtaagtaagccgccaagcatattgctaggcacagagcaggtgtgcaacaa

SEQ ID NO: 193430 - DNA, 122 bp, Homo sapiens
ggtttactttaaaccaccaggttctcaattctgtgattcatgtaagatattatttctttccgtctctgatctagtttccaaagaatattaatctgctatgcctgatctttactactaggtgt

SEQ ID NO: 193431 - DNA, 122 bp, Homo sapiens
ttaagagctgtgacactcaccgcgaaggtctgcagcttcactcctgagccagcgagaccacgaacccaccaagaggaaaaaactccgaacacatctgaacatctgaagggacagactccaga

SEQ ID NO: 193432 - DNA, 122 bp, Homo sapiens
tgcaggtctgagagcatcgggcccgtcccgcagctgcctgcgccctgtgtggtggtggatcggcctctgcttctaacctggagcacatctgaagtgacgctgccgggcccttcttgagaacc

SEQ ID NO: 193433 - DNA, 122 bp, Homo sapiens
aacactgacacatggatttaatattaaccacttggaacagaataccactgttaaaattgccgtggaaggttaaataatgggcagcccttgctattccaagtttggtttttttgttttttgtt

SEQ ID NO: 193434 - DNA, 122 bp, Homo sapiens
gggccgtgggtaggggctgggcagagccggccgcctgccaggcgcaggtgcggctaggagcgccgtctccagggctggctcccgctcctcctcccgcgccgggactcggggcgctctcctgc

SEQ ID NO: 193435 - DNA, 122 bp, Homo sapiens
cgggtcagggttttgagcccaaggtcctcaactctaattctaatgctatctcagggcagtcgagaggctgaaaacgggcgccaaacgggggaacacgtacgcagcattcgcaggctatgggg

SEQ ID NO: 193436 - DNA, 122 bp, Homo sapiens
aagcaggaggatcccttgagcccaggagtttaagcctgcagtgaattatgatcctaccaccgcattccagcctggatgacagagcaagacactgtttctaaaaataaataaagcatgtccat

SEQ ID NO: 193437 - DNA, 122 bp, Homo sapiens
gcctccgcccacccctctctttcctgctggggcagggccacggctccagctgcagggtggcgggcacagctggttcacctctgtcctctctcagtcccggccccgccaggacggaaataaca

SEQ ID NO: 193438 - DNA, 122 bp, Homo sapiens
ctgcttcgagcctggccaccttccctcctgtgccggctgcttctaggagatgctgtgggacggtgcccggcttcgcggtgactaccatgccctaaggagcagagcctccaggatgcccccgg

SEQ ID NO: 193439 - DNA, 122 bp, Homo sapiens
gagcattctgaggtgctggctttctgagcctgaaatgttcccccaagtggaggccacggccggccatcccactgaacagccttcacctcagggcagactcagtggcaccactgatttgtcac

SEQ ID NO: 193440 - DNA, 122 bp, Homo sapiens
agcatgagcccagtgaactttgaaattcaggaaggaattcacaggaaagctgcggcgaggcgggcagaaaaccacaggcttccaagaaacgcgtgtctgccgccccctcctcccaccctgag

SEQ ID NO: 193441 - DNA, 122 bp, Homo sapiens
tgggtcgggaggtgtttctgtgtaggtgtctggccctttcatcagtcgtgcggaggaccgcgtgatttccttccagttctcctcggttttcaggtggtggcgccatcttcggtaaagggtgt

SEQ ID NO: 193442 - DNA, 122 bp, Homo sapiens
gccccgcgtccgcagggttcgggaacgtccttggaggctaagactccccaagtcgcactccggcctctcccagtttcctctcaaatgccgtctgccctgcccttgaggtccgtttcgcgccc

SEQ ID NO: 193443 - DNA, 122 bp, Homo sapiens
aaggatgcctttggccagcagagccagtggagggcgaggacagacagcactccgtggccacgtggggcccctcccgtgcactccctgagcatccacagacgcagcctgaccgtacctcccca

SEQ ID NO: 193444 - DNA, 122 bp, Homo sapiens
tgagtttgcactgacttccattttctccctggcttccttccggtgtcagatgagagtccccgcgctcctcccggacagccctcagggtcctcggctatcatatatgggggagggggtggagg

SEQ ID NO: 193445 - DNA, 122 bp, Homo sapiens
ggcgcggtgccagccccccaggccgattcccatccagttgaccgagcttgtgctggtcaccgcggtttccgcaggacagagtccccacagccgctgggcaccccggtcccattcgcggccac

SEQ ID NO: 193446 - DNA, 122 bp, Homo sapiens
ctcagtcacctgtgtggtcgcagtgctgccatggacctgggacccatgcgcaagagttaccgcggggaccgagaggtgccgccgctagggccaggcctcctgcaggggcgggggaaaagggg

SEQ ID NO: 193447 - DNA, 122 bp, Homo sapiens
tcgcgagtgcttctggaagccctgccgcggaggtcgactcttttaccagagacagaaggtcgggaagatgcagcgagtacagcgttcttattataactcgcctcctcacaggtttctgggca

SEQ ID NO: 193448 - DNA, 122 bp, Homo sapiens
cttccctccgcctcgtccctgccatgggagctcctcgaccgccgccgccgcccgggtcgccgctcagctgcggaaatgcccggatgttcccactgcctgctgcaccggcgcacaaatgcggg

SEQ ID NO: 193449 - DNA, 122 bp, Homo sapiens
aggacataaactagtgatcaataaatggttcttgcagtgaatttccataatcaaaacccacggtaatcaccagccaaattttgcaggaaacaagcactcctttctctcattgtccaggggca

SEQ ID NO: 193450 - DNA, 122 bp, Homo sapiens
cgcggcgccacgagagagaccagctcggctgagcgcccgcgagtactcccggcaagtgcacgagtggctgtggcagtcctactgcggctacctcacctggcacagcggcctggccgccttcc

SEQ ID NO: 193451 - DNA, 122 bp, Homo sapiens
gagtgggcccctggagagctggggcgtctcagtgggtgctgccggttttgcttctcctcccgggaacccaggctgctgggaggagaagtgaaaccaccccggccgagcctgggcgccagcga

SEQ ID NO: 193452 - DNA, 122 bp, Homo sapiens
accacgcgtaggggtgggggctgccgagaagcaactagtggcaagcgggactcagagccgcgcgggaggggagctagtggtgacggaacagagcacagtaagaaaagcagggcaagaagggc

SEQ ID NO: 193453 - DNA, 122 bp, Homo sapiens
tagagaacctttagagggccaagtgtctaaggccccacaatagtaataccaatggtcattcgtcactgagcatctactgtgttacaggtaccttataaacattacctataaccttcactata

SEQ ID NO: 193454 - DNA, 122 bp, Homo sapiens
tcaagtgggtggattgtgaataagatcattgatgtttacttggttgctagtcgccccacgcgctcactttcctattttgcttatttaaagtaataaaacagaaaagcagaactgaagaaaat

SEQ ID NO: 193455 - DNA, 122 bp, Homo sapiens
gcagggaatcacacctgctcacaagcctggatgccagaatgtgggtttccctctggcccacgggctccctgagctgtggtttccgtttaagcacacgggctccggccggcaggtgggaacag

SEQ ID NO: 193456 - DNA, 122 bp, Homo sapiens
gttcagggctatcatagtagactcatgggcagccggtgaacaggccactgcatgtactgacgacgggcatagctcaccctgaaaagatgtctcatggtccccaaccaggttctccaaccccg

SEQ ID NO: 193457 - DNA, 122 bp, Homo sapiens
gcaaatagcaaagccagtctacccgtccttccccttacgaggtgcggggaagctaaaacacgtttaggatgagctagtaagagtggaaagtgcaggaggctcaatgaccacttgacggtacc

SEQ ID NO: 193458 - DNA, 122 bp, Homo sapiens
tttcgcagccaccactaggccaccaagagcccttaggttcatgatctgacataattccttcgcagcatgccaggatggaaaggtttctgaggggttcagcctccctgcaggactcagtcagg

SEQ ID NO: 193459 - DNA, 122 bp, Homo sapiens
agcagttcacttcaggagcaaaaacctctgaatgtgattccaaagtcagcagagaccttgcgccgggagaggcccaagtaaagaggaggaggcccctggacttttcttattttcatgtagct

SEQ ID NO: 193460 - DNA, 122 bp, Homo sapiens
gaggcgccccgggccccaggcaatcaccgccaaacttggggaggggagcagggggctgcgcggcatccagcctcccccgatgacctgagcctctgaccctccagggagccgcctttccctgt

SEQ ID NO: 193461 - DNA, 122 bp, Homo sapiens
gcccctggtggcagttcggtgaagaggcacccggaacctggcaacgtggcccgcgcggggcgcacgcatatcaggaagacacagaggcctttttactgaaaatgccagcgggtgcggattcc

SEQ ID NO: 193462 - DNA, 122 bp, Homo sapiens
gtacggagcagttccaacttttcagcccatgaactgtcatacttttccaacaatcaatcccgaatcatatatacaattcagtttctccacatcagccaacaatggcacttagagctctgtcc

SEQ ID NO: 193463 - DNA, 122 bp, Homo sapiens
tgctcagtgtggacaaattccgctcctgtggggggaggaaacccccacccagaggcaggacgtggcctccgtccccagcggccctccccacccaccgccagcagattgatttattcccctgc

SEQ ID NO: 193464 - DNA, 122 bp, Homo sapiens
gactacaccgcgccagggctgaggcgctccagccagcgctggacacgagacacacggcggcgggggtgcaggaggacccctgggttctcgcccaaccccacgcctcggtttcctcctttacg

SEQ ID NO: 193465 - DNA, 122 bp, Homo sapiens
tggcttctatttaactccctcagtagcctgaagggttgccagaaatctcaccacttggcacgcttcctgtagactaggaaaatacaaataatctgaaagaagttaacacattgtgtcaatgc

SEQ ID NO: 193466 - DNA, 122 bp, Homo sapiens
ttcaggatttctgtttcccaggtccaagcttcatcatccaccgatgcccaattcaaccaccgtgatggaatttctcctcatgaggttttctgatgtgtggacactacagattttacattctg

SEQ ID NO: 193467 - DNA, 122 bp, Homo sapiens
agtcgctggaggcccccggaagacaggtgagagcactgtgggtacctggggctacgaaaccggaggcctatgtgtggcatcatagttaccttgggcactgggacctgtatttccccttcgtc

SEQ ID NO: 193468 - DNA, 122 bp, Homo sapiens
gaataagctagcaacccggcagagtggcccttcattgctgtaaatgtgctcatctatagccgcatcttaccggcttttagatatgcgtgtatgcagtggcacttcgtacttttcatgtaagt

SEQ ID NO: 193469 - DNA, 122 bp, Homo sapiens
aaaccatatcaacaacttatttatagtacttgggagaaaaaaatttacatcagaggcaaacgacaggggcaagaatgatttcaggggaccaaaacctaggttttaaaaaaagacttaaagat

SEQ ID NO: 193470 - DNA, 122 bp, Homo sapiens
tggcgctgggtggccacggaggtcccgcgctccccgaccgagatagggcgggccctatttcggagaggtgtttggcaccaacattttttaaagccccgtgggtggttctccgggatctccca

SEQ ID NO: 193471 - DNA, 122 bp, Homo sapiens
cctttgaaaaaaaaaaaaaaaaagatgggggtgggggcgggaattaaccaaacacctgttcgctggactagatcagctgagaaaacaagtctgagtgatgtgcccagcccccaaagtactcg

SEQ ID NO: 193472 - DNA, 122 bp, Homo sapiens
cgccgcccctggaccccaggtgtgaggagcggggctcggccagcggctccagaagaggcccggaccccactgccgtggctgccgggggcgggaaagtgatttctcggaaagcagagcacttc

SEQ ID NO: 193473 - DNA, 122 bp, Homo sapiens
ccacgccacacacacagatgccaggccacgggccacgccacgcacacagatgccaggccacgggccacaccacgcacacagatgccaagccacgggccacgccacacgcacagatgccaggc

SEQ ID NO: 193474 - DNA, 122 bp, Homo sapiens
ccgttcccccctattctcttcctcctaggtcagttcttccactgcacaccaaactcaaggcggtgtccgatcctcacttcccgccttatgactccttcccacaggagccgcttcaaagagct

SEQ ID NO: 193475 - DNA, 122 bp, Homo sapiens
ttacataaggactatgaagccacggcagccattcttattaataacctgaggggcgcagaacgtcgtttagagtttgcaagggtttgaaaagccccccgtaagtggacacttcccagcagagg

SEQ ID NO: 193476 - DNA, 122 bp, Homo sapiens
ccaactcttaacctagttaatcctagttctgttgacattggaccaggctcagtaaataaacgaatggatttccagcctttttttcccatctgttcctgcttttagtcctctgaatctgcttc

SEQ ID NO: 193477 - DNA, 122 bp, Homo sapiens
gactttgtttatcaaatgctcatgtggcgagaccgatctctggactctgtcctgggttcccgggctccacccaggctgcatctcccatccccccggtgcacacgctgtgttgctgcatctcc

SEQ ID NO: 193478 - DNA, 122 bp, Homo sapiens
cccgaaccaccgaaggcggcgacacctgattcagcgcacaaacacaggtcccttctgtcccggatacaattacgcggcagacacacactcaaactcgcgcggggcagccaagagacgaggtg

SEQ ID NO: 193479 - DNA, 122 bp, Homo sapiens
gttggcccaggcaggtggatcacttgaggccagaatttgagaccagcctggccaacatggcgaaaccctgtgtcactcttttagacccttctgagtgtttgcaggttgagtgttcacagggt

SEQ ID NO: 193480 - DNA, 122 bp, Homo sapiens
taaaaacgtgtgtttcctcgtctgtgtttaacaccctaacgatgatcagtttgggggagacgtacccctccctaatcacaggtaggaccacttcccaaatcaatgaaacgaccgtcctcttt

SEQ ID NO: 193481 - DNA, 122 bp, Homo sapiens
agatgaaatagacatgtcctctatctactgttgacctgctgtcctcagagcttaaagtggcgctcagtgtgcctcacctgtcaaaggctttccctcaccatttcccaccagagatccaataa

SEQ ID NO: 193482 - DNA, 122 bp, Homo sapiens
aaggaaggaagcgtgatgaatgaatgatgtgtagacttgagggatgactattaaaggggacgtaggatgaagagaaagaacctacagatgacaatgaatgtaaacttatttttcttcatgtg

SEQ ID NO: 193483 - DNA, 122 bp, Homo sapiens
ggtcctgggctttggcaccaagtacctgaaagagaacttctcgccatggatccagcagcacggtggatgggtaagcgtatcctatttaaaaacaaattttctcagaactcagaagagatggg

SEQ ID NO: 193484 - DNA, 122 bp, Homo sapiens
ttctcaattactctggtcttctctccccacagattgtatctgtcagggaagaagggccagcggctcagcctgcgaggcatgcccaccatctgccactcatcctcccagggccttttcccctt

SEQ ID NO: 193485 - DNA, 122 bp, Homo sapiens
tcccgcgcccttctccgcgcctcggggccccggaacacccccatgtcatatgcccgacaccggctccaaatctccttgtgatgtcgcagcagtcctaggcctcctcgtgtcccgcccgctct

SEQ ID NO: 193486 - DNA, 122 bp, Homo sapiens
aatgaatcattattctacttttcgtgataaggtatgggatgccgatgagcaatctgctgccgatgggcagctagccatggcaggtcagagagcaggcctgcggagactgcccttccgtggag

SEQ ID NO: 193487 - DNA, 122 bp, Homo sapiens
aggtgtgacatggaaaatgtgtgtgtcttatgtgtgactgaaaaatacctcctttgctgacgtctaaaatttcactattagagatgcattcttttgtcctaaagattattctctattcaagg

SEQ ID NO: 193488 - DNA, 122 bp, Homo sapiens
gcggagccatttgattggagaaaagctgcaaaccctgaccaatcggaaggagccacgcttcgggcatcggtcaccgcacctggacagctccgattggtggacttccgccccccctcacgaat

SEQ ID NO: 193489 - DNA, 122 bp, Homo sapiens
gtctgatgagaaagatgtggattgccataatacctcaaagatacacttgtttgcatttttcggtaatatacataggagctggggattctacagtatctgtgaatacgtggactcctttttat

SEQ ID NO: 193490 - DNA, 122 bp, Homo sapiens
acccccagccgcaaagcccagagagccccttttgggaggacggggcgaggcccagcaatccgcgttgggagtggtcccgcgcgccgttctgatctgggcagccctgggctagcggagaccac

SEQ ID NO: 193491 - DNA, 122 bp, Homo sapiens
cgaggggccaggtggcacacagcacctgtgtgccgctggggagggtgaccgcgggaggagcgcccgtgcatcgctgcagagggtgactgcgggaggagtgcccgcccatgcatcgctgggga

SEQ ID NO: 193492 - DNA, 122 bp, Homo sapiens
acatccctactaatggcagcccagcatttcatgatactgatgcaccatggtactatgtgccgcgtttgtaactcgatagttttccagtgtttgtctatttctcttttcagccgcatggcaca

SEQ ID NO: 193493 - DNA, 122 bp, Homo sapiens
tgttcattcagcagaaacttcactgggttcctcttgggtgtcagggcagggctggggccccggaggctcaggacgagtcagtctctatccctgccctccttagttgaatatggaagactcat

SEQ ID NO: 193494 - DNA, 122 bp, Homo sapiens
tgactggctggctttcatgcagaaggaggagtcagtttccatggcatggacacaacactccggatggttaggactgcctgtcagcacagagctcctcaaatttcacacaagacagtaagtgt

SEQ ID NO: 193495 - DNA, 122 bp, Homo sapiens
ccccaaccctgaagttccctcttcacaatatctgcaatgttttcatctctcgaaaagagccgatacatttataatcatactccaaagagtccaaggttctatcatttgccatgctccaaaca

SEQ ID NO: 193496 - DNA, 122 bp, Homo sapiens
tcggcactgttggagaacgctcagggtctggtgctctcgtgcctgccccttccaggcagccggctctgattgcacaaggcagacctgtgactcctccatccagctatgcccctgctgcccag

SEQ ID NO: 193497 - DNA, 122 bp, Homo sapiens
ggccagacccggcagaaggcggagcagactagggtgtccgtcaccgtcctcggtgtgaaccgccacggatgcacgcgggtgctggctggggggcctccccggttgagggaattgagacccag

SEQ ID NO: 193498 - DNA, 122 bp, Homo sapiens
ctgcttcttcagtttgacctcctaagggaagtaagtcctgcagaagtaaccagcctgccgcggcagaatgcagagcaggcaccaactgccctgcaactgcttccataacctgcagatccacc

SEQ ID NO: 193499 - DNA, 122 bp, Homo sapiens
gagagaccggggcgcctcggtggggtgagacagggcgctcactggcggaaccccgggggacgcggtgatgggaggagtgtgggaggggcagtggaactggagtcagctaatggctgacgcac

SEQ ID NO: 193500 - DNA, 122 bp, Homo sapiens
ggtgtctgtgcgtcacggcaaagagtgtatccgtgtgtctcacacacgtgttggcctgtccgtgtcaacttgtgtccacatacgtgtcaacgcacgtgtctccagtgtcatcaccctcatat

SEQ ID NO: 193501 - DNA, 122 bp, Homo sapiens
cctcagtctgtaaatcatctaagtcctggtggtaaacattgtttgaatacattctcaaaacgcacctcgatccagcataaatagagatatgatgggagagatgttgtccaacaccaccagta

SEQ ID NO: 193502 - DNA, 122 bp, Homo sapiens
cccgggaaatgggaccagagcgcggagggagcctggccaggaggcctcctaggactcagccgcgacgctgaaaagcatgaagggtcggaattaggcactcatttagcgagcgttactaatcc

SEQ ID NO: 193503 - DNA, 122 bp, Homo sapiens
ttaagtaaactgaccaccatcttccccagcagaaacctccatgcctgcacagtccattaacgctgccgccgtgtggctggagatcagccaggttgtaggacaccaaacatctggacactgga

SEQ ID NO: 193504 - DNA, 122 bp, Homo sapiens
ccgcgcgggggcgggccggaaggcgctcgccaagccgtggctgcggctcattggtccgggcggacatcgctcactcacatatccaatgggaggcggccgggtagaggttaccggtttggttt

SEQ ID NO: 193505 - DNA, 122 bp, Homo sapiens
tggcctggatggagcacactaccgagtcgctgacgtgcgggcagacgtcgtagagcttggcgccatcttccgtgttcatggagcacctaaaacagagaacagaggtttggtctccaccaggg

SEQ ID NO: 193506 - DNA, 122 bp, Homo sapiens
gctgatactgcgtgagtgtggtgttgcacgccctggcacagatcaagcgcgtcttccccacggcattgtcacccacgaccacacatttgatagtttcaacgttgggtctttcgtagtccatg

SEQ ID NO: 193507 - DNA, 122 bp, Homo sapiens
atgcgtccgctgctcctcatagaggcgtcgggagagtgtgttcgcgactttctcgcacagcggctgcgcccgcgcctgaccctgccaagagaggggacacttcctccacctcatcccctact

SEQ ID NO: 193508 - DNA, 122 bp, Homo sapiens
gatgatagccaattgaatggaacatccattcgggggcggggtcaaagggggacacgcccccgttccgccccctcgttgcaaactacacttcccattgtgccctctcgcgcttcctgccgcgc

SEQ ID NO: 193509 - DNA, 122 bp, Homo sapiens
gaacttggtaactttgagtgggcaccaatgacttgctgattactcactgacttgaccgcgcggttcctttcttcacctttgttttccggggggtccgtcgcttttccttcacgcttccttcg

SEQ ID NO: 193510 - DNA, 122 bp, Homo sapiens
tagggccgtgcagatgcctggcaacagccgtgcctgggggaggatgtggcgctgggagcccgcaggccgggagcaggcgccgggggagcttcggcggttctggagggactgggtgttcccgc

SEQ ID NO: 193511 - DNA, 122 bp, Homo sapiens
tggacttggtgttctatgaactatgagctaactaagttacgggaaagcagcctgcacccacggtaagatgaaaaggcagaatcctgggcctgtgcattttaattatagctctactgcctgca

SEQ ID NO: 193512 - DNA, 122 bp, Homo sapiens
agtgctattctgggccatggggaggtaaggggaatgatgccgtgggaactgtggcaggaccgcaatcgtgtgccctctcaggacagttgaaaaattcaaacactgtgcaggcaagaagagga

SEQ ID NO: 193513 - DNA, 122 bp, Homo sapiens
attaatctttatatgtaaattaactcacttggcagaggttgcagtaagccgagatcatgccgctgcacgccagcttggatgacagagtgagaacttttctcaagaagaaaataaaaataagt

SEQ ID NO: 193514 - DNA, 122 bp, Homo sapiens
ccactcatctgccattaaactgtcttttcatagttctgtgtatccttcccctactctgtgcgctgatacttatttgaatgttgaatgatctgtgcaggcaggcattgccatggacaaggtca

SEQ ID NO: 193515 - DNA, 122 bp, Homo sapiens
gaattctatcaagaaaatgaaatgaaactctacaggaaattaacagtggaggaaaattaccgaatagaggaagaagagaagctttctagagtggaagaaaagctcagccgtgccactgaaca

SEQ ID NO: 193516 - DNA, 122 bp, Homo sapiens
ttaaaagcagctgtggcctccgagatatcgttttcccagtcttttctccccctccctgcacgacgcctcttggcagacatccgggagaacccgaaaggcgctcgttgcctggttggatgcag

SEQ ID NO: 193517 - DNA, 122 bp, Homo sapiens
agggaaggagccccagagttttcttccccgtctgctgcagagtaactagattgtaaataacgcggcgattacccacaccgtgcaggaattttttttttatctgccctccacttaaaggagcg

SEQ ID NO: 193518 - DNA, 122 bp, Homo sapiens
gagcgagtaggggaacacaagcttagagatactgcgcccgcccgcgcgaaagcgggctcccgggtaactagggtacggctttcccaggaggaaacaaacctggtgcacatgtgaaataggtt

SEQ ID NO: 193519 - DNA, 122 bp, Homo sapiens
gctttgggatttctcttccaggcatcttcttcgtctcctagctggagatcctgcagatgccgcttctttttctttgcagctttgggtccactatttttctttctttgtttcttctggtcctt

SEQ ID NO: 193520 - DNA, 122 bp, Homo sapiens
agcactgagctttgagactgccagccaaggcctccttttatgcttaggcataaatgtacacgggacatataaattaaatttcaacgccatggttcccgttgcttctctgttacctgttcttt

SEQ ID NO: 193521 - DNA, 122 bp, Homo sapiens
ggcggcggcgccaggacatggagctcgagaacatcgtggccaactcgctgctgctgaaagcgcgtcaaggtgggtgcgcggcaggcgcccccgaccccccccccagagaaccccgaatcccg

SEQ ID NO: 193522 - DNA, 122 bp, Homo sapiens
acagaggcagaggtgaaaggtggagtctttctctggcatcagctggcaggtgcccccattcgaacagcccctaggagggcagggtcctgcccgcagctcacaacgtggaccctcctgcccca

SEQ ID NO: 193523 - DNA, 122 bp, Homo sapiens
acatcggttcagataattgtctcttttctctcccctgcttgctttgtattctccacagaacgaaaggaggtatttgtgcaattaattggctgcttccttagtcatcaagcccatactgataa

SEQ ID NO: 193524 - DNA, 122 bp, Homo sapiens
cttagtggtctgatctcagaacctgatggctagaacaccgagaggtcctgcctccctccccgagggctggagagccactgttttcagtggttccagtacgccttcaccaaggaggctgtcct

SEQ ID NO: 193525 - DNA, 122 bp, Homo sapiens
ggcggagacgcacagctggagctggagggccgtcgcccgttgggccctcaggggcctgaacgcccaggggtcgcggcgagtccacccggagcgagtcaggtgagcaggtcgccatggcgatg

SEQ ID NO: 193526 - DNA, 122 bp, Homo sapiens
ccggagcatcgtggatttgggtccgatggggctctctgacatccccacagcgtgagtgagcgtctcagggcagcttcgtggttctgtagcgggaacacaggaagcagagagacctcggttgt

SEQ ID NO: 193527 - DNA, 122 bp, Homo sapiens
ctcgttcgcccgagccgcggacctgagggagcgctgtccgctccccgcaagatgctcacgcgaaaaacccactcttcagtgtctgagaccactccgcagctttcggcctcggtgagcgggtg

SEQ ID NO: 193528 - DNA, 122 bp, Homo sapiens
gcgctggaggaggacgtcatttaccacgtgaaatacgacgagtgagtcatggcaggtgggcgggcctgggtattcaggctctgtgacgcgcatccttggctgcgggtgttcaggccagagct

SEQ ID NO: 193529 - DNA, 122 bp, Homo sapiens
gtgaccaccctcctgtcaagcgctgagcgcgcgactacccggccaggatctctgcgctggcggcagagactgcaacctgcagctgcggaagcttcaagtctcgcaacaggttattccagttt

SEQ ID NO: 193530 - DNA, 122 bp, Homo sapiens
ggtaagtagaataagtaagaaggccttttctttcacatatgtgttgcccatttggcctgccgaaatgcagcctgggaacaagttcagtggttagtggagctctcctctgccttcacagatgt

SEQ ID NO: 193531 - DNA, 122 bp, Homo sapiens
gctgttgccaccctaacctctggtgcttcctcttagcaattttttctcctctgacctcaccgtgctctatggttataaatcccctcttgtcttacttggagtcagagttgagcttcaaggga

SEQ ID NO: 193532 - DNA, 122 bp, Homo sapiens
cctcggctgcgcgtttaaaactccgagccctaacgtgaggtgcccccttctgattggctgcgccacaaccaccaatcagcggctgccactcggtttgccgggagcgcacaggccaagaggga

SEQ ID NO: 193533 - DNA, 122 bp, Homo sapiens
gtggggagaatacatctttcccagctcagagaagaagaacaatgggccctcagaggctggcggcctccctgtgacccctgccccagagctctcagggaatcacctagatggaaaggccctgg

SEQ ID NO: 193534 - DNA, 122 bp, Homo sapiens
gagatcccaagacctgagagatgagcccaccaagcggcctccctgggaggactctggacccgggtcactctacacccctcgggctttgtcttcaatcttcccaccctgcttcgccctctcct

SEQ ID NO: 193535 - DNA, 122 bp, Homo sapiens
tctccttgtcccccctccaatcagctctcagtgcgagccaccagttttccttcagaccaacgctgtccaggagcattttctgagatgatagaaatagtctctatctgcaccatccaatacag

SEQ ID NO: 193536 - DNA, 122 bp, Homo sapiens
tctcaaagcaccaccccagggccacattcacttgggactggattcgatacaatttcaaaacgggagtcggaattccttaggaccctctgtggacaaaaagctgatacccctgttaccacaag

SEQ ID NO: 193537 - DNA, 122 bp, Homo sapiens
ggaggacgcccacgtggtgtgcaggcaactgggctgcggctgggcagtccaggccctgcccggcttgcacttcacgcccggccgcgggcctatccaccgggaccaggtgaactgctcggggg

SEQ ID NO: 193538 - DNA, 122 bp, Homo sapiens
caaatccaaattctcccaccgatcccaaacaaccccacgcaggaacgtgaccgcagcgaacgctgtgggccagctcactcagcagctcctgctctccgcaggctcaggtgcaccctggggag

SEQ ID NO: 193539 - DNA, 122 bp, Homo sapiens
ccgggatggttgcagctgcgcggcggggtggggcttcacgggcctccttcccatgtgagacggtggttgtgcccaggccctgaagtgggtgagcagacactcgccaaaggagcacacgggtc

SEQ ID NO: 193540 - DNA, 122 bp, Homo sapiens
aagctggggttgacgaaagtcctaaggtcaagatcctgagggcccgagaagctggcgatgcggagactgagcgggactttgctgcccggggccaagaaacccgaggggccactaagctgcag

SEQ ID NO: 193541 - DNA, 122 bp, Homo sapiens
tcctcactaaggggaggggaggggtgttccggcctggcggggtgggaaggggcgcttgggcgggattgtgacataaggttgccctggtaacatggaacagatctggacccaagcctaataaa

SEQ ID NO: 193542 - DNA, 122 bp, Homo sapiens
ggggtcgcgagggagggcggggagtcccgggcgacgggcagcggccgctgcgcccctgcacgagaccattcgagaagcagcggcgctgggtcaatcccccaggctagcccggaggaggcgct

SEQ ID NO: 193543 - DNA, 122 bp, Homo sapiens
ggcagggcctgtgttcatctccaattggacatctaacaaacatcccaaactcaacatgttcgtttctgaacagctgaccttttcccccaaaaatgacccctcctaaaactgtcctcatctca

SEQ ID NO: 193544 - DNA, 122 bp, Homo sapiens
accagcttaagcatcacgcctccaatgtgcacctcgccggtcactctcagggtgacatcgcggttcaggtccgtcacatggacactcagttcccacgtcccgtccgcgtagcagccatctgg

SEQ ID NO: 193545 - DNA, 122 bp, Homo sapiens
cgtgtttggcttggaaggttctgaaatctccatcggggcacctgacttgcatgggaaaaccgtcctgggtgaggtgagggcacggtgaggttgcatcatcatcccagaatgccggaaggcca

SEQ ID NO: 193546 - DNA, 122 bp, Homo sapiens
acctcaatcagaatgtagaatgaatgaaaagtgtatctgaggaaattgacaattgattgacgagactccttaattgctcattaaaattatacctggggagctacaatgagggtccctccaga

SEQ ID NO: 193547 - DNA, 122 bp, Homo sapiens
tccttctggggaatttcgaggtggctagctagcaaagctggctttaaaaaagtagcttagcgtgtgaatagataagagtagtgcttattgtatgacccacggcagagagtagtaagtagttg

SEQ ID NO: 193548 - DNA, 122 bp, Homo sapiens
aaatgaccagcctttacacaacccagctcgcaggcgaagctgaggtcggagctccaaaagcgagggaggacagccgctgaagaagtcccggcttcccataggccaggacgaagtagggggcg

SEQ ID NO: 193549 - DNA, 122 bp, Homo sapiens
tgtggggcagtgtggacacggcagagtgcaggaatgtgctgggaggaagtcagacagccgcgagatgaagagttggccagggcctgatttcccattataagtaatccttccttatttacctg

SEQ ID NO: 193550 - DNA, 122 bp, Homo sapiens
catgatccgcctgcctcggcctcccaaagtgttgggattacaggtgtgagccaccgcacccggcctctgagaaatatttagattgtacgcctcaaatgggcagggactgtgtcttacacttt

SEQ ID NO: 193551 - DNA, 122 bp, Homo sapiens
acccatcagcggcgcgccctgcagagggaccagagcttggagagtcttgggcctggcccgcgtctagcttagtttcagagaccttaatttatattctccttcctgtgccgtaaggattgcat

SEQ ID NO: 193552 - DNA, 122 bp, Homo sapiens
ctgagaagcccccttcctgatttcccgaggcccagggcagcctggggcgtctcgaaggggcgaggcctgaggtccacacccacggggtctcagggtcctcccccagctctgcccagccctgc

SEQ ID NO: 193553 - DNA, 122 bp, Homo sapiens
cagactcgctctccttggaagaggcattttctgcaccagtctctgcctccttctcttctgcgaaaaggaaacaaaaccacaggctagtgagaccacacggccagcaccagggtccccacggc

SEQ ID NO: 193554 - DNA, 122 bp, Homo sapiens
cccgggggcggcgcacagagacagatgggcttgtgcaagggagagttcgagccttccggacgcctttgcataaaaatgacgagacctgtgcagctttgattatctctggaatactgcaggaa

SEQ ID NO: 193555 - DNA, 122 bp, Homo sapiens
cagcccacgtctcaggtgaaggaacacactctcctcctctctcagcggggcccatccatccgcaggcctgctgcggtctgcaatactgacctgagctggggagcaagcatggctagttgtgg

SEQ ID NO: 193556 - DNA, 122 bp, Homo sapiens
gaaaggggggccgtcacgtgtggccttcgcccgaaagcggtaggggagtcgctctgaaaccgccaaggatcgcgagcgacagatttgtgttggccagggttttaagatgacgcaatagctga

SEQ ID NO: 193557 - DNA, 122 bp, Homo sapiens
gtcacttccagaggcgagagaggcacagaattctattctgagaacccctgggacgcacgccgcggtggctgtgagtatgaaggcagatgctgcggaacagcctggaaaggatgtggggccca

SEQ ID NO: 193558 - DNA, 122 bp, Homo sapiens
acccgctagctgcaagaatgggaattgcaagtgggctgatgtactgcattcagctttgggcggtagagcctagaaaatgaagcgagaactttacccctaaggctctcaggagttaggaatgc

SEQ ID NO: 193559 - DNA, 122 bp, Homo sapiens
ctgagacattcattgccttcctccagacgcttcctgccagctcaagctaggatgcgatcccgagctcattcccggggaacccagagtattaacaaacaccctaagtgataatgatacagacg

SEQ ID NO: 193560 - DNA, 122 bp, Homo sapiens
tgcggagcaggcggggtgaggagctgcggtctgtgagtcctctcccgccaatgggtggaccgcgctggcggccgcgagctcgcggagctggtgagttcctcaaagagcggtcccacaacctt

SEQ ID NO: 193561 - DNA, 122 bp, Homo sapiens
ggtccgaggttcccgagatgaaggtctggctgctgcttggtcttctgctggtgcacgaagcgctggaggatggtgagtgactctgggcgcggggccacctagcttgtgccctgactttagcc

SEQ ID NO: 193562 - DNA, 122 bp, Homo sapiens
tatgttttttaagaagtcagaggcgatccaccgcactcagaccccaagcctaagtgtgcacggagcgcgcgcacgggtgcccgccgccctccgccatcgcttccgtgtccctcacccccgag

SEQ ID NO: 193563 - DNA, 122 bp, Homo sapiens
ttcatctagccaaactggtttgagtcagccacaccccttcccagctccctgggctcttcacgtggtggctggccactcaaccccacccctgggcttggcttggagccctgagtcagctccat

SEQ ID NO: 193564 - DNA, 122 bp, Homo sapiens
ggagcaggatcaacatgtgaccctggccagcccgacaggggaggccgggcccatggctcacgggaccctctgagggatctcaactccacgcacgcgcacggagcgactgtagccactgtaga

SEQ ID NO: 193565 - DNA, 122 bp, Homo sapiens
ctagcagtccaggtccctcaaccttcaccaaacactacccatggggggttgggagtcagccggccaaactaacactccccctcctccaccccagcctgctgctgctactgctgcccgctgct

SEQ ID NO: 193566 - DNA, 122 bp, Homo sapiens
cacatctgcagttcatgggcaatgctgaccacaggtgcggggaccacgagcactgctgttcggtgaggaggaggccaggcaccagcaggtgaccacggcgctcgctgcagtgaaaggctcag

SEQ ID NO: 193567 - DNA, 122 bp, Homo sapiens
acactaacagcacacactgcgggaaggattaggtgtgatactctgggccaagtgtgggcacggggaatcgagaaatggctcggtggcccacggctgccatcagcattgtcgtatggcgagga

SEQ ID NO: 193568 - DNA, 122 bp, Homo sapiens
ctggagctcagggtctgggaggcgtagggctcggccgcgtggaaatccagtccggctgaccgactggagggcagcccaggcccggccagggtgactcgctaagtgtggttggggtggatttc

SEQ ID NO: 193569 - DNA, 122 bp, Homo sapiens
ttgaccccatgagctcaccctcacgagttgagggactaagccgagtcctcagggcaggcacggcgtccctggaggaagagggggctgcacagacacaactccagtgatccacaaaggctgcg

SEQ ID NO: 193570 - DNA, 122 bp, Homo sapiens
aggaagtgggcgatcagcaaattgcccttttgcaggaggctggggacgcccctggaagttcgctttcattctccaggttttctgccttttcccttcccccttcctgcaacgcccccgcgcct

SEQ ID NO: 193571 - DNA, 122 bp, Homo sapiens
acgcagatgatcagccggtccacctgcgccaggggctgctcagcctgggccgagctgccacgcctggccccaggatcctgtgactgcctgccctggtgcaggctttcacctgcctggccctg

SEQ ID NO: 193572 - DNA, 122 bp, Homo sapiens
aacatgctgaagcaatgcagccatttaatcatattccaaaatgagaggtctgcggaagagcgctttcagcttggcaaagagtccacccatatcaacgatggcccaggctttttctatattct

SEQ ID NO: 193573 - DNA, 122 bp, Homo sapiens
aagagcttccccagccttcgggagcagctggcagggcgtccgggaataagccctacacgccgccgcctgcctccaactcactaaccctgcgcctcttgtctttcagattcaacgcgttcaac

SEQ ID NO: 193574 - DNA, 122 bp, Homo sapiens
cctgctctgcaggatcccaggaaggtgagcatagcctactaacctgtttgggtagcacagcgacagcaactgaggccttgaaggctgttatcagaaaattgtgggcggaaacttccaggggt

SEQ ID NO: 193575 - DNA, 122 bp, Homo sapiens
ccaccaccaccaatgcgccatcggtgactcggagggcagcagtcacctccgaggagaagtcgacatgcccgggggagtcaatgaggttgatgaggaagccggcaccgtccttgctctgcttg

SEQ ID NO: 193576 - DNA, 122 bp, Homo sapiens
gggggtctgtcctttgcctgggggcgcaggtccgcgagccaactttgcggctgatgaggccggacaggcggcagaaaggcgcggcgacccgggccggggagggcggtgggcccggggggcca

SEQ ID NO: 193577 - DNA, 122 bp, Homo sapiens
gattttagaaaatggttggctttcagaaagtggtgttggctctcagagggtgaggctgaacggcagtgaatgcccttttttggttttaatttggggaattttaggttaatttgtgagaagtt

SEQ ID NO: 193578 - DNA, 122 bp, Homo sapiens
gtaacaccaagaaggacgccatgagagcgaaggccattgggtaaccaccctttgctctcgcgctgcgcgtctccctgccatcaaccgccactgggagcggttgagggcggccggcctcgcgc

SEQ ID NO: 193579 - DNA, 122 bp, Homo sapiens
tccagaatgaacttaatgattgccctttttgcgttttagtccccctcccatccatcacaccgctaggcttgcccctcctcctggggcaactggaatggtttttgtaaaagcataaatcggat

SEQ ID NO: 193580 - DNA, 122 bp, Homo sapiens
gtcatcgtggagcctgcagaccctatcagcggcacctgcatccgagactccgtcccctgccggagccagctcaaccgaacccacaggtgacagctcgggatccaggagttccggctccaaaa

SEQ ID NO: 193581 - DNA, 122 bp, Homo sapiens
tgtaaacgtgagcctcatgccagagaacccacagccagcccctcacacccctgcactgaccggcttttatttccagcctaaaagaagagaaggcagatttagttgcctgaacacaaaccctc

SEQ ID NO: 193582 - DNA, 122 bp, Homo sapiens
cttggctcactcgctggacctctcgcccggccgcacctcctcacgcacccccaaccctaacgtggcctcccgggctgacgcagcgtcggtgcccatcacaatcacaaaccaaacttggcgcg

SEQ ID NO: 193583 - DNA, 122 bp, Homo sapiens
ttgggagtttccccacggtgtgcaccctttcatgttgaagtctgttggaacaggtagatacgttccttgcagatcataggtgtttctccaagtctctccacctgggcatgatgggaggatga

SEQ ID NO: 193584 - DNA, 122 bp, Homo sapiens
gcaccagcctggggatggagctgcagcgacgaggaccgggaagctggaactacctcaccccgagcccagctcagcccagcccagcccagaaagggcccaaccctgtgattggtccaaccctg

SEQ ID NO: 193585 - DNA, 122 bp, Homo sapiens
gctcggaagctgtgcagagttttgtaatggaatgtgaattgctacggcggatctggatttcggttctatctcctaagcaataagcagagagggaggacaaatcggctaagcaggaaattttc

SEQ ID NO: 193586 - DNA, 122 bp, Homo sapiens
gaggcttgctctgtgcacggccaggtgatgtttggaggctgggtcagggctctcggctggcggagacattggcattaaaggctttagcttgagcagcctggtcctgaatgttgcaaaaaaat

SEQ ID NO: 193587 - DNA, 122 bp, Homo sapiens
cctgtgagtgagtaattccgggaagctcgccttacaactccgcgcggcctcggccccctgcgccgcccgccccacaacaaaactcagcgcagcgctcccgggcgcccggttcagagcgacct

SEQ ID NO: 193588 - DNA, 122 bp, Homo sapiens
cggccccggagagggggaaggcgcctggaaaacgttcttcttctccctggccgacccgagcggggaacagcactcccaggatgcagtttgtgtcaacacggccgcagcctcagcagctgggc

SEQ ID NO: 193589 - DNA, 122 bp, Homo sapiens
actggctgggcggcgcgcggggacgcagagcagccacctgacgctgctaccgcccccctccgggctccggcgcctgaaaccttcctgaacactggcgctttccgcaccgcccttaccccacc

SEQ ID NO: 193590 - DNA, 122 bp, Homo sapiens
cctacaggtagaaggttctagattcatgccttcctcctgccccaaactagcaacccaccacggagagggtgaaacgagcatttctagaggctccctgcagccctgtctgtgatttcagtaat

SEQ ID NO: 193591 - DNA, 122 bp, Homo sapiens
ccagcccgcctgtacgagctttcgccaaagagcttttcctaggcaaaatcaagaaggtaacgcgagccctgggcgaacccttgctgtctggctcccgcttttcaccctcagctgcaagactg

SEQ ID NO: 193592 - DNA, 122 bp, Homo sapiens
gcgcgtagccgggaccatggaggggcagagcggccgctgcaagatcgtggtggtgggagacgcagagtgcggcaagacggcgctgctgcaggtgttcgccaaggacgcctatcccggggtga

SEQ ID NO: 193593 - DNA, 122 bp, Homo sapiens
ttgttgagcctggtgtcaatgcacacatctggagttgccatctccttcatgtcaaatttccgaatctctctgagtgcccaaggggcacgcttcatgaagcccactccgtggacgcgctggtg

SEQ ID NO: 193594 - DNA, 122 bp, Homo sapiens
gaccttgaaggttgctggtgtatagaaatgctccgggtttttgtacattaattttgtatccggaaactttcctgaagtagtttatgagatcaaggatctttttggcagagaatctgggattt

SEQ ID NO: 193595 - DNA, 122 bp, Homo sapiens
ttgcccagtctgtttcaggagcaggcctcagattcctcaggggttaaagtgggaagaacccgtgtgtgcacattttttgtgcttttccagaactgggtaccatttggcagttgatcacccaa

SEQ ID NO: 193596 - DNA, 122 bp, Homo sapiens
actgcataacagccctgatttttgcactaaaatagagatcaacaagcaatgattctgtgtcgtgcacgcacgcagaaacgcgatgacgtcagggttgcttggtaacagaagggcagaaagcc

SEQ ID NO: 193597 - DNA, 122 bp, Homo sapiens
ttttctgcaaggcaaccggctgaaaaaatacatctctgcaaaaataaagaaaagcctaaccgagtgcagccgccatcctcccagtaatgagatttggaggattactgctgagatgaatggaa

SEQ ID NO: 193598 - DNA, 122 bp, Homo sapiens
ggcgactgcagagcgattgcagagctcatagacgtgatgaagaccagctgggcactgcagcggctctggcttctgctgtgagggacggggagctgtggagactccctctgtttggtcccatt

SEQ ID NO: 193599 - DNA, 122 bp, Homo sapiens
aacccaaaagttagtttatgtagtattatagctgtcaactcccacatcccccaacaccaacgtcaaatatggagcccatcgcaaacattggtgattgattgtggcactttcccagctgaacc

SEQ ID NO: 193600 - DNA, 122 bp, Homo sapiens
acgtggtctgaggctccagccaccagacccgaagctcagtctacactcaccaaggcccgacggctgctccaacctgggaggaccgatccgatcctgcgctccctgaggccgatggctttttg

SEQ ID NO: 193601 - DNA, 122 bp, Homo sapiens
gctattacgctattaattatagcttagcagtacatcagtcaatcagtccatggcaccagccgttcagtagctgttgtactctggtcctgatggctcagggaatgccactttgtatatttctt

SEQ ID NO: 193602 - DNA, 122 bp, Homo sapiens
tgaggttctagcgtgaccggacaagcccatgcctctaatccacttgtttccttgtgttggcgtaataagagttgcattgaagtttcaagagtaggcacctgagacggagtcagcatagaagt

SEQ ID NO: 193603 - DNA, 122 bp, Homo sapiens
ggcctggctgggccggacgccccacccttgccaacaggcaggcccgccccgtctccgcctcgccgccaacaaggaggaccagcaccaggcctgggaactgctgacctgcccgcccaccttcc

SEQ ID NO: 193604 - DNA, 122 bp, Homo sapiens
aaaaaaaaaaaaaaaaaaattagccaggcttggtggcacacacctgtagtcccagctactcggaaggcctgaccccatgaggtcaagaatgcagcaagctgttattgtaccactgcactcca

SEQ ID NO: 193605 - DNA, 122 bp, Homo sapiens
tcctgcgagatgtcagaagcacctacctccgtgtgggctgctgagacaagcatgcccacgcggagcctctgtgtggttatgaagtgtcaacaccccggccaggcctgtaaagaatcttaaag

SEQ ID NO: 193606 - DNA, 122 bp, Homo sapiens
ccgaacccggaagtgcacttgggctcggagagccagaactacaattcccagaagcctccgcggcgcggacggtcagtaggcggggttccggcttctccaaggaagtggggcgggggaccggg

SEQ ID NO: 193607 - DNA, 122 bp, Homo sapiens
actctgtttggaaaatcagacgctaaatagcccctgaagccgagcagcctgttatgaaaacggaggggtggtaggcccttctaattggccagggtatttacccagagctctggctttcacat

SEQ ID NO: 193608 - DNA, 122 bp, Homo sapiens
acaaaggattgtggagacccaagttcttactttcagaggaagccttcaggtagtaggcttcgataggtggtagtaaaacgtttcttatcggacttaaagtctatgttaatgttaatgtcaga

SEQ ID NO: 193609 - DNA, 122 bp, Homo sapiens
taaagccgtgcgcagcccgccgggccagcttgtcactcgcgaggtgggcgccgaggcggccggctgtgcatcagtgtgcccgtaattgttcctgtaattgggccgcctcgctcctggggagc

SEQ ID NO: 193610 - DNA, 122 bp, Homo sapiens
gggggcccctgtgacactttgtctcgagggccatccctgctcccactccttgggggtatgcgtgtgttctacactctctcccctgccgcgtccctgtgtgcggcgtcgtggatctttaccat

SEQ ID NO: 193611 - DNA, 122 bp, Homo sapiens
gggcgtggtggcaacctgcctgatgctacacagctgattaggggcagagttggggtctcccgtagccaggccctgtttttttccctgcacaccactgtggcctgctctggtgttgcctcctg

SEQ ID NO: 193612 - DNA, 122 bp, Homo sapiens
ggaacggcccctcggctacttaccgggaggaaggacagccgagatcccggggccccgggccggaccgcggagatgccccaaactgacacggccgccatcttggagacagtgagctccagccg

SEQ ID NO: 193613 - DNA, 122 bp, Homo sapiens
ggatggatggatggatagatgggccagagactgggaacggtaatgccggccagacgggtccgagcgcctcgggagccccagccctcctccggctgcggggccgctgctcctgctcccgggcc

SEQ ID NO: 193614 - DNA, 122 bp, Homo sapiens
gtgatctgctcgcctcagcctcccaaagtgctgggattacaggtgtgagtccaccgcgcccggcctatatatggattttattatgatcttgaaacattagccttttgtaatcttcgacagaa

SEQ ID NO: 193615 - DNA, 122 bp, Homo sapiens
ggcccttgctcccgcggacccaggtcgccagggtcgcaagtttctccggccacccccctgcgaagcctgacccgcctactgactgaaaccacgggcaaagttccttttcgtctttcttcctc

SEQ ID NO: 193616 - DNA, 122 bp, Homo sapiens
ctctccgtggctccagccaaaagctcaggcgtcatctctactcctccctttgaccctcagcgacagtcagttgtcagtaaagactcctggctctgattctaaactaaacatagaatcaggct

SEQ ID NO: 193617 - DNA, 122 bp, Homo sapiens
tggaaccaggtgcgtgaaagcgcccagcctgggcgcagcggacgagcacgcggaacggagcggcagcccgcccgcaggatgccctgagctacactcgctggacaccttctgtgtacctagca

SEQ ID NO: 193618 - DNA, 122 bp, Homo sapiens
cagaagttcccgggtgctgccttcagtgctgccgaatcacgtggaacggtattccgtttccgatttcagttccggttcagacactctggtgggaaaggctcacgctgctgctggagggtctt

SEQ ID NO: 193619 - DNA, 122 bp, Homo sapiens
caaagctgcacgcatattctctgcgtggaaaagggggctctcagctgaactgggagaaagcggtggctttgcattggggaagcagagttgaatgaaaatcaaatgtcgcctggcccagttag

SEQ ID NO: 193620 - DNA, 122 bp, Homo sapiens
gccggtaaagcctgaacccacaacacatctgtctctgtggtaacagctgcaccagctttgcgtatcccctgttcgagaaaactgctgccgtcggtgaacacggtggcgtccgcctttctcag

SEQ ID NO: 193621 - DNA, 122 bp, Homo sapiens
cccggcggcgggagggatttagtcctggggttctccgcagggcaggggagacttccgaggcgtcccttgaggccgcggggcgtccgcgcttactgttccggggctcgcggggctggaggcct

SEQ ID NO: 193622 - DNA, 122 bp, Homo sapiens
ctgaaaagaacccctggcagccaggagcaggtattcctatcgtccttttcctccctccctcgcctccaccctgttggttttttagattgggctttggaaccaaatttggtgagtgctggcct

SEQ ID NO: 193623 - DNA, 122 bp, Homo sapiens
ccccggacctgctgcctcctcctgcttgtcaggggacagatccagtacatctcccctcagcgctgggtggacctaacccttgctttcttggaggaaacccaggaatccagagacaaagtgga

SEQ ID NO: 193624 - DNA, 122 bp, Homo sapiens
gaccttcatgtggatgccccgttggccttcaaggtcacgcctcaaggacgcagcagctgtcgcccttgtcctatagggagagcccatcttgcaggtggcagtcgtgcccgtggtcgcgcggc

SEQ ID NO: 193625 - DNA, 122 bp, Homo sapiens
aagaagatcactggggcgaacaccgagtgtggcggggagcaccgagagagatcactggggcgaacaccgagtgtggcggggagcaccgagagagaagatcactggggcgaacaccgagtgtg

SEQ ID NO: 193626 - DNA, 122 bp, Homo sapiens
gaaaaaaaccaaacgttccaaagtcgaagacttttcctttgatacaaacaagcgaaagttcgattatttgttcaataattttccgttgatcccttagtcttgtagtcgctactttataaccg

SEQ ID NO: 193627 - DNA, 122 bp, Homo sapiens
ctgtcactggcctcacccttctccacaactcagggattattttaaaggtttctttaatatcggccagtccaaatattctcttgtcaaatatttctgtggcccgtacttgaaatctgtgaaca

SEQ ID NO: 193628 - DNA, 122 bp, Homo sapiens
atttttgagatggggtctcactgctttgcccaggctggatggagtgcagtggtgagaccacggctcactgctacctctgcctgcggggctcaagcgagcctgtcacctcggcctcctgagta

SEQ ID NO: 193629 - DNA, 122 bp, Homo sapiens
gtgcccatatgtgctgtttgaaagaaggaagagagagggaaagaaagcaacactgaaacacgattcaaaaagtgatagaaagatttacctttatgattgggaaagccacaaagacatgagta

SEQ ID NO: 193630 - DNA, 122 bp, Homo sapiens
gtcgcctgctgggttcaggttggcatcgtaccagccaccgaagcggttctccaggttccacgcaacctcgccgtgccggatcagcacctgtttgtaggcggcgtggcggcgggctggggatg

SEQ ID NO: 193631 - DNA, 122 bp, Homo sapiens
gcgtctgtgcgtgtgtaagtgtgcttgtgagtgtgcgcaggaacaagcgggcgcgcagggcgcccggctccagccgaagcctttggaaaccgaccctgccgccctcggtcccttcacctgga

SEQ ID NO: 193632 - DNA, 122 bp, Homo sapiens
tcaaaggcggagtcacgggctccgccctctttctcctgcttggcgcgagcacaggcaccgcgtggttctcacaaccagcagctcggctcactgagacccggtggtccagacgctgctcctgg

SEQ ID NO: 193633 - DNA, 122 bp, Homo sapiens
gcgaagggagaggcggggcgggacgtgcgggtcaaccccacccgccagccggaggggccgcgagtcctgcccggaggccttgactttgaccacagtacagggccccaccagcgtgtttatgg

SEQ ID NO: 193634 - DNA, 122 bp, Homo sapiens
actttctatccttctgtctgctttttcttctcccgcacagttgagctctgcacagctcttcgaaaggggtaggaacaaggcaaacctcgtctcatcccacgaatgactccctggtgcacttt

SEQ ID NO: 193635 - DNA, 122 bp, Homo sapiens
aggaaaagatttccggaactctttcagagcacacacagaacagcaggccacagcttttcccggggctcagcttggccccctgttagccgaggcgggtgcaccccgaggaccccatgtggttg

SEQ ID NO: 193636 - DNA, 122 bp, Homo sapiens
ccccagccagcccatgctgccccgaggcgggagccatccctttccccagccccagctctgcggccactcacctgctccgagaccgaagatcaaacagaatgttctcagtaagacccgagact

SEQ ID NO: 193637 - DNA, 122 bp, Homo sapiens
atgctttggagattgcgccacaaccagggcagcgtaaactacagttcccagagagcgccgcgtcgggagcggagccttttctcgctaacaccgctcgccctctccgagtcagttccgcggta

SEQ ID NO: 193638 - DNA, 122 bp, Homo sapiens
ccggtggtgcacacgggcgctggccaggcggttataggccaggttaagctccgtcaggcccggtgtggcgaccaggtcacgggcacccagcgcggccacgtggttgtggggcagcaccaggg

SEQ ID NO: 193639 - DNA, 122 bp, Homo sapiens
gtgtgtgtgtgtgtgtgtgtgtgtgtgatgcgccctccgtgctcgcctagcaattgcgcgcgcgtgcgctctgcgtgtacacccttcacactagccacatcacactacacgcttggtaaata

SEQ ID NO: 193640 - DNA, 122 bp, Homo sapiens
aaaagagtacgtgtgactttgaacagtccttttaaaatgtgaatgtgcaaacattcaacgcggtctcgttaaagtgtagatttcaattcagtagatgtggggtggggcagagattctccatt

SEQ ID NO: 193641 - DNA, 122 bp, Homo sapiens
cttgctggaggtcgcacagctgctagggacgccaaaccatggcagtgtcgcccacgaagccgcttccctaccgcacctagtactcatggcagagatccacaattttgcctgaagagccttgg

SEQ ID NO: 193642 - DNA, 122 bp, Homo sapiens
gccaacgccgtattgacgcgcagcacaagcgagtgagtcctgaggggcctaagtgagtcccgcccctggcgtccgcgacctatcactgcgtgcccggcttgcggcgtccgaggcctccctgc

SEQ ID NO: 193643 - DNA, 122 bp, Homo sapiens
ctcactgtgattgcccaacggattcgctaaagttagggaaaaaaatggagcaacatcaggcgaattcaactgcgaacatactgtcagcctcattatctgcccatttcaagggaaagcatttg

SEQ ID NO: 193644 - DNA, 122 bp, Homo sapiens
cgccataaaggtactcccttaggagcaggcccggcactggcttgatgtagcggaagccctcgcccgcgcgggcggcctcgtccgccggcggctcgggctgtctgcggtacagcaggaagaac

SEQ ID NO: 193645 - DNA, 122 bp, Homo sapiens
ccactgctgcacaccaccctccaaagggcacaagtactcccagtcggacagcgtttccctcgttcacaaaagacctccatgatttgagaccaggcagagagctgtttagagcatacttgctg

SEQ ID NO: 193646 - DNA, 122 bp, Homo sapiens
gccgcttccaaaatgggatggtggcaagcctcttgttctctgacctggggttcttggcctcgcagattccaaggaatgaaatcttgggccatgcggtgagtgttatagctctattagaagcc

SEQ ID NO: 193647 - DNA, 122 bp, Homo sapiens
gggtggatgagagtgctttattgggcacccagcatgggggcttggcccgaggaggaccatcgggccccaagacaataaataaaccatcatctccctaaacaataaataaatatccaagaaat

SEQ ID NO: 193648 - DNA, 122 bp, Homo sapiens
ctagacaccgggaagaccgctcggatcaagaccagccaggcagaggaggagaggcggcgccgacttcgcccaagatttccatcaagtccacgcatgagaggcctctccctcccccagcggtc

SEQ ID NO: 193649 - DNA, 122 bp, Homo sapiens
aaagtatgtggcgacagtcaactagatttaagttcattttctgtagcttggggtcagaatcgactgaagcactctgatgatcaagttttctgcaattccctattccacgcattagctcgctg

SEQ ID NO: 193650 - DNA, 122 bp, Homo sapiens
caaactcctgacctcaggtgatctacccacctcagcctcccacagagctggaattacaggcgtgagccaccatgcccggccatgcccaccttttaagagagctcagtcaagcagaagcaagc

SEQ ID NO: 193651 - DNA, 122 bp, Homo sapiens
cactggtaacctagtgctcccaggccttgcggagcagtcctgcacaaggcccttaggagacggaggttacaggaaaggccggcagctttattttgtaagactagcagagccaccttgtggtt

SEQ ID NO: 193652 - DNA, 122 bp, Homo sapiens
gtttcttctttcagttgtgaaaagagctcataaaacgatcaaaacacgccagcccgggcccgggctttgttacctttgcgcctctcgcctcctctcgcccgaactctgcagatcccattcat

SEQ ID NO: 193653 - DNA, 122 bp, Homo sapiens
tcaccgcgagggtccgcggcttcattcttgaagtcagtgagaccaagaacccactaattccggacacaatttgactggtagttaatcaataaccagggagattagcgtgctaaccagttagg

SEQ ID NO: 193654 - DNA, 122 bp, Homo sapiens
ttcggagccaggagctgggacctgctgactctggaacgtctcctctggctgcggagcccccgccccacgtggggccgtgcgtgaatcctaccagcccctgtctccgcaggggtcccgctccg

SEQ ID NO: 193655 - DNA, 122 bp, Homo sapiens
gtctgcgccgcccagggaagccgggggtctagggggccgggggtccgtctgcctgcggcgcgcgcggggtgcttgtcccaggctgggtcggggccaggagagaccccgcaggcggaggcagg

SEQ ID NO: 193656 - DNA, 122 bp, Homo sapiens
aaaccaacagtcagtgtgggagaactgctgatactcgaatacatcaaatagttataaaaccgccaaaaaccgttttctctcaaacttttggtaaaatgtgcttcagggaaaacgcagattgg

SEQ ID NO: 193657 - DNA, 122 bp, Homo sapiens
tgggcgcgtccggggctaggcgggagctgcgcagccgggtccaggggagacgccccgccccggccggaccctcggagcctcctaggggagaccccggccccgcccctctctcgcccggatcg

SEQ ID NO: 193658 - DNA, 122 bp, Homo sapiens
gttcgaccctccccatccccctggtccctaaatcataaatccggccagcaggagccagaacgggcacagcttgtccagggcctggggctctggccacctcccatgtcctgcctgccctccct

SEQ ID NO: 193659 - DNA, 122 bp, Homo sapiens
gtctagcagcaacaagtgcccttgagacgagggctgggggttgaggtggggtgactgaggcgcggagaaccaggggtatccccctgggcaaattcactcgatttgcattttagagggccatc

SEQ ID NO: 193660 - DNA, 122 bp, Homo sapiens
tgcgatcggggtcctcagagccggggggcggggaagagggtctggctctcagtaatcccacgtaaggtacctgctgtcggaagatttgaactttctacttggactactaacacccacagtcc

SEQ ID NO: 193661 - DNA, 122 bp, Homo sapiens
ggaaaaaaaaaagtatacactataggaatagtacacttattcctatagtgtactaggcaccgcggtgtttgtgaaatctctgcagtcctctatctccccagacccaagtccagtgcctggtt

SEQ ID NO: 193662 - DNA, 122 bp, Homo sapiens
ggcgtggctgtggttgacctgggatatgctcccaggtgtagtcaatgtgtgctcacatgccgcccagggattcacccatcccatgatgaacatggagtgagaatatgaagctgtgactcctt

SEQ ID NO: 193663 - DNA, 122 bp, Homo sapiens
cacaggcgcagtaggacactgggcgccgcttagccgactcttactcctcctccccgcaatcgtcgggtggttagttgcacagcctcgcgcatgggcacttttgttatttttcattatgtagt

SEQ ID NO: 193664 - DNA, 122 bp, Homo sapiens
agtgctaagaaacatatctggtgcatagcaggtgctcattaaatttagttatttggtcaacgtaaatcccccattgctggataattttttgtttgtttgtttttgttttatgctattataaa

SEQ ID NO: 193665 - DNA, 122 bp, Homo sapiens
ctttctagtttctccgaggaggtaaagagaaccaagaagccggattgaagatgatgactgcgccaaggcgttgcctagccaccatcctgtaggctttgatgatttacattctaaacggaaaa

SEQ ID NO: 193666 - DNA, 122 bp, Homo sapiens
caccctcaggacaatcttcagcaacatacagtcagtttaaccaacaaagtctgaacagcacggcaccaccccctccacctcctccacctccttcttcgtcttactatcaaaaccagcagccc

SEQ ID NO: 193667 - DNA, 122 bp, Homo sapiens
tacctttcccagaaccctccgcagcgcagtccgatcctaggggcgatggtgtcgtaaatgcgcgtccacctcgagtcacgcccactgcgaggcggcgggaggcggcatgcaaggtgtttctg

SEQ ID NO: 193668 - DNA, 122 bp, Homo sapiens
gcgcgccgcgtggggcttgggagcctccgaggggccatgcccagcctggaataaccatttcggtttttgctagatggctgcggagacaatggatgaatgacagaaataaaacaagtaaagga

SEQ ID NO: 193669 - DNA, 122 bp, Homo sapiens
ttgaaccactgtaccctgactaaaaagatcttctgtgttgaatatgacaacattgtatgccggccccaacagatttaatttatgcaacatagtccagttacagtatccttatatatgcaaga

SEQ ID NO: 193670 - DNA, 122 bp, Homo sapiens
gctggactcctggccctggggagcagctgccaccctgcctattccatccactttccaactcgctgcctattggagcagatgcaatattgggtgccttgtgaaagatgctcctagtgcacttg

SEQ ID NO: 193671 - DNA, 122 bp, Homo sapiens
gaagcagtagactttctgtactttgatttcctaccattgcctaatggtaaacactggaggcggctctatccctgatttggtccctggggtagaagcctgctggaaaagggtaatcataagta

SEQ ID NO: 193672 - DNA, 122 bp, Homo sapiens
agaacccctttcaagtacaacttcacaggagtgacaggctcccaggacaatctgtttcatcgttcccaaaaagaagcctctcaaatgctccgaggcgggtatctaagtgttgtcagatggag

SEQ ID NO: 193673 - DNA, 122 bp, Homo sapiens
gggacaagcacaagggaccccgagcaggagctctcacaagaagagtggctcagggctgcccggtagagagagatcttagtggttgtgctcttcctggccagaaaggctcagccctagcttgg

SEQ ID NO: 193674 - DNA, 122 bp, Homo sapiens
ctaatactcattctcaatcacttttttttcctgacaccaatttggcatctatttgtgcaacgtatttccacatgtaattattttacctactaatcttaacttagctctttttccctcctact

SEQ ID NO: 193675 - DNA, 122 bp, Homo sapiens
ccaaggcagttttacagcgcagtggagggatctaaggtgggcgaagactgaatgctgacccgcccaggaagaccaataggacctagctgaagagggagctcgggcctcccgcggtgaggcca

SEQ ID NO: 193676 - DNA, 122 bp, Homo sapiens
aatagtaatatgtaaggtagagcatgttacatttcatccatcacccatgggctcaccgagcgcagagactggagaaattgcgcacatttctccgttgctgcattaatactagaaagggagtg

SEQ ID NO: 193677 - DNA, 122 bp, Homo sapiens
aaaattcaccatacttggtccacatcctgaagccacagggcctggggccacaaagatgaacggaactggggctcagagcccaggggggaagctgacacagcagcctgctgccccgacaatgc

SEQ ID NO: 193678 - DNA, 122 bp, Homo sapiens
gagggctgggtcgcccctcccgtccccacttcctccagccccgccccaccccctgcggcccgcgcgtttatgggaactcaggcctggacggtttctctgaaatcattcgctgcgtctgccct

SEQ ID NO: 193679 - DNA, 122 bp, Homo sapiens
gggagtcccagtactgtgtaccaacagacctaccagttgggagttaatatttgagaacatcgttgacgtggccagatctacttgtctttaactttctggtgtcctgaaagtctgctgtgatg

SEQ ID NO: 193680 - DNA, 122 bp, Homo sapiens
caaaataaaacagtggacttttccaatggcgcttccctccccactctgcaccctgtgctccggaagttttggccagaagtgaaagggaaagaaaagtcttcaattataccagcttccaactg

SEQ ID NO: 193681 - DNA, 122 bp, Homo sapiens
tcagcttcattaagtgaatagctgaacaaatatattacgcatgcatgaaaagctctttttcgaggagtctcattgtatcctcagccctgacaggtggttaactgtgtgttgtttttttgtgt

SEQ ID NO: 193682 - DNA, 122 bp, Homo sapiens
ggaaagtgattggcaagggaaagaggcagggctgaaggcctagggccccccgcagaaatgcgccctctgagctgtactgtacagaggcgctcctctgcggaatcctgcagctgctccaggtg

SEQ ID NO: 193683 - DNA, 122 bp, Homo sapiens
cctgaacttggagcttagcacctgcgttcaaatcctggctgttcctgttagtcatacatacgtggctttgggcagattcctgcaccactgaatcttggttaccaggatgcagtgagaagcaa

SEQ ID NO: 193684 - DNA, 122 bp, Homo sapiens
ccctgccctcccaggctggagccgggctcctggcggagcggtgggatgctgctgccgggccggcgtgcagtaggggcggacccccagcaggaggaccccggctgcggctgcggcgggggtgt

SEQ ID NO: 193685 - DNA, 122 bp, Homo sapiens
catgtgctctttgctgatctcgtgggcttcgctgtaggccttctcggaggactccaccaccgtcgcccttttctctccggtggccacttcagccaggtagcggtagtagtcccctttcatct

SEQ ID NO: 193686 - DNA, 122 bp, Homo sapiens
tctcttcgcgatggccaatccgcggccacccctctcctcccacaaatccccaacttctctcgagccttggctgggtttcctgccgtgtctctctgcattgccctgaatctctccccattctc

SEQ ID NO: 193687 - DNA, 122 bp, Homo sapiens
ctgctgtgtctctcagactctggtgagtgtcagaatgttttggaggccttgttaaaactccgatggccaggcccaccctgaggttctgattcaggaggtctcagcagagcccagagctggct

SEQ ID NO: 193688 - DNA, 122 bp, Homo sapiens
gccacaccagactcactgcccaccggggctttcgccggagagagaaaatactgaggtaaacgaggcctgcttgggctgttgaggtccctgaaagtccgtggctgtaaactcgttcagcagtt

SEQ ID NO: 193689 - DNA, 122 bp, Homo sapiens
gtttcccagtttcactctgaccctccatcaatgtagccagccagctagattgtaggttaccggcttctattctgcaggagaactttgagtctcgggagactcagggtttcttcctcccgcct

SEQ ID NO: 193690 - DNA, 122 bp, Homo sapiens
atgaaaagaaacgtagtcttgatacacgccaaaacatgcatgagtctcaaaataaacatgcgaagtataagaagccttaccaaaaagagtatatgccatgtgagttcaccaagataaaattc

SEQ ID NO: 193691 - DNA, 122 bp, Homo sapiens
ccggcacatcagcgtcatgggagccctgccggccatcagccgtggtcctatcaaatctgtcggagcccctcaccctgatgcttcctgttcacggtgttccatccctggcccttcctcgtcca

SEQ ID NO: 193692 - DNA, 122 bp, Homo sapiens
ctgtccgagtcccggcggggctccaatcccttaataggcggttccgggccgctctggtcacgcccctgacccgcccctcaagacctggccttagcctaatctcagggtttgccccaccccga

SEQ ID NO: 193693 - DNA, 122 bp, Homo sapiens
cttgcagagtcaccctcgggccgggtctggagcctgatgcctcgggggtttagccctagccgctaggcgggtaggcaaagtgtcgggttgaaagggtctccgggaacctacttcttcctgct

SEQ ID NO: 193694 - DNA, 122 bp, Homo sapiens
tggatcctccttcttcttcagggacgtttcacttggtaatggctgtgctgggacagaattcgcacaccatgcccctcacccatttctttttccttttcttttttgttttcacacagggtctc

SEQ ID NO: 193695 - DNA, 122 bp, Homo sapiens
caaaaatctccctttgcaagatgctgaggtatattggcaaaaccgcagatcacatgactccgggagtttgagaccagcctcgccaacatggtgaaatcctgtctctactaaaaatactaaaa

SEQ ID NO: 193696 - DNA, 122 bp, Homo sapiens
gtcaggatccgctaaacattcacaatgacaaaggatgtgaccatggatttgttttgccagcgcttcttgtggcttatgctaagaggaatagtgggaaagcctgtcatcctatcagtaatgag

SEQ ID NO: 193697 - DNA, 122 bp, Homo sapiens
ttaatatgtagatcttgttagaattcaaagaatacaggcatcatttggataagctgaggtcggtatttgagatgaaggtgctagaagcctgcttaactccctgaagagtcttttccagcctg

SEQ ID NO: 193698 - DNA, 122 bp, Homo sapiens
gagaggactcagctgcgtgtacactgtcagaagaacaagaagccatgaacccataaaaggcgttgactaatcctttagcagattgaaaatgatccctcccaaatcaccaacagacctcagaa

SEQ ID NO: 193699 - DNA, 122 bp, Homo sapiens
cggagtgcgcattgcgctaacacgcgcacgggaattgcacccttgccggagcctccgcaccgtgcgcccttcaaagagctggcgaccccgctcacgtgtaagcaacctcccactttgaaact

SEQ ID NO: 193700 - DNA, 122 bp, Homo sapiens
aggaaggctgtccagttccaaatgcagcctggtccacacacacctgtcctcaccaccacccgtgtgcattcagtgatcatacaatcccttccagaaatccccagaggcagactgcagatgtc

SEQ ID NO: 193701 - DNA, 122 bp, Homo sapiens
cgcggaagcaagtgaaatccagcctcaaagactctgatggaagaacacctgtgaataccgcgccctctaggcgtccgccacaccccacggccccccagacggggtcttcttttgttgcccag

SEQ ID NO: 193702 - DNA, 122 bp, Homo sapiens
agtaaactgggtgggtaggaagaggtgaaggctccctcctcagggctgccgggaccgcctcgagggcttgtctgtttaggtcccaattcctcccggatccgtacattcacacgagcgcaggg

SEQ ID NO: 193703 - DNA, 122 bp, Homo sapiens
gcctcctcgacagattttgccctccgcagaaggcctgaactcagcacaagtgcaagccatcgcctcctatcaaaggtgcgccggggggtgggggaggggcagccctgagcacagccagtgcg

SEQ ID NO: 193704 - DNA, 122 bp, Homo sapiens
ggaactcagaatgcagagtcagtttcacagacaccaagtgaccttgtgcaaggcacctcacgtattgcctcgccttcttgacaccccctaatgaatggtgacagcgacacgccccagccggc

SEQ ID NO: 193705 - DNA, 122 bp, Homo sapiens
tccctggcctagctctgcgagagtggggtttcaggtcaaagcaggtctggcagctctgcccggcccaagcgcagaacccttagctgggaaggccgcggccaggctgcggggccccctgcagg

SEQ ID NO: 193706 - DNA, 122 bp, Homo sapiens
cgcgagcgagcgagggattccctctgacgtcattgctaggataccaaacaaacactccgccgcgccggccgagctccttatatggctaattgcgtcacaggaactccgggaaggcggggccg

SEQ ID NO: 193707 - DNA, 122 bp, Homo sapiens
ggcgggggcggagctctgcctgccaactgaggggatacagtctctcagtgcacagagccccgcaaagccacggggccgtcagcagcgagcatgccccagcgcgaggcgcagcccaggcggcg

SEQ ID NO: 193708 - DNA, 122 bp, Homo sapiens
cttgacgggcctttgcaggcagttctgtacagagtcctaacccgtaacgggcctcaaccccggctgtgtgtgcgtgtgcttgtgtctgtgtgtctttgtgtgtaaaagcaacgcataaacat

SEQ ID NO: 193709 - DNA, 122 bp, Homo sapiens
cttttcaccacatttacgccaacacctgctgttctttgactattgaataatggccattctcgctggggtaaggtgggtgagaaactcagctgtttttcattgtggctttaatttgcatttcc

SEQ ID NO: 193710 - DNA, 122 bp, Homo sapiens
ctcggcgtcccagaggccgcgcgccgcccggggtcccgaccctgcggagagacctgaaggcgcctgccgtggaagaagccgctggccgcaacgtttgggaaatcaaaatgttgccttcccac

SEQ ID NO: 193711 - DNA, 122 bp, Homo sapiens
ccaggaagagccactcgacacgccgacttcctgattgtcactgaggaaacttccggcacacgtcggaagttattcacaactggacaggaaacccgcctctcaggctgtggccacgcctccgc

SEQ ID NO: 193712 - DNA, 122 bp, Homo sapiens
acttgaaagatgatggagtagttgaccaggcggtcagaggaacttggaagcgctatgattcgggatcccacagagagagattcaagggcaccttggcagatatggtttacagtgacctctgg

SEQ ID NO: 193713 - DNA, 122 bp, Homo sapiens
tccagatcgcgccccaggctggactcggaattactgccccgcgggtctgcattttcacagcggcaggtgtgagttccccgccgctggagaccagaagcctgaaggcagctccgcccacccca

SEQ ID NO: 193714 - DNA, 122 bp, Homo sapiens
agcaccaggcattgtttgttgaaatatttcctttcacttgtagatctccagtcttttctacgcagcttgacaagtgaagtggaatgccaacaatctcctctcaacaagctcagaagataaag

SEQ ID NO: 193715 - DNA, 122 bp, Homo sapiens
gttctcctgccgtcctctcgccgagcagggttgtgacccccgcactttcggatgtggacacggaggcccctaggtggagccttgacgtgacccccagagccagactcagcagctcaggccac

SEQ ID NO: 193716 - DNA, 122 bp, Homo sapiens
gcacccggcgtgggactgggacccccctgcccggccccgccacattctccgccggatccccggaagacacaaggagacgtggacccccacaggcttttttggggggattgggcgttgaaacc

SEQ ID NO: 193717 - DNA, 122 bp, Homo sapiens
ttttatcagttgacaatttgttttggtcttccttcagatctattgaaaacagctgggcaccgtggctcacacctggaatcccagctgaggcaggaggctcccttgagcccaggagttgaagg

SEQ ID NO: 193718 - DNA, 122 bp, Homo sapiens
gggggagaacttccctttccaaagttagataacaggctgggctctctgtcagaggattggcgcgacagctccacgtgctgcagctggcgcagggccaggcccgccctgccaagcagcgggaa

SEQ ID NO: 193719 - DNA, 122 bp, Homo sapiens
cgaggccacccagttcagcctgcagtgggagagctacgtgaagcgcttcctggacatcgccgactgccgggagcgctgccggctgccatctgagctggacgcaggcagcgtgcgctttaccg

SEQ ID NO: 193720 - DNA, 122 bp, Homo sapiens
ctcttcaaccacctccaagttccatcccttaaacccacaagcgagccccttttcttgacgcgcgccttttattgacgcaaacctcccgttctcgcgggaacttgggaacgggagcctggtag

SEQ ID NO: 193721 - DNA, 122 bp, Homo sapiens
gggcttgcggagaatgggggacttcaaggcgtgtcagtttcaggagggtgagggcaggagcgtgggtggagtcagcaggtccccatgatggccctcactgagagcttcgcccttgtctccta

SEQ ID NO: 193722 - DNA, 122 bp, Homo sapiens
ggaatgtcgtgctggacaagccgggcaaggtcaccatcacaggcacctcgcagaactggacgcctgacctcaccaacctcatgacacgccagctgctggaccccactgccatcttctggcgc

SEQ ID NO: 193723 - DNA, 122 bp, Homo sapiens
gcgttacagctctgtgccctgagaagcccctcattccctcagtgactccacagggaacaccgggtgggcccctggattcacagccctgtagcacgctgcccaaggggcccccttgctctccc

SEQ ID NO: 193724 - DNA, 122 bp, Homo sapiens
gtcacgaacaccgcacagtcctgcaagcttcttagagtccttgtcgtcacgaacaccgcacggtcctgcaagcttcttagagtccttgtcgtcacgaacaccgcacggtcccgcaagctcct

SEQ ID NO: 193725 - DNA, 122 bp, Homo sapiens
tccatttctatatatgtgtgtgtgtatatatatatgtgtgtgtgtgtgtgtgtatatgtacgtatgtatatgtatataaaaaaaggaatcaatgtaaatggtaacttacttgaatttggttg

SEQ ID NO: 193726 - DNA, 122 bp, Homo sapiens
tgttcccatcacctagtgtccttctgtcaggggccgcttcggtagctacagaagcctagccgctggaagcttccttccccgacactccatacctccatgccacaccttttaggcaataacca

SEQ ID NO: 193727 - DNA, 122 bp, Homo sapiens
cagcatctgctcggtggacagggtggtgaagtaggccaggttggtcagcacgtacaccagcgtcacgatgggcagggagatgatgatggccaggggcaggtttctggaaagaacagggacga

SEQ ID NO: 193728 - DNA, 122 bp, Homo sapiens
tgattaccatgtgccaggtattgtgctaaacacgttgtagatattaactcacttaatcctcgtaacaatcccatgaagtaggtactgctactatcccggctttacatctgaagtacagagag

SEQ ID NO: 193729 - DNA, 122 bp, Homo sapiens
ctgctgcctgcctccctccacaaggccagcgtctgcagggcaggagctgtgagggtggcccggctccatcctgtgtgggaaagtgcctggcacacagcaagtgcttaattaatacctggtga

SEQ ID NO: 193730 - DNA, 122 bp, Homo sapiens
tgctggggcggggccctgtcaactgtccatccggggaagggggaagggacagtcgccctccgtccattcctttagtgctgcgccgacagcggtcaggatctcggctttcttgcttcgagagg

SEQ ID NO: 193731 - DNA, 122 bp, Homo sapiens
cttccccttcacagcctccggcccctacaagacgctcccagccagcctccggaacaaacccgcagccctaaatcagaattccagttctcgagcgccacccggagagttcacatttcccctcc

SEQ ID NO: 193732 - DNA, 122 bp, Homo sapiens
aggggaaagcaggtgagtggttgttaggggcggacagctgcgttgcctaggccctggtcccgctccagttggctgagagtagggaaagctcagtccttgggcgagtgatccctggctggcct

SEQ ID NO: 193733 - DNA, 122 bp, Homo sapiens
cagcggagaagcgcccaagcaacaacgtctgcacccaaacccagtcctcagaaccgcagacgtggccctgcgtggcttccggctcgtcgccacgccccctggccaatcacggcagaggacta

SEQ ID NO: 193734 - DNA, 122 bp, Homo sapiens
cgccggccttatctcatagatgaggcaccaaggctcaggaaacagttctgtggatctgggcgggcatcttccacccacagtcgcgcacacgtggcataggttaataggctgtctggctcggg

SEQ ID NO: 193735 - DNA, 122 bp, Homo sapiens
ggagttgggaaaactgcccaggagccaggtctctcttctcgcctgcaggcatacgaggagcggcagcggcactggcagcgagagcgtgaggccctgcgagaggactgtgcggcccaggcaca

SEQ ID NO: 193736 - DNA, 122 bp, Homo sapiens
gcaacagcctcactgcaggcaggggtcctcgtcacagcttcagggctttgcagaggattacgcaatgtacacgcacaaaactgaattccagcctctccattggcaactgcatacatacatat

SEQ ID NO: 193737 - DNA, 122 bp, Homo sapiens
aatagggactcgctggaccatcacaaacgctgtcgcgcgtgcgcagggaggaaccgagttcgcggcgaagtcagtttcctgactcttgaaggaagtggccttgtgtcacttccggcctccct

SEQ ID NO: 193738 - DNA, 122 bp, Homo sapiens
gctctcaccggactcaggagcccagttagctaataattctgggtcccaggagtgtctagacgcccctcggggagtgcgaagaatgcagtgtccttggaatccacctttgggaaagtcagctg

SEQ ID NO: 193739 - DNA, 122 bp, Homo sapiens
gttgcagaatagccagaagctaagaaatgctgggccggcgtcaggagaaggtgtgcccagcggcctcgtgcgggtttacgctctggccacaagcagccagccctacgctctcactcaaccgt

SEQ ID NO: 193740 - DNA, 122 bp, Homo sapiens
gttgttacttgcctccgtagaggaagcaaaagtcaaaggacctacttccggaatgcacctcgctacaccccgtagccgagttaacagccaatatgcgaccagaaaaaaccttgaggcgagga

SEQ ID NO: 193741 - DNA, 122 bp, Homo sapiens
gccagatatgtacttagtaatataaactgtattaataaaatccatttactgtgtaatacacgagtttaaaaattaagagcgattagctgttcactttggtaacaggtagttaagtgtcacac

SEQ ID NO: 193742 - DNA, 122 bp, Homo sapiens
ctacagcagcccctcagccctccccctcccccatgtcttactgcatccttctccctcagccggcttcacactgctaaaaactgcagaagccaagggctcctgggttcttcccgcagccagca

SEQ ID NO: 193743 - DNA, 122 bp, Homo sapiens
ggcccttttgtagtcaggacctcttcctccgcagacccccgcgtttctgcttcgtccctacgttctgccgtttcgagaacgtcctgtgaatggaatcacagtgtgtcaccatgtgcctggct

SEQ ID NO: 193744 - DNA, 122 bp, Homo sapiens
gggacctggggatgggacagttctgagtataaaaatgcccttaacaatctgatgtcagcacgcttagaggctgtgtggggacaaaggcagcaatgtttgtgctgctgctgctgctgctgggt

SEQ ID NO: 193745 - DNA, 122 bp, Homo sapiens
gggtcgctgcaatctgtggggccctgtgggactccccaggctggaattgtgcgtgtgtggcggagggtgtgggatgtcagactgagtgggtaagaccgacctgctgtctgtgaggttgtgac

SEQ ID NO: 193746 - DNA, 122 bp, Homo sapiens
gtgggaaggctggacagagcaccccccgggagattcctccgcagaagcgaattcctaaaacgtctggagaaagggaagagacctttgacatcatgcagcctttcagggggctcacacatacc

SEQ ID NO: 193747 - DNA, 122 bp, Homo sapiens
gtctggggtgtggcagtgctctgaattgcacacacacctcctcacccaccactgccaggacgagagtacactcagacacgcattgcacactcacagtcatgggggcctcacctgcacattcc

SEQ ID NO: 193748 - DNA, 122 bp, Homo sapiens
ttttttttttaacttttaatgttgtacgtgctggctgggcagctggagttgggtagagggcggttagggttctaggctggtgtggatgctctgagaaagctatacttgatgcgaaaatattg

SEQ ID NO: 193749 - DNA, 122 bp, Homo sapiens
tttcctcccgccccacacccagtctccgagccggatatatagagtgtcacgtttgggagccgaaagactggagccgtttccttgtggctggagcgcttcccgtagcctcggggaaggagcag

SEQ ID NO: 193750 - DNA, 122 bp, Homo sapiens
ctgcggccaatcgtggcattacagccccgtgtgggaacgcccgctgggcccagagcagcgcggtcggccttggccttgggactccaacaccccagtctaaaggtcctgctcaaaatactttt

SEQ ID NO: 193751 - DNA, 122 bp, Homo sapiens
ggcagggtgagccagcgggcaagggtccccaaacctggtgcaggcagcaagctctctgaccggcccctccatgcgctcaaaaggaagtcggccttcatggcgccggtccccaccaagaagcg

SEQ ID NO: 193752 - DNA, 122 bp, Homo sapiens
ctcgcgaggtcatctgcaaaatgggagactgggggcgtgaggcggctggcacaagacaggcggcctttcccagcgcgtccccgcccccactacgaaaggtcatggcgccctggccctgcagc

SEQ ID NO: 193753 - DNA, 122 bp, Homo sapiens
ctcctggagcggttgggaggtgcctggatggcttgcatatgtgcttgacgcggaggcctccggggtcgcgagcttcagaggtggaggtgcccggtcttcggtttcccacgccgccctgggga

SEQ ID NO: 193754 - DNA, 122 bp, Homo sapiens
tctggtctgggcatacagatttgggaatcaccaacataaaaattgtgttgcttggctgggcgtggtggctcacgcctgtaatcccagcactttgggagactgaggtgagtggatcacaaggt

SEQ ID NO: 193755 - DNA, 122 bp, Homo sapiens
ggagcggggcggggaggcgggtcccgggaccacacgcgcggctcggcacttccccgtcatcggcctccaggtctcccgctgggggtcccccaggatgtgacctgggcccacgacttcgccca

SEQ ID NO: 193756 - DNA, 122 bp, Homo sapiens
tgagggattctccccttcctccagctctccctccggattttaacatatggagtacagtcacgatttaccgccaccctggaaagccagccgccacctccccaacccccatcttgccttttttc

SEQ ID NO: 193757 - DNA, 122 bp, Homo sapiens
agaagaaagagaggagccggtggcctctgtgaaaggctccccagactcatcgttattgcccggtccccgagctcagaggagctccttgagtgtgtctgcttgttggggatcccaggctctgg

SEQ ID NO: 193758 - DNA, 122 bp, Homo sapiens
cgcgcactccatgaagggcccattagcgcggcaggtgcctcccgggctgtaaattcgccccgatttatctccccggggacgaaataaatccagcttggatgggagtgtagttaggcaaaggt

SEQ ID NO: 193759 - DNA, 122 bp, Homo sapiens
tggacagagacttctttttttcatccaaggatccccagggcctgccacatggaaggtgcccgaccaatatttgtggcatgaatgaataagtgaatgaatggtaggtgtagatcaggaaatga

SEQ ID NO: 193760 - DNA, 122 bp, Homo sapiens
ctcgttacttactggctgagagtgctcagacccctgcaggttcagggccttgaacttggccgggtcgccgggctgcggagccgaggggaggagcggcgccgccgcaactggcagggaccctg

SEQ ID NO: 193761 - DNA, 122 bp, Homo sapiens
attcttaaatgaagagatacaaaagcccactgagtcatttatgcaaatcagatggagtggcggtcttctccacaattcccaagtacagcttccacttttccctcaacctctcataaagtcac

SEQ ID NO: 193762 - DNA, 122 bp, Homo sapiens
gggtcaacagaccgtagtctcccacatctccccattacatatggaataaactcccaactccgcaggcctttggagcaccttagtgcagagcagcctctgcacccaccaacacctccctccca

SEQ ID NO: 193763 - DNA, 122 bp, Homo sapiens
aaagagtaatattatacaatttcttcttggatattacaaaccacatctcagaggggtgaacgacccccgcgatatggggactaaccctcctatcccgccctgactgttaggagccatggctg

SEQ ID NO: 193764 - DNA, 122 bp, Homo sapiens
gccatttcctgccctttgtgtgacagccgctgcggcgaaggggcgggcgctgggtgggggcggagccgcggcgggcggagcagcggggccggggcggggccgagcgcggcgcagcggagcgg

SEQ ID NO: 193765 - DNA, 122 bp, Homo sapiens
ttttcagaaaccattggcatctgtgttaagctgttgtgggagaaagacagacaagcaagtcgtcatttttattgccagaaactattctgagattttaatgtgaaaagtggaaattttttaat

SEQ ID NO: 193766 - DNA, 122 bp, Homo sapiens
ccccgaggggccctgcggacgggcagtgctggaggccgtatggtgagggcgaggtggggtcgcaggcaggcagggtctggttaaactaatggcctggaaaatgaatgcctgtgatgagcaaa

SEQ ID NO: 193767 - DNA, 122 bp, Homo sapiens
cgcgcgagacgacggggccaggggggcgctctgaggagccacaataggccagacggcacgcgcgtccacgagggggccgggagccgcgaagtggcggcggcggcgacgacgccggcgggccc

SEQ ID NO: 193768 - DNA, 122 bp, Homo sapiens
gaaacatctggagaatgtgctcaaatctcaaaccccggggcgggaccctgcactaccaagcgcggccactgagcggcactcacacccggcggcgcgcgctggttctcccgctccggccgcgg

SEQ ID NO: 193769 - DNA, 122 bp, Homo sapiens
gaagggcctttgtctgaagagggtgaccccagttgtgcagagagagagtcttggctttcacgggaatcaaggtgaggactctgagggcggatgagaagacctctccccaaaaaaggcacatt

SEQ ID NO: 193770 - DNA, 122 bp, Homo sapiens
aaccctggaaaccatggcttaggagagcttccctggttggccacgcttcatgtttgtattcgcacattgttgctgggagaattaggtgctgcctgtgcaactgcactggaagcttgcacctg

SEQ ID NO: 193771 - DNA, 122 bp, Homo sapiens
gacttcattcaaccatggcaattctaatcagctttattctaagcaagagatttgagatgacggatttatcccaccactcatttgaaaccatagttacctactttccaaaagcagaaaacatg

SEQ ID NO: 193772 - DNA, 122 bp, Homo sapiens
gcgcggccgagcccgagccgctgccggagcggagccggagagtggcggcggcggcggcagcggcaccatgaccctgggcagctgctgctgcgagatcatgtcctccgagagctccccggccg

SEQ ID NO: 193773 - DNA, 122 bp, Homo sapiens
aaaaggacttgcccaaggtcacacctgcagtgcgtggcagggccgaagggtgaatccaggcgtgggagcaaccagccccagctacacctcccggccctgccaaggcccccttttcctggcag

SEQ ID NO: 193774 - DNA, 122 bp, Homo sapiens
tttttagaagagagtcttgctttgttgtcccccaggctggatcatagctctttggagcctcgatctcctgggctcaagcaatcctcctgcctcagcctcctgagtagctaagactataggca

SEQ ID NO: 193775 - DNA, 122 bp, Homo sapiens
ttcctggccgcgctcttctgcttccacgccgccttcctgctgctgggcgtgggcgtcacccgctacctggccatcgcgcaccaccgcttctatgcagagcgcctggccggctggccgtgcgc

SEQ ID NO: 193776 - DNA, 122 bp, Homo sapiens
caatcaagcacgaagcttggaattaaaaagccaacgccaattttatttcctccagtcaagcgtgagtgatggggcggccgcgcaagggcaacggagtccagcggacaaagcttgcagagagg

SEQ ID NO: 193777 - DNA, 122 bp, Homo sapiens
acagtggttcttaaaccatgtgcatcagaatcatccatagcgctagttaaaacataatgtcgcctgatgtggtggctcatgcctgtaatcccggcactttgggaggccgaggtaggctcatc

SEQ ID NO: 193778 - DNA, 122 bp, Homo sapiens
tggccaggtgcctctgctgtgggctcctggcacgaaagggtgaagtccgtctgagtccaccgaccaatggtgacgcgcagcgccttcgcggcgcttcctgattggcgggcatgcagggtggg

SEQ ID NO: 193779 - DNA, 122 bp, Homo sapiens
tctaccaatcgggaattgctctccgatccttctgaaaagaacctcttgaagatcttggcccgggtggtcgcgcggtgtttacggggctttggggtcctgctttccccgagcatcgcggcctc

SEQ ID NO: 193780 - DNA, 122 bp, Homo sapiens
ggaagagcactaggaggaaatgccatctgaactgaatcttgaaagacaaacgggagttaacgaaagatgttcctgagagagtggcaggtctgtgcttgcatcctgatgtcagagtcagataa

SEQ ID NO: 193781 - DNA, 122 bp, Homo sapiens
agatgatgagatttggggacagtttatgtgagcaatttgttatgcatgcaggaggaatggcgacttgatgacagattcacttcttggtcctgaaccttaattaacaaggccctctgagtaac

SEQ ID NO: 193782 - DNA, 122 bp, Homo sapiens
aatcaaatggaatttgtcttgaaataatttgacctccacagccagtccatttgagacattcggttaagccatgatttattataagattcagatgcttagtctcactccttcctatgtatatt

SEQ ID NO: 193783 - DNA, 122 bp, Homo sapiens
gtgccagacgctccagacagactgccactcttggggggcaagagttggttgtcgtcatggcgacggcgctgatggctgtggttctgcgggcagctgctgtagccccgaggctgagaggccgg

SEQ ID NO: 193784 - DNA, 122 bp, Homo sapiens
acacactgatggcgcctggaggtttggcgaaatactgacaggatgcgacgtcaacgggagcgcagggccaaggtacaggccccgcccagtccggtcacatcccccggaattctcgcagctcc

SEQ ID NO: 193785 - DNA, 122 bp, Homo sapiens
gagaatcaagtacgaagcccttagtgttccggtcgttccaagtctaagagctgttgtgggcgccacagagcctgctgctactagcgatcccagtttggcaaacaccggggcctcactttgtc

SEQ ID NO: 193786 - DNA, 122 bp, Homo sapiens
ccgggccggggggctgggagtctgatcaggtcactgcgtgcttctctggcttgagggaatcgagccgggtcgaccgcctcggcatccctccccaatcacaccccagcgccaggacccgaggg

SEQ ID NO: 193787 - DNA, 122 bp, Homo sapiens
ttccctattttaattagaccgatgcctacagttattctcattttttttagcagatccaaacgacataaggtagtttaaaatctagttaaaaatcatctagagatctgcctgagcaacatagc

SEQ ID NO: 193788 - DNA, 122 bp, Homo sapiens
aaatttgcattgatttttgtacacatggcacctctttttcattttttttttttttttggacgatgttttgctctgtggccccagctggagttcagtggcgtgatatctgctcactgcaagct

SEQ ID NO: 193789 - DNA, 122 bp, Homo sapiens
ggcagctcctccttggggctacctggtacctgaatgtcctggagctctagaggttccctccgctggaggcgtggtccggtcagcaggttgggattagtgtgtcataaggaacttctcaccgc

SEQ ID NO: 193790 - DNA, 122 bp, Homo sapiens
tctgcaatagatactacaaactgaggaccaaagtgagacttgaagatttttccatattcccgtgtgtgcttctgctgcaataccatggagaaatcaaaaaaggaaaaaatacatagatatga

SEQ ID NO: 193791 - DNA, 122 bp, Homo sapiens
gaggttgcagtgagccgagatcgcgccattgcactccagtgtgggtgacgagcgaaaatccgtctcaaccaagaaaaaagaaaaaaagaaaaagaaaacttaactggcctttggggcacatg

SEQ ID NO: 193792 - DNA, 122 bp, Homo sapiens
gttataaaagtctgtggcttccagcttaggtgcccacaggtgctgtcttgcaaacacactcgctctctcttgctctctcgctctctcatcacttgctctagaggaaacccactgccatgtca

SEQ ID NO: 193793 - DNA, 122 bp, Homo sapiens
cgggaattactcggcgaggtcgggaggtcgcgcggtggaacccgggggccaggtggaactcggtgtaacagagcccccagtggtcgcgccgcgtctcagaacccggtgcgggagacgctctc

SEQ ID NO: 193794 - DNA, 122 bp, Homo sapiens
gtgaggtctgggggactggacggccccagcagggctccttcccaaggccgttgtgcccctcgccccaggctttatgaggtggccctaagggccaatcccgccccgacgggctccgccttcct

SEQ ID NO: 193795 - DNA, 122 bp, Homo sapiens
aaatcaagcggtttcattacaacggtagttaaacccttcctcagaccctgagctctgccccgagccccggggcctcgctttctacccccaccacatccctaggacctgggaaaaacaaaacg

SEQ ID NO: 193796 - DNA, 122 bp, Homo sapiens
gctccaggccgcccgcgcctccagggcacagagccagtgggtcctcgtggccactgttcccggcctcctggcgctgaggctccacgcagcactctaccggcgcctccccccggcccccgccc

SEQ ID NO: 193797 - DNA, 122 bp, Homo sapiens
atctgtaatcctagttactagggagaggctgaggcaggagaattgcttgaacccaggaggcggagggttgcaatgagcagagatcacaccactgcactccggcctgggaacagagtgagact

SEQ ID NO: 193798 - DNA, 122 bp, Homo sapiens
ccacaaaatggtagccgccgtgggggatgtccagttttttttcctcttcccaagtacagacgcagagcagacttgtctttccgcttaacctcaacctcgtgtgatctgccagtttcgctccc

SEQ ID NO: 193799 - DNA, 122 bp, Homo sapiens
gcctcctcatggcacacaggggtcgcaggggctggcctcctcacaggcttggcgtgctgccgccatggctgtcagggatctccctgtggccagctgtcctctccccatcagcacagtgggct

SEQ ID NO: 193800 - DNA, 122 bp, Homo sapiens
tcagctcctccatgctgtacctgtccatggctgccacacaggccaggctgctccgagagccggcagggaggaaggcgaggcaggaaggagggaaggggtgggaggcagagggagggcccact

SEQ ID NO: 193801 - DNA, 122 bp, Homo sapiens
acaaaacaaaacaaactagccgagctctatttcattcctgaaacccttagtagccaggatcgctgcgacctgggctgagtctgacccagactccagcactggggagcctgtggggagcagat

SEQ ID NO: 193802 - DNA, 122 bp, Homo sapiens
tggagccgccagtgcgggctccttgctgaggtgccctgaggtcaggtggggaaatgctgacgtctttaatgggcaagtgggaggaagaaccctgcagccttccggacaccaccccaggggac

SEQ ID NO: 193803 - DNA, 122 bp, Homo sapiens
gagatgctcactcacagttatccccaaaggacggtccaaacatgtggaaaacatgtctcccgtagaaaatggagaaacggccgggtgtggtggctcacgactgtaatcccagctttgggagg

SEQ ID NO: 193804 - DNA, 122 bp, Homo sapiens
ccctcgccccaccctgcactggctcagcagccgggtccagactcccaggcctctggaaaacgaacctcggggggacgcagagggtcacacagggcttcacccccagctcgggttcagtcctg

SEQ ID NO: 193805 - DNA, 122 bp, Homo sapiens
cctcccaaagtgctgggattataggcaggagccacctcactgtcttaatgtaaattttcccgcactgacttgtccgttctgttttactacttccctctttcccatctctttgcctttgttca

SEQ ID NO: 193806 - DNA, 122 bp, Homo sapiens
tggatttgtacattatattcatgccactgaaagtgagtgagccagggctctgtgaatcagcgtgggtgaatcccccaaaaaacgtgccaagaaaataaaatcaaattgcacaaaaaagtaca

SEQ ID NO: 193807 - DNA, 122 bp, Homo sapiens
gatcaggcctctcggaccgattttcccagctctgcgggcgctctacgcgctggcgcgagccgcccctcaggaggccaccgcccttctggggccgctaccattggaagcctggaacgcggggg

SEQ ID NO: 193808 - DNA, 122 bp, Homo sapiens
gggaagctggggcaatgggaaggggtctaggcacacgagccctcgggtcctcacctcccacgaggcagggtcccaggctgcctctactcaaggtggggcagcaaaagaatcgccctctagct

SEQ ID NO: 193809 - DNA, 122 bp, Homo sapiens
tcggtcctcggcctcagtttccccctctgtaaacgtggaaatggtccctccctgtggtggcgcgggggacggggcctcagctccccgggctcaggagataccgcctggacccgggcagctta

SEQ ID NO: 193810 - DNA, 122 bp, Homo sapiens
gataccccctcgacagctcctccctgggtgagatccttagcattagagtcccccacggtgcgccctctgagagaccacgggaacccacccagcggctgcctgggacaggcacaggagccacc

SEQ ID NO: 193811 - DNA, 122 bp, Homo sapiens
cctgtttgaggtggtggtgttgctctcattgttttcttttgcttctctgttttgataggacgctaagtgccaaaggaattatttaactcctagcagctggaatctccctgctctcaggttct

SEQ ID NO: 193812 - DNA, 122 bp, Homo sapiens
cccgcttagcttccagtccagaccttccccgcaaatgagtgtgtgctgtgagtgagaccccgcgtgtctgcccttgcagtccgccctgaggccgtgaacatgtccttgggcctgaccctggc

SEQ ID NO: 193813 - DNA, 122 bp, Homo sapiens
tgtccaaattctcctcttccacaattgagaacaattttgcttccctcaaagctgggccaccgagttcagggccctggtcacccttggctcaccagctgccattgtttagtaacaacaccagc

SEQ ID NO: 193814 - DNA, 122 bp, Homo sapiens
ggtcccttcccccgggccccgccccggccgaccccacctttccgcgcggctccgccccgccgcccccttgccagtggcccctccccgcgcaggtcccgactccagccgcacctcctccggct

SEQ ID NO: 193815 - DNA, 122 bp, Homo sapiens
tcacagcccaggcttgagggcactgaaatgcagaagagttctgggtccaactggggacaacgtcataaatttgcttcaggaactcccagttagctaaggagaaacattcctgcctcaggaga

SEQ ID NO: 193816 - DNA, 122 bp, Homo sapiens
gagagagctccgacaggtgcttgaagggcttttggcagatggggcagctgtagggcttgtcggcctgttcagcaggggtgacagtggaaggcgcgggtgctgcgggaagcgacggggcggct

SEQ ID NO: 193817 - DNA, 122 bp, Homo sapiens
tagttacagggaaaaaaaaagcgagaaagaagctcttagatttgcaacacatcggaaaaccgggggagcaccccgccttatccgatctccatgctccgcaagggccttccgggttttaggac

SEQ ID NO: 193818 - DNA, 122 bp, Homo sapiens
aaagggacagacacagaaaacacacacaagactgagccccccacggcctcgtgccagcagcgggacacaggcagaccgcctctgcctcgatggggtctgcacaggcccaaggtgaggggtcc

SEQ ID NO: 193819 - DNA, 122 bp, Homo sapiens
cagcttcctgattaccagctgagcctgattacacagtctgtgtgcctgtcccaggacagacgtgctgctgcgtgctggaggaaggaggcggctccaatagtggaattgcatttagggtctca

SEQ ID NO: 193820 - DNA, 122 bp, Homo sapiens
tcacattcggaggctggtgtccagggtctcagcgcgggggacgactcaggtactggatcccgggctaagctcgggaggaggtcccctttggtggggccatttcgggaaagtatgtcaggacg

SEQ ID NO: 193821 - DNA, 122 bp, Homo sapiens
tttttgtttcccctgccaacctgggaactcaatgagggcagcgatcttgtctgacgtggtcgccacggtgttgccagttcctagactaaggcctggcccttggatggcgctcaagaaggagt

SEQ ID NO: 193822 - DNA, 122 bp, Homo sapiens
ttcttccgcccgcaacacgagactcagcaccacacaatcagcgtggcaaagcctgaagggcgggacaggaagtgaggtcactcctcaccggggtgaaaggttagcggaagtgtccttctttc

SEQ ID NO: 193823 - DNA, 122 bp, Homo sapiens
ggtccatggtggtgggtggcgccggggccaagcggggaccccctttataggcgcctgggccgtcccagctgggggccttggagaagggacagaacattcttcaggaccgcccaggaaaaagg

SEQ ID NO: 193824 - DNA, 122 bp, Homo sapiens
atgtctacattaatctacattaatctgttggccagaactgtagtcgcagagcccattccccgcggcataccaggggaaagactcaaccatgtgcacattatctccctacaggaaaatgagga

SEQ ID NO: 193825 - DNA, 122 bp, Homo sapiens
aattataaacacttttttttgctcttgttcttacagaatttttgtctcccttggtgatcacggtgtcctttcagatgtctgtctgaatcaatgccatttttttttagattaaaaggtacaga

SEQ ID NO: 193826 - DNA, 122 bp, Homo sapiens
ggagaggaatgcgctccttccgattcccgccctttctgcgacaccatcaaatcctctcagcgcccctctggcagttccggatttgcagggtccgagggagaatacatcaaagtgatgtcatt

SEQ ID NO: 193827 - DNA, 122 bp, Homo sapiens
taagcacatggtcctttgttatggcagccccaggaaactgacatcaaaagctgatgtcctcgaacaccatgcgaacacagtggaagggaccttcggcctcctcatccatcccctatcccctg

SEQ ID NO: 193828 - DNA, 122 bp, Homo sapiens
tttagcccatgacataggtgttgcctcggacggcggagccctggcctggatgcctttgtccgtgaggttcccgagtgccgagtgccgggagggacagcccctctcctccagccccatctctc

SEQ ID NO: 193829 - DNA, 122 bp, Homo sapiens
gcaccggttttctgggctagctcgcgcccgcaggtgatatttgtgttgacgtagttctggcgcccggagggaggtgctggaacctgagctgctgttgaggactgttgtctcctacaatgtac

SEQ ID NO: 193830 - DNA, 122 bp, Homo sapiens
tgccttcacttctgcaccacttagcacagtgcctgcaggccctgggctccaggcatctctcgactcctccacaccgttggcagccgcgttggtgcagcacccagggaaccggcgggaaggtt

SEQ ID NO: 193831 - DNA, 122 bp, Homo sapiens
gaaaatttggctccaggacgggaccagcgagggaccaattgaaagacaagaggcggggcccgcaggcaaaccttaaccccagagacctccgtggctgttgaaggcagagggtaatgggcggg

SEQ ID NO: 193832 - DNA, 122 bp, Homo sapiens
ggaacagcgcgctcgcagcgggaggtcgcgaagcctgggactgtgtctgtcgcccatggccgccgcgctgctcgcccgggcctcgggccctgcccgcagaggtgagtgcgctggggatccgt

SEQ ID NO: 193833 - DNA, 122 bp, Homo sapiens
gagaaaggcccccacctctgctgctcagctcaatgccagtcctgaagacaggagtttccccggtctaccaccactgcctcacctctgacactgcctaaggcccggctgtcccctcaggcctc

SEQ ID NO: 193834 - DNA, 122 bp, Homo sapiens
attccgcgggcggaaatgaaggtgaagcgcaggccaggccaagtggcgctctgcgggaggcgacatcagggctccccaaccggtagtgggagggaagattgccctcaagtccacaggactga

SEQ ID NO: 193835 - DNA, 122 bp, Homo sapiens
ctcttggtcaggcggttacggccaggaggcgtcggagcctggcgtggtagggctgtgctgcgcggtccttcccattcaccctagtctggcgctcgccggcgtgggcgggccggaccttcgcc

SEQ ID NO: 193836 - DNA, 122 bp, Homo sapiens
ctgccgctggccgtcaagggcgggaagtgttctgggactctcattaggggccgcgagcctcgagcgtcaaattcccgcggcgtccgcctagcgcgctgctgtggcgggcgcggagggcgcgc

SEQ ID NO: 193837 - DNA, 122 bp, Homo sapiens
gcgccagcccggcgcacagccccctcccccgactcggcgccgcccctaccccaaagcaaacgctggagaacccggaaattgcccagaacgggaaccgactttcgcgccaaccgcgcggccgc

SEQ ID NO: 193838 - DNA, 122 bp, Homo sapiens
aaatgagtatttaaaacactattggaattctacttctggccaaaacagaataacaggaaccgaattatttccactttccttaaacaactggaaagcaagaagacacatgtaaaagaacagtt

SEQ ID NO: 193839 - DNA, 122 bp, Homo sapiens
aggaacagactaagacagcacctgtgcaaccctccagccaaaaactgaaggtggcttcagcggtagcatggcagtggggctggacagaagttaagggattgtagaggaattaaagtagcaga

SEQ ID NO: 193840 - DNA, 122 bp, Homo sapiens
gcggagtataatacagtgaaccccatgtgtccatacccaccacaacaaactactgacgcacgcaacaaagtgaatggaagtaacaacctccgggaccgtgtctcccgccccaccccaatctc

SEQ ID NO: 193841 - DNA, 122 bp, Homo sapiens
tcactgacacggagggagaagcccgtgtggactcagagagctccgattctcaatgacaaccggtaccgtatccatgttaacacatcaataaaggcccaggcggttttcaggtaggaatacag

SEQ ID NO: 193842 - DNA, 122 bp, Homo sapiens
ggtgcttgagatcttctttcccgagcgttctccttgcagagatcttttgatatggagcggcgtgcacgcagcccctaggttgggcgctgaggggcatcgctgatgcgatccacgtgcctccc

SEQ ID NO: 193843 - DNA, 122 bp, Homo sapiens
gagccctagcaaccttcccgcgtccttagttaccaaacaggaaacgctccagcccgaaggcgaaacttccggttgagaactccctgcctgcaggccgaagaatctttttcttaccttgagca

SEQ ID NO: 193844 - DNA, 122 bp, Homo sapiens
gctccgccagctcctccacggcctgtgagtgcttctgcctcatctcctggatctgggcctcgtgggtcttggcctcctcctccagggtcttcttcaggatgttcacctcctgctcacgtttt

SEQ ID NO: 193845 - DNA, 122 bp, Homo sapiens
tccttgggtctgatgcccacgcttaaccgattcccagccaaacatttcacagttgtcttacgcacaggcgtaagatatgcatctatcttggtgtgcacctgagaagtagttatgtctaagtt

SEQ ID NO: 193846 - DNA, 122 bp, Homo sapiens
acctggcctagggtgaggcgcggctactgggaggcgggcaacgggggcccccaacaaggccgcgcttccggccgcctgcccagtcgccatagcaacaggcgcagggcggcttgggagccttt

SEQ ID NO: 193847 - DNA, 122 bp, Homo sapiens
agcacacgtccgcaggctcatttttctcttttcccggtgtgaagcgctgaaggtgattctcgtctgctttgagaggcagctcggaagccagtggtactggctgagcctccaggtgaaggaga

SEQ ID NO: 193848 - DNA, 122 bp, Homo sapiens
tgacagctctgtagctcctcctcatacccgcagtccccgcaagttccacccctgcccgcccggttcgctcgcccttggttcccactcccaggtggctgcagactggagtgtgtttcatggac

SEQ ID NO: 193849 - DNA, 122 bp, Homo sapiens
ctctgggggaagccagccaccatgtcatgaggacactcaagctgcccatgaagaggcccacgtggtaaagaactgagacctcctgccaacagccagtgaggcacacatgagtgagccatctt

SEQ ID NO: 193850 - DNA, 122 bp, Homo sapiens
agctatcgatttccagcttgctttcaagtctggcagagactgtgaaagtcctaacttctccgcgatgtcagccacggcccgcggcggtcacggagccacttcagcacctcgcgatggacagt

SEQ ID NO: 193851 - DNA, 122 bp, Homo sapiens
gtactttctgaaatttttagcaataattcaaacattgtgtttgtgtcctgcataaaattccggtttacccaacacacacacacacacacacacacacacacacacacacacacacaaatgta

SEQ ID NO: 193852 - DNA, 122 bp, Homo sapiens
ggttcaggccgcagtgacagtgctggcggccgtgggtttcgtgttaatgaatcaatcatacgtagtcaataaggtgtctgtgaacagagcacgcggagaacaaggttatgcactgatgggtg

SEQ ID NO: 193853 - DNA, 122 bp, Homo sapiens
tcagaggacagcaccatctatgatctcctgaaggatcctgtctcgctgagaagcaaagcacgccgggccaagaaagccaaggccagctcggcgctggtggtctgtggagggcagggccaccg

SEQ ID NO: 193854 - DNA, 122 bp, Homo sapiens
ttggagaggtcaaaaggcacgccgctgcccccactcccccatctcctccaatttgccctccgtagcttttctctagggtatcgtattccgggagttcaactgtcatttgaagccgctgcatt

SEQ ID NO: 193855 - DNA, 122 bp, Homo sapiens
agcgtttgtgtctgaaagacaggggaaaaactgatgcagattttccctaaattggactgacgcacaatgcagggagagcaattgagtgccgaggaaacccctcacacccttttttacacttc

SEQ ID NO: 193856 - DNA, 122 bp, Homo sapiens
gtgtgtgtgtgagagtgcgcgcggggaaggaggcacagagacagcccggacaggccactgcgcagccctggtggcccccgctccacctctcgctccgcagacccgcgccagggaggcctctg

SEQ ID NO: 193857 - DNA, 122 bp, Homo sapiens
gtctcctcagaatcccgcggggttaggagaaggatctggcggccaagacggctggatccccggctgcgctatttaacacccagattttggctgatgactgcagggtcagtgtgagctggtcc

SEQ ID NO: 193858 - DNA, 122 bp, Homo sapiens
gtctgtgagtgggtggccagccgctaggggcggggcctcagcgttgacgggcaggcaggccgtcccacccctctcgcccagagcggccgcgccagcgctggggacagcagaagtgagtacgt

SEQ ID NO: 193859 - DNA, 122 bp, Homo sapiens
acctagatttatttggaaatattctatgaccactttacagatgaggaaacaggcctcaagcgtggaggggtagagtgaagagtagaacccaggtctgatgccaaagctgctttcttctctgc

SEQ ID NO: 193860 - DNA, 122 bp, Homo sapiens
tggcatccgggcctgctccgcacaggctcccaaaaccccagctgcttcactccttctccgcgccaatccccacctgcccctcaaaggccccagcggacgtgacacctggtccacgcctggcc

SEQ ID NO: 193861 - DNA, 122 bp, Homo sapiens
gctcagacgccgtcacgtgatcccattttctccccctcccccgactacacaagccgtttccgccttcggccttgaggaataaccgcctcccccaataggcgcctgcgatttctctgggtccc

SEQ ID NO: 193862 - DNA, 122 bp, Homo sapiens
ggtagccatgctggacacctggggctgctgtccctcagctgccgggctctctgccagagccgtgcagcctggagtcctacccactctcagtcagcttcctcctaacacatggccagcgttcc

SEQ ID NO: 193863 - DNA, 122 bp, Homo sapiens
ttaagtcataaactacagaatcttcggtcatatattctccccaggcacttgtttctccaccgcaaaaaataattcctatttgcttggtcctttgtagtcctttattatttatcttcatgata

SEQ ID NO: 193864 - DNA, 122 bp, Homo sapiens
tgcctaatggggcacagttctgagcaggcacaccagctctgggagcagaagtggggcgcacgtgcttggagaggatggaagagacaggggagggcagcaggcctggcttccagccatccagg

SEQ ID NO: 193865 - DNA, 122 bp, Homo sapiens
cgtcatcatgctggtgggcaacaagagtgacctgcgccacctgcgggctgtgcccactgacgaggcccgcgccttcgcaggtgagcagacggagacgcaggcatcagagaggtgtctggaag

SEQ ID NO: 193866 - DNA, 122 bp, Homo sapiens
ggtagttgggcagctcgtagaggacccagcagccctccagcacgtggagggaacggatctcgctgaggtggaagcggtcctggatgctggggcagtcttcactcagctccatcatgaggcct

SEQ ID NO: 193867 - DNA, 122 bp, Homo sapiens
cagagctccaggttgatgtggcggttgatggcggcctctgagtcctggttgtagtcctggcgctcctgcgaggtggacggggtcgccatggcggcgactaaagagaggcggctgcagcggcg

SEQ ID NO: 193868 - DNA, 122 bp, Homo sapiens
ggcgagcgggagacaggagcggaaaccacagaggtagagtcagggccgacactgaagaaacgtagatgcacagggaggggccaatattagtgtacagagagaaagagggaacacggtgcggt

SEQ ID NO: 193869 - DNA, 122 bp, Homo sapiens
gaaaatatgcataaaagggttttattaacaagcaagtgctaaataaacatgaaggattagcgttatgattgcatgtgctttgtcacagggctcttctctgagatctgtcttctctgagtgga

SEQ ID NO: 193870 - DNA, 122 bp, Homo sapiens
caggctctggagggggtagtagctgcttttcagtgtgggtttgtcaccctacttcttgtacgactcaaatgtggcctttgcagctgatgatacagcttctttccccatcagatcgaccctgt

SEQ ID NO: 193871 - DNA, 122 bp, Homo sapiens
cgacggaaacagcagttggcagtgtccccagagcacttgcccttcctctggagcgcttcacgtgcgagcccgccgtctatttataacagttgggcacttgtcgccacaatggctgattgtgt

SEQ ID NO: 193872 - DNA, 122 bp, Homo sapiens
acttgcatgattatggagatggtctatctgatgctgaaaatgtctctagttttttgacaacggctaaataaccatgggatcaagtggccttgggaaagcagcaacattagatgaactgctgt

SEQ ID NO: 193873 - DNA, 122 bp, Homo sapiens
cccagcgctgcagggacttagaatgaactgccctccatctctcgatccagggtgaggagacgccccccagcagtcccccctctcccacatcatcaagtttcccctctgctggatcatttccc

SEQ ID NO: 193874 - DNA, 122 bp, Homo sapiens
cagggaagtaccgacaagcacactggagaggggtccgcgtgggccccatcagggaagtaccgacaagcacacggagaggggtccgcgtgggccccgtcagggaagtaccgacaagcacacgg

SEQ ID NO: 193875 - DNA, 122 bp, Homo sapiens
ctcctccagcgttagccccgcccacaagccggcccagctaggaaacggctgcggtagggacggactgattgggtaagagccagctcgtcgctctgttaggattggttgaatgagtcttttcg

SEQ ID NO: 193876 - DNA, 122 bp, Homo sapiens
ttccacccgagagaaattagctcttatctttaaaataaacatagttatgagtgatcccagcggatatttctcaagtggctgaggagcctcccgacatggaagtcatcctaagtaaagggaga

SEQ ID NO: 193877 - DNA, 122 bp, Homo sapiens
cgccagaaagaaggcgattggatggcggcggcgctctggggcgtagcgtcgcccgggccccgcccaccgctgccttcctctgctgggctccagagccactgaggcctgagcgagagccgacg

SEQ ID NO: 193878 - DNA, 122 bp, Homo sapiens
ggttttgcaaccacagtgtctaagacaatcagaagggttccagggaggtcttgtctgtagcgatgtgacagatgaggaaactgcagctcagaggacaatgacttgcccacgttgcacagctc

SEQ ID NO: 193879 - DNA, 122 bp, Homo sapiens
aagggcagatcccccgctccccgatcgcccgcaatccccgcgaccaccggggaaggcccccgctgcagcgttcggcgtggagcgcccacttgcttctttgccacatcttctctctcctctgt

SEQ ID NO: 193880 - DNA, 122 bp, Homo sapiens
agtccaagaaattatttttttgctaacaaagagcagcctgaaatactgagccgcaaacatcgataagcaagcttgaagcttgcacgggggaatgctggcagctgcgccaatagagaaggact

SEQ ID NO: 193881 - DNA, 122 bp, Homo sapiens
cggcccgccctgctgccgcgaacttgagcggtcaagtgaaggtttctgggttgggggtcgcgcccccactccccctaagctggactcgggactcccagtcctcggagggtgcaagtttctgt

SEQ ID NO: 193882 - DNA, 122 bp, Homo sapiens
aaagcccaggtcagccacttactctacaatgagtaatgattcttaactggagcaattttgcgcccctacccaggacatttggcaatgtcttgagatatttttggttgtcatacttgatgggt

SEQ ID NO: 193883 - DNA, 122 bp, Homo sapiens
gtggttcatacttgggaggggctgccggctgcacagttcccttgctagcctctccccagccgtcctctcccttcaaggaataatggggaattctagtgagcgagatcatctccctataaggg

SEQ ID NO: 193884 - DNA, 122 bp, Homo sapiens
cgcccgcagccattcctcgcctcgaggcgcgcgccgggccggggcgcgggagccgctccgcgactccgtaatgacccgggttcgccgcagctgcgccctgaccctttgtgatggcgccgata

SEQ ID NO: 193885 - DNA, 122 bp, Homo sapiens
gagcggggagctacactcgggcctggagccggtgtggcctccgccaggttgtgggttgctcgacctcctggagcttcagtgcccccatctgtaaaagtggaggtcgatgaaatattcttgaa

SEQ ID NO: 193886 - DNA, 122 bp, Homo sapiens
gtgcagactaattacaaccctgctgcctcctgcacactggaactcaggctgcagcacctgcgcttctgagctgaaggatttttaggatctggaatttccccccggcactaaccttgcatttg

SEQ ID NO: 193887 - DNA, 122 bp, Homo sapiens
cagcagacctggattcaagttccagctgcagagcttgctgagcgtgtctaaccttgggtacgtcactccacgttgctgctctggccctcagacagctcatctgtaaaatggggatgaccagg

SEQ ID NO: 193888 - DNA, 122 bp, Homo sapiens
aggtgagtctttgagggtatcctggggctgaaggttaaggtctctgccatctcttattctcgcactaccagaaagatgaacaaaccccctccaaccaaccttacaaaactccagcctccaaa

SEQ ID NO: 193889 - DNA, 122 bp, Homo sapiens
ccgggccccgcagccgcgaatgccggcagacagggaccaggaggcactcaagtcccactgcgcacgcgccctgtaggccgggccggagtcacgtgcgccaacgttacgcacgccggcgactc

SEQ ID NO: 193890 - DNA, 122 bp, Homo sapiens
gtaggccaacgcttcctccccagtagctcctaggccttctcgtggccgttgttttgaaaacggcgctctgattggctaggtttccgggcccgcgcccgttgccccacgcactgaccaattgg

SEQ ID NO: 193891 - DNA, 122 bp, Homo sapiens
ttatataggatgatagcaaaactttgataaaaaactgcttaaagccaagaggagtcatcccgaacaaaagtatctaattcactgatcttaataattttggtgtcatggatccctttaaaaat

SEQ ID NO: 193892 - DNA, 122 bp, Homo sapiens
aggctgaggtgcagacccattggcattggatggtgaagttcactaaggtgccataggaaccggctggcagggaggaaactgcccaccagtgggaccggaatgccagtgaaactcataggatg

SEQ ID NO: 193893 - DNA, 122 bp, Homo sapiens
tgacttacttgtgtttgtttgcaaacctgtttttgccagttgtgcttgatattgtgctttcgtaacttaatattgtataaaccaatgaaatagtgtggaaattgttgtttctttaaaaatct

SEQ ID NO: 193894 - DNA, 122 bp, Homo sapiens
tcttgttctgtgtttgtggagacactccttgggccgtgtgactgccggctttttacaccccgactgccatgggggtcatctggacccgaagccagcttcaggaaggacattcgcagcatcct

SEQ ID NO: 193895 - DNA, 122 bp, Homo sapiens
tcagttcttttgcagagagctgcttcccctgtccacccccagcaatgaatggttaggcaacggtgacctggttctgagaatttcatggactatggggatttcctaggcacagataagttcta

SEQ ID NO: 193896 - DNA, 122 bp, Homo sapiens
actggtgatccgtggttgttagtaattaaaccaagtaaacggtagctcattcggtcaggccgcttgccgccgatgaggggtgcagagcttctgcagcatcctggggaggtcccggaacgtgg

SEQ ID NO: 193897 - DNA, 122 bp, Homo sapiens
atttttgcggccaggcactgtgcctcactcttgtaatcccagcattttaggaggttgaggcgggtggatcacttgaggtcaggagttcgaggccagccttgctaacatggtgaaactccgtc

SEQ ID NO: 193898 - DNA, 122 bp, Homo sapiens
cttctggttgggtgacaaatgcacgtgaggtccctgggtttccatggggtccttggccaccgtgaggtgatgagattccctgcctgtccatccagagagggctgaatggaggggactgtgga

SEQ ID NO: 193899 - DNA, 122 bp, Homo sapiens
agggaggaggcagggaggccaggagaaggaagacagccagccttctgtgagatttacgtgcgtgcctggcttccaagacaagtaacttctgttgtaaatacaaattaagctattttttgttt

SEQ ID NO: 193900 - DNA, 122 bp, Homo sapiens
tggcttccacgtcttgcgcgcgcgcgaacacacacacacacagacacacaccccccacaccggacgagtggtctcctaatctgcctcggggaacaccttactcatcttgctctgttcacact

SEQ ID NO: 193901 - DNA, 122 bp, Homo sapiens
gcgtttgcgagggagggggtagaagcaccggaggtgggtggttgggagcgggtccctaggcggttccgcgcggtttttagtagccaagactgtatccctttctgcggcaatcatttcctcct

SEQ ID NO: 193902 - DNA, 122 bp, Homo sapiens
catgcacgcttgcgccgggggtgggggcgccgcggtggcctcgctgctccttgcccacggcgcagacccctcagtccgagatcacgcgggcgcctcggctcttgtccacgccctggaccgcg

SEQ ID NO: 193903 - DNA, 122 bp, Homo sapiens
tgacaacacctactcccacctacacctcagggcattgggcgtaacaggagggagctctgccggttttgcacgcgagagcttccacacgtgtgcacagggtgctcatacccctggcatcgtca

SEQ ID NO: 193904 - DNA, 122 bp, Homo sapiens
actactcgggagcagagggggcgtggctagaccttagggggcgtggtttaacgccgggagcgaaggagacagaattctttggcaggggcgaccttagaatcctggggaggagcgagaatgga

SEQ ID NO: 193905 - DNA, 122 bp, Homo sapiens
gtcggttgccttttaaaatgctctggagaataccatggtgtgtacagatagggagttggacgactgtgtgtgcatgtgtgtgcatgcagtagcttatgataaacaaaatcaccagactcttc

SEQ ID NO: 193906 - DNA, 122 bp, Homo sapiens
tccaggccacacgaagaaggcccggggctctccagaggctgagggcgtcaatgtccaccccgaccagccctcagagacaccacggggcgagagggggtgtcctgcccccacaagccgagtga

SEQ ID NO: 193907 - DNA, 122 bp, Homo sapiens
gcctcgcgttcgcctttacttgctggcgggtgctgttctcagtacctgctgtgattaggtcgctgaatcatgccaggtctgttgctgtctcccttgtgtggcggaggaaactgaggcacagg

SEQ ID NO: 193908 - DNA, 122 bp, Homo sapiens
cgggtccccactcgggggtccctcgcggggtgcgtcatatgggctctcccctctgcgacccgctatttccctgctagacccccagcgcccagcggattccaaggctgcgctcccgccggctg

SEQ ID NO: 193909 - DNA, 122 bp, Homo sapiens
gaaaacataaatagttttttttttcatatgaatgtaggtcctatgaatcacttttattaccgcagtgtggtgcataatcaaacaaggaggacttagttgtcttaaaaaattatttttgcttt

SEQ ID NO: 193910 - DNA, 122 bp, Homo sapiens
ggagcccgtgggtgcccgggaagagggcaggaggtgctgggccctgctggggaagaggatcggtaaggacttgcaggtgactttgctcgcctgtcctgaacagggcacagggaaggcttccc

SEQ ID NO: 193911 - DNA, 122 bp, Homo sapiens
ggaatcagagaggcagaacgacgagcaggggcgccacctctacctcagcaacccccggcgcggcactttgcaaagcccatgggtggggacgggcacctcccaaatgtacagtgggcaccgat

SEQ ID NO: 193912 - DNA, 122 bp, Homo sapiens
cctaacgctaagtcgggcgggactgccctggcacccatgaaacccgctgcccgcctcccccggggccaggcccttggcctccccagcttgtttcttcgtgtataaaatgagggccacggtgc

SEQ ID NO: 193913 - DNA, 122 bp, Homo sapiens
aactttccacttaatcaatggttttagaaaactcttcggcgaatggggctagcaggcttccgactctctgcattcctcccaggcagactaggtcagccatccccaggtgcaccccagccccg

SEQ ID NO: 193914 - DNA, 122 bp, Homo sapiens
cccctgcccaccctggccctcctgcagcaaggtgcagccaggaagcctctgtgatcactccgcaaaggggagagaggaggcaaggagaggcaggggaggccccccacctgcgccccaccccg

SEQ ID NO: 193915 - DNA, 122 bp, Homo sapiens
gtcctgggcagtacctggtgaggacaggttggaaacggtcgtcagccatctgaccttccccggagacgctcaggcagaggcaccgccaaggggagggagcggaggctacaacaggaagtggg

SEQ ID NO: 193916 - DNA, 122 bp, Homo sapiens
acgtgacgactggccccgcctcttcctctcggtcccatattgaactcgagttggaagaggcgagtccggtctcaaaatggaggtaaaaccgccgcccggtcgcccccagcccgactccggcc

SEQ ID NO: 193917 - DNA, 122 bp, Homo sapiens
ctgcttttctgaatcgtgtggttctctctctggcccggcaggccagcttttccgagccggcgggagacccaggcccagggctcagatcctcaaagacctgaaagggttttggagcaggtgcc

SEQ ID NO: 193918 - DNA, 122 bp, Homo sapiens
gagggtcagagtgttggcacctgtcttccggatctgttcacccgtcccctggaccggcaccggcacagagggtcagagtgttggcacctgtcttccgggtctgttcacccgtcccctggact

SEQ ID NO: 193919 - DNA, 122 bp, Homo sapiens
cacgcggagcgcctgtgtcctgtctctgaggatccaccgtgcctatgtaactggaaaacgcgggcagctggtgcccgcgagtcgtccctggttccttgcccatacgctgctcgctaccctcc

SEQ ID NO: 193920 - DNA, 122 bp, Homo sapiens
agggagaaaacaagaaactacggtctgattcgggaaggaggtttgcgggaggaaggagggcgatgaagcagagctgaggttttagaaagtggggtggaagtgaagattatttaatggttgca

SEQ ID NO: 193921 - DNA, 122 bp, Homo sapiens
acgaaggcacaggaagaggagagcagagggaggaagcctgggagcctggcctccggtgggcggggcagaaacaaccgtcagactcgccaaacagatgcaggaacaaggtgttccagtcgggg

SEQ ID NO: 193922 - DNA, 122 bp, Homo sapiens
agagcgtgtgtgtgtggtggaggtgcttacataaatgcagtatttttaacctgcctggcacgctttaggttggcgttaaatgaatatctggagaataaaggtttgtagttattctgaagcat

SEQ ID NO: 193923 - DNA, 122 bp, Homo sapiens
accgcactgtcgcgaaggcaggcgaagaacagggccacactgagtggggacaactgggcccgggcccagaggacacgaaggaaggtccgggagaaggaattcctagtttcagggaagaaaag

SEQ ID NO: 193924 - DNA, 122 bp, Homo sapiens
tcactccacatttgtgggcaaaatgtcaggaatccaaggaacactattcttagaactggacgttttgggacagtccctcagtgcaatcctcaagggcagtagcctggaccgatccgaagacc

SEQ ID NO: 193925 - DNA, 122 bp, Homo sapiens
gtgaactgaagggacacgtggattagttcaatcaggcataagcaaaacacaaatacctgccgcctctcgtctggtgtatggaggccgagtctgagcccagggtctttaggggagtcctgggt

SEQ ID NO: 193926 - DNA, 122 bp, Homo sapiens
tttgagcaggtttagtttcagatgagttcagcttagtagctccctttgtcttctgagagtcgtcatctgaatgatggaggctctgctgtgtcagtaaggctggcatgcccttgagaggtctt

SEQ ID NO: 193927 - DNA, 122 bp, Homo sapiens
atctgggttcggaacccacgctgcctccgccctcctcccacccgcgctgcagttcccaggcgcatttcccagcctcaggacacacgctgccagaagcaagagtgcttccactcaaggaagcg

SEQ ID NO: 193928 - DNA, 122 bp, Homo sapiens
gaggaagagtctcctctgaggggagagtcggtcatggcagcagacgccgggatggctccgcgactgctacaccaggcactcctgggcccgggcagcagaccagtcagccctgtggctcctcg

SEQ ID NO: 193929 - DNA, 122 bp, Homo sapiens
atggcaggcactcggtgttcaagcactgtgttcccatagactctgggctcctgccctcctcgcccccaacccccttcctaggaaccagccccggcttgtcagagagccagctagctgtcaac

SEQ ID NO: 193930 - DNA, 122 bp, Homo sapiens
aggtggagggtgtgtgaggcggccgaggccgtgcggggcgttaggaaacagggcacaacgcgaagcaggaggcaccgagggccacagggagcacagagtagggacgctgaggaagggaagag

SEQ ID NO: 193931 - DNA, 122 bp, Homo sapiens
tcctgtgttcccgccggagcctggcacggaagtgtaatcttcccgcgggggcccttctgtcgtctcgcctacctgagagctgagactaaatgaaatataaaatattcacgataagaggaaac

SEQ ID NO: 193932 - DNA, 122 bp, Homo sapiens
gcaggaccagatacgatgagccacactccagactagcaggaattttcctcaggggcaacacgtcctctaaaaaccttcactggcaagaaaccaagaaacttgaagtgagaagagaaacagga

SEQ ID NO: 193933 - DNA, 122 bp, Homo sapiens
aacgacaagcccaggcctgccctctgcatcccgtttctttctccaagagctgtttttctacgcgctcgagcctttgagctgtgtgtgcggtaggatttccttcttggatgtgttcgacccct

SEQ ID NO: 193934 - DNA, 122 bp, Homo sapiens
tgtatagagagtcctgggctaggtcacagctgcagtgatgctggctgcattcaagaatcccgggccaggttacggctgcagtgatgctggctgcattcaagaatcctgggccagttcacagc

SEQ ID NO: 193935 - DNA, 122 bp, Homo sapiens
gactcatgcccctttgagctaacggcctgccccaacgagggctgcacctcgcaggtgccgcgtgggaccctggcagagcaccggcagcattgccagcaagggtcccagcagcgctgccccct

SEQ ID NO: 193936 - DNA, 122 bp, Homo sapiens
caggtgggagctgcacacccctctggccaggtggcggggacggccggcctctgttcagcacggcccactgcacaggtgggggatggccagcctctgttcagcacagcccgctgctggctgca

SEQ ID NO: 193937 - DNA, 122 bp, Homo sapiens
agctgaggcattccattgagaatgcatcatgtcttgacttctctctctggccaatcctgccgtcattgcatttcttaataaacctcctgcatgctaaaaaaaaaataaaaaataaaatcaaa

SEQ ID NO: 193938 - DNA, 122 bp, Homo sapiens
gcagttccttgctgcctcctatgtgtaaacgagctttccaaccttgagaatagtagattacgaagacagagacttactttggatggccaacagtagcccagtgacctcatgtcccatgggcc

SEQ ID NO: 193939 - DNA, 122 bp, Homo sapiens
actgtataattccactcatatcaggtgcctagagtagtcaaggggaagttactgtttaatcgcgatagagtttcagtttgggaagataagaaagttctagaaaagaatggtggtggtggtta

SEQ ID NO: 193940 - DNA, 122 bp, Homo sapiens
gacccttagcccggtttttagaattcttcctcggaggcaggggctcaactcacactctcacgcatactggccacgggagagaagcgtgggaggcccactctgcgcccgcgggaaagggttta

SEQ ID NO: 193941 - DNA, 122 bp, Homo sapiens
aggagaattatccccactgggggagtcaaggcacagaccaaagcttctgtgaggtggcagcgtccacgcctcaatgcctttctgcctccctagccctgtatggtgctgaagtgtaggactgg

SEQ ID NO: 193942 - DNA, 122 bp, Homo sapiens
cacccggccttgcatatctgttcattgcctgttgtcttccccattagaatgtcgccctggcgagagcagggacttgctcattctctttccagtagtgttcccagctctttgtgcttggtgca

SEQ ID NO: 193943 - DNA, 122 bp, Homo sapiens
cgaggaggcaaacacataaggcacgaggcgagaaacgtgcagagcggaggacgaggccgacggacggggaggctgggggggacactaggcagcctggccaactctgcttgtccccctgctct

SEQ ID NO: 193944 - DNA, 122 bp, Homo sapiens
tccaccgccccaggcgcacaggtttccgccagatgtcttttcttcttcgcagtctttgcccgagcgcttccgagagccagttctggactgatcgccttggatgggataccgggggagggcag

SEQ ID NO: 193945 - DNA, 122 bp, Homo sapiens
ccccggccccaggacctgatctggctttatgacatcatcttacagctgacccttgaggaccgggaaggcaagggcctgtcgttttcctttgcctgtgtcagacacaaaatgacttaactttg

SEQ ID NO: 193946 - DNA, 122 bp, Homo sapiens
aaacaaaaccgcatccttgagcaagccctcaaaccgagtccatttcccggcctcctcccccgtggtctgcgtatttccacagagctcaaaatcagaccaggccagagctccccaaacatttg

SEQ ID NO: 193947 - DNA, 122 bp, Homo sapiens
gggagtgcttgcttcatgccaaggagtgttctatattcacgagtcctttctaaaccaccgcgaactaggtactgttttatcattttacaaattaggaaattgaggttcagagaagggaagta

SEQ ID NO: 193948 - DNA, 122 bp, Homo sapiens
caattccattttcacaagaggctttctttttggaaacatgatagcggtctcgctggtgtgcgcaccaggagcgttgcggccgcggcttcctcctgcggcgaatctgccgttgcatcacagtg

SEQ ID NO: 193949 - DNA, 122 bp, Homo sapiens
gggagcccgggccggcggcggcgggggctgtgggggccggcgcaggtgaggacaaggcggcgcccgtctgcgtcggctcctgcctcgtggacatctacagcgagaccaagaggaggcacgtg

SEQ ID NO: 193950 - DNA, 122 bp, Homo sapiens
aaaggagaaccattgaggtctgaggggcatagcagcggagacagggcttggcttgtggttcgaaaagccccctgtgtgtgcagcagggagtgcaatttgcaggggcccaggtggccatggag

SEQ ID NO: 193951 - DNA, 122 bp, Homo sapiens
tgtttaattatgtctctatcctactcttataacacttctataaaaactttttacatatagcgtccacttttggttcagtttcttaggaaaataactttgagagtcagctatctgaaccaaag

SEQ ID NO: 193952 - DNA, 122 bp, Homo sapiens
ctggttcccgcccgcagtaggcaagaaagcgggcgttgctcactgggacttgtagtatgacgcccgcgagctgtgatgcgttactaactggcgcgatccacagcgcctcctctcccggcgtc

SEQ ID NO: 193953 - DNA, 122 bp, Homo sapiens
cctgataggaggagagtaagactcaaaaactctgcttaaaatccagatgtgtaaatgagacgtactctattaaagaggacaagaatcaaacataggaaaactattataccactaagatgaca

SEQ ID NO: 193954 - DNA, 122 bp, Homo sapiens
cgaaaccctggtaaccagttactcagactgcggggctgattttatctttcctgaagcagccgcggagcaaattcagtgatggcacgccccctggtggtgatacgaggttctaccaggcagaa

SEQ ID NO: 193955 - DNA, 122 bp, Homo sapiens
aggtcagagatactagatggcttacccaaagccacacagatcagtggcatggcagaaggtcgaactcaagcctcacaatccccaaagcctgtgagctttccaccccagaaggagaaccttga

SEQ ID NO: 193956 - DNA, 122 bp, Homo sapiens
actgatgcagaaacccagctaaagttgctcctttccttcacatccacagttagtattttccggtgtgtaagaggggattcaagcaacacactgtggacgatggtgatggtattgccagcgga

SEQ ID NO: 193957 - DNA, 122 bp, Homo sapiens
ggctgttgccttttgggcagcccctcttcgcggcggtggggctgtcccgccggcctgtcacgttgcccttccctgggcttgtgaggattggctccgcttggacctttgcggtgctcccggag

SEQ ID NO: 193958 - DNA, 122 bp, Homo sapiens
cggtccccggggcagctatatttagaaggggctaaagagagggaatgaatgaggtgcccacgagaaagtgaaaaatagaccagcggggcaggtcccgccgctgccttcagccggagcttgga

SEQ ID NO: 193959 - DNA, 122 bp, Homo sapiens
aaggaggccccagcgagggcgtacctgcggcaggtgacgaaggaggcggcgcaaaacacccgccgtgtacgtttcgcgggacaaaaaccacgcgcccgccgggccgcgctcaggccttcgcc

SEQ ID NO: 193960 - DNA, 122 bp, Homo sapiens
caccccatctgggatgtgaaaagcgcctctgcccggccacccagtctgggaggtggggagcgcctgtgcccagccgcccatcatctgggaggtgaggagcacctctgcccagctgccacctc

SEQ ID NO: 193961 - DNA, 122 bp, Homo sapiens
tcccttggtttcgagttgtatcgttcaccagaggacgactgtgtgccccaggacaatttgcgcatggtcctagctggccggctctaggtcgacggccccaggcggttaagctacttacaaag

SEQ ID NO: 193962 - DNA, 122 bp, Homo sapiens
aagaagttggcctcagcagcgggggtccgagaggccctcggaatccaccatggcatgggccggagtcgctggggtccgagaggccctcggaatccaccatggcatgggccggagtccctggg

SEQ ID NO: 193963 - DNA, 122 bp, Homo sapiens
aagtcttgtttttcctaatacaaaagaaacgatcatttccctttcctggccctgcaggcacgtgagctttctgcgtggctgaagagcaccacactgagctcctgctaccagagatgtctgct

SEQ ID NO: 193964 - DNA, 122 bp, Homo sapiens
cgattgagctcgggagacttcggataagttcgagcttgttcgcctaagtccggttacgctcggtctgcttcgaacaagtccgggtgacgctcgggccgggtcgggcatgttcggtcacgtcc

SEQ ID NO: 193965 - DNA, 122 bp, Homo sapiens
agaggaaagaaaggcatatgcaaagggtggagaaacaaaaagtgatgttaagtcaagagccgaggagagggaactgcaggagaagcaaagtgaaaaaaggttaagaaacgccttgagtactg

SEQ ID NO: 193966 - DNA, 122 bp, Homo sapiens
gggggccatcggggccggggtgtccgcggttcatggcaacggggacgggaaagcggcgcgcgagctcggcccccccagcctcagtcggaatctgccatcttgagcctgtgtctccgctctcg

SEQ ID NO: 193967 - DNA, 122 bp, Homo sapiens
cgtggcttaggagcatcaggaatgtgtggctcacagttctggaagacggaggtccgaggtcgaaggcccagcagcttcggtgtctggtgcggaaccgccttccagctggtaggtgtcgtctc

SEQ ID NO: 193968 - DNA, 122 bp, Homo sapiens
gctttggaaatccactccggggggccttggccggaagctggactgccgcggaggacactgcgcccctgctctgcagaggaggaatcccagccgggggacgggccgcccgaggtcacagaggg

SEQ ID NO: 193969 - DNA, 122 bp, Homo sapiens
ccctctcgtgaggcggcaggcagggggtgtgcgcggggactgcggcgcgcgtggggactgcggcgcgcgtgtccgcggcccgcgtgtccctgcggctccggcccaggcgtccgcgtgtgtcc

SEQ ID NO: 193970 - DNA, 122 bp, Homo sapiens
tgcgatcctgctcccacttgcgcgaacagaagaccatctcggtgaagtaccacatccagccgataattgggacataggccagctctttcttggccaggaccttggagccctgaaacagaaga

SEQ ID NO: 193971 - DNA, 122 bp, Homo sapiens
gacagagatagggaacgaaaccgagatagagaccacaagcggagacaccgatcccgctctcgatcacgttccaggacccgggagaggaataaagtgaagtctagatatcggtccaggagcag

SEQ ID NO: 193972 - DNA, 122 bp, Homo sapiens
cgattcatggaacacagcgtctggcgtccagctttgtgggtgagggcatggcgggggatccggtggccctgccctgcctccggtgccggtggatgggggagggactggcctctgactgcggg

SEQ ID NO: 193973 - DNA, 122 bp, Homo sapiens
tacaaattaagtgctcacatgagctttaaaaagcagaaacgggtcaggcacagtggcttgcgcctgtaatcccagcactttgggaggccaaggcaggcggatcacctgaggtgaggagttca

SEQ ID NO: 193974 - DNA, 122 bp, Homo sapiens
ggcaaccctgactcggaccgctcgggagagccccaggagaggccagcgccgcgcagcagccgccccgctgcgcccacctccccggctgctcccggagggctcacaaaggcggtggccgcccg

SEQ ID NO: 193975 - DNA, 122 bp, Homo sapiens
ggcgcccagcagatggcaggatgtagccaaagattccctgcagtcccggagagctgggcccgcaggactgcaaggcagggggacctgcctgtccctcagggagcgtcctgggaacccgcgct

SEQ ID NO: 193976 - DNA, 122 bp, Homo sapiens
tcccactgggttgatgccatcttcttccacctagcttcccaagctcttccttcagtcccacgactacagtctgtattccttggatgtggaattcatcaatgagatcctcaacatacgtacca

SEQ ID NO: 193977 - DNA, 122 bp, Homo sapiens
gtttgggatcctaaagaaagcatcagaccagactcaggtctggacgtccctcaagtggcccggaggtaccgatattagtgtcaccgccgtcagtgccctgcccagaaataaaacctttgttc

SEQ ID NO: 193978 - DNA, 122 bp, Homo sapiens
cccagggaaaggcccagtgacaggtgtggacaggtgccagccctgcaagccgcctcttctcggtagaagggagaaggacagagctctcttcaataaattcgtcaggtcaaagcagcagcttt

SEQ ID NO: 193979 - DNA, 122 bp, Homo sapiens
aaagcggtaccttagaaacagattggtgccatctgttggcccacactggaattactcctacgtatatttttacctttcaaaggtccggaggtgagttagcagttttttctgggctacagaca

SEQ ID NO: 193980 - DNA, 122 bp, Homo sapiens
tatttttcaccccaaccactcccagtggcaactcttcaaagagctctttctgacaccctacgtgaagtgaagtgaacccttctccacccagccattctcttccttgatactatttttttagc

SEQ ID NO: 193981 - DNA, 122 bp, Homo sapiens
ttgcacaacctcaagttggttataccttctcgaggttgtcgctccactgtcaggaatccacgagtggagaccttcccacgtgtgtcttagctgtctaggcagtacttcctgcaacccccccc

SEQ ID NO: 193982 - DNA, 122 bp, Homo sapiens
tcatcctcccgggaaccgggctggacagggctgggctgagggaacccaggggggccgggacggggggcggcgacgacggcggcgacgcgcgggcggattcagcggagcgatccacgaatttg

SEQ ID NO: 193983 - DNA, 122 bp, Homo sapiens
ccatagaaccccatggggaaggtgtccgacgagggctacgatctcgaaagagccagctgtcggtccaggtttccaagaggcggaatttgagacagggagtgacacgcatcttgtatatttat

SEQ ID NO: 193984 - DNA, 122 bp, Homo sapiens
tcatcggcctccaggtctcccgctgggggtcccccaggatgtgacctgggcccacgacttcgcccacgggccgcctctcgcgaatccccggccgggagaacagagaccaggacggcctcagc

SEQ ID NO: 193985 - DNA, 122 bp, Homo sapiens
aacagaaaccgcaaagctgcattgttttgtttgtcccttggttgggctccgggcaaccagcgcgctggggttctgacacactgcctgagcgccccctgctggccactgtgcagaacttcacc

SEQ ID NO: 193986 - DNA, 122 bp, Homo sapiens
acagcctgtcaccttccgtgtcgtagggcgaagaagcagttgatgggggccacacctccacggtgattttgttcctctccagccacagacccttgctttcccctaggagcgtgaccacacgt

SEQ ID NO: 193987 - DNA, 122 bp, Homo sapiens
tgttatgataaaggggccttggcagcactcttctggtgtggtttgaccaggctccacccacgaattctgttttcttttagaggtcactggagagcccggtggggtgtaagtacactgcgctt

SEQ ID NO: 193988 - DNA, 122 bp, Homo sapiens
ccgctgcgcatcctgccgtaagcctgtagtgggtgggacaagaaagcttctgtcacccaccgcgcctctccgccgagccgctcgggggcggcacctcgttcatcaaatcttcgcacgcagga

SEQ ID NO: 193989 - DNA, 122 bp, Homo sapiens
accaatgaggtggacgtcctactcacgggactgagtttccaaacgggccagagagcagcacgtgagcattttgcaggtacttcaagggagtgggtttaagaataacctggccgcgcccccct

SEQ ID NO: 193990 - DNA, 122 bp, Homo sapiens
tgcccctaccttggcctttgggggcggccatttccaggtctgtggggcagtcggcttctccgttcatcctccagctgtccagccacctcctcggtcgtgctggccgggcaacccggggtcaa

SEQ ID NO: 193991 - DNA, 122 bp, Homo sapiens
gcatctacttcaccatggagtccctcaagcaggtgggtgccttggccatgcagagactggcgggccccgcacagtagctccttggccgcacagaggctggcgggccctgcacagtagctcct

SEQ ID NO: 193992 - DNA, 122 bp, Homo sapiens
acatgccttctttattttagatagtaaaacaacagcatagaggcacttcttctactttcccggcatctagtgatggcatccagtctttgtctgctaacactagagcaattcaggtggaaact

SEQ ID NO: 193993 - DNA, 122 bp, Homo sapiens
tagatgcacttcacgaagtaccagagctgggccaccacattctggttgaacatcctggggcgggatggccaggtcaaggaccccatcagaaacagccccgcagggcccccagcctgcactgc

SEQ ID NO: 193994 - DNA, 122 bp, Homo sapiens
ccgcggggccgccctggaggccggagccactgggcctgcggcgcctcggcagcgagcagccgctttgctcgcgtgcaggaggctgttcgctacctcacacccccggctggcgctgtggcctc

SEQ ID NO: 193995 - DNA, 122 bp, Homo sapiens
atactcttcgctccggccgccgcggccccgcccctgcgcactgggatccctctagcctgccgcgcctctcgctggtcatctgcgcccctccgacctcggaaagagtcctgggtgcgggattc

SEQ ID NO: 193996 - DNA, 122 bp, Homo sapiens
cccgggttccagtttctccacctcctcgtcagcgtgtgctgttgtctggctttttgatgacggccgtcccggtgggggtggaggggggttttgtggtggttttgacttgcacgtcccggtga

SEQ ID NO: 193997 - DNA, 122 bp, Homo sapiens
gggggcggggaggagccaagggggcgagcaagctcggtggctgggtgggttggggcgttccgcgcgcccttcattgaagcggcggtggccgggctgggcgccggtagtggaaagcgacggcg

SEQ ID NO: 193998 - DNA, 122 bp, Homo sapiens
ccagaggcatgggctgaaagggtccctctcctggtgatggccagagtcaggcctgctgggcgggaaatggcagttggcccaccccaaggcccaggggcttgtccatgctgagcacaagggtg

SEQ ID NO: 193999 - DNA, 122 bp, Homo sapiens
ctaagaaagaaggaagaaccaaggcgaaccgtgcattcaccttgctctctgactggaagccgtttctgcaggggagagaaaacaatgtcttttctttccttttttaggttcttagttgagac

SEQ ID NO: 194000 - DNA, 122 bp, Homo sapiens
gctcagcccagcggtttaggcttcgggtggcagttgcgtgcatcagtggttggttcctctcggttgcgtggacgtactgcagcttgcttatccttcatctgttcatggatatctgaggcctg

SEQ ID NO: 194001 - DNA, 122 bp, Homo sapiens
gcggctttgagtgggctaggctgtcagggagtgttccgatactgtagtgcaggctgggatcgcggtcgggagacgccgagtccgcattcctcagttctagagcttctcttggcagctcggca

SEQ ID NO: 194002 - DNA, 122 bp, Homo sapiens
aatatccctctcctttttcttccctcctgctggctttggttgctttcctaaacattgccccggacggcaaagtcggcttcactcttagcccttgttagggaaacgctggatccaagattagc

SEQ ID NO: 194003 - DNA, 122 bp, Homo sapiens
cggctgcccgcgtcgaagccgccggccctgctgtggcacgacctggacgcgtgccacggacgtgctctgtgaccttggctctggctgggcggtggttcttgctgagccttagtttccttttc

SEQ ID NO: 194004 - DNA, 122 bp, Homo sapiens
ttaagtggtatgttgttttaaaagtcaggtaacaaggcaacactgaactacagtgtctgccgtggtgtacgggcggctagtggggtgagctggccatgctctgccgctcacctgggtggaga

SEQ ID NO: 194005 - DNA, 122 bp, Homo sapiens
gaggtttgattcctttccctacagtcgtgctcaaactttcattctctaccacttgggggccgcagacgcgtcatccaggtctcccttttcacttcccccttcccgcccccagtgtccggcag

SEQ ID NO: 194006 - DNA, 122 bp, Homo sapiens
tgcgcctaaccctccaacgcccctaatcctccatcgggcacgcctctgacccattgggcgcgtgcctaaccctctggcaccccgtatcctccagcaggcgggcgcctaaccctccagcgccc

SEQ ID NO: 194007 - DNA, 122 bp, Homo sapiens
caaagtctccagtggcgtagcgcgcagcgctcacccggctcgtctcagagccctgaagtccgcccaagttttgagtcttgccatgaatgaggtactgaaaactcggagacgaaattcctaat

SEQ ID NO: 194008 - DNA, 122 bp, Homo sapiens
caccaaggccgtcaccaagtataccagctccaagtgagcctctcgctgcagtaacagttccgccgtgacccacaccccaaaggctcttttcagagccgtccacgtttctcaagaaagagcca

SEQ ID NO: 194009 - DNA, 122 bp, Homo sapiens
gcagatatttttgaggtgacattgtgtacattgacacagatcctcttgtaaataggcatacggagatcttgaagttctgggttatgcaacattacgtttataaatttgacaccaggtgattc

SEQ ID NO: 194010 - DNA, 122 bp, Homo sapiens
gaatgaatgcgagacgccgattgtacagggacttgtttccatactgctctctaccagaaacgttctcagtttccttccttctgctggacatgttccaagggccaaaacctcaaataatgtga

SEQ ID NO: 194011 - DNA, 122 bp, Homo sapiens
aaaagcctaatgtatttgtagatccaggaccagtactcttggctggcctttgatccgccccgcccccggaccgcagcaacagaaatccaggcgacccctacctccgcttctccccgtggctc

SEQ ID NO: 194012 - DNA, 122 bp, Homo sapiens
cttctgcagaaaatgacagcggccaacacggcagcaaaacagcaaaggcttcctttcttacgtttctgttgtgagcatgtttgtttaagggctgctaaccttcacctgccacccaaatgatg

SEQ ID NO: 194013 - DNA, 122 bp, Homo sapiens
tccccgtttcccacaccctggacccctcgctccgtctcggccccgccccaagcccagctccgtctcggcccctgagcccagccccgacccacctcccagtccctgggttcctcccgacaccg

SEQ ID NO: 194014 - DNA, 122 bp, Homo sapiens
ctgggctgggtcgagggcctgcagccgaggtgtgacctgcaaggtcgaagggttctttctcgctacttggccctaaggcctcgggtcagatcctgatgggacggggtggccgccacgtcctg

SEQ ID NO: 194015 - DNA, 122 bp, Homo sapiens
gagaaactcagggtcgaagctggggtccctggggtccacaagttcgagatgagacacgggcggtctcgggatgggaattggggacgcagggggatgaaaagatggaaggtgggggcactcag

SEQ ID NO: 194016 - DNA, 122 bp, Homo sapiens
ccacgactcccgggagagcgcagggaggggcgtgggtgccccttcgcccacctccgcccccgtcacctcgacagctgtcccgctcttggaattcattggcttcctctacccggcctcccaaa

SEQ ID NO: 194017 - DNA, 122 bp, Homo sapiens
ctggagcccgctgagcgcctccagactctgggccgcgatcaccgtgtgccgccgctcggacgtgtgcaccagccccacgttggagaagcgccggcccccgctgcccccgccgcccccgcccc

SEQ ID NO: 194018 - DNA, 122 bp, Homo sapiens
catcaagcagatgctgctggactggtgtcgagccaagactcgcggctacgaggtgagccccgggaggccagggggcctggaggcctccccagaccccagctcaacacctccttcttagcaga

SEQ ID NO: 194019 - DNA, 122 bp, Homo sapiens
gcttccgaaggatggtgcttcttgcaccccaacagagtggctggcaaccccccaggggagcgcgcaggatcccagctgatcccacccgggtcggctaaggaggtttccatttcgtccagagt

SEQ ID NO: 194020 - DNA, 122 bp, Homo sapiens
agctattttataaacaccactgtctgaagatcttcatttacattttgctaaggatcacttcgctaacctcacaggcttgtgtcaacagcatgatttgcaggacttcagttacactcttataa

SEQ ID NO: 194021 - DNA, 122 bp, Homo sapiens
ggccgggccggacgtgacgtgcgtgggagggggcggggcaggccgctggtgggggcggggcggcgagggtccccacccccacagcattccgggcagcggccctgtgtcctgcaagcttgagg

SEQ ID NO: 194022 - DNA, 122 bp, Homo sapiens
ggagcagacttggctggctcaggcatcttaaaacaccagaaatgtgtcgaaagtaaagagcggatttctgctacttatagggcttttatgctaatgagggatggagagtacctcttagttaa

SEQ ID NO: 194023 - DNA, 122 bp, Homo sapiens
acatgcggaaagggctctgtgcctctcacagcagcatctgaccctctggactgagtcattcggtgtacttgcctagaaggttctttagctctgggactcacaggagtaagaagctcagaaaa

SEQ ID NO: 194024 - DNA, 122 bp, Homo sapiens
tttgtttacttgattgagtaaagagaagttggccttttttaacttttaaattagaccttgcgcctttcttgtgggaagtgttttctcttatgtttgtagaatctaggatgggtgttttgtgt

SEQ ID NO: 194025 - DNA, 122 bp, Homo sapiens
ggattcagggtaccccaggggtgatcaggcagaaccctgtggatgagagaccagggagggcgttgggaaaggatttttcccccggctcccagtgaattagaacggggcagtcgtctggactc

SEQ ID NO: 194026 - DNA, 122 bp, Homo sapiens
cccggggctgctttccgctgttcgactctggcaggctcagccaatcactgaaggagggaacgatttgagcgatggagccactctggccgagttagagctgagattatcctgagttcctttta

SEQ ID NO: 194027 - DNA, 122 bp, Homo sapiens
gcgccgcggcagggcggggcggggccgggggcggggccttctggcagtttctgggagctgcgaacgcgccgccccggggctcggcggccggaaacgctggcttcggagccttaggcgccgcg

SEQ ID NO: 194028 - DNA, 122 bp, Homo sapiens
ggacgggactaaagtctcgaggcgggtcttggacagtcagcggcccaatagtgtgctctacgtggggcggggctcaggtgcggacgccgccggttgtcctcttcgctgctccgtagtgacgg

SEQ ID NO: 194029 - DNA, 122 bp, Homo sapiens
cacccccggcgggggagagcggccccagcggagactcggcagggctcaggtttcctggaccggatgactgacctgagcccggggcccgggcggcgctggccgggcacaggatgcgcggcccg

SEQ ID NO: 194030 - DNA, 122 bp, Homo sapiens
atcactgaattccatgctgggaggaaatgcctgcagctggctcttctgggccagcaggtccggctgccctcctgcttatcatcatctgacattgaataaagtttgcttatttattttgatca

SEQ ID NO: 194031 - DNA, 122 bp, Homo sapiens
gacactgtaaggcccatagttacaggaccatagtacactcccgttcccagaccagttggtcgcctctggcctggcagggctcccagtgtctcgggacctccaggtgacgcgcctgcctcccc

SEQ ID NO: 194032 - DNA, 122 bp, Homo sapiens
ggccctgctgtgagggagggcggcggagtgcagcgtctagcacccaggacgccagtgcaacgcggggctgtctccccagagcagccatctagacgacggcacgcaaggcccgacctcgctgg

SEQ ID NO: 194033 - DNA, 122 bp, Homo sapiens
tctgaatggtttggagcactcatacaagcagaatccctgccccagtcttgagtctgggaacggagaagggagcgtcagcggggtggtgagggggtagcggggagggcgaagttgaccgtgcc

SEQ ID NO: 194034 - DNA, 122 bp, Homo sapiens
ccagctggaaataaaagtaagattccagacctctggccaacaccctctgagcccaaatgccggctttccaccgtgaggccctgcctgccagcgctggctgccatgtgggctttctgctttgc

SEQ ID NO: 194035 - DNA, 122 bp, Homo sapiens
tggtaagttcagtctgaagagccaggtgacacttcatagaggagatggtgctccagctaacgtaaatataggcaaaatgggagggcaaagagaaggaaaggcattcaagcagggggaatggc

SEQ ID NO: 194036 - DNA, 122 bp, Homo sapiens
gtgattctcacacaaaggcccagtgctcattggccctgacagtgctgtgctttgaccagccgcttaaccagctttcctgcctccttcttaggactcaagccctgtatcctgacaaccctcct

SEQ ID NO: 194037 - DNA, 122 bp, Homo sapiens
aagggaagccccaggaactgcgaggggagcgagtacttctctccgcagcctgtcactttccgaggctcccgccaggcagccctcgttaataacgcctagacaccgtgcccctgcccgcccca

SEQ ID NO: 194038 - DNA, 122 bp, Homo sapiens
ccctcagggccccgcttttggtgggtcctggtgccccaccctgtagaggctagatccctgcggaatgaagaatgaggaaattgatgagacagcagctgccatctctgcagtcctccttccag

SEQ ID NO: 194039 - DNA, 122 bp, Homo sapiens
gtcccagaaggcgtggcgtcagcagccatgttggtaaagggcgcccggaaaatgtgggaacggctagagagttgtagtcctcccgaatactctgattggtcaggatgcagtacgagggcggg

SEQ ID NO: 194040 - DNA, 122 bp, Homo sapiens
ggtgggggctgggcaggtccacagcccaggagggcctgtggctccttgttctttgagagtcggtccagtcccaggatatcttggtgtcagggcccaggaagacctttaggacctggctgagg

SEQ ID NO: 194041 - DNA, 122 bp, Homo sapiens
tttcattatgtagtctgcagctgctggaggaaagacaagaaaaaaaaagaagggacaaaacgattaaagttttggggtgaaaactccagatcctttaatgatttttcctctcgaatccaaac

SEQ ID NO: 194042 - DNA, 122 bp, Homo sapiens
gggactgagatgtttgtaactgctttgggagtttcagttggctgtacctctaagtggtaacgatgaggtctgaaagacacaaaggaaggaactgaattcatataagacccacacagattgtc

SEQ ID NO: 194043 - DNA, 122 bp, Homo sapiens
ccaagaactccccaaacagcgggggtggcttctccagtacggaaagggttacaacccaaacgctcctgtattccccttcgacagttcccttacgttatccttccccaaactggaaagtgggg

SEQ ID NO: 194044 - DNA, 122 bp, Homo sapiens
atgacagacacccctggtaacccagcagcaccgtagcctctgccctgtaaaaatcagactcggaaccgatgtgtgctttagggaattttaagttgcatgcatttcagagactttaagtcagt

SEQ ID NO: 194045 - DNA, 122 bp, Homo sapiens
gttggactccaaggatccatccggcgcctcctttccacctcccggctctgtgtctgtcaccggaccagggcctctgattccccgtgtgcccccattgggtcttccggggctgtgccagaggc

SEQ ID NO: 194046 - DNA, 122 bp, Homo sapiens
gtaagaaaaaatattgaacaccaacatagtcatctgggtactgggaaatactcccatgcccgcaccaagatttcattattcaatgaaaagtccaaggtagtgcttacatttctggcctgacc

SEQ ID NO: 194047 - DNA, 122 bp, Homo sapiens
cccccgaaagccaggctcccaggagtagctgcacggcctgtcaatcagcgggggcaggggcgggcgctgcctgggtttggagggtggagggggaggggactcccgggggcagggacccatct

SEQ ID NO: 194048 - DNA, 122 bp, Homo sapiens
ttaccccaagctcgagaaatcttcacttttctatgcaagcacagggagcccgttttctcacgtgttcaggaagaacaaccaggatttctaaggtgagaattatttgtcttcctggcagttgc

SEQ ID NO: 194049 - DNA, 122 bp, Homo sapiens
gggtctggaaactgagtggtccctctcaggaggcaaccaaaagacgttctcactggctgacgatgggacacttggagcatcactgtgggcaataacttggagtgatttaaatacgtgagata

SEQ ID NO: 194050 - DNA, 122 bp, Homo sapiens
gccttcaaacctttcgcatttacttaaagatcgcctactagaaaccaaaccttaaatatgcgtccaacaaggcagacagggacgttgccttaagagagctcagaagcctactagggctgcag

SEQ ID NO: 194051 - DNA, 122 bp, Homo sapiens
ccttggtgactggatttagaaatcaaagaacagggagaagtcaaaggaggtgctaagtaacgttctcagtccagctaacagtgtctttagttatacatatggaaaagtgaagagcttactca

SEQ ID NO: 194052 - DNA, 122 bp, Homo sapiens
ttttttaaatgattgggttgccataaaagaggttttctctagtctgaatgaacttctgtgcgatgctgactgagggtttcagcctcctctagatgcttacaagagcttggtctggaaggtac

SEQ ID NO: 194053 - DNA, 122 bp, Homo sapiens
tgcagctcatgcaggcagtgcaacacgttgatggcccgtgcacagactgcggcatcggggcgcaggcagccctgcaggagctcagccacctgggtccggtaggcctggtgctcgccttgggc

SEQ ID NO: 194054 - DNA, 122 bp, Homo sapiens
ctcccgggtcacggtcgcagccgggcccagcagcgcggtggagcacgtgggcccgggaggcgcttcccagctgcggtccctggatcgccctctccacgctgaagcaacagctccctggggcc

SEQ ID NO: 194055 - DNA, 122 bp, Homo sapiens
tgccatgtgaaagctgaaaggttacgtcaacctttcagctttggtgccaccgctagggagcgtcggtttgcatgactctagcttgactgcaaagtgattctgctttccctgcggaagggcag

SEQ ID NO: 194056 - DNA, 122 bp, Homo sapiens
aagtcgagggcggtggcttggcttccctggaatgggggacgtcttaggactgcgcctgcgcggggcgccgggccctgggcggggccttcccggctgacggcctgcgtgcactgcgcttgcgc

SEQ ID NO: 194057 - DNA, 122 bp, Homo sapiens
ccccagatggcttgtcctgtaggctgcagctgcatactgcctccctagagcctggcactgcggacccaaggagccgaggaccgagctgccgccctcctcccatctctgaggcctgccgcgtc

SEQ ID NO: 194058 - DNA, 122 bp, Homo sapiens
cctgacccaacaggcctcgacaccactcacccgcgacatccctcacgcgcgtgcgcaccgcgtctcttcgcactacgccacgcccactggcgccacgccccttcgcgccgcgcgacgcgccg

SEQ ID NO: 194059 - DNA, 122 bp, Homo sapiens
gctcaatagtatcgcttatttccttttgcttaaggatccattctggttggtatccattatcgatcagtattcggttcaggttgtgagtcatgggatcaatgtaagaacagtcagaaaacttt

SEQ ID NO: 194060 - DNA, 122 bp, Homo sapiens
cagcccgcagactgcgcgcagggagaccttccccaggttggtcttcccaggtgcctcagccggtgccttcctctgtggaggcttccctagggaaactggaggccatgtcttggcggttagcc

SEQ ID NO: 194061 - DNA, 122 bp, Homo sapiens
acagatcgtcgagggtgggcctctccgtttgaggctcggtgatgctgcgtggggggagtccgcgctggctgaccacacagcctgctcacctgccccatgggctcgggagtcgccagtctggg

SEQ ID NO: 194062 - DNA, 122 bp, Homo sapiens
tgggagcactttcgtacacagaggacttcttatccatggaattggccgttctttgtaaaacgctctgtacttactagcaacctttacacagacatgaagtttctccataaggataaagggat

SEQ ID NO: 194063 - DNA, 122 bp, Homo sapiens
ttggaggctgtatgtttctatctagggatgattgcctgatagggtttacttgtggttgcccgggcaactggcttatcatttaatcacacactgccctcaaatgtcagtacctggatcttttt

SEQ ID NO: 194064 - DNA, 122 bp, Homo sapiens
ctcctcattggccctcacaccccgacctgggaggtcctcccactgagggtgcttgtagttcgcggagtgtcctcatcaaagactgggaatgcggcagatgctgaattttccaaacggcctga

SEQ ID NO: 194065 - DNA, 122 bp, Homo sapiens
taaatgtagatacagttgtcataactttcttaaggatatggatacattctgacatggaagcggatttgggggtgaaacagccaacttttctctagcacgccacgtaaacagtgccatcttgt

SEQ ID NO: 194066 - DNA, 122 bp, Homo sapiens
taaaccacatgggctctatttaccttcctctcctaggactaggaagattctgtagagtatcggaaagcattggttcatgtgctgccaggattcatgttggctctggtgagccagggacaggg

SEQ ID NO: 194067 - DNA, 122 bp, Homo sapiens
gctgcgggaggaaggccgggtggaaggaggcgtccgaggtgcagctcagcgcgctgtagtcgtagtcagaattgtctcccggtaagagggtcattttgggccttcacatccctctcgggcct

SEQ ID NO: 194068 - DNA, 122 bp, Homo sapiens
tagaaaggaaagtccaagtaaagagggatgccacacctggggaagggagagaggatgtgacgacacctccaggaatgcagggcccacgcaggtgcactggcacccacgaacttcctgataaa

SEQ ID NO: 194069 - DNA, 122 bp, Homo sapiens
tttcatgaattccattttttgtcataacaaatttttctttttttgtgattataattgctgcgatttgaatgaatgtgtccctccaaaattcaaaggttggaactcaaaccccaatgtgatag

SEQ ID NO: 194070 - DNA, 122 bp, Homo sapiens
tctcgcacgccctctcccacaggcctggctcactgagattcatgagtatgcccagagggacgtggtgatcatgctgctaggcaacaaggtgagtggctccggggcagggtcagcccagccct

SEQ ID NO: 194071 - DNA, 122 bp, Homo sapiens
gagtcacagggaagaaagcgatttcctccgcctcttccaaagcggtaggtttccttcctccgcctgcctcttaaataacgtggtatctcgcagtttggctgaaacctgaattaaatgcaatg

SEQ ID NO: 194072 - DNA, 122 bp, Homo sapiens
ctcccctttctcgtcgtctagccggacaggagcagctcccgctgtgggtggccctcctaccgcttccgcgacactgcagtctctgtcgccaccaccaactgtagcgcggcgaggcgagtcgc

SEQ ID NO: 194073 - DNA, 122 bp, Homo sapiens
gggttggcggctcctgcgagagtcagcgagcatttgctctgtgccgggcatcacaggggacgcggactgagacccagacggccaggttccgggcctgggagccgggccttctccctggtgca

SEQ ID NO: 194074 - DNA, 122 bp, Homo sapiens
gagatgtttactgaagaagggaatgaattagtaccaaggtgaggaccccacccttccccacgggctccaaaagcagcttagagcccaacaaaacctgccccacatttttggcgtttctgtgg

SEQ ID NO: 194075 - DNA, 122 bp, Homo sapiens
aaagccacggctggctgtatttctttcctatgaaacaaatttttattgatcaccgtgtaacgaccaagagtcacacaggcctggcaatggcatttgggagaaacttcataatctttcaatat

SEQ ID NO: 194076 - DNA, 122 bp, Homo sapiens
gcgcgccgggccctgcggggtgagcctggcgggtagcccgggggaaggagggggctgtagcgggtgggagggcccaggcctggctcaccctgccctggccatctgtccgcagaggccgcggg

SEQ ID NO: 194077 - DNA, 122 bp, Homo sapiens
ctttagttatcaaaacagtctatgtggaaatccagtcccgctcttcattcggagagtccgcgattcctagagcctcagacttcgtcatcccggtctgcgtgactttatgagattctgagttt

SEQ ID NO: 194078 - DNA, 122 bp, Homo sapiens
ctacacatgatttaagacaggtatgtgtaagaagcctttttgtgtgtgctggctttatcacgacaactctggctgattctttatgaaggattagggatactcatcttcagcagtgcacgtga

SEQ ID NO: 194079 - DNA, 122 bp, Homo sapiens
ccagcccggccaacacagcgaaacccggtctccatcaaaaaaatacgaaaaccagtcaggcgtggcggcgggcgcctgcaatcgcaggcattcagcaggctgaggcaggagaatcaggcagg

SEQ ID NO: 194080 - DNA, 122 bp, Homo sapiens
gctgcagccgccgctgcccgggaggaaaggagcccccggcggcggcggcggcggcggcggcggcggcactcacccatagtacggatgcgctgcaaactgcacatgctcgcgtctgacaggcg

SEQ ID NO: 194081 - DNA, 122 bp, Homo sapiens
agtgatacgaccgcctcggcctcccaaagtgctgggattacaggcgtgagcaaccgtgcccggcctctattgcttttttaaaagcaatagctggtgacctgacttctcaccggccttagcac

SEQ ID NO: 194082 - DNA, 122 bp, Homo sapiens
aaaacagccttcagaagtagaaacaggcatagtggctcataccagtaaccccagctacttcggaggccaaggcaggaggattgcttgagcccaggagtttgagaccagtctgggcaacatag

SEQ ID NO: 194083 - DNA, 122 bp, Homo sapiens
ggccgggtcgcttattcaatatggcggcctcggctaactctgtcagccgggcctggagaacggaaagcccggagggactagaatccttgcattcgacaagtttgtcggcaatttccgtcagc

SEQ ID NO: 194084 - DNA, 122 bp, Homo sapiens
gggtgtattaaaagatttgcctctgggtggacagaattcacatcccgtctctgccatttgcggctgtgtgactctaggtgagtcccttaacctctctgagccctcgactcctcatcagttaa

SEQ ID NO: 194085 - DNA, 122 bp, Homo sapiens
gcgcagggtgtgctagcgcgctcagccctctccggccggcttagtctagttcccgggcctcgctcggttccagaactttccagaaaatgccgcgctccctacggctcaagggtcaaatcgcg

SEQ ID NO: 194086 - DNA, 122 bp, Homo sapiens
ttctcaaacttgaacatgcatacccacactgggatcttgttaaaatgcagattctgattccgtagggctggggtgaggcctgataatctgcatttctaataagcacctagatgatgcccatg

SEQ ID NO: 194087 - DNA, 122 bp, Homo sapiens
ctctggactccaagcctgcatggccctggtacaaaaggggttggggcgaccccacgtcaccgccgaactgaccaatcccaacatacaaaacacacgacgacaatgacgagatcaaaggggct

SEQ ID NO: 194088 - DNA, 122 bp, Homo sapiens
ccctttccgagtcaaagaaaggggtgacggacgcacctggaaaatcgggtcactcccacccgaatattgcgcttttcagacccgcttaagaaacggcgcaccacgagactatatcccacacc

SEQ ID NO: 194089 - DNA, 122 bp, Homo sapiens
cgacgaccactcagcggctgcaagccgcctacagtttcaaaggtggaacctccgaggcgccgtcagcgggcacggggctgcgggggatgggagaagagggaagggggtgtgactcgacccgc

SEQ ID NO: 194090 - DNA, 122 bp, Homo sapiens
gcctacctgggaggtgcttgcctggccaccagccagggccgtggctcctcggcaagtgggcgtccgccgagcctttgatgcactctccaaagtcacagagcaaaacaacacgctgaacaaac

SEQ ID NO: 194091 - DNA, 122 bp, Homo sapiens
actgccaaggggttggacccggccgcggcggctataaaagggccggcgccctggtgctgccgcagtgcctcccgccccgtcccggcctcgcgcacctgctcaggccatgatgagcttcggcg

SEQ ID NO: 194092 - DNA, 122 bp, Homo sapiens
aggtgagcggctccatgactgcggcggggcgggggacggggcctcgggacatcctggggacgtcctggtcccaccgccctcagcggccagcgcagacgcgcggggggaggggcgggaccggc

SEQ ID NO: 194093 - DNA, 122 bp, Homo sapiens
caactatctaccaaagtcacctttataagaaccaaaaatcaggtgtgcactcacagtacccggttttaacttcatattgctgaaagagacactgaagactaggaaaaacagtctttaatcac

SEQ ID NO: 194094 - DNA, 122 bp, Homo sapiens
aaatttagtggctttaaaaaacacagatttattcttttagaattttggaggctggaagttcgaaataaatttcagtgggctaaagtcaaggtgccagcagggctcattccttctggaggttc

SEQ ID NO: 194095 - DNA, 122 bp, Homo sapiens
agagaaaggcggggaagggcgcggaggcggagcactgggcgggtacccgctggcggctctcgcgcggcggcgctgctccaccttaagcgactgtacccccttaagggcgggcgctcaagcag

SEQ ID NO: 194096 - DNA, 122 bp, Homo sapiens
gacctgaacaacgcacactcctggccttccctctggtaacaggatgaggggcaggctttgcgtggaagtagcagcaagccctggagcctaaggcttatttgttagccaggagtgatagcccc

SEQ ID NO: 194097 - DNA, 122 bp, Homo sapiens
tatcctcccctcacctgttctcattaataatggctcccctcttatcttttttttgccacacgtatcattcttttaagaaacatacacaacccagggagaaagcccggcgcctgcccgggagc

SEQ ID NO: 194098 - DNA, 122 bp, Homo sapiens
tacgtgctgctgtcactcgtgtacttgcccggcgtgctggcggctgccctgcagctgcggcgcggcaccaagtaccagcgcttccccgactggctggaccactggctacagcaccgcaagca

SEQ ID NO: 194099 - DNA, 122 bp, Homo sapiens
agggcccttatgattctgtcaggaccaaccactttgagcactggaaatgtagttgcaggtcgggggtggaatggcaggtgaaaagtagaagttcagcgatttagagtcactgaaaaagtcat

SEQ ID NO: 194100 - DNA, 122 bp, Homo sapiens
aaagtctgcaaaagtgaccttgagtaactcccaagacttaccatgaatacaagatacatccgattaagaggctggtccccagtatagtcaccaagttttcatctctgtacaggtcttgacca

SEQ ID NO: 194101 - DNA, 122 bp, Homo sapiens
ctgcctgcgttccccgaccattgattgggcccggcaggcgcttcctgggggcttccctaccggctccagcccttgggattcgggagcgccctgctaggaagccagagccccgcaggggccgc

SEQ ID NO: 194102 - DNA, 122 bp, Homo sapiens
tgctgtgctatccttgtctcaacatattccaacagcacagtcagaatgcccgagcgctcacgcttgtgcctggactcagacacctccggcactaaaggtcctcacctgcgatacttgcaaag

SEQ ID NO: 194103 - DNA, 122 bp, Homo sapiens
tctgcggctcttcaaacctctgcaaaaggaagagggtctctgcctggggcagtcactcaccgaaccccgaaccccgtgaagcccatggtgaccacaagctgcgggtccggtcccgatgcgtc

SEQ ID NO: 194104 - DNA, 122 bp, Homo sapiens
gcgggggacgcgccgggaagctagggttgaggctgagtgttgcgcgcacgcatttctcaacgaggcaaggctgcagagttcgtcttaaatgtctcacctgcagcacatctctcaagtcgttt

SEQ ID NO: 194105 - DNA, 122 bp, Homo sapiens
taaggcaggcagagccgggctggggaggggggtgggcaggaggtagaggcggtcctgacacgggcagactgcgatgaaaccccagtttgttgggatcttgctcagctccctgctaggggctg

SEQ ID NO: 194106 - DNA, 122 bp, Homo sapiens
tgggaggctcggctggaggtgtgaccagggcagggactgacctggcccggaacagaagcgcgcagagtcccatcctgccacgccacgaggagagaagaaggaaagatacagtgttaggaaag

SEQ ID NO: 194107 - DNA, 122 bp, Homo sapiens
ccttcaattactgttccactactcatcaagcacataagttactcattgagaacctctgatcgtcactgtgctcatcaggaagaaattgatgcacaaagaactactgtcaatctcagcaaacc

SEQ ID NO: 194108 - DNA, 122 bp, Homo sapiens
cactcagtttctatttcccgggagttgcccagcgctccgcccacgcccgcttgcagaactcgccccgcctccgccccacccatcgtgtgacgtcaccatatcggtcccgcccctctacttcg

SEQ ID NO: 194109 - DNA, 122 bp, Homo sapiens
actcagatattttgtctttccagccaaactacagtataagataaattgtgtgtgcaagaacgggggttggggtggatggtaggggagccgggggaacagcaaatggaaggcaaggtgcagca

SEQ ID NO: 194110 - DNA, 122 bp, Homo sapiens
agcatgtttctggctcactttctcagaggtcactttctttggtggattttggacggccagcgtctggggttccctctttccttggccacttggaacaggaggaaaaagtctctgcagcacct

SEQ ID NO: 194111 - DNA, 122 bp, Homo sapiens
agccctttcccgccaaaccacgaaggccgggaaataaacagcgcctgcccaggctctgggcgcgcgagcccaggagaggacttgggtgggaagaggatctagaagatcggaaggagggagag

SEQ ID NO: 194112 - DNA, 122 bp, Homo sapiens
tcacatactgtataattccatttatgcaacatcctcaaaatgacagattatagccaggcacggcggctcacgcctgtgatcccagcaatttgggaggctgaggtgggtggatcacctgaggt

SEQ ID NO: 194113 - DNA, 122 bp, Homo sapiens
ttcccacttgggtggccatgcggcgctgacattggacaggtggtggacgagagatggtcccgagaaagggtggtcttgggagggctggtcccaagcctgctgtgctcctgtggcagtgatgg

SEQ ID NO: 194114 - DNA, 122 bp, Homo sapiens
tacttcccttctggaaggtggccaacacttctgggccgcccgggtggacctcaaatagaacgtctttaaatgtccggtggccaagggttctgtagccgactaggagtcagcgtccgactcgg

SEQ ID NO: 194115 - DNA, 122 bp, Homo sapiens
tttaaagtgataaaaactgtacaaatatttctggtgtgaaacacagtgttttgatgctcgcggactcttggattcgaggctgcggtagtacggacaaacaccgtgcagcggcatctcatctc

SEQ ID NO: 194116 - DNA, 122 bp, Homo sapiens
ggcctccttctccacttcaggcctgcaaagcggctgacggcattcgcagtggctaggcaacggcccgcgcagacttctcggcgttagccccgcctcttgaggcgcttccgccgccgggctcc

SEQ ID NO: 194117 - DNA, 122 bp, Homo sapiens
catccagaaagagtcgaccctgcatctggtcctgcgtcggagaggtggtatgcagatcttcgtgaagaccctgaccggcaagaccatcaccctggaagtggagcccagtgacaccatcgaaa

SEQ ID NO: 194118 - DNA, 122 bp, Homo sapiens
ggcctcggggccaatgacagggcggcgagcggcggggtctggccttgacgttgtgccgctcgccgcggggtttatttggctccgggtccctcggccgccgccattagggtccgcagcgcccg

SEQ ID NO: 194119 - DNA, 122 bp, Homo sapiens
aacttgataggatagtgtcatagggagcccattgtaggagttgactagggcagtccaaggcgtgtttaaggagtaggagccagttctctaaaatggtgcaatttgatgattattctggtaaa

SEQ ID NO: 194120 - DNA, 122 bp, Homo sapiens
gtatgagatgaggatgaagctggttagggtggtttcttcaaggctgtgatgtttaaactgcgatccataggattaatgagtagtccagggaaaccatgttccaggcacaacaagctacctta

SEQ ID NO: 194121 - DNA, 122 bp, Homo sapiens
gggcagtgccaggtgcttccagtgctttcactttcacataattccagctgaacttggaaccgacttaaaaacaggatttgattcccctttcacttctacttatgaagacatcaatagatttc

SEQ ID NO: 194122 - DNA, 122 bp, Homo sapiens
cgccccacacgccggccttttctgccgcttcccaagccggagccaatcagcgctcagcagcgaccggcagggacgaccaatcgacttatcctgcgttgtgctaaagacctagaaatcgagcg

SEQ ID NO: 194123 - DNA, 122 bp, Homo sapiens
aaaatatgtttagagaattagactctgctgatctcaggttttctttcttctccgaaaggacggtctaaggaaacatctgtggaagtccgttagtaaacacacaatttctaccaaggggctaa

SEQ ID NO: 194124 - DNA, 122 bp, Homo sapiens
ttgttgcattttctgctgctttcttggcctctcctcctgaatgatcattcctgctcaccacgcttgggactcctgaggaaatggtgacccagtttcctggaactacttaccccagaaagatc

SEQ ID NO: 194125 - DNA, 122 bp, Homo sapiens
ccgaccgcttcttagaactctgaaatttaaggtcaagccccctctcggcgcgcggggagccgccgcggtgcgtcccgctgccgcaccaggcagacgggccccagctcttccctctcgccctt

SEQ ID NO: 194126 - DNA, 122 bp, Homo sapiens
gaaaagaggtagagggctggttgtcgctgcgagcgggtcggcctaagcgacagtacgaagcggctacacccgcggggtgaggtgggcctgtattccatgatggcggtggtcgtggctagaca

SEQ ID NO: 194127 - DNA, 122 bp, Homo sapiens
ccaacttattttgcagaatttcttgttcatcaacttctcggtggaaaaataaccacttaacgttggtatcacactggaaagtactttaatacccctgatgtcacgcaattctcccaacaaac

SEQ ID NO: 194128 - DNA, 122 bp, Homo sapiens
ggtcaggctttccctcgcgctgcggctgtcggagggccgcggccggatagggacaagcggcggagcagcagcaagtccggccgcctccgatcctacgccttctggccctcccctccttcccg

SEQ ID NO: 194129 - DNA, 122 bp, Homo sapiens
gagtgagacctttgtggtattagtggagtttttgtaggtggaaagatatttccatctggccgtcaacatcgtggtcttccaccaaagtcattaactaggtgggttacacagactgtagaatt

SEQ ID NO: 194130 - DNA, 122 bp, Homo sapiens
atgcaggggttgctgcccaagcctgggcgctcctgggggttctgcatctcatgaagcagccgcatgatctgctgtgccgtggggctgtcgtggggaaaaccctccccagcctcttcttgttc

SEQ ID NO: 194131 - DNA, 122 bp, Homo sapiens
gcgcccagcccggcgcgcggacgccggcgagtaccgcgccgcggtgcacctcagggaccgcgccctctcctgccgcctccgtctgcgcctgggccaggcctcgagtatgtggggcgggacga

SEQ ID NO: 194132 - DNA, 122 bp, Homo sapiens
gcagaatgacccatggggaaggcactggaaagtcaccacccaacccactcctgatgcagacgagacctgaggaaggggccagagatgcacagggtcacacagcaagtagccagggcactgcc

SEQ ID NO: 194133 - DNA, 122 bp, Homo sapiens
cacacccaccgcgtggtggacctggtgggctacagggccgggtggtatgatgaggaggcccgggagcgccaagcggcccagtgtccccagcaccccggggaggcactgcgcttcctgtgcca

SEQ ID NO: 194134 - DNA, 122 bp, Homo sapiens
cctgaacggagggtttatggctgacacctccacttgtttctcagagccggggctgactgccggctgcatctttgaatggcgaccaaaaaagacatgcatttgtctggcaaagtcgctggcgt

SEQ ID NO: 194135 - DNA, 122 bp, Homo sapiens
ccaggttcccctggggttcccctgtgcagctggtagggaaagccactgtgctggggactccgggcatctagcactgacctctccctccaaagtctccacatgcagggacagagttccgggct

SEQ ID NO: 194136 - DNA, 122 bp, Homo sapiens
agggccagtgcctggtctgtcccgactccctctgtgtccccagctgccagcaacgtgcagcggatgacaagtgaaatgaacgagggagtgagagccgaaaaagacaccttccaggaatcgtg

SEQ ID NO: 194137 - DNA, 122 bp, Homo sapiens
ggctgagggttgggctggggacgagggctggggctggggcctcacccagcttggtgatgccgatctcctgcaggtcctcccaggtgatgtcggtgatgaaatcaatgttctcgtagccattg

SEQ ID NO: 194138 - DNA, 122 bp, Homo sapiens
ggtcattctcacggaggattccccaacaccatcagcataggtaagcgcaagcgagccagccgtcggtccaggctctccctcacccgagaccactgccccggcaaggctttccctgcggtggg

SEQ ID NO: 194139 - DNA, 122 bp, Homo sapiens
ctcagttccagaccccggcagtaactccggccgcctcgtctcttccagggaactgaagtacgtgattcagaggttcgccgaagaccccaggcaagaggtgaggcctttgtttctgcatctca

SEQ ID NO: 194140 - DNA, 122 bp, Homo sapiens
aagagaacgttcttccttacacagacaactagtaaaacaaaatagtaacaatgtgaggtgcggctatgtgaattagctgactgtaataatcatttcacaatgcatgcctgtatcaaagcatc

SEQ ID NO: 194141 - DNA, 122 bp, Homo sapiens
cgcagacccgcgccccgcacaggcccggtgggcaggccgaccctggctccgagcccctcccgcgcccacgcccacgccaagaccaacctgctgccgggccgtgcagtccaggcccccgatgc

SEQ ID NO: 194142 - DNA, 122 bp, Homo sapiens
tctctctgcgccacaaagacactcctcgtcactccctgccccaggccacttcgtcaccatcgttggcccagccagtccagggccgacaagatggggctgctactcacctttctggacagggc

SEQ ID NO: 194143 - DNA, 122 bp, Homo sapiens
tccacctgaacatagatgaataaactgcctcaactctggcaaaataagcaacttcaacatcgcttcaagtggtcagtggtatttctgtcccaaaacagctgtagcatctgactcatttttaa

SEQ ID NO: 194144 - DNA, 122 bp, Homo sapiens
aaaaataagctaaataactcaaaattaactgttctatctacaagccataactatagtacccgttatcagatatatttttaaattgcaacaaaataccttgaaacaacttatagcaccttgaa

SEQ ID NO: 194145 - DNA, 122 bp, Homo sapiens
gaggacgggcagccgaggtccggcctccagcggcgcgcaccggcctcgggccctcctgggcgctggcgggctcgctcctccataaataaaatacagggcgtcgactttcgcaagtgaccccg

SEQ ID NO: 194146 - DNA, 122 bp, Homo sapiens
gggggccagggtgaccgccccaagcaaacatctgccgtctgggagttcgcttttctcttgcggcccaaggcattgcgctgtctatcttcaccctgagcccgactgtgtctctcttgtttgta

SEQ ID NO: 194147 - DNA, 122 bp, Homo sapiens
gtgctggtgtgggagagtggcctggccgaggtgtggggcgcgggcgtggggcctggctggcggccgctgcagagcaccgagctgtgtccgggcgggggagcccgcgttgtggcagtggcggc

SEQ ID NO: 194148 - DNA, 122 bp, Homo sapiens
acaaaaaaacaaaagcaaacaaaaaaaccaaatgcatcccttgtgtaatttttaggtcaccgcgccatgggaacacgctaccaggggaagggagctgtgagacgcgcagggaggctccagac

SEQ ID NO: 194149 - DNA, 122 bp, Homo sapiens
tccaacatcagaacccacttggggaatgggacgcagaacccctccctctgcagaagctgccgcactgcccaggctccttgcggtgagctgagcccaggccctgccggccccacactttgttg

SEQ ID NO: 194150 - DNA, 122 bp, Homo sapiens
acattagatgagatatgttgattgaactaaataaaaaaggaccaagcatggctttgttttcgagttatttatgtatgcagatttcagccttctgggtgagctttcctgccgctgagtatcac

SEQ ID NO: 194151 - DNA, 122 bp, Homo sapiens
ggctgccgccccgtctgcgggggcggagcgtaggtgggggacctgcgggctgctgcgcggcgctgcaggcacctgcgccaggcatgccagcgaaagcgggggcatctttgcagaggatccgg

SEQ ID NO: 194152 - DNA, 122 bp, Homo sapiens
tttccagaccctctaacacatttccctccggatcctgtgagagcctgagatcacttatgacgagattcacctggaccttccggtcagtgagctcagaacacctcacaccacagcgtcactca

SEQ ID NO: 194153 - DNA, 122 bp, Homo sapiens
aggttctgctggctccttcagggctcctggcattgcctttagtccatgtgggtccctgggcggacctgggtcagagctggctgagggcataggtttgggctatactgagggcagcttccagg

SEQ ID NO: 194154 - DNA, 122 bp, Homo sapiens
tggagattcgaactgttcaaggccttgaatgctgggatgagtggggtgaacgcgagccctcggagctggtcccggggctgtgccagagcgtggggccgggctggggtggacgggagaggacc

SEQ ID NO: 194155 - DNA, 122 bp, Homo sapiens
gtgagttgtgaggcgcgcccagtccctctgttcccgcctggcacttgctctggccgcgcccgccccatctgccacttcggagaggccacggctctgagctgcggccgctagtgccctgatgg

SEQ ID NO: 194156 - DNA, 122 bp, Homo sapiens
ccgtctcttcccctaccaaaattatgtgggaacagcggtccaggaccttcccctgttcagcggtatccccgggccggtgaccccggggttcagtcgtctccccgaccccaagcggcctctgc

SEQ ID NO: 194157 - DNA, 122 bp, Homo sapiens
ctggcctggcgtgtctgtccacggttttagaagcgcttgctggacggtccaccagagctgcgggtcttcccgcgacgtcctccgagcctgagctgctgccgagacaccctcagcgttcggtg

SEQ ID NO: 194158 - DNA, 122 bp, Homo sapiens
tctctctcctcacctgccgagggctcgcccctctagccccgccccgccccgcccaggacgcgtgacgtcacaacaagcgccgtgcgccccgccccccatcgggggcaaccattgttccgccg

SEQ ID NO: 194159 - DNA, 122 bp, Homo sapiens
gcgggatgggcagagtttagaggcttagagaaccgagtcgtggcgcatcggagcctggctcggccttccctagtatctgccgtcctgggcagccaaggcccagctccgcagatcagacgctg

SEQ ID NO: 194160 - DNA, 122 bp, Homo sapiens
agcatcccagcacagccccacgcctccacccgggcaggctcggagcggcgttcggagcagcgccgcctgctgtcctccttcactggcagctgtgacagtgacctgctcaagttcaaccagct

SEQ ID NO: 194161 - DNA, 122 bp, Homo sapiens
gccatgaagaccaagacacactatcgcgctatgcaggcagactgcctgcagaaactacagcgatatctgaaatccggggtggccatcaggagaacaggtaccgaccctggccaggggctcta

SEQ ID NO: 194162 - DNA, 122 bp, Homo sapiens
cctgctggtggctctgtcctctgttaggcaccacactggttggtcaacttggatgttcatcgaggctcattctggccttgctcagaagcccttctgatgctcttcagtgagggaggcactac

SEQ ID NO: 194163 - DNA, 122 bp, Homo sapiens
gagcaagttgccattaaccagtgaatactttacctgccatgggctctgttctcagaatcacggcattaggagttctggagctacactgtcccagacaaggaccctcagaaggacctcagtct

SEQ ID NO: 194164 - DNA, 122 bp, Homo sapiens
cggccttgcatcccggcttgggggtccggacccgctgggaacagctggttcagatttagccggggaggcagcgcgcattcctggcagtttgtggtgaacaggaatgtgctggaaggccggcg

SEQ ID NO: 194165 - DNA, 122 bp, Homo sapiens
acctttgttttgctcttttgggatctgcctccttatctggagcagggtcttgtgaagagacgcagggaaaagttcactttccacctcccaggggagcaggcaggaggggactagttaggagg

SEQ ID NO: 194166 - DNA, 122 bp, Homo sapiens
tctgaattccttagagtgggacctgagaaacatgctttcttgaggccatttcctccctgccgcccacctccacagactgggttgggaaaaggatggggataatgatttcaagccctagtatc

SEQ ID NO: 194167 - DNA, 122 bp, Homo sapiens
cctgaaggagagaggggctcatggtgaggccagggaagcccagggcagctggagttccgacggggatgggatcagcagctgccgcccagaggaaccggggcatgagaggccctggagggcag

SEQ ID NO: 194168 - DNA, 122 bp, Homo sapiens
gcgtccagtgggagggtggtatttggaggtgttctgggattccaagtgacccctcaagtgcggtctggtctctggctcagttcagggtatgatgcctttggtattttcttctgggcagtcgc

SEQ ID NO: 194169 - DNA, 122 bp, Homo sapiens
tgctcttcactaaggcggctttggcaccgttgggtctttggagcgaagataggacgctggcgaagggacccccaagcgaatccgggatggaggtgatggggccggggccgggagcccagcct

SEQ ID NO: 194170 - DNA, 122 bp, Homo sapiens
atgcagtgaggaggcgcgtctctgagctgggaattggccctcgccagacgttgaagttgccggcgccttgatcttagactttcagcctccagcgctgtgggaggcaaatgtctgttgctcaa

SEQ ID NO: 194171 - DNA, 122 bp, Homo sapiens
catcctcgcctgccctgtccccggggcgcccacgccgcgaatgaaggcgccacgtcgttgcgcacccaagccggtttatttggtctcccgcacacactcaggcctgcatcaccggccgtgat

SEQ ID NO: 194172 - DNA, 122 bp, Homo sapiens
gggaagacctcctatgctaagaacccctagcctaggtcccactgacggaggagatgctgacggccggcagaggagcccttctgccgagaggaagccaaggtgctgccgggaggagcaagggc

SEQ ID NO: 194173 - DNA, 122 bp, Homo sapiens
tcaccgcacctaccaaagggaatccggttccctcatgcacttaggaaaaaagaaagaccacgtgggcgccagatatcgggagacctgccccgataatcacgtaggttcttttctattttcct

SEQ ID NO: 194174 - DNA, 122 bp, Homo sapiens
actggccgatttcctctccttcaagcttcttccaacggacagagaaaattcccagaaagacgttgggggaaatgttagcgacagcccggagaagaggggaatgtttacgtggacgggccttt

SEQ ID NO: 194175 - DNA, 122 bp, Homo sapiens
tccagctcctctgccgaaagctgctgctttgaattcctgccggcacctctgcctcttccacgggcgcctccgcgggtgcctctccgggtgcctccaccaccaccaaaacctccagcgccacg

SEQ ID NO: 194176 - DNA, 122 bp, Homo sapiens
gacgtttctagaagaaacttaaagggggctcgcgccgcacgactgtaggtggagggcgtgcgccgcgggacgccccagccgggtctgataaagccccgaagccgatctaaggtcaataaacc

SEQ ID NO: 194177 - DNA, 122 bp, Homo sapiens
aaattacactgaccacaagccttttctgcctaacccacagcatgtagaatctccatgagacgtttaagtacccgacaaactcctcagtgggaaaccatttgagggcagactggccagaaagc

SEQ ID NO: 194178 - DNA, 122 bp, Homo sapiens
caccggaaggggccttggcgaagctgggcggagccggccaggcggcgcgagcgggaactacggccttggccttcttcagttctagcgtcaacccggtgctctacgtcttcaccgctggagat

SEQ ID NO: 194179 - DNA, 122 bp, Homo sapiens
cccaccccgccctgccctgccctgccctgccctcggcagcgggctccgccccctgctgcacgatcctggggcccgaggcttccgcctggcctcccggcgccaactggctctcacacctgccc

SEQ ID NO: 194180 - DNA, 122 bp, Homo sapiens
cgccttaagagctgtaacaccgcgaaggtctgcagcttcacttctgagccagcgagaccacgaacccactagaaggaagaaactccggacatgccccctttaagaactgttaacactcagcg

SEQ ID NO: 194181 - DNA, 122 bp, Homo sapiens
caggaaccagactaacagagggcaatgaaacaaaaccagagaactcaggcccagagccagcgagggagaggaaggacgccgaagcgtagcgtcccgcgccgccccccgccaacccgggagga

SEQ ID NO: 194182 - DNA, 122 bp, Homo sapiens
ggaggaacattacagcccgtattgcactgcatggcgactgcactcctgtgtcttccccatcgtctgaaacctcccaggggatgggaggcccagcaacagccaaaggcggagtgagaggaacg

SEQ ID NO: 194183 - DNA, 122 bp, Homo sapiens
acagctaatgagatgctaatgacatgcgctggaggcggagtccgggcagaccaatcacagcgccgcgagcccaacccggctctcggagggcctcgctccctcccccaccccgccccctggcg

SEQ ID NO: 194184 - DNA, 122 bp, Homo sapiens
agttgacgtgtcactttctgacgtggaaccgaataagtcctccgtggtacgtgctgcggccgctgcctccttctccttcctgccttctcctcccaaatgagctgacatgtatgatgaatata

SEQ ID NO: 194185 - DNA, 122 bp, Homo sapiens
tattatgcagggatggctgcaagagagactggagtttcgctatcgctcaaatcagtctcccgaagcacgcgggaaaacagcttttaaagataacttgctgtgtggggcaggccagtgcatca

SEQ ID NO: 194186 - DNA, 122 bp, Homo sapiens
cttgcttttgaaggatacagcccacgttctttaatgtggcacccaatgcttaggatgaaccgctgcctggatctgctttgccaggagcaccctgtgtgcctctttgcctatgcaactcgagt

SEQ ID NO: 194187 - DNA, 122 bp, Homo sapiens
cctcacaaaaccaagcccggatcgctgtcagccactcactcagtgccgcatggagctcctcggacagcgcaacgtcaaatgtcttcgtatcctgagagctcgctccttgaccagaaatctca

SEQ ID NO: 194188 - DNA, 122 bp, Homo sapiens
tcctagctggatgctgatgacccccaggacatgaggtcatttcctggagttgtagctgcccgttgaaatgagaactctggatttaactgctgaggcagcgatccctaaatcactaaagaatg

SEQ ID NO: 194189 - DNA, 122 bp, Homo sapiens
gtaagcctcactttgaaatgtcctgcctttttttggtcaaaccaatgtataccttccatacgttgattcatctcatttcctgtaactcctgtccccctaaaatatataaaaccaaactgtaa

SEQ ID NO: 194190 - DNA, 122 bp, Homo sapiens
tcgggggcgccaggttcagagagcgcagagcgcgggtcagtgcgcacagggccatcagcacgacacccttacttttagccaagctgctcggtgctcctagatgacgttgactgtccggcgcc

SEQ ID NO: 194191 - DNA, 122 bp, Homo sapiens
ccgcgtcgactgccctaagagttcttctgcagccccagcaaagcctggggaagggctggccgagcggacttccaaaactcccaggttgtaagcgggccttgctgcggagagcgggacctgcg

SEQ ID NO: 194192 - DNA, 122 bp, Homo sapiens
agggcaggcacacagggagggaaccagctgctggaatgccagcccggttgatgcaccaggcggatgccaaccagctgtctcatggcccaagccagacccagaaccctttatataaagacagc

SEQ ID NO: 194193 - DNA, 122 bp, Homo sapiens
accaagcttgcctgggtgtcacggcgtgcaggcacttctgggacttggcgttctacaggacgccccagttggctgactcgggccgccagcttgctcaagtcacagtgcttgcattggggatg

SEQ ID NO: 194194 - DNA, 122 bp, Homo sapiens
aaatctcaactaccacaaataaggtaatacccaccatttgaggactgttgaaattcacagcgccccccccaccaccacactttcattcatactgtatttgtaagaaaccaaatattaaagtt

SEQ ID NO: 194195 - DNA, 122 bp, Homo sapiens
tcgggcgccagggacagacctaacggcctttacagtggcgcatgcgcaccaggctagggccgccgcgcccctcctcaggtgttttgtgttcctgccaagtcaggcttcggccctgggggaac

SEQ ID NO: 194196 - DNA, 122 bp, Homo sapiens
ctcgctcgtcccctgcgtgtgcgcagagctgcaaatgttcctgcacgtgaccatcgcgctcgagctgacgtctccaaccctggtccacgacagcgcgacacattctggcttcttcctcttgc

SEQ ID NO: 194197 - DNA, 122 bp, Homo sapiens
ggcccggcccgccggcaggaggcagctccacgccgccgcctcctcctcggccagcccgctcgcgcccctcccgcacactttccacaggaaatgattaactcgggccgcggcgcgttcccatg

SEQ ID NO: 194198 - DNA, 122 bp, Homo sapiens
gctccatccctgcactgggtggcccaggagagactggcagcccagagggcacagcgcgcacgcccccacccgcatctgctttgcagcctcactggccaggaaggtggacacctcatacctca

SEQ ID NO: 194199 - DNA, 122 bp, Homo sapiens
gcctgagccacttgggagcccccagtttccgaggcagaagaacagtgcccaccagcgcagcggggctgcggcccggaaaccctggcggggagccccgagccccggcgggcgcacgccgcgtg

SEQ ID NO: 194200 - DNA, 122 bp, Homo sapiens
acatggtaccgtgtctagttctctcacatgttgccgtgtctagttctctctcacatatagcgtcttgtctagttctctctcacacagagcatcgtgtctagttctctcacgtggcgccgtgt

SEQ ID NO: 194201 - DNA, 122 bp, Homo sapiens
ctcaggggcggataccagcaggagcgcggttctgactgcgccagtcaaaagtgaccagcgcgcccagggagatgaggaccagcccggccagccccaggcggactaggttcccccgggtgtag

SEQ ID NO: 194202 - DNA, 122 bp, Homo sapiens
agggcgggagcagagcctcactttagttttggcacctggctctggttgtgacgcctgcaccgtctccctggaggggctggtcagagctgggctcccactgactgatgtgccaagatgaggcc

SEQ ID NO: 194203 - DNA, 122 bp, Homo sapiens
ccagccctcggatgtgacctaaatatttcaagaggcttatttgatctcttctgccaccaccgtgtttcaaatcaccattttctcttatggcaacttcactcacagtcattgaactgggcccc

SEQ ID NO: 194204 - DNA, 122 bp, Homo sapiens
ctggtccggccggcgggtggacaagctgttccgcgctcccggcgcacacggctccgctgccgccttttgacaagcagagacagcccagcacctggccccgcctctcggtcaggccccgcccc

SEQ ID NO: 194205 - DNA, 122 bp, Homo sapiens
gctatctgaattgaattccaacttctaccatcttgaaagactctcagttcatgtggacaacgaatggggtagaaggccctgagggttgtcagcattggctgtgatatgaaaaaaagagaatg

SEQ ID NO: 194206 - DNA, 122 bp, Homo sapiens
tcaagcttcctggcatgcagctgcgcccaagggtctacacagggtctgaggctgctttcacgcagcaagggtggcggtgctgagtagtggccgcagagcctgtgtggccctgaaagctgcat

SEQ ID NO: 194207 - DNA, 122 bp, Homo sapiens
catttcatgagtaaataagaatgctatttttgagtagcccaagagttgtgctgttctcaccggggatgcttaactatgaccttggaaaagctcctcctcgccctggcaggggtcaaagtcgc

SEQ ID NO: 194208 - DNA, 122 bp, Homo sapiens
ggacgcgaggtgtcaattctagtgagagcaatttccaggaagccatgttctgctcttgagcgagcacccactgggcctcatgcaaggtagaaaaagcctgcgtacgtcaccctcccatgatg

SEQ ID NO: 194209 - DNA, 122 bp, Homo sapiens
ctcccattgcggagctggcagccgagccgtggaaaggggggggctctcgtgcagccggcgcgctgcctcatgggtaggctccgggtcagcctccccgtgtccgagctccctgtcttctcgcc

SEQ ID NO: 194210 - DNA, 122 bp, Homo sapiens
tctcaatctcctgacctcgtgatcgtccgcctcggcctcccaaagtgttgggattacaggcgtgagccacagcgcccagccaagagtattctttttaaataaaaattatgaccagagactag

SEQ ID NO: 194211 - DNA, 122 bp, Homo sapiens
tcaaactatcaaggatcaaataagaaatacacacaaaatgcttccacccggagcctcaaacgtaaaagtattcaataaatattttgtatgattatgattgctattagtattattattacctt

SEQ ID NO: 194212 - DNA, 122 bp, Homo sapiens
ggcccttactgcagcttgtactgctcgcggtgcgcacaaaccatcttttcctcagggcaccggcagcaaagaacagcagatcacgagggcatgcagaagctagagatctccccgagtaaggt

SEQ ID NO: 194213 - DNA, 122 bp, Homo sapiens
aaggggaggatgaggaggccgaggaggtgttgaggatgttcctcggggcctccgtgtccccgccgcactcccactggagatgggagggtgaatatattcggtgcacggtgggtccatgatag

SEQ ID NO: 194214 - DNA, 122 bp, Homo sapiens
aagctgccgggcccgcctgggccccgggactgacgacagtgcttcacctgctggtcctggcgcgacagatagaagtgacggttggcgctgactggatcaaaggtcagattgcgataatctgt

SEQ ID NO: 194215 - DNA, 122 bp, Homo sapiens
gggtgtccccgttggccagccagacgatgaaggctctagagacaggcagcagacaagtcacgctctcactggacaaagaggctctgtgttccaggtcctgtgctgggttctcggggaagtca

SEQ ID NO: 194216 - DNA, 122 bp, Homo sapiens
accatgccactggtttccacaggtatgagttgcgtttccccaattactatagttttgttccgtttgcctatgttattctttgctttatacacataagcacaactcttaaatagaattcagtt

SEQ ID NO: 194217 - DNA, 122 bp, Homo sapiens
cagggccagactctggtccaggagcctgtggggggacatgcagccccttcagggctgtaacgtccaggccttggctacctctacattagttggccaaagccccccactaccgccaccagcca

SEQ ID NO: 194218 - DNA, 122 bp, Homo sapiens
cgtcaccccgtctagatggacagctccacaagcagaaagacttggttttgctgtcacagccgcagcactaaaaccttgcttagcaggtgctcacttcacttgtccaaggaatggctagcata

SEQ ID NO: 194219 - DNA, 122 bp, Homo sapiens
cccggccccacccctcccaccgcctacagcccggccccgcccctgccgtccgcacccgtccgggagagttggcctggcccccgaggctgtccacaccccagctggtgctgggcttattccag

SEQ ID NO: 194220 - DNA, 122 bp, Homo sapiens
gggttattcctgaggggacctgcaggtccgcaagagccttgggtgggccggggcaggggccgtgtggtctgcagggagtggagccagaagcctgggcctccccggtaggagcccggcagggc

SEQ ID NO: 194221 - DNA, 122 bp, Homo sapiens
aaccctgccctcccggaaggtcccagcctggcgggttcgggtgcttttctctctggggcgcggcctccctgttctgctcagttgggggtccgttcccgggaagaaccaccacaccccccatc

SEQ ID NO: 194222 - DNA, 122 bp, Homo sapiens
aagggcacgacgcgcaatccctcccgctccagcccggggagaggggcgggggatgccgcgcgggtcaatttgcctagcattgttgcacctgggtagaaatgggactcaggccaagaattcgg

SEQ ID NO: 194223 - DNA, 122 bp, Homo sapiens
acatgcacaataaaaggtccacctctcatcccttaattgtgttcccatacaaaacaagcccgccaacaaaaatccaccctacacatcttaaacatcactgaacaaaactgctttttaagtat

SEQ ID NO: 194224 - DNA, 122 bp, Homo sapiens
atcgagaacagagacccagggagcaggtctagctgtataattaattacggtaatagtcgccgcttgtgtccagtgctgcctacttgctaggctatgtgctgaggcttatttatggattcccc

SEQ ID NO: 194225 - DNA, 122 bp, Homo sapiens
gtgcagcccgtggctgagaggcggctgctgaggggccgggcgggctaggggccggctagccgccgttcgcccctgctttgcatattcatgaagtctagcgaggccggtcgcccaggctagcc

SEQ ID NO: 194226 - DNA, 122 bp, Homo sapiens
ggacttaacccctttgccccatccctgcagctggccagccgatgtcgagatgctaggatccgcctcctcctggctcagtgtaatggtgagatgtgtggagaagagcggggcccagtgcctgg

SEQ ID NO: 194227 - DNA, 122 bp, Homo sapiens
tcctcccgcgagcgcccgccgccttcgctccccaggccccagctgagaccgccaggaaggcgggctcctcgaccccagatcataagaggtgtctgggaactaagggtgggagggggccaggg

SEQ ID NO: 194228 - DNA, 122 bp, Homo sapiens
cgccaggaccaggctctacccgaataagagatggtcccacggtgcttaaacaggtggttacgctgttgtctttttaagttttttggcagtaaaaaggaaactaaaattaaaagctatataac

SEQ ID NO: 194229 - DNA, 122 bp, Homo sapiens
acaggagatagattatttactgcatgactgtgatgtttatcatccatactgttagttgtccgctttgaccatcctctgtctgcctctatctttaccccaaagagccgcgacaaccaaaccat

SEQ ID NO: 194230 - DNA, 122 bp, Homo sapiens
cgaagatgacgtgtatggaaactcatcaggaaggaagcacaggggccactcggagtcgcccgagaagtaagtttgtgtgtaaggtggagtctcaccgtcccccaggctggagtgccgtggcg

SEQ ID NO: 194231 - DNA, 122 bp, Homo sapiens
ggaagggaatttggggtgaagtggccgtaaaagtgtgggacgaaactgtttcgggcagagcggtgggaactcacctgaggaaagcatgggggaggagtcactaataagaatgagtggcaggg

SEQ ID NO: 194232 - DNA, 122 bp, Homo sapiens
atctctagtgatccacccacctcggcctcccaaagtgctgcgactacaggcatgagccaccgcatccagccttaccatcttcaactgaaccaaagatagaagggtagagctgaggccaggaa

SEQ ID NO: 194233 - DNA, 122 bp, Homo sapiens
cctgggtcctgacgaaagacaagttgatgagtgagttggtcgccattaaagtgaggctcccggcccggagcagcgcagagaccaggacgcgcagcctcgcctgcagcactcggccctacctc

SEQ ID NO: 194234 - DNA, 122 bp, Homo sapiens
gttgggggccgagggaacacggatgtggggtgcagaacgctgtagtggggacctccaggccggcttttgcttgcaccggagggaagaagaaactacactgcggggacgagcgtaagagtggg

SEQ ID NO: 194235 - DNA, 122 bp, Homo sapiens
tccggggaattctgggaaatgtagttcacacgctgcgcggggtaggggcacttccgctcccggggggcgaggttgctgcagtgcattcggtggtagtttggtgtcagtcctgtgtcttgtcg

SEQ ID NO: 194236 - DNA, 122 bp, Homo sapiens
ccgtctggcctgacatcctaagccagacaagggcgggcaggcatctgaaatgagcaccaccgcagcccagtcctggccggccgcgcttgggacggacacgcacgtggtgtactccagcatgg

SEQ ID NO: 194237 - DNA, 122 bp, Homo sapiens
gcaggagcagggccgagggccctggtgggaaggtcgtggcccactagggaaggctgggcccggggggtcaggtggagggcaggctgagctgcgagctgtgtcttcagcctacagcaaggcca

SEQ ID NO: 194238 - DNA, 122 bp, Homo sapiens
gcagcatcgcccaggttcctaaaacaatcttccctttacaaattacttttatatctactacgaaaggatgagctcttgtttaaatgtctaactgtgaacatcaagtgtgctgactggagata

SEQ ID NO: 194239 - DNA, 122 bp, Homo sapiens
cgcgcacctctccttggagtagagctgcagctgctgctcctgctgcttcttccggataaacgccatggagggtaggcgcgggcgggcgcagagcgcacaggcaggccccgccgccgcctgcc

SEQ ID NO: 194240 - DNA, 122 bp, Homo sapiens
tgcccctgggccgctcctctgcaccccgggagccctcccctgacgcacccgtcggtccctcggaagagccctctgccgcgcagccccgacaccccccgccccgcatccgcccaggcccccgg

SEQ ID NO: 194241 - DNA, 122 bp, Homo sapiens
tggcggccgcgggggtggggaggggggtggggcggcttcttgggcagcgccacacggcggcgcagtgatggatgttaacagcagcggccacccggacctctacgggcgcctctgctctttcc

SEQ ID NO: 194242 - DNA, 122 bp, Homo sapiens
caccaagcatggccgggactgctgcagaaccacgtgggtctgtttgcaatttacaaacgtcgcgactcgcccgcctgcagcggacaaaagtggccggggccgcttggggcccccatgctcca

SEQ ID NO: 194243 - DNA, 122 bp, Homo sapiens
gtgtccttaccctttgggctgaaggaggcatcctagtaccagggttccacgggcactatccgtattcttagtttctatcatgatagattatgctgggaacttgttccttttagcccactatc

SEQ ID NO: 194244 - DNA, 122 bp, Homo sapiens
ttctctcctcttctcactgaagctcttccgggaaaaacacccaaggatgactgagccaagcggctctagctggaggcgcccgggacctcaaagctggactccccggggactgagtccaaccg

SEQ ID NO: 194245 - DNA, 122 bp, Homo sapiens
tttaccattgcttaaccaaataccaagtcacggggaacccacagggggcgtgtggctactcgctcaccaagtataggggaaagagatagactgtttacaaaggaaacaaaagtctcagggct

SEQ ID NO: 194246 - DNA, 122 bp, Homo sapiens
cgctgggaggtcttccaggcaccgggccttacccacgagaagtcgaggcgtgttccagggcgcagttccaggaggctgggcaggcctgcaagttttggggcgtcaccgatctcccctaaact

SEQ ID NO: 194247 - DNA, 122 bp, Homo sapiens
tgcactcttgcccaggcccggtgagactctgaggacgatgtgtctaacctctgtgtctaacgggggtgtgtgctctccctcctctggcgaccatgaggaccaccccggcaggacaaggtgtg

SEQ ID NO: 194248 - DNA, 122 bp, Homo sapiens
tgtcgaggtcgccagagtgggctgaaccctcgggactgtcgctgtttgtgtgctgggtgccgggccgtcatcccaagatgattagcggcaggctttgcatgttgctcgaccccacccaccgg

SEQ ID NO: 194249 - DNA, 122 bp, Homo sapiens
aaaatggctagtttaattctgaaaacttctgacacaaatgttttaagaatatatcacagacgctagagggggcactctcaacggtttcttaaacacacacacaacaatccagacaaaggtct

SEQ ID NO: 194250 - DNA, 122 bp, Homo sapiens
tggccgcacaaggcgcagggatatcagaggcgctttgcagcgcttggcggtgctgtgtgccggatgccccagagcccggcgttaggatggcgggcttgtaggaagcggctcaaatcaactcc

SEQ ID NO: 194251 - DNA, 122 bp, Homo sapiens
gaagggttgaaggaggcctctaggatggcgacctttccctaagcagcacatcggtgttaccgggcaccgagagagaaaggtaaaaaggagaatgaagaggaataatgggaggtggggagata

SEQ ID NO: 194252 - DNA, 122 bp, Homo sapiens
cgcagtgaccgccgcgcggcagcctcagggttaggggactggcgggaagcgtgggccggtcgagtcaggagcgagcgctctcctgattggctgccggtccccaccgacctgagtcgccccct

SEQ ID NO: 194253 - DNA, 122 bp, Homo sapiens
cccgctccgggcggtctcaggtgcctggcggcctggggaaagcacctgggcaggtgggggcggggcctggggaggcgggtccctagggggcggggcctggccggcccacaagagcccgcggt

SEQ ID NO: 194254 - DNA, 122 bp, Homo sapiens
tttggatgttggcacaaggctgcctgcttgcattagaactcagccggcaaggaaagcaggcggctcaaagactgggtcagcctcagggactggatggggatggagctttcagaggagtggcc

SEQ ID NO: 194255 - DNA, 122 bp, Homo sapiens
ccgcccatgctgagcacacaagccccggagtctgctctgctgtccgccaatttgagaagccgtgtagacatatcagtatttaagggaaggaaagccatcggggagggggggagaggcaggtg

SEQ ID NO: 194256 - DNA, 122 bp, Homo sapiens
ttagcaggagcttttcggtaacgaccctgcacaccacctcccctccccgcacccccaaggcgcatcgctgatgctgactgtcacggtcatgctggtaggacccccaggcgcagacacgggga

SEQ ID NO: 194257 - DNA, 122 bp, Homo sapiens
cacgcctccgggtgagggttgctgcgtcgggcctacgtcagccgcgggaaattcccctcccgccaggctgctcgcctctcggctgggccagcactcggctctccccgctccgccccctgccc

SEQ ID NO: 194258 - DNA, 122 bp, Homo sapiens
gggaaggaagagggaagaggcagctgtggagaggatgaggttgagggaggtggggtatctcgctgctctgaccttaggtagagtcctccacagaagcatcaaagtggactggcacatatggg

SEQ ID NO: 194259 - DNA, 122 bp, Homo sapiens
tgttggaagtgggcttcctggtgcgggggtccccactccccaccctgcagcccctcctcacgtctctgctcttccggctgccaccaggctcccggcacgcggcccttcttccttctgagttg

SEQ ID NO: 194260 - DNA, 122 bp, Homo sapiens
ccaactttgccgccagtccccttgccctgtgcgcctcctccgcgtggctgttcctgaatacgctggtgtctgttcgcatcttttagaatacgctggtgtcggtgcgcacagcgcttctctta

SEQ ID NO: 194261 - DNA, 122 bp, Homo sapiens
cagcaggggcggaaattggcaccagggggctgggttgcgtcctagctgggcgttgcccctcggtgtgagcagggagtcgcttccctctctgggcgcccgcgttcttcactgccgtgtggagg

SEQ ID NO: 194262 - DNA, 122 bp, Homo sapiens
ccactctggccgttcaaaacacctgttgaggctgggtgtggtggctcacgcctctaatctcggcactttgggaggccaaggcacacgaatcacgaggtcaggagtttgagaccatcctgaac

SEQ ID NO: 194263 - DNA, 122 bp, Homo sapiens
gcccccgctctccgggcgctggacgcgggacgccgtctcctggcaacgcagacgcggagccgagcgcgcccgcaggctctttgctcagagctcagccctacatagatcggcttctgccatgg

SEQ ID NO: 194264 - DNA, 122 bp, Homo sapiens
acaatgtgtgggctcctgattggccgcgagatccaggagggctggctacaaaattgggcacggggataaaattaacaagtgtggcggccaagagcgtgggagggactgcaatgtctcaatat

SEQ ID NO: 194265 - DNA, 122 bp, Homo sapiens
ttacgcattcactgttcaactatttattgaacaactatttattgagcacctgctgtgtgtcgggccttcttctgggctcatggagtgagcaagatcagcatagtctgccctcctggaacagg

SEQ ID NO: 194266 - DNA, 122 bp, Homo sapiens
gaagtcaacacggcgtcgctgtgccgcatcgggcaggagacagtgcaggacatcgtgtaccgcaccatggagatcttccagctcctgaggaacatgcaggtaggaaggcgggcgcgcgaggc

SEQ ID NO: 194267 - DNA, 122 bp, Homo sapiens
aaagtcactttttaggagaggatcagagatccgcaggctcatttcactctataaatgccgcggacatctggttccaggacctggacagtcctctctggagactggtgggcccctccaacacc

SEQ ID NO: 194268 - DNA, 122 bp, Homo sapiens
ttcatctgggaggcaactgagcagcaccgtgaatctgtactctttgtgttatgagacatccgtgggaagcagaaacctaaaggaaaaaagagaccggccctataattcaagaacaagtctca

SEQ ID NO: 194269 - DNA, 122 bp, Homo sapiens
aggacgcgcgcggtctccttgggggagggtgcgggtgggccgggcgcgcatgcgcatgggcgccatcgcccgccggaagagcggcagcccaggcgctgctgctggcgccagacggcaccggc

SEQ ID NO: 194270 - DNA, 122 bp, Homo sapiens
taaatcttggaggatttgtccacaccttaagagaagaaaatccacgttagctggcagcaacggagatcccagcatgctggcatgcccaagtctgcccaggttcccccaaggccatgcccgcc

SEQ ID NO: 194271 - DNA, 122 bp, Homo sapiens
caggcatgtgcgacgacacctggctaatttttaaatttttcttgtgtaaggataaggcctcgctatgttgttgttttcaaactcctggattcaagcgatcctcccacctccacctcccaaaa

SEQ ID NO: 194272 - DNA, 122 bp, Homo sapiens
tccccagaaggcaatcttcacgcccactcaagacgtacttttcggatgctgcagcccaggcgtcctactgcacactaggagctgtggtcacctcgtccagaaaaaacaagaatgtggccaaa

SEQ ID NO: 194273 - DNA, 122 bp, Homo sapiens
cgcctcgctcaggaagtacttcgagggcttcggcgacatcgaggaggccgtggtcatcaccgaccgccagacgggcaagtcccgcggctacggcttcgtaagtggcccccgcgcccgggccc

SEQ ID NO: 194274 - DNA, 122 bp, Homo sapiens
tcccaaatcagggcctggctgctcagcacactagcagctattgtgccctgacattatattcgtgagtgtgcactgattgtgtcattcagaacagaggtgactggaagaattccatggaccag

SEQ ID NO: 194275 - DNA, 122 bp, Homo sapiens
ggaggagccggcagccttgggaatgctggcgggtggggtggaggcggtgggagccgcggccgccagcgaatacggcccagctgggggattagaaggcatctggctcagtttacaccaaagaa

SEQ ID NO: 194276 - DNA, 122 bp, Homo sapiens
aaaagtattcttttaaaaaaaagacattctaattcacaaagtcacttggctgaaagttaacgcttactgtttttagtgcctgggatttggcattaggcaaaactgctataagagtaaggaaa

SEQ ID NO: 194277 - DNA, 122 bp, Homo sapiens
aatggcccaaagctctatgttggctgacagctttgtgtcagagattcaacagcgccttagcggagtctattactaaaatacacagacccaggtctcatggtcctgtctgatgcttggccact

SEQ ID NO: 194278 - DNA, 122 bp, Homo sapiens
tcggatcaggagacaatgtcatcctttcatgtgaactcagagtcctgttcacactccacccgccccacctccccaccagctccctttgatggtgagagctgccccctaggctctcagctgca

SEQ ID NO: 194279 - DNA, 122 bp, Homo sapiens
tcgctcgttccctccctccggcgagggccgcctttataacaactgctcagagtgcgagggcgggatagctgtccaaggtctcccccagcactgaggagctcgcctgctgccctcttgcgcgc

SEQ ID NO: 194280 - DNA, 122 bp, Homo sapiens
gctgagctcctggaagaacttctggcatggatccagtgggctgagaccaccctcattcagcgggatcaggagccaatcccgcagaacattgaccgagttaaagcccttatcgctgagcatca

SEQ ID NO: 194281 - DNA, 122 bp, Homo sapiens
ggagagaaaccctatgagtgtaagcagtgtggtaaagccttcatttcttccactgccattcgtagacatgaaaggactcacactggagagaaaccctatgagtgtaagcaatgtggaaaagc

SEQ ID NO: 194282 - DNA, 122 bp, Homo sapiens
ggatactgccttggctcccatacaatgtgtggtctttagcgaatggcttctttgactcagcgcaatgtttttcaggttcatccccattatagcaccatttcttcttattgttgagtaatatt

SEQ ID NO: 194283 - DNA, 122 bp, Homo sapiens
tgtcccccagggcagaggtggggccctggctcagcacccccagaaaccacaaggtgggggcggaggatcctgcacctgaccttcaccttcgtgtggatcagatcagagcagaagttctattt

SEQ ID NO: 194284 - DNA, 122 bp, Homo sapiens
aatggcaagctgcttttaggatatgcagagaagtaagagcgagcaaaccagccaccaggccgggctttgttgacatgcaggacatcgtttgagatgtaagagcagctctagtagccctgcag

SEQ ID NO: 194285 - DNA, 122 bp, Homo sapiens
gtttgttcctcccagtgggctcgtggtctggctgggctcaggagtgaaactgcagatcttcgtggtgagtgttacagctcataaaagcagcgtggacccagagtgagcagtagcaagattta

SEQ ID NO: 194286 - DNA, 122 bp, Homo sapiens
ggataaggggacctcttccctggtaacagttaggtaagtcttagattttcaataccaaggcgagagacttgacaatctccatttgcttgaatttcgtgagaatttggtagactttctgaaat

SEQ ID NO: 194287 - DNA, 122 bp, Homo sapiens
tttgtttaatcacacacgctgtacattttccacgccctccccctctgccctacaggaatccgctgtacttctgacggcccataggtggcactgtagggacaggtaagtgcacagggagcgcc

SEQ ID NO: 194288 - DNA, 122 bp, Homo sapiens
tctgatgaaagtacacagcaggttcatcgtgtctctggcctatgcgtttgaaaccaaagccgacctctgtctggtgatgaccatcatgaacggaggtgacatcaggtaagggctgggccaga

SEQ ID NO: 194289 - DNA, 122 bp, Homo sapiens
gtggcctcgcggttcccgagcccggccacccctgcggggagcagcaccagtggtgcgctccggagcgcgcacacctccgacgactcccggctctgcaaatcctcgagagagggaggaggcga

SEQ ID NO: 194290 - DNA, 122 bp, Homo sapiens
ctgcatgttgcgcgggggtcggccgcgggagcctgggaggagcaggcgatgggcagaggccgacaatggggtccggatcatgacgacccagcctcccgaagagggggttgaagtcacgcgac

SEQ ID NO: 194291 - DNA, 122 bp, Homo sapiens
atcttcgccttcgctgcctgggccgcatgcctcctgggcttatttaggaagcgaagttagcgccacacatttggctccagaaatttgttctgacggcgcggccgacgccctgcagggtcatt

SEQ ID NO: 194292 - DNA, 122 bp, Homo sapiens
cagagaagcggtctgtatcaaggcgtatcagagtggtcaccctgctcctcggaatattcacgggcatttgcaaactctacagttggcccagccaaatttccagcaaacactggcaagggccg

SEQ ID NO: 194293 - DNA, 122 bp, Homo sapiens
tcaatagttgaattaatgatggcaggagtaaaaacagcaattgtgcacagcgactctccccgggtcccccaccccagccaagagggaacctgccaatcaggctgcgccaccaccaggctagg

SEQ ID NO: 194294 - DNA, 122 bp, Homo sapiens
attgaatttgtccttagctaagtttctttattttgtaatgtggtggtcacattgcagagccgcagagcctaggatctcatgatgcttctaggcctgtgtttttggcaactaaattgtgatac

SEQ ID NO: 194295 - DNA, 122 bp, Homo sapiens
acccgctcacaaataaggtggccctggtaacggcctccaccgacgggtgagtgttggtgccggagtttctgaggccctggctgcctggaaacatgcactggtgtctcgtcctttgcctccag

SEQ ID NO: 194296 - DNA, 122 bp, Homo sapiens
catagccggcagtaggagagcgtggactagtcgaggtggggtggccacgtgttcgcgcagcggcccggggtccagcggctctgctgagggaagagcctcagattcaacagggaaaaaccgga

SEQ ID NO: 194297 - DNA, 122 bp, Homo sapiens
tgggcgacagagccagactccatctcagaaaaaaaaaaaaaaaaaaaaaggagaaagcagcgaaaccacaaggactttctggatcttggcagtgggaaaagccagggtgttaaaggatgtgg

SEQ ID NO: 194298 - DNA, 122 bp, Homo sapiens
tgtgaggcctacctggtgggactcttcgaagacaccaatctgtgcgctattcacgctaaacgcgtcaccatcatgcccaaagatatccagctggcacgtcgcatccgtggggaaagggcata

SEQ ID NO: 194299 - DNA, 122 bp, Homo sapiens
ctgaatcctacgtccactgaagaacggtagaacccactagccatggctgtgggggtggggcgtgcagcacaaaggtggctgccagggacccactctctggctggtcaggcagttcctagaaa

SEQ ID NO: 194300 - DNA, 122 bp, Homo sapiens
ctgccattttcagctgcccggttcacggccgagtgttaaggcagcgctgagaagctagtccggcgtgtgatcttccacaaaccgcggtgctgtcactgcagctggaaaacgactcggtgagc

SEQ ID NO: 194301 - DNA, 122 bp, Homo sapiens
tgctcaccctgtgggcctcaaatgtggagcactattctgatgtccaagtggaaagtgctgcgacatttgagcgtcaccggtgacgcccatatcaacggatgccgtggagctcggtcttctgc

SEQ ID NO: 194302 - DNA, 122 bp, Homo sapiens
gtaggttccagtgactgcaggtatataagctttgagggtctcagccctgccctcttccaccggctgtccctcctgagtctgcgtgagaacaatgtggggttcaaggccctggctgaccagat

SEQ ID NO: 194303 - DNA, 122 bp, Homo sapiens
gacccttgagggtctgtgagaaatcaaactttcggcactttggaagtcaggaaaccagcacgttgggggaggcgggatcacagttacttgctgagacaagctgccctggctacgttcactcc

SEQ ID NO: 194304 - DNA, 122 bp, Homo sapiens
atttgtgtgtgttgtgagtgtgtgtctgtgtatgtgtatatgcatgagtaagtgtatttgcgtgtgtgtatgtgtggatgctatctgtatgtgtatggctataaaggacttctctaatttct

SEQ ID NO: 194305 - DNA, 122 bp, Homo sapiens
cacagacacacacacacgcgtttataatctcccccaagtagttcatggatttatggctcccggtttaattaaattccgtataacgactatccaaatgggcagcacgcggcacagcgaacccc

SEQ ID NO: 194306 - DNA, 122 bp, Homo sapiens
gcgcgcaagagagcgggaagccgagctgggcgagaagtaggggagggcggtgctccgccgcggtggcggttgctatcgcttcgcagaacctactcaggcagccagctgagaagagttgaggg

SEQ ID NO: 194307 - DNA, 122 bp, Homo sapiens
caggtgggagggaggagtctgcgtagggacctgattgggagggtggacccagggtcatcgcgcagctagggagggtccccaaaggctctgtgtatcccgccccaggtttgaaaaggcttttc

SEQ ID NO: 194308 - DNA, 122 bp, Homo sapiens
ccatggtccatttgctccacagagcccgtctgcttcagaagccgtcctcctggcttctaacgaagatgtaaagtgaagcagcagcaaacgcaagagacacgaggcccctggcgggagggtgt

SEQ ID NO: 194309 - DNA, 122 bp, Homo sapiens
ccatccttctcctggtttccatctcccaagaggaccccttgaaatagcgattccgagaatcggctccggggctgatgagccatccagatacggagcttccgccgcactgtgtgaccgtgagc

SEQ ID NO: 194310 - DNA, 122 bp, Homo sapiens
gatgtgaaggtgaagacctatctgactgtatgagcactatggctctgcactgtccctcaccgactaccaagaggacaactggccccaccataactgggccctgtgctatcctccctgatccc

SEQ ID NO: 194311 - DNA, 122 bp, Homo sapiens
agcagaagctgtcgggggcaggccctctgtttaccggactagaagaccaactaagatgggcgcctgcgcactgatgagtgttcgtcagcggggcgcgcctgcgcagacttgtgcagcagctt

SEQ ID NO: 194312 - DNA, 122 bp, Homo sapiens
aaactgtaacaggaaatactggtagaatttaaacttctgcaaggttaaatgacacagcatcgccatcactactaaaaacaacagccctggtacgactgccaccaaaaccaacaatgccacaa

SEQ ID NO: 194313 - DNA, 122 bp, Homo sapiens
aagtgcagcgagaggaggaagttcggagaccggcgggtggggctccaggtccggggagggcgaggaaacgcgccggaagccagggtggcggtcgtcggctggccctcgctccctaggcggcc

SEQ ID NO: 194314 - DNA, 122 bp, Homo sapiens
attggggccccgacaaggtaaggggttggcatgaagctgcacagtgagataaagctggaccggagctagaacccagaatcaaagccttgccctgtgcggtttctcatcgcctacgcagtcgg

SEQ ID NO: 194315 - DNA, 122 bp, Homo sapiens
ttcggccctacgccctctcggcctttctctcgcgccccctccgcagatgaggccggagcgcgggcctgggtttggggcttcaccccgaccccacctctggcctggcccgcgcctcttcagcc

SEQ ID NO: 194316 - DNA, 122 bp, Homo sapiens
tcccctcttccgcatgcgcacaaggagcagaagccgaccagctcgtcacgtcgccttccccgcccctaaatttccagttccgattggtctgtttcatgggaccgcccctctggcccgaccaa

SEQ ID NO: 194317 - DNA, 122 bp, Homo sapiens
gcgagcggcggacccggctgggcccggcgcacgccgaggagagggagcccccgccaccgccgctgcctccgcgtgctcagcctgtccccgcccagggagccggagcctccaactaactccgc

SEQ ID NO: 194318 - DNA, 122 bp, Homo sapiens
cctcccactgtgggtgtgggggccccggcaggcacagaggagctcattcctcagctggcccgtaccggggcacccatcctggtgcaaaggctgttgtgtcccatggggcagggctgccccag

SEQ ID NO: 194319 - DNA, 122 bp, Homo sapiens
accctaggttccctgttcttcctccagctgcaccagagcaacctctcactccccatgccacgttccacagttgccaccacctctgtggcattgaaatgagcacctccattaaagtctgaatc

SEQ ID NO: 194320 - DNA, 122 bp, Homo sapiens
catcccagacagtcaggcagacgctgagctgtccgcgtcggcgtgggcgcctgtggccagcgtattgtgagatttctaaatgtcagggcactgttaaggaaatgtctgacaaacctgtagta

SEQ ID NO: 194321 - DNA, 122 bp, Homo sapiens
taaaattcaaaggcaaagtcttcagactcgggggccaggaagaccaggacagacagccctcgagtgggcgtcagtccagacggagaccccaccctgcaaacaaatgcgccacttagagctgt

SEQ ID NO: 194322 - DNA, 122 bp, Homo sapiens
aggaaagtgaggcaggggaagtctgattcccgagttggactcttagacataaacagataccgcttctcttgggagttttgctgcaacagcagcacagaggagagagagcagctcccagtaga

SEQ ID NO: 194323 - DNA, 122 bp, Homo sapiens
ggaggctggctggagattggggttagcgggcagggttgcccccactcagtcatcctccttcggaccgcttggccctggcaactcctgggacctccgccccgcgagcccttctagcgtgggga

SEQ ID NO: 194324 - DNA, 122 bp, Homo sapiens
ttggtctttgcatttgctattccttcgtcttggaaggctcttccaccaggctccctccttcgctttcttcaggtctttgcttaaaagttaccttttcactcaggccttccctgtttgggaat

SEQ ID NO: 194325 - DNA, 122 bp, Homo sapiens
ccccatcctcccgggtactcaccgtgccactggccctgcagctagctaccgttgctatagcgccgacagcgtggcgggcggctggccgagaggagcacgggagaaacatggcaggctcccgt

SEQ ID NO: 194326 - DNA, 122 bp, Homo sapiens
caatccccgcctttgtgtcgcagtggcgtcacctggcagcgctgggcgggcttcgggcaacgccaggcgtcacttcaggccacgcactttttcctcgcttcctctgccctttctggaaacaa

SEQ ID NO: 194327 - DNA, 122 bp, Homo sapiens
tgctttctccaaactaccagactcaaatctgcagcccagttggccaggaacctttccatacgcacgtatttcctgcattctcctgggtctgcttttaaaaattgctaccaccaaacaaatgc

SEQ ID NO: 194328 - DNA, 122 bp, Homo sapiens
ggggcttgggggtctgtgcagtctacctcccctgagaagagcagagggtggcttcccaggcggctgcgtagcacagagcagaaggccacgttggtgttaacctccccagaggggtctgggga

SEQ ID NO: 194329 - DNA, 122 bp, Homo sapiens
agaacacaaaagactgttttcagaagcctatggcagcaccaataaacaaacatctgaactcggtttagagttctcaagataatttaaacttccagcaaagtaacagctgccaataatgtaaa

SEQ ID NO: 194330 - DNA, 122 bp, Homo sapiens
tagatggcatttgagggccctccagctacagtacatgaggacgacttcctggcacggggccgggctgaggtggggtcagacacgggccggaggacgctgaccagcaggcagcaccgctcagt

SEQ ID NO: 194331 - DNA, 122 bp, Homo sapiens
ccgggctgccccctgcgagccgctgcgctacaacgtgtgcctgggctcggtgctgccctacggggccacctccacactgctggccggagactcggactcccaggaggaagcgcacggcaagc

SEQ ID NO: 194332 - DNA, 122 bp, Homo sapiens
cgcgcggacccggcagacaccgccattgctctgcggaggaggcaggtgggtcacagctgccgcgtctgaacggaggccgccaggagaatttgcttccctaggctccgcctcccgacgcgtca

SEQ ID NO: 194333 - DNA, 122 bp, Homo sapiens
tccacctgcctcagcctcccaaagtgctgggattacaggcgtgagccaccatgcccagcccgctaattatttcaatttgaccttgacactgagcctgccaagtaggttcaagcattttgatg

SEQ ID NO: 194334 - DNA, 122 bp, Homo sapiens
gcaggaattccgagtccggggtggagcgcgatgtggaatctgactcgcttgaaacagcaccgcggtggattcggatccgggtgagtagggaaatgcgcctcagcccctcccacgggccgccc

SEQ ID NO: 194335 - DNA, 122 bp, Homo sapiens
tgggcgctccgggggagggagctccaagggcagggtggcgggggagccgcagctcctccacgttatggaagaaaggggaatgctagccccctgcgcctccgatcttatcctaaggctaaaac

SEQ ID NO: 194336 - DNA, 122 bp, Homo sapiens
ggcccctgcagacttgctgacacagctgagtgcggagtgcatctagaccccaacatgaggcgcccttctctcaaaacaaatgagccttcgaaactccagcaaacagtgctaatgaattgccc

SEQ ID NO: 194337 - DNA, 122 bp, Homo sapiens
caggcgcatgctcagctgtccctgcaatgcggcgccttgtcctctattaacccagttccgcggattctgccgaccaggcactcattatccccctgagcaggggtcgttttctggctgtggat

SEQ ID NO: 194338 - DNA, 122 bp, Homo sapiens
cacacattgatctccctagacacccagttggtcccttcaactcagagacattgccaggttcggccatatacttctatccctgtgctatggattttcttctttcaagagttacagtcctgcat

SEQ ID NO: 194339 - DNA, 122 bp, Homo sapiens
cctgaagcccaggagcaagggataaccagtttttctctcctgcagtctggcctccaggttcgactgtgtttttgtcttgcccttctcagacaaacgtctatcttggtctccactctgtatct

SEQ ID NO: 194340 - DNA, 122 bp, Homo sapiens
actatgaaaatatagggacaaatgatgctactgataaaagtctgtctcaagaggcagtagcgagtacaagcccaagctttagacttggataaactggaatcaaaaggagctgtcagctaaaa

SEQ ID NO: 194341 - DNA, 122 bp, Homo sapiens
ggatgaagcgagctggagtggaaactatgtgccctcgatgggtctcgtgggggcgccgatcgtccacactgagcgatgaacccgacggagttctaaagctgaagacgtctgcccccgccccg

SEQ ID NO: 194342 - DNA, 122 bp, Homo sapiens
tgctcactctgcgctggccccgcccactcaccaccctggccaccgccgtgactggtgctgcgctgatcgccactgccgctgactacttcgccgagctgctactgctggggcgctacgtggtg

SEQ ID NO: 194343 - DNA, 122 bp, Homo sapiens
aagttaaatgatcctggctgtgccttttcctgtacataagatagcacctgacaggattgacgattatgcctctataatctatataactaggtgcatcctcgaacccaaaccttggcgagatt

SEQ ID NO: 194344 - DNA, 122 bp, Homo sapiens
accccactctcacctcttctactggtcaaaggtaagtgtgagttcagcctctccctcgtgcgtctctgacccttctctggttctctgggctgaggtctgaaggagccaaaaggggcccccct

SEQ ID NO: 194345 - DNA, 122 bp, Homo sapiens
ctcccacgcctgacaccgacgtcgccaggaccgcggggttgggggaacttggctgtcccacgtctttcaaataaagctgttttgtctaactcactgcatgcgggtgttcttggggccccgac

SEQ ID NO: 194346 - DNA, 122 bp, Homo sapiens
cagactcaaggtaagcaccttgcctgcgggctttctggtctccggatggaggcgtgggttcgaatcccacttctgacacattcgttttattagcattttattccccggaagaaaccccagaa

SEQ ID NO: 194347 - DNA, 122 bp, Homo sapiens
ccctaaggcctaaaacagcacctggcacatagtaggtatacaaaaagtatatttgcagaccgaatgaacgggatgtccctgggggtttaggactcagaaaaaagacctagttcagtcatccc

SEQ ID NO: 194348 - DNA, 122 bp, Homo sapiens
tcgcccccagcccacttcactccatcactgtcttccttagagtttatccagaaggcaagacgtggtatccaagctcagaaccaagagcccacagcatggtgtgagctctttctgcctcttgc

SEQ ID NO: 194349 - DNA, 122 bp, Homo sapiens
gcctttagttccctgggttctgtgtgccgcgttccatccaccctgaagatgaaacgcagccgcagaccaaagccttccctttgtccccgaggtggctgctgtgaagtcagctctgctcccca

SEQ ID NO: 194350 - DNA, 122 bp, Homo sapiens
agctccgattggctgagatggtgggaggggtgtgccggcccagaagacctggactgtgggcggtggctaccgcctgaaccacctcggttcctggggcttctggccgcagcccctcggtgcgc

SEQ ID NO: 194351 - DNA, 122 bp, Homo sapiens
ccgtggctcagtgcagcctcgaccttcggggctgaagtgatcctcccacctcagcccctccgccaagtagctgggaatacaggcgcgagccagcatgccaggctaattttttaattttttgt

SEQ ID NO: 194352 - DNA, 122 bp, Homo sapiens
ttcagcatcaatttatcttgggagctgctcctgcattttataaggtgaattctacagcaacgagattaaagattcagaaagtgagtaaagttaacactgagcccttgggcctggtaaattga

SEQ ID NO: 194353 - DNA, 122 bp, Homo sapiens
gtcatttcttctagtaattcccactcacagaacgaggttttacaaggggacatgtttatacgcaaggacaggctttaatcaaatatatatgtatatatatgtatatatacatatatatgcac

SEQ ID NO: 194354 - DNA, 122 bp, Homo sapiens
gggggctgcaaggaaggtgccgactgccccccagggagggcggtgggcgaggggcagacacggctaggcgctccagcccccttcccacaccacatacccgatcttcacagccaaataataac

SEQ ID NO: 194355 - DNA, 122 bp, Homo sapiens
tgcgcttttcagaccggcttaaaaagtggcgaaccatgagattatatcccacacctgtctcggagggtcctacgcccacggaatctcgctgattgctagcacagcagtctgagatcaaactg

SEQ ID NO: 194356 - DNA, 122 bp, Homo sapiens
gggccaggctgccaaggcggctcccctgtttatctagagccttcgttcctggccataccccggactgccctcctgtgcctgatgtccccagctggggtcagtctcaacaggagccagtcttc

SEQ ID NO: 194357 - DNA, 122 bp, Homo sapiens
ttcatccacagcattgctttgtgggcgtcctctcttttgatcttctcgaaacagcccctgcgatggggtcatattttgcactcacatacaagaacccatgagcctgcccacggtcacgcggc

SEQ ID NO: 194358 - DNA, 122 bp, Homo sapiens
aagctgaacatcttgcatgaagatacctcatgctctgcctgccgaccttttctgcagccacggagcagtcagagacaaaggggccaagaggccttaggtgagggctgccatgctggaaagtt

SEQ ID NO: 194359 - DNA, 122 bp, Homo sapiens
aagtgaaagaagtcagatgcaaaaggcattatggcaggataaagaacatggtaaaccacacgctggctcctgtaacttctgcctacaagtaacaatgcttttgcttctatgtcagcaatcag

SEQ ID NO: 194360 - DNA, 122 bp, Homo sapiens
ggtaaagcacgattttcactacatcaaatcaaaggtgctctcagcatgctttatcactgtcgatgttttggccttgatcacctagctgcagtagcgttggtcaggtttctccactgttaatc

SEQ ID NO: 194361 - DNA, 122 bp, Homo sapiens
gataaaggggccaaggagcctggggcctcttgcagtgaccaacgacgcctacttccttgccgcagccccagccccctttaaggcatgagatgcccaaaaaattcacttagattcattcactg

SEQ ID NO: 194362 - DNA, 122 bp, Homo sapiens
cgggcgcactgcgccctctgttgatcctcttaggagctgcgtggggaccgtcgggcctgccgtttcgcacctggccgaaaggggtcgctgtgccgggccagatcctatgtaaatttagctgg

SEQ ID NO: 194363 - DNA, 122 bp, Homo sapiens
caatggcgacagagtggtcacccgggaaccggatctgcgcggctccgtggccgaaagaggcggccaagcctgcttgcgtccctaggccgccttccgggccgtccacgccttaatggcctccg

SEQ ID NO: 194364 - DNA, 122 bp, Homo sapiens
gtgcgtgccctttcatgaccttcatgagcagcgtgatccactgcggggagctgagggcgccgcacacctgcggcgtgagagcgatgctccgcacaaaccccagcatgcaccagctccggtgt

SEQ ID NO: 194365 - DNA, 122 bp, Homo sapiens
aattacatagcaagtacttacatagtgctgagcatgtgccaaacaatggttttcatacttcgtatagattcacttatctaatatctccaaggagaagtgacttgctaaagcctcaagcagcc

SEQ ID NO: 194366 - DNA, 122 bp, Homo sapiens
taacacgaaacaaggtagacgtggttcctgatttcccagtatgctcatataggggttggtcgcattagtgatatgggtgctagaatggaagaagtaagatcacatagcaggtgcgcctagtt

SEQ ID NO: 194367 - DNA, 122 bp, Homo sapiens
cgcgtccggcgcggtcgggccctaggccgggaggccctcgtgggtggcccgaggccggcccgggctcaggcagggccatgtcatccttcaggtgcccagcaggcactccccaccctaaacct

SEQ ID NO: 194368 - DNA, 122 bp, Homo sapiens
aatccctccaatgttatttaatgaacaattttaaaaaatattttagatttttgatgaatacgtaggaatatgaaaatctgaaattgtgggagagctctataaaagatggcttttatcttttt

SEQ ID NO: 194369 - DNA, 122 bp, Homo sapiens
tctgcgctccgactgacccagactgacccaacctccgctgcggcacttcctgctccaggccgctcagacctcgggcagcagcctattcgattgctaagcgctgtggttaacaaggtgttttc

SEQ ID NO: 194370 - DNA, 122 bp, Homo sapiens
cgcccactcccgggacacgcccaccccgggacacgcccacccccgggacacgcccactcccgggacacctctacccctgggacacgcccacccccgggacttgcccacccccagaacacgtc

SEQ ID NO: 194371 - DNA, 122 bp, Homo sapiens
cgtattcattgcatcattttttgtaaaaagctgagagaagtgcccagcaacacgtcgtgccgcgcgtgtgcatggaacaccatatagcctcaccattaataggcaagatgagcgagacccat

SEQ ID NO: 194372 - DNA, 122 bp, Homo sapiens
gctgcatctgctggctccgagcggcgagaggttctgcaataaaggcacggataaaacgcccgggtaatcgaaatccgaatgcacctcttaccattggaccgccgaacaatattctccagaaa

SEQ ID NO: 194373 - DNA, 122 bp, Homo sapiens
gggggaagtcagaaagcacctcgcgagcctggagcactctctgcctcagattctgggagtcgtgtacggggggggggagccgcctgaacacgggaagaagcgccgcctctgggggtggcagc

SEQ ID NO: 194374 - DNA, 122 bp, Homo sapiens
gcagcccagaccctgagactggactaggtctgttagggtccctgtgtggccggcaggactcgtggtgaagcccggggaaggcctgggtcctccaggtcagggatgtaggtcccagggtgtgc

SEQ ID NO: 194375 - DNA, 122 bp, Homo sapiens
atctctggctcgtgtggtcgtgccaagggtgccattgcggatggacggggccatgcgggccgggtcggcctcctggggagaaacgggtgggcgcaaggggatcggcgccatcgagggtggag

SEQ ID NO: 194376 - DNA, 122 bp, Homo sapiens
agaatcgccgtggatgcacacaaataagcggcctacaaaatggagtcgcagccgtcaactcgccctcggcctttttgcggccctttcacgacagagccgggcccctttacggtcacgccttc

SEQ ID NO: 194377 - DNA, 122 bp, Homo sapiens
atgtcacagtgcccccaggggagctgatggagacaacagagagctgaagaaggccggatccgatacttggctgttgcattgcgatgcctccatcgacacgtgatgacgcgcagcggcgacac

SEQ ID NO: 194378 - DNA, 122 bp, Homo sapiens
cctgaagccggagaaataaacttaacatgaatcttgctttcctggcgggcgttgggaccccgccgtttttcatgccaaccgttggaagcttcgtactcaacggccacaggtgcctaggagcg

SEQ ID NO: 194379 - DNA, 122 bp, Homo sapiens
tgagaccctgtttcaaaaaaaaaaaaaaaaaaaaagaaggaagaaactgaaagagacaggcggcatgcagaatgtgttgttcaaggaatgttggaatgttgagttgttgagtaacccaacat

SEQ ID NO: 194380 - DNA, 122 bp, Homo sapiens
cattgagagcaagtgcctgcttccctagcctgccccaatgacattgaccatgaggggcggcgaggtggcctccctgtggcaaggcaccaggcgggccattctcaagtcctccagagaaacag

SEQ ID NO: 194381 - DNA, 122 bp, Homo sapiens
caactcaaaatcattcactgtttccaacttccaagtgacgatttgagggtatattccacacgtttaagcccaccaaatcactttaatttaatcaatttccttcatttgaccatttctcctct

SEQ ID NO: 194382 - DNA, 122 bp, Homo sapiens
gtagagcacagcgcttctggatgccctcagacttgcatctaattctttctccagatctaacgcctctgtttctacacccaggggaacctctccccagggactgcgcgcgcgtgcgtgcaggt

SEQ ID NO: 194383 - DNA, 122 bp, Homo sapiens
tatctagaacaaaggctcccggaaagacctctctcgtgaggagattgggagccttcttcccgccagggaactggcggttcgccgcctcaacccgtcttaaggcacagaaaatcataaaaaag

SEQ ID NO: 194384 - DNA, 122 bp, Homo sapiens
aacgcgtagggcggggcccagacctggatccagctagccgggcggtgtggggtgcgcatgcgcaatgtccgcttcggctctaggaccgcgcgggcgacagcagggccgcggtgcagtgtccg

SEQ ID NO: 194385 - DNA, 122 bp, Homo sapiens
ggccgcgattcctcgcccgggccaggtccgcggggctagggcgtcgcccgtctggggcggcgccgcccagagccctcgccccaggtatggggacccaggcggctttgttcggagcccggcct

SEQ ID NO: 194386 - DNA, 122 bp, Homo sapiens
acttaagagctccgattctccccgtcgcccctttccatcccctcgacccacaaagggctccggtgtttcccgccgttcatgcagcgaaaagagaaagcaaaatgccctcaggaggctccagg

SEQ ID NO: 194387 - DNA, 122 bp, Homo sapiens
tcccgctactggttgccctcctaccactgtcgacaccaccaactgcagtgagccagtgtccgaggctccagccagaaacaggtagcagccatgccggataccaaacgcccacacttaagagc

SEQ ID NO: 194388 - DNA, 122 bp, Homo sapiens
aagtgggcgaaggggtagtttagtcctgtccatcagccagtcacgttctttggccaaactcgggacctgcctgtgctttgtccatggtgtccaggaagaaatctgtgtctgtcacttccaga

SEQ ID NO: 194389 - DNA, 122 bp, Homo sapiens
ctgcagctgtgtagctggcgtccctcctcgacctcgcagctggaagtccctgcctgagggcgccctctgtgcagcccacttctggctgagtccagacctcaagaaccccatcagctatccac

SEQ ID NO: 194390 - DNA, 122 bp, Homo sapiens
ggaaagcagaagtgtcctgaggaggagatagagctaggggaagaatgctggcggcttctccgggcctgcccctgggcctttccagagactctgcagaatttccacccttaactttcaggaga

SEQ ID NO: 194391 - DNA, 122 bp, Homo sapiens
tcaggaaagccaagggaggaaagtatctgtgaaaggagtggtcagcgggtcaaatcacaccgtccccttaggggttttttgtctgctcccatagtgccacgggcaggcctctaacctgcgtg

SEQ ID NO: 194392 - DNA, 122 bp, Homo sapiens
aagagagtttgcagcccctccaagctgacagcgcttgcatttatttagtgcagatttaatcgacaaaggctttaagtcaacacacctgtggataactaacctggttgcccccacccctgaga

SEQ ID NO: 194393 - DNA, 122 bp, Homo sapiens
tcagtttcgtggggagccagggattagctagtgcggccatgcagggtagccccgtggatgcggtcacagcttcttgagtttttcacagcccttgtaccccatcagtacagccatcctagtaa

SEQ ID NO: 194394 - DNA, 122 bp, Homo sapiens
ggtactcgggcatagggcggggacgcgtcagcctggggtggccggcggcccctagcccggcggctgtggtgcacttgaaggtgcaaggccatgagctctggggctccagtggcgaacgggca

SEQ ID NO: 194395 - DNA, 122 bp, Homo sapiens
ctatacttctcatgtagatcagccacattgtcactggagactcggatccagccatcctcccgcacgtggtagaggttgactgcacctcctgagtaggcatctctgtaggtggcttggtagat

SEQ ID NO: 194396 - DNA, 122 bp, Homo sapiens
gagaggtgggcaaagggcagcctggctggagtggccacagacaggggccccatgggcagccgggacccgagcgtttcctgtggaacgccccttggtgcctcactgggggtgaccacggggga

SEQ ID NO: 194397 - DNA, 122 bp, Homo sapiens
cagcgttccggccgggtctggatctgagctcaggaacgcggggcagggctggggacagctcggtgacgcgacccagggtcaggataacatgcagggcggggatgggctgggagggtcagtct

SEQ ID NO: 194398 - DNA, 122 bp, Homo sapiens
cgctcccagcctccagctggaaaccacgcggtggagtgggcgcttgcgcagtgagcacctcgtgccccacgcccgtgtctcgttcttttttgtgcttgtttcactttgcataattttagcat

SEQ ID NO: 194399 - DNA, 122 bp, Homo sapiens
tccagtgtcatgagagtgagggccaatcgcagaacttaatctgtaccttgatcttagctacgaggggttgtgggatgcgtagggcttggtcatcactgttgctggatctttttttttttttt

SEQ ID NO: 194400 - DNA, 122 bp, Homo sapiens
agtgctgcgcagcctcgggcacgaacagccgcctagcgcaccctcatggcgcccggcgcccggcggcgccaccagcccagggtggacatctcccgcgcctcccaaacctctcctcccgcagc

SEQ ID NO: 194401 - DNA, 122 bp, Homo sapiens
gagcgccgccgcctgcgtggggggatctggcagcttcaggggctgccctgagctccctggcgagcaggagtgagctgctgcggcgagtgagcacccggctccccaaccctctccttcctggg

SEQ ID NO: 194402 - DNA, 122 bp, Homo sapiens
ccgggcggggcccccagatagctgaggcttttcaagcagggctgctttcagaagttagctcgcttttaggcattttcacgtaacccaagaggctcgaatttgccactttcatttctttcgtg

SEQ ID NO: 194403 - DNA, 122 bp, Homo sapiens
cgtggctgcccttctgggcctgttgctgctgactcacgttcccacggccacctttccctgcgtctggacgtagtagcaatttctcgttggatgtggacattgtgctgtgaccgctttgatca

SEQ ID NO: 194404 - DNA, 122 bp, Homo sapiens
cttcccttcagccttagcctcagcgtggacccgggactcctgcatcctcccgtcctgccccgcctgggcacaccacggccgagagcctcctgttggcatcagcctctccccagcaccgactg

SEQ ID NO: 194405 - DNA, 122 bp, Homo sapiens
ccccggggcacttacagtcagcccatctctgtcctggtcaggtgggcgccaaggaagacccggctcagggcctctgtatgggcagcctggcttgtacacacacccctccccaccagcagatt

SEQ ID NO: 194406 - DNA, 122 bp, Homo sapiens
gtggacgagacactcacaggtggcgtcacggtttcagagggcagcagcatgttgtacggccgagtcggtgcactgtgttactagcattttctttttattttctttctttttttttttttttt

SEQ ID NO: 194407 - DNA, 122 bp, Homo sapiens
gttacactcctcagcctcctaacagctgtacggctgcccggtggtccctctccaaggcagcggctctcaggctagcctcagcctaccccacccgcccgcaccccgtgttctccctcgtgggg

SEQ ID NO: 194408 - DNA, 122 bp, Homo sapiens
acagctactgggaggaatgatgagcacatcaatcggtgactactcataggggcttgggaccgtgttgcctggcacatgggacgcgctccacaactttgtctcctggatgaaatggggacatt

SEQ ID NO: 194409 - DNA, 122 bp, Homo sapiens
gagccaaggaacacaagctgaggcgcgctgcagcggtaattaagctgtctgccagggccccggctcataggctaagccgccggcgcggggagggcccgcattaacataaaccctgtgacttg

SEQ ID NO: 194410 - DNA, 122 bp, Homo sapiens
taacctgtcatataaattatgaggagtgcctatccctaataaaagaataaaggcaagtcccgaaagggaagccagaggagggctagaaatctaacttgttcactcactcactgtagagcaac

SEQ ID NO: 194411 - DNA, 122 bp, Homo sapiens
catctaccccgcggcccctcccgccagctcgctggggcgtcctgcaggccaggctccgggcgctgtctgctcctgcgtggtcccttccgccagctcgggcgctgtctgctcctgcgtggtcc

SEQ ID NO: 194412 - DNA, 122 bp, Homo sapiens
gacagctgggcactcacatcttgcatggcccgagtgcggtgatcagaattgatctggtcccggagctgaaaaaacaaacggtgacacaaacgccgttagtttgcgttctggagtagaaaagg

SEQ ID NO: 194413 - DNA, 122 bp, Homo sapiens
ttcagggacagctttaaagacaggttcctcctcaagccaccgtcacatgattcatgacctcgtctgcgctccaggaagcactttctaagccgccgtcgccctacgatacgggatttccggag

SEQ ID NO: 194414 - DNA, 122 bp, Homo sapiens
aaaggagaatgcaccaccaagcaattagtttcattgtattgtgcatgggatggcatcgcccgctctggaacggaagaggagaggggacatcccggcactgggagtggggagggctgagaggg

SEQ ID NO: 194415 - DNA, 122 bp, Homo sapiens
tagataggtgccctttgggcccttgaaattcaacggctatgtgttcacgttcagcacgctcggctgagagctttcatttttagggcaaacgagccgagttaccggggaagcgagaggtgggg

SEQ ID NO: 194416 - DNA, 122 bp, Homo sapiens
caattagtttctggtgaaacgtcctaaatccaaaagaaaggtgaccagaaatagagaaaacggagtgtgatcttttgcattaatgagagagaccgtgtccccgtgtgttaaaacctgtcatt

SEQ ID NO: 194417 - DNA, 122 bp, Homo sapiens
tgtacccacaggacagtctgattcccagggtcatgccgtcatacaggtcctttaaaaacacgctggtgattcaagacaggaaatcagaatcctttaggatttcgatgcttaccgtgtggtcc

SEQ ID NO: 194418 - DNA, 122 bp, Homo sapiens
agagcttgtgccgcggtctgtgggcgcgggccatgtggtggcgaaggtacgtgcagttgacgctgactcaggctacaacgcgtggctttcgtatgagttgcaaccggtggcggccggtgcga

SEQ ID NO: 194419 - DNA, 122 bp, Homo sapiens
ccaatggaggggaaggccactctggtctgctgacagttatgtgcgggtacaggagcaaaacggactggtggaagctttgctcccaggaattaggaaggcatgggataaggacagccatggga

SEQ ID NO: 194420 - DNA, 122 bp, Homo sapiens
ccacggtgacgcgggtcagctccaggccatgcgtggtgtagcacatctcacagtccaaggcgtagattcctggataagcgtctctggacaactctttcttgaaggtctccacgaagccatcg

SEQ ID NO: 194421 - DNA, 122 bp, Homo sapiens
ctgttcctgtggaactttttacctgcttctgtgaaaactcacgctgtcctcagcacagcacgcacacacacgcatattcacgcatgcacaggcacacacgtgcacatgcccacgcgtgcaca

SEQ ID NO: 194422 - DNA, 122 bp, Homo sapiens
atgacgagtttaactcctggacttccgcttccggggtgcccaggctcccagaaatcctcgcggcaaaggttaaacacgtgactactccctagtgggtgtggccgcagcgacaggcttgggtg

SEQ ID NO: 194423 - DNA, 122 bp, Homo sapiens
gaggaaatgacgtgatgttatttttgtgtcaggtcagtttccagcttcagcttagccctccgggctccagggaactaaccccgcggccccaccgggtcccactcccgaagggacgctgcggg

SEQ ID NO: 194424 - DNA, 122 bp, Homo sapiens
tgatgacctgcttgcggttcaaacccactcagtgttgcagggatgggctagctctgagagcgttaacagtcactgttgcggtctctctccattggctctaactagtagggcgttttcttcct

SEQ ID NO: 194425 - DNA, 122 bp, Homo sapiens
tggcaggactcttgatctattttacctgggtatgccagacagatgatgtaatctgtcatacgcatcatggcagaagtagggcctgctgcaccatctgggctgtgatctctgactctctggct

SEQ ID NO: 194426 - DNA, 122 bp, Homo sapiens
catcagactacacctgcctttgcaaatgtccgcatacctgtggttctaaaggagccccgtcgcgagctccgtttgatatcttgtcgcctcaaaatctaaaatcatggccacgtgtaaagacc

SEQ ID NO: 194427 - DNA, 122 bp, Homo sapiens
catttgaacagtggattgcacggcaatcttttctctcctgggaaagaaggttagagaatacggtggtggtttaaaagtatgggctttggccctaccacaagctaagtggcttttggtttctc

SEQ ID NO: 194428 - DNA, 122 bp, Homo sapiens
atcggggaaaaaaaaaaaaaaaaaaaaaaaaaaaaaaaaaaaatcgaagagccccggggacgcctgggaaatgaagttccgcgtctaggggcgggcccaccagtcccaattgacgcatgagc

SEQ ID NO: 194429 - DNA, 122 bp, Homo sapiens
ccacgggcatgaccgggaagggcacacggagccccagggtggcagcaacgccacggtacccgctcagctgtgcctcacaactgggccagcaggggcttctgcctggacggctctcccagacc

SEQ ID NO: 194430 - DNA, 122 bp, Homo sapiens
gggcagcgagggaggcaggggcagggagtgaggggggcgggggcagggagggaggcggggcggggagcgagggcactgcactgagcttttcagtccctgttgctcacacacagcatccagtt

SEQ ID NO: 194431 - DNA, 122 bp, Homo sapiens
agctgtgcacatatagagactgttctagatgcaggagaagatgcctcctgccctgtgagccggcaaaaaggaggccacagccataaggctcggactgatgggccactcaatagtccacaacc

SEQ ID NO: 194432 - DNA, 122 bp, Homo sapiens
agacacggccatagtcggatttaggttcattctaaaagtgatctatctggatttggacaacgaaacaaacacctgccttaaagcaagtaatacgctgagaataagcgattctgtagctacaa

SEQ ID NO: 194433 - DNA, 122 bp, Homo sapiens
aggagggaagggaaatatcccacctctcctcttccgccttccagcctcatctgatgcttccgatgggctgaaacctgcaagaaacccagcctgcaaggtagcccaggtaatgctgtccatag

SEQ ID NO: 194434 - DNA, 122 bp, Homo sapiens
ccggcagatggatgttcagagcagggagcatccatgttccaggcgtgcgggcacctgtcccgccggacgtggagcgtgcaagtcagtgggcagcagcccaggggacacagagcccccaagga

SEQ ID NO: 194435 - DNA, 122 bp, Homo sapiens
ttctctctggctctggcctcctggggctccctgcagctgaggccaaggctggggtgtggccgcctccgcggcaggccggcgggctgggctcgggtgggccggggcgctccctcctttccacg

SEQ ID NO: 194436 - DNA, 122 bp, Homo sapiens
tttgactcagtgggtatgaaaaacttagagatcaaaggaatgtgccctcttggaagagagcgagctccctgtcactggagatgttcaaataaagttggctgagcattgaacgtgggggagag

SEQ ID NO: 194437 - DNA, 122 bp, Homo sapiens
aaggcaagagatacaatctaaactacaaagagaacaaaagctaacccctaccttggcccccggagtaagagatatcattctgaggaacaccaagtggaagcctctaaaactgcccccctccc

SEQ ID NO: 194438 - DNA, 122 bp, Homo sapiens
ttcccaaaatcttgttacttttgcacaacttaaagatcccccaagtctttcccaagagaacgctttgtcccattgcaagtcagttgtttgacagtggagttggaaacatgaatcagtatcac

SEQ ID NO: 194439 - DNA, 122 bp, Homo sapiens
agcgcagcttcctcctctgtaaaatggggatcaaaccgttcccacccgatagggagagggcgcacacctgcattccaggctggatggatccctgggcagcggggtcctccccgcccagggcg

SEQ ID NO: 194440 - DNA, 122 bp, Homo sapiens
tcacctctctgtgcctcgatgtcttcatctacgatacttctggttccctcccagggacatcgtgaggattaacacttgctaatatctgtaacacaatttgtaacctctcaggagacaatggg

SEQ ID NO: 194441 - DNA, 122 bp, Homo sapiens
tcatttgttcaacaaatatttattaagttcatgatgtgtcccaggcactgttctaggtaccgggatggaagaaaccaaccaaaccacacagacaaaaacccctgctctcatggggctcgcat

SEQ ID NO: 194442 - DNA, 122 bp, Homo sapiens
caccgtgagatctccatcatctttagctcagatcctctcaatcatcctaaccccgagggccgatggtgagactcacaggctaacatttatctctggatgccgacaggatgcctggtatctgc

SEQ ID NO: 194443 - DNA, 122 bp, Homo sapiens
gaggaagcttctccctgggagcgagctgtcttgccacaggcgccaaatcatcgcagaagtcgacgcgggtctcagttgagagttgtgacttctcagggagagaagtccgctggatttcagca

SEQ ID NO: 194444 - DNA, 122 bp, Homo sapiens
ctgctgcgggaggcgggcagcgggggccgcgagcgggcggactggcggcggcggcagctgcgcaaagtgcggagtgtggagctggaccagctgcctgagcagccgctcttccttgccgcctc

SEQ ID NO: 194445 - DNA, 122 bp, Homo sapiens
cctggcatgacccctgcctggctttcaggtccaccctgagaatgaagactggacttgcttcgagcagtctgcctcactggacattcggtctttctttggctttgaaaatgccttggagaaga

SEQ ID NO: 194446 - DNA, 122 bp, Homo sapiens
tttgacctttgacttggggttttatatgttggcgtacttccggggtcctgcgtcccttctcgcgatttttcgcgtgggtggggctgtctgcgtgcgctggggcctgccagcctttgggaggg

SEQ ID NO: 194447 - DNA, 122 bp, Homo sapiens
gcggaagacgagaggcggccggccgtgagggaggcgccctccctccccgcgcttacgtcgcgcggccatgcggtttgggacaggacacccctgagagtgcaggcacctccccctcccgcccc

SEQ ID NO: 194448 - DNA, 122 bp, Homo sapiens
ccttatggaacttcaggggccacactgagtggaagtcagtgtgctgttcagaaaactcatcgtgatgcatgaatggtgttctctcaccctgcttccaagataatcaaacagctggttatctt

SEQ ID NO: 194449 - DNA, 122 bp, Homo sapiens
ctgagaggccactggagggacgcaccgactgggggaccggaaagcaagggggtggggttccgccagggtccgcgtgtcagtcccctctggtgatctcgtcgccccttctctcccaggcaaca

SEQ ID NO: 194450 - DNA, 122 bp, Homo sapiens
gactttgtcagagcaggggtggggagaagggaagaagaacaggggagaaagattatcaaacgaaactaacttgtccagaatcgtcagtgagttggtgcaaagctcaaaatcaagatcaagtc

SEQ ID NO: 194451 - DNA, 122 bp, Homo sapiens
gaacatcatgtgaacattctatcattagaagctcaaaccccaaaggcagtgaaccgcctccgtgatgaggggctctagccagtcagcgtacgcgtcttcccttccacccagcacctgccaga

SEQ ID NO: 194452 - DNA, 122 bp, Homo sapiens
catgcacacacagggcacaggtacacgaaggcacacgtgcacacacagggcacaggtacacgcaggcacatgtacacacaggcacacgtgcacgcaggcacacgcatgcaggcacatgtgca

SEQ ID NO: 194453 - DNA, 122 bp, Homo sapiens
tcctcctcttactcttgttcatcagcccacttagtgtgaagacaaggatgaagacctttacgatgacctaattcccccgaaggagtaggattttctcttatttatgattttcttaataacat

SEQ ID NO: 194454 - DNA, 122 bp, Homo sapiens
tgtgacgaaagtgcagggacaaagcacaaactcggctctggtggaccggatacggaaaagcggtgccttggggagggcgggagcaaattcgctttccccacagcgcgtgcgccgccgcaagc

SEQ ID NO: 194455 - DNA, 122 bp, Homo sapiens
ttccttgaaatgtcttgtggcaaccagtgacattgatggtttcatgaatggacttcctaccggtagaccctgcaagagcatgaactccactgtatcattcatccaaatgaagaaagaaagaa

SEQ ID NO: 194456 - DNA, 122 bp, Homo sapiens
aaaggcgcgtgcgcgactgggacatgggatgggtgcatgcgggttgggggaagggagggacggatgggagtgggctactgtggatcactgtgtcggctacatcgaagtttatcagtggggaa

SEQ ID NO: 194457 - DNA, 122 bp, Homo sapiens
atgccgtcttttactccctaaatggaatggggattccgctgacgttcttcagaagctctgcgctgcgggcctccgtgtcccttctactcccgctgtctgaaccccgcgatgtcccccgcgct

SEQ ID NO: 194458 - DNA, 122 bp, Homo sapiens
cagaggctgatggggggctggaggctgtgaggcttccagcgtcggtaccatggcgacgcgcggtggggctggggtggcaatggcggtttggtccctcttatccgcccgggccgtgaccgcgt

SEQ ID NO: 194459 - DNA, 122 bp, Homo sapiens
acccggacacaggaagcgcgccaggggcccccacaccgcggagctgctggcgacaaagggcgctgctcctgcataggccaggctaatgcaatctacaaactagatttctgtgcctacagttt

SEQ ID NO: 194460 - DNA, 122 bp, Homo sapiens
ggggcggccccagggagacctgagttggaggcagaggccgcacctgggctttaatcccctcgcagagccacgcacctggcacccctgccccaaacccctgcggctcgaacccggctgtccag

SEQ ID NO: 194461 - DNA, 122 bp, Homo sapiens
ggataccacagcaaccttgacgaggactcaaccatctctccaacgggggcacaaagtctccgctactctggattctgtcttttcttgtgcgttttttcccctccaccaaaatctaccccaat

SEQ ID NO: 194462 - DNA, 122 bp, Homo sapiens
cagtggccttgaggtccccctgcatggaagggaggctcacgtcggcctccacctttggcgcggtcacatccactgatgcctccatggacttgcctggggcagacaccccgaacgacggcatc

SEQ ID NO: 194463 - DNA, 122 bp, Homo sapiens
cctgggcccagcagagggtgcccggcatggtgctagacacagcctgagaaagagacccgccgccttcttcccagaaagtctgttgagctctagctggcgtgagagcaagtgggcgccactcc

SEQ ID NO: 194464 - DNA, 122 bp, Homo sapiens
gctccctcccaatccgcccaaaagagcaacactcagtgtgactgggatcttcccttcctgcgtcctcgagcctccggtgccaagctgtgcgggcgccccgctccccgcggctggcgctgtca

SEQ ID NO: 194465 - DNA, 122 bp, Homo sapiens
tgaccttgagcacatcgaagcgcaccgtcttgctcaggggctggcactcgcccactgtgacgatgtcactgatctggacgtccctgaagcagggggacagttgtacggacatgttcttgtgg

SEQ ID NO: 194466 - DNA, 122 bp, Homo sapiens
ctcaggtgatccacctgcctctgcttcccaaagtgctgggattacaggcatgagccactgcgcccggcctagtaaagtatttctcaattgtcccctcagagtaagtgaaagtgaaattgctt

SEQ ID NO: 194467 - DNA, 122 bp, Homo sapiens
cagaggtcggcgatccttaggccttggccctgagaccccaggcgaggtcagcaacccaaccggggtgggacaggacgagcaagaggttctgctcacgcatgtccccactaacctggccgagg

SEQ ID NO: 194468 - DNA, 122 bp, Homo sapiens
tcggctgatggctgggctgatgttgccgtggccgccgccgccgcgctctaaggctggtcgcggtggtgcaaaaaatgtttctccgctactcgagaccaaaaaacctgccctgtctactgagc

SEQ ID NO: 194469 - DNA, 122 bp, Homo sapiens
atttgctttgtaccacttcctctacctcaagagcaagccttgatcctagcacggctaacacgaggtgagattcgtgagacctaactcccgggctgactctgaactgtcgttttagagggagt

SEQ ID NO: 194470 - DNA, 122 bp, Homo sapiens
ctcagtcaagacagggaagtgagaatatgattattcttccaaatttactatttccaccagcggtctcagttcagcatctgagaatatgttaggggaaactcagcaagtcagttccttttgtt

SEQ ID NO: 194471 - DNA, 122 bp, Homo sapiens
gttcagctccgtgagttgaactcaatcgtcacaaagcgtttcctgggaatgctactgtctcgtttttatgtgcagttatatcctctactgccataggcctcaaagcggtccaaatctcccct

SEQ ID NO: 194472 - DNA, 122 bp, Homo sapiens
agcactgtaactcaggcctgaaggatgcttctttaacacacatattttctccataagccacgtcatagttttcttgcacttaggaacatagacagcactggggctctatgcttgtgggccat

SEQ ID NO: 194473 - DNA, 122 bp, Homo sapiens
gttcgttcttcccagtgggttcgtggtctcgctggccgcaagagagaagctgcaaactctcgtggtgttacagctcataaaggcagcacggacccaaagagcaaaataacaaagctcccaga

SEQ ID NO: 194474 - DNA, 122 bp, Homo sapiens
ggtcagagttacttgttatattaacattttgatttctgtgtaacaaataactgttaagcacgtgtttaattgagaagacaacccaagcaggctaagtgtgagcaacaaggcttgtttattca

SEQ ID NO: 194475 - DNA, 122 bp, Homo sapiens
catcacaaactcaggtttctcttagaaatcactcttagtgtccgcagtgcctaggactcccgccttggatcctggggcccacgagaaggtaatttaattcacccagatagaaccagcccaat

SEQ ID NO: 194476 - DNA, 122 bp, Homo sapiens
aagagcgaaagaacaaagcttctacaacgtggaaagggacccgagcaggttgccaccgctcgcttgggcagcctgcttttattctcttatctggccccacccacatcctgctgattggtaga

SEQ ID NO: 194477 - DNA, 122 bp, Homo sapiens
gttagaagagctcttgaagatttgagtctcttcctcagctttggaactcagaacacatcacgccgaaagatgctctatcaggctgggcgcggtggctcatgcctgtaatcccagcactttgg

SEQ ID NO: 194478 - DNA, 122 bp, Homo sapiens
ttttttctgacacaggtggtgatcttcaggaacccacctgcacctgtgagattctgaagacgtggacccagccttcacaggcatccaagttaccttccccatgaggacttgttttacagatc

SEQ ID NO: 194479 - DNA, 122 bp, Homo sapiens
cagactgatgggcatgcagctggcctttggtatatgccaagcctttgcttggtagccccacgcctgggccagcacaacaaatagcacctgtggggcctataagccgggaggggatgggggag

SEQ ID NO: 194480 - DNA, 122 bp, Homo sapiens
cagaaaggggtcaggaatataactttctctgcccagattccaggacttacagtgagaaagcgccttctgggaacttcacaatggctaaagtgtgctaatgggatgatgtgcccttgtacacc

SEQ ID NO: 194481 - DNA, 122 bp, Homo sapiens
cacaaaaataatactaataatacattcataataaaagggacagggaaactttaggaatgacggacatgtctatggtgttgatgcggtggtgttttcacaaatatatacttatctccaaactc

SEQ ID NO: 194482 - DNA, 122 bp, Homo sapiens
agtgggacccggtgggagctaccaccacaccctgtccggggctcagaccctgcagcagcccgggcggggctcaccggcttcttgtccctgcttccgcaccgcttccttaaggcgccgtcgtc

SEQ ID NO: 194483 - DNA, 122 bp, Homo sapiens
gcctgccttctcgcgctgtttctagctctcgccatccctcggcgtactcttcctctcctccgagtcagagtaccctggagggataatgctctgcaggtaagcccggttcatcagcagggtgg

SEQ ID NO: 194484 - DNA, 122 bp, Homo sapiens
ccgcagccctggcccaccagtgctcccagcccgcctgttctcaggattccgtgcgtccagcgtcgggctagtgcctcctccaggtcagagcgccgttccctctaggatgcaggagcaagaga

SEQ ID NO: 194485 - DNA, 122 bp, Homo sapiens
actttaagcaaaacgatgggttttctcatcaacttcacaaggaaatggtgctgaaggaaacgatgttactcggggacctgccatgtgtcctcgggcccaaagtcacagtttccaggaaccca

SEQ ID NO: 194486 - DNA, 122 bp, Homo sapiens
ttaccatagtgactgcaggcgtccggagcgctgagcagaggtgggtgtgggaaaacgccccggactgagagctcccggcaccgacaaatatcccatgtctgctaacatttgccgaggactaa

SEQ ID NO: 194487 - DNA, 122 bp, Homo sapiens
cagtcccctcgaagtctctaattacacctcgcagttaccccttcttggtgatcttgcccccggtaaccctgctagcttctccgatctcgcttcaccacgacctcctacccgctaacccccac

SEQ ID NO: 194488 - DNA, 122 bp, Homo sapiens
agagttatctgtatacattgtatatttttcattttgtttttaaccagcagggtaagcctccggacaaaattctattttgatttcttttgaaatttctttttcttctttctcttttcttgcat

SEQ ID NO: 194489 - DNA, 122 bp, Homo sapiens
atggcacctgatttcaaggagatagaattttcataaacaaatcagcatcttacaaacattcgataaaaagcaaactcacatgtgcagtgattttccaaagtgtgctagagggatttactggt

SEQ ID NO: 194490 - DNA, 122 bp, Homo sapiens
ggataaggcatggcccaggctctgccccacctgtctatgcatgtggggtgagtcgcttcacgcaccctgaccccatttccctatttgtgcagtgacgtgttatagagggcaatcctaaggtt

SEQ ID NO: 194491 - DNA, 122 bp, Homo sapiens
tcgctgctttccctgcagcgtgctcctcgtccctatctcggatggggatggggcagggggcgcggggtgagccatcaactccagccgcctgcctggccgcgcaaggcgggaaagtgggggcg

SEQ ID NO: 194492 - DNA, 122 bp, Homo sapiens
ctcccccctcccccgacgcgggcccacagcccgggggtgcagggggagaggggtgcgcggcgggggcatgtcgcccctctggcccggctgggtgtgcctgcctccacagcccgtcgagggtg

SEQ ID NO: 194493 - DNA, 122 bp, Homo sapiens
tttcacaaatacggaactccattcacctctccatccagaggaatccatccctggggacagcgtctagacactgtttctaaaagtgtcttttctgtccctgatctgctggagtggaatttggt

SEQ ID NO: 194494 - DNA, 122 bp, Homo sapiens
actgctgtttgcggcattcattttcctttcattatatttttttctgaatttgttctggatcgttttttgtttaaaatctcttcctcctcaggagtccgctgggcccccttcttgtggcccgg

SEQ ID NO: 194495 - DNA, 122 bp, Homo sapiens
accacaccaggcatagtctagacttttagacttatcctagctcctcactgacccatgtgccgtctgagggcaggggccatctcccccttgttgcatctttctgtcagccctagacacagagt

SEQ ID NO: 194496 - DNA, 122 bp, Homo sapiens
gtcttgcctttcacactagctcagtcaagtttccaaaaggaaagccccgttatcaggccacgagcaggacttaaattaacaattagcctctagaatcgaactatgatgcagaagaattcatt

SEQ ID NO: 194497 - DNA, 122 bp, Homo sapiens
tcctccctgccccaggtggaggtgtttaacatcctgttcgtgacaagtgagaatggcagccgcaacacgtacctggtacactgcgagggctgtgcccggcgccgcagcgcaggcctgcaggg

SEQ ID NO: 194498 - DNA, 122 bp, Homo sapiens
tcactgcggccgggggggcgggccggccgggcggggtccgcggggggctcctcccgggaccgagcgggaccccgaaccaagggacagtcgcagtttgggccccttgaattttactttcaagt

SEQ ID NO: 194499 - DNA, 122 bp, Homo sapiens
agcacattatgaactcgaaagccttgcttgctagctcaggactatcagaacttatcagatcgtaaatctgccagtgaatagttctttagttacaattttaatgattttaatgacttacaact

SEQ ID NO: 194500 - DNA, 122 bp, Homo sapiens
cactctatggatctggacctctggattcggctttctccctgggcactgccttcaggaagacgttgagaattgaccttacacaatcccagcgccctcctcacaggagcctttcactttacagt

SEQ ID NO: 194501 - DNA, 122 bp, Homo sapiens
acgacacgcaccgccccgcccggcactccctgcttcgcccacgacacgcccctccccgcccggcaaactgcccggagccaaggccccgcccccagagagaacctgccccgcctccctggccc

SEQ ID NO: 194502 - DNA, 122 bp, Homo sapiens
gtttggcgaatgggggtggggagggggtatttcagctccagcgtggaatctagagaagcacgaggaaggttctatcacgggggttgagccttagaaggtgggttttcaaaactgcagggcgt

SEQ ID NO: 194503 - DNA, 122 bp, Homo sapiens
ctctgggtatactatttgatggttacttcttctcccctcttgcctaagctagtcagggatcgacttggctctttgtagtgagaacctggtgtaattcctcaaggtaaaacccataaaactgt

SEQ ID NO: 194504 - DNA, 122 bp, Homo sapiens
acttgaggggctctacaaacttttagttccttcccacaaccccaccccctgagcccaagtcgcggcagcatccttccagtcggccagtccccttgctgcagttcatgaaaactggcactatt

SEQ ID NO: 194505 - DNA, 122 bp, Homo sapiens
gctgtgagctgcgcgaaggccgggcggaagcgggccatagttccacgagtcagaaggacacgctcagcaaagggtcggcggcagcagcgacggcggtggcagccgggaagcacctggcagtg

SEQ ID NO: 194506 - DNA, 122 bp, Homo sapiens
ccctggagagaggcccagccatagtttgtctagagatttcaagaatcaaacaactctcctcgggaccacacataaaaatcccaaagcagggcaagtgtggaggcctgaagctactcgatgag

SEQ ID NO: 194507 - DNA, 122 bp, Homo sapiens
ccatctctacaaaaaacactttttaaattagccaggccttgtggtatgtacctgtagtctcggctactgggaaaggtgagttgcgaggatctcttggggccaggagttgaaggctgcagtga

SEQ ID NO: 194508 - DNA, 122 bp, Homo sapiens
cacatcagccagatattggggtttttctccggtaactttcctatggggactccatgtggacgcattcctgtgtataaatatgtgtgttctggataatagtaatggtagcctttgggttcaaa

SEQ ID NO: 194509 - DNA, 122 bp, Homo sapiens
acagcgccgggacacgcggcaccgcatcccgggcgcgccagtcctcctgcagtcgggggacgctcccctcaggcgcccgcgtcggagcccagctacccccgcgccgccctcacctaccgagg

SEQ ID NO: 194510 - DNA, 122 bp, Homo sapiens
agactgactcaaaaaaaaaaaaaaaaaaaaagcttaaatacaagacggaaaaaagggaagcggcttgctgcctgtcaatgtccaggttcgaatggctgtgctcagatgtggtgacccttact

SEQ ID NO: 194511 - DNA, 122 bp, Homo sapiens
gcgagtcacagagggacctgcaccggttgttcactgccctcttggcatggcagaggagcacgtaatgtctttatggcaacagcaacagtgagaggccaaatggaaggatttgcttgttcaca

SEQ ID NO: 194512 - DNA, 122 bp, Homo sapiens
gcccggggccagccgttcgccagacgcgccgggcaggtgaagctcaccgtaggcatcgcacgtgccttgtgtgtgctgccgcggtctccctgcaccttcagagcaatcttgtgaggcaaacg

SEQ ID NO: 194513 - DNA, 122 bp, Homo sapiens
gctaacttcaacaatgaagcctcggaccctggcggtgagtgttacagttcttaaaggcagcgtgtccggagtttgttccttctgatgtttggatgtgttcggagtttcttccttctggtggg

SEQ ID NO: 194514 - DNA, 122 bp, Homo sapiens
taagccagactcaccacgcagggccgctagccgtcccgcagcgccgccatcttgttgtcacgcggtttcctaggcgaccaggacccgtgcacttctcattggctagtttgagggaggcctga

SEQ ID NO: 194515 - DNA, 122 bp, Homo sapiens
ccccgccccgcccccttccctctatctctgagtttgtccgcgtctctgtgggtgggtctccgtccagccgccccgtgtccccatctccttccccgacaccgctctctccccatggcagctct

SEQ ID NO: 194516 - DNA, 122 bp, Homo sapiens
gcattggagagaatctccacattgacaaggtcttctatttgctgactgctggtcataatacgtatcgtgcattgttatttgacattcctccattccaagtggcattgattataaggtacaca

SEQ ID NO: 194517 - DNA, 122 bp, Homo sapiens
aaaaaaaagtttaagccttgtgcggtggctcattcctgtaatccaagcactttggttggccgaggcaggaggatcgcttgagcccaggagttggagaccagcctgggcaagatggtgagacc

SEQ ID NO: 194518 - DNA, 122 bp, Homo sapiens
ccaattcggcattgcctggaggcggaagtgggtgggaggggccagacgtgcgcccctccccggaagtgggcggtacccatagggctccacagtcgttccgccacctcccagtcgggttgcgg

SEQ ID NO: 194519 - DNA, 122 bp, Homo sapiens
tccatccaaagtggacattgcttttgagtatgcagccctccagttgaaggttagaattctcgggggtcataggagaatcttaaacccacaagccagcagcaagcaccccgtcttcaggccct

SEQ ID NO: 194520 - DNA, 122 bp, Homo sapiens
ttgttgcttattcataaggccgcggctacggccggggattgggcggtgagtaggtgtgcccgccctggctctgctggcactgacagccgacgccgtcgcccacgcccccctgcgcccacttc

SEQ ID NO: 194521 - DNA, 122 bp, Homo sapiens
actcctgcccctggtggccctgccacagggaaatggccaggcccatttctgccggggtgacggcagctctgcgcctggcccgaggagcagggcgaggagcaggttgagccgggcgcagcggg

SEQ ID NO: 194522 - DNA, 122 bp, Homo sapiens
tgcaaccttgatttcccagaggacgagtctgtctcagtatctacgtcattccgtagcctccgctgccgccatctttgttggggctgacaacctgcaagccaagaagtacgagaagggccagg

SEQ ID NO: 194523 - DNA, 122 bp, Homo sapiens
tctgctcagccctggtgcccagcagccctggtgtgcatcctgcagggcaggccttcccgccggagtcctggacttgctcagggccactccccttgcccatgtcaaccaaagtcaggctgccg

SEQ ID NO: 194524 - DNA, 122 bp, Homo sapiens
aggctggccaggggctggggccccaaagggcctgtccgtagccagtcagccatgccaacccggggacccctatgtgtctctcgggctgcccacatggcttctgtctacccctccgtttcggg

SEQ ID NO: 194525 - DNA, 122 bp, Homo sapiens
ggagttaaacgatgagaagacatggacgcatagaagggaacaccacccactggggcctgtcggagggtggagggtgggagcggggaggggatcaggaagaagaactcatggatactgggctt

SEQ ID NO: 194526 - DNA, 122 bp, Homo sapiens
atgggggtcaggagcagaagctgccattagcactggtcccagcgaactgtcctgggcttccgcagcttggtcacccacctggaacgaagctaacccccccgcccccggctgcccagcccaga

SEQ ID NO: 194527 - DNA, 122 bp, Homo sapiens
tctcttgcaagcatcacctcctgtttggaggccaactgacacaatccattgcagcatctccgggtagcataatgaagtgcccaggaaggagaaaacttgtacatgacctcagctatcgccat

SEQ ID NO: 194528 - DNA, 122 bp, Homo sapiens
ccggggggcagcgtgtatttccgggtgaagcatcgggagatgtagccatgctcgtcctgccgctcctcgtgcttgctggtgatctccaccatgccatccttggtcttgaccgtcagctcgtc

SEQ ID NO: 194529 - DNA, 122 bp, Homo sapiens
tgttgggtacacctcccagatggggtggcggccgggcagaggcgctcctcacatcccagacgggcatgcccagttagttttaaattttttgtagagacagggttttactctattgccagtgc

SEQ ID NO: 194530 - DNA, 122 bp, Homo sapiens
aggcagggaccctctgggtccactttgcactttatcaccagcgcccaacacaaggtcccacgctgcccaacagatagtgatggataatcttcatccagggaactttccctgccctccctcct

SEQ ID NO: 194531 - DNA, 122 bp, Homo sapiens
cccgcctgcccagggtcttaccacctcctcttccatccgcaggagctacagggagctggccgactgcacctggcacatggcggagaagctgggctgcttctggcccaatgcagaggtggaca

SEQ ID NO: 194532 - DNA, 122 bp, Homo sapiens
ccctggtgcacagcttgagtgtgttaaataactggctgtttagctgatgccagccagctgcgtgaaggggagaaggccgcctccaaggacacagatgtttgctgttgacctcacgctgtgtc

SEQ ID NO: 194533 - DNA, 122 bp, Homo sapiens
cctggggccccgggaaggtgtcaccatcgatgtcactggccaccaggctgcagaaacccccggggacttccggggcaagtgctgccctgcggtcagaatgccctcccaggcggcccagcgtg

SEQ ID NO: 194534 - DNA, 122 bp, Homo sapiens
atgaagaggagactcatagttgcaagtgtttagtgaatgtttatgcaatgaataaatgaacgaacaactctgcctgttggattcccagcccatcaacttggccatctaggaaagtcacactc

SEQ ID NO: 194535 - DNA, 122 bp, Homo sapiens
ctcgcgcggcggtggcgggtggtggtccttggaccacgcggtgggcggagccagcggcgacggcctcccctcccctccggacgcaggccggaagtacgtgagaggagacttccggccactgc

SEQ ID NO: 194536 - DNA, 122 bp, Homo sapiens
gggccagggcgcgccgggatccgctgcgccaggaccctgcagacccggccgcggccgggccgagtgcctcccgccggggccttacgcccacggtccacgcttgcaacaccagggctgtacgg

SEQ ID NO: 194537 - DNA, 122 bp, Homo sapiens
aatgactagatctaagaaatgtaaacaaagccagtaactttcctctgtagtaacaatagccggttgaaaatgaaaactacacattttcattctttcagtggttctcttaaactttagcatgg

SEQ ID NO: 194538 - DNA, 122 bp, Homo sapiens
gcagactcagggagtctagacaataacaacctaggaggcacacttagggagctggcaggacgaggggaggcaaaaaagagagggtcttctcagagtaactcaaacccactgcccagcctcgt

SEQ ID NO: 194539 - DNA, 122 bp, Homo sapiens
cgccgacgagttcgaggagagcctccctctgctgcaggagctcgtccaggaggccgacttcgtgggtgaagagcctgggattcgcggctgtgccggacagagccccttgccccgggcgagct

SEQ ID NO: 194540 - DNA, 122 bp, Homo sapiens
gctgcggctgcaggccgaggggcccctgggacagtgagaagcagcggcgggagctagtcacggggcagggagcgctcagcggtaaagacggcttcatctgactccagggctggcaggcggcc

SEQ ID NO: 194541 - DNA, 122 bp, Homo sapiens
ggcgcggggggaggcggggagaataagaagaagaaagaaaaggcagtcgcttcacggaggcgctaagctttcctgtttacagcaaggcggggcgggcctggctgcccacacctcactgcgcc

SEQ ID NO: 194542 - DNA, 122 bp, Homo sapiens
ttcattcacccattaattcattcatttccctccttcgccgatggcgcctccagagttgagcgctggggccactggccccaggagatgcgtccctggtgtgcagagccacagtcaagtccgcg

SEQ ID NO: 194543 - DNA, 122 bp, Homo sapiens
cgcgagcacaacgccatcctcgggccctttggcgagcttatgaccgaagccgacatcctccgcatcgagcagcaaatcgagaacctgcaggtgctgcacaaggcgcagaagctggaggcgcg

SEQ ID NO: 194544 - DNA, 122 bp, Homo sapiens
ggggttccttgcaagcaagcacccagcaaaagcaggcgttcccacccagcggtgtggcagcggccatccacagtacagcctgttatagccccaccatccacagcacagcctgttatagcccc

SEQ ID NO: 194545 - DNA, 122 bp, Homo sapiens
cttaagcgaacctcttgccgcagcctcccaaagtgttgggattacgggcgtgaaccaccgcgcccagcctactatctttatcttacagaaagaaaagaatggaggaaaccgaggctcggaga

SEQ ID NO: 194546 - DNA, 122 bp, Homo sapiens
acaaaacggggcgtagcaaaagggaatgctattcggccgcttagagggatgacgatgccacgctacagcatggatgaactttgaagaaacgatgctaagaagtccgtcgcagaagacaacat

SEQ ID NO: 194547 - DNA, 122 bp, Homo sapiens
tgttcctagtgccggatagactggagcggcgactgcggcggagcagcggcaggcggggaccgcggcgcgtctacgcgtcctccactcgcctccgctcgccccgcccggccgccgcgcgcccc

SEQ ID NO: 194548 - DNA, 122 bp, Homo sapiens
tacgggccagcacaaaaactgctccccacacattcacgaaggactatgcctgtcactcaacgcaaagctcaattctttgtttttggccccatagcggctgctatcaccacctttacgaacgt

SEQ ID NO: 194549 - DNA, 122 bp, Homo sapiens
ggccacaattctcgtcccgccggccggttagctcggttgcttagagtgttgtgttaattacgctaaaggtcgtgggtttgatcctcttaccggccacatgaggagaattagttctttaccac

SEQ ID NO: 194550 - DNA, 122 bp, Homo sapiens
agtctggagaagcttcaagcactgaaggagctgtgctggagaagccacccttgctgctggcgtgaggcactgggaaaccacatccaccgcagaagcctggtgctggggcaggcctcgcacac

SEQ ID NO: 194551 - DNA, 122 bp, Homo sapiens
tttataaggcagttttccctgctcttgcttgctctctctcgcctgctgccatgtaagacacgcctcttccccttttgccatgagtttaagtttcttgaggcctccccagccatgcagaactg

SEQ ID NO: 194552 - DNA, 122 bp, Homo sapiens
cactagctgaatttgtatataacatttatggcacttcatcttataaatacctaggaaagtcgacccacccaacccaggatgtttttaagcagcagtagccaatatggggatcctttgaaatg

SEQ ID NO: 194553 - DNA, 122 bp, Homo sapiens
tccccaggacagggttgttgagtcctgcctttgactgtggggtcctttccttcccaatgtcgccagcttcctctctctcccacgtcgtctccgagtcccatccccgtttctgttccctttct

SEQ ID NO: 194554 - DNA, 122 bp, Homo sapiens
ggaggttgctctgccggctggacctggcggttttcaccccagagttgcagcgaaattgaacgctttgagcctgctggaggaatccagagattggttcaggggctatttttttttttaagcag

SEQ ID NO: 194555 - DNA, 122 bp, Homo sapiens
cagaggttgtgaaggcaaaaggtcacagcctaggttcatgttgtgtggacagagggccttcgggtaggggcaggggtgaggtcaaggttcggcgggccaggatgaggtggtgcagcctgaca

SEQ ID NO: 194556 - DNA, 122 bp, Homo sapiens
caaaggacatctgtattagcagctcggggaagtggcatttgcagaaaggcacaacaactgcgcttaaaagaaaatcattaagcctcagccattaatcccctcccccatcctcttcgtctgga

SEQ ID NO: 194557 - DNA, 122 bp, Homo sapiens
tcagatgagtattgccctgcttgtagagagaagggaaagttaaaagccttaaagacttaccgaattagttttcaagaatctatctttttgtgtgaggatctgcaggtaaagtattaatctta

SEQ ID NO: 194558 - DNA, 122 bp, Homo sapiens
aagacgccacccggacatctgtgcagcagagctttcccctgaagaccttcaactcagacccgggcttgtccaggctgcacggaggccgtgggcaccagcgctgctggggctgggagaatctt

SEQ ID NO: 194559 - DNA, 122 bp, Homo sapiens
ggggcgcccaggggtgctcggagggagcccgtttcccaaagcacgtgcgcgagccccgggcgcttccaagggctctaacttcacgtctgctccgtgttttcaagcgcagggggccggaggcg

SEQ ID NO: 194560 - DNA, 122 bp, Homo sapiens
gacgctctgattggttcctcctgctgtttttaaagggagggggcgggacagagctgttgccgtggcaactgggaggcactctcaggctgttttcccgaggacctcaaatccggacttttttt

SEQ ID NO: 194561 - DNA, 122 bp, Homo sapiens
cgtgcccaaagagagcccgaaccaagcctggggtctctgggtgggcagaaaacgtgagtgcgggggtggggggaactcgggggagggggaggagggcagggaggagggcaagtggagagaaa

SEQ ID NO: 194562 - DNA, 122 bp, Homo sapiens
aggctacagtaagttgagatcatgccactgcactctagcactccagctgaggcgacagagcgagactctcaaaaaaaaaaaaaaaaaggccggccgggtgcggtggctcccgcctgtaatcg

SEQ ID NO: 194563 - DNA, 122 bp, Homo sapiens
agcaaagtgaattatttcgagagaagcttggctccatttaaaaaacatttctgggcttggcgcagtggctcatgcctgtaatcccagcactttcggaggccgaggggtggatcacttgaggt

SEQ ID NO: 194564 - DNA, 122 bp, Homo sapiens
tttctatattagacctctctctggagctctggacccaaatattcaactgcctcctggccacgtccaccagaatgctccacaagtccttcaaactcagtgtgtcccaaactgaattgatcatc

SEQ ID NO: 194565 - DNA, 122 bp, Homo sapiens
actttacatgtgtcagtgttaatttcaagggatcatcatttctgtatccagtttggactccgggttcggtgaggactgcctacttccttggctacacaaaatcccaatcctgacttatagca

SEQ ID NO: 194566 - DNA, 122 bp, Homo sapiens
cagaccctcatatctccaggtccaggccccattttcctccgctgacagctcagcagcgtgcgcttccgctggattcaggccaggaccagcgaagccgcaccttacacccaccgaggaggaaa

SEQ ID NO: 194567 - DNA, 122 bp, Homo sapiens
tgggtaagctccgcaaggtgagtccccagagccgggaactcgcagcctgagcagacgcagcgtagccgatcttgggtccgcgctcctcccgccttgcccagccctgcccgcggttggctagg

SEQ ID NO: 194568 - DNA, 122 bp, Homo sapiens
atgtgacaccttgagacgccctggcgacagcatgagctcgagaggcaaaggcggtgacgccggggaaagcgggctccagttctgagccagccgtgctctccaccagccactccggccccttc

SEQ ID NO: 194569 - DNA, 122 bp, Homo sapiens
ctcacctgccgcttgtccgccagcacctcctcggcgagctcctccacttctacaaggtaccgcagcactcgctctgcctcgggtgatagcatagcgcccaccaactccgcttgcggctctcg

SEQ ID NO: 194570 - DNA, 122 bp, Homo sapiens
ggagccttgtagagaccattcaccttagctccagacttcccagtggcacctcggggtccccgctgaccccgtggaccctacagagggaagaggagttgtcagagaaacccaaatgcccccct

SEQ ID NO: 194571 - DNA, 122 bp, Homo sapiens
agatatgtatataactaggtaaatctatatctatatctgtgatcttcaaggagagcgtcacgtgtaattaaagtttaaataatttactttttatttttatctgaaccttaggtgaaagcagt

SEQ ID NO: 194572 - DNA, 122 bp, Homo sapiens
agcccgccatgcctgacccttcccccgactccgtgggctcctgtgcagcctgagcctccccgacgagtgccgccccctgctgcacggcgcccaatcccatcgaccacccaagggctgaggag

SEQ ID NO: 194573 - DNA, 122 bp, Homo sapiens
cgggtcctgacagggaaaggtcctcttctgggggcaactgtggcgacggcgcaatgccaacgtgagccaccatttgaaatgagaaagagcagtgtggcagaaaggaatgagtttggtgcaga

SEQ ID NO: 194574 - DNA, 122 bp, Homo sapiens
taattttccccgatttctctcttcagcttctggagatcagactgctcatatctggagatacgcggtgcagctgccgacaccccagcctgttgctgacactagtgtaagcacctttccttacc

SEQ ID NO: 194575 - DNA, 122 bp, Homo sapiens
gcgttgctgcacgccccgcgggttgccaaggtgattcaattcgcttcccacaaagaggtccggctcctccacttccgttaggctgagcaccggctgaatcgcggaaacccgactctggcaat

SEQ ID NO: 194576 - DNA, 122 bp, Homo sapiens
gcgagtcgggccgcgtgggggggcggtgcgttcgctggatccatgggagcggagtgcgcgcgcattatttttgctcgtcggctgggagccgggcgtcgggtcgctgggagtttgcctcttgt

SEQ ID NO: 194577 - DNA, 122 bp, Homo sapiens
actcgcaaattaaaaagaggagccaaacaagtatggcgttttgactctgtttaaacttgccgcctccaccaatgaggacctccgggcaccgccctcctcgtcacgggaccaatcggtgagca

SEQ ID NO: 194578 - DNA, 122 bp, Homo sapiens
cctctgctcaccgtggctcagtctgcttctaaaactgggtcaaagggctcactcagaacacgggcgagtcaaagacaaacagcatctctccaacatgtacatagctgccctgctcctgagca

SEQ ID NO: 194579 - DNA, 122 bp, Homo sapiens
aaaacaaacaaatccaagtctggatctcgctcttctcgctcaagatctgcatcaagatctcgttctcgttcattttcgaagtctcggtcccgaagccgatctctctctcgttcaaggaagcg

SEQ ID NO: 194580 - DNA, 122 bp, Homo sapiens
ccccctcagagcgatctagcctcccgaattgttttttcttttaagatgcggatggacgtacgtgtgggggcatcccagcccagccacgccgaggctcggaagggctaagaccctcccactgc

SEQ ID NO: 194581 - DNA, 122 bp, Homo sapiens
agctgtgcagaaggaatggctcctagcactgaatgtcagaattttccacgattttggaaacgttctatgtctacatccaatatggcagtcctggccacagggggctactgggcacttggaat

SEQ ID NO: 194582 - DNA, 122 bp, Homo sapiens
agatggaaggaggtaaatcaaaggctgaaactttacattggaagagcagcaatcttaggccgaggatgtttattgtatttgagtacgatacataatgccgaatttcctatgattcaactgat

SEQ ID NO: 194583 - DNA, 122 bp, Homo sapiens
cgagcagaaccgcaagcgggaggctgagctgctgaagctgcggcgggagctggaagaggccgccctgcagagcgaggcgacggcctccacactgcgcaagaagcacgtggactccatggccg

SEQ ID NO: 194584 - DNA, 122 bp, Homo sapiens
ggggtctaagggcctgcaacaatgagatctgtcgccttggctaggactggcgccgagaggcgataggtctcgggagagcctggcgcagggtgtgggagattaggaatcccaggtccaccgga

SEQ ID NO: 194585 - DNA, 122 bp, Homo sapiens
cagcctgcccaccccctgtctccgacctcctgccttcctcgaggtcaaggtgagaagtctcgggacggattccagctccagccccggcgtctttgcacattcctccatctggggtacctcgt

SEQ ID NO: 194586 - DNA, 122 bp, Homo sapiens
cactgacttccttcatctccacgaagggaaacgcctggccactgacttccttcgtctctgcgaagggaaacgcctggccactgacctcctgtcgtcacccgaagggaaacacgcctggccgc

SEQ ID NO: 194587 - DNA, 122 bp, Homo sapiens
actaaattgtttggaaaagcgtttcctaggagttgctataaaccaaatgactcatttaaacgtttttattactttgacaaatacttcggctctgcagcctgttccttttttaaaccaacttg

SEQ ID NO: 194588 - DNA, 122 bp, Homo sapiens
catgggagcggagtgcgcgcgcattatttttgctcgtcggctgggagccgggcgtcgggtcgctgggagtttgcctcttgtggcagcatcctgcttagtccagcgaattgtgacacattatt

SEQ ID NO: 194589 - DNA, 122 bp, Homo sapiens
tgcagcctcggctttcccagcgccggcccccgcccaccccttccgcgtgggccacatcaccgcgctggcatctccaacagccatcccaagggcccggtctgcacgaggacaggagcgccgcg

SEQ ID NO: 194590 - DNA, 122 bp, Homo sapiens
cacactgaccctgctgatacaacatcttccctctcttctcagagactagtggaaagtcgccgacagcagatcttgagggagtttgaagagcttcataggcggctggatgaagagcagcaggt

SEQ ID NO: 194591 - DNA, 122 bp, Homo sapiens
gggaagagggaggcccaagcacagagagagaacagttaacacacatttattgattgagttcgccctcttacatgggcactgtttgtggcaccccaaagcaattacaatagtaacatcaaaga

SEQ ID NO: 194592 - DNA, 122 bp, Homo sapiens
gttaaggttactaaaatcagcgtttctgaatcctgtctcaagttgtctcatctgggcttccgtaagaacggtttcttcataagagggccttcagcgacagccaagctcggaaaagaacggga

SEQ ID NO: 194593 - DNA, 122 bp, Homo sapiens
ttgtgaatttcaattctgactctgccgtttattgagggcatttccttaggcagagggtggcgtgtccctgagcctcagtgtcctcatctagactatatgaaatggagataattttaggaact

SEQ ID NO: 194594 - DNA, 122 bp, Homo sapiens
aaaggccaagggcaagggtgtgtacgttcagaacagtgagcacggcaggtcttagggggccgggcgctcagaagggcccgccgggcatctgagttctgcgcggaagattaaaccaagaggaa

SEQ ID NO: 194595 - DNA, 122 bp, Homo sapiens
tttcagaaccccagcgtcggcagtgccgggcggggctggcagtcggaaaagcaagttctgcggcggaccacgggtttaggctcaccgcgcagtcccaatacaactctatttcctgcgactct

SEQ ID NO: 194596 - DNA, 122 bp, Homo sapiens
gagtttggaggacacaggtggaacagcacttgccaggcgctgcagtgtgggtggtgacatcgtcagggcccgctgggctcacagggcctccaggcaaccgggggcctttgggtccccagtta

SEQ ID NO: 194597 - DNA, 122 bp, Homo sapiens
acatttagctctgtaatgcccaattatctctggagtcaggaagcgatttaggtttgaaaacgctacaggcagatgtttctgtgggttgagtgcattaaccaatataacacatgagctaccaa

SEQ ID NO: 194598 - DNA, 122 bp, Homo sapiens
agctgctcgctccatctgcgagacagaccagagctgcttgagtgacacacttgcaagcttcgcccacgttcctctcccggaatcaccggggcggccaaaccccaggaatctgcctgcttgaa

SEQ ID NO: 194599 - DNA, 122 bp, Homo sapiens
ttatatggcaacctgttcttggacctggcagggcccagagaagcgaggaactccgcagctcgtcgacacgtctcgtctcctgtcccaattcagggcttggtgaggtgactcgcggtcgcggg

SEQ ID NO: 194600 - DNA, 122 bp, Homo sapiens
ccagcattttagtcattgtgtgtctcatgataaataaaatgctggaacctaaagaacccccggggcaaggtgggggtttagcatatgtcattatacctgcgcaagtgtgaaacccgaagccc

SEQ ID NO: 194601 - DNA, 122 bp, Homo sapiens
ccaccgccgggggtctcgggggtctcaggtctgcgcgagcggctggcggggctcgggggtcgcgtcctcctcccttcgggcctgcggcggtgacggtcccgtcctcccctcccgggtggctg

SEQ ID NO: 194602 - DNA, 122 bp, Homo sapiens
gtgaccacggccgtccacattggctctccggggctccaggccccgcctcctccccctcggcgtggccgggaaaggtgtcaatggaacccgcccaccaggaatggggactaggggattccagc

SEQ ID NO: 194603 - DNA, 122 bp, Homo sapiens
acgcgctcccgggtacccggcggcgcagtcattgttctgattcactgaactaagcgaacacgccggggcactctccggcgcacccccgcccgccagcgcctagtccagccctcccgtcccag

SEQ ID NO: 194604 - DNA, 122 bp, Homo sapiens
tagagtggtgccgtccggttgtttggtgggaggcacgtaagaccgctctgggcacgggggcgctcacctcactggctcgttcggttctaggagcagatccggggtagagggaaaagagctcc

SEQ ID NO: 194605 - DNA, 122 bp, Homo sapiens
ctgcctgggtgccgggccctgtgccctgtgtctggaacctccaagtgaccaagacacagccgcagccctccaggagtgcacacatgtagagatatgtacagacaacagatcatgtgatgcaa

SEQ ID NO: 194606 - DNA, 122 bp, Homo sapiens
cgagagcggagtcagctccagttcctcagaagtggagaggccgggttcagaggcatagaccgcgcaggcgtcatgtgaagcagccaagcccggcctcgcgcgtgcgccttggaaaaccccga

SEQ ID NO: 194607 - DNA, 122 bp, Homo sapiens
tcagagaccattcataagtcatagccatagttttaaatacactacacaagtcaaaagatacgaagtagcagatatgtaggctgaacacgtttaaagatctaatgtacaagaggactctagtt

SEQ ID NO: 194608 - DNA, 122 bp, Homo sapiens
aggtgggaggattggttgagtccgggaggtggaggttgcagtgagcagagattgcgccaccgcactccagctggtctaatagagccagaacctgtctcaaaagaaaaagagaaaaaagagtt

SEQ ID NO: 194609 - DNA, 122 bp, Homo sapiens
ctcgcctctcgctgctctttgtactctagactctcaatggaccgatcccgggagccgagtcggctccctacctgcggggacgccgggtaggcaaggaggaggcgcggggacgcagctcctgg

SEQ ID NO: 194610 - DNA, 122 bp, Homo sapiens
gcccgctcccgaggctctagggcggcctcctggccgctgccttctcgcacccagggtcttcggcctgggctccacacctcaggcccctcaagtaatcggcctcttggtggccgggcactgcc

SEQ ID NO: 194611 - DNA, 122 bp, Homo sapiens
gcacgcatgcagtggtgacggagggccttggcagcccggagacggcccgtggggctcagccgtgggagacagaggcctcctggcagcttgggcttcccggctgggtggtgaaggcagctgag

SEQ ID NO: 194612 - DNA, 122 bp, Homo sapiens
accatgactcacctagtagcttcctggtggcaggatgctggagcctcctagcagctccagcgtggataaaccaagcaaagtggggtgtggaggggaaagctggagactgtcagccctctcca

SEQ ID NO: 194613 - DNA, 122 bp, Homo sapiens
acaactttctcttttctctatctcggtttgtccccctcccctttcttacccaagtctccacgcttgggtcatactggctgggcccattccatagaaaatccttgctatcttctttcccagtc

SEQ ID NO: 194614 - DNA, 122 bp, Homo sapiens
cggatactgcttgggtaaaacgggcaccccaggaacatggcagacgaagatctcatcttccgcctggaaggcgttgatggcggccagtccccccgagctggccatgatggtgattctgatgg

SEQ ID NO: 194615 - DNA, 122 bp, Homo sapiens
gggaccccagatgaaaaggaaggcaggtggcacccttcgaccagcgtccaggcagcgtttcggattcccccaaaaggagggcggggctgagaagcaggacaggaaccacaggattctccgcc

SEQ ID NO: 194616 - DNA, 122 bp, Homo sapiens
ttttttctgtacatgtttgtaaatacacctcttaaaatgtggtcatgcggctgggcatggcggctcatgcctgaaatcccaacagcactttgggaggccaagtcaggcagatcacaaggtca

SEQ ID NO: 194617 - DNA, 122 bp, Homo sapiens
gggaggtgggggtagggtaatgggggaggagggctggatgagaggctgagtggagtcctccgtctgtgctgggtgtgcatagggacagcccccaagagaggtcagtcccctcctgtctttgg

SEQ ID NO: 194618 - DNA, 122 bp, Homo sapiens
tctgatttttacttcctttccctgctacccaggagtccataggcagatccctgcatttcacgtgacaatggtgctagcagaacttcctgtcaaagttcaaggagacccacgcttcgttttgc

SEQ ID NO: 194619 - DNA, 122 bp, Homo sapiens
aattactctatgtaaaaactggccaaaaaaattatctgaccggccgagtgcagtggctcacgcttgtaatcccagcactttgggaggccgaggcgggcggatcacgaggtcaagagatcgag

SEQ ID NO: 194620 - DNA, 122 bp, Homo sapiens
atgagctactcctggctttcactttaagagccactactagaaactaaattgcattctaatcgattacatatattaactcatttagtttgtacaacaactctctattatgattcccattttat

SEQ ID NO: 194621 - DNA, 122 bp, Homo sapiens
cggggacctgggctgcccctgggcgcggggagccccagccctgaagaggcgcccgcccggcgtgtcccctgtgcttcgtcatcgcccttcataagcgtcccagaggtcatggtgaccattgc

SEQ ID NO: 194622 - DNA, 122 bp, Homo sapiens
aaatatattaataacttaaacttcaaataggaaacatgtaaaataatccatcagttgaagcgttaaaattgcattgcctctccaactttaataattcttctctctccttcccattctgcttc

SEQ ID NO: 194623 - DNA, 122 bp, Homo sapiens
gctgtctgcagtgattgatctgactatcaagaggaaatggggttgctcctacacaatggacgtaagaaggaagaatgcaggagatcctttggggcaccccctagtactgccatatcctgtga

SEQ ID NO: 194624 - DNA, 122 bp, Homo sapiens
ccatccccggagaggatggaccaggagaggatgcggccacacccaccttctgagttctgccgtgacgcggcacccttgatgcggaaagcctggcgtgcccggctgcggtccccgaagctcca

SEQ ID NO: 194625 - DNA, 122 bp, Homo sapiens
gatggctccagagcttcagcccacatagctctcggttttggtgacacgtgccagcctgcacggggagtgaaacgtacgtcccatcttacgcatttaggtaatcatacgccgatgcctggcga

SEQ ID NO: 194626 - DNA, 122 bp, Homo sapiens
cataaaaagaggtccattgtcaagcagcctgtttcccgggtgggagtcagcaatatgcagcgtaagtgggtagagccactgtggctcagaggctccccggctttggccctcggttgggggcg

SEQ ID NO: 194627 - DNA, 122 bp, Homo sapiens
gtttagaggttgtatagaggaagaatgtggtatcttggaatttgagaaggggtagtgtatcgagcaagcaatggccaactgtgccaaatgctattgacaggctgagcaacttaaatgcagag

SEQ ID NO: 194628 - DNA, 122 bp, Homo sapiens
cgtgtgcgtgaagagcccgcacaggccccctgtgcgcccggggtcaggtgtggatggggtcggggtatttccagtacttgcgcttcggagtctttttaaaattgagagctcatctattgttg

SEQ ID NO: 194629 - DNA, 122 bp, Homo sapiens
attttggtttccaccaacctctccatctcttgtggaattcattctggagtgaccactagtcgaaggtttaagtgaacataaatggaggtcagggaacaaagtctgcagacctctcgactctg

SEQ ID NO: 194630 - DNA, 122 bp, Homo sapiens
tatttgagctcaaaccaagcgactgttgactttagcacacaaagcaaagatttcactgcccgctagtttaaaaatgaatattttaccaagatatcgatcagcgttataaaattcagttaagt

SEQ ID NO: 194631 - DNA, 122 bp, Homo sapiens
ctggccaaggtctggcctcggaagctacgagctacaatcttccttcatcctacccacccacgaagagcgccaccccagctgcagaccaagtgaccagcccagttagaaggggctcggccgga

SEQ ID NO: 194632 - DNA, 122 bp, Homo sapiens
agcacttgagctgctccgagaccttgctgctcttctctggtgctgggtgctgctgagagtcgggcacgtccttctttggaggtttcacaggccggctgctctcccgccgctggcccagcttg

SEQ ID NO: 194633 - DNA, 122 bp, Homo sapiens
aagctgttaagtcatttctgctaaatacagaatgacccactgtggtcatcttggaagcctcggccatccctgctggctgtgctccattcttgtgcctcgccattggaacgctctagtgagcc

SEQ ID NO: 194634 - DNA, 122 bp, Homo sapiens
tgactttgctttcaacccccgtttgtgtaggtcataaaaccccggcgtaagttggcgttccgctcaggagaggcccgcgactggagtaacggggctgtgctacaggtcagaaccgcactggg

SEQ ID NO: 194635 - DNA, 122 bp, Homo sapiens
cttctgcctacaagcctggtctcattttcctctacctaaggatcttcctccatgcaatttcggcctaggaggcccttcccgccccttttcgcctagctaactctttcggtactcaaccacca

SEQ ID NO: 194636 - DNA, 122 bp, Homo sapiens
aatagaagtcaatggactcaggaaagcagccataaagcctatttgagtttccatactgatcgcagatcttctagtgttggtctaaatattctagtgataaacaattcagcacctagaataat

SEQ ID NO: 194637 - DNA, 122 bp, Homo sapiens
tggagaagggggcgcagaagaggtgactgacccggcaaggtcaactctgggatcacctggcgccacaggccatacacagtaaatgggccatgaacaggcaggctacccagtccatactccct

SEQ ID NO: 194638 - DNA, 122 bp, Homo sapiens
gtcgagacgggtacgggccggccgcgcctcgcgcatgcgccctaggcccgcagggccccgcgctggaagctcagctcccactgtaccctgctttaaccagtcaggcaattcatcttccccaa

SEQ ID NO: 194639 - DNA, 122 bp, Homo sapiens
gacacaaacaaaaccgacgctccgggtctccgtagtcgttaagcaaagaggaagaggaagcgcttcttcattaggccacaggaccgggccttagaacttttgggttttatccattaaaggtc

SEQ ID NO: 194640 - DNA, 122 bp, Homo sapiens
ggatgtccttgtgcttcatcatgtggttctgcagctggctcgggtactggaaggtcttgtcgcactcggagcagttgtactggatggggccccggtgcgtggtgaggtgtctcttcagctgg

SEQ ID NO: 194641 - DNA, 122 bp, Homo sapiens
cctccaccccctcccccaccccggaggccgggctggacgcgacccagagcctccgccacccgcttctgccactcaatggaggacggtctgctggagatcatgaccaaggacggcggcgacat

SEQ ID NO: 194642 - DNA, 122 bp, Homo sapiens
tcctttgcccactttttgatggggttgtttgtttttctcttcaacatattttaaaactaccgcaccaggttttgtgccaattggagtatcctatgactctacctcaataatttctgcctgag

SEQ ID NO: 194643 - DNA, 122 bp, Homo sapiens
gtttattaatatctcaatcagcatctctgggggtggaactaggtatttgtaacgtctccccgtgggtttctaatgcacagctaagtgcccaggataagtgccctagggcaatctaagtaaaa

SEQ ID NO: 194644 - DNA, 122 bp, Homo sapiens
gctgacggcggccaggtgaggcggggcactgggcgcaccctagagagaatcgttcgtctccgccgccggcgggccggccccactcccggagaggccgcgcggcgcgaggctgcgggcgtgcg

SEQ ID NO: 194645 - DNA, 122 bp, Homo sapiens
cagcccagctcgcgccccgcggcagctccgcagtgcactagccaccaccgccgccgccgccgctccgccagacctgctgccagcttgcccggtccagccctgagagagcctcgaacgccagc

SEQ ID NO: 194646 - DNA, 122 bp, Homo sapiens
ataatcctgtctttgtctttttcttttctttctttttccctttttagtgatagagggtcacggggtcacagacaacatacagagattctcctcactgccaccttacctacctgtgagctacc

SEQ ID NO: 194647 - DNA, 122 bp, Homo sapiens
aaatcacactatgagcacagataaccccaggcttcaggtctgtaatctgactgtggccatcggcaaccagaaatgagtttctttctaatcagtcttgcatcagtctccagtcattcatataa

SEQ ID NO: 194648 - DNA, 122 bp, Homo sapiens
cctccttttggatgcttctaaagtctctttgtctctggtgttggcagttccatcggcaagcgtcaaggtgtggacgcggtttgcttttatttatcctgcttgggacttggccttgatcctga

SEQ ID NO: 194649 - DNA, 122 bp, Homo sapiens
tgatctcctccatcaacgtaggggactcctagtggtacatttcataaacggctgcacctgcgtgcttggaaaacatgctcagggtgctgagggatgaggataagttcacaaatgacatcgat

SEQ ID NO: 194650 - DNA, 122 bp, Homo sapiens
gtagtacccctatttcccagtttttgcaagagaataggagcctaacttcagtgggctcctcgctctaagttgtaaaactacctcctgtcttgaatataaaaaaaaataaaaaagtttacttt

SEQ ID NO: 194651 - DNA, 122 bp, Homo sapiens
ttttttgtatagccaagcgcatacaacccattacatacacgttttcaagataaacaataacgagtcctcaagtaagaggacttgtcacatatagtttatctttttttttttttttttttttt

SEQ ID NO: 194652 - DNA, 122 bp, Homo sapiens
tcataaaatataattttccatatttttgtggaggaagaggcccatacaagcaagaatgctcggggctcacatgtcagaatgcagccttggtcatgactgatcctggccttcgtatggttctg

SEQ ID NO: 194653 - DNA, 122 bp, Homo sapiens
taaagttccaacagctttaagtttggattatttaatttcacactttgaaggagacaaatgcgctgaatgtaagcgattttaaattagatgcttaataccatccttaaataaaaaggacaagg

SEQ ID NO: 194654 - DNA, 122 bp, Homo sapiens
acctgctggggcccccccgagtctgcaaatctccctgaatctgtttccccaccatgtcaccgggcacccaggagagctgcacctgcaagtgactgggtgcttggcccaggggtgggtgctgg

SEQ ID NO: 194655 - DNA, 122 bp, Homo sapiens
gcggaaggccgctgtgttccaagatgagattctgcgctctagccggcagttagtgctgcccgagctgggcgtgcacagacacgtgctagtcgtgggctgcggtgggctccgctgtccactgg

SEQ ID NO: 194656 - DNA, 122 bp, Homo sapiens
ttgtctataacggcaaagaacagaacagtgacgtgggggcgtttcacactcagatgggtccgggggtaaatgtggggggtgcagggggaggactctgagtgaagtcttgggccgtgcgtctt

SEQ ID NO: 194657 - DNA, 122 bp, Homo sapiens
cgacttggcctattttgcgatactcgcccctcccttgggtaatccctcacgccctccctccgggcacctctgtgaagacacgtggaagacctgcccctggcgtcacaaccgctcgagatgaa

SEQ ID NO: 194658 - DNA, 122 bp, Homo sapiens
ccccagccccggatcctgggtcgccagggttttccgcgcgcatcccaaaaggtgcggctgcgtggggcatcaggttagtttgttagactctgcagagtctccaaaccatcccatcccccaac

SEQ ID NO: 194659 - DNA, 122 bp, Homo sapiens
gaaaaagggctgctgaatataaatcgcaaaacttcaatggtggatgacaacttctacacccgtgaagttacacagctagttaatggcggggccaagaccagaatctacacttgcagaacctc

SEQ ID NO: 194660 - DNA, 122 bp, Homo sapiens
actctgaagcctgcaatggggcagcgattgcagcttccttcgtcgttgtgtgtacgccggcggtcacctgtctttgcaccccgctctgcagcctgcagtggggcggcgactgcagcttcctt

SEQ ID NO: 194661 - DNA, 122 bp, Homo sapiens
aaaagccgtgccttgaaggccggtggctggagtcagacgttttctccctaggcgcgatcacgtgagccagggacagggggcggagcacgctgcgcggtcacgtgacggccggcgtgggcggg

SEQ ID NO: 194662 - DNA, 122 bp, Homo sapiens
tagtggttaggattccagctgaagagatttgagggctggagtgatttgatggcagggagtcggaatcatttggaggttccttgactcacatgtgcctgtgttgggaagacttgaagactaga

SEQ ID NO: 194663 - DNA, 122 bp, Homo sapiens
ctcccaagccctggctgccagggcacgtcaccgaggcagctctgaccttctcctcgatctcgctggctgtgtgcttggtggtctccagattctccaccaaggccgtgtctcccagaaagttc

SEQ ID NO: 194664 - DNA, 122 bp, Homo sapiens
tggtgcccccaccccgtggctgtcaagatggtcagggccccctccctgggctgagctccacgtctagggacaggctcgtctgcactggtgctcctggtggctccacgtctgaggacagggaa

SEQ ID NO: 194665 - DNA, 122 bp, Homo sapiens
ccacaccactgcctggcgccgtgcccttcctttgtcctgcccgctggagacagtgtttgtcgtgggcgtggtctgcggggatcctgttacaaaggtgaaacccaggaggagagtgtggagtc

SEQ ID NO: 194666 - DNA, 122 bp, Homo sapiens
aatgagttaatgctctgggtgaaggaggaaagccctcactaggaagagacttgtgccacccggggcaagaacatcagagatccagtgacagcccagcgacctccgggatcaattgcaatggg

SEQ ID NO: 194667 - DNA, 122 bp, Homo sapiens
atcaacttccgcggtaggcgggcgcctgccatgcagatggccaatcctggccgaaagaggcggtggcggagggaggcggggcccgccgcggtttccacccagggcggggaagtgggcggggc

SEQ ID NO: 194668 - DNA, 122 bp, Homo sapiens
ccgccgaggcaattcctaatgacagagcaggtcgggaggacagcgcgaggaagtgaatgtcgcccaacccgtttgaggccaggaggctttggcgttgcccagggggttggcagctgctggag

SEQ ID NO: 194669 - DNA, 122 bp, Homo sapiens
gcagggttggcaccttcaggaccccgaggacactcagaaagctctagagattcccgcaggcggctgggttggtgaggcctgggatggggtccacgctcacacccatacctgtgagcagaggc

SEQ ID NO: 194670 - DNA, 122 bp, Homo sapiens
tcctgtcttgtatgctctcttatgtccaagtaagggcacagataaagtttgacacatactcggtggagtatctaaatagaaaatgtactgaagcaaaccaagaacagagttttaaaaaaaaa

SEQ ID NO: 194671 - DNA, 122 bp, Homo sapiens
tttgttctctgctgctcacaaacctgtgtgtacacgattataagcacagtggccacaaatcggcgtcacacgttgggtggtggccgacttttagttactgctggcctcggttacatttcttt

SEQ ID NO: 194672 - DNA, 122 bp, Homo sapiens
cagagatgggcacacagatgggcttgccacgctgccatgacacgtttccaaagagacgctcggattccgaggctgcccaggcattgagaggcagccgtagtgcactggttttctgtgtgact

SEQ ID NO: 194673 - DNA, 122 bp, Homo sapiens
gctatgtcgtggggactgagcaggccgactcctcccccatcgcacgtccaggatgaagagcgctgtttaggtttgaaacctgcagactcagtcccaaccgaactgggcagacaccagaccgg

SEQ ID NO: 194674 - DNA, 122 bp, Homo sapiens
ttgagtcacccttacacacctcactagatgcacccaccaacttgcagtggggtctcaacccgactctgcctcaactcaccgcctgctgcttgctctggaattcgtgctctcgctctctgcgg

SEQ ID NO: 194675 - DNA, 122 bp, Homo sapiens
gcacccggtccggccctgtgctgggagacctgggctgggtccccagggtgggcaggagctcggggagccttagaggtttgcatgcgggggtgcacctccgtgctcctacgagcagtacttcg

SEQ ID NO: 194676 - DNA, 122 bp, Homo sapiens
cggaagctgccctcagtggccggagggttgcggccttggccctcctcaggtgctatcggccgtccagccccctcattcctgtgagtccacgtcactcccggttctccccccttggtctgggt

SEQ ID NO: 194677 - DNA, 122 bp, Homo sapiens
ctttttgcccgcctcggcttttggccccccgccgccgctgctttttgtcccccgccgacgcggctttttgctggccacggctttttaccccccgccgcggctttttgccccccaccacgccg

SEQ ID NO: 194678 - DNA, 122 bp, Homo sapiens
ttaggataaaagatagatgaaaggggctcggaagaggagacagcggttgtccagggcctgcggttcaccgcctcagtgaagggctccaccgcaaccaccaggcttgttgctttcctgggcgc

SEQ ID NO: 194679 - DNA, 122 bp, Homo sapiens
gggcgggcagctgtaagacattcggagggcgggtcgggcctggctggggcggagactgggcggggccgggcccgggagcctcctcagccccactggcttgccccgcgcgcgcttcctccagc

SEQ ID NO: 194680 - DNA, 122 bp, Homo sapiens
ccggaccgcacccttcagccgctgccctgacccggccagcagctgcgaaacccgtccacgcgaaattgagttcttggctgggcccgtgcctcgtgctccggacctgggatcctcgaggcatc

SEQ ID NO: 194681 - DNA, 122 bp, Homo sapiens
ttctctggccaggccgcggggccgttcggcgcggggcggggcgtcggggagtttccgcagcggttagaccggccaggggacctcgggacaatgagcctttctgttttaaagccggaacccag

SEQ ID NO: 194682 - DNA, 122 bp, Homo sapiens
gccgagaggaaggtgccggagcccagctgcactgaggtgggtgcaggcggcgctgggcaacggcgaaggacccccctccatccccgcctgcgtttgcttctgcaccccgtggacaccgatta

SEQ ID NO: 194683 - DNA, 122 bp, Homo sapiens
gccacatcgagggtgaataaaatccttcctgtttgcagccctgtttgcggttggtggcagcgatggacactgcagccagccacagcgtagaaaggcgtcggggtaagtgcgctatccaggct

SEQ ID NO: 194684 - DNA, 122 bp, Homo sapiens
aggtcttacgcatgcccatgcacttctccttgtcgatgcagagggtgttggccttgatggcgagctcgtgctccagccggcacttggtcatgaccagcagctgcagcgtgtcctgtgtctcc

SEQ ID NO: 194685 - DNA, 122 bp, Homo sapiens
gaggaaaaaagaaacgtagggatcaggagtcctagatgtccttggcaccctggccacacacggtaacaattcctcatggaatcctcagcaatgaggactcactagccatgcttgttccattg

SEQ ID NO: 194686 - DNA, 122 bp, Homo sapiens
gacatgctctcctgccccagaagtaattgcactcctaccctgctggagtgcaaacacgggcggctcaggtcctgtgcagtttcaaagcctagggatcaacatatctgaatttcatcacacac

SEQ ID NO: 194687 - DNA, 122 bp, Homo sapiens
gagtttccaacaagaaagcagctccagtcgtggcatgatgactcagggtggcgttttaaacgctgaataaacccattccttagctctttaataaatcgctaataacagcaaaaacagccttc

SEQ ID NO: 194688 - DNA, 122 bp, Homo sapiens
gagccttgctgagggcactgaagctccggggagtttatagctggaggctcgggcccgccccgaggggagagggagggggagagaattcctttgctcaaacacaagcctgggagttcagagac

SEQ ID NO: 194689 - DNA, 122 bp, Homo sapiens
gcgtgtgcccggcgcccaagttcgaaacgcccgccagagccgcagaggcccgctcgggaacgtttgcagaccgttccatgcttccgcctccaaaggctcttgggtagtgacccggccgactg

SEQ ID NO: 194690 - DNA, 122 bp, Homo sapiens
tccctcccagttgcgggttccgctggcggcggtggcgctgacaagcccgcgccgggggggcgggggagtccctgctcacacagactgcgcccccacggagtgaggccgcttcctagacctcg

SEQ ID NO: 194691 - DNA, 122 bp, Homo sapiens
cctcgccctttcaccccctcgggaagatcaaagtgtctttagcccaagcatggccttgagcgacttcatcacacctgcatgaggtcacaagcagtcactagcgcaggggggtgaggcgagtt

SEQ ID NO: 194692 - DNA, 122 bp, Homo sapiens
tatcaagagagtgaatccagaacgagggaaaagagaacatggccgtgaccccggagggatcggatgttagaacttcactcttggatttttgccctcaggtgactttgacgtttgggggttaa

SEQ ID NO: 194693 - DNA, 122 bp, Homo sapiens
acacctgcggattgggggacggacttccgggctttactgttgtgagcaaagctggctgtgcgtgtccccaggaggcgtgtgctagttcctgtggctgctgcaacaaatcactacaaactcca

SEQ ID NO: 194694 - DNA, 122 bp, Homo sapiens
gctggggacacctagactcggccaagaaacgctatgaagtctccttgcagcttcaccccacggcatcaggaactaaggagaatgcaaatgcaacagaaagacgctgatcctttttccttcat

SEQ ID NO: 194695 - DNA, 122 bp, Homo sapiens
ggccctgtcgacttcctttctgaggacgtttagtgacaagcttctccgaagcaggagcatcgtctccccacgtctcctgtcggctccctccagaagctgcagccaaatggaactcaaggaat

SEQ ID NO: 194696 - DNA, 122 bp, Homo sapiens
gtgtagtgcacacctgtagtccagctactctggaggctgaggtgggcagattgcttgagccgggggaagttgaggctgcaatgagctttgatctcaccactgcactccaattctgagactgg

SEQ ID NO: 194697 - DNA, 122 bp, Homo sapiens
agtggggaggagcacagacgccggcgcgaggctgggcgaggggaggggaagcgaagcgcgcgccctgagctctgcacgccccgcctccgaatcctcaagatggcggccgcagagccgcccac

SEQ ID NO: 194698 - DNA, 122 bp, Homo sapiens
gcggcaacttccgctccagggtgccaaggtaggtccagacgacgcctaggcaaccgggggcggggctcccaaagcctgtcgtcgtggcaacgagtagtgattgacaagcctctcgctctagc

SEQ ID NO: 194699 - DNA, 122 bp, Homo sapiens
cccctgcctgccactttctgtctgatgcccctggctgcatgcgcttgcaggtgagccccccgcctgctgctttctgtctgacgcccccagctgcatacgcttgcctgtgttgttcataacgc

SEQ ID NO: 194700 - DNA, 122 bp, Homo sapiens
cctgccctgggagagtgcaatgattacccggcactagtaataatctcccgtcaggtggggcgcagtggctcatgcctgtaatcccagcactttgggaggccaaggtgggcagatcacctgag

SEQ ID NO: 194701 - DNA, 122 bp, Homo sapiens
ttgggaagggcaggtgcctcttcttggggaacatgagtcacctccctttcaaaacccatccgtgtgctggagtcatgggagctcagaacagaaggagagatcctgactgacacccgtagggc

SEQ ID NO: 194702 - DNA, 122 bp, Homo sapiens
tcatcccgtcccacgtgccagccgggctctgcccttagcacacatctgatccacgtgtgccgctgccacccggccgacacggaggcccccttggaccctggcctcctctccacatagcgatt

SEQ ID NO: 194703 - DNA, 122 bp, Homo sapiens
cctccctcccaccgcctaaggtttttccgaagctgctgggcgtgcgccgcgtttctgaggcgggaggagacacttccgagccagctgtgtgacatccgtttacacagccgcgctgacgtctc

SEQ ID NO: 194704 - DNA, 122 bp, Homo sapiens
agccgggaacacccccggagccggagagggcgctgcggggagcgggctgtccctcagtcccgcccctaggcgccacctgagggaaaaagactctcccttcgggtggcccagcggatttttaa

SEQ ID NO: 194705 - DNA, 122 bp, Homo sapiens
tggccacagtgaattgataggcaagcaatgcttctctaccaatatcatttccttagtctccggagatgtttatgcaaatagaggctctcactttagtaagttggcattgtattgtatgaaaa

SEQ ID NO: 194706 - DNA, 122 bp, Homo sapiens
gagccaagcctcgagcctctggggcctttcagcccctgcccctttttcaattcacgttttcgcgtccactggcaggaatgccatgtgctgcgatgccagcacagaaaccccactgccatgtg

SEQ ID NO: 194707 - DNA, 122 bp, Homo sapiens
cttgggtgtggtccctcgggtccagtctcgcaggcgggctccaggtggactgtagggtaacgccaccaagatgctgggcatcccgaacttggtgtttggacacttgattgtggacctgcgct

SEQ ID NO: 194708 - DNA, 122 bp, Homo sapiens
cgtctccctaggtgcttggtgatgcaggcagtgaccagctaactttgaatcagtgacccccgaaggatgatactactgaacaggttatcatggctgcaaatatcacctgagtagaaatcttg

SEQ ID NO: 194709 - DNA, 122 bp, Homo sapiens
ccagaaagttccctgtggggacatggtcaaattgtggtcaatgtaaagaccacagttaagcgagggagggaacaactcaataaaatctgttagagtcttttacactgaactttcctggcatc

SEQ ID NO: 194710 - DNA, 122 bp, Homo sapiens
ggtctgaaatgaataacgtccttgtaggcacaccagtccccctgggcggctgtcacaggacgccgcggtctagctggcttccccgacggaaatgctgtctcaggcctggaggctggaagctg

SEQ ID NO: 194711 - DNA, 122 bp, Homo sapiens
cggccgagggaagggcgcgccaggcacctgccgcctccgccccggcggcccaggagggctcggctctcacctcgccggttcatgggtcgtatccgcaccgccactttcactttggagtcccc

SEQ ID NO: 194712 - DNA, 122 bp, Homo sapiens
ccagaggtctccaccccacgggaggaaggctgaggccaagaccccggaagagatggaccgcgtgaccagataccccatcctgggcatccctcaggcacaccgtggcaccggcctggtgctgg

SEQ ID NO: 194713 - DNA, 122 bp, Homo sapiens
gaaaactagaagcaaggctatttgaatcatagaaccctgaaaaagctgggcaggaagaagcgagagacaccactaaaatcagggggttgaagtctgcgtaataattagttaaaccttagcat

SEQ ID NO: 194714 - DNA, 122 bp, Homo sapiens
caacaccggcactgaacagcgaacacgccctgtctcggcgccccgcgcaggcgcacacagcgccgctgccagctccacgcccgaccctacccatattaggagaacagctctccagacgtgtc

SEQ ID NO: 194715 - DNA, 122 bp, Homo sapiens
atctagcttgagagtctgaggcaatttcctgatgatacatctcagtgggcctaaaggaaacgaaacacctacaccattgctcaatgctggaaaattctccacagtggccgacccctttagga

SEQ ID NO: 194716 - DNA, 122 bp, Homo sapiens
ccccaactgtgacgttgctatttcatttaccacagtagtttgagtcatttccacatcttgcgagtccttccgaacgagtctcctttccttggggctcgcaaccacccaatgatcgattcagg

SEQ ID NO: 194717 - DNA, 122 bp, Homo sapiens
ctgtctattttagatttcctttcctggatgaaaatgttgtctcctttctaaattctctgccgatttgggaaaaagcaaacttgactttaccccgaggaattggtgaaaaattacttttacgc

SEQ ID NO: 194718 - DNA, 122 bp, Homo sapiens
tgctgcagcgcgggtcagcacatcagcccttttatggctgagtgattattccaccgtgcgcgtagaccgcgtcctttttgcccatccaccgccgatggccgtttgggctgtctccacctttc

SEQ ID NO: 194719 - DNA, 122 bp, Homo sapiens
aacatagaaaacccagcagagagcagtacaaatcagcatgcggtccctgatgcgaagtcgcgggcaggccagggttccctgcggaagcagcctcgtggtgagagcactcctgcccaggtgtc

SEQ ID NO: 194720 - DNA, 122 bp, Homo sapiens
gcgcgggggtccgggggcccggggcgccccgccgcccgcgccccccacccccgctgcaggcgccctccccgccgccgtcccccgctgcgcccagctccctcgctgtcacccgctcctgctcg

SEQ ID NO: 194721 - DNA, 122 bp, Homo sapiens
caacatggttaaaccctgtctatactaaaatacaaaaaattagccgggcgtggcggcatgcgcctgtatcccagctacttgggaggctgaggcagaattgcttgaagccgggatgcggaggt

SEQ ID NO: 194722 - DNA, 122 bp, Homo sapiens
ggctgtgccccagggttctaaaggcggtggtctcagagcagcggctgacccgtgacaccgcgtgtgcaccgcagtgcgccaggtacggctcgtacggggcctgcaggcagtggaggcacggg

SEQ ID NO: 194723 - DNA, 122 bp, Homo sapiens
ctgctcctttcggaaaggactttttttttccccctgcgttgcgtcagggcggttgcctggcgacggccgagctctccgccgcgagcctttcaccgcgatcccggcctcgcgttctcgccccg

SEQ ID NO: 194724 - DNA, 122 bp, Homo sapiens
ggttgttgttgagggatgtgagccaaatgtgcagtaacagctgtcatagccgtagatagacgcagggctctctaaatttttactgaattaattaatggactgcagatccgagacctacgtag

SEQ ID NO: 194725 - DNA, 122 bp, Homo sapiens
tgagtgtgtccaaccccagcctctcatctcccttccacccggcctcatctccccttcacccggtctcccaggaaaggtgaaggagctttccgaaccaggcctagggagcccgcgttgccacc

SEQ ID NO: 194726 - DNA, 122 bp, Homo sapiens
cccttttctttgatggctctcctgagaaacctcccgaagatgactcagactctctcaccacgtctccatcctccagcagcctggacacctggggggctggccggaagttggtcaaaaccttc

SEQ ID NO: 194727 - DNA, 122 bp, Homo sapiens
cgtttcttcatctgctcctggggccgcctgcccggtagcggagattgaatcgcatgttgacgtctattacgatgattaatgttcttgtcattcccgtcactagcaggtgagaggctgggagg

SEQ ID NO: 194728 - DNA, 122 bp, Homo sapiens
aatgaactaatctgtgtaaaagaatagttttagtctcttttcttatgtcacgttgactgtcgcttttacaaattgggaattttacaggttgagttgccttatgttggggttcctctaggtaa

SEQ ID NO: 194729 - DNA, 122 bp, Homo sapiens
ggcgtgcatacttggagtccacaggagtgtgtgctcaaaacacaaaagtcccagtgaccacgcaccactcggcatcaaagcaaaggtggcaggagtgtgtcccctggccacttgccttctca

SEQ ID NO: 194730 - DNA, 122 bp, Homo sapiens
atccactaccacaatgaagataaagaaataacatttccatagtcccctaaagaatagccacgcgataaaattccacgcagtccttaaaaagaggaggataaatttgtaagtattgttatgag

SEQ ID NO: 194731 - DNA, 122 bp, Homo sapiens
gttgggacgcgacgctggttcccaggggagagccagccgctgccgcggcactggttcagacggccaggccctagggacccaccatggatcctgaacacgccaaacctgagtcatccgaggca

SEQ ID NO: 194732 - DNA, 122 bp, Homo sapiens
aaatcagtgaccaccctcaacagcaaagaattcatacttttaacactggatttccactttcgtcatcagtcatgggacaaaaaagtttaagatatatcttcagaggaaatagaattcaacag

SEQ ID NO: 194733 - DNA, 122 bp, Homo sapiens
agattgcttaaccctttgcattcccagcaagaagcgactttttcacttagaagtaaaacgcgctgggctattccagtttttctccccacagtgtgtgtgtgtgtgtgtgtgtgtgggaaaaa

SEQ ID NO: 194734 - DNA, 122 bp, Homo sapiens
aggtggtgctgctgctgcggtgagcgtgagacccgcacccccgaggagctggtaagaagccggcggagtcggcctggggagggggcggttgctaagggactgagagaggcgttgccgggggt

SEQ ID NO: 194735 - DNA, 122 bp, Homo sapiens
aatttaaattgccaacccagagttttctcttgaacttcaaatttttatcctacgtgaaaccgacagtgcctactgatgtccccaggggcacctcaaacttaccatgtccaaatctaacatca

SEQ ID NO: 194736 - DNA, 122 bp, Homo sapiens
agaagatggcggggaagaggcaggaccagcttgcagctcccgatcggacagacagagcagcgtgtggggactcacactgtgaacttttgatccaacaactgccacagcaacataccaggtaa

SEQ ID NO: 194737 - DNA, 122 bp, Homo sapiens
tcagtttgtgcttcagatacaagagcttgtcctggcctgctgcacctagaatgtcgaaggcgctaggaagtgatgggcctgtgcaggccatgggcacaggtgggtgcagcctccggcagcag

SEQ ID NO: 194738 - DNA, 122 bp, Homo sapiens
gacagagagaggtgtggttgggcagggcatcataggatatatagagcttcggggtttattcgcttccaaaggtcagagacgtccccaagatgtcagcaagtagaacagtgccagaatagctg

SEQ ID NO: 194739 - DNA, 122 bp, Homo sapiens
cagaaaaaaaaaattttgtgataaccaattttaagatgagaaccagtggcatgctgtagccggctggtgccggtttgtgagagctgactgtgcacatatcttcccaactccatgtttagtgg

SEQ ID NO: 194740 - DNA, 122 bp, Homo sapiens
actcgtggcgagcagcacctgggcaagccagcaggtgcttgagccacggggctggctcctcgttgagctatctagaggagtgcaccgagcaaagcgcctgctgaaaatactttgtacctccg

SEQ ID NO: 194741 - DNA, 122 bp, Homo sapiens
cttttgttaataaacttccaactccctcctcagacccgaccgcatgtctgtcatggacctcgccaatacttgctccagctttcagtcggacctggatttctgttcagattgcggctcggtcc

SEQ ID NO: 194742 - DNA, 122 bp, Homo sapiens
accatttgacagtgccaaggactttggtggcgagaacttttttctccgcgtcttcgctgtcggcggcggtggctaaagaggcggcggccgcggtgcccgtggctgcgggggccccgtcccca

SEQ ID NO: 194743 - DNA, 122 bp, Homo sapiens
cttctggacgcacggagcccggccctccagccggcgcccgccctgattggcgcccgaggccggcctcccgccggctcacctgccactcccagccaatcggggccaccagaattggggctgtc

SEQ ID NO: 194744 - DNA, 122 bp, Homo sapiens
gcactggaaatgataaaccactttctcccagaaaaagcaagcaactacaagaggcaaaaacgaatgagctagagtatattttaaaattctgatagataaaaccagctctttgaaaagaccca

SEQ ID NO: 194745 - DNA, 122 bp, Homo sapiens
gtgtatagcaggtgttggcagagggtgaaaaacgtagctaagaccagaccaaaccaagaccgaattccagaggggtttgcagaaggtagacccaacccacccagcaaggtgaaatctaccag

SEQ ID NO: 194746 - DNA, 122 bp, Homo sapiens
ccagggaggcgcccatttcccttcccccgcgcctgggaacgcggtgctgggggcggggcccgaccgctgccccctccaaacgcctcgaccgccaggtgccccgaagcccggcctcccctccc

SEQ ID NO: 194747 - DNA, 122 bp, Homo sapiens
tcgcagccagcctgggagctgggccatgttggccgcagatggccccctggtgaaggttcccgttggctttgggaagtagacaacgggtctgcctcacggggctgaggtgggactggaggatt

SEQ ID NO: 194748 - DNA, 122 bp, Homo sapiens
tcgccatctacaggagcagaagaatggacttgctaaatgacctagcactattctctggcccgatttatcatatcccttttctcctccaaatatttctcctctcaccttttctctgggactta

SEQ ID NO: 194749 - DNA, 122 bp, Homo sapiens
acacttaacggaaacaggcaggctcagggctccccgacttccctatggctgatgtcaaaacgcctcgcgggggcagcccaggggcacggccgctccgggggtcccctttcgtctggagaaac

SEQ ID NO: 194750 - DNA, 122 bp, Homo sapiens
gacagcagaggaccggctatccgaggccaaccaaggccccacagccctgccatatccttccgtgggattctgacttaggggcgttgggtcataatcccacagatagtggctttaccccattg

SEQ ID NO: 194751 - DNA, 122 bp, Homo sapiens
ctctgtccttttggccagctttaggagaaaccccagaactctcctcttcttacaattcctcgctgatggcgaggtttctccactgaagagccttccctggggttcataagacgctctgcaag

SEQ ID NO: 194752 - DNA, 122 bp, Homo sapiens
acagcctcgttagtccttgataaatgcttataagattctgttgccgattgcgggacagaccgtttaccactcactaggatgaaagcgttgggattctaagtatcccctgaatcttgcaatta

SEQ ID NO: 194753 - DNA, 122 bp, Homo sapiens
ctgagcttttctccatctcgctctccgcgcctctgttttcaaggttttagaggtgaaacccgccagtgaggctggagcagctcagcagtcagggaaatagtacctccctgagaagtcgccgt

SEQ ID NO: 194754 - DNA, 122 bp, Homo sapiens
tgaagattttgaatcttatatcaaacacttcatatatagtcaacaccctatgaggctattcgaggagaaattcattgctatttggaaataatagcttctggaacatatctgtgttccttggg

SEQ ID NO: 194755 - DNA, 122 bp, Homo sapiens
aggcaggggccaggctgctgggctccccgaggcccccgggggctgggagtgggttaaagccgtccagggcttcgctagggaggggctccagcaagaccctgtttaaacctccttcccaccac

SEQ ID NO: 194756 - DNA, 122 bp, Homo sapiens
gctccccgtgttctctgagctggcttagcttgaaggaacctcacaaaaccaagcccggatcgctgtcagccactcactcagtgccgcatggagctcctcggacagcgcaacgtcaaatgtct

SEQ ID NO: 194757 - DNA, 122 bp, Homo sapiens
gcttttggagaccttacaaagcatgtattccctgaccaggaatcgaactcgagctgcaggcggtgaaagcgccgaatcctagccactagaccaccacggaaacaacagcaagcacttttcat

SEQ ID NO: 194758 - DNA, 122 bp, Homo sapiens
ggcggggtatggggagggtatggttgtgagcaggtggccatgacggaggctccagattctcgtgtagcagtcctggcccacggccgccacgactccttcttcttcgttcacatgcacgggta

SEQ ID NO: 194759 - DNA, 122 bp, Homo sapiens
ggagccggtgcggtggatccgtccacaccatgctctgggtgttctaagtgtgcgtctctgcgtgtgtgggcaggtgaggtatctggggcagacagggaagggcatgagagagctttctgggg

SEQ ID NO: 194760 - DNA, 122 bp, Homo sapiens
tccagaactcttgggaggctgtgatgagaaggacgtactgccctcacccagcccacttcacgtcaccctcctaaggaccaggcttcacaggtgataggagaatttctgcagtctgggaggca

SEQ ID NO: 194761 - DNA, 122 bp, Homo sapiens
agtgggagcggctgcttgtgggcagggtggacgcggggccacgtcttggccggcgttttgcggggtcttcctgttctgaacgcgcgtaacttttgcctcagtatctcacttcttggaatccg

SEQ ID NO: 194762 - DNA, 122 bp, Homo sapiens
tttttaagccggtaggaaaagcgcagtcttcgggtgggagtcactcgattttccaggtgccgtccatcacccctttctttgactaggaaagggaactccctgaccccttgtgcttcccgagt

SEQ ID NO: 194763 - DNA, 122 bp, Homo sapiens
cgcgcccgggcctcggcctccgggcaggagttgtggggagcccgcgggaaggcagtaactcgtagagagaacggaggaaagttcgagtccgaacggaggaaagttcgagtccaaactccacc

SEQ ID NO: 194764 - DNA, 122 bp, Homo sapiens
ctggaaactcccccgaggaatctctcctccctgctgttcttccccacccccagaaagcttcgtttcatgtctaaaagctcaaagatgtgctgagtcatactgtacaaatagcagtggactag

SEQ ID NO: 194765 - DNA, 122 bp, Homo sapiens
tcacctttttcttgagcttgttgaatttcttctgcagagcctcctcttcctcgctcagtccggggggtatcaccaacatggtggctcctagttcaggggcagggcccaagacatctttctcc

SEQ ID NO: 194766 - DNA, 122 bp, Homo sapiens
accttgctatctaatgtcacccgagcagaggcaagagcacatatactatcttacagccaccgcaacggctgatttcagccagcctgtgggaaagaaagatctagctgagaacactaatagac

SEQ ID NO: 194767 - DNA, 122 bp, Homo sapiens
gtggaagctgtccgatatggggactgtctgatgtggaagctgtctggtttggggactgtccgacgtggggactgtccggtgtggggactgtccattgtttgctgcacttgtctttgaggttt

SEQ ID NO: 194768 - DNA, 122 bp, Homo sapiens
ccctgacctcttcccacccgacctggcttcggtgaagtccccatttccatatctgtcaaacggaaccccaatcctgagcgctctggccagagtgggagaagtgggacaaatgtcctgagctg

SEQ ID NO: 194769 - DNA, 122 bp, Homo sapiens
ccgggggccccccagccccgccgcctccctgcgcagaacaggggctccccctcccttccccgccaggagctggggagtcctggcgcgcccactcgattgtttcaacctgctccccctcctcc

SEQ ID NO: 194770 - DNA, 122 bp, Homo sapiens
ggaaggctctacataaacacatctaggtacaggaagacacagtgcgagagcaggtggctccgtgggggaggggcaggcgacataggcctgagcagtgagttaaatgacagggtccctgcctc

SEQ ID NO: 194771 - DNA, 122 bp, Homo sapiens
ccccatatctgctccgatgcccacaaccttcatcgttttggtgcaagcctgtccctgagccgctggttctcatcgaagtctttaggatgaggcatctccttgcacccccacggcacctctct

SEQ ID NO: 194772 - DNA, 122 bp, Homo sapiens
ccgccagcgcccacaaaggctttcggagcctcggcagccgcaggcagtccccgtgccgggcgccgcctcctaccggcttggcctgccgccgacgctcacctccctaagctcgagcgtcccgg

SEQ ID NO: 194773 - DNA, 122 bp, Homo sapiens
gaaaggatgtaaaacaaactgtcaacagccagaatgaccaggcctcttcgaggccagagtcgatgaaatttaagacctgactccagcctgtgagtgcgagagaaggaatgactcttacaccc

SEQ ID NO: 194774 - DNA, 122 bp, Homo sapiens
agacccggcaaaagtggcgtgagttcgcttgctgcgcttcgaggcaaggctggggaaggccgaggacggggcggcgccgcgtcgcgccgctggtggccgacagggccggggccgggcgcgga

SEQ ID NO: 194775 - DNA, 122 bp, Homo sapiens
tgcatcttcccttggggctttaaaaaccacagcccttgggcaggagggaccttcgatcctcggggagcccaggagaccagaacatggtgagtctcgaaggggaatgggagcaggaaactttg

SEQ ID NO: 194776 - DNA, 122 bp, Homo sapiens
aagaggtacagaacacccagaggtgccctcgattccgtcttgcacttgcccttctcccaccgtccagcaataaagcgagagaaacaagtgcaggaaactggccggcagtcatgggagaagcc

SEQ ID NO: 194777 - DNA, 122 bp, Homo sapiens
gcagctggaggccattgtgcgcatcgcggaagccctcagcaagatgaagctgcagcccttcgccacagaggcagatgtggaggaggccctgcggctcttccaagtgtccacgttggatgctg

SEQ ID NO: 194778 - DNA, 122 bp, Homo sapiens
gggaaaggaacggttgtctgggattctggggtgcttccccagcacagaacaggcagcctgcgagaggagatgtcctccctggccctggggtggtccggacccctggctcccatctcccatcc

SEQ ID NO: 194779 - DNA, 122 bp, Homo sapiens
tattaaaatgaaggtaataatacaaaactaagaggattgtggagatgatgacagataatacgtataagtaacttggtgtaggcattcagtaaatgtgggtagttgttacaaatactagctaa

SEQ ID NO: 194780 - DNA, 122 bp, Homo sapiens
agccctgggtgggttacgggtgtggacctggagtgctccccacttccacccttagcgttccgagcacagggcagcgggaggcaggaggcccggcccggtccctgctgccggtggaaggaaaa

SEQ ID NO: 194781 - DNA, 122 bp, Homo sapiens
cagatattccggcctcgagaacagctcatgctgagagccaacagcctgaagaaagcaattcgtcagatcatagaacacacagaaaaaggtaactggccttgtgatgaggaggggctttcctc

SEQ ID NO: 194782 - DNA, 122 bp, Homo sapiens
cccattcccagcaggcgggagctcttacattccgagcgagtgacccctctcaccctctggcgctcacacacctgtaactccaaacctccgtctcagaatggtccaggctggaagggatgatg

SEQ ID NO: 194783 - DNA, 122 bp, Homo sapiens
cctctgcgcagccccaccggggcgctgctgttcccggtcctccccatctctcctcctgatcgcttctcaaggctcatccgtcgttctcgctgcctgtccctgtgtcgctccggtccctttcc

SEQ ID NO: 194784 - DNA, 122 bp, Homo sapiens
cttaatagagcatctcgttggaaataagacggcccagtggaaaagtctagctccacagaacgaaacatactcagggcgggtcagttcctcaacaccattcttctggccctggcagcccagga

SEQ ID NO: 194785 - DNA, 122 bp, Homo sapiens
atccaccaaacaaggatgcctggcttggcggagggatcacaggaaattgtcatgacaactcgtagagcttgggaagtgcttctgcaaactgctttcttaacgattggcgctcggaacagtca

SEQ ID NO: 194786 - DNA, 122 bp, Homo sapiens
tgagccgcagtctgagggccgggccctggcatgggctccatcagatcccgtaatcggatccgggcgctttagccctcacgtgactaggggccaccgcctaaccctgattagcgctctacatc

SEQ ID NO: 194787 - DNA, 122 bp, Homo sapiens
cctccgcgcaggcagcctggagccacctccaggagggctggccgccactgtaattacaggcgcctctccgcgccctggggctcggctctgcaaattaaactgttttctgctttttatctcca

SEQ ID NO: 194788 - DNA, 122 bp, Homo sapiens
ccagaaacataaaaattagccgggcatggtggcccatgcctgttgtcccagctacttgggcgcctgaggcaggagaatcgcttgaacccaaaacgcagaggttgcagggaaccaagatcaca

SEQ ID NO: 194789 - DNA, 122 bp, Homo sapiens
gggtgcaacctgtaacaaggtgccaactaggctaataggcaaggagcactttggggccaacggggaagatataaaaacaggaacagatatttaatgaaacgtcttttttaacccacagaatt

SEQ ID NO: 194790 - DNA, 122 bp, Homo sapiens
ttgcgcgcgctctcctcgcgaccttctcggtctctccaaccaccgcccggcctcccaggccggttcaaattctaagttccagcggtcccaggaaccctggctgcctgtcacttatctactgc

SEQ ID NO: 194791 - DNA, 122 bp, Homo sapiens
ggacccgaggcttagggaatcagaggacacgcagtataagggtcgcaggtcgtggttgctcggaacacgaggtgagaggcggaacaaggctgaagggaagctctgggagtgcccttgccgag

SEQ ID NO: 194792 - DNA, 122 bp, Homo sapiens
tatgtatatactaaaatatcttccctttatcttatctggtcttcgccccatggggcaacccgaaggctaacatttattccttcacacattaatttaagctgctttaattgctgctatgatat

SEQ ID NO: 194793 - DNA, 122 bp, Homo sapiens
gtatggcttaaacctgcttctgaaccgtgcacagttgtaggcctgtctcaagtgttccgtcgttgacttgtgtcccgcctcgccgggcaatgatgtatgtgtggagcgcagtcatgttcttt

SEQ ID NO: 194794 - DNA, 122 bp, Homo sapiens
ttgggaactgagacagaacatcatccataagcgccctaatccacaaggatgtttctcccccgcgaccagagcggctccttctgggatgcagcaagcggcggggaggcagcgcgccggtgcca

SEQ ID NO: 194795 - DNA, 122 bp, Homo sapiens
gaagccggcagcagagtacccgcggtcgcgccctcgctgcttaacaaaggccgccccgctcggcccgccccctcatgaatagttaacaaacctccagccaatcactggccggagcgccactc

SEQ ID NO: 194796 - DNA, 122 bp, Homo sapiens
atacacttcaggtggcatgggctctcccagccatttcgatacatgacacctctgtgacctcgccagcttgaaggataaaatgaaaggttcttagtgaaggaaaaaggcgttcatcttcaccc

SEQ ID NO: 194797 - DNA, 122 bp, Homo sapiens
gtgatgtttagaaccttttgggggattccttctctctcagaatttaacctggcaagagaacgactgagttctaggaattttcttgtctggagagagtaaaataaatgtattttttaaaagct

SEQ ID NO: 194798 - DNA, 122 bp, Homo sapiens
aaggaaattagtctatggaaaagactagttttaacacaaaaatcagctgcatggaatatgcgtttaagggaaaaatattaaacaatcaatggaacagtgactcaatcatgatgcagcccata

SEQ ID NO: 194799 - DNA, 122 bp, Homo sapiens
gttgtttgagacgatatctcgctatgttaccaagactggagggcagtggttattcgtagacgccctcaaagagcactgcaccctcccaaatcctgggctcgagcgatcctcccgccttcccg

SEQ ID NO: 194800 - DNA, 122 bp, Homo sapiens
gtctggtctggggcttctgcccagggcattgtccgcagtactctagaagatgtgccaaggcgggtgggtgaagacagggaccagggcagatgcccgggggcacaggggtgggctgggagttg

SEQ ID NO: 194801 - DNA, 122 bp, Homo sapiens
taagcgactactgcgtgtaggatcgtgcgaggcctggaaatacgaggcctctcaacagtccggcgtgcacactctgtgaggagacctgctcggagggcctgcccgcccgcctggacagtcag

SEQ ID NO: 194802 - DNA, 122 bp, Homo sapiens
cacggaacatcccatcacccgtcacacggaacatcccgtcacccatcacacggaacatcccgtcacccgcagctgcccctgcccctttgtggccagctccccgcctggttcgtctcttctgg

SEQ ID NO: 194803 - DNA, 122 bp, Homo sapiens
tcacctgcacgtgtacctctggggccaacgcaggtgtcgtgagacctggcaggtgcggagcgggaagcagaccctgacgagagggacaccagtgcctgggtgccatgggaggcacctgggac

SEQ ID NO: 194804 - DNA, 122 bp, Homo sapiens
aaggctcgattcagtctcatgtctgctaggcccattctcttttcacttcatcatggcccccggtgagaacaacggtgtcattgccccgtcagtgctgggcctaaggagagggcaagaagggg

SEQ ID NO: 194805 - DNA, 122 bp, Homo sapiens
ttccgttcccagtggggcggcagcaaggacaaaaacatctggagaggcgctctgcaggcccgcctggcaagctggtggatcaggttacttcatgacggcaactgggttcgttccgtaccatg

SEQ ID NO: 194806 - DNA, 122 bp, Homo sapiens
cctccacaaaaccattaacagacaaatattttatgtaaaccttaggagatgtttattaatcgtggttcggcttggggcacataggatgtttgtcaggttagtgaataaatttccctaatgta

SEQ ID NO: 194807 - DNA, 122 bp, Homo sapiens
tatcgcgaggtattggtcagccaagatggcttctaacactggccgccacacttaatatggcggccagggaaatttcctggagaaaatcacgcgagagttgcatcacggcggctgtgcgcgag

SEQ ID NO: 194808 - DNA, 122 bp, Homo sapiens
gcacaacccgtccgcgatctcccggatcttgtagatgtcggagaacatctcatcgtctgccggatacacagagccgcccatcaccgtgcgcctggcgccgccatttcccgcatttcccgcgc

SEQ ID NO: 194809 - DNA, 122 bp, Homo sapiens
ccccattttggggataagaaaactgatctgtcacaggttgaatacttgatcaagctcatgcgtcttttaaatttaagatattctgacttgaatgtgttttacaccagactccatgatttttt

SEQ ID NO: 194810 - DNA, 122 bp, Homo sapiens
tcttcgaggccctggccagccatctgcccagcctcggagggtgggcaacctggtgcttcccgggtggacacacaggaccactcagtggggcctgtgtgggcgccgagacctgggtgtctggg

SEQ ID NO: 194811 - DNA, 122 bp, Homo sapiens
cgaagaggatggagaagtcaagctcgtcttgggggctgcccccaggctcgtggcctggggcgtccccgccgtcgggttggggctgccgctcgggggcgttcatggcgcgcagggcgggaagg

SEQ ID NO: 194812 - DNA, 122 bp, Homo sapiens
cctaagcagccagacacccaagggcaataacgggaaggaaaggtaccctgcatttatgtgcgaggcggggcaaaccgcctgagtcaccgctcacggttgtgtttttccacctcccggccgtc

SEQ ID NO: 194813 - DNA, 122 bp, Homo sapiens
gcagttgcggggatggcagtctctaggcatggagtgggactggcactcctttctcctcggcgttagagcccaggctgcaccatctgccctgggggcagcgctctgtgcagtgtggaagagca

SEQ ID NO: 194814 - DNA, 122 bp, Homo sapiens
acccggctcacagcggcagagcccacgggcctttgataaacatctgggaagggagaggcccggtccccagcacaggcacctcactcaggagagcggagccttgctccctcgtccgtcccgtc

SEQ ID NO: 194815 - DNA, 122 bp, Homo sapiens
acgggggcagcggcggcggcgacggctgcaccggcggcggcggcaccacacaaacaaggacgctgattgggcagctgccaagcgcctcggctccgccttacccacacgccacgacgcccatt

SEQ ID NO: 194816 - DNA, 122 bp, Homo sapiens
ggggggatctggagcggggccaggtagcaagaagaccctgaccctgctctggggctggggcgcgtgctaggggcccgcggggtttcagctgtattttcgaacccctgtgcttggccgagggg

SEQ ID NO: 194817 - DNA, 122 bp, Homo sapiens
aacttgcccgacgaaagtctaaaatgcccaaatcgggagtcattggtggactgcaaccatcggtttctccaatgctctgtggggaaggggaaataacaccggttagaggtgataatggttaa

SEQ ID NO: 194818 - DNA, 122 bp, Homo sapiens
gaagtacaggccaaaagagacaacaaacagcatttctcacctgcttcctctcagtgggaacgtttgctaaatgcttaatgtaagttctcacaggtaaatttcaccactgaattctgaagtcc

SEQ ID NO: 194819 - DNA, 122 bp, Homo sapiens
cactttcgttgactgccaacccgtgcagagcgcttagtgcgtgtccgaccgtgagctgagcgctgtgatgcgggtgctgttaatgtcccattgcacagatggggaaactgaggccggcgcac

SEQ ID NO: 194820 - DNA, 122 bp, Homo sapiens
ctggggctcccgagcgaggtgaagaagttcaacgagtggctgggtaggtccctcctgccccgggcgggcggctgtgctgagcaggaagggggctcccgccagctcccgaggctgcctgcctg

SEQ ID NO: 194821 - DNA, 122 bp, Homo sapiens
tctgcagtcgccagcagcctccgagaataggtttccaacagctgcaggcgcgccaggccgcggctcgtgcgccccacgcgtcccaacagtggtgcatcttaaggcaccacaaaaacgtactg

SEQ ID NO: 194822 - DNA, 122 bp, Homo sapiens
cgtgtccatgcccggttggccaccccgtttctggggggtgagcggggcttggcagggctgcgcggagggcgcgggggtggggcccggggcggagcggcccggggcggagggcgcgggctccg

SEQ ID NO: 194823 - DNA, 122 bp, Homo sapiens
caggaagaggacggttgggctttgagggtccctttaaagcgaatgatttgggtggttcctcggatgagcggcttgagggggctctgctttatgtaccctcccctgtgcccatttgtggggtc

SEQ ID NO: 194824 - DNA, 122 bp, Homo sapiens
ctgacacatagcccggtggggagcacgtgccccgcagggtggctgggctctgctgaaggccgagctgtgcttgaacccggcgccgccccctctaggagctcgcactgcacctctttggcctg

SEQ ID NO: 194825 - DNA, 122 bp, Homo sapiens
ggaaagttgctcccgagctgtggaggggcgtcatcgcctcctagcaacgctcctagcaaccgggtaacatctgctccctgtggtccaatgcgagctgagaacagctgcgcgcccgcctagcg

SEQ ID NO: 194826 - DNA, 122 bp, Homo sapiens
actcacaccagatctttccatgcctcctctgcaaggactcaagagagtcgagagcaaaaccgtgccatagttccataaggagggcaaagagctttatccacgctgaggaacaggcggatcat

SEQ ID NO: 194827 - DNA, 122 bp, Homo sapiens
gggcccccagctccaaggagcagagcttcaaggggcagaattcagccccagtccaaaaggcggtgtcctggcgagagcagggagtggaaaccactatcttgacgggagggagaaaaagaaaa

SEQ ID NO: 194828 - DNA, 122 bp, Homo sapiens
gcccaggctcctgggcagtgccctccaggaagcacagaagtaggggctggaggcgggcttcggtggaccccgagcccgggccggcagccagcaggggtcgctgcagacatgggaatcacggt

SEQ ID NO: 194829 - DNA, 122 bp, Homo sapiens
cgcggacggaaacaccttccaaatagtaggctccgttccaagcgcgggggttattcctgccgggtcttgctggcagccttgtcgggccgggctctggccgcggccgccggccccctctcggc

SEQ ID NO: 194830 - DNA, 122 bp, Homo sapiens
aatggggccaaaggtgaagttgcagctcttgtacaatcagtccttctcactgtacacagtcgctggtcacagagtgaactcccagtctccacagtctcttgaaaatgtgtttattgggggag

SEQ ID NO: 194831 - DNA, 122 bp, Homo sapiens
gcaggatgcaggccaggaggaagaagccgggcaccaggatgctggagaagagctcggacacgctgaactgctccaggcccaggtcccccagcctgtggaggggcagcatcagcaccggcccg

SEQ ID NO: 194832 - DNA, 122 bp, Homo sapiens
caggggggtgcggcaggaaagtgacagaccttggaagctgaagaggagggaggacccacacgctggcttcctcagtgatgggtatctaagcacttcagtgcctcacctaagagcaggtgaca

SEQ ID NO: 194833 - DNA, 122 bp, Homo sapiens
agcagccaccgccgcgtccctctctccacgaggctgccggcttaggacccccagctccgacgtaagtccctctcgtgcgccacctccatccgctgcccctctgcccacgggccgggctcagg

SEQ ID NO: 194834 - DNA, 122 bp, Homo sapiens
gcaccgacaggcgggaacgccaccagcctgtgggcggagtcctggctcggcccctcgcggcgaccttaccccggggtctccccggagaccccctaccggaggcagcccccagaggctctgac

SEQ ID NO: 194835 - DNA, 122 bp, Homo sapiens
taggacaaactttaagaatctcagatattttcagataacaaagactgatttatgtgggcccgttttgtgctctgacaaaacatagagacgcttttgtgctgtgattagcaagggtgctgatg

SEQ ID NO: 194836 - DNA, 122 bp, Homo sapiens
gcggttggtgcggtataggagactcctctgaccggactcgcctgctggccgcgcggcgggcgaggcccaggcaaaaacaaagtcttcccgctcagtaccggccccgcgaggcgctccagagg

SEQ ID NO: 194837 - DNA, 122 bp, Homo sapiens
ggccagtgaaaaacactcctcaggttttgcaggaaaagcagtgaacccttcttttaagctcgagaatgctttaaagatgcatcattggcaagccttgccaaagaaatacgggatctaaatgt

SEQ ID NO: 194838 - DNA, 122 bp, Homo sapiens
ggtatcggtcaatggcggtcagcaggaggctacccacagaggctgtgaaggtcatagtcacgctgccaatcttcagcaggaagacagccttggaatccacaccatggaaaacatggaaattc

SEQ ID NO: 194839 - DNA, 122 bp, Homo sapiens
atcctagtctattttactgttataagttgatgccgtttgctaagtcaaatgtgccacattcgtgacaattactgtagtctgcgaggaaagctttctgttccataacaactaaacctagttcc

SEQ ID NO: 194840 - DNA, 122 bp, Homo sapiens
taggcatttaggttgattctgtatctttgttattgtgaatagtgctgcagcaaacattcacgtgcatgtgtctttagggaagaatgctttatattcctctgggtatatacccagtaatgaga

SEQ ID NO: 194841 - DNA, 122 bp, Homo sapiens
cgtttaaaacaaatcaagaaacttttgggtaacattgcaattacatgaaattgataaccgcgaaaataattggaactcctgcttgcaagtgtcaacctaaaaaaagtgcttccttttgttat

SEQ ID NO: 194842 - DNA, 122 bp, Homo sapiens
cccagcagaagcaggcgcctacctggccgtccaaatagatcccccagggtaccacggaggcgaaggagttggaggtgttttccaggggcaccgatgggcttagagctctcatgatgctaccc

SEQ ID NO: 194843 - DNA, 122 bp, Homo sapiens
tcccggacgaatctcatccaatcagagccagccaggaagccgaggctcagcaaggcctcgcgacgcccaacttcccagggttagcgtctctgatgtcatgtgattccaccctccgcctctca

SEQ ID NO: 194844 - DNA, 122 bp, Homo sapiens
aacctgacagttcactcatccccaggctacttggcgttccggcaaagtgctttagcatcacgagtccagcttgctacctgccccagcataaacgggccggggctccgggaagaatctgcacc

SEQ ID NO: 194845 - DNA, 122 bp, Homo sapiens
tgcgtcgggagctgcccccggatcaggcccagtactgcatcaagaggatgcccgcctactcgggcccaggcagtgtgcctggtgcactggattacgctgcgttctcttccgcactctacggg

SEQ ID NO: 194846 - DNA, 122 bp, Homo sapiens
attgatagaagaaccacgaaccagtagtttcataatgggctaatcagacctgagaccaagcgaagctgtacctcaaacctcagaccaatctagtgggataatgcttgagaatgtggaactgg

SEQ ID NO: 194847 - DNA, 122 bp, Homo sapiens
ctacttcctggcaagggtccggaattccctccccactcccaggagcagattgctggcctgcgggagtgggggtgactgacccgggagagcagccgcttggggttaaagaccaaagatgggcc

SEQ ID NO: 194848 - DNA, 122 bp, Homo sapiens
ctaaaacaatagccctcgctcgttgcatttgccaatatccatgatgcaatacctgctcctcggctgacttccagctactcacctggcgtcacggagtgcagaggtagaaggggctgtgcaca

SEQ ID NO: 194849 - DNA, 122 bp, Homo sapiens
ggctgcgggccgggactgacgttgcgccgggttcgagtactcccctccggagttttgtcccggtgcggctccggtacccagacgcttcaccacgccccccgccctccgcccgctcaccccgg

SEQ ID NO: 194850 - DNA, 122 bp, Homo sapiens
atgacacacgccagaagggaatccacacaacatatagatcatttattttccttctagtcccgggttcagtacatagatggcttttcttcaccctttgggttgacaattttctccaggttgct

SEQ ID NO: 194851 - DNA, 122 bp, Homo sapiens
gggtcggggcgcgggcgaagccgggccgcggaggacacaacaggtagagccgggggtgcccggccgcgcgccccccgcgcatcatgcagctctttgtcacctctctcgcccccaggccaaaa

SEQ ID NO: 194852 - DNA, 122 bp, Homo sapiens
ctacactctgtagctctggccaacccatggaacgtgcttcatcaatatttatttcattgtcgatcttccatcagccagctctttatcacatgtatagctacaaagaatgtagtccatctcta

SEQ ID NO: 194853 - DNA, 122 bp, Homo sapiens
agctcctgcggtgttggtctgcggcggcctcggcagctctgctcggttctctcctagtttcgtccaccaacttgaggccaggccgagcccttggctgtgtccctcgaagagacccctcttcc

SEQ ID NO: 194854 - DNA, 122 bp, Homo sapiens
cgccgtgcgcgccgcctccgcccatatggcggccgggccggaggtaattggaacaaacgccgtctgaaaagggcacaaaagccgcagctggggctttgtccgcgctcccacggggagccgcc

SEQ ID NO: 194855 - DNA, 122 bp, Homo sapiens
tgtcacctaagacaaattactcaactttgctggactttgcccttctcatctatgaaagggcgtattaaggaatggctcacatgaaggatatcatctatatgggtttgtattactcctccctt

SEQ ID NO: 194856 - DNA, 122 bp, Homo sapiens
cacacacttccttctggcttggggagttccttttcatcaaaggccaagccttgtgtgtttcggtcctgcccatctccgtgcggcctgcgggacgttggttggcgtggagtcttcacagccgg

SEQ ID NO: 194857 - DNA, 122 bp, Homo sapiens
caggcacgccctcgctcacttccgtcacttggtttgagtcacccacgctcctcgcgattgcgggcacaccccctgccgcgagctctgccgggagttgtagtccaagctcgagcaagcgtggg

SEQ ID NO: 194858 - DNA, 122 bp, Homo sapiens
ccgcgaagatctgcagcttcactcctgagcccagcaagaccacgagcccactgggaggaacgaacaactccagatgccccgccttaaaagctgtaacactcaccgcaagggtccgtggcttc

SEQ ID NO: 194859 - DNA, 122 bp, Homo sapiens
gcctgaggcgctcggctcagcctccctgcaggctggccttccgcaccgtcgtgaagcccccgacaggccccacacctgcccaggtagaacggcgccagcccgagtgacgcctggcgtgtagc

SEQ ID NO: 194860 - DNA, 122 bp, Homo sapiens
ggaggctagcaaatatttaatcgagcactcgtgatgtgccaagcactgttctaagtgtggcgtgtgagttatcagcttccctctgggccagggactgctgatatcacctgatgttcaggatg

SEQ ID NO: 194861 - DNA, 122 bp, Homo sapiens
acctccacctcctgggttcaagccattctcctgcctcagcctcccgaataactgggattacgggcatgcaccaccacgcccggctaattttggatttttagtggagatggggtttctccata

SEQ ID NO: 194862 - DNA, 122 bp, Homo sapiens
cactattctggagctgttgccaagtttcgttccatggaacatcggcttcctttcccttcacgaggaaccaagccaggggaggcctcacttgtgctggtgtgagaaaagggaagacacgagaa

SEQ ID NO: 194863 - DNA, 122 bp, Homo sapiens
actgaagagcaggtgagcaaaatgctgctttctgccttggtggcaggcagagaactgtctcgtactagaattcaaggaggaaagaagaagaaataaaagaagctgctccatttttcatcatc

SEQ ID NO: 194864 - DNA, 122 bp, Homo sapiens
gtaccgtgcagccacggaacggactttgcgggcagtggggacgtgtttttggagcgaacccggtaaaggaagtgtgctacgccatcaagggcccccagtcccgggtgccgcggggacagtgt

SEQ ID NO: 194865 - DNA, 122 bp, Homo sapiens
tgacgacagagggcctcaactccaccgaggcagccctggccaccttcggaactttcccgtcgaccaggccccccgggactcccagggctccagggccctcctccggccccaggcctacccca

SEQ ID NO: 194866 - DNA, 122 bp, Homo sapiens
ctgcaagattgtccttgataatcttttcacagcaataaaagcactgacgaagagtcagggcgttgtcatcaaagagactaaactgctgcagactacaactttcccaggacaaaaatattcaa

SEQ ID NO: 194867 - DNA, 122 bp, Homo sapiens
caggccgttcccacggcgggggtggtgacaaggactaaagggtaagaatttagaacgggacgcgcaggcctagcaggagctctctgcgcggacccacgcagtcctcagaactaagcagactc

SEQ ID NO: 194868 - DNA, 122 bp, Homo sapiens
aagttaccgggtgcttcgtgcagcagagacgttgccgcttctgtttctcccctaacctcgcggacgggattcagcggttccgttcgtctctcggtatttattgggcacctccctacatagaa

SEQ ID NO: 194869 - DNA, 122 bp, Homo sapiens
tcaaggtgaacaccctcagttacacaacaaaaatgtatcaaggttttgtttaatcaattgcgtgtgtttcagaaagtctgtataaaattctctgcagtggcagatcatagcaagggatggtt

SEQ ID NO: 194870 - DNA, 122 bp, Homo sapiens
atcggggactgccccccccgctaagatacgccactacctcagcggcgctaacgctgctagcgtagcaccaccaactgaccggccccctcacgccattagcgtaatcgctttggaatcaattt

SEQ ID NO: 194871 - DNA, 122 bp, Homo sapiens
aactgaagggccaagggagtggccccagctcccgagttcctgaatgaaaaagtgaaaacacgaacccaggagtgtgggccagtgctgacgctgacatggcacttagtcatggggtgttcacc

SEQ ID NO: 194872 - DNA, 122 bp, Homo sapiens
ccagggtacctgcgccatgacgtcatgggaccgtcaccctccgccagccacgggcccgggcggtgccagggtacctgcgccatgacgtcatgggaccagatgtccgcagccgaggtgaggtg

SEQ ID NO: 194873 - DNA, 122 bp, Homo sapiens
tatggtgtgttttttgttgttgttgttgttgttttccatgaaacagcacagcaaatccatcgttagaggccggccatcccaccagcagggatgattttgtgagtgagtcatgctgaggaggc

SEQ ID NO: 194874 - DNA, 122 bp, Homo sapiens
gccgcctcctccgctttcccagtgcttgcctccacctcccccttgacgcccgggtgcccgcggctgctcctggctgcagtgtcccgatctgtgtagtgcagggtccctctagaggtccccgg

SEQ ID NO: 194875 - DNA, 122 bp, Homo sapiens
tcatttgaaagcctgttttaattgtatgacaccccagtctactgtgtaccaaatgcatcccgtgaacttactttccttttcggtatagtggtgagcctgattttggcactgttctaaacaca

SEQ ID NO: 194876 - DNA, 122 bp, Homo sapiens
ttgcctttgcccacatttttgctcctttgagagattcctggaccacaatggggcaggggtcggggaaaggagggagtgcctccaacaaataagggcaccaacactccccagccttgcttctg

SEQ ID NO: 194877 - DNA, 122 bp, Homo sapiens
atcgctggggggaatgctggctgaaagtgaaggcaaatacccttatgtatctggctaaggcggatccagattgctcttttgccatctaagtttgcctgaagtggggcccacccatcacaggg

SEQ ID NO: 194878 - DNA, 122 bp, Homo sapiens
ggctgaaaagacaagcagaatgagatagttaaagaggacgatttagcctttattgggtcccgaggttctaaagggctagttagggagagcatgctgaggctgtccttgcagcagacctgatt

SEQ ID NO: 194879 - DNA, 122 bp, Homo sapiens
attacttatgtccccttcaaccaagatgttattcaaaatgaaatcatgccaggtgcagggcgcgcacctctaatcccagctactcggaaggctgaggcgggaggatcgcttgagcccaggag

SEQ ID NO: 194880 - DNA, 122 bp, Homo sapiens
ttcaataaatgtgttggtttaatgacaactgcttctgaaaacactttgttaacgctagtacgtaacatgaatagctgtgtccattatgtccagggtgaagtcagccaatttcgattctcctc

SEQ ID NO: 194881 - DNA, 122 bp, Homo sapiens
gacggaggagaaggggcttcaggcagtgactcgcacccgtctgggaatcctggacagctccgcgctcggggctgggcagaaggggcggcccggacgggggagctttcccagagacccgggga

SEQ ID NO: 194882 - DNA, 122 bp, Homo sapiens
ctcctgcctgccccaagccccaccccctggggacacctggcaccacctcttgtggcctcccggctcccatctccatggagcccctgatcccaaggaaaggctgtctcgcagacgtgcccatc

SEQ ID NO: 194883 - DNA, 122 bp, Homo sapiens
tcccttctctcaaacttcttccgagtctctgaaacttttaatgacgcctcccccttccctcgtatgttactaaaaccatctctggactgcacgtgggttactttactgatcattcacttcca

SEQ ID NO: 194884 - DNA, 122 bp, Homo sapiens
cacccgcatgcacagagcaggggctaggtgtctcctgggaggcatgaagggggcaaggtccgtcctctgtgggcccaaacctatttgtaaccaaagagctgggagcagcacaaggacccagc

SEQ ID NO: 194885 - DNA, 122 bp, Homo sapiens
ctgtggctccctcatggctgatggtgctgagcactctgtcgtgtgcccggtgcccgctgacgcctccctgggagcagcgcctgtgcaggcccctgcccactgttccgctcactttcagggcc

SEQ ID NO: 194886 - DNA, 122 bp, Homo sapiens
tatggatggaacaacagaaacgtaacaccacaaatggaaatacaactcatgatacatcatcgtgactcatgatgttcaatagagagaactgcaaaaaaaaattggacactttgtattgctat

SEQ ID NO: 194887 - DNA, 122 bp, Homo sapiens
cgagggcgcggtaaatggcgctctgagtactttctgtctcagtccggctggccgctcacgcgtcgggcccccatttactctcgttactgaggagacacggctccagttttgacccgactacg

SEQ ID NO: 194888 - DNA, 122 bp, Homo sapiens
agcaccctacgccccggacgacccgccgcacaggtgtgaggccatcgcaccgcgagggaacggtcactaggtgtcgccgtcttcctcggaatggaagccacgtttctcctgcaccgttgaaa

SEQ ID NO: 194889 - DNA, 122 bp, Homo sapiens
ggcctgccggagtcaaacccccaaaacgtttttcttaaactaagggttcaggcctcagatcggcatctcgccctctccgatttcaggagccccgaaaaaaggagaagaataggccgccactg

SEQ ID NO: 194890 - DNA, 122 bp, Homo sapiens
gtggatcaaccacggtttgttttccccgtggatgatgtcagggtggtttccagatttcgccgttacacatgaagctgtgtgcacgtttgtgtaaagcccgtgtgtgcacagatgctcttttc

SEQ ID NO: 194891 - DNA, 122 bp, Homo sapiens
ctgattttttggggggcggggacagggtcttgctctgttccccaggctgcagtggagtggcgcgatcatggctcactgcagccttgctccctggctcaagcaatcctcctaccttagcctcc

SEQ ID NO: 194892 - DNA, 122 bp, Homo sapiens
cattctcgggaaaactcggcggtgggaggagtcccctccgggagagcttcctgaagggggcgagggctgacttccgtaatctttcggaagaggcggagtcttcttccgaggaccattcggaa

SEQ ID NO: 194893 - DNA, 122 bp, Homo sapiens
acgaggtgtcagaagtcaaagcaattcatcacagactgggagaataagggaacccaagcccggcccagtcttacctgcaggtagctgagggcctgagattcgggaagaaacctttaaacgct

SEQ ID NO: 194894 - DNA, 122 bp, Homo sapiens
aagcgcttgtcactgtgtgggggcagcagccttagtgcacctcccagcgtgtgtggcccccgccctcctctgcatccctcccaggcttcccaggactgcccagctgttttctcctggcatta

SEQ ID NO: 194895 - DNA, 122 bp, Homo sapiens
ggacccactgcagagcccgggatggcaaagaattctctgactcaggctctgacccggactcggaggggcaaagtgagcaggaaagggatctgcaaagctcacctcctcttggccaaggcggc

SEQ ID NO: 194896 - DNA, 122 bp, Homo sapiens
cacgtggtgcacctctgagcctccgcccctctcccgagggaaccgcaactctacttctcgcgagaattgcttctatggctccatcctgctttccggctgtcgccctcatgcgataggctctc

SEQ ID NO: 194897 - DNA, 122 bp, Homo sapiens
tcctgattatctccctatggatcatgaccatcctcagcttaacagatcccagatgaaactcgttatctcaccctgccactcttccaatttgctcctccagtctctcatatctcagtaaaagg

SEQ ID NO: 194898 - DNA, 122 bp, Homo sapiens
cgccccagtgcgtgcctcgggggcagggatcccggcttttcactactgttagtaacagctcgcgcgcgctgcttcacagcaggtgggtgagcctacttttagtcttcccatcgacaccctta

SEQ ID NO: 194899 - DNA, 122 bp, Homo sapiens
taaaaggaagctattgattccaagctgtatggaaagggaaacttaaaaacatttaaaaagcgttgataagttttttaagggaaaaaagggcaatgcatgcttttaacaattcaaacagtaca

SEQ ID NO: 194900 - DNA, 122 bp, Homo sapiens
cgaaggtgtccaccaggttggccacccactgccggaccttctcaaagtcctccttgcccacgctggaggaggtgtccaggaggaagaccagatcgtagtggacacttttgcaacctgcaggg

SEQ ID NO: 194901 - DNA, 122 bp, Homo sapiens
ttagaagtgaaagggaccttagatctcatctatcccaaatcccaaccctgtggaggaatccgtctacaaaagctgtagcagaaaccagcctgtacttgaacctttccagtgacaggaaactc

SEQ ID NO: 194902 - DNA, 122 bp, Homo sapiens
gtgagtgcctacagagcctgcttacatgtgtacattgccttaagtccagcgtttagtatccgtcctcagatctcagaggtaggcggggtttcgaggcaggcgagaattttaccgtggtgcgt

SEQ ID NO: 194903 - DNA, 122 bp, Homo sapiens
tatgtcaaagcttctccaattgtatactttaaccatgtgcaattcattatatggcaattacgcctcaataaagctggttttaagaagaaaaattatcagagggcttacactatttcaattgg

SEQ ID NO: 194904 - DNA, 122 bp, Homo sapiens
cgctggggtaaaagagaagggtttgtccagcagacattggaagcaaaaggctgggccccacgcctaagctctgagagctgcaggaatcactattgttggcaaacctgcagcctgtttggaaa

SEQ ID NO: 194905 - DNA, 122 bp, Homo sapiens
cacggcatctgccatttccaatctactcctcggaatggtaagtaggggcttgtgccaggacgctcagggggcagcacagaacgcgcgcaaccgtggctggaagtgaaaatgtaaaaaccctc

SEQ ID NO: 194906 - DNA, 122 bp, Homo sapiens
gaccaactcagcagactgtaggtacaatttttaaaaaaagattcacaactgatacatcttcgtgagcagcagcaacagtttagtcactgtttccaagagagagctgtgtgtaaaatgttcac

SEQ ID NO: 194907 - DNA, 122 bp, Homo sapiens
agggagatttctcctatttcggactaggaagggaagatacgctccggaagaccccccgggcgtccatgcaaggagtctccgtaggacccctggagaagggcaccggagccccctagggcagg

SEQ ID NO: 194908 - DNA, 122 bp, Homo sapiens
gggatctgactcctgcttgcctctggccacctgcaggccgaggggcctcgcaccgcggggcgtatagaaggtgggaaggttgcagaattatcagggcggaagcttgcaaggaaggagtcgtg

SEQ ID NO: 194909 - DNA, 122 bp, Homo sapiens
ggctcccctccctcgtttttctctcctccaatcaggctcagccgcctccctcacccccagcgcccctgggccgagggactcgcaccacctgcctccagcccccgccccctcctctctgcagc

SEQ ID NO: 194910 - DNA, 122 bp, Homo sapiens
tggctcttgggacactccctcttagaacccagccaccatgctggagacagatcaggtaagcgtgccgttcaacagccctagctaagctcccagctgactgccagcattagccaccaatgtgg

SEQ ID NO: 194911 - DNA, 122 bp, Homo sapiens
gtagctttgattggctgggctgcgagggtggagtcgtgcagagccgctgctggcggaggtcgtggtgatctcgcttgatctttgagagggaaggtcctgaatcacatttcatttagcaaaaa

SEQ ID NO: 194912 - DNA, 122 bp, Homo sapiens
gcgcgcagcgcgcggcggcctgttccggggcgtgctcagcccgagcagccgctgcggcggcggcagtagcagcagcaggagcggccgcctcagcctccgcctcccgctccgagagtcaccgc

SEQ ID NO: 194913 - DNA, 122 bp, Homo sapiens
acttagaaacggaaactctttcctaggggtaattgaagcaatttgtaattgtgcccctgacgggacataaccaatgggtaggggaggattttcgtgagtggtccagttctagaaagcaggtc

SEQ ID NO: 194914 - DNA, 122 bp, Homo sapiens
tgaggagggctgggggcgggtctcggggtctctggggagggccgcggccaagggtctgtgcgggtctccgggtccccggagtccccaggcgcaggcgggccctggcgccgccccgcctgaca

SEQ ID NO: 194915 - DNA, 122 bp, Homo sapiens
ggccccactgacgctgggaggacagtgtccaagctgggggaccatccgccagggctgtggcgtgaaggccgagggagtatgagcagggggtgggatagtcccaggtggctggaaacagctgt

SEQ ID NO: 194916 - DNA, 122 bp, Homo sapiens
ttcgtttctcctcccgaggtccttctttctttaaggctttgcagtcagtcctattttcaacggattccggtgaaaactcttcattttcctcccggcttcaccctagggcctgaccggcggcg

SEQ ID NO: 194917 - DNA, 122 bp, Homo sapiens
cttgccaagaccccagcaatatctttcctaataagtctagcagtgcctgaggctcgcctccgaagaacagcctctcccttccgcctctgtcttctttaagggagagggagtgcaagccaaat

SEQ ID NO: 194918 - DNA, 122 bp, Homo sapiens
ccccaggttcacttagaatccccttctgtggcttcacagagacccaggccctggatgcatcgcagatcctcttctttgactacatgtaatgactgagctctacaatggtccgactgacaacc

SEQ ID NO: 194919 - DNA, 122 bp, Homo sapiens
gaaaatgagattattgggaatagtacatgtatttctggaatagtaggaaggaaagaattacggatgaagaaagagggccttttgatgttttagcttggaatccccaaattaaacactgtagg

SEQ ID NO: 194920 - DNA, 122 bp, Homo sapiens
agccttctcgctccagattcctgggcccttcaacaccagccctgacaggaagttctttcacgtatctctctgcaatccttgtgctggccaggccctcgggagatgtggccccctcccccggt

SEQ ID NO: 194921 - DNA, 122 bp, Homo sapiens
gagcttctctgtaggcttgaatttccaggaggcagcccgagtccctggggagagggtcatcgtggctctcgtcggtgccttccacctctggacaggcaaccggtgggagaggacgccggtgg

SEQ ID NO: 194922 - DNA, 122 bp, Homo sapiens
tacttaagtcctcagaaaattctacaaagcaggtatttttatttctaccttacaaattcccgtgaaaactgaggcccagaaagattaagtaagttactcatggtcaaatcacaatgaaatga

SEQ ID NO: 194923 - DNA, 122 bp, Homo sapiens
agatgaaactgtgctgcgactgggcccagtcttcttgcattaccatcctgagaagcccagcgaccaccttcaggggcatactcactttgcaggagcctgcagaggcggcttcaggttctccc

SEQ ID NO: 194924 - DNA, 122 bp, Homo sapiens
aaagggacctctacccccagcccattcccattctgttttgcagatgaggaaactacagcccggtgaagttcagggacttgcccaaggccacactgctggtgagggcagagtcaggtccggga

SEQ ID NO: 194925 - DNA, 122 bp, Homo sapiens
tgtgcaacatggtgaaacctcctctctaccaaaaatacaaaaattagctgctgctgggcacggtggctcacgcctgtaatcccagcactttgggaggccgaggcgggtggatcacctgaggt

SEQ ID NO: 194926 - DNA, 122 bp, Homo sapiens
gaggaagggcaagatctccactgggaaggaaggctggctgttggacagcggactaccatccgagtctgttgcactattggggtctcggtcaaggtcagactcgatgtccgaggaagagtcag

SEQ ID NO: 194927 - DNA, 122 bp, Homo sapiens
aacccagaagttccagatgaccgaggaagggcggtagaaaaggcctgcgctggctactcccgtctgctaaaggccaggcggatcccccaacgacagctccacgccgagtggccgcgggcgag

SEQ ID NO: 194928 - DNA, 122 bp, Homo sapiens
ttcaaatattcattgaaaagatctctataaggcagcttaatacttatccagtatgaggctcgcaccctgtccctgtctaccatcactcctctcaccaaggaatccctttatctttgttcctg

SEQ ID NO: 194929 - DNA, 122 bp, Homo sapiens
cgcggctcccacctcagagatgtccccaggtgccccacgccccccgcgcgagccccgacacgcgagccccaccgcactcctcaagggcttgtgtggatccttttgtccccacccccaaggag

SEQ ID NO: 194930 - DNA, 122 bp, Homo sapiens
accaggggaagaatattgatttcctctgagtcactttggactgacctattaattcaggctcgctgagaaggtggaaaacatgcaagttgcacttggctgcacttttaatgctcccttactgg

SEQ ID NO: 194931 - DNA, 122 bp, Homo sapiens
tgttcggccaggtgggcagggaatcccaggggtttccaggtgggctttgtccgtgggcaccgagtggggggcctttgcctgtagtagaccctgggggccagaccgccgcttctgtgcggagc

SEQ ID NO: 194932 - DNA, 122 bp, Homo sapiens
ccagttttgtgctttccatggttggattgtcattctttcattcgacaaaccttcggtgggcgcccaggtgttggagggccctagctcccctccggacgccccagcccagtggggctgaaaat

SEQ ID NO: 194933 - DNA, 122 bp, Homo sapiens
aggccaactgtattttcaagcttctgaacttaggcaaaatattcatcgcaaagtctctagcgtcatatttttctcacccaaattacgtttccacgagattatttatatatagttggtctatc

SEQ ID NO: 194934 - DNA, 122 bp, Homo sapiens
aaagtctttcttactagataataacttcttggtcatctgccttaataaatgggtcatgtccgatttcatagatagatcctgattctgtctcccatgttctgttattaacaattacattgtat

SEQ ID NO: 194935 - DNA, 122 bp, Homo sapiens
tcgcgtcgctggcggcgccgctgctccttctcctcctcctccgggagaaaccgttgttcccgctgctggcgctcctcggccctcagctgcctctcccgctgctcccgcaatgggggcctggc

SEQ ID NO: 194936 - DNA, 122 bp, Homo sapiens
gggaacagtgtcttcgtttgattgctgtctattatttccagcatgctaaatccttacccacgtttcagcttctaagtaggttgatgcttcactctgtctcccgtccaattaattatttctca

SEQ ID NO: 194937 - DNA, 122 bp, Homo sapiens
gatgggccagtggtgctcccagggtctgcacctcgacagtccaggtggcaagtctgatttcgggtgccccgcaatcaacgccgaatactccagggcatcctctaagagcagactgatggtgt

SEQ ID NO: 194938 - DNA, 122 bp, Homo sapiens
tgccagtcccgctctccaagctttctcataggctgagaggtcttggagctgtagggtacacgtgccggcggtctcacgcggcaacttgtttacccagaagctggggattttccttgacgaca

SEQ ID NO: 194939 - DNA, 122 bp, Homo sapiens
tggcttcatttctcagagaagagccgtgaaaagatacaagcatcttctctgacgtgggtccgctgctctcctgcaggacaaagagctcctgtggggctcttgtccttggctgcagtgtgttc

SEQ ID NO: 194940 - DNA, 122 bp, Homo sapiens
ctcacacacacccttttttctccctctccctcacatatcctgttttctctttttagacatcggactattaattagatattggactatttggcttaattttctaattatctttcttatttcct

SEQ ID NO: 194941 - DNA, 122 bp, Homo sapiens
gtggatcacaacggttttcatgacacgattcccctctggtagacctctcttaaaagatgtcgcaggtatgaaataagactgagccacgggagaagcgcagccctttggactcccctgcaatt

SEQ ID NO: 194942 - DNA, 122 bp, Homo sapiens
ggcttgaaaaaaagcctcgttagttgccaactctgtgtgttgttgttttacaactgtgaccgaccgtcacatgagaggggggacagctgggggccgggctgcacaaaggggaatggcttttt

SEQ ID NO: 194943 - DNA, 122 bp, Homo sapiens
gagctcatttcacgaggcagggggtggggtggggtgggggttggggtgtctgtagagagccggattctccctcgtgggtggctacaggatacaaatgaatatggcttcttgggcagaggggc

SEQ ID NO: 194944 - DNA, 122 bp, Homo sapiens
cagcagtccagtgactcaagctatggggtgcttaccacttcccttggggaatctggcccacgtctctgctgtctcctcattcaaacgttttcccagctactcagccacaagctcctttcccg

SEQ ID NO: 194945 - DNA, 122 bp, Homo sapiens
gtgtgtggtgcgatgctcccctgcgatgctcgcagaggcagtgagccgccgctcccagatcgccaccagccatacaaccatgaggggaacgacccatctccatagtgtgctgcatggccaga

SEQ ID NO: 194946 - DNA, 122 bp, Homo sapiens
caacagcaaggctgtacctcctcacgtgacttcagtgtagactttaagaacctaaactaacgcttctcgcgagaggaaagattgaccgctcgcaagcgtacatcagctggtgccccgccttc

SEQ ID NO: 194947 - DNA, 122 bp, Homo sapiens
ctacgcggcctccgtgcgattggctggttcgcggatggcgggacgacacgattggctagtcgctcacaagccccgtgccctggttggcccaagacagcgcggaagcggggagttaaagagtc

SEQ ID NO: 194948 - DNA, 122 bp, Homo sapiens
tgcgggatgctggggcgcgagcgggactgttgactaagcttcgttactgggccctggaagcgaggtcagagctggaaatggccttaggggtcacctagggcctaatccatcgtttctcttgt

SEQ ID NO: 194949 - DNA, 122 bp, Homo sapiens
ccgctccccgaccttggttcccgatttgtggcctctaacactagggttcattgaggagcccggtccaggttctgagggcttttaaagaggaagccggggtcatgaccacctacgctaatttt

SEQ ID NO: 194950 - DNA, 122 bp, Homo sapiens
tctggtgagcactggagcctgattacaggatggctggggaaagaggaagtgtttgcaaaccgcaaggaggaatgtcgccctttgaaggagtttggcatttattttttgcctcctccactgtc

SEQ ID NO: 194951 - DNA, 122 bp, Homo sapiens
ggagactagagcagctccatggtccagcagcattgctactcgcctgctctgcagggaacgcgcagaacggattggaggcaaaaaacaaaacagggagggggacatcaaggagagaaattgaa

SEQ ID NO: 194952 - DNA, 122 bp, Homo sapiens
atgagtgaatgagtagatgatgaagaccaggtgaaggggctaatgagagggagacattatcgatgtgtaaaacagtctgaacaaaaatggggaggtaggaatgaacatgctatttcagagag

SEQ ID NO: 194953 - DNA, 122 bp, Homo sapiens
tgcagcttggactcgtgtttccgggtatgaccggaaatagcgcatgggactctaggcaggcgacaccttagcggttcctaaagcgagctatgctacggaagcctcagagtgtcaaaattact

SEQ ID NO: 194954 - DNA, 122 bp, Homo sapiens
tgcgatagcgtggtgtggtgaataagggcatgagtgatagagccagtgctcggttcaaatcgtagtactggctcttactagcagtgtgtccctgggcatgctacttgatttctttttctctc

SEQ ID NO: 194955 - DNA, 122 bp, Homo sapiens
tgaactcctggcctcaaatgttcctcctgtcttggcctcccaaagttttgggattataggcgtgagccatgttgtcgtcattacagctacattgagatataatttatgtgccacacaatgca

SEQ ID NO: 194956 - DNA, 122 bp, Homo sapiens
tttgttggagaataaagacctgcgtctcatggaggtggggcccaatacctgttgggaggccggggctggcaaacaatgaaaagatcgctgttttccaaactcactcaaaggcttgtcgattc

SEQ ID NO: 194957 - DNA, 122 bp, Homo sapiens
tcctaccggccgctcatgctgaggagagcggaccgggacacagcagcggacccgaaagagcgcagactcgggacgaaccggccgctctgccccggacacagcgacctcgggccctccccgca

SEQ ID NO: 194958 - DNA, 122 bp, Homo sapiens
ttggcggcgggcgggtcgggctgctgcactgacatggttctgcgcaggtggttgcgcttccgcaggaactctggctgcgcgtgcagcccgaagctgcccttgcgcaggatcatgcgcgagtt

SEQ ID NO: 194959 - DNA, 122 bp, Homo sapiens
gagaagaggaaggaagtggagctgacccagggtcccagagaggatgagccacagaaaccccggaaggcggcgaggcaggaagccggcggggacggagcccccgcgaaccccgaggagccggg

SEQ ID NO: 194960 - DNA, 122 bp, Homo sapiens
ggccttgtaggcacagcggctgagactcgatctgctccaagtaggggctccagcgcgggtcggagtctgggggttcgcgcccgccgacccgcgccctgctccctctcagcacctgggcggac

SEQ ID NO: 194961 - DNA, 122 bp, Homo sapiens
ccatacagccatccactatgggccctgatgggacaagagtcagtggagagtgatatgttgcgcaaaggctaccttggaatttgagaaaagcaagatatggagatttcaggaggagcaaaagt

SEQ ID NO: 194962 - DNA, 122 bp, Homo sapiens
ggctgccgtggtgggcttcctcatcgtcttcaccgtggtgggcaacgtgctggtggtgatcgccgtgctgaccagccgggcgctgcgcgcgccacagaacctcttcctggtgtcgctggcct

SEQ ID NO: 194963 - DNA, 122 bp, Homo sapiens
agcatgcagttgggtgtcgctcagggtgtggagtcctggcacatgagacgccacctgcctcgaagagctctttgtttaccgttagaagtggaccctgagcagggccctcggccgacaccaga

SEQ ID NO: 194964 - DNA, 122 bp, Homo sapiens
ctcaacaaaaggacccagaggtagcacaggcctcatgactagaggctgggtccctctctccgataggagctcagacttggggtcctgggctgtccacccaggagcagccagactccgaatcc

SEQ ID NO: 194965 - DNA, 122 bp, Homo sapiens
ctggattcctcctgcagtttccagcaggccttgcagaaagcgagtgcccagctgaaggagcgaggccgcagcgtctcccgccagcgaaagtagctcaggtagcgggcgtggtccttgtccag

SEQ ID NO: 194966 - DNA, 122 bp, Homo sapiens
ggctggctttaaggcgagtctgtgaacccgagtgtgaaggccccgagtctgggtgtctgacggagagagggcagtttcccaccctagacgttccactttcctataatcctgaggaaagaatg

SEQ ID NO: 194967 - DNA, 122 bp, Homo sapiens
tcacctgctcgcctccttggaaccggaactgggaactttcctggttgccaggagccgaggcggggggtcgcgctccgcacccgcaggtgctggtggaacagcgtcccggcctcttcccgccc

SEQ ID NO: 194968 - DNA, 122 bp, Homo sapiens
aggtggctcggaggagatgggtgatggccaccttgggcctctttaagacctcccctctctcggcctcgtggccctcgcggggttccgcggcctggtcttttccccgcagcgcggccaacttt

SEQ ID NO: 194969 - DNA, 122 bp, Homo sapiens
acaagcgcatccatggagtgcgcttcaagaagcgtgcccctcgggcactcagagagattccgaaatttgccatcaaagaggtggaaactctaagtgtgcgcattgatagcaggttcaacaaa

SEQ ID NO: 194970 - DNA, 122 bp, Homo sapiens
actgtgtttcaggttaatgcaggaaaacagggaagtaatgaggctgacctgttgggtcttcggtgaaatgtgtatgaagagcttgacacttactagaaatgaagcaatttttcttatctaag

SEQ ID NO: 194971 - DNA, 122 bp, Homo sapiens
ctgagtcgggagacctgcagctcactttctccctgtttgctggccagcagggtttgtggccgcctctgctgtgacgccacagcctggtgaggagggggctgcagttcctcaggaaactgcca

SEQ ID NO: 194972 - DNA, 122 bp, Homo sapiens
gagcagcacctggtcccggtcagccctagggcgcacagctcagaaatgccagagcagaaacgcttgccctgggggaagaggcaactcgcatgtggagctgggcagctggagcatctgtggaa

SEQ ID NO: 194973 - DNA, 122 bp, Homo sapiens
tgagacagactgagtatttctatgaaaccctcataatgatactctcttaaaagcctcccacgcttccttttttccaataaaaaataagcagtatttgagtactgaaacctttattcccattt

SEQ ID NO: 194974 - DNA, 122 bp, Homo sapiens
ttactgtaggttgagacagctcagaatcatcaatggatgcttaaaatagcaaggcaacttcgagttgaaaaagagagagaagaatatcttgcacaacagaaacaggaacaaaagaatcaggt

SEQ ID NO: 194975 - DNA, 122 bp, Homo sapiens
taacagcgaccatcctgctcgccacagacacaattcaagttcatttagtgctccaatgtccgaagccaggaaaggagaagaaaagggtttgggggggtgggggtggattccttcctccctaa

SEQ ID NO: 194976 - DNA, 122 bp, Homo sapiens
tggtccttgaaggtcccttaaccataaatgtcaagagttgggatttaaacccaggtctaacgccagagctggcgccctttagattaaaagtgcagtgtccatgacaacgaaagaagttgatt

SEQ ID NO: 194977 - DNA, 122 bp, Homo sapiens
tgaggacgcggcgcgggctgctggccgcgtcgccgagggagggcccggacagccctgcagcgcgtctcagcggagccctgggggccgcgccgctcctccaaacatgattcagaaccgcccgt

SEQ ID NO: 194978 - DNA, 122 bp, Homo sapiens
actcacacttttagaaaagagccgcggcgccgagaaagtgggttggttcccttcctccttcggactgaagcggcagctgcggaaggctccggcgcggtactgaggaagaagcggtgctcgtg

SEQ ID NO: 194979 - DNA, 122 bp, Homo sapiens
atgcaagtctgaaatccagcagggaagtcaaatcttaaagctccaaatgagcttttttgacgccatgtctcacatgcaggtcatgttgatgcaagaggtggattcccatggtcttggacagc

SEQ ID NO: 194980 - DNA, 122 bp, Homo sapiens
tgtctagactgcctttcaagtttacttagagacacagagctctttgaccctgggtggcaacgtttgcagacactcaacttcagactgctgggatctgccattctcctctggctagggctggt

SEQ ID NO: 194981 - DNA, 122 bp, Homo sapiens
gtgctgaagttggtaaaagtcaggcgtgtgtgaatcagagcccgggcctcgccacggcgacggccaggctattcatcactgggtggtgggtgacagtgactgatgggctaggcccgggcctg

SEQ ID NO: 194982 - DNA, 122 bp, Homo sapiens
cgtatcaccttttccttagggaaactggttagatcatgttgggaagaagtttggcttgaccgttgctggcttcatagtcatttgtgggatgggattgggacacctggctgtgttatcctatc

SEQ ID NO: 194983 - DNA, 122 bp, Homo sapiens
cccacgccaggatgtaggagtagccgtagctgccttctctggtcacgggatagaatttcgcgtttttgtcgtgaatgtcttcacgcctgtctgtataaatggaggccgcaatcatgacacac

SEQ ID NO: 194984 - DNA, 122 bp, Homo sapiens
gtggcactttttgttaagagggagaaagggcacaaatcagagccagaaagatttgcatctcgatgtattgttaaaatgcttttattttatgtaaatagtgtcaggtgaatcaagcaagcata

SEQ ID NO: 194985 - DNA, 122 bp, Homo sapiens
gatggtgggaggaagtgcgctgcagcccgcacctgcctcccctgatgccgatagcaggaccggcaccctcgttctctgcagtcacactccccatgtgaaagcgtctcctgtgttctttcttc

SEQ ID NO: 194986 - DNA, 122 bp, Homo sapiens
caggcatcttctttattctggaatgagcctgcccatccctcaggaagactgaaaggaattcggtcagaagaatattattgacttttatccagacttgatttcagtagagttctgggacctgc

SEQ ID NO: 194987 - DNA, 122 bp, Homo sapiens
gtcagaaaagaagcagggacaggcgcctctgcctgagcctggcagacacaacacgaagaccggggatggggcgggggaggcacaggagacggctctcagcaatgtgtgcacttggtcccttg

SEQ ID NO: 194988 - DNA, 122 bp, Homo sapiens
ctcagtgtctccgcagcagcaggtgctcagtggctctgtggactgactgttccatccctacgctgtgcatatgaacatgaggtgcccaagacttccccttgaggttccagagcccactaaag

SEQ ID NO: 194989 - DNA, 122 bp, Homo sapiens
gagccctcaaccccaaaccctgaccccgaccccatgtcacctgtctatcctgggactgaccgagcatgctctgcagctctgtgtcagacctgccagcccagtgtccccacatgggtggactg

SEQ ID NO: 194990 - DNA, 122 bp, Homo sapiens
cttatgcagagatagacgctcttagatcaaggttagtattttgaaaacctgactgagagccgcctgattaggcgagggtgggtggaaagaccgcataaatgcccgcacccccgccctgcttc

SEQ ID NO: 194991 - DNA, 122 bp, Homo sapiens
gcctggtcccaggccaacttttagatcaccccactgtggtgtgggaaaggttcaattccccgagcctgggagagatgggagtggatgagggctggagaagcaaaggaaatccagggagaagt

SEQ ID NO: 194992 - DNA, 122 bp, Homo sapiens
cagggctggagcagcttggaccctggactttctgtctggccttgcagcctggagcagcctcgcccatttactccattgtgtcatataagtactgctgttttctgccaggagttggaaaaggt

SEQ ID NO: 194993 - DNA, 122 bp, Homo sapiens
acatcgcctggggacacctcactctctggcaggctcctgctggctggagattgttaacatcgccaatcagatgttaattgaatgcaaaggaataggaaataaattctggttctgaaggggca

SEQ ID NO: 194994 - DNA, 122 bp, Homo sapiens
cccaggctggagtgcagtggtgtgatctcggctcactgcaacctctgcctcccgagttcacgtgattcttgtgcctcagcccgcagagtaaccgggaccacaggcacctgccaccacgcctg

SEQ ID NO: 194995 - DNA, 122 bp, Homo sapiens
tgcgcggagtaacttcagcatctccgagggccacctctctggcctgggccggggccgaagcggggtcggctgcgcaagaggcggcaactttggcttatactgactcagcccagcgccccctt

SEQ ID NO: 194996 - DNA, 122 bp, Homo sapiens
ctgtcgaatcagagtgtacctatcttgcacagtggtcacctggcagtagtgggagccccacgtctgacatgcaacaggtgttcagcaaatgctggggccctcgtcacgggatgtttactctt

SEQ ID NO: 194997 - DNA, 122 bp, Homo sapiens
gtacaaggattcagatacaacgcatggcgggggataatccccatactaggctccgcagcacgggacaaagcataactgtagagttgttcccagaggcctcaggagtgacaccgccaccaagc

SEQ ID NO: 194998 - DNA, 122 bp, Homo sapiens
agtattagtgagaattactagaatctgcacaataaactgttgacaaatctgaattctcagcgtaaaaaaaattcattaaaataaggtaagcctgtttaaatttaaggaaactcacaatttta

SEQ ID NO: 194999 - DNA, 122 bp, Homo sapiens
ctcttttttataatgttgtacttctgatttctagggaatgattagcaaactcacccctgacgctatgtcccttggacattatccttgtatacacaaaaagtgcaattaacgagtgggtagaa

SEQ ID NO: 195000 - DNA, 122 bp, Homo sapiens
gagagcagcctgggcaacatgggagacccctctctataagaaatagaaaaattagctgggcgtggtcttgctcacctatagtcccagctacttgtggggctgaggctggaggatcgcttgag

SEQ ID NO: 195001 - DNA, 122 bp, Homo sapiens
gtcaaacctaaatacacacaatgtgcactggggcgctgctcggtcacctccctgactccccgctcccccaaccccgtgagccaggagggatttctcagccaaaccgacttccagcttccact

SEQ ID NO: 195002 - DNA, 122 bp, Homo sapiens
gctactcaattgcttaagctggcccacagtacagacaagagacagagcaagggatgagatcgaaaccgttggcccaggctgagaagaaagcttccagcaaaggggatgtcgctactaagaga

SEQ ID NO: 195003 - DNA, 122 bp, Homo sapiens
gagcactttccctgcagcccccgccttttgcttccctcctttgctcctcctgcccaaccccgtgccactgaggttttgttgttgtgtcttgttttgcagacattttgagttcgtatgaggtt

SEQ ID NO: 195004 - DNA, 122 bp, Homo sapiens
cccagacacatggcagaccccagacccatggcagactccagacgcgtggcagaccccagacgcgtggcagactccagacgcatggcagaacctcagtgcagactcgtggcagaacctcagtg

SEQ ID NO: 195005 - DNA, 122 bp, Homo sapiens
cgcgcgacgttcggttcgctgtgtgtgtcgccggctccttgagggtccatgtgatttttacgccagtgctgctgaactgtgcagggtagggagctggcacagtccgattaattgtccttggg

SEQ ID NO: 195006 - DNA, 122 bp, Homo sapiens
gaccgggctattgaaaagatgcacctgaaacaggatctgcgggcagctgcatttgccacccggctttattgctgctttccagcggcgaaggcgcagcagcagtaacagggaagccagagcga

SEQ ID NO: 195007 - DNA, 122 bp, Homo sapiens
gtacaccaccaggggaatcccccttctgacactttcagaaactttgcgccccctgaacagcgtccgtcctcgtgctaccagctggaccccaagtttttccagcgctaattaaatcgaggatg

SEQ ID NO: 195008 - DNA, 122 bp, Homo sapiens
ggaagcccagacccagccagaacccccgcaggggtgctccttattatacaactcattaaacgctattgagaggctacaatagccagactcaggccaggtcccagcaccccagagctagagag

SEQ ID NO: 195009 - DNA, 122 bp, Homo sapiens
aggaggtgactggggaggcgctggtcgggctgctcaaacagtcattacattgttagattacgaatcgtcaggtaatccctaacaacagccacacacaccatccactcatttaacaaacatct

SEQ ID NO: 195010 - DNA, 122 bp, Homo sapiens
ggagatgagtaagcagggagtgggtgcatatgcaaacagggtggtcagaaatgctttggccggatgtgtgactgaaggctatgtgcagctgaggaaggctgggccaccacagtagcagagag

SEQ ID NO: 195011 - DNA, 122 bp, Homo sapiens
tgggctggtgggctggctgtatgagtgagtagatatttactctgcctggtgaggtacaggcgagcatctgaaagtatcccggctctagtcctttatctttggttaaattggaagacaggcct

SEQ ID NO: 195012 - DNA, 122 bp, Homo sapiens
tgagatatactggcgaggcttccctggccgcaacgccgccgtaagtgctgctcccacgcgcggtatccccgcgtactgctcagtgcccaactccgacgggctctcaagtgccgcaacgcccc

SEQ ID NO: 195013 - DNA, 122 bp, Homo sapiens
agcagcccagccagccgcagcggccacttgtgttcccagctgtggcttgtgatctatggtcgactgagctgttactctcctcggttagacacgcatatgcacacacatgcacactcatgtac

SEQ ID NO: 195014 - DNA, 122 bp, Homo sapiens
acctctggtgatccacctgcctccgcctcccaaagtgctggaattataggagtgagccaccgcacccggcctctgactactgtcttggctgacaaaagggtaaaatacctccagtttatata

SEQ ID NO: 195015 - DNA, 122 bp, Homo sapiens
aaaactggagggtgctcagagccagactccccacttctgctgcagccaggtgcatcttgccggcacagccgctgaccaccccaggacggcagcaggctcccacctcaccttgctgctgcacc

SEQ ID NO: 195016 - DNA, 122 bp, Homo sapiens
ctggcctctatctactcagtgcgatagcatctcccaaattgtaacaatgaaaaatgtctccgggggctggtcatggtggcttatgcctataatcccaatgctttgggacgccaaagcaggag

SEQ ID NO: 195017 - DNA, 122 bp, Homo sapiens
tctgacgactcggatgcctgttcctctgtccttgcaccctgctgatgtgtaggtgaccagcgggctcttttctgctggtctcccgggtgtgctccttggaaactgtttcctgtgcgtccttg

SEQ ID NO: 195018 - DNA, 122 bp, Homo sapiens
cctcctctctatgaaactcccacagcactctgttcccctcatagagcaagcagaggccttcggcgtgttgacaagccttcattcatttactcatttcatgttcccatcagttgctggggtgg

SEQ ID NO: 195019 - DNA, 122 bp, Homo sapiens
tgtccgtgtggctgttggggttgttgctgaggtacattttgtccatggccttgagggcctcggtgagatagttctgcagggccgtgaccgcggcacacaccgcggggctgccgaagccgtgg

SEQ ID NO: 195020 - DNA, 122 bp, Homo sapiens
gaagcgctgagatgggtgtgtgcatgtggggcgtggccaccgagggagtctctggtgatccggggctccatggatttgcggggcggacggcccagccaggcaccctcccagctgacgtgcag

SEQ ID NO: 195021 - DNA, 122 bp, Homo sapiens
aatttttttaattcatttatttttgagacagggtcttgctctgttgcctaggctggagtgcggtagcatgatcatggctcactacagcctcaacctctcaagctcaagtgatcctcttggcc

SEQ ID NO: 195022 - DNA, 122 bp, Homo sapiens
cagggtggccgggccagccggccctcaaatcctccgacgaagcggcagccgccacgaccacggccagagcagcgctcggaggcgagtttgtcaacaatcgcctcgcctttggcggcctgacc

SEQ ID NO: 195023 - DNA, 122 bp, Homo sapiens
gcggtctctgggctgggtatacaatggtattatctcaagccaacctcggctgcagaaactcgcaatgcttcctgtccttgcattgcagcacaaactgtccgatttccaactgctttcggaca

SEQ ID NO: 195024 - DNA, 122 bp, Homo sapiens
gaagttttacggatacgataacttacagagacagccgatttttacgacccagcaagaggccgagctggtacaatatcctgactgtaaatcgtccagtggtaatattggcgaggacccagacc

SEQ ID NO: 195025 - DNA, 122 bp, Homo sapiens
cctccccatccccctctccctgcctcgtgcaaatcccagcacgccgcccaccatatgcagcgatccctcactatcacacagagcccaacatctggcgggcgctcttgccgcaagatatgtgg

SEQ ID NO: 195026 - DNA, 122 bp, Homo sapiens
cgggcaggtggccgtgctccgaagagcgccctgccacccatgaggtggccctgggggcgtcgctagccttcccagctgggtgtcctcatccggagacacaaacacctgcctcaggattaaag

SEQ ID NO: 195027 - DNA, 122 bp, Homo sapiens
gcctcagaatcatacaccctctgtgaacacaggaggccttagtttacggggagggggaggcgaaaggagatcatacgtggaagcagatctgagaaatcccctaccccagcctctgggtgctc

SEQ ID NO: 195028 - DNA, 122 bp, Homo sapiens
ccagcaggtgggacatggagcaatgctcagaggggcctcccatgcttctggcacagagcccgctgtgaaaggaaaataaaaactctgaaccccagttcactccaccaaaaagaaaaacttaa

SEQ ID NO: 195029 - DNA, 122 bp, Homo sapiens
tccgaaggtctcagaatccgagcctccaggccagattttccctctagccattcctggccacgcagcgcggagccgcgagcacacagaaaaggatgtcttcatcgccaaccgggatggaacga

SEQ ID NO: 195030 - DNA, 122 bp, Homo sapiens
actcagaagactagctgacagccttgtttgtggcagacagagatgcagggtcccagactgcgaatgcttcatcttgtctaacacaggcagcctgtgacttgtttgaattaaactgtactttc

SEQ ID NO: 195031 - DNA, 122 bp, Homo sapiens
gacgctctcccagcacagccggcatttgcagtgcattagaatcttgccgtcacttgcacacgtcaccaagttactttagtgagagttcagcctagctatggctctgctgtgctaacagttgc

SEQ ID NO: 195032 - DNA, 122 bp, Homo sapiens
agccaccgcgcccggccagctctagctaattctcacgtgcgccccagcagtggcgccccgcgctgggagactttgactagacgcctccccacacacgcacacacctcttatcagcctggttg

SEQ ID NO: 195033 - DNA, 122 bp, Homo sapiens
cccagtgggtggagtgtgaggcggggaggtcgctcgactcgccggcgctgtggcctcccgcggagccgctcagactttccctgccggcacatggacctggcccaaccctcacagccagtaga

SEQ ID NO: 195034 - DNA, 122 bp, Homo sapiens
tgtcccacacagctgagatggcctggagcagggcttcctgctgccctctctggcttcctccggcaggcagcagtgtagtccaggagtctctgggccaccaggtgttcgctgccagactgctc

SEQ ID NO: 195035 - DNA, 122 bp, Homo sapiens
ctcgatggatgtgatacgcaacttagcaccgcgtcgccatgcactcgatgccggtcttcacggcacgctggcccctccggcgccttcatcaagcgcatttgtcttaacccttaggagctact

SEQ ID NO: 195036 - DNA, 122 bp, Homo sapiens
agtattggtcacatttgccaatttgtggggagttggcatggaaaatatggtggaaaattccggctgtgatgttaaaggtaaccattgaacacttgcacaaactcagttgaagaagttgtggt

SEQ ID NO: 195037 - DNA, 122 bp, Homo sapiens
ctccacgttggccctcatttcacttccagcaccagtcctggtgaatgcttaatcatgaagcggagcatctcggaaaagcctcctcttagggttaggggttgccagtgtgctatggggtccct

SEQ ID NO: 195038 - DNA, 122 bp, Homo sapiens
gccaatccaagaaaacaatttatcggctgccgagaatgatgcaaccaatgcaatttcctccggctgaggcgtgggcgaagactacggttgattggtagagcgtgctcctatcgcagaggctg

SEQ ID NO: 195039 - DNA, 122 bp, Homo sapiens
aatgggaagaaaagtgatgtgaaggtgaaatgggagagttctctgatccccttcatagggcgtgcgacaggggtgctcgcctgttctgtccccgttactgctcaaaaccccttacaggatgg

SEQ ID NO: 195040 - DNA, 122 bp, Homo sapiens
gaggacagctttgctctggcttctacccagagcttgggtgcctcaaaagatagcttggtccgtctccagattcagacttggttggaaccagtttgtaaccttcctgagtccagctccaaacc

SEQ ID NO: 195041 - DNA, 122 bp, Homo sapiens
aaatttctagaaaatgcaaaccaatctataattacagaaagcagatcagtggctgccaggcgaaggagggatttaaaaaggggcaagaggaaactttgaggggtttcatggttgtttcctag

SEQ ID NO: 195042 - DNA, 122 bp, Homo sapiens
accccaagccggcaccacctgcagcggcgcagggagcagtggcaagggcgacctcacaggcggcgcctgctgatggggataagatcaccgcaaggaagattttgggaacagtaaaatggttc

SEQ ID NO: 195043 - DNA, 122 bp, Homo sapiens
ctttatggctgaatgacattccggcgtgtggccacgttatatgacattccggcgtgccggcgtgtggccgtgcgtcattccacgttatatgacattccagtgtgccggcatgtggccgcacg

SEQ ID NO: 195044 - DNA, 122 bp, Homo sapiens
tcaggcctcttggggccaattcttgtttctaccccccaactaaggagttgtggacctgggcgcctctgagtatcagcttcattcttctgaaatgggaacatgaaaaagcccctctcttggcc

SEQ ID NO: 195045 - DNA, 122 bp, Homo sapiens
gcctgctaacatcagtctcagtggtgaacctgacagtttccctatagttcagtcccagtgcgcccaagctgaggtgccagctcagagctgcttgcacaaggacccagagagagattcaccca

SEQ ID NO: 195046 - DNA, 122 bp, Homo sapiens
cctcgtctgggcctcggctcggagggtttcctgcccgcccgctcctagcctggcaggaagcggacacctcagaacaaagggaccggcggacaatggccattgaattgggccggggcgctcgc

SEQ ID NO: 195047 - DNA, 122 bp, Homo sapiens
gcctgggagttgaagaagggtgcagtcgggtggtggttatgaatctcagaaatcctgccacggagcctccttttgtgccctattacttaaccttgagggacatagagagcatgagacaccaa

SEQ ID NO: 195048 - DNA, 122 bp, Homo sapiens
gtggacggctaggccagagccttttctgtcgaagtcaagtgcagagttcgggcaatgcaccgtgtgagtgtgtcagcaatctccaagttctcgaggtgtgcactgaagaggtcctcccaccc

SEQ ID NO: 195049 - DNA, 122 bp, Homo sapiens
agagaggtgaagggtagggtttgctccaatttgcactgaatataaaccagactttggtatcggggcagggagtgagccagaagaaggaaggaaggagaaagcaggaggaattagcaagctgc

SEQ ID NO: 195050 - DNA, 122 bp, Homo sapiens
gtccgtacctccaaacatgcgcggtgagaggtgagctggtaaggagccgatcaccaggagcggcccgccggggctccagcccaccggccggtgccggccgccgccgccatcctcagggctgc

SEQ ID NO: 195051 - DNA, 122 bp, Homo sapiens
gacccatgcctacaatcccaacactttcggaggccaatgtgggaggatcatttgagcccacgggttcaagaccaatctgggcaacatggcaaaactccatctctacaaaatatttttttttg

SEQ ID NO: 195052 - DNA, 122 bp, Homo sapiens
gattatccagggtagtggattatccaggagagtggattatccagagtagcaggtctggcgcgatgcccgcccggctcagcccatctccctagcaacgaaacccttccgcgccgcgaggttgc

SEQ ID NO: 195053 - DNA, 122 bp, Homo sapiens
tctagcacagtgcctggcacacagtaaacagcaagtgaatgacaagcagttggcagtggccggagctccgtcgctggggcgtggagagggccgccccggcccgcagttcccgccctgacact

SEQ ID NO: 195054 - DNA, 122 bp, Homo sapiens
ggccgcacgcagggaacagccgtcccggagccctggggacgtgcgcgcctgcgagtggaccgtgaattcagttaccttgttccctgttgctagtttctacgctaaataagaagaagaagaag

SEQ ID NO: 195055 - DNA, 122 bp, Homo sapiens
ccgtcgccgggaggaaggggtgtgtgtttcgcctgcgcagtggtcctggccaccggctcgcggcgcgtggaggctgctcccagccgcgcccgagtcagactcgggtgggggtcccggcggcg

SEQ ID NO: 195056 - DNA, 122 bp, Homo sapiens
ctcctcccttgggacccgttgtcccggtcctggtctttcccccggatctagtattcagggcggaccagcggagcggaccccgacagctgctgaccctctataaccccacaggaactgcgctt

SEQ ID NO: 195057 - DNA, 122 bp, Homo sapiens
tacatttgatgattttctgaggacctgctccgccctagcatgtaaagtccacgagcacagcgattttgttcttgctctctgctctgtcccagagactgggggagagagagaccctctcattt

SEQ ID NO: 195058 - DNA, 122 bp, Homo sapiens
aaaagagaggaagcagaagcaacaaggtttcccatgaaggtttgtagtttaagacattcccggactgagttcttgccccttgaaaagaggcaagaagatggaaactcattgtgcaccctatg

SEQ ID NO: 195059 - DNA, 122 bp, Homo sapiens
gcgttgccactgtcccgggaaggtgggagggacaggtggctgcctctgcccagtgccacacgaccctttcatttgtcttggttggattcgatgctctcagtagaggaaggcagcttttttct

SEQ ID NO: 195060 - DNA, 122 bp, Homo sapiens
gtgtctgctgctggaaagcccaatccaaaagagcgtgtaaagtgcttgacagaaagaggacgcttgataaatgctagccagctcactagtgtgaaagtgtcatgaaggcagaagtcatccat

SEQ ID NO: 195061 - DNA, 122 bp, Homo sapiens
gaaatcaacgcatcacgtacctatcggcagagcccggaaatcaacgcatcacgtacctatcggcaaagcggtgtctgtgctgatgccagcaccaatcaggaaatccccgatcagggcaggtc

SEQ ID NO: 195062 - DNA, 122 bp, Homo sapiens
ttcgtttagttcagcgcgttgaagcgctcactgtgtcctaggcagacaccgtgctgtgcgcggggatcacagttatctagttcctctcgcgaggactccgagggacaggcagggtgctgcgg

SEQ ID NO: 195063 - DNA, 122 bp, Homo sapiens
aaggactgcaaaataatgcaagtctgatttcagcctctcaaacttagattctttgcctatcgctacatgaaggagtaaagagaaaggtatttacttctgataacactaatattctgtcaaat

SEQ ID NO: 195064 - DNA, 122 bp, Homo sapiens
agactgctgtgctagcaatcagcgagactccgtgggcgtaggaccctccaagccaggtgccggatataatctcatggtgcgccgttttttaagccggtcagaaaagcgcaatattcgggtgg

SEQ ID NO: 195065 - DNA, 122 bp, Homo sapiens
tggccactacacccacaatcttctgggggccgggtttctcctacaccatagagacgggtccggaaacgggacagaaggcccaccttcctccctccgacgccaccaatgaggccaactaacca

SEQ ID NO: 195066 - DNA, 122 bp, Homo sapiens
cgcctgacgtaattaaagtgcgcgaacggaagtggcgcggaacatgacggaaaatcagtacggttggtcccttaaggaccagcgggaaagataaaagctggggtttagtctgtgctgcgtga

SEQ ID NO: 195067 - DNA, 122 bp, Homo sapiens
actggcggggaggagggggctggggagcaatggataccggagtcccggagaccccagggccgtccgaaccgagggcgaagagctgggcccgggggaggggtggctgtgccgcccggtagggg

SEQ ID NO: 195068 - DNA, 122 bp, Homo sapiens
tccagttggcttatgcgcatgcgtttctctggtgcaggttctcaccaaatccagaagcggcgggcatttgaaatgatgtaagccgggagtcgctctgcctgcccgtttctgcgctgcactgg

SEQ ID NO: 195069 - DNA, 122 bp, Homo sapiens
gagagctctttatatttcgggagtggctacctcaggcacgtgtagagccatctggggcaccggaaacaatgtttcagaagtgagattaggaggaatccggtcatgtggccgagaagatgggg

SEQ ID NO: 195070 - DNA, 122 bp, Homo sapiens
gcgggcgcgctgggctctgggtgtccgcaacccaaagtgcagctggtgtcttgacgctaccgtctatgcacaagccggcggcggcggcggagcttggaggaggcagggagattccaaataaa

SEQ ID NO: 195071 - DNA, 122 bp, Homo sapiens
tgcagggtgggggctcgggcatgacgggctgccattcctgagccctgccttgcggggaggcggctgaggcccagagagaatttgagcatggcacaggcgggctagcagtgctgggggacccg

SEQ ID NO: 195072 - DNA, 122 bp, Homo sapiens
tatcaagcagctgttgtactccgtctaatttgtttgcttcacctggtggaatacatcagacgctaaaatagtcctgccccatagagtaataatggttagggatgaggcagagcttgtacata

SEQ ID NO: 195073 - DNA, 122 bp, Homo sapiens
cctccacggaaaggctccggcacctcaacctcactctggctgcattggaaactcttctgtcgctatcggccttctctgaagagctttaatctctccttccatggagtctcctgtggacttaa

SEQ ID NO: 195074 - DNA, 122 bp, Homo sapiens
cggtctctttaagtgcgcactttcggtgtaatgataggcgattgggccaataaagcgtttcgtcctggagttaactggtttgtccctttcgggctgccgtcctacagatccgccatattgtc

SEQ ID NO: 195075 - DNA, 122 bp, Homo sapiens
gcttgcagagaggcatggcagcttgtctttaggtagattgcttatgtttcagatagaaaacgaaatccttgtcagacatactattgaatctatccttgagtgtatgaattctcaagtttggt

SEQ ID NO: 195076 - DNA, 122 bp, Homo sapiens
caccatcacctttcaccaatgatagctaccatgtgttgcatttctatgtcccaagcacaacgtatacacatttaagatcaaatcttcactataacctcatatggtcagtatctgagagatga

SEQ ID NO: 195077 - DNA, 122 bp, Homo sapiens
aacagatacattgatggcatgtgtctagaagagtcctttcatcaagacttgaattcttcacggtgcacaggggcattcttgtttctgaattgccagactcttagaggaggcatccaggagca

SEQ ID NO: 195078 - DNA, 122 bp, Homo sapiens
gcgcccgctccccgtcccgggcgcgttcacggctgggaaaaattttgcagtccgctgaagcgctcagcgacgttactggggaagcccaggaaggaacttggtcactggagctcgggaggggg

SEQ ID NO: 195079 - DNA, 122 bp, Homo sapiens
ttttcgttgaagtgggcacagagtgaccaagaaagcattagctgcagggaaatgctgttccgtatcattctgaactggttggttgtgagacaccctccctcttccctgtgccctacccgctg

SEQ ID NO: 195080 - DNA, 122 bp, Homo sapiens
acatggcaggtttgattgcaactctgtttgattccaaagtgtttgctctttccacttcatcgtaatgtatttccactttatcataatgtatttctggcaagaagcataagaatcaaaaacgt

SEQ ID NO: 195081 - DNA, 122 bp, Homo sapiens
gctctttccacccctggaagatggaaataaacctgcgtgtgggtggagtgttaggaccaacggtttcctaggagtatgtggttttgctgtgtggcctgtgtcctgactcgcacgtctgctga

SEQ ID NO: 195082 - DNA, 122 bp, Homo sapiens
ggcagagacaactgcgctattactgggatatagacctggataattgtgtggctagaatggcgctctctcagtacacttatggctatgaatatttgggtgcatgcccaagattggttattact

SEQ ID NO: 195083 - DNA, 122 bp, Homo sapiens
cagcagccacgagggaagaaaaacgctgcgcccagcggaaaggccacaggagccacggggcgcaggggccgtcgctgaagaagaacccagaaggcttctgcttttggtacaaggacaggaag

SEQ ID NO: 195084 - DNA, 122 bp, Homo sapiens
ccacatctcaccacaccacaccacaccacacctcactgcccacacacggcgcaggctgcccgcctcctggagagcacacttcagctgaaacagtaaagcctgatgggtgcaaatggaacctg

SEQ ID NO: 195085 - DNA, 122 bp, Homo sapiens
ctttgcccgggtttgcccctcgctgcggaggctgttctacatctggcccttggagcaggccggctgacagcgtggtaaaggaagatttctgcgggagggcggccagtgcaaaacaattccct

SEQ ID NO: 195086 - DNA, 122 bp, Homo sapiens
cgttgttgtggggctgcgcgctggcgctgcagggcgggatgctgtacccaagagagaggccgtcgcgggagcggaagaagctggaccgcctctggagcttccgcgccgacttcttcgacaaa

SEQ ID NO: 195087 - DNA, 122 bp, Homo sapiens
agggcacaggggagcccgggggtgcgggtgtcttccttgggcctggccctgtgactgcttcgggcactcggaggtgcggcgcttccctaagcgtgggctacttccgtatttccgagacagcc

SEQ ID NO: 195088 - DNA, 122 bp, Homo sapiens
aatgcgatggagctacggccaccgctgccgagacaaaatggcgccgacaagctggtttagcgcaagcgccttggacagaccctgccccgcccccgtgcaagcccctggctgcaattctgggt

SEQ ID NO: 195089 - DNA, 122 bp, Homo sapiens
tgcttgaatcagccagaccaggcactgaggatgtcccccaaaggctgcaatgtgggctggcgtctgcgcgtaccgtgtggtggagacgttgagtgtggctcccgctctcaccaactgcacta

SEQ ID NO: 195090 - DNA, 122 bp, Homo sapiens
gtgcagcctgcccttagatcaacagcatctcccagctcaggacaccctggacaggaaacccgaaggtggagaataaaatgtggagtgtactagggcatcttacctttcatttgtgtggtgcc

SEQ ID NO: 195091 - DNA, 122 bp, Homo sapiens
aagaattcagtgcccgggggccgaaaggcagcagaaggcgggcaccaaaggataggcacccggaaggtggactccgaggaggagagaggacaggggtctctcaccccagctcctggtcacca

SEQ ID NO: 195092 - DNA, 122 bp, Homo sapiens
cggtccacggcggccaccctttgtgaggagacagagttcctgggcgatatccgggcagtgcggtggatcatcggcgagcagaacgtcctcaacgctctcatcaaggactacctggaggtggt

SEQ ID NO: 195093 - DNA, 122 bp, Homo sapiens
ccgtcccggccgctctgggaggggccaggaagggcgccccctgggtgcggagctacctggcgcgcaccttacgagcgggctggctccccaggcggcgtcccggaacagcagcagcggcagcc

SEQ ID NO: 195094 - DNA, 122 bp, Homo sapiens
cttctgctacgaccttctggggaaaacgaatttctcattttcttcttaaattgccattttcgctttaggagatgaatgttttcctttggctgttttggcaatgactctgaattaaagcgatg

SEQ ID NO: 195095 - DNA, 122 bp, Homo sapiens
gtcgtttccttaaggcatattctccagcaagccggggccgagagcctgccaacgaggcctcggttgaatacctgcaagaggtggcccggatccgcctctgcctcgacagagctgcagatttc

SEQ ID NO: 195096 - DNA, 122 bp, Homo sapiens
gttcacaagtcctgtggtgcaaaggtgtgaaccctggcccagggaggtggtgactctccccgccctccgcctgccggttgtcctgcttccgaaagcaacccacgacggtcccgcagggtgag

SEQ ID NO: 195097 - DNA, 122 bp, Homo sapiens
tctccccccaccccagacccacctggcggttggacattcccccccacccccctttaactgcgagaaggcaggccttagggctctaacacccagtactcctactgctcaggaggtggggacct

SEQ ID NO: 195098 - DNA, 122 bp, Homo sapiens
gccctccctaaccctggcggagctgatgggtggctgtagcctgattagaccgcgtcagtccggagggtgggtcttgggagggggcgcagggcagtccacgtttccactgcagtttctccttt

SEQ ID NO: 195099 - DNA, 122 bp, Homo sapiens
tgcttggtgaatgccgaatgatttgtttgaagtcttttagtttgttaatggcagagttatcgttacaaatttaaatgttcgaactccagtgctggttctactgccccatattaatctttttc

SEQ ID NO: 195100 - DNA, 122 bp, Homo sapiens
agtaatcactgctgatcaatcactggaccagggcggggcagtccctccgcctggcctgggcgcacgcgtggctgtccaagctgagcgcgggggcggggcggggccgagaggggcggggccag

SEQ ID NO: 195101 - DNA, 122 bp, Homo sapiens
gggtttgtattgcattttaaagcaccactgttgactctctaccaggtggcactatatgcccgcgtgtgccataggttagagcctctgccggggctgggtgccctttgtgccagcggtcccac

SEQ ID NO: 195102 - DNA, 122 bp, Homo sapiens
tgagtaatgtagtgagatgctgtttctaaaaaaaaaaaaaaaaaaagccaggtgaggtagcgagtgcctatagttccagctattccagaggttgaagcaggaagataggaagatagcttgag

SEQ ID NO: 195103 - DNA, 122 bp, Homo sapiens
aaccagaatatgtttatatttgtttcttttctcactgtaactggaagttaattaaaaaagcgatggtctaagtaaaagatataagcaaaagcgtcaccaggcaccaccctaacctgagaatt

SEQ ID NO: 195104 - DNA, 122 bp, Homo sapiens
aaaaagaaattcttggcctttttaaaggcttacaactttaaggggtccacgtgaaagggtcgtgatacatcaaacaagagtgggaaacgtgactgggggctacaatgcttttttcatacagt

SEQ ID NO: 195105 - DNA, 122 bp, Homo sapiens
agcagtaagtggggacctggatgtgggggagagggacgtgggtgaaagggacgtgggttccgaagacaggaagcgctattcttagaaaccacggcagtctcatgacttcagagacgtgctcg

SEQ ID NO: 195106 - DNA, 122 bp, Homo sapiens
tgccgcggaagttaattgcaacttgacttcaagttgtcctctttccccatacgaagtgggcgtttaaaggggagagcgaggcgaggagcgagcgagcgagcgcgcggggccaagggaaggaa

SEQ ID NO: 195107 - DNA, 122 bp, Homo sapiens
acaagtttgttgctgtagaccccctgtggcccataagggacagtgtaggggtgcctctcccgcatctccggttggctgtacaccagatcctctggctggttgtaggcatgggtgttgataat

SEQ ID NO: 195108 - DNA, 122 bp, Homo sapiens
accacacgtctgttggaacatttgggtgatgcgtagaaaattaagcaaatgacggccgggcgcagtggctcacgcctgtaatcccagcactttgggaggccgaggcgaggggatcacctgag

SEQ ID NO: 195109 - DNA, 122 bp, Homo sapiens
ggcccagccccgtttagtctataactgcaaaaccacatacaaaagggataggggactcatcgctgagccccagggacccatccagcccgttcatttttacacagagggcagctggttggaac

SEQ ID NO: 195110 - DNA, 122 bp, Homo sapiens
tgtgtttgcttatatttgcattttaaaaagtccacacattaggctgggcacagtggctcacgactataatcccagcactttgggaggctgcattgggtggatcacctgaggtcaggagttca

SEQ ID NO: 195111 - DNA, 122 bp, Homo sapiens
ggtgagtgtgcggggttgggcaacccgagaagggagaccaggctgtgaaaccagcagaaccggcctctccacagcccgctcccaggtcgccgacctgagtccccgctggcgcagctccgtcc

SEQ ID NO: 195112 - DNA, 122 bp, Homo sapiens
cgctgtgagtagcagtgaccgctctcaggagagtgtgggtgcaccgtgggtagcagtgaccgctctcaggagagtgtgggcgccgtgggtagcagtgaccgctctcaggagagtgtgggcgc

SEQ ID NO: 195113 - DNA, 122 bp, Homo sapiens
tgcttggatgtttctttggtgttggtaaggctgtggcctgctttttgctttgtttctgaacggtcattaattctttaggtcaccctgccgatggtgaaggtgcctggggagcctggtgttac

SEQ ID NO: 195114 - DNA, 122 bp, Homo sapiens
ctctcgccccactcggcaccgccccgccccgccccgtcccgctccacggacgcgcccggacgctactggttcgcctttgcgcatgtgcaattgccctcgtaccgaactccgcaggacgaagc

SEQ ID NO: 195115 - DNA, 122 bp, Homo sapiens
agggagctgccttctttcctaaactgcaatggaaactgtcctgatgtctgagacaatgtccgttgtgccgcagccctctgccttctctagccagagcgcgagctcagctgcttttgagagaa

SEQ ID NO: 195116 - DNA, 122 bp, Homo sapiens
agaaaaatgcgacagattatttgagactctgatagcctgggggtgatccataaacattcccgaactcctccaatgccccccagcactgtcatcagacatcttcaccctctgaagcccatgct

SEQ ID NO: 195117 - DNA, 122 bp, Homo sapiens
ccccactggagcccccggtgctgggcccaggccctgcagccatggaggagagccccctgccggcaccccttaatgtcgtgccccctgaggtgcccagtgaggagctagaggccaagcctcgg

SEQ ID NO: 195118 - DNA, 122 bp, Homo sapiens
tccgtgggtccgtctgcccagccatctgctggtggcacctctccctcctgccgcctccctcggtgaaccccaccttgcagaagtgcagctcgcccggagcagcccaggagctcagcatgcgt

SEQ ID NO: 195119 - DNA, 122 bp, Homo sapiens
aactgcagagtcctctcggcaaccattctgcactccaacaaccactagtgtaaaacccagcgtgtccccttttacaaatcaaaagccagctgtcacttcccttgcaaccatttccgagactt

SEQ ID NO: 195120 - DNA, 122 bp, Homo sapiens
cagaacagaacaaaattcaacaagaaataagcgcccgcgtccacatattctcgtgcctggcgtgttttacgtgcttgggaagcggagcggccgctgggcttggctctgaggtcgggactggt

SEQ ID NO: 195121 - DNA, 122 bp, Homo sapiens
aatacagttgtagtaacatctcctcactgtctattcaactacatgatcaaaataggaaaacggactccctaaaagttgaacttaaattagacattaactctcaatatctggttcatgattgt

SEQ ID NO: 195122 - DNA, 122 bp, Homo sapiens
caggaagccctttagtcacttgctgaaggccacgctgttacccgtgggaccggatttgggcggccgaagagcactcatccgacagtggggccggattcacgccccgggcccgttccctcctg

SEQ ID NO: 195123 - DNA, 122 bp, Homo sapiens
cccagtctggtttcaacatcaccgtccatcatacaatcgccatcacagcattcaccaactcgtgcagtgaggctgttctcgtaatttcccagctattctgggacctccttcctctaatggac

SEQ ID NO: 195124 - DNA, 122 bp, Homo sapiens
cgcgaggtaggtcacgtgccgagggcgcctctggccatgtgacggggcgaggcgggactccgctagctctctgggcagtggggagctgggaagtccttcagtttactcctctgtggcccggg

SEQ ID NO: 195125 - DNA, 122 bp, Homo sapiens
ctgcagttgcaacccgggccgcccgcagaggcaggcggggcccaggtggcgtggaccgcccgtcaccagctctgcctcgccagtctgagtccgacttattaactagcttccgtcattcatca

SEQ ID NO: 195126 - DNA, 122 bp, Homo sapiens
cccgagcatcgccagtatttacgttctaggcaccctgttaagcacgtaaccttcactcttcgcaagcagcctctctatgtggaagccacagtcaccacgcccgctttacagaagaggctcaa

SEQ ID NO: 195127 - DNA, 122 bp, Homo sapiens
aaatttgctctttggggaaagaggcaacttcctttgcaggagatgagtatctcccggacgcgggctggacaggaatgcccaagaaggcacaatgtccattaagccggtgaatggcagggaga

SEQ ID NO: 195128 - DNA, 122 bp, Homo sapiens
gaaattattttctagattcctggcaactcgcgtatcatctccaagcttatttacttcccacgtaggcttttctcttccttgcctttatttctaagtcaagaacttggtctgggcatagtggc

SEQ ID NO: 195129 - DNA, 122 bp, Homo sapiens
gcagttgaaaagttagagaagtctggttttcaagagatgtgctgggtcagaaggaataagcggagagacctagaaaatctggcagttttgtgtgattggggtaattttatgaggggaaaatt

SEQ ID NO: 195130 - DNA, 122 bp, Homo sapiens
tacgggtggcttcaaaaacttgtccccttcgattagcccccacccccacccccaccctcccgccccacccagcccgattgcaaggtccaacgtggccctcagtaagaaggtggccgacagtc

SEQ ID NO: 195131 - DNA, 122 bp, Homo sapiens
agttttcacattcaaggttttactcaccctccaataccatttaaatggatttgtagacaacgatgtgactcgtaactaccaacatttcctatcagtcatccttacctgaacctctgtcttcg

SEQ ID NO: 195132 - DNA, 122 bp, Homo sapiens
cccctcagcactcaccatggcgactccccagagcctgcagcaagcagcacccgccccgcgcgtagcctcccgcggtcatgtgacgctgcggcccctccaagccccgccctctctagccccgc

SEQ ID NO: 195133 - DNA, 122 bp, Homo sapiens
tgtcctctgtctcctctctctgtcacgttctctgctatatttttcttaacaagagccttacgtgacacatagtaagtactctttatatatttaatgtgaaaatcaagttacctgactaaccc

SEQ ID NO: 195134 - DNA, 122 bp, Homo sapiens
acgatccatcagtgccaggctcccgggagctgcagctggctccaagtgcgtggccggaggcgtcccccatctgcacgagtccccagagtcacccgggaataactgcgccgccgccgcctccg

SEQ ID NO: 195135 - DNA, 122 bp, Homo sapiens
taatgatgtgtactttatcagccattgacatgcacaatgaaagaggaagtaattgcctgacggtgtcaggtgaccttcgagttttacatagaaaagaattcagaggcaataatacttaacaa

SEQ ID NO: 195136 - DNA, 122 bp, Homo sapiens
aacaggcgctgggtgcgaggcggagggatgcacaggtcccgccccggccccgccctctgtcggttctaaagggcaaggtctctctgcctcgcgccccgcctctaccccgcccaggccccgcc

SEQ ID NO: 195137 - DNA, 122 bp, Homo sapiens
tgggggtagaaggagctcagcacctcttccagcccttaaagctgcagaaaaggtgtcacacggctgcctgtaccttggctccctgtcctgctcccggcttcccttaccctatcactggcctc

SEQ ID NO: 195138 - DNA, 122 bp, Homo sapiens
tcttctcttggggaaggtttctcccttaccttttcgtccaacttggtgtggatgtgtgtccgggcattggatcagggcgctgggccaggggaagaacaatatatagcctgcctttcctgtgc

SEQ ID NO: 195139 - DNA, 122 bp, Homo sapiens
gacatatgcaaattggcactgcaggcccagggtgcagctgatgcaaaggccccagagctacgctggcttggctttgaggagcagaagggaggtaggaacacagtgagcatgaggagagtgtt

SEQ ID NO: 195140 - DNA, 122 bp, Homo sapiens
gccgtctcttaaaggtaggtaccaggtaggcatgtagggagaagaggatagaatcagagacgcacacagagacagagagcagagagacacactgggaagagacaggcgtagacagaggaaga

SEQ ID NO: 195141 - DNA, 122 bp, Homo sapiens
aaggtgctgggacacatcatcacgggtgacagaaccggtcccctgtggcactcactgtttcggggaattggacaggtggttccaatgcaggcggagtgccattgatgctgagagagaaggga

SEQ ID NO: 195142 - DNA, 122 bp, Homo sapiens
tctgcggagggcgaggcccctggatcctggccgccacctcgcagcccctccctcatcctccgattctcgtaggcgtgcaccgtcacggtctaggtctcgctcagacaagccgaggaagacca

SEQ ID NO: 195143 - DNA, 122 bp, Homo sapiens
tggccttaacgcacggtacaaggcagtttgtcctggggctggagcgtctgggggccctgccggctgcacgtgggagaagggctggccgcctcctgcctcatttcctcctctctaatggagaa

SEQ ID NO: 195144 - DNA, 122 bp, Homo sapiens
tacatatgtatccagaaaccttcacagggtctctacagcctgaagaatactggaagccatcgtctgctcttgctttccttttgttttcttctctgtttcttctctgcctctgcctcaggcaa

SEQ ID NO: 195145 - DNA, 122 bp, Homo sapiens
cctgccacgtcaaccctgcctcgggtgtcatctgacgaggatgccaagctacaagggctgcggtgagactcagagacacgctaccaatggcaccgcggccccacctcgccgaagcagctgcc

SEQ ID NO: 195146 - DNA, 122 bp, Homo sapiens
ttcccctgcctccatgccagctctcactcatcctttaccgctccccgccccccgggcaagcgtgcaggaccccatgggaaatgatcagcttctagcacagtgcctggcagtcagcgggcttg

SEQ ID NO: 195147 - DNA, 122 bp, Homo sapiens
gctcccgggattcggagtcactgccaggaacgcacctagatgtactctagctggtggtggcgccatcctgccaggtcaatccaagaagcagcgtgcttggctatgacaagacagaacttcgc

SEQ ID NO: 195148 - DNA, 122 bp, Homo sapiens
gaaggtgtccacggccaaggtcgggcgcccgggccgcccaggcactgcggcggggacgagcggccaggaggcagctcagcgtggaactgtagccccgccgcccccgcccccccctgcctggg

SEQ ID NO: 195149 - DNA, 122 bp, Homo sapiens
cgcccgttcggttctgcccggtgaccactagaggtcagcagggcttggaggacgtggccgcgggtggcccagcagggtcccgcccggcgctgcgctctggctgcggcgggaccgtcagcctt

SEQ ID NO: 195150 - DNA, 122 bp, Homo sapiens
agcagctggaggaggctgaggaggagaggacagaggtgcctggggcaacctccaccttgacggttccaggtaggtcctggctgcccagcccggtctttcagtctcggccggcgatctcttag

SEQ ID NO: 195151 - DNA, 122 bp, Homo sapiens
aggatgtgggccccactttagaggcacagactatgaaaagctgagttagtgcgcccgggacgccaggcaagcagcttttacagtttggcatcttattgcaggtgcttcgtgcacagtcagct

SEQ ID NO: 195152 - DNA, 122 bp, Homo sapiens
tccagctcccctgcccaccccagccagataggaccgagtgccactccctcaccacccacccgacctccccaggctgctcccagcagcgtccagccctccaatcagcccctgccctgtcagtc

SEQ ID NO: 195153 - DNA, 122 bp, Homo sapiens
tgagtgtgtgcatgccatcaggacgcacttgtgtgcatgtgtgtgtgtatgccatcaggacgcatgtatgtgcgtgtctgcatgccatcaggacacgtgtgtgtgcatgtgtatgtgcatgc

SEQ ID NO: 195154 - DNA, 122 bp, Homo sapiens
cccgtcctggtgagggagttaaagtccgtgcaggtgaacagaccccggcccgcgaatcaacgaaccacaccgagtgccaagttgcgccgtgcaggctgcggagggtgcgagagcagggagaa

SEQ ID NO: 195155 - DNA, 122 bp, Homo sapiens
aggcagaggttgcagtgagctgagatcgcaccactgcacactccagcatgggtgaaagagcgagactccatctcaaaaaaaaataattaaaagcttcatgagctcttctaaacagcctttcc

SEQ ID NO: 195156 - DNA, 122 bp, Homo sapiens
gctcgcccaggaaggcctaggctaggacgttggcctcagggccaggaaggacagactggccgggcaggcgtgactcagcagcctgcgctcggcaggaaggagcggcgccctggacttggtac

SEQ ID NO: 195157 - DNA, 122 bp, Homo sapiens
gcggaactaggccgagggacaaaggctaaggtcagccgcggttcaagccctttcgtctgccgacgaccagcggccagacgctgcgggagcactgctgggctggaggagggctcgagctgcga

SEQ ID NO: 195158 - DNA, 122 bp, Homo sapiens
ccagagtccccgcccttttcgaggaatcaagcaatggaagcatgtgggatgggaccacagcgagcaactgaccaatgagagtgagcgaggcccgccctctacaaacttttggccaatgggag

SEQ ID NO: 195159 - DNA, 122 bp, Homo sapiens
tgttaccctgctgttgctgctgctgcagctgctgctgccgaacagaattgagtttagtgccggcccccactggggaccgggtggccgcgattgtctgtcgcagcgaactgtccctcggtcta

SEQ ID NO: 195160 - DNA, 122 bp, Homo sapiens
aatatagaacagtatgtttattaatcaataatgtgccacacagaggtgaatgaatgaaagcgacattgtctaatgtggaaaaggattctgtagacagatgcttggtatgtctggcatcatgt

SEQ ID NO: 195161 - DNA, 122 bp, Homo sapiens
ggcgggcgcgcgcacacccgctgatctatcactctcgttcttgtagctcccagccgaggacgtcggatgtcatcgtccttgctgctttgccaccccattcccgtcaataaagtggtttgaac

SEQ ID NO: 195162 - DNA, 122 bp, Homo sapiens
agtctgggggcggaggtcgcagggaggcgagcgcagggggtcaccggcgaccccagagcgcgcattagaggggcaacctctggttaacttcaaagactcccgtgtctgcaagttggaccatt

SEQ ID NO: 195163 - DNA, 122 bp, Homo sapiens
cctcctcttcttctcctcctcttcctcctccttcctttccttctccttcttcttctcctccgcctcccgctcctgctccgcgctggctctcccagagtccggagcctgggctgcctccggcg

SEQ ID NO: 195164 - DNA, 122 bp, Homo sapiens
gccaaggcccgggaaagttggagaactcgctttgcaaaaaagacatcccctccaggctgccgcgccggggctaggaggagccgcgttgtgtggcttcgctttcctgatgctcgggtcaaaaa

SEQ ID NO: 195165 - DNA, 122 bp, Homo sapiens
tcccccttccccacctggagcttgtgacactccagagcctggtttcatcctcatatccagcgaaagacgtggatacctccccccagcccctacccccctcccccaaaaaagaaagaaagaaa

SEQ ID NO: 195166 - DNA, 122 bp, Homo sapiens
cggtgccgcgccggcagccgccaggaaggccaaggtgctgctggtggtcgacgagccgcacgccgactggtaggtgccgggcgccttcgccctcgggggtcggggtccgccggcagccgcag

SEQ ID NO: 195167 - DNA, 122 bp, Homo sapiens
aaatatttaaatccaataaaatgaattctcatgaatattttattgtttcaatggagacttcgtaagacaaaataatttcattaatgtggatgaaaaatggaaaactcagcaaaggacatgaa

SEQ ID NO: 195168 - DNA, 122 bp, Homo sapiens
cggctcagtcggggtagatgatgaagccggagaaggtgctgtacttgttggtgttgccgccgtgcactttcccgccgtccagcttgatgaagacctcgtcgcccacgtccaggtgcagaatg

SEQ ID NO: 195169 - DNA, 122 bp, Homo sapiens
atgggcctttatgtcatgagccctgatagtcagatgctaaatcaagctcatttcctctaccggctaatgtgtgcagatgcagcttgacatttagcattagtctgtcctctgcatttcaaggg

SEQ ID NO: 195170 - DNA, 122 bp, Homo sapiens
gtcaatgaatcaactcatgggtacattcacaagtcctcatcaggccagtcccctgggcaccgcctgccctgtgccttgtggctcaggtgcgtgtcacggacggcacgttcctcggcacccca

SEQ ID NO: 195171 - DNA, 122 bp, Homo sapiens
agttgaactgtgaacaatttgtaatagaggcctcaggcaatccagtaagggctctggagccgggatttcctttcagagtcatcctgaattgaggccagggggcagacctttagaccctctta

SEQ ID NO: 195172 - DNA, 122 bp, Homo sapiens
cctcggcgggcaccagaagaaccacatgatttcttcagagactagaacacagatgtagaccgatgcggtgttctagggggcacacctgcaaagaccccaaattcttctaagacaccatttca

SEQ ID NO: 195173 - DNA, 122 bp, Homo sapiens
tgctggtagcggagcctgggggagctggaggtgcacgggggcggggcagtcggtaccaggcgagccgtggtctttgacctttgacacttgccaaagcatcgagtgcgattggaggggtgagt

SEQ ID NO: 195174 - DNA, 122 bp, Homo sapiens
ggctccggagccaagaggtgaccaggctggctgggcagggctgagtggctgggccgagcacgtgatgctcccagccggcctccggggccctccgggctgaaatcgacatttgcctctggcag

SEQ ID NO: 195175 - DNA, 122 bp, Homo sapiens
ctcaaaccgggatcatgacggtccccaaggagatgcccgagaagtgggcccgggcccaggcgcctccctcttggagccgaaagaagccctcttgggggacaggtaacgggaggcagcgcctg

SEQ ID NO: 195176 - DNA, 122 bp, Homo sapiens
tcaaggtcaaggaggtacatacactcagtagaacagcaagtgcaaaggccctgtggcaggcgccagcttagcatgttgaatgaacagagaaggctgctgtggctgcagtgtagggggcaaag

SEQ ID NO: 195177 - DNA, 122 bp, Homo sapiens
cattaagtattgcacgtggtccttttattctctgcagcaaaaacgattcctacttgctgacgcggaaagctcaggtctggagagccgttatctatagatgcgagcgtgacgatcaacagcaa

SEQ ID NO: 195178 - DNA, 122 bp, Homo sapiens
aactcttgagctcaagccatcctcccaccttggcctcccaaagtgctgggattacaggtgcgagccagcatccccggcccagagctgggtcttaataccgagactaacacctttttctttct

SEQ ID NO: 195179 - DNA, 122 bp, Homo sapiens
tcccggagccttctgcccccgccctctctagccacgccgaggcataggaggggccctgcccggcagccccagcccaggcggggagttcctgcgcttccccagggcttcccaaacttcagctc

SEQ ID NO: 195180 - DNA, 122 bp, Homo sapiens
cgttcattaactcattcgctcagcgatccatgggcctgtcacgtgcgccaggcatttgggcgtcatgctgatggctgggcgaggatggggaggactcagacaaaagaagacagccagcaggc

SEQ ID NO: 195181 - DNA, 122 bp, Homo sapiens
gagacgggggttgtgcattgacgagccccgagatgctggggagacgcagccgatgctccccgcagccctcagaaggggctggccctgccgacatcctgcgcctggacctccagcccccagaa

SEQ ID NO: 195182 - DNA, 122 bp, Homo sapiens
gtgatcgagggctacctccacatcctgctcatctccaaggccgaggactaccgcagctaccgcttccccaagctcacggtcattaccgagtacttgctgctgttccgagtggctggcctcga

SEQ ID NO: 195183 - DNA, 122 bp, Homo sapiens
cgaccgcacaccctcccccactttttccacggccgattccgacatcactgagctggctgacgagcagcaagatgagatggaggattttgatgatgaggcattcgtggatgacgccggctctg

SEQ ID NO: 195184 - DNA, 122 bp, Homo sapiens
ctcctgctccttcttgagctccaggtaggagtgggagaaggtgtggaagatagacgtggccgggaaggccatgatgaggatcccgctcaggatgctgctgagggccaccatctggcctggca

SEQ ID NO: 195185 - DNA, 122 bp, Homo sapiens
acgcctaccagcagtcatcctacacggagcagagctacgaccggtccttcgaggagtccacgcagcactactatgaggggggtaaggagcacggctgcgtgctgggctcgagcgtaagcgcc

SEQ ID NO: 195186 - DNA, 122 bp, Homo sapiens
taaattgagcaatggctttcatggcccttggggctgcctctgcagaggcagttaatcatccgcctgaacaatcaaatcaatacccatgacctttcctttcagttgtttctcctgctgtctct

SEQ ID NO: 195187 - DNA, 122 bp, Homo sapiens
atgagcaaaagatttccttaccataaagtgaagcccatcaagtgaaagcaagtagaaaggcgcagaaaggtttatccttgtcaccatgtggaaggacacttggggagcagatcatttggtaa

SEQ ID NO: 195188 - DNA, 122 bp, Homo sapiens
ccatagtgactgtactcatttacattcccacacataagagttcccctttctctgcatcctcgcccacatccattattattttgtctttttaatcatagccgttctcattgggtgaagatgat

SEQ ID NO: 195189 - DNA, 122 bp, Homo sapiens
ttatacttctaccttgatgattgcaacaggctgctggaaagagtttggtgaacaatccaccgggcatcctccccccttcacctgcgcacgttagggagggccggcgtggcgcccaggtacgg

SEQ ID NO: 195190 - DNA, 122 bp, Homo sapiens
ggtgctgctgcgcggcggccaggcggtcagcactaccaacctgttcatccttaacctgggcgtggccgacctgtgtttcatcctgtgctgcgtgcccttccaggccaccatctacaccctgg

SEQ ID NO: 195191 - DNA, 122 bp, Homo sapiens
cattgcctgctgcgcacccggacgtgcggctcccctcggcctcctcgccatggacgcggacgactcccgggcccccaagggctccttgcggaagttcctggagcacctctccggggccggca

SEQ ID NO: 195192 - DNA, 122 bp, Homo sapiens
cgagaacctgcaatcattgacttaagtaataccctgagcgcctgcagcaggcccggcaggcgtggctgcagctgagagccaagtgctggaagttgggggggaatcctcagatcaatccgcag

SEQ ID NO: 195193 - DNA, 122 bp, Homo sapiens
cagctactagtccgcaacttctagccccaaaacgctggagctcagaacccagctcaggtgcgctcgtcggtttcccagggagactggggctgattgtaggcacgcgggggcgggaagacagc

SEQ ID NO: 195194 - DNA, 122 bp, Homo sapiens
tcttataagccctgagatggggaaccgtggaccaggggctgttttaaagcaacagtcccacgattgttccaatttttcccacacatgagactctgcacctctcatttaaaatgtcagttttt

SEQ ID NO: 195195 - DNA, 122 bp, Homo sapiens
agctgccgggtggagaggctggggggcttttcccgaggtcggcggcgaggctgagagccccggccccgccgcgcccgaggagacagcccttcgcgggctctaaaggccccggggcctccggg

SEQ ID NO: 195196 - DNA, 122 bp, Homo sapiens
ttttgttaggagcaaagtggaaggaccatttcatttttttctgagctctgtttccttgcccgtttttctgtagagctattggtctttttcatctatttttagggaccatctgtgtattacag

SEQ ID NO: 195197 - DNA, 122 bp, Homo sapiens
acaatatctggcatttacacaacgaggcctctgctccggacactgttctgaggcttgacccgtccttaagaacctaggacaaccctgtgcggtgggttttatccttaactccattatacagg

SEQ ID NO: 195198 - DNA, 122 bp, Homo sapiens
tgatatcgactaattctctcctgtttcaactgttcaaatttccgttttaactctgcctgccgttctactttcttttgtgcacggcctacaaatatgattttaccacttatttcttttccatt

SEQ ID NO: 195199 - DNA, 122 bp, Homo sapiens
accaccccccgcctccttccctccatccctcccaaatatcccagaacgagtcaaacctttcgaatctcgtagcacagataacaagcaactcagtaagactggacggggatgactgagggcca

SEQ ID NO: 195200 - DNA, 122 bp, Homo sapiens
acatgtgtctaagtgtgtattcccaccaccacctcctatggtggcaaatcccataacctccgtgaggagaaaggacttcttcacatttatcaaacacctgcaacgtggcaggcactgtgctg

SEQ ID NO: 195201 - DNA, 122 bp, Homo sapiens
agaaaacactgctgctggccgtgtttcctgtgagttttgagggtgacctgagttgagttgcgtgtaggcagctcaggttgactgagacaggaatgcgctcgatttcctgcccgttaaaacac

SEQ ID NO: 195202 - DNA, 122 bp, Homo sapiens
agtgggatgggaccatgtgtgcccaaggtgggtccacggggacaccagctctgtccatgccgcacctccagaccctgggacccaggctgcgtgcaggcaggttcggaggagcgcagcgatcc

SEQ ID NO: 195203 - DNA, 122 bp, Homo sapiens
agcctggggagttgggggagactcgcaggctctgagattccaaggacagtttctcacggccgcagcccctgcacgtggggaatgctgagctcctgggcccggcagcagcacccggaaggtgt

SEQ ID NO: 195204 - DNA, 122 bp, Homo sapiens
cttgctgatcttttcaactctaagagtgaatacttttcttttctttttaaaattctttttcggaaccctcaaacacctactctcttcaaacagccattccagcccagtctggggaaaactgc

SEQ ID NO: 195205 - DNA, 122 bp, Homo sapiens
agcacaaccggaaaaggaagtgcctccggcgcaagtggcattgagggacttgtagtcctgcgatttcgggtgtagagggagcaggggcctgcggggacctggtgtgggtggagtggggacaa

SEQ ID NO: 195206 - DNA, 122 bp, Homo sapiens
ggatattttcctggcaggataccgcgatggcaggatgtttgataccgaatcgaagcacggcgtcaaagcagcgtcctgcgcgggggagccggatgtaataagcgaccccagctgccggtaac

SEQ ID NO: 195207 - DNA, 122 bp, Homo sapiens
cacagcgaggtcctcctcacatactcactccttcctcggagaaagaccccgacggagggccgtggtgaacacacactcctcggccgctttgtactcacatgcacgccagcctacatatgcac

SEQ ID NO: 195208 - DNA, 122 bp, Homo sapiens
cggacagcgggcctctccaatggccgggcgcggtgggcagctaggggcgaggcggcggggcggggccgctctcccgcaggaggagtcaggcccccgccctccggccccctcctccggccgcc

SEQ ID NO: 195209 - DNA, 122 bp, Homo sapiens
gagcaatattaagaggctggcatcgtgcacccaattttagagatgaagaagcagggcctccgggaccagaagcctcagctcacacaggattgagtgcagagctaaggctagagcctgtctgc

SEQ ID NO: 195210 - DNA, 122 bp, Homo sapiens
gagtgcagtggcaccttctcggctcactgcaacctccgcctcctgggttcaagcgattctcgtctcaggctcccaaaatagctggggctacaagtgtgcaccaccacgcccagctaattttt

SEQ ID NO: 195211 - DNA, 122 bp, Homo sapiens
gagcatggtcctgcgcgggtcgcttcatagctggggagaagagcaggatggtctcaggggcgccagggttttcaagttttggtttgttgatttgtaacaactttattgagccttcatttaca

SEQ ID NO: 195212 - DNA, 122 bp, Homo sapiens
ttctctgccatgaggaattctgcaatcttatgaattgtccatgatgaaactccagcaccccgtaagactgcatattagaacacaatacaatcttatatttctgtagcgcccttcatgcaagc

SEQ ID NO: 195213 - DNA, 122 bp, Homo sapiens
ttagctgctctggaaaaaggatcagacttctaactattgcccaaccacatggccccagcccgcttttctgcagggggaaatgaagagagaaaatggccacctctgctgccttgccttctccg

SEQ ID NO: 195214 - DNA, 122 bp, Homo sapiens
tcttcttcttggattttctgtgatgatgggtcctccgattttattgagggccacggagcacgggggaagtagaagctcaactttttaaaataatatccacagcaacagcagtcaccccgcat

SEQ ID NO: 195215 - DNA, 122 bp, Homo sapiens
gtgtttacagtatgaatgcttttattagtgaaatgggtcctcaactcaatctgggagccacgagctacggtgcagggctctcgggcatccccaccgtggtgcactgcagggagggagggagg

SEQ ID NO: 195216 - DNA, 122 bp, Homo sapiens
gtgttaagttcttaaagattgtgtgtctcgagtttgttccttcagatgttcagatgtgtccggagtttcttccttccggtgggttcgcagtctcgctgacttcaggaaggaagccacagacc

SEQ ID NO: 195217 - DNA, 122 bp, Homo sapiens
tgggacactgacgtgatgctgatctgtaaggcagctctctctgtggaatcaccaccacctcgcatccagggagaattaattcagggcacaatggagacagagacccagccgagatgacaatt

SEQ ID NO: 195218 - DNA, 122 bp, Homo sapiens
tttgatgcgagagatgtatgatagggcaggggagatggcctccagtgcccaagacgaaagcgaaaccactgtgactggcagcgatcccttctatgatcggttccactggttcaaacttgtgg

SEQ ID NO: 195219 - DNA, 122 bp, Homo sapiens
gtaaaaatgagttgtaatacattcctcccctccccctagccatgaaaggaaacaggggtgcggcttgagtacagagtcacaacctgagtctttagtggaaaaggagacgaaatgccgagcaa

SEQ ID NO: 195220 - DNA, 122 bp, Homo sapiens
ccgcgtgtgggcttgcctgtctgtcttccctaccagatgacaaatgccgcttagaaccaccgctgggtctcattgatcctgaacctccactgcctagtaaagttttcctccttttaaacctt

SEQ ID NO: 195221 - DNA, 122 bp, Homo sapiens
gtaaaattaaagagttggtgccacctagagggcaagagagtgcatctcagaagagggctgcggaaatccttagaatatggaaggtggtggtggttataaagaatcataaaaataatctctat

SEQ ID NO: 195222 - DNA, 122 bp, Homo sapiens
ccctccccaccacccgccgctgtgtccagacagagaatgttctaacgctgggggcggctgcggatgaagtccttggggagaaaaggagcaggccaagggcgatggtggagtagagctgcctc

SEQ ID NO: 195223 - DNA, 122 bp, Homo sapiens
ggggccctcctccactggcgctggtcttttgtctatggattcatgatctttattttctcccgaactctctttatgatcatttcagaggggtctggggagaagggcagtctggagctggcctt

SEQ ID NO: 195224 - DNA, 122 bp, Homo sapiens
gggcagttggaggacagtgaggaagcagctggaggagatgggaaggtgcaggtttgcccacgtgatctgcagcacacaagatctgtgccagggactgtggggcactgatgacaatgtggccc

SEQ ID NO: 195225 - DNA, 122 bp, Homo sapiens
cctgggaggccgagaggacccagcctgggatctctgggggaaataggggcaagtttaccacggtttaattaagccacagccctagcacgaggaccccggcgacccatccgggctgggggatg

SEQ ID NO: 195226 - DNA, 122 bp, Homo sapiens
aaagcttaaatggcagcgcagagtcgggaggggggtgcccagggggcctcagcagagccccgtccctcccggcagcccggcctgcaggggccactcggccaatcccgaagagctcgctcagg

SEQ ID NO: 195227 - DNA, 122 bp, Homo sapiens
gcgaagatctcctggatgagctcgaagatctcgggcttgttgcgctcccggatcttcatgcggtccttgagcaccatgatgatgttctgtgtccggtcctccgccccgtgcttggagctctt

SEQ ID NO: 195228 - DNA, 122 bp, Homo sapiens
gaggggcaccccatctttgtggccatggcggtggtagagcggctgggaggggctctgcggcgagcaagggagcaggcggtaggggttctgcggcgatgggcgggctaggggcggggcgcggg

SEQ ID NO: 195229 - DNA, 122 bp, Homo sapiens
gagacagagtctcactctgttgcccaggttggagggctccatcatggtgtacttcagcctcgacctcccgggctgaagctatcctgccacctcagccttccaagtagctggtactacaggta

SEQ ID NO: 195230 - DNA, 122 bp, Homo sapiens
ctcaaaaaaaaaaaaaaaaaaaggaaaagaaacacataaatactataataaatgtagcaacgtaccttgcagaagatccaaaggttgcttgtggaattgggcaagggaatctaaatttccag

SEQ ID NO: 195231 - DNA, 122 bp, Homo sapiens
gagatttaaaaacgcttatgggatgaatggaaaatagcagggcctcttaccggcctgcaacgcctttagaggcacggatgccacgtgcacagacccagctccgggaagcacaagcctggtgg

SEQ ID NO: 195232 - DNA, 122 bp, Homo sapiens
aaaggtgcttcaggtgagctctcactcccctctaataaataaacgaatccacacacgccccggtatagccaggtgtctcaaagccaaagcttggctgaggagctggtgggtagagctcactg

SEQ ID NO: 195233 - DNA, 122 bp, Homo sapiens
gtttgcacctgactgcaaatgctgctcagaaagctaaggggagtagggataaatgcttctcgaactgactcgccacagcgcgagcatgtcttgccgcgagttttcagctgtgcggcttcatt

SEQ ID NO: 195234 - DNA, 122 bp, Homo sapiens
tgggagtgcgcgggcagagtgagctggacccccggagggtcagaggccctttcataaaagcgcgcagagcagaggagtgatgtcccccagctcccccgcagagggtcctgcacctgcggcct

SEQ ID NO: 195235 - DNA, 122 bp, Homo sapiens
agcattataagacacctcagtatttttaggaaataagtggggacataaatataaacaacccggaaatcactgcccctagaattcacagagtggaagaaccaagctttttagggctgatgtgg

SEQ ID NO: 195236 - DNA, 122 bp, Homo sapiens
tctgaactcaccctaaagaggacaaacaccgcaaagtagttaaaagtcaggcattcgcgtcggacgtctgggtttgaattctgccctggcttggtaaaatagggctttggataaattaaagt

SEQ ID NO: 195237 - DNA, 122 bp, Homo sapiens
ttgggttccagagggctcccatgcccctgtcctattgctcttctggcaataggacatttacgcgggggggggggtggttcttgattctgggtcttttaggggactctgtgattaagaaacag

SEQ ID NO: 195238 - DNA, 122 bp, Homo sapiens
cactgacactctagagaccagcgggcaccgcctggaggcgccttcaccacttggcggttccgggtccgcgccccaccgcgccacaagactcacgcccgaaccacgtgatcagggccgtggct

SEQ ID NO: 195239 - DNA, 122 bp, Homo sapiens
acccagacgagccacggggcggcgcagagccccactcgcagggcggccgggacccacgcgcgtgggtccacgcaacaacctataggtgacaaaacactcaggaagccgtcatgcggggccaa

SEQ ID NO: 195240 - DNA, 122 bp, Homo sapiens
ggctagggctcaggggccgtgtgtgaatttacttgtagcctgagggctcagagggagcaccggtttggagctgggaccccctattttagcttttctgtggctggtgaatggggatcccagga

SEQ ID NO: 195241 - DNA, 122 bp, Homo sapiens
gcccccaccactgctgcaaagtgcctgagctcacccagtggcggctaataatgctaataacgcgaccccgctccccgcgccggggtgcgcgctggccccccgccaggcactcttaaaggcaa

SEQ ID NO: 195242 - DNA, 122 bp, Homo sapiens
ccagggcgtaagtagcggtcaccacgtagctcgcccaggcccttgtggggtggggtggggcgcggcgggctgggcgggcgaagtgggtgcggccgggtgcggcccgggtcccgcgtcacctc

SEQ ID NO: 195243 - DNA, 122 bp, Homo sapiens
gaggggtaatcctcccctaggtccaaccggtgccgcttggacatcctcgcactcttcgaacgggcagttattaaggaagaaagctggctgctgtatgggcacagtcgaggacagccacttaa

SEQ ID NO: 195244 - DNA, 122 bp, Homo sapiens
cctgcagaggtcttcttcagcttggcacacagtaggacatctgtaaagaggaagacgtgccgcagcttccgggagctctctgacacttccaccaggaagccgtccttcaccagctgtcgcgt

SEQ ID NO: 195245 - DNA, 122 bp, Homo sapiens
tggaaactttcttgtgtttgcgaacgcagacagacactcgacacccagtttctccatggacggcatgcatttacatgcataatacggcggatgtgcccgctctgactgcagctcatttccta

SEQ ID NO: 195246 - DNA, 122 bp, Homo sapiens
ctaatagaggaaagcacgcgcccaccccctctctgagcatgcgcaccaacagaatagccgcgccctttcctaattaaatcattaaccaaggtgagggtaaggaagaaaaggaggcttggcta

SEQ ID NO: 195247 - DNA, 122 bp, Homo sapiens
gaaaatgggggcagttctcacctggttatcccttcacggagaatcctgaagaatctggaccgtgggtggagcaaggaacaacagaggtagagccgggcagagagaagaacagatgaggagag

SEQ ID NO: 195248 - DNA, 122 bp, Homo sapiens
gagaggttgtgtgtgtgtgcgcgcgcgcgtgagctccaggcgaaaaggggtaggattcagcgccgagcagagagggtcagggtttttgacgttcctcgccagctgcacaaacctcccggagc

SEQ ID NO: 195249 - DNA, 122 bp, Homo sapiens
tgcagctcctgctccagcaggttcaccttctcccgcagcagctccgcctcgttcttcttgcgctgcagctcattctcacagacctccagctccaggcccttggtgcgcagggcgccctccag

SEQ ID NO: 195250 - DNA, 122 bp, Homo sapiens
ggcgcgtggcccgggggtcctcggtcccggtccgcggagctgctaggggtgggatctggccgagagctggggcggtctgcggagcacccggctctgggctgcgcgtcgcctcctctgggctc

SEQ ID NO: 195251 - DNA, 122 bp, Homo sapiens
cgggggggggacacggacgccaccaggcacccccacgcacatcgcggcctgagctgggctcggggagcggcctcatgactgcaaagacttgttcccagcccgaagaaatctaaaaaccacaa

SEQ ID NO: 195252 - DNA, 122 bp, Homo sapiens
gagttccgtgcgccaatcatcggtgggagacagggagggggcgtgtccatccccgccccccgcctccgctggcctcgaaagcggagtgcgaagcttcctcaaacctaatcggcggcggagcg

SEQ ID NO: 195253 - DNA, 122 bp, Homo sapiens
gttgcatggaaggtttttaaacctagccctgccgagcagccctctcctggtccgggagaacgatggggagagagctggcgttcagctttcatcactggagccgttccttcttccggcccccc

SEQ ID NO: 195254 - DNA, 122 bp, Homo sapiens
ccggcaccatctggcccctgcctctgcctgcatcctcttgcactgctgaataattcatgacggcgggccgtgccaacccattttcaacagaggtattgactggcagcgcgagcaagcggctc

SEQ ID NO: 195255 - DNA, 122 bp, Homo sapiens
atacattacatataggtgcatagatacataatttcatagatttcaaaacacagataggatcgtgctctacaccttgtttggcaacattttttttttaacttcctacatcttggacgcccatc

SEQ ID NO: 195256 - DNA, 122 bp, Homo sapiens
ccgtcggcagcagaaagtgccgcgtgtctgcccccgagagcggagagcgggccggatgcccggggcagtggcaggcgcaatgacccagcccaggccattttagatttctgccagccataaaa

SEQ ID NO: 195257 - DNA, 122 bp, Homo sapiens
gccgaggggccctgtggcgtcgggggtctttccctgcagggtgggtgggggctgtcaccacgtggcttctcctttttttttttttttttttttccgctccattttttttcaagtcgatttta

SEQ ID NO: 195258 - DNA, 122 bp, Homo sapiens
tccgggtggcacagactgcagcaacagtgactctcctcagcattcaccaccaagctggagcgatggacatcccgcttcccaggacccacctcctccgcgttctagaggcggtggcggccggc

SEQ ID NO: 195259 - DNA, 122 bp, Homo sapiens
gccgcgggagaactggggccgctgcattctgggttctggcggcaggtgccaggcagggcgcgagtgatccgctgatcgaggcggtggcagcgggaggacacccgctccgggcgaccggccgg

SEQ ID NO: 195260 - DNA, 122 bp, Homo sapiens
gttgtttggagtaatatttgaggtcttgctgagtgaaataaatagacacttctgaagaatcgagcaacagagaattgtggagaaacagtgtattcgggccactcagtgcacacagccagctt

SEQ ID NO: 195261 - DNA, 122 bp, Homo sapiens
tttattccttgatttataccctcaacataatatgatgtccttcatgcacagagatgaccccgatgaatcactcatcaacatgagttattttttccagcagtggtcacgaatgttcactcatt

SEQ ID NO: 195262 - DNA, 122 bp, Homo sapiens
tcacatcctttacctgctatggctgtcagtgataccatagactcaggggttactagtctccgtaattttgtggaccatgcaaagaatgaggaaagctgtattgagattcctttgatgacccc

SEQ ID NO: 195263 - DNA, 122 bp, Homo sapiens
gaggtctgagagcctgcccaggtatgctcctacttttcccactttacaaagactgaagagcgaaagagaagcgcacccagacacacccaggttcacggttgcttcctctgttggatctctgc

SEQ ID NO: 195264 - DNA, 122 bp, Homo sapiens
ggcgcgaaaccggcatcctgataactaggatttacagaataaggctgactcctgtcagctcgtgacccagccctgggcgtcctccacggggcagctgtcattccctaaccgccccccaccaa

SEQ ID NO: 195265 - DNA, 122 bp, Homo sapiens
tattaaatccagacagcacacgaacaaagcacaaggagctcattgtgttgaaggaaaccacgcactttggtgggaagacaatgcactatatagtatgaaaaccctccatggccattgggact

SEQ ID NO: 195266 - DNA, 122 bp, Homo sapiens
ccagatgcggtgggcgggagctgggggggcggcggggtcccgcgaagacctgcgacctggcgccctcgccggctgtgtcccggccagcccgctttccaggcgagcctcgctaaggagtgtga

SEQ ID NO: 195267 - DNA, 122 bp, Homo sapiens
gccagaagcccggcggggttgggggcgctctcctagtgactcaaggcgcgcagcgctgggcgcaaagcgccagtctccgccttgcgagctcagagtgtgcccgctgcgccgccgctgtccgt

SEQ ID NO: 195268 - DNA, 122 bp, Homo sapiens
gaattattccctctctctgtagatcgaccaggtgtcccagacacaggatccaactgcttccgggcttattgcccgagtggggtggggagagtctatcccaccaacaccccttgcgtgagtcc

SEQ ID NO: 195269 - DNA, 122 bp, Homo sapiens
tttggcaacggaagctggcacagagagtctgaaataccctcaccccacacgtctggctcccgcctgcctcccacaacacccggcccgtacaggcccactggggacccgcagaggcagaccag

SEQ ID NO: 195270 - DNA, 122 bp, Homo sapiens
tgttgggcggacagagcactactaactcctaacttttctcagaaagctgggctctgctttcgccagcaacccggtccgaagtcgcgggcatattctgtctgaaatcgtgtgcaccgaaatcc

SEQ ID NO: 195271 - DNA, 122 bp, Homo sapiens
gatgagcggcaggtgcggaaacacatcggggatcgtcatgggcgtgagcgccgttatgaccgggccttccccggcgcccgcgctgccccccgcgccgccggctccttcctccgcgccgccct

SEQ ID NO: 195272 - DNA, 122 bp, Homo sapiens
tggcagatgcggccccggggccatcccgagcccgaggggcggagaggggagccgagaattcggaagtgagaaggggacccggagacaaagggaaaaaaccaagactgagaaagaagtgagag

SEQ ID NO: 195273 - DNA, 122 bp, Homo sapiens
ccgtcagcatcctcgcgtcctgtgtggctgtgaggcaccgtcagcatcctcggtcctgtgcggctgtgaggcactgtcagcatcctcgcatcctgtgcagctgggccaggacaaactggctg

SEQ ID NO: 195274 - DNA, 122 bp, Homo sapiens
tttgaaataaattaattaatagatgatggaatttcaggtattaatgaaattaccattactcgactgcaggcagccgtgtccttgcaaaaagaccatgtgatgccgcctgtgaacgcacaggg

SEQ ID NO: 195275 - DNA, 122 bp, Homo sapiens
gcacgtgtgtggtggaattgaacaggcgccctcatccacacccgagcataactggaacggcgctctcccttaggtgcctgtgaatctgctccgtgcgggccgcatctttgtgttcgagccac

SEQ ID NO: 195276 - DNA, 122 bp, Homo sapiens
ggatcgggacaactctaagccactcctcgcctgctgctcggctgctctccccctccacgccggagcactgtgggccaccgcgctgcaccttctgccggcttccaagggctccagccatagca

SEQ ID NO: 195277 - DNA, 122 bp, Homo sapiens
acaccgtcaccggttcggggaagtagtccttgaccaggcagcccagggcggctgtgctctcggaggtgctcctggagcagggcgccagggggaagaccgatgggcccttggtggaagctgca

SEQ ID NO: 195278 - DNA, 122 bp, Homo sapiens
ggattctatcctgcaagggcacggggacccacaacgacggctgtccctaaagaaccgttgcgactggtaactgaagtggaagagagtccagatttcttgtgtgtggtcaaggagacggacaa

SEQ ID NO: 195279 - DNA, 122 bp, Homo sapiens
ctcgggagcgcggccctttgcctgctgggagtgtggcaagggcttcgggcgccgcgagcacgtgctgcgccaccagcgcatccacggccgggcagcggccagcgcgcagggggcggtagctc

SEQ ID NO: 195280 - DNA, 122 bp, Homo sapiens
ccctcttctctgagactctcttttctcagtcttttcgccggtgtttggcagcaaaggatccgaggaggaagctgttggttgagcctccctgattctttggctcaatttggaagttctcttag

SEQ ID NO: 195281 - DNA, 122 bp, Homo sapiens
caggagtgcagggcgggtacctggggagctgcgtggactcgcgcagacgggaagcaggcgcgtgctggcggtgacctggggccggaggaggaacgctgggaagaggccgggccccatccagc

SEQ ID NO: 195282 - DNA, 122 bp, Homo sapiens
cgatctcctgaccttgtgatccgcccacctcggcctcccagagtgctggggtaacaggcacgagccacgacgtccagccttggacatacattttgaaaggcaatggggtgacaaagagagga

SEQ ID NO: 195283 - DNA, 122 bp, Homo sapiens
ccgtcgcgggagaggtgagagcgctggctagaccggggccgaatgcggccggattcggggcgggggccttcagacctagggtggaacactgggatagggtgtggggaattcggaccgctgtg

SEQ ID NO: 195284 - DNA, 122 bp, Homo sapiens
gcttgtcccctccccctcaaaagtcccaggttacagattcttggaagactgtatccgagtcgctgcagccagcggacagatgcagtggaactatggttatgtgctgctctgcctgggagaag

SEQ ID NO: 195285 - DNA, 122 bp, Homo sapiens
agacacgagccggggagcccataggtttcctctgcctttggagcgaacccagtcccttagcggggagcgggcggagtgtgagcgcgcgggtgagcccgtgccggggtgtcggcaagagaccg

SEQ ID NO: 195286 - DNA, 122 bp, Homo sapiens
tcaaaggatcctcccgcctcggcctcccaaagtgtttaggattacaggcatgagccactgcgcccggccaaaaagaagagtttttaaaaggcacagagtttacttataaatattctacggcc

SEQ ID NO: 195287 - DNA, 122 bp, Homo sapiens
tcttcgctctgctggggattcaggggtcttggctgcgcggagcgtctacggagccagaggcgtggccggagtccttcccaactgcctatcaatctgacaccttccaattttatgtttctaaa

SEQ ID NO: 195288 - DNA, 122 bp, Homo sapiens
accagacccccagcaggagttctcagtgttagggagcttgctagtgctctgtcacactcacggcaaggctgcttgggggaacagggagaacagaaaaggaagacagaaaatctcagtggcat

SEQ ID NO: 195289 - DNA, 122 bp, Homo sapiens
tttaaaagtgggctccctcctcacctcatcacatcagattccagacccgcagtttttcctcggatgaaaataagattatgtaacaagagaacagaacttccagcgtttggataggattaaga

SEQ ID NO: 195290 - DNA, 122 bp, Homo sapiens
ccgtttggtaactgacaggaagcggaagccgtgcgtgggaggccgattctagtgcgcctgcgtggccgcgaatcaccagccagcctctgggtctgtagcaaccgcccagcgttgaggcgcgg

SEQ ID NO: 195291 - DNA, 122 bp, Homo sapiens
cgcctttcctccgcctggggcgaggggggttccgggccagataaagccgtctggttcccacggtccagccgccgcctacccgccccccgttgtagctcagcacccacccccaggacgaggcc

SEQ ID NO: 195292 - DNA, 122 bp, Homo sapiens
tcccacccctcccttttacaccccacccactgcttctcacatttccctgcttggttcctgcggttattcatgtttgcaatctctgacttagaggtttcaatcaattgctatctcaataggag

SEQ ID NO: 195293 - DNA, 122 bp, Homo sapiens
gggcagcgctcagcttggtggcgggggcggcggcggcggcccgcgggtcatgatctccgccgtgtccagcccgtggctcacgcagctctcgcatttctgcgacgttgcagccttcacggcca

SEQ ID NO: 195294 - DNA, 122 bp, Homo sapiens
cccatatgctggggtggagtggggaggggagagggaggcgctgtgaaatacatctgcctccgatcacaaaaagatcaaattaacatgtgaaaagatattccaaggagctgtgggagagaaag

SEQ ID NO: 195295 - DNA, 122 bp, Homo sapiens
aaggtaacagcatagctcagggtgggccagacccagaccagtgctggtcaaaggctgttccggccagcagcggctggcgaggggcctggacaggcggcgtgcctgctcctgctcatgcccag

SEQ ID NO: 195296 - DNA, 122 bp, Homo sapiens
accatcctccctggaacaaagacaaggaaacgctgtgcctaagtgaggctgtgacacacccggcacactccatggcttccattggttatgcagtcttagcagagaatccacatcaacccctg

SEQ ID NO: 195297 - DNA, 122 bp, Homo sapiens
ggccccccactgcgcgggccgggtgtggctggaggccgagagacgtgaggctggaccgcccgccctgtgctcctggagggagggaccagccccagctctgccccagccacagctgcgggagc

SEQ ID NO: 195298 - DNA, 122 bp, Homo sapiens
accgaggctcagggagtcacgtaacttgttcatggtttcaccgaaaacccaattctgccacgttgcaaagacccgctttttccacagttccatctcacaaatatgaatatgtaactatgtta

SEQ ID NO: 195299 - DNA, 122 bp, Homo sapiens
taaatcagactaatgcacattcatcaaagtggcatcatctcaggatatgtgcatatttgacgtgggtatgaattcagggtttccttgggtctctttcaaggactctcctttctcgtcggtat

SEQ ID NO: 195300 - DNA, 122 bp, Homo sapiens
aagactgaaaactgggaagagacgctctaccctgtgctcctcgccggcttcgataggagccgcaggtgcctgggattttctcaaactttgtcccaaacttcagctgtgggagtggaggaaca

SEQ ID NO: 195301 - DNA, 122 bp, Homo sapiens
tcaagtctcaaaaaaaaaaaaaaaaaaaaaaaaaaaaaaaaaagaagagtggagagtgcacgctagagtccaattaggtgcattcatccagtaagcctcctaggtaactgctctaggtgcag

SEQ ID NO: 195302 - DNA, 122 bp, Homo sapiens
gctcaggccagctcatcttctcatacatggctgacttgctggtagacatcaaagttggttcggatccaattctggggcatattggtagatcaggatctggctgccctagaaggttccagaca

SEQ ID NO: 195303 - DNA, 122 bp, Homo sapiens
cttcttcccctccaaaggaaccatctcttgaacttcacgaaatccaggagcaatgctaagcgttttgtatacatcacctcattttcaatcctgtgaggtgggagctgggaacttcattttaa

SEQ ID NO: 195304 - DNA, 122 bp, Homo sapiens
ccaagaccacccagctaaggagtggcggaggtggggcccaaacgcgcgatccagccctcgcgcaggcgccctggaactccccgcgcgtgttgtgacccagaattcccggggctgtggaagag

SEQ ID NO: 195305 - DNA, 122 bp, Homo sapiens
gccttttgtggactggatttgtttgcacttcgccacgttcttgctttcagtttgctgcctcgtgatgttggggagacctctctgtccaagcagggctttgttggtggggaggggggggaatc

SEQ ID NO: 195306 - DNA, 122 bp, Homo sapiens
tgacctcgctgccccccaccagtgttaaaatagatcagtctagtgatgctcaagtggatacgattcagaagcgagacgcaaagaggttaaacacgggtaaaccgcacgcaaaattctgatat

SEQ ID NO: 195307 - DNA, 122 bp, Homo sapiens
gtccagccctgtggacaatgctttgtgtaaacctattccctgttgtaaaccaagctccaccgaggtccctgccggcccatgcctcccgcccccgtggccccggccaccagggttgcccggga

SEQ ID NO: 195308 - DNA, 122 bp, Homo sapiens
tgttattacaatttggttttttaagttgcacaagtgagggccatggaaaatatgagtcaacggtatagtatctttcacatagtattggctcagagtaggcgtgtcctttagatgtggaagaa

SEQ ID NO: 195309 - DNA, 122 bp, Homo sapiens
atgctgacctgtcttgtgttgactatcccacagtgtcccgtttctccagcccgcgggtgacgccccgcctgagccgcaagcgggcgctgtccatctccccactctcagacgccagcctggac

SEQ ID NO: 195310 - DNA, 122 bp, Homo sapiens
catataacacaattattataaaaatattttgctctgattaaaataaaagaaggacgagatcgtgtgtgtttttgtcccagtagctttactaaccagaaagcgcctcctgatgtggtgatcac

SEQ ID NO: 195311 - DNA, 122 bp, Homo sapiens
cgtgtgcctcacggggaaaggagaagggcgaggggaggcagcggcagcacggcaaagaagcgagtgttgaaacccctcaggtgctgtccttcccgaccccggctagagggttgggaagtgtc

SEQ ID NO: 195312 - DNA, 122 bp, Homo sapiens
gttcaaccgctcctcacaatgatatccaatcacaattagcagtgggttagactaagcaggcgaatttccacatgcgtgagagaaactagtttataactggttagttttcctgtcatttattg

SEQ ID NO: 195313 - DNA, 122 bp, Homo sapiens
agtttttaaaaagatattgcttcacagcattcctgccagaaacaggactcctcctctctccgaaactgatgatagctaagagggacaaggaaaacctaagagtctcagaggcagtcaggctc

SEQ ID NO: 195314 - DNA, 122 bp, Homo sapiens
cagtgattttgggccagccctgcccttagctacaggctgcttatttgtttcctgaggggccggtcagtgccctgacccctgttttccctctttcctccaggtgaaggcaaggtccctggact

SEQ ID NO: 195315 - DNA, 122 bp, Homo sapiens
cccggttttgttaagtgaccacctgggtcagtccgaagcaggggggctccccaggggacccgcagtcacggacttggatcatttaaaggggattctcaggcggaggcagctatactgcagga

SEQ ID NO: 195316 - DNA, 122 bp, Homo sapiens
aaccttccaaggtgaagtaagcgccgagtgtgaagttactttcctgcaggccgccccgatcgggtagcatgccccccccccccccagtcctggggtttatttccctctccctccagccaacc

SEQ ID NO: 195317 - DNA, 122 bp, Homo sapiens
ttgtatgagcctccatggtgggagtggactgtttcccactgagaagctgaaaaagccagacgctgtgacagcctcccagcagtgagagagttaggtgttcatgtctaggtctttgcaactta

SEQ ID NO: 195318 - DNA, 122 bp, Homo sapiens
caacaggggagcgggagctcagacctggatgttgcggggcagaggcttggattaggaagccgtgtcgaggcctggtgtgccggatgcagcatctcagcccctgctgtcctctgtgccttgca

SEQ ID NO: 195319 - DNA, 122 bp, Homo sapiens
gctggcggctagctgggactagcggaacggcggagtctcgattggcagtgcctggacaggcgcaagggccggcgcgggctccgggcgctcccggcatccctcgggcggcggcggcggcggcg

SEQ ID NO: 195320 - DNA, 122 bp, Homo sapiens
cggacacctccacggtgccccgtacagcaccacgcagtgaggagatagtgcagggagaggcgcgggacagtatctgtgggccatcgtgtgccaaggagggcctgaaacaccggcatgagcac

SEQ ID NO: 195321 - DNA, 122 bp, Homo sapiens
cggaaaggccgtcgcctgcccggctcgcggctgtcagcgcgtggagaccggcttttgccgcgagcagcagcaaccaagaggatcctgcgaagaaacgcgacagtttgcgttccagcggggaa

SEQ ID NO: 195322 - DNA, 122 bp, Homo sapiens
ctccaagcagagacagaaggacaagcagagcctgggcccaaagccccggggccagcacagcgcagggagcaaactgctgcagggacagagtatccggcagggccctgggagaatgtgggcgg

SEQ ID NO: 195323 - DNA, 122 bp, Homo sapiens
tgctccgcaccgacggggcccgagcacggctggagaccgcagcccggccgggagggcgggcgggcgggggcagagagtgaaaccgcccccccgccccgcacaaacaagcaccgccgtctgca

SEQ ID NO: 195324 - DNA, 122 bp, Homo sapiens
ccccccacggccgaaccccgtgccggttggggaccctccacgtgactcggtgatgcagaacggttatgaccttcagcgtgtgtctgtgaacgcaagggtcccagcaacagtgcgggtttgcg

SEQ ID NO: 195325 - DNA, 122 bp, Homo sapiens
gtctggaagtcctgggctcaagtgatcctcctgcctcggcctcccaaagtgcccagccgacggttcaggtgtgtccgtgtctcccaggaacgagtttgctcagtcacgttgctctgccgtat

SEQ ID NO: 195326 - DNA, 122 bp, Homo sapiens
tggggactcacaggaaggaaactgaaattccctttcccaaacaccagccccactcccgcccggactggcaacagcagacgccaaaggataaagggggtatatttaataaagtgagtagattt

SEQ ID NO: 195327 - DNA, 122 bp, Homo sapiens
gcctccaagcgcgggctcagcctgtcgcctccgcagccagggcccaggaggccgctcttccggggtcaccaacacggctcgttctgagcctagaggcccagggcacagtgtgagccggaata

SEQ ID NO: 195328 - DNA, 122 bp, Homo sapiens
tccggaactctgaggccagtaggcagcatgcagtttccatgtgatccgtaatatctttgccgccttctgtactaagtcagccacaaatgccggcctgttatctgagccgatccgtaagggca

SEQ ID NO: 195329 - DNA, 122 bp, Homo sapiens
accagggcccacatgcacagggaaggggctgcatctctggcaggtgtctgcagaggaacccgagagccctgagacagttcttaacctgcatgacgctagcaggcaagacgtcccacaaaaaa

SEQ ID NO: 195330 - DNA, 122 bp, Homo sapiens
tctctaccggcgcgatctgctcgtccgcctcggctccagaagctggggctcagggtccggcgaggcaggaagcctgaggccacagcccagagcagcctgagtgcagtcatgtgggggcgact

SEQ ID NO: 195331 - DNA, 122 bp, Homo sapiens
catcactcgagtattgattaagaaactagagcatatccataccgcggaagctcatagtgccgctaatgtctgtgcagtaaggtctcatttatgtagaaacacatcaagcaccttttctcccc

SEQ ID NO: 195332 - DNA, 122 bp, Homo sapiens
aagctggtggcccttcgggggtggggaactggtcttcctacaacttagtagttggcctgccgtgggagagggcctaataaaatgtgtgaagatggctctcaggtcagcagccgagggatgcg

SEQ ID NO: 195333 - DNA, 122 bp, Homo sapiens
cctccttggtctccggttcctgatagggggtgggagcccagccctgcgctctccccactccgggctcctccatctgctttgccagtgtgcttggctcctgcagcctgctgattcagtgcccc

SEQ ID NO: 195334 - DNA, 122 bp, Homo sapiens
gtgaggttctcggggcacctctggaggggcctcggcacggaaagcgaccacctgggagggcgtgtggggaccaggttttgcctttagttttgcacacactgtagttcatctttatggagatg

SEQ ID NO: 195335 - DNA, 122 bp, Homo sapiens
gccgtcctccagtcccctcagctgccgcgcgcgcgtcaccgccgcccgcaccgccgctgccgccgctactgagcatgcccagaggccgtccaacgggattccggccccccaagtcagcgggg

SEQ ID NO: 195336 - DNA, 122 bp, Homo sapiens
ctccaacgtctggatttgtgaggggctgagaaaggaggaagggaagagtggggaggggagcggagtgaaatagacccatggctcaaagtcattgcaagtgggttttgaggactgcatagcag

SEQ ID NO: 195337 - DNA, 122 bp, Homo sapiens
tgaatgccaattcatgaagtcttaacaattggttctttatttttgttttcaatttatggccgagtttggttttgctgttttggactgtctcaactccctgctgatgccaccatacagagtca

SEQ ID NO: 195338 - DNA, 122 bp, Homo sapiens
catctgcggtgaggttgagggctgcagtgatattgaaagtctctttggccgcctgattcccgggtattttcagtgatgtgcaggggaatgctgtactctcaggtgagtagcacatttggaga

SEQ ID NO: 195339 - DNA, 122 bp, Homo sapiens
ttattgtttgtagcaatagttagctcccttttactgctgagtagcattcaatagtatggacgtacagtttgtttaaccactcacctgtggaaaggcatctgaaattatttccagtttggggc

SEQ ID NO: 195340 - DNA, 122 bp, Homo sapiens
agctcccctgatggaaaggcaggcccaggccctctctgggcagctgctcccattcatttccgtctgttccttcagtctctcctcactctatcactattttcttttttttttttttctttctt

SEQ ID NO: 195341 - DNA, 122 bp, Homo sapiens
ggttgtccctttgttgccattgaaaaagcagaatgtggagggtgagttataggtgcttcccggtccccatatgagtagggaaaaagggccagcatcctcccagcatgaaagaacaaacaaat

SEQ ID NO: 195342 - DNA, 122 bp, Homo sapiens
tttgggtctgtgtgggctggaaacaaaacacccttctttccagagggcatgtccttaaagcggaaagggaatctaagctcaagcaggaacttgaaaaacgtgcatttggccaaactctgggc

SEQ ID NO: 195343 - DNA, 122 bp, Homo sapiens
gcaacagccattgaagaggctgggtgtggcagaccaaagcttctgaagaaaaggaagaagcgatgccattgggatccactagcaggccttccatctaaagagagaaacgagagctgtgtgga

SEQ ID NO: 195344 - DNA, 122 bp, Homo sapiens
taaagccttacatgtacagctggaaacttgaagccactaaaaaaaaaattcagccgggcacggtgggtcacacctgtaatcctcaaacacaaggtcaggagtttgagaccagcctggccaac

SEQ ID NO: 195345 - DNA, 122 bp, Homo sapiens
tataatactgtgcatacataaataacaacaacaaaattggtccactgcccagagagctctcgatccacagagctgccagacatcatgagatttcaaaagatcttggctctaaaatcagagga

SEQ ID NO: 195346 - DNA, 122 bp, Homo sapiens
gatctccctgtaagatctcccttacatgtggacatctgagagctgagatctcgatgaccccggaagacccttacacccggagtggagcggaagcaggatgagagaatattgactgagccctg

SEQ ID NO: 195347 - DNA, 122 bp, Homo sapiens
cagctaccggcccatgggcgctgggaagcggagatgggctaggggtgggccggagaggggcgtctcgcctgggggcagtcaccccactctgcccgcagctgggaagggcctgggcctgcaga

SEQ ID NO: 195348 - DNA, 122 bp, Homo sapiens
aattaaaatggtcagcagagactcagagcaaagctaggtttgaagaagagccagaatacacgtgcctggtttagggaagaggaacacagggcaaatgaggtgccatcttatctaagacaggc

SEQ ID NO: 195349 - DNA, 122 bp, Homo sapiens
tttcttcattacacttaaaacaacaacaacaacaacaacaaaacccagtaacctaggcatcgcacccagcctgggtaacatagtgagacttcatctcttctaaaaaaagaaaaaaacaactt

SEQ ID NO: 195350 - DNA, 122 bp, Homo sapiens
tagcacagttcattcatgttaaatgcagacacatactttgagatttaaatgattatgacccgaaagaaggcctagagcaacatatactcttcttttatactgttagtattaaatacggcgaa

SEQ ID NO: 195351 - DNA, 122 bp, Homo sapiens
gtagggcgggtggggtacagctcctaaggagaaacggaaccgcaggcaccgtccctctcccgctgcagcctgaggaacgcgttccgaggaacccctagccacaagtcaggaccgcgtacaag

SEQ ID NO: 195352 - DNA, 122 bp, Homo sapiens
tcagcggctctgcttttctgagatggggcagctcccttctcccttggcctcaggcctaggcgggcgaggctgctcccaccagcagggggcgctttgactcttccgtggagcccagctctgcg

SEQ ID NO: 195353 - DNA, 122 bp, Homo sapiens
gtctcaaaaaaaagagtccttgctcactctttggtgagggtttggtattccacagggccccgaagcgcgacagccctccaaggagaagtgagcgtcggggattagacgcgtgcgctgtcttg

SEQ ID NO: 195354 - DNA, 122 bp, Homo sapiens
ctccgccgcagagttcggcgaagccgacgctccctgaccgcgctgcgtctgtctgtcccgcgggtctggagatcttcaaacgatggaacaccggctttgcccttctgagggtctccatccct

SEQ ID NO: 195355 - DNA, 122 bp, Homo sapiens
gatacagtttggctgtgtccccaccaaattgaattgtgttaatagttcccataatccctacgtgttgtgggagggacccagtgggcagtaatttaatcatggtggtggttaccctcatgctg

SEQ ID NO: 195356 - DNA, 122 bp, Homo sapiens
cgtggcagccaagtcaggcatacagcagccctcttgctggcttccagtactggctctgcacgccttcaccgtgagaggcccctggacaagggactgccttcctctgtgcctcagtttccctg

SEQ ID NO: 195357 - DNA, 122 bp, Homo sapiens
cgagccagtgcacctgagccctgctgtgcgcctgagcatccaggatctcaaggtgcatggcgacaggcaccccatcctctgtcggccttggccccggcacactaagcggctgcaccactgtc

SEQ ID NO: 195358 - DNA, 122 bp, Homo sapiens
agcaatcttcccaccctggccttccaaagtgttagggttacaggcgtgagccagggcgcccgacctgttattgttactattattgctgctgctgttgtgattcccgtgttaagaagagagac

SEQ ID NO: 195359 - DNA, 122 bp, Homo sapiens
gtggggcagggatggcggtgactgtgggcaggacggggcgttagggggtacccggggttccgggggctgggggaggcagcccctcacccacatggaggcaaatgaccctggcctctctcaga

SEQ ID NO: 195360 - DNA, 122 bp, Homo sapiens
ccggagcccgcgccccttaaagtgatctccagttgtccgaaaggcccgccagggatctggcgaaacgggggcgggggagggctcagggaagaggagaagctgagcccgggccccagaagctc

SEQ ID NO: 195361 - DNA, 122 bp, Homo sapiens
ttcagacacagtagtgggttaacctgaggccctctcaaaagacatgtccacctagaacctcgggaagggacacgtccgcctggaacctcgggaagggacgcgtccgcctggaacctcgggaa

SEQ ID NO: 195362 - DNA, 122 bp, Homo sapiens
tccccatgagctattgtcacctcgggtctccatctgtcaccgactgatcttttaaggactcgtagtatgcaggcaggcttgtgtgtaatagacgacacccggggtccacgtgcatatgaagt

SEQ ID NO: 195363 - DNA, 122 bp, Homo sapiens
tggccaggctggtctcgaactcctgacccaccccgcctcccaaagtgttagaatcacaagcgtgagccaccgcgcccggccccacaaatgtaagatttatgcacttctccaagccaagtgct

SEQ ID NO: 195364 - DNA, 122 bp, Homo sapiens
cagacgctccgggcagagagaggccgggtgtcctgcttcttatagcttgggcggaatgggcgctcagagccagcctcccaaaaattcgcagagccccgcaggggaccggccaccaccgccat

SEQ ID NO: 195365 - DNA, 122 bp, Homo sapiens
ccagaccatcgtgggttggggcaaggcggggcggggcgggagcggtgcactcgggatgcccgccacccccagctgccagctgggacccaagggccggccctcgccaggcggcgctgtgcctg

SEQ ID NO: 195366 - DNA, 122 bp, Homo sapiens
gaacttaacacctccggatctctcccactaaccggacctcacccccacctccgggtctcccgcctcacctgtctggccttcgggctcccaggctccagctcaggtcctggccacccccgccc

SEQ ID NO: 195367 - DNA, 122 bp, Homo sapiens
acacatgaaatggacacagaaaagacacaggatcaaagccccaaaagctctgcgacaccgcgacggctggggctgcaggtgcgcgacaccgcaagggctcgggctgtgcgtgcgggacaccg

SEQ ID NO: 195368 - DNA, 122 bp, Homo sapiens
tggggatgatgtgcagacgggagggccaggagcagaagaaatgcgtataaacagctccaccgagaacagtgatgaaggacttaaagtgagagatggaaaaggaataccgtttactgcaacac

SEQ ID NO: 195369 - DNA, 122 bp, Homo sapiens
atcagtaaaatggcgggtggactcggggatgcccgaagacttttccggaccacgattttccgatgctggacacatatttaaacatgaaggaatagacttgcgacttttaagcgcaaacaatg

SEQ ID NO: 195370 - DNA, 122 bp, Homo sapiens
acgttggctgccaaggaaaaggaagcctcgggtccctgctctgaggcttggtgaccacagcgaccacgcccctctcgccaccactgcagaaacagtgccattgggaatgagttgggctgaga

SEQ ID NO: 195371 - DNA, 122 bp, Homo sapiens
catccctaccagcatccacgtcgatgccgcgctcgaaggccgcaaagaactcttcgccctcgaacatctccaccgtgtcagagggctcggggccccggtaccgctccagcagccgccgaagg

SEQ ID NO: 195372 - DNA, 122 bp, Homo sapiens
gtccaacaacaacaacaacgacaacacaaacaaacagaaaactaaagacatgcttattgacgtttcaatttcccaatctcagccccaatagacactttaaagctgttactcagggcagtgta

SEQ ID NO: 195373 - DNA, 122 bp, Homo sapiens
tcagtgtggaagatgaatcacaaagggacagctggaggccaaaaaaaaaaaaaatttagtcgaagagtaattggagcaagggtaagcatgagggtctgagctgtggtaaatataaagggaat

SEQ ID NO: 195374 - DNA, 122 bp, Homo sapiens
gttcttcaggcagagcagctgagtcttgaggttgctcttttaggaaacaaactcaggaggcgctgtggaagatgcattgaatggagtaggaggtggaggcagcgagaagggtgaggagacac

SEQ ID NO: 195375 - DNA, 122 bp, Homo sapiens
taaggcttagccttgagaccaatcattttctttgccttctttgaacattcatgagcctctcgactttctttctttctctttttctcatggtaatccaaacagtatccatggtgtttacagtg

SEQ ID NO: 195376 - DNA, 122 bp, Homo sapiens
acgggcgaccgcggacggcggcgcgcgcgttccccgcagcgctgaggcgagcctgccgcgcgctccgctcagcgtggtctggcagccggagaccaggcctcactgcgcctccaacagccagg

SEQ ID NO: 195377 - DNA, 122 bp, Homo sapiens
cagatcaagtcagaagatacatgtgaacacgcggtttaaaatactgcacaaggctgggcacggtgactcacgcttgtaatcccagcactttgggaggctgaggctggcagatcacctgaggt

SEQ ID NO: 195378 - DNA, 122 bp, Homo sapiens
gcagtgagctgagattgtgccactgtactccagcctggcaacgcagaggttgcaatgaaccgacacggtgccactgcactccagcctgggcgacagagtgagactctctcaaaaaaaaaaaa

SEQ ID NO: 195379 - DNA, 122 bp, Homo sapiens
gccatctgcagccgcagtgacacccactcgggtttgctgcaggggttttttttctgtccccggaagccagcgccacctgctgacgcccggcaccgcctctgcgccgcctcccccgcgcccat

SEQ ID NO: 195380 - DNA, 122 bp, Homo sapiens
tttgggcagagggaagaggggccgcagtcctggaacctcagccaggcccactgccccagccgagggaaggaggcactgggtcttcaggcgcatatccccacaagctgtggcaagcattcagg

SEQ ID NO: 195381 - DNA, 122 bp, Homo sapiens
tgggatgattaaggtctctggtgtaagcacacaggtaaattcaaatcatggcaaaatgaccgtgcagctgtgttgcacaacaaaactatgtaagaaaatgagtgagatacaccagttacaaa

SEQ ID NO: 195382 - DNA, 122 bp, Homo sapiens
gaagctgtgtgcaaaatgttagcagggattgtcagaaagcagaaagatctgctaggcacacgattgctgtgactcattataaggcacaggacaaggaagacagccacaggttagaaaggagg

SEQ ID NO: 195383 - DNA, 122 bp, Homo sapiens
cctccttctctccctcttgcatttcttccgtccttcccgcatccctccctccctccctcccgcactgttttccctggagacagtctcagtgcatagctaaccacctttaggtccacacgcct

SEQ ID NO: 195384 - DNA, 122 bp, Homo sapiens
tgggggtggggggtgcggcgcggagcaaacatcctgggcggggtggcttcccggcccgcgcgcatcactgggttttattggctctgggctccagcgactccagtgaccttgctcaggaaaca

SEQ ID NO: 195385 - DNA, 122 bp, Homo sapiens
gcaagcggcccgggaacccaggacaggaagtgagcaaatgcacccactgggacctggggacggctccttcctggagctcccaccctcacatctctttgtgttagtgacacgttgtttcctgc

SEQ ID NO: 195386 - DNA, 122 bp, Homo sapiens
taccataactactgctattgttaacgataaaaggcaaagactttccaggacccgacccctcgcttacaagcctttcgggaacttgccctatacccccgaccccagtcaccttcagatttaat

SEQ ID NO: 195387 - DNA, 122 bp, Homo sapiens
tgagaactcaggggccagcctgtgacaccccggccaggccatgcgagggtggcgccgggacgccgccctctgcggctcctttggggagcactgaccagcactcagggatggatccgtgcagc

SEQ ID NO: 195388 - DNA, 122 bp, Homo sapiens
gctgcccgtggggccaggaccaggacctgaagccaggtgagcaggccccctctcaggcagcgcgggccacggggctgctctggggtggtgacgtccggcggcctcagatcagccaggtcccg

SEQ ID NO: 195389 - DNA, 122 bp, Homo sapiens
cagaggaggctagtacacttgtttagttcattccttggctgggatttcatactatcatctcgaaattttgaaagagactttcgtgtctctaaccttgcaaagcacagcttcctgcctgacct

SEQ ID NO: 195390 - DNA, 122 bp, Homo sapiens
aggacttcatctaccgtgagggcgcggggcaaagagcctccattcaaccgctgccagtgacgactgagtcccccttccacgcaacggccggcaggaccagtgagactgagggggaggagcgc

SEQ ID NO: 195391 - DNA, 122 bp, Homo sapiens
tgccctatccccagggctctaatggctgtgtgtgggtgggggtgtactccacctatgaggcgctgggagtcaaatgcatttatcagcttcctggagatttaaaacccaatagcctctctcct

SEQ ID NO: 195392 - DNA, 122 bp, Homo sapiens
ttactgggggtgtttacagccgcctgtgctgggcctcccctggagaggaagtcacgcccacgttaagtgcgtgggaaacctgtcccaggcgttctgtaaccgtagctgcaggtgctctgggt

SEQ ID NO: 195393 - DNA, 122 bp, Homo sapiens
cggcaccccccctttggcgagtcggcagccacgtccttgtcctcacccgcagcgcagtgacgccgacccatccaacggtcatcgcatgcgcgtgccccgcgcaggccccaaacccccacgga

SEQ ID NO: 195394 - DNA, 122 bp, Homo sapiens
cctccggaggtcccatcgaggcggcctgcgggacctgagcgccgggctccgtagcgcggtcgggagggggcttctggtcccaggcccaagaccgaccgctttgcaactgaccttccggcggg

SEQ ID NO: 195395 - DNA, 122 bp, Homo sapiens
aaatttgtgtcacgttcctatagaagagagctactgacctggggatgcttaacttggggccggcttgttgagaagtcatacattacattctgtgaatttatcttttttaaatcttcgtatcg

SEQ ID NO: 195396 - DNA, 122 bp, Homo sapiens
cgctgcagaggtggtgatgagcctgtccaagtgctactcctccctgctggactcgatgaacgctgagatccgcatccgctggctgcagattgtggtccgcaacgactactatcctgacctcc

SEQ ID NO: 195397 - DNA, 122 bp, Homo sapiens
aggacctggcattgggggcctctatttcccagcagcagaaaaggggaaagccatttttcccggcagttttctgccctgcaccagggagatgctttatgggtctcagcccagccagcgggggc

SEQ ID NO: 195398 - DNA, 122 bp, Homo sapiens
ttagctggggcggcgagtccgactcatcaatattttaaggaatgacccggccttggggtgcggaattgctgcgcgggcgggggctgaagaccggcttttttttttttttttttttttggtcc

SEQ ID NO: 195399 - DNA, 122 bp, Homo sapiens
cttctgcaagttctctttccacaatggccacgacaccattagcctcatcgacgcctgctccgagagggccgcctcactcttcagcgccatcgccaagttcaaagcaggtcctccccttttcc

SEQ ID NO: 195400 - DNA, 122 bp, Homo sapiens
aaaacaacttttggggtgcaaaaacaggaatccctgtccccatttagggctgtagattcccgggcttgagggtgaggcctttgccaggaaactaccttcttctacccagggtttccctgtct

SEQ ID NO: 195401 - DNA, 122 bp, Homo sapiens
ctcagaaattccaattcttataactcaaatccccacagtggtgtagatgcattaactccccggggacagcaatctgaggcaggcaggttcattaaacaaacatgttctgtgccctctggcag

SEQ ID NO: 195402 - DNA, 122 bp, Homo sapiens
aaaccgctgcacccaaaccgggagcagctgcgagcagggggcagggcgcgggctgaaaggcgagccgaaggttcaaacctccgcggcgcgggcgggggcggagggcaacagcaggacggccc

SEQ ID NO: 195403 - DNA, 122 bp, Homo sapiens
ccgcagggcactgtcccaccgggatccagttgcaaagtttgtctcgacagtttaaggcctcgcttagttgtactggattctcagggagtcctctgtggccttttgctctgagtgctgtttcc

SEQ ID NO: 195404 - DNA, 122 bp, Homo sapiens
agccctggagtgctaggtgcaagatcccttctctccctcacctcctcaaggctgctctgccgtctgggaagaaggtgagagaaactctttcaaaagacaaaggggcagggccagtgaaagga

SEQ ID NO: 195405 - DNA, 122 bp, Homo sapiens
tcctcacctaccaatataggtagatgactccttacacgtggacaagcacatccacctggccgcttctcccctttcctcccctcccccgttcctctcctccccaacacatccaggttccgacc

SEQ ID NO: 195406 - DNA, 122 bp, Homo sapiens
ggtcatcaggcctttatttgcaaataaattgaaaataatctgaaggacagctttcctcctcgcgcgggcgcaaatgaatttcggagcccgagtccctttaataatatttacataattttcgc

SEQ ID NO: 195407 - DNA, 122 bp, Homo sapiens
gttagggacagggaagggccctgggaccagcagggaccatgtctggcttcgggccttgtgcgagggtcttgcagaggcctgcttggcttctccggggaggggctgctccccctgttacttcc

SEQ ID NO: 195408 - DNA, 122 bp, Homo sapiens
aagtgaggaccgcctcttcctggccgccatcccgtctaggaagtcaggagcgtctctgcccggccacccatcgtctgagatgtggggagcccctctgccccgccgccccgtctgggatgtga

SEQ ID NO: 195409 - DNA, 122 bp, Homo sapiens
gaaaccaaaagcactactggaatcattgtctacttgtttagttctactttacctgggggtcggggggttgggctaacaaaaagggacaaatgaaaacagggtagacggcaacaattccacta

SEQ ID NO: 195410 - DNA, 122 bp, Homo sapiens
agctttgcaggtacctccaatgggcagacaggactgggaaccctcagactggagcaacagcgtagggatgggcttcacttgcacctcagccataccaaatattcatatagtcatgtttcatt

SEQ ID NO: 195411 - DNA, 122 bp, Homo sapiens
gcgtcgcaaccccgggggcacctccagggactacttgccttgtgcgtcagcgagtgacagcgtcacacacacgccccctcccgcacatgcccgctgcaccctccctttccccctccccttcc

SEQ ID NO: 195412 - DNA, 122 bp, Homo sapiens
agacgccacgcggtgacaaacaggagtaaggcggtccccaggcgagggccaattggcagccgcctttgccgcgatgcttcctgggagttgtagttcggggtgaggccggggcttcatgggga

SEQ ID NO: 195413 - DNA, 122 bp, Homo sapiens
cttgcaggccagccggccgctctgagtgcgggtcccctgagcccacgcccacccggaactcgtgctggcctgtaagcgtagtgcacagccctgattcccgccggagcctctccctccacacc

SEQ ID NO: 195414 - DNA, 122 bp, Homo sapiens
cggggctgcggtacaaatgctcagtccctgctttgctgagctgacccgagtggagcggagcggtggagatttcaccacgctaaccccgctgggcctcggcacctccacacaagccccattcc

SEQ ID NO: 195415 - DNA, 122 bp, Homo sapiens
cagtgacccccgtctcttggccactgtgaccaacgcatacctgggcacacgagtgtttcacgacacgctgcacgtgagcggcgtgtacaatggggctggcggggacacgcaccgggccatgc

SEQ ID NO: 195416 - DNA, 122 bp, Homo sapiens
gattattaattgcggtaagtcgcattgcgccattccactcctccctcggcagctcgtttacgacccaaaaggggacacaaatgcccctgagagagcagccgtagactgggatagatgaggat

SEQ ID NO: 195417 - DNA, 122 bp, Homo sapiens
gttcacatgggcttctcagctctgaggaacttggcctggctttggatggcaagaaatatacggaaagagcccctgcagctgagtttcctaacaaggaatttgggaaacccctctgattccaa

SEQ ID NO: 195418 - DNA, 122 bp, Homo sapiens
tgaagccggggtccggagcagtcaggagtcagagtgagccgcggttcgcgtctgtcttcccggcaggtgtccgacgcctcagctcaatgaatgagaagccgcttagacaagggatgtgagcc

SEQ ID NO: 195419 - DNA, 122 bp, Homo sapiens
aagtgatgaaagcatgcaaatgcctccgaatcaaaggtaaatcaaaagaaaatggcagcccgcaagaggaggcggcggtgacagcccgtcagccgtacagccacccgacaggcctggtggca

SEQ ID NO: 195420 - DNA, 122 bp, Homo sapiens
gtccggaagagaagttttgcgctcagcaggaccgctggcgccagcgggagaaccaggaagcgcagctctccccttagctgactctggtgctctctacaggtggccttcactatcaactgcac

SEQ ID NO: 195421 - DNA, 122 bp, Homo sapiens
tcccggagatgacgagacaccgcgagaggagcacagcgcaggctcctcgggactccgcggcgcaggccgggcagcccgttacttgttttatcgttcccgaaaccaacctctaagttgtctat

SEQ ID NO: 195422 - DNA, 122 bp, Homo sapiens
ggccgtgctgacctgtggcccgaatgcccggtgccttccacggacctgctcgttagcttgcgacaggcagaagtcccaacaaaaagaacatggccatggtttcaaaaaagaaagtatgatgc

SEQ ID NO: 195423 - DNA, 122 bp, Homo sapiens
cattagactataaacccctagaaggtagagattatgttattttttgtctttgctgtttatcgttactcatagtgtcttagcagatcgggaggaagagagtgataggaaaagggggcttgggg

SEQ ID NO: 195424 - DNA, 122 bp, Homo sapiens
attccagcaaactgaaggcatcgcgggcgcggccgccgcccccgcctccccacagctgcacggagcgtccacggccccaggccgagccccactgtgccccgcttccgaccccgcccgccctg

SEQ ID NO: 195425 - DNA, 122 bp, Homo sapiens
gcagagatcaccagactgtgggatcctgttcaatagagccagtcccgtgaacacttattgcgggcatgttacactgtgcccaggaggaggcctgggacaaatgaggccaccaggtctccagt

SEQ ID NO: 195426 - DNA, 122 bp, Homo sapiens
gccaccgcgcctggccaagcatcagcctattgaattccatatgctggaggcagagaaggccgctatgctgtgatacacatgctaaatctgcctgcacagtacagtagtagcagaataagaat

SEQ ID NO: 195427 - DNA, 122 bp, Homo sapiens
gtcagcctctttctcttggggaagacagcctgggggcaggccgagaggtcaagatttggtcgtgtgcttttactatggacaccgacaggatctccccttctccccttccgcttttcctttct

SEQ ID NO: 195428 - DNA, 122 bp, Homo sapiens
gaaaccagcgccctcagagccacgctcccagcccagggctcacggaccagcagggaccatcgcccctcctgtcagccccggggccaggagtctgcagaccccgcccaaggcagaagggaagg

SEQ ID NO: 195429 - DNA, 122 bp, Homo sapiens
cgggaggcgggttagcagtggccttgtgagcgtgaggagctgccgccaccgcctgctcctcgtcgtcctcgtcctccgcggccccggcgacgtgggccgcgcacggccctggaagagacgtc

SEQ ID NO: 195430 - DNA, 122 bp, Homo sapiens
gctcccctaggcatctggggagcgggtgagcggggtgggcacagcccccttcactgccctcgacagctttacctcccccggaccctctgagcctcctaagctcggcttcctctcttcagata

SEQ ID NO: 195431 - DNA, 122 bp, Homo sapiens
aggagggaactactttcctgaaacttgctatgctgcacatgacttcgagttgcagtgattcgcccggaggccgcggcttttagtcctacccacacaccctcacagcctgggcaccccgctcg

SEQ ID NO: 195432 - DNA, 122 bp, Homo sapiens
tcctcctgaaaactaattacctcactgcgcctgcccactggactaaatttgcctggtaaccgatgacatcatcactaattccgcgcccacgctcaacctatgggataactgatgacatcact

SEQ ID NO: 195433 - DNA, 122 bp, Homo sapiens
tgtcttttagtttactcacacgaactatttctcttttctccttttgatcatctagaggaacgggcaacttggtttcttctttagcttccttgttctcattaagattgaacaatgcctctaaa

SEQ ID NO: 195434 - DNA, 122 bp, Homo sapiens
cactcaagagacagccactgttcattcatgaggagtgtttcttggtgctcttccgtcacccgagacttgtgtagattctccaccgtcacatggagcccacagcatggtgttcactccagaga

SEQ ID NO: 195435 - DNA, 122 bp, Homo sapiens
tcagagtctccggatccgaaatctaccccgaggcagcgggacccgcccagaccctccacccgggagagtcccaggcgcctttacccaggttcattttcagtttaggccaaaatccccgcggg

SEQ ID NO: 195436 - DNA, 122 bp, Homo sapiens
gacgggtccttcttccttgatactcacgaagcggacacagttctcattcccactaggtgtcgggtttctagagaagccaatcggtgccgccgcggtcccggttctaaagtccccacgcaccc

SEQ ID NO: 195437 - DNA, 122 bp, Homo sapiens
attcaatgggtagggccggaccgactgcccgaccttcgcggtgcttcacttgcctcactgcgcatgtgccaaagacaatcacccaaagtactcgaaaccaagcggcagggccggcccttgcg

SEQ ID NO: 195438 - DNA, 122 bp, Homo sapiens
ccggaattccagacccagtcggtgttagggctgcttggtccaacacagttggacccgttacgtttgaatgtcacatcaacaaggaatacatttttagtataagtatatcccagatttgcaca

SEQ ID NO: 195439 - DNA, 122 bp, Homo sapiens
tcatttcagctacacctatttgaaggtcggtgtacttacctgaaagtatctttaaacatccgctttttagacaagctgtggtaattgtccctttcaaacataagaataattcttaccctgag

SEQ ID NO: 195440 - DNA, 122 bp, Homo sapiens
acagcgctggaggcctggggactggactctgagaggagcttgggcagacacagcagcctccggccccaacactgccctgggttggcaggcccagccctggtcctgacaggcaggtccttgag

SEQ ID NO: 195441 - DNA, 122 bp, Homo sapiens
aacagcctctgtgtgagttgcaggactgaggtcctctgcaatttctcagggaaatacttccgggagacgcagtcctcagtgcctggaggtctctgggtccaggtgagtgtggtgtgagtaat

SEQ ID NO: 195442 - DNA, 122 bp, Homo sapiens
gtcattgtgcactgtaaagcagcttgtagcctcctagaaaaacctctgtattcctcccctcgctctatggtttaattctaccatttattcccgtacctcatctaagaagtgtccacaaaaca

SEQ ID NO: 195443 - DNA, 122 bp, Homo sapiens
aaattaaagaaagtagtcttcctccttttatatctgtttacacagattgttaaaatagtacggttcatttggacgatgttgagatggaaaaaaaatataacttgttccttctgaagagtaga

SEQ ID NO: 195444 - DNA, 122 bp, Homo sapiens
gcggtgctgcccgtgccgcctgaagagctgcagccagaacaggtggctgagctgtggggccggggtgaccggatcgaatctctcagcgaccaggtgctgctgctggaggagaggctaggtgc

SEQ ID NO: 195445 - DNA, 122 bp, Homo sapiens
ggagtcgtacttgaccaaggaggtgtacctgggcgggagacataagaggccgcgtgaagccgctcctctgagccgggggcttggggtccccactgtgaccgtgagtcatttgtggggtgcac

SEQ ID NO: 195446 - DNA, 122 bp, Homo sapiens
gtggcaggagatgaggtcagagaagcaacgggggccagttcacgcagggccttggggccacggtgaggactttggctttgattctgaggtagaatcactggaaggttttcaattgagaaggg

SEQ ID NO: 195447 - DNA, 122 bp, Homo sapiens
atttgtgtccatcttaacctggtcaaggaaaatttcaacaaaaatcccagatggctggagcgagaagatctcatgctgtgactctctggagggaagcactttctgttgtctgaaagaaaaca

SEQ ID NO: 195448 - DNA, 122 bp, Homo sapiens
ataaattctagctgaattgactttgagagccgttttagttctatacctcactgctcaaaccgcaggcatcaccatgcaacttatcggtttacagctgtgctgtgggtaccatctgaaaatct

SEQ ID NO: 195449 - DNA, 122 bp, Homo sapiens
ggttggaaaagggaacaagggggccaccaccacctcccaacccctccctgccggaggctgcgcagaatccgccatccacaggccaggccttgtctacttcaggtctgtgagccccagcagtg

SEQ ID NO: 195450 - DNA, 122 bp, Homo sapiens
ctttttctagataaaaaacgtacttcagtaacttgcctgaattgagagagcaaaacagtccggagagaaaacttaaaatgtttccacattatcaagcccccttcagaagtactgtggtctcg

SEQ ID NO: 195451 - DNA, 122 bp, Homo sapiens
tcttctagggtcccatagagatgttcctcccgcttcctagagaatcagagaatggatgcgcgagctcgctgctgacgcactaccggccgcgccaccattcttccggtttcagaagttaaggc

SEQ ID NO: 195452 - DNA, 122 bp, Homo sapiens
gcccccagagggttacaattcaaacgcgggcgggcgggcccgcagtcctgcagttgcagtcgtgttctccgagttcctgtctctctgccaacgccgcccggatggcttcccaaaaccgcgac

SEQ ID NO: 195453 - DNA, 122 bp, Homo sapiens
gccagcagttgcaggggacaggacctgtgtctttgagagacccaggtagacaccctgatccgtgttcttagacccgtagcgtttccgcgggatcattgagacgcataacctcggactgttgt

SEQ ID NO: 195454 - DNA, 122 bp, Homo sapiens
acccaggtgtatttaaaagcacccgcgtttctaaacctcccgcagaaagtgggaagcaatcgccccctcggacctggcgccgctgcgcctgctggagcctcgcttccccacagtcgggcggc

SEQ ID NO: 195455 - DNA, 122 bp, Homo sapiens
tctctgccagcttgtcctctctcccatctctgctccttacctcccctgctctctccaccccgaaaccaactaaatagccagacaagggtcagatgggtattacgtgagataaggcatgtggc

SEQ ID NO: 195456 - DNA, 122 bp, Homo sapiens
tgctgtgccccaggtggttcgtagggtgctttttactccttgccaaagcccacacagccccgcaaggcaaacagtgttcaactcttttcatggctgaaaaattgggacatcagagaggttaa

SEQ ID NO: 195457 - DNA, 122 bp, Homo sapiens
gaccacccgctgattccaattccctaggcggccgcggcgagctgcggcgtctctgtgccccggcctgcccctatcccgcctgcgccccgcccccgcccggctcgcgccaaggcccgctgctg

SEQ ID NO: 195458 - DNA, 122 bp, Homo sapiens
tcaaaaaaaaaaaaaaaaaaaaaaaagacccgcatgaacaatttatcaaacatgagatagcgtgtgtgtttatgagtgtatttgtggtcacactgatgtttcatactgtggctatcaagttg

SEQ ID NO: 195459 - DNA, 122 bp, Homo sapiens
cgccatttccttcccaaagcccgtattaaagaatgccgggtccgtagagccgagtacccgcgttgactaggctcctgcttagagctggagttattttctctggactggttgtggagcactcg

SEQ ID NO: 195460 - DNA, 122 bp, Homo sapiens
aggcacttcccctttcccttgctcatggaggagccaggccgggctgactcagagcaggagcgcacagtagtcctcccagcccgacctgggcggcgtggtctggcggccgggcgcgcccccgt

SEQ ID NO: 195461 - DNA, 122 bp, Homo sapiens
tagaggaggagggtgtgggtgtcaggccagctcagtgaccccagcatccctggttttgcccgcagtgacgacagctccccaggagccccccgcccggcccctccaggcgggcagtggagctg

SEQ ID NO: 195462 - DNA, 122 bp, Homo sapiens
tcccagaccagcagtgtcatctgggaggttgttacaattgcaaattctcagacttcagctcggacctactgaattggatgggagtggagaccagcaatctgcattttcacaaacctccccga

SEQ ID NO: 195463 - DNA, 122 bp, Homo sapiens
tctctccttgaccaaattttggaaagtcttctctgagtcctctttttgatgaggcctcatcgttgacccttgtcctcaaacctagcttggttaaagcaagaattctgctaagtcagtgtgtt

SEQ ID NO: 195464 - DNA, 122 bp, Homo sapiens
tagcttgagcaagagaagaaatgcatcaattcctgtaactgaaatcaggaatccattgctcgccatctccctgctctgcttcctctaggctggcttctgtctcagccaggttcctgctttgc

SEQ ID NO: 195465 - DNA, 122 bp, Homo sapiens
cccctaactcccaacgtcccttagcacaccagtcaattttatgacaaaattaatctgcagcgtgacttgtggagccccagagggaggtcacggaggccggtaaatatgtaaacgtgggtttt

SEQ ID NO: 195466 - DNA, 122 bp, Homo sapiens
agctccatgggcgcttggcgggacggaagctgcgggaatagttgatgttgaggttgacggcgacagtgaggactgcaagaatacagtcacgtaccctggaacaatgttcaggccagtgatga

SEQ ID NO: 195467 - DNA, 122 bp, Homo sapiens
caaagccaccatgggcggcgagcgtggcgggaggcgtgcgtcaccggcggccccaggagccgggtcaggaggtgtatttgcatctttattttgctgacgctggagagcactgcgtgaagtga

SEQ ID NO: 195468 - DNA, 122 bp, Homo sapiens
agcagatgagtacaaacagttcagaagcctttcctgtttctttccctgtatttactcaagcgatttgcgtaaccattcacttggaactgtgtaagtcactcctagttgccccccttcttaga

SEQ ID NO: 195469 - DNA, 122 bp, Homo sapiens
ttttggtttactaaatgaaatcttacatatgattttaatatgtaaaataaattacaagagcggctttgaagaaaatagaatgaagggcctagaatcctaccatccagcctgcccttcttctg

SEQ ID NO: 195470 - DNA, 122 bp, Homo sapiens
tcgggcgccggggacgctctctcttctctaaggcagagcctgacggcaggttccctcgggcgccagggatgttccctcttctctaaggcagagcatacggcagtttccctggggcgccgggg

SEQ ID NO: 195471 - DNA, 122 bp, Homo sapiens
ggctgctccttgcggcgttgggactgagggtcacaggcacctgtatttccgtttccggttcgcctccggagccatggcggcggcactgaagtgtctactgacattaggaagatggtgccccg

SEQ ID NO: 195472 - DNA, 122 bp, Homo sapiens
gtgtggtggatgtcaactgaaagggaatccttcggaccccaagtttatggggacagcctccggcctgacagtgcctctcacacctgctcctggccctggcctcagatcatgacccgcccatc

SEQ ID NO: 195473 - DNA, 122 bp, Homo sapiens
cgccgccgccgccgccgccgccgccgccggcccctcgggcctcgcccctcactctgccgccgcctcccacagcagcgacaccccagccacctctgccgggccgcgggacccggaaccacttc

SEQ ID NO: 195474 - DNA, 122 bp, Homo sapiens
gcgacggcctcccctagccggcctcgaagcctcattccgtgctgcgccaggtcctaaggccggtctgcaatcgtgaaaggggtggagtgatacccgcccaagccccgcctcctgccccgcct

SEQ ID NO: 195475 - DNA, 122 bp, Homo sapiens
gtttctgagaaaagggaggaaagaggcggggcctgcacggtgtgtccccgccctccaggccggcgtcaactctcattggctcagcgccacgcgggactttaaactcccgctcgagacaccgc

SEQ ID NO: 195476 - DNA, 122 bp, Homo sapiens
tctcagcgacgcccagacccaggctgtgcactgtcttggctcagacactggcaaagtcctcgagaaattgccttggtgatcggtgccttccctcgggccacccagccgccggtggcacggag

SEQ ID NO: 195477 - DNA, 122 bp, Homo sapiens
tccggtcgccgccgtcccggctcgtccgcgccgccacagctgccctcagcgccccgcggccgctgcaaatgaccaattcttaagatatgtgaaaaaccattcagttgtagcaaacatcatac

SEQ ID NO: 195478 - DNA, 122 bp, Homo sapiens
ggcccggcctggcggaggtgatgctggtatgtgcgtcgccaccgcccctcccagcactgacgggcctgagggacgacaagttgacgctcctttcgtcatcacctggtctaggagggacgccc

SEQ ID NO: 195479 - DNA, 122 bp, Homo sapiens
cgaatgcccagaatgccagcaaaacgtgggaactgagtctgtatgagctgcaccggaccccgcaggtgacaggcattctccctttcaggcttaccccctcccccaaacccttatatccacag

SEQ ID NO: 195480 - DNA, 122 bp, Homo sapiens
acattccttgatctggaaaacccaacagtatgctttgcttcagcctcaggcctcccttgtcgcctcctctgtgccaccccccattcctcgggagtcctcctcctcccaggggcgcacttttc

SEQ ID NO: 195481 - DNA, 122 bp, Homo sapiens
gcagcaggtgtgcaggcaccagggtgtgcagggtgggcaagagggttacgtgtgacatgccgtcgctaggcaagcactgataagcaaagagcaaacattttgatttaaattatttattagtc

SEQ ID NO: 195482 - DNA, 122 bp, Homo sapiens
gtggtagtgacgggtacgctggctgatgggggctgtagcggcagcggccgggggcagaggcgggggcggctccgggactgcggggccgagaggggcaggtgctggaagtcctctcagatttg

SEQ ID NO: 195483 - DNA, 122 bp, Homo sapiens
gcagaggtgagatgggagcagcttgggagccccccattggcgccgccctactggggaagccggtccgtacgtaggccttgcatctcgccacctccacttctgtcctcaagaacaagtcctag

SEQ ID NO: 195484 - DNA, 122 bp, Homo sapiens
tatgtagtgagccaattctggaacttcagcgaatttcacagactaaacagtgggagggagcgagcacttgggacttgtgctgactgagcaagcaaagttaccaggtgactgctgggctcaca

SEQ ID NO: 195485 - DNA, 122 bp, Homo sapiens
gggtgggggggaagcgggcacgtgaccccggtcagccaatctgggtgctgctgacgtggccgcgcggccccgatgctctccccacccccccagcccgttcgggaagggaggggctgggggct

SEQ ID NO: 195486 - DNA, 122 bp, Homo sapiens
ccggtccgtttattttaagaagctttgtgcgcctgctgtggggatttctgatccaggctgcgaagaatttcgaagtctggaaaatagcaactgtgtttgtttctaaaggatcttctcctgac

SEQ ID NO: 195487 - DNA, 122 bp, Homo sapiens
tgaaaatcactgcactcttcctctcccagaagcacacattctctctccatgccaggtggccgctgccggcgaatgggggagagatagcatttagcaattcaagactgtcttaccctcttcag

SEQ ID NO: 195488 - DNA, 122 bp, Homo sapiens
gcccgaccccgtaaccagagacgccactcctgccctccctaacgacgcgggcctttcagacgcctacgcgggtcgcccacctgactgcccgaaatcaccccgcccaccaagtgtcccctctt

SEQ ID NO: 195489 - DNA, 122 bp, Homo sapiens
gccacggcagccccttgtgtttcctggagattagaaccccgcagtcatcaatggcagggccgagtgagccgccaatcacctccgctcactccctgagagccgctggcctgggccgcaggagg

SEQ ID NO: 195490 - DNA, 122 bp, Homo sapiens
ggggaaagtccctgcaggtcatttcccctacaaactggtctaagacaagttcctggatgccggtggtttcttcatcccgggtcatttatcccagttgtgtaacctatgggaacaagagaggt

SEQ ID NO: 195491 - DNA, 122 bp, Homo sapiens
ctacagtccatcgccctggggtgtgatggttatggaagtcagaagtgtcgctatttgccccgttttcccatgagaattagacatgtcagcatcaccccctccccttgctcctgagcatacct

SEQ ID NO: 195492 - DNA, 122 bp, Homo sapiens
tttcatataaatatatttgaaacctggggccttcctacccctttccctatttctgatgggcgacgagctggcgcaaacacgtccgattctccctgtgcattcctttgcgttaggaaccccct

SEQ ID NO: 195493 - DNA, 122 bp, Homo sapiens
gctgcccaactttccttaggagtcctctgctcttgcatgagggacctggttgctggcattcgggagcaggacaaggtcaggagctgagtctccccctgttccaaacacaggtttttatgtaa

SEQ ID NO: 195494 - DNA, 122 bp, Homo sapiens
tgggggtgcctggagtttggctggggctgggtgcccagtgggcgggcacaggccccttgacgtggctgtggcctagctggcagcctcgtccttcctctccgctaggcgggcactggagcttt

SEQ ID NO: 195495 - DNA, 122 bp, Homo sapiens
tttctttttttttcttgagacggagtctcgctctgttgcccaggctggagtgcagaggcgcgttctcagcgcacccaggctggagtgcaatggctagatctcagctcactgcaacctcccgc

SEQ ID NO: 195496 - DNA, 122 bp, Homo sapiens
ggaccaagttgacactgagagctggagtcaaggtaccatcatgggcccactagagtagggcgtatggaggccagcaaagtgcaatcctggtccacctctagctcacactgagtcatcccttt

SEQ ID NO: 195497 - DNA, 122 bp, Homo sapiens
gggtgcaataggaattagagagtcagggagactcccagagcagcgagctggaggcggcctcgcctggaggccggagatgagccttgcagatggctaacacctccggcagggggagcagccga

SEQ ID NO: 195498 - DNA, 122 bp, Homo sapiens
acctttacaggctttgctgcttccactcgtgctctcactctatgtgcctgtgcctggccacgccgagagcttcccccagacagcgctggctcctttaccaggatctcagagtaaccaggagc

SEQ ID NO: 195499 - DNA, 122 bp, Homo sapiens
ggaattcagagttttgatttttttttgtactatgattgttttcatgttttcttcttgaaacgcatcctgttttttcatgtgctatcatgcataggaatgtcagaaattttgaaagaaaagct

SEQ ID NO: 195500 - DNA, 122 bp, Homo sapiens
ctctgagcttcggggtagtccgcgaggctgggttccgtgctgaggggcgtcgcgtctggccgtgcgctgcgggagcgcgcgggcctggcccgctgtcctggccgctgcgaggcgctcagctt

SEQ ID NO: 195501 - DNA, 122 bp, Homo sapiens
agatgcccaaatgccatctgagtcttccacgtgttgtgtggccttgggcaagctcgtgttcggtttcttcaggtgtagacacagagccgctccttttcatgtggttgtacagattcacatca

SEQ ID NO: 195502 - DNA, 122 bp, Homo sapiens
gggcgggcggaccttgtgcgctcagccaatcagaaagcggcttcggccggagtcggagagcgcgcgggccctgcctcacactcctcagttcccgggcgggcggtggggcggcctcctccttg

SEQ ID NO: 195503 - DNA, 122 bp, Homo sapiens
gctgcaaggatatggctctggcccagaagccggggatgtcccgcggcctggggcatttaccgagcccagctccacgtgaaggacgtccagcgagtccgttgccggcgggggcatactagggc

SEQ ID NO: 195504 - DNA, 122 bp, Homo sapiens
taaaatcactggcccaaggtcacagatcgctagtaatggggcaggaacactatccggtggcgacctcaccgctccagtgggaccagctacttggctgacacacatcgagcccgcgctgccca

SEQ ID NO: 195505 - DNA, 122 bp, Homo sapiens
tggcagtgtgactcagcagctttccttgcctgttctgagggggcgcagctggggacagcacgggcttctgcccactcctcaccctgccagcgggaagcctccaagacttgggaaggaaaggc

SEQ ID NO: 195506 - DNA, 122 bp, Homo sapiens
acatctgtctttaacactgagattatctttccctgcgtattttgtttctcctgccataaacgccttcagaatctatactgttggctcacgtgagactccttcatagctccctgtgactatca

SEQ ID NO: 195507 - DNA, 122 bp, Homo sapiens
ttgttttgtatttgtaatcatcactgccacgaccatcaccgacctcttttacgcctccaccgggatccccacctcccagcctggcagttccaggctctggtgactcattcacttcctggaag

SEQ ID NO: 195508 - DNA, 122 bp, Homo sapiens
cacccccaaaagcacgcaaacaggaaagacttcagccaatggcaggccgcctatgcggggcggggccctggcgctagccaatggtaggcagtgtagggtgaggggcggggcggtgcctcagc

SEQ ID NO: 195509 - DNA, 122 bp, Homo sapiens
acgtggtcttcgtgcagacaaacatcttgaactggaaggagaggacgctcctcatcgaagcgcacaatgagaccttcgccaaccgcgtggtggtgaacgagcactgcagctacacggtgagc

SEQ ID NO: 195510 - DNA, 122 bp, Homo sapiens
cagggcacaaaggaaagacggtgaatcacagagccaccacccgaggccagtgggaccaggcgcccacccagggagggatcccgcggggtcaggaccgccagcgagcagtgggctgcagccca

SEQ ID NO: 195511 - DNA, 122 bp, Homo sapiens
aagggacgagggagagcgggcagaaggcaaagacagaagggagcgagggagggagttcctcgggcctggcccctttactaggtcagtctggcaggtacctcgccggcccaggacggggctgg

SEQ ID NO: 195512 - DNA, 122 bp, Homo sapiens
cacatcaaagaacaggtgaaaagttgttcctagttgtgttatgcaggtgcatacaactcccgccattctctgtgcaaaaatcaacaaataaacagaggcaccgcatttcggattctgttacg

SEQ ID NO: 195513 - DNA, 122 bp, Homo sapiens
gagttccatctctggatgtgaagaggccaggggtgggccctgcgcttcccacgtgggactcgcaaagtgctcacctgcttctgttaccttctgtctttcatgaatcatgtttgcgtttgtgc

SEQ ID NO: 195514 - DNA, 122 bp, Homo sapiens
accatgaattcaaggaattcactataattataactacttaaaataattaaacaggccaggcgctgtggctcatgcctgtaatcccagcactttgggaggccgaggtgggtggatcatgaggt

SEQ ID NO: 195515 - DNA, 122 bp, Homo sapiens
ctgtttggccgccacaggcacagcatcgcccctaggcatcgccctccgcacccggggatgcggcgtccccagccttgcctttcttgatggctaaagcaacagcgccaccttccggcctcaag

SEQ ID NO: 195516 - DNA, 122 bp, Homo sapiens
atctcgtagtcctggggctcccaggccggccggtacagctctccacgcaaggcgtggtagcgccagcggagaataacagcccccagccgtagggcgccccacagccgcagtgcccagagccc

SEQ ID NO: 195517 - DNA, 122 bp, Homo sapiens
tgcagtgcagggagaaggccgggcgggtgctggggggcccgtctccctgtgactcgtggacggtgcggtgcagggagaagggcgggcaggtgctggaggactgagtgaggcccctccaggat

SEQ ID NO: 195518 - DNA, 122 bp, Homo sapiens
ctgtccaggacctgggctccactgtcatcaaagaagtcttgaagagggccactgtggctccggaagatgtgtctgaggtcatctttggacatgtcttggcagcaggtaagtctcagtgattc

SEQ ID NO: 195519 - DNA, 122 bp, Homo sapiens
aaagcctgcacacgagacccccgtgggccaggactgacttcctccccacacagggctgggcggggcaagcaggaaggagcctgttacagtcaaggtgacgcatccttgccgggccagcccga

SEQ ID NO: 195520 - DNA, 122 bp, Homo sapiens
cttgcttggctgcctgtctttgctcagcctcctcactcggggtgttcactggttctgccacgtctcacgctctcctccccttccctcctctcctgatgcctcggtgttacaccattcagttc

SEQ ID NO: 195521 - DNA, 122 bp, Homo sapiens
ggaggagccgtagttgtaaaagaaggaagagaagagggtgtcttccgacagcccgcagcccgccatgctctggatgcaaataaaatgaggaaagaaaaaaaaagcacacatacacaaaagca

SEQ ID NO: 195522 - DNA, 122 bp, Homo sapiens
ggagagccgcgctgtcgatgagtcccagtgggccacctggagcggaagtggaggagcggccggaagtagccggaatctctgaaagactgaccgactgactctgacaggatccggggctgagg

SEQ ID NO: 195523 - DNA, 122 bp, Homo sapiens
cctcgactcaggggtccaggcccccagcccctcctccctctactcaggggtccaggcccccggcctagactttgggctcttggtcgcagtcccctctggatctggccggagggttcctgggg

SEQ ID NO: 195524 - DNA, 122 bp, Homo sapiens
tttcagcgcatctttctaggagccgccccacccgagttccagaaactggagtcggtggcacgcactgggcatccgatgtaggctgagttgtggacgccggggggcctcctgtaggtgccatc

SEQ ID NO: 195525 - DNA, 122 bp, Homo sapiens
gtctgtacaaaggtcttgattagcaggtcggtggcctgcgtgtagagcgacagggcatagcgcaaggattgcaggtccgggctcttctccaggaaggtcttcttgaggcccacgccacccgc

SEQ ID NO: 195526 - DNA, 122 bp, Homo sapiens
agttctccctcgcagcccgtttggatgcgtgcgtctacagcccagtcgcactttggtgaccggcctgggctgtgaagcaccctttagcgaacagcctccgcacttggggacactggcacaag

SEQ ID NO: 195527 - DNA, 122 bp, Homo sapiens
ctggggtggcactaagttatcacttttagtagtaaacagtgaaatcagtgatttcagtaccggctaaggcgtggtcagcatcccagtcatgtgcaaaccagagtaattctgagaccagaagc

SEQ ID NO: 195528 - DNA, 122 bp, Homo sapiens
ccctttctatctccttaggtcttggacttcattccattttctgttgagtaataaactcaacgttgaaaatgtcctttgtgggggagaactcaggagtgaaaatgggctctgaggactgggaa

SEQ ID NO: 195529 - DNA, 122 bp, Homo sapiens
cccggagcttctgctagcctgtctggcccggcctgcacccacctgctccggtcgggtccgcgagttccgtgcgtccaggcggattccgctggacagccaggccttcccttcctccgccgggt

SEQ ID NO: 195530 - DNA, 122 bp, Homo sapiens
caggtttggagctcctctgtctagtgaggatcacggtctgcagagaagggttggcctccccgtctcctatcaaggcttaaagcaaggagaaccatcccaaatttggttccttttcccctaag

SEQ ID NO: 195531 - DNA, 122 bp, Homo sapiens
acgggagttgaggctgaacaaggcgtggggagcggtgggagctgcagcccgaccgctctccgtccccgcgcagggagccgctgccccttgggagtgggcttagccgttgtctacgccacccg

SEQ ID NO: 195532 - DNA, 122 bp, Homo sapiens
cctggggcttcgaggggggagggcgtcgcccgggtggaccctgccccacccacatgttctcgaggtcagacccctcacttaggggtggccgagggtgcaccaactggcagcctgggtctctg

SEQ ID NO: 195533 - DNA, 122 bp, Homo sapiens
agtgctgggattacaggcgtgagccaccgggccccgccaggggcacacttttgggagtgacggaaatggtcattatcttactgtggtgatggagtcacagaatatacatctatattcaaaac

SEQ ID NO: 195534 - DNA, 122 bp, Homo sapiens
tcctaatggcaactccttgtttgggaactctagttccagtccagtagcacagcctgttaccgttccatttaacagcacaaattttcaaacatctttacctgtgcataacatcatcatacaaa

SEQ ID NO: 195535 - DNA, 122 bp, Homo sapiens
ccgggccctgcgggctgagctggaggcactgctgagcagcaaggatgacgtcggcaagagcgtgagcagggcccccgctccccgggacacactgggtgaggggagacacgtacatgcatgta

SEQ ID NO: 195536 - DNA, 122 bp, Homo sapiens
agtctggggcactgcccgccacgtgagcgggtgctggtcactaagctggctccccaggggcgtgatggagttgaccagggtcgtcaggttgatgaaatgggccacagactgtgggttcgagg

SEQ ID NO: 195537 - DNA, 122 bp, Homo sapiens
tattgaacacagtcaagacactgtgttagatcctgtagtgagctgttaataggaaagacacgaagaccctgccatgcagatcagtcccaggcagcttggagaggagcctcctgcaggaaatg

SEQ ID NO: 195538 - DNA, 122 bp, Homo sapiens
tgcagggtcgggtctccccagggtgtggactgcagggaggagctgcacagggtgctcccccgaaggaaggaggagggaggaagcacagaggcattggaagtgaatggagaaggaaatggcag

SEQ ID NO: 195539 - DNA, 122 bp, Homo sapiens
aaacccaggtggggtctaaatgggtttgtattcacattccagccctcctactcaggcacccgtttctccagttctttaatgtgtaattcacacattcatcaggattatattaatagtaaagg

SEQ ID NO: 195540 - DNA, 122 bp, Homo sapiens
ctcaggaagcccgcaggagtgataccagccgcggagaagcagtgttgtcaacggtgctgacgtgcggtacttaatgagaagttgcccgtgtttttttcgctttatttgtgacgaaacattcg

SEQ ID NO: 195541 - DNA, 122 bp, Homo sapiens
gccttggtcggcctccgcctccaagctggccgggtccatcatctcgtccccggaatccgacggctctgtgtcctccaggctcgggcgctctggggcctctctgcgctcccgcgcagagccgc

SEQ ID NO: 195542 - DNA, 122 bp, Homo sapiens
ccctggtgagtccctctcgaccgagagcatcttgcagaacaagccgtctgttttcacggccgtttccagggggagccctgcccaccgccgttcatcctaccccactggacagggcatttact

SEQ ID NO: 195543 - DNA, 122 bp, Homo sapiens
gcctgactgcgttaacctctcggttccctgctcttgccacgtgaggtgcccaaatatggtcggactcaggaggagccagggagcgcttgcctttctcctgctaatggggaggaggctggaac

SEQ ID NO: 195544 - DNA, 122 bp, Homo sapiens
gcccggcccgcgtgctcactggtgcacttcttgacgtggctgcccttcttgagggcgtggcggctcagcttgcagtggaagttgtcctcccagaactcggcaaaccagatgttgcgccggtt

SEQ ID NO: 195545 - DNA, 122 bp, Homo sapiens
agggacgcatgtggagcagtgagggaggaaggggacacccgtctagccagcaagatcaaccgaatcaaccctggcaatcaatggcgtgacagatgtcgcagccagatcgccctcacatcccc

SEQ ID NO: 195546 - DNA, 122 bp, Homo sapiens
caggccggcggtggaggggccccccgcggcattgtatagacttgaacttgagcccggagccgggcgggggcggggaggggggtccgcgccgggagcgggcgggacgggagggggcgcctgcc

SEQ ID NO: 195547 - DNA, 122 bp, Homo sapiens
tcctccccttagagtatttagtttagaacatttgtaattttaagttctttgaaatgttatcgctttgaaatgtagataaatctttttaaaagtgaaataagcctcttgccagctttaggagc

SEQ ID NO: 195548 - DNA, 122 bp, Homo sapiens
cattccaggagcacatgactagcctcctacaggcctgtccccactgactcggaggcaacccggggcctcctgaggcaacatggggaggctccggccccaactttgctgatgacaaagttccg

SEQ ID NO: 195549 - DNA, 122 bp, Homo sapiens
ctaaaagctttaattataaaaatattcttttccttttagcaaggtagaaaccttttgttgcgctactgttgtttttcctgtttggtattatggaaaaattgtcttgcaaccctgaccgcctt

SEQ ID NO: 195550 - DNA, 122 bp, Homo sapiens
gaaggcctgtggcttcaatactgtcaccacgtgagtgccggcccctcacctccaggatctcgttaccctacaagtgcatcctggccgggaacctgagcctccgattttgggggcccagcgtg

SEQ ID NO: 195551 - DNA, 122 bp, Homo sapiens
gcctccacttcccgccgccaacgccgagaacgtcgctttcgtcgttacttgtctgcaggacggctggtccgggcccaggccctcctccagcgacacccaggcctcgatgtagatgctgggca

SEQ ID NO: 195552 - DNA, 122 bp, Homo sapiens
ctgttagtatgtgccaccatacccagctattttaaaacatttttgtagatggggtctcaccgtgttgcccaggctagtcttgaaaccctgggcttaaacaatacttttgcctaggcctccca

SEQ ID NO: 195553 - DNA, 122 bp, Homo sapiens
cactggcaggcattttataaaacactgttgattaaccgaaaggccatttctgagccacatcgcttacccatgctcagccccacggaaagggcatttaaagcaaagagtcttaatcaccaacc

SEQ ID NO: 195554 - DNA, 122 bp, Homo sapiens
ttttcaaaaacacgtgaaacaaaatgaaacaacgcctcatgctctgggcggcctgccgtccgggcaccaagtgaacctttgcttgtgcaacatgaagctggcttctgccggattcagaattt

SEQ ID NO: 195555 - DNA, 122 bp, Homo sapiens
ccccagagacaccccttcattcagactccacaattaccagcacacacatgccaagccactcggctccagagctgataagacagccggttccttcacctgtgatggaggaaatgttttgtatt

SEQ ID NO: 195556 - DNA, 122 bp, Homo sapiens
accttgcgacggcgtagggtgtccaggcgcagccctgtgcccaggcaccgttcctatcagcgcacttgctgtcccatttcacagaagagcacgggggcgccaggagctgggaaccccatgaa

SEQ ID NO: 195557 - DNA, 122 bp, Homo sapiens
ccacacgcacccagacgcgtcgcgcatagctctcccggaaaccccacacgcacccagacgcgtcgcgcatagctctcccggaaaccccacactcacccagacgcgtcgcgcatagctctcct

SEQ ID NO: 195558 - DNA, 122 bp, Homo sapiens
tgtgacagtgaaaataaattaaaacgccgtgagacggaacctaagaagaactgcctgcgccggggcgggcgggttggccgtggccgcgcggctcatctgctggcggccgaggcgccgggttt

SEQ ID NO: 195559 - DNA, 122 bp, Homo sapiens
ggtttcaccatgttggccaggctggttttgaactcctggcctcaagcgatccacccgcctcggcctcccaaagtggttttggtgattatttgattaatgccggtcttgcccagtggaatgga

SEQ ID NO: 195560 - DNA, 122 bp, Homo sapiens
catggggttgggccggcacaccccctgcctagggctttggggaaggtgcctgtgacatcacgatgtccctgcggcatggctggagctgagcgtgggcttccctggtgctgctctattccacc

SEQ ID NO: 195561 - DNA, 122 bp, Homo sapiens
tccctgcaggaagcaacgggctttggggtcaggacatacctgtgtgtgcaccctgcttgccgcctagatgtgacacattgactctcagcccagtgttttggtctgtaagatgggtaatgctg

SEQ ID NO: 195562 - DNA, 122 bp, Homo sapiens
agctgtcagtcatccctgggtgcctcctgcgcaagcgcagttgtcctcctgcgccgacctcgaatgcggtcctcctgctgcagaccacgcccaccaagggctggccgcagccactgtagctg

SEQ ID NO: 195563 - DNA, 122 bp, Homo sapiens
ccactgcttatctgatgcatagggggtcagtgcagagaagtggccttgagtaagaagagccgggctaagggagcttgggcaagtgctcagccaatgggaaagctggtccagaggggtaaggg

SEQ ID NO: 195564 - DNA, 122 bp, Homo sapiens
gtctacctgggtttgaatattcaccattcactactgtgagatctcagattccagtttcttcgtctgtaaattccagtgtgatcttagattccagtttcctcatctgtgaaatagagatatga

SEQ ID NO: 195565 - DNA, 122 bp, Homo sapiens
cagagactccgcgtcatcgggcgctggggctccgctaggtctcctgggggcatatgagtgcgcgcttcaactccgagcccccctcatctcccgccgctccacggtgggcgtttggggtggca

SEQ ID NO: 195566 - DNA, 122 bp, Homo sapiens
attctagggaaatgtcacttttaatgtcacagtgggtgcacaccttgtgaaattatcaaccgccactcccccccgggatatgaagatccatatcgcatgggggcgggtgccaccgcgattcg

SEQ ID NO: 195567 - DNA, 122 bp, Homo sapiens
caaacctccagtggtggtttgaaaattatattttacaattaaggtggctgcattttctcccgagaattttgcccgcaattgtggcatgctaccaccagggggtgcctgttcccactctggaa

SEQ ID NO: 195568 - DNA, 122 bp, Homo sapiens
cccccgtccttggaagaacaactggcctgtggctgtgtgggctcctcaggtggccccccccggggcgtggagagcggccgagccagggccagtgctcttggtccacacgggcttcccagccg

SEQ ID NO: 195569 - DNA, 122 bp, Homo sapiens
atcacctgcagaaaaacccacagccaccaccacttagacatggagacagacccaaggctgcgccgcgggcggtccgcgcaggccccccgttcggccgcccgtcaacccagcgcccgcacctc

SEQ ID NO: 195570 - DNA, 122 bp, Homo sapiens
cagccacgcggtggcggcactgcctagcggggaccgcgtggctgtcagcgtggcgggccacgtggaggtgtacaatatggaaggcagcctggccacccggttcattcctggaggcaaggcca

SEQ ID NO: 195571 - DNA, 122 bp, Homo sapiens
tattcagctgcccaaggacctctggactcaaatttcttcctgcacagcatgcttatcacccgaggttgaacctatcctttcccttcctcccagtccccaaatctgctatcctctccagcatt

SEQ ID NO: 195572 - DNA, 122 bp, Homo sapiens
acacgtgtgttaggaaatgcccgtgaacttgccctctgggctttttaatgagaggcttggcgcatgcggcacccagcggctgcttccctgcaagccagcgacttgccgagcagaatgagctc

SEQ ID NO: 195573 - DNA, 122 bp, Homo sapiens
ggacgcaattagcagacagccttggattgaccccaaccctctcactctcaaggaacgaggcggcctgcctcgccacccatcaggtcccacgctcaccccggacaagccgcgctgggactccg

SEQ ID NO: 195574 - DNA, 122 bp, Homo sapiens
caggctctctccgcggccggggctgggcaggttgcgggcttagggcggcgttgtctcatccggcggcctgggcaggtgcggcagggccggcgctcacgcgggcctgtgtgtccttggcccac

SEQ ID NO: 195575 - DNA, 122 bp, Homo sapiens
gagggaattggttgaaaggaattggggggcgcgggggtggtccgcgatatctgcctcttccgccactgccacaccggcgtcccgcgtcgtgccaacggccgggtcacgagtcttgagtctgt

SEQ ID NO: 195576 - DNA, 122 bp, Homo sapiens
tcctggagaagcgggaggccttgggcagcagccggccagccctgaaggctggccagcatccgaaccccgccaaggagggaggctgcgtgctctctgcctccccactgaactgggctccttcc

SEQ ID NO: 195577 - DNA, 122 bp, Homo sapiens
atcaattcggtgaagatcaaaagtactgattttttttaaagtagtagttgctagattttacgtgactgttgatactaaggtactgaaaaataggctgctaccatagagtacaaataagccac

SEQ ID NO: 195578 - DNA, 122 bp, Homo sapiens
cagggggcgccagcccctacaggtgactccatgaatcttcggctccactcggctcttcttcggctgagttcggccaacgcttgccttctcaggctcggctctcttcggctttctgagagcgc

SEQ ID NO: 195579 - DNA, 122 bp, Homo sapiens
cggcggccctcgcggcaggtttcgggcttcaggacaattcgtgatggcgggggctggttccgccgctgtatcgggggcagggaccccggtggcggggcccacaggccgcgaccttttcgccg

SEQ ID NO: 195580 - DNA, 122 bp, Homo sapiens
gaaaccgcgggggcacgtggggcggctgcagggtccgcaaagccggctgtttgcgaagggcgcagctccacctggaacagccgaggccgcccacgcgcttcccgcgggatcagagcagcctc

SEQ ID NO: 195581 - DNA, 122 bp, Homo sapiens
cttacagtcaacagagggttagccttccataaatgagaaatccaaaaaagaataatgccacgtatttcaggaatgtcggttagaggtttggccttcttgggaagtgtcacaatgctgagtct

SEQ ID NO: 195582 - DNA, 122 bp, Homo sapiens
taacgtgggacgtcaggtgacctcggcgcaccaggatgtgtcaatataggccccgcctcccgacagtgctctgcggtaggcgtggcctagagatgattggatcaattagaacaagagcgagg

SEQ ID NO: 195583 - DNA, 122 bp, Homo sapiens
cccggcaccggccttggatggcttccctctcgcaatctgctttctgggaagtgggcccctcgcaccgggtgcggcgcccagggttccccgccaccccgacccttactaagccgctcagccca

SEQ ID NO: 195584 - DNA, 122 bp, Homo sapiens
ggtagggggtggatgctgcttttgagcctctgagtcagctcgggagttccccaaggcaatcgaggtggaagctcgctggtgttctctgcagtgcgtgactgccaccttttgggggcttccac

SEQ ID NO: 195585 - DNA, 122 bp, Homo sapiens
ttcctggtcatcataggctgccattcttcccctagaaattaatacatctgtatgcgggatcgtgccttctcatcccctgctgcagaatcctcggtcataacagcttttgtgttcatgaatat

SEQ ID NO: 195586 - DNA, 122 bp, Homo sapiens
aaccgccagaaacgtcagatggtacggaggaaaacactttacactttaacagtatttttacgtttatttgcagcaaatgttgttggctttgtatttaaagtatttatgactcactataaagt

SEQ ID NO: 195587 - DNA, 122 bp, Homo sapiens
tggagtgacaggcccgcctgcagcagagttcattacccccgcccccagctccttgtgactcgctgctcttgtttattcctgaggatttacttaggtcctgcataactgccgaaatgtgctgg

SEQ ID NO: 195588 - DNA, 122 bp, Homo sapiens
atacccagtaatgggatggctgggttaaatggtatttccagttccagatccctgaggaatcgccacactgtcttccacaatggttgaactagtttacagtcccaccaacagtgtaaaagttt

SEQ ID NO: 195589 - DNA, 122 bp, Homo sapiens
gccccgaagggcttcaggtgcccagaccgggcggggcctcgcggagcctcgcagcgcaggcgcagtctgcaggcaacattcaactgcaaggcatcggccaatgggaactattgctgggctcg

SEQ ID NO: 195590 - DNA, 122 bp, Homo sapiens
atggggaagcctgcacgagatggaagaggaagcaagtggaaaagcagctcagatggctcgcgagcaaaaccaccatacctgggaccagggcgccaataacaggtaaggaattggcttgtgta

SEQ ID NO: 195591 - DNA, 122 bp, Homo sapiens
gaaaagtccgaatctgtccttacgcccccaaggcgaattctggggcgcgcgggtttattccgacccactaccacatcgcgtttcctgaggtaacccggcctcggctctgcggccccagcggc

SEQ ID NO: 195592 - DNA, 122 bp, Homo sapiens
ttgaacccggggcctcgtgcatgctaagcacgcgctctaccactgagctacaccccccaacgctcaacgtgggccaaaatatttctatgacctgttactattatcggtcgtgccaagaagca

SEQ ID NO: 195593 - DNA, 122 bp, Homo sapiens
ttcgtacattttagggagacatgagacatcaatatatgtaagatgaacattggttcagtccggaaaggcaggacaactggaatcaaaggtgggacaacttgaagggcaggtggcttccgggg

SEQ ID NO: 195594 - DNA, 122 bp, Homo sapiens
cactctgtttgtcaagtctgcaagtggatattcggacctctttgaggccttcgttggaaacgggatttcttcatattacactagacagaagaattctcagtaacttccttttgttgtgtgta

SEQ ID NO: 195595 - DNA, 122 bp, Homo sapiens
tataggctagttttctctgcttcaataagatttaattattggctcgatgccctgttcattcgtcagaagagaagtccttcactcattccgtccttttaataagtctctttgacccctgtgcc

SEQ ID NO: 195596 - DNA, 122 bp, Homo sapiens
ataactccagcctctgccttggtcgtcatggccgtgtcttctgactttggatttagggtccgtcttgatccggtatgaccgcatctcaatgacgtcggcaaggaccctgtttccaggcaagg

SEQ ID NO: 195597 - DNA, 122 bp, Homo sapiens
ggatgttatgacttcctgtcgctgccaggacgactccagatacacaggacacggatgctgcgggttcaccgggagcctccatttcccagaagatccatttgtcttgcaccctaagcctctcc

SEQ ID NO: 195598 - DNA, 122 bp, Homo sapiens
cactgcctggaaacgagccagactcctctgcctttgaaatcctgttccttggagcaatcccggctcgctaggtttaattgtttcgtctctttttttctggtttatgaagccgccccgcctga

SEQ ID NO: 195599 - DNA, 122 bp, Homo sapiens
tcttcaaaggtgtattaaggtgcctttgttgtcggctttcaacgcctcctttgaaggactcgctcacttccccggcaggtgagtaagcagctcacagggaccccgtgagcaaagcctgcaag

SEQ ID NO: 195600 - DNA, 122 bp, Homo sapiens
gtgtctggggagccgagccccgcttctcgctgcggtgagcccggactggggcacgcactgcgcagactccccgctgcagtgggcggagctcccacaggccccgccccctcctcccaccctcg

SEQ ID NO: 195601 - DNA, 122 bp, Homo sapiens
cgggtggctcaggaaactgcgaccctttctgggacggtgctgtcccccgagtgagaccatcgagagggcactccgcgtgtagagcattcccgtctcgcgctgaggcgcggcacctgtggcct

SEQ ID NO: 195602 - DNA, 122 bp, Homo sapiens
actcccaatttgtttccttctgaaggaagccctccaggaagaccttttcagtgccccctccggagccatacaaacgagctgcgcctttcccagccgagagcccaaccgccaccagcagcgtc

SEQ ID NO: 195603 - DNA, 122 bp, Homo sapiens
tgctataggccacagaggaggcgtctggggtccctcggggcaggtgcagcaggaggaagccgtctccgagggcatgaccttggaactgagcattgacagaggagagtcagccagacaaagaa

SEQ ID NO: 195604 - DNA, 122 bp, Homo sapiens
acaaagtaagggggaggggcacggagaggcccgcagcagcagaacttacgggagatgggacggaagaggaagtggttgcgtgcccttcaaattagattgtctagatacttgtctttcccctc

SEQ ID NO: 195605 - DNA, 122 bp, Homo sapiens
agtaactggacggacgccaagtcccccagcccgctcggccccagctccacccgcccgggccgcagcccgcaccccatcggcccgccccgggccaggagcatccccagctccggcgtctgcgg

SEQ ID NO: 195606 - DNA, 122 bp, Homo sapiens
cgccggagctgctgccgcgccgcgccctcacgtgacccgcgtacgcgccgggggcggagccgtctcagacccgcccccaccccccggcgtccccagcgcgccggtccgtcccgagtgcgcgt

SEQ ID NO: 195607 - DNA, 122 bp, Homo sapiens
gaatatcctgccctgcctctcttgcaagtaggtttcaccatctgaggatgttcaggcaaacggaatgtcaacagagtgatgtgtgcaattcagagtttctgcccttaaaagaagacttgctc

SEQ ID NO: 195608 - DNA, 122 bp, Homo sapiens
agaagggcaacctttttctgatcgctttcccaagcaggcaggaatctaagtgtccggaaacgccaggagctggccgccaggtgagcggaggacgaaggggtcctgacttctaggggacaggc

SEQ ID NO: 195609 - DNA, 122 bp, Homo sapiens
ttttcaccaaaatggcatctgggaactttcaagatcatctgactaataccaggttgtattcgttatttgcaaagatggaggtggaatctcctttgaagtagtacaaccaaatgatgtctgta

SEQ ID NO: 195610 - DNA, 122 bp, Homo sapiens
ctgacactttgggcgagggcaccacgctgaaggtgttcatgatgcggtctgggaactcctcgcggatcttactgatgagcagcgtgcccattccggaccccgtgccaccccccagcgagtgg

SEQ ID NO: 195611 - DNA, 122 bp, Homo sapiens
caaaatatatgaatatggttagatcccgtctaatttgtcatgcacttagcaaaaacaacccgaaaaacaaaaggcagttttcatttatattcatttggaaaatacacttttaaattattatt

SEQ ID NO: 195612 - DNA, 122 bp, Homo sapiens
aaagacccagatggcgaggccgggacaggctggagtccggcttctccggtccaggatgcccgcttttgctttttcaaaagtctcatgccctgtgctttttcctctttgccctcgaggtgtct

SEQ ID NO: 195613 - DNA, 122 bp, Homo sapiens
caggggtcagcttcgcggtctgttcctggcggtcactttttatttattcactttaatagacgcgctttgggggcgttaaaattctgcgtaagagttggggatctcagcgctattaagaaacg

SEQ ID NO: 195614 - DNA, 122 bp, Homo sapiens
gctcctaactaccaggttaacgtagtttgcccctaatcctaacttgggcatcctaaggcccgtctcctatgctggattctcgctgcttttcctctttggttgaacatgatccggagtttccc

SEQ ID NO: 195615 - DNA, 122 bp, Homo sapiens
accttgtgttccagtcggtgggaaacactggtttttcctcaacgccacgtgggcatgtcacgtccaggcctggcctggggtaggcctcagctccatctcctgcccaacgcctgccaaggttc

SEQ ID NO: 195616 - DNA, 122 bp, Homo sapiens
tcccggcagaaacctggaagtggaaatctcgggcattcaccgtttgggtgaagacggaggcgggttctggacagacgtaggctgtcagggagtgtttacttcgcctccacttctgttcctcc

SEQ ID NO: 195617 - DNA, 122 bp, Homo sapiens
ttacggggaagaccatcaccctcgaggtacgggccgggtggtcatgaggaagccaaggtccgaataaggtcctgaggtggattttaggaccggcgctgctttccatgtcttagaccatgatt

SEQ ID NO: 195618 - DNA, 122 bp, Homo sapiens
tgccacctccccactctcctcctctctggctgcgctccctaacagatcgggaggtgggagcggggccaggccagaagagctggctgcctgcaaggctgtcccctcccagtgccgccccgccc

SEQ ID NO: 195619 - DNA, 122 bp, Homo sapiens
tgccctggagaagccaactggaggtggtggccccgagagtagacgcggaggggctgaggccgcaggatcctggagcccaggagctgacggagatcgcccacagctgctgcagcagcgcccgg

SEQ ID NO: 195620 - DNA, 122 bp, Homo sapiens
tttcagaagcagcccccgccccccaacacacacacacacacacgcacacacacacacgcacgcagtctcccagccatacaagggccaacagctacaaatagttacagacttacagaactagg

SEQ ID NO: 195621 - DNA, 122 bp, Homo sapiens
tcagtcggcgcacaggcttggccacacacagcaggctgtgtggagaaattgtgcaccagacggggcagggggaaagggtgaggcagttcagctgcccagtatcctccaatctcctgtttcct

SEQ ID NO: 195622 - DNA, 122 bp, Homo sapiens
gccttctgcaaactgatgactgcatttcctctcattatctgagagatctttgggaagccacgtgcaccagctcgttctaggaccccaggcctctaagaatccaggcagaggaagctgggaag

SEQ ID NO: 195623 - DNA, 122 bp, Homo sapiens
tgcttcctccagcagggactccatcagtcagattcaccagtgatgactcctgcccagggccgtgttcatcttcagagctgaagcctcccgctgtattgattagccaatacaaccaacaagct

SEQ ID NO: 195624 - DNA, 122 bp, Homo sapiens
cggtgggcggctgcaggtgggcgaagctcaggaagacctgttccagcgagatctggctcacggagtagtcgtccacgccgtacttttccttggctttctccagaataccgaaaacctttggg

SEQ ID NO: 195625 - DNA, 122 bp, Homo sapiens
ccagccggagctggccaaccctctccacccgggacttgggcagcggcgccggcagcccagcgtctatttgcgcttaagagccagcaaggaagctccaggggccccagctggccgtgctcccc

SEQ ID NO: 195626 - DNA, 122 bp, Homo sapiens
gcagcattatcttcagacatcacattctagctctgtttaaataccacatatgctaaaaaccgacgccaggacattctctaaatgagttacaaatcagtttctggaaaggaagtgctccatga

SEQ ID NO: 195627 - DNA, 122 bp, Homo sapiens
caggacaagacaaagggcaggccctcagcctgttggaaccgggaccggcagacccaagggcgcagcaagtgccgctgcgggggcctagatggcctccgggagggtggaaaccaagtctcaga

SEQ ID NO: 195628 - DNA, 122 bp, Homo sapiens
gcggggccgctctccgggctggtgttggtacctggccacctcttcgtaagtcagcagctccggagactcagctccggaggacatctttccttcctgcgagccacccagtctctccctacagc

SEQ ID NO: 195629 - DNA, 122 bp, Homo sapiens
gtggagcaattaaacatttgcatcggtgactgtttgagatgtcatgaagcccacagctgccggagtgtgggtgaagtgtgaaaagcattcatagccagcatgggaagctctattccatgttg

SEQ ID NO: 195630 - DNA, 122 bp, Homo sapiens
caagttagagagcatagcagaaatccaattatcagcagcttctggggttccatggactcccgccttcagctgcggctgaagagctggtaatcctagctcactctgccaaggagagatgtctt

SEQ ID NO: 195631 - DNA, 122 bp, Homo sapiens
ctgtctgggtgagtgggccgcgcgggccgggcaggtccgggtcccccgcatggcagtccgcgccgcgccctgaccgacctcctctccggccgcggcatcccgagccccccaccgcggtggct

SEQ ID NO: 195632 - DNA, 122 bp, Homo sapiens
atgacagcctgagccacacacctatcgactgagacttagaagtaagagccaaagcctacccggaacctcccagtctcacaccaccttttccaattcagcttttcccagatttctccattggg

SEQ ID NO: 195633 - DNA, 122 bp, Homo sapiens
cctggtctccactccctctgggctttggggtgcatgctgcagtgcagcctccccgcgccccggcctccatgcaccctgctcgtgctgcctcagaggcttggcatctcccccatcttccagcc

SEQ ID NO: 195634 - DNA, 122 bp, Homo sapiens
acgccgcgacaggcctaccagcccgcacgcactgggcgaccagcctgaggccccgcccctcggccggctccccgcccgaggccccgcccctgagccagccccagcccgcctggccgctcgag

SEQ ID NO: 195635 - DNA, 122 bp, Homo sapiens
atagtctgaaatatggcctcatgggataagaaagacctgaccatcccccagcctgacacccgtgtagggtctgtgctgaggtggattagtaaaacaggaaagcttcttgcagttgagataga

SEQ ID NO: 195636 - DNA, 122 bp, Homo sapiens
actagactacctgagagcttcccattgcctggttttcctcctttgaaaaatggggatattcgccaccccccacctccctcagcagggaagcactagtgattaattaggtaacatctgtgaag

SEQ ID NO: 195637 - DNA, 122 bp, Homo sapiens
gagtttctgggtgccagcctcgctggaggtccctttcacactgtcagtcgcagccgtggccgcctctgtggaggtagatgtgggacagagctcctcgatctcgtccaaggcagaggagaaac

SEQ ID NO: 195638 - DNA, 122 bp, Homo sapiens
tttcatgaaagagtaagtaaattctaatagaaacatcttttttagagtgaacaatattcccgtcaacatttgagcttctaattgcatgttgaagacctttagtgctatgtgggcctaaaccc

SEQ ID NO: 195639 - DNA, 122 bp, Homo sapiens
ggacggggaaaccaaggcggcagccagggagaccctgaccgaggtgacctctgtttagggcgacaaccgggttggggctccccgcagtggccactggcccggcggtcccgcacccccagccc

SEQ ID NO: 195640 - DNA, 122 bp, Homo sapiens
taagtagggctgcctcaggctcccatgaaggttctcaggatgtcacccgtgctccacttgcgcttggtgtggccttgttgctccagtccagcagcagcaattgtcctaggtgtggctgtgtg

SEQ ID NO: 195641 - DNA, 122 bp, Homo sapiens
tcctggcttcaacctccctctctggttttcccagctctcagcccacaatcttcagtccttcggaatacaagtcttgtcgtatgaaggaagccgggtaactcagcaccttccttggcaccgag

SEQ ID NO: 195642 - DNA, 122 bp, Homo sapiens
gcgctggggtgcccggtagttaagggtggggtggcagcgagcgtttctgtgcacccgcagcgtgccacgcccgtgctaagcactttgcctatagagccagtggcttaattctgcaatagcac

SEQ ID NO: 195643 - DNA, 122 bp, Homo sapiens
taacacagtaacctccagaacgcccctgcccttctctttaaccacaccggtcatcagagtcgcaatgacatttattaaaagatgcctaaagttagacacaactctggttggagggagaagaa

SEQ ID NO: 195644 - DNA, 122 bp, Homo sapiens
ctccacaccacaggcccggcagcagccactgacggctggaagacagagatttcaggcccccgactccacaccatgggcccggcagcagccactgacggctggaagacagagatttcaggccc

SEQ ID NO: 195645 - DNA, 122 bp, Homo sapiens
atactcaattagttattctagcacatagctttttaaatattggccaaaactggctgggcacggtggctcatgcttgtaatcccagcactttgggagctgaggcgggcagatcacgaggtcag

SEQ ID NO: 195646 - DNA, 122 bp, Homo sapiens
gcaggatctggagttctcggtttccaagcaagactggtcgagtctaggtcggattggctgcgatagaacgaggggcaggggttgtaccgaatcacaaagctaggattttcatctctctctct

SEQ ID NO: 195647 - DNA, 122 bp, Homo sapiens
aagtgccctaaaaacaatgcgcatgctcagttcccaagggtgaggtgggcacagcgcatgcggaaagcccatcttaaagggagagtcttgggaaagaggcgagcctataaagtctcaggagc

SEQ ID NO: 195648 - DNA, 122 bp, Homo sapiens
gtacagcagtggtccgaaactagtggaagaccactagaacgcggagaatcagaaaattaccgggcatggttcaataatttttttctgtctcattattggcagactctagagcgacagcggaa

SEQ ID NO: 195649 - DNA, 122 bp, Homo sapiens
aggagtgttctagggagaaaacccaaaagactgcctttatcctgacagccagaaaccacccgctgagctccagtgagtactaaaaccctatcgtggaggcttctagcctgaagaggatgcag

SEQ ID NO: 195650 - DNA, 122 bp, Homo sapiens
cttagcagaattcaatgaattcgtcattgtgttaagcaaggaccctaatgaatctcttgtcggcccagtttactgaatgaccattagccacaaatgagtcacagcacaccgcccccccccgc

SEQ ID NO: 195651 - DNA, 122 bp, Homo sapiens
gacccagcacgatgccaggcacggcacgataccagacccagcacgataccaggcccggcacgataccagacacggcaggatgatgccagccccagcacgataccagacccggcacgatacca

SEQ ID NO: 195652 - DNA, 122 bp, Homo sapiens
ttcaagcgattctccggccttagccttccaaccagctgggactacaggcgcgcgcccccacgcccggctaatttaattcccagattgatatccattgcttctgagatgggccaattatcctt

SEQ ID NO: 195653 - DNA, 122 bp, Homo sapiens
ctccaggacagtggtctggtgcacactggatgtaagttccttcccccgctagttggggcacggaagaccctagcattcctggtgggtagaaggctggaagtcgtttctcctcccctaagcag

SEQ ID NO: 195654 - DNA, 122 bp, Homo sapiens
agcggggcgccaggtaaggatgagtattacagtccgagaagcgaacttccaagtcacctccgcccagtcgcacccaaggtacgcccctcccgccttctgggggaaccaagatggctcccggg

SEQ ID NO: 195655 - DNA, 122 bp, Homo sapiens
ggggccggggagattacgcaacacgggtcttagttgtctgggccgctggggtcgcctccacgggcaggagccacggccaggacgtgcaggccgccccctgctggtccgtttcggaaccgggc

SEQ ID NO: 195656 - DNA, 122 bp, Homo sapiens
cactgagcctacctctgacagcgcggggctcactagttaccgcccaacctggatccggcgcgtgtggccgctgggcacttggcacctccccaagagcttccacttggtttggtccccccacc

SEQ ID NO: 195657 - DNA, 122 bp, Homo sapiens
cgtgtcaggatgctcgctcacaggaatgctcatcacaggcttgaaagcctttgccatccacgctctccggagccccgagcgtctccaaagagcctgcccaggcttctccccgacccaggtgc

SEQ ID NO: 195658 - DNA, 122 bp, Homo sapiens
attctggcctctgatatttttcccagggcctgtggagggagtcacgaaggtcagcccctccgggcttcctgttcaccgagggtctctacttagacttttggccggctcatcaaatggggata

SEQ ID NO: 195659 - DNA, 122 bp, Homo sapiens
actacctcgggcggctttcggaagcccggtgagtagccgggcaccgaaagggccatgacgcgcggcggctgagggtagccggccgccctacagagacttcccgcgcgcgccgggcccgcccc

SEQ ID NO: 195660 - DNA, 122 bp, Homo sapiens
acatcaagagctctgcagccagggcctggggcaacctcccgctccacctcccgggagcctcgcagccagcatccccagcggctcgtgctccccggccaggcgggacctcagcgctgtggcgg

SEQ ID NO: 195661 - DNA, 122 bp, Homo sapiens
actacatttcccaggatgccctgcgactaaccaagccggaagacggttgtcttggttgggcgggtccgggagaggctcgtctgtggagaggtggcccagccaatgggtgaggccgactgaat

SEQ ID NO: 195662 - DNA, 122 bp, Homo sapiens
gcgtgcctgcctgggccaatcggcgcgagcccacagtgcggagcgagcgcctcaaatgctcgggtttctcagctgattgtctccagccgagagttgttttttgcagctacggagccgagccg

SEQ ID NO: 195663 - DNA, 122 bp, Homo sapiens
aaggcagctcgagccctcgttggcggggcagcttgcatcacgctactccccaccacttcccgctactccccgcgatgagtcctcagtgtcatgtcttggaaaatggatagaaacgcacagtc

SEQ ID NO: 195664 - DNA, 122 bp, Homo sapiens
ttggcggcagctgaggtcatctgtcaggcggagccggggggtcaggcccggggaaggggccgcgagggagggcggcgcgcgtgggccggcggggtgcgggtggacgagccgggggccctgcg

SEQ ID NO: 195665 - DNA, 122 bp, Homo sapiens
gcccgtgctgtccaaggcagagcgcagtcacatcatcgtgtggcaggtgtcctacacccccgagtgaagctgctgccctgcctggcccgacctgtacataggacccccgaccacctgacccc

SEQ ID NO: 195666 - DNA, 122 bp, Homo sapiens
ccaaatggcgaagaagatgagcgcggcagtgagcagcagcgccagcatgtagcagaaggccgcgaacgtgaacgccatggctggggaggaggagcggggagcggcgccgttgccagcggaga

SEQ ID NO: 195667 - DNA, 122 bp, Homo sapiens
tttttttaattcacctcttgacttacccagttttggaggcagtggtttgccctgtgccctcgcttctctgatcgatctaagagttgttgattcttcagtttcttcatccttttgtaatcaag

SEQ ID NO: 195668 - DNA, 122 bp, Homo sapiens
ttactaagatacgatatttctttttttttccgagacggagtcttgctctgccactgtgcccggccaatacattattattaacttaaggctgtactttattaaggcttccttagtttttgttt

SEQ ID NO: 195669 - DNA, 122 bp, Homo sapiens
ttttttacctcctcttctctcggatttaattctacttaaaatcatactggtcagttaagccgctgcagaataacagatatgtacctgacacgtagtaaatgtttgataaacgttaattactg

SEQ ID NO: 195670 - DNA, 122 bp, Homo sapiens
ttcctagcagccaggaagtgagaggacgatatgactccccatacagcaggaggtgtacaccgatcctgggatattattcctaatatccacggagaggagaggctgatatgactcccaatatc

SEQ ID NO: 195671 - DNA, 122 bp, Homo sapiens
ccaggggcagtggcaggtagattttattggcctgggacacacaggggataccctcacccacgatggggtggggggtgtggtgttgaagatataatctgatggtcacttgtggtagaatcgcg

SEQ ID NO: 195672 - DNA, 122 bp, Homo sapiens
aaatcgagcgccgcgcccctacccggcgccaggcccggggttgcgagcggtgatcttcaacgttgatcgtcgcatcttcaaactcgctgccaccgccaagatgctcctgaattctttttttt

SEQ ID NO: 195673 - DNA, 122 bp, Homo sapiens
tcaacatgaatactgcaagcaggtctttattttttttgacaatgggaacttccactcattcggtagaagtcaccactttcaaaacatagtaagtcaacacacaactgtacaaactgaacgtg

SEQ ID NO: 195674 - DNA, 122 bp, Homo sapiens
atacacacctgggggttcatgatgacagtgtagcgaagaggattgcagatggcaacaaaacggtcaaaggccatgatagccagtaaaatggcctctgtgcttcccaaaaagtggaagaagtg

SEQ ID NO: 195675 - DNA, 122 bp, Homo sapiens
ctggtgcttggtcaagtgggacgtcttgctgaagcctttgccacattcggggcaggtgtacggcttgtcagccccatgggaagcccgtcttcctggtggggggccgcctcttggctgatcag

SEQ ID NO: 195676 - DNA, 122 bp, Homo sapiens
catgctaattctttgaccagtacagagcttctcaggtgaaacatttcttttttatttgagcggtttccatagtctaagaaggaagttcaccttacttaagtaggacttttcacttaaggaaa

SEQ ID NO: 195677 - DNA, 122 bp, Homo sapiens
acttcctcagtgaaacaagtcatataaaatccacttccacaaaaaaataagcagttacagcggttaatggaattctctacaacatgcttctatgtcagactaagaaaactaagaactggtta

SEQ ID NO: 195678 - DNA, 122 bp, Homo sapiens
atcgccgttacgggaaaagtaaaactcttgagggacttccttacactaatttaactgtcccgggttgtttttatttctaattgtgctggggggatgggcatcatgatctgttttcagggctt

SEQ ID NO: 195679 - DNA, 122 bp, Homo sapiens
gaggttgtctgtggagcgggtgttttaggcactgcgcccatggccgggtctcccgtggtccgtcctgagcgtttcctcccccggggctggggtatactgcaaatttaacacagcagcggtct

SEQ ID NO: 195680 - DNA, 122 bp, Homo sapiens
tgctgacacgtgtgacattggatcccagagctgccccgtggggcagtcctgaaaaaaccacgcagggcccggggcagcgccacgcccctcacggagtgcaccatgcatgggccctgcagagg

SEQ ID NO: 195681 - DNA, 122 bp, Homo sapiens
acagaagtttatttcttgcatgcattacaggttggcagaaagttggctgtggctctgctccgtgtatttcccacaagcagattccactggggcagctgatttgcggggagtgatgtcctcat

SEQ ID NO: 195682 - DNA, 122 bp, Homo sapiens
gcagcagcgacggcagacaaaacaacgcgtgaacacagtcacgtttctgaacacagtggccgcatgttgacacgcccttcccacgccaaaaaaacaagatcagaagatgtggcttcttggct

SEQ ID NO: 195683 - DNA, 122 bp, Homo sapiens
cttaggtagagaggcttccatggaagtgtgggctggctgtggggggttgagacctagccccgttcttttgacatttcaccctgtgttctccaaactccagcaagcagcttccatagctcatt

SEQ ID NO: 195684 - DNA, 122 bp, Homo sapiens
agtgtgagatttggccttttgacctggggttttatatgctgccatacttccggggtcttgcgttccttcttctctgattcttcccttggggtgggctgtccgcatgtgcattggcgtgctag

SEQ ID NO: 195685 - DNA, 122 bp, Homo sapiens
ctgcctctagcagacaatctatatcaaaacagttgtacacataaaactgcaccaccgcctcggctggctctgctctgatccagctgttagagtgaatagcagttggtgcacagagcgctgga

SEQ ID NO: 195686 - DNA, 122 bp, Homo sapiens
tttttatatcatttgacttttcttctttcctcctgtaattacttcatttcagtgaaatcacgctgtattatgatttaacaactggaacagtcacttaagcattgatattttgcaagctcctt

SEQ ID NO: 195687 - DNA, 122 bp, Homo sapiens
tatagacattcttggtacatgcaagctggtatttcttgtatctggggtactgcgttaacgcgtccttttctgagctctccttggtgtctgtgggcacgtcaggctcgggcagcagggcttct

SEQ ID NO: 195688 - DNA, 122 bp, Homo sapiens
aaggagctggagaggccgcagtgtggtcggagctgactaggcccggctgcttgagaaaaccggccggatcccgagttcagctggggcccacacacccaccggaaacacacccagcagagcag

SEQ ID NO: 195689 - DNA, 122 bp, Homo sapiens
gctcccagcggaataaaaaaaactcttccttctttaatccgctgtctgaggggttttgtccgctgctcatccatgctccatttctttgttccctgaccgggaatcgaacgcaggcagcagcg

SEQ ID NO: 195690 - DNA, 122 bp, Homo sapiens
ctgagactggagggagaggcattttgggtagcctaggagggcgactggcggcagcagaaccgaggaaggcaaggttgtttcccccacgctgtgtcctgtgttcaggtgcgacacacaatcct

SEQ ID NO: 195691 - DNA, 122 bp, Homo sapiens
tgctgaatgagctgtgtattcggccaggttctgtgattcttaccctgtctgcatgctgttcgagtagctaaagtactttagaaaagaagaaacactttaaactcttaaagaaaaagagaagc

SEQ ID NO: 195692 - DNA, 122 bp, Homo sapiens
agccgcccgcgggcttctgggagggaaaggaccggagggcccggcccccttctcagacgccgtagttcccgatgtgccggccgcaatgcctcctggggcttgaagtccacaccgcccaggcc

SEQ ID NO: 195693 - DNA, 122 bp, Homo sapiens
ctcccaaagtgctgggattacaggctccagattcctggccaagattctacatttctaaggcgctcccagtgaggcagctgtccctgacccagggaacacggcagtagccgggctacactggc

SEQ ID NO: 195694 - DNA, 122 bp, Homo sapiens
ctgcagaggcagggagagacttgggggagatggggctggtacagagggcccagctctcggcggatgttgactttcagcccaggacaggagctacgtctgaagagtgattctgaatacagaag

SEQ ID NO: 195695 - DNA, 122 bp, Homo sapiens
taccctacgaggacaagcatggactcccacggcaaccccgtcaccttgctgaccatggaccggcacggggagcagagcctctattccccgcagacccccgcctacatccgcagctacccacc

SEQ ID NO: 195696 - DNA, 122 bp, Homo sapiens
caataatatttttctccatgatccatgtaaagacatggattggtgccttagtgatacttccggttgcttcagctctgactataatgtgatgagaggttgttgtaagcctgggaggaatggcc

SEQ ID NO: 195697 - DNA, 122 bp, Homo sapiens
tggggcggtgtctgataaaacagatggctctcctttccaggtgtttctgaatttgatccccgacgcctggggcatcgtggaggaacttgcataggaaatcaaggtgtcgcaggaaagagaac

SEQ ID NO: 195698 - DNA, 122 bp, Homo sapiens
agcgggtgaattacaggtgcctgctgcctgcctacctgggtaatctgatcttgtctgtatcgccgtgtgctcatcactgaagaattgcaggccactcatgtcagtgaccagatttgtggctt

SEQ ID NO: 195699 - DNA, 122 bp, Homo sapiens
ggcctccgcacagcggccgctaccgcatcccggggggctgcggagaggaaggcgcgagcgcgttgagtgcccggaaccctccagcgcgcccggcccgccccggctcccctgccttcgccgag

SEQ ID NO: 195700 - DNA, 122 bp, Homo sapiens
ggacgtggagggactacaggcagctgcgaccgtctgccctgccatcgctacctgtgtatacgcactcgcactccatgtaaccttcacagccaccagcaggccgcggccgggccgccctgcag

SEQ ID NO: 195701 - DNA, 122 bp, Homo sapiens
tgggggcaagctcccaggattaggtggggtcacggtgggaaggcgcagtgcgcgcagctgcgtccgcctgtcgcccgccccagggccctctgcacagcctgaccatacctgttgcttcagct

SEQ ID NO: 195702 - DNA, 122 bp, Homo sapiens
gagcgcggctcccgggagggggcgctgccgcccgcggctgggtccggccccgcagcctcgcgaccaaccccgccccgccccgcgcgcccgcctgcccagactgcggctcccgcccgcgccgc

SEQ ID NO: 195703 - DNA, 122 bp, Homo sapiens
gcatgatcagagtgtgttggaaagagtgtctgagatggagagaacagtggatgcaagggccggaatgctggagaaggcataatgaattggagaaataaaaatcatggttaacattgatagaa

SEQ ID NO: 195704 - DNA, 122 bp, Homo sapiens
acccaataactcgccaggttacatgggtcttgagagagaattttaattactaattgtgcacgagatagttggttgtctatatgtcaaatgagttgttctcttggtatttgctctaccatctc

SEQ ID NO: 195705 - DNA, 122 bp, Homo sapiens
cctgtagcttgttttctcaaagtctcttcaaattcttgtaggatagaagcaggcctaactcgcccatgaattcctgcattttctggtgtggaatgttgcttacagggctgactgtggactag

SEQ ID NO: 195706 - DNA, 122 bp, Homo sapiens
tctgttgcagcccaccctccaacccctaccacatacactgccatgctggatagtgcctgccgggtgagcttactcaggaaggagtggggactcagccaaggatcccatgaacaagcaaagca

SEQ ID NO: 195707 - DNA, 122 bp, Homo sapiens
caccagcacacagcctctctttaaatatcaagctcacaaatatgtttaatgaacttgatacgggaggggaggaagtcttttttttttttttcctttttttgagacagcgtcttgctctgttg

SEQ ID NO: 195708 - DNA, 122 bp, Homo sapiens
cagaaggccggtatgctcatgtcgatgtgtctaagtcaaaggcatgaagttgaacacgtgcgcacatgaggctggatgttacagggcagggaagtaggggtccccaaggagcccctcacaaa

SEQ ID NO: 195709 - DNA, 122 bp, Homo sapiens
agctctggtccatctcttgtcaatactcccagtgccagcgaggaaagccacagcatccagcgctctgcagtggaactgcagcggggcccccaccaggcagccctgcagcaggattgggggtc

SEQ ID NO: 195710 - DNA, 122 bp, Homo sapiens
tcttgtcagaggccaagcagacactcaggaattcctgagggcctggtggggatgggacagcgttggtggggaggggaacctggacttctgcctccttatcttgagccagcaccccctcctcc

SEQ ID NO: 195711 - DNA, 122 bp, Homo sapiens
agcgacttggctcgtctccagatctaaaggtgggcgagtctgctggacggacgctgggaccgtcttgcaggggatgtggaatagctgcccccacccccgaccacctggcctcggcgggacgg

SEQ ID NO: 195712 - DNA, 122 bp, Homo sapiens
gcggcgcggcgggctgggcgcggcggtggttaggtcggtgcggttgtagtccatgcacagcgtgtcagggttgccttgctcgggcagccggtcgcagcgcatgcggtcgggccaggcgaagc

SEQ ID NO: 195713 - DNA, 122 bp, Homo sapiens
tcacccgcctccccgctcctgctgtgcggcctgcttcctaacaggccagagacccgtacccggccacagccccgggctcggagaccctggcttaaacgacgtaaatgtatttctccaccatc

SEQ ID NO: 195714 - DNA, 122 bp, Homo sapiens
tgctgaatacaaaatcatctggccgcagtctagaattggctcccgttcaacagggtatctcgcaactcacgttgcagtcatctggccccttttgtttcagtacagttgtcccttggtatctg

SEQ ID NO: 195715 - DNA, 122 bp, Homo sapiens
tcctgggatctgagcatgtcagagcccccggggcgatggaggctgtccaggtcatggtaacgtctagcacgatgcagacagataagggctctcgaggcttccatacccagccccgtgtgagc

SEQ ID NO: 195716 - DNA, 122 bp, Homo sapiens
ccgcaacgtgtcctacgggaccaagagagacccttcctctctccttcctgggaccctaggcgcggagcgaccaccgcgcgccgaggctgagacctgctcccgggtctcaccgggcccgcgcc

SEQ ID NO: 195717 - DNA, 122 bp, Homo sapiens
tcagcttcacccacctcccagaggaaacgccagagccgccgtgattcctccagccgggcccgccgcgccgctgccaactcgcacagtgcctcatagctctgctctagcttggccacccgctc

SEQ ID NO: 195718 - DNA, 122 bp, Homo sapiens
ggggttgggggagggcagccacctccaactctatcccacaggacaacgaagggttaacgacggaggaagagcgggctgtccaggccaggaggccccaaggcagggagaaagagaaagccgtg

SEQ ID NO: 195719 - DNA, 122 bp, Homo sapiens
ggcgcctggggctcagagaggccaagtgactcacccaaggtcacacagcttagcagtggccgacccgggattggaacccggggctccggaccccgcggcggccgtttctcgaagatacccac

SEQ ID NO: 195720 - DNA, 122 bp, Homo sapiens
tggcttggccttgcacccctctcccctcacagggcagcttccggccccacggccttgttccgcaacactaaggcagccggggcagccattggtggtgtcaagaacatgctcttggagtggtg

SEQ ID NO: 195721 - DNA, 122 bp, Homo sapiens
ctctgccactcttctccagacctttaatttggtctgtaacttgatgcttcactgaccctacgctatccctgccacgctaactcacagaggaattgttggcactctgaattgaatttttttcc

SEQ ID NO: 195722 - DNA, 122 bp, Homo sapiens
ttgggatgcgataactcagtgccctcttgcagacttgcatagaaataattactgggttgtcgtggaggggacacgagacagagggagttctccgtaatgtgccttgcggagagaaaggtcca

SEQ ID NO: 195723 - DNA, 122 bp, Homo sapiens
caatataaaataaaaatttggccgggtgcagtcacccacaatcccatcactttaggaggccgaggcaagcagattgctggagccccgagtttgagaccagtaaaaaaatctttttttttttt

SEQ ID NO: 195724 - DNA, 122 bp, Homo sapiens
gatccaaggcgcgcggggaagacggccacgtaaagatacggcgccctggtgactccgcctcgcccaatcagagcccgcgcaacccctgaaccaatcctgagccgcgaccctgggaggggcgg

SEQ ID NO: 195725 - DNA, 122 bp, Homo sapiens
accaggcgtaatgaaattcctttgaagcaggacttctaaccctaatttaaaagcagtattcggattattcacatcatgtattttccacaaatggatcctcggctcaggttttcttattttat

SEQ ID NO: 195726 - DNA, 122 bp, Homo sapiens
gtctccgggccaagcccatgatgccagaattaatatgtaagataaacagacccctggaggcgctgatcgcattctccaggcccaggtcagaggtctgctctttaggtgtgagaaaaggttta

SEQ ID NO: 195727 - DNA, 122 bp, Homo sapiens
ggaaaccttaggagcaaataaaccgtgctttcatgttttttaaatggtgctttccttacccgagaggtattttgcctgttccaatcaaaccaccccattcaggtccatcagcctctgattaa

SEQ ID NO: 195728 - DNA, 122 bp, Homo sapiens
gcccctggaggagggggaaagctgcagagggaggggaaaggatgctgtttgattacatttcgagctgtctgcaaagctcttagatgctgtcactaccctgcaagtcggagggagcgaattca

SEQ ID NO: 195729 - DNA, 122 bp, Homo sapiens
gcaggactttggcagaggctgggatcccagaccacagagccccacaagctgatgcctgttcgcggatgccacagccacctccgcggcaggcgctggggaggggaggggatcacagtgctgga

SEQ ID NO: 195730 - DNA, 122 bp, Homo sapiens
ggcctaccctggcatgttgaatgaggccacagggctgacaaagtaggtcccaagccagtgcgggtgcagaaaggggaagctttctgcagaaatccaggtggcatctttagagtctgtatctg

SEQ ID NO: 195731 - DNA, 122 bp, Homo sapiens
gttgggattactggtctggatcactgcgtccaggcagtaagtttttcttcttttgagacacggtctctctccgtcacccaggctggagtgcagtggcatgatctcaactcattgcaacctca

SEQ ID NO: 195732 - DNA, 122 bp, Homo sapiens
tccctggcagcaaatgaaggtatgtcaggaacacccctctcctggcaactagccacctcccgggtgtcccctcgcagatcctctgagtgttgagctccgggtctgttatggccattgctctg

SEQ ID NO: 195733 - DNA, 122 bp, Homo sapiens
tttctgcagggagcggacggcaggcctggggcgtgctgcccgcttacctcatgaactgcgcgtgcactgactccacattacccacacgtgggaacaatgcagcagatgtcttttttggatcc

SEQ ID NO: 195734 - DNA, 122 bp, Homo sapiens
ggaggctgacccaaaactgaggcccggtgcatcatccctcatgagaggcaagcccagaagcgccacaatactagggtcccccttcaggagacagagacccccaggacacagagggcccccaa

SEQ ID NO: 195735 - DNA, 122 bp, Homo sapiens
atgttttgtaaaggataaaatcatacaagccaagaaagccttcagggtttgacaaacatacggagagattcttttaatacaaatagggaatctggactgtgaaaattaggtgttctctgttc

SEQ ID NO: 195736 - DNA, 122 bp, Homo sapiens
cagcctgcagcccggactcggccccgcctcccggaccctggacccctccccaagtgggcccgtcctaagttccgcctcccagagtccgcgcaccgcctggccatgtggtacgacatagtcaa

SEQ ID NO: 195737 - DNA, 122 bp, Homo sapiens
ccaaccccagtcaacctgcacacttcaatgagcgtatgtgctggaacatccatgatatcccgacccttccgggagcttacaggttaagaggcaaacagatctagacaaataaattacaccac

SEQ ID NO: 195738 - DNA, 122 bp, Homo sapiens
ctctgacccacctgtttttctcagagtggattaacttcacatcttcaggcgtaggtaatccgcctcttgtaccgaaaatgttatgactgcgacgttgtcacagcagcacacatttgcaaaac

SEQ ID NO: 195739 - DNA, 122 bp, Homo sapiens
gtgcgccaggcgtgcgcggcggccagcagcagagacaggaggctggcgagcaggctgaagcggcaggcggccggcgggccccactcctgcaccgtgaagcgctcgcgctcctgcaccgtgag

SEQ ID NO: 195740 - DNA, 122 bp, Homo sapiens
tggccctttgtcatgtatctggcaccccataggcgctcaaatggtgcaacgaggatgccacggccctaacctgcaaacacgtttccacgacttcacgccggaggcagccaaaacgcttcccg

SEQ ID NO: 195741 - DNA, 122 bp, Homo sapiens
gagggcacggagcacgcgcagctctgcggtcgacgccgggccgcccccactccgcttctccgggttttccgtgaagctccagccaacagcggccgtcaccggaaaaaacggggagcgaagtt

SEQ ID NO: 195742 - DNA, 122 bp, Homo sapiens
tcgagggctgcgcgcaccctccccgcccgcctgcccgcggttctcctcctgctcccggagcgccagtcgccccaccccgtgaccggctccccgtcttgtcccgcaggacccgcccggacggg

SEQ ID NO: 195743 - DNA, 122 bp, Homo sapiens
gtgaggcgcagcgggagacgtgggagggacggtgagggtgcagccctcggagctcagcctcgcctcggagggcaggaagggtctgtgctagtgggtgggggatggacaggcagacgggaggt

SEQ ID NO: 195744 - DNA, 122 bp, Homo sapiens
ttaaagtgggtcacaggacaaggcagagtcaatgtgagagagtctaaacaaagatatgaacgtgtagaggtgtgattcattgaagccatctctgcagatgctacaacatatgatgataccat

SEQ ID NO: 195745 - DNA, 122 bp, Homo sapiens
ctccacagcgcccacctgtctccgcccctcggcccctcgcccggctttgcctaaccgccacgatgatgttctcgggcttcaacgcagactacgaggcgtcatcctcccgctgcagcagcgcg

SEQ ID NO: 195746 - DNA, 122 bp, Homo sapiens
ctggttgccaccgccggtttagaaatcctattctcgcgccggggactggatttttccctacgtcagcgcagctaggcgatgtcgggagcgagctcggaccgagggctcagttgcgtcagtgc

SEQ ID NO: 195747 - DNA, 122 bp, Homo sapiens
tgaccgcggccagggcggccccctcgccctgggatgcccggctccccttcccccgccccacgggcacttctgctgcccgaggtcctgggtctggaggtttaggctattttggggaggacaga

SEQ ID NO: 195748 - DNA, 122 bp, Homo sapiens
gaggttgaagtggggggtagttttctaggccgttgccagggcgatgccacctgagctgggcgccaggcacctgtcgtctggggaacagtgcaggcggggaccttcccccgggagctagcggg

SEQ ID NO: 195749 - DNA, 122 bp, Homo sapiens
cggggacccaagacgcgcctctgcgccgcctccgctgctccaacatggccgcccgctgcgcgccggaagtgcactgcgcttccgcttccgggacccagcccgccctaccgacccttgacccc

SEQ ID NO: 195750 - DNA, 122 bp, Homo sapiens
aggtcactctgaaaagctcccaacatctgctccattcgctgtagggagggtagatgttgccggagtgctatagggtttgtaggggataagtgggccaccaaagactctttgtgaagtcttca

SEQ ID NO: 195751 - DNA, 122 bp, Homo sapiens
cccgccctctgctcttgcgattggctctccagtcccgggcaggactgcattggtttcagccgacctcactcattgctttggctcctactattatctaagccatcaaaggaaataattccatg

SEQ ID NO: 195752 - DNA, 122 bp, Homo sapiens
cttcaggagtgagggaaggaagccagcggctggcttcctcatggccggagaagatccgcccgcgtcccgtggacacaagccgcctctaacgggccaagccgcagagagagccgcaggcgcgg

SEQ ID NO: 195753 - DNA, 122 bp, Homo sapiens
attgctgccggcagatatgagctagtgaatgatagtagtggttctcaacaaagatctcaacgagtctcaagaagacaggcaaaagacttacatcactggccattgagatcagtggcaaagaa

SEQ ID NO: 195754 - DNA, 122 bp, Homo sapiens
gggagggggcgacagccctggcttggtgctgagccgtggcgctgcggaacctctaggagccgggtggccggtcagtgcgggcgttcccggaaccgccaaactttctccgccaaccgaagtta

SEQ ID NO: 195755 - DNA, 122 bp, Homo sapiens
tcggcacgccttggcgcgagtgccacgtcgagaggcgtcggcggggagcgcggaaggggacgctggcccccaggcccaggtcaagcgccttggtttgcccactaggattgttttaagaaaat

SEQ ID NO: 195756 - DNA, 122 bp, Homo sapiens
agagcgtgtgtcgcgacgtctcggtgcggacggaaagttgtgcatccacccccgtgtgtgcgtgtgtcccgtggggtctgggcacccattgtatgtcggtcccggactttaaggttggaggt

SEQ ID NO: 195757 - DNA, 122 bp, Homo sapiens
ggatctggggcccagttttgtgcctgagtagggagagcatttcttctccatcttgaagagcgacatggatatgtggtctccagcaggggcccaggcccagcgagggtcaggaggaaggaagg

SEQ ID NO: 195758 - DNA, 122 bp, Homo sapiens
aaccgggagccgggtgagctggaaactggggagcgctgctggggccgaggcctgccttggcgaaggggaggggtctaccctcagcaaccctcccccggcctttttgggagcgggtaggaggc

SEQ ID NO: 195759 - DNA, 122 bp, Homo sapiens
ttcccttgtcccatcacctgctctctgagccaaaccttcctgccttcctcttgcaagaatcgttgtggttccatggggcccccagataatgcaggataatcccccatctcagatttttagct

SEQ ID NO: 195760 - DNA, 122 bp, Homo sapiens
attctgtgagtctataagcgactgcactgctgtcagaatgactcctcggagacatcaaaacgtggagggttttattatatatagcaacgagaagagaaaaggacacaaagaaaggagcctgt

SEQ ID NO: 195761 - DNA, 122 bp, Homo sapiens
ccggaagaattgcactggactgtgggtatcctggtctccgcgtgtgtgagtaccgcggcgcgaggttagtggtagctgggtgcagacgccgtggcgctggtgagtaaaggcagaggcgaaaa

SEQ ID NO: 195762 - DNA, 122 bp, Homo sapiens
atttcacgcgggattgtgcacacgcatgtccaccgtgccttccacgcgggatcgtgcacacgcatgtccacgaactcctgcacacctacacccaccaggcctgcccatgcgatgcgtccctg

SEQ ID NO: 195763 - DNA, 122 bp, Homo sapiens
ccaagagcatacggaacttggccagctggttcgagcggtgaagccgcgctcccctggaagcgacccaggggaggccaagttgtcagctttttgatcctctactgtgcatctccttgactgcc

SEQ ID NO: 195764 - DNA, 122 bp, Homo sapiens
ctgtccgcacgatggaacacatggccatcaaaaggcatgaggctctgacacgggctatgacgtgggtggaccctgaagacacgatgcgcgtgaaacaagctagtcgcagaaggcctctagtg

SEQ ID NO: 195765 - DNA, 122 bp, Homo sapiens
ccccgcgctgctgttggggctgttgctgctgcgtcgccggcggttgaggctgctgctccccgtgcccgttctcgtcgcccgcgccttcctcttcgtccccgagctcatcttccccttcctgg

SEQ ID NO: 195766 - DNA, 122 bp, Homo sapiens
caatgggaatggaagagagagctgaaaagggacaagtgcaggaattagcaaatggtacttcggtgaatggacctcagtgcatttaaaatagcaattgatctgctcttgactcataccctaag

SEQ ID NO: 195767 - DNA, 122 bp, Homo sapiens
cactggcaaccgcgcgcgcgcgcgcccgcgcctgcatttctgtctccttgggcagcacttcgcccaactggccctgaaactgaggatgggaaagctaaaagctggctgccgcgcgagctcgg

SEQ ID NO: 195768 - DNA, 122 bp, Homo sapiens
tccagcctcggtgcccggaatcctggatctcggcctggcgctccggaagcgaggcagctccgtgccccagcagggacggggaacgcttggcttgagagatcacatttctgggtgtggagagg

SEQ ID NO: 195769 - DNA, 122 bp, Homo sapiens
ttccactaagtcaagaaccgtggtcggtctcagccactcactcagcgccactctatgctccgaagtccgtgtagcaccaccgctccccgtgttctctgagctggcttagcttgaaggaacct

SEQ ID NO: 195770 - DNA, 122 bp, Homo sapiens
gagttcagcctgacacacaggccggcctcagtgagagggagtgtctgcctccctggcatccgtgacccatacggtgggcgcctgttctttagaacaacttgctccttccgtcgttggcttgg

SEQ ID NO: 195771 - DNA, 122 bp, Homo sapiens
aatcattttggagctgctgggagtctggagatggggtagggaatgggaaaagggggagggcgccttcagcttccaccagaccctccttaaggcagagtgtccttcccagcagtagagccttt

SEQ ID NO: 195772 - DNA, 122 bp, Homo sapiens
aggactgaggaacctactttgacgcatcattatcatacattgtatttttaatcctcacaacggccctgcaagatcggccctgttcttaccaccccccacctccactgctttgaggatgaggc

SEQ ID NO: 195773 - DNA, 122 bp, Homo sapiens
tttgggagcgaatccgtctcaggttccagccaaggtgtagggcgaggggattggcccgtgcgtcgggccaggctcagtaacgccttctccaagtggatggcggggtggacacgcgtcccggc

SEQ ID NO: 195774 - DNA, 122 bp, Homo sapiens
cgcggccccctcgggcttgctgggcatctgctgcagcagctggggtgacaggctgcggtgcgaggtggccgtggagcagacggcccagtcgggagcgctggcattgaggttgttgtcactgt

SEQ ID NO: 195775 - DNA, 122 bp, Homo sapiens
ggatctgaagcccagatgtagggagggttccctgggaaccagcagtctggagatcttggccgtgcaccctccagcacagaacccatggctctgccctcctcagacagtgctgagatgactgg

SEQ ID NO: 195776 - DNA, 122 bp, Homo sapiens
ttgtctccttccactttcttccacctataaataatttcattgaaatgaattctgtcgtcacgagactctggaagggtggagatttataaacaagaatagtgggggtgtgttggtatacatat

SEQ ID NO: 195777 - DNA, 122 bp, Homo sapiens
attgtctgtggttctgggggccaagccttgtcaggatcatcacgtaagggtgtgtatgtgcggaagggtggtggctgaggctcaggattcaaggactatggaccatggtgggaaagtagaga

SEQ ID NO: 195778 - DNA, 122 bp, Homo sapiens
tgatgtctgtatcttttgtttttcatctctggatctttaaatctaattatgaagccagaacgagccccctacaagcctgtctcttacccttcaggcggcctttaaacgttcctttgtgcatg

SEQ ID NO: 195779 - DNA, 122 bp, Homo sapiens
agccacacctgactcgggaatatctggactaaccctagttctgcggccgagaggggctaacgtacgcaccaccagcccctagacaaacacaaacgcatgtgagttttaggttccaccgttgt

SEQ ID NO: 195780 - DNA, 122 bp, Homo sapiens
aggggagaatcgcttgaagccggccttggagattcatttcttcgccttgctattgttcttcgtctcctgcatcatcagttttcttcctgtcttaggtgaagagattgaggtgaggcaggaga

SEQ ID NO: 195781 - DNA, 122 bp, Homo sapiens
ggaggcctagtcgccaaatggttggccaatccgccgcgaaggggctgaagcaggaagcggcgatagtcgtcggtaattggctgcgctggaagcctgtctggactgtaccacctcagtaggag

SEQ ID NO: 195782 - DNA, 122 bp, Homo sapiens
attgcactctgctgaagacaaaaaaaatctaatatttgcatttatgtccacagtacctagcgtagtgcccagaaaataaaaggtgctctatatgtttattgaatgaatgaatagagcaatat

SEQ ID NO: 195783 - DNA, 122 bp, Homo sapiens
ggtgaccacggcgtcggccccgctccagactccaggcgctcccaacccagcccaggtgcccgccagctccgacagcccaagccagcagcccaagttacagatgagggtccctgctgtcaggc

SEQ ID NO: 195784 - DNA, 122 bp, Homo sapiens
ggtgggccggggcagtgcacagggagggcttgctaactctcgtgggcttgccctgagtctcgcgagtgccagcattgccccgcccttggatgggctcctgctttccagcgtctcaccgtccc

SEQ ID NO: 195785 - DNA, 122 bp, Homo sapiens
ggccggcaggggtcgcgctccccccgctcagcctcccgggcgggtccgatgcgaagccctcgcttcccgcgggtcccggggccaggtcatttgcatacactttgcattcatttgcatatcgt

SEQ ID NO: 195786 - DNA, 122 bp, Homo sapiens
gaatcaggatccaatccccagcagtagagcttccaaatcccctttctctgaaccatcccccgaggacacagaataacaaaaatgacaaactgagtgaattgctgattttccttaaaagaata

SEQ ID NO: 195787 - DNA, 122 bp, Homo sapiens
acacagtattaacggtttcttgggtcatttatttcctaagaacgactctcctgccagccacggggcatttctagccatccgccagccctggatacccttctggagtcaggcgttctctgtgc

SEQ ID NO: 195788 - DNA, 122 bp, Homo sapiens
ccacggtagggcagggaggcagggacactgttgcctgaggtgtcctgcaaataaatgactcggctggggctaaccagagttgaaggctgagaacagacagctgccaagagtgtgacagggaa

SEQ ID NO: 195789 - DNA, 122 bp, Homo sapiens
cacagggggcttgtgcggcttctacaatgccaacgccagtgacgagttctgtctccccaacggcaagtgcacggacaacctggcagtgttcctggaaagctggacaactttcgaggagatct

SEQ ID NO: 195790 - DNA, 122 bp, Homo sapiens
ctggatgcccagtgtgtatgcatgcctgtggcgctgcgtgagttatcggggctctgatagcgtccggagcgggttcgagggtctcctccaggaactcgcagaaattagagggggtggggagg

SEQ ID NO: 195791 - DNA, 122 bp, Homo sapiens
ttaggcccttcccaccactctggtcactgctgggtactgggcggtgaagggtcatcgcttcggtagattggggaaggggaatgaggtgatgtcaagagggatgcccagtggtactgcttgga

SEQ ID NO: 195792 - DNA, 122 bp, Homo sapiens
caaggaaaggagcgagcgagggcgcagatgccctttggtcaagtactccccggatgttcccgactaaagcgtctccaaatgaacctgcagcctgcggaagccggggacacattcatagacgc

SEQ ID NO: 195793 - DNA, 122 bp, Homo sapiens
tcgtcatcatcatccagcacgatgatgctgttagcggtggccataggggatcaaatcccccggagggaggaagtggtggggatttcagaattcctgctggaaggggatggggcctcagaatg

SEQ ID NO: 195794 - DNA, 122 bp, Homo sapiens
cgtaagcgaacataggcaggaaggacttgagaaaggaactggcttatgattataagaccacgcccgtctattgtgtttctgtccggagctgtggagttagcgtcagaataattcgtagacgg

SEQ ID NO: 195795 - DNA, 122 bp, Homo sapiens
ctgagctccgggcagctgtggaagccagggccaggccacaccagctgctgtctggttccccgcagggcacagcaggcaggaagtttgcccggcagccggcccgctcccctaactaggtcgtg

SEQ ID NO: 195796 - DNA, 122 bp, Homo sapiens
aaaaaataatattaataaaaagaataaaatccggcgctgcgcggtgacatcagtctctgtcgttaatgcctcgcgccggctaccgtcctgcgcagtctctttctgaggacccccccccccac

SEQ ID NO: 195797 - DNA, 122 bp, Homo sapiens
tgtcccgaagtcccgcgctgctgggagcggtagcgcgtggctgtacaggcgtattttaggcgctgatttgagaggggacttttagaatccctgagtccttagggagtctggcgttcaatgcc

SEQ ID NO: 195798 - DNA, 122 bp, Homo sapiens
tggttatcgttgttttccttccatagcctttgaaaagcctagttttactcctaaagaaaacgtagtatctcttagtatccctaaaacatttgagttttcttatcctggagaacctgtccctg

SEQ ID NO: 195799 - DNA, 122 bp, Homo sapiens
ggagggaagattcccagtgggcgtgagaaaggcaggcggctgcccaggagagggcagcatcgcaccacctcccggaggagacgctactcgggagagctgcagccttctgagaggtgcgaagg

SEQ ID NO: 195800 - DNA, 122 bp, Homo sapiens
tgtacaggagactggacctggggcagcctcagaatgcctggctgcctggagctctcctcgcgtgtccaggcggcctgcttggtctccctcctctcccctcttaggtgccggggcgggcaccc

SEQ ID NO: 195801 - DNA, 122 bp, Homo sapiens
cagacggggcaaagggcagccatcaaaggtgtctgggacgagcccggcggggtaatgggccgctagggactcagtctggcccgggtctcagccggggcagaaggcagccgggcgagggccgc

SEQ ID NO: 195802 - DNA, 122 bp, Homo sapiens
gggttcattcagggagctgcgggcgagtcaggtgggcacggggaccgcccacaggtgcatcgcgtgtcctcagccgcttcccctgcccaccttctgcgaccccttcccgcccccaccctcct

SEQ ID NO: 195803 - DNA, 122 bp, Homo sapiens
ggtctgcggtcagtgtgagcgagccctgtgcgggcagtgtgtgcgcacctgctggggctgcggctccgtggcctgtaccctgtgtggcctcgtggagtaagtacttcagtccctggagctgc

SEQ ID NO: 195804 - DNA, 122 bp, Homo sapiens
ttctacttccaggtcgggggggggcgggtccaatagaaaggcggaagccagtgtcccaggcgttctcacgcccgcaacaattcctgagtagggccttgcttgagttcttcggaaagtctcat

SEQ ID NO: 195805 - DNA, 122 bp, Homo sapiens
ggcccgttacccccgcaggtagggggggcgcacgggcccccgggcattgatgtgcggcagcgcgcccgccgccagcttctcactgagtttctggttcgccagctccaggtggcggcccttct

SEQ ID NO: 195806 - DNA, 122 bp, Homo sapiens
cataaaggttggttaacgggatcgtgtttggctgcaacgtggagctcccgggtcgaacggcgagacagctgcgcgtccccgagccgccgcgcgcccggtccgccggggcggagtcaacgccg

SEQ ID NO: 195807 - DNA, 122 bp, Homo sapiens
cccagccctcttcggggagttcagcagcagcattgggccccgccccctccgtcccaggcccgggctccccccagccccgagctcagcggcagcctcaggccccgcccccccggcccttaaca

SEQ ID NO: 195808 - DNA, 122 bp, Homo sapiens
ctctccacgtgaccacaccccctcccacactggaccgccagggacctgggcaccatgcctcggccacgccagcctggggagcccccactttgcgctcagcccatctggccttgcgccccacc

SEQ ID NO: 195809 - DNA, 122 bp, Homo sapiens
taaggaatattcactttgccaacaaatatttattgagtgcctgctatataccccttagcccgtttaaatagccgtgggattaaaaagataaatagggcaggatttttttttttcttccagga

SEQ ID NO: 195810 - DNA, 122 bp, Homo sapiens
aagtcccgcagggtggggtccccgcctgcgccgagagggccacctggtcgagagaacaggcgacacggaaacctgagaaactcctctgtctggtgcacctaaccctcttcctcataaagtgc

SEQ ID NO: 195811 - DNA, 122 bp, Homo sapiens
cggcgggcggcggctgcggggaggccggggacgtgggcgacggcgcgggcgggaggccgccgcccttctggggctcgccttccaccttggtctgcttgaccagcgggcccttgcggccgcgg

SEQ ID NO: 195812 - DNA, 122 bp, Homo sapiens
gagcgagcggaggagatggctggcacctgggaacgctatgggtaaaacgcgccccctcgccgcggccctggaggtcgagcgtcgtagccctcgcagggctagtctccggctccggccgcttt

SEQ ID NO: 195813 - DNA, 122 bp, Homo sapiens
tgctgcgcagacaggggcaaccctggcctattcttctgcggtgggctaagcggggctgggcggcctggaaccgaactgcctgatcaggccacgtttgtcatcagaggcagaaatcaggagcc

SEQ ID NO: 195814 - DNA, 122 bp, Homo sapiens
cttctcctgcaacgaagcgggaggggagcggggcgagggtgcagcaaaagctggatgggacgcggtatgggggactcctgccaaacaattcagtgttcccctcccaggatcacccatctttc

SEQ ID NO: 195815 - DNA, 122 bp, Homo sapiens
tcattttttataattcagtttgaaataatttcaaatttaaagaacaccatatccctttcacgcagatttccctatattaatattttaccacatttacttcttcatcctctccatttctctct

SEQ ID NO: 195816 - DNA, 122 bp, Homo sapiens
atgtgcacgacagtggaacggaggcctctccaagaggcgggggcagtgctgtgggcttcacgcctgctgtggcacgagatcctccctgcacgtccacccgtgacagagcagatgatgctcca

SEQ ID NO: 195817 - DNA, 122 bp, Homo sapiens
ggcttccgttgcgctggatgctgacttgccagggccactcgccctcctgcgtgtcctgcccgcccaccattcggttcagcatcctggggcgaccacaggctgggggagcatggggagcgggt

SEQ ID NO: 195818 - DNA, 122 bp, Homo sapiens
cagcagaacgcggggtcacacttcgacccctcagagaacgatcgctcccaatcaatactacgtgctcaggagctacaactgaagaagcgtgatcacggccttggcatttagggcaggcacca

SEQ ID NO: 195819 - DNA, 122 bp, Homo sapiens
cctaagaaaaatatttgcacagccattttaaacaaagaaggcattaagtagtacatacatcgtggtcaacgtttctcaccattttatagctagcttaaaaaatgaacacagaaggaagtccc

SEQ ID NO: 195820 - DNA, 122 bp, Homo sapiens
atttctgtttaatatttttggacctcagtggaccacgggtaagggactcatatgccctggcgtgggaggaggttcccgtctagggggtggcatggcctgaggggtgggtcaggcaagtgtga

SEQ ID NO: 195821 - DNA, 122 bp, Homo sapiens
cctgcgggtggttttcctgcctccctttgccgttttgctggttatcaaagacctttgctgcgagacccaggccggcccagcccagcgcctcccatcctcctgtgaagtcatccgctcagttg

SEQ ID NO: 195822 - DNA, 122 bp, Homo sapiens
aggggcgggacaggggtagggtggcgcggtggctgggcgcaaaggtcccgcagtgggccacgcaggcaccgggctgacctggcaaaactttggcgtctctgaaaacctctggtaaccagctc

SEQ ID NO: 195823 - DNA, 122 bp, Homo sapiens
ccgcccctctggtgcatttccccgctccaaccacctcctcaaactcacggcaaagggatgcgagagctggaactcttaccaggcctgcggaaactcagccctccggcagctaatcccgcccg

SEQ ID NO: 195824 - DNA, 122 bp, Homo sapiens
gggacagggggcctcggcctgtagcgtcacgtccgccagggttacctgtggggctgggagcgaaccgcactcgcaccgcaaccccggcatcagtgcccaggttggcctcgcgccgtcctacg

SEQ ID NO: 195825 - DNA, 122 bp, Homo sapiens
ccctccccccttcacgtagtggctatttcatcccctccgagtgcattccaagcgaaagtccgagaaccactgctctcggagaaaccagaaacagttaagtggaaattggcaagtctctttgg

SEQ ID NO: 195826 - DNA, 122 bp, Homo sapiens
agcaagtgcaacgggcaagagcaagcttaggagtaaacccacggaccgtcgggggtggctcggcgtgctctgcaggtgagctggtgaagaagtgtttgtcacggcctgtgcacagctgtaca

SEQ ID NO: 195827 - DNA, 122 bp, Homo sapiens
tgcctctctctcctctctggtcctaggtctgccctcaccccttgtcaacggctgggagcacgtaaactcttgcaaattatttaacctctctgtgcctcagtttcctcactataaatcgtgga

SEQ ID NO: 195828 - DNA, 122 bp, Homo sapiens
cacttccccacacctcctgctgtccccctctccgcaggtccagccctctcctggtggccgcgtttggcgcctgctctctcaccaggcagtgcaaccaccaagccttccagaagcacggtcgc

SEQ ID NO: 195829 - DNA, 122 bp, Homo sapiens
tcaatgaaacttgcgaactatgaatatccatagaacagaatcctgtgcagctgtacaaagcgagaagttctggggagccccacccaagaccacggcccaggcccccactggttcaccgcttg

SEQ ID NO: 195830 - DNA, 122 bp, Homo sapiens
caatagcaggcggacgggtgggcgggcagctctggggccgctggccttggggcccacatccgggagcattgtcaccgccactcacgagggcacacaaggagggctggggaagagagaatgca

SEQ ID NO: 195831 - DNA, 122 bp, Homo sapiens
gcgaagacggtgtcccctgagaagctgctggagaaagcgttcgccatccgcctcttctcccgcaaggagatccagctcctgcagatggccaatgagaaagccctgaagcagaagggcatcac

SEQ ID NO: 195832 - DNA, 122 bp, Homo sapiens
tgggggagttggggacaaagccgggctagagtgtggcagcggcttcggcctgtgctttctcgcctgacaaattgcgaaaggggatgggggttggagagagaactatcgagagagaaagccgc

SEQ ID NO: 195833 - DNA, 122 bp, Homo sapiens
ccactcactccttctcaatctcctcagcctgcgggtgcttgagccgccgggccttgtccacgtccaggaagaggtccttgagcagcacctcagcctccttcaggctgcggcccgtctcctgc

SEQ ID NO: 195834 - DNA, 122 bp, Homo sapiens
tcgtagtctcccttgttttattttctcaagtttttgcaaaattcttacataaccgtctgccgtttttatagggcagtgtttctgagccgggtgctctgtccatacatctcctcttgagaggg

SEQ ID NO: 195835 - DNA, 122 bp, Homo sapiens
gcaagatgaggacgtttacaaccctatcttatccatatggacaggcgccttccatgcatccgtttataggctctccacgaggggcgcattccattcccagagctatgaacatctgcttttct

SEQ ID NO: 195836 - DNA, 122 bp, Homo sapiens
agttggtggcaaaatctgaactggatactcacggagggcccgcgcgggtgctgtgccgtccgctgctctcttcctcctcaccgagaactgcccctcgccggcggactacaagagggcagccg

SEQ ID NO: 195837 - DNA, 122 bp, Homo sapiens
acaactctggctatgcccttggattgcacaggcaagattaggaaattaataacatagttgcgctccatctatcttttggaaaacacatctaatttttccccttagcttcatttttatgtttc

SEQ ID NO: 195838 - DNA, 122 bp, Homo sapiens
aggggtgcttgacaaaaacctgttcttactttgctgagactgtagaggtccaagatccgccgttctacattgggaatctttaaggaggagccctggatttcccagaatttggcaatctggtc

SEQ ID NO: 195839 - DNA, 122 bp, Homo sapiens
gggagcggacaccgaggggcgcggcgggatggcaggcggtgtccaaaagcctctgaaagccgcagccgggcgcgagtcgctgaccgaccgggaggccccgatctgtcccagccaaggcctcc

SEQ ID NO: 195840 - DNA, 122 bp, Homo sapiens
gcggggtaccgcgcgggatgtcgcgggggccttcagtcccgccgctcacacatttctccgcgcgctcccgtcccacaaggggcagctgccggagtttcagtggacctctctagacccaggcg

SEQ ID NO: 195841 - DNA, 122 bp, Homo sapiens
cctgagtgtgggggctgtgggcccgcttggccagttgaggcagcagaatgcacctgcccccgaggtgagacctctgtcctccccacctgagtgcgggggctgtgggcccgcttggccggttg

SEQ ID NO: 195842 - DNA, 122 bp, Homo sapiens
gcacaaaggcctccttgtttcgtggttcacaaagtcagaactggatcataccagggcatacgggttctgtttcaaggctttgtaaagctgctagggttgaaataggtatttttggtgtcgga

SEQ ID NO: 195843 - DNA, 122 bp, Homo sapiens
cttggaagcaaaaagttaaaatagagaagcagaagcatgttgcctattaggaccaatgtgcgaatagttaaagccattgtttactatgaggaactccaattgaaaataaaaatgaataaata

SEQ ID NO: 195844 - DNA, 122 bp, Homo sapiens
ccgagacccaggagaatgccgcagctctagcaagagaggttgccaggagcctggcctgtacgcctccccgacagtagaggacaggacacgggacagggctgcgccgaggcagctcacggagc

SEQ ID NO: 195845 - DNA, 122 bp, Homo sapiens
atcattacaaaatggctgaaccatgcgcggacagcctggaaaaagcagtcattttcaatacgagttttaaagccttcaccaagtcccttgccaacccagctaatagaagggaggcttgggaa

SEQ ID NO: 195846 - DNA, 122 bp, Homo sapiens
cgcggagttccaggccgggcgctggggaaggaggtcccggggacgctgctgaaaagagagcggccagcccaggcgcggggccaagcctattgccaaaaacatattaccctgcgacattctgt

SEQ ID NO: 195847 - DNA, 122 bp, Homo sapiens
tgaagttctagccctggagactcagattagacaaataatcactagcctggcatccagagccgcgatggtcagaagagcaattttatttaagtcactttctaataggagttgaagcgtcttga

SEQ ID NO: 195848 - DNA, 122 bp, Homo sapiens
caaccacatccaggccagcgagtgccgctctccctgcagcgggagagcccgaggcagcaacgctcttgcacccaggtgactgactgcacgggcttcctctgagcagcctgaagttggctccc

SEQ ID NO: 195849 - DNA, 122 bp, Homo sapiens
ccggtagagccacgccggatggtgacggcggcgtccggggccccacagtgcgggctcccccgaaaaagtttgagaaagccaactcgccaggccttaacatccctgggatcccacgttgtgga

SEQ ID NO: 195850 - DNA, 122 bp, Homo sapiens
tctggggtcctggagggactcatgcgtttacttaaacagccatagccgttgaacggaacacgatgccacaccacagtgggtcctcaacagatatttatggaataaataacgcaacgcaatgt

SEQ ID NO: 195851 - DNA, 122 bp, Homo sapiens
caccaactgtctccgggaccctcgcatggagcagaagtcaccgactgtcgccgggaccctcgcacggagcagaagtcaccgatgtctccgggaccctcactttggaagcagtgccctgccct

SEQ ID NO: 195852 - DNA, 122 bp, Homo sapiens
gtgagtatagggagctgtatgtgcatggagttggggagggcaaggggatggtcaggaagtcgtcctttaagctgggccctagagcatgggtaagggctagcctagacctaagaagtagaaat

SEQ ID NO: 195853 - DNA, 122 bp, Homo sapiens
agacagctgagattcggaagggcaggcgactccacctagtcacggggacgctctttttgacgctccagggaccgcagggtctgggaaagttcctggttactccggcgaccggccggccgtca

SEQ ID NO: 195854 - DNA, 122 bp, Homo sapiens
actgtcgccaccttcctcggctgtgtaaggcgagcacaaaggagtctcccacctgagatacgatcactccttttctttcccgtacagacatctctgtgggagcgatgctttcacataaagcg

SEQ ID NO: 195855 - DNA, 122 bp, Homo sapiens
cttccaatgtcgccgggggtgcccaccacccctgtgatattgatcctaatatccagggggcgagaggatattagtctgaatattgcaggaggtgtacactccctagggttattgttcctaat

SEQ ID NO: 195856 - DNA, 122 bp, Homo sapiens
catcattttctattaagtaaaaagacagttctatctccacctgagtacgtgcttgttctccggaaggaaatgtgcagtgtgatggcacctcagtgtatggggtcagtgggaaaacttcatgc

SEQ ID NO: 195857 - DNA, 122 bp, Homo sapiens
ctcattggatccaatttcaatcccctcggttaactgaaagtgtgttgacttccacccagccggcaggaccctaagggcgcctggagcagtctggtgcgggtcctggctgcagcatgcccagc

SEQ ID NO: 195858 - DNA, 122 bp, Homo sapiens
gaagtgcggctgccgaatggtgtacatgccaggtgaggggctggggttttcgtcccatggcgggcagggcccagggagctgaggctgcttctaaagccatctccccggtacccgcaggcgac

SEQ ID NO: 195859 - DNA, 122 bp, Homo sapiens
cccccccacacacacacaaggacactgtgtagggtcactgttactgtcactccccgagcacgcacagtcaccgctcagccgcaacccggcgctccctctcgcgaagccacaccccctgcgca

SEQ ID NO: 195860 - DNA, 122 bp, Homo sapiens
ggatggtttactatttgataatgtttaattccaggagaacattcaaatagattgttgtaacggggagcaagtaacacatttacatgacagaaaatgaaaccggctctatactatcccaaagc

SEQ ID NO: 195861 - DNA, 122 bp, Homo sapiens
ggcgggagcggaagtgattcagagcgcccccagagcagttctgctcttcgcactgcagtacgcagtcgcggtacaccggctcacggtcgccctgggagccgctcgccagcgccgctgcccca

SEQ ID NO: 195862 - DNA, 122 bp, Homo sapiens
agtgaataatcagtgcaggcaacaacctgacaatactacattcctcaaaccaaaagaatgcgaatgttcaaagaagtgttggctaagcagaactcagtccattttccacaatacgtagctta

SEQ ID NO: 195863 - DNA, 122 bp, Homo sapiens
tgcagctggtgcagcgcatccccgaggccagcctcaacttccagaaggtgccgcccggctcgctgaactctcgggactttgaccagaacatgaacgacagctgtgaggacgccctggccaac

SEQ ID NO: 195864 - DNA, 122 bp, Homo sapiens
cgttcctcctatcggcgtaggccccgcgaggaagacaagggcgcgccctggctgggagggcgtggccagagacctgtccatcaccgagtccacgagtggcagcacctaccacaccgcagtac

SEQ ID NO: 195865 - DNA, 122 bp, Homo sapiens
ccctggccccaggtgcctccatcagagcatttaccccattgtgttgtggctgttccttaacgtccccactagccaggctctttgagggcagggattgtgtctggttaatttctgtattctct

SEQ ID NO: 195866 - DNA, 122 bp, Homo sapiens
ccggccccgccccctccctgagaggaaagaggaagagcaagggagggagggaggctgggacggagggactgctgagaaaaacaaaagagagacagagactgggagagacaggggacggatca

SEQ ID NO: 195867 - DNA, 122 bp, Homo sapiens
agaaactcctgcgtgcagggttccaaaggcagcgggaagggcggcactcgcgtctccagccggctccacagcgctggcagacacaggccatcgagcccctccagagcgacttcgtccaacaa

SEQ ID NO: 195868 - DNA, 122 bp, Homo sapiens
gcctgggagccccctcagaccatcagggccaggtttccctgctgggcctgcaggacccaccgggcctgtcttccccggggcacctatagcgccaggatctccctgaaacacacacaaggaat

SEQ ID NO: 195869 - DNA, 122 bp, Homo sapiens
gaggggccctcacaagccaagatcgaatgtgacgacaagggggatggctcctgcgatgtgcggtactggcccacggagcctggggagtacgctgtgcacgtcatctgtgacgatgaggacat

SEQ ID NO: 195870 - DNA, 122 bp, Homo sapiens
ccagggcacgcgtcctaggtcgtctggagcccggggataggaggcctagtggtggcaggccgtacgcgccagggagcgtgggacgctcgtgtcccgcgcgtgcggccggactctcccaggtc

SEQ ID NO: 195871 - DNA, 122 bp, Homo sapiens
tcagaccgagagataaaagccccgatggtgatcgtgagtgatggcaagaggatttagcctcggcattaacttggagcggagtgcaggggggcagtgaagcgcccgccatctggcccgcgccg

SEQ ID NO: 195872 - DNA, 122 bp, Homo sapiens
gcgccccgaacacaacacctgcgctccacttccgcacaggcagatggtgcaatctggccgcgccgcaccctcccgcaccccacccgcggcggccttgccgtgacagcgctcgcgccaggtgt

SEQ ID NO: 195873 - DNA, 122 bp, Homo sapiens
gcggaggagcccgccccgcaagcgggaggaggcggcggccgtgccggccgcggcccccgacgacctggccttgctgaagaatctccggagcgaggaacagaagaagaagaaccggaagaaac

SEQ ID NO: 195874 - DNA, 122 bp, Homo sapiens
aggaaaatggactgaaaagttttaggcagaaactgacacacacctcacttactactttgccggagagcagatcctgagtgagcttccctcaaagtctgtggtctctttccaactacctgcgg

SEQ ID NO: 195875 - DNA, 122 bp, Homo sapiens
agcagagtcagggtcaggagccggtgtgggacctgaagcagggcacaggctggggctcatcgcggcccggcccctttccatcgcagatcccgcctcctcgcgactcggcccccaggtcacat

SEQ ID NO: 195876 - DNA, 122 bp, Homo sapiens
tagacagtcaatctggagagccactctcattttcagttttattccacatagcctaggtcccgccactctgcatctgcggcctgacctttgcacagtgaaaatacaaagcagcaacagaccaa

SEQ ID NO: 195877 - DNA, 122 bp, Homo sapiens
cttaaccaggcaagagcagggagtgaaccggagtgaacaagcgcaggactggtggtggggcgcgggcaagaccagccactgatcagtcccagcacgctgccctcacttcagcgtgggttccc

SEQ ID NO: 195878 - DNA, 122 bp, Homo sapiens
cagccccttcccaggccggtacaggagctcgcacttgaccccgcaggcgtggaggagacacggtccctggtccctgtggggttaatgaaggagctccacggacccactgcctcgtgggccag

SEQ ID NO: 195879 - DNA, 122 bp, Homo sapiens
ggtagcaggtcagctgggggacacttaaggacggcagaagggtccagagagtccgaggcccgggcccagggagcgggtcgggaacagaggcacgacatcggcgggaggtcggaggcgggcag

SEQ ID NO: 195880 - DNA, 122 bp, Homo sapiens
ggaccgtcaccttgtcccactagggaactcggggtgcggccctcgccggccccgggccagcggccaggtccccgccctccgcgggatttactcctgtcccgcctcctcggatttagcccagg

SEQ ID NO: 195881 - DNA, 122 bp, Homo sapiens
aattttttatcttggattttcaaaccaatttcaagctattgccatgctctatcctgttagcgattagtgtttcttccatgtttgacagccctgtctagacctgtgttaagctgtctgctcca

SEQ ID NO: 195882 - DNA, 122 bp, Homo sapiens
cattccagacgatgggcggccgggcagaggcgctccccatttcccagatggggtggtggccgggcagaggcactcctcacatcccagacggggcggccgggcagaggcgctcctcacttccc

SEQ ID NO: 195883 - DNA, 122 bp, Homo sapiens
tgcttcccactctaattaggactccctctcaggggtctccaccacgcacaggtggttggtcgctcgaggatggccccttcccttgatccctgaggtcggcacttacccgaaggattccggtg

SEQ ID NO: 195884 - DNA, 122 bp, Homo sapiens
gaatcttggacaatcaccgcccaaagcgtgcactctgtgggctgtttaaaaaattatatgcgcacagactctaaaggaaaaaccagagacaaaccgctcatattccatgaaccttccttctg

SEQ ID NO: 195885 - DNA, 122 bp, Homo sapiens
tagggtttctactccacacctttctccttacacaggtgtccccgtgtgacaacaagctggcgatactcgatgtactcctgcatctggggtggtttgctgtgcactacccaacgatgtggact

SEQ ID NO: 195886 - DNA, 122 bp, Homo sapiens
cagaggatgggaaaggaggcggctccaggggaagcacgggaccaggtggtgcatgcggggcgaagggagggtagtgtcccatgtgtccgtgtcctggccaggcgtggctcactgtgtaccgt

SEQ ID NO: 195887 - DNA, 122 bp, Homo sapiens
aggaagagacgctgaccttggcagaaccagcaacatgtgcaaggcatctgcccgtccgttcggcagctgatgttaaaacatctcagtgctggggctgagatgtgtggtggagagatgagcat

SEQ ID NO: 195888 - DNA, 122 bp, Homo sapiens
gcgatctgctgccccttggtgggcacgcgcggcactgtttcctgagggcctgatggtggacgtttgcaagacaaatccacatgcgcgttgtgtagacctgtaatcgtcacagcagtcatgga

SEQ ID NO: 195889 - DNA, 122 bp, Homo sapiens
gcgaggccagaggagacaacaactcccagcaggcgtcgcggcagcgggaagtcacgcacgcgcaacccaggccacaggagtaaaatctctctgcccgtcttctgggaagggagaatggcggc

SEQ ID NO: 195890 - DNA, 122 bp, Homo sapiens
caaacatcaatgagacttatgataagagagattaacttggctatcacatccaggggctgccgtagacaagtgaatttctcacccacttctctctagtatggcaaagaggaagaaaggagact

SEQ ID NO: 195891 - DNA, 122 bp, Homo sapiens
ccgtaaggacccaaggaccgcggaggggcgagtggagcgcgacgcttccaccccagaatccgttttcaaaccttagggagccttctttgccattgaaatgcaaatccggtcctgagctcccg

SEQ ID NO: 195892 - DNA, 122 bp, Homo sapiens
gccagtctcccggcgcccctggctgggtctcgctcagtccctgccctcgcagacgcacagcggggtggccagttcaaaagtcctacataacttggagagaaccagcagctagaaaacctgtt

SEQ ID NO: 195893 - DNA, 122 bp, Homo sapiens
tctcccgggtctggactgggcctggcggcgtgggaggggcagtgcggcgggcggcgcttccggagagcggggcctgcgcgctgctcttccccgcggagcccgcgcagtccgcgcagccctca

SEQ ID NO: 195894 - DNA, 122 bp, Homo sapiens
ggcgcgtcggccgcctcggtctgggcaagggcgcggaggcgggcggtgtgtgcgggggggcgcggtgctgcgctccggtgtgttcgcccatgacctcggtggttcgaaggggcgggtgctct

SEQ ID NO: 195895 - DNA, 122 bp, Homo sapiens
atggggggccagtagccccgcctccggcagctagggccacacccccggcagctagggccgcgccctcgactgtggctccgaggccaggtcctagggccgaagtttccatcgtctcacctgaa

SEQ ID NO: 195896 - DNA, 122 bp, Homo sapiens
atccaaaattgcatgttgagagcacagctggatctgcactgtgctttacttgtgttgcctcgttggcctaccgtggtcagtggactggggttggctggttgagctgctccaggtcacatggc

SEQ ID NO: 195897 - DNA, 122 bp, Homo sapiens
tgccggcacccagcttccctcccccgccctggcggtgggaacttgatttctccttttggtcgcgcttcgggggctggagcttgtttccccacgtcgcccaatgagcgccctctaaagggaac

SEQ ID NO: 195898 - DNA, 122 bp, Homo sapiens
agcttccttccttctgcggccagagccgaggcgggcgggggtgagaacatcaatcgtcagcgacagcctgggcacccgcggggccgtcccgcctgcagagggccactcgggggggtttccag

SEQ ID NO: 195899 - DNA, 122 bp, Homo sapiens
cccacgaagccgcccaggcggccgccgccccgccgtgcagcagcgctgagcgccaggcttcggctgcccccaaggcaggagaggctcttgctgccaaaggaggccgagcccttgacccgggc

SEQ ID NO: 195900 - DNA, 122 bp, Homo sapiens
gcacggggagcgcctagtcctccgggatgggagtgttgcagttcccgtggtagatcttgacgtggccctcacacctgaaataggcctcgaagacgtcactgtagccatggtccctccaccag

SEQ ID NO: 195901 - DNA, 122 bp, Homo sapiens
cttgcaagctagtttcctcaagggccccattttacagatcaggaaactgaggcacagagacgataaataatttgctacaaagaagcaagcaaggaagtggatgagctgggatgcaaccccag

SEQ ID NO: 195902 - DNA, 122 bp, Homo sapiens
ggccccactagtgcgtttctgaccagccgtcagcaccatacaaacactagcagagaagctcgcctgtcagcagcgtgattcctatttcttacccatgggagggcactgttcatattgttctt

SEQ ID NO: 195903 - DNA, 122 bp, Homo sapiens
acaccgaacaaaggagacagggtcatttatgacctgacgcgtctaccccactgctgtgtccggtttccattggctggaacaggacctcacattttttgtttgtttcgattggctagtaactt

SEQ ID NO: 195904 - DNA, 122 bp, Homo sapiens
ttgctggcaccgttaaaaagacgtgcagtgatgaacgtggccagatttgagttagagatccgtaggagtgagacggtacttaacaccaaaaataataactgccccctttcacctttgcatcc

SEQ ID NO: 195905 - DNA, 122 bp, Homo sapiens
gcggtctcgcgctgcagcccccggcgcgccccctgcaggtgggcggtcctcacggtggctcgggctgctctgagtcagagactccgggaaagcctgctctgaattagggaaagcatcaaaac

SEQ ID NO: 195906 - DNA, 122 bp, Homo sapiens
agcgtgggcgccagagcagcccctctgccttgggtgtcttggagatgacttggcgccccccggagccccgtcatggctgtggctgcgtccacaacactgcatcagcagagtcctggggaagc

SEQ ID NO: 195907 - DNA, 122 bp, Homo sapiens
tcttcaagtgctgctctgctggagggaaagagaattctgggctgaatttaacagtcatggcggtatcgattctagaggtaaatctagaggaacagtacaaaaggtgtttgctgagataataa

SEQ ID NO: 195908 - DNA, 122 bp, Homo sapiens
caacatggctgaacctggggaatattatgacacacaaaataagtgaggcacagaaagacacgtaatacatgatctcacttatatgtagaatctcaaaaaacaagtcgaactcagtaacaaag

SEQ ID NO: 195909 - DNA, 122 bp, Homo sapiens
tctaagtggccctggggtccaggctcgccggaggcaccagcgtgtgcaggcccggagcgccgtcttctgggcgaggagtgtcattagtaacactttatgttgcggataggtgaaagaaaaac

SEQ ID NO: 195910 - DNA, 122 bp, Homo sapiens
tacgcacaatcacatctgcgggcagttttaatacataaaccaaaacggcctggagctgggcgtcctgggcagatgctctgaaaatttctgctggcgtctcatgcctcttgcgttgtctattt

SEQ ID NO: 195911 - DNA, 122 bp, Homo sapiens
ggggcgaggttctcccaaccaaaggccggcgggcttatgtccggtcggaggtacagtgggcgagcgccccttatcatagagcccaaatgcccatgcgtggcccacttcttccgccggggcca

SEQ ID NO: 195912 - DNA, 122 bp, Homo sapiens
ctcccggtgccgagcggcggcgttttttctttcattgtttctctgcctttttgtggtgttcgtcgtctcattcgtcatcccgtgtccagaccggccggcgtcacagcgaatgtggaggatag

SEQ ID NO: 195913 - DNA, 122 bp, Homo sapiens
ccgcaggcgggcctgagcctcctggcaaagccctttgtcaacgtcaacagaagcatctggcgtcctttctggtcgcggacgtcagagctggctgctccggcactcagccgggtggttggtcc

SEQ ID NO: 195914 - DNA, 122 bp, Homo sapiens
ctcttatttgtggagagcgggcatctggttttgtagctgtttggtcccaagtttgacagccgttgtctgctgactgaaagggagctgaagcagctccctttgcatcctggtttcctggtttg

SEQ ID NO: 195915 - DNA, 122 bp, Homo sapiens
agggtggggcgtagggagcgccgtctccaccctcagtacttttggggtgggggacctgagcgtgcggagagcgggaggcagagctgagagcggggttaagcgcgaagctaaggcgccgcata

SEQ ID NO: 195916 - DNA, 122 bp, Homo sapiens
ttggtgaaaacgccaagcgttggagaaattcaaggaatggctgttgtaatgtacatttcacgcttagcctttcctccccgcgctgggaagaagtgctgcgcaccgcggctccgccagggggc

SEQ ID NO: 195917 - DNA, 122 bp, Homo sapiens
cacgtgggaattctggacgatacaattcaagttgagatttgggtgggaacacagccaaaccgtatctgatattatcccaaagaagtgaaagcagggatttgaacagatatttgtacacccat

SEQ ID NO: 195918 - DNA, 122 bp, Homo sapiens
agccttcgtttcctactctgcaaaatggagataacaagtctgcattttattatgtaactacgtcctaaggtacaaattaaagggcatactattggtattattttagagaaatattttcactg

SEQ ID NO: 195919 - DNA, 122 bp, Homo sapiens
ctttctgagctgacttgggactcgctcaacctgccgggaatccctgtgtgtgcaagtgaccgggtgggcggccccagccctgcttgcctccccgctctgggactggccgggaaagctcctca

SEQ ID NO: 195920 - DNA, 122 bp, Homo sapiens
gaagatgcccgtcttgatgtcggccatggctgcgggtccggggagctgcgaagagcagagcgcgcagcggggctggcggcggcgcggaggagcgggaggaggagcgggaggaggaggagagg

SEQ ID NO: 195921 - DNA, 122 bp, Homo sapiens
aggtgcctcctagcggacagcagggttaacaggtgggcgccgatgctgatgctgtagctgcggcagcgggctctgtattcgtctgcacacaaggctctcatcttctccaaaaacagctcatg

SEQ ID NO: 195922 - DNA, 122 bp, Homo sapiens
ggaggggagaaagctctcaaagttagggttcggctgctcctgtttatcctatttattctccgtcctgaagaaccagctagacttggctgtgattaatcgcagaggaaccagaaactcccggg

SEQ ID NO: 195923 - DNA, 122 bp, Homo sapiens
agtatttataccatagaaatttgcaaatgctacggttagggcatttttttccagaaagcccgttgttaaccatttaccagcaccccactacctctgtctcctctgtcagcccagggaagcgc

SEQ ID NO: 195924 - DNA, 122 bp, Homo sapiens
gaagagcggagcccatcctttggagaggactactatggaccttcacgttctcgtcatcgtcggcgatcgcgggagagggggccataccggacccgcaagcatgcccaccactgccacaaacg

SEQ ID NO: 195925 - DNA, 122 bp, Homo sapiens
tgggaagataaataagtgagcaggcctccaagtaaatcaacccacagcatgtgtgcataacgttttagtgttaaatacaaaataatctttgactgattgtcatttcaagtgtttataatatt

SEQ ID NO: 195926 - DNA, 122 bp, Homo sapiens
atccatataatggatgctactcagcattaaacacaaggatccaacagttgacatgcaacacgtgaatgaatttcaaatgatttacgctaaatggaagaagcctgcctacagtataatttcac

SEQ ID NO: 195927 - DNA, 122 bp, Homo sapiens
cagtgaagaagccctttgttgaccagagagaaaggggctgcagtggccaacccttcccttcggactcagcacttccttgcttagtctgaaaggtcttcagtgctttgtcccctttccttgaa

SEQ ID NO: 195928 - DNA, 122 bp, Homo sapiens
caggggtctctccctggagcattccaaggaaggaaattctcctaaggccaaaagagatgccgctgtcttagctgaactgactctgtgacatcaacccaggagcggcctaaaagcacctctct

SEQ ID NO: 195929 - DNA, 122 bp, Homo sapiens
actgctaacatgaagaatatttatttttcctttctattgggaatgcagaggggactttcgcgagcatcccagggaatctgcagtgtggcattccagtctttgcggatgagaacatgcctctc

SEQ ID NO: 195930 - DNA, 122 bp, Homo sapiens
gaagatgcccacccgctggttcagctgcccggtccaccagccctcgtcgccggacacctgcgagtccttggacagcacctccaccacgtcgcccagccgcagggtcagctcgtcctcgcccg

SEQ ID NO: 195931 - DNA, 122 bp, Homo sapiens
tgtgccagaaccgctaagctcttttcggcggaacaaattgcagctggtgtccttaaaggtcgagaatcaaacttgctgtatcctcagggtttaggcagcaaattggtcccagttttcaccct

SEQ ID NO: 195932 - DNA, 122 bp, Homo sapiens
gactcgccccctcccctttctttcttctctttttgccttggtcctcttcctacgggtgtgcgcgcgcgcgggttgcacggtttgctttggcaggagctcgctcgtgtgtgcgcgtgtgtgag

SEQ ID NO: 195933 - DNA, 122 bp, Homo sapiens
caaactgctcggggagcccgagctcagacctgcccactggctgagggtatccggcggacgcggcaagccagggccccgattacccagtaatgcaaccagcaaaatggcgaccacaacaaacc

SEQ ID NO: 195934 - DNA, 122 bp, Homo sapiens
atcttcaccggggtgtccgtctccccgcagctggctgtctcaagatggtgggatgggaagcgttcagtttggggcgaggagactcatccagctgcggggggcggcgccgagggagtggcgct

SEQ ID NO: 195935 - DNA, 122 bp, Homo sapiens
cgcctggcgtgtgttgctccgtggtgctccgggggaaggtttgggggacccatgcggcagcgttggcgtctaggcacacaggtcagagcagctaggggaggccagggcgacgggagcgcgcg

SEQ ID NO: 195936 - DNA, 122 bp, Homo sapiens
ttcctgagccccgccagacctcagcttccagctcaccttttctccccacagtgaagggtgcgcccagcctgtagttgtgtctacagaccccatccacggcctgtctgctcctctccaagaga

SEQ ID NO: 195937 - DNA, 122 bp, Homo sapiens
tgcccgtgaccttgtcagcctcggccacgttcatctggatggatgcgtggtccttggcaccgatgatgcggttgctagcggagcatttccgcggaacttacaggtccacgaactcgccggcg

SEQ ID NO: 195938 - DNA, 122 bp, Homo sapiens
gggtcccgcgacccacctcgtgtcccttgggcccgatcccctcctccttcccgcctcccccggttccagtcacccgccccccggcccgggtcccaccggctggagtgacctcctcgccgcgg

SEQ ID NO: 195939 - DNA, 122 bp, Homo sapiens
gacaagcctgggcgacatagtgagacaccatctctacaaaaaccaaaaaaatcagccaggcgtggtagcccatgcctgtagtctaatctactcgggaggctgaggtgggaggatcacttgag

SEQ ID NO: 195940 - DNA, 122 bp, Homo sapiens
gccgcccagggcgccgccgattgtgctccggcctgggagggacccgggccgttcgcgccgcggcacctccccctgggacctaggccagggctccggcccccgcccgcccccagctcggcccg

SEQ ID NO: 195941 - DNA, 122 bp, Homo sapiens
gctcactcagtccatgctgctgctccctgtggcaggcagtcagggcatgttctgtgtgggcgcagtgcggtgctgcatggcaggctgcccagctgcctgggaacagggccacaactaagaac

SEQ ID NO: 195942 - DNA, 122 bp, Homo sapiens
actaagttaaatcctttatgtagcaattatcctaacagtgcctttaattcttcaaactaacggatatcatatcaatgagtaaataaatccaaaagaggttctgattcaacctcagatgaaca

SEQ ID NO: 195943 - DNA, 122 bp, Homo sapiens
ctggaaaattgggtcactcccacccaaatattgcgcttttcagaccggcttaaaaaacggcgcgccacaagattatatcccgcacctggcgcggagggtcctacgcccacggagtctcgctg

SEQ ID NO: 195944 - DNA, 122 bp, Homo sapiens
gaggattgcggtttcccttcatctccgcggctcttattcctcccccgcaaggccgcccaccggggtacgctctcccgcgcctgcgccaattccgccccgccccgcccccatctaccgaccgg

SEQ ID NO: 195945 - DNA, 122 bp, Homo sapiens
gttataacattcttttcttatcaaccacagtgtatttaattttgttttaaaataacatcacgcttaagaatatccagaatgcatgtaaatgattgcttggatgtgttagcttctctctctct

SEQ ID NO: 195946 - DNA, 122 bp, Homo sapiens
gcgggcgctgcgtgtgggcttgcactcgagggtggggtgggccgagggcagggccgcagccgcgagaacaatgggcagaggaggcgcgtccacctgtccgcccggccgcctgcccggcttac

SEQ ID NO: 195947 - DNA, 122 bp, Homo sapiens
ggggaactaacatttgtctttcagttaaaaaactcagccccggccgggtgctgtggctcacgtctgtaatcccagcactttgggaggctgaggcaggtggatcacatggtcaggagatcaag

SEQ ID NO: 195948 - DNA, 122 bp, Homo sapiens
cctggacgccaccatttcacaagaagaggcaggcgacatgcgagtgctgtggaggaaccccggacaccaccatttcacatgaagaggcaggcgacatacgagtgctgaggaggaaccccgga

SEQ ID NO: 195949 - DNA, 122 bp, Homo sapiens
cgaagcgaaactccgtctcaaaaaaaaaaaaaaaaaaaaacacgagcaccgatcagggggcgtctgtttcctcggcctcaggctgtggcccctgccagtccccagcctcccgaccgacggca

SEQ ID NO: 195950 - DNA, 122 bp, Homo sapiens
ggaagaatatggcccctgtggatgtctattcatgtctccatatcttgtgagcgcttatcacgtggtgggcactgttgtaaacactcagccacattttctctttcaatcttcacagcagtcct

SEQ ID NO: 195951 - DNA, 122 bp, Homo sapiens
gagaaaaaaaaaaatccctgcctctcagctgctgcctcctcatcttgtgagggcaggcttcggatcctgctgttctttaagagaaaggaaccaggaccttgtgctagttcaaaggctgtttg

SEQ ID NO: 195952 - DNA, 122 bp, Homo sapiens
cacggtggggaggagcgacgggaggcggaagcccttcggtccgggccccgcccccgcactcgccctcgccccgccgcgacttcccattcgccgccaacccatgtgcgttggtgacgtcaccg

SEQ ID NO: 195953 - DNA, 122 bp, Homo sapiens
ggaggagcggggcaaaggggctgggtgtcccccaagccgctgcgcgggacgtggaagggacgaaagaggtgaggaagagtagtaaatcaattcaatacactcacacttctgctgtgctccca

SEQ ID NO: 195954 - DNA, 122 bp, Homo sapiens
aaacctcagaaaagagatatgcttttgtcttagatggatgtcagcagctgctgcagaacccggtgaaaacaccccccgggtagcacgaggctctgcgagccgtaactccgacaaacgcagaa

SEQ ID NO: 195955 - DNA, 122 bp, Homo sapiens
cacggacctatcaacattctgacagttttctggtcttgacacattatccttttaatatagcgctggattcaatttattaatattttaagtatttttatgctcacaggggaagtcgatctgaa

SEQ ID NO: 195956 - DNA, 122 bp, Homo sapiens
cactattccatttgtattgctttaaattctctgattaagtgtggaaaactatcaacaaggcgattgttcccaggggctgcccggccagaaataccgagactgaccatttttaagaacccagt

SEQ ID NO: 195957 - DNA, 122 bp, Homo sapiens
tatccccaccgcaaagcagctccgtgcgcatggctcctcgcagccacacgggggcgcccccgccccggcaacaatactcagggccggagggactccactgagatcccagtcgggggaccgag

SEQ ID NO: 195958 - DNA, 122 bp, Homo sapiens
atgtggtaaagacattcctgcagggttctaagcacaaaccgcttttggcttagctagacacgatccagagcacttgcgtccaccacttgccctcagtggctgctgctcgtctgagactgcag

SEQ ID NO: 195959 - DNA, 122 bp, Homo sapiens
gtgcgtctgaggaataaggagctaattgagtctgtcctgcagcaggaggccagggaatgccggtcatggctattcagggccctctcccccaaggcgcgtttcctgctaatggcctcgatttc

SEQ ID NO: 195960 - DNA, 122 bp, Homo sapiens
aatggctcgccctgcctctgcgccgcttggcccgtcccctctcaagcatatctcggataacgccccttccgcacctttcacgggcggtgggagctgaggctcctgtcgttatctctgatcct

SEQ ID NO: 195961 - DNA, 122 bp, Homo sapiens
gttcctttccacactgtggaagtttttttctttcactttttgcaataagttgctgctgttcgttctttgggtttcccactgcttttgtgagctgtaacactgacggcaaaggtgtgcagctt

SEQ ID NO: 195962 - DNA, 122 bp, Homo sapiens
agggaggtttcagtgtcacaattgaagaagagcgtgtggagtgagatctgttagtgtgggcgtctttgggaaatgccatctgccacagcctcagaggctggaagggctgcctgcatgctttc

SEQ ID NO: 195963 - DNA, 122 bp, Homo sapiens
gggaagctctaatgcagtgtgttcctgatgtttacattgattcaatgggatacgcttttacgcttcctctgtttaagtatatagggggttgccaagttggaagctatgttcattatcctact

SEQ ID NO: 195964 - DNA, 122 bp, Homo sapiens
caccaggctgtgaaccatacgggcgggtgaaccagcccacatgccctgtgtttagcgatgcgccagtgagtccctgggtcgttcttggtcgccagggacgacagcaagtgctgactgtgttg

SEQ ID NO: 195965 - DNA, 122 bp, Homo sapiens
ctccacccacacattcctggggcgtgaggcgccaccactccctgctgccccgggcaaagccgtcatttgttccctttgacggcccgggaggctgccaggctctccacccccacttcccaatt

SEQ ID NO: 195966 - DNA, 122 bp, Homo sapiens
atttaactgggttgctgtactctctcctgcagtatatatcctgccttacagaagtccacgcggcaagtgaaatccaggcagtgtgaaagtcactgaccagaccggcggggactctggccccg

SEQ ID NO: 195967 - DNA, 122 bp, Homo sapiens
atcctggcatgggttcagggggcattggcagttccgctgtttctgccagggatacaaccacgcttgctgctgaacggacagtatagctgggccaggtgggggaggtgggctttaggggccag

SEQ ID NO: 195968 - DNA, 122 bp, Homo sapiens
tagagaagtgcaaattaaagcacctaggagatagcgctctacacccaggagaatggctgacgtccaaaacactgaaacatcaaatgttgacctgtatgttgagcaacaggagctttcagtca

SEQ ID NO: 195969 - DNA, 122 bp, Homo sapiens
ccaggtctcaagagcggtgttgggactctagggaggaggcagcagaacgtttccagtggacggaagtgccggggagtccaccttgggagaccttaggcttactcagatttggaggctccagg

SEQ ID NO: 195970 - DNA, 122 bp, Homo sapiens
ggtgagctgggtgacctcctggagctgcaagagtttgtgcctgctgaggccttgctccaccgagtcttggggggaggcagctggcgggtgggggcgtggctgccaaggaagtgggtgtcggg

SEQ ID NO: 195971 - DNA, 122 bp, Homo sapiens
aggggtggaaccagattgggggaaggcggggaagagcgcttgactgagggaagatgctggcgcgctctgagggaggagccaggagccatttgccttctcattggttgggacctggccctccc

SEQ ID NO: 195972 - DNA, 122 bp, Homo sapiens
gcgttgccatggaggccgggggcggagccgcagagggacccgcggccggccaatcagagacgtagcggagcccggcggactacattgcccagtaacctcctgggctccgctgtgtttttcta

SEQ ID NO: 195973 - DNA, 122 bp, Homo sapiens
acacgcgcccacgctcactcgcactgggaccatttagacaagatgatcacctcacatgcacgactttggggtgtgggcgggaggaaaccagagcacctgggaaacccatgcagacctgggga

SEQ ID NO: 195974 - DNA, 122 bp, Homo sapiens
cccacctctccgggtcccgccccctgggcgactgttggggtagtgagtgacagcggaggacggggggaggcagggacccagccctcacgtgcccctccttcccttgtctgcagccacggggc

SEQ ID NO: 195975 - DNA, 122 bp, Homo sapiens
atttaaggaaccaaactaccggctcacccaactcagaagtggccgcagaagacattcaagcgctcccgggggcccggccagcgggcggggaggagccgcctccattggccggccccgcggca

SEQ ID NO: 195976 - DNA, 122 bp, Homo sapiens
atcttccagttccaggatacatggtacttcatttggatccaggcttccttaaattgcgttcgattctagctttgtgcagagctctctggtgaggtgtaagtgaggagcactagtgcatgaga

SEQ ID NO: 195977 - DNA, 122 bp, Homo sapiens
gctgacacgctgagcgtcgaatcgctgacccttgtccccccagttgacccccacagcctccgcagcctcaccggcatgcccccgctgtccacgccggctgccgcctgcacagagcccgtggg

SEQ ID NO: 195978 - DNA, 122 bp, Homo sapiens
cacacaaactttgttctggacttgttcagccccttcgggacccacagttgtcgcctccatcggagaaaacaagtgcccctgtttcaggggggattccactctggctggccacccgcaaacct

SEQ ID NO: 195979 - DNA, 122 bp, Homo sapiens
gcctcttgccagggacccccgggcgggggagcagagccaggcggggagcgggtttgccttcgggggcccaggggaccctgagaagtctggccgtgcccgggcggtgagcgcggaggcggccc

SEQ ID NO: 195980 - DNA, 122 bp, Homo sapiens
ggttcaaagtgaaagtgaacagaccagtcaaagggagctcgcgttcaggttcctgttattcggactatgctgggccgggaagggcgcacggaacgggacctatggcctacagactcaccgcg

SEQ ID NO: 195981 - DNA, 122 bp, Homo sapiens
ggagtctgagcctgcccgagcggagctgggagggggctggcgggcgggcgcgcgcacacccgctgatctatcactctcgttcttgtagctcccagccgaggacgtcggatgtcatcgtcctt

SEQ ID NO: 195982 - DNA, 122 bp, Homo sapiens
cctctgtgtaagatctcctcttccaatccaaacaggctccactcacaagccttggaaaaacgccaccagcccttgggtccaagaataacataaatgcaatgagccattttctgaaaatgaga

SEQ ID NO: 195983 - DNA, 122 bp, Homo sapiens
ctagtccacctcagaccttggggatccccctttcccatgacccccgatggcacctgattacgtcactgggttccagttaccagaccacagccaaggtccaggatggctgcatcagagtcatc

SEQ ID NO: 195984 - DNA, 122 bp, Homo sapiens
gcgccaaaaactgccaagggctgtgggaggtgtgttcttgcgtcatttccgagagacttccgcgccgcagtttccctgcttccccagctccagaacttccggccagcgcagccattttggct

SEQ ID NO: 195985 - DNA, 122 bp, Homo sapiens
aaattctacatattttaaaatgtcccaagtcttgtatgatatccagggaccgattagtgccgactggagagactattccctctcccattccgaataaagggttaggtgaaggttgtggcccg

SEQ ID NO: 195986 - DNA, 122 bp, Homo sapiens
cggctgctacgttgtagcagaagggcggggccctgcggggcggggccggggcgccgtgggcgcgcggggacaatgcggcgttgcccgccggcaggggcgcgctaccttgggccccgcccctc

SEQ ID NO: 195987 - DNA, 122 bp, Homo sapiens
tgcgcctcggtgccctgggcccgagtcgtagggtcctggggtagggggcacgcggggccccgctgcagagcccgcgggcggcaggtgggcggggggcagcctcgtcgccgggactggatccg

SEQ ID NO: 195988 - DNA, 122 bp, Homo sapiens
ttggcgtccggaaacaagtgttttccgctcagtcatggcggcttcgccagtcgaacagagcgaaagggctctgggcgaccctgcgacttccaccagaccgcgagcccggagcaccggcggag

SEQ ID NO: 195989 - DNA, 122 bp, Homo sapiens
ctgggtgtgatccgtggacacagtttggggaccaaaacaggatgttctcagcaaatccgccgagttccaggcccgtaagaagcaaagtcaagtgcctgacagactcttattcaagactccag

SEQ ID NO: 195990 - DNA, 122 bp, Homo sapiens
gctcctccgaagcccgcgcggacccgccccctcccaggcctgcccgccgcgcgcctgcctcggcgccctcgcaaccgcggccaggccaacctcagccggaaactacatttcccagcaggtcg

SEQ ID NO: 195991 - DNA, 122 bp, Homo sapiens
gtccactggccagggtcgggcttctggatggcccgtggcccctgccattaagaaagtaagcgcgacgtccgcaaaagcataaaaaagtttattggagcatcacagccggtggggcgggtatt

SEQ ID NO: 195992 - DNA, 122 bp, Homo sapiens
gaggtgaggaggctgcttgaggatggacgctggcacaaggacagccaggagcaggcactgcggagaaggcatatgcagcatgctggccaaccccagtgtcttacccaacgtcccacgtgcac

SEQ ID NO: 195993 - DNA, 122 bp, Homo sapiens
ggccaggtacgagcaggaaatgaccaggacggagccagagggccggtctcagtctttaatcgtggcagggcctcacgcacgcgcgcacgtacacacactcaggcttcagatcttgttgaaag

SEQ ID NO: 195994 - DNA, 122 bp, Homo sapiens
agtgaagagggcagtcggaccgattcaacattgacctctgctcttagatcagggcgttctcgtatgaaatcccattttccatggagctcttgggaatctcggagacagagttatccacataa

SEQ ID NO: 195995 - DNA, 122 bp, Homo sapiens
tctcatataggtgccatcttagccttctacacaactgtggtcatctcttcagtcatgcaccgtgtagcccgccatgctgcccctcatgtccacatcctccttgccaatttctatctgctctt

SEQ ID NO: 195996 - DNA, 122 bp, Homo sapiens
catccccttcccttttgtcccagccctcgccgcccccctcccgctgaaaccgcggttcgccgcggtcaccctttggaaatcgcctttaattaaatgtttttcgcgtgtgtcatcctgatggc

SEQ ID NO: 195997 - DNA, 122 bp, Homo sapiens
ctacaaaaggatcataaatgacacattttgaggagaagaatcgctaagtcattttatactcgatataccatctgagtgtcttccctaaaagaggcacaaggaacttcaagctgagaaccctc

SEQ ID NO: 195998 - DNA, 122 bp, Homo sapiens
ccgcttcaccacttaagcagcgcggtgacatggggaactcacctaaccttcccgagccttcgtttcctactctgcaaaatggagataacaagtctgcattttattatgtaactacgtcctaa

SEQ ID NO: 195999 - DNA, 122 bp, Homo sapiens
aaacatgaaccacaccagagatgggctatccagtgaggctgatatcatctcaggcgccaccgacatctctctccagcattctgtcatcttatgatcaactatgtaactccagacatccaggg

SEQ ID NO: 196000 - DNA, 122 bp, Homo sapiens
cagagggctgaagggatgtctttgcccttctggcaggcaggacagtgtcaggatggaccgcgctgccagaagccgacgctagcgagggaggtgtgaagagttggccagaatgaccaactcct

SEQ ID NO: 196001 - DNA, 122 bp, Homo sapiens
agcgccgccgcggcgccctataaacgctggctggggatttctctggggcggggtcaggctcggggaatttccaagccagtcagaccagaaaaagagaactggcttcgtcctctgctaggggg

SEQ ID NO: 196002 - DNA, 122 bp, Homo sapiens
gtgcaaaggcgaccaggaaggactccagagagggccaggctcggctggacaccagggcgacggtcactaccggtgttttgtggggagagccagtgctgccgtctgccgcctcaggctgccct

SEQ ID NO: 196003 - DNA, 122 bp, Homo sapiens
ctccaaaccctaacacattttaacgctgaggttcacataactcccagcgctccttccgcacgaaccgcccctgcacagggaacctgctggaaaggacgagcctctcttgcagatgggccaat

SEQ ID NO: 196004 - DNA, 122 bp, Homo sapiens
cccattccccttgtagagttcatgtctccacaaaaaccaccatttacccagttgcccaagcgagctgcttgagtatcattaacttctacacccctaaatctctgacttctaagctaataaca

SEQ ID NO: 196005 - DNA, 122 bp, Homo sapiens
tgacatcttgtgaaaaacttagcataacgtacatcctttccgcgggaatttatttctgttcgcacaaggcgtttctgctccgcacagagcaggccttgcttcccaggacgccgctcgcccct

SEQ ID NO: 196006 - DNA, 122 bp, Homo sapiens
agggcaactgcatccagcaaaggaaatcactagaatgaagatttagggtagacttcctgccgcctgtgtttatcgcacagatcaacgcacacaagccatggagtatgatgctggggaagtag

SEQ ID NO: 196007 - DNA, 122 bp, Homo sapiens
gctgcagtcctcaagatcaagagcaccacgtgaatatcagaggttaatcagggttttgatcgcttcagctttctcagagaaagattctaccacagaatccctgcattggtggagcacagaaa

SEQ ID NO: 196008 - DNA, 122 bp, Homo sapiens
agggctcactctgagtcagagcttagcatttagtacaataagtgggagtcactgactacacggcaccatctgagatggtccctgaatgttactttgcgcagctagctcaagagttaaggcga

SEQ ID NO: 196009 - DNA, 122 bp, Homo sapiens
tgaaaagacataaattaggacgggggcttatgggatggaggaaaacagctcttctctgagcgagagcctgggctgttgcacaagagctgagtgagtcaccagccagcagagggaaggaccag

SEQ ID NO: 196010 - DNA, 122 bp, Homo sapiens
ttcaattatttaaaaaataaaccaatgctcaggttagtacagttctttatttatttgatacgaataaatgaagaaactgttggcagttgctcacttcgacagtgaatagggtttggcttgtt

SEQ ID NO: 196011 - DNA, 122 bp, Homo sapiens
ggccggggtcgggttgtggtcgggccgggattgggctctcctgggccatggcagccgaggcgcgcgtgtcgcgctggtacttcggggggctggcctcctgcggggccgcctgctgcacgcac

SEQ ID NO: 196012 - DNA, 122 bp, Homo sapiens
acctctaaccacaggacatgctgtgaatccaggttggcctctaagaccctggatgggtcacgccacagcccatcagggatcctgggacccccagtgcaggggatggccctgctgctgcttcc

SEQ ID NO: 196013 - DNA, 122 bp, Homo sapiens
tgttgtcactgctgccgctcgttgttcccactaggcggcactctaagctcatcgtcaatgcgaggaccgagcacctgctaaaatctgcggcaggcatctccgttgtgcaaaattggtaacag

SEQ ID NO: 196014 - DNA, 122 bp, Homo sapiens
ttctgagttctgtgagccattctagcaaattaccaaacctgaggagggggttgtgggaaccgatccctccaactttatagtgagttggtcaaaagtatgggtggccctgacttgtgattagc

SEQ ID NO: 196015 - DNA, 122 bp, Homo sapiens
ctgccagcgcagctgcagctcctgcgggcaggcacgggcggctgtcaggggtcgtcggggcgtccaggcccaagccccctgccctccgggccccccactcacgttggccctcaccccatcct

SEQ ID NO: 196016 - DNA, 122 bp, Homo sapiens
tggggacaggaagtgactggggctggatcttgctggggctctcgttccgagtcccaggaccgcgggtgggtgcctggaacgtgggttggggcctctcccgggccgtttgccttggggctctg

SEQ ID NO: 196017 - DNA, 122 bp, Homo sapiens
aaaacccaccttgtctgccagttagttggaaagctttgtaacttcatgagcccatttctacgaaataatggcccgagacagagaatttctagagacagaaagcagatcagtggttgctggga

SEQ ID NO: 196018 - DNA, 122 bp, Homo sapiens
ctgcacccagcctccggcctcggcaggcgcttccggtgcggaaccttctggaaagtaccgcgccgccctcccggcgtccccacaaccccgcccgcacctgcgcgcaccggcgctcgcgagca

SEQ ID NO: 196019 - DNA, 122 bp, Homo sapiens
ccacatcgtttttcaggtaggtggtaatactctcatttttaggataaaggagctgtggtacggatcatttggggagcttgtctacagggttgcacttaggaaacacagattcaagcccaagt

SEQ ID NO: 196020 - DNA, 122 bp, Homo sapiens
tggctatctcttggagttaaatgattttttttctcgccccgttcgcatccataatagacgcgaacagagtcgtgattgttccctgttgcgggacattctgcgcctgaatgagcgggggctgc

SEQ ID NO: 196021 - DNA, 122 bp, Homo sapiens
acccgcaccccaggctttcccgggggtggaaaaggacttaggaatgccccggatttttagcgttgagcccaaagctacctgctgaattgggggtgaatccccaaaaggggaccaaaaagaca

SEQ ID NO: 196022 - DNA, 122 bp, Homo sapiens
ccgcagggggcgccggcacaagcccgaagtccaaagcgaagcggcccagcgccagcactgcgtggccgcacatggagctgtagccctcgttgtgcaggaacaggacgcccagatgcgcgtcc

SEQ ID NO: 196023 - DNA, 122 bp, Homo sapiens
ttgggaaatgccccttcgtggacgccgaatccccgccaccctcgggatgtgctgttgccccgtgtcccaccagaccctgggtctcaaggcagagcctgaccacagcctctggggtcggcccc

SEQ ID NO: 196024 - DNA, 122 bp, Homo sapiens
cggggcgccctcacgctgtgttctctgcggtgcaccgaggcgcacccggctgtcctgttgcgggtctcctggtcacctgtgggccatagggagagacgcgcccacacactctcgcccgcgcc

SEQ ID NO: 196025 - DNA, 122 bp, Homo sapiens
agaagtcatcaccaccgtggacggcggctggaacctccctgctgtgtgcccctctgcgcacgggacctcccctgctgtgtgcccctctaccagaggtcatcaccaccgtggatggctactgg

SEQ ID NO: 196026 - DNA, 122 bp, Homo sapiens
ctttccaaacaggacccaataaagatgcatgaggccagttgaatctgtctcctctcctctcgcttttttctgtcatttattccaaaggtaaacaaaaatatttcactatcttttaatattac

SEQ ID NO: 196027 - DNA, 122 bp, Homo sapiens
atatcgtggggggggtccactcccttgtgatatggttcgtaatatcgggggggagaggggcgtgatattactccccatatcgcaaagtgtgtccacctccctgtgatatggttcataatatc

SEQ ID NO: 196028 - DNA, 122 bp, Homo sapiens
cggctggcaccaaggccggggcagggaaacgtcaggctgagcttggagcactcacagtcccggaacgtgaggaaatgcgtgaacgggagcagggcttgtggggaggggacctgggagtcaag

SEQ ID NO: 196029 - DNA, 122 bp, Homo sapiens
agtgaaatagctgctgcctagggtggctgagctgggagtgccaaggtgcttttggaaagccgtgggacgctgcgcatctggaattgccaatgtcttcactcctttcatccagcaatcacatt

SEQ ID NO: 196030 - DNA, 122 bp, Homo sapiens
ttttttttttttttctaattcctgaggggtggttgctgcttttgctacatgacttgccagcgcccgagcctgcggtccaactgcgctgctgccggagcgctcagtgccgccgctgccgcccg

SEQ ID NO: 196031 - DNA, 122 bp, Homo sapiens
gctgagccctgggtgtggggccgcctcgggcactcagcatgggaatctagcacctggcaccgcgcctggcactccccgggagctgggaatggttcacggttgaaaagtaaaacacattgtct

SEQ ID NO: 196032 - DNA, 122 bp, Homo sapiens
gtgctagaattacagccatgagccaccgcacctggccctggataccactgtttacagctgcgtggtcttgggcagcatgctaaacccttctgagcttcagtcttcttgcctttaagtcatta

SEQ ID NO: 196033 - DNA, 122 bp, Homo sapiens
cccgctgcattttctccagagctttgtcaattccaattggaatgtcgtggtcttctccttcgcccacagtgaatgccacatctctgcagtcaaacatccttccaccacagcggccttccagg

SEQ ID NO: 196034 - DNA, 122 bp, Homo sapiens
acagtgtgttttccagtgtgactgggaaagcctgcatttttttcaatgatgtgtttctcacggtttgcctatctatcttcagtgtcctatttaaggcagggttttggtggaaggtgactttt

SEQ ID NO: 196035 - DNA, 122 bp, Homo sapiens
gttgatccacccacctcggcctcctaaagtgctgggattacaggcctgagccactgctcccggcccgagatacttcaacatagttttgaaagcagagaaaatcttgaagtttttctctcctt

SEQ ID NO: 196036 - DNA, 122 bp, Homo sapiens
caagctggatggattctacagaaggaattcggtgtttacagaatcgttagcagggctgttcgcgtgaaggtcagggaaaagcaccccaagatttcaggataccaagaagttactgaaattgc

SEQ ID NO: 196037 - DNA, 122 bp, Homo sapiens
ttcccatcaggctggacccgcaacatgacgttgtctgtggtggtgtcgtggatgaaggagcgtttggagtgcacgaaaaacatgtcagggacccagatcttcttgaccagccggccgtcaaa

SEQ ID NO: 196038 - DNA, 122 bp, Homo sapiens
gatccgcccgcctcggcctcccaaagtgctggggttacaggcgtgagccaccgcacctggcgttaaaaactttttattgaaatgtaatgtatacgggccaggcgcagtggttcacgcctgta

SEQ ID NO: 196039 - DNA, 122 bp, Homo sapiens
tccaggccacattaggctaaggtcactctgtgcattatttcattatttcacacggagggtcgcccacggttgacagaaccacaagctgagccccaggcgcatcagagcgcagtgcacacctg

SEQ ID NO: 196040 - DNA, 122 bp, Homo sapiens
agaacgtgttcacgtgggcacccacgtggaagtctgcccgacgcagcaggcgcatgcccccgaaactctccttggctagaccagaaaggcctaggggtcactgctagcccagccccggccca

SEQ ID NO: 196041 - DNA, 122 bp, Homo sapiens
ggatgctctttcattcctttatgctgcttgggacaggtgcgctcccagaagggatcctgtcgccagttctgggggagcccagccatgctctccccctgcccaccccacagagccctctctgg

SEQ ID NO: 196042 - DNA, 122 bp, Homo sapiens
aactccctttccgactcttgcaaaggagcgaaacacgccccacgtcagccacatccctttcgacttttccaacagccacatttaagctgtcattaaagacctggggcgctccccgtaggtct

SEQ ID NO: 196043 - DNA, 122 bp, Homo sapiens
gtggctccgaaaggggtgtggaaggagcgccgtgggactgaatcagagtgttggatttcccgcagctttctagcaacagagttatgttcaactcccctaaaaagcaatggagaattgtttgc

SEQ ID NO: 196044 - DNA, 122 bp, Homo sapiens
ggtcctgcccgggaggcctcctgccttcccctgtgggcagggccagtgtgcccaattgcccgattgcccgtgctgggcagggtcctgcccggggggcctggtgggggaggcagggcaggagg

SEQ ID NO: 196045 - DNA, 122 bp, Homo sapiens
gacagcatttgcttacctttatccccagaagccctgctgaatcaagtgagaggagagctgcggagcaatcaccatgagtatctcagctcttggaggccgcaccaaaggtgaggcctgggctc

SEQ ID NO: 196046 - DNA, 122 bp, Homo sapiens
ccggtctcttttttctgccttcttgtttccctccggcgagtcagcgcgactgtgaatttccgtttccggcggtgtccatgctgacctgaggagtcgcggctgcgagcaggttcggtgctgcg

SEQ ID NO: 196047 - DNA, 122 bp, Homo sapiens
cgcccaccctaggccatgctctcagctgctgcaaaggctcaatcaggtctgctacagctccggactgtcttgctgttatgtagcccaggggctgtggagtccccactgctgggggagataaa

SEQ ID NO: 196048 - DNA, 122 bp, Homo sapiens
ggcacactgtcctgtgggcaccttccgaaaatgaatagcaacttgttcttgtcttctcttcgtggcatgtcagcagaggagtctacgttttcacagtcattttttactacactggctgcatt

SEQ ID NO: 196049 - DNA, 122 bp, Homo sapiens
atgctaggcacacttctacctgctcggtcttactctgatcatacagataagaaactgtggcgcagatgttaattaacttgcgcaaggtcacgcacacgttaatggtagagctatgtttcaca

SEQ ID NO: 196050 - DNA, 122 bp, Homo sapiens
aaagaaaatcgagctgagcagcgggaagtcgaagtcgcgtgagtgaggaccagacactctcgatttaggcaaaggcggggtgcacttcccaacaacacatcctcctcactggcgagaccagg

SEQ ID NO: 196051 - DNA, 122 bp, Homo sapiens
aaagaattatatggatattgggttattttgtaaattaatatttctttggggatgatgctgcgagcagcatagtgagaattatttaaaatccttcgtagggaaggacagctgtctttgcaggg

SEQ ID NO: 196052 - DNA, 122 bp, Homo sapiens
aggaaaagaaacctgcaagagctggggcgtgaaggggctgccaggagcagctggggcacacggagagcgagagagcctctcccaggctccatggggaggcttccaggagggcagcagggaca

SEQ ID NO: 196053 - DNA, 122 bp, Homo sapiens
gcatctaacttgcaacaaaacctttgccactgcccttactgtcatgcttatcaacatcatcgccattaattaattagctcatcacaaatttattgaaatgaacactatgtgccagacactga

SEQ ID NO: 196054 - DNA, 122 bp, Homo sapiens
tcagggttctggaaacgtcctgccctgagggcctgcgactttctgtatggagccttggatcgcgtccctggaaagggacaccaaagatttccaattccggagagcgggcccgaggaagggtc

SEQ ID NO: 196055 - DNA, 122 bp, Homo sapiens
aggacgtgcgtgttagggggcaggtatttggagccaggccccactttcgagttgtctttccgcaggaaccagagactgcggacggggccaggaaccaggaaccgttagggagataaggaagg

SEQ ID NO: 196056 - DNA, 122 bp, Homo sapiens
gcgcgcccactcgtgctggataaagtgcaggatccccggcaggctcaggggctccgggcccgccgtgggcccggggctgcctccgccgccgcctcccttacctgccgggcccggcccggggg

SEQ ID NO: 196057 - DNA, 122 bp, Homo sapiens
ccaggttttggaacaggttgcctgtgtctcgcggaaagcccccacaagcgaaaacaaggccgcagggtggcatgagcgagccacagggactcagggggacactgaggcgggtagaggggaga

SEQ ID NO: 196058 - DNA, 122 bp, Homo sapiens
ctggtcgtggctgcagctctgtccgcctttctgtccggctttccatccggggtgccagctcgccgctgtccccacatctggctcccgtgttcccggctgtcacgcagggtcacgtcgtcccc

SEQ ID NO: 196059 - DNA, 122 bp, Homo sapiens
atcacaacaaaactccatatgatttgactttgggaggccaaggtaggcggatcacctgagcgcaggagttcgagaccagcctggctaacatggcaaaatcccatctttacaaagatacaaaa

SEQ ID NO: 196060 - DNA, 122 bp, Homo sapiens
ataaagcagtgaacttcagaactagagggcatcgacgcggcagctgattttgtctgcacacggcccccgtagcctttccgtccaaaatcatttacgcggccgcgaccggtagtgacgtcacg

SEQ ID NO: 196061 - DNA, 122 bp, Homo sapiens
gggaaccaggagctgagtgatgatccagtcccagtctcctcactgttcagaaaccctacacgctgcttccttttccctctgaccttccccccaatcgcgtcctacatctcagcttcagcttc

SEQ ID NO: 196062 - DNA, 122 bp, Homo sapiens
taatgggctgagagccgcctcgtggaaagcccggggcgggggatggagtagaaacagctgcgggagtgattcttgtctccatatatgtttataaggcactgagggcgggattagcagctcct

SEQ ID NO: 196063 - DNA, 122 bp, Homo sapiens
ggaggagcagcagagaaagggagagggtttgagagggagcaaaagaaaatggtaggcgcgcgtagttaattcatgcggctctcttactctgtttacatcctagagctagagtgctcggctgc

SEQ ID NO: 196064 - DNA, 122 bp, Homo sapiens
gcgaggagaaagactccaaatcagtcagggagaggagtggaaggagccaaaacgtccctgcgaggcctgcgctcaccagcccccttacccaaagtcccgggcccctggcgccaggagcaggc

SEQ ID NO: 196065 - DNA, 122 bp, Homo sapiens
gactggggaggcagccaatgaagtcagcgctgggcgggcactggagcgagcctggctgcgcggagagctcatcccgggaccacagggcccggggcggggctcggggcggggctcggggcggg

SEQ ID NO: 196066 - DNA, 122 bp, Homo sapiens
ttactggaattcttgccacaagagggatactgagcagtgaaggtttacaagtctcccttgcgcttgtgcatatggattaacttcactcttttaataccttacttctccatcagttctagagc

SEQ ID NO: 196067 - DNA, 122 bp, Homo sapiens
atcgtgctcacggcccacgagagggccatcaagtcggcgctgctcacggcccgtgcagggcgcggcttccccagggcggaactggatggcaccgacagcccttcgaccagctgtgagtatca

SEQ ID NO: 196068 - DNA, 122 bp, Homo sapiens
gtaaagcatctattttgccatggtttcaaaattttaatctattcaagccaaaactgcccacgggagagctgtatctttcaattcaattccccttaccctacagacagtgcaggtatatatta

SEQ ID NO: 196069 - DNA, 122 bp, Homo sapiens
cccgcagccccgcaggagcgcccccgggaggcagcaggtcgtgcccgagtgcccgcaccacgccgtcctccaccagcacgtcggccacctccgagaagtcatcgttgaccacgcgacccccg

SEQ ID NO: 196070 - DNA, 122 bp, Homo sapiens
gacataaaggtccccttgtggggaaaaggcaaggacagtttcccgctggcatgtacatgacgggatatgtgctgatacaggagaagccaaaaatgtttgccaagggaactgagatcacccat

SEQ ID NO: 196071 - DNA, 122 bp, Homo sapiens
aacaaggagatccagccaggtgctgaactggcagcctgggactggggcttggggtttcgacgggatgtcacacctatggggggtggggggtcactagtccattaattcgagtgctaaacttc

SEQ ID NO: 196072 - DNA, 122 bp, Homo sapiens
tctccttttgttccattcccagtctagccttggcagttcctggtcctggcctcagatgtccgccataattcaggggcctggcatggcaacagtactttaactagaaacctagaagtattttg

SEQ ID NO: 196073 - DNA, 122 bp, Homo sapiens
ccgtgatgcctgcctgcagagggatttgcttcttgcctaagatctggcacagcccagtggcgctgccaagccaggccactaggtggtgtcccagagctcaggccctggcagctcccagggaa

SEQ ID NO: 196074 - DNA, 122 bp, Homo sapiens
tctagcgccgctgggttagggtctccacagccgagctggtctcagcacagtggcccttgacgtttgcggggatgggttccgggaccccagtagatcatacaatccatggatgctcaagtccc

SEQ ID NO: 196075 - DNA, 122 bp, Homo sapiens
gaggactccttagctctcagaagactcattaaacgagcctagcagcgggtgaagattaggcgctgagaaagtgatagcacctgggttagcacccgaagctttgctttttaaatgcttgagat

SEQ ID NO: 196076 - DNA, 122 bp, Homo sapiens
tcagagcccccttcccattagagtgaggctgcaccccatcctgcctgggcttactttgtgcgttgcttgggggcatggagaaggttcttgcccttgctgctttatatgaggtccaattcctc

SEQ ID NO: 196077 - DNA, 122 bp, Homo sapiens
tgaattccatatacaccggagattgcttatcgatccacatcagaatatgcgggctggccccgaggaccggctgagtattttcccagggagttaataacgtggcggccgagctgtcttgtcca

SEQ ID NO: 196078 - DNA, 122 bp, Homo sapiens
tatgggaaaagtgtagtatctgggccagattgtatcgttcctcgcagcatagtccctcaccgcttcctttggctaggggagggagttccctgaagccttgcatttcctgggagaggcgacgc

SEQ ID NO: 196079 - DNA, 122 bp, Homo sapiens
gagggcagcgtggagagagcataggctcagggggcacagccggtgtccctgcacctgactcgcagtgcgcgctcggggaacagctgctgggtggcgagtcaggggcagcaggcccgctcggc

SEQ ID NO: 196080 - DNA, 122 bp, Homo sapiens
gccagagcagtgaagaaagcagaagcaaatcccttccccatggagagtcacaggctctcacggggccacagactttacagcttcagcccaagcccctgttttataaatgagacctaggctgg

SEQ ID NO: 196081 - DNA, 122 bp, Homo sapiens
tttgaggtgacagaaggggtctcggctgcagcgtgcgggggcgagaacggggtggggagacgacagggcgtggggtcacgcagctgaacccaacgccacatcacgagaataagcctcaggct

SEQ ID NO: 196082 - DNA, 122 bp, Homo sapiens
acaggctctcagtaaaggaaacacagcggccatcaacgcagtctagctgtgcggaaggagcgctcagccccggcgagaggtgtggctgctgccgccccttttcgggggactcctccatgacg

SEQ ID NO: 196083 - DNA, 122 bp, Homo sapiens
ggacagggtcccctgtccggttccactgtgccgtggtggtgctgggcctctgaggcgagccggatggacggacggcatcccctggaccctgccacccttgccaccgtgccacagtgaacacg

SEQ ID NO: 196084 - DNA, 122 bp, Homo sapiens
tgtaagtgtttgtaagcaagaaccggctgctactgagagttttccattttgttccagattcgcctccacagatatcaaaagaaacctgaagagcctacaaaaaaaaaagagataaagacaaa

SEQ ID NO: 196085 - DNA, 122 bp, Homo sapiens
gttaacattaatataatacatatataatttgatacggtgcctggcacacagaccattccccgtaagtagtagttgtcgtcctcagatgtcgtctgtatctggctcttgcaagggcaaaggct

SEQ ID NO: 196086 - DNA, 122 bp, Homo sapiens
ctgtcctgggggtggaggaggaagttcgccccgcgcctgcctcgcaaccgcagccgcctccgtgcgcttcctgcccgcgccgccctccacactgcgctccgtgtctggcagcagcccccgcc

SEQ ID NO: 196087 - DNA, 122 bp, Homo sapiens
tcgactttgatcatggtgagtgtgccacgggccaggctcgggggtgcccacaggcagggccggcttctgctcagagcgcagcttccagcaagcccgccggacctgctttctggcattttctc

SEQ ID NO: 196088 - DNA, 122 bp, Homo sapiens
aacaaatttcctgaaccccatcaggtccgctgcctgcatgtagaaagaggagagtaaaaccgatgcacactggactcacccaaaggcggaaaaggacaaggaacccaaaaaggaagatccag

SEQ ID NO: 196089 - DNA, 122 bp, Homo sapiens
ctctgaggcccctcaagggacagggcatgggtgtgaggggtcgcgtgcgccccctggcgccgggtccgctgggcggggtggtgggcggggacggtgggcggaggcggaggcgggaggcggag

SEQ ID NO: 196090 - DNA, 122 bp, Homo sapiens
tggaccgcctctgccggggtctgggagggctgcccttacctgactcgcaggtgggcactgcgagagtcgttgcctcctgctgagatcacccggcaggtgtacgtgccgatgtctcccgacca

SEQ ID NO: 196091 - DNA, 122 bp, Homo sapiens
ttttaatgtgtctccaaccatattttctcatcttaaacagaaattaagattgtccctgttcgtgcaaaggcaattgcttgtgtgtccaactgcagagaagcaggtgaatgaatgagggctca

SEQ ID NO: 196092 - DNA, 122 bp, Homo sapiens
tgcccgccagccctgccgcctgccctcggacttcccagggcgcccagggtcctcccaacgcgcctgcacccacacccgcccctgagccacagtgaccttgcattccccgccccctgccacac

SEQ ID NO: 196093 - DNA, 122 bp, Homo sapiens
ggaaaccacggctccctcttccggtcccggggcactgtgggatatggggcggggcggctccgcccatccccgaccagccctgggatggctccacccgcgctggctccaaaatagcgaggggg

SEQ ID NO: 196094 - DNA, 122 bp, Homo sapiens
gggggcacagaggaatacggaatgtatgggcatctccaggggggtgaggcgtccctcagccgcaccagcccggccgcccctacgcctctggtaccgaatctgaaccgtgttcctgcagaaac

SEQ ID NO: 196095 - DNA, 122 bp, Homo sapiens
tgtcgtcacttccggcagccggaggcagcagaggaagccgaggggcggccatcttggctccgtgaggctctgaggtgccggggtgcggcggcggcagcggcggccagcagggcggaggctga

SEQ ID NO: 196096 - DNA, 122 bp, Homo sapiens
ctattttggaggagggggcagcgttaggaaaactattccgaagcctggccacgtcccaaccggtttcaacttcctgcagctcagaagaggggtccccacccgagagcgccgggaccctgtcc

SEQ ID NO: 196097 - DNA, 122 bp, Homo sapiens
tccctccaagggattggcagtggtacccaagcaacctctccttttgtctttgtctcttttcgttatatccctcattcctctcttagaattcaggctttttcttttcttttcttttctttttt

SEQ ID NO: 196098 - DNA, 122 bp, Homo sapiens
catctggttccaggacctggacagtcctctctggagactggtgggcccctccaacacctccgtggcttcccgggatcaagtatcgcacctaaaaggagcgcagagagcgtgcaactggcggg

SEQ ID NO: 196099 - DNA, 122 bp, Homo sapiens
ctggctgaggagagccgctgcggcgttccactgtcacgtgagggggccggtcctcttcggcggcggcactcagtgagtgacgccaagtggccaatcacaggccagcctcgcaggccacgtga

SEQ ID NO: 196100 - DNA, 122 bp, Homo sapiens
ctcccctctccgaggcctctctcagggtccagcgttcaagtcccgggtgttctctggacccgccccttcctctcgccgggtcaggtgccgagggcgagcacgggcggcgcggagagcagtcc

SEQ ID NO: 196101 - DNA, 122 bp, Homo sapiens
cctggacagctcctcctggggaccggggaaagcgctcttgggacccaggccgaatgctcccgtttgggcacagcctgggggccggggcgccccagacgctccagggtccccgcctgccttaa

SEQ ID NO: 196102 - DNA, 122 bp, Homo sapiens
cacagaactgcctgtgattatctttagtttaaacaacagtgtctgcccaagataaatgcacgtgtgagatagatttcacccctgagagcagttcatctttccttctgcatgccattttccct

SEQ ID NO: 196103 - DNA, 122 bp, Homo sapiens
gctgttgggaggcgtcgtgctggggccaactctgttctcactgggccgttggcctgagtccggcatggagctgagcatccccttgtgtggccatgacctcttgtgccggggggttcatgtgt

SEQ ID NO: 196104 - DNA, 122 bp, Homo sapiens
agggaggaaattgtcaatggagtttactctctaggtaagccccaaaaagtcttcacacggcggaaatactgaaaaagaaaaatagcacaagaaatacggctataatattaagacaattttaa

SEQ ID NO: 196105 - DNA, 122 bp, Homo sapiens
cgcgcgcccggcccgccgcccagcccgccgcccagccctccccctgggcggggacccgcccgccgtcagcctaggttgaggcgccctgcgtgtgtctataactttgtgctgctgccgcggcc

SEQ ID NO: 196106 - DNA, 122 bp, Homo sapiens
agtcatcgatatcatttattaagacagtacctgagccagttgcatattttcttcattttccgtcatccggactaagggaaatgcagaagaaaatgttataaagaacaaaaacagaagcagaa

SEQ ID NO: 196107 - DNA, 122 bp, Homo sapiens
aatgcaacaggtctgtaaagaatgaacacagggccagggtggtgtctcatgcctgtaatccgaggactttgggagactgaggcaggaggatcacttgagcccaggagttcaagaccagcctg

SEQ ID NO: 196108 - DNA, 122 bp, Homo sapiens
ccgggaacaccgtggggctgcgaatgatggagttgtcgtgtagagaggagggtgctgcctcgagagaggaggctaagtaagagtgagcccagttcaggaggtcactcagagagcctcgacct

SEQ ID NO: 196109 - DNA, 122 bp, Homo sapiens
ggatgttgaggcctggagggtgacaggtcacacagccagagcctggcagcagcgcaggggcggaaccccgggtcccctgtgggcctgtgccctctcggccagccttgcaacgcgcagctaac

SEQ ID NO: 196110 - DNA, 122 bp, Homo sapiens
ttgagagctatggcagtttctggtgactttattgcagacagcagtcaatccacaactcctcgcaaaggctggtgattgagcaataagctttttgaaaactcttcctgagatctttcattcac

SEQ ID NO: 196111 - DNA, 122 bp, Homo sapiens
cgcacgtgcgcggctgtacttacctgtccttccagacacgtctccatgcatgcacttgcacggctgtacttaccaggccttccagacacgtctccatgcacgcacatgcgcggctgtactta

SEQ ID NO: 196112 - DNA, 122 bp, Homo sapiens
gggaggcggtggctgtcataggatggagggcgggacctgagatttcggacataacctgagcggcgaagcttgagggccaagtgatgatggcgaggggtagggagggcctgagagcctgagag

SEQ ID NO: 196113 - DNA, 122 bp, Homo sapiens
tcggccggtgacggtgtcggcccccggaagagctgcacggcggcgggcggccccaggaagcgcaccggccccaagctggccaggaagagacttcggccctgctgctcccaggcggcggccgc

SEQ ID NO: 196114 - DNA, 122 bp, Homo sapiens
ggcaggtagaaaagaaagtacttcccaagttctagaggctatgtttcatgtaatcaagctcggctggatacattcaggatacgtacactatgcagtggaggatgaaacaaaggttttgtcaa

SEQ ID NO: 196115 - DNA, 122 bp, Homo sapiens
gtccccttccacgctgtggaagcttagttctttctttctttgcaataaatcctgctgctgcgcactctttgggtccacactgcctttataagctgtaacactcaccacgaaggtctgcagct

SEQ ID NO: 196116 - DNA, 122 bp, Homo sapiens
attatgatttcaaccatgagactacatgaaattaagcaacatttaatgtttaatccctagcgaatgacatacttttgctctgggatgtgatttgtttgccgtaattcgttttagtgatattt

SEQ ID NO: 196117 - DNA, 122 bp, Homo sapiens
cactatggatcttgtatttgaatccgatgtagctggattcccggggccacgtaaattaggcgtggagcctgtgttagagagtgagggtttccttagcgtcgttggcatcattcatgtatagc

SEQ ID NO: 196118 - DNA, 122 bp, Homo sapiens
ttactttaatgtttctgtttttaatgtgaaggccaagcaggccctgggatgggagtggggcggaggagggtcctaagagctgattatttaatttctatccagaaatctttcttcttcttgct

SEQ ID NO: 196119 - DNA, 122 bp, Homo sapiens
taattagcaatctcttcatttccaatcaaagcacaaagcggccccaaaagcctgtctttacgagggagccgagcagcggctagggatgtgcgggggggataattgtcttcgccagtggcggc

SEQ ID NO: 196120 - DNA, 122 bp, Homo sapiens
tggcactcagtgcccatctgccggatctcctccgtcgtctccttcaggcatttctcagtccggccccagagaacaatctggaagaagataataacaacgcagaacaaatggtcattaagcca

SEQ ID NO: 196121 - DNA, 122 bp, Homo sapiens
agcttccacgcgtgccacccgctccccaactcagggtgaggggcttcatgttgcacgacacgtttacgtggggctttacgctgcattccatctcccttgatcctcgcagcgaaataaataat

SEQ ID NO: 196122 - DNA, 122 bp, Homo sapiens
gggctcagagcagagagcacctgcctggcggggcctgtctctgactttgccttgctgctccgcacagcactgccctggtacccatcctgtttggagggctcagagcagagagcacctgcctg

SEQ ID NO: 196123 - DNA, 122 bp, Homo sapiens
cacagggagccctacccaaaagaacatgacactcagacctgcctggacttcatgaattaccggctgtcagagcctgatgggccctgagggatatctggttcagcccattaatttctcagatg

SEQ ID NO: 196124 - DNA, 122 bp, Homo sapiens
ggaagcgtacggaagttgggtagaggaaagtctcattacccactcttgtgccctaagctccgccaagggcggctccccgcggtacccagtcgactcagaacccccacaaccttcgaagtcca

SEQ ID NO: 196125 - DNA, 122 bp, Homo sapiens
tgggggtggggtggtgggtggcatggggaactctgaaaactcattagttgaggataactacgcctaccaacagaatgcagaggtgcaagactgagctactggtgcctgagttctcagcgggc

SEQ ID NO: 196126 - DNA, 122 bp, Homo sapiens
gatgcctcattccaagaaccctgaaagccacgggggaaggcggagcaggcagcctttggtcgggaagaagagacgggcagatggccagcagaacagacaagactctctttacctgaccaata

SEQ ID NO: 196127 - DNA, 122 bp, Homo sapiens
ggctttatgtgaatatccgtgggacgatcaagaacaatctccacgtgggttacatccccacgcccccaccctttccactttgggacgcgccggccgctgggcggggtttcgcagaggggcgg

SEQ ID NO: 196128 - DNA, 122 bp, Homo sapiens
ggaagaatgtactgcacttagagttcaccagtacagccatgaccctgtgcctcccaagcccgcaaacctggtagtgatgggaggggaagaagaacccacacgtgtattcagacacctgcacc

SEQ ID NO: 196129 - DNA, 122 bp, Homo sapiens
gcgcggcgactcggagtccttctcggagcccatggccggcagaggccgaggagccaggggcgcccagcgccgccacagctcccgcctcagcgcccctcagccagcgcccggccgccgccgac

SEQ ID NO: 196130 - DNA, 122 bp, Homo sapiens
ctgctgcctcagaagccaggccttccctgcagagcctctcagggacagcttgtttcctagcggccccaggagccttctacaccctgccttataatacacatctgcaagtttttggtggctgg

SEQ ID NO: 196131 - DNA, 122 bp, Homo sapiens
ggccaggtcagcttcagaatcctccagtgtgtgttccccctaaatctgtgctcttttattcgtgggttggccttgtgaaatctgattacagtattacttcaatgactttcaatcatgaaagt

SEQ ID NO: 196132 - DNA, 122 bp, Homo sapiens
tctccaggctaaatttaaatgctctacctgagtgcgcttctcagtgaggcttttgaaaaccgagatgtgaaatgaatcgcagatcactttaaaatgcgtttattcatcttggaaaaagtctc

SEQ ID NO: 196133 - DNA, 122 bp, Homo sapiens
ggcgacgggggggagactccgtcaaaaaaagaaaaaagaagttttgatttgcgttatttacgttctgcttgtgtcttgatgttacagaagttacaatctcctaggcctgggtgttttggcta

SEQ ID NO: 196134 - DNA, 122 bp, Homo sapiens
gcgtccagcgtggtgaagtgcgggcgtggagctcgccctctatccggctggaagggtctgcgttttgatttgtgaggatctctgcatgtgtcgcgctctctggttccttacgggaaggccga

SEQ ID NO: 196135 - DNA, 122 bp, Homo sapiens
tggccaccgcgttggccctcagagctgctgctcctgcgtgcctggtgctgggaggccatgcgctaacttaggtatcacagcacagagaaaccagacctcacggccctactccccgcccctca

SEQ ID NO: 196136 - DNA, 122 bp, Homo sapiens
caaaagcagcaacaactacagacaccgcacgcatgtgcgtcctgctcacgggaacgggtccgtggttttgtcctgtacaggttctcgggaggacagtgtcactgcccagcagccaggcccca

SEQ ID NO: 196137 - DNA, 122 bp, Homo sapiens
ttgtttccattcacctggcagtggacatctgggttgttctcccctcttgcctattgcaaacggcagtgctttgaacatgtggtacaaatatctctttgagactctgctttcaattcttctgt

SEQ ID NO: 196138 - DNA, 122 bp, Homo sapiens
gcaaatgttactgggggacacaccggctcccagtagggtttccgccaaggctccgcgaaacgccactagagggcgccgctagcgaatcccacagcgcgccccgctgcccccacttttgtcct

SEQ ID NO: 196139 - DNA, 122 bp, Homo sapiens
acctcaggtaatccgcctgtctcggcctcccaaagtgctgggattacaggcgtgagccaccgcgcctggccagtaatttttagaggtaatactaacgtatttatctaccattaaagacccag

SEQ ID NO: 196140 - DNA, 122 bp, Homo sapiens
ggctctgaggaaagtccaagtttcttttgtaacttgcgctccatgtgacagaaacatgagcgtttccaaaatgaaaacactgggggctttcgcctggaggggcgcagggacagccgcccagg

SEQ ID NO: 196141 - DNA, 122 bp, Homo sapiens
aggcggggatcccgcctgggtgcaaggggactggctcatacacgcacgcacacacgcacacgcttgcacgccagctggcccgggccctgtccatgcagcccacccctggggaggggcctcct

SEQ ID NO: 196142 - DNA, 122 bp, Homo sapiens
aaaaagcaagaatcacaggaaggtaaaggattcagagaataaagacttagggaaaaggggcgaagaaactgggaggttttgcctgaggaatgaagacatcaggctggtgtctccaaatacct

SEQ ID NO: 196143 - DNA, 122 bp, Homo sapiens
acttgtccggcttgaacttcaggacgatggaggcaacttcctccagatactctagtctgacgtccggggccattgtcatcttggcctttccttacactgtgtatctgttaagagtgcaagaa

SEQ ID NO: 196144 - DNA, 122 bp, Homo sapiens
ttaagaagtggattgatctgggaagtgcccaaggtgcaggtaatgatacattttgccaggcgcaggcggtgataatggatcacgttttggcgaggaggataatggatgggtgcccagcggag

SEQ ID NO: 196145 - DNA, 122 bp, Homo sapiens
tacgagcattttttctttacatttaacagcagacctctttaatagtctcctgatgttcaccgagaatatatagtaagattcatatttgaaaaatagcaagaaaaattgtgtaagtttgaatc

SEQ ID NO: 196146 - DNA, 122 bp, Homo sapiens
cctcgataccatcttccttggtctcacttttagtgtaactggagagcccagggaccagtccgagctggccatgcgcgatctgctggcagtggccgcacctgcgaggggacaggagctggggt

SEQ ID NO: 196147 - DNA, 122 bp, Homo sapiens
taagagcagcgtggaatcccggggctctgcgcaccgtgcccggccccgggctccctgacgcgaggcaatgcctgggcacagcgtacggccaccggcaccttcactcctcacctgtgcacgcg

SEQ ID NO: 196148 - DNA, 122 bp, Homo sapiens
acaggcgtgtgtttcattctctgtggttggcatagtcacttcctgtttgtttcctgctggcgcacgtccaaggaaaagccaggtaccaaactgaaacactggatgtagtctgcatcttgcca

SEQ ID NO: 196149 - DNA, 122 bp, Homo sapiens
gatggctaagcctgtggccttccacaagctgaagctgaccaacaacatctctgacaagcacggcttcgtgagtgttggggcagggtggggacggtgcaggagcttgttgacccagcactgca

SEQ ID NO: 196150 - DNA, 122 bp, Homo sapiens
cgcctaccgccctagagcaggaaatagcggtcagcgccagctgtgaggagcacagcattgcggccaacacaggaggcactgaccacggggcaggcgctatttaaaaatcgtggcaaaggatc

SEQ ID NO: 196151 - DNA, 122 bp, Homo sapiens
ttctctacgggagggagggagggagaatccggccggacagatctgcgcgtatcctggagccggcccagttgtgaactaggagagctttgggacctctgtcccaagcaagtaagaactttagc

SEQ ID NO: 196152 - DNA, 122 bp, Homo sapiens
cacacgctcttgccatggacttcatgagcataggattccgagagtgcctaacagaagttgcgcggtacctgagctccgtggaaggcctggactcctcggatccgctgcgggtgcggcttgtg

SEQ ID NO: 196153 - DNA, 122 bp, Homo sapiens
aggaagacacaagtggctggttgttgagagcacgccagcggaagagcacgcgacaggcaccggcaggccaggaggccattgacccgcgagacaaggcggagtttggccggggcagttggagg

SEQ ID NO: 196154 - DNA, 122 bp, Homo sapiens
gctgggtgggctcgagtagtgaggcctcagagcacccgccgggagctgtgcgggcgggggcgtccaggagagcgctgggccccgcctgtctgcgccggagagcaggtctcctggctccccca

SEQ ID NO: 196155 - DNA, 122 bp, Homo sapiens
acttatctctctgtaggtttctgggacccggacaggtgtcctcagaatggaacatattgtcggtcaaggtaaccagctcttcatcactcaggtgtgtgtaccggaagggggtgcctgttcgc

SEQ ID NO: 196156 - DNA, 122 bp, Homo sapiens
ggtaacctgtaaaaggcactctcttaccttatacttcatttcggcagcggtgggttgagccgttttcctacactagttaagacagcattaagcactgcggtgcccgcccctccattgagtgc

SEQ ID NO: 196157 - DNA, 122 bp, Homo sapiens
cggaaggtaggaacctcccacctgctcctggccccagggggcgcgcatgcccagcgggagcgcatcttcacctgcggacgtgaggctgcagcgctgccggccccagccagccagggtgccct

SEQ ID NO: 196158 - DNA, 122 bp, Homo sapiens
tgtcaagtggcgtgacaagagccacctcttaggagcccttaccgtgtgacaggggctctgcgaagcactctagggttgctggcatttaatacagagactcacaggccctgagcagtcggggc

SEQ ID NO: 196159 - DNA, 122 bp, Homo sapiens
ccgggtccctggcgccacgctgtggggcttggtggttcagagccacacctgacaccctcacgtcccaaaccgggatagtcgcaccgacaaaaatcacaggaaggagcgcgcagttgactgtg

SEQ ID NO: 196160 - DNA, 122 bp, Homo sapiens
aacacatgagatgcgttaaaagagttaagtgaaataataggcagcattcaaagagcaaatcgtggtctttggcagaaaatagagttaattttgtatttgagctgtccagttattacaattag

SEQ ID NO: 196161 - DNA, 122 bp, Homo sapiens
atggaagaaggaaccataccctggagtccaatgcctaatgaaagagcttgtgtgtgtgtgcgtgtgtgtgtgtgtgtgtgtgtgtgtgttggagggtgagacacggaatgaagctttataaa

SEQ ID NO: 196162 - DNA, 122 bp, Homo sapiens
tacactcccgtttcactcagagtaaaagacaaagttctcaccatgacccataaagatgtccgtgatattccttcttccttactctgacctcacttgctccttctcacttggtctgctccagc

SEQ ID NO: 196163 - DNA, 122 bp, Homo sapiens
gcgcatccacggctttcagattgggcgactgacttcaaaggggggggcaaacagggaacgcgcaggtataggagcgctggctggaggctcctcgagagctccccagacacgcccccgtgcgt

SEQ ID NO: 196164 - DNA, 122 bp, Homo sapiens
acagcaggctgggcagctggggcagctctgtttcactgcagggcaacctcctctccatcacgggttctgctaggatgtgctcttctcacagcgatggctgcagggcaagagggcaaggctgc

SEQ ID NO: 196165 - DNA, 122 bp, Homo sapiens
gccatcctagttctcacgctttgtctccagccctgggcagacattccctcccccaagaatcgtaaggattcacccccagaaaaggaaaagaattgccttatggcttcgaggtcttttctgtt

SEQ ID NO: 196166 - DNA, 122 bp, Homo sapiens
ccggttccgggacgaccgctcccggagttttgcttccgaggtcaaggcgagtagcatgtgcgggagactcacgttgccggcgaagtgggagagagaaaagtggtaacctggggctgggggcc

SEQ ID NO: 196167 - DNA, 122 bp, Homo sapiens
ggggccttctgtgaggcaggacaggctctacatgcacttcggcttcttggcagatctgagcgaatgagaactgccctgggcttcactcccgtttaactttgcatgaagaagaatgttctcca

SEQ ID NO: 196168 - DNA, 122 bp, Homo sapiens
gttccaggtagaggaaataaccaagtgcaagggaccagagctggaagagcccactggtgacgtgagaaagaaacctgagttttctcatctgtaaaatgatgtcaatggtacttactgcagag

SEQ ID NO: 196169 - DNA, 122 bp, Homo sapiens
tcatcgctgtgagacttggggctggtatccgtcatcgctgttagactcggggatggtatccgtcatcgctgttagactcagggccgatatcgtcatcgctgtgagacttggggctggtatcc

SEQ ID NO: 196170 - DNA, 122 bp, Homo sapiens
tatgcaccctacttacccaaagtcagccgactggtgagcgcggatgattttcctttgggtcgggagtctctacagtatggtcccttttgtggttcgcgagaaagatgttacaggaccccaac

SEQ ID NO: 196171 - DNA, 122 bp, Homo sapiens
actcctgctcgagtgggaaggtcttctgttcgagtgatcctgggagtaaacactcctgctcgagtgggaaggtcttctgtttgagtgagcctgggagtaaacactcctgctcgagtggctag

SEQ ID NO: 196172 - DNA, 122 bp, Homo sapiens
cactttagatttagggtaaaaattcttagagcaaccaagtggcttagtaattattagaaacgaggcctttattaatagtctcaaggtcagagctcttatttaatatggtcctaattatctca

SEQ ID NO: 196173 - DNA, 122 bp, Homo sapiens
atccctgagaaggccacatggagatcacagcacggcaggttcctgttagatgtagggagacgcatggcacagaacagcaagaagccgactggcctgcacaagccccgccctcagcccacggc

SEQ ID NO: 196174 - DNA, 122 bp, Homo sapiens
atacattggtataactggcatttggcaaatataatagattggcgtgtctttctgaagctacggttaatttaaagataagacgggatccctgtaattgtactggtagaaaactggtagaagtt

SEQ ID NO: 196175 - DNA, 122 bp, Homo sapiens
ggaaagtcagacttggagctccggcgaggaaggcaggagaggcgtctggccctggcatcccggctaggaccacaaagaacttgtcaggtcttctgcagcggtgattaactaaatgagctgtt

SEQ ID NO: 196176 - DNA, 122 bp, Homo sapiens
accttctgatgcatttccacgatagctaaatctcttgcatcactaatggacaaataataccgctggcctgcgctggggttttggaaagaggttttcctagaatttgatgtgaattcagctac

SEQ ID NO: 196177 - DNA, 122 bp, Homo sapiens
ggctggcgggggggtgccccccgaggctgctggtctgaacgggtagctgggctggggggacggaagagggaccctaggtgcgctccgctccggggaggggactttgggagggggagcaaagg

SEQ ID NO: 196178 - DNA, 122 bp, Homo sapiens
gagcaggaatgaaaccactagcaattaaaactacagaacccacagaaggccacaacactccgaggacagagagatgtcttgcaaaactctcttatctcagttgtggacaggaagcttttgtt

SEQ ID NO: 196179 - DNA, 122 bp, Homo sapiens
cagtttggagggttctgggaagcacatttgttttgcttacctaccatgggaaagattccacgtggtcctagaagcatacgtattcgtcggttacagtattttaaatattcactggccgctga

SEQ ID NO: 196180 - DNA, 122 bp, Homo sapiens
tccttggctccgccccttccccgccctcgtcgcggagccaggttctaccccgggacatctcgctggactcagcctcccacaggattcaggagtgcggggatgctctttgtgctgagaactcg

SEQ ID NO: 196181 - DNA, 122 bp, Homo sapiens
agcagggctggcacgggaagattgggctgggtggagatcagggctggggctgtgcggagccggggacttctactttccagattcaaaacgtacgccatccctggggtgtggaattacggtgc

SEQ ID NO: 196182 - DNA, 122 bp, Homo sapiens
tactctcacagaacacttctgatgcaggatgggaaagtggctctccttccccacgtcacacgatgctccggcggacactgagcatcctataatatcctggcatatgccctgccaccacccac

SEQ ID NO: 196183 - DNA, 122 bp, Homo sapiens
tgttggactttgttgtgcgccactatcaagctttttccaaatttggtttccaaattactacggcaaagaggtgaggttaaaaggttttgctgtctgcaggcagaaggcatctttgtgctgat

SEQ ID NO: 196184 - DNA, 122 bp, Homo sapiens
ggtctagaagagcaagcaggtgagtgatgggaaaaataggtatgtgaatctttgcagtctcgaagaaattatttcataaaagaaaaggtgatcaactgcatgaaaattaaagaagcccaccc

SEQ ID NO: 196185 - DNA, 122 bp, Homo sapiens
aaagaggttggacggggccccgggtactaggctgggtgggggttgggcgcctgggccggtcgcagttgtctgggggccctggggctctctgcgtcgagagcgctcgaagacccgggattcct

SEQ ID NO: 196186 - DNA, 122 bp, Homo sapiens
cgcggccaggccgggcaggtgagcagtctccgtgcctcccggttggcgttcccctcaacgcgtgcggtcccgccggggcccactgtctctccgtccgtctgtctctcaacttttcccatcct

SEQ ID NO: 196187 - DNA, 122 bp, Homo sapiens
tgcgtcacgatcctatgaggcccagctgcagagggctgggagcttggttcgtgggaactgcgggaccagcgacgtcccacctagcccggcggcctcttgctcacgaccgctgccatttcttt

SEQ ID NO: 196188 - DNA, 122 bp, Homo sapiens
aatctgaacagcacattatactaacctactaccatcaaccagtcatccaccacactcatgcgtaccctaaaatgttattcatcatgccattcaatattatttctgtcctagtttctgtccaa

SEQ ID NO: 196189 - DNA, 122 bp, Homo sapiens
cacaaaaatgacactggccaccgctaattagctggcaaggtaagggtttgtccgttttaccgtgagcagcgttagtgagcaccattgcacacagcaagaagggagagagtaataatgagaga

SEQ ID NO: 196190 - DNA, 122 bp, Homo sapiens
agttcttcacaatcaaagccatgactgtgttgtgttttgagtatctcttgccggagtgtgcgtcctaataaatctcgggtgtgaaatacgctgttttctcctttctttcctctcccgcttcc

SEQ ID NO: 196191 - DNA, 122 bp, Homo sapiens
gtccccagaagaagtgtccttacctgctcctgtgcagcccaggctgagccccagcagcagcggcaggaatgtgatcatgctctgctctgtaaagatgccgggagttcagtcccctggaccag

SEQ ID NO: 196192 - DNA, 122 bp, Homo sapiens
taaagggtctgatatgtcctgggaacagcacagataagctgagtcacaggagggcgaggccgaggcagcccttccaggaagccttttgcttggaggaggagttgatggggctgaggcgtcaa

SEQ ID NO: 196193 - DNA, 122 bp, Homo sapiens
cccgcattcgctcggcctccacaagctggaggtggttaaacaggcactggacggggcttccgcccgttcacaccccaccgtggcctaggtgaccccacaccttcttccaggtctcccggtct

SEQ ID NO: 196194 - DNA, 122 bp, Homo sapiens
actccctcacaccgctgagtgcaaacgcggcactcctgcacatgtcgcctcgcaccgtggcgggcgtgtcccgtggaaagctgcccatgctgcccacgccctccctgggggccccttggctg

SEQ ID NO: 196195 - DNA, 122 bp, Homo sapiens
atcccgaggtagccaggccttgcagcagattctccctgcactcaccggcaccctggcaggcggactggcaccccctctgtgttgtttccgtctcagacagtgatttaactcccttctcacca

SEQ ID NO: 196196 - DNA, 122 bp, Homo sapiens
gtaactggcaggtaactaggctttggagtggtattttaaaatatgtgtcgttaagctgttcgtgggctatcagaggtttaatttttgttcacagcctcaacacccggggcggtggatcagtc

SEQ ID NO: 196197 - DNA, 122 bp, Homo sapiens
ttggagagcaccccttttaccactgcctggttgcagaagtgccgaaagagcactggactccggaaggtaacccctcgccctttccagaagccagagagaccaagtgttatgtaagaagtagt

SEQ ID NO: 196198 - DNA, 122 bp, Homo sapiens
ccgggactgcacgcgctccttcctgcctcggggcgcagggtgagacttacgtctaaagggcgcccggcgagctcgcagcagcccctgccccgcggagggccggtggcgcgcggcgtccggtg

SEQ ID NO: 196199 - DNA, 122 bp, Homo sapiens
cctcatctctccactggagcagttacaaccagagcctcctctctgcgtgggagtgaggctcggtccttcccctgaacacggtgacagggatctctccacaggtagagatgacaccattcctc

SEQ ID NO: 196200 - DNA, 122 bp, Homo sapiens
agagacagaaggtagattcatggttgccgggggttaggggaagggagagtaaggagtgaccgttggccagaaatttccttttggaagtgttgaaaatgtttagaatgagatagtggtaatgg

SEQ ID NO: 196201 - DNA, 122 bp, Homo sapiens
gctattaataatacaacctactagttaaaagtcaacagaaccaaagaactaataaactgccgcaagaacttaaatgcaccacagccaaaagagtttctcagctacacaccttagctaaactg

SEQ ID NO: 196202 - DNA, 122 bp, Homo sapiens
ccacttcagggtcctcgccacaccaccacaaagcttgtctgtgtacacacgagcataacccggcaatggctcttctgttatctacaaaatatttgggtgtgggtttggcggttggacgctac

SEQ ID NO: 196203 - DNA, 122 bp, Homo sapiens
agaacaacttctccaccaatgagaatcttcttctgctgggcctggggcggagccatgaggcgccttgagtgggcgtggtctgagcaatgggcgtgatccgggcgtccgagggaagttgattg

SEQ ID NO: 196204 - DNA, 122 bp, Homo sapiens
aatttccgactcctgaaacacagcccagcagtaataacagtgcagtgatcagatttccttcgttaaaaaagggctctctagacacagaagatcatgagataaagaatctgaaagtaaccacc

SEQ ID NO: 196205 - DNA, 122 bp, Homo sapiens
ctatagttctttgggtaagtttcacttccacacctgccaaaaacgtggggcttttcctgccgtggaagacagggaaggacccgtgagcatgagctgacactgtttaaacaggctttctgctc

SEQ ID NO: 196206 - DNA, 122 bp, Homo sapiens
ggtcgccaggaggcatctgcatccccggggtggtgaagacccagcgtgtatggccgacctcgaggacagggcgattgctccaccagaatgttcccagatggcacagatgcttctggttctgg

SEQ ID NO: 196207 - DNA, 122 bp, Homo sapiens
gcctcaagcgatccacccacctcagcctcccaaaatgctaggattacaggcatgagctaccgtgcccagcctgctaaggaaagattttgtattagctaggattctccagagaaacagaacta

SEQ ID NO: 196208 - DNA, 122 bp, Homo sapiens
tgggagccggcagtggcttgggagggagggagggagaaggagaggggcgggaaggctcctcgcgttttccacgcccccgcccagctctgggctggtggtaaatctcggaactggtccgggct

SEQ ID NO: 196209 - DNA, 122 bp, Homo sapiens
cccagaacgccagtccagacaccgaggagccgaggaaacaggacagcaggcagggggctgcggagagcagcacagtcacggacactgcctccttctccatgccacccgcggtttccacagtt

SEQ ID NO: 196210 - DNA, 122 bp, Homo sapiens
cactctaatgtcaccgacaaaaacgaggtctctgctcttttcatccctgggcttccttctcggaaccccttctagccttgttttaagccagttgatagccttctttagcaatttttagacca

SEQ ID NO: 196211 - DNA, 122 bp, Homo sapiens
ataaaggttagcaagtcttggcttcaattccaaatacaggagttactagttacgtgaaaccggacaaataaacttctcttagctttagatttcttacctgttcgatgaggataattgaattg

SEQ ID NO: 196212 - DNA, 122 bp, Homo sapiens
aacctcgtgcagtgggaaatggaagtgtgcaagctgccaagactgtctctgaacggggtccggtttaagcggatatcggggacatccatagccttcaaaaatattgcttccaaaattgccaa

SEQ ID NO: 196213 - DNA, 122 bp, Homo sapiens
atggatctttggtttgtttccaggtttggttattatgaataaagttgctgtgaatacttacgtgtaagtctttttgtggacaggtttttatttgtcttgagtaactacgtaagagtgcaatg

SEQ ID NO: 196214 - DNA, 122 bp, Homo sapiens
gggcggtcgtgtccacgcccgagggcgcccgcttcggccggggctcggggccggtgtggacggaggccttccgctgtgcgggcaacgagtcgctgctgttccactgcccacgggggcgtggg

SEQ ID NO: 196215 - DNA, 122 bp, Homo sapiens
ctacctacagcctggagcctctgttctttctagcctggaacccaccctgacagctgtagccgacatcagggcagccacttccatccaggtctcgctttagtctggcctccaagtctggtctc

SEQ ID NO: 196216 - DNA, 122 bp, Homo sapiens
gctgctttttatgtgcaccttgtccctgtctgtcacctacctgtgctacagcctcctgggcggctcgggctccctgcaattccctctggcgctgcaggagtcgccgggcgccgccgccgagc

SEQ ID NO: 196217 - DNA, 122 bp, Homo sapiens
tgggacagcagcccttcgtcaggaaaggagaaggcaggataacggctggctgagttccagcggagaagctaaaccagtgtccccaactctgcttgcacacagagaaaatgacagcacagtgg

SEQ ID NO: 196218 - DNA, 122 bp, Homo sapiens
ggtgacgcacgagtgacccacagagagggacccctgggcctctggtgggggcctgggagacggtcgaagggggcccgggcagaagctccgcggccgggccggcggagggaagggggcggccg

SEQ ID NO: 196219 - DNA, 122 bp, Homo sapiens
ctcgccttccctgagccttcgtccctactctcactggcgctgagtccccttgtggccagccgtgctcacctgtccgagggtccagcgtaccaaattcagcttcaccatccgcgcgagaagac

SEQ ID NO: 196220 - DNA, 122 bp, Homo sapiens
gaaccaatttaattttttattgtgctgcataattttgagtaggcctttatcacacacacacgcacacacacacacacatacgcacacacacacacatatctgacgctacaaagaaaatattt

SEQ ID NO: 196221 - DNA, 122 bp, Homo sapiens
tttctagaaaattttctgagaatgcttctgtctaggtttgatgtgaagatatacccgcttcgaacgaaggacacaaagtggtccaaatatccacttgcagattctactaaaagagtgtttca

SEQ ID NO: 196222 - DNA, 122 bp, Homo sapiens
gcaggaggacggccagaggtgcgcgggcccccaccgcagccccagctcccagatggtgcacggaccaaccactcaacaatcagcctgtgagttttcggaagaacagagtcttgggccacgga

SEQ ID NO: 196223 - DNA, 122 bp, Homo sapiens
aggtggggttgtgggtctggataacagtttggagcaaatctattagggcttgcggcttttcgctctaggacggggtattgttttcccagttgagaaggtcggcagaggtgaagggcttttac

SEQ ID NO: 196224 - DNA, 122 bp, Homo sapiens
cctggccgggggttctagtgttgccgctggaagagcgaggtcttaattgctttgcgggagcgttcctggggaagtccagagctgggttcctgcggcccttgggcccccacggcgccgtgtgc

SEQ ID NO: 196225 - DNA, 122 bp, Homo sapiens
gctgatatcacacgtcttgggcaggttcagctcgtttatgtccttctggatccgcagctgcgccgccgacgccttcttgctgctgcgcttggtgcctcccgccgactactcctccttcttct

SEQ ID NO: 196226 - DNA, 122 bp, Homo sapiens
gggagataacagactggagaactggattccgaagtttagaaaaagcctgaatggagtgtgcgttagtctatgtatgctcctcacatctgtctgtctgtctgtctctgctggggaggttgaga

SEQ ID NO: 196227 - DNA, 122 bp, Homo sapiens
ctgcaagatcactggtaagtcagagctggaactgggactcagaatacagcctccttagttcgaatctctcctggcaccttagctaagtctcagtgtttgtgtgaaaggtacaaaatctaagg

SEQ ID NO: 196228 - DNA, 122 bp, Homo sapiens
accaaccattaaggttcaaatccttttctttgatgtgcttatgattttatgcaagtgcctcgatctttctgaagcttggtctttccaccttgtaaatgggggttgtgatagtatttacccaa

SEQ ID NO: 196229 - DNA, 122 bp, Homo sapiens
cccccttccggcggttagcattaaatacaagtgtattgttgtcatacttgctctcctccccggcttcctcctcctcctattcatctcctcctcctcctcctccccccctccttctcctcctc

SEQ ID NO: 196230 - DNA, 122 bp, Homo sapiens
tgctatgaacattcatgtacaggtttttgtgtgaacatatggtttcatttaccctgagtacggctgctcaaattttaaatactatggaaaaagaataaaatttattttattttattctttac

SEQ ID NO: 196231 - DNA, 122 bp, Homo sapiens
agtgcagtggcactatcacgtctcactgcagcctcaatttcccagggctcaagtgatcctcgtacctcagcctcccaagtagctgggactacaggcacatgccaccacaccttgctcatttt

SEQ ID NO: 196232 - DNA, 122 bp, Homo sapiens
ccaggctgttagctgggcagtggtgtgcaactgattggactggtgccagtctgactgactcgttttaaaggtcagaacaactagactgaaccatgggcataataactatatgttctaatcat

SEQ ID NO: 196233 - DNA, 122 bp, Homo sapiens
aagccagaacgagaaaggaaaagactcatatcaacactgtgatcatcggacacgtagattcgggcaagtccaccactactggccatctgatctacaaatgcggtggcgtcgacaaaagaacc

SEQ ID NO: 196234 - DNA, 122 bp, Homo sapiens
tcgcggacttccaagagccctgcacagaagcccgcggctggcagctgcaatcactgactccggctgtccccggaacatccctagaaagtgtgaggctgagtttccgtagggggagggggctg

SEQ ID NO: 196235 - DNA, 122 bp, Homo sapiens
tgacagtggcgcgggcaggaggcaggggacctggagctcctttatctctgtggtctccctcgtgggggactggggggcaggagggctggggcatggagacagccacgggggtggcagcaggg

SEQ ID NO: 196236 - DNA, 122 bp, Homo sapiens
gaacatgaatgaagtataaaaacggttctgagaagtgtcagaggacggagaaagaaagaccgcatttacttggtggctggttatcaaaaatggcttcatgaaggaagcatcatttcaggtag

SEQ ID NO: 196237 - DNA, 122 bp, Homo sapiens
tcgcctcctccacccacccctggcacccactcgtctgccctctgtctttatggatctgcccgttctggtcgtctcttgtgagtggaatcatctaattcgtgcctttttgtgactggcttctt

SEQ ID NO: 196238 - DNA, 122 bp, Homo sapiens
atgccatagttggtccaacattccgtggaccactacagagcaaggatggacttccccaaccggtttttgtaatttcctaaaaccatatgttcattttactagaggatcatagaagttaaaga

SEQ ID NO: 196239 - DNA, 122 bp, Homo sapiens
ggaggcagctggtggcccctgcgtgctcgcggccctgctgctgcttcgtcagaaatgacacgacatacctcactgcacctcctgaccttgaggtgcgctgagaagcactgcagagagcactc

SEQ ID NO: 196240 - DNA, 122 bp, Homo sapiens
gccccttcaccactgcctcatctttattcgctttctttctgtccccggtcttgttcttggcgcggcaggggactgcctcactcggtgccgctgtctctgctggcgcccgggtcccaggcctg

SEQ ID NO: 196241 - DNA, 122 bp, Homo sapiens
cacaaccctgcctcctgtggggcctacgccagccgccctcctacctgtagtagtggctgtcgacaggcacctcgctggggaagcccagcatcccgcacaccaccctgctgttgttcatggtc

SEQ ID NO: 196242 - DNA, 122 bp, Homo sapiens
tgccaggtgctgagagcagatgaggggcatcagagggtgggcgcccgagccgaggggtgtcgggcgcatccgctgcccagcggaagcggcggcctgagtggagtcaccgtgcaatgggtggg

SEQ ID NO: 196243 - DNA, 122 bp, Homo sapiens
cacctgctgtcggttctgcactgagcaatgctgattgacatgttcttcacgggatgctgccgcgtcggggggtttacgcagcaaagcctgaggtcagtcggatttccttgctcttccccttg

SEQ ID NO: 196244 - DNA, 122 bp, Homo sapiens
aggctcggcgggggagagcggaacagagctgggcgtggcagtgcctgcgagtcagcgccacgtaaccagaggcgctcgcactaatttgacctctaagagagactaagcgcagggaacagcgg

SEQ ID NO: 196245 - DNA, 122 bp, Homo sapiens
cggccagctccctcagcgaggggtgccccggctaaaggtggctcccccatcttccagcggcgtccctcgagacctaaaagtcccagagtttggagggcggggtctggcttgagcgtaccagt

SEQ ID NO: 196246 - DNA, 122 bp, Homo sapiens
agccctggtagagcactcactcgggggctccatcctgagccctggtgacctggatgaggccgtggaaactgcctgtcgactctcttagggctataaccccatccttctcttctgtatcagca

SEQ ID NO: 196247 - DNA, 122 bp, Homo sapiens
ccatcggcactggcgccctgctccatcggcactaatgctccactcggcgccccactccatcggccccgctccatcggcactaatgccccactcggcgccccactccatcagcactaatgctc

SEQ ID NO: 196248 - DNA, 122 bp, Homo sapiens
tccggctggctctgaaccgtgcgtggtgcctacagcctgcagtctggagacaagctcttccggagtgctctgggagccaggccagggtgtgagggaggtgcagaggcatccggggcgggagc

SEQ ID NO: 196249 - DNA, 122 bp, Homo sapiens
atggagcaacacgctgttttaatgagcacctgggtgcaggcgagatgaggtctaaaatggcgtcagccccaagtaaggatagggcaggggtttttttgttttgtttttgtttttgagacaga

SEQ ID NO: 196250 - DNA, 122 bp, Homo sapiens
tgctgcttctcccccaaggggaactttggggtgcagaggctgaaacagcagttggagagacgtgtggactcatctgtgaggagctgaggaagccaagaacagggatccggaaaccggggttg

SEQ ID NO: 196251 - DNA, 122 bp, Homo sapiens
gactctgtcacccctgggctccccctgccatcgtgtgcttcacgtggccccatgcatgcccgcctctctgcatggtctcttgggaaaagagagatgtgtcgcctccgccagtccgactgccc

SEQ ID NO: 196252 - DNA, 122 bp, Homo sapiens
agcctgggcaatagagtgagactccttctcaaaaaaaaaaaaaaagaaagtggggtcttacggcatccctcaaagtagacaggtgacattaccctagacaagcaggaacaggacccagccca

SEQ ID NO: 196253 - DNA, 122 bp, Homo sapiens
ttagtctgaggcaggggccctggctgagtatttttaaaaagtgccccaggaggctgggcccggtggctcatgcctgtaatcccagcactttgggaggctgaggcgggcggatcacatgatgt

SEQ ID NO: 196254 - DNA, 122 bp, Homo sapiens
agttagggcctagctgcggaaggccttaacctttttatgcctagtattccattactggaacgctaagggcgtgggagttacttttatccgactgctcaagtcattgccaaggtctgattttt

SEQ ID NO: 196255 - DNA, 122 bp, Homo sapiens
ctcagaactcactttctacatctgcaacactggggtaataatgccagctcacagtgctgtcgggaggattaaaggagtccaggcaataaaaagcactgtatacactgttaagggctagattc

SEQ ID NO: 196256 - DNA, 122 bp, Homo sapiens
cctgtgggaaggacagttcaggctgggccctggggctggaagtctcatttgaggagcacacggtcccgagaatggcacgtatttaacaaccttctttagggcaaactctgcaacggagcccg

SEQ ID NO: 196257 - DNA, 122 bp, Homo sapiens
tccccacgtgtcaagggcgagaccaggtggaggtaattgaatcatggggctggttccgcacgtgctgttcttgtgcgaatgagtgagtctcgccagatctgatggttttataagcgtctgac

SEQ ID NO: 196258 - DNA, 122 bp, Homo sapiens
ggctcggggattggccgcaaccgagagggctgggcagaactataagaggcgcggagggggcgtgcagcagagtgcgttcctcgtctgccagccggcttggctagcgcgcggcggccgtggct

SEQ ID NO: 196259 - DNA, 122 bp, Homo sapiens
ggagtgtaagtccaagtctccgggttagagggtgatgcaggggccagaggcagctacccccgtagtatgtaatggggcctgggaccaggagattctgcaactaattcattggatggtattgt

SEQ ID NO: 196260 - DNA, 122 bp, Homo sapiens
ggttcccagtcttcccaaaggtactcttacatagactccgttttagtccatcagtagtctcggactaggaaaagagaaatcctgagaaagactgtaaataggagattcatcctgccaaactc

SEQ ID NO: 196261 - DNA, 122 bp, Homo sapiens
ggctggcggtgatacccaagtgtgtaataacacagtcacgacaatagtcaccgtttgctgcgcactctctgatgccagacaccatatgctaaaggagttacaagtattaactcatttgattt

SEQ ID NO: 196262 - DNA, 122 bp, Homo sapiens
cccgcccgccagctgatcccgggagcgccgggcggagactgacccgccgcccctcccccgcgcgcgctcccgcccggctccatccacccaaccaggaagtgaaccgccgccggaagtgcccc

SEQ ID NO: 196263 - DNA, 122 bp, Homo sapiens
gccgccagacccgccggagttggacccgagcacgccgcggagcccggaccctccctcggacgctctgccccggccatggcgtcgctgctgccactgctctgtctctgtgtcgtcgctgcgca

SEQ ID NO: 196264 - DNA, 122 bp, Homo sapiens
gttatagtgatttgctaaatgaggcataagtctgtctcacatacgttctttttccacgtccgctacaggttcgggggctcagaaactttttgcggcttcctgcctgctgccagaaaggcagc

SEQ ID NO: 196265 - DNA, 122 bp, Homo sapiens
ctgcgtggtcctgatgacatctgcggatcttttaaaatcatacgatcatgtctgcgaaaccgggatgccacttcccacctggcttctccctgaccccagcttgttcccttggagggccggtg

SEQ ID NO: 196266 - DNA, 122 bp, Homo sapiens
gaggaagcagatgaggtacacgtaccccctagccgggagcactcaagctccagcagaaagcgtatcaactccatccctctgctgttcagagtagcttagagtctcctccccttctccacgtg

SEQ ID NO: 196267 - DNA, 122 bp, Homo sapiens
ggtgtctatgcattgcccgtttgccggcttctagctgggtctgcgttcatgggagggggacgggttgggatgaaagagtccctctgagcagccccttttcccccttggccattaatatccca

SEQ ID NO: 196268 - DNA, 122 bp, Homo sapiens
cgggcgcaggggtggcctactcacctgggggcgaactccttctggcacatggggcagctgcgcagggccgcggcaccctccacagacggctgctgctccaccctgggggccctgcagggatc

SEQ ID NO: 196269 - DNA, 122 bp, Homo sapiens
agaatcctagaactggaactggaacccagagctcctggccacgggctctttcagcagcatcgccttctattcctgttgtcctccatagtggctgactggcccagcagtcaatgttaccttta

SEQ ID NO: 196270 - DNA, 122 bp, Homo sapiens
agaagatggcgggatcagtggccgacagcgatgccgtggtggtgagtgtggcagggcgcgcgcgaggcgcccctccccgccgtcccgcactccgccgccgcctgctccagcagtgctggggt

SEQ ID NO: 196271 - DNA, 122 bp, Homo sapiens
gatctccacctcccctgggaggcaagacccacaccctcccaggtgcgcgagttgtggctgcggttcgcgaccccgccccacttacccagctggtagaaaagtcatcaatgattcgtctgaaa

SEQ ID NO: 196272 - DNA, 122 bp, Homo sapiens
gggagctgagcttgccgaggtagacagtggccacgtgactgctaaaccggttgccagaggcgcggccatttttggggcgggcacccaatctctcgccctgtaaactgcggggtgacgggacg

SEQ ID NO: 196273 - DNA, 122 bp, Homo sapiens
atttaatatttattgagcgcccacggtgtgctaggcgctgcacagaccattcggaagacacggtccctgccctctaggagctgacaggctaaagcaacaggatggacagacatatacatttc

SEQ ID NO: 196274 - DNA, 122 bp, Homo sapiens
cctctgtgtggggtctaggtaaggaagcagccagaaggccaggatccccctctctacatgcgactggactagttccttaccgaggacttgtggggaaagttggtctgatgcctcagttgttt

SEQ ID NO: 196275 - DNA, 122 bp, Homo sapiens
tgtgaggcgcaaaaaatgtcccttccagagctggccagaagcctgtgagtgctgttgacacgcacccttgtgcacacacatcccctttctctttctgtctcctacacacacatgtacacaca

SEQ ID NO: 196276 - DNA, 122 bp, Homo sapiens
attctgttgcccaggctggagtaagtggccgtcatagtgcactgcagcctggaacttgtgcgctcaagcaattcttctgtctcaacctccaagtagctgggactatagatgtgcaccactgt

SEQ ID NO: 196277 - DNA, 122 bp, Homo sapiens
gaccccaacggaagccggcaccatcgcagcacccctgtctaccacgcctctcgcgtgggccgggcagacatcctgaaggccctcatcaggccagtactgtggagctcgcctggctcctgcag

SEQ ID NO: 196278 - DNA, 122 bp, Homo sapiens
ccccagcagagacgtcctctgagttttcttagacaagactggctgagtctggggcagcagcggcccctacaggaggctggaaaagccatttcccacatgacgcttttttttttttttttttt

SEQ ID NO: 196279 - DNA, 122 bp, Homo sapiens
gctccggcccgggcggcgagagtgcccggcggtccatgcatccgccgccgcccgccgccgcgatggatttcagtcagaacagcctgttcggttacatggaggacctgcaggagctcaccatc

SEQ ID NO: 196280 - DNA, 122 bp, Homo sapiens
tttcattatctgctaaatccttccatcctcacctcagagtcccaggtgataccaccagaccggtccacagaaatgtgtgaggctaatctttttaaaagcatacttttaagaaacagagataa

SEQ ID NO: 196281 - DNA, 122 bp, Homo sapiens
catgctcctgcagggacatctctgagtttggctctgggaatgacctttcctcttactctccggcacagtctcaggacttttagagatcaatatgtaggaagagcccaagctatctagagtcc

SEQ ID NO: 196282 - DNA, 122 bp, Homo sapiens
tgtacacaccctgtgacgttaggagcaatatccgtcggggatgttaggaagaatatcacacggaacacaccccctgtgacattgcgatatgacaaataatatcacaaggcgtacacacatca

SEQ ID NO: 196283 - DNA, 122 bp, Homo sapiens
agggcagtccccaccgaggggcggaggtcagcatggccatggcgggggtagcacaccccccggtggaggatgctggccgtctggagagtctcccaggctgggatctgggcttcgctgctgta

SEQ ID NO: 196284 - DNA, 122 bp, Homo sapiens
ccccgcgcgcgcatgctcagtggcttctcgacaagttggcagcaacaacacggccctggtcgtcgtcgccgctgcggtaacggagcggtttgggtggcggagcctgcgttcgcgccttcccg

SEQ ID NO: 196285 - DNA, 122 bp, Homo sapiens
aaacaataaaacagctacttttcatgcaacacaaaagagggagcatttttctcagcaccgcggcctcatcacatcttctgtgtttcctgtcccatgggcgacgcccccactcccacccggtc

SEQ ID NO: 196286 - DNA, 122 bp, Homo sapiens
aggcagatggtgaggcggaggcgggcagacaggcagagatggggaatggggggagagagacggcaaaaaggacagcggctgggaggacagagagtcattgagaaagcagatggacagacaga

SEQ ID NO: 196287 - DNA, 122 bp, Homo sapiens
ctgcttctctggttaaacccttactgatacatcatccaagactattatttcagatcctctcgaggtagccaggaaacctaagggagagaggagctagcctagcacagagaccagtaaataag

SEQ ID NO: 196288 - DNA, 122 bp, Homo sapiens
atgaggatgacagcgagggctgccgcggagaccttcatggtacctgtgggagaggctgtgcgaggtccacgtgctgtcttgatcctctgcaggaatcctctgcagctcaggctggcccttta

SEQ ID NO: 196289 - DNA, 122 bp, Homo sapiens
atgaacatgattggcagcttgcgtcttccaataaaaactgggggcgtgggtgggcggagccggaagtagagcccagccgagaggcccctgtccggctagggaggagggaagggggagggaac

SEQ ID NO: 196290 - DNA, 122 bp, Homo sapiens
atgagggtgtccagccgcagtcagggtgggcatgcccacagccagtcatgggcgggggttcggctatgtctgaggccaaggtcgcctcggtcacggacagagcttagaggcgcccagggcca

SEQ ID NO: 196291 - DNA, 122 bp, Homo sapiens
ctacgcgggacgggaaggatgcaacctgctggaggaacgcgtgtaatgcggtggtaatcgcgctgcaccaccctagcacttaataattgcctgttaaatggatgagtgaattaatttctata

SEQ ID NO: 196292 - DNA, 122 bp, Homo sapiens
tatcttacgcacgatatctagtgacagaggagaaagtggaaaatgacctcaaggaagctacgggcacaactggaagctttgtagaaattaaacatattcaaggagcaagaaatgaactttca

SEQ ID NO: 196293 - DNA, 122 bp, Homo sapiens
agggtatagaaatcaataattggcctttaattaacaaacatacccaggtatgctcgcaaacgtctgcacatcctgtaagattaaattacatacaaatttgtgctctcaggtttattacgtcg

SEQ ID NO: 196294 - DNA, 122 bp, Homo sapiens
gcgcccctcgccgccggagctcagggcagctgtcgcgcccgccggtggctaagacggaggcggcagctcggaggcttaggccacccgcgtctggctacacgcctcatttcttcccgcgccct

SEQ ID NO: 196295 - DNA, 122 bp, Homo sapiens
ctgggtgtgtttctcggtgtccactcagccctctgcccctttgtgagcatcaggtttatacgtttttatgaaatggtgggagacaggctctcccttgatgcagtccctgtagctataaaaat

SEQ ID NO: 196296 - DNA, 122 bp, Homo sapiens
gctccggcccgtccttggtcgtcaattacctcattgtggatctgccagggccaaggtggccgaaattgcctgggcgctggtcggagagagagccttttgatcatcttgcggggcgggggggg

SEQ ID NO: 196297 - DNA, 122 bp, Homo sapiens
aaattttcaaagcaacattattttttaaaaatcctttcaaaaaatcaatagctggcccggcgcggtggctcacgcccataattccagcactttgggagaccgaggcaggcggatcaccgtag

SEQ ID NO: 196298 - DNA, 122 bp, Homo sapiens
caaaaattccagctgggcggagaaagcggggatggctccgagttagaatggaagagaaaacggtttacattcccggcgtcatctgaagtgaaacttttctcaacacactttttttttttttt

SEQ ID NO: 196299 - DNA, 122 bp, Homo sapiens
aaaggtgtattcaggaaaccctgaagccctcactgaaaaggcaaaagcagggaaagaagtcggggagcggtagaccagaagaaagaaagagttatagctaataagccaacaaaggaaagaaa

SEQ ID NO: 196300 - DNA, 122 bp, Homo sapiens
aggtgtgagccaccatgcctggccaggaggtcacttctaaatcttactgggggctatgcacggtggctcatgcctgtaatcccagcactttgggaagctgaggtgggaggaacacttgagcc

SEQ ID NO: 196301 - DNA, 122 bp, Homo sapiens
cgttgctatagtgccgaggcctgccctgcccggaccttattctcaaagccccgccgatcccgccgtccccgcgaccccaagcgtcagcaaagtttatgcagttgaactggattctgagtata

SEQ ID NO: 196302 - DNA, 122 bp, Homo sapiens
gatggcaagaacactacactggggagaagacacacttttcaattaatggtgctgggaaaacgggattgccacatgcagaagagtgaaactggaacgtatatgtcaccatacacgaaaataaa

SEQ ID NO: 196303 - DNA, 122 bp, Homo sapiens
gggagtgttctcagcactgaagccaccaggatcagcagacacagcccagctcaatgatcccgagagtgggggcagcatcaggctcacctccggagagcagggtcccagaggccacaaaaatt

SEQ ID NO: 196304 - DNA, 122 bp, Homo sapiens
ttcatttattattccgtgcccacccacaccctaaaaatcgctctcttcaccccaattgctcgaaatgcctgtcactccaagcactttgactagcccaagagcctcatttaaactttagcccc

SEQ ID NO: 196305 - DNA, 122 bp, Homo sapiens
cacacacacacacacacacacacaccgtacaaccttcttatggtcttccacataagaccacggtttcatctaactcataggaagaaaaacagaccatgatcctacaaggtttacttcaattt

SEQ ID NO: 196306 - DNA, 122 bp, Homo sapiens
agagtctgtgaggcttttgtttatggtttttgtctgatgtaagaaaatttgaagtcaaaacgagtcatatgcacccagtcaagacccagcagctcctgggcttccaggatacagatgggcag

SEQ ID NO: 196307 - DNA, 122 bp, Homo sapiens
ctcaatttcaggaagcaggaggctagctctgcagggtgggggcgcacctgggctgggctgcgcggaggcggcggaagcactaggcgcggcgcccacaggcggacggctggcgctgagcgcgg

SEQ ID NO: 196308 - DNA, 122 bp, Homo sapiens
cgcgtcccaggctcaggctgcaatgcctttctctttctctttctcttctttttgcagttccgttgggtcctgcccaggacagataaagacagagcagcctgtctttatcggaggttcctctg

SEQ ID NO: 196309 - DNA, 122 bp, Homo sapiens
aactagtgacctagtgacgggtgaggggcgccaagtggtgcggaccacagtctcaacccccgttccctctcggtgggagtcaagggggaaaagcccttgaatcccgagacggggggatgggg

SEQ ID NO: 196310 - DNA, 122 bp, Homo sapiens
ggcgttctcgatgctgctttcttagcctagaaaagcacagagtgggcgccctccctgctccgtggtgcgcgtgttgattgtctactgctgtataacaaactctcacaaacgttagtggcttc

SEQ ID NO: 196311 - DNA, 122 bp, Homo sapiens
gccgcctccccgcgggccaggcgcactgacacacgtgctggcgcttccgcaaggtcctagcgcacccgtcccgccggacccccgcccccaaccccgccgcctcgctaggccagtatagggca

SEQ ID NO: 196312 - DNA, 122 bp, Homo sapiens
tcccagcaatgccagggtgagcccttctcccacttgtcatcgctctgcttctctctctctcgaggttttttccaattctgtggactcttgcaattccactggggccacccaaataatccatg

SEQ ID NO: 196313 - DNA, 122 bp, Homo sapiens
tgtttcaggaaatcggagctgctcgattcatgtgtagcaaatcaaagccaattagatctgcgttaaccttggttttcaacaacttgtatcgtgaaaaggtttctgtccatgtttaccctcat

SEQ ID NO: 196314 - DNA, 122 bp, Homo sapiens
agcacccaccagtcctagcagaaacttccagagagttgctcctgctacttcaatggggcccgcttacctgtctattgtccctccacaggggcaggggccgggagacctgcagagacaaagag

SEQ ID NO: 196315 - DNA, 122 bp, Homo sapiens
gcctttcgggcctcgaatctcggcccactggtattcgggggtggcacggatcctattttgcgcccagatcggtgcccctgtttcgctcccagagctgggcggagtctttccctccatcggtg

SEQ ID NO: 196316 - DNA, 122 bp, Homo sapiens
gatgggggacgtggggcagcacccgcaggtctaaatcggggtgggggtgttcggtccttgcgggcttcacgagatcgattcctgactattttgcggtgaactgcacaactcacgcagtaatg

SEQ ID NO: 196317 - DNA, 122 bp, Homo sapiens
ggtcatggaaatgctgtgacataaatgcactgtgaccttggcaagtcttgcaacctgcagcgcctcaatttccgtaagagatttgaccgattgagttttcccagcgtcgacgcgcaaagatt

SEQ ID NO: 196318 - DNA, 122 bp, Homo sapiens
tgaactcagtggctgctgttttctgagcacctgaaccctgtgggggacgacagagttgcccgaggcggcaggatgtccccacactcgcggtcccccgcacatcttcctgttgctttgggact

SEQ ID NO: 196319 - DNA, 122 bp, Homo sapiens
actctgcagcaaagacaacaatgaacaacacagtcatatttgatataaaaggacatgcaacgaacaagaaatgagcctttgttctttcaagtgtactgtgatttgggggttgtttgttactg

SEQ ID NO: 196320 - DNA, 122 bp, Homo sapiens
tattttctctataaggactcatcacaaaaccataaatactgacgatcctgttgaggcagccgtgaagccaaccaactttatggtgataatgtttcccataaaaggaatgagctgactggaca

SEQ ID NO: 196321 - DNA, 122 bp, Homo sapiens
gtccccctccccgggagcggcgggagcggcgggcgggagacaacccaaaaagggcaggcgcggactccttcctgcaggaattcccagcgccgcataccagctctgggctgccggctccccct

SEQ ID NO: 196322 - DNA, 122 bp, Homo sapiens
ctgtcaagggaagagctgaatcttttatcttttgtaacgactacccagtgaaagaaaccgcgggtatgcaataaaaacctgttgaatcgattaaaccatttcccttatttccagatttttgc

SEQ ID NO: 196323 - DNA, 122 bp, Homo sapiens
gcgcagccatcttgtctaggccctgtgcccactgctctgcccagcatcattaaggggggccgttgtgccaggttgaggaaggaggtgcacaatgagacagaagtttgggctggttggcatga

SEQ ID NO: 196324 - DNA, 122 bp, Homo sapiens
ggggatcgtgctaggtcccgtcgccctcggtggcctgagagcctaccaagtgtatttcctcgcgttttatagggaaaataaggcccggagagagacgaagcggcttgtccttaagctccaaa

SEQ ID NO: 196325 - DNA, 122 bp, Homo sapiens
gaggccccactgctggttttcttcctacttccccaggtgctcactttttcattctcttcacggactctgagatgttagtgatctccaggattctgtcttcggccttattctttagtcattct

SEQ ID NO: 196326 - DNA, 122 bp, Homo sapiens
ggctacaactcgggaaaacctaagtctgtaaaactaagtacgttaaactaagtaagttctcgctgtgcaccaagttgatgggggcgattatttacggcggagaaactgagtggaggaaggag

SEQ ID NO: 196327 - DNA, 122 bp, Homo sapiens
tgagcgccgggccccgcactcctgggggagcagcagcagcaagggctctgccttacctgacgctgtaggaggcatggaggatgcccaggctgtgaggctccggggcggtggcaggagccccc

SEQ ID NO: 196328 - DNA, 122 bp, Homo sapiens
acccgggaagtgcaaggggtcagggaattccctttcctagccaagggaagctgtgatagacgacgcctggaaaatcgggtcactcccaccctaacacagtggttttccaatggtcttagcaa

SEQ ID NO: 196329 - DNA, 122 bp, Homo sapiens
agcctcccattgcttcactacacggggcgtagcctgttgtcctacttttagtgctaagaccgatcagtgtgttaaggttttagtgctaagattgatcagtggtttcaggtggagctgccgac

SEQ ID NO: 196330 - DNA, 122 bp, Homo sapiens
tggtattattatgaaatcaccagattacattgttaagtgaaaaaggcaaagtggagaccccggagctacataagctaccacttgtgctaaaggggaaaaatataatatttgcttttctctgc

SEQ ID NO: 196331 - DNA, 122 bp, Homo sapiens
gcttcagagcaaaagaataatgtgtccatgtgttcctccagatctctgagtcctggcagtcgacctcaactctcttggccaccataaagcagtcattgaaaggacacagctgcaggaactag

SEQ ID NO: 196332 - DNA, 122 bp, Homo sapiens
cgcactacccaataggcatgttgggggggcggggcctccgtgaagtcccggcctcctgttcgttctctccgcctcccgaggccccgggtgagaaacgggggagacgcgaggggcggagcttg

SEQ ID NO: 196333 - DNA, 122 bp, Homo sapiens
cagctctcaccacatctggccggggttttgcttcgcgatgggcgcggtctttccggactccgagacccccaggcccctccgaggcccccaggcccctccgaggcttcccagcgcttctcact

SEQ ID NO: 196334 - DNA, 122 bp, Homo sapiens
ccagcccctcccacctctggctcttaggactcacattgcaagtgggggaggcatcctccgcgaggcgcggactgagagccagcccctcttccccccctggctctagggacccccatcgcagg

SEQ ID NO: 196335 - DNA, 122 bp, Homo sapiens
ttgtggttccaagagcctgtctcaggtaccttgaacactccctgtatcctttcaagcaggcgaggtagctgttattcctatttagtagataaataggcaccgatgggggaaaagatttttta

SEQ ID NO: 196336 - DNA, 122 bp, Homo sapiens
cgtgaggggcatgggtatgtgctcatcaggccagctccttccatgacctgctcagagccccgtgccagcccctctgtcctctgttcctggacagttgttccatatcctccttcccagtgccc

SEQ ID NO: 196337 - DNA, 122 bp, Homo sapiens
cagctcgacccctgcggggaccacgatgggccggaaggacagcgagtgggggcagatgggcgtgatcatgatggccggcacgttggggtggatcatggaggccccggccgcggccgcatacg

SEQ ID NO: 196338 - DNA, 122 bp, Homo sapiens
gagaggaatcacattcctcaatttttaacagctctattgagataaaattcacataccatacggttcacccatttaaagtgtataattcaggccgggcgcggtggctcacgcctgtaatccca

SEQ ID NO: 196339 - DNA, 122 bp, Homo sapiens
ccggagcccgtccttccctaaggccacacagttccttgctgactccatgagggacactggcgatgaaataacaactttctcttcctgaaaaggctcccacggctgagttgttcccggcccac

SEQ ID NO: 196340 - DNA, 122 bp, Homo sapiens
cgggcggcgtggcactgctgtcaaccaccagcagccgctcaggtgaatggcggctagcaacgggcactgtgctctgtttgctggctctgctggttctggtgaaacagctgatgagctcggct

SEQ ID NO: 196341 - DNA, 122 bp, Homo sapiens
gcgaggtcagcacggtcctcccctggcagggcctccgtggtgccttggctttagggctgacggtcacggtgaggtgatggtcacggtgaggaccctaaagcagcgttgaaactgcactagct

SEQ ID NO: 196342 - DNA, 122 bp, Homo sapiens
cagggcttggtgaggtgactcgcggtcgcgggtgactcgccggcaggacactgcctggaacgcctggagcgcctcccactgcagacgtctgtccgcctccagccgctctcctctgacggtca

SEQ ID NO: 196343 - DNA, 122 bp, Homo sapiens
ccactcccagggggccaagtcccacaccttcagaccctcaagacgggagccggaagccaccgcggaactaaagtctgggaaccccccttggggcgctcaggattcacccgcgcatgtggctg

SEQ ID NO: 196344 - DNA, 122 bp, Homo sapiens
tcagcagcacagcagcgggcgcgtgggaccccagcccccacctgcaggcatgcacgaccacgataagcttgtttctctgcgagctgtgccggatggtcagctggatctgccccagtggagac

SEQ ID NO: 196345 - DNA, 122 bp, Homo sapiens
gttgaggaagagtcaagtgaagatgagcagccacaccgggtggcctgaggtcacaccccccggggagggggcgcagagggtcgcgggggagccggcagtgaccgcgcctggggtgtgtctta

SEQ ID NO: 196346 - DNA, 122 bp, Homo sapiens
aatggggacaaacagaagagttcagaagttaaagatgcctcagtgatgggcctgacaggacgctgatcacttagtgatgagaatgaacggaaaaatgctcacctggaggtactagagaatct

SEQ ID NO: 196347 - DNA, 122 bp, Homo sapiens
catctgtgggcgcgggttgagcagtgaaaagccaccagggcacccgccgcttgaagtctccggtgacacgataactcggtcagggaacgggtcgttcaggtcctgccgagcacaagacacgt

SEQ ID NO: 196348 - DNA, 122 bp, Homo sapiens
ttctgctctaggaaggagtgccacgcctgttccgcggacttctgaccccgcacaccaacccgatggaagtagtgaagacagtagggacgcacagcacagtgactgaagcctgaaaccctgag

SEQ ID NO: 196349 - DNA, 122 bp, Homo sapiens
gttttgtttccttcacttactttgaggactcttacaaagagaagagttactgcattatgacgtgtgcccagacctagagcacttccgtgtactttgcgtgtgaattttagtaagaaccactc

SEQ ID NO: 196350 - DNA, 122 bp, Homo sapiens
gtgtctgggctagctaggatcacagctgagagcgaaggtgctctcagtgtccgaagaccacgtgctggtgaacccacaatgagaagcgaaagggtttcaggactctagcagaaaggaagagc

SEQ ID NO: 196351 - DNA, 122 bp, Homo sapiens
acgtgcaaccttctccgccatcaccattaactgaagtacacgagacaaaacggcttggagcgtccattttcacaggatgagtggtgggcgcgcgcgcgccctgggtccccctccaaaagccg

SEQ ID NO: 196352 - DNA, 122 bp, Homo sapiens
gatctgtgacaggtaggacagatcagtcaaggtggtggaggagcgtggttgtgggaggtgcgttgactgtggctatttactctgccagagaggaggcactgattgctctggtcagcatagtc

SEQ ID NO: 196353 - DNA, 122 bp, Homo sapiens
ggcctggggctggagtccgattgccgattcagcccagcaggtgagatcgagggcagctctcgacacactttctccaaggctagggtttctcaggttggggacgctttactcccccagaaaat

SEQ ID NO: 196354 - DNA, 122 bp, Homo sapiens
ggagggctgcccgccagttcacggtgcgtgccctgcacagcctgggcgtgggccgggagccggtggctgacaagattctgcaggagctgaaatgcctctctgggcagctggatggctacaga

SEQ ID NO: 196355 - DNA, 122 bp, Homo sapiens
tatggtaacctggaatagaaaaggaacttcttcactccactggcaaggctttgggtctcacgcccacggctgaagcagtgcgaagagtacggggctcctcttcagaagacctgagttccgaa

SEQ ID NO: 196356 - DNA, 122 bp, Homo sapiens
gatgcgcatgtaaggggtgccatggagcacccgggaaggacccaggcctgggcagggaggcgttggggccggctctagggagcaaagctgtcggagtccaggcctctatcacccgactgctg

SEQ ID NO: 196357 - DNA, 122 bp, Homo sapiens
tctgaaccatcaagttatcctgttttcacataggcttcagggctgtaccactcagctggtcgtgcaggtggctgggaaaggtgtgaagcatccaacaatgtagtgaaggatccctatctgta

SEQ ID NO: 196358 - DNA, 122 bp, Homo sapiens
gggcaacatagagcacccttcccctgctccaaaaacaacaacaacaaaaaattacccaggcgtggtggctcaggcctgtaataccagctacttgggaggctgaggtgggagaattacctgag

SEQ ID NO: 196359 - DNA, 122 bp, Homo sapiens
ctgctgtcgccatcttccaggcagacaaagacaccatcccccacccttgtctgattcgggcgtggtgactgcctggttattgagatttgggagcacgcatatttaaccccagacagatgccc

SEQ ID NO: 196360 - DNA, 122 bp, Homo sapiens
gttcccatttaagagacgaacaaatcaaggctctgcatcaagtggccccagagagagactcggggagttggacatgatgtgtctaccttctgcttgctgccagaacttcatgtgtactctta

SEQ ID NO: 196361 - DNA, 122 bp, Homo sapiens
tccctgaagcctccagtcacagtttaaatttagaccttctattctggtccgtgctgctcacgcctcaccccgtggccaccggtcagccagtttccccgagcacaagtgtgctccggagggac

SEQ ID NO: 196362 - DNA, 122 bp, Homo sapiens
tcggccccggcctgcaccttcatccccaggacgtcccgatagaaacgcgccgtctggaagcggtttcccactttgaatacgaagtgcagagctctgcgagcagccatgattcccgccgcacg

SEQ ID NO: 196363 - DNA, 122 bp, Homo sapiens
acactcatggtgcagcacctgctggatctctgagtgcccctacctctctctgaccacccccgtccccctgtgctcaaatccagggaggattgtcccgcccacttgtggggagagtgaaggag

SEQ ID NO: 196364 - DNA, 122 bp, Homo sapiens
taattctatcccatctccttgaaacagtgatgcagaggggaaccctgctagaggggttcacgtggacttaaatgcccattccctcctcacctgactcttcttgtgcccctaaacatggatgg

SEQ ID NO: 196365 - DNA, 122 bp, Homo sapiens
agatggggaggagggaaaatggccgaggcgggaggactctgaggcccggaacgcggcagccggctcggggccgccggcactggggaggcgccgccgccgccaagaatctgccgcctggcgcg

SEQ ID NO: 196366 - DNA, 122 bp, Homo sapiens
aggtgaaaacagctatccactcctgtggccttataactcaggaaatgctggggatgcaaacgtgcaaaaggcagggggaagctgcccaggctgagactggagcagctaggagtgtgcttggg

SEQ ID NO: 196367 - DNA, 122 bp, Homo sapiens
cacttgagaacccacactaaggagaaaccctataaatgtagtgagtgtgggaaagcctatcggtatagttcacagcttattcaacaccagaggaaacataatgaggagaaagaaacctcata

SEQ ID NO: 196368 - DNA, 122 bp, Homo sapiens
gcgagactaaaaaacacttttatttgtgcaatcacaaacataccagtcatccccatctctcgctggctaatgagtcactactgctatagattcactttagtctgcattcctagatagtattt

SEQ ID NO: 196369 - DNA, 122 bp, Homo sapiens
tgagaggactgtcctaactccctcaagcttttctgtgcagatcctaagaggcccaggatgcggccagagtcctagcctgaggacactaacaaagtttggttcctaaactgttggcgcctttt

SEQ ID NO: 196370 - DNA, 122 bp, Homo sapiens
attctttgttccttaagctcaatgtaatagtctgcattttgtgttagagcagcatctccccgcaaaggccacccctgtgtttggcataaatcacaatgcagggagaaggctcattcagtggt

SEQ ID NO: 196371 - DNA, 122 bp, Homo sapiens
ccatgatctcctgccccgtctgcaggatctgcgggcgacagctgtgagggaggcgccccccgcaggggaccccagccccaggtcccaggtcccaggccctgcccctcaccatggtggagtct

SEQ ID NO: 196372 - DNA, 122 bp, Homo sapiens
aatcttggctcaagatttagaagcagcctgacctcgtctacggaggactcctcaatcaggcgaggggcctctgcagacaggatgccgtgggtggccataacatagatcttataggcgcctct

SEQ ID NO: 196373 - DNA, 122 bp, Homo sapiens
gagatgcggaagtctgcaggtgcaacatcatcttaccacgcctcgtaggagctggactgccgcaggactttcaacgggatccttagttctcccaggaattcatctccaaacttcaggttact

SEQ ID NO: 196374 - DNA, 122 bp, Homo sapiens
cattcaacaatcccatgatccccttgcaacaaccctttcctggccagtatcacagggtgccgaccctcacagggtctcacaattcaacaattcagtgagagaggatgcagcaacaaagactg

SEQ ID NO: 196375 - DNA, 122 bp, Homo sapiens
actgacccctgccgcttcccggcctcacccttggtctcccctttccagcattcgccagtacgagcttgtggtccacaccgacatagatgcggccaaggtgtacatgggggagatgggccggc

SEQ ID NO: 196376 - DNA, 122 bp, Homo sapiens
cttcactaaacatctttcttgccttatgtgccccattgagcttcacagtgtcaggctggacgccgtgatttcagggacctatgtcacaatgttcgctgaggccccaggtgtggtggggaggg

SEQ ID NO: 196377 - DNA, 122 bp, Homo sapiens
ctggagaaagatgcatgtgccaagcgagacaacaaccccaggtccatgtgtccaaatccccgtagccagggcggcggccagccaaagaaatgccgccccgagcaggcgcgtgcggctcctgg

SEQ ID NO: 196378 - DNA, 122 bp, Homo sapiens
gcccaaagcctgggctcctactactcaccactgacctacagttctaaaatcagacagacacgctggcccagggccccagagcccttggcacagagcggacctccagcctccttcccgtgagc

SEQ ID NO: 196379 - DNA, 122 bp, Homo sapiens
gccgcgtcttcggcttccacgatctgcgttcgggctacgcggccacggcggcagccactgcgactcccactgtgcctggctctgtccatattagttcccaggcggccgtcgccgttccagca

SEQ ID NO: 196380 - DNA, 122 bp, Homo sapiens
gccaggtgtgccagagacacatagataattaagacctgatttatgaccttgaatgggtcacgtttataaatcctcctgtaaacatgggtaaaatgtaaaagtaaaatgggggcacatgagtg

SEQ ID NO: 196381 - DNA, 122 bp, Homo sapiens
tcccgcccgcctcctctcctcctccctccgcgggtccggccctcggcgcctccccaccctcgctccccacccggccggctcagctgtccctgcgcagggctactgacgctcaaggttagttg

SEQ ID NO: 196382 - DNA, 122 bp, Homo sapiens
tgccggcagaggtagatggagcggggggtcacgtggatgttcatgaggtaatatacgatgcggctctggatgtggtcagccacacggttcaccacgtagctctggcccacatccatgatctt

SEQ ID NO: 196383 - DNA, 122 bp, Homo sapiens
tgggggagacctggctggccggaactgggattcggggggagcattgcccttcggcgtaagcgctgctcaggtagagcccagcgctccgcttctccacagaacgtgctggcgcgcgcgtcaga

SEQ ID NO: 196384 - DNA, 122 bp, Homo sapiens
ccggaaaagtttggttcgggctgcttcttaccgtttttcctcctgggattggcttgtttgcgcctcttgcaccgggggccatccgccatgatcggctgcttcattgataagagcggatcaga

SEQ ID NO: 196385 - DNA, 122 bp, Homo sapiens
aaaaaaaaaaaagaaaagaaaagaaatcagccacgattcagatttttaatgctaacaagacgttttgctttctaaatgcacacacctttaatataaggggtgtgaggacagatatttccaca

SEQ ID NO: 196386 - DNA, 122 bp, Homo sapiens
actgcggttcagtgcagggctccccagtggctgctccgggtcgcaggtggcctttgctgccgggtcagtgctgtggtgaccgtcctcgggcagatgctgcccacatcctcctggtgcagcgt

SEQ ID NO: 196387 - DNA, 122 bp, Homo sapiens
ggggcccatggactcttcagtctggagggtcctgggcctcctgacagcaataaataatttcgttggacacgttgcttgtgcctttccatgctgactatcagactctgcgcccctgaggctac

SEQ ID NO: 196388 - DNA, 122 bp, Homo sapiens
agggaaggagctttggtcatatacccagccatccacacagggctctgtatctggctcactcgtgttggggaaggtcccattcagatgaatgagcttccactggggatggacaaagcgacgac

SEQ ID NO: 196389 - DNA, 122 bp, Homo sapiens
ggcaagcacttttatctcagctggatgctctggtcttttagttgctggcatcagtagggacgccaaagagctaaaattttagttcttaaagagcagacatttagcacactgatattcttaat

SEQ ID NO: 196390 - DNA, 122 bp, Homo sapiens
tgtgaacccattgtgtagctcagcttatttctactcctcctgtctcccatcaaaggaagccgctgtcctaaactttatcatctttctcttatcacatgtgtttttctttttttactataata

SEQ ID NO: 196391 - DNA, 122 bp, Homo sapiens
tgggtcttgtgttccagtgacccaaattcacaacaaaaaggggattgatgaacttgatgtcgaatattcatttatgctgagagacttaactgtgaagattaggattctatttataacagccc

SEQ ID NO: 196392 - DNA, 122 bp, Homo sapiens
cgctggagagtcttttcgcccgtcttagggtggccctaaatccggggaagttttatgtggcgctgaacacttgcgtttcccaggggcgttttccctagctcccggaaacccagtaggtaact

SEQ ID NO: 196393 - DNA, 122 bp, Homo sapiens
gctttgccttgaggtggtcttagacaaaagagcccgacaagggcagcaaggaggttcctacgcggaaggaagcccgtggcttctgctgcgctgcgagggcttgaccgccatgtttgaagcgg

SEQ ID NO: 196394 - DNA, 122 bp, Homo sapiens
tattagggctattttgggatcttttagggtttgctgtaggttgaaccttagagggaaactcgaatgcctagcagaaaacttcaaggaacaggattgactttactaacttggaaaacacaata

SEQ ID NO: 196395 - DNA, 122 bp, Homo sapiens
gcacaggtacacagagagcctcagcatgcccagtgttctgcaaagcagccgggagtaagacgaagaaggctcagaattttcctgcattttccctgttccttgcccctggcagctgtgcctga

SEQ ID NO: 196396 - DNA, 122 bp, Homo sapiens
ttcttcatgctccaggacacacagccctccagacacacggcaaataacacattcttcctgcgccccagtctcaccagacgcctgaaggttattaacgcacactctccagcaaggctttgttt

SEQ ID NO: 196397 - DNA, 122 bp, Homo sapiens
ctagacagtctgcagggtgcacacagaaagtacacaaatgcggggccgggggagcctccgcgcacacagagacggggcacaggaacgcactcacgtagtcacgccacgcacaggcaagaagc

SEQ ID NO: 196398 - DNA, 122 bp, Homo sapiens
tgctcaggccagcaaggcattggctgctctgctcacggctgagaggcagagctgctgattcgctctggaaaggctgtggctgtccccattggaccctggaggtccttggcagctcccacttc

SEQ ID NO: 196399 - DNA, 122 bp, Homo sapiens
cagtgctcccgtacccgtggtgctcccgtacccgtggtgctcccgtacccgtggtgctcccgtacccacagtgcttctgtagctcttgtcatgacgttggggtgctttaggcctcagaaaac

SEQ ID NO: 196400 - DNA, 122 bp, Homo sapiens
accctatcgtgaactgcgcatgcgagtgatctaggttgcgcgctccttatgagaatctaacgcctgatgacctgaggtgcaacagtttcatcccgaaaccatcccccacccccagtccatgg

SEQ ID NO: 196401 - DNA, 122 bp, Homo sapiens
aatggactctgatcacagtttgaggaactcctaaacagagaaagaacatgaaatttagtgcgtataaaagatgtggtatatttagaccggaaaaatcatcatgaatgtttgttaaaaatagg

SEQ ID NO: 196402 - DNA, 122 bp, Homo sapiens
gcggagcagaaccgcgctgcctcagaagctgccgggctgtgtgtttctgcgggagtgttgcgagtgttggctgcccgagtgtgtatgcggctgtctgtgtgtgcgcgtgtgtgtgtttctgt

SEQ ID NO: 196403 - DNA, 122 bp, Homo sapiens
ccacatagtctttcacctcatccaagtctccgtttttcagggcccacatgaactccttgtcgcacatcactgcagcggggcaggccggttggccgggcagaagatgaggaggcggtggcagc

SEQ ID NO: 196404 - DNA, 122 bp, Homo sapiens
gccgctccagctcgtcgatacgctctcgctgggtgtggatgaggctctgctgcttctgcacgatggccgtgagctccttgaggcagagcacggcgcgcaccggattctccagcaggctctcc

SEQ ID NO: 196405 - DNA, 122 bp, Homo sapiens
tcacccctcttctttctcagtggttacttggtctcctttctgttgctttaacacaccaagcgctttcccacctctgggcctttgcacatccctgtttcctctgatttaatcattccccctcc

SEQ ID NO: 196406 - DNA, 122 bp, Homo sapiens
tcaattggtgcatccttgtttttggagggcattagagtcactttcctgcaattaaaggctcgcagtactttgttagattgaagtcaaatggattcagatgtggagccttattccttgtctta

SEQ ID NO: 196407 - DNA, 122 bp, Homo sapiens
gctgcccgtggacccgccctgtggacacggtgagacccgccctgtggacacggtgagacccgacagtcaggaaaggatgagcgctgtgtccttgcactcacagggagtcccacggccgtccg

SEQ ID NO: 196408 - DNA, 122 bp, Homo sapiens
cctcacctggactcaccaggcggcgtgttgtcacatctgcatcctcctaaaacacatacacgggtttatttaatggaatggattgaagccgcattgtagacaactgcgctgtccctccccgc

SEQ ID NO: 196409 - DNA, 122 bp, Homo sapiens
cttatttcttaaagctctgagaaaattcagttgttgaatacgcatgtattaagcactttacgcttaaacactaattccatagataggaatacaaaagaactataggaaagggtccttatcct

SEQ ID NO: 196410 - DNA, 122 bp, Homo sapiens
atcaattagtcgatggtaaaattggttttaaagtcacagtttccatgaacctatctgtgacgttttaagtgaggacttactgtatatagtgcttcttagtgctgaaacaggcagcgtgtctg

SEQ ID NO: 196411 - DNA, 122 bp, Homo sapiens
tgccgctggggaccctggggactcacagcagtactgctggggacgccgaggacgcagagccgtgccactggggaccccgggaaagcagggcagtgccactgggacccagatcatgcccctct

SEQ ID NO: 196412 - DNA, 122 bp, Homo sapiens
ctgtgagcttacaagaaatggaaaaatccaaagattaatcccttcttcctcatctggtgccgaagaagaagggaacaagggattcattggagcctatatttcatctgtcttggatttttggc

SEQ ID NO: 196413 - DNA, 122 bp, Homo sapiens
gtgcgtgacctcaggttaactgctcacagctacagaaggaatgagccccgcgggggggcacggtcgaggaccctgacagcctgtgacacggggcggttcctgccatgtggggctgtgctggg

SEQ ID NO: 196414 - DNA, 122 bp, Homo sapiens
ggcctctcccctcgctctcagcccaagatgacagagtatgacaagcgctgctgctgcctgcgggagatccagcagacggaggagaagtacactgacacgctgggctccatccagcaggtggg

SEQ ID NO: 196415 - DNA, 122 bp, Homo sapiens
gaacccggggccctcacctacccgagctacctccgagcttggcgcgagccggagggctcccgggaatgccctccccgccattttcgccgatgagctcgggctcacccttccactggaagcga

SEQ ID NO: 196416 - DNA, 122 bp, Homo sapiens
caaatgatcaacatttgaaatacagacaggatcccaacctgcacttgcatgaccttgtctcgcttgcctcaccctaaacccagccttgacactccaattaaactttatttacaaaacaaggg

SEQ ID NO: 196417 - DNA, 122 bp, Homo sapiens
agtccacagtctcgcaaggatggagcctggatcaaattttgggttatcagattccaatcacgtttcttagcttttcttttttttttccaactccagtttctgtcttgctccaaaaaagggga

SEQ ID NO: 196418 - DNA, 122 bp, Homo sapiens
aaacatgacgattttttccaaaactgccgtcaggtgcggtgccaggtgccacgtttatcccgggcctaccgccgcggtgccagtgaagccgcctgggattccgggcaaagtggggctgtggg

SEQ ID NO: 196419 - DNA, 122 bp, Homo sapiens
tcccttaatgactcctccaacttgagcttttcagggtctccgtagcgtacagtgctgtcacggaggccactaggagaggccactttcacaacttggtcaaaaaggctaaagtcagctatgta

SEQ ID NO: 196420 - DNA, 122 bp, Homo sapiens
gcggcgcgcgggtcttcccggcggctcccgcatccctggccccggggctgccatcccgcccggttttcatctgggccaaatatgtgcacgcaaaggttaattctctgcttgctacccataaa

SEQ ID NO: 196421 - DNA, 122 bp, Homo sapiens
ccgccggcggccgggcggagacgctcctcacttcccagatggtgggccgccgggcagaggcgctcctcacttcccagcttgtgaggtggccggcagaggcactcctcacttcccagacggta

SEQ ID NO: 196422 - DNA, 122 bp, Homo sapiens
cgggggctgcagcggcgccgctgagcgcggcctggggcgggcgcggcggccgcgatgccgcggctcccggtgaagaagatccgtaagcagatgaagctgctgctgctgctgctgctgctgag

SEQ ID NO: 196423 - DNA, 122 bp, Homo sapiens
tttttttttttgagacagagtctccctttgtcactcacgctgagtggagttgcacggtctcggctcactgcagcctcgacctcctgggctcaagcaatcctccctcctcagcctccagagta

SEQ ID NO: 196424 - DNA, 122 bp, Homo sapiens
aagggtggggggcattcggtctgtcacctggctccggttgtatctgtagggatccaaggtcgtggaagagccccggatgccaatctgcaccacacgcttacagtccaggagaccctcatcca

SEQ ID NO: 196425 - DNA, 122 bp, Homo sapiens
ctgcacgggttggggtcaagttctcgcattctctggaagaagctggctgttctgttcccacggcggcctccctgtttctgggagcagacggaaggccccagcgcgcactcctcccttccgcc

SEQ ID NO: 196426 - DNA, 122 bp, Homo sapiens
ggaccccaagagctcaacctgctgcctctcctcctgtctgaagttcccttagtgcatgttcgggtttgaatacgtttcagtgagaagtcccgcgtttaagaggcagatggaatcgggaggag

SEQ ID NO: 196427 - DNA, 122 bp, Homo sapiens
agctgccttctgtgcttctgttggctcatctgtgtttctcctcctccaggatactccaagcgggcctggacgtggagcgtctctccctcaggaatttcttccatcatttccattccaagcga

SEQ ID NO: 196428 - DNA, 122 bp, Homo sapiens
gcctggagctgtctcgtgcctgcttgtggtgggatccttgtcttcctccagtgctggtcccggtccgtccatgggcggactcagactgttcatgagtgctcacctggtagaggaaagaccct

SEQ ID NO: 196429 - DNA, 122 bp, Homo sapiens
acagaattcctgagtgaacgaacagagcagctcctcttccatctccaggtaagaactgctcgtgtcctccttgagggtgctggccaccggggcctgaactaccttctttcttttccttttcc

SEQ ID NO: 196430 - DNA, 122 bp, Homo sapiens
actttgcaggacgaaaaaacaatgtattctccttaaaataaattatgtcctaacatgggacgaaacccggttgcaaagcacgagtattccttccctcgtgttaaaaaccaacgctttgattt

SEQ ID NO: 196431 - DNA, 122 bp, Homo sapiens
ccccaacaccagcccctcctttccagatgcaggccccaccccgcccgcggaggaagcccccgggagccttagaccctccttggcaccagccatgccactctgggaagtcctgggggttacag

SEQ ID NO: 196432 - DNA, 122 bp, Homo sapiens
gattagttggctatcctgggcccctggctttcgttttttgatggagttttcctctcccgacgtagggaaatgaggctatggcagtttgtgcccaactttcagattcattcaaataacattgc

SEQ ID NO: 196433 - DNA, 122 bp, Homo sapiens
agttcagtagaatggcaacttcctgcatttgtgcctgtgcctgaaggggtgattcacgcacggacctcccacaaagacagcccccacaccgcgccccagccaacaccgccaggcccagtgtc

SEQ ID NO: 196434 - DNA, 122 bp, Homo sapiens
ggccaaaggcaaagtgctccctctgcccccacgtgacctttttgtgagcagggaaaatgacggtctccccaggccaaggtcaccagataccccgatccgtttttcccctcccagtgggattc

SEQ ID NO: 196435 - DNA, 122 bp, Homo sapiens
cccggagctcattgctctcctatagacctgacagccttggtgtagtttgatgtgggctgccggagggagcctgtgtttattgcattgggtaaactgaagatccacttcaatgatcctgcctg

SEQ ID NO: 196436 - DNA, 122 bp, Homo sapiens
agtccctcagtcccttggtgtcaaagggcacagagatggccaccttgaaattcatagaaccgggtgcaagacataacagccctctgtgtggcctcagatggcagagcagggtggcagcagct

SEQ ID NO: 196437 - DNA, 122 bp, Homo sapiens
ctctcacgacgaccgagggagagaccaggaagtgctgccctcattttacaacggaggacacggagaccaggagtatcgaaaagtttatgggattctcgcccgccccaactcaaggacgggat

SEQ ID NO: 196438 - DNA, 122 bp, Homo sapiens
ctgccccgctgtgcggcggagaccccggctggagggggcgctcagcatacggctgggagccgggtagggaccccgagtctccgaagctggggaccccgacctcttgccccctcctgagcccc

SEQ ID NO: 196439 - DNA, 122 bp, Homo sapiens
agatttgttttactttttgccttctcactcttcctagagggtcgccatcggaggcgtgtccggtgctcatccaggtaaaagaggcggacaagccctttggttccacgtttcagcttgatcat

SEQ ID NO: 196440 - DNA, 122 bp, Homo sapiens
aatgacctaacatagatagaatggtggagatgagcatctaccactttctgtcttcccccccgcatcttcctggttcttcttttcctcttccatatgaattttagtgagaattggtgtatcaa

SEQ ID NO: 196441 - DNA, 122 bp, Homo sapiens
ggtgtccttaaacttagtttttcatttccagaagccttctcgctgtaccttgtggtcacacgtggagggctacgatacctcctcatctcaccagagagtgggaagtttcaaataagaacatg

SEQ ID NO: 196442 - DNA, 122 bp, Homo sapiens
tattatggtgaggggactcaggacagtttaggggaagagagtggcatttgagtcctaactcgtaaggaagactgggtaggactacttgaaaataacttttaaaaattaattataaagctggt

SEQ ID NO: 196443 - DNA, 122 bp, Homo sapiens
gcatttccccttgtcccacccagcgactggttgacaggaagcagggtgtctatggactggcggcgggcgccccttttcctcacctccctgcgcggccagcgggggcccggggtgtggtcagg

SEQ ID NO: 196444 - DNA, 122 bp, Homo sapiens
ttctggtactacgtgaaggaggtcctcaacaagcacgagctgcagcgcttctactccctgcgccacatcgcctcagacgtgggccggggtcgcgcctggctgcgctgtgccctcaacgaaca

SEQ ID NO: 196445 - DNA, 122 bp, Homo sapiens
accttcctgtccgtgtttccttggttctggagtgcacacttcccccagctgaagtggggtcgcagcacgggccagcacggtagtgactaggcaactcccgccaccctgaattggcagtgcag

SEQ ID NO: 196446 - DNA, 122 bp, Homo sapiens
ccaacggaacacattgcctttatcttatactgttaaaatagcctcgctgatcattacaggcgctcttaatcacttttagggtctaggctctgccccagacaccctactagctggaacagaaa

SEQ ID NO: 196447 - DNA, 122 bp, Homo sapiens
gctatataaggcccgcgccggctcaacttcggacttggtgttatttatttgggaagcgcccggacggcggagcttggcggcggcggtggtggtggctgccgcagactgtggttaaaaaaaag

SEQ ID NO: 196448 - DNA, 122 bp, Homo sapiens
atggaatacagctctgcctgactgctcatcggctctggttcattcttcatgacattattacgtgttatttccatgagttcctttgtctgttatgcccaaattttattttctttcacattctc

SEQ ID NO: 196449 - DNA, 122 bp, Homo sapiens
ggctgcaggcgccggagcggagaggccagaagttggggccgcggggttcgcgttctttgacgtgtgggtctgggaggtgtggagttgcgttggcggcggttgttttgcacgcagtcgacgcc

SEQ ID NO: 196450 - DNA, 122 bp, Homo sapiens
agcctgtgtgcccacagctgtgactgccaagtgaatgggaagcactaagaattgcctcctcgggatctctagtagtatacataacatgctccagagggcatggatttgtcagactttttttt

SEQ ID NO: 196451 - DNA, 122 bp, Homo sapiens
ctgaggggtcgtcgggtcctggaagggcgttcaggggtctcgggtggctagcccggctggcggggagatgtcagctagcggccggaggagcgggctcgggagggggcggcggctcgcgcgct

SEQ ID NO: 196452 - DNA, 122 bp, Homo sapiens
agctcatacacatgcaaggatacacacataagcacccccagattcaaccacagaaatatacgccagtacatttgcataaattcaaacacccctttacatgtaaaaatcatataagcacatac

SEQ ID NO: 196453 - DNA, 122 bp, Homo sapiens
aaagggacagcctttttgtgagcacagtattaccttgcccctgccccaaacaattaaccacgtaaaaaaaataaagatgtagttgaggaaaaatgttcaccctgtcttccaactcaggtact

SEQ ID NO: 196454 - DNA, 122 bp, Homo sapiens
ggtaactgatttcaacacacatttcagtacacagacgaaagaaccttgttatgagatcatcggtcttcagtattccttgctggtgcatctacaacaggaacaaaaaataaagacacaatgag

SEQ ID NO: 196455 - DNA, 122 bp, Homo sapiens
ggtcacacagccagcagcagcaaagaggagtctcatcctggtttctctgtcgtcttcacccgtgctttggccacagcaccgcagtgctctctaaggacttctgtaagctgcacagtttgctc

SEQ ID NO: 196456 - DNA, 122 bp, Homo sapiens
cctctctcatgctttccctgcctccccctccactcccctctcttctcacattcctgtgaacggaatgtagcttaatgcacagggtggcaactggaggatttgttggtggcacttctctccat

SEQ ID NO: 196457 - DNA, 122 bp, Homo sapiens
agctttattaggttgccactgcacagacaagcacttgtcagcttctgtttgccttgcaaccgaagacattagttatcccagcagaaagaaactgtggactttcaagtctcaagtagaaagaa

SEQ ID NO: 196458 - DNA, 122 bp, Homo sapiens
aggcctaattccggcagctcctggggctgcggcgactgccggacactccggggcagcagacggctaggaaaccagggccaacaaagagtgaaaggaaagcaaggaaggacagacggggaccc

SEQ ID NO: 196459 - DNA, 122 bp, Homo sapiens
gtgtttgtgtccagagtggaattactgacattggccacataggctcagggtggctaggcacgtctgtggtgataactctgataaactattagcactatttttatttaatagatacaccattg

SEQ ID NO: 196460 - DNA, 122 bp, Homo sapiens
tcctggaggggcttgactcccgcagcctgccgcccgcctcacggtgacagcccgcccgggcgctgaccatcccggcccggctctgtttacaagcggcttctcgcggtcccactctgaaatgc

SEQ ID NO: 196461 - DNA, 122 bp, Homo sapiens
gttttgtttttccttgaagttcttgccatttttttctcttaaaagaatgaatgggggtgacgggcttttatcctagaatagacctacgcttaataaaaagtgtttctcaaaaaatatgaaga

SEQ ID NO: 196462 - DNA, 122 bp, Homo sapiens
aggctgccaatctcccatcccagggaggctccgctcaaacccatgagccccgagaacgtgcgtgcgtgagaacagcgctcttcagagtggtttggtgttgttgcttcttaagattgattttt

SEQ ID NO: 196463 - DNA, 122 bp, Homo sapiens
gaacttaaccatctgcttaggaaagtgtggagcttcggcactgccaaaatctgggctgggcggatcctggggctggccgggcgctgcgctgccccacagatagccccctcccatccctgacg

SEQ ID NO: 196464 - DNA, 122 bp, Homo sapiens
gggaagtgagcgggctgcctctgcgaggcaagtgcagttgagctgatgtggatcttacgtcgcttgagtgcccacctcctcgtcctctccccatttgtccgccgcacaaagacgctcgcacc

SEQ ID NO: 196465 - DNA, 122 bp, Homo sapiens
tcccgctttcgacaaagtctcagctccgcagcagcacccggcgcggactcgctgggcgcgcggactgagctccgggtggaaccaggaccctcgcgccctcgccctcgccctcgccctcgccc

SEQ ID NO: 196466 - DNA, 122 bp, Homo sapiens
gatgttaagggtgctcttccgggtgggctccatgtccattctcttcgtttcagccactcacgcttctggggaaagaggacacacaaagaaatttctgtcccattcccgaaaggtcttagaaa

SEQ ID NO: 196467 - DNA, 122 bp, Homo sapiens
cctggagcgccggtgcagggctcctccgctccgatgggcgggtcccgctgggagtggcggcgcctttggggccagctgggggctccagcctctccaaggtgttgtctgagagcggataagag

SEQ ID NO: 196468 - DNA, 122 bp, Homo sapiens
catgctctctttttaatttcagaagtcatgtacaatcacattgtgaaacttgggaaacaacgcttccttccttcaaagtcagttctgctattcatgtggacctaatgtctctaggaccttgt

SEQ ID NO: 196469 - DNA, 122 bp, Homo sapiens
catcctatgctggttccttaaggtcctgtgacaatataaggatacactttcctgtcccatcgcagtggatcaaggccctttggaccatgaacctccagaggcagaagtctctgaaagctaaa

SEQ ID NO: 196470 - DNA, 122 bp, Homo sapiens
aggcagcgtcttccctgcttcaggccaggcgtgggatccgggccggtcttctctccagtccggttagcgggcggtcactgggtcacatctctacggacgttttcctgttatgacagcctcag

SEQ ID NO: 196471 - DNA, 122 bp, Homo sapiens
accccaccaggctgaggaagccactttcccatcttgcctctgtggcaggtgtagttagtccggcccctccttacgccctggggtgaggttgggcctgcgagtcatcccgggccttgggcttg

SEQ ID NO: 196472 - DNA, 122 bp, Homo sapiens
ctgtggccctcaggacttcatccttctgcaggcttgtgtgtttgttttatttttttggcacgcctgcagccaagttggggagggtttcctggacagaggtcctttggctgctgccttaagac

SEQ ID NO: 196473 - DNA, 122 bp, Homo sapiens
gtacgcagcattcccgcacccgcctgcgcctcgcgagcagaaagacggcggactctgcaccgctccacgacactggggacccgccccggccagacccgtcccctaccgagaccttgtccccg

SEQ ID NO: 196474 - DNA, 122 bp, Homo sapiens
gtcaacccttgttaaatccaacatattgcctggtcttgtccctgtacccatgcagcagtacgttgctggggaaaaacaaatttgtgacgattaacctcatataggcctttcatgatttctgg

SEQ ID NO: 196475 - DNA, 122 bp, Homo sapiens
cgattggccccggctggggtggagcagggggagggagggagggaactcgccttcccaaatcgaatcaaggcagaacggtgacctaagggggaaacttcgccattagtagatagatgtctcca

SEQ ID NO: 196476 - DNA, 122 bp, Homo sapiens
tacttcttcctgccacggtcgcgattgagaggcaatgggtggcgagcctacaggggacgtcgtcgaggagacatgggataactttaagggagcaggctggttgtaaggcggtgggactgggt

SEQ ID NO: 196477 - DNA, 122 bp, Homo sapiens
gtcccaccctgcttcttgggaacccactgatgttttgcaagctatgcttgatgaaatcttcgagcaccagggcaaactcgtgacctacatatattcttaatatgctaatttttgttttggtt

SEQ ID NO: 196478 - DNA, 122 bp, Homo sapiens
ccattgaggaggctctcagcggagtcgctcttcacaggagtcttgaacgcggtgtggaatcggcagcgaggaatcctggagcacagagaagctcccagctttgaaggtcttgcggtggtgcg

SEQ ID NO: 196479 - DNA, 122 bp, Homo sapiens
gcccgcctctcgctgcagtgagccctgcctccagaatgaggtgaagagtgtgcagccgggcgaagtctgctgctggctctgcattccgtgccagccctatgagtaccgattggacgaattca

SEQ ID NO: 196480 - DNA, 122 bp, Homo sapiens
cccttggtgtcatcaatacccgagcttattttcctttctgctccaccatccaaaacatgtcgcttcacttagagattgcctcattagcacaaaatggctgctgaagtgcttgtcatcacatc

SEQ ID NO: 196481 - DNA, 122 bp, Homo sapiens
tgctgcagctcctgtaccacactgcgcaggctctggttctccactttcagactggtgatccggacgacgagctcgctgtggtctccgctggggccgctggaggccccggggcctgagtttcc

SEQ ID NO: 196482 - DNA, 122 bp, Homo sapiens
gcccggcttcctcctctacaaaatggagatcgcaaccgtccccacccgatagcgagagggcgcacacccgcattccaggctggacgggtctctgggcagcgggctcctccccgcccagggcg

SEQ ID NO: 196483 - DNA, 122 bp, Homo sapiens
ggtggctaggccgtgggccttgggagctgggcagtctgggctgggctgggctgggcagggcgccacatggaagctggaggagcaacgggagcgctgggcgtggggtgcaaattgcccggtgc

SEQ ID NO: 196484 - DNA, 122 bp, Homo sapiens
gtgagactggagtctgcccaggggcccagctgaggcagcctcctcgtcagctgcttgggccgccaggacgccgccgggggtgcgccgcgcttccctggatggggtgcccccactcccctcgg

SEQ ID NO: 196485 - DNA, 122 bp, Homo sapiens
cgtcccggaggcctgaaggccgtgcctggtgcccgggcaggtgtgaggaggctgagcccccgacagcatcctctctcttcgttcccagtccccacgtggggccttggggcacagactccaga

SEQ ID NO: 196486 - DNA, 122 bp, Homo sapiens
aaagtcccaatgcacttgctcatcccgaggtttaatttcccaacaatgattccagaaacacgtacaggaaagcagcagcttgggccagccatcaggtaactggatttgggaattatttagga

SEQ ID NO: 196487 - DNA, 122 bp, Homo sapiens
ccaacctcgctggctggaactgcagtttggggatgatccgatggatccagttgtggtgggcggtgacacggatgtagacacctgggcggttctggcgggcacagccctcaccccagctgatc

SEQ ID NO: 196488 - DNA, 122 bp, Homo sapiens
agaaacaagactacaaaactcagggatccagaagtaggcagcgaataaacaatcccaggacgattcattccttggcttaaagggagccaggcctttgggaaggcaggttagcaaagatagct

SEQ ID NO: 196489 - DNA, 122 bp, Homo sapiens
ttcgccccttgactgctccgcttccgggaggcggggcttctgcgggttccacctcccgagcgccccttgtggctaccaaggtcaggcaacaggtgtccagttgttccctctcctgtctacga

SEQ ID NO: 196490 - DNA, 122 bp, Homo sapiens
gggctgcaaggaaattctgccctgtttccccctgccctcttccctagctcttttctttaacgttgtgtttgcttttcatctttgtagcctgctgggttaaagggcaaaccacaggcagagag

SEQ ID NO: 196491 - DNA, 122 bp, Homo sapiens
tggtagacaggtgtgttctggacttactaaacaggcttagaaatgcattttccggctgggcgcagtggctcacgcctgtaatcccagcactttgggaggctgaggcgggcggagcacgaggt

SEQ ID NO: 196492 - DNA, 122 bp, Homo sapiens
tcctaatttaacaagccttccagctgattcttacacatagtacagttgaataccacccaccgctctaggttaatattcaaagaaccaagactgctagtcttctctaataatattttaacctt

SEQ ID NO: 196493 - DNA, 122 bp, Homo sapiens
gctcctaatttttgcctaatgtgaaacatatccaaagatgaatacttaaaccatcagttccgtggcggagtaaattgaacgttgttctccgatcaaacaggagcttcgggtccacctgtttg

SEQ ID NO: 196494 - DNA, 122 bp, Homo sapiens
agggtacgtctgctgtgccggccacccctgccctctggatttccccactgcggggcagcccgcgcctgtcacctggctggcccaacccagctggccctggctctgttaaccccctcgtgccg

SEQ ID NO: 196495 - DNA, 122 bp, Homo sapiens
acagtctgggagctaggtgccaggtagcaagggtgcagtctgctctttcccttcttcccccgacccaccacacccgcccacctccacccccaacttccaggcctagcacctctggaaatgag

SEQ ID NO: 196496 - DNA, 122 bp, Homo sapiens
accggaagtggagcctgggagccttgacgttaggaacgaagtctaacctggatctggagccgggtgaggagtggcatcgggaggttggcgggtaggaaagcaaaggagaggtcagggtatta

SEQ ID NO: 196497 - DNA, 122 bp, Homo sapiens
gggccttcacgcctttgctccctgttggctggcagcagcacacgtgcatagaatgtgtgccgtggaggacaccaggtgagacctctgaggatcacataagatggtgggggtcaggatgcatt

SEQ ID NO: 196498 - DNA, 122 bp, Homo sapiens
ggcgaagtggcggaggtgagcacctagaggcgaccctgcccggggaacagctggcgcgaccgcggacagagcttcccaccacgcccttccccgcctttggccagcctttgccgtatgttctg

SEQ ID NO: 196499 - DNA, 122 bp, Homo sapiens
gcccccagcaggagacccgggctggcggccactgcgtcctgggtgcactcggtggcaaagcgctgctaccgggcacgggtctctgcagctcaaaacctgcccggctggagcgcaccaatagt

SEQ ID NO: 196500 - DNA, 122 bp, Homo sapiens
tgtatagggtgtgtgtgagtgtgtgtgtgtgagagagtgtgtgtgtggcagaatagactgcggaggtggatttcatcttgatatgaaaggtctggaatgcatggtacattaaactttgagga

SEQ ID NO: 196501 - DNA, 122 bp, Homo sapiens
ctatctgacaatcacggtgtctggtgccttgagaccttggatcaccaggagagtgtccctcgggttttgtgtggaaagggtatgttgagccgggtggatgaaaaaaggaggaagacagccat

SEQ ID NO: 196502 - DNA, 122 bp, Homo sapiens
gaaacgtacactcctgagtagggactggatacacacgcggcacacacccacacaacaggccgccacgcggcaatcaggagtctgccgctgatccacgcaaaagcctgggtgaatctcagatg

SEQ ID NO: 196503 - DNA, 122 bp, Homo sapiens
cgacggtgagcaccagcatgaagagcagccggcacgtcttgccagagtagcggcccatctcgccaccagccccgggcgcccggcgccgcccaggggagcgcagcccaccccgcgcgcagcca

SEQ ID NO: 196504 - DNA, 122 bp, Homo sapiens
tttctgtgccttagtccccgctcctgcaaggtggcatgaaaacagcctgtgctcgagggccggtgaggcctgagtaagtgaatggtgtgaggagcttagtggagtgtgaggcacagagggtg

SEQ ID NO: 196505 - DNA, 122 bp, Homo sapiens
gccctcagtggggtgcagcgacagagcccggcaggtgcagcagccgccagcccctctctccggtaaccccagggctgctgcacacatttgtcttgtgttttacaatccgccccttcacctcc

SEQ ID NO: 196506 - DNA, 122 bp, Homo sapiens
ccattattccaaatggccaacaccagaagaaatctgtgagcatcattccaaggaaaggttcggagaagtaatgttccattatctagggacattcctccagtatgtcaaaagcctactggttt

SEQ ID NO: 196507 - DNA, 122 bp, Homo sapiens
tggcttccagatagggattggttcgcgtattttttcacataagtttaaaatgatctctcacgtctgtctcatcatctgtaggataaacagctgagggtggcattgttagcacagaccattct

SEQ ID NO: 196508 - DNA, 122 bp, Homo sapiens
cgtgggcctgggcctccatgcatctctggggactgggccaggcctgggtcagcacatctgcgtttcagtggaagtgccagacctttgccaggtgatggcacagtagtgatgctcatgggctg

SEQ ID NO: 196509 - DNA, 122 bp, Homo sapiens
gaaagagggcgtggtccgcaggaagttctcacgttacggaaagtaaagtgtttccggctccggtgtcatggccggctcctaccctgaaggtgcacctgcagtcctcgccgataagaggcagc

SEQ ID NO: 196510 - DNA, 122 bp, Homo sapiens
gggaaggtccctcctcccatagagacttgggtggaactggccctgccgacaccctgatttcggacttctggcctcaagaactgtggaagagtaagtgtttcttgtttgaagcctccccacgt

SEQ ID NO: 196511 - DNA, 122 bp, Homo sapiens
ctcccttttgcaaactgttacccccccgagaagctggaataactaggacagatgccacctcgcagggctgactgtgtgctggcaccacaccgagtgctctgcttgcatagcggaacacagct

SEQ ID NO: 196512 - DNA, 122 bp, Homo sapiens
tctttcatggccttgacatttttgaagagtacagtccagctctcttctagactgtccctccgtctggatttatgtcatttcttcatgattagattcagttaggtatttttggcagaaacatc

SEQ ID NO: 196513 - DNA, 122 bp, Homo sapiens
ctggcggccgactgccccagagcccccacccggcaccacacagaccccacccccgccctgcgccagccttcgtccccgcagaggaccccccgacaccagcatggactgctgcaccgtaagtt

SEQ ID NO: 196514 - DNA, 122 bp, Homo sapiens
aaccctctgtaaacactcaatgtgttctcaccttgttatcattcccaatgatgtcgaatgcgtggttgccctctccagtataaaagtttgatgcagctttgcctggatgtacctgtctataa

SEQ ID NO: 196515 - DNA, 122 bp, Homo sapiens
aggaaagtccgctttccccagcctggcgttcaaagaccagggagggttgtccctttaaagcgctggggaaagcgccgtggccccacgattttaaacggcggaactggggtgcctcctggtgg

SEQ ID NO: 196516 - DNA, 122 bp, Homo sapiens
tccattgtagctgatttgggctcctaagctcacgggagtgggacatcgttctattagctgcgtcctgcccctcaacaacgatggctccttgcgggcaggccccaagggcgcgtcatggcccc

SEQ ID NO: 196517 - DNA, 122 bp, Homo sapiens
agttacgaggttcgtggccgcggtttccccaggcagctggcgctggaggcttcggcgtcacgtgctggtctggatttttctcgatgcactggggaaagcggtggactcttatcgtgggaggg

SEQ ID NO: 196518 - DNA, 122 bp, Homo sapiens
aggtccctgtgagggacggcgaaggcgggcctgtcacctctaaaagagctgtgcctgtggcgcagacgggggtgccactgtggcctggtgagtgtggctgtagaacaagcatctgttgggct

SEQ ID NO: 196519 - DNA, 122 bp, Homo sapiens
acatgggtcaaatgcattttgaacaaagaaacatggcaaaaggaaaagtgcaatgtatggcgttggatttatccatttgctcctccaatagtcattggcaacattatggattaggctttgca

SEQ ID NO: 196520 - DNA, 122 bp, Homo sapiens
ggtgcccctctcgtgccccaggctgtgtctgaagccgggggatggggcagacagaggaagcgccttcaagtgccctgagtgcagtgtgctaaatcagggctcccggccaaagcagtaattgc

SEQ ID NO: 196521 - DNA, 122 bp, Homo sapiens
accccacagagttgaaaaggtttaaacaggataatgtgcacaagtcctgcccctggtgttcggtagagaatattttgactccttgagtaatgggagttcttttgtggtctctgctagggttg

SEQ ID NO: 196522 - DNA, 122 bp, Homo sapiens
tcgtctgcaaattctagtgcatctaggcagaacacaggaaggaagagaggtgcagacttacgtatggccctggggcacctgccatcccctcgagcctgtatggtccttacccgcccatcccc

SEQ ID NO: 196523 - DNA, 122 bp, Homo sapiens
tttaccatttatagtgagttcattggttgagttgttattttcatcatcagttgcctaatgcgttgctgagccctgtcttgggtaaagcactttatccctctaaatctagagctgaactgaaa

SEQ ID NO: 196524 - DNA, 122 bp, Homo sapiens
ccctggcggggtgaccacgcgggtgtctcttcgtgctcccaatggacgcgtggcacgcggcgtggctgcgtcctcgggggcctgagatccagccaggactccctagggcttttcctgtacta

SEQ ID NO: 196525 - DNA, 122 bp, Homo sapiens
tagcggaaagggctgtaccatccggaaatgggaccggggccggcggctgttggagccctgcgagctgggacggccggcgtgtgtccttccgtcttcgctgccgacggtgggggttgggagcg

SEQ ID NO: 196526 - DNA, 122 bp, Homo sapiens
gttccccttcattcgtttagttcagcgcgttgaagcgctcactgtgtcctaggcagacaccgtgctgtgcgcggggatcacagttatctagttcctctcgcgaggactccgagggacaggca

SEQ ID NO: 196527 - DNA, 122 bp, Homo sapiens
gaaatgaatgccaatcgctaccagggatatttgaataacacaggcaagcggcaggcggcacggtcccgtccctactccttctgggtggggaggagggaggggaggaggtgggggagaaacaa

SEQ ID NO: 196528 - DNA, 122 bp, Homo sapiens
gccctgtctaacctcctttccagtcgcacctctttcctgctttagaccctgcgtctgtgccggtgaccttagagactaggtctggcttatgaagactgttgggctccctttctgcccttcac

SEQ ID NO: 196529 - DNA, 122 bp, Homo sapiens
gtcgcgcgagcatggtcttccagctcctcctcagcgaggcaggcgctgcagggtcccatgcgccccgcacccacttctctccgcacgcccacttcatgcacctccccgcgcccttcccacgg

SEQ ID NO: 196530 - DNA, 122 bp, Homo sapiens
ctgactggcgtatcaatgctgagacgcttctcttgagtgctcagctgcctgccagcagcgcgttacctacttccaatcacctcccgcttcgtctgtgcgcttttcctctccgcagccttcct

SEQ ID NO: 196531 - DNA, 122 bp, Homo sapiens
cagcattatattctaaccaaaaaatgatcacaccaggccatgcaaaactgtacaatattacgagaaaaaccctaaaaaatttataaaatgaatgatattacactatcaaataaaaagacaag

SEQ ID NO: 196532 - DNA, 122 bp, Homo sapiens
gttatacaagaacatgcacatctgggcattttaggagtcattttcttattctgtctgccacgttgactttcagaaattgacacaatactgtatcacttaaccaaatctttgttaatcaaatc

SEQ ID NO: 196533 - DNA, 122 bp, Homo sapiens
gcacaaagcatgcaggctttgttgtcctcctcctccacccctcagcctggcatattttggcgagggacttccctgatgccaccgggcaaggtatcttgcctaactggtctgaatgactagcc

SEQ ID NO: 196534 - DNA, 122 bp, Homo sapiens
accaataataaaccacaagaaaaaataataatggtgtttaactttaagacgcttttggagcgtagataggtctctaatgtaaataactagaaatagagttgggttaacagtgtctcatccta

SEQ ID NO: 196535 - DNA, 122 bp, Homo sapiens
gagtgcagtggtgtgatcttggctcactgtaccctctgccacctgggttcaatcaattctcgtgctcccgagtagctgggactacaggcacctgccatcacacctgctaattttcatatttt

SEQ ID NO: 196536 - DNA, 122 bp, Homo sapiens
catgcctggctggcagcagtggtcatctttgggccgcttctgcagttccatgtcaaccctcggactatcttcgccagccacggcaacttcttcaacatgtgagtccactcaaggctgtggga

SEQ ID NO: 196537 - DNA, 122 bp, Homo sapiens
gacgccatggcacgcatgacctgcaggttggtgacgccgggcacatgggggtgcaagctgcggggccgccggtccttcttggccaccatcacgccctcgcggaagagcacctcatagatggc

SEQ ID NO: 196538 - DNA, 122 bp, Homo sapiens
ggggagccacagaatcccacaatattagctgtacagacaagatcacccaaaggggcgaggcgtgaacgacagggttccagttgggggcagatgacagaagtgacacgcaaaatgaaaacgaa

SEQ ID NO: 196539 - DNA, 122 bp, Homo sapiens
gaggaggcggcgccgctctcggagaccgcaaggcgcgggcagaaggcgggatggcggcagcgcctctccatgcaccagcgcccccagatgcaccgactgcaagggcatttccactgcgtcgg

SEQ ID NO: 196540 - DNA, 122 bp, Homo sapiens
tgtgcactgtgctgagctgctgcagcaggcacagcccagacgcaggtgcagcctggtggccggcggggagggcggccctggggaggtgaggccagcgctagggcaggctggcaatgcgtccc

SEQ ID NO: 196541 - DNA, 122 bp, Homo sapiens
gggaaacaacatctttctgaattttgccttgggagttgcatacgctcctcccagagaatccgtttccccattttattaggtttctttttctgtgttgtgtattttctcccctttacaagtct

SEQ ID NO: 196542 - DNA, 122 bp, Homo sapiens
tactgtgtgcctcgcacgcagggtggagcacggagccctgggagcgcatgaggcactgaccgagctgagggcctactgtgtgcctcacatgcggggtggagcacggagtgccgggagcgcat

SEQ ID NO: 196543 - DNA, 122 bp, Homo sapiens
aacaatgcctgcaacataacaatcaccccccccccgtggatgtgagcgctgtctcagtagcgggtgtgccccacggatgatactactgagctggcaggtgcatggtcctgtcataggtgtcc

SEQ ID NO: 196544 - DNA, 122 bp, Homo sapiens
gaaccggcgatcagtgatgtatttggggtcagaagcctcaccccctaccagacaatgtttcgctagggcctctcggcgagcccggagctcggccacagctgtctgcagccggccctggccgt

SEQ ID NO: 196545 - DNA, 122 bp, Homo sapiens
aaggctactgaatcagaggccgcattttatttagcaaggcccccaggctactcctgcacacgtttacatttgaagggctggtggtctgtggtgacgggaagatgtgtgtgacaggaagatgc

SEQ ID NO: 196546 - DNA, 122 bp, Homo sapiens
cagaaactgctgtccgggcgactcctgaccaagaccaacaggacgccctgctgggccgagcgactgtttcctgccaatgttgatcactcggtgtacatcctggaggactctattgtggaccc

SEQ ID NO: 196547 - DNA, 122 bp, Homo sapiens
agcaatttgctcagaagaggagaaggccaccaacacatggggtccaggaatcagtctcgccgttctaagctgttaacattagacaggtgcttcaaggagaagaaagaacacttgtgttgtcc

SEQ ID NO: 196548 - DNA, 122 bp, Homo sapiens
taagctccatgcgggcacagctatgatctgctttctttgctgccgaccctgcgcccagcacggagactgtagttactactaggacctcgcctacccgcggaacacactgagagccggaagtg

SEQ ID NO: 196549 - DNA, 122 bp, Homo sapiens
ctgcctccccgcggggcagggctcgggacctgcagcccaccaggcctgagtctccccctccgctgtaggctcctgcacggccctagcctctctgacgagcgccgcccccttcttcacggcgc

SEQ ID NO: 196550 - DNA, 122 bp, Homo sapiens
gtggaattagtgccctttataaaagaaaccctagaaagtttttctgccctctgttcaacacgtgagagtaaaacaagaggactggagcctgcaactcgaagagggccctcaccagaatctga

SEQ ID NO: 196551 - DNA, 122 bp, Homo sapiens
gtggcctcttgtttcacacacagatgcgccatgctgcccggcaccttctcacgggcaccccgcagaatgccagaggattcttagagaaagaaaagagctgggcacggtggctcacgcctgta

SEQ ID NO: 196552 - DNA, 122 bp, Homo sapiens
tatgctgcccccgctgcccaggccgcccccgccacccccgccgctgcggctcaagtaggacgaggagaactgtctgcagctcatgacacagctggtagctcacgggttgagaagcagtgata

SEQ ID NO: 196553 - DNA, 122 bp, Homo sapiens
caggcagagagacccgcaggcctagcccgccccggaatcgccctgagccaggttcgcttccgctctattgtaaaaagctggattctgatctgcggcctccgcggtgccccagaaacagcccg

SEQ ID NO: 196554 - DNA, 122 bp, Homo sapiens
tttatttactattccccaaataattgttaccaggatagtacttttattaaattcctgatacgttgtcaatattgaaaaaactcaacaacttaaatgtacacgcacagtttgaaaagctggaa

SEQ ID NO: 196555 - DNA, 122 bp, Homo sapiens
ttgttgagcaggatttatgggtgagtccagcacggctgtttgtgcaggatgctcagtggtcgccaggggtccgggagtcggcagcaatgttgttccatcctttgtcggcttctccatctcct

SEQ ID NO: 196556 - DNA, 122 bp, Homo sapiens
tccctgaagggacagactgtgcctcttcttcacagtccatggttaagagcgcctggcacccgccatcactcaggagtggttctgggagaaacagatgaagtaaagcagtttacaacaaacag

SEQ ID NO: 196557 - DNA, 122 bp, Homo sapiens
ccagcttagtcatttaacagttcattcagagagggaaccagggtgccctgtgactgctgacgtgatggattttgtctggggaggaaaggaggcacagccctgcaaaagtctacaaatcccat

SEQ ID NO: 196558 - DNA, 122 bp, Homo sapiens
ttctacattgctttcttggctttgggttatttatcaaatagattgaagaaaagcaaaacacgtggaagccttatctccgtaaagaggcagcgtttttacatttttaaacgttcagcgtatcc

SEQ ID NO: 196559 - DNA, 122 bp, Homo sapiens
ccctgcgtccttgtcaatttcagagacaaaacaagcagcccaggctagtagtctaggcggcggcgcagcggctgcggcagcgcggccccagcggcggccccggcggcggctcctacgcagcc

SEQ ID NO: 196560 - DNA, 122 bp, Homo sapiens
agcccgaggtcccggaccaggaggggctgcagcgcatcaccggcctgtctcccggccgttcggctctcatagtggcggtgctgtgctacatcaatctcctgaactacatggaccgcttcacc

SEQ ID NO: 196561 - DNA, 122 bp, Homo sapiens
gtgcccacgcgggatgagcgcggccagcccatcccagagtggaagcggcaggtgatggtgcggaagctgcaggcgcgcctgggcgcagagagctccgcagaggcccaggtaggcccccggca

SEQ ID NO: 196562 - DNA, 122 bp, Homo sapiens
cctacgggtcctcatcaccgacgtgaacgacaacagcccccgcttcgagaagagcgtgtacgaggccgacttggctgagaacagcgccccggggacccccatcctgcaactgcgcgcagccg

SEQ ID NO: 196563 - DNA, 122 bp, Homo sapiens
tagacaatcagggatgctaagtttaaaactgaggtagatcttgaatttccttctggaccccgcaactgggaggacttgccttccaaatgtggttgattggtgttggccggcacggaggaggt

SEQ ID NO: 196564 - DNA, 122 bp, Homo sapiens
tttgttcttttcttatttctcactgagagatccattgagctatgttttactatttgtggccgagcgcagtggctcacgcctgtaataccagtactttgggaggccaatgtgagcggatcacc

SEQ ID NO: 196565 - DNA, 122 bp, Homo sapiens
gtggtcgacagggaagaaggagagcctcacagcatctcctcttggccagggtcccccgggcgccccaacagcggttacgggatggacagcctgcccgccatggccatcttcgaactgctgga

SEQ ID NO: 196566 - DNA, 122 bp, Homo sapiens
ctctcgccctccctccctgcggccgctgcgcccaccggactgtgggctggaccggcccgccgccgccctcgtgatttatctggatttttaattggaaaaaatttgcgaattaattgatttca

SEQ ID NO: 196567 - DNA, 122 bp, Homo sapiens
cgaagagctttaactcatcttctccaggatttggggcacgggaacctgtctcctgaccttcgtgccttacctcggagtgtgctgcccagacggacttgtgaatagctgcgtctgtccccata

SEQ ID NO: 196568 - DNA, 122 bp, Homo sapiens
gttattaaccccatttgacagatgaggaaactgaggaccagagaagtgaagtgacttgcccgaggccaggcagctggtcagtgccagaggctctgccattcactggccaggtgcccttggac

SEQ ID NO: 196569 - DNA, 122 bp, Homo sapiens
gatcaggctagagaactaccagagggaaagggaaatcagagagggcgattgtgtggatgacgtcactcagcaaaacaaagtaggcccccatgttccacaagccctgcattagtgtgtggact

SEQ ID NO: 196570 - DNA, 122 bp, Homo sapiens
ccaccatgtggacgtggccccctctggcttgggcctgaaggctgggcattttccaaacaacgcgctgctgctacctgcaacttaaacccatttctaattcagctggcccccaggtgttttca

SEQ ID NO: 196571 - DNA, 122 bp, Homo sapiens
aagtaaccaatgggaaaactctaattctgtactggggctcttggatcctattcttggacccgctcccaccctgcggagtgtacttttgttttttgttgcttcaaattttttttttttttttt

SEQ ID NO: 196572 - DNA, 122 bp, Homo sapiens
tcaggaaagatctgtccttgacgtccatcacattgcttctgggtggaggccatgggcagccgagaaatgaagtaagacttgatgtttcccggcctggccaggagtcactcggtccctcacca

SEQ ID NO: 196573 - DNA, 122 bp, Homo sapiens
tagctgggattacaagcccacaccaccatgcccgactaatttttgtatttttagtagagacggggtcttcaccatgttggccagtgtggtctcgaacgcctgacctcaggtgatccgcccgc

SEQ ID NO: 196574 - DNA, 122 bp, Homo sapiens
gctgtggcgccagtgacaggctctgcctccagggcaagacccagaggtgcaactgcctcccgggcctttccttgttcacccctcgcataagttcagcaagtccacggccagcttcctgccta

SEQ ID NO: 196575 - DNA, 122 bp, Homo sapiens
caggggagggtggggctggtcccttctggtttgggggatgggagacagaattttctgtgacggctctctctgaagagggagaagccacctgggaagccaggtggatcctccagattactggc

SEQ ID NO: 196576 - DNA, 122 bp, Homo sapiens
aataagacttgctgggagcttggagccccagagttaggagctcactcttgcagagatgtgcgcggccccacccgccctgttcttccgacgcactgccaggccagcgagcgctcaccgggctg

SEQ ID NO: 196577 - DNA, 122 bp, Homo sapiens
aaatcacaactaatgcacttcaaagggaggaggggaagtgtcttttggagaatgggaggccgcttttaaagagggcaaggcgaaaaatcagcaaacatagtcgcgcgggtgaccgtccttgt

SEQ ID NO: 196578 - DNA, 122 bp, Homo sapiens
tgggtgttcatcatgacagatgagagcctccccccagggaacaaaacacaaagacttggtcgaaccaatcagtaacaaagggagaaaaacagaagggcaaatgctctccctgtagctgggag

SEQ ID NO: 196579 - DNA, 122 bp, Homo sapiens
ctgtaagaagctttaaaaactccacccacaggtggccaacactaaggtaattcacattcccgtgcaatcacagggtgctttctactcttcatttgctgcccagccatgatctcatccctcta

SEQ ID NO: 196580 - DNA, 122 bp, Homo sapiens
tccgcctctgccgctcggcaaccaactgtcagtgagacgccatgttgggggcggggctcccggcatgcctcgcggagcggacaatacaggccccgcccgccgctccgcccaccgctccgcgg

SEQ ID NO: 196581 - DNA, 122 bp, Homo sapiens
atgagtaaaagtaaaactgggcctggaatgagtggatagatccctctgaggtctggccatcgataccatttttgctgatgtcagggagtggagacttgaccagaattcttcttcttcttctt

SEQ ID NO: 196582 - DNA, 122 bp, Homo sapiens
attctcggatcccgagagatgtcagagacacagtgtaaggaatggccctgcctgcccctccgtttccttcctgcatgcggccacgctccggagagagcagccatgtgcagggccccagggtg

SEQ ID NO: 196583 - DNA, 122 bp, Homo sapiens
cgtttcccgccggcgggagctgtggctgtgattgagagaggggttagaggcgggtcccagcgctgccgcaccatggcggaccagctttatctggaaaatatagacgagttcgtcacggacca

SEQ ID NO: 196584 - DNA, 122 bp, Homo sapiens
tcctgacctaaagtgatccacctgccttggcctcccaaaatgctgggattacacagccaacgatcttgatcacgcttttcgtgttttgttttgagacagggtcttgttctgtcacccatgct

SEQ ID NO: 196585 - DNA, 122 bp, Homo sapiens
gtgtccagcactgttagccttttgcggagcccgcggtgactaaggcacatgacactcagtcgctggtggttctggcctcaagtcggcgtcttgtagctgcgctgaagcctgccttatctgcg

SEQ ID NO: 196586 - DNA, 122 bp, Homo sapiens
gagaaaggttaaggaaagtgtaggtttgtttttcccacaaaagttgtggtcacaactaaacgaagtaatcacagttggagaatttaaaacaactgttttttctctaaaatgagggtaataac

SEQ ID NO: 196587 - DNA, 122 bp, Homo sapiens
ccccgggaggctgcagggccgcctgtgttccccgcagtgcgccgaggtgcgcggcttctccgacaaggacaagaagaagtatttctacaagtatttccgggatgagaggagggccgagcgcg

SEQ ID NO: 196588 - DNA, 122 bp, Homo sapiens
tttctggcgtccgggccaggtcaagcggaagtaaacactagagcctgcgcatgcgaacagcggagccttcctgcttttctccctcacttccgcttccgcctcggctcagccgcccgaggatt

SEQ ID NO: 196589 - DNA, 122 bp, Homo sapiens
actcaccaggcagcttccgctgcgtgtgcggcccgggcttccgagccggcccacgggctgcggaatgcctgggtgagaaatttgccccacccggctccaggcccaccccagggtctcgctcc

SEQ ID NO: 196590 - DNA, 122 bp, Homo sapiens
ggctggtggctagatggtctgtccctcgcccttatctccagtcctgcattgcttatctgccgcttggaggcggtgaccatcttgactctaagagccaaacccacagagccctacatgtgagt

SEQ ID NO: 196591 - DNA, 122 bp, Homo sapiens
gggggctgtgcgaagggctgtgtgaggcgctgtgctgggggctgtgcggagaccttgaggcgctgtgcggggtccgtgaggctctgtgtggggcgccgtgtgggagactctgcgggggccgt

SEQ ID NO: 196592 - DNA, 122 bp, Homo sapiens
agctctctctccgcccttcccaacttagtgctgtgtgttcaaatagacttcatgttgcaccgcccccacctcggctagcctcaccttcccttatagcgccagtgggacctccccaggctctg

SEQ ID NO: 196593 - DNA, 122 bp, Homo sapiens
ggtttgtctgtccctgacttctgcctctgagattgtctttgttggtctttgtttaataaacgccccgaccttcctcatgattgctcacaggagtccctgcgtttgtcttcatcccttctcaa

SEQ ID NO: 196594 - DNA, 122 bp, Homo sapiens
tggctctgcacaagcctacaaagctcaggagtaggcagccagagattttcaaggggggggcgtcaggaagggacagtggctgccaatgtcataaaggcccaggactttgttccttaaaggac

SEQ ID NO: 196595 - DNA, 122 bp, Homo sapiens
ccatctgtacccagattcaactacccctccgtgagccagaagatcgtacgcatcttcccacgttatcctcattacagcacattgaagaagggatgaggaagcccaggtggaagacactttgt

SEQ ID NO: 196596 - DNA, 122 bp, Homo sapiens
acgacttcctgccgccgccgccaccgccgccgcccctcgatgaccctgagctcccgccgccgcccccggacttcatggagccgcccccagacttcgtgcccccgcccccgccgtcgtacgca

SEQ ID NO: 196597 - DNA, 122 bp, Homo sapiens
actggcatcagggagtgtttgccaagtgaataagggtgaggctgccctttccagagccgccgggagaaactctggatacagagaccctagcctggcgccagtcccagcgttcctcctagtcg

SEQ ID NO: 196598 - DNA, 122 bp, Homo sapiens
agcctctcactagaaaccgtggccagctccgcagagccaggacctgcacgctgggcccgccgtcccccaggacctgcaaaatcgtgagtgcggcgtcccgactctctgaggcagggccggcc

SEQ ID NO: 196599 - DNA, 122 bp, Homo sapiens
gtgtactaaactaaaactttagcatacatcacatcgaatgtttctttgcttcagacaaagcgaaaagaaaaaaggacattaggaaccctcatttttattccttttcttaggaaagttaaaca

SEQ ID NO: 196600 - DNA, 122 bp, Homo sapiens
ggataatcatgccacctcctggggctgctgggggatccagtgagctgatttccatgaaggcggaatgttggcgatgcgagtttttagctagtccccgacacacactgagaacaggaaacgag

SEQ ID NO: 196601 - DNA, 122 bp, Homo sapiens
gggcgagctcctctgctttctcacagtcaagcatctttgtgtgtggattgtgccaggctacgggtcctggagcaactggccgcgggggccctcgaacccaggtcgggaagtccgcccgccac

SEQ ID NO: 196602 - DNA, 122 bp, Homo sapiens
gcaagagccctaagacacagagcatttaaaaactggcacttacgaagctttttaaaataccgaaaaggacaaagagaactaagaaaattcccactatccctaaatctctcttaacttctttt

SEQ ID NO: 196603 - DNA, 122 bp, Homo sapiens
aatgatgtgcaggtagggaagctagctaaggggtagttctgggcacacaacaggtaagtacgtataggataggcagagaactgatgtgggcctgagacgggtgaaggactgagcgaaagaat

SEQ ID NO: 196604 - DNA, 122 bp, Homo sapiens
tcttcccagactcgctcccccacctgggcttgcagccagctcagaccacagcagacaggccgggagcctcccaaccttattttggctacgctcgagacactggagagaacagtagcttccac

SEQ ID NO: 196605 - DNA, 122 bp, Homo sapiens
agtcaccatcattgatgggtccttggtccccaaacctgtgtctcatttttcctttccaaccgtatcttcagttagccttcacaaagatgcaagctttaaaggagctaattagaaacaatgag

SEQ ID NO: 196606 - DNA, 122 bp, Homo sapiens
agagctatgttcatatttttaattaggtgattaaaaatatttgaaacggcagcaagacaacggtcagcttttggtaatccaaaggaaaaggtgacatgattagcactggcaagcttaagttt

SEQ ID NO: 196607 - DNA, 122 bp, Homo sapiens
ccaggcgctgacgcgcatcttcaggctctcagatcaggacctggaccaggcgctcagtgacgaagagctcaacgctttccaggtgtgcccctgccccaccctcggtgcccagcccccttgaa

SEQ ID NO: 196608 - DNA, 122 bp, Homo sapiens
cagggatttgagtgctgaaggaagagcacaggaagctctgagcaggaggcaggcatgttccggggtggatgcccctgactttgggttcaagtcttggcattgcagcttagtgagttacttaa

SEQ ID NO: 196609 - DNA, 122 bp, Homo sapiens
gcacgccttaagcgctccataaacacctgtagaaatgaatgaatgacgtatgcatctgcacgtgggcccacatctgcaagaacaggctgctcaggccatgaggcccggtgcatcacctgcac

SEQ ID NO: 196610 - DNA, 122 bp, Homo sapiens
aagggacccgggaagggatggaaccccaggttactccgcttccctaattcacgtgcaaggcgctgacagttgactctggtggggcagatgtcagcctgcaacaaaggaccagggtgcgaggg

SEQ ID NO: 196611 - DNA, 122 bp, Homo sapiens
tgcccagttctttctcatgcaaatccacgtgagtcctggttcaaggcaagctcagcttatcgtgcaaatcatcctctgtgactcagaagggaacgtgtaatggggctaacgctaagttttaa

SEQ ID NO: 196612 - DNA, 122 bp, Homo sapiens
gctgctgccctgagcagaccagactgagactagcagccgcaccactgccatgtgacaggccgtcaaggcaacaccggtagcaaggcaacaccggtagcaaggcaccacctgggcttaggcaa

SEQ ID NO: 196613 - DNA, 122 bp, Homo sapiens
agactaacccttccaaccactgcattcaccgagtcccctttccacttccccgcagtttgccggtcaggtgcaaaaccccccagatcttgctctctgcccccagatgggaaggactcgcaccg

SEQ ID NO: 196614 - DNA, 122 bp, Homo sapiens
gtgtggctccccgggcagccagttctggcagctctccaggctgaaggcctcgccctgcggcgctgggcccacctccacccgctgcacagtcgagaagccgatccacacgtctaggctcctgg

SEQ ID NO: 196615 - DNA, 122 bp, Homo sapiens
ttatccagaggattggtgtcacatgcatagaggccgtgacttagctatcaggtttactcacgcctctgtatgagcaatgctgagctcctaattttccctgtgcctgagcctctgcttctaag

SEQ ID NO: 196616 - DNA, 122 bp, Homo sapiens
caccaaggctttgtctttctcttccagttgcacatcctaaagtttgaagagtctaaataacggggcttccctcagcatgttccctctcctgtttgccacggatccagaggccacctgccctg

SEQ ID NO: 196617 - DNA, 122 bp, Homo sapiens
caagctgggtgccgtgcatctggtggccacattgtctgcaccagaagcctgcagagtcgccggctttgacaaggagggggtgctctgtggggcgagtgggtgcggtcagggaagaccggcgg

SEQ ID NO: 196618 - DNA, 122 bp, Homo sapiens
tcaggtgatccgcccgcctcggcctacccaaagtgctgggattacaggcgtgagccacagcgcccagccgattggtttcaactattagaagaagggataaactggcccggagcggtggctca

SEQ ID NO: 196619 - DNA, 122 bp, Homo sapiens
cgctcgacatgttaccatggttacagctgtctccaaagccaatggaatgagttgtactatcgatacggccgggacaactccgcccccgacccgaaggccaatggtgtgagacataataacag

SEQ ID NO: 196620 - DNA, 122 bp, Homo sapiens
aaacgttaagcagattccttgaagtttagggtcatgggtctcgttcttgagtccccacggcgaagcacggcgctgacagcaggagatggcttagtaggtgtgcatgggacgaatgaacttgt

SEQ ID NO: 196621 - DNA, 122 bp, Homo sapiens
tggccctgcttcacccaactgctcttctagcattctccacatcatgtgctatggtaagtacgacaccctaggaagtcaaggagaaatgagggacagggaaaggcagagcctgctgcttccac

SEQ ID NO: 196622 - DNA, 122 bp, Homo sapiens
ggggttggggtggcgagcagtcgcggcgcctcagcctaagtggcttttaggggcagctgccgggatatgggcacccagggggccatggcccaggaggctgcccagaggcgagccctgtgctt

SEQ ID NO: 196623 - DNA, 122 bp, Homo sapiens
ggcccaccagccagctctgaaaggtcaggccccaggagcaggagccagccagaggctttgcgaggcaggcctcgcacagtgaccctgttgatgtgccatcctttattttgttttaataacaa

SEQ ID NO: 196624 - DNA, 122 bp, Homo sapiens
tgtagtcggctatgttgtggtccacgatgaggcgcagcagcctgttgagcagagtcaagtcgatcttctcatacatcttctcaaagcgggattccagcatgacattgcactcgccttcactc

SEQ ID NO: 196625 - DNA, 122 bp, Homo sapiens
tgtccccggcagcccaagtaacagcaagtatttccaggttttttttcccatttttcagaacgcgtctgcggtcacagcgcacgtatttttcagaacgcgtctgcggtctgggcgcaagtagt

SEQ ID NO: 196626 - DNA, 122 bp, Homo sapiens
ctccacctcagtactgtggacatctcgggccgcatagccctgttgcgcgggcatcctgtgcgttgcaggagatgcagcagcatccatgaccgcaacccatcagaggtcagggtccgccccct

SEQ ID NO: 196627 - DNA, 122 bp, Homo sapiens
ctttgggcttccagaactgcaggggaaactgattctgagatcagacaacggaccctggggcgggaggggggtaccttattcataaccctccctcacaatagcggagcacagtactcagcacc

SEQ ID NO: 196628 - DNA, 122 bp, Homo sapiens
gaactgtcaggatttaacactggagtaatccagaggcgcgggagaatgggttttgaatatcggaaagtgaaacgtcaggatttaacactggagtaacttaatagctaccagagtagcactag

SEQ ID NO: 196629 - DNA, 122 bp, Homo sapiens
cggggattttaagggccgtatcgaccctggacatcggctgtggaaatgggaaacagggagcgcaggtttaatctacacagagggtcactcacgctcgacgccgtcaccttcacccaacgcga

SEQ ID NO: 196630 - DNA, 122 bp, Homo sapiens
tgggaaccccgtgcccagggagtggctcatgtcagcaggcagtgctgggagtgaggtgggcgcggcagtgaggctttgttgagtgggaagggacactcagccaacatctgcaaggcagtggg

SEQ ID NO: 196631 - DNA, 122 bp, Homo sapiens
tagcctactaaagaaaacagtcgacttcttgtgaaggttttggagaaatatgtatcagttcgttttatttgggtattcaataatatccttggtgataatgctgactccatggcttctgaccc

SEQ ID NO: 196632 - DNA, 122 bp, Homo sapiens
ggcagacctcgtcgcgtggaagagaaatgccaggaaaaggggtcactgcaggaggcacctcggatctgatggcaggcaggaccttgcatcaaaatgacttttctttagaacaaaaaagaggg

SEQ ID NO: 196633 - DNA, 122 bp, Homo sapiens
gcgaccctaagctgtcacaggcagggggcgagctcctctagttgtcttcaaagttcgtttcgtcttcgtagggcacgcgcccaccctgaatcccgcctttcctctcgtgaagctctgccggg

SEQ ID NO: 196634 - DNA, 122 bp, Homo sapiens
tcgcctccaggccaagagggatccttcacccgtgtctggtgagtgaggagcgctgttggccggcgcgggggtggccgcggggagcagcaacagtggaggatggatgagtgaccctgagagtt

SEQ ID NO: 196635 - DNA, 122 bp, Homo sapiens
ggagaggcagcggcatcgctgcccgccgcacggacggatcaccagcagctccgatgaaggcggaggttttaaactacagttgtgtctaagatgaagtttggggattaggtgtctctgctttc

SEQ ID NO: 196636 - DNA, 122 bp, Homo sapiens
taagtttgggtcaaaagaggccttgagaggagagacaacccaaccagaacagatgcagcacggaacacgtacgggatcgtaaatgcagaaacgacagattcttccatcccaccttgaaagtt

SEQ ID NO: 196637 - DNA, 122 bp, Homo sapiens
cttccctgtgctcgggcactattgggcgttacgcgagggcggggccggttgccaggacgacgcctgcgaagatggccgctgcgtcctcatcggattccgacgcctgcggagctgagaggtga

SEQ ID NO: 196638 - DNA, 122 bp, Homo sapiens
ggcaaaagagaagacagacatctaaagctccgacaagccatttggggtgacgtccaggcacgccgcctgcaggacctgtgatctgttctgacatatggatatctgaaaataacccctcctat

SEQ ID NO: 196639 - DNA, 122 bp, Homo sapiens
tctgggactaggcatcagcacgttgtccagctcccagctgatggcagcgtgcgtccagggcggagaggtcgtgctactcaggtgtgcactgaggaccagccgcgtcaacatcactgcggctt

SEQ ID NO: 196640 - DNA, 122 bp, Homo sapiens
cgcgccctcctttttttttcaaacccggagctgcactgggattggtggactgggcactcacgtggttaacggtcgcgggaagccgcggagcccgaacctgagactggacctgaggagacctc

SEQ ID NO: 196641 - DNA, 122 bp, Homo sapiens
attgtcagagttcttgcgttggttctttctcatatgtgtgggctgatgttcctttaactgcgatgtaatttgagtgtagtcagttgacttcatttctggatgtttttagagggccgaggctt

SEQ ID NO: 196642 - DNA, 122 bp, Homo sapiens
caaacagtgttcactcttaactctaaacacagtgctcccactactggttctgcattgaggcggaggggaaggccagaggcaggcttagcttcgggcggcagcggtctggggctgctcggact

SEQ ID NO: 196643 - DNA, 122 bp, Homo sapiens
ctgtctgaaaaaaaaagggaaaaaacgcagatcgcgcccccacccagacttcgggaccagcgggttggggacaggacccatcaatgccttaacaaaccctgcaggagaccgcgggcccgctg

SEQ ID NO: 196644 - DNA, 122 bp, Homo sapiens
tcaagtatttgccatcttgacaggaatggcaagatgcagagaagtgccccactttaatatcgagggaaactaagttttattaaatcggtgttgtgctctgtccaagctataaccaaataatt

SEQ ID NO: 196645 - DNA, 122 bp, Homo sapiens
ctgcccgccgctcccggcccgcgccccgcccctcgctgtgcccgccctcgccccgccccgcgccacccggagccccgccccctccgggaaccccgccctgcaccgccgcgtacccgggtctc

SEQ ID NO: 196646 - DNA, 122 bp, Homo sapiens
gttgcttcctggcagggcgagcgggccatacatcacttagccatgccgaggaggctgggccgggcagctgggcagggtatttctgggctcgggtgcaaccccctctgtgggatgtcaggcat

SEQ ID NO: 196647 - DNA, 122 bp, Homo sapiens
tgccgggggctcctgtgtgggccatgctcttcttcgggatgctgttcaccttggggctatcgaccatgttcgggaccgtggaggcggtcatcacacccctgctggacgtgggggtcctgcct

SEQ ID NO: 196648 - DNA, 122 bp, Homo sapiens
gcccgcaccgcgggggtgctccgagctgcggcgctgggctctggcaagcgcctcgcagtccgtgagactgtctgttcacctggatgcaccaggccttcacccgccgtttccctgcgatccca

SEQ ID NO: 196649 - DNA, 122 bp, Homo sapiens
tgcccccagccggtgccctgtcctcgccgtctctgtccaggaggtcagagcagtagcacccgccccgccccgtccaccctgtggatcctcagcccatccgccaccccgccccgccccgctcc

SEQ ID NO: 196650 - DNA, 122 bp, Homo sapiens
agacaggcactagggaggccgcaggagagcatggcgcggctgactcctggccccggggtccgcgggtggcgccactctcctcctccccggcccggcagccctggggcgtccccaccgggtca

SEQ ID NO: 196651 - DNA, 122 bp, Homo sapiens
cttttggtttgctccaaagggaaaagtactaatactatctaacacttaccaagcatctctcggtatcaggccctggaacttttcacacagtatctcagccagtcctccccaccaccccggtg

SEQ ID NO: 196652 - DNA, 122 bp, Homo sapiens
ggaggtaggggcggccgtctgacgggggaggtcgctctggtggctgcttgggactctcagcgggttggggtggagcccctgccggacagcctggcctggggctgcgaggggctggattctgg

SEQ ID NO: 196653 - DNA, 122 bp, Homo sapiens
cagccctttgcagatctccaaaaagttcaaagtccctggtcattaacttgggcttgaagacgggagctcgcccatcccggaagggggctaggggggaccagggcccgcgacaggaagcctcc

SEQ ID NO: 196654 - DNA, 122 bp, Homo sapiens
aggctgggggtccgggagtgaagggggcagcgagaccgcgggctgctccacgctcaccgtcgtgtccatggagagtaagtgcgcacaggcctgagcaggcaacaaaatgaggatcttgcctt

SEQ ID NO: 196655 - DNA, 122 bp, Homo sapiens
tgggcgctccatgaggtgcgagttgtatccttttccagctaaagcaaaccatccaggctgcgctgcctctgctgcccagagatggaccacgcctccctgtgcctgtcatcgtcatggtcccc

SEQ ID NO: 196656 - DNA, 122 bp, Homo sapiens
gctgcacatctagaaacggcagcagctaagttagcccgcaccccccttcgcaacgatccccggactgcctgcacgccctgtggaacctcgcagtcggcttcaccagggcagggactaaggcc

SEQ ID NO: 196657 - DNA, 122 bp, Homo sapiens
acgcgcgaaggaacggcatcccgcagcaccttcagacaaagggctgccccgccccgtctgcgcagccgccaatccctgggggctcctgcccctcagttcccgcccccacagccgagttcgcc

SEQ ID NO: 196658 - DNA, 122 bp, Homo sapiens
tttcacaaatatcataaatgacaggcaggacgcttttctggagtcaagatctgttagtttcggagtcagaaagaccccgtttagagactcgtaggcgaacttgccagggggcctaccagggg

SEQ ID NO: 196659 - DNA, 122 bp, Homo sapiens
tcacgatctatggccatggtcgcttcccctgcagaaggcgggcgctggggtctccgagtgcgcagagagcggcggcggcgagtcgctcccgccggttctgcagcatcacggtcgccctcggc

SEQ ID NO: 196660 - DNA, 122 bp, Homo sapiens
ctgtagaagaggcgccgccatcccagacagtgttcataaacaccgacggcaaagtcaggacgggcaggagcgttctaggcaaatgatgaaaatggtattttacacatatttgaaaagaaagg

SEQ ID NO: 196661 - DNA, 122 bp, Homo sapiens
atctcaaacaccagttggacttacagcccaggtttgagcctccacacctgcacctctgcacgggggtgtgagagcctcactttcacttgatgcatgtgagttctgtctcattgggagaccac

SEQ ID NO: 196662 - DNA, 122 bp, Homo sapiens
ctgtgagcaaatactgagagcctagggaaaccatctgattagaagagctcccctcaggagcgcgttagcttcacaccttcggcagcaggagggcggcagcttctcgcaggcggcagggcggg

SEQ ID NO: 196663 - DNA, 122 bp, Homo sapiens
tgctcagtaattgaatttcccctgctccttagagagcaacaagttatggggggagaaagacgggaagttgagctggcacctaagacttctgttacacggggaagatgttttgctttaggggc

SEQ ID NO: 196664 - DNA, 122 bp, Homo sapiens
gagcctgcggcggccgttaggggaggcggccgggctgggggccacggcgaggaggctgagcgccccggccgggtggagtccgtcgcggcgaggagcgcgccgattctcaggggactttgccg

SEQ ID NO: 196665 - DNA, 122 bp, Homo sapiens
cctgccctgtcccagccactggggtctcactcacccatcagcctggaaacagacgcatgtcggcaccctcccagcccctctgcgagagcctctccatagcctcgctgttgagcccgtggcag

SEQ ID NO: 196666 - DNA, 122 bp, Homo sapiens
aaacttccagagcttggcaggcacacctaactcctgcctttcagacctgtggctcccaaacgcggagggagtctccgtgggccccaccaccgccagcagtttcctccgggccacgaagccct

SEQ ID NO: 196667 - DNA, 122 bp, Homo sapiens
cgacaggtcaacccctcacgccagatccctccttcatccctagggctgggcctgagctgccggttatgtgtcagtgaagttccttccagctccaaactgttcgaacactttggacagcagtc

SEQ ID NO: 196668 - DNA, 122 bp, Homo sapiens
gacgacaaataccaatttgagatgagactgcgatttagtctgcagcagcagcgtccagcgcgctgagacctgaactcccaggccccgcctagcccctccgccccaggtcgccacggtcccca

SEQ ID NO: 196669 - DNA, 122 bp, Homo sapiens
gccatcgttcccaaacaagcaggaagcttcacactgatgcctgatccacaattcccaaagcgccctcagggccaccatttcttgcgagcctcgcagcatccacgagggggcagcacaggact

SEQ ID NO: 196670 - DNA, 122 bp, Homo sapiens
agcagctcattcccttcctcagaccttggattttgcctccatggagatctcttccatctccgacatttaatgttctagagatagagtgaaaagacacaggaagttgaagcagtatcagaaag

SEQ ID NO: 196671 - DNA, 122 bp, Homo sapiens
tttgtggatgagtaaactcatagaaggtgctggtgaggtgtgaatgaaggctcatcaggccgcgcagctgactcatctctgtactgaggtgtgtagggacttgggaaatgtgtcttgatttg

SEQ ID NO: 196672 - DNA, 122 bp, Homo sapiens
ataaattttaaattgcatgttgttctgagtagcatggtaagatctcaagcaattccactccgtcctgctcaggaggaatcatttctttgacttatccctttgtccagcatttccactctgtc

SEQ ID NO: 196673 - DNA, 122 bp, Homo sapiens
gccacagggccagatgaggttattggagggctgaggctgcgcctgccccaggccaggtcccgccgaaagcatcaagtcaggtaaacaggaggggctgcgccagtcttggtagggaggcagac

SEQ ID NO: 196674 - DNA, 122 bp, Homo sapiens
ccagagagccccgttagctggaaggacagcctgtaccaacacaggcttcaaaggctctcccgaggccccatttcctctccggaagagttagcatggtacagggctggaggctgccaggggac

SEQ ID NO: 196675 - DNA, 122 bp, Homo sapiens
caacgggaggagacgcgaggcgctgggagctccagagtgggcgaggacttcgggcagacccggcgttgctgttggacatcattcagaagtccccgctcagcgggggcagcccgaagagcaaa

SEQ ID NO: 196676 - DNA, 122 bp, Homo sapiens
cctcggcagtagacaggcagtgccaatgagagaagagggcgcggcgaaggtgatcccgcacgtaaagattccggactgccaagctcatgccacgcccagagacttcggaattctcaacaatg

SEQ ID NO: 196677 - DNA, 122 bp, Homo sapiens
gcgcaatgtgaagcggcggcgcggctccagcgaggccggcgcctgaggtctctaaggctgcgcccgcccccgccgggcttctaagctgtccagagcggggagcctcagacccagccgagccc

SEQ ID NO: 196678 - DNA, 122 bp, Homo sapiens
gcgcccacccagaactcgtgctggcccataagcaccacgtgcagccccggttccagcctgcgcctctccatccacacctccccacaagcagagggagccggctctggcctaggcctgcccag

SEQ ID NO: 196679 - DNA, 122 bp, Homo sapiens
ttttcttcagttcaaggctattctgtctgaagaagaacagatcagacgcacaggtgttctcggctataagagcaacagaaggaaagagtgatttgctgtccaaagatagagctttccctcag

SEQ ID NO: 196680 - DNA, 122 bp, Homo sapiens
gcgccgaggccgcgcccgtccgcccgccgcccgagccgccgcccgccctggacgtggcctcggcctccagcgcgcagctcttccgcctccgccacctgcagctgggcctggagctgcggccc

SEQ ID NO: 196681 - DNA, 122 bp, Homo sapiens
gcccttttatggaaatgaaggacccggctcaggaattgaatccaacatccgggctctaggcggcgggccctgaggagggggagcgggggagcgcgggcggcctttcccggggcgctggtggc

SEQ ID NO: 196682 - DNA, 122 bp, Homo sapiens
aaaaattaaaaaggataaccatcacattacactgaatccacataggtctagggcttttagcgctgcccacaagaaggcttggggtggtttccaacttgccttacttcactctgttcctgtca

SEQ ID NO: 196683 - DNA, 122 bp, Homo sapiens
ttggctctgctcattccaggcccgttctttgcacgaggccaagcagagcagatccaggtgcgcagatggaggcaggcgctgtggctccagggctggtgccagcatcctctcccaggggagca

SEQ ID NO: 196684 - DNA, 122 bp, Homo sapiens
aagtgccaaatgcattatcactgctttttccttcttttataagaatcattactatgaactcgtactcgttggtgcacagaggatgctattttcatactctctttctttgtaaaggtcttctc

SEQ ID NO: 196685 - DNA, 122 bp, Homo sapiens
ccttccagcatttcagctgcccaatctatggtctcttctgggggcacagctgagtggaaccgccccatccttggccaccctgggtgctgagccctgacacttcactgccccggccctcctct

SEQ ID NO: 196686 - DNA, 122 bp, Homo sapiens
cacaggcacaagccgtctgctctccaggttcagcaggggcttctttcccatgcctggccccggagggtcccctgggagtcagagtgctccactgaaaggttgtggcatctggagggtccccc

SEQ ID NO: 196687 - DNA, 122 bp, Homo sapiens
ctcagtacccatccctcctccatgagggccaccctgatttatttcccccttgctggcctccgccccacactgcccagggccactatgagcatgacctgtcatgcttggttgaccataactga

SEQ ID NO: 196688 - DNA, 122 bp, Homo sapiens
gagtccatcgtcttgcctgtctctgacttggtgttacagggatgagaccctctctggcagcgagctgacggcgaaacttgagcctgcctttctctctgggctgcgctgtgcccagccactca

SEQ ID NO: 196689 - DNA, 122 bp, Homo sapiens
agactctggatttggaggtgtgggcggtgccttagtctccccagaagacaagagcccacccgccgggtgtgtcctgaccccacccccacctgccccacacagacacctgagtgggcatcaga

SEQ ID NO: 196690 - DNA, 122 bp, Homo sapiens
ttttagcagatctcccgcctccggtctctctcggcttgaaaccatcctacacacagctgccgggataatctttctggagccatttttatcatgtcacttctctgcatgcggtgttttctgtt

SEQ ID NO: 196691 - DNA, 122 bp, Homo sapiens
acagacctggagctccaacccagctgtgcatcattctcatgcccggccctgacaccactacgctttcctgctgctgtccccgagcagtagctttgcactgtggagcccacaggaggactctg

SEQ ID NO: 196692 - DNA, 122 bp, Homo sapiens
gctcctgagcttctggtccaacctgcggcctaagcagtaacattcacagccaccccaccccgggaaaggaaccgatctcacgcaccttccataaggtccacagatatccgtagaaggagacg

SEQ ID NO: 196693 - DNA, 122 bp, Homo sapiens
gcgaagcagtgaccataggaactgggctcaaacctaacctcccaagaaacaggggcaactcgtgctgccgagcttccggccggcagctgtgcccgccgctgcccctcacagccgctcccgct

SEQ ID NO: 196694 - DNA, 122 bp, Homo sapiens
caattgagggggtctgatgagccttaaagtaacttaggaggatttatggaagataaaaaccgtttaactaagcctggagccgagcccctggtggcctagcatgggaggccatgctgtatcct

SEQ ID NO: 196695 - DNA, 122 bp, Homo sapiens
atggcagagaagagattaaacctgagactcgaactgggccagcgatgtgtatagagaccacgcacaaagcctgctctgccgctctctgttttctcacgctggcatcctctgcacatttggat

SEQ ID NO: 196696 - DNA, 122 bp, Homo sapiens
cgtgtgtgtgtgtgcatgttaggaggttgctggacaaggggaggagtcaaggggatggaacgactacccagtgatgaagccagtgggcaggggatgacggtcatagactgagaggaagaaga

SEQ ID NO: 196697 - DNA, 122 bp, Homo sapiens
cttttttaagattctagatacacacagtcaaactcttcttcacacactcacccttctacccggagtggaggcaaccgcctgtttcataacacccaagccagccagtgactgtttatttttct

SEQ ID NO: 196698 - DNA, 122 bp, Homo sapiens
aagagtaatttcactattcagaaagtggagagaggtggcttaatgcactttttggagagccgatagcatttttgaatcttgttctgcaaaaatagttcttggtgccctcaggatgtgctgtg

SEQ ID NO: 196699 - DNA, 122 bp, Homo sapiens
catcctgctgcaggctctgccttttgctccataatgatgccagagacatgctgaggtgcccgtccaaggggatggaagataggcatcactctcccttttcacaaagcagctcattgggaatg

SEQ ID NO: 196700 - DNA, 122 bp, Homo sapiens
ctgaccctcagcagaggtgtctctggccaggaggagctgaagttctgcaggacattggtccgcccgcggacagtccactccgcggggactttctctggataaggagtgcgtgcgagtggctc

SEQ ID NO: 196701 - DNA, 122 bp, Homo sapiens
attgtacggtgggagcatgctgggcccataaccctaaggctaacgggtcaggagcatcctcgcaggcagttcaggcagtggtcatgtccacagaccctggggccagggtgtctctgagtcct

SEQ ID NO: 196702 - DNA, 122 bp, Homo sapiens
ggctggagcttcagcatcacatcttgcctctctttgcctttctcttttccctgtgtcatccgaggggctggactccactggccaggggtctgcccgtccacaccacccctaggtatctacca

SEQ ID NO: 196703 - DNA, 122 bp, Homo sapiens
taccacgaaaaagccgtccaaggagcatccacgcgtgcactcaggatgaggcgggtggaccgtactacctcatcaccagttgttgtaatgcacacgatatgaacaccttaaccttgacccca

SEQ ID NO: 196704 - DNA, 122 bp, Homo sapiens
ggtataatttatgcatttaaaaaatcagatcaattgccccccgggctctgggatggaaggcggtgtgcgcctgcgaaggtcagaggcccagcggcgccagggctcctcggcggagagccgcc

SEQ ID NO: 196705 - DNA, 122 bp, Homo sapiens
ccccaaccctgacgggcacacgcccctcccccagatcatagcctttgatgagctgcggaccgacttcaagaaccccatcgaccaggggaaccctgcgcgggcagtaagtgatacatgtgctg

SEQ ID NO: 196706 - DNA, 122 bp, Homo sapiens
tgaatttaaggtgccagtagctgtctacttgaacggcatgcttaatctggaacgccatgtcgaccttcatcccccagttctttctccccaaattaaaaacacaaatacacacacacgcccct

SEQ ID NO: 196707 - DNA, 122 bp, Homo sapiens
taggccctgtaataaccacacttcttcatggtaaacaagaaccagattcctggggagtgacgcaggcaggagctctgtggctgaggcagctgtgattataccaagacatgaagaaacacctc

SEQ ID NO: 196708 - DNA, 122 bp, Homo sapiens
tcaggttctatagtttttatctacagtgatcacactcgcctcatctgggaaggacacccacgtgctcccacactgccacaatcttggctcactgaaacctccgccttctggactcaagtgat

SEQ ID NO: 196709 - DNA, 122 bp, Homo sapiens
tcctcctcctccttccccaggtcgtcactcatgttgatcccaagggtactccttaataaacgtcccactcactaaacaccatctagagcagcattcttgggaacccacattgtaacagtcac

SEQ ID NO: 196710 - DNA, 122 bp, Homo sapiens
ggagcccggaggaaggcagggaggttctgagggccaaagcaagctctcagaggtcaaacacgggatagaggctcgtgctcctgccgcagcctctgctcaggccccactcaccgtggacttct

SEQ ID NO: 196711 - DNA, 122 bp, Homo sapiens
tccgggggcgagaggtgtctggctggggaacgttgacccacaccaggtcccgtacaggaacggagactccctaggaccgtgagagccagcttcgtaattctcttgctcttcaaacctgagag

SEQ ID NO: 196712 - DNA, 122 bp, Homo sapiens
tgctaagctcctcactgcctgaggccggcagtgccagctggccgctctgagtgtggggcccgccgagcccacgcccacccagaactcgggctggcctgcgagtgccgtgtgcagccctggtt

SEQ ID NO: 196713 - DNA, 122 bp, Homo sapiens
ccaagggacggcatcctcggggctcccgagccccgagtggagaagcttggggcagagggacggcgggggcggcccctggtgccgggctgtgcctggaagcgcgcccccgccccggcccccgc

SEQ ID NO: 196714 - DNA, 122 bp, Homo sapiens
ccctgcccggatttcttctctcacttcagctcagagtcaggtgaggggtgctgggtgtggcggtgggaaagggaggtgctttcatctggaagtggcagaatcatcactggatttgggggcag

SEQ ID NO: 196715 - DNA, 122 bp, Homo sapiens
ggccgaccccaagcaccccagagatatgaggcaccctttgctccacccacagcagggccccgtcagactctgccagcgcgtcctgcccgcttccctcggtgacctgctcagacaatggagag

SEQ ID NO: 196716 - DNA, 122 bp, Homo sapiens
gggtaggcggggagcgcttagcaggtatcacctataagaaaatgagaatgggttgggggccggtgcaagacaagaatatcctgactgtgattggttgaattggctgccattcccaaaacgag

SEQ ID NO: 196717 - DNA, 122 bp, Homo sapiens
tcttttgccacttctcactggcccggaatatgctggtggaagcccaggcaaaactgcgttcgatgattttaatttccccaccggtacatcctcgggtaaataccgatcgcatcatgcaacat

SEQ ID NO: 196718 - DNA, 122 bp, Homo sapiens
gtgcgggctactgggccgggtgaaaatgcaagatgtgaaccaggagctgcacgtcggccacgtgtggagaaggctgggccttcaagaggactgagaggaacagaaggaggaaaagcaaatta

SEQ ID NO: 196719 - DNA, 122 bp, Homo sapiens
agaaggctgttgtatcttggcctctgctagcttcaaaaactaaggcccgatgaggtagctcgtgcctgtaatccctgtttacaggagaggctgaaagggcagggattccttttttttttttt

SEQ ID NO: 196720 - DNA, 122 bp, Homo sapiens
actactgccccttgttttgcacactggtctttgggggttgcaaacactggcacctgtcctcggggtcaaaaccagtgtctatagcagagtgggcaggactttgatgaaactctgatacctgc

SEQ ID NO: 196721 - DNA, 122 bp, Homo sapiens
ctgaatccaaatccctaatgccagttgatcacgtgtgtgtgctcacgcatgtgcgcaccacgtagattccattgagagagacacagcttgaggagtaacctgcctgactggggcagtgtgga

SEQ ID NO: 196722 - DNA, 122 bp, Homo sapiens
acaaagcttaaggcagtgattgataggttatttcttggacacagctgaacgtatactgtgcgcctgcaactttccggtggtttcggaccggacttcagtgaagccagtgaagtcggtcgact

SEQ ID NO: 196723 - DNA, 122 bp, Homo sapiens
tccctcctcccagccagtctcttctctcctgcacccccaaccgggagccctggaccatcccgtagcgaagtgccatgggctcccatcctgcacccccggctcatctctgcacagggcagtga

SEQ ID NO: 196724 - DNA, 122 bp, Homo sapiens
gacgtgtatggacacatccccatgtgcaggcccacaggcgtgaccccgtgaggtgtgtggcgggaaaggcatccaggcccacgccccagcccgggggaatagctgaagaaccccagcgagag

SEQ ID NO: 196725 - DNA, 122 bp, Homo sapiens
ctgccccgagctggagggagaccgggattttgccggagccagtccgaggctgagtgagcccgggcctccaccttaccccaccaaaggtgtggtggcctcatgtccctagcctcaccctgctc

SEQ ID NO: 196726 - DNA, 122 bp, Homo sapiens
cttgatctcttgaccttgagatcctcctgcctcggcctcccaaagtgctgggattacaggcgtgagccactgcgccctgcccccttcggccagtcttaaatgggtgtcagcaagaagaaaaa

SEQ ID NO: 196727 - DNA, 122 bp, Homo sapiens
gggccgcatcatcgagtgcacacactgtggctgtcgtggctgctctggctgaggctggcgcgctccaccctggactctggacttcgcaggttcctgcctgtcacgccacccccttcctggga

SEQ ID NO: 196728 - DNA, 122 bp, Homo sapiens
aggcaggagaattgcctgaacccaggaggtgaaggttgcagtgagccaagattgtgccgtcgcactccagccttggcaagagcgaaactctctcaaagaaaagaaaaagagaaaagaaaaaa

SEQ ID NO: 196729 - DNA, 122 bp, Homo sapiens
gatcaggagaataaagtgtcctgggagtctgttcaggttctgctgcgcagccttcatacccgccgccaggacgggtgggactctcatacccacggccgggacgggtgggactctcataccca

SEQ ID NO: 196730 - DNA, 122 bp, Homo sapiens
tgctaggtcattcatataaacagaaattttttttgattgttttgtttattttttttgagtcggagtctggcacagttgctggggctgcaatgcaatagtgtgatcccagctcactgcaacct

SEQ ID NO: 196731 - DNA, 122 bp, Homo sapiens
gactattgctagtcgcagctcttagcgctgcccataaggaaggcactgtgctaagcagttcgtggcattttttaccattcatttcccctgtggtagatagggaaataatcattaaggacttg

SEQ ID NO: 196732 - DNA, 122 bp, Homo sapiens
agaccaagtccctgtcagttcttcaaagggacctgtcatttgagcccagacctcagcctccgcattaagcaagcatgggagttcagccactgtcttgactttctccaactttgacttctttt

SEQ ID NO: 196733 - DNA, 122 bp, Homo sapiens
cctgtagccgacccgttccttgaagcgggccagaaacgccggctcggctggccgcacgtacgatacctggttccgcttgctcatggtagctctgggtaaagacagaagacaggttccgcgac

SEQ ID NO: 196734 - DNA, 122 bp, Homo sapiens
ccccttgttttggatatacccaggtagaacaactctctctcactgtctgttgtgaggatacgctgtagcccactcattaagtacattctcctaataaatgctttggactgatcaccctgcca

SEQ ID NO: 196735 - DNA, 122 bp, Homo sapiens
tttatcaggaactacattggaggaataaaaatccttcctgtctggaactatggtgtccatcgtagcccatggtgatatcactcctggaggatttagggggctacatactggctgtactgctt

SEQ ID NO: 196736 - DNA, 122 bp, Homo sapiens
ccaaggtggcagtggctcccagtaagtcagagctgcggccgcggtgcggggagagcacagcggggagggcgggagccggctctcgggcggcggcgctgaagtttccttcccgccgcgctctc

SEQ ID NO: 196737 - DNA, 122 bp, Homo sapiens
tgcctcccagccataaatctgtcaggtttacaaaattattttaagactttccaggctgggcgtggtggctcatgcccgtaatcccagcactttgggaggccaaggcaggcagatcacttgag

SEQ ID NO: 196738 - DNA, 122 bp, Homo sapiens
catgccagccgcccgggccctgggcctgcgtgtgcggaggagacttctggagggaaggagcgggaaggacacccaggggtgaagggatctccccagagaaagtggcagaaaggaggcagctg

SEQ ID NO: 196739 - DNA, 122 bp, Homo sapiens
aattgtaaatatcttacataaatatataactgcccacttaagtgaaaacctagctttgaccgaggcacccggagaagcttcttttccttcttccataccaaatccatcaaggtgacccattc

SEQ ID NO: 196740 - DNA, 122 bp, Homo sapiens
ccccacccccctgaagcaatcttgtgatctctcggaattctgtgttatcagaactacccccgcccccgccccacagacaataacgccctccctcccccctctcttaaaaccacatccttcca

SEQ ID NO: 196741 - DNA, 122 bp, Homo sapiens
agaccctgaggccagcactgccgggtcctgggaggcagctgtgggcgacaggtgagtacacgccagcccactcctgagagcctggatcccgctggggcatgagaggcgcctctcggacgggg

SEQ ID NO: 196742 - DNA, 122 bp, Homo sapiens
acgtccccctggtgtgggcctgtgtcactgcgccatctagtggacacagcgcgcagctgccgttggaggcactcagacaagccagaggaaagggtttaaagccctgactgtcctgatccgtc

SEQ ID NO: 196743 - DNA, 122 bp, Homo sapiens
cggcgtgagggtgcggggcctgggaaaaaaccctctcgaggcgggcagtggggcgagtggcgccccttgacctggggcgggggcggcagcgaggactgtgagtgcgtggatctagctggggc

SEQ ID NO: 196744 - DNA, 122 bp, Homo sapiens
ccctgttctgtttaacctggcagataagcacacagccagattgtgaaacaatgtgataaacgctctagcagaagagcaaataaagtgttaaaggatcatagaaaacagcaaagtgtcacgga

SEQ ID NO: 196745 - DNA, 122 bp, Homo sapiens
ctgaaaaatgcgaatttgacttaatcgccaattttttcattgaccttttatgtcacaaaacgagaggacacaaaaagctatatgaattgtttatcattatcaatatatgtgtatgttatctt

SEQ ID NO: 196746 - DNA, 122 bp, Homo sapiens
attttgataaacttgggcagaaggatttgtggtaagtctcttttataaaacataagtgttcgagagcagattgatattctttacttgtttgaaaacagaatgtctctactcagactgccctc

SEQ ID NO: 196747 - DNA, 122 bp, Homo sapiens
gccgaggtagagaaccaccaaaattaccatctcggagcggtgccggaagtcccgccttaccgtatgcaacaaacggagacaggtccgttcctgaacgttgattggctccgcgtctttgcagc

SEQ ID NO: 196748 - DNA, 122 bp, Homo sapiens
tcttcaaatactctggactgcggagtggcggcattcaggaggggaaagactactccgggccgttcagagactgaatctactcgtcccggcatgcaccgttccagtggttccgcggcgcgggt

SEQ ID NO: 196749 - DNA, 122 bp, Homo sapiens
atcagagatctgtacctcgattacaggcaaaattcaaaaccttgaagttgctcatggcaacgctaaaagtaggactaaggtctttttcttagtgtaatataaaaacccttctgttggctctt

SEQ ID NO: 196750 - DNA, 122 bp, Homo sapiens
actgcacccctctccaccccatccgagggcgggctgcgagttggagaccctgcaggcccgcgcctgcacagccctcagccccgcccgcttgtccagctgcctcgcaattggctgcaccctct

SEQ ID NO: 196751 - DNA, 122 bp, Homo sapiens
cccgccgcaccccccgctaaacttaccggcagacccaatggttcttcgatgctggaacagcgggaacaagcaacacccaaccacccgagagcgaccccagctgaccagtggagcgcgaatcc

SEQ ID NO: 196752 - DNA, 122 bp, Homo sapiens
agagatattattggacctagagagattaaatcagttacctaaggccgcgctacagttgcacggcgctgggcgggggggaaagaaccacaactcccagcaggcagcggcgctgcccacgggcc

SEQ ID NO: 196753 - DNA, 122 bp, Homo sapiens
gggtccatgcatcagtgtatgtggaaaggactctgaataatggggagacataaggtggaacgcttctactcctgaagctgatagcgggaagggaagaagctcttcttggcagtttggataga

SEQ ID NO: 196754 - DNA, 122 bp, Homo sapiens
ccgcagcagtgaacactctcacagaggtagggctggttgttcactcctgggcacagctctcgaagctgctgttgcggcgcccgaagtgccccccaggcctcctcgctgccgttcccgctgct

SEQ ID NO: 196755 - DNA, 122 bp, Homo sapiens
cccttcacctatgggattatataaacgcaatcctattttttaaatagttgtgcagaaaatcgagaagggagctaccttaactgtgtattcagttcttgagtgacaaagacaggcgtgagaga

SEQ ID NO: 196756 - DNA, 122 bp, Homo sapiens
ctccattccctcccttaggaagctgacttgactaatagcacaggtgaggcccactccaggcgtgccaagaggacccaaggagggaggggaagctcccagacagcagtggcacacctttgcct

SEQ ID NO: 196757 - DNA, 122 bp, Homo sapiens
ccacgccttagtaactgcgacgcgacggcagacagtgtaggcggcaaccgacggccgggacgtctaacctcaagtcccagcaagccccgcggccacgtcctctgactacctcgcgccagcaa

SEQ ID NO: 196758 - DNA, 122 bp, Homo sapiens
tactttggtacaactaatcgaccttaccactttcacaatctgctagcaaaggttatgcagcgcgtgaacatgatcatggcagaatcaccaggcctcatcaccatctgccttttaggatatct

SEQ ID NO: 196759 - DNA, 122 bp, Homo sapiens
ccccaagccttgccagattacattgtcaaggccagcactttggagatatttccttggtttcgcaattcacacagtgactaacacatgttacattttgaaaacttctctgggtaaaaatttaa

SEQ ID NO: 196760 - DNA, 122 bp, Homo sapiens
gcgccggaggattggctggggcgtcgggagagaggaggctcgaaactacatttcccatgacgcagtgagaatttaaaaccaaaacaattggacagcacttgttttgacaactgtgcggcact

SEQ ID NO: 196761 - DNA, 122 bp, Homo sapiens
tgcggggctggctggatcttgttctcctctccgagttggaggaccccattcctgagcagccgctggacgaaacccggccctgggatcccgcgaggtccccgggaggcgcctcaaaagccagc

SEQ ID NO: 196762 - DNA, 122 bp, Homo sapiens
ccagatgatcagcaagtgcttggcacactccagagcctttttggaccaatgttggattttcggaccagagaaaccaagagaaaccatgcggatttttccctgttaaccagggtcctggggaa

SEQ ID NO: 196763 - DNA, 122 bp, Homo sapiens
cgcgatttccggtagcgttccgcttcctccggaagtcggaaggagtcgctctgtccgtcccgctcgttggtggcgctgttacatagcccgtagtcagaggcctttcagcccaggggccggcg

SEQ ID NO: 196764 - DNA, 122 bp, Homo sapiens
tgtcagatactgaactctcagatacagttccccttcatccctccagggggcgccatggaacgcagggccctcactggccctggggactgggtgacgtcaggggtgagcctctggtgattggc

SEQ ID NO: 196765 - DNA, 122 bp, Homo sapiens
aagctctgggcttggttttcttccacatttaaaacaaacccaaggaagagatggtgcagccgtgcaagcccctggtggatctgttgtgtctcacacaggttttctattttctctgtgtcttc

SEQ ID NO: 196766 - DNA, 122 bp, Homo sapiens
actaactttccatgcatttaacaacagaatctgccgtgcaggttctctccttgagagggccgatacactcatattccacatctcagataaagctcactgtgttgtatgtctccttgagtgta

SEQ ID NO: 196767 - DNA, 122 bp, Homo sapiens
ccgggcgcgcacgcgcacgcgcacgcgcgcacaccccctcgcgctccctcacgccgccgacgttccatttttgaacctgcgcaacgttttcctcggcgccagcgagcgagcgcgcgcaagga

SEQ ID NO: 196768 - DNA, 122 bp, Homo sapiens
ctcagctctccctctgcagagttccctaccctaagagaatgttaccacctgaacagtcctcggtgaatctgagaggagaggatggggtaaggcagaagcaccagctgtactactagaaggga

SEQ ID NO: 196769 - DNA, 122 bp, Homo sapiens
tgaggaccacactgttctaggcactgttaggtgctgggacctaacacgaaacaaggtagacgtggttcctgatttcccagtatgctcatataggggttggtcgcattagtgatatgggtgct

SEQ ID NO: 196770 - DNA, 122 bp, Homo sapiens
ggcggagagtggcattttctgtttgacggaatcctgctccccaccttagggtaggggtgtcgcgggtgttgacgggttacctccatcccccaaattctggatgatttttaaggggttatctt

SEQ ID NO: 196771 - DNA, 122 bp, Homo sapiens
ggcggtctccaattcctgggcccacttggaggtaaaataggacccaggaagccaatcccacgccctggtatgaagggaaaaccagggaggaaacatggaactctccaaatacatttccctgt

SEQ ID NO: 196772 - DNA, 122 bp, Homo sapiens
gcatacataatgcataatacatgactccccccaacaaatgcaatgggagtttattcataacgcgctctccaagtatacgtggcaatgcgttgctgggttattttaatcattctaggcatcgt

SEQ ID NO: 196773 - DNA, 122 bp, Homo sapiens
cactcattctcccatgaattaagaaaccaggggaaagagacgttgccaagtctctccccgcgcaccctggcccagtggcctccagctgccaggccagcacctccctgcctgggtacagaggg

SEQ ID NO: 196774 - DNA, 122 bp, Homo sapiens
gccctcctaattctggagtaggggctaggctagaatggtagaatgctcaaaagaatccagcgaagaggaatatttctgagccaccatgcccgggtaatttaaaaaaattttttttctagaga

SEQ ID NO: 196775 - DNA, 122 bp, Homo sapiens
ctgaccgccagattactgtgcatcccgaatcacgaccacctgcaccctcctgccccggcccgccccccaagtcctcaggcacccagctccccggcgccccggatcctcctggaccggtccgt

SEQ ID NO: 196776 - DNA, 122 bp, Homo sapiens
gcatattttaacacatttaatattcatagcaaccctatttgtggaaggtagtacagtctacggcacggcagctatatcggcccctttattttccccagggtttggagtctcttccactttcc

SEQ ID NO: 196777 - DNA, 122 bp, Homo sapiens
aattctttttctggtttgacgtttcagaggtgaatgaacaccactgccagtggtctcctacggtcattacacagaaagacctcatgggcacaggacatcggtcttctgcggctgcaaactag

SEQ ID NO: 196778 - DNA, 122 bp, Homo sapiens
tgaacccgggaggcggagcttgcagtgagccgagattgagccagtgcacaccggcatgggcgacagagtgagactccgtctcaaaaaaaaaaaaaaaaaaatgaaaagagctgataatctat

SEQ ID NO: 196779 - DNA, 122 bp, Homo sapiens
tcttggcctttttaaaggcttacaactttaaagggtccacgtgaaagtgtcgtgataaatcgagcaagcatggggaaggtgagtgcgggctacatgcatcagctaacagaacagaaagcttt

SEQ ID NO: 196780 - DNA, 122 bp, Homo sapiens
tgcaggcagtttgtgggggaaataataaaattagcatcctaacactacaagtcgtgagaccgctcaggaacaatcctaatttgcatactggaactcctgtagaagatactttgaaccgcttt

SEQ ID NO: 196781 - DNA, 122 bp, Homo sapiens
gagtgaagagacagcggagagggtactgggctgaattctttcgtgccgagcaggtccctccggttcccaactcacccgggtggagcaggcgcgggccgaacccgggaggagagtgtcgggga

SEQ ID NO: 196782 - DNA, 122 bp, Homo sapiens
acacccttcctgagaagcaggggcagcctggctgcggctatggagtggcggctgcttcaccgcttccttcttgcctgcagctcctactgaagcccaagttcagcggcgtggagaagatcaag

SEQ ID NO: 196783 - DNA, 122 bp, Homo sapiens
gaagtacttgaaatgcaaatttggggagactttgccatataaatgcttggctggattaagcgcctaattaggatggtttttcaacaagttggagtaagcatgcaatcggtgagtgctcaaaa

SEQ ID NO: 196784 - DNA, 122 bp, Homo sapiens
aagtcactagggtcactcctagaggggccaatgacccaagggctgctgtaggggaggtaccggcctctgaaccccctttcttctctccccaacagggtgacgctgggggacccctggcctgc

SEQ ID NO: 196785 - DNA, 122 bp, Homo sapiens
ttctgcatctgtttgatgtttactgaacatccgctgagccccaggtcttgttcttgggggcgggtgcaacagtgcataacatggacatgaccctgccctggtggggcttgcaacagaccaaa

SEQ ID NO: 196786 - DNA, 122 bp, Homo sapiens
ggcgggaagaccggaggcctaggctgcgccggggtggggcggggacagagctcagagaggcgccccgggccggggagaaggtagggggctgccctccagagacgcgcagtccacagacgcga

SEQ ID NO: 196787 - DNA, 122 bp, Homo sapiens
ttcctttcttgtggatatccagtttcctcagcactatttgataaagagactgtcctctctcgttacatggtcttggcagccttattgaacatcatttgaccaaatatttgagggtttgtttc

SEQ ID NO: 196788 - DNA, 122 bp, Homo sapiens
acattatttgttactgcagtttttaaaattgactctatccatcagacagtattatttggccgctgtttttttacacctgtcttatttattcttgattttttttttttggtttgtctgtttta

SEQ ID NO: 196789 - DNA, 122 bp, Homo sapiens
gcaaaaaataaaaagagtgatcattgctaaatgcccatagcaccacccactactcttctccgacattcctactcatcacatctgcagatcttttctcatttccacagatgaagaagagacag

SEQ ID NO: 196790 - DNA, 122 bp, Homo sapiens
aggctgcgcccgtctgcccccgccacgtcctcctgtgaggggctcagtcgaaacaggcagcggtcgcagggaaacgaagcggcacccgtcatgcctcaaggtggcccaaaagcctcttcact

SEQ ID NO: 196791 - DNA, 122 bp, Homo sapiens
cgcttgcccagctccgggtagcagaaaaccaagccgacctacacctcttacccaggctgtcgcagccaggccggcctttcgcggtaatagcggctcagtggggccagctgctgccccgcccc

SEQ ID NO: 196792 - DNA, 122 bp, Homo sapiens
aaaagcaagtggcttggttttttgatgatgcccaggatccctatgaacagagacatgaggcgagcatggctctgtgagtaacagaagcctgttcattactgggctgagctgtggctcgccag

SEQ ID NO: 196793 - DNA, 122 bp, Homo sapiens
gagtgggaagaggaggacgctgccccctaggggagccgagtcacaggctgggggccggggcgggaggggctggaggaggcggccggtagcgaggccgcgccgtcgggcggggcggtccctcc

SEQ ID NO: 196794 - DNA, 122 bp, Homo sapiens
gggtctaagaggaataaagctgacaaaatgtcaatgcaaagcccagggctggaagccaagcgtgggcggcctctgttcgccatcggggtgaagcctcctgtgttcgttcactgccgtcgggg

SEQ ID NO: 196795 - DNA, 122 bp, Homo sapiens
tgtcccctcttagcaaatggcagcctcggcgatcctgccccgagacaggcctgcgcccagcgtggagatgaacatcagtatttgctgaacgtgtaaacgaatccttgaccttccctcatgct

SEQ ID NO: 196796 - DNA, 122 bp, Homo sapiens
gaatatcttctgatggaaagtgagtagccaactgctccgcacaagtgacgcccgcgatgccgccgccgaccaccatgaacttccctgcagtcatgggagggcgcgctgccttcatgctgccg

SEQ ID NO: 196797 - DNA, 122 bp, Homo sapiens
gtgatctgagtggcaaacctccatatctgctatagtatgatatttcacatatccaataaccgatgtcacttgtcatgacacaaaaataaaatgacaagatccataaaagaaaaggaaagaag

SEQ ID NO: 196798 - DNA, 122 bp, Homo sapiens
gggcccttcttcttgccaaaggtgggcacaacgttgacaaagcgccggttgtactgcatccgccgcttagcccgacctgtcttcttcttcttcttctcctgtttggccacctggagaaggga

SEQ ID NO: 196799 - DNA, 122 bp, Homo sapiens
gtgggcggggccaggtgggctaagcgggacgggcggtgtgggcgggacctgtttggtgggcggggcctgttattcgctctgccttccacccagcaagtctttgttctcccgatttaggagta

SEQ ID NO: 196800 - DNA, 122 bp, Homo sapiens
tcctggctaatatggtgaaaccctctccactaaacatacaaaattaaccgggcctggtggcgggtgcctgtaatcgcagctacttaggaagctgaggcaggggaatcacttgaacccggtag

SEQ ID NO: 196801 - DNA, 122 bp, Homo sapiens
ttgagataaggccctttcttttcttgatcaaaacaaacaagataacatcttcccccacagcgatcttttttggcaaaaaacagatttgtgtttaataggatgacttgcaaattgattttcag

SEQ ID NO: 196802 - DNA, 122 bp, Homo sapiens
cgcgagccggaggctgggacgcagctggacgcagctgggcgcggaagcttggggcggaggcgcgtgcccgccttcccagctcagccccggcagggctcccggctccagcccactgggagctc

SEQ ID NO: 196803 - DNA, 122 bp, Homo sapiens
ttgggtgtgaaggaaggtttgtcccggcccttgtctccgtcccgtctccctgggcctgggcgctttcagaccaggttgtactccttgaggctgagctgcaggatggtgtccttcacggccgc

SEQ ID NO: 196804 - DNA, 122 bp, Homo sapiens
aagctgaagggttcgcgcgtgcgtgtgcggggcaggaacgcgccttacaaaactgggatgcgctgggggtggagggcgctagttcggactggatcctgggcccgaggcctgcttatttgcat

SEQ ID NO: 196805 - DNA, 122 bp, Homo sapiens
cagcagccgagcagcgggaactagcgtttcagcctccgtctcccgcatagccttcgcctccgcaagcactcagctgatgtggctctttgcctggtgggatgccctaagccttcattcctgga

SEQ ID NO: 196806 - DNA, 122 bp, Homo sapiens
caggggagggggcgatgctagtgtcatgctttggtacaagaagcagtgaggttggtctttcggcacaggccctgtttctgacctcctgacctggcttcccttcctggcagggtgcccgaacg

SEQ ID NO: 196807 - DNA, 122 bp, Homo sapiens
gcgcccgggtatttgacttgcgctcctttaatgtggtattctgcctctcgttttcctggccgcctccctgggacccagttccagctcaccagcatcggctcctcacactcagtgtttaggag

SEQ ID NO: 196808 - DNA, 122 bp, Homo sapiens
tgccaagaatgacagcagttggtctggagtgctcacctccctgtgaaatcattgttcgcgcgaccctcatctgcctcaggatgctgtactctactacgcacaactgctccatcttttaagat

SEQ ID NO: 196809 - DNA, 122 bp, Homo sapiens
aaagccagcgggctccttggccaagtcaccaaggacagcagaagaggcagcagtaaagagcggcagcgaagaccccgataccaaccaatgtcatctgtcggggggcggcgggcgcgaccgtc

SEQ ID NO: 196810 - DNA, 122 bp, Homo sapiens
tgcggaccgaggtgagtgtgtgaggcgcaggctgggccctccagagccgcggctcgtcctcgcccacctgcgtcctggccggtccagtgctcagcggcagttggggcctccgcgcgcagtgt

SEQ ID NO: 196811 - DNA, 122 bp, Homo sapiens
gcttccaacggtatgagccccactttttgcctctcagcgctaacaggaaacaattagaaacgacacaacatcgtttatctcccttgaaaatttccccaagactgtatgtgcggctttgttct

SEQ ID NO: 196812 - DNA, 122 bp, Homo sapiens
tgggagggtagaaggatccagagtagctgctgttcctcgctagctgggcttagtgctttccggagacccctttcttgaagcaagactctgtaagccctgcagaggtcccctgagcacttacc

SEQ ID NO: 196813 - DNA, 122 bp, Homo sapiens
ggggtgaccgtggctttgagcagagtgctggtgggacaggtgccgtcaggtgtcagggagcgaccacagcagcaagccagaaataaaggttaagccgttactctgaggcccaaggcctcaga

SEQ ID NO: 196814 - DNA, 122 bp, Homo sapiens
ctgtgatgagaacaggcaatgtgaggttaacaaaggtaaagaggctggagggaaagaagtcgttagtgctgtctgtggatgcccaagacgcacattttaatttttccactttttctgtgctg

SEQ ID NO: 196815 - DNA, 122 bp, Homo sapiens
ttgttgggtaagaaaggctgagtctcaggtaagcggcctaaggttgcaagagattgtgggcgagctggaattcaaaactgcctaggcttaactcgaagctcaccttctttcaacttaatcgt

SEQ ID NO: 196816 - DNA, 122 bp, Homo sapiens
cgggggttgcgggcgctctgtccgaggaggccgggagactaggaggcgctgggagggcctcgttcgaaccgcgcggcagctggggtcggaggcactgtgggaaggggctggagggaggaggg

SEQ ID NO: 196817 - DNA, 122 bp, Homo sapiens
agggagagggaggaggctcgtggaccaagaggacgcactcggatctggagttctccggcccggacacccacgggccaccgcgtcgaggcagcgcgagccccgggcgccccctgcaggttgta

SEQ ID NO: 196818 - DNA, 122 bp, Homo sapiens
tggcgagccagatgggtgctgtggccttaggttcgggcaggtgtggggccgctcgccctccgatgttaccgcggtgggtgagctgggaagctctttccgccctcggggcacaggtagtggct

SEQ ID NO: 196819 - DNA, 122 bp, Homo sapiens
gagaggaagggggacggggaaggcgacgcggccgctgattggaccgtttgaatgagacgccgccacggcccggcatacgcgcgggcgcgccctgacgctgaggaagtcgcgcacgcgactaa

SEQ ID NO: 196820 - DNA, 122 bp, Homo sapiens
actggcatgatcagctgaactttgtggggtcagcgcttctctctggcttcccctcagcggcgccaaggcgaggggagcgcagaaccccggctcaggacggacagacagacggccagccgcgc

SEQ ID NO: 196821 - DNA, 122 bp, Homo sapiens
cttctgggctcaagtgatcatcctaccttagcctctcagttagctgggacttcaggttcacgtcaccatgcccagctaatttttttcttttttttgagaaggagtcttgctctgtcatccag

SEQ ID NO: 196822 - DNA, 122 bp, Homo sapiens
atttcaggccaagagttcgagaccagcctgggtaacacagtgagacgccccccctccccccgtctgtattttatagaaaagaaagtaaagaagaatcctgggagacccagcgcggggaaggg

SEQ ID NO: 196823 - DNA, 122 bp, Homo sapiens
ccgggcgcgagcctgcggccccgccggccgctggcgtgcgtgcgtgcgtgcatgcgtgcgcgccaccgccatcgccatcgccttcctggtttggacagctctaccggctcctcccgcacggc

SEQ ID NO: 196824 - DNA, 122 bp, Homo sapiens
cggtttctcacccgccccgagagcgccaggcctcccttcttctgattggccgagccgagtcgtcacgagccatgattggctcagggccaaccaccccgccccttcacctagggctcggccca

SEQ ID NO: 196825 - DNA, 122 bp, Homo sapiens
caagcagaaagaggagcaagctgtttctaaagaaagtgagacctgcgatcaccctcctatcgtctcagaggaagacatttctgttggttattccacttttcaggatggcgtccccaaaactg

SEQ ID NO: 196826 - DNA, 122 bp, Homo sapiens
cagcctccttcctgtaggcgagggcccaagtctgggggcagaacctgagtgtggatggggcggccaggaagaggccccttcctgccggggtgggaagagtttctctccatcggccccatgcg

SEQ ID NO: 196827 - DNA, 122 bp, Homo sapiens
aggagagggtccgggctctgtcggaggagtgggtacagcccagcacatgcttttctgacgcgcagcgctggcctggggagtgggtgcagctgctgcagccagcccccaccccgccccaggct

SEQ ID NO: 196828 - DNA, 122 bp, Homo sapiens
ggcccagctggcggcccagtggcaaagcgccgttggtcctccgtttgaaaaccatgatcgcggttagtggaaagagtaggctgagtcctgatttttaaactatacggtgggtacactggtgt

SEQ ID NO: 196829 - DNA, 122 bp, Homo sapiens
gagcaacagggaggagttgttaccatttggtttttcagggccccttcgaaccgaagccctcgctgacaggagcccctgccgtcaatcacaaccacggcgtagcccagggaggccagtgtgtt

SEQ ID NO: 196830 - DNA, 122 bp, Homo sapiens
gcaggtcaggaaacttccctccgaacagtcaaccgttgcttacactggggctgagtcacccgacaggaagttcctacaaaccttactggcatcattgaaaacagacagctccatggtacctt

SEQ ID NO: 196831 - DNA, 122 bp, Homo sapiens
aaaaatatatgtggtttggatgtgtgctttaattcagctttagaaattaataccactacccgtgaattatatggcctgacaatatgaattaggtgtactgtactgaagaacagtactccaca

SEQ ID NO: 196832 - DNA, 122 bp, Homo sapiens
ggggcatcaaccctccggggcagccaaggacgcagcggcagtggctgcagcggccgccgccgccactgtgtacccgacgtttcccatgttctggccagcagcaggcagcctcccggtaccgt

SEQ ID NO: 196833 - DNA, 122 bp, Homo sapiens
gtacggggtggttctgggccgggtggcgcatcagggtcccccagtgcctgtgaccaggcccgcccgccccatcttacagcaccactgccgggcgtgtgggcagatattctgtggaaagtgtt

SEQ ID NO: 196834 - DNA, 122 bp, Homo sapiens
tggaggctaattcagcgggccgagttgggcctgccccagatgaattcctctggagctgaccggcccgcgcagagagcaagtgatgtggacagctgccttcagcatcgcagcccccagctcag

SEQ ID NO: 196835 - DNA, 122 bp, Homo sapiens
taaaagaaatgcaccttgttcataattgccaacagttcactaagcacaagacgcaatcgacgaggtgaatcactgtgttcaaactctaacgtcagtccatgctgaagctgtgataccaggat

SEQ ID NO: 196836 - DNA, 122 bp, Homo sapiens
agagcgacgttcttccaaacacggtttaagcggcgagagacacctgcctaggaccctacgcgtctggaagtctctcccagtgaattgggtctcatctcctgccgagtacgcaagttcaatta

SEQ ID NO: 196837 - DNA, 122 bp, Homo sapiens
gcctctctttggtgtgactggttatactttgtcttcttcatacggagtggttccgttttgcgcctaggggcgtaacccgcccgggagggaatctggctgcggcggaccagggggcgcggctc

SEQ ID NO: 196838 - DNA, 122 bp, Homo sapiens
ggatctgctgccatggagaagctggagttcttctcagctccgagtgagccccaaggagtgcgtctgagcagagtgcacgtggtgcccatggttctcaccagagatgctcaagcccttgggcg

SEQ ID NO: 196839 - DNA, 122 bp, Homo sapiens
accctggcctcccaggtaaatggccacattgggggatggagtagaggtgcagagctgcgacgtgcccggggctgaaagtgtggtgatgaagataagttttgctggcttgaggatgaagagtt

SEQ ID NO: 196840 - DNA, 122 bp, Homo sapiens
taaacaaaaaaatcaaggcagaatgactagaaattaggacagcagggaaagcaggggaagcggttgagctggtagaaatgggtaatacctatgattatttctgggatcaacagatacatccc

SEQ ID NO: 196841 - DNA, 122 bp, Homo sapiens
gaccccgccctccccacagacggtgtgcagccagcagtaccgcttcagcattgtcatgaacgagctctccggcagcgacaacgtgccctacgtggtcaccctgcttagcgtgatcaacgccg

SEQ ID NO: 196842 - DNA, 122 bp, Homo sapiens
aggactcacagctaatctgggtcaggagcggctgccggctcccccactcctggagatgagcgactctgtgacgtcacgggaggcgcgggcggagcgccggggaagcgaagtaggcaggggcg

SEQ ID NO: 196843 - DNA, 122 bp, Homo sapiens
tccctctgactccgtgacctcggctgcagagggtcacggcgaattatatacacagtgccacgcacatgggaagctctcagtgagagagggtgggctgagagccgcttggcctgggccctgca

SEQ ID NO: 196844 - DNA, 122 bp, Homo sapiens
ctactcctttaagagattaggcagtacgcctattctcgcctggtcccagcgtaccttgcgcggctcgccgtcccccactcacgtaccagggctcattgcgtgacggttacacttccggcggg

SEQ ID NO: 196845 - DNA, 122 bp, Homo sapiens
gttagagggtggccagccagttccagcgacttgtcctggcgctgtctcttgcatttgtagcgtcggttctggaaccagatcttgacctgcgtggacgtgagctgcagcgcgctggccaggtg

SEQ ID NO: 196846 - DNA, 122 bp, Homo sapiens
aacggggaagaggctgagattgtatgactcccagccacagtttgctgggcaagatactggcgccaggaggtggtgagatttgtctaaggtcacacatgaaatccaggatagaactctgcagc

SEQ ID NO: 196847 - DNA, 122 bp, Homo sapiens
cggcacctcatctctgaattcaccttgagcgccttgccctggagctcatcgatgattccccggaccttccccagcaggaagggccaggagttgatgaggtagatccggtccatcatgatggt

SEQ ID NO: 196848 - DNA, 122 bp, Homo sapiens
gtccaggaggtaggagcccgtgtaggtgacgtactgggcgtaccactggggcgcctgcggcgtgatacagcacaggatcttgcgcttctcctcgatcttcttcctgatctgcaggtattcga

SEQ ID NO: 196849 - DNA, 122 bp, Homo sapiens
aggcagcaactccagagagaaccgccagagcgtgcaacagcaaacactaaccagcccagccgtcagccacgcaatcatcactccctggcccagtgcgcggcagaactggcgcaagcgcacgc

SEQ ID NO: 196850 - DNA, 122 bp, Homo sapiens
tccacatgtttaggctaaggtgggcatgaccgagtggccttcccccgggaagaccagtgtcgtaactggaattaagttgtggaacataagagtcaaggctcgtgtctgctgtgaactggagt

SEQ ID NO: 196851 - DNA, 122 bp, Homo sapiens
tgggtgaagccaggtgggctcctgagtctggtgggggcctggagaacctttatggcggcgcgtctggagttgttcgttcctcccggtgggttcgtggtctcgctggcctcaggattaaagct

SEQ ID NO: 196852 - DNA, 122 bp, Homo sapiens
gcggcgcggactccgcgtggtgctgaaggggacagcgccagatttgtcgcactgcgcaggcgcagaggcgcgaacaaagaggggagggggacgaggcgcgcggccggaggtggtgcgcgctc

SEQ ID NO: 196853 - DNA, 122 bp, Homo sapiens
aatcgggtcactcccacacgaatacagcccttttctgatgggcctaaaaacggcgcactacgagattacatcccgcaccaggctcggagggtcctacgcccagggagtatcactgattgcta

SEQ ID NO: 196854 - DNA, 122 bp, Homo sapiens
tgggtgggaacagaacagccttggtcgtggctgaggagaaatcccacagatgtcactggacgagggtgacgggtggggccgggctttcccctgggtacaggcacaaccgtgctcttccctcg

SEQ ID NO: 196855 - DNA, 122 bp, Homo sapiens
tgggctgcggggcccaggggctccttgggcaaagccagcatcgggatatgggtgaacagtcgttgctgtggcatgccttacccagccagacttcatctttatttcttaatctgggctagctg

SEQ ID NO: 196856 - DNA, 122 bp, Homo sapiens
tgcctggaccctcccagagggggtcccctcctccctctccaagggctgccggggagaacacgctcagaggaggcagctctaacccagggctggggactgccctgcttcatgattttcctggg

SEQ ID NO: 196857 - DNA, 122 bp, Homo sapiens
cttgggtggtcgatgggactgggcgctgtggagcagggggcggcgctcgtcgcggaggctcgggctgcacaggagcccacggaggggcggggaggctcaggcatggcaggctgcaggtcccg

SEQ ID NO: 196858 - DNA, 122 bp, Homo sapiens
cttgcctcgccttgaatcatttgccacttcacaccgccccgccccttccgtccccggaggcggccagcctcgtgtccgctctaggcttctcccggacgtctctttgtggtggcgttgagctc

SEQ ID NO: 196859 - DNA, 122 bp, Homo sapiens
accgttccgccccgccctgccgatccgtctgttcccggtggtcccttcggaaacggttcccgcactggccggctccgaaagcaggaaaacaaaggttcccacagtaggggcgggggaaacgt

SEQ ID NO: 196860 - DNA, 122 bp, Homo sapiens
aggaagcccgtcctgacaacgtggcctcggagctgcgtgctgagtgggatcacagcgcagcgagcagagcaggggacacagcgtgacccacggccaggacaggacggcaacggctggaacac

SEQ ID NO: 196861 - DNA, 122 bp, Homo sapiens
gttccctcagtgtcatcttataaatggccccggcttcgcagaggccaagggcccgatggtcgcagctgggagcagtccgccagccgggaggttctccatgtggcctcgggacgcccagcgac

SEQ ID NO: 196862 - DNA, 122 bp, Homo sapiens
tttataaagaaatgcataaacaagcaaacagaaaataaggtaccactatggatttatgcccgtaatatctgatgaaccagactgaagcacgtgaattatgcccaaacctaaagggactgtgt

SEQ ID NO: 196863 - DNA, 122 bp, Homo sapiens
cgggggtgccgctcaggtaagtcaccgcagccttggcaagggggtgtgggagcggcggtccgcttcggcgcccgccatcggcagggatctccctcttggtgccaggtacctgcctactgctc

SEQ ID NO: 196864 - DNA, 122 bp, Homo sapiens
tgctcttgcctggcttagccttctggtcaacccatagcctcctgccgttggcatggcacacggcatcccggatggctggggcagaccccagggtggcgcgggcagacactcgttgggaaagt

SEQ ID NO: 196865 - DNA, 122 bp, Homo sapiens
gacccaacgctgaggaaagaccccgacttgtggtgtccttccccttgcccaaactggccacgaaaggacatatagcgagagagaaagaggtgcggggggacggggggggtcgattgaaaata

SEQ ID NO: 196866 - DNA, 122 bp, Homo sapiens
tccctctggattgggctttgcaaaaatgtgtcctcttttgactgatcaattagaaaaaagcgacccctctgggcaggctaattagaaaaatgtgccccttccacagccctgggctgagcaga

SEQ ID NO: 196867 - DNA, 122 bp, Homo sapiens
cgcttcccaggttacgtcccttccgtaggccgcggcgtaactggtgattggtggagaaagcggcagctgtcccagcggaagcgacgaagggacgggacccgggagcctggacgagtccgagc

SEQ ID NO: 196868 - DNA, 122 bp, Homo sapiens
gatggtttgggaaaggaaacagggggtctcagaccgcttgggtgcagcgctctccccatgcgtttgagtgcagatctgtcgagacgccccagccctcgccaccccaccaagctctcaggtag

SEQ ID NO: 196869 - DNA, 122 bp, Homo sapiens
gtctgcaggcgtctgccgcccggccgctccctccggctcttatactctacccgacctgcccggctggttccaccaccgaccgtccccactggtatttgggtgacacatcccgcccccctccc

SEQ ID NO: 196870 - DNA, 122 bp, Homo sapiens
cccactcaggaactttatcctctggctgtgactttctcaggacatatctggcacttgcatcgctccatacctttactcataatgttcctcttttcctggaatattcttctcacactagagaa

SEQ ID NO: 196871 - DNA, 122 bp, Homo sapiens
ccctggttttaaaaataaagtttcgagccgagagtggtggcgcccgtggtcccagctcctcgggaggctgaggctgggggatccctggagcccgcgaggcaaaggctgcagtgagccgagat

SEQ ID NO: 196872 - DNA, 122 bp, Homo sapiens
tgcgcagtgtcctagtgcccatcgtctgtttccccggccttgcccccgcccgccccgtgccgtggacatctgggcccactcatcgcccctccaggcccccggcgccccaccccctagagtgc

SEQ ID NO: 196873 - DNA, 122 bp, Homo sapiens
tttgaaggactatctccatatccacggtgcatgtcagaggtatgggatactgcctccaggcggcccactgccctgtccaattttttaccagattttgcatgtcagtcataatgtatcacctc

SEQ ID NO: 196874 - DNA, 122 bp, Homo sapiens
gccccaccccacactgcagcactgcgcagggcatgccttgtgcaccgtcctctggacagccgtcctggacagggtcctctcagtcaatgtgtctgaaccaaaggcatctgtggacaagcccc

SEQ ID NO: 196875 - DNA, 122 bp, Homo sapiens
gctgaggacgcaaatgtggtgagcacgcgatgcgggtgcggtgaccggggctggtcgggccgggaagaaggggcgccggatccaggtcccgcacggggagggggcggggaaggattgcttgt

SEQ ID NO: 196876 - DNA, 122 bp, Homo sapiens
cagcacccccgcgcggccgcctggcctccgccagcccgggacggggatcgtgctaggtcccgtcgccctcggtggcctgagagcctaccaagtgtatttcctcgcgttttatagggaaaata

SEQ ID NO: 196877 - DNA, 122 bp, Homo sapiens
cgtggtgtggccgtgcagggctcgggtgctcgtgctgtggccgtgcagggctcgggtgctcgtggtgtggccgtgtagggttcgggtgctcgtggtgtggccgtgtagggttcgggtgctcg

SEQ ID NO: 196878 - DNA, 122 bp, Homo sapiens
cattccttgattctggaattacatcgcagtcagttggtcccctccaggacccaagggtcccggttttctgcccttcctccctcaggccggagcccatccccagacctctcctctcggggaac

SEQ ID NO: 196879 - DNA, 122 bp, Homo sapiens
ccgcccgtcagccctgggtgtggggaccctgcacggatatcctgtgtgctctggtcccggcgagcgtcctgggagagctgtgcatgagtgaggcatcacagacggtcctcagaggcagtgtg

SEQ ID NO: 196880 - DNA, 122 bp, Homo sapiens
agactgatcagccgatcagggaagtgcgaggaagcgcacacgagagggagcagtggtggacgaagcgccccacccggccacggggacttacacccaccacatcagaaaccccctcaacacgg

SEQ ID NO: 196881 - DNA, 122 bp, Homo sapiens
tcccctccctttcctgggaggagagaaaagagagggcaaatcctaaaaaaatatgtatcacgtgaaacgggggcaaatacttgattgaaaatgagtacttcgaatattatattttcctcggg

SEQ ID NO: 196882 - DNA, 122 bp, Homo sapiens
gtccaggcttcaagacctaggctccaatttctcaccgtgaagaagctcgggaaaaccgggcgcttggggaggcgcgcgggcagaggctacccgtccccgcggcctctagacaggggcggagt

SEQ ID NO: 196883 - DNA, 122 bp, Homo sapiens
attgctgctgctactattactgctgtggctgcgcctcctccaacacagccaaccaggctgcgtgcgagcccgggcagacgcctggccgcctccccaccctttcttccagccatccatctatc

SEQ ID NO: 196884 - DNA, 122 bp, Homo sapiens
gggcttggaggtcctttctctaaggccgcaccgataaacgattaccgactgttgacctcacggccccttcgcttccggccgcaccgcctcgctgcccacgcctgcgcactcaggcaccgcag

SEQ ID NO: 196885 - DNA, 122 bp, Homo sapiens
gtacgcctacctcaacgtggtgggcatggtgggctccatcgacaatgatttctgcggcaccgacatgaccatcggcacggactccgccctgcacaggatcatcgaggtcgtcgacgccatca

SEQ ID NO: 196886 - DNA, 122 bp, Homo sapiens
gcttccttataggctctttctccccacccctctgctcctccccagtgttacacaacactacggagccaggaacacaatgtcaactgtcaacgtctttctaaaggcagtgggtgatatttaca

SEQ ID NO: 196887 - DNA, 122 bp, Homo sapiens
aagctttcgcccgaatgggaactcctggaaataaagccctgcagtaaagacggcagggtgcggtcccggctcctggcgcgccgagccccccagcagggcgggggcaccgcggaagaagcgcc

SEQ ID NO: 196888 - DNA, 122 bp, Homo sapiens
catctggcgccactgtcccacaccttccctagactacaggggagagagccgagtgcaaggcgcaaagccagcgctcacgggctctcccacgcaggagccccagtgagatgggagccactgag

SEQ ID NO: 196889 - DNA, 122 bp, Homo sapiens
atcttagaggagtcagaatgggtcgggggaagatccagagagagaaggcagcctctgcctcgctcactgcaccataggcatgagccaccaggctcctcaccaactgcccctgcaaaccctca

SEQ ID NO: 196890 - DNA, 122 bp, Homo sapiens
ctcttccagctaacggtggaggaaggcacaacaacagtgccaccgaggtgccctgagacccgcaagctgctcccgccaaacggaattgcaggggagcctgatgcggcctcggtctgaccacc

SEQ ID NO: 196891 - DNA, 122 bp, Homo sapiens
gaacaaagcccagttcgaaaccccgcccccggttctctgagttacttcagggctcgagttcgagccagtacaactgttacgtcaccggaatccagccaatcgcagacgacagaaggagggcg

SEQ ID NO: 196892 - DNA, 122 bp, Homo sapiens
cgccccgccccgcgccacccggagccccgccccctccgggaaccccgccctgcaccgccgcgtacccgggtctccaagccaacccagctccccaagccccgggaccccggccctccgtggcc

SEQ ID NO: 196893 - DNA, 122 bp, Homo sapiens
ggccagggcaggggcggggcagagccgggccaagctgggcgggtcatgcgccctggccttcgcgcatctcccaggttagctgcgtgtccgggtgctaggctgcagacccgccgccatgacgc

SEQ ID NO: 196894 - DNA, 122 bp, Homo sapiens
gtcggggggatggggtttgaactgtcagcaggctcgggtgcctgtgcagtgatctgtcagcgggttggggtgtgacctgtgggcgggctggggtgcctgtgcggtgatctgtgggcgggctg

SEQ ID NO: 196895 - DNA, 122 bp, Homo sapiens
aaagcagttgtttttaaaggctgtctgtgggaccaatgcgttgtcaaacagatgccgtcccgcatcccctccccctaaatgacacagaagattccagcgtaggggaagggccacgaaacccg

SEQ ID NO: 196896 - DNA, 122 bp, Homo sapiens
gtaggcgaacttgccagggggcctaccaggggcagaatggggtcctccggaccagccagccgcgtctcagccacctccgcagcccccggggccctgaaccccggccgcgttgacgcgcgctt

SEQ ID NO: 196897 - DNA, 122 bp, Homo sapiens
ggcgcccccggccagagcggcccctggctgcctccctacgccccgcgactccggtccggacgccgagggcctcggcctgcccctgtcccccggccgccccccacctgctccggcccggcggg

SEQ ID NO: 196898 - DNA, 122 bp, Homo sapiens
cctttaaaactgatttcatttgcaatcatttcctcagagaggggaaagttaaagggcacccgggtggctcataggagcattcacagggcacataccaattggggaaatggtgaaagaagaag

SEQ ID NO: 196899 - DNA, 122 bp, Homo sapiens
gctcctctccggagctgcggagcgcaaaagatcacatagagaggaaccgaggcagccaggcgttcgccgggggtgtgcgcccttgcacctcctgccgcctgggcgctcagcctgtgcgcctt

SEQ ID NO: 196900 - DNA, 122 bp, Homo sapiens
aaaaaaaaatatgtttacaggccaggcgcagtgttcagcagtttgggaggccgaggtgagcggatcacttgaggccaggagttcaagaccagcctgggcaacatggcaaaaccccatctcta

SEQ ID NO: 196901 - DNA, 122 bp, Homo sapiens
ttcctcacagaatcacacagagaaacaagagctgctggcttccgggttctcctgggctggcgcggtacgtcccggaatcgcaggcgcgcatcccttcccgcctgagggcctgcctggccgtg

SEQ ID NO: 196902 - DNA, 122 bp, Homo sapiens
tgctcctccgtcagctcattgagggcatcctgtagctgctgcagatgactggcaaactcccgcagctgagacgggcaagtgagaatccccatcacccagagtcaacgctgaccccaccactg

SEQ ID NO: 196903 - DNA, 122 bp, Homo sapiens
cgcatggcggtgccccacctggtgaggacgcgggctgcagtcctccctctggggatgagtcggtgggctcctctgagctccagcgcccccagggtctagacccctcccattgctccgctccc

SEQ ID NO: 196904 - DNA, 122 bp, Homo sapiens
tgtcttatctgaagcctccctccgggaagaatctgctttcaagttcatgtggttgttgaccgggctcgtttctttgccggctgccaggctgggagcctctgtttattgctggctgttggcca

SEQ ID NO: 196905 - DNA, 122 bp, Homo sapiens
aggaatgcacagagcttgccttcagttctttaacatctatggtgccagttccatccgcatcgaaaagatcaaaagcttcccggatctcctgcttttgctcttcagtaagctcaggcttaggg

SEQ ID NO: 196906 - DNA, 122 bp, Homo sapiens
tgtgcatgctagaaaggctgtacgaagagaggggaggaggggagagcccagccgcctgggcgttttaggagttctgattttacacagaactcaagtgagttttgtcaaagctcttgaggtga

SEQ ID NO: 196907 - DNA, 122 bp, Homo sapiens
gagagatgcacgagggtcctcgggggtgtcctcaggaaggagctgagcaggtcctcagctcgccccacctccccgacaggtgcacacccggcgggggctgaggtgggccctcctctgtctcc

SEQ ID NO: 196908 - DNA, 122 bp, Homo sapiens
gcagaagcatcagccaacccaccacgagtagaaacgccctgtggtcccgcgggacagggacggagtccccagaggggatggcagagtcaaaggagatgaacagttttgtagcgcttatatat

SEQ ID NO: 196909 - DNA, 122 bp, Homo sapiens
agcgctctccacgacccccacgagccagggcgtcagaaaagtttgtgcagaagtgggggacgcaagggatgagcgcaaggtccggtgcggctggggcgtgattactatgtacgcccctcagg

SEQ ID NO: 196910 - DNA, 122 bp, Homo sapiens
agcactgtggagagaaccggaaactgctgccgtgtcacccagcactcgctctggtggaaccgtcgcacgagcctcacgcctcgtcccctctgatgccaacgtcaggacaccccacttcaggg

SEQ ID NO: 196911 - DNA, 122 bp, Homo sapiens
gctttggtggtcaagtgcagggcggctgggggaggtaagaccttcaggaaggccatatcccggacaagacccagaagggaagcccccagagccaagggtaggagggccccacccgggtctca

SEQ ID NO: 196912 - DNA, 122 bp, Homo sapiens
gcaccggacgaagcagtcgggtctggccccagtcgactccagccaggcggggctccaagccgagactcctgcacgcccggcccgaagctagcccgacaccctcagctgagtcctccgccgtc

SEQ ID NO: 196913 - DNA, 122 bp, Homo sapiens
gaacatcagtgatttgtccaagatcctagagctgagagagaatcgttgggccccaaatcccgtgcttttacctttgcatagcgtttatgatcgaaaagccctttttatgagccaggtggtag

SEQ ID NO: 196914 - DNA, 122 bp, Homo sapiens
agatggagatcggaaactcggcatctggttgtccatgaggggcaactactgtttctataacgcagagcaccacgtatattggaaaacatgcgcttgcaaaatagaacaccgatcactcgagg

SEQ ID NO: 196915 - DNA, 122 bp, Homo sapiens
tgccagcggcttccgccacaatgatgtgatcaggttcattaacaatgaagtcctcatggacggcagcggcccagccttttacgtggccttccgctcgcggccgtggaacgaggtagaggaca

SEQ ID NO: 196916 - DNA, 122 bp, Homo sapiens
ctggggaacaaaaggtaataagccactctttactatgccttctccctctgcccactcccccgccccccgaaaggaagacctccaggtgacgctccctgaggactcgggccaggtgctgctgc

SEQ ID NO: 196917 - DNA, 122 bp, Homo sapiens
actcgggtgtgctgaaaatctcagcctcagcatccctgggaaaagcgcctccaagagttccggcttcagggagccttgttgcagtaccggaccggtctcatcagcacaaccaaagtggaaag

SEQ ID NO: 196918 - DNA, 122 bp, Homo sapiens
aaatgggagccggccacagctgagcacaagaggactttggagggtgatggaaatggttttcgacctgaatctgaacatgggaagcactgcagtttagtagtcctggtccctaagcccttcca

SEQ ID NO: 196919 - DNA, 122 bp, Homo sapiens
tgtttttaacagggacagaagccctggtgagaaaatgcattcccagtgggcatttgttgccgaccctatggggactgtgtgagagctaatcctcactctcaacctgcctttcccagctgaag

SEQ ID NO: 196920 - DNA, 122 bp, Homo sapiens
gccttgaatttggtgatcatgtctctttagtctcctctaatctagaactgcaccggtaaacggtcagcaggactgtgttcctcaatgaaggttccggggtggtggggtttgggtgggggaca

SEQ ID NO: 196921 - DNA, 122 bp, Homo sapiens
gtgagtattggctgttccttgttccttttaggaaggtatgcaaagaaaagagatgacgttcgcaaggactggccagatttcaaacagagatgaaaggaaaaggcaagtgtctagagcagcag

SEQ ID NO: 196922 - DNA, 122 bp, Homo sapiens
gccgcgcggctctggcccttggcgcggccgataatgttcgggtagataaactggggctcccggcacccagccacgcccgccttgatcattcccgagccgttgtcgatcaccaccggtagctg

SEQ ID NO: 196923 - DNA, 122 bp, Homo sapiens
gggccgcgacaggcagttctggctgggcctctaccactcgcagaaggtgctgctgggcttcgtgctgccgctgggcatcattatcttgtgctacctgctgctggtgcgcttcatcgccgacc

SEQ ID NO: 196924 - DNA, 122 bp, Homo sapiens
ggacaaatcacaatcgacccgggcggccagcagtggagacaaggaggagagacctctccgcgggggttaggtcccctcagaaactgccgagctggggcaacacgaaccgctgggacctcctg

SEQ ID NO: 196925 - DNA, 122 bp, Homo sapiens
gggaagaggctgtgcagaaggaagagccttgcacggtgcttccttccatccgacagatgccgtcggcatcaatgggctcaaacacatcgatgatagcaacgtaatcaggaagacatgaattc

SEQ ID NO: 196926 - DNA, 122 bp, Homo sapiens
tactgctctggtgccagaggatattcccaatgcctggcgtccccaccctggttcttccttcgttccaatgaatgtaggtaaaactgccttcatttgaggcccagtaggacaaacagcaacag

SEQ ID NO: 196927 - DNA, 122 bp, Homo sapiens
tgcaggagcaaagtggaaaagtcctctggggattttcttctctgatacaagggaagcacacgcaaatgatcttttcctgagaaaacccattgagagcagtttcccacacgccctgacactca

SEQ ID NO: 196928 - DNA, 122 bp, Homo sapiens
actacccaaggctcggggcgtttgcccgcgtgggtgagggccctcagtgccccggccctgcggcccctggtttcaactccagtcttggtagcagcctttggcaggggctggctatgagtaag

SEQ ID NO: 196929 - DNA, 122 bp, Homo sapiens
atctctcctccactctctgtccacctccgtttctctttctgacagtcactatctctccttcgctttcggcctccacttctcgctgttcctcgcggcacagggccttggataaactacttaac

SEQ ID NO: 196930 - DNA, 122 bp, Homo sapiens
gcgccccatggcctacacaccctgcttccagagtgactccaggagcaacctggataagatcgtggacgggctgggaggcgagcaccaggaaatgaccacgtttcaccctgagtcgccccgca

SEQ ID NO: 196931 - DNA, 122 bp, Homo sapiens
acctggtgatccacccacctcggcctcccatagtgctgggattacaggtgtgagccactgcgcctggcctacctgatgttctattctactgtagctaacctggcattcaaaccataatacaa

SEQ ID NO: 196932 - DNA, 122 bp, Homo sapiens
tatattcagtgacggaagcgcattcacagtgctgtgcattcagtggcggaagcccattcacggtgttgtgcattcagtggcggaagcccattcacagtgctgcgcattcagcagcggaagcg

SEQ ID NO: 196933 - DNA, 122 bp, Homo sapiens
ctatatttagccctggataaagtccactttttcctgagtcataatgccaacttggctaaacgatcgtacatttccaatcatgcttaaataaacataaaatttatgtatggatgagaaggaca

SEQ ID NO: 196934 - DNA, 122 bp, Homo sapiens
gcaccgtactggcagccacaaagaccaatattcctctttgttgctgttttaaaagcaaagcgagaatggtaatatggaaacacaaaaacacggacacgctcacactatgggaaaaccatatt

SEQ ID NO: 196935 - DNA, 122 bp, Homo sapiens
tggccccggcgcgaggagctcccgggttcccgggcgggcactggagtaaggagctgcgagcgcagcccgaggcggggcacggcggaaggcgcggcgagagcggggtccctgcgagcgcagtc

SEQ ID NO: 196936 - DNA, 122 bp, Homo sapiens
tgggggctgaggcagaaggatcacttgagctgggaagtcgaagctgccgtgagccctgatcgtgccactgcactccagcccgggcaactgagtgagaccttgtctcaaaaaaaaaaaaaaaa

SEQ ID NO: 196937 - DNA, 122 bp, Homo sapiens
atactacatgtttccgcctttaagtgggagctaaacactgggtatacatggactctaagacgggaacaataaacacggaaaattccaaaagggggtaatgaggaaggagggcaaaggttgaa

SEQ ID NO: 196938 - DNA, 122 bp, Homo sapiens
agacatcgctgtttatcttgtctctaagagctccagacacagagaaggcagccaggtaggcgggtgggtactcagcaccagtgacattacgggatcacggcacccatcacaatgggcccccg

SEQ ID NO: 196939 - DNA, 122 bp, Homo sapiens
acatttattatgaacagaccagctgtcctccatctctcataaaacagcttctaattcacacggaatcgtgtgccccaaactcctctctcctgtcttctttaaaaagcatatgtcacagctgc

SEQ ID NO: 196940 - DNA, 122 bp, Homo sapiens
taatcgaggataactgacttgccttccgtcactctgctactaaggtgtagagacaggtttcgatctcattgcttttgaagatttacacgcggtcccccgtgattccggaatatccctcttcc

SEQ ID NO: 196941 - DNA, 122 bp, Homo sapiens
ccccggcgctctcccgcctgcgttgccactgctcagccctaaggtccgggttcactgtaacgcggctgttgccctttcgaattcttcgcttttgaacaaggggctgcgtttccattttgccg

SEQ ID NO: 196942 - DNA, 122 bp, Homo sapiens
tggggcagcaagcagtggaggccccagctggtggcaaggctatgcatagaccatgtgcaccgctgtgcctgtgggttgtgtctgtggacgtgaccatgtggtccctccacatgaacgtacac

SEQ ID NO: 196943 - DNA, 122 bp, Homo sapiens
tcgcagcaccccttctctaacacttcctgatgtgggctccggcgctgttaaacgtaggcccgctccggtgtgctgagccagggtgcgttcggcctgcagagcaatctccagcgactgacagg

SEQ ID NO: 196944 - DNA, 122 bp, Homo sapiens
gaaagctgttgttttgcattttgatatcgctaccattcctagcaagtttgtcctctgaaacgttcaaaagctctttttagacgataccttcaccctctccataccctcccagcgagggaagg

SEQ ID NO: 196945 - DNA, 122 bp, Homo sapiens
caagtcactgaggtaggacaaaaggttgctacggtcctattattttatggttattataagcgtactggaactctaaaaagaacttgttgtataatataattctatacaaggtatgtagccca

SEQ ID NO: 196946 - DNA, 122 bp, Homo sapiens
cccacaggcagaagatgccggtgcaagttcaaccagcagcagaggtaagacgcccctccccgccctccttcgcccgctcctgctctggagggcgccgcgggtgaggcggggagtacccctga

SEQ ID NO: 196947 - DNA, 122 bp, Homo sapiens
acctgacacgcacggctgcctgacatgcacggagcctggcccctttctcgacggagcacacgccgttcagacgtgtgcagaacatttaccaaaaccaaccagggctgcaccacgtgcagcca

SEQ ID NO: 196948 - DNA, 122 bp, Homo sapiens
atcagggggctgggaggtggggctggagccaggggaccacctgtgtctcattagtcctgtcgggcaaagtactgcagacgttaactccctgctggctccaactgttccctggatcccactcc

SEQ ID NO: 196949 - DNA, 122 bp, Homo sapiens
caacatagcgagactccgtttcaaacaacaaataaaaataattagtcgggcatggtggtgcgcgcctacagtaccaactactcgggaggctgaggcgagacgatcgcttgagccagggaggt

SEQ ID NO: 196950 - DNA, 122 bp, Homo sapiens
ggcaggagggcagaggccccacctggaccaagctgctgatgtcagcccctcatgctctagcgtgttgacaccattcacccactgcagacaaaggagatatggggagggggtggcaggtcagc

SEQ ID NO: 196951 - DNA, 122 bp, Homo sapiens
agcgatggccacgtgtggccgctggacacgagagacgtggccagtccaaactgtgcagtgcggtaagggcagaacacatgccagctttcgaaggcttagtaaagaatgcaaaatttctcaat

SEQ ID NO: 196952 - DNA, 122 bp, Homo sapiens
ctaaaagaacgctgcgtatttgcctgttttgcctccataagggaagtgtcctgcccaccacgccttcaaaaggaatggccttcaggccttgtccttggttccatttgaccctgtcctggcca

SEQ ID NO: 196953 - DNA, 122 bp, Homo sapiens
agtggccttatttcctaatagggaacatagcagggcctggggtttgatgagacggcgtaacgcccagcacaccttcagacaaaagagaccgtgataaaaacggttcttactacaaggtccca

SEQ ID NO: 196954 - DNA, 122 bp, Homo sapiens
gcggccgtctcccccgcccacctctccgggtcctaggccactgcgccagtgaatactccccgggctcttggctgctcacattctagttttcaaccgtgttgtggctgacacaaccccacgcc

SEQ ID NO: 196955 - DNA, 122 bp, Homo sapiens
gagccagtgggtggaagacagaggacgcaccaggtggagggcacaacaacgaccagggctcgtgggtgggaaaatactgggccaaggcaggcactggggttgagtgcagggtggagggtctg

SEQ ID NO: 196956 - DNA, 122 bp, Homo sapiens
ctgggatatttccgccgggcgctgtcagcattgaaagaggctcccgagactggggaagaacgaggtaggcagcaacttcggggtttagaccaagagcatcaaatccagggcaggcaaggaaa

SEQ ID NO: 196957 - DNA, 122 bp, Homo sapiens
tgtcccctggagttagcagcgtgaagagggctcttggctcatggctctggaccggcgagccgtgcgggtggagatgggcgccggctcctccgcggcgcgggcgtccaggcggtgatgctccc

SEQ ID NO: 196958 - DNA, 122 bp, Homo sapiens
gggggcgccatttttctcgccgcgcagggaggactgactaacgtgggcggagctctagctcgcgtattctgaggaggcggggttggcctaggcgaagatccggactctgggtgttttgctac

SEQ ID NO: 196959 - DNA, 122 bp, Homo sapiens
accaatgcgatggccggggcggagtcgggcgctctataagttgtcgataggcgggcactccgccctagtttctaaggatcatgtctgcgagccaggattcccggtaagaaaggcatttgcaa

SEQ ID NO: 196960 - DNA, 122 bp, Homo sapiens
ccagcccaggcaggtcactgcgccatttcctgtccaaagctgggcgaatcaggtcggtgccgcggggtaccccggaatcccccctgggagctggtcctgcactggccttcagagccgagcag

SEQ ID NO: 196961 - DNA, 122 bp, Homo sapiens
ccccctgctgatgatcttggttcgcagtccgcctgaggccacggccctatggaaagttctcgggaaggctgcgggggccctcttctttaagacaggggaaactctccgcttctccaactgga

SEQ ID NO: 196962 - DNA, 122 bp, Homo sapiens
ccagcaaaaaaaaaaaaaaaaatgaaaagggaaaaccacgtagaaggggcatcctggtcccggaaatgtttcatcatctggtggactgtgggagaataggcattgccaggacttgggaaaca

SEQ ID NO: 196963 - DNA, 122 bp, Homo sapiens
tgagcagtcccagagccgccgtcaggactggctgggtcccactaaatcagcccccatgaacgtgatggactttgcccacctctagaaatctggtggtggggtgtccagcctcttactctctc

SEQ ID NO: 196964 - DNA, 122 bp, Homo sapiens
ccgccagtctggactctgcgcgctctcgaaccacgcccgccggcccagctcgcgccgcagcgcactccacttccggctcggcccgcgtcctcgcagctgctacgcaaccgcacaaggacccc

SEQ ID NO: 196965 - DNA, 122 bp, Homo sapiens
cctcctcctgtggcgacaaagctctcggccaacgctcaccgccatacacatccgcgggaacgcttcctccaccagccgaaggcggggcctctgagggcactcccgccacacagcgcgaattg

SEQ ID NO: 196966 - DNA, 122 bp, Homo sapiens
ctgggatccagtaagatttttctcacgctgtctgtccagcttgagtggcgcgaatgcgcacgcgccaattgcgcctgcgaggaagaagtcacgtggcagccggaaagcgtggcggctgctgc

SEQ ID NO: 196967 - DNA, 122 bp, Homo sapiens
cgcggggacagagggagggagaggggaggggccgggcctcaggccgcggtcggcgccccccgcccgccccctccggacaataagctgccttttaaagggccactccgggcgccggcaccgcc

SEQ ID NO: 196968 - DNA, 122 bp, Homo sapiens
gcatctcccaggaagaggctgggccagacctcatcgatatggttcagtgtggcagcctgacggacccacagcaagcgctgcagcgaagccaatgtgggcggctggtagggagatgcctggac

SEQ ID NO: 196969 - DNA, 122 bp, Homo sapiens
ccctctgtggccaggccgtacttgttgctggcgctgatgtcactgcctccgcgctgccagcgcaccttcactcctgcccgctctgtctcggcctcgaacacggcagggctgcctgcggccac

SEQ ID NO: 196970 - DNA, 122 bp, Homo sapiens
gttcgcagataccagtgacaccaggtggctggactgatggagacgtcttcagacaggagccgctcagtcttctttcccgggcgtcgcctcctgtgtggtgccggaagagcgccaggttcagt

SEQ ID NO: 196971 - DNA, 122 bp, Homo sapiens
tgaaatagacatgaaacaagataacccaagaacacatttgttttccttgtaacagggatgcgttaagttcattattcagaggactttgattacccttttcaaagatttttggtgagtttaat

SEQ ID NO: 196972 - DNA, 122 bp, Homo sapiens
cgcgcacagccccctggtgcagctcctgccattcagacccccagccctcccccagatgtccgtcccctggccgtcgccttccccaaagtcttcgcagtgggcaaggaggcctcccccaagct

SEQ ID NO: 196973 - DNA, 122 bp, Homo sapiens
gcagcccgccatgcctgagcctcccctccatgggctcctgtgcggcccgagcctccccgacgagcaccaccccctgctccacagcgcccagtcccatcgaccacgcaagggctgagaagtgc

SEQ ID NO: 196974 - DNA, 122 bp, Homo sapiens
ttcaatgtagctgtcaattcagtatttttaagtacacctgtcagctgtttcttaccacttcgatggttgtgattaatttaaaatcaaaataaaggaattactgagtttatttgcctaataga

SEQ ID NO: 196975 - DNA, 122 bp, Homo sapiens
accttgtgatccggccgcctcggcctctcgaagtgctgggattacaggcgttagtcactgcgcccggccctagctgtggtttcttaaaagcgtgtcaactaaagtcagacaacttacacttc

SEQ ID NO: 196976 - DNA, 122 bp, Homo sapiens
caaagcccattacctattcttccagaaccttcctggagtattccgttttctctaggacaacggttctcaaagtgcggactaggggccaaaaaaaagcaggagaacacgttagaaatgcacgt

SEQ ID NO: 196977 - DNA, 122 bp, Homo sapiens
catccagagacacgtggggacagctccagcaccaaacggcttctgaccaatgagcagagacggcaaacagcaaatgcgttaccgtggctttcacgtgtcatgaaggtgatgctgtaacctga

SEQ ID NO: 196978 - DNA, 122 bp, Homo sapiens
ataccatgattcattagacctaatgaacaatgctgagcatattgtctctcaaatataacccgctggcattgatatatatgtactttaactcattcgtcccaactttattaggtacatatgtc

SEQ ID NO: 196979 - DNA, 122 bp, Homo sapiens
ccatcatcaggcccagagagcagcacggctgaggggccaacaggagcactcatgccgccacgcgagctccataaaaagactccaggtggccttgcaggctgcgtcaccacggttctgagaac

SEQ ID NO: 196980 - DNA, 122 bp, Homo sapiens
gggctggcacctctccagctgcggccagtctaaccccagggcctgctgggaaatgtagttcgaatgcaaacaaccaatggacgaccgtcaggcgcggcggttggggcggggcaggccccccc

SEQ ID NO: 196981 - DNA, 122 bp, Homo sapiens
gaagagcttgtttacaaattgtccattgaaaattgagttgcaaacatcggcatcaggcctcgcctgccaggccacccggattggagagtaatttatgaagattgctttacctggggccgtgc

SEQ ID NO: 196982 - DNA, 122 bp, Homo sapiens
tggctgttccaaattagggtctacccatctctatgcagggctaaagtccgcgggcggccccgcaccgctaccaaaagtacagtcctgtgcgcccagacgcgacgcaaacaagagtcgcaagc

SEQ ID NO: 196983 - DNA, 122 bp, Homo sapiens
cgatccgcgcctgctgggaaccgtgccaaagttgggacccgcgctggggaggcagccgagcgccccacgccacgtgctaccgaccggcggggagcgcaagagcgctgcaccccgcacagagg

SEQ ID NO: 196984 - DNA, 122 bp, Homo sapiens
ccaagggagtactgccatggtgccaccaatgtttacttaaggcccatgtggtctttagtccgctcttataataaatgctgccaggcctgtgactcacccttcagggcagtagtctcccctct

SEQ ID NO: 196985 - DNA, 122 bp, Homo sapiens
ctattcttccttgcagctcctcgttgcccacgaatctcttgtttattcccttagtttaatcgagaaatttactagatctgggtcttcctctccagctcatgtttttcttggctttattccaa

SEQ ID NO: 196986 - DNA, 122 bp, Homo sapiens
tacgccgaccaccgagaagtgaggactccacaggccgagagcccacgtgaagccggagcccgtcggtgactgacagacgctctgaaccccacagatgtcgccgcccctcacacctgcgcgcg

SEQ ID NO: 196987 - DNA, 122 bp, Homo sapiens
gcgggcggggcgaggaggctcggcccagggtccgagagagacttgccgggcctgaggcgtcgctgttccgggcggaccccggccggggctgggctgggaacgcggcgggcgactctgggatc

SEQ ID NO: 196988 - DNA, 122 bp, Homo sapiens
catcgcgagcggggaccaatcagagagtagctttgcctctataacggcgcgagagtgagacgtcatcggtgagcgactaacgctagaaacagtggtgcgcggagaggagaggtgagtgtgat

SEQ ID NO: 196989 - DNA, 122 bp, Homo sapiens
tcaaccatcaattgccttaggagcgcttctcattggcgtcagtcaagcgcggggcaggggcggagcaccggcaggcaggctccgtccaactgccattctcgcgcgtcgtctccgcggcgcat

SEQ ID NO: 196990 - DNA, 122 bp, Homo sapiens
tcggcagggcctctggaaaggacagggagggctggctttagcgactccacgggacggggacgcttgggctcttctagggagatgggaagctcttgggaggcacccgtcatcccaagcacatc

SEQ ID NO: 196991 - DNA, 122 bp, Homo sapiens
cagaatgggccagggaggttgagtgactgaagaccaagggttggtgcagcctcctcgccgcgctgcgggggctgggccgcacaggcttctgcccttctcggtgtccaggctccttgggtgat

SEQ ID NO: 196992 - DNA, 122 bp, Homo sapiens
cccaacaccaagaagcagctgaagttcctcttgatagaagcttgccacctaggatgccaccgggcatgcattggccagagtatgttatgtcttgatcactgaagtcaggtcatagagcctgg

SEQ ID NO: 196993 - DNA, 122 bp, Homo sapiens
cctgagcctcgtgcccccagcggaggagctctaccagtacctggagacctagggtgcagccgcccagggccggcggggcccttttcaccttgggctgacggaggtggcggggctagaggtgt

SEQ ID NO: 196994 - DNA, 122 bp, Homo sapiens
gggggcttcccggtggggcctggctgtcattctagggaacaggccgggtccctgcggggccgaacccaggccagaggcaacccagctaccctcgcatgtggccaactctccccggcccgctg

SEQ ID NO: 196995 - DNA, 122 bp, Homo sapiens
tgggccgacgccgctgccacgctctgtgggccgacgccgctgccacacactgtgggccgacgctgctgccacgctctgtgggttgacgctgctgccatgctctgtgggtcgatgcagccacc

SEQ ID NO: 196996 - DNA, 122 bp, Homo sapiens
gggcgcggcgctggctccgcgcgagacacaaaggagccggagctggcgggcgggtcccttcgcggccagctgtacatcagctctggtccctctcggctggggacctccccagcacaccgatc

SEQ ID NO: 196997 - DNA, 122 bp, Homo sapiens
agaccttgtaggtttattttgttcagtgtcaccatccctcccccaccacccctggcctatcgtccctctgcccgtcttttgtggcccggggtcctgcttctgcttggagatgaaaggcgtgc

SEQ ID NO: 196998 - DNA, 122 bp, Homo sapiens
gcttcagtgccccctgtgcccaatagtcagggaccttaaggtgaccctcagggccctgcacgatctggccctccatctcacctcctctcccaccacctgcccccttgcttccctcttcatgt

SEQ ID NO: 196999 - DNA, 122 bp, Homo sapiens
cgccacctcctcccgcgcccgccgcccccgaccgccctgcacaggcgcggcccgtcctgccgtcgcccccgtcgtccccgccccggcgccccagccgcatcccccgcccccgacttccagca

SEQ ID NO: 197000 - DNA, 122 bp, Homo sapiens
tacccactccctagctgtgttcccgcggggagagaggggaaagagggtctgattttttaacgaagggaaagaaaatatgccatttctagcgcttcagccacacaaagaaagcggcggaatga

SEQ ID NO: 197001 - DNA, 122 bp, Homo sapiens
atctctcccgaaggccgccctatccctccttcaggcggggacctagtaccttccgtccagcgctccccgctgcccagagtcgccgccatatcggttcccaatcagcaggtccgccgagcctc

SEQ ID NO: 197002 - DNA, 122 bp, Homo sapiens
gctctaaatttccctccaatctgggaaagtccaatctcccttcctcgagaggtgtctgggcgcaatactctccggcccgaagcaaggggacgtttgcgaggagggagaaatttaaaccccct

SEQ ID NO: 197003 - DNA, 122 bp, Homo sapiens
ccagagtcagctcatgttctctgagaccagggactatttttatctggtgcctgaggccagcgggacaggctaacaggtgccccagcccctcccaggcctctgctctcatggggtctccctct

SEQ ID NO: 197004 - DNA, 122 bp, Homo sapiens
aagctgtgtgaccttgaacagattgctttccctctctgggcctccatttcctcatctgtacgatgtaaagactgaaccaaatgatggctaagggtatttctggatctgagaaccttaaaacc

SEQ ID NO: 197005 - DNA, 122 bp, Homo sapiens
cgaggattaacgatgacgaggggggtgttagctctgaagaaaaccccaatccttccccatcgcccccgtagagcccgggagagctttctaaagcgccccacggcagtgatgaatcccggcag

SEQ ID NO: 197006 - DNA, 122 bp, Homo sapiens
gcatctttaagtccctggactaagacctcggctcctggttcgggaatcagactgcctgggcggcactccaggctccacagctccccacctgtgagctcctgggcaagtcactcggtccggat

SEQ ID NO: 197007 - DNA, 122 bp, Homo sapiens
ggggcccaagtggggtgctctggtctgaccgatgtgtctcccagaactattctgggggcccgacaggtgggcctgggaggaagatgtttacatttttaaaggtacactggtatttatatttc

SEQ ID NO: 197008 - DNA, 122 bp, Homo sapiens
ggctgaggtagaatagcttgaacacggaggcggaggttgcagtgagtcgagatcccgccacggcactccagcctgggacagagcgagactccgtctcgaaaaaaaataataaaataaataat

SEQ ID NO: 197009 - DNA, 122 bp, Homo sapiens
attaggctctatctgttgctgaaatttctcaacaaagtctctactaatgtgctttctcatcgatgttttctatgcacaagttccccgtgattaccagcaccctgtcagtatagaacagcctg

SEQ ID NO: 197010 - DNA, 122 bp, Homo sapiens
ggaccaggagaagagcaaagaaaagcagcccgtctggatttgtttgcccaggactggcgccgcgcacgcggatccccgaggggagtgcggtcggagtcaccgcgcccccgcctccccgcccg

SEQ ID NO: 197011 - DNA, 122 bp, Homo sapiens
ggagtcagcgagaggggcgtggccacagtcaaagatggagaatccatggtgccactttcccggtgatcccggtgggggaaggggttgccgcccggcagagattcagtcccgaatcccgacag

SEQ ID NO: 197012 - DNA, 122 bp, Homo sapiens
tgtgccagcccgaggatgagatgagccatccggggatcctcacagttcacataggctaagcgcagttctacacagagggacatggtctggagccccatcagtagtttaaccacccagagctg

SEQ ID NO: 197013 - DNA, 122 bp, Homo sapiens
ttgggcgaacgaagggctgcttcaggaggctagtgacgaaaaacctgcctggcttttgtgcggagaaacggcaggccctttccatccttttctggggggtaggttctaaaaagaaggccttt

SEQ ID NO: 197014 - DNA, 122 bp, Homo sapiens
tacatggagaagtcctcccggaggtgaatccgctgatgctgacacatgttggaactgtgccggaaggccttcccacactcgctgcacttgtagggcttctccccggtgtggatcctccggtg

SEQ ID NO: 197015 - DNA, 122 bp, Homo sapiens
gagcgactgtggggttagacggaggcagacagagcgtgggccgagcgatgcggggctgtgcgcccaggcggccgcgagttgtgactggagccacgatgcacggccaggcgcggtgagaagcc

SEQ ID NO: 197016 - DNA, 122 bp, Homo sapiens
tcgcgccccgacgcccggccccggccccctcccacagggcccaggaccccgcccacagcgcgcgcccccgacgccggccccgagccactcccacaggtctcaggaccctgcccagcgcgcgc

SEQ ID NO: 197017 - DNA, 122 bp, Homo sapiens
tcagagtggttgaatagaaggtagaaacaggccgggagtccacgggctcccagctctaaacggcgccagggcaggaaggggtggctccaggtctcactgtggcaccttctacagaaaataga

SEQ ID NO: 197018 - DNA, 122 bp, Homo sapiens
gaaaagacagtattaagtaaataacagtccaggccgtttgaggattacgcagcaatcattcgggtggatatgaagccagggaaaacgcattagctcccagggttggtgaaatgcgaggctgg

SEQ ID NO: 197019 - DNA, 122 bp, Homo sapiens
gccccgggagaggcgggactggggactcacggcagggcttgtctccgcccagggtgattccgggggacccctgtccagcgtggaggcggatgggcggatcttccaggccggtgtggtgagct

SEQ ID NO: 197020 - DNA, 122 bp, Homo sapiens
tggcctgaaggtgagaagagacaaaccaggttattagaagacaatcaaaatgaaacaaagcggggatggtaaggacagctaaaaaaaatcctaaggctgctgacacacccagataactggta

SEQ ID NO: 197021 - DNA, 122 bp, Homo sapiens
atgattcctcatcctctcctagtgagcatacctgggctggcctgctgaaccggctcacctcggccacccagcccaggccaacccagttctgtcgactctcagccgacccagacgaatgacag

SEQ ID NO: 197022 - DNA, 122 bp, Homo sapiens
gccctacctctgtttgtcctaggcatcctttccctcttacatattatagatgtacagagacgcaaaacagaagaacaactttatttgtggaatttacataccagggcttcttgcctacaaga

SEQ ID NO: 197023 - DNA, 122 bp, Homo sapiens
ctttatgttgtggctcctgcagccgaatggtgtagcttcccagtttctgaaaatctcccgcggagagtaaatgctctcctactgaaacgctgatggggacgggtggatttaattattcacac

SEQ ID NO: 197024 - DNA, 122 bp, Homo sapiens
ccagctctaggggcaggtctaggaactcattgttttccaagcagtgaggggtatacacgacgtttcgagatatccacaacttgatgtgccagtgtctgtgattgtaattggtaacaaagttg

SEQ ID NO: 197025 - DNA, 122 bp, Homo sapiens
ctgaaagccccatcagtcccttggagagatcatcagagagtgagtagagacatagcagggcgaagccctgagccccggttcccccagcatgtacctgcagtctgtttcctcttctcaactac

SEQ ID NO: 197026 - DNA, 122 bp, Homo sapiens
tccagggccgtactgaatatcaggcagtgggaagccattctccttggaccgcccaaaccacggcgaccacacttctttcaggcccacgtgtgcccgtgccatgctagcctgctgggtgacac

SEQ ID NO: 197027 - DNA, 122 bp, Homo sapiens
ctgcgggaggtgcaggccaagcacaagcacctgtgtgaggagctggccgagacccagggccggctgatgctggagcctggccgctggctggagcagtgtgagtcccgcccgcccacggaccc

SEQ ID NO: 197028 - DNA, 122 bp, Homo sapiens
gcttcatggacagcagtttagtagtacagatttcattagagaacttaactgctataggatcgggggaggtgaaggaaatacaattttccctagaagatttacattaaacagagtagttacag

SEQ ID NO: 197029 - DNA, 122 bp, Homo sapiens
agagaagcgagcgatcggaggatgcgagtctcggctcacgtctgcctcgcagctttcctccgaggcctggaaggcgagctagcctttgccctggcagcaccctgccccagcccagccatccc

SEQ ID NO: 197030 - DNA, 122 bp, Homo sapiens
caggaacccaaaggaaactgggaaaaccaaacctcctttctcaatggagaacctgctggtcgctgtcctcggggagctagactcttgtgcacacacaattcctcatcagaaacaggcaaaga

SEQ ID NO: 197031 - DNA, 122 bp, Homo sapiens
tgttgcaacgcccggccagaaagtgggcatcagctgttccgcctggcccacgtgacccgccgagcataaatgtgaccggccgcggctccggcagtcaacgcctgcctcctctcgagcgtcct

SEQ ID NO: 197032 - DNA, 122 bp, Homo sapiens
cgattgtaatggcatgtttttccccactccgcagtgggaaacaccatccatcatccatagcgcagaacacgggcctatggccccctccgcgtgcgctcctgtaccccacgccccaccccttg

SEQ ID NO: 197033 - DNA, 122 bp, Homo sapiens
cgcgacgtcggaccacaaggcccagcatgccccgcgcggactacaagccccacaatgcaccgcacaccctttactggccggccccgcgctgctctcctaagaccccgcgggccagcgccgcg

SEQ ID NO: 197034 - DNA, 122 bp, Homo sapiens
ctcagctgcacaataggaggtaccagcctcagccccaaagcctttccttcaagtccctaacgggtcctcatcccacctcaaatctcaccccagatcccaaaatggggtccccagccttactc

SEQ ID NO: 197035 - DNA, 122 bp, Homo sapiens
ggaaggagagaggagagcgctcccatccccaccctttatgtatcagaggcaaaggtaacccgctggagtcaagcaaaggattcacaggagccccgcatccacttgggtggcctcccctaagg

SEQ ID NO: 197036 - DNA, 122 bp, Homo sapiens
acagatggcttttgtgtccctgtttctttagcaatgtcatggtgtgtttggatctaattacgtcatctggtgatagatcaggtgtagtgtaatataacacagtgttgtgttagcagaaatca

SEQ ID NO: 197037 - DNA, 122 bp, Homo sapiens
gcgtgaggacagcaggacctgagccacgagccacactgctgtgggacccgtgtcgggactcgcagggcctggcaggtgtttccatttgacctgtgggctcacactcggcagttctgggcccc

SEQ ID NO: 197038 - DNA, 122 bp, Homo sapiens
ctacatttcccagagacctctgcgcggtcgggagcaccgcgaggaggggcgagatgggggcgggcctctgtgtgaaggcccttcccattggtgcgcattccaaagggccatgtaaacttctt

SEQ ID NO: 197039 - DNA, 122 bp, Homo sapiens
ggcctagatatgcggtaggctatatatctgggtttgtgtacgtgtattctgtgatgtttgcgtgatgccaaatcacctagcaatgcatttctcagaatgtatctgcatccttaagtcatgca

SEQ ID NO: 197040 - DNA, 122 bp, Homo sapiens
aatttatataagcctaaatgtccttctctgcacaaggtggggcaagttacagtacatacccgctacagtcgttttgaagacaaaatgagacacagcatgaaaagtgcatccaccagacccac

SEQ ID NO: 197041 - DNA, 122 bp, Homo sapiens
agtccaccgaagcagacgcgtgcgcccgccacgtcctggcatgcagagggtctcaggccgcgatccccccagcccccgggggcctggcctggcgccctcggcccagctgcccaggtaacagg

SEQ ID NO: 197042 - DNA, 122 bp, Homo sapiens
gagactcgcctgtcctcatcgctgccgtcattccagggagccaggccgcggtaagggccccgccggccccctgaggctgagtccttggtgccagccagggtgtcctgtccccacctcaccgt

SEQ ID NO: 197043 - DNA, 122 bp, Homo sapiens
tgtctgttttaacccagaagtaggcgccgatcctggggctctctgtcctgcagtcgtctccggcgtcccagaggactctgcgtccctgggccactcccgctggctcaggagccgtgatcagc

SEQ ID NO: 197044 - DNA, 122 bp, Homo sapiens
ttcccagccagttgccactaggagaggcggtgctggctgggtcacagtccaggggctgcccgagggaggggctagggtaagtgggaccgcggagactggagcgggggctgtccctcggagag

SEQ ID NO: 197045 - DNA, 122 bp, Homo sapiens
ctgagatcttaaggacaagctggagttccctcagttttgggaaaggagttctggggtgagcgaggaacatcaggagaagctggaacagagaggggcagccaagtcctgaagggcctgctgta

SEQ ID NO: 197046 - DNA, 122 bp, Homo sapiens
actcgaggcatggactggagccccaaaggcagcgcacacactgctcctgagcctgctgctcgtttcctctctatggctccatttgtagcactgttcttgcactgaggcttgtgcatgccggg

SEQ ID NO: 197047 - DNA, 122 bp, Homo sapiens
gaaatgggcacgtggcgtccagggaacacaagcagcagcggaactggacagcaagggcttcgtggggagctgagtgtcctctgagggtggtggctcctgcagggaatgacttacgggttcag

SEQ ID NO: 197048 - DNA, 122 bp, Homo sapiens
tgcgtgtttccggaagacgtggcggctctcgcctgggctgtttcccggcttcatttctcccgactcagcttcccaccctgggctttccgaggtgctgtcgccgctgtccccaccactgcagc

SEQ ID NO: 197049 - DNA, 122 bp, Homo sapiens
ccttcctctcacgctccgcgttgcacagccttgggggcctttaaaaggaaccggaagtgtcgtgagctaagacagtcgcgcggggaccatcgagaacaaggagtgctgtttcgaagtagcgg

SEQ ID NO: 197050 - DNA, 122 bp, Homo sapiens
aaattctgagaggtgatgtcgtcgatgcagggtcggcccgaaataggcggagttgggattcgaactcatttcacaggcagagggaggagagcagccatagccacctccactggttccgactc

SEQ ID NO: 197051 - DNA, 122 bp, Homo sapiens
ggcgtttaatgattgcttcagtttgaactaccctggcaacccctgcccaggggacttgatcgaagtgttccgtcctggctatcagcactgggccctgtacttgggtgatggttacgttatca

SEQ ID NO: 197052 - DNA, 122 bp, Homo sapiens
gggcgctctgtgcgcggcggagctcgccgcctgactggccagaaatgggtggagctggcgcggggtttgaactgcagctgtgtgggtcttgggggtttttccacgtccttgccctaaaaagg

SEQ ID NO: 197053 - DNA, 122 bp, Homo sapiens
tctcgggatgtcgcctttccctggagatgagcagttctgcgtcaccctccgtggccagcgcggcttccagggctgggctggtctattgtttgctgttcttgaaaggacgtggggagggtggg

SEQ ID NO: 197054 - DNA, 122 bp, Homo sapiens
aattcattgagattatgcgtgtaattctaacacacaccagatacctggcaaaggtccaatcgaccagcaaggttgatggactccacctcctattcacattcatatttctcaactctatcctc

SEQ ID NO: 197055 - DNA, 122 bp, Homo sapiens
ccagcgccccgtctcaaaacaagatattacttccgctccaaacaaagatgggccagctaacgagcgcgggggaaacatccgcccggaaggccacttgaaggcacttccgccctctcttaaca

SEQ ID NO: 197056 - DNA, 122 bp, Homo sapiens
ccttcttaaactagctttatacctggggtccctgcttttattcctactccctttcataaccgagtcatcctggatgacaatgtctgtttatacttttgttatacatcactttcctcatttca

SEQ ID NO: 197057 - DNA, 122 bp, Homo sapiens
tgccttcgcctgaagtccgaatcaggcgtgttctgacccaaagctgcctgaagcgctgctcggtgtgcacttgaaaatcagcgaaatgctgagcgttgcttcttccctctctccagggcttt

SEQ ID NO: 197058 - DNA, 122 bp, Homo sapiens
gtgtgtgtagacgtctatgagggccatagcgccgggctgtaagggcatctgtaggggtgacgcagccgggctgtgtctctgcacctccgttctgtgcgaggtcaatgctggtggggtctgca

SEQ ID NO: 197059 - DNA, 122 bp, Homo sapiens
ggctgcttccttccagaggcttcagggctgaatccgtttctggcccttccagagtctgctcgctgcccaccttccttggctatggctgccccattctagtctttgcttctctggccacatca

SEQ ID NO: 197060 - DNA, 122 bp, Homo sapiens
gtggggccgtcagacacaggccaggcaggcagcaaatcagcagatttattgaggcagcagcggcagtggggagcaggggtgtggggagggggcggggcctccccagggtccatgaagtgctg

SEQ ID NO: 197061 - DNA, 122 bp, Homo sapiens
tatcttcaaacctctctttctctttattagtcctgccccttaggaggtaaaccctctcatcgtctctcccactaaaagaaacaaacatataagcaaaaccacacacattaaacagcaatcca

SEQ ID NO: 197062 - DNA, 122 bp, Homo sapiens
gtggtgggtggcacgttggtgtggctctccatgtatggcgtgaaccaggcgcaggtgcagcgctacgtggcttgccgcacagagaagcaggccaagctgtgagtgtttcggggagcaaggtc

SEQ ID NO: 197063 - DNA, 122 bp, Homo sapiens
cacaggctgcatgccagggtctccacagccagcaggagagtcgagcctgcccagggcttccgggcttgggccagggtccacagagacctggtgtccatatctaggaccttgtctgtggcaat

SEQ ID NO: 197064 - DNA, 122 bp, Homo sapiens
tgctcatttgcatttgaatgcttggaacattccctgcgagacgagatgtgcagaacattccgccgccgcctcacccagcagacaatgctgatgtttgtgctgtcaccagtgggcttgttcgt

SEQ ID NO: 197065 - DNA, 122 bp, Homo sapiens
gagaatgaatgaatcagggagcagacattgcacattatcttatgaaagggtctgttcaagcgtggctacattcttggtcttacagagaacaggggagaaaattgttccttttggtgggtctg

SEQ ID NO: 197066 - DNA, 122 bp, Homo sapiens
cactagtgtccaaaaacacctggaaagcggtaggacaatgtcatgggaaatccatatgctcgtgttattggatatttgtcttgaccgggtaccatttgaaaaggaaactgaaaagcaaccct

SEQ ID NO: 197067 - DNA, 122 bp, Homo sapiens
ttggctgggttcgcctcaaagtgagggctggagctgggctggagcagctgggcctggtcacggccattctcctcttcccggtggatggaatcccagctgggctgtgctgagccctcgctcac

SEQ ID NO: 197068 - DNA, 122 bp, Homo sapiens
ggagttttcgggcgcttcacgcccggcggggaggcagtgcgtccggggtgagggcagccccgatcctccgagagccaagtctcctctcagccgccgccgccaccaggaaggagcgaagatgc

SEQ ID NO: 197069 - DNA, 122 bp, Homo sapiens
ctagtctccaggtacaaggctggggacggcgagtgaccttcacggagcagctcctgggagcgaggcctgtgaccacccgtgggtagactgagcgcgccgagggtctccgctgcgtccacagg

SEQ ID NO: 197070 - DNA, 122 bp, Homo sapiens
gccaacgggtggccttaagtgtctttggtctcctccaatggagcagcggcggggcgggaccgcgactcgggtttaatgagactccattgggctgtaatcagtgtcatgtcggattcatgtca

SEQ ID NO: 197071 - DNA, 122 bp, Homo sapiens
cccgcgcacaccgccacgtcaacctaaacctacaccgccctctccaccccaccgccgcagcgcccgctgggcccgcagcgggtctccccaggcagcgtcctccacgcctttcccacaatgct

SEQ ID NO: 197072 - DNA, 122 bp, Homo sapiens
agacttggagggtcacgggtgagattttgataaggttcaaatactcctcactcctgcctccggtttccaccaaagttaccattgtactactaccaacagttgtggaaatttactttggcaaa

SEQ ID NO: 197073 - DNA, 122 bp, Homo sapiens
gcgacacaacgctattgtggtctctggggccgtgaccttggccaacaccctgcctctgcccggctctcccgtggtccccggcctggccctccgcgtccgtgggactggatccacagcgccgc

SEQ ID NO: 197074 - DNA, 122 bp, Homo sapiens
cctattttcacctttgcaaccctcacttctcagcgcaagtgagttgccgggacagagggtcggcttagtaattaacctcagtttgcaagtcaacttgccggtcagcacttttacatcagtgt

SEQ ID NO: 197075 - DNA, 122 bp, Homo sapiens
ccacacatcttttccaactgacgcttgtccttttctgtttaggaagcactggttttctttcgggacacaaccgaacgtgccaggactgcaggagccgctggattacagagcagcaaaccagg

SEQ ID NO: 197076 - DNA, 122 bp, Homo sapiens
ctgacagtcatactacatatgactcagccacgtcaatggaaaaagtagactggatagtgacgtacccgcagaaaacgaatgcaacaatctgtcatacagatctgacggcagtcagattctgc

SEQ ID NO: 197077 - DNA, 122 bp, Homo sapiens
gggcctgaggaggaagtggagagattgttgctccctctgcgcccagagaggacgcggctgcgtcgcgctcccctgcgatcccctccatgttccctggccccaccgctccccttcctaaggct

SEQ ID NO: 197078 - DNA, 122 bp, Homo sapiens
caggctggagtgcagtggtgagatcgtgactcacagtagcctcaacctccctcaccccagcgtcccgtgtagttgggatggcaggcatacaggaccatgcttagctaatttttttttttttt

SEQ ID NO: 197079 - DNA, 122 bp, Homo sapiens
gtgtctgtggggattggctaagcctcgtaaaccgcagccatggggcggggcttgcaggcccggaggctggacctgagacggaagtgggggaagctggctcagatgatgggccctaggggtgg

SEQ ID NO: 197080 - DNA, 122 bp, Homo sapiens
ggtgcccaggccatggagaagctgattcaaactttacttgtccacaccggtagaggtgaccgcgatgagaataccagaaacagcactacgaccctcagaactcagggtacctccagctgcag

SEQ ID NO: 197081 - DNA, 122 bp, Homo sapiens
atggcttccctcatctgttggcctctccttcgtgtctgatgaaggatgttttgagatcagcgtctaataactcaagccctatagaagccgcgcgctgattggctgccgcgccctgccgccct

SEQ ID NO: 197082 - DNA, 122 bp, Homo sapiens
tgattatatatattatatatatatatatagagagagattattttgaagaattggctcacacgattgtgcagactagcaagttcaaaatctgtagggcaggctggagacccagggaaatcttg

SEQ ID NO: 197083 - DNA, 122 bp, Homo sapiens
tagctcccttccttcctagagcaggcagtctgggatggccctgggtttggagttgggtagcgcggccaggtgacggtctccttccctgggccgtcagggctgcaggcggctgtgacactccg

SEQ ID NO: 197084 - DNA, 122 bp, Homo sapiens
tttgaagggaacgagattgattaacaatttaagctcggggtgaggattcttactgggagccgactccccaatttttgaagtaaaggatgtgtggtggagactagtaaaggaattgcttcgtt

SEQ ID NO: 197085 - DNA, 122 bp, Homo sapiens
gcaaacccaccagatcaacccgcaagacaggaggcccctccctgggaaatctatgggggccgctgtgaggaagcctcgaagcctcaattctaagcgtgctgctgaggcactcagcaaatgtc

SEQ ID NO: 197086 - DNA, 122 bp, Homo sapiens
aataatcaggcaggtgtccccgtgtgattaaacaccaagggaagactgttttcccaagtccgtgaccggtgccggagttttgggtccacggataaaacgtgtctccttcatctctgccagaa

SEQ ID NO: 197087 - DNA, 122 bp, Homo sapiens
gctgcactacctgtacacatcagagatcgcgctggatgaggcgagcgtgcaggatttgttcgccgcggcacaccgcttccagatcccttccatcttcaccatctgcgtgtccttcctgcaga

SEQ ID NO: 197088 - DNA, 122 bp, Homo sapiens
agcaggaagggaaggggacacagccaggtttgatgagcccagactctccattaaacgctgcgctcaggggccccagctggggtcattgacccctgagcaacactctcttaagctggaggatc

SEQ ID NO: 197089 - DNA, 122 bp, Homo sapiens
taaatccagtttcacggatcgcggccacggggagcacaagcgccacctgctggcccacagcgagattccaagagaggacgagacctgagcacaaccagctcaagacgcacagtccccggtca

SEQ ID NO: 197090 - DNA, 122 bp, Homo sapiens
gagtatctagagggcgtggtgcgggcacgccagggctggggtgctgctgctgcactcacgcggctgggctttctggcgggaagcagttacgggggccccttgcctggactcagcgacctgtc

SEQ ID NO: 197091 - DNA, 122 bp, Homo sapiens
ttcacctggagcatgaaaaccactagttcaatggatcccggggacatgatgcgggaaatccgcaaagtgttggacgccaataactgcgactatgagcagagggagcgcttcttgctcttctg

SEQ ID NO: 197092 - DNA, 122 bp, Homo sapiens
tgctgggctgtgcttggccctctgccagggtctggttccctcctgcaggtaccccaacaccgcctgggaggactgccatctagaaagagcttgggcgttttccctgactaggtatcatcctt

SEQ ID NO: 197093 - DNA, 122 bp, Homo sapiens
atcctatatcatatttggagggttaaagaaagttgttaacatactagctgactctttggacgagagaagaaataaaatactgtcctagcaataatttattcccactggctgaaatggagttc

SEQ ID NO: 197094 - DNA, 122 bp, Homo sapiens
ggagggagggagctgggctctgaaggtcggaggggacgtgtgagtgggtacacaccagaacgctcaaccctatctagacatacaaaacgtacagcaaaacccagtgttaccatcttacggga

SEQ ID NO: 197095 - DNA, 122 bp, Homo sapiens
ccagtcaacggagcgtctgtgagtagcagcgtgggatcaggcagcagggttttttttccccgttgctttcgttcctttgcaggactgagccaccgggctgtgggggaagggatcaaggccat

SEQ ID NO: 197096 - DNA, 122 bp, Homo sapiens
tgggggttttggatcccatcctacaggaataatggggtgctcctgtagctgttagtaagacgatggtgtgcctggggatttgtgctatacaccacagcatcttctacagtcgttttggggga

SEQ ID NO: 197097 - DNA, 122 bp, Homo sapiens
gtgcgtgggagctctcttaagttccttaaaggacagccagagccccagatgggtgatcagcggcagaatggggggcttatccgcagtccccaccagcggcagacgtccctatgggctgagag

SEQ ID NO: 197098 - DNA, 122 bp, Homo sapiens
atggaggaatctcatgaatatgattctcctggcaatgcaggcagaacttttttccagcagcgtgcatacctcaggacagctgaggaggaggttgctgcagcaatcgactgctcctccctttc

SEQ ID NO: 197099 - DNA, 122 bp, Homo sapiens
tgttctctgaatcctttctgttctgtaacgagctgtccataactgttgtgaaatttcgtacgtgcttcatttaagccactctgtagaaacaatcagttgggtttttttcttgtaattgatcc

SEQ ID NO: 197100 - DNA, 122 bp, Homo sapiens
catcctggagggccaggaccctttccagcggcaggtggggcaccaggtgctggaggcctacgcacgataccaccggccagagttcgagtccttcttcaacaagaccttcgtgttgggcctcc

SEQ ID NO: 197101 - DNA, 122 bp, Homo sapiens
cccactcccttcacccggcaggttacaaccgaatgtggacactcggcagaagcagctggccgcctggtgctcgctggtcctgtccttctgccgcctgcacaaacagtccagcatgacggtga

SEQ ID NO: 197102 - DNA, 122 bp, Homo sapiens
aagggcagcgcgccccctgctgtccgagcggaagaactgcgcagcacgcgaggccgcagacgccctctggtcagggccctgcagaatggcttgggcttgggactcgtcctgcgcccttgggc

SEQ ID NO: 197103 - DNA, 122 bp, Homo sapiens
atttactttaaataatttaacatgttgaaacaagtttataaaatataaggtaaaattttacggtctcaattctgcttgattgtgtttctatgaatgtgttatggacataatatacaaatagt

SEQ ID NO: 197104 - DNA, 122 bp, Homo sapiens
aggaagcccgcggggagccccggcttcgccgctcggggttcaggtgcacgggcacagacgcgcaagcccagagcagctcctgagagctggggtcctgcacactggtcacctcgccttcctcc

SEQ ID NO: 197105 - DNA, 122 bp, Homo sapiens
catagatcaggaaagattcagcatcaacaccttttattttcctaggataaatagactcttcgaactggtatgacttaacatggagtagcacaacaattgttacaaggtctcattttcaaaat

SEQ ID NO: 197106 - DNA, 122 bp, Homo sapiens
tgtactttggtccttctccattgtatgcctcgtgtattatgtgtctcataacgtctgtcccgtcctatgctatgtgtgcatttgaatgttggggagggttcagtagatgtccattgagttgg

SEQ ID NO: 197107 - DNA, 122 bp, Homo sapiens
aacactgagggccgtacgacactctcctccatgcccaaggtgtctggagcagggctgacacgcctgggtccttcaacctcagaggaaaccgaaattgctcaacactcctgggctgtgcacgc

SEQ ID NO: 197108 - DNA, 122 bp, Homo sapiens
cttcgtgagttcctcgcagggccggtcagagctacacattgagaacctgaacatggaggccgaccccggccagtaccggtgcaacggcaccagctccaagggctccgaccaggccatcatca

SEQ ID NO: 197109 - DNA, 122 bp, Homo sapiens
cagcagcagcagcggcgggagccccagttgggtcctcacccagaggctccccttcggcgccgccatcttgttcccctctgtcacagcagctcagcttgttgctgttttctcggaagggtttc

SEQ ID NO: 197110 - DNA, 122 bp, Homo sapiens
ctcctcaataatgcagtcactgtagagagaattccggggacagcgaccattattgtagcccgtcatcatcaccgcggccgctcctccgccggggacgttcatcatcatagccaattaatcac

SEQ ID NO: 197111 - DNA, 122 bp, Homo sapiens
attagcagatctgggtacactgggcccatgtcccaacagggatactgttcgaggtgtctgcgtagtggcttactcccagcaccacctgcccgcttttggcagggcattgcatcccagctcca

SEQ ID NO: 197112 - DNA, 122 bp, Homo sapiens
gcggggaggctggagagagcgcgcgcgagaatacggccagagagtctgtgcgcgagagatcgggcgagcgggcgagagcaggagtcagtcactttggagcctccggagccctgtctgcaaag

SEQ ID NO: 197113 - DNA, 122 bp, Homo sapiens
acaggctccagacggagcgggccgggcgctgggttaatgcaatcggcgcgttacctggggcgcaggctacattaccagcccggcccccgccaggcacggccagaaccagtcagcccgcgccc

SEQ ID NO: 197114 - DNA, 122 bp, Homo sapiens
gagctcagcgaagaacagaaacagatcctgttcttcaagatgagagaggaacagatccgacgatggaaagaaagagaagcagctatggaaagaaaggagtccctgccagtgaaacccagacc

SEQ ID NO: 197115 - DNA, 122 bp, Homo sapiens
ctgggctgtccaaggccggagcccactcccccagcttgcagggaggtgtgcagggagaggcgccagcgggaaccggggctgcgtgcggcgcttgcgggtcagctggagttccgggtgggcgt

SEQ ID NO: 197116 - DNA, 122 bp, Homo sapiens
ttctcgagccttctggaaagattctacccaatgggcagccggtccccggagaacggccgccgttgccatggcagcgacagggccgctcccgtgccattggctcaaacctgcctccgcccact

SEQ ID NO: 197117 - DNA, 122 bp, Homo sapiens
ccaatgccaaatcactccagcccaagtgggataaaaccatttttcagcctctcaaatgtgcgcaaacagagttctttttcattatctgctaaatccttccatcctcacctcagagtcccagg

SEQ ID NO: 197118 - DNA, 122 bp, Homo sapiens
cttacaacattatgccaagcccctggtacctggaggacatcagaccctcctgttcctgtgcggccttgactagacgaccacttgctctggacttgctcctcgaggggtcgctccatctggaa

SEQ ID NO: 197119 - DNA, 122 bp, Homo sapiens
aacccctagcccccacctagagaaattccacagatccaacacctagtctctgccacgaagcgcgaacactccagcccactgttttccttccttcctctggactgctataacgatgcttacta

SEQ ID NO: 197120 - DNA, 122 bp, Homo sapiens
gggtgtggcctgtgcccggagcccaggctggaggcggccttcagcagactcagggtctcacgagctgctgtcagggcagggcagagtattgcggtaattatccttctctgctaatgaggatt

SEQ ID NO: 197121 - DNA, 122 bp, Homo sapiens
ctggcagctctccattcccttgttgggagccaggcctggggactctggcgggggtggaatcgggaggaatgttatttagccttactactgccaccttaagaaagataaagaaatacttgatc

SEQ ID NO: 197122 - DNA, 122 bp, Homo sapiens
tggcgcacggctggacaagcatgacagttgtcgcggagccgcccgagctgttggcttccccgatgttccccctgtgctcgagctaggggtttgactttagtcctcagctgtcagaggccgcc

SEQ ID NO: 197123 - DNA, 122 bp, Homo sapiens
gccaatgacccgggggtgcctcctcttaccccctgtggaaagggcttgctctctggacctcgcttaggtagctttgattctcaaaaaacccttcggaatgactctgaaaggtttcatgtttg

SEQ ID NO: 197124 - DNA, 122 bp, Homo sapiens
gaactcttggatttgttccaatggagtcagcttgcatgatcccatcagctgtcctgggcccgtgggcaaggctgcgagggcccgcatcatttcttcctagatgaccggcgctctctctgtcc

SEQ ID NO: 197125 - DNA, 122 bp, Homo sapiens
aggaacattttcgccgtagctgctccgtaaagcgattgtccaactgagaggggcgtcggacgagtggaccagggcggcgagtttgcccggcgcgtctcggatgctgctgcggcggccgccgc

SEQ ID NO: 197126 - DNA, 122 bp, Homo sapiens
caacagacatttattgagtgcccactgtgttgggtgtcacaatcctaccttccttgggcgcgctacagatggacgtcccggggtgcaggtggcgtgccttgctgtgtgcaaatgctttgttc

SEQ ID NO: 197127 - DNA, 122 bp, Homo sapiens
tagtatgggtcttcaacaaaaaggcttgaaaaacactgccctgtgggagtaaacagaagacggctgacctctgccacctggaccccaggtgatgaaatgggcgggtcacatgatacacaggt

SEQ ID NO: 197128 - DNA, 122 bp, Homo sapiens
actcggcactcagccgcttctcctgcggcgggaagtggggtcaggcttcgacggagctcccgactcacaggctggccacctgggatgccccccacgtggcaggccttccctgagcttcccgc

SEQ ID NO: 197129 - DNA, 122 bp, Homo sapiens
gcgcttggtcgcgtgtgtgggagtctacgggaaccgcgcgcttggctcctgagggttgcccggaccctgccccgtggcatggacccccgcggggcctgcgcggaggctctgggtgcgggtgg

SEQ ID NO: 197130 - DNA, 122 bp, Homo sapiens
gaagtggtacttgtcggccagctgctgcacctgcgccggctccagcaggcggctgtagagcggggactggcgcatggcctccaggttcagcaacatcaccccgctgttgaagcccggcagcc

SEQ ID NO: 197131 - DNA, 122 bp, Homo sapiens
tattaaaatggtttgtaaaggtaaactaaattgactaaagtatcaatatttccatatatgcgtgatcttttagagaccataaactgtcagtgtattaggctgttcttgcatggctataaaga

SEQ ID NO: 197132 - DNA, 122 bp, Homo sapiens
acaaacatttacttggttggctgaggcggagggtgtgacccagtgggccacacctcccaccgccctaccccgctacgtggaggcgaggaacagtggccgcgggctaccggggcgccttccga

SEQ ID NO: 197133 - DNA, 122 bp, Homo sapiens
gagaagggacgaggcggaggtagcggcgggaggctggcactagcccgggccacgataggtcggactacagctggtagcaactgggggtcggaagtggagcccagacaacagcggaggagaaa

SEQ ID NO: 197134 - DNA, 122 bp, Homo sapiens
cccctctgaccgcagggtcttcttctagagtcctgatcgccgaggctgagcggaggcgcccggtcttcccgcctcttcagtcttaatgtctccctcaccctcgccccccacccccgtggctt

SEQ ID NO: 197135 - DNA, 122 bp, Homo sapiens
cgccggatctgcagacatttccaagattcaccaactaagggagcaggaagtgggccggggcgccctgcgagacacaacttccacgagcctaaaattatcccaggcggagctgggagagtgga

SEQ ID NO: 197136 - DNA, 122 bp, Homo sapiens
cagtggaatgtcctcgggcattctgtagccttcaattttaaagagtgggataagggactgcgtcaccagataatgtgagtaaagtgcttttagatcaccagatgaaaagcattttataaaat

SEQ ID NO: 197137 - DNA, 122 bp, Homo sapiens
aaggagcagggacccggctcagccctgcccgggacagctgtgaattgctagattagacctcgtgagagccacttcagggggaaatgggagctcagagagccaccttagaagacatggggtga

SEQ ID NO: 197138 - DNA, 122 bp, Homo sapiens
ccagtgccccccagccccaaccccagccccagcgcggttacctcgcgggccgctgccgggcgcttgcaggtgctgctgttccaggagcgcagcttcggaggaaacttccccgcgctccgggg

SEQ ID NO: 197139 - DNA, 122 bp, Homo sapiens
ccccgcggggcgacttctccctttcggccctggggttgaagatcctgtgtggggcagctgcgccttcgggacagccccagccgcggagcgcccagaccagggcagccggagtcgggtcatac

SEQ ID NO: 197140 - DNA, 122 bp, Homo sapiens
atccgactcaccttcccgctgggctgcccgggactaaattaaccagcctgcgcccccacccgcttgtcctggacccggccctcttaagcgcgttctgcctggttgtgtgtggggggaatgct

SEQ ID NO: 197141 - DNA, 122 bp, Homo sapiens
gccggcgcgcggacgcgtctggggcggttcgccttagccaagtggaaagagactccgcgccgcgggctacttaatagagggctgttcccagctctcagtttactcggttacgaaacgcctga

SEQ ID NO: 197142 - DNA, 122 bp, Homo sapiens
gaagagcaatcataaaaatgctgatacaatacaccttctccacaaagaccacacctagcccgcattccaattttcttccttctcagctaagaagaattaccaccaaacttgaatagcttaaa

SEQ ID NO: 197143 - DNA, 122 bp, Homo sapiens
gtggatatccaactatttcaggactgttttttgaaatgaccgtcctttccccctgaactgcgatagcactttggtcgtgcatcaagtgagcccacagacgcgggtctctttccaggccccgt

SEQ ID NO: 197144 - DNA, 122 bp, Homo sapiens
gcagcctcctgggaacacagcgtcccattcccaggggctcagcgggctggcgggagggggcggcgggggccgtgggttttgtttggcggccgggccgttaggattcccagcgccgggcggct

SEQ ID NO: 197145 - DNA, 122 bp, Homo sapiens
gacatgttttagccacggactatatgctccctaggatttctgggaattgtagtccttttccgtaaagagtcaccatgcgtcagctgaaagaaccacatttcccaagaatccgttctctctgg

SEQ ID NO: 197146 - DNA, 122 bp, Homo sapiens
caggcccagcacttctcagggcccgaagagcccgcctccgagttttcccgccgccgccgccgcctctggggctacctggcaggctaagctgcccactgatccctgccacctccgcccccctc

SEQ ID NO: 197147 - DNA, 122 bp, Homo sapiens
gtgtttcccctaaagtcagcttaaagtgcaatggtagaagagcacggtctctccccaagacggcctgagcttaaactgcagcgctgtcacttgctagctatgggacctaggcaaatacatcg

SEQ ID NO: 197148 - DNA, 122 bp, Homo sapiens
ctgagactagaaaagcaactactgtgagtcaatgtcattagagatggatggatttggtgccgaccccagctcagcagttgttgtgagagctgggtcagggatatgtgtgctccaagagggac

SEQ ID NO: 197149 - DNA, 122 bp, Homo sapiens
ctgcgagcctggcgggcctcctggcgcctgtcctgggagcagctgcagccgtgcctggatcgggctgccacgctggcctctcgccgggacctgttcttccgccaggccctgcataaggcgcg

SEQ ID NO: 197150 - DNA, 122 bp, Homo sapiens
agtccacatagtgcgtttgagacggctgtggcggcagcagctggtgcctgtcagtaatcacgcataatgctgccgccgccgccgccgccgccgtcaccgctactcttgccaccgccgtcgct

SEQ ID NO: 197151 - DNA, 122 bp, Homo sapiens
tcactttcggtgtaacggagtcgctgtttcctttaccgggacgaaggccagagaccccaccgctccctcccctggcccccgggatttcctctgcagcggacgcggcactgcgggagagcggg

SEQ ID NO: 197152 - DNA, 122 bp, Homo sapiens
cgccctccctactgggcctggtggaggattgggtgggccttcactcctgctccacgcccccgcagttactctgccgattgtgacgtcagctgacgctgggggcgggtgggggaatctggccg

SEQ ID NO: 197153 - DNA, 122 bp, Homo sapiens
ctagcggtcacaccgtgaacttttcggatccatcccctagcggtcacgccgtgaacttttcggatccatcccctagcggtcacaccgtgaactttgctttagtcacgtggcttctcccttcc

SEQ ID NO: 197154 - DNA, 122 bp, Homo sapiens
ggcgcccagggaacgtttgaatgaatgaaaatagctgggaacccagagtgagcgggaagccgcttggaaaacacccattgaggaggtgtttcatctaggcctgtgaaacgcagcccattttc

SEQ ID NO: 197155 - DNA, 122 bp, Homo sapiens
gtgggagagtaatttccttctccatgtaagatgactagaaagagagagtgtgtttggttccggttacaaccccctgaagaagtgagacttcaaaagaaggccgtgctgcccacaggtcagct

SEQ ID NO: 197156 - DNA, 122 bp, Homo sapiens
gcttcccatcctgacccacttcccttccactgctccgggctctgaccctggaagaggagacggtgtgactggggcctctgttggcactgtcccctggcctacctcccgggaagccctcgcta

SEQ ID NO: 197157 - DNA, 122 bp, Homo sapiens
gagccaggtaagtgtcagatgctgccaaggagttgagggtagaggatggaccactgaattcggacacctgtggatccctaaggaccctgaccagggcacttttgtgagggagggacaggcct

SEQ ID NO: 197158 - DNA, 122 bp, Homo sapiens
atcaatgatgaggtaagtgcgcaatgctaagctgtttgctcacgtgactgccagccccatcggagtctaagccggctttcctctattttggtttatttttgccacgtttaacacaaatggta

SEQ ID NO: 197159 - DNA, 122 bp, Homo sapiens
gttgaatgtgccatgaccctctccctctctggatggcaccatcattgaagctggcgtcatcggagtctcttgttctgttggcgtgctacctggaagatccttctgtcctggacaagaggaat

SEQ ID NO: 197160 - DNA, 122 bp, Homo sapiens
tgggaaccactgccctgccgggtgaggtcatggacccaggggtatttcgtatgccagccacgccaccaagtggatggaacaagcagaccagctagacaaattgcggttggaacagttttctg

SEQ ID NO: 197161 - DNA, 122 bp, Homo sapiens
ccaacaatcccggggacgagagttgggcgggaatccgctccacgcaactcggcgcggtcccggggacgtggcgctttccagccaatcccggctatgcgattgttagaccaatggctactcgg

SEQ ID NO: 197162 - DNA, 122 bp, Homo sapiens
gatctaacggctctgctgtaggttcctcaagaggtgccttctcggagttaaatgagtcaccgcttactaggcagaagcgcgggccgcgagcgcgggcgagaggcgggggctaccggtggggg

SEQ ID NO: 197163 - DNA, 122 bp, Homo sapiens
cattagcatctcattacttctggatccctctaccgcctccagcggggacagtcttgggcccgcccatgcctgcagggtggcgcccgagggcgtggcgctgcggacaccccgttccgctctgg

SEQ ID NO: 197164 - DNA, 122 bp, Homo sapiens
tctgactctagtattaatgcattaagaatgtttctcaagcactttctaggcaccaggcaccgtcacctgaatattctgtggtggacaagcccgacgcggactctgacctcagtggggctctt

SEQ ID NO: 197165 - DNA, 122 bp, Homo sapiens
aggcagatgcttgctatcctggctctcaaagatgttgaagccccagcgatgtctaggcagcgggtagaggtcagctttgaatagcaaaggagtgggggtttgcagagttctggatgcctagg

SEQ ID NO: 197166 - DNA, 122 bp, Homo sapiens
cgcgggcagctcgggcggcggcggcggcggcgcgggggccgcggggggcgcgggcggcgccgggacctaccactgcaacctgcaagccatgagcctgtacgcggccggcgagcgcgggggcc

SEQ ID NO: 197167 - DNA, 122 bp, Homo sapiens
aagccgtgccggagcacgagcacgcgcaacctccacatcctggtggtcgtttctgtgctgcgatggagaccacggaccgccccagccaccggctgctcctcccggcattgccagagtcactg

SEQ ID NO: 197168 - DNA, 122 bp, Homo sapiens
aagaggaatatgctctcaagcgttcaccaagatatatgtacaaggaagttcaccacaaaacgtggaaacatgtcatgtctattcattgataaaataatgtatactatgtctacataggaaga

SEQ ID NO: 197169 - DNA, 122 bp, Homo sapiens
ctgccagtactatgccagaatctccctcctcctccactacctgcacaaccactgcttcaacgtctttgacaagcagtgacacattagtgagctcagcagatactggccagtatgcaagcaca

SEQ ID NO: 197170 - DNA, 122 bp, Homo sapiens
gctatcatggtgacagctcaggttagtgtcacccaaggagtgtcacccaagggtcctgcccgctcacagttttgaagtgacagcctgaggaggagggctgtggctccatggccccatgctgc

SEQ ID NO: 197171 - DNA, 122 bp, Homo sapiens
tccaggcggacccacagatcgctgaattgccggagtcgcggcctccgctgtgaccgcctccgcttcttccggaacctctgttcggcctcactgggcgtgtcggcacttccaggccgggacac

SEQ ID NO: 197172 - DNA, 122 bp, Homo sapiens
acccaccaagccaaggcgccaggctgctgtggggaagaaagctggtgcggctctgaaacccgtgggcggaatgaagccagttcccggaacttcatcctgcctcaccctccttagaaattaga

SEQ ID NO: 197173 - DNA, 122 bp, Homo sapiens
cccagcccccgccccgccttcaagtttgtgccttattttccaaagccgccacacttgagacgtccttgctgcgggttcgtctgtaacctgtgtcccttcactgccatgcactgctcttagct

SEQ ID NO: 197174 - DNA, 122 bp, Homo sapiens
ttgttaaccagaacatcttctgcggtcggcaaatcctttctgttctctgggccgccaaaccgcattgagagcccatttctcaagtgtcactttggagccggcttcgggctgtgaaatgtctc

SEQ ID NO: 197175 - DNA, 122 bp, Homo sapiens
ggtacctctgatgccttgacagatatggaggcagcagctggacacctgggtcctgtatgccgtctcctggggttcatcttcaggcttcttgggttggggctggagaggccccgtgctggaga

SEQ ID NO: 197176 - DNA, 122 bp, Homo sapiens
tgcacacaccgtcctggcacacgccgtgctggctgcagtcattcgggcactgcctcacaccgcaatcctcgccagagtagccgtcctcgcacacacaccgcccatctaggcactggccgcgg

SEQ ID NO: 197177 - DNA, 122 bp, Homo sapiens
cacttccagaggcgagagaggcacagaattctattctgagaatccctgggacgcacgccgcggtggctgtgagtatgaaggcagatgctgtggaacagcctggaaaggaggcggggtccgtg

SEQ ID NO: 197178 - DNA, 122 bp, Homo sapiens
ccacccaggctcccaaccctgtgctaagcatccatgcagggtgtcatgagtaaagtctctcggccatttctatactgattaggagggtgacagctctctgggggcaccacaaatgcaagcaa

SEQ ID NO: 197179 - DNA, 122 bp, Homo sapiens
attacctgcaagaatgaaaaacgccgtttactcgggaggtgcccgagaaccagggtggggcgatctcacattttaagcaagacgcccgctgccttaccaaaatagccctctccgccaaagga

SEQ ID NO: 197180 - DNA, 122 bp, Homo sapiens
gcccacgccgctacgggaacgcccctctgcgccttccgtctatggcttggggtcggcttccgtcccttgtagcactgccttctgggtaatgtagtttgacggaatccgggtggtacctggag

SEQ ID NO: 197181 - DNA, 122 bp, Homo sapiens
cgtgatccgcctgcctcggcctcccaaagtgctgggattacaggcatgagccactgcacccggccaggttttgtttctttaaggattagcacaaatggcaccgttgggtttttcttcataca

SEQ ID NO: 197182 - DNA, 122 bp, Homo sapiens
cacgcactgcacacttttgcagcttggcagcagccggctaaaccatgcggcccaagggtgcgggaggctgcacggcccaggctcgtacaagtcattctaggaagttcccgcaaagacaacac

SEQ ID NO: 197183 - DNA, 122 bp, Homo sapiens
gaacctcctctcccaggcatctgagttgcacgggcactgggcacgcccagttcatagaaacggggacatcttttatggtatcgatttggatcacctcacttcctgtatgagacacaaatcac

SEQ ID NO: 197184 - DNA, 122 bp, Homo sapiens
gggagtcccgaccccagccctaccgcctccgcctaggacgccccttctgcagggtccctgcggctgctcacttgcccactatctgcctctgcccttagcgtccccataggctcggggagggc

SEQ ID NO: 197185 - DNA, 122 bp, Homo sapiens
ggtgcgcgagaggaggggaatggcaggtccccgcttcgcgtaccttggaaataagctcatcgtgtttggccaggtgtgcacggcagtggacacagctgtaagtgcggtgacagcggggcaga

SEQ ID NO: 197186 - DNA, 122 bp, Homo sapiens
ctaccggtctcgggatctctgggtcggaagttctcgccctgctgctccgagacctaggtccgctccccggacagacctccgcccggctcgtccgagccccgggggtcgccaaccctgagtcc

SEQ ID NO: 197187 - DNA, 122 bp, Homo sapiens
tactcctaggagacacttggcaatgcctggagatatgtttggttgtgacagctggggtggcggtggggaggaggagggatgctactggcatctagtggattgaggacagggatgttactgaa

SEQ ID NO: 197188 - DNA, 122 bp, Homo sapiens
gcttccgctgtcactcagaagtgaggggcggggcctagcattccatccaatcagaggtgccggggcagggccctgcccattgtttatccaggcacagagtgggtcgcattcctgtcctcacc

SEQ ID NO: 197189 - DNA, 122 bp, Homo sapiens
atgaagcgaaggcggcgaggcgttggatctctcgaaactcactaatagtcccatctgtctcgccttcaactgaagactttcccaggctttggacgaccccaccttccactttcctgaacccc

SEQ ID NO: 197190 - DNA, 122 bp, Homo sapiens
tagaaagataatactaatttttcaaaaccacagtgcactgtccttcgagaaacctgcatgcgttctctttgtcaaggccaggccctgcggatctctgacccgactgagcctggtgcactccc

SEQ ID NO: 197191 - DNA, 122 bp, Homo sapiens
tcagtgtctctggctagggcccagcatcccgggttgctgcatggggtcaagcactctggtcggtcccatggagctctgcactgtagcttcccttccacaggccccgcagggcgccccctgcc

SEQ ID NO: 197192 - DNA, 122 bp, Homo sapiens
aggtagtccttctagctttaggagaggccacgggagtgagcttgttgaacaagacatggtcgtggcttctctttaagcttacggtttaggcggacacagatgatgaacacacaccggattag

SEQ ID NO: 197193 - DNA, 122 bp, Homo sapiens
gctggcgagcggcttagggacgtggctcgcccgccaggaccagagcgcgcggaggggcttcggggaagtttataacacatcgctattgattcccgcttggctaggaagagcagactctggtg

SEQ ID NO: 197194 - DNA, 122 bp, Homo sapiens
tgaagttagtcatcgagttagattagaatggaaggcaggaggggaggaactccgggtttgcgccgcagctgcgtcggtggggccagatttctcattacaagatgtactgaacctttccactt

SEQ ID NO: 197195 - DNA, 122 bp, Homo sapiens
ccgtcacagcctaccaccccagaggcagtggggccacaggggctagacgagccaggtgggcgggaccagggtggcaggaaaaaggggctgtgtggcaagccgttacctagcccagatgccgg

SEQ ID NO: 197196 - DNA, 122 bp, Homo sapiens
acactcttaaaaatctgtggtggagatgactgaaccaagaagataatctccaaaggtccacgatgggctttcccaacagctccaccttacttcttctcatactatttaagagaacaagcaaa

SEQ ID NO: 197197 - DNA, 122 bp, Homo sapiens
cccgccctcctgacgcggccggagcgcagccctgaggcccagggtaagtgagggcggaggcgcgggacgggggcgggaggctctcgggacggcagcgtccagggtccggggtcgcgtagccg

SEQ ID NO: 197198 - DNA, 122 bp, Homo sapiens
tccagtcctcggtccgcgcgccctgccccttgggctcagctgcgagccaccgccggcgtgcgcacccacaaggagagaaatggaggtaatcccccgcttcccaccgactgccggaagctcgg

SEQ ID NO: 197199 - DNA, 122 bp, Homo sapiens
gggcgctcttaagagattatcaggatgagtatcaggaccgtgtttctgaaatagtgaccgcggtgcaaagaacacagcagagtgccgagaccctgctaggtaggagggcacctttcaccgaa

SEQ ID NO: 197200 - DNA, 122 bp, Homo sapiens
cgagcgctgggcaggcggggactagagggccggcaggaagcctcagtgggcgcaggggcgcgggccgggctgcccacacgctgaccttcccgggctgggagggaggagcgctggctgcgggc

SEQ ID NO: 197201 - DNA, 122 bp, Homo sapiens
tttgacatgttgtgagcatcttgccatactgaacatgtttcagagatatttcttctactgcgcagcttgtggatgtaatccagacaccctggggtgaagaaaaagctaccccatgttgggct

SEQ ID NO: 197202 - DNA, 122 bp, Homo sapiens
actcttcacgccgccttggagccaaaattagtttagccgcgagaagtccgggcaaccaatcggaaacaaccaaggaacagttgcatggcgacactctggttccgccttcgggcatgctcgaa

SEQ ID NO: 197203 - DNA, 122 bp, Homo sapiens
gtgcctgtcacccagccccctgccttcctcctcggcctcagatgtcgtcccacctgcccacgagcagggaacctggaacccactctcccggcagtccccagcgggttccgccacccggcggc

SEQ ID NO: 197204 - DNA, 122 bp, Homo sapiens
acggagatggagaccccgctgggggtgctgtggacagtggtgcagaggagtggcgatgcccgggtcctgggtcctgggtcccgcgtcctgcgtcccggccgatgtgagtcctcagacctcct

SEQ ID NO: 197205 - DNA, 122 bp, Homo sapiens
acgccctgcaacgcagcgtccagctggccatcgagatcaccaccaactcccaggaagcggcggccaagtaagtgaggctgggagctcggctgcctataatgcccatggcaggccactgctgg

SEQ ID NO: 197206 - DNA, 122 bp, Homo sapiens
ggcgcctgcgcactggagtcccccgcgattttttcctccggggtgggcgaggaggctgtgcggccttccccagcggctgtagcaggagacctgcggctgcatctcccagggccttccggcgg

SEQ ID NO: 197207 - DNA, 122 bp, Homo sapiens
caccgcgtttcattcaacaaaccaagtgtggatttgatagctgtagttactatagagatgcgaggttttctgcaggggaaggagccctggcggcttgaccccgaatccttcacacagcccac

SEQ ID NO: 197208 - DNA, 122 bp, Homo sapiens
gcgacacaggccgagtcacttcctcgcccgtgcccgggtgtcctcatcgggggatgggtgcgccttccacatcctgcccaggactgaaggagccgggcccagcgagctcccgggaggtgtgt

SEQ ID NO: 197209 - DNA, 122 bp, Homo sapiens
gtattattaatttttattgattttttcctgactattttttatccgaggttggttgaatcacggacgcagaagccagagactcagagggtgaacagtacccagcacactggccccgccttccc

SEQ ID NO: 197210 - DNA, 122 bp, Homo sapiens
gggagcctggcaggccgtacatcccaatgccaagcccgccgcctctcggcctgacaccaccggtggaaccaaaaaggggaaatcatgtcctttgtgcctctgtgtctgtggtaagcggggcc

SEQ ID NO: 197211 - DNA, 122 bp, Homo sapiens
agggagaaattccctttaaggctgaatgcttgggcaagtgacacgtggttttcctactgtcgccccaaccttaaaagaacgaatccaggcggggcattaggtatttgtttccatatttccca

SEQ ID NO: 197212 - DNA, 122 bp, Homo sapiens
cagccccgctctgggaagcccgagtggtgcagcagggcttctccccacccagggcggaaccgaggtgacaggaaggaggaggcaccgcgaggggcggagacgcgtgcgacccaggcagactc

SEQ ID NO: 197213 - DNA, 122 bp, Homo sapiens
tgacagacgtgacaaacacgtgactgacacgtgatagatgtgtgtgacatgtgacttagacgtgtgacacatgactgatacgtgactgacacctgtgagacaagtgactgacacatgatcaa

SEQ ID NO: 197214 - DNA, 122 bp, Homo sapiens
ccccctccgctcccgctggagccctccaccctacaagtggcctacagggcacaggtgaggcgggactggacagctcctgctttgatcgccggagatctgcaaattctgcccatgtcggggct

SEQ ID NO: 197215 - DNA, 122 bp, Homo sapiens
atagttggtcatgggtttcctgaaggaataaatcttctggaggataaactctcggatcttcgtcactgcctagatgtggggaaccaaacacagggcatgaagctgcaacccttttgctgtat

SEQ ID NO: 197216 - DNA, 122 bp, Homo sapiens
tgtcggggcagggcttccagatgatcattcggcttttttgtgtcttccaagatgatgatccggggaggagggatgtgaaagggggtcagtcgccaggcgagctgaggacccagttctgcgcc

SEQ ID NO: 197217 - DNA, 122 bp, Homo sapiens
cctgctctgacggcaccctctagtgaccggtggccacggctgaagcggcgcccgggaacacgggctgggcctcccatcctggggaccatggcctgtccccagaagtcacgggggctctggaa

SEQ ID NO: 197218 - DNA, 122 bp, Homo sapiens
accccgcccggcccagcgcagagcccggctgctgagtccacacctgtggaatggggacgacgaactgggaggatccagccgggaccctttcgggaacacacccttcctggacttgacgttcg

SEQ ID NO: 197219 - DNA, 122 bp, Homo sapiens
cccagacccgtccccgctctcagcgaccctccttatgtcccgggccaccccactagccagcgcgttgggccccacctcccgggttgggatccccgcacctgtgcagagtggctgccgagcac

SEQ ID NO: 197220 - DNA, 122 bp, Homo sapiens
tgggagaggggcaagcttaagaactcttaaaaccccaactcagctgggcgcggtggctcacgcctgtattcccaacactttgggaggctgaggcgggtggatcatctgaggtcaggagtttg

SEQ ID NO: 197221 - DNA, 122 bp, Homo sapiens
aacccgcgctggaggcgggcgagggccgaggggcagctagggagcgcggcttgaggagggcggggccgccccgcaggcccgccagtgtcctcagctgcctccgcgcgccaaagtcaaacccc

SEQ ID NO: 197222 - DNA, 122 bp, Homo sapiens
cgcgtgacgccagcgtcaggccagccccggcatgctctgcggccgcccgcggtccagctccgacaacaggaattttctccgagagcgggccgggctcagttcagctgctgtccagacccgga

SEQ ID NO: 197223 - DNA, 122 bp, Homo sapiens
actgcagagtacaaagctttcaggccgcctgcctcattagcactaatggctgctcccttccgccctgtgtcgtcaggactgtctatgcctggtctcatcagcacaaggctggggtaaggact

SEQ ID NO: 197224 - DNA, 122 bp, Homo sapiens
cagaatctccttggtctcgttccaggccccccagccctgggcctcagggtctgaggagaccgtctggagccaggcctgagtcgggggtgggaagagagagcggctcgggaagggccacatgg

SEQ ID NO: 197225 - DNA, 122 bp, Homo sapiens
cgtgtcaggagccgggtgtgggttgagagcacgttcggcgccaggcacaggggcttcggtcggcttatgtgctcttcccgggagctcctcagagcaggaatgttgttatgtccatttcagat

SEQ ID NO: 197226 - DNA, 122 bp, Homo sapiens
tggggtgggtggcgcgcgctagcggtgaaggtcactcacaattgcgcgctgggcagacgacggcagccattacttttacctcgatcgctgttttcctggatccgcacgggtccaacccgact

SEQ ID NO: 197227 - DNA, 122 bp, Homo sapiens
gaggctggacacagcgtccctgcaccaagggggcagtgctctcgtcacagagcagagggccgcaccgcccgtgtttgtctttcccattgcagcttctcaggccctaggccaggcctcgttcc

SEQ ID NO: 197228 - DNA, 122 bp, Homo sapiens
ataatttgttgagaggttttgttttgaggagcatgaaggatctgatgtaagaactaccaccggtgctggtgatcacaatatatgcagctgattaaagttcctcatttatgctacctacatcc

SEQ ID NO: 197229 - DNA, 122 bp, Homo sapiens
ggcgctcgcgccgcctgccgcccccggccgttcactgccgcatttcgcgctctcgcgccgcgccccgccccaccggcctaaatttgcatatcccaggatcgcggccaatcgctgctcgtctc

SEQ ID NO: 197230 - DNA, 122 bp, Homo sapiens
gcacctactaactgcagtcccttttgctgtctgccgtcttttgtacaagagagagaacagcggagcatgacttagttcagtgcagagagataggtgaggccagctcgagatcttataccact

SEQ ID NO: 197231 - DNA, 122 bp, Homo sapiens
tggcatcactggggaccacactggcaatcactgagccagggatggtgccaccctcagggtcgagggtggctgcaagtactcccttccacattgagaaaaaatagtgacttcattctttaaaa

SEQ ID NO: 197232 - DNA, 122 bp, Homo sapiens
accagagcgaggactgcctgtacctcaacctctacgtgcccaccgaggacggtaagggcgcgggcacaaagccgggcaccccgtggacacagcccacaaacgcacatgcagaccctcaggca

SEQ ID NO: 197233 - DNA, 122 bp, Homo sapiens
ttctctttagaaaaaaattaaagtgctccacttttgttacttaaagtacatcatgaagtgcgcaattccaacctaagaagatatattatttcatacaatgaaaaggattaagacttgaagtt

SEQ ID NO: 197234 - DNA, 122 bp, Homo sapiens
atatcacaggaccaggtaatccgtatgctcttcaagctacaaccaggcacaattccaggtcgaatctctctcggtcttatgcacacatacatgctccacagccgataccacagcaggtctcc

SEQ ID NO: 197235 - DNA, 122 bp, Homo sapiens
cacggtgcgcgcacccactgacctgcgcccactgtctggcactccctagtgagatgaacccggtacctcagatgcaaatccagaaatcacccgtcttctgcgtcgctcacgctgggagctgt

SEQ ID NO: 197236 - DNA, 122 bp, Homo sapiens
tgtcgcccaatctagagtgcagtggttattctcaggcacaatcatagtgcaccatagcctcgaactcatgctcaagcagtccttctgccttagcctcccaagtacctcagactttagatgca

SEQ ID NO: 197237 - DNA, 122 bp, Homo sapiens
gggctcactggaaagctgggatggggctaaaaaactcagccggctcatccttcaggggaccggcccttctctgtgcttccctcccaccactagaggctggattggttctctgtggctccatg

SEQ ID NO: 197238 - DNA, 122 bp, Homo sapiens
cctttccgagtcaaagaaaggggtgacagacggcacctggaaaatcgggtcactcccacccgaatattgcgcttttctgaggggcttaaaaaacggtgcaccgcgagattatatcccgcacc

SEQ ID NO: 197239 - DNA, 122 bp, Homo sapiens
cagaggcggatgtagaaggagacaccggtggctaggacccgcgcgatgggaagaggaaggcgccggctatctacaatcagaacgtgggctgaccgtgacgtcacaatggcgcggccagccaa

SEQ ID NO: 197240 - DNA, 122 bp, Homo sapiens
gtgggggatgcaaacggaaaaggcaagtgatgaaaagccacaactcaggacaagcacaggcggccacgctgccggagtcattcgcgccgcccgcggaaacctgcgtcgcccaccccgggccc

SEQ ID NO: 197241 - DNA, 122 bp, Homo sapiens
actctgcacaaaatgtccatgatggggcatcgggtccgcattctcccatggtctacctttcgcttgaatcttaggtcagtccctggctgagggaagcaggctggaattggtgggaggcgggc

SEQ ID NO: 197242 - DNA, 122 bp, Homo sapiens
tgcagcccccgcgccccaccgcgcgtcctacaagccggtcatcgtggtgcatgggctcttcgacagctcgtacagcttccgccacctgctggaatacatcaatgaggtctggcaggggacac

SEQ ID NO: 197243 - DNA, 122 bp, Homo sapiens
tttctggggaagattgctgggagtgaccagggcgtccaggatgccagacatccctctccacgaggcctctccttcccaggccattcctgtatcacgagactgggagctgcttcccagtgctg

SEQ ID NO: 197244 - DNA, 122 bp, Homo sapiens
atccctgtgggcttcctccactctgtgctcctctctcctgccctgcagttggggtgacctcgggctggagcacccagcacctagggtttgcagtctcaccaaacccagaacacagtgcagct

SEQ ID NO: 197245 - DNA, 122 bp, Homo sapiens
cctacctttagaagctttaaagaagctccaagaaccaaaataaatgctttcccagaatgccggataggctattcggtgcattaaaaaatatgtatatatttatatgtgccattgagtttgat

SEQ ID NO: 197246 - DNA, 122 bp, Homo sapiens
ccaactctgggttcctggcatccggaacccaggggtttctgcgggcgggtggggctcaggcggggagcccacaaaccggcctggcaagctctagttccctgcagctggggtggggcgtcgcc

SEQ ID NO: 197247 - DNA, 122 bp, Homo sapiens
agacagttcacacttccggcgcagcgtgtgcgtcaccagcgggcgtcgagtccgatgcagcgcagtgtagttgctggaagtttgaagagccgaaacagtaaagcttccatgcttgttttgct

SEQ ID NO: 197248 - DNA, 122 bp, Homo sapiens
tgtaatggactaccgagtcgctgctgccggagaagaggttgagcgcgctggggatctcctcggggtacagattgtcaggcagttggtttagcaaactgctcatggtcaccggcagcttctcg

SEQ ID NO: 197249 - DNA, 122 bp, Homo sapiens
aatctagtgtagcagcctccaggcaggattcagcacaacactggggagtcacccttccctcgggcctctgcctaccaacaactgggcttatcactgggaaaacacaaaaaattacacaaccc

SEQ ID NO: 197250 - DNA, 122 bp, Homo sapiens
ctcccctctgtctctgtgcaggtgcagctgccttggcgaccatttgtcctacagtttgtccggacccaggctgtccttctgtgtgctggaatgaggcgaacatgtctttgagcccagcaggg

SEQ ID NO: 197251 - DNA, 122 bp, Homo sapiens
ttcggacggctgcccgatgcccggcgttggacccggcaggagggtggctgagcgtggtttcggacggctgcctgatgcccagcgttggacccggcaggagggtggctgagcatggttccaga

SEQ ID NO: 197252 - DNA, 122 bp, Homo sapiens
agcgtccattctagcacctctgcctgccccacgtccgctccagagcctctgccggccccacgtccactgcagagcctctgcctgccccacgtccgctccagcgcctctgccggccccacgtc

SEQ ID NO: 197253 - DNA, 122 bp, Homo sapiens
cgtcgtccaggtagcatcctcagcactgcaatgaggtggggggtccacgtgcccctgccccggcacacaagcccctgagctccaggccacggctccggagggagctgctcaccgcggtgtgc

SEQ ID NO: 197254 - DNA, 122 bp, Homo sapiens
tacgatccggttacatctcagccccctgctgagaaagaggcgctaaggtggccctggagccgtgaattcactgggattgagatcatctcggcgactttatcatgaaggccagcacaggaggc

SEQ ID NO: 197255 - DNA, 122 bp, Homo sapiens
ctttgcttattttaaaaaatgtttccttgattcctgcaagccaaacccatggaaaaataacggaaaccaaatgccagggaaatagagccaaagcaaacacatgtgagctctgaaataacagg

SEQ ID NO: 197256 - DNA, 122 bp, Homo sapiens
ggtattgggagcaggagtttggttttcttctctggcacagatctgtggcatttggtagagcggcagtcagtagatggagtgaaaattaccttgctggtgttaataaaagctaattttcttgc

SEQ ID NO: 197257 - DNA, 122 bp, Homo sapiens
gtttttaaaaatatattcatgtaataaatactaagttgtatttggcacatagtacagtttcggataaaaagctcttatcagtggtgaacttgccacaggaaatacatttataataatcaaag

SEQ ID NO: 197258 - DNA, 122 bp, Homo sapiens
ccgcctctccgactcctcccaccggtcccactgcggccctgcccctgcggcccctagtaccggtcccagtgcggccccgcccctccggccccgctaccgctcccactgtggcccagcatcct

SEQ ID NO: 197259 - DNA, 122 bp, Homo sapiens
accgcaggagcgctcccaggctggggacagatgagacagcatatcaacagtgagccccatcggcggcaagctcccaagcagccccaagcccagagcaggagaacatcccaggctttcctcga

SEQ ID NO: 197260 - DNA, 122 bp, Homo sapiens
gaacttgtaaagtggcccaagagtggctgtaatttgggccattatagcaggtatgggtggcgtctctcagcaaagctgactgactgactgatgagtgctgtttgcaatgacctccgctggaa

SEQ ID NO: 197261 - DNA, 122 bp, Homo sapiens
tgcgtgcgtgtgcgggtcagggtggtgggaccgcgcatcagggcagggtgcctgcgtctgcgtctgggtctgtctggtctgcatgtcggcgcgatctcgacctggattcgtgtccctggatg

SEQ ID NO: 197262 - DNA, 122 bp, Homo sapiens
aaatgttttcttacattttattgtagtaaaatacatgtaacataaaacttattatgtaagcgattttaagtgtgcagttcagtggtattaaatacataatatgtcatcttgtgcaactatca

SEQ ID NO: 197263 - DNA, 122 bp, Homo sapiens
ccccagcatggcagccccttccagcctctcctatccccaggcctgcaggctaggatggcccggccctcagccttccccatcggggtctgtctgactctgcccatggcctggatctccccggg

SEQ ID NO: 197264 - DNA, 122 bp, Homo sapiens
agggacagcgagtgggttgcccgcaggggccttgcttgcactggcttagagagctaacagcgtttggtgggactcagtttatcgttctttccctgctttgaggcaggcccttgatgtgcagg

SEQ ID NO: 197265 - DNA, 122 bp, Homo sapiens
gacatgccacatttcctaaggtggagagggtggccaggagaccgctgggccgtcatgccacggcgcaaggagtcaccacagccgtcacccaacaagggctcatggccaccacctgcgtgctc

SEQ ID NO: 197266 - DNA, 122 bp, Homo sapiens
gaagcccgcacagcggaccatccagtagccaacgcgggctaaaaccgaccggacatctagcgggcaggggaagactccactaaagacttccacaaagacctcccctaaatctgaaggtcttc

SEQ ID NO: 197267 - DNA, 122 bp, Homo sapiens
gttttctgaaatgggagaggaccacgccccgccccccaccatggactctggagtctgcggcgcacaaatcctgcgattttacagatggggaaacagaggcacggagaaagtctcagctttcc

SEQ ID NO: 197268 - DNA, 122 bp, Homo sapiens
aaaaaaattgtaggacacccagttggtgtctgcagagaattggagaatcgtgtgaaaaaccgacacatttggtatcaaaggtcttgtgaaaagcagtgtttctttactaccattaacaggtg

SEQ ID NO: 197269 - DNA, 122 bp, Homo sapiens
gctcagaagggagcgctgtccctggagtcaggggaattgctgtgttgggtgcaggcagggcggggatggaaagatgcaacctctgctggagacccactgcctgggaggggccagcctgataa

SEQ ID NO: 197270 - DNA, 122 bp, Homo sapiens
aagaaagaaaatctttcaagagtcaccaacctcaagcctggttttggcaattatatcctgcgttgtttgtccccaccaccccaccccccacccgctaaaatacttctgttttaagacacatt

SEQ ID NO: 197271 - DNA, 122 bp, Homo sapiens
ctagagccactctccagtgtcgttactatcaatgatacttgacgtggctttgatattaaacgtatactttttcattcttgcctggaacgcacagtttgctgttgctggcttggtgaggatgc

SEQ ID NO: 197272 - DNA, 122 bp, Homo sapiens
ggctcaggctcaggctcaggctcaggcacaggcttgggacccggctggggatcctccgcccgcacttccgtctggacgcgaaggcgtcaccgggcgcgccgggtcagatgcaaaaagcatcc

SEQ ID NO: 197273 - DNA, 122 bp, Homo sapiens
gggaattcttagaaatgataaattgcaggggtcctctgcttcaccccggagagtttcccccgactggcctatgtgtgagtgttttcctcctgcgcgggtctggccttgtgcaagaggcaaca

SEQ ID NO: 197274 - DNA, 122 bp, Homo sapiens
acttgccctttttattacgagaaactgacacaatcacagtccctagtgtgttctaggtttcggtactgaacgacacaagatgtgcgccagattgagcgcaggaagaaagaaacaccctttag

SEQ ID NO: 197275 - DNA, 122 bp, Homo sapiens
tcaccccaagcccacagtcacactggtccccctagtgaagggcccttaaaaataagctcccgatggccgagaaaggtgctcctctgtatttaggaaatggagctgcctgcttcctctttggt

SEQ ID NO: 197276 - DNA, 122 bp, Homo sapiens
tgcctgtacttgagttgtctttgttgatggctacaaatgaggacagctctggctgaagggcgcttccatttccatgggctgaaggagggacattttgcaaagtgtgttttcaggaagacaca

SEQ ID NO: 197277 - DNA, 122 bp, Homo sapiens
agctctcttgacctccggcacctgctgtcttctccccatcgggtttctcccttgtggtcacgttagtgatgttttggagccgtggaccagggcaccacgtttcactgaaattcaccccaggt

SEQ ID NO: 197278 - DNA, 122 bp, Homo sapiens
agcccagcccgagacatttaaagtcagtagagggccgggcaaatccagtttctcagcacacgcaacctttccaaggtctgcagtgatgtatttttctgtttcttaagtaatcaatgcttata

SEQ ID NO: 197279 - DNA, 122 bp, Homo sapiens
caacctcagtctcctgggctcacacgatcctcctgcctcagcctcctgcatagctacaggcgcaagctgccacacccgactaatttttttatattttagtagagactgggtttcaccatgtc

SEQ ID NO: 197280 - DNA, 122 bp, Homo sapiens
tggcccgggcccccacgttggcccaggcggggacgtgccaaggggctgggctagggttgccgctggcctggccgcctctcgcccggcgggcctcaggtgacgcggccgcggcttaactttcg

SEQ ID NO: 197281 - DNA, 122 bp, Homo sapiens
acagtggttttcttcagtgcccagagccacacccttgtgctcttctttaatgcctctttacgacagactctgatgtgaaccatattctcagaatgaatctatttgagtccctggaaatgata

SEQ ID NO: 197282 - DNA, 122 bp, Homo sapiens
attgttcatacagagacagcgaccgcagatggggcactagtgccttcagctgcaaaaggtcgtctggcaggaagcatgttggtctcctggcagtttcttgggccatgtgacataaccgccag

SEQ ID NO: 197283 - DNA, 122 bp, Homo sapiens
ccaagagtcaaaattcatgatgacgaactttgaatgtgaagatgtaaataaatcctggctcggcaaccctgcctgtgacgcgacttggagcatatctctgcactcagctcctgagtctattt

SEQ ID NO: 197284 - DNA, 122 bp, Homo sapiens
agcacctggaatgtggcatgaagtacccaaattcaggcctcttgagcccccaaacttctacgagccacctcttttccccatggtgagtctctgttggcttgaactcatattttttcttttgg

SEQ ID NO: 197285 - DNA, 122 bp, Homo sapiens
gcagagagaccctccgaatacaaagcaacatgctattctaaagtgactggggcccgggtgcggtgactcatgcttgtaatcccagcactttgggaggctgaggtggttggatcacctcaggt

SEQ ID NO: 197286 - DNA, 122 bp, Homo sapiens
cccacaccgcccgcctccatgcccaacctcgccgaggccacgctcgcggacgtgatgccccggaaagatgagcacatgggccaccagttcctgacgcccgatgaggcgccctcgccccccag

SEQ ID NO: 197287 - DNA, 122 bp, Homo sapiens
cttccccgcgcccacggcgccgttacctcccgccgcagcttctgcccggcctttactcatcgcctttcccgccacccaactcagaaagccggacgttgtagttgctcggggcgacggctcct

SEQ ID NO: 197288 - DNA, 122 bp, Homo sapiens
tggcattaagctggcccccgacaggtgtttgcaatacacctgtgttgctgtagagccgcccgcgcgccggcaatctcactgtgcgtcattctttaaccttcaccttcccttcaaaacctaac

SEQ ID NO: 197289 - DNA, 122 bp, Homo sapiens
gtccgccgggcccagcctgagccggggttcagtcagcacaggaacctgggggagggcccgcgtttatccctgaacctctcctgaaccccggggtagacgctcagcaccagggagcacatgcg

SEQ ID NO: 197290 - DNA, 122 bp, Homo sapiens
ctccacagggaaggaccaaaaacctggtttaccttaaaacaaaaacctgttggagttcagcgtggtgtaaaaatgtaaggaagcattgataaattgtctaagtttatccatttgaaagaaat

SEQ ID NO: 197291 - DNA, 122 bp, Homo sapiens
ggcccagtagtgcacgcaggtaatcccagcactttggggggccacggtgggaggagcccacgagtccaggagttaaagatgagcctgggcaacatagcaacatcccatctctacaaaaaaaa

SEQ ID NO: 197292 - DNA, 122 bp, Homo sapiens
aaaacttggctgtgttggggtggtcagggacccagcctcttaggtgtccctcccctggctcgcgatcacccacccgggacaccgacggaccccgcgccgctaaccagccgctctcagagcgt

SEQ ID NO: 197293 - DNA, 122 bp, Homo sapiens
ggcgcagggtgtcgcatgcttccagcaggggctgcctttctaggagctgctgccgccgggcgtcccccgtggcctcgggcatggccagcgcaaactgccggaccttctgccggaaccgcacc

SEQ ID NO: 197294 - DNA, 122 bp, Homo sapiens
gagagagagttcagacatgtgaagatgctgaagtgggactttgtggaggatgtgaggctgcgactgagccagcacacaccccagggcacacggaggggtgtttggtgactgagaggacagtt

SEQ ID NO: 197295 - DNA, 122 bp, Homo sapiens
ctccccgttttctacaccctccttgtcttctttcccgtctccctaccctctgcctcctttcgtttttccccaggctagggaccctcagccttaacaatcttagtacggatgcattagaccgg

SEQ ID NO: 197296 - DNA, 122 bp, Homo sapiens
ttgccgcaatacacaaactggcccgtgtgaatgccctcggcagcaatgaaaagctccgtccgcttcttaaaccagtacgggtcgcggaagaccaccttggggaggggcgcgctgtgacccga

SEQ ID NO: 197297 - DNA, 122 bp, Homo sapiens
cagggcagcctccctgtcaatccatttgcgacttcatgcctcatttgttgggatccacagcgctactccaagttatggaccagcatgaaggggacaggctctaggctatcaaggggccacca

SEQ ID NO: 197298 - DNA, 122 bp, Homo sapiens
gctacgccttcgtggactaccccgaccagaactgggccatccgcaccatcgagaccctctcgggtcaagtggaattgcatgggaaaatcatggaagttgattattcagtctctataaagcta

SEQ ID NO: 197299 - DNA, 122 bp, Homo sapiens
ctggactccagggtgtcccagcatcctcctgatggctctcctggccacagcagggcaaatcgcgacacaccctgagctgacacaccctcagcactttcagagaagccgagagcgacccgagg

SEQ ID NO: 197300 - DNA, 122 bp, Homo sapiens
gtgatcgggcagacggggcagggggcggggcagctgggaccttacgtcactcggtggtggcgatgatgcgtgtgtgtggggggcggggcatacgctgggcgcgtcccgggggtcacgtggtg

SEQ ID NO: 197301 - DNA, 122 bp, Homo sapiens
gggaaggtcttgtcatgtttccagtcctttgagaaactgctgctcagggttcaggaaagacgctgagcgggcgggcacgcgccccatggggaagcctggctgagacgggaggtctcgggagc

SEQ ID NO: 197302 - DNA, 122 bp, Homo sapiens
ttttaggaaaattaaatgagacaatggatatggaagtgttttgtaatctgtaaaggctggcgtcgttacgagttttaccattaccccacgttcccactgctgagaagggcacacgtggaatt

SEQ ID NO: 197303 - DNA, 122 bp, Homo sapiens
gagggagcactgcagctgtgggaccggcgcatagctaaaagccggcgggccatagggccccgcggaggaggccccagcaggcggaccaggaggccgaagcctcccgacgctcccagcctgtt

SEQ ID NO: 197304 - DNA, 122 bp, Homo sapiens
atatatatatattaattaaataaaaaaacgaggtgccttctcctgactccctgatccccgcgctctccagctctgccctcgcgatcgctggagccccctgaggaactcacgcagacgcggct

SEQ ID NO: 197305 - DNA, 122 bp, Homo sapiens
aagtgaaagacccctctcaccaccactcctatttccaaggataaccacattgacagtttgcggtttaaacatacagatatagaaatatctttaaataaaaaaacttatatgagattatgcca

SEQ ID NO: 197306 - DNA, 122 bp, Homo sapiens
gcggctccgcgcttccctgttggcctaacatcttaaaaccagaggcgggcttcctggtgccgagacgtcactccgccgcggccctccccagccctctccgcctccgcctcctcccagaccct

SEQ ID NO: 197307 - DNA, 122 bp, Homo sapiens
ttactacaccagacaagtgggccccacttcagttcagtgacatgttttgattgttgttcccgtctcttctatcagcacatctttaattgaaactgtagaagctgggggcaccaaaatactat

SEQ ID NO: 197308 - DNA, 122 bp, Homo sapiens
gcgccccgggtggccccgccgccagcaagcgacctggcggctgtgtcctgccgcctcctccgcgaagcccctgattgcccagcccgctcagacccaggcccagactctcactcactcgcccc

SEQ ID NO: 197309 - DNA, 122 bp, Homo sapiens
ggggagtgcttggggtgggtgcagggcgggttggcgtcatctgtgggctgcaggcgcgggcgtggccgggcgataggccaagtgcggggacgccgggggggccttcacgggaggcccgggct

SEQ ID NO: 197310 - DNA, 122 bp, Homo sapiens
cggcacatgcgctgctgcctgcaggccaagctcaggataagctcttgcagtaaatagcaacgtttatgtccctcgactcctggctcagagacgcgacccaggtgggaacttgattcgtgaaa

SEQ ID NO: 197311 - DNA, 122 bp, Homo sapiens
agggctggtccaccgggcagcactggccactgttgcctcagcgttctgtgtaagcaggtgcgtcagaaccggctcatggagatataattgaacgattgcctcagcgcgtgccagactctcca

SEQ ID NO: 197312 - DNA, 122 bp, Homo sapiens
gagggtgggctggaggggactgtgaggcacatgcaggcagacgccaccacaggagcacagcggggaggctccacatggcctgaggctccctgggcagggccagctggggcaggagggcaccc

SEQ ID NO: 197313 - DNA, 122 bp, Homo sapiens
ttatattcctactgtctttgtatgtttgttttgtatgattcttattattttcaccagaagcggaaaccctttttaagctgaaaaaggatgattcatttcgtacacagtgagggccctcttac

SEQ ID NO: 197314 - DNA, 122 bp, Homo sapiens
ccacctacgccgcgctccagcgtctcgctattgcgcatgtgccaccgccggtcgtgatggcgtagccacgctggcttactgagactcctgatctgtaaacaggactttggtggctacagcgc

SEQ ID NO: 197315 - DNA, 122 bp, Homo sapiens
gcctccgggaggccccgcccctcctcagggctggtccaatacgatcttcccagctggccccgcccacgttgactccttgggaccactcctgggccacttccccaaggccccgccccccggtg

SEQ ID NO: 197316 - DNA, 122 bp, Homo sapiens
agtacaaaaattgaagtaatggaactatgcgtacgcacctcctagatttttaaaggttaacgtgtgactgtgtttacttcagatgttcctgaaataaatgaaaatgaccagttaaaatgaag

SEQ ID NO: 197317 - DNA, 122 bp, Homo sapiens
ccttgggtcccctggagcctctgcccaggacagttaatttgctcatgctggggaggccgtcgggcctcgctgggacagcctgactcctccctcagcgtgaggctcccagagtgggcaggact

SEQ ID NO: 197318 - DNA, 122 bp, Homo sapiens
gttgagtgatggccaaggccacggacctggtgagggggacagtcaggattcgaacccaggcggctggctccagagcccttcaaacgatgccatgggaatggatgggggtcactagcctccct

SEQ ID NO: 197319 - DNA, 122 bp, Homo sapiens
aagcggcgcccaccctcagagcactacttccatctctgattggcttcgctgggtgcccgtcgctactccactcgccgctgataggccattcaaccgccgctctgcgcggcgccggctccgcc

SEQ ID NO: 197320 - DNA, 122 bp, Homo sapiens
tgttttcagaaccctttcaagcggttcttaaacaaaaaagtctagtccgatgcccattagcgccgcccccatcccacctcttacctcccaccgagcccagcgggtgggcaggaggggcctga

SEQ ID NO: 197321 - DNA, 122 bp, Homo sapiens
tcgtcactatcagatgctgctgctccctggcctcagaggaaagcagcacacagctcaccacgaggggtttccccagaggctcctcctgcagccaatgctactattagtttatattataatag

SEQ ID NO: 197322 - DNA, 122 bp, Homo sapiens
gtgcatcgtccgggccgcctcgcgctcctgcagatgggtgggcagggcggcgggcaagggcgctgaggggcaggcaggcacaccgaggggggcaaggatggagggaatctcccagggtcggc

SEQ ID NO: 197323 - DNA, 122 bp, Homo sapiens
gtcgacccctcggtccagaactgagtccaagggccccgattaccgatctatgggcggaagcgcagcgcagcggctttgtttctccacccccaggccttggggaaacttagggcggcgcgcgc

SEQ ID NO: 197324 - DNA, 122 bp, Homo sapiens
aacatgaaagaacaatgaaaagttaagcattaagcattattactcccagcattaaggaaacgtgatttcatctttctcaagctgaaaacacacacacacacacacacacacacacacacaca

SEQ ID NO: 197325 - DNA, 122 bp, Homo sapiens
tccctcgcccagccccgctgcccaatttctcccaacacgcacccactttccccacaaacacgttcagcgcgtagtcccggaagaaaggcccctccatgcccatcagcacggccccggcgcgc

SEQ ID NO: 197326 - DNA, 122 bp, Homo sapiens
aacgttggttagttttaaatgagttactatacgtaaagtgagtttagaacagatccagcacgtagaaagcacttttgtatttactgctgtgtatttgaaacaagcaaactaaggagttgacc

SEQ ID NO: 197327 - DNA, 122 bp, Homo sapiens
aaactaaagcctctctacataaagcaagttagcactctaaacacattataatccagtaaccgttcatctgtgtttttattttttatcttatttacttatttatttttgagacagagtcttgc

SEQ ID NO: 197328 - DNA, 122 bp, Homo sapiens
aagtgtaacatttttctcccagagacgtgaacagtctagtttcttcctcgcttactgcagcgtacaaacacctattttcccagtatcgttcataggatcccgacgctgtactttttcgtctc

SEQ ID NO: 197329 - DNA, 122 bp, Homo sapiens
gggaggagccgcagacacggggagccgcagacacagggggagccgcaggcatgggggagccgcagacacagggggagccgcagacacaggaggagacacacgaggagccgcagacgcaggag

SEQ ID NO: 197330 - DNA, 122 bp, Homo sapiens
cagccaactcgagtgccaagggtgaggcttggttcaaagcagccgtgccgtgtcccagggcgggaattgtgcggggacgggctccacggaggaatcttctcttccttcccttgatgttgcca

SEQ ID NO: 197331 - DNA, 122 bp, Homo sapiens
ttaaccctcttgtgatgagggattctttatttttgaagtgggatacattgaacttgttagcgtgtctatgctagtagaataagtagtcttttttaaaaacagctaatcagttcatggtaaat

SEQ ID NO: 197332 - DNA, 122 bp, Homo sapiens
ctccgcagtagaccatggaagtgggtctctcagggccaccccttgcaggagctgggctcccgtcatggagagggctcagtacgctggagactggggcctgtgggctgggtgaggttgcctca

SEQ ID NO: 197333 - DNA, 122 bp, Homo sapiens
tcttccccaagctcccaattcggcattgcctggaggcggaagtgggtgggaggggccagacgtgcgcccctccccggaagtgggcggtacccatagggctccacagtcgttccgccacctcc

SEQ ID NO: 197334 - DNA, 122 bp, Homo sapiens
tttaagcaagaatttgtgtccatagagacaaatctgaaaggatgtttatgaaaatgtaaacgtttccaagggcaggcagaatggcagcgttgtcatgagttgttacagcccagctgtgaatt

SEQ ID NO: 197335 - DNA, 122 bp, Homo sapiens
tggggcctggtgggaggtaattgtaacataggggtgggtccctcatgaatggcttagcaccgtctccttggtgatgaatgaggtcttgctcagagttcatgtgagatctggatgtttaaagg

SEQ ID NO: 197336 - DNA, 122 bp, Homo sapiens
cagtgccttggcttcattaccatgcagtcttgcagtgacgcacaactatagtggaaatgccgctgaatgcagatgaactatccagttgaataaaagcttacaagtttattataagtgcccag

SEQ ID NO: 197337 - DNA, 122 bp, Homo sapiens
ggtctacatgtatcattatgataaatatgaaaatattaatatttggtgaaaaaggcgaatcgcataaatataggtatagtaaacaaaataggatttgaatgatagcatgaaaaatcaggata

SEQ ID NO: 197338 - DNA, 122 bp, Homo sapiens
cgggaaggctgagctcccagacgagggcaggggggagcccgtgtctgggttgacagggatcgggatttgcctctaggaaggtcagggaccaagtggctccttcaaagctctgaggctcagaa

SEQ ID NO: 197339 - DNA, 122 bp, Homo sapiens
atctgaaacagcgccgagctcccatactagcctgccttcgctagctgaagcattagggttcgaacccaggtgggtctttcttaactcaaaaccaaggtaattccacaccgaaggctctttcc

SEQ ID NO: 197340 - DNA, 122 bp, Homo sapiens
ccccaagctcccaattcggcattgcctggaggcggaagtgggtgggaggggccagacgtgcgcccctccccggaagtgggcggtacccatagggctccacagtcgttccgccacctcccagt

SEQ ID NO: 197341 - DNA, 122 bp, Homo sapiens
gcgggggggtcttagaatgtatcccctaggaataaggtgagactgctgtactattttcaccgtttcaagctgtttctctcggtagaaggatggatttgaacataagaaaagttcaggacttc

SEQ ID NO: 197342 - DNA, 122 bp, Homo sapiens
cctcactgaagtccacaccgctgagaaggcccatcatccttacggccccaaatgtccacacgaataaccccgaacacacctgtgtggccggaaaggcacaacggatttttgccttgagggaa

SEQ ID NO: 197343 - DNA, 122 bp, Homo sapiens
gttgttcttcaggccgggcaccctgggcttggctgcgtccccatcctcttccagccaccccgtccccacacgaccccgcctgagttctggccgccttccgacccctcggggcccgccctgcg

SEQ ID NO: 197344 - DNA, 122 bp, Homo sapiens
aaaatcaaatagcccaggcacaacagccggggcttagtttggcctaaatctaaagggagtcgagtagatctgagagtactgaaaaaaggtgagagcattaaagtgcattagaagcaaccaaa

SEQ ID NO: 197345 - DNA, 122 bp, Homo sapiens
ggaaaagggactggggaaacagcggagaagtgaaagcggcctaaaatgggcgacggcgggcgagtcctctttatcagtgcagcaggctgccggagccgccatttggtggcggatctcggtag

SEQ ID NO: 197346 - DNA, 122 bp, Homo sapiens
cagcggtgtgggctccttgtgcccagatcctttgtattcatagggggaagtggaagaccacgctgcctgactgagactttattatagaggctcaggaaaaagatgaactggtcccattcctg

SEQ ID NO: 197347 - DNA, 122 bp, Homo sapiens
agggcagagacctgcacggctcaggtaggggccaggcctcttccagaaaggctccaccctcgcccaggccctggtgccgggcgggacgtcccggagccccgcctgcccgcgggaggcggggg

SEQ ID NO: 197348 - DNA, 122 bp, Homo sapiens
aacaactacatttcctaggaccctctgcacagcacacagcctgaaatacagggtgggagccgaacttaaaaagaaaactatagtcttggaggtaaatgtcacacacacaaaaatcaatttaa

SEQ ID NO: 197349 - DNA, 122 bp, Homo sapiens
gagacatgaagactttggtgccaggaccactaccctgcccgtgctgctgtagtgttcttccgcttttcaggaaattcacaaatcttttgcaggattcctagacatctcttaattttaaaagt

SEQ ID NO: 197350 - DNA, 122 bp, Homo sapiens
agtagctgggattacaggcaagagccactacaccaggttttaagaggtttactcgctgggcgtggtggctcacatctgtaatcccagcacttcaggaagctgaggcaggtggatcacttcaa

SEQ ID NO: 197351 - DNA, 122 bp, Homo sapiens
atcaaaaaaaaaaaaaaaaaagatgagattaggacacagacatgtacagagggaagatgccgtgaagatgatgtaaagacacagggagagatggccacctacaagccaaggagtggcacctc

SEQ ID NO: 197352 - DNA, 122 bp, Homo sapiens
aaatatgcgtctctggatggccagtgactcgcagcccccttccccgataggaagggcctgcgcgtccggggacccttcgcttccccttctgctgcgcgacctccctggcccctcggagatct

SEQ ID NO: 197353 - DNA, 122 bp, Homo sapiens
ttgttatgaaaatgatcacaggttaaaagagaactgcatgtgttgggccacaattttgagcgtgcatgccagtgtaatgggagagacggcagcagaagccctcacctgttttcatgatgggc

SEQ ID NO: 197354 - DNA, 122 bp, Homo sapiens
ggtgtccccatgagtcagcaggccccatgggtcccggcacctgacttcagtgtgccaggccgtctgtcgccccggcttgcacacacagatacagtcctcactccaggtgcagcccctccacc

SEQ ID NO: 197355 - DNA, 122 bp, Homo sapiens
caactcactttccctttttaatcgtgttcctgcccagtagagggtccagcacggggtccacggtttcgccgatgttctcaatgagcaaggtgtccccttccgagatggcctgctcgatgaca

SEQ ID NO: 197356 - DNA, 122 bp, Homo sapiens
acaaagtcagcagtggtgactgaagcagcccttgctgcgtggcaggctctgtgctgggcacgggattccagacacacaagagtgagaccctatcttgcagagcttacaattcggggtggggg

SEQ ID NO: 197357 - DNA, 122 bp, Homo sapiens
cgcacttatctctgcaaataccccacaaaagccctgaacccagaatgaaacttaagagaccgtacaacccgctccgcctataggaactgccgcggcacaggcgccaatgccgagggctgaat

SEQ ID NO: 197358 - DNA, 122 bp, Homo sapiens
gcggcacgcacggacattgcccctactccaggcgccctgcgaggttacaggtcatggacgcgcagggccattgcccctactccaggcactctgagcagttacaggtcacggtcccgcaggac

SEQ ID NO: 197359 - DNA, 122 bp, Homo sapiens
caggtttttgttacagaacactctgggcatatctcaaaatgtttacttttcccctcccaccggccagtcaggaatttttctgtggtctttaccatgagaacttggtagagcttcttggagta

SEQ ID NO: 197360 - DNA, 122 bp, Homo sapiens
atcccccacgcccacgcccaggaactggtggcgtccaaagggactgcgttggggtgaggccggggttgagggcctagggcgcagagccggctggagacgcggcgtggggaagggggccgagg

SEQ ID NO: 197361 - DNA, 122 bp, Homo sapiens
tcagaggatgccatgcctgtcttggggctcagcaactccactacccttcctccactcccgcgggctcttaggctgccggctgccacctgtgggccctgtgccccccaacccgtactctcttc

SEQ ID NO: 197362 - DNA, 122 bp, Homo sapiens
ctcattcagcgcctgtttgttgagcagttactgcgttctcatcaccacccacactaggcgcggcgtcaacactcagtgaccccgagaagtggctttctcttcctttccaggaacagtgcctg

SEQ ID NO: 197363 - DNA, 122 bp, Homo sapiens
tccaccgaagcccatctccaccttgtggactctgggtggggaccagacacgtctgctggacgggggcgtggccgcactcgcttcgtcgccgctgcccccgcccactccgggagactctctct

SEQ ID NO: 197364 - DNA, 122 bp, Homo sapiens
tcggagagcggagacgctgggcgcgctgtggggcgggggcgaggttcgggctggttgttccgttgcgagctgcagctgcgatctctgtggtaggcccaggtgagtgagcgcctctgatggaa

SEQ ID NO: 197365 - DNA, 122 bp, Homo sapiens
tcaagcacacaaaatcctttataatttaaagactccactttagagatacaccaaagccaccgttgttacacaagttattaaactattataaaactctgctttgtccgacatttgcaaagagg

SEQ ID NO: 197366 - DNA, 122 bp, Homo sapiens
tggccctgagcaccgcaaaagggtagaaattctgagatattgtagctatagagagagagacggcatttaaaggaactatgaaggttcatccaggtaaatcatctccccggctttctatccct

SEQ ID NO: 197367 - DNA, 122 bp, Homo sapiens
cctttgaaattttgaatttatggtggcttcgttacaaaaagattacaggaacaaaaaaatcgaaaatagtttggagctaaagacttaagagctaatccattatggagtaaactataaaatca

SEQ ID NO: 197368 - DNA, 122 bp, Homo sapiens
gacctagtttcttgacccagactaacctggaaatgattttctgagcatcacagtggcgggcgcaagggggaagatccactagctcttccttcctgatttcactggggtcgctgaaccagaac

SEQ ID NO: 197369 - DNA, 122 bp, Homo sapiens
ggggtctcccagccaggacacacaaggcaggctggggagccagggtcagccagggcacgccgctgagatgtctttcctgctccttctccccgggaagcaagggaagcaaaaggccagagggg

SEQ ID NO: 197370 - DNA, 122 bp, Homo sapiens
gtgcttctggggtcatcccagtgaggacagcaatgctctcactgcacagggaagcacacgcgggcacacaaacacgtccttactaaatgaagccccgtgttcctactccagccccaggtttc

SEQ ID NO: 197371 - DNA, 122 bp, Homo sapiens
ggcctgatggattggagctggcctcattctgcacagggagaacctgggccgtgggtctggcggaactggaagtgaagtgattcagcagcatcaccggcttctccttgtcagagctctccaag

SEQ ID NO: 197372 - DNA, 122 bp, Homo sapiens
ttaaacacctttccttctgtggttttctttggacggcaaggggacatgtgattgtcacttcgttaaaagccttgtgttccaggaaccaagttcaggcaccattgcatagttttgtaaataag

SEQ ID NO: 197373 - DNA, 122 bp, Homo sapiens
gtcagcctggcggggcggcagcaccgtgcctcgcgccccgcgcagccctggcacccagcccgctgccccccgcatccccgctccgctccaacgctcggagccctcggtgccgcgcctgttcc

SEQ ID NO: 197374 - DNA, 122 bp, Homo sapiens
gcgtcaccccttttcactctacactggctcccgcaggaaaatgtggaccatagtctgggccgggagaatggagatggggcccctgccctggggcggtggcaaattctctatggaatgaacct

SEQ ID NO: 197375 - DNA, 122 bp, Homo sapiens
gcatatgaggatgtgaccctactggctcactcctgagaatgggctcctgttagatgggcacgggcggattaattttagcaaaatgttctgggtgggggtagaatgaggtggggtggggtgag

SEQ ID NO: 197376 - DNA, 122 bp, Homo sapiens
ccgctccggacccccaaccctcccagccccaccccgctctcttcttcgtgtccaatcggccgccgagttacaagccactccctgatccgacttggctcccaccgcccggacccccgcccagc

SEQ ID NO: 197377 - DNA, 122 bp, Homo sapiens
aaggccggtgccccataggttccccaggaggaccgggaggaagaagggaagcgggcgagccgcggtgctggagggactaagttaccttgaagcttctggggaagaatccaaagatgatctgt

SEQ ID NO: 197378 - DNA, 122 bp, Homo sapiens
ggagaaaagattcctcgggagaagtgtgggtggcgatggcttaggaggaccttgaaattccgcatttgtctgtgagctgctgccaggtgcccattggcccagctactctgggtcgcaaacct

SEQ ID NO: 197379 - DNA, 122 bp, Homo sapiens
tcaggtctccttggcagttccccttctgctgttcttgttgctgcttggtgctgtgtgaagcgcaccagggcagagcccgctgggggctcacaagtgggagcggtaattgcgattggctgtgg

SEQ ID NO: 197380 - DNA, 122 bp, Homo sapiens
ccaccgaggatgttctggaggacgtgtggggcctgcccaagccctcgggtcctgggaggtcgagcagtaagctgtaaactaggagtgtgggggacggagatggctgaggcgtcacaggctgg

SEQ ID NO: 197381 - DNA, 122 bp, Homo sapiens
aaccatcgacaagactgctaaccaggcctctgacaccttctctgggattgggaaaaaattcggcctcctgaaatgacagcagggagacttgggtcggcctcctgaaatgacagcagggagac

SEQ ID NO: 197382 - DNA, 122 bp, Homo sapiens
atgatccggcctaggctgcaaaagataagctgtgcagtcctaggacaaggtgcttttccccgtgcctccagaccggtaacactgcttccttcttaggacctttcatgtctcctcatagtttt

SEQ ID NO: 197383 - DNA, 122 bp, Homo sapiens
cctcctccccgcgacgtgacgcggcctgtgcattttcaggtgagggacggccggtgtcatcgttggagcttcctaagactcccagaggctgatgcacctcccagacccgcctccgcccggct

SEQ ID NO: 197384 - DNA, 122 bp, Homo sapiens
catgagaattaaggcagagcccagcggagtgcattgtaaggatccatgagtgtgaaccttcgtttttactactgcatatgaggatcctgccaacaaacctggcggcttcaagcatccttgcc

SEQ ID NO: 197385 - DNA, 122 bp, Homo sapiens
ctttgtttgtcgccatggaaaccagtcagccaatctgaatggctcttagatcatacagaacgatgcaatgctccctgctctcagtgaaagttcctcactgagtgagtggggctgactcttcc

SEQ ID NO: 197386 - DNA, 122 bp, Homo sapiens
gcagacatgctgggatcctacggctccttggctcgtttccgcaacatctctcgcattatgcgagtcaacaacagtaccatgctgggtgcctctggcgactacgctgatttccagtatttgaa

SEQ ID NO: 197387 - DNA, 122 bp, Homo sapiens
attcaagtttattaatgctgccccaccccagggttttaatccggtctgggcagaagcgggcgataaaagccaaaggagaccataaagtgtaggatatttcctggttagtggctgccgggtaa

SEQ ID NO: 197388 - DNA, 122 bp, Homo sapiens
gagggaggcccctcccccggtgcagcgccctcccgccctcggcacccctcggcagccaggcgctggccacagaggccgcttccttggtcctcaggcagctcatgggatccaggaaggaaacg

SEQ ID NO: 197389 - DNA, 122 bp, Homo sapiens
taaagctataagcctgccttttcccattggcgatgggtccaggtatcgttccccaggctccgcctctgagctgtgaccattagctggttggtgggatctaatcgccctcttcctagctcctt

SEQ ID NO: 197390 - DNA, 122 bp, Homo sapiens
aaaaggaaaaggaggaagtggaatgctggcttttcaggtgtcgcttggccaaatctaaagcgtggcaacttcaggaatttcaggttgtccccattgtcagattccaggcacccacaggtaag

SEQ ID NO: 197391 - DNA, 122 bp, Homo sapiens
cctgggaccaggaaggacctctaggctgtggctggccttgtgcagaccctggactgcatccggttccccaaagccctgctgcattcgagtgtcccccaaccccgggcaggtggcacctggtg

SEQ ID NO: 197392 - DNA, 122 bp, Homo sapiens
gttcttcggtgggtcctgtaacagtgggtgcttgggatcagagcatcagagtggaattttcgcagggaaatggaaatgcctgatcgagctgggcggtggcagcagccgctcctcactcttca

SEQ ID NO: 197393 - DNA, 122 bp, Homo sapiens
ttgcgcggcttcctccagagggcgggaaccttggacgtggcggggctgggtcagtcagggcgctgggcccagcctctctgcaggctggccttccgcgctgccgtgaagcccccgacaggtcc

SEQ ID NO: 197394 - DNA, 122 bp, Homo sapiens
gatttcagggaactgaacagcaaaggtgttcacaatcagaccaccagcaggagtgcggcacgccccttaaacactctaaggaagtatttaccaaggctgctaaaaaagaagttgaggatttc

SEQ ID NO: 197395 - DNA, 122 bp, Homo sapiens
aggcagtgtgagaatgcagttggaggcctcagtcctccccgggactgctccgtaaggcctcgtggtggaagggcattgaatggcccggcctcgtcgttaacctggccagtggactaggctgt

SEQ ID NO: 197396 - DNA, 122 bp, Homo sapiens
ctgggccgcgcccgcttcctggcgaggccgaggcgacgccgcgaggtggggagggacgcccgggaccccccgccctgccccgccgcccccaggctcaccgacgcccggtagcgcatcctgcc

SEQ ID NO: 197397 - DNA, 122 bp, Homo sapiens
gagcaggtctgagaccccggcctcggcctggctggttggtggtggggatgggggctagtgcgcccaatcccggcggccctgtgtttctcacaggctgtgctgctccacgcagagaagctgtt

SEQ ID NO: 197398 - DNA, 122 bp, Homo sapiens
gttagggacacagggaaggttgagagagcatagccttgctgagcaggccacagaggtccccgggactctactcgtctgctggagagacatatggtgctgccagcaggccatgggaccctctg

SEQ ID NO: 197399 - DNA, 122 bp, Homo sapiens
tgccaagtaggcgactggataaaggggatctggggctgaagacatccgtttgggagtggccggcctgtggatggttttaaagcccccggtgtgcatgagcaggtagacagggcagagggcca

SEQ ID NO: 197400 - DNA, 122 bp, Homo sapiens
aacgcgcctcgggggctgggattgggggtggtggctgacggagaaggctgggcagcagagcgcctatgacatccagccccttgtccggtagccactgcttaccttgaccccctcctccgaga

SEQ ID NO: 197401 - DNA, 122 bp, Homo sapiens
ttcagcggctagttaggcccgggtggttcacacttcacatgcccagtgcccattaggatgcggggcccgcccacccatgcacaattgggaaaatctgaggatgaatggttgtcagagacctt

SEQ ID NO: 197402 - DNA, 122 bp, Homo sapiens
gatgcacacacactcgaggtccgccaccccgcagtgccgtgcacccctctgcccccacctcggaatttttgtgcccgagcgctcgggatccacggcaaaaccaggcacattcctccctctgc

SEQ ID NO: 197403 - DNA, 122 bp, Homo sapiens
tttccatctgactggctcaggcagctggtgagaacagcgctcgtgtcatcagccagactgcgccgcctggagccgggccagtggccgtgcgccgaggcagctcttagaggccttaatcctcc

SEQ ID NO: 197404 - DNA, 122 bp, Homo sapiens
atgaaatgataggacagcagtctaagattcttaggctttttgtgtgttggcccctgcctacgtttccagtctcattcctttttagtttttatttattgttttgagacagggacttgctctgt

SEQ ID NO: 197405 - DNA, 122 bp, Homo sapiens
gctctccgttgtccccatgcacagaggctactgggggaacaagatcggcaagccctacaccgtccctggcaaggtgacaggccgctgcggctctgcgctggtgtgcctgatccccgtgtccg

SEQ ID NO: 197406 - DNA, 122 bp, Homo sapiens
ttgtgggcacaaaatctctttctcttccttaacccgcatctgtagccttttgcactacctcgtcactagcagaaaataggatttttcacctgcaaatggtgaagagagaagaggctagccta

SEQ ID NO: 197407 - DNA, 122 bp, Homo sapiens
cccgcgtctgacccgcagccatcgatcactatggcaggcagtacagtcaggagtcaggcccgcccctgccccaccacctcccccaccaccccatgccgcacccagcacctctgcaggccccg

SEQ ID NO: 197408 - DNA, 122 bp, Homo sapiens
taggcacaatctttccctcaacactcacagcttggactgctaccctcccttcctttgcctcgaggtccaaaaattacacaatatgccacagcctgagtcaactcagcacacacttcctgagt

SEQ ID NO: 197409 - DNA, 122 bp, Homo sapiens
ctgtaccagcacactcgagggaagggcgtgaaggtgttgtgtaactggcattggctgagacgagaccaacctcctgtttccggactcttatgaacttaaatcacggcttgaaactctccacg

SEQ ID NO: 197410 - DNA, 122 bp, Homo sapiens
cgccgccggccgccgcgccgggtcctaaagccgcgcgtctcaaaaggatggtgcgcctggcggccgagctgctgctgctgctggggctgctgctgctcacgctgcacatcaccgtgctgcgc

SEQ ID NO: 197411 - DNA, 122 bp, Homo sapiens
cacaagacaaacaaaatactgagaaaaccgaggttctcactctgcccacagagggagctccgagttgcagctgcctctttctgctccttttcagttcagataaattgcacttggtcaacgga

SEQ ID NO: 197412 - DNA, 122 bp, Homo sapiens
cgtgtgagcaaatgtgtgagtgtgtgcaaagcgcccgggccaggccctggcacgcatcggcgcccatgttggctggtgtcaggggtggtggcggtgggcgtggggcgtgggggtggggtgaa

SEQ ID NO: 197413 - DNA, 122 bp, Homo sapiens
aaactgcaaggaaaagccagtgagacgcaggaggggtgagagggactgcgcggcagccggcgctctcggggagaaggcctgccgctctgctttctgcatttctttgctggaatttattgctc

SEQ ID NO: 197414 - DNA, 122 bp, Homo sapiens
ggtccctcttccaacttgtggagataccccaaagcagttgatgtggaaagtccttggcgtcgccctcctcctcttggagaatatttgtccaatctctctccccgaggctgacaacaacgcca

SEQ ID NO: 197415 - DNA, 122 bp, Homo sapiens
acctagggtcacacagattgccgttaagtggcaagatacggggtgtgtactcaggcatatcggatctgtaaagtgagggataaggaaccttaatgtattttgtaaatcctccagggctgtgt

SEQ ID NO: 197416 - DNA, 122 bp, Homo sapiens
tgacggtgccaaggttacagaatttaatagctatgcctgctttttacttcatgatctccccgttcctctccaaagcatttatttcatctgtgaaggatcctagtaacatttcagacattttt

SEQ ID NO: 197417 - DNA, 122 bp, Homo sapiens
cttgttgtctggagactctccaccaaagaggtagttgcagccttgaggcagagcctagggcgctgattgatctccccgtccccgctccgcagagcttcctggatcaatgctcttgctgcaca

SEQ ID NO: 197418 - DNA, 122 bp, Homo sapiens
cagactaagccagcacatcatgaccagcagtgcctggccgaaagggtcccgaagccctaacggttttccggtctctgatgcagtgatagacatccagggcacccaccctctgcgccttggaa

SEQ ID NO: 197419 - DNA, 122 bp, Homo sapiens
tgagagctgagcgggggagacactgttcagaaaagactgggtccctgaaactgttgttgtcgtttaatccagccattttttttaagtttgtttaagagacaggggtctccctatatttccca

SEQ ID NO: 197420 - DNA, 122 bp, Homo sapiens
aaatggatcatgagtcagccctgctgggctcacattcatactatataatatataaccccccggacaaataatatcctctctttatactctaatttcattatctgcaatacaggaataatact

SEQ ID NO: 197421 - DNA, 122 bp, Homo sapiens
gcgtgacgtcactccgttttagccaaacaaatgggtttcggggcgagcgttgggcgccgccgcgccgcgctgggtgctcggtccgactcagcggtggggagtgagccaggcctcccgccacc

SEQ ID NO: 197422 - DNA, 122 bp, Homo sapiens
cccggagccattgtccacaaacacagaagcgtactgtccagcctgtaagaagcacggggacgtcacaaccgcagccacagcccagccactcggtggccaacgtctgcccacctgccctgcgc

SEQ ID NO: 197423 - DNA, 122 bp, Homo sapiens
cctactgtggtccacattgcctgctctggatgtttctttctgctcttttgctgtccactacgtaaatcctggtaacaagacccaagggtagagcagagccagaaggtgggggtgtgctgggc

SEQ ID NO: 197424 - DNA, 122 bp, Homo sapiens
tagcggctatgggcgctgtcttacaacaaagccaaggaatctcgctgctgaggggtgagccggggtcttaagactgggattcccgttgagggaggtgaacagctgtgggagctcaggccgag

SEQ ID NO: 197425 - DNA, 122 bp, Homo sapiens
tctgagatgtacgctaagactgaacaggatattcagagaagttctgtaagtcattagcttcgggactgaccttaacaggaaaccattgctcattttgctaatctgtgtgtttctctaaaatc

SEQ ID NO: 197426 - DNA, 122 bp, Homo sapiens
ttctcggctgccagtctgcctgtcttgaaggtggtctgagctttctcactccaagccagtcgtgtgggaagggacactctctgagcctcagtttcctcagctgtcaacctctcagggcttgt

SEQ ID NO: 197427 - DNA, 122 bp, Homo sapiens
gtaaagtagaggggccaggtagagatcctgctgacctggcaagcacatgttccctccagtcggggcgttgaccgctcagcagcaggtctagtgtcacccagtctttctagttctcaggagaa

SEQ ID NO: 197428 - DNA, 122 bp, Homo sapiens
agcgcaccccggagactaggaatttccctctagtttaggctatgcaatcgccaacttcagcgagttgtctttgcgcagccctgcctgtgacatccatgccctcctaacttttctttagacac

SEQ ID NO: 197429 - DNA, 122 bp, Homo sapiens
cgtgggcagctgtgacagggctactcctctgggtcgggcagggtccagccctcgcttggccggcgccccagggcctggctcttggattttcctcccgcgctcccggaaagcgggcaggggtg

SEQ ID NO: 197430 - DNA, 122 bp, Homo sapiens
cgctgacaacaccttcttaagagaccctggcagctccgagccagacctcatgttactatgcgtttaccggtcaacgggggtgcccctgaaatacctgctcgtctacatgatggaaacagccc

SEQ ID NO: 197431 - DNA, 122 bp, Homo sapiens
atagaaaaattctttcccttcaatcttctagactttgagagttttgacctgcctgaagagcgccagattgcacacctccccttgagtggagtgcctctcatgatccttgatgaggagggaga

SEQ ID NO: 197432 - DNA, 122 bp, Homo sapiens
aatacttactgggaaataaccaatcagtcagaccaggtccctggacattcgctaagaggacgaatagcaccaggaggctcaaaagtccagaagatcccatgttgaagagaggccagcctttc

SEQ ID NO: 197433 - DNA, 122 bp, Homo sapiens
taaacaggcacctttggattcagggagtgtttcccagccaatacggagtgctggcagacacgggtgggtgtctgggtgcggttcagctaccatcaaaagaccccgggcttcgttcctgcctg

SEQ ID NO: 197434 - DNA, 122 bp, Homo sapiens
caagggagctgggccatttcctattttctttttagtgagtgcgatgttctctaaacaccgcggagaggcagggttcccggtgatggccttgccgagggtgctcccgcaacctccacctccag

SEQ ID NO: 197435 - DNA, 122 bp, Homo sapiens
acgccttcctaatcagcgggcgcattccctgacttttgcggaaatagcggtccaaaaccgcgtctagcattagcaaaagcacgtggtctccgtctccccgcaacaacaaaaaagaacagtaa

SEQ ID NO: 197436 - DNA, 122 bp, Homo sapiens
tcagggtaatatcttagagatattaattagcttgctttaggtcacatagaattttagtgacggagctagtgttcaaaactggtcagtctgactcaaagcctgattcttaacttttaagtcat

SEQ ID NO: 197437 - DNA, 122 bp, Homo sapiens
acacagatcttaaactaatagaagaggtaaggcaggggctgaactaaactaagcctctcccgtgcctcactggaggatgctcctaacaatgctttaatcctgacaggaagctgatcatctct

SEQ ID NO: 197438 - DNA, 122 bp, Homo sapiens
ttgttgaaaatcggttgactgtaggtggcatacgcaatatataaagaggaaaatcagccacggaccaatacagaatgttaatttgaagtgattattttttaattactgaataattgttcagt

SEQ ID NO: 197439 - DNA, 122 bp, Homo sapiens
aatcctgtacaagttgaagctgggccagtcggtgaccaccattcccactgtgggtttcaacgtggagacggtgacttacaaaaatgtcaagttcaacgtatgggatgtgggcggccaggaca

SEQ ID NO: 197440 - DNA, 122 bp, Homo sapiens
aagtgatatagtttgtttctctttcccagatttattcttatgaacttcatttttggcttccgatcacttggcttccctaatttcctagggtcattattaattattgtgctctgcccaggtgc

SEQ ID NO: 197441 - DNA, 122 bp, Homo sapiens
acaccttctccccactggcttcctctgccttagcttctgtctctggctttggcttcacctcggccacctcttcagagcagtctgccggcccatgtgtggcagcgtggcgcgctgccctgggc

SEQ ID NO: 197442 - DNA, 122 bp, Homo sapiens
tgaaagtagttaacttctgctcccccaagtcagaatgcgtttgtaacagccacgctttcccgccctgtgagcaacgccaggcaggtggtgagaggtgacagcgtgctggcagtccccacagc

SEQ ID NO: 197443 - DNA, 122 bp, Homo sapiens
gcctttttggagcccttcttgggagcaggagcggatttcgctggatccggcatttttgcgcgaaaaaagagaacagagacttaaagaagtaatccgaactaccgcaaaacgggctggttatg

SEQ ID NO: 197444 - DNA, 122 bp, Homo sapiens
gcctcccgaagtcctgggattacaggcgtgagccaccacgtccggccctgccagggctttcggttgccgtgtgtgcacgtctctgtgtgtgcacatgcatgcacaggtgttaaatctcaggc

SEQ ID NO: 197445 - DNA, 122 bp, Homo sapiens
agaggggtgggccggggctgaggtctgccaggcggcccttttcttgctcctgtgccggcacgagcaggcttctcctagggttgtcaggctgtgcgctttggtagttctgcatctccagcctc

SEQ ID NO: 197446 - DNA, 122 bp, Homo sapiens
tcctcgcttcctgcggaaaggacggccgtggctgagcgcggtgggtgcgggccttgatcccggactgcggtgtgttgtcaggtttctccaccgtaagatcctttttccacaccgcgctcctg

SEQ ID NO: 197447 - DNA, 122 bp, Homo sapiens
gtcaacaccggactccgcctcaggggacgggagccccagggccggccccgccggggcctccgccttcaccgacacccgcaggccccgtacggccgccatcgctgcctgccggccgcaccact

SEQ ID NO: 197448 - DNA, 122 bp, Homo sapiens
ggcccctggcccctgacctgccgagagaggccagcggctggctgaggctgtagagcagcgcgcggccgggggcggcgggggcagccagcgcgggaggactcagctgcaccatgcggccgtcg

SEQ ID NO: 197449 - DNA, 122 bp, Homo sapiens
tctcctggaccacagcgcccgctctgacagcagggggcgccctcgggccggcggagcctccgcttacccacaatcagggccttggtgcgcagcccgccctggagctctggctgcagcagcag

SEQ ID NO: 197450 - DNA, 122 bp, Homo sapiens
gtaccagatggtctccactttgttcctgttctgcagggtcttggtggttctgagaattttcggggccacgctcttgctgcgggtcccactgggccactctggctggccgactttctctgctc

SEQ ID NO: 197451 - DNA, 122 bp, Homo sapiens
ctgggccaggctgaggccacctgacgctgtttactcagccacttaggaaggccctgccttcgggcacagccccctgtccaacatactccctcccctgctggctgccagggccccagttcggc

SEQ ID NO: 197452 - DNA, 122 bp, Homo sapiens
tgggttccagcctcccgctaggacgcaatttcttgagagcaggattcgatctgttgttcacggctagatcctaagcgcctagaatagtttctggcacacagtaggcactcaataaacatttg

SEQ ID NO: 197453 - DNA, 122 bp, Homo sapiens
gcccttcgggtctgcactgacaatgacttgcttgcatcctttgtggacaccttatttccccgactccaagagtgaaagctggggcagtgcccttgcggggatccctcggaacagcccgggca

SEQ ID NO: 197454 - DNA, 122 bp, Homo sapiens
tccttttgcccttgtctcccacaggtcctggtgcttgatggtcgaggccatctcctgggccgcctggcggccatcgtggctaaacaggtactgctgggtaagtcgctgctcgtggcccctct

SEQ ID NO: 197455 - DNA, 122 bp, Homo sapiens
tgggagggattttggtcatggggcttgtcgtgggtcattcctgagtccattttcctgcctcggccttcccgaggagggaactggatatagaggctgtgggctcaggactgagatcagggcca

SEQ ID NO: 197456 - DNA, 122 bp, Homo sapiens
tcgaatccttaaacttcatcgttgctccgggaggctcacggttcattctgcagctgtctgcgcggccgccccccaactgcagctccatcggtttaaaatgggggccactttatcgcccagct

SEQ ID NO: 197457 - DNA, 122 bp, Homo sapiens
tagcacttcttactttaaccatatcaaactttttttatatccatttcttaggagaaatgccggtggttagcttcatcaaaaggaaaacaagtgagaaatttcagctagatttggaaaaggaa

SEQ ID NO: 197458 - DNA, 122 bp, Homo sapiens
tggagatgagagagtgtagaaataaagacacaagacaaagagataaaagacagctgggcccgggggacaactaccaccaagttgcagagaccggtagcggccccgaatgccaggctgcactg

SEQ ID NO: 197459 - DNA, 122 bp, Homo sapiens
ctttgatgtgcggcggctgcctgcgaggagaagtctgagggactctggctaggcgggcagcgcagatggaagggcccggctgcccgtggacaacaggctcagccacggctggccccattcgg

SEQ ID NO: 197460 - DNA, 122 bp, Homo sapiens
acaaatgggcggggatttccccggaagtctccctttatggagggttggggttgggcgctccgcagtcctcccagggccgctctgaccggccgctctgtaacttctcgcctcctcttcgccgt

SEQ ID NO: 197461 - DNA, 122 bp, Homo sapiens
ggctgccgtgcggccctgggcaccctgcctggagaacatgaccactgccccaaacggcctcgggccaggccccgcagccccctgtgcaggctcggacctgaaagacgccaagatggtgacct

SEQ ID NO: 197462 - DNA, 122 bp, Homo sapiens
cgtaactcacagcagtgacgcttcccgacgccccccggccacatccccacaggaacgctacggcgcacagggcattactgtgcccccaccacaaccacataaagaaaatgtgggggctcggt

SEQ ID NO: 197463 - DNA, 122 bp, Homo sapiens
ctttatatctctttctttctaaactgggactccactgaaaagttgatttacactgtgaatcgaggctgaatgaaatccaattggaactcacttgaacactgttttgatgtaagattcaaagc

SEQ ID NO: 197464 - DNA, 122 bp, Homo sapiens
cgggtcaccgcgtggcagctcccgggactgccgaggggccccctgaccccaggcctccctcgggaggggtccagaaaggtgcagcggctcactagggtcacacagcaaaattcctcacattg

SEQ ID NO: 197465 - DNA, 122 bp, Homo sapiens
gcctctctctctgctgcttttacagccattggcagagaggctgtctccacacatggaactcggctactgagggtctcagaccgtatccataaattcatgtcctcaggtcaggatgccaaggc

SEQ ID NO: 197466 - DNA, 122 bp, Homo sapiens
caattcacatccgaccaggtcaagtgactggagttcaccggtctcgggtataccgcatctcgcgccaggcttcaaactctagatccccgagtctcgagctccagctgggtgtcgagacgggt

SEQ ID NO: 197467 - DNA, 122 bp, Homo sapiens
tctctccccaatgcctccgtttctccagaaaagctagaggaaccttttcctcatccccttcgaaggttagaaggtttcagaagcctggaaaagaagagactctaagggagaaaccttcctct

SEQ ID NO: 197468 - DNA, 122 bp, Homo sapiens
aagagggtgggtgttaggggcgcggggaccctaagtagcctcggcctcctgtcactgccccgtcaccatgctggggaatctccgggccagtaacccagcccccacccctcccacacacacac

SEQ ID NO: 197469 - DNA, 122 bp, Homo sapiens
aaatccatcaggtagcctagttttccttctttcctctctacaagggattttaagcgctaccgtgtgcttccctcccactatgctggtactttcccataggaagggttgtgcctggacctccc

SEQ ID NO: 197470 - DNA, 122 bp, Homo sapiens
ccactaaaccggatgtgacgttgacctaccttagtcacattgttagggaaggaagtgtgccgcgcctacctatctgccccgccttgagtctcagccagtcggcgtctccatcctggcgccag

SEQ ID NO: 197471 - DNA, 122 bp, Homo sapiens
caatgcaggcttactgggtaaagcccaaattcctcaatcttttggaaatgagaagaaggacgcttaaagctcattattgtcatggatctgggaggtttttacaattcccaggaaggtttaga

SEQ ID NO: 197472 - DNA, 122 bp, Homo sapiens
cggcgcctccgcaggtaacgcgggtgctttctctctgcacagatggacgtgcacatcctccggcagcagccctcagtacaacatctgcgagcagatgatccagatccgcgaggaccacatgc

SEQ ID NO: 197473 - DNA, 122 bp, Homo sapiens
cctctgtggttccacccagccttccaaccaataacgcagcgtctcctgcaggaaactcatcgcttgggtcacctgttgctctttgctctaatgagccttgagaaaggattgctggtcatggg

SEQ ID NO: 197474 - DNA, 122 bp, Homo sapiens
ggccgtgctccaggctggagtttcccaggagctgcgcatctgcttctgtgtggcgtctctcggctgcggccgcctccctgtgcctcctccctgtgggtctgtaggagtccttacgtattctg

SEQ ID NO: 197475 - DNA, 122 bp, Homo sapiens
gttcgcctacgatggcaaggattacatcgccctgaacgaggacctgcactcctggaccgccgcgaacacagcggctcagatctcccagcacaagtgggaagcggacaaatactcagagcagg

SEQ ID NO: 197476 - DNA, 122 bp, Homo sapiens
cccgagaccacccctaagcaagacccctagccggagtcgcccctccgtcccgagactccgcgcccctcaatgcgtcacccttctgagcgcccggcctatctggccccggagcgcagcctgta

SEQ ID NO: 197477 - DNA, 122 bp, Homo sapiens
actcgcgctcactcattggccggcaggacagtctgtccccgctcctcctccctattggcccgcttggctccattggtcgtggttccaaccctgccgcggacctcgccgccactcccaagtcc

SEQ ID NO: 197478 - DNA, 122 bp, Homo sapiens
tcccggagatagtgaacttcccgtctgtccttgtgtgagagcccagcttgaatcaaagcacggtggagcggcttcccgtgctccaagaccccttctggtttaactttctgtgaacaaaaagc

SEQ ID NO: 197479 - DNA, 122 bp, Homo sapiens
cttccttatttataccaactcctattcaaggttttattaaatgattaccttttagaaagtcgaccaaaactcaaacacatttaataaaaatattaacttctcaatatgtcgtcccacattga

SEQ ID NO: 197480 - DNA, 122 bp, Homo sapiens
acaggctccccacctggctgggcttgggaatcactggggaagctttttagtatgaatctgcgggcctgagtggaaagtcactgaatcagaatgtcagggcaggaggggaaggggaaggtgtc

SEQ ID NO: 197481 - DNA, 122 bp, Homo sapiens
cagcgggccgagcctccttcttccagctgatccctggccgggctggacctgcgctatcagcgcgcccccaggccctggcccgggtagactccagaagcatgcccatcacccaccggtgatgg

SEQ ID NO: 197482 - DNA, 122 bp, Homo sapiens
tcaccagagcccacccaggggcctcgcctgtcccccattctcattccatactctgggaggcggtacaaggtcgggagggccagcggggctctctgccaccaggactcacttccgcccatctt

SEQ ID NO: 197483 - DNA, 122 bp, Homo sapiens
ctggctcggctgggcccgcggccggccaggggcctggggtccgcgtgcgggacatcgcctcgctgcggcgctccctcaggatgggtttcatgacgatgcccgcctcccaggagcacaccccg

SEQ ID NO: 197484 - DNA, 122 bp, Homo sapiens
cggtagtgccctcggaagccgcatgtgctggaggcacgttggaggcaaggatcctgcagccgcgacttgaatcgcatgggtcacggaggccacgctggagcccccagagctggctcggattg

SEQ ID NO: 197485 - DNA, 122 bp, Homo sapiens
agagaacgtctccgagtccctcaactctctacgctttgcctccaaggtgcgattaccacccgtcagccttgtcaggacccgtgggtggttgtaggcttctccattccaatcccttttgtctt

SEQ ID NO: 197486 - DNA, 122 bp, Homo sapiens
ttcctgtttcccttcagtcatttacaacattttacaaaacgctataggtaggaaagaaggcgaatctgtaatcagggaatggaggattccagctagctatgtgaaagctgtgtgtcaggtca

SEQ ID NO: 197487 - DNA, 122 bp, Homo sapiens
ttgcaggtagacaatagataccgcatcaaaaacatgcacagcaccccctcctcagcaaggcgcccaatgaggcagaccagatgacatttcctgggaacaaggactatcgtttataagttttc

SEQ ID NO: 197488 - DNA, 122 bp, Homo sapiens
aggtcttcggagaccttacttctctgactttcacattctaacgttctgaggctaatactgcgatctcagtatttgccctccacccccaacgacccacactcgagctctagagctgccgtact

SEQ ID NO: 197489 - DNA, 122 bp, Homo sapiens
acatcctcatgttccggcgctggaacaaccatagagacatgaacctgtgctttttgggggcgggacagttggctggccaggctggtttggctccggccagtgtctggatagttaccaagccc

SEQ ID NO: 197490 - DNA, 122 bp, Homo sapiens
ctccacctactgctgtctgacctcgggcaagtactgagttcctctgagtctcaaggtcctcgttagcgaaatgggaatgaaaacgatgcttcacagagttgtagtgaggatcacacaactcc

SEQ ID NO: 197491 - DNA, 122 bp, Homo sapiens
cccaccctaatcttgttatgcaaataggcttcccacttggcaggggccgtcttgtccactcgtttctgtaaacatgggtggcaaaaagagaagatggagctgccatttagaacatgcctaat

SEQ ID NO: 197492 - DNA, 122 bp, Homo sapiens
ccccgcccccgagagacatgacttccaagccgcattccgactggattccctacaggtacgcgggcgccgggccggggcgcccaccactcccgactcgggacgtgagctggctggggatacgc

SEQ ID NO: 197493 - DNA, 122 bp, Homo sapiens
gccgaggcttgaagttgaagtgagggatccagctgtggtgtgcgcggggctcctcgccgccgctttcgctcgctcgctccgcgtctcggccggaggaggaggctgtggcgccggcgacagct

SEQ ID NO: 197494 - DNA, 122 bp, Homo sapiens
tatgactctggggggctgtgaattcctaatgtccttttgagacatgtagatcttccagagcgatgctgcccaatgcagtagccactagccaagtgcaaatggtcacttgcaatatggctagt

SEQ ID NO: 197495 - DNA, 122 bp, Homo sapiens
ctcgggctcaggctcaggctcaggctcaggcacaggcttgggacccggctggggatcctccgcccgcacttccgtctggacgcgaaggcgtcaccgggcgcgccgggtcagatgcaaaaagc

SEQ ID NO: 197496 - DNA, 122 bp, Homo sapiens
ccaggcctggcgcggcggctgggcgaacatggtgtaaccaggccgggcgaggcggctgggcgaacctggtgtatccaggcctggcgaggcggctgggcgaacctggtgtatccaggcctggc

SEQ ID NO: 197497 - DNA, 122 bp, Homo sapiens
ctccacagccctgcctaattttaggcgccaaggctggacgtgactgaccagactcctgctcgctccctctccacgaatgatgttggtccctgaagctaggttaaacaagcaatagtccacag

SEQ ID NO: 197498 - DNA, 122 bp, Homo sapiens
ttgctataaaactaaaagccattatatatgttggggatgggaaagtaatagaaccagatacgaagacaggtcttgaatatagaccctgactttttcactgtttggtttctagccctgtgagc

SEQ ID NO: 197499 - DNA, 122 bp, Homo sapiens
cccacccccgggccccacacgcctgccctgccggttccgcagacgataggtcaccccgcacgcacggaggtgacgacgtcagcacctgcccgcccatgcagaccctgtcccctgaattattg

SEQ ID NO: 197500 - DNA, 122 bp, Homo sapiens
tcagaacagcttttagaccaacctgaaagcaggaatgtaagcactgttcacagagattttcgtctttggcttattgtgcctgcagagtctagtgcttctttgccaggtgaggagcttaaccc

SEQ ID NO: 197501 - DNA, 122 bp, Homo sapiens
agccctgttgctgccctgccacttttccttgccataaggtatttattctagaaagaagggcgtagacttggtccatgctttccattcaaaccttctaacgtcgcagtctgctgtcttcccca

SEQ ID NO: 197502 - DNA, 122 bp, Homo sapiens
ttttttttttgctcccagcctgcccagatttcaggaaggaaagaagatcttttgcttcttcggtcgctgggtcggctctccagtgtctgatgtttactgaaatcttgatcgtggttagcctc

SEQ ID NO: 197503 - DNA, 122 bp, Homo sapiens
actccgattcctgaacaaggttactttcccaaagtccttggacttcatccagagttggcgcgccttaaaaagcagcgcccctccaagtccccgccccacccaacaccccgtttccagtctca

SEQ ID NO: 197504 - DNA, 122 bp, Homo sapiens
agctcggcgtcaggctggagctgggcagggcgtgtcctcagcacacggtgcagtggctcccgaagactctgcagccaggggtgtcagcagcctgccctccccacagctattctccgttgaag

SEQ ID NO: 197505 - DNA, 122 bp, Homo sapiens
attttctcctccgtgctcactgctggtgttgcctcttggaacctcggcagtttctgctttcgcacctgcagggtttagtctccgggactgcttgggaggacacctggaatgccgaaggcagg

SEQ ID NO: 197506 - DNA, 122 bp, Homo sapiens
gccacgaggcggcgccagagcagcgtccacagcccgggcctctcggcaggcttggggctgcgagaggggccgcggagacaaaccaggcctccaaccaggcttcctgcaaagaccaggtagga

SEQ ID NO: 197507 - DNA, 122 bp, Homo sapiens
gagaagaaggaagcttccctgcctgagacacgaatggaagccaggagctcccaggtcatgcgacctgcccagtcaagcagaaacaggtttggagagagaaacaggtttggagagagaaacaa

SEQ ID NO: 197508 - DNA, 122 bp, Homo sapiens
tctagggtttgggttggatggtggcccgggccttccgagtttccatgagtaagctaaagacgttaggaaacagagcagggtggttgaacgggagtgcagcacggttgtgggggcagatactg

SEQ ID NO: 197509 - DNA, 122 bp, Homo sapiens
ttctttgtggtctgtcatccaaaatgtgtcattgttacccacaagcttacaaaatggttgcggcagcaccatctgtggtatagaatttccagataggacatagaggaaagaggggaaagcaa

SEQ ID NO: 197510 - DNA, 122 bp, Homo sapiens
actccagggcagcagccagactggcatatgtagggctctccggttactttctctgtatgtcgcgggtgagaggaacagcgaggacaatttagcgcaaacacacgaagggtcggatctcaagg

SEQ ID NO: 197511 - DNA, 122 bp, Homo sapiens
ggcggcctagctcggcgccaagccagattccgaaatgcaaggggctgcctgcggctaaatcgccaagagcaaggggggacttaccctactacaagatcctgctcccaaccgctggggcgcgg

SEQ ID NO: 197512 - DNA, 122 bp, Homo sapiens
acgttttaaggtttttaactttaggcggacaagtcactacagatcagctgaaattgctttcggtcctgactactcctgtgcggggttaagacctaaggaagcaaaagggcagccagcaacag

SEQ ID NO: 197513 - DNA, 122 bp, Homo sapiens
acctttgggaccaaggctggtgtggcagggctcaggttctgtcactggggcccaaagccccgaggcagggacagctagcggtctgtggagacaagactgtccccttcccgcctccccgcatt

SEQ ID NO: 197514 - DNA, 122 bp, Homo sapiens
taggccagttaataaccctacgatgggctcttaagtgttccagagaaaggaacaggcgcacgtctctcacgttaaagaaaagccaaaaatgattcagttcagtgaggaaagcgcgtcagaag

SEQ ID NO: 197515 - DNA, 122 bp, Homo sapiens
gagaagctcccgcggtactacaagaacatcggtctgggcttcaagacacccaaggaggtgcggggaacctcagaagaaagaaggggaacctggcgttcctgcacgtgtgcccacgacgagtt

SEQ ID NO: 197516 - DNA, 122 bp, Homo sapiens
acggtgcaggcctggtagggttttattctattcacagtgggaagaagggagtgtcaaaatcggatttacattttgtaaagattatttctgccaggtggagaatgtaccttagagcagcggtc

SEQ ID NO: 197517 - DNA, 122 bp, Homo sapiens
ccatgaaacatgttaaaatgcaaatttctgcccagcctgcaaggattctttttcaggaaacgattctgatggattcattctaaagattaaatctaaggaatcgtgagatgctgttgtaaatt

SEQ ID NO: 197518 - DNA, 122 bp, Homo sapiens
ccttcccctcccctccccaggggaggctctggggctgaatattttctgtcttgaataacacgggaccggggaaccgacgctggagaagggggattagccggaggccggagcggggtgctcgc

SEQ ID NO: 197519 - DNA, 122 bp, Homo sapiens
atccagagcacttgcgtccaccacttgccctcagtggctgctgctcgtctgagactgcagcgccctgggtccgcgcaggcgcattccacaccgacgcaggtccgtcctccaagtgcgcatgc

SEQ ID NO: 197520 - DNA, 122 bp, Homo sapiens
ccagtagagacataaaagtacaaaagataattggacgtttagtagagtcctgaaagggggcgggataggaagatacctaaccataagaaaaaccagcaagagcggaaaaggagctagtcctc

SEQ ID NO: 197521 - DNA, 122 bp, Homo sapiens
caagagcaaagtcacacagcctgtgatgatggggatatctgtcttgaacctgaacttgtacggaggggtcattaggccagcaggtgtgcaaaccctgcaggtggatgcatctgcaaaggatt

SEQ ID NO: 197522 - DNA, 122 bp, Homo sapiens
atggaggtaggttgtgtggctcagttccgggacagttgttagctatgattatggccatcccggatgaattatttacctttatcatcctgagcttcctcatctgtaaaatgaagctaataata

SEQ ID NO: 197523 - DNA, 122 bp, Homo sapiens
aactggcgctttcctcagaccttgactcacagcaaatccccttatgccaggcctattttacgaagctaaatagaaaccatcaaatcgaaattccatcagcttccgtttgccaaacttttaaa

SEQ ID NO: 197524 - DNA, 122 bp, Homo sapiens
tgacattatggattttggtttagagtttaggcatttaaaagacactggaccctacgtctgcgacagagcaattagcgaacacaggtgatgagtactgaacaacttgagtaaatgattccttg

SEQ ID NO: 197525 - DNA, 122 bp, Homo sapiens
gtgagggccaggacagaaggccggcgtgggcagatggcgaaggctgcgaagggtaatgagcgcttcctgaggactctcagaaggcgggggtggctgggtgttttggctcacgcctgtaatcc

SEQ ID NO: 197526 - DNA, 122 bp, Homo sapiens
aaaaaagcccagcctggggtttcagggcccgaagccactagagcggctctccaaggctctcgagaaagtcctagtgtttacatggcgaagtgggggtggggagaggaggaaggggggtgcag

SEQ ID NO: 197527 - DNA, 122 bp, Homo sapiens
taatcccagctctgcttggccagggtggaatcttgagggagttcagctctaacattctaccgttccatgatttaattttaattttaattttaatttttcacctcttccctccctgggccttc

SEQ ID NO: 197528 - DNA, 122 bp, Homo sapiens
cgactcagggtgtaattgaagggtcatttaatctagacgcaaggtgaaagaaaacaggcccgggggtgtggcatacctaaggaggaactagagcatcttttcactaggtttgcctgtcattt

SEQ ID NO: 197529 - DNA, 122 bp, Homo sapiens
tctgaaacagtgcttcaaaaaagactgtttccccgcattgtgtgaaatgcaggagacccacgtacttgtatttttaaaaaacccatttgcaacatactattaaagttggatttaagagaaca

SEQ ID NO: 197530 - DNA, 122 bp, Homo sapiens
ccggccactgccagggcggccctgtgatgagctacatgggacacaagaggcagccccaggcgcccgcctccacctctaccagcagcgtcttcgctttcacttctgccttctgcggcgtcttc

SEQ ID NO: 197531 - DNA, 122 bp, Homo sapiens
ggcccggcccccaggggtctctcgagcgtctgccatctgcccggtgaggatctgtgtgtccgggtgtctggggctggctggtggagggggggtgtgtctgtaagcgctgcggcggcggaggg

SEQ ID NO: 197532 - DNA, 122 bp, Homo sapiens
atgcctcaaggagcagcagctccgggtatctgatgatatgacagaatgacagctgttgaccggagagcttaatctgtacctatttacaggtagagatgtctgtaataagttaaaggaaattg

SEQ ID NO: 197533 - DNA, 122 bp, Homo sapiens
caagcggcaagacataaatattggaacctgggttcctccgccctacggagatggtgacgccggatgcgcgaggcagttgcctggcaaccctgctgccggcacccacgcaggcccagccctgc

SEQ ID NO: 197534 - DNA, 122 bp, Homo sapiens
tgcacaccggaaactcaaagcacgactctatactgtacttttgtaatgtacaatgattgccgtggagagcagcgatggagatgttagtcctctttccttctccatcccccttgccctggtgc

SEQ ID NO: 197535 - DNA, 122 bp, Homo sapiens
tctcgatccagaccccaagagggttcttggatcttgttcaggaaggaatttaagatgtgtcgcagagtgcagtgaaagatgcaagtttattagaagctacaccattagtgagcaggaggccc

SEQ ID NO: 197536 - DNA, 122 bp, Homo sapiens
tcttgctgtcactgaacatagtcttctttgctttagagtctgagaatctgaccattctgtcggaggcattagaaccagagtgattccttcttgaatgtagcaagggctgggtaaaataaggc

SEQ ID NO: 197537 - DNA, 122 bp, Homo sapiens
gatttgtgctgctcggttgtggggaattgtaaggcaggaagggctggcggagctaagatccgacaggctctcttcgccggactgttctgttattcattgcttctgggctcttcaggcagaga

SEQ ID NO: 197538 - DNA, 122 bp, Homo sapiens
tccactattgggctggtttccttaaagtactgttgtgcggttctggtatacccttagagccgcgatccacaaagcccgtaccgccttattcagctgccctcccctcaggatctccaacctct

SEQ ID NO: 197539 - DNA, 122 bp, Homo sapiens
ttaattttaagggttgcagagggatgaagctccatattctatagcttcttcaagctgaatcggggtggtgatacttctttctattaggtctcttgtattcagagtagggaggaattcagtca

SEQ ID NO: 197540 - DNA, 122 bp, Homo sapiens
tttcagatattctatatctttactaatgttcatgttcagatttccccatcagtatttccccgtcagtatttctcttacctgttagtagataaaatagatcaagcaatcagtctcccattata

SEQ ID NO: 197541 - DNA, 122 bp, Homo sapiens
taagacacagagctacgtaaccaagactgtgtaatttggcagaaggatagtcacacaggtcggtggaacagcacagagaacccagaaacaaacccataccaacatgcccaactgtttttgac

SEQ ID NO: 197542 - DNA, 122 bp, Homo sapiens
gggaaggggtagagggggcggcgggggtcgctccaaagacttgtatttcgcgtttgcctccgggagctgggagtaaggccttggatggcgccgacgcggttgcgaggaagctgaggcctggg

SEQ ID NO: 197543 - DNA, 122 bp, Homo sapiens
tagctagcgaattgcactcagatggtggcaattgagggaagggggctgaactgccgagggcgccggcctgagttcaagccctgccacccccaggttggctgacactcctgggcaaggtgttt

SEQ ID NO: 197544 - DNA, 122 bp, Homo sapiens
tccctctcactctcccaaccccatagagccccatcctgcacctggccagattctactttgcgcctcagagtaaacgtggtgattttctcaaggagactttctcagaccccaccccagactag

SEQ ID NO: 197545 - DNA, 122 bp, Homo sapiens
cccaccagtcgggtgcagcgcagccaccgcccgccgtcaccccaccgagcccgagcatgccgggaattgtagtcctgcctttgttaaccgggttctggcaggttgctaatgcctttcccggt

SEQ ID NO: 197546 - DNA, 122 bp, Homo sapiens
gcgctccggcgcggcagcctgcgaggccagggccgagcgcgcggagccgaatgctgggctcggggatccgcggccgccgcctctaatccgcccttaagtagtctccgcctgcgtcacgccag

SEQ ID NO: 197547 - DNA, 122 bp, Homo sapiens
ccccagctgaactgaagctcaccgagccttcgtgcgccatcgccaacgcggtcgcagcaacgctggtgtttctgctgcatccgggccgcgtaagccacctaacagtcgcctgggcaaccacg

SEQ ID NO: 197548 - DNA, 122 bp, Homo sapiens
gagccacagttgagaagcggaggggccagctgtgcatggagccatttggatggcggcgggcggggggggattctctgtatcaggagtgactttgttgccccacacagcctcctgctgcaggt

SEQ ID NO: 197549 - DNA, 122 bp, Homo sapiens
gaggtgtggagggagaagcacgggcaggagtcagggctgtgcgcggcgctcgcaggcgctcgcactcagagcagctggcccgaggcaatgagggacttggcacccgggccagcagctgtgga

SEQ ID NO: 197550 - DNA, 122 bp, Homo sapiens
tctgagagaatctcagagccctggaaaactgaggatccacaggcagatgcagcgggtcagcgatgcctttctgaggctagttgtcctaaggttgtttctaaacatttttaatgaaacagatg

SEQ ID NO: 197551 - DNA, 122 bp, Homo sapiens
catttacctgggctgaaacgacagcaataggcagctgtagaaggacacggggcagctcagcgtggagacgccgcacatttcaacctgacagttgaggctgtgcaaacagaaggtagtcagga

SEQ ID NO: 197552 - DNA, 122 bp, Homo sapiens
ccaggtgggcaccaagtcacagccacaggccagtccgtggggtgacagggtccctcagggcggctcagggagggggactgtggaggccaggatggatggagcaggcggtggcgagaggcagc

SEQ ID NO: 197553 - DNA, 122 bp, Homo sapiens
acgtgggggttccagataagacagctgagattcggaagggcaggcgactccacctagtcacggggacgctctttttgacgctccagggaccgcagggtctgggaaagttcctggttactccg

SEQ ID NO: 197554 - DNA, 122 bp, Homo sapiens
tacgggctaagcgcccggccccggggccgcggatccggcagccatgtgtggatcttgaagcgccatgtggtcttctgaagcgcttgacagttctaaagggctttatattgcaaactgatcaa

SEQ ID NO: 197555 - DNA, 122 bp, Homo sapiens
ccagaaggagcacggggaagggcagccagatcttgtcgcccatccctgctggggcgatcccgggctgaaagaggcgtcaggtactgttgtctccgctccgcgtttcctctctggactcctcg

SEQ ID NO: 197556 - DNA, 122 bp, Homo sapiens
actcaagggttaagcctaggcctggcttttcactgtccagagggcgggctactcctttggcgcattgggagcccagagtctggttttgagtctaggatgccaaatcataatgcagtgctcca

SEQ ID NO: 197557 - DNA, 122 bp, Homo sapiens
gcagctcggccctcggtcccctccgctgcaagatggcggccaggccggcagccgggaccccgcgtgtcctgtcccatcccgaccccgcagagcgacctcgtccctggccggagccctctctg

SEQ ID NO: 197558 - DNA, 122 bp, Homo sapiens
gcccttgcttctgcgcctgtgcggaagcgcccggccctcacctgcgcaggtgagctgggtcgtctgagagggaaatggggtttcacaccaccctgctaaccaggcaaagatgacattcgtgt

SEQ ID NO: 197559 - DNA, 122 bp, Homo sapiens
tcccctggccgcgaacgcgctctgggcgggggcggggccagggccgaaccgagggtgtggcgttcgcgacggtcgccaggggcgcctcccggcgcggcggggcgggtgcagtcacgacgccg

SEQ ID NO: 197560 - DNA, 122 bp, Homo sapiens
ctcttgtaggtttgaaagtaattgcatatggctcaaccggaaaggttgagaggaaaatggcgagagttaaaactggaggggtgaactggagataattattaagccctgcattttatgttaag

SEQ ID NO: 197561 - DNA, 122 bp, Homo sapiens
tctgggcctcagtttcctcatctctaaaatgggggcaattgtcctgcaggcatgggaaggcgctctcagccacacagcaagactttggacatccctgtctgcccccttccccaccccacccc

SEQ ID NO: 197562 - DNA, 122 bp, Homo sapiens
gggagagcctcgctcagggaagaaggtcccagctgccctcgccctcgcccgctcaggccacgtccttctcgactgccctgctgcggccaggccctcccctgccaccaggtggaactggagct

SEQ ID NO: 197563 - DNA, 122 bp, Homo sapiens
ctctgcgttagtgagaagcagtggtcagggaggacccggctctggggtgagggtctggggcggcgcggccgagggacctgcgtgggtgcgggcgtgtgagtgtgtgtgtgtgagtgtgtgtc

SEQ ID NO: 197564 - DNA, 122 bp, Homo sapiens
catctcacttaccgctctccaccttaaatttctcatgccgccccttcaggccatcgatctcggattgctgatcagcaaggaacttttcaagtttgttctggacagacttgggcagcttgttc

SEQ ID NO: 197565 - DNA, 122 bp, Homo sapiens
cagagccatggaattctcctggctggagacgcgctgggcgcggcccttttacctggcgttcgtgttctgcctggccctggggctgctgcaggccattaagctgtacctgcggaggcagcggc

SEQ ID NO: 197566 - DNA, 122 bp, Homo sapiens
ccagctccccatgcgtgttgtaattcactgtcatgaccttcacggagtccttgaacaccacgttcccctggctcagatattgcagggtgcggcggatggggaagcggcccttcatgggcatg

SEQ ID NO: 197567 - DNA, 122 bp, Homo sapiens
tcaatgtagcagagcataacatttgggtacacagggaaaatggatgtagtgtaggcttgacgatttttaacactgatgaaaaggggatattaggaagccactatccatctttacttctgtat

SEQ ID NO: 197568 - DNA, 122 bp, Homo sapiens
acatacccagctttcatatttacaaacaacaacctcttagaaatagaggtctcagccaggcgctgcggcttacacctgtaatcccagcactttgaggggacgagggtggccaatcacttgag

SEQ ID NO: 197569 - DNA, 122 bp, Homo sapiens
gcaggaagctaaagaactggcgccagaaaaccactcccaggatgcctacttttcatgctgcgtgttttcatgtcaatacctcttcctgtggctttaagattggaactatttaaaaaatgtca

SEQ ID NO: 197570 - DNA, 122 bp, Homo sapiens
ccgaggagggcggcccccggctcccgtccccactcacctgccgcgtccggagggcgcccccgggtccgcccgccacgtctacgcctaggcgcccccgacattgtgatcccagcccggcgtcc

SEQ ID NO: 197571 - DNA, 122 bp, Homo sapiens
gttttccctaggaaggcggggagtaccaaaatcagttactggctgaagcttaggtgaccccggggaccttaagccctgaaggtgcgctccaggggagtgagaggttcctgcgcttagaaaag

SEQ ID NO: 197572 - DNA, 122 bp, Homo sapiens
taggcgctgaaacgcttgctctctctcagcatcgcccggtacagagataacacttgtgcgcgactggaggctgccattttggaaagaaaaaaaaataaacgggtcctcttcgccgaggtccc

SEQ ID NO: 197573 - DNA, 122 bp, Homo sapiens
cctcagcccgagcccggcgaggtctctgggctcctggagcgaggtgagcgccccaggccgcggtcctgcctacgccgggacagccatggcgactgggtcctgctccttcccggccggactga

SEQ ID NO: 197574 - DNA, 122 bp, Homo sapiens
ttgcaggccgggcacagtggctcatgcctgtaatcccagcactttgggaagccgagggggcggatcaggagtttgaggacagcctggctgacatggcaaagccccatctctactgaaaatac

SEQ ID NO: 197575 - DNA, 122 bp, Homo sapiens
cggccccaagcgagtccccggggactggagggccgaggggcagcgcccggaacaaaggcccgcagaggggtcctggagacagcggctccccgggggcggctcccctctctcccctctctccc

SEQ ID NO: 197576 - DNA, 122 bp, Homo sapiens
taattttctttgaccttagtctcttaagttggagaaggaaagctttctaagaagtgatctcgatccagttcttagatcagtgggacatacaggtctatggtggtcacctatggtcaccttca

SEQ ID NO: 197577 - DNA, 122 bp, Homo sapiens
aaacaggaatcaacataatgtctagtccttgccttacaaaaaggggttaacaactcaaaacgtgggccaaaatcttacaaaaccccaataatcattaaatagctccaaacagccaatacttg

SEQ ID NO: 197578 - DNA, 122 bp, Homo sapiens
actcaggatctctgacctagggagaaaaaccagctcttcctgctcagaaggtctctgagacgtgggaagtcccctctgatgccctaactgaccacactggggaatgcagagaaccccctggg

SEQ ID NO: 197579 - DNA, 122 bp, Homo sapiens
tctgccccatccttggggctctctcatggaattcacaaagcccctgaaattagtcattcacgtctctcaacacacagcaacatagatacggagccataaagtaagaagaaaaacacagtcag

SEQ ID NO: 197580 - DNA, 122 bp, Homo sapiens
cccgcgctgctcggagagctctgcgctgttctggacagctgcgacggcgcgctgggctggcgcggcctgggtgagtcggcggggaccggccgggggcggcgggggagcccagcgcgccgcgg

SEQ ID NO: 197581 - DNA, 122 bp, Homo sapiens
caagaggccgggagcgccagagaccgggcttgacttggctggctgctcgcgtccagcgaacggaagaattctaaaaacagtgagatagaccggacacagtggcttacgcctgtaatcccaga

SEQ ID NO: 197582 - DNA, 122 bp, Homo sapiens
gtagacttattattgtttttcattttctactaaaagtttattttcccatgtgctgtttttcggtgtgtatgcattgttaactgcatttccaccatgttgcataaggaacatttgcaatttgg

SEQ ID NO: 197583 - DNA, 122 bp, Homo sapiens
tccagaacccgtcacatgataattaagaaaaaacttcagttccgcctcctcaaacgactgcggtagaggatctctcagttctacctcagtgccgcgcccacatccggggctggttctcaccg

SEQ ID NO: 197584 - DNA, 122 bp, Homo sapiens
gtacaaagggaaaacggtggagcccaaccagctaatcgcagcatatgtaatagacactcacgttaggactccagggcctgcatacagcggtcgagagacaatatcacccagtggagatctgc

SEQ ID NO: 197585 - DNA, 122 bp, Homo sapiens
cgatcttgcacagctgagtggagccagatgagcaagttcctgacacagcccttggcagggcgggcttcctccctgctctttgatctgaatcctcccgagggatatttgcacttaagcggaat

SEQ ID NO: 197586 - DNA, 122 bp, Homo sapiens
ggaattgcctctgtctgaggctgctggcagttccttttccttgagaggaagtgatgcccccgctgagccttgtttagttctgcgtcacgtcgaggtgtctggccttgggttgaaaaccctgc

SEQ ID NO: 197587 - DNA, 122 bp, Homo sapiens
agactcccacgcctctgcccgactcccgggcttgcgcgcgcggctgcagcgcgacaggggcggggccacggccacaaagcagcccccgagaccacgtggcctccgagcagctcagggcgccc

SEQ ID NO: 197588 - DNA, 122 bp, Homo sapiens
gctctccgcgggtcaagtggactttcctgtcccggggccgggaggcagaggtgctggtggcgcggggagtgcgcgtcaaggtgaacgaggcctaccggttccgcgtggcactgcctgcgtac

SEQ ID NO: 197589 - DNA, 122 bp, Homo sapiens
tacttatttttggaaaccctaaagtggctgagcatcaagtggttgtgttttctctgaaaacgccagtattagtcataacctttttccaaagtatcatcccttaaagatgttcagaaccttgt

SEQ ID NO: 197590 - DNA, 122 bp, Homo sapiens
ctatttccatggggagcccatccctgtgaccgtgactgtcaccaataacacagagaagaccgtgaagaagattaaagcattcggtaggaccttcttctcagaagtagagggcatagtcttct

SEQ ID NO: 197591 - DNA, 122 bp, Homo sapiens
cggaacgtgaccaggtgccgccgcaccagctcggggtgtgcgtcgctgcggcaggccaggcgcagccactcctgcagcactgtggtgtaggccactttctgcatgcgagtcaggtgggagag

SEQ ID NO: 197592 - DNA, 122 bp, Homo sapiens
gtctggtcatagtctttgtgattgtaattttaacgacttgctcttcatttctgatcttgacgttaataagactctcccaactccagtggctcccctgtcccttctcctttccagtcactgct

SEQ ID NO: 197593 - DNA, 122 bp, Homo sapiens
cactcctaaatacctggcccacagacactgtgagataataaatgcttggcttttcttaagcgacttaacttgaatcagcaataagtaatctatattcgttcaagcaataatcattgatctgt

SEQ ID NO: 197594 - DNA, 122 bp, Homo sapiens
tgagcatcgccgacctggcctacctgctcttctgcatccccttccaggccaccgtgtacgcgctgcccacctgggtgctgggcgccttcatctgcaagttcatccactacttcttcaccgtg

SEQ ID NO: 197595 - DNA, 122 bp, Homo sapiens
aggattgaagtggccccgcctcccgctccgcccccccccacctggggggccctgcgcccccgccaccaacctctggatctagcccgcgtgtgggtccaggcttctctggggaccgagatagc

SEQ ID NO: 197596 - DNA, 122 bp, Homo sapiens
tcagtatgccgggagtacagggtcactatttggtgaacggatgaaatcaaatctgatcttcgtaggcctctcagactgcctaccattcactcttttgaatctgacggcttcacacatttgac

SEQ ID NO: 197597 - DNA, 122 bp, Homo sapiens
gcggcgacacgcgctggtagagcggcggcggagggggcggctgcggcggcgggtacgaggcgccgggggacggtggcggtggaggcggcggcggctgctggggaggcggagggggcggcggc

SEQ ID NO: 197598 - DNA, 122 bp, Homo sapiens
ctcgaccccagcccacagctaacttcccgagctctctgagaaccacagcagtcgaggtaacgtctttggcagctcctctcctccccgcccccagtctctgcacagtgccctgtcaccccagg

SEQ ID NO: 197599 - DNA, 122 bp, Homo sapiens
ttccaggtgccatccgtcacccctttctttgactaggaaagggaactccctgaccccttgcgcttcccgagtgaggcagtgcctcaccctgctttgctcgcgcatggtgcgtgcagccactg

SEQ ID NO: 197600 - DNA, 122 bp, Homo sapiens
ctgcggtggcattggggactgccccggccgagggccccgctggagacacagagggcatgacggcagccagcacaccccaggcctggaagcaaggagaccaggtcaccccaggcgccagcctg

SEQ ID NO: 197601 - DNA, 122 bp, Homo sapiens
atcccctgagatctcgggtgttcgcgtgttgtttggaattctgtgagggttacgggctatcgcttcacaccagcccagcattttctccttcctcttatcccttttcaatttctgaaattctg

SEQ ID NO: 197602 - DNA, 122 bp, Homo sapiens
taggtctggcctggcccactggcttctgacagggtggcttttattttggaagtgtgaggacgcactggacggtcgccacatggggatttctggttgaacagttttcagagaatgaaatcagt

SEQ ID NO: 197603 - DNA, 122 bp, Homo sapiens
atgcagtcgccggatcgcctttgagtctcgtgaggtacttttggtcccaggctccgcggacgaggtactgcgcaggcgtgggagggtctgcgcatgcgcagaagcactccgggcgtgctgcc

SEQ ID NO: 197604 - DNA, 122 bp, Homo sapiens
cagccagtcatgtggtccctacctagagtcagatttaagggcaaacagatcatttccctccgcccacatgattccatcaccaaacaatcagcagtacttattttttagtcctgtgctcctga

SEQ ID NO: 197605 - DNA, 122 bp, Homo sapiens
cagcgcaggcagatgccggttccggggcttggagaacgtggctcggtggcacagagccgccgggcgaggcgggggcagggaggcgggcgacgggattggctggaggcggggcagcggggctc

SEQ ID NO: 197606 - DNA, 122 bp, Homo sapiens
atttgaaaactctatatttgaggacgctgccaggtgtcttaacaaagagccgcacctcggcgtgtcatccacatgagagagttggcagtcggagccaagagaaggacatttcatcccgaggg

SEQ ID NO: 197607 - DNA, 122 bp, Homo sapiens
agcccgcgcgtgtatacccgctcaacgctgggacgttacagccagggccaatgggcagagcgggactcgaggccccgcccccgccttgtggcgtcacggggacgccgggggcgcgcgggctg

SEQ ID NO: 197608 - DNA, 122 bp, Homo sapiens
agtggctgccgtcaatcactcggggagactccaaacagtgagcctagagctggagactagcgttaaccggcggggcggccggtgagagggctggcagggctttggctttggggaggcttggg

SEQ ID NO: 197609 - DNA, 122 bp, Homo sapiens
ccaaccgtgttagaaacatccaaccataaagaagctttctaaggaagccctttgaattaacgtatccactttttctcacccgcccgtgccccacccccagccatgccaaaggagcagcaaat

SEQ ID NO: 197610 - DNA, 122 bp, Homo sapiens
caaataccactctaaaatgattgttgccactggcatttttgtgaattcccttccgctcaacgtcaccccagcagagctaggctctaacttgccaagtaccaagctggggcttgggttttggg

SEQ ID NO: 197611 - DNA, 122 bp, Homo sapiens
tgtgtacacgtctgcattaacctgtgtgacgctggtgtttgtacccaagtgaacctcacccgatggcttccatcctttccaccttcctcaccggcttttgagctccctcaggcatccctgac

SEQ ID NO: 197612 - DNA, 122 bp, Homo sapiens
cacaggcaaaggccctggggcaggacagcacggatgtgtccatggaacatgggacagccacggccttcacagctgctatgcctgtggtgtcggctctagttccagggcaaaggatggaaaga

SEQ ID NO: 197613 - DNA, 122 bp, Homo sapiens
agacaaactgaactttaagcgccaggggccccatattttgtctgctctacagatcccacccgcgggccacaccctcccttcactcccgtctctgggtcccacccataataacccgtaatgac

SEQ ID NO: 197614 - DNA, 122 bp, Homo sapiens
catagaggattcttcagaaaccatgtgagctgcaagtgtcccagattccagggatgggggcgtgctcagaccagccacgcggctgtggctgtgaccgtgtgcccattcacaccaccccctcg

SEQ ID NO: 197615 - DNA, 122 bp, Homo sapiens
tcggagagggagccggggaaggccagcaggcagggttggctggcaagggggcctcctacccggagtgttggagaggagagtggctgggtcccggctcgctccatgcactttctctccttttc

SEQ ID NO: 197616 - DNA, 122 bp, Homo sapiens
cgggctgcactggagcacgtgggaaggctttttttcctgttccttctttccctttttaaacgcccacccacttttgcgcgggctcggccgcggaatttttctcgcgagaggcgcgctgccct

SEQ ID NO: 197617 - DNA, 122 bp, Homo sapiens
tgccagcgggccgaagagtcgggagccggagccgggagagcgaaaggagaggggacctggcggggcacttaggagccaaccgaggagcaggagcacggactcccactgtggaaaggaggacc

SEQ ID NO: 197618 - DNA, 122 bp, Homo sapiens
ccgcctgctttccttggcagagcccagccctgtgttgtaggtggttggactgttgggtcccgctgacgtcatctggtgggttccttccaggtccccgcggagccccccacgcttgtgtgagg

SEQ ID NO: 197619 - DNA, 122 bp, Homo sapiens
caacaggaaccgggagcggggtcccgggactgggaagaaacggcggccgggagggggctccggggaccatggggctcctgaccattctgaagaagatgaagcagaaagagcgggagctgcga

SEQ ID NO: 197620 - DNA, 122 bp, Homo sapiens
gggagcgggcgggagtcatgcagcggccttgagcactaggggccggcgctgaggagcgcgcgcggcgggagggcagccgagcatggagctgagcctggagagcctggggggcctgcacagcg

SEQ ID NO: 197621 - DNA, 122 bp, Homo sapiens
tctttgcagagtgggcaagtaggggactcctccaggtctgggcctggtatctcacagtagcgggtaaggcaggcccggcagaagttgtggccgcagtcgatagtgaccggctccctcagggt

SEQ ID NO: 197622 - DNA, 122 bp, Homo sapiens
ggatgccgctctggcagccccggcggtttggccaacatccctccgcgcccggcccaaccccgggactgcatttttaacccttgtttgggatgctgcatttttaacccctggagagctgggct

SEQ ID NO: 197623 - DNA, 122 bp, Homo sapiens
cggtgccctgctctcctctgggcgccaggatgttcctgcccagtgcgtgtccagaatagccgctcagacaccggctccaggttcagccaggcggggcgcgtccctgcctccctcccctttgc

SEQ ID NO: 197624 - DNA, 122 bp, Homo sapiens
cggggggcgtgggtgcgggtcctggggctcccggagtggcccctgggggtgaccaaggtgcggtcgcagggcgcccgcaggaaaagcgccccagctgaaccggtccggcgggcgccgcaggg

SEQ ID NO: 197625 - DNA, 122 bp, Homo sapiens
gagtatagagctgggactaggagctcccgactgcagccctcactgcctgggcactgaggacgggatcccagctccccttctcatccccgatccccaatcccctgtactcactgtctgggtca

SEQ ID NO: 197626 - DNA, 122 bp, Homo sapiens
ctgagagcgcgaggcttcgggactgagccctagctgctgcgctggccgaagttttctcgtcggtaaaataggataacagtgcaccatagggtcgttttgataaagaagaaaggtagggcact

SEQ ID NO: 197627 - DNA, 122 bp, Homo sapiens
tttatcccacatagactacttcctcttagctgcagttgaaaatgaaggcttgaattcctgcgttataatcatctagccttccatgaactcctaccatgatggggaactcattattaactaag

SEQ ID NO: 197628 - DNA, 122 bp, Homo sapiens
tactgcagcaatggcccatgacaatcatgctttcctgtacccacaccctcctgtggtccccgccaaaaggaatctggcttggcctcttgacttgctacagccaataggacattagcaaatat

SEQ ID NO: 197629 - DNA, 122 bp, Homo sapiens
ggagccttctgaaacctattaaagtgtaatattaaaaacctcttggctgggggcctctctcgccttccatccgccgcgccccctccagggagggcgagaccgggaaaaaaataaaatctgtt

SEQ ID NO: 197630 - DNA, 122 bp, Homo sapiens
gtatgagtgagttttccctatgggacagcatagcagtttctcatcctacagtttccaattcgtgaatggctttactttaacaaaatgacagataatgagagggaaagtagtgtttgaatgct

SEQ ID NO: 197631 - DNA, 122 bp, Homo sapiens
cgcggcgcaggaactactggaggcccgagtagttgggctgctcatagagcacccagcagccgctgtccacgcgcaccgagttgcagcggctcaagtagggctgcaggttggggtggtcgctg

SEQ ID NO: 197632 - DNA, 122 bp, Homo sapiens
aggaaggaatgggacctcctgaggaagggcacagaactgtcctgtaaatggaaactagaccggacgcacgccaagccgatgacccacagtaacaggtgttctccatctctgatgtctgtgat

SEQ ID NO: 197633 - DNA, 122 bp, Homo sapiens
cctccccattcccaggcagagatgagcacagggcacctgcattcctacgtgtgaatcatccgtgtgaatcactaaacagtggagagttgcacttggtcataaatcacacgtgactgcagcca

SEQ ID NO: 197634 - DNA, 122 bp, Homo sapiens
gaatttactgatgtagtaacaacaaaaggtacaataaggtctacttcataacacattgaacgctgtatattcataagctgagaagcagagctaagaatgaggcaagtcaagtgactaaagca

SEQ ID NO: 197635 - DNA, 122 bp, Homo sapiens
ccttctctaccttcagtcgggaatcaatggtctggtcgcagattggtgacatcattggcgcgccgggcgtgggaggaagaaccacgtgattcaacctcttttgtttgcgctctaggaaatta

SEQ ID NO: 197636 - DNA, 122 bp, Homo sapiens
aacccatgtaataacccgaagtattctccacagaagccccagctctgcaggaggccacggcgtttggcttcttcgtgtggccacacacctttccgttgttgtacaggtggggactgagagcc

SEQ ID NO: 197637 - DNA, 122 bp, Homo sapiens
catgttgaatctgagatgattggaaattatgcagttcggtttagactgtatggtgtacatcgcatgaaaaaagaaaagattgtgggggaaaagattttttatttaacaaaattgaatcttca

SEQ ID NO: 197638 - DNA, 122 bp, Homo sapiens
gcatggcgaggcctgggggcggggcgcggagcttgacccgcagctggcgccgctgcagcgcggcctggcgcccatcctgggctaccggctgccaccagacctggaccaggccacccgccgcc

SEQ ID NO: 197639 - DNA, 122 bp, Homo sapiens
ttgcttctctggctatttccttatctataaaatgagtgggctagtttaggccgactgagacgcagacagggatacggtactgtccatggacctctgagctgccctttccacatcgctggtga

SEQ ID NO: 197640 - DNA, 122 bp, Homo sapiens
tcaccctgctcctgcagggctggttaaactcggggtccactgcatcacgggtcagaaggtcgccatcaagatcgtgaaccgggagaagctgtcggagtcggtgctgatgaaggtgtgtgcgc

SEQ ID NO: 197641 - DNA, 122 bp, Homo sapiens
tgaaggggtctgacaggcgccaggccagaatcctggataactggcaccccaatgaccactcggctgtctctggaaacttctccatgggtctggaccccctgctcacctccggggtatgtgtt

SEQ ID NO: 197642 - DNA, 122 bp, Homo sapiens
gcctatccggagcgatccatctcgttacgtcaccaccagcctagctcggacggcaagcggcgggagattttcaaaatgggagcccagaggcaccgcccaggcctcggaaggtgtcagggaga

SEQ ID NO: 197643 - DNA, 122 bp, Homo sapiens
cagcagcagcaacaatatagacacatgcaaaacacaaagcagccagctaccagccacctccgaattgtatccaaatgaactgctactcatacctccacttcctgggccccatttctctgatt

SEQ ID NO: 197644 - DNA, 122 bp, Homo sapiens
tttattttctcagggccttctctgggaggggttcctaacacacccatcctgatctggaatcgcagtccagctcacaggttaaccaaatgatctttaaggtaaatgtcattcttattgtaagt

SEQ ID NO: 197645 - DNA, 122 bp, Homo sapiens
cccggctatttcaagaattccagaaaaagagtgcaccggcgtgtgcgggccggtgctgcccggaaaacccgtgaagcaggcacgcacggcccggatgcaagcacatctgtcccctcccccaa

SEQ ID NO: 197646 - DNA, 122 bp, Homo sapiens
acagcctttccataggcatttctcttggctcagagccacatggacgtaacctagagccaccgagccacaagaaaatcttggaccagaagcagggggaggggacgctttgcacggtttttcct

SEQ ID NO: 197647 - DNA, 122 bp, Homo sapiens
aagatttggtttcaaaaccgccgaatgaaactcaagaagatgagccgagagaaccggatccgagaactgaccgccaacctcacgttttcttaggtctgaggccggtctgaggccggtcagag

SEQ ID NO: 197648 - DNA, 122 bp, Homo sapiens
gccaatgccgcaaagactgctggtgaggccagatgcatgagtgatcatactcacaacagtcgtgaaactgccagtgatgaaactggtaaggacaagaaatgacaataatcaaggtggggttt

SEQ ID NO: 197649 - DNA, 122 bp, Homo sapiens
cggcgatacggccaggcagcgtgcgttcctggcctgcctccccacgccctcccgccggcgcgggtcatgtggatgctgcccgcccattggctgggcccagccttggccgccggggtgcgcgt

SEQ ID NO: 197650 - DNA, 122 bp, Homo sapiens
gatgcttgaccagctcctcgggcctcacctcctggttcttcccctccgaaaagttggggacgcattccaccagctgggacatggccagcaccttgatccagatgctcctctctgggcagatg

SEQ ID NO: 197651 - DNA, 122 bp, Homo sapiens
acctgaacgacaagtactgggtgaagtcagagacgtaatggagaaaggagcccgaggcaccgattatgagtccctcaaggacatagtaaggactttttgactttcactctgagtgaattagg

SEQ ID NO: 197652 - DNA, 122 bp, Homo sapiens
cccagctagcaggaccaaccgcgccgccaggccggccatcctttctccctggctcgccgccgggggaggagcttaggagtatgaagcttccacttccggagtaaccggaagttcctgtgttc

SEQ ID NO: 197653 - DNA, 122 bp, Homo sapiens
aagaaaagaaatagatgtagtcagacagtggggaatcactccggtcctgagaagcaaaggcggtgctggggatgggaggatgcagacaggttccagagacactgaggggatcaacaggactc

SEQ ID NO: 197654 - DNA, 122 bp, Homo sapiens
atcacccaggcagagctggattgtccagtcgaggaagggaaggacagaggacagaggtgccggcatgcagcagtgttcacagggcttcaaaaataacccagaggggccgggccacgattctg

SEQ ID NO: 197655 - DNA, 122 bp, Homo sapiens
tttcagcagagctccggctgccgttcggggagttcaccgtgcaggcccgtccccagcggccgaattaactggttctgtctgtacgactgggagagcagctctcgctaaaaatagcgccctgc

SEQ ID NO: 197656 - DNA, 122 bp, Homo sapiens
acgcgctcacgtagacccaggtgccgtccctcacgtggagcctctcctctttattttagacgctgcggataactacccttttggaacatgtcaacagaggaaactttttcctcacttccatc

SEQ ID NO: 197657 - DNA, 122 bp, Homo sapiens
gcccaccgaaccagcccctcgaggcagccaccgggaattttcataagctcttctgatgagcgggaggataagtcagtcagggctggaaactcccggatcagagcaaacccagctcctcagca

SEQ ID NO: 197658 - DNA, 122 bp, Homo sapiens
gataagttgataagagcagccagacatgtgtagtgggctgctccgccctcctggcttagccgttatcttcctgtagggggtcactagccaggcaacaggaaaaatcagagcagaatgcctgc

SEQ ID NO: 197659 - DNA, 122 bp, Homo sapiens
tccaaaaccaattttacggactgtactactgatccacctgtcggggagaaagactctacccgcagtttgacgaaaatggtcgtttccagatgcttgtaggatttcctcgctaagctccaccc

SEQ ID NO: 197660 - DNA, 122 bp, Homo sapiens
caaagtttgtgttgggccctaatcttcgctgatataattttggctacagtatcagaaggccgatcagctgaagtaaccaaaatctggcctgaaagaaaacagatctgccatgaacagcagct

SEQ ID NO: 197661 - DNA, 122 bp, Homo sapiens
tatcatgctctccaagaaatttctcaatgtgagcagcagctacccacattcaggcggatccgagcttgtcttgcacgatcatcccattatctcgaccactgacaacctggagagaagttcac

SEQ ID NO: 197662 - DNA, 122 bp, Homo sapiens
tgcgttgggttttttttaattaactgcaaagcaggcgggccacgagggcaccgcttgggtcgtgccaccagatgagccaaatgagcaagatctccccgaagccagccccagcggaagagtct

SEQ ID NO: 197663 - DNA, 122 bp, Homo sapiens
ccaaggggacaccccggtgacccacaaaagcttagaaaatccaacacgcagcaaatgaaacgggggaaaggggcaccggccctcactctggcctcttagacacacgatatgaaaccttcata

SEQ ID NO: 197664 - DNA, 122 bp, Homo sapiens
ggtacagcatcgttctatgtgactgggtgcagcatcgccccatgtgactgggtgcagcatcgttccatgcgactgggtgcagcatcgttccatgcgactgggtgcagcattgccccatgtga

SEQ ID NO: 197665 - DNA, 122 bp, Homo sapiens
aaacccattatttatttatttttaagttacttccaacctcgctgcctcgagcttctgaatcgcctgggcaacctggaagccgcccatctaagggggtgaggtcgaatcccagccttgacgcc

SEQ ID NO: 197666 - DNA, 122 bp, Homo sapiens
cagcacgccgcagccgccggtaccgcagcagttgcctacgtggctggggaagcggggcgccggttgtactcacctcagctcagggtcctagagacctgcgggttttgctggtcgctgaggtc

SEQ ID NO: 197667 - DNA, 122 bp, Homo sapiens
tagtgatggattgtgtcacagccaagggatgccaataatggttttggggttcgtagacgccgatccagctgttacttgtttattcatgcaacacctctatatgcaacactgtcctggttcct

SEQ ID NO: 197668 - DNA, 122 bp, Homo sapiens
tcccgtttgcaactttccatcagcgcggaagctggcattctaccataagtgagcgctggccgtccccgttcagtgccttttgcacacgtgcatttgcgtacacgcatgtgggtgtgtctgtg

SEQ ID NO: 197669 - DNA, 122 bp, Homo sapiens
aatcatgataactgcctacatttggcccataaagtgcctagagtcatgtctcgctgcaaccgtctatatgtcatgctgttgtatgtaaactaagccatttggcaacccttattacaccacaa

SEQ ID NO: 197670 - DNA, 122 bp, Homo sapiens
ggacccaggcttcgtcacaccttcctccccccaagctccagagttctctctccgccccagcgggcctcctgccagtccccacgcctgaggcctcagaggccagcgcacaggaggcaggccgg

SEQ ID NO: 197671 - DNA, 122 bp, Homo sapiens
tgggccttcttccacagtcctgggctggaattcagtgtggctgcctgggttacttgtatgcgcccctgaaggaagggtccactccaggccgcctggtccctgcgaagtgtcacactgtgggt

SEQ ID NO: 197672 - DNA, 122 bp, Homo sapiens
cacctgtggacttttgggaaacctggcacagaatgatgagccagacaccaatgtgttttacggctcatcaaaatcaacataagtggaatatgttaggttggaccacagccttatgaattcag

SEQ ID NO: 197673 - DNA, 122 bp, Homo sapiens
taagaggctgtcacgggcagcgtatcgaatgtgaaagcaattaaagccaccagcagtgttcgctccgggcgggcctcgggcggcggggagctgccagaacacatctcacctcggtgcccgcg

SEQ ID NO: 197674 - DNA, 122 bp, Homo sapiens
aggcgggtagactttggaccagggccgaggcccgggacgtcacggtggggggtggggtctcgggaggcacgtgatgcgccgtgatgacgtcagtgggagcggaggcgatttggcctagagct

SEQ ID NO: 197675 - DNA, 122 bp, Homo sapiens
aagcaaaaggggtccgacggtactcaccatttggcaataggcattagtctcaccgcctggcgatgggcgatggtcccatctgggtggccaaaatgtgtctggaattggtgggttcttggtct

SEQ ID NO: 197676 - DNA, 122 bp, Homo sapiens
gcggccgagctacatgcgccactatgggtgatgaggtccatcagctgacaggttggcaagcgttgcaaaaaaaaaaaaaaaaaggccagccaccgcgcagggagcccagcccgtgcagcccg

SEQ ID NO: 197677 - DNA, 122 bp, Homo sapiens
gcctgggggcagtgtcagcgcccgctttgagaatgcctgccctgccctggtggccaccttcgtgcccagctgcccctgggagaccaatgataccctgttctcagtggtagcactgccgtggc

SEQ ID NO: 197678 - DNA, 122 bp, Homo sapiens
aaaggctttagccatggacaggtcagtactgatggtggcagctgagcccgaagtcttgcccgtctcgcctgttggcgaaacgaaataggtgaaactagactcccagaagaagccaaggaggt

SEQ ID NO: 197679 - DNA, 122 bp, Homo sapiens
cgctgacgcgggcgccgctgctgctggggcttccagcaatccggggccggagccggggcgcgctgcgcggggctccagtttcgccaaccccggtgctatttaaaggtgtcaggtggctcggc

SEQ ID NO: 197680 - DNA, 122 bp, Homo sapiens
tgctggactgttatgtaaaggacataaagattctgtgttaaggccaggcgcgatggctcacgcctgtaatcccagcactttgggaggccggaggaggcagatcacctgaggtcaggagttcg

SEQ ID NO: 197681 - DNA, 122 bp, Homo sapiens
agcctcggcgaagcatgctgggtgcgggcggaggcggcccctctgctcggctcactgaggcgccagccggtctccaagacgacggcgtgcaggctggttgccttggtgacggtggttgggct

SEQ ID NO: 197682 - DNA, 122 bp, Homo sapiens
gggctgaatgtccagacaggcagtgtagacatgggaaatgggtagagagaacccgcaggccggccctgtctagagggtctgggtggagtcagaaccggcctgactccatccatccccacatg

SEQ ID NO: 197683 - DNA, 122 bp, Homo sapiens
ggaaatgcgtgtgtcagggtgcctcctagtggaactgcagcgtttcctcgaaagccattccgtccaggagttaaggtggccgctgcccgcccgggacactttctcagtccagcccatcggcc

SEQ ID NO: 197684 - DNA, 122 bp, Homo sapiens
cctccctggaccgtaggttccacaggacagcactgtgcccatctgtgccccagccccaagcgcagcctgctggggtatgtgctcactggttgctgtggggtgagggactgtgcctctgcctg

SEQ ID NO: 197685 - DNA, 122 bp, Homo sapiens
cgaatatgctgttggattgattgaggatgctgtcctgtcccagcacatgctccaccagcccgaaacccctgccccacctggcagaggggtggggtggggtggaaccaggttaggactgtcaa

SEQ ID NO: 197686 - DNA, 122 bp, Homo sapiens
acatccacacctgtcccagcaaagtgcccccgtggccagctctccaggcctcgggtgcctcgtctgtaaaatggggaactggatgatgtctgaagcccttgaagcagttagatgtggaggtt

SEQ ID NO: 197687 - DNA, 122 bp, Homo sapiens
gggacctggaggcagagcgtttgcgggcgctggggcatctctgcataggtttaccaccgacggctctgcactcacctcttcagacaagcgattgccctggtgctccatgccaccccatcgac

SEQ ID NO: 197688 - DNA, 122 bp, Homo sapiens
taccggaaatggtgctggccatggtgctggcggcggttgggcctgcggaggctggagaggcgcaagtggcggccggagctgcagacggctggtgctgcagtgccggggaggggaggggagag

SEQ ID NO: 197689 - DNA, 122 bp, Homo sapiens
gcgctagcacgtctccgtcacttccgatctggggcgtggcctcgggtgccgctaaatatgcgggcaagccccgcccacccttccgctccggtccggcttcctggctgctattaagatgttgc

SEQ ID NO: 197690 - DNA, 122 bp, Homo sapiens
gaactctcctcgtttaaaggagagaatgaagaacgctgaacgcaaatctccgtccttgtgcgcataaatctgaggcgacaggaagaatgtggaggcaaacctggctcttctcagtactgctg

SEQ ID NO: 197691 - DNA, 122 bp, Homo sapiens
tcacggcccctgagcccgcgcggaggcccgacgccccgcggccgacgccggtccccgccccgggccgccattggctgttgccatggcaccagcccgtcttcccgcgccctcattggctgtct

SEQ ID NO: 197692 - DNA, 122 bp, Homo sapiens
cagtctgctccgcctgcctgtctctgggaggatgtgtgggaggggacggccgaggggctccgtagaacgaagggccttcctacagccatcctgcactcaaggtttgcccggctcacagaagg

SEQ ID NO: 197693 - DNA, 122 bp, Homo sapiens
caggcttagcctggaagaagtttccaggccaacgtgaagttttcctgtcttgggtacatgcgagccccacgcgtctgcgagtttgggttagtgtgtcaacagggtcagtccccgtatctact

SEQ ID NO: 197694 - DNA, 122 bp, Homo sapiens
ccaagtttcacttccttgccttggagactcagagccatagcaggctgctgtctcacagagcgagaaggtgtcaggagcagcccagttgtgtctctctctctacctctgtgaagggcgcgaat

SEQ ID NO: 197695 - DNA, 122 bp, Homo sapiens
cccggggcttaacggctgctggagccactttataattagccccaaaccgaaggaggcgcgcgcgccccaatcgccggcgggctgcagctgacgcaggccctacgccagccccgcgccgacgc

SEQ ID NO: 197696 - DNA, 122 bp, Homo sapiens
ccatgccacctcctcatgtaacccaactccgtaaatctctgctccccgccgcaccctcctcgccctcgcactcacccttggtggcccctgcctcctgcgggctcaggagggtcatcagggtg

SEQ ID NO: 197697 - DNA, 122 bp, Homo sapiens
tcccacccacaaggaccgaggcagaactctagacccatcccccttcacgctgtgctcgcccggctgcgctcagaccctgttggcagctgagactcacccaaaggctgtaaaagccccacaac

SEQ ID NO: 197698 - DNA, 122 bp, Homo sapiens
gcccctgatgcgtacctggcgggactgggtcccaggggctctccgcgctccttctgggggcgccacgtccggaccttgtcccctgctgaggactacctcgcgggccgggcggggtgaagggc

SEQ ID NO: 197699 - DNA, 122 bp, Homo sapiens
agaataagagtcagggtcacagctccctaagcccacccagcacagacgcccacaggcacacgccactgcctctctagaggcagtgcccaccagtaccccccaggaagaggtctcctgcaccc

SEQ ID NO: 197700 - DNA, 122 bp, Homo sapiens
gtcttggagctgatgctggtgggtctgcaggccgtgactgggctgcgaggctgttaagcccgggagagaatagtttgagctcctggcgtggcccatattgccctgcagcagaaggaccgagt

SEQ ID NO: 197701 - DNA, 122 bp, Homo sapiens
gagcctgcgtccctcctcctctgagctcggtggaggtgcttccaggccactcatgtgagccgggaaatgcggacagccaaagtctggatcatcctcaccgctgaagcgggttggggggacgc

SEQ ID NO: 197702 - DNA, 122 bp, Homo sapiens
gccccaggaaggaaatcactaaggaggattgagtgtcaattcacaacctaatcccatcagcgcacacagctacagcacgggccgccccctcccctactctgcagaccctggcggctgccggc

SEQ ID NO: 197703 - DNA, 122 bp, Homo sapiens
gaagctcttcaactagaggaaatcaggtgctggccaaagagacagaggcgaaggtgcctccggggaactgctgatattgcttcaactaaggtaagtgttttggcagaaatggcagaagcctg

SEQ ID NO: 197704 - DNA, 122 bp, Homo sapiens
aggtgtccacgccggcggcccggctctctgtggcaataatgtgtctctttctaaggattgcgaaagttgagggaggatttctccactggaagaattatgcaagcttcaactgaaatgttttt

SEQ ID NO: 197705 - DNA, 122 bp, Homo sapiens
acgctcagtattttacttctcgccgagttatcccacactcttcacagacaccacacggaacgcctgcaccacgtgtcagcgtctgtgctttcgcattcatttaccgtggtttctatttaggc

SEQ ID NO: 197706 - DNA, 122 bp, Homo sapiens
ggggtaaccgcgagaacaaagcagggtacccaacggggtgtggcgggacacctgggcgcacgccgccagcgcccgggagagcgaaggcggggagagaggaaccacgctgaggcgtggcagga

SEQ ID NO: 197707 - DNA, 122 bp, Homo sapiens
tgttggtattatatgataaaattaaagaattctttcatattgatattggtggtaggtaatcgggagagtaaattaagaaatacatggatttaacttgttaaacatacaaattacatagctgc

SEQ ID NO: 197708 - DNA, 122 bp, Homo sapiens
gccagacctgttgctcaggccgagctcctggttgccagcgagttaccacgggaccagtcgcgtgtatggctgagactcattcccagtttccagggcccggtatttggacactagttgccaag

SEQ ID NO: 197709 - DNA, 122 bp, Homo sapiens
tctgccgcgacaggttggcgtggtggtgacgttcctggtgctgcttattttctcctacaacgtcgtcttcctgttcgtggggacggcaagcctgggcctgtttctcagcagcaccttcccca

SEQ ID NO: 197710 - DNA, 122 bp, Homo sapiens
tgggggtggagctgcagcagcctggagccaggagtgggcaacgcggcgtgagcagcggcccgaggctcccggagcatcgcgctgggagaagacttcgccgctcggggccgcagcctggtgag

SEQ ID NO: 197711 - DNA, 122 bp, Homo sapiens
ctccagggatggcgggtagcacaggtgtgctgagggaagaggcctctctgaaaacgtgaacggttactttggagaatgcctgtgttctctgaatatcttctgccctcatcctcaaaactaaa

SEQ ID NO: 197712 - DNA, 122 bp, Homo sapiens
tagaatcttaccctaagattcagccatacagcccaaatctctaatctgattctcagctagcgtaatataaaccctagaacttccttcctgtagttgtacacagatgggggaatgagtgtagg

SEQ ID NO: 197713 - DNA, 122 bp, Homo sapiens
ctgcgcccacagccactcccattccaagatggccgtaccaacatggcagcccccacgtcacggagtttaccgtacagggcttctcttaaaatggcggcccccaggcaaccggcgttctcaat

SEQ ID NO: 197714 - DNA, 122 bp, Homo sapiens
ccgcatttgtgaaagtttggctcggagctacgcgctgattaatatcagatctccttcactcgcctcgccacaatcttgtcacatctggctgacaaatcccgaggaactccggcaaagccagg

SEQ ID NO: 197715 - DNA, 122 bp, Homo sapiens
ccagggctctcagccgcgccctcagcctaagcgcctttcgctggttggggtcagggctctcggccgcgccctcagactaggcatcttttcctggtgtgcagtcgcccctatccacaggggac

SEQ ID NO: 197716 - DNA, 122 bp, Homo sapiens
agagcggcaggccggcgtgcgccccagggcctgcgcaccgtgggggctcttccccgcccacgaggcctaggtgctgccgcagccaccccaggaagggccccaggccacagtcgcagcgccag

SEQ ID NO: 197717 - DNA, 122 bp, Homo sapiens
tatgtcctaatgcaactttggattataatgttttataggcaccgcatcaagtcattgatccgtttcccacgcattgggcttaatataaatgataggtatcctattctacaaagtagattttt

SEQ ID NO: 197718 - DNA, 122 bp, Homo sapiens
ctcctttcctcccttcctcttttttttctttttggtttgagacgaggtcttggccaggcgcggtggctcacgcctgtaatcccagcactttgggaggccgaggcaggcggatcacctgaggt

SEQ ID NO: 197719 - DNA, 122 bp, Homo sapiens
tcatcgggaggcggcagctctaacagcagagagcgtcaccgcttggtatcgaagcacaagcggcataagtccaaacactccaaagacatggggttggtgacccccgaagcagcatccctggg

SEQ ID NO: 197720 - DNA, 122 bp, Homo sapiens
cgagtcacgatagaaaacccactctgtggagagaccagagatgaccgccgcgcacacctccgttcagcacacaaacctttgcaggtgttcatagcggaggcagattccgtactggggataag

SEQ ID NO: 197721 - DNA, 122 bp, Homo sapiens
aaattctccacggcgcgctcctttgttgcgagcgtgtgaggcggcggcagctgcgtgcctcgccccccagcccacagcccgatgaggcggacacggataactgcattagatgcactcagctc

SEQ ID NO: 197722 - DNA, 122 bp, Homo sapiens
ggggagtgcggacccgagtggcccgcgccctggtggaaacttctgcaggaagcggcccgacgctttctaccttacctgggcacaaccgccggatgcgcggttcaccagctccctgaaacatt

SEQ ID NO: 197723 - DNA, 122 bp, Homo sapiens
tgggcatgacgggtcgccttgggtgtcctgccgagctcagctttgagggtatgcgcggcgcgggtgtttttcccaggtccactctgcaaaagttgtggcctgaggaaaacttccaggtcgcc

SEQ ID NO: 197724 - DNA, 122 bp, Homo sapiens
gtctgtatccatgaaatcgcccactcacaatcgctttttgtagctactggaagcactaggcgtctgacctgccatcatccttgttatgatgtcataatcatattctgtccgtgtttattgca

SEQ ID NO: 197725 - DNA, 122 bp, Homo sapiens
gcccgggcggcctaggcctctgtagcctcagggtggtgtctgcgagtaggtgggtgtccccgggagccgaggtgcaggcccggccttgaagagcggttgtaggtttgtctcctctctagaac

SEQ ID NO: 197726 - DNA, 122 bp, Homo sapiens
gggcggggcttgtgagctggggctcccccggagcgggcgagttggtaaacagatccggagcgcgtggcgggcgtcagcgcggtggccagcgcgcagaggcgggcgcggaggcggctagaagg

SEQ ID NO: 197727 - DNA, 122 bp, Homo sapiens
agacctcttatgtcctgtgggtcaataggagtgactcaaacgttatgagaagcacatggtcgcagggcctgtgaggaccacctcagcttggggatgagtccttagttaagcttatgcttgat

SEQ ID NO: 197728 - DNA, 122 bp, Homo sapiens
gcccatgctctctccccacctcccttgcactctagtcccctcgacagacttgctctcttgcgggaacatcacccacttccacatcacccagcctttgtgtgtgctgtgtcttctgcctagag

SEQ ID NO: 197729 - DNA, 122 bp, Homo sapiens
ccgccgcggatggactcggatcttccgggcctaaatcccctttcagctgcctaaaggagccgccgccatcgcgctgtgacgtcacttcccctagcaacccggcggggcggggccgcggcgct

SEQ ID NO: 197730 - DNA, 122 bp, Homo sapiens
gccccttaaagtcacaggccccctagcgcgaaatcccacgcccccctggacggctgcggccgcactcgccaccagggggcagaggccagagaaagggctatttcccggacccgcccccttca

SEQ ID NO: 197731 - DNA, 122 bp, Homo sapiens
gcacgaatcagtgcatacaaacctacctcaagcccaaagtaacaatgaggatcacactctcgaggctcacagtggtgtgacaccaaaatccagggctgcctcaaggcctgagccggccacaa

SEQ ID NO: 197732 - DNA, 122 bp, Homo sapiens
ctcagccactccattcctggatgcccatgtcccagtggcggctggctggtcatccagaggcgaatgcggaacatggtgtctgagctactaacctcccaccttgggtatgcccttgaactttt

SEQ ID NO: 197733 - DNA, 122 bp, Homo sapiens
tcactcttccctggctgttttcaactcttcattgttggctttcaggatggctcacgtgggcggcaagctggggatttctgtgtatttatccggcttaagattcatggggcttcttgaatctg

SEQ ID NO: 197734 - DNA, 122 bp, Homo sapiens
attagggtcaagttcatcatatcttgtccgtgctcggacgtcacctgctttaggtgcacccggtttaatagtgcacggccagctcccccgaatccatgggtccagtcaacacagattgaaaa

SEQ ID NO: 197735 - DNA, 122 bp, Homo sapiens
cctgcttggccacgggtgggcagacccaggagacacagcactccccactgggtctaggaccgtctccgcgggtggggaccccagccggccaggcatgtgccctgacagccctgccgacaaca

SEQ ID NO: 197736 - DNA, 122 bp, Homo sapiens
taagagaaaagttcctccttccacagggggaaggatgccaggacagaaggtggggagtagcgtcaggaagatgtttctgccctacaagacttgcaccatcgaatcctacaaaaaaatataaa

SEQ ID NO: 197737 - DNA, 122 bp, Homo sapiens
acaggggatgcttttggcatattcccagatggtcaattgtatataaaaagtgaactggaccgtgaacttcaagacagatatgttttaatggttgttgcttctgacagagcagtggaacccct

SEQ ID NO: 197738 - DNA, 122 bp, Homo sapiens
gtcggggtggggcacaggatggtggagagactgtcaacaacttttaatgagctcccttggcgtcctagcctagcccccaggcactgggagcattgcagaaagagaaagatactgtccctgtc

SEQ ID NO: 197739 - DNA, 122 bp, Homo sapiens
aagtgctgggattataggcgtgagccactgcacccagccacatttattttttgagactgtcgcccaggctggagtggcggaatcactcttcactgcagcctcgacctccagggctcaagtca

SEQ ID NO: 197740 - DNA, 122 bp, Homo sapiens
ccctcgccttcctcaggttcaggctgagcgccgcgtgggccgcagccagagggggcgtagcggaacgggagcgggcggtggccaggctgcccccacgagaaatgcggcagcctggggttccc

SEQ ID NO: 197741 - DNA, 122 bp, Homo sapiens
tccactagctaataaagttatttccttcgtatgctgcgcggctgagccggaaggccccagcggctcaaggcttgaggctagctgttatccagcacccagctccaagcaagggaggaagcggc

SEQ ID NO: 197742 - DNA, 122 bp, Homo sapiens
tccaatacctggaaagaggttgtacctaaagtgttctctgtattggcggaaaatgtttcccgggcaacctcttttcattgtgaaggcttgaagagcttttggctgacttcccaaaagcaacc

SEQ ID NO: 197743 - DNA, 122 bp, Homo sapiens
cctggtacacagtaggtgctaaactaatcctctccgagctgggcttggggaagatgcctccgttgggtgtacagcgtgggcgcgggaaggcgagcctgggagcgagggggttgcagagaggc

SEQ ID NO: 197744 - DNA, 122 bp, Homo sapiens
gttctcacgagtgcgtcagggcatctgtgcccgtgtacaccgatgagacgctgcactcgacgacgggggagtacaaatccacatttaatggaaaccggtaagctcgggctctgctagaccct

SEQ ID NO: 197745 - DNA, 122 bp, Homo sapiens
tccaagcaagcgctaagccagagcctcggttacatgtaaacaccagctgtgtcaagacggcgcagcttcttctaggtcaacagacagctgtggggttgctaggcaaccgcctggctcccccc

SEQ ID NO: 197746 - DNA, 122 bp, Homo sapiens
tgcgcgagccactcaggggcgggctgtaaagtcaggcttggctgacgtcagttgagtgggcgcggctagggcggttttctttcgcgtcgaccaaacgtgggccaatggaaaaccggaagcgt

SEQ ID NO: 197747 - DNA, 122 bp, Homo sapiens
ttaaacatagaattgaagaaaaaaaaaaaaaccccacaaagtaacaaaagaatgaagcggcgaaagcagaaatttactcaaccaagaaagcaccccacagggtgggggtgggcccaagcgag

SEQ ID NO: 197748 - DNA, 122 bp, Homo sapiens
agccctgctcgcctctgcaggtgcccggcgtccacacacacaccccctccgggggcaacccgggcccccaatcctggtccacttggcgcgtccccatctcggccctgcgctgctgcctcggg

SEQ ID NO: 197749 - DNA, 122 bp, Homo sapiens
aagtaattaaattatttttggaaggaggggatatggtggtgatggtgtcagggaaatccccgtatgcatgggaagaggcgtgcgcctctcgccactaattaaaatcagggatgaccctccct

SEQ ID NO: 197750 - DNA, 122 bp, Homo sapiens
gcctcacctctcctagaagcctcacaggttagaagagccaccgttattccccaaacaccacgcagaagagctccacttactgctccaagcatgatcctgaagatcagccaccggaagcccca

SEQ ID NO: 197751 - DNA, 122 bp, Homo sapiens
ggcctgctttttttgcagttagagtgaaactttccattggtggagtcaccccaaaggaggcgggacggagcgggaaagtcctgcctaccttggccttcccagccaatcgcagcatctatgcg

SEQ ID NO: 197752 - DNA, 122 bp, Homo sapiens
gtcaaactgtcgaaagcccaggaggaaaagccatttcctccaggaagccttctcttttctcgaaatgagaggttgctgccaggtgccgtggctcatccctgaaataccagcactttgggagg

SEQ ID NO: 197753 - DNA, 122 bp, Homo sapiens
tccgcgatctttctattaaccctaaagggacagagggctgacaggaagttgcccggggaacggtgcactctgggaaatgtagtccggagcctgggccgtctttaactgccccggacaccgcg

SEQ ID NO: 197754 - DNA, 122 bp, Homo sapiens
gcacttcacagacggtggggtggctaggcagagatgctcctcacttccaagatggtggggcggccctgcagaggtgctcctcacttcccggagagtgccgcggcagggcaaggtgctcctca

SEQ ID NO: 197755 - DNA, 122 bp, Homo sapiens
cttgtcagtgctgtgtaggcacaagcaccaggtcttctttttgccatttctatgagacaacgcaattgactaattcaagttgtgtgaaccagaacttctagtttacacagtttccttccaag

SEQ ID NO: 197756 - DNA, 122 bp, Homo sapiens
gttaacatccccagtgcaatagttaaaacagcacttaccttactgtcttgacactgctttcgttaattcttaaagcagatgcactatggacaagaatccaccaatatatgctgtgaactctg

SEQ ID NO: 197757 - DNA, 122 bp, Homo sapiens
tgtttcctgtaaatttgaactcttgtgctaaacagcttcttagggcagagagcggaggctcgatcaggcttcgtccaagagcgtggattccgttcctactaagtgccggccacactgtgcct

SEQ ID NO: 197758 - DNA, 122 bp, Homo sapiens
tttccagctcgtttctaggccagtcttcgtcgtgctttcaaatgaaaggtgcagtcagtgcgaggaacaccccatgtagatttgggagagcctttgacacccgagagccatgtggcagacta

SEQ ID NO: 197759 - DNA, 122 bp, Homo sapiens
ggatgtacaggctagttctctggtcctgttcgggccccaaaccggttctcccggtcccaccgcctctggccctaaggcctccaacccgcggcctgacaagccctcacatgaagcagctggag

SEQ ID NO: 197760 - DNA, 122 bp, Homo sapiens
ctgctgggtcatgcggagaggtcaggcgtgatgggagctcgggccgccgcgctgacactgcgactgcccccagcgcattttggggatgacctcatggatggtaaaagcgcccagcggattat

SEQ ID NO: 197761 - DNA, 122 bp, Homo sapiens
aaagaagggcttgttccagtttcaggggatcctgtagccaggcattggttgctttcccgccgatgtaccacctgatgaagttcattcctctgtattccaaagtgcaaaggccctgtacgtca

SEQ ID NO: 197762 - DNA, 122 bp, Homo sapiens
acagccatgtttcagtgaggcgttgatcttcttccctggtgtcccaacctaccagtgccacgttacagcccagagtgagttctacaagcgttgctggcctaatggatgggctgggggaaggg

SEQ ID NO: 197763 - DNA, 122 bp, Homo sapiens
ggacctctcctctcagggctcagacgtggaaagcctgagttcaaatcccgacctaccactcgggttctgtgtccccacaccagctaggcttcttctgtgtctcagtttcttgacctgtaaaa

SEQ ID NO: 197764 - DNA, 122 bp, Homo sapiens
agctcagtaagtcacttctgggcgactgttgttttatttccggtctatgggacccggctgcgatttgctgctgcggacagcagctaccatcactgctgccgccatcatgtcagacacggaca

SEQ ID NO: 197765 - DNA, 122 bp, Homo sapiens
gccggggcgtgatttccgatcctctgcctgcttgttgggtccctcggaggcgggtcagaccgcacccgccgcgggcgcccggtgcgcccccagcccctggctcgcggcggcgacagcggcgc

SEQ ID NO: 197766 - DNA, 122 bp, Homo sapiens
aaggcactaaagtcactttaaagcttttggagaagcaggagggcattggcttaaccaagccgaaggctgctggctgggctgcctagcccagctaagatcttccttcagcccacctcaggatc

SEQ ID NO: 197767 - DNA, 122 bp, Homo sapiens
tactgcggacagaggcccattgggctggtgctcgtggtggcaaacactaaaaccccggcacgggtaacacacgaagctgaaatcagacatgtcaatggaacagggaaatgtggggtgacctc

SEQ ID NO: 197768 - DNA, 122 bp, Homo sapiens
ggctcactcggttatatctgctgaacacaagagcttgctgtttacgcaacaccaccttcgcgtgttttaaatgcctttgggagaagcagatccagaatacttgtgtaatgaacaagcacagg

SEQ ID NO: 197769 - DNA, 122 bp, Homo sapiens
ctacatcccaaatggtttcttcagtgagcaaacctaggcacctccttattagcaagcctacgctttttatcagctgcttctgtttccatccccctccagcaccctgctgatcaaacacagct

SEQ ID NO: 197770 - DNA, 122 bp, Homo sapiens
tctctactgctaccctagacatgacaggttgaaaacactaggccccagttgcttttgccccggcttgcttttagggcagatgttgctcactggaagaaccaagccaagaaaactagatgcta

SEQ ID NO: 197771 - DNA, 122 bp, Homo sapiens
ggacgcccctgggtctggccgtgggccgtggcacacacagtgtccctgtcaggcctcacacggtgccaggccacacgctcacgtctccatctcacctgcctgggtggcacaacccgtcacac

SEQ ID NO: 197772 - DNA, 122 bp, Homo sapiens
gctgtgagcctgaggcccctgggcggagcagggtggcacctggggagagaggaacggggacgccggagagatgtcccaggaacagaagctgctagcgacgaaaaacgtcattcatctggcag

SEQ ID NO: 197773 - DNA, 122 bp, Homo sapiens
ggtgctgcgggaggtgagctgggctggtggggacaggggcagggcttggggctgggtctccggacagaggcctggcttttctgtcagggcagggcctagcccctgcccccataaaagaggag

SEQ ID NO: 197774 - DNA, 122 bp, Homo sapiens
tggtttgatgacccaggttctgcactagtggctcctttaactatgacttcaccacatgtgcgcctgtgcttcaacaatctatcagtccttgaaaaatactgttggcaagtgtcacacttata

SEQ ID NO: 197775 - DNA, 122 bp, Homo sapiens
ctctctgctttctgtaggtattggcaagcttgccagtgtacctgctggtggggctgtagccgtctctgctgccccaggctctgcagcccctgctgctggttctgcccctgctgcaggtaagt

SEQ ID NO: 197776 - DNA, 122 bp, Homo sapiens
gaaatcagtatctaaaaagtacaagatgggattatgttatggaatccaagaataggaaagcgaatgtgaatccagacagcatggtttagacggggacccaaataaccttcagcataacttct

SEQ ID NO: 197777 - DNA, 122 bp, Homo sapiens
cttttttctttattagacatggctgcgttggtctcacggaaatctctgcgcttttgcaggcgcccacaagacagggcaactacggggtagcggacatccgccaggcacgcttctagggccgc

SEQ ID NO: 197778 - DNA, 122 bp, Homo sapiens
ccaggggaatctgggcaattaggctcaggcggccttaaagtgccaggagctccttttctgcgtctcccatcatggggcttagggttgagtcttcaggttctgggggcaggaaggacgggcac

SEQ ID NO: 197779 - DNA, 122 bp, Homo sapiens
ttctttctgctgggggaaaatccaggtagctacaggcctctgtctggcaggggtgtgcaacggtgagtggtgaggcagcatcctgacccagagaccagttggttgccctgcactctgacagg

SEQ ID NO: 197780 - DNA, 122 bp, Homo sapiens
ctgctttccgttctcctgggtcagacccacagttggcattgctggatctcacggcagttccgtctcatctcgtggggtgcctccgcgctgttctccacggtggtggcgctggcccaccttcc

SEQ ID NO: 197781 - DNA, 122 bp, Homo sapiens
tactcagcttgggaagcccttttcccagcatctcatctcagaccatggattcccacccgacgagacccgctgtgcaccgatgcccgaatcctatcctcctggaactttatcttgcttattcc

SEQ ID NO: 197782 - DNA, 122 bp, Homo sapiens
gtgctcctgaagcccaggcaggaagaaggagcctgcgtgttcagagtcaagaacaccacgcggtaatggtagagagaccctggaggtcagaggcctagactcccaccgccacctgaccctgg

SEQ ID NO: 197783 - DNA, 122 bp, Homo sapiens
cacgccggaggccggctcgctccgcccctccccgcccccttgtccccgccccggctcagacgccgctccccggtgcctctcggcaccggctcacgctctccaggcccacctgcccggtctcc

SEQ ID NO: 197784 - DNA, 122 bp, Homo sapiens
cccgacggcccggcccgcgcgcatgcgcaccccgcccctctgcccaccccgccccgcccgcgcggcacagtaacagagaaacccggaggtgggatgggaaaactttattaggtttggtttcc

SEQ ID NO: 197785 - DNA, 122 bp, Homo sapiens
gctgaacgcactgcagcctcctgagttcaggtagccctgagcggggcctggaccgcgaggcggactggccccagcctggagcagggcttgagggaaggccctagctgaatgggtgggcgtga

SEQ ID NO: 197786 - DNA, 122 bp, Homo sapiens
gaaggcgctgcatgggcctgaggcaccgacacagcggtttcctatcatgggggtgatcgccggggagttgaaaaatacctgtggccagaccccagcctaacccaagtgaatctgtctcgggg

SEQ ID NO: 197787 - DNA, 122 bp, Homo sapiens
ggggcgggggcaggtgagcggaggcgggggcaggtgagggctgctgattggagaagcaagcggagcgggaccccttaatgcgactgtagctgacgacggtctcccttgctcaggcatggaca

SEQ ID NO: 197788 - DNA, 122 bp, Homo sapiens
tgggagatacactggtggaacaaatctgcagagggccctgcacctgcgctggtggatcaacggtgtcttctcacctccagggctagctgccttgccttccctcgtggggcttaagtggctgg

SEQ ID NO: 197789 - DNA, 122 bp, Homo sapiens
taccaccctcactttctccccaactctgaaatgcttttcactctctacctaggctgaagccgacgtagcttctctgaacagacgcatccagctggttgaggaagagttggatcgtgcccagg

SEQ ID NO: 197790 - DNA, 122 bp, Homo sapiens
acctcccgactaaatctgtggtacctcaggaggggtgccccagggctgtggatttaggagcgggcaacagataagctgtagaacaaaggagttgggaatatttgcataggggagcacttggg

SEQ ID NO: 197791 - DNA, 122 bp, Homo sapiens
cctgatctccgccgtggacccagtggccgtgctagccgtgtttgaggaagcgcgcgtgaacgagcagctctacatgatgatctttggggaggccctgctcaatgatggcattactgtggtga

SEQ ID NO: 197792 - DNA, 122 bp, Homo sapiens
tgcctgtagtcccagcgctttgggaggctgatgcaggagcatcacttgaggccaggagttcgagaccagcgcgggaaacatggcggtactccatctctacaaaaaaaacccaaaaaaattag

SEQ ID NO: 197793 - DNA, 122 bp, Homo sapiens
ctcaagacacaagagaaatattccttcccccttaaatatggaggccgggagaccgcagagcgtagggagacacatgggatctagcatggccccaccaccaggtcttccgggcgcgtcggaat

SEQ ID NO: 197794 - DNA, 122 bp, Homo sapiens
cccccacccaactctcctgccccgggaggacccggcttcggggctttggggaacctgcggcgcctgggccaccccctgcgtggacccctggaccccaggcgaggccaccagcgcccaccatc

SEQ ID NO: 197795 - DNA, 122 bp, Homo sapiens
tggaagagcggcgctgtatagcagcagccccaggtctcccctggacctgagtgtgctcggcgtccccacccccaatataaagtaaaataaaagcaatggtttaattaggcctcaggatacga

SEQ ID NO: 197796 - DNA, 122 bp, Homo sapiens
ctgcctgccttgaggttccagagaagcatcctggaagctgaagctcgggccctacctggccgcgccgggctgccctgaggagcaggtggggccaggtggcctcaggacgccagagccccccc

SEQ ID NO: 197797 - DNA, 122 bp, Homo sapiens
gtctctaatctccaaaacacctgttgcccctgcttgggggcttgtgaggtccctgtcgggcgcccctcttggcagccactaggatgcgctcactccccaaaaatgcagcagccccgccccct

SEQ ID NO: 197798 - DNA, 122 bp, Homo sapiens
agtccggctggaaacaagctccccccaatttcagggccgttgtcgcctccgggcggtccgcgggtcccgagcggactgggactctggagacgtgcccccaaccccaccgccattcaccctgt

SEQ ID NO: 197799 - DNA, 122 bp, Homo sapiens
aaccttgttctgcagaaaatcatcattagcgcccctgagtcttaacaatcgaggcgctgccgataccacggatacctttattgctccctggcattcacatcctaagcccatgctcccaccgt

SEQ ID NO: 197800 - DNA, 122 bp, Homo sapiens
ccagaaaatgccgcgctccctacggctcaagggtcaaatcgcgtcatttccgggaggggacgaaggggtagttctttcacctcggctgggcgcctagaaaagcctagaaacagctccttttt

SEQ ID NO: 197801 - DNA, 122 bp, Homo sapiens
accctcgctagggtaaggacaaccgcggggtttgaacggcagagaaggcggtggagccagcgtagcgcccgcagagcaacgcaaagaggaagaacagagaaacggctatgagaaaaagggcc

SEQ ID NO: 197802 - DNA, 122 bp, Homo sapiens
cccgagccgagctcaccgcaggccccgccccggacccgcctcctgggctactcaccaagccgcgctcactgcaggccccgcccctgccccgcctcctgggcacccgccgagccgagttcacc

SEQ ID NO: 197803 - DNA, 122 bp, Homo sapiens
gcagcagcagcagctggagcagcaggaggtgcagctggagctgaccccggtggagctaggcgcccagcagcaggaggtgcagctggagctgacccccgtgcagccggagctgcagctggaac

SEQ ID NO: 197804 - DNA, 122 bp, Homo sapiens
cccaccacggacggacagaagcccaacaagctgcagtgctgccagaacctgtgacccctgcgcctccacccagcgtgcgtgcacgtcctccgcccgcccccgccacggtatcctctggcccc

SEQ ID NO: 197805 - DNA, 122 bp, Homo sapiens
gccccttactgctttctttacccccatatggaatcctgtgcctctttatgggcagaagggcggcccctgccctcatgtgacctcccttccctctctgtgcccagcgtggggtcgtgtgggag

SEQ ID NO: 197806 - DNA, 122 bp, Homo sapiens
agctcagccacagatgtccagccacaattctcggttggccgcagactcgtacaagaattgcgtttggacaatcagtggcgaagcccctgagttcagggccctggtctcctgcggggttcccc

SEQ ID NO: 197807 - DNA, 122 bp, Homo sapiens
cctctccactctagcaccagaacaccgcagcggatacttgcacgccatctcccctgggcgcggccatgttggagaaaactgcactacatttcccatgagcccgcgggacaacgaacagcgct

SEQ ID NO: 197808 - DNA, 122 bp, Homo sapiens
gttctgggctggggaccaaagtcttctgccttgctctggttccaggccaggcatccaccccggggccccttcattctggaagccaaaaactggagcttcaacccagcctcccgcttcagctc

SEQ ID NO: 197809 - DNA, 122 bp, Homo sapiens
cccgagcctctttgattctcttcggctcgggtctgttggctcttttgtttaatagaggagcgatcaggagcctggagggagcagggagctgatgctggtcgcagattgtggctttgtgacat

SEQ ID NO: 197810 - DNA, 122 bp, Homo sapiens
ctcgccgcgggtgcacctggctgggcgtgggccagcgaggggcccggcacccccagcccgcgggatgacctcacctgtaaagtgtgcgtagacaccgccctgcagccctccctcccggccca

SEQ ID NO: 197811 - DNA, 122 bp, Homo sapiens
gaggcgccgctgcggctcgttcatctgggtgtagtcccggaccgtggtgcctccgagggacgccacattctcgataagtagtcccttgccccgcagggagcccaggctcacaggctccccgc

SEQ ID NO: 197812 - DNA, 122 bp, Homo sapiens
caggcaggggcgaagccagcgggacccgagttccccgcgagcccctggcgctgccttctccgctcaattaactttctcaacgtctcctgctgggcctgaggctgggaaccacctgtcgcctc

SEQ ID NO: 197813 - DNA, 122 bp, Homo sapiens
ggcggggggcatggtggcctctcgggctgctccgaacgtcccctccaaacagcgaggggacgcacagccccactcaggagggagccaatgacattgaacctgaacccaagccagccttagac

SEQ ID NO: 197814 - DNA, 122 bp, Homo sapiens
acacagatcacttcagagtagtctcacttgagaagctagtgacgtgtgctgataaaatgacgggtgctggattcttgttgagatgaggaaacaatgcctttgggggtagaggatctgtgaat

SEQ ID NO: 197815 - DNA, 122 bp, Homo sapiens
agtaagtgtccttatgattttggggttgtggtatgcagtagtggatgtcagcatagatctcgtgaccattgtgaacatgaagtttcagctgatatcagcatggaaatacaccaaaaaggtgc

SEQ ID NO: 197816 - DNA, 122 bp, Homo sapiens
gaatggcctggcccccccagccccaccacccccaccccggctgcagattacggagaacggcgagttccgaaacaccgcagaccactagcccacccagcatcagagaccttctcttcctttcc

SEQ ID NO: 197817 - DNA, 122 bp, Homo sapiens
ccccttcctttcctcttccctcctttggcttcaggttttgtttttccctgtctacacgcacgcataagctgtccctagaacagttccagccttgttttgcttctggaagctctccagaaata

SEQ ID NO: 197818 - DNA, 122 bp, Homo sapiens
tgattggggagtggaagccccacagacatgcagtgaaaaatgatcctttcttcccctctgcgttctcgtccccttcccagagacaccgctgtgatctcgtgcctcgccccctccgcacacgc

SEQ ID NO: 197819 - DNA, 122 bp, Homo sapiens
cgcaggtagggcagctttgcctctaatcaggcgttcattaactttttccctgaacaagctcgcccatttgtggtttggaagaaaagaaagcgagtctccgcggtgaggtgtggagggcaggg

SEQ ID NO: 197820 - DNA, 122 bp, Homo sapiens
gggcacagcggggagggcggtggggccggtgccaatgtgcaggtgtgtgtccaggagctgcgccgctgaggccaccggggacgcgccggtctgcaggagtgggggcggcagcagcgggagcc

SEQ ID NO: 197821 - DNA, 122 bp, Homo sapiens
tatatatatattttatccagtattttgggaacctggcagtggtcgccgtttcgagccaggcgcaatgcggagccgcacacagaactgcgggtcggcagagggcgcggggcggacgcgctgca

SEQ ID NO: 197822 - DNA, 122 bp, Homo sapiens
aggcaaatatgtgtttttaaaaaaacaaactcactttacagagagagctaaggttaaatccgaaggtttgagcattccgggagccagcattcatgtagtttcccattagcaatacaagttcc

SEQ ID NO: 197823 - DNA, 122 bp, Homo sapiens
cgagccgcactcgttaccacgtccgtcaccggcgcgggagccaatcgcctccctcgcgagcgggttcggtttactagaaccagacgcggctcaacaccccttaaaaaacaaaaccaaaaata

SEQ ID NO: 197824 - DNA, 122 bp, Homo sapiens
gaacaattccaagcaattagtttcccagggagaggtgacgtgatgcccgcgccccagccccgctttgtggctttatggagggccatcagttagctgtcagccgctcaaagagcccccaacct

SEQ ID NO: 197825 - DNA, 122 bp, Homo sapiens
tgtcccctgtttacttagagcgtgcctaatggtcagaacctgtcagatgtagtgggttcacgggttgtctccaatccgccagccaggcctccctcaggtgcataactgaagggaataattag

SEQ ID NO: 197826 - DNA, 122 bp, Homo sapiens
cccacatctcagacgatgggccactgggcagagacgctcgtcacttcctagacgggatggcggccgggcagagacgctcctcacctcccagacggggtcacggctgggcagaggcgctcctc

SEQ ID NO: 197827 - DNA, 122 bp, Homo sapiens
tttagagaggaggactctttctgtcacccaggccagagcacagtggctaaaatagctcaccgcagcctcgaactcctggcctcaaatgatcctcccatctcggcctcccaaagtgtgagcca

SEQ ID NO: 197828 - DNA, 122 bp, Homo sapiens
cgtctgtcctcagtacaacgtgctgtttgacatgtgcgtctcggcaggcccagagtgcagcggtgggaagggactggacgccctctgggactctgcctgccatgtgggtcactctgctctgt

SEQ ID NO: 197829 - DNA, 122 bp, Homo sapiens
tccgggaggccctgggcttcctgtgtgtagccctggcatagacttgctcgtcagggtgttcgactctgggatgctgggccgggcagacatttatgctctgagcagcaaggaccattgggatg

SEQ ID NO: 197830 - DNA, 122 bp, Homo sapiens
ggactctgactcaaagtgttatagaggcattacgtattgtacccgcagctgcagcctaagcgagctgcttcagcttcctagtcacaggatcccacgcgagaatagagccataggttagcgtc

SEQ ID NO: 197831 - DNA, 122 bp, Homo sapiens
gtaggcgcttaaagctgaccctctgctgtcaatgttgggacttagatacattttttgcatcgtcattcttgtgtgtgtttcccgtttattccattctaaggctcaggctcgcgctgtttctc

SEQ ID NO: 197832 - DNA, 122 bp, Homo sapiens
gtgcacttgaacggcagcttgtcgctgtggatctgctcgtgcctcttcaagtagctcaagcggatgaaggacttgtcgcagaactggcaagggtatggcaggcccgtgcccccttcctcctc

SEQ ID NO: 197833 - DNA, 122 bp, Homo sapiens
cagggccacgcatgtgcagtcaggccgggaggggcgggggcaggggcggggccgcccacacgcagcctggaggggctgggcctgaggcatctgcgtcttccgtgctctcttgcccgttcccc

SEQ ID NO: 197834 - DNA, 122 bp, Homo sapiens
ggtgacaggatcaggtttccatgcagcattttccacctgccccgaccatgaccacagccacggaccctctggaaagtcaagactgggagaagctcaagggcggcccaggctcaggcgacttc

SEQ ID NO: 197835 - DNA, 122 bp, Homo sapiens
aagacgagtctctttcccgctctggccgcacggctcgctcctcgcctcctcccccttcggcgggcaccgctagtaccgcgcaaccaaaccgccccctgctccaccgccgcctcctcaggccg

SEQ ID NO: 197836 - DNA, 122 bp, Homo sapiens
gagggcttcttggactggaggtgtgagcctcagtctgagtgggcagggaggtccatgtcccggcctcctgctcctgcctccagtctctggtagagggccaggtcccagtaggttttcctatg

SEQ ID NO: 197837 - DNA, 122 bp, Homo sapiens
tcacacccccttttgtccttccatcatctctccaggagtatccacttcttcatgaagcagcgtaaaaatacacaggtttccctgtttctctctttgagacaaattgtgctttccctcatttc

SEQ ID NO: 197838 - DNA, 122 bp, Homo sapiens
agggccaaagaaagtctaaccagacagttcctaacctgataaataattactaacatatgacgtgagtcttttccatgtgaatgtaaagagggcctgatatcttggcctgtttaaaggaaagg

SEQ ID NO: 197839 - DNA, 122 bp, Homo sapiens
gtgacggctcagtagaaaccgggtgacgctcctgcttgcagcgtttgacttgtggcttagcgtcattacccgcttacgttggcagaaaacatgttgtcaagtaataacaaaccttcccagag

SEQ ID NO: 197840 - DNA, 122 bp, Homo sapiens
tgaggcggccaccagcagatcatctccttaaaggttaattaagaacctgaagctggccagcgtgcgtggccgatgacggtggatgcggcgtctctccaggccattaaacactaattaggttt

SEQ ID NO: 197841 - DNA, 122 bp, Homo sapiens
gaagagcttaggtaggcagtctcgcggtgaccaatcagagctcagggcaagactttgtcccgccctacgcaactcgtccaggaagcaatcgccgctccgcggccttcctcctcaccccaccc

SEQ ID NO: 197842 - DNA, 122 bp, Homo sapiens
ttttccggcgcgggagaggtggtggcggtggcggtggcggcggcggcggcggtggtgggccggggggaggagaagctgccattagccgccgccattttgtcctcctgctgccgggcctgctt

SEQ ID NO: 197843 - DNA, 122 bp, Homo sapiens
gctgagtcttcttagtatagcaatgcattttttagagcagtgtttgaggcaaattattttcgcaaaattacatggcttctagggattagattgcatgagtttgtctcttgttcctccctcat

SEQ ID NO: 197844 - DNA, 122 bp, Homo sapiens
ccaaggacgatgcagtggtgctcatggctgcactgtctgtgacgggaagagaggaagccgcggtgcctctcagagcggaacacgcagtcgtggttcacttctgtgagtgagctacaagagct

SEQ ID NO: 197845 - DNA, 122 bp, Homo sapiens
ctttcctttcaacaaaaaagtctctccctattgtctcagcttcccttccgagccactgttcgcctctctgtgagttttgcagttggcgctcacctgcttggctggtgtgaaaggtgtgatag

SEQ ID NO: 197846 - DNA, 122 bp, Homo sapiens
atctatcctagccgggaggaatacgaggcccatcaagaccgagtgcttatccgcctgagccgcctgcacaaccagcaggcattgagctccagcattgaggaggggctacgcatgcaggccat

SEQ ID NO: 197847 - DNA, 122 bp, Homo sapiens
cccccagcgaagtgtctgcaagcagaacctgagaggggccggctgccccgagagtcctcgcgcttgggcagtgggaagtccaggggtttgtcgttctggtgacttcccccacctggctcagc

SEQ ID NO: 197848 - DNA, 122 bp, Homo sapiens
cacatggctggcttcctccccctgccctcctcaggccctgactcactggggttttgtgctcggactcaaagagctccattgacagcggggctggggtcggtttctctccacacagcctagcc

SEQ ID NO: 197849 - DNA, 122 bp, Homo sapiens
aaacaaatcgatgaaagaagacaagcggctggacatcgagagacatcaaggggagcatgccggcagaagagcactcagacagatgctggcaggccattgacccgcggaaggaggcggagttt

SEQ ID NO: 197850 - DNA, 122 bp, Homo sapiens
cccccagggaagaggacccaggcctggggtgaacgtggacgcagcatgtggggcgcagcccgagtctggctcttcttcttgaccagttgttaggtttcgggccccgctccttaggagaagtt

SEQ ID NO: 197851 - DNA, 122 bp, Homo sapiens
gagctgttcaaaatcccagggcctgggccatggtgcagaccagtgaaagcaccctcgtggcgcggggcccagatgtcagggtgtgtgaaggtctccaggagagtccagctgcactgaggaac

SEQ ID NO: 197852 - DNA, 122 bp, Homo sapiens
tccaagaacctggtgagagcttatagtgtcttgccacagaaaattacaatgtcaaaaaaacggattttagaaagatacactgtttgaaacctaaaattccaaaataatgtaacagaaagatt

SEQ ID NO: 197853 - DNA, 122 bp, Homo sapiens
cacactccctgcctggggaggacggacgtcatcccacacgccctgcccggggaggacagacgccaccccacactccctgcctggggaagtcggacgccgccccacaccccctgcctggggag

SEQ ID NO: 197854 - DNA, 122 bp, Homo sapiens
tttttttagtagagacggggtttcaccgtgttagccaggatggtctcgatatcctgacctcgtgatccgcccctcccaaagtgctaggattacaagcgtgagccaccgctcccggccagttg

SEQ ID NO: 197855 - DNA, 122 bp, Homo sapiens
ctgttagtgctcatctccagaaacccacagcacctgcccccacgaaatctgtggagaacacgagcaggcggtgcaaataattctgactcctcggcggaagaacaggaataagaaggcccggc

SEQ ID NO: 197856 - DNA, 122 bp, Homo sapiens
tcagcgagggcagctggactccggcacaatcctgagacactgtgaccgcggaggttttctcggtgtgtcgatggaagagggaggaatgtgatccgtcccagccgccggcggggccagagcat

SEQ ID NO: 197857 - DNA, 122 bp, Homo sapiens
acaggctgagcctccttctgggcagtgtggtgcagtggcatgccctggaaccagactgcccgcctgtaaagcctcgctcgagcatcttctggccgggaaacatgacttcaaaactcatcggc

SEQ ID NO: 197858 - DNA, 122 bp, Homo sapiens
aagcccaggtgttctgacgctaaatcctgtatgtttttcccccatacacggcttctttgccgtatctacttcctgtagtcaaattactttaaccttggtcctcaaagtagacaaaactccag

SEQ ID NO: 197859 - DNA, 122 bp, Homo sapiens
aactctggacacagagactcaggggtgctttcccggttggcaacacacactgatgtgttgcggggtgacgtgccctgtggggtgacacactctgaggacacagaagcttcacatttgggacc

SEQ ID NO: 197860 - DNA, 122 bp, Homo sapiens
ataaaagagaaattttaaaagtcttaatgaataaaactatattattacattagggagactcgtcatgttttattttatttccagaagaggactgtcagaaggacgtagaaggcacggtttta

SEQ ID NO: 197861 - DNA, 122 bp, Homo sapiens
aagatattacctgagattgggtgatttatacacaaaggagatttaattgactcacagttccgcatggctgggaaagcctcatgaaacttataccatgaaggaagagaaagcaggcaccctct

SEQ ID NO: 197862 - DNA, 122 bp, Homo sapiens
ttacagtcgtgagccaccgtgccccggctcctagttgtgtaattcttacgaagaacatcacgcagctgttaatgaggacttcccattagtcttgatatggcacactctccaagacatttaaa

SEQ ID NO: 197863 - DNA, 122 bp, Homo sapiens
atttaataaatttttctgcaattaaaaaaaaatcgcccaacagcagagcgggtcagctcgcggcgtccggatctgttgctcgcagctgcggccgccgcctccttttcactcctgcgcgcccg

SEQ ID NO: 197864 - DNA, 122 bp, Homo sapiens
cccgtggccttttatggcgagtgacattccatcgtttggatggaccacattttatttctccgtgtatccgtcgatggacctgtgggttgtttccgccttttgtctttggtgtgagcgactgg

SEQ ID NO: 197865 - DNA, 122 bp, Homo sapiens
tgggcctccgtgctgcgggttggagggtggccgattcctgagctgtgtttgaggagagggcggagtgccatctgggtagccgtccttcagcgttctgcaggaaggcaggaacccagctgtca

SEQ ID NO: 197866 - DNA, 122 bp, Homo sapiens
gtgctgagggaggaaccgggccgaaggaaggaaagtagacagaacagggcccgcgggaatcgagtgcagcaaaacagctccaacctcaatccaacgccagcgcccggcccgcacagcacgga

SEQ ID NO: 197867 - DNA, 122 bp, Homo sapiens
tgacggtgtccttacccaggatggccagcaccatgttgtctcggagcacctcaagcgagccggagcagacatagtaatgtgcctgcagggcatccccacggcgcaacaggtactcgcccgga

SEQ ID NO: 197868 - DNA, 122 bp, Homo sapiens
agcttgaggatgaggccggcccggttctttgggagcgtttcaacttcgcggcttggcgggcgtcggacctgcccggtcttggccgcggacgcgggcagatttggaagccaaccgtttgcctc

SEQ ID NO: 197869 - DNA, 122 bp, Homo sapiens
ctgtttggatctcgttaatctctgcaaaatccctgtgcccacaagctggcgtccaaaactcgcttctactggattgaagaatggcctacttcagttcaccaggggctcctaagggagacttt

SEQ ID NO: 197870 - DNA, 122 bp, Homo sapiens
ggcagcagccggctgctggtggcctcgtgggtgagtgtgacggcctgcctcgtcgggcggcgggaggaactccccacctccagccgcagcagcactctctgccagcctccctctgaacagga

SEQ ID NO: 197871 - DNA, 122 bp, Homo sapiens
tctgagggagggggacgttaaatggaggttcaggcagatattctaggcatcgcttaagggcgggattcgcggcttcctgcacccgccccatcttgagcattagcctcagagaaacaggggag

SEQ ID NO: 197872 - DNA, 122 bp, Homo sapiens
cgtcggcaggcctgggggtgtgggtcggccctgagcagctgttctgggagagccagtccacggagccaaagctggagggctgctgccggccacgaggtggggaggaggacggacgcatggcg

SEQ ID NO: 197873 - DNA, 122 bp, Homo sapiens
tttctttaactttaataaagctgcagtatcctggtttcacaggaactcctggcccttccacgaacattcaaaaaggatccactgtgttctataataagtatcataggaacccacccacaaag

SEQ ID NO: 197874 - DNA, 122 bp, Homo sapiens
attacaggaatatgcgggggtctggaggcaggcaataagcttggaagattgagataagctcgcagctgcaacttgttagcaatgctggaatggactgctggaatttcttagcctatgtataa

SEQ ID NO: 197875 - DNA, 122 bp, Homo sapiens
tgagaaagttacagaatgcatcgaccttccaggactagaattagtgaagagctggtgtgccgtaggcatggcttgataaccatgctacaaatcacatagcatgctaacatgcatctgggaga

SEQ ID NO: 197876 - DNA, 122 bp, Homo sapiens
agctcccctttaaagcaacatcaggttcaacgcagtgactgctcagtagaagccatggctcgcagacactgcttctcctactggttactggtatgctggttggtggtaactgtggcagaagg

SEQ ID NO: 197877 - DNA, 122 bp, Homo sapiens
gggttccgcagatccaccttggggtggatctcagacggggagactctgggcgacccgggccgtccgtgggggatggggaggggtcgtgacctgcgccccgggccggggtcactcaccgtcct

SEQ ID NO: 197878 - DNA, 122 bp, Homo sapiens
ggtcaagaatataacccgtgcttgccttcctgaaaaagatattctgattaccttttcttacgtcaaagaaattgttccagtaaaataattaaaggtactagatgtgacaagtcagtgtgttt

SEQ ID NO: 197879 - DNA, 122 bp, Homo sapiens
gctcccaggctcaatgcctacaggcggtctgtctttttaaggatcctgtttactaaggtacggaggcaatttgcttaaagttgctcaaagcactgctctatcaaatataaatgtctcccact

SEQ ID NO: 197880 - DNA, 122 bp, Homo sapiens
acaccactgctcccctctcccccggaagcccttgttgctagtagggggctgcatggcacgcgcccctttgcgtccagagaataccatagtgcgggggagcgccaaccagtgccaggacactt

SEQ ID NO: 197881 - DNA, 122 bp, Homo sapiens
ggcacgcgcgcgcagaacgcctgcctccggcgatgcacatgcgtacaccgccgcccgacgcgcatgcgtacaccgccgtccaacgctcctgccagctccgctcctctagtccaagtccttta

SEQ ID NO: 197882 - DNA, 122 bp, Homo sapiens
taccttcagtcgggaatcaatggtctggtcgcagattggtgacatcattggcgcgccgggcgtgggaggaagaaccacgtgattcaacctcttttgtttgcgctctaggaaattaaggtttt

SEQ ID NO: 197883 - DNA, 122 bp, Homo sapiens
cgcctctggctgtgcggttctcagatggtggcactcaatttccagacggcaggtaaaggccgactgaaggtagtcccgtccctgcaaggtggcggttgcagtcactccaggccgagtcacct

SEQ ID NO: 197884 - DNA, 122 bp, Homo sapiens
atggagcagctcctggccagccctcccctttggagaccgccagtgccccccaacccctgtcggctggaagcctttccgggtgagcgctcccctagggagaagcttgacatgactcgactcgt

SEQ ID NO: 197885 - DNA, 122 bp, Homo sapiens
ggctcatggcttaggggccacagatttggggctcgggcggggctctgggcacgtggccggcgggcctgggtgtttgcctgagtcccgcagccgcggcccgggcgggcagccagacaggccgt

SEQ ID NO: 197886 - DNA, 122 bp, Homo sapiens
gctggcagtaaaatgggtggctgtgtttccctgagcctcggtttcgccagctgtgaaaggcgctgatggccacacaccctatactggttaagtgaacttggggacaaacatagagggtagag

SEQ ID NO: 197887 - DNA, 122 bp, Homo sapiens
ggagcatctccgcagcagctgcaacagccgcacgaaggtagctccgggcggggagcgaggcgctgtcctcggtgctgaaaggccgaggcgcgcggtgggcgcgacagccccggagacccgag

SEQ ID NO: 197888 - DNA, 122 bp, Homo sapiens
ccaggccctctccctctccagatgcctacagcacaccagacagtaggctccttgctggcacgaaccacagcctccagctcatggctctcaaatgcagtgcaggtatgcatggttctcttctg

SEQ ID NO: 197889 - DNA, 122 bp, Homo sapiens
aaaagggtatgtttctaaggtgtcgctgaatgtaaggttactacctttcctgattatgaacgaaaagaattttaaaaactaactccaaagcaacataaggaaaatttttaattaaatgcatt

SEQ ID NO: 197890 - DNA, 122 bp, Homo sapiens
ccacggagaccgccggagtgaaggtctgcagttgaacaagataaaggaacaagaacaaaacgactcaaaactgttgtaaccataactcccttgcaaaggatttaccgtgtatttttcttagg

SEQ ID NO: 197891 - DNA, 122 bp, Homo sapiens
tccaccatctgaacatcaggattccgcctgggtggagatggctgtgagggagctaacaagcggaacagcatctcccacaacatgttttaaaacattcacaacactgaccctcaagtttgtgc

SEQ ID NO: 197892 - DNA, 122 bp, Homo sapiens
tcacagaaaccagccccccacaaggtgagggctttattgtgaccccaaagcaggacctggcggagagaagctgtggctccgagggaggctcttgacaggcactaatgggctcgccagagcca

SEQ ID NO: 197893 - DNA, 122 bp, Homo sapiens
gacatgggcagaccaaaagtagtcttgtctcataacacaatcctgcacctttattcatatcggtgatccaggaatagatttgagttggtcagattctctctcccaggaatttgaaaccagga

SEQ ID NO: 197894 - DNA, 122 bp, Homo sapiens
gggacgggacggggcccagggatgggacagcaaccggggacggacgtggggggtgcggagcgctgtcagcccaccttagcgcttcccagtgcaggacactgttcacaacatgctgccaggta

SEQ ID NO: 197895 - DNA, 122 bp, Homo sapiens
actgacagactccattcttccctcccagcagctccagaaaagaatcgaagtagctattgacggattcaaagcttccccggaggtgccgaaggccccagtctgaataggactcctccgtgtca

SEQ ID NO: 197896 - DNA, 122 bp, Homo sapiens
gattttgtatttttagtagagacggggtttctccatgttgtgtcctgacctcaggtgatccgccccgcctaggcctcccaaagtgctgggattacaggcatgagccaccgtgcccggccctg

SEQ ID NO: 197897 - DNA, 122 bp, Homo sapiens
tggcttcccctagtgaatcctgtgctggggacacgctagcagagctgcctgccagtcccgcgcaggcacgcccacacccctcagtccttgggcagtggatgggaccgggcgcctaggagcag

SEQ ID NO: 197898 - DNA, 122 bp, Homo sapiens
aacctcagaaacatgcattgaccttcaactgcgtgcagtcagggtgaggaggggtgagggcgccaggagactgagggtctggccagagataagacccacaatttcttccaaactacaacttg

SEQ ID NO: 197899 - DNA, 122 bp, Homo sapiens
ggtctcagctacttgggaggctcaagtgggactgagcccattactgtatcgctgcactcccgcctgtgtggcagagcaagaccctgtctcaatcaatcaatcacaaaaaggggctagtatgg

SEQ ID NO: 197900 - DNA, 122 bp, Homo sapiens
cctgggcacacgagtgtttcacgacacgctgcacgtgagcggcgtgtacaatggggctggcggggacacgcaccgggccatgctgcccagccccctcaacgtccggctggaggcccctgcag

SEQ ID NO: 197901 - DNA, 122 bp, Homo sapiens
tttcttttccaagagtccccaaagctgtgtgcaacttctcacgatacctttaactactcccgacactgagttcaaacagtgtttgaactgtaagtaattctttatccactggcccctgagca

SEQ ID NO: 197902 - DNA, 122 bp, Homo sapiens
tggctggcacgcctgatgtttggaataggctcaacccagtcaccaaatagctcttttgggcgagtcacttcatcgtccctgccctcattggtggctagcagtcccagcatgggagcccgcag

SEQ ID NO: 197903 - DNA, 122 bp, Homo sapiens
atttcccaccttcaggtagctggaaaccccacaaaacgaggatcatgcccatttaaatcccgcagcattctccctctcgttctactgatgccgactggatcattgtacttgccaagtacagt

SEQ ID NO: 197904 - DNA, 122 bp, Homo sapiens
ggacggagctgtagcggcactgtaactgcgagggcagcgccgcgtgtgtaacggcgggggcgtgtcggcgggaaggacaatcgggccgggactcgcggtgtccgggtgaccgcggcttcccg

SEQ ID NO: 197905 - DNA, 122 bp, Homo sapiens
tcactcttccctcaggttccctacatagtttatctctaccccctctaagccgctcagtatcgcccattaaagaactaaaccaaaactagaaaaccctcatttaacccttcactccccctaca

SEQ ID NO: 197906 - DNA, 122 bp, Homo sapiens
atgggtgggagaacacgccccgaggtgctgctttggcagagaagccctgtctgcgagccccgaggcggagatggctccccaagcctgatgcagacaagagagcccgcccctcccctgtcccg

SEQ ID NO: 197907 - DNA, 122 bp, Homo sapiens
ccaccccggccgcctcgccagccacccggttccaccgtccccggcagggagcccaggggccgcaatgcatgggcaccgcccccgccactgccaacaccttccccggccacccggcaggcccg

SEQ ID NO: 197908 - DNA, 122 bp, Homo sapiens
ggctgcccacgctgctgctgggtaaaggcaccatccccgtgaaccgagctcggcaggtgccggaactgagtccaggtccagcctttcaccactggccactcgcagcctccctcaggcccatc

SEQ ID NO: 197909 - DNA, 122 bp, Homo sapiens
cgacctggaggcgccgcacgaggacgacgctgagggggagggggagtgggactgagcgtccgcagaggtgaccgaaaagccgtatgatgatgttcccgatttctctgttggtcggagtcggc

SEQ ID NO: 197910 - DNA, 122 bp, Homo sapiens
tcactgtttttgtttctcattcttatcttcctgctcatggactttattctgcattgccttcgaagcttcctgaatgtcttgtgtatctttcatcttggctagaaaagaagtctcttttcttt

SEQ ID NO: 197911 - DNA, 122 bp, Homo sapiens
gcaagtagtacgtaccctctccacctcgcaccttgggaaagggggctgcggggtgggccacggcagggccctggcggcttccaccagttccgctgtgtttcgggagcacagtgatagcttgg

SEQ ID NO: 197912 - DNA, 122 bp, Homo sapiens
ttgggggtcggtgggggtggccacggctcacacgcccttccatccgcagcctaactgctacgccaaggtcatcaccatcgagtcccagaagaagatcgtgatctactccaagcagcccattg

SEQ ID NO: 197913 - DNA, 122 bp, Homo sapiens
ttcttggttgaactttattttgggcctcttctttgagctgggatgccgttttgccccctacgcccgccccgtctaggagcctcttttcctgagaatctgtgtttctgtaagggcccttgttg

SEQ ID NO: 197914 - DNA, 122 bp, Homo sapiens
ttgccatgtgggatctgtggcttcccagggtgctcggtccgacctgtcttcttgttgacccgcgtggggcccgggcatgactggacacgcccccaggcctctcctggcactatctgggttca

SEQ ID NO: 197915 - DNA, 122 bp, Homo sapiens
ctccgaggggcggggctggtgcaactccaaaatggctgccgcggggagcggcgattagaacgggttccagtcgcttgggggcgttggggggctggagggcaagaggttacgcgccccagctc

SEQ ID NO: 197916 - DNA, 122 bp, Homo sapiens
ggggcccgaggaggccaaggcgccagtgagaggcggtgagttcattccaccctcaccacccgccctccatcccacccacttctccaccccacccgccccgtccatccatccctcaccaccct

SEQ ID NO: 197917 - DNA, 122 bp, Homo sapiens
aactcaggcccgaaggcgaacggcgaatgcagcatcgggactcgaacccaagtctgtccccgagtgcggggctattccaggctcggtggtcttgacctccacggccctcctccttgttgcct

SEQ ID NO: 197918 - DNA, 122 bp, Homo sapiens
ctaatacagcaggactgcaatggatgctgtggtgtgccactcagatgccctattcaggatcgaggcagtcattcacagctgagtccctccccaggaatctccctccaagggagagagctggc

SEQ ID NO: 197919 - DNA, 122 bp, Homo sapiens
caccgtgcgctggaacggctcgcgcatcgcgctcccctgccgcgcgccacacttccacatcgacctggatggctacctcttgaaagtgaccaccaaagcaggtggggcgtctgtggcctccc

SEQ ID NO: 197920 - DNA, 122 bp, Homo sapiens
ggatagagctccacgtgtccgacatcctagtctcccagccctgacacctctcgaataaggcgcggcggactagcacctcccagcactcgctccaggatatagccaattctcacgcggacacc

SEQ ID NO: 197921 - DNA, 122 bp, Homo sapiens
gaatttcaaactgagcaggggcaaaaccgatatgttagtaacaaccagaagttccattctcgattcgaaattccattgccaaatatttctaccattcctgagtcatctaatatttctagaac

SEQ ID NO: 197922 - DNA, 122 bp, Homo sapiens
tcgtccgtcccctgcttggccacctcccgagttgtcagtctcatcacttcctgggcagcgcgttccgtttggggacccttaagaagcactttgatttcccgacccgagaccccccactaagc

SEQ ID NO: 197923 - DNA, 122 bp, Homo sapiens
ggggggcgggaggatacatctcctgttgcaatctctcgttccaatatgaatttgtgaccccggaaagactgtgcgggtttcaaaagctgtctgaaccaagattctgagcaggtgcgaggctg

SEQ ID NO: 197924 - DNA, 122 bp, Homo sapiens
ctctcctgcatcaccatcattgtgggcagcatccgcagggacaggcaggcccggcttcagcggcaccgccaccgccaccaccgccaccaccaccaccatcatcaccaccgccggcgtcgaca

SEQ ID NO: 197925 - DNA, 122 bp, Homo sapiens
aggcaaaccacaattacaatgttgaactcactggaaagccccgctgcacctctctaaccccgcattcctccatttaggcacttcaacttgttacatttgggaatagctttattattcaaggt

SEQ ID NO: 197926 - DNA, 122 bp, Homo sapiens
aggtggtgggggagcccagggccaacataccttgtaaataggtaaataaaagcagacccccggcctgcctgcctctgtgcctgcggccctcacaactgtcaccggtgcatccctgctgccct

SEQ ID NO: 197927 - DNA, 122 bp, Homo sapiens
agttactcccaacagtagggtcactcttctcagagaactattgggattacttacatcgctcggttgttacgcacactacacaacagggaaacttgttcattcctccgtcccaaggtttgtca

SEQ ID NO: 197928 - DNA, 122 bp, Homo sapiens
cccagaaccaccacagggggaggcatcctcattatcaggcccacactgcacctgaacctccgagaatggggagattaaaggcagatgcaaccaatcatgtaggcgtctaagtcagcttatgg

SEQ ID NO: 197929 - DNA, 122 bp, Homo sapiens
tagctactagttgagtttacccctatgtaataaatctggcaataaccctgaatctcatcacggcactgaatcaatggcagtaaaatagtaacttctctttttagtgcctttgcaaattcaag

SEQ ID NO: 197930 - DNA, 122 bp, Homo sapiens
cgcggagaacaccggggacttttcgcgattctgccgcgcgagtgtgtcctgtattccttccgcaaacgtttatcaaacctggcaaagatacttccgatacactcgcagaaagtgccgggggc

SEQ ID NO: 197931 - DNA, 122 bp, Homo sapiens
tgcattttctcctcttagggccactggtgtgtctcacctggaacctgctcaccaaaaacccgtctgttacttcacagatcctgccacgcgggagcccggcacagcttggctgaggtctctgc

SEQ ID NO: 197932 - DNA, 122 bp, Homo sapiens
gagggggtcgagagggagtcgaggagggattccagctccagtttgggtaaatccagctcgcgttttgtctctcgctcaactgtgcagggtccagcgaaggcagagccccagcttcactccct

SEQ ID NO: 197933 - DNA, 122 bp, Homo sapiens
ccccgctgatcacaatgcatgccaaccgcatcctgagtatttggcccccaatttcccgaccgactctgccctcgctgtgacccgggacctccccgtgtgggtctgctcagggagcctttgtg

SEQ ID NO: 197934 - DNA, 122 bp, Homo sapiens
ggcccagccaggagagctggagaggcagccaggatcttccctcagagcctggcgagggggcgcggcccagccaggagagctggagaggcagcgaggatcttccctcagagcctatctagggg

SEQ ID NO: 197935 - DNA, 122 bp, Homo sapiens
acaattgttaaagaaggagctgcttctgcagctccgatgacctgacgtcacagcggcggccgcactgcaaatgaagtggaggccgtttcccaggagggccagtccactgccgctcctgacac

SEQ ID NO: 197936 - DNA, 122 bp, Homo sapiens
gctcttcctgcttgtgctggtcttcttcctcatgggcctggtaggcttcatgatctgccacgtgctcaagaagaagggctaccgctgccgcacgtcgaggggctctgagcctgacgatgccc

SEQ ID NO: 197937 - DNA, 122 bp, Homo sapiens
gaaagagggaaaatctgtttcagtaggagaccttctcacctctttactcataagccagcccgggcatcatatgacttcatcagactgcaacttactgttctcccctttgtggggagtgtcaa

SEQ ID NO: 197938 - DNA, 122 bp, Homo sapiens
ttactcttaaagcagcttagattgcatgttttcttcagggtcattggaaaaggtggttaccgtcagtccaggaagtggggagccagctaattgtatccagatggaggtacagtggacgcttt

SEQ ID NO: 197939 - DNA, 122 bp, Homo sapiens
gcgcgccttccgagcctgctttttagggcggatggcagccatgctgaagtgcgtgatgagcggcagtcaggtgaaaggtggagcggcctttgttgtcttcccatttagcagagagaaaagca

SEQ ID NO: 197940 - DNA, 122 bp, Homo sapiens
ggcagcctgggggcagatgctgctgcagggcgtgtctggggctgtgctcatgtgatgaagcgagggaaaaaccggggggaggggggcggaggctaagaggtggcctttttttttttttcctt

SEQ ID NO: 197941 - DNA, 122 bp, Homo sapiens
agtttgtgttcattaactcgaggccatctggtgcagacacgctgccgtctgtgaatcaaacgtgcatcaaactccagggatcagaacgcgtgccagagccagtgttttggagagtcaacaac

SEQ ID NO: 197942 - DNA, 122 bp, Homo sapiens
ttcattaaaaaaaataaaaaatactacaaaaaggatcattcggagaaccaaagtgagctccgggaaaattaaatacgtgagagcagaaatgccaattcagtacaagagtctggagttgaaat

SEQ ID NO: 197943 - DNA, 122 bp, Homo sapiens
tctgtactccgaaaataatttcagaacctaccggtgttttgaaatctcacctcctttttccgtttctcctctgtctctagttgtctttccctctccctccttcacaggcagagttgaataaa

SEQ ID NO: 197944 - DNA, 122 bp, Homo sapiens
atttattcaccaatatttattagacccttgatatgttcaagaccctgtagctggtgctgtcggagtcactaagatgaactatataaataactactctatgtgtacgaataactaccctacaa

SEQ ID NO: 197945 - DNA, 122 bp, Homo sapiens
gtccccttcccatccatccacttcttccagacacagcaggaagaggccctctgaaggggccgccggcccccagacaccatccttacccccccaccgaccccacagtttgtccagctgttctg

SEQ ID NO: 197946 - DNA, 122 bp, Homo sapiens
aagatgaaaagaattagatcctcttgaaaatactctaataactaacatttcttcaacattcgcaatatgcaaagcacctttcataccttgactcatctgaccctcctaacaaccctctggga

SEQ ID NO: 197947 - DNA, 122 bp, Homo sapiens
ggtacaaggtattatttttttctaccctcagtcacttagtggcaggggaagtcatagtcacggtgcttaggagatgaaactttattgatttaggcatggatccatctagtttaattaatata

SEQ ID NO: 197948 - DNA, 122 bp, Homo sapiens
tttgcttcctccttcttttccaggacccttagcgacaggagaggaagagaagcggcccggcggtttaattgccaatttcctgatgcagccacagggcccagcagcggctcagcctaggccac

SEQ ID NO: 197949 - DNA, 122 bp, Homo sapiens
cggacaaagggacaacgtggcggtggacgaaccagggccagagagggccgctgtggctcccgctcttcgggccgaagcacccaccacgggttcgttattaacgcgctgggaagtccgcaatc

SEQ ID NO: 197950 - DNA, 122 bp, Homo sapiens
aatggtgaagggcattcacaaggggacgtttcactggggcctggccatgtcatagggtcccggctggctttctgctgtgagtgatccacaggccaaatacagacagcatagatagaaggcct

SEQ ID NO: 197951 - DNA, 122 bp, Homo sapiens
aaagattcaagagtttactcttcgcccaatgcccacttcagctaggggttcctggaagaacggggctgtggagtatctcagaaaactttcctccctctactgtcttcaggccccaggagaca

SEQ ID NO: 197952 - DNA, 122 bp, Homo sapiens
gatggccaccaccttcagcgtggccggggggctggcctgcagtccatcgctgacccggaacgtcaagtcctgtgcaggaccaccgcggtggacatagactaggctgccggcctccaactccc

SEQ ID NO: 197953 - DNA, 122 bp, Homo sapiens
cactggccagctcttccccctccccctccccctccccttcctctcctctcctctcttccccgctgccctccctgctgcagcctttgccaaagctcagggaggggaaagctgggccaaggaag

SEQ ID NO: 197954 - DNA, 122 bp, Homo sapiens
atagagagagatttaacagtatgaatgaagggaggagtcaagaacagtttaggcttctcgcgtacatgattgggtggccccagatgtcattcacaagtataagccttggaggcggaacataa

SEQ ID NO: 197955 - DNA, 122 bp, Homo sapiens
tccttgtttctaaataaatgagattgttttcccctttttctcaggaggcttgagttggctcgtttcccaaactcaaccttttggatagtaaattccttttgaaaagaagcacgaagcccttt

SEQ ID NO: 197956 - DNA, 122 bp, Homo sapiens
ctccactcttgatcaccaggagagctaaacaagactcaaggctgtgctgagcctccctgccgtcctctgctaaatcttgcataagaaagcgataatgatgtcaagattttcaaggagactct

SEQ ID NO: 197957 - DNA, 122 bp, Homo sapiens
ggtgatccacccgccttggcctcccaaagtgctgggattacaggcatgagccactgcacccggctgccgctcttaatttgagaagtccatcacacacattcaacttgcagtaagcacccttt

SEQ ID NO: 197958 - DNA, 122 bp, Homo sapiens
ggtaagtgtgggcggggctgacgtgagcctggtacaggttccccccacatcgaatctctacgttcaggggcccgtggccctcgggaggtgggagagctgggagtgaggcctcctgtgtgggg

SEQ ID NO: 197959 - DNA, 122 bp, Homo sapiens
ctgctgctgaaaaggggtatttgaaggcaaagtgcatggcagaaggaagcctgtaggtggcgctatggctccggttgccgagctgctcccaggagattcgttttcagaggatctgagaaaaa

SEQ ID NO: 197960 - DNA, 122 bp, Homo sapiens
catctgcccacaactggaactgtttatttgtttagcccactggtaagaaaaatgagagagcgggctggcattcctggctgggcataaacacgtttttaaaaaatgtctgttccaactctgtc

SEQ ID NO: 197961 - DNA, 122 bp, Homo sapiens
gcggggagcagccgcaccttcttctcgtacacgtgctgccacacgataccggcaaagaagcgatgctgcatgatctccttggcgtcctcggagcccccgccaagcctgcaggcaggaaacaa

SEQ ID NO: 197962 - DNA, 122 bp, Homo sapiens
tgcctcacatcggcctccttcacaggcctgggtatggaaatgcctctcttccaccagcctcgagtggtcaagcgcaaagccatagcagagagagctgcggtccgaaaactgtctgtaggcgc

SEQ ID NO: 197963 - DNA, 122 bp, Homo sapiens
gcctgagcgcgagcacagacgtcccggcagcgctccagcctcagcgtggaccagccccagcgtggaccagccccagcgtggaccagcctcagcgtggaccagcctcagcatggatcagcctc

SEQ ID NO: 197964 - DNA, 122 bp, Homo sapiens
gtgatgcatctttagatttttttcccccaccaggtggtttttgacactctctgagaggaccggagtggaagatgggtgggttaggggaagggagaagcattaggaggggattaaaatcgatc

SEQ ID NO: 197965 - DNA, 122 bp, Homo sapiens
gtcacaccttctccctcgggaaggggctctttcctgctcaagttgcgtagcccgcatgcccgcccaccccaggagaacctgcaggagacggaggcattgtataaagggctggtggggaggcc

SEQ ID NO: 197966 - DNA, 122 bp, Homo sapiens
gcttgtacaagaaggtgcttagaatcaggctcactcttccacactgttaggaagcccctccgctctttccagagccagaaagtagtagttttggggttgagacttatccatccatccatcca

SEQ ID NO: 197967 - DNA, 122 bp, Homo sapiens
tggttttcggttgaaccgaaacctggccgttggctgagcgagcgcggggtgtttgggatgcggcacggcgagggggagcaggcttggctcgggcgtagggaattggtttttttgttttagct

SEQ ID NO: 197968 - DNA, 122 bp, Homo sapiens
tttgagatacatagaattctaatttatttaattattctaaaaattccaatcacaatggcgcggcgttagccaccacaactttgcagggcaaaaaaaaaaaaatacttcctgaactaacatat

SEQ ID NO: 197969 - DNA, 122 bp, Homo sapiens
ccacgttgaactcagtgtggacttgtggcatcttgcgggcctgtagattaatatgacagccgtgattccaccctgcttcaccaacgcacatgcgttttctctcctcttaggggccctgtttt

SEQ ID NO: 197970 - DNA, 122 bp, Homo sapiens
ggcaatttctttaaaatttaaatacacaccatttcatccactcattccactgggtagaagcgtgatgggtatgtcagctattggattgtggtgacggtttcacaggggtacatatgtgaaaa

SEQ ID NO: 197971 - DNA, 122 bp, Homo sapiens
agaagtaggggcgaggggcggtcaacttctgggaatggccaagaggggtgctctgaggcccgagccggggtccggtgcccgcggccggcggccggggtctgtttactccggcgacgtgcgga

SEQ ID NO: 197972 - DNA, 122 bp, Homo sapiens
tgcatataggattccgtccgcaggaaccagctgctcactctgacccacgatacagcagcccgcctggtccagcagcacttgcatctggtcagacatcccctgttctcagtgacttatggtaa

SEQ ID NO: 197973 - DNA, 122 bp, Homo sapiens
gggaacgagaaaggaaagacttcccacaatgcaaagctcttcacggcagagccggaactgcgggaccggaagcggaaacagatcgcaagcagaaggggcggagcaaaagcggagggcagctg

SEQ ID NO: 197974 - DNA, 122 bp, Homo sapiens
ggcaaggtaaagatcaatagtaagtggataattaatagtagcaccagtgaaaacctcaaacgcaataggctagtggcaggagttctggaacactccagtgtggctgcagggatacagcacat

SEQ ID NO: 197975 - DNA, 122 bp, Homo sapiens
tgagtcatggatgaaaaatcaacgacagaagagcccttgggtccacagtcacacttttcccggggactgtaggagctgcctgggacaccctctcctttcagaagatgtgtccctaacttgga

SEQ ID NO: 197976 - DNA, 122 bp, Homo sapiens
cgagcagggggcgggctcgcgagatcagctgcttctggccgggcgggggcgtggactcagcgttctgggtggccaggccgtcgacctgcggcctttgttccgggccgctgccaggcctgagg

SEQ ID NO: 197977 - DNA, 122 bp, Homo sapiens
ccgagcctcgcatccatcggagggagccggggactgacagctctcaggtaggcaactgcacggggcccccagcccgaccgcgactaactggactaactgcgtggagctccgggagggcaggg

SEQ ID NO: 197978 - DNA, 122 bp, Homo sapiens
tcccccaccctccagaggggtaaccagtgttaccagtttgctgtgtttcctgctacacctcgccttattcacttccatttgtatctgaaaaacgtgttgcatggtttcttttctatagaagt

SEQ ID NO: 197979 - DNA, 122 bp, Homo sapiens
gaacgattgcctcagcgcgtgccagactctccaaacataataacagatgacgtttggggtcggctccaggcggtgacgtgctggccccagagaatattgtctctgctattacaacagatgct

SEQ ID NO: 197980 - DNA, 122 bp, Homo sapiens
actctgaaagccagcttattgccgactactgagaacgaaccctgcggtctaggaaatttccgtgcttctcacatttgagttatgcgtctttgctttttttcacgtttgttgcagaggctaga

SEQ ID NO: 197981 - DNA, 122 bp, Homo sapiens
aaaagggaggacataattgggctctgtgcttggagccggcagcgcaagccgcctctagtccgggacaacaatagtagcactgattcttttaaacgtaattaatgtttaaaattaacaaataa

SEQ ID NO: 197982 - DNA, 122 bp, Homo sapiens
caacatcaccaaatcttccctttctactggattctttccatcaacatgatgcttttgtttcgtatcttaaaaagtccctctttacccagtttttcattagctacttgcccattttcttcttt

SEQ ID NO: 197983 - DNA, 122 bp, Homo sapiens
cgctcccggtccggtcccgattggcagaaaacgatacgagggcggtatacactcaacacgcgcatgaacgattcatcaagccctccgtgtgccgggtctggctcaccaacctcatcctctga

SEQ ID NO: 197984 - DNA, 122 bp, Homo sapiens
ggcaggaggcaggtgcattttgagctcttcctaaagtggactcctttgctttgcacttctcgagctttctccccgccaagagccttcatcaccacttagaacattgccatcttcctagtgcc

SEQ ID NO: 197985 - DNA, 122 bp, Homo sapiens
caattaggagagagcagtgctgggcaggaacagtagacctgctgggggaagttgatcaaccgcatggtgacacatttgctactttgtcattttctttttttcacattttgaagtcaaacact

SEQ ID NO: 197986 - DNA, 122 bp, Homo sapiens
agcatattgcatgtgctcaccaacaagcccattatcatcagatactgcctgttctctcctcgtcccctgggccattctaggccccaagtgagggttcttggatctcacacaagaaggaattt

SEQ ID NO: 197987 - DNA, 122 bp, Homo sapiens
gctggtgctcgctgggaacctgggaacctggccctagccaccagagagctagatcttatacgcactcctcccttctcattcccctctcagcgaggccaggttccaaagccctcgtcccctct

SEQ ID NO: 197988 - DNA, 122 bp, Homo sapiens
agagatgcagtggcctctcctcccctctcctccccatctttctaatccaggccaggcctgcggtcctggccaggccgtttcaggaacagccagggcctcggacgagacacacgtccctcacc

SEQ ID NO: 197989 - DNA, 122 bp, Homo sapiens
tgtgcacagatatgctgtctggacatgcacacacgtgcagatatgctgtccggatacacacgcacgcacacatgcagatatgctgcctgggcacacacttccggacacacatgcacacacag

SEQ ID NO: 197990 - DNA, 122 bp, Homo sapiens
taacagaggagcagggcccagacagggcacctgggggtcaggatgggcctctgctggcgacgtgaccaacgtgtcagtgaacacctgaagcagggcaggggccagccacgaaaagacagctc

SEQ ID NO: 197991 - DNA, 122 bp, Homo sapiens
cgttcttcccaatatgccatgtcacctttgtagcactcacacacttgcagggaagggactcggggttgggggtggttctgatgtagaaattgcagatggagagctgggctctggggatggaa

SEQ ID NO: 197992 - DNA, 122 bp, Homo sapiens
gtggtgcttgatgctatagacacaatgcagcgagtcgcctggcatatcaatgacatgaagcggaaacacgagcacgcggtccggttacaggtgagcccgcgaggtgtcggtgcccggcaggg

SEQ ID NO: 197993 - DNA, 122 bp, Homo sapiens
gcccaaacactccctacaacttcttcaagtcaaacttgggcaaggttggctggctgactgcgagaggaaaaagagggcgcggagggggcgcggcgcgcggccgggtgtagaggccacggagg

SEQ ID NO: 197994 - DNA, 122 bp, Homo sapiens
gctgccctgagaccctgcaggctcagcgccaggggacgcaccccgctgcgctccgacccgcgtgagccccaggccagtactgccctggtacccttgccccaggacgggggccgcggggcgcc

SEQ ID NO: 197995 - DNA, 122 bp, Homo sapiens
catgtgggccggtgaagcccacgctggtgtgctctagcgcggtggggagctggtcttactcgcagcagaggcggcagagggtgtgttctggggagggcctgcccaaggcggacctcatggcc

SEQ ID NO: 197996 - DNA, 122 bp, Homo sapiens
ggttctcgacagcacagagcctcacgcaatgtgcaggcaggtggtgctctcgctccaccacggcacctctgcggtctctgcagccgtttgcatttcctgaaaccggatcttagtgtcagagc

SEQ ID NO: 197997 - DNA, 122 bp, Homo sapiens
ttcccccagagctcctggatgtggattctccccatctcttctgtcccgtcttccttctgtcgttctgtcttctccccatcttccttctgtcgttctgctctaggcaaattctctcagctttg

SEQ ID NO: 197998 - DNA, 122 bp, Homo sapiens
gggctctgattggaggctgaggcagctatgttgggaatgaggtacggggctgagtctccccgtctggatggaattagattgagagatgcctggactctgcactccagggctgccatgcagtc

SEQ ID NO: 197999 - DNA, 122 bp, Homo sapiens
tctttctgcgggtcgaagaaggacccgcgggagctgagaggcccaggtcggaagcactcccggctggcccaagagtagaggcgaagagcgttgagtaggcatccatggacttttctttctgg

SEQ ID NO: 198000 - DNA, 122 bp, Homo sapiens
gggcggcgcgggcgttgccacgacgcgggccgcgcgcgtccctggcagccaacccgtccacgtcaaggtttgtttaataatcgccagggtatctatggccgggctcaggcggctgctgggga

SEQ ID NO: 198001 - DNA, 122 bp, Homo sapiens
tcatgtcgtggtgggagcctgaggctctgggggggtgggggaggtgcctgagagggtgaacgtccttgcacacgtgcttgggtgtgctcacgcctgagcgtgtgttcactgaagtcctgggt

SEQ ID NO: 198002 - DNA, 122 bp, Homo sapiens
ccggaatcgcctttttgttttggagctgccttctcgctggcggagcggagggtctgcgagcgccggggaaggcaggctgggggcgcagcccgccccccactggccgggccccgcagggcgga

SEQ ID NO: 198003 - DNA, 122 bp, Homo sapiens
gctcatctgctgcagatctcatcaaggccctgcaaagcatccacggcacgttacgctttgcgtttcacagtgaatcggctgcaatcagtcttcctgcagccctcccttacccccatcacctc

SEQ ID NO: 198004 - DNA, 122 bp, Homo sapiens
ccatgaaaggttcggagtggaggctcagccccccccccgggctcgaatctctcactcctccgttagattacgctggccaccagccagctagattcgtggtgctttctgagcccccagggcga

SEQ ID NO: 198005 - DNA, 122 bp, Homo sapiens
ggcgcggaccccggacccggtgcccaaggtcgcctatccccgccgcggcatgcggtggttcgctctccgcacttccctgtttggggcagttaggtccgcagaagtctgtccgcgagctgtca

SEQ ID NO: 198006 - DNA, 122 bp, Homo sapiens
ctcattttctctttcgagctaaattctattgtagagtcttcccttccaacctttaaaaagcgaccctgtacctttaatagtggagacctggtgagaggttcttttccaaacttgttccctgg

SEQ ID NO: 198007 - DNA, 122 bp, Homo sapiens
aattgggcagctcctgccgctgtaaacaaaccccagactacgacccgccggggcggcctccgccgcaccagttctttctcgaggttctgggggcccaggtccaagatcaggacatcaatcgg

SEQ ID NO: 198008 - DNA, 122 bp, Homo sapiens
ccttggtttccatagtgaacggaggaaggggggtcaccccagagcctctagtgggaagtgcgcatgctcgcagtgcaggggcccagaggccctggatgaaatgtgaatcctctggctcttcc

SEQ ID NO: 198009 - DNA, 122 bp, Homo sapiens
ctttgactctggacatgagtctttggagaaattctctttggtaaatgcagttcactcacacgcagtgaaaacagccatcaaaagctttcataaagaggctgatagtatggagtaataactac

SEQ ID NO: 198010 - DNA, 122 bp, Homo sapiens
gcctgcgcaataagcctggggaggtgccagctccggcaggcattgggcacccgggagtcccgccgctgtggccgcgcagggcaccggatccctccaggatcccaggctcccgacgtccagca

SEQ ID NO: 198011 - DNA, 122 bp, Homo sapiens
aggcaaatgtgagcgcgaatgtccagcccagggtggtggaggtagctgggccttccctgccgcggaggcggcaaatgtgagggcgaatgtccggcccagggtggtggaggtagctgggcttt

SEQ ID NO: 198012 - DNA, 122 bp, Homo sapiens
cagcccctggtcctctacaatcccttcaccccagccaagtactctctggaaagacagattcgagggtgctcgcatctcctcactcagctgccctgcaatcattaaactctttctctactgca

SEQ ID NO: 198013 - DNA, 122 bp, Homo sapiens
gcatatgtggggccaacctcagcagaaatccacgtgcacctccgcaggcagcgcgtcccccgcacacccgctgcccgcccggctttcactccagaatggcgctgcccgtgcctgtacagaca

SEQ ID NO: 198014 - DNA, 122 bp, Homo sapiens
tcctgcattccttggcccagttctggagttggtgacctttatcacaattattattttaggcggccagtgaactgctgcttcagaagtccatagcccagctctgaactttctcgataaaatgc

SEQ ID NO: 198015 - DNA, 122 bp, Homo sapiens
agctgggtccgggtggacactgcaccccacccggcaagcaggagagagaacccagaagaacggatgactccctcacacgcctctttctaaagcatgctggcgctgaataaccacaggggtcc

SEQ ID NO: 198016 - DNA, 122 bp, Homo sapiens
ttctatacgtgtcccccacccctccagatggtgaccccagaggaagacgtgcattgggtccgctggccccaggccagtgtctctcagccatgtgctcaacacctggtgagctgaagctcagg

SEQ ID NO: 198017 - DNA, 122 bp, Homo sapiens
cgcagatgggctgctggcggccgcagcgcggttatcagcgctcctcgcagatgggccgcccgccctccgcgctcgcggctcccactccccgcggcctgcagccccgtcccctgggcgcgggg

SEQ ID NO: 198018 - DNA, 122 bp, Homo sapiens
tctcactcatgttcttggaatgtgtttgtgtggagcatttctcactaacaatcttttccccggtgttatacattcattctagttctgtcctgctctgtccagaggtgaaccctgccatctct

SEQ ID NO: 198019 - DNA, 122 bp, Homo sapiens
tgctccagaatttaattcaagaaattcaccagagagtcagaattatctggaaacacaatacgggatcctaactggctcattaatcaagttcctagaaaataactgattaatccatctgtcac

SEQ ID NO: 198020 - DNA, 122 bp, Homo sapiens
ggggctcgtcgtccagagcccggcgagtgaggaacccagagtggtgacagcccagctctgcgtagatgacaaactttctctcctctggcagagggtgggacattccggctcatccaggcatc

SEQ ID NO: 198021 - DNA, 122 bp, Homo sapiens
gcagaaccctggattcgagtcccggcttcagagaccctcggctgtgtgacgtggaggcgtcggccgccctctgagagccttcgtggatgacagctgatgcttgggcctaccttcctcggctg

SEQ ID NO: 198022 - DNA, 122 bp, Homo sapiens
tgcgtcaatttgctgcccgtctccaaggcactggtgatgctgccttcacaagctggctaacgtcacggctccatcacccagcggggtgtggactctctttttctgttcttctctatttaatt

SEQ ID NO: 198023 - DNA, 122 bp, Homo sapiens
ccacaatataactgttttatgagttttttgttttccgcatttagaggcgaaagcatggagcgtagagtcaagaacaaacatcagatttacagatagagcccttactaatgggggtggctttg

SEQ ID NO: 198024 - DNA, 122 bp, Homo sapiens
cttgaatgtgcagcaggctctaaaagccattttatgaccattgccttagataatcccagacgtgagttaaaagctaaggtatgaggtgctttcatacatttttcttatttaaggcctttccc

SEQ ID NO: 198025 - DNA, 122 bp, Homo sapiens
cacaaaatggatttgcaaaagtaatatcccaggcaagactccaggcccctcccagccctgcgcctctccctgctgacggtggggtgcgtccagagtgccagcactcagggtctgaccctgga

SEQ ID NO: 198026 - DNA, 122 bp, Homo sapiens
ttccagtcagtcccacaagactgccccccattgcagatgccaacaggaagtagtaagtcccgaagttactcacagcttctgcctgacttggctacaaattgaaagttcccatgactgccttc

SEQ ID NO: 198027 - DNA, 122 bp, Homo sapiens
tattaccctcttcctccctggatattatgaaccatatcacagaaaggtgtacacctcccgcgatatggaaagcaatgtcacccactccccttctggatattacgaaccataccacgggggtg

SEQ ID NO: 198028 - DNA, 122 bp, Homo sapiens
tcaggggccctagtttcacatctcataacgtgcaatctagagtccttttttagctcattccggatttaggcctgcacactgtactttacttctctgggtgctttgctgtctccatgaccttg

SEQ ID NO: 198029 - DNA, 122 bp, Homo sapiens
ggcttgggtctggggtttaagtggccacccatccaggccctggccagtgtgggaccgggacgggaaggaagaaggaggctaggagcagggggaaaaggtgcacttggccagtggcgcctgcc

SEQ ID NO: 198030 - DNA, 122 bp, Homo sapiens
tacaatcccagcgctggggcctggggcgtccggggggcggcctttgagcttcccggataccgctcgcctgctcccggagctgttcggccgccggctgcccgggtcgtgcactttcagtaggg

SEQ ID NO: 198031 - DNA, 122 bp, Homo sapiens
tctgcacggctaagtgcccaggttcttcctaatcgagctgaacactagtcactgggtccacggttctcttccgtgacccatggcttctaatagagctgtaacaaccaccacatgacccaaga

SEQ ID NO: 198032 - DNA, 122 bp, Homo sapiens
cccctcgtgttgtccgggaagcttttaggcctgtttgctgggcgagattggtgattgctccgggagggaagagacaccccgggatcaagcgatcctcttgccctcagccatggtgtggcaaa

SEQ ID NO: 198033 - DNA, 122 bp, Homo sapiens
aggtgaagagtttgacaagaaaaagttgagaggaggagggttcctgagaggtcagacttacgtaaggtagttctggtcctgaactccaaaagagttcagagctgtggtctattagtcagtca

SEQ ID NO: 198034 - DNA, 122 bp, Homo sapiens
taattcttccaagcttcgagttttggctcccgtttgagctggtctgggggttccagctcgcgcctcagcgacttcgccggcgccgcggctccgtcaggccgccattctatccctgtggctaa

SEQ ID NO: 198035 - DNA, 122 bp, Homo sapiens
aggaaggcgatggccccgcctctggggtggaggggggtcggggcactcacgagtgacgtccgggtctgactgtcttgcgtaactcccgccaactgtgggatgttctctttctgccccgaatc

SEQ ID NO: 198036 - DNA, 122 bp, Homo sapiens
tttttttgtaagcatggttccccagtctgacctcagagctgcctggagatgggccccacccgcttcccgttaattaacaggctggtgctcggtgtggatgctggctcctccgtctccctgcc

SEQ ID NO: 198037 - DNA, 122 bp, Homo sapiens
ctggcggggcctccgaaccccctcatttaggtgtcgctgcacgtggctcccaggtgtggacgtccccactctggcgagggctccttccttctggggtcgtttgtggaatgtggcctgggtcc

SEQ ID NO: 198038 - DNA, 122 bp, Homo sapiens
agacttcggcaaatcgtcctatcagtttgggctgtgaggtgcccaagccggtgccaagcacggataggtgagctgctgcaggccgggtcaccttcactcaggatctctccagatgtcagtcg

SEQ ID NO: 198039 - DNA, 122 bp, Homo sapiens
gcatctctctgggaggctgtgcgccccgaaggtgcccttgcagaccaagaccaaagttctcggggatgatcctcccccagcagaggcgaggtgggggcttctctgctcaccgtgacttgtac

SEQ ID NO: 198040 - DNA, 122 bp, Homo sapiens
ggattctgattttttaaaccaagttgtaagaaaacaagctacttttaaacctctttgctgcgctttcaaaattctataaatataccttcattatagcatacttaatgttgtattgtaattat

SEQ ID NO: 198041 - DNA, 122 bp, Homo sapiens
tttttttttttttggtcttgatatagtcctattcttctaaaaaatcttttcatttgtctccgtcagactttgatggagaggaggggagatattgtttacatttgttaaaaatggcttttaag

SEQ ID NO: 198042 - DNA, 122 bp, Homo sapiens
gggctcgcgctgatgggagtccggttgagtcctgctcagccaatggcaggttgtgtgccacgggcgagctacttcatttctctggacctgtttccccagatggctggtcgcaataatgacga

SEQ ID NO: 198043 - DNA, 122 bp, Homo sapiens
aagatacaacatgaagatagtctgttttgcagcagcaggaaatcaaattggttccagaaacgaagttatatgacaaatggtttaatagtattgctagaattggaaatcttgattgaattatt

SEQ ID NO: 198044 - DNA, 122 bp, Homo sapiens
aagaagggaggcagaagcccagaacaggtgcagggatgtggttgcaaggatgtcctgtcccgtcagagaaagcctttcccgcgggcgctttgttttattatttccatcctggggaccaaaaa

SEQ ID NO: 198045 - DNA, 122 bp, Homo sapiens
gaagttttataggaaagtttccgctttccagtccccctcccccgtcccacctcccttcctcggggtctaacaattcgtcctcccaaaccattcaaaaacgacctggcccgggcggccggccc

SEQ ID NO: 198046 - DNA, 122 bp, Homo sapiens
tgaggatcgtctctgcccggccgcccatcgtctgagatgtggggagcgcctctgccccgccgccccgtctgggatgtgaggagcaccactgcccagctgcgaccccgtctgggaggtgagga

SEQ ID NO: 198047 - DNA, 122 bp, Homo sapiens
ccgctcgctctccaggcaacttgctacttggtctgaaacccttgatgcccaaacttcagccggggtttgttcgcggttgtcctgacccataagatcggcgttggaagccctcgccccggggt

SEQ ID NO: 198048 - DNA, 122 bp, Homo sapiens
aatccagaagttcatggtcaagtagaagtgaaaactgagaagaggccaaacttcgttgatcgacaggcatccacagttgagtatctcccaggcatgctacattcaaattgccctaaaggtct

SEQ ID NO: 198049 - DNA, 122 bp, Homo sapiens
tccccttgaaagcccccacccccgcctgcagtcgccgccctccaggcccctcccctggagcgctggagggccccttagccccatggatgggtatgaaagtccccggaaagggggaatctggg

SEQ ID NO: 198050 - DNA, 122 bp, Homo sapiens
gaggtgcttgcgttataggatgtcgccttgtgtaataatatacaaatcatctgcatggaacggcccagaactggcaagagatgtaggttgcgtgaatgcagggttctcgatttgtttgattc

SEQ ID NO: 198051 - DNA, 122 bp, Homo sapiens
ccctaacgggcaaccggagcgtaccactgcggagccggctgcggggggagttaggggacgcgggcacccgtaggcctcacagacccacactgcccaccccggtacctttgttacactttaca

SEQ ID NO: 198052 - DNA, 122 bp, Homo sapiens
ctggttgctgtgagcaaggggatttaggcaatcccaatgtcgggactctcctgccaggatcgcttttctctccgaggtggttttcattatttttcattcccagactattttggaagctggct

SEQ ID NO: 198053 - DNA, 122 bp, Homo sapiens
tgggctatttcaccagttgtggctgataggctttggtctatctgtccctttatcaccctgcgggctggctcaagcttgttcacctggtggaagcagaggttgtaaggcccttgaagcatagg

SEQ ID NO: 198054 - DNA, 122 bp, Homo sapiens
attcctatttttaaaatgtgattaatgtgttgatcctggtctggggtttcccatgaatgacgagcacttattccttggtgagcaaatgtcccaacggtgcagcgcgtggccaggattggagg

SEQ ID NO: 198055 - DNA, 122 bp, Homo sapiens
gggccgcgggtgccaggcaggtcagctctgcgtgccgggaatccggctccttagagtcaccgtcactgctcctgctgcctcctcgtcctcaatggggcagcaagtgcggcttggacctcggt

SEQ ID NO: 198056 - DNA, 122 bp, Homo sapiens
tcatagcaccgccactcaagtcaagatatggtattccttactaattgcagtcccctacctcggtctattattctgacatgtgtggtttgaaataatgctttttaaactctttttcatcataa

SEQ ID NO: 198057 - DNA, 122 bp, Homo sapiens
atccaaatcctaaaatgaactatttgataggaagtttgtgggttattctgagtaatgaagcgctaacaagagattttaaatgaggtataatctccttattgaacaatatatattttagaaat

SEQ ID NO: 198058 - DNA, 122 bp, Homo sapiens
ccatgttattcttttagttttttaccgtgttacaaatgcctgttttattcacagcagcaacggcatcagctgattttcagggcaagaataatctgctagtgacttgaaagatttaattttct

SEQ ID NO: 198059 - DNA, 122 bp, Homo sapiens
gccgcgcggtggcggcagtggggagagcaatggaggccacggccgactgagaggcgggtgcgctgctggtgctgctgccgcggcggctgctgatgcggaggctgccgcgcgcagtgccgccg

SEQ ID NO: 198060 - DNA, 122 bp, Homo sapiens
ccctccagtggtgggtgccagctcccgcgccgctcttccccgaggctccctatcccgctgcggcccagagcactccaggaggccgtatgtcttcttttgagaaatgtctatttatgttcttt

SEQ ID NO: 198061 - DNA, 122 bp, Homo sapiens
acaggcactgctacggacccaggtccgcccgggctctcattccagggacaggcactgcgacggacccaggtccgcccgggctctcattccagtgacaggcactgcaacggacccaggtccac

SEQ ID NO: 198062 - DNA, 122 bp, Homo sapiens
ggaaaaggagtgagtgatcactcactcactaaaggaatttaatttggccaaacaaattaacgctctgtgcattaggtcatatgagagctgatgtcagaaaaaaaaattaagtaaacattcca

SEQ ID NO: 198063 - DNA, 122 bp, Homo sapiens
aggtacagtgctcagtcacaaccgtagggagagtggtcaaatcggagcgggggcgggggccgtgagtcaggctgaaaagaagaagctcagagcaggaagggcagaagggccgggaagggcag

SEQ ID NO: 198064 - DNA, 122 bp, Homo sapiens
cctctttatacggtggccctgaccgcagccggcagccgagccagctcctacgtggagcatcgaggccactgggcttaactcgctcgcgcccagagatgcgcccccgccctccacggggaagg

SEQ ID NO: 198065 - DNA, 122 bp, Homo sapiens
gttaagggtggccgggggagcccagccaccgccccttcccagcatcgcctcccagaatcccgcaggcccccagccagttctcgcacctcgcgagactccacccagccccttccccgaacagc

SEQ ID NO: 198066 - DNA, 122 bp, Homo sapiens
gctaagtccctcactgcccggggccagcagggctggctggctgtcccgagtgcgggggcccgccaagcccacgcctacctgcaactccagctggcccgcaagcgccgcacgcggcccgggtt

SEQ ID NO: 198067 - DNA, 122 bp, Homo sapiens
ctcgcagggaggcctcagactgggccctgcacgacaagaacccactggccggaggagtgacgaggtcctgctccctcccgccccgcttctccctcctcatctgccgtgtgatctcaccaaga

SEQ ID NO: 198068 - DNA, 122 bp, Homo sapiens
accaggatggaggccatggaggagtaggaaatggatctaactaacacttcttaacttctccgccccactgggcaaagccccagatctcagtccccgggcacaaggctggcgctcagccactg

SEQ ID NO: 198069 - DNA, 122 bp, Homo sapiens
taaatatagacccgaggctcctccttctgccgcccctgtggctgcatggccatgataagccgcagggtggccttggccactgccctcaggccccacacctcctcggcgggctctgtgacacc

SEQ ID NO: 198070 - DNA, 122 bp, Homo sapiens
tccactcccaaagtctaggggctggaaggccaggcagggacttggctgccctgactccttcgtctctctgtccctctgtctctgccatcagtctctcagccactccacccacgagatggtga

SEQ ID NO: 198071 - DNA, 122 bp, Homo sapiens
agagtctctgcatggtaaatgcctccttttatctatctgaaaatgtcattgtttcaccctcgtcttctaaagatggtttttccaggcatggcattgtagggtgatagtttctttcttccagc

SEQ ID NO: 198072 - DNA, 122 bp, Homo sapiens
taaagtgtgtgtagcctgtgctgggccagactcagactgtaggtttgcttgctggggcaccgaactgcagcccacccgtggtgtttccactgcaaatgctcccaagcccttagagaggccaa

SEQ ID NO: 198073 - DNA, 122 bp, Homo sapiens
caatgtcctgccatgccaaaccctccctatttctagatctccacacatacagtattgctgcgatgtctttagccatggcttctttttcaacttcttcaaccaatcagtgtcgatgtaccatt

SEQ ID NO: 198074 - DNA, 122 bp, Homo sapiens
acgcgacccgagctccctgtctgcgctctaggcagcaattgcggcctgggccgccgcgtccggctgtggcctaggtggtgggaagtactttctaccctcgccaagcacaacctgaatgcgga

SEQ ID NO: 198075 - DNA, 122 bp, Homo sapiens
tcaaatatttatttttaaagtcactaccatttttgcacactgtacactaatttactgcctcggtgcactaaaatgcaactcagtagcctgaaaagttaatgcattttcatcaaattcttaag

SEQ ID NO: 198076 - DNA, 122 bp, Homo sapiens
caagaaggtgctcccagccctggggctcctgtcaccctcggcctcgatcatcccgccccgcgctcctgggaccggagtcccttactcccatagactctcgactgcctctccgcccaaccccc

SEQ ID NO: 198077 - DNA, 122 bp, Homo sapiens
gggccgggctcctgcggggtcctggggctgccgagtggcctcctccttccccgaggacctcggcagggagattgtgggtaggcgcagcatccatgaccctgacacatctgcaggcctcggtg

SEQ ID NO: 198078 - DNA, 122 bp, Homo sapiens
atctccgagcctggactctctggagtcgttctctaacctgcattcttttcccagtagctgcgagttcaatagtgaggagggagcggagaacagggtccctgaggaggaggagggcgcggcgg

SEQ ID NO: 198079 - DNA, 122 bp, Homo sapiens
ggtcccccagccccaaatctcagagccgcactcccctctcacacaaacactctctccaagcggtaggaaaggtgcttctagaccccaaacgaaagaaaaagtatgccgcaatggaaactcga

SEQ ID NO: 198080 - DNA, 122 bp, Homo sapiens
gacccggggggcgcccgggcagggaggtccggctgcgctgcctgcagtccgcggggagggcggatgggtctgtgagtccgactgctgtgaatcctcgcttccatccctgcactgggcgctat

SEQ ID NO: 198081 - DNA, 122 bp, Homo sapiens
agatagatggaaagggcagggccacagagcagtcaggcattcggcctaccacattcttcccgaggtgtagtgggaaatctaagaattagagaggtagataagctccaagatcagagtcctgg

SEQ ID NO: 198082 - DNA, 122 bp, Homo sapiens
tccccctccctcgtgacaggtgtaaacactgcctccttcaccgaggcccgaggctggccgcgacctgagtgtgctgcttccaagggtctctgaagcaagcgaatttggaatcctccaacagg

SEQ ID NO: 198083 - DNA, 122 bp, Homo sapiens
aaccattgtaaaacatgtaaactattcttaactcacggatggtgggctggatttggtccacggggctgtcatgtgcccacccctgctaaccaccccttgaagcaatatcatccaagcaagct

SEQ ID NO: 198084 - DNA, 122 bp, Homo sapiens
tcccttaactgtgctgtggtgggaggttgttggctgttcccagttcttctcaatttgattcgcccactttgagatacccctctatcaaggtgggaattggaaaaagagaggagcacctcagg

SEQ ID NO: 198085 - DNA, 122 bp, Homo sapiens
ccataacgacggctaccccttcgacggccccggcggcaccgtggcccacgccttcttccccggccaccaccacaccgccggggacacccactttgacgatgacgaggcctggaccttccgct

SEQ ID NO: 198086 - DNA, 122 bp, Homo sapiens
ggccgcagcgggagcccgggagcgcagggcgggcctggaagagctccgccccaaggggcgcggccaccccggaggcgggcgcacggctgcttctcattcattgtcttgacaagagcatcttc

SEQ ID NO: 198087 - DNA, 122 bp, Homo sapiens
tgggtccccactgacagcatggggaggggcaaacagtgcagtgtctaaggccagactacccgggtccccactgacagcatggcgaggtgcaaacagtgcagggtctaaggccggaccacctg

SEQ ID NO: 198088 - DNA, 122 bp, Homo sapiens
cagagggcttgtgactcaaatgaagcattaagaaaatgagaaatcaccatgagtcatcaacgattagggttactgaaaaataactgaaactaagaatgttaaatccacagatgctaaaggtc

SEQ ID NO: 198089 - DNA, 122 bp, Homo sapiens
aagatgcccaggttcatctgcagcgagacttcttttacgaacagcagagttgcagctgcacgtggggaggcagtgtgcgtagcccatggggagtcactgactgcgacagaagacgacaacgg

SEQ ID NO: 198090 - DNA, 122 bp, Homo sapiens
atctgtaatatcctactggtcacacaggtcagccctattcagggtaggagtccaaggacacgaacgccaaggagtaaggatcactggggctcatcttagagtcggctatgacagctgttaat

SEQ ID NO: 198091 - DNA, 122 bp, Homo sapiens
gcctggtttgggctgcccttatcaaaggcctggtgactcccgggctgcaaattggcaaagcgctgctaattgtcgccgccggatgggttttggggggactctttgcacacggcttccctttc

SEQ ID NO: 198092 - DNA, 122 bp, Homo sapiens
ctatcccgaggtgattcacggagtttctggggattggcgcaggctggcgctgggaacccccgcgccggttacccctttcctcggtggtagaggccgggcggggcagcgcatgcgcgtggcgg

SEQ ID NO: 198093 - DNA, 122 bp, Homo sapiens
actgtgagagtctgggggactctctgctattgactcattgcattatcatctattccatgacgttgatgatgatgactaagagaattgcaacaataatgaggacaacagacaaggctaataac

SEQ ID NO: 198094 - DNA, 122 bp, Homo sapiens
cggcgagagcgagccggctaaaggcagcgaggaagccaagggccgcttccgcgtgaacttcgtggacccagctgcctcctcgtcggctgaagacagcctgtcagatgctgccggggtcggag

SEQ ID NO: 198095 - DNA, 122 bp, Homo sapiens
tcagggatggcatctttcccccccacagggaaattcttatctttgaaacagcatgggaatcgaggcacccaggaggggagcagaggcaggcaggcctccttcaggcccatcctccagctggg

SEQ ID NO: 198096 - DNA, 122 bp, Homo sapiens
ggcactgacttcatcacctctctgagcctcggcctgtgcaggagaacagcagtgacaccacggggaagaggcatagagaccggtggacacacggcccctagccccacatggagccaggcatg

SEQ ID NO: 198097 - DNA, 122 bp, Homo sapiens
tggtttcccaggccataccatgcacaatgacctcggtgctctcccgaaatcgctggatgccgttgttggccttgcacacatacgagcccaggtcgtgctggctgacgttgtggatggtcagg

SEQ ID NO: 198098 - DNA, 122 bp, Homo sapiens
gggggccccagcacctgcatgctgacctggtccccaggacgcagatgctgctggcctgagcgtccccggctgtctcctgtctggtgtgggtgctgccgccgggaggccttggccccacgggg

SEQ ID NO: 198099 - DNA, 122 bp, Homo sapiens
ttggcttcacggtccctcatgcgcctcacctcccgctcctcgggggtctcattgtcccgccggctcttcttggccgtgcgctctcgttccagccgctgcagccgtacttccaaaggctcatt

SEQ ID NO: 198100 - DNA, 122 bp, Homo sapiens
caaggattcactaacattcctaccggccttgcttaacctccatgcccccgggaagtggcgcgaatcactcttggcaccacttggggcgcacagaaaggacccacctcctgttggccaggcaa

SEQ ID NO: 198101 - DNA, 122 bp, Homo sapiens
acataggggacccaccaccgccactgccgctcccgcagcagctcgtgccgccaccacccacgcctccttgctgcagccagcgtgacgacagcggctgctccggaccacccgcaagcggccat

SEQ ID NO: 198102 - DNA, 122 bp, Homo sapiens
ttagtttgatcaatcaattacttccttaggaatttgacctggagatgtgggaagagaatccgtagcctgttatttgaaacaaagtagaaagatgcccagagattatcagacacagagaaagt

SEQ ID NO: 198103 - DNA, 122 bp, Homo sapiens
gccgcagccctgccttcacatctccattgcaggctcgggcttggagatgacgccgggcctcggcgagggtgacccccgcccagagctggtgccctttgacagtgactctgacgatgagtctt

SEQ ID NO: 198104 - DNA, 122 bp, Homo sapiens
agggcttcccccgatccctgcacacatagccaagactaaatcaatcctacttactctccacgattcagagcaggttcagctgactccctgctctaggtgcctcaggaaaccctctggagatc

SEQ ID NO: 198105 - DNA, 122 bp, Homo sapiens
tgcacacagacacccactcacccctgactctccccttcccccacagcacaatgaaacagacgccagcaggcttgacccataaaggggaggggcagacagggaaccaccaggagggctgttag

SEQ ID NO: 198106 - DNA, 122 bp, Homo sapiens
gccggcgcaggggtgggagtcgggcccggggcccagagagaccttccggggccggggctgcggctccgcgggcttccccaccggccgggtctcccggcaactaccagagagcgggggcgccc

SEQ ID NO: 198107 - DNA, 122 bp, Homo sapiens
ataattatatatataaatatatatatttataatattttatatatatatattttttgcccccgccgccgcatatttttgcccccgacgccgaggctttttgcggctttttgcccccgccgccg

SEQ ID NO: 198108 - DNA, 122 bp, Homo sapiens
gctggctttgcctagtggatcctgcaccagggcagcgggtggagctgcccaccagtctcgcgctgcgtgcctgcactcctcaccctttgggcggtcgatgggaccgggtgccacagagcagg

SEQ ID NO: 198109 - DNA, 122 bp, Homo sapiens
tgctcagaacttggaaagcgactggtctctcaggatagagaccgcgacgcaaagaagtgacggaaaagatgcgtccgccatcccttttgctccacccctgacgttggcctcggccttcgatt

SEQ ID NO: 198110 - DNA, 122 bp, Homo sapiens
gaccttcgcctgagtgttacagcttttaagacggcgtgtactggagttgctcgttcaccccggtgggttcgtgctctcactagcttcaggagtgaagctgcagacatttacagtgagtgtta

SEQ ID NO: 198111 - DNA, 122 bp, Homo sapiens
tttcgtggtgcagcttggatggcatcggaacctgcaagaagccaagacgcctgttctccacggcggagcccgctggtcggtcactcctgttcctttcgtgtccgttgggtgcaggcattatt

SEQ ID NO: 198112 - DNA, 122 bp, Homo sapiens
attgatttcttttatttaaggtgaaacaagtttagtttggagcccagagcaaaattctaacgtgctgaaaacatgctgcctggcaagattcctgggaaggattcctaagaatcctcccaaaa

SEQ ID NO: 198113 - DNA, 122 bp, Homo sapiens
ccctaggggcaggatgggagcaaggcttaccaaggctgccacctacagaacagagggcagcgaggactgcgcagcagcgggagggaccggtggcgttgggcgcggggagggtctgcgcgggg

SEQ ID NO: 198114 - DNA, 122 bp, Homo sapiens
gaaccagggcttgttattgtcaatagcacaagaggctaaagatggcgccatttccggtcacgcggcgccgagggaggggcggtgtcaacctcagggagtgggggtgagggaagcgctgcagc

SEQ ID NO: 198115 - DNA, 122 bp, Homo sapiens
gaatgtaataagcctggtccaatttgcttgtataaacagaaggccgaggcaggcgagggacgtcacttggccgcagcggttctgctttttatacattcctcctgccttgtttcctgagacct

SEQ ID NO: 198116 - DNA, 122 bp, Homo sapiens
cctgtgctacccggtccagacctcccagcccaagctagagcttgtgggtgagtgtccagccgtccaaaggggctgcccgagccagaggaacacagggcagctctgggcccggggcgtgggct

SEQ ID NO: 198117 - DNA, 122 bp, Homo sapiens
accgcttttctttttaagtgaactaaccacaacccagactagaaaacactccaaagctgccgaattcaaacccagcgagccttcctgttggttggttctgtgttttacttaaatgtgattac

SEQ ID NO: 198118 - DNA, 122 bp, Homo sapiens
ctggagaccggaggaacatggactaccaatcccagaatgcgttttatgggacccgctcaccgcgcaggcgctcttgcccaagccactgagagcgggacgcggggctaggtcagagtaggaag

SEQ ID NO: 198119 - DNA, 122 bp, Homo sapiens
aagtcaccgtttcaaacctgccctgtggaggaaatgccagtttagtaacgagtaagtcaccgttttaagcctgtcctgtggaggaaatgccagtttattaacgagtaagccaccgtttcaaa

SEQ ID NO: 198120 - DNA, 122 bp, Homo sapiens
ttgacgaggaactttgataattcgtttatacttgcatattgatgggctttaagctctcagcgtgtgcgttgttaatttctaaaaaatatgcataaacaaagatctgtgactctccacctcct

SEQ ID NO: 198121 - DNA, 122 bp, Homo sapiens
aagccaaagatatctgtggtcacgttacccagagtcaaagaaatgctaagcccttctcggcgagtgctggccggctcgcgcgtttcaaaaggcgatacggggtgaaaaatgttaaacttgca

SEQ ID NO: 198122 - DNA, 122 bp, Homo sapiens
tcctcactcgcgaagtccctatctatctctgtgggtcccggaggcacagggctgcaagggcgcccgctagagctgctccacggcttaccggattgcatgcggagaagaaacgggcccgggtt

SEQ ID NO: 198123 - DNA, 122 bp, Homo sapiens
agttcagtgctgagtgtatgtgtggagggaacgctccttttcagtcagctggtggagcaccgcatagctactttcccgcggtggagcccaagacaaatagatatgaaactacttggctggaa

SEQ ID NO: 198124 - DNA, 122 bp, Homo sapiens
cggaagaggcagaaagcgaacaggctgctcagaggtagtggcccttccttccaggcgtcgcgctgatccccaactgcctggcgcccgagtccctgagctccccagagctgaggggtggaggg

SEQ ID NO: 198125 - DNA, 122 bp, Homo sapiens
accactgtgggattcaggaaggcaaggcctcttgtgcagtgtgtggggcacagtcaatgccggtgctgactgtggagtgaccatctgacatagcctgcaatcaggaaggaccatgtcaaggc

SEQ ID NO: 198126 - DNA, 122 bp, Homo sapiens
cggcggcgcaggctgcagcggaggaagcatttcctcattccagaggctgcgactcatggacgtcgggatcggcgcccgcccccagcagctccccgtctggggacacggaggcccgggaaggg

SEQ ID NO: 198127 - DNA, 122 bp, Homo sapiens
accgggcttctccatcatattccgacaccctttcattcgttagcccctagttagtaggtgcggcaagggtgtggcgtgggggcaagggtgtggcgttcagcaataaggtctttctcctttcc

SEQ ID NO: 198128 - DNA, 122 bp, Homo sapiens
aaaggctaagccaggccaggtgcagtggctcacatctgtaatctcagcgattgggaggcccgaggagggagtatcgcttgagcccaggagctggagaccagcctgggcaacatggcgacacc

SEQ ID NO: 198129 - DNA, 122 bp, Homo sapiens
aggaatgtcggggcggggtcccggggtgcggccccacccacggtgcgtggaatacaggggcggggaacgcccgctcttcccgaagtgcccgctagatggcgccagatctccgtgctgcaggg

SEQ ID NO: 198130 - DNA, 122 bp, Homo sapiens
gctcgcagcctcccacgatccctgcttctgcactgcggtcttgcacctgctgcttgtcagcgtggactcctctgaacaggggctgtgccacttgcttgggggccacggtgcaggatgctatt

SEQ ID NO: 198131 - DNA, 122 bp, Homo sapiens
ttgcaaaagataaaaagcccaactcagttgccttaaacaaagaagaaatttattctttcacgtgacaggaaggcctgaggtgtaggcatttgaaatttgtagggttggttaatttggtggct

SEQ ID NO: 198132 - DNA, 122 bp, Homo sapiens
aggaccatttcatcacttccctggggagcccactcattcattcagtgaagatttctctcccgatacccacttcaggaacccaggggccatctggaacagctctgggcaatggttcttatcct

SEQ ID NO: 198133 - DNA, 122 bp, Homo sapiens
acgtgcacgcctggcaccatgcctgtgcgtagttctcaagttagagtgacgactgggttacggatgctgagcgtattaaaatgaaccaacgtgaatatggtgtgtgtgggagggtggcggct

SEQ ID NO: 198134 - DNA, 122 bp, Homo sapiens
gggtcgggcggcagaggtggtgagagcagatggaacgccaagtacactcggaggcagagccggcgggatgtgtggaagcatcactgaagttgggtgtgagaaggtggcgccagggatggctt

SEQ ID NO: 198135 - DNA, 122 bp, Homo sapiens
aacccacaggatgtgcagcacgggggccccgacacgaatgtggactttagttactgaacgcgtgtgatggcccgcctgtggtaagaggtgcgcctcgccagcataacgtgttaattacaggg

SEQ ID NO: 198136 - DNA, 122 bp, Homo sapiens
aaaatacatggcgataagtcttgtgatcagaaccgagtctttgggcaccttgggggcaatcgagtgaacttcccagaggagcccagcagactggccagtggggaaagaactggctggggagc

SEQ ID NO: 198137 - DNA, 122 bp, Homo sapiens
gtcacagggaagggaaacattacccctcaggaaacaaggtctgcatgctaagagggttaccgtgcctaggtccctctgggaaaacagagtagccctcttaaaatatcaactgtgccagggtc

SEQ ID NO: 198138 - DNA, 122 bp, Homo sapiens
tttgtgagctttttgaatgaggctataaaggaatttaaaaatcagattcaacactaattccgaaacccctcacttcattcagggtgtgggccgaagatatgctcatgtggtgttgaggaaag

SEQ ID NO: 198139 - DNA, 122 bp, Homo sapiens
ccaccttcagtactgcggccaggagagtggcgctcccctcttataccgtaggctgagtcccgcccagccgccagcggcccaacccggaggtgctgcacagcccgccttcccgccaccctctc

SEQ ID NO: 198140 - DNA, 122 bp, Homo sapiens
aggaaatacaacccaaaaaaataattggccgggcatggtggcttgcgcctggggtcccagcgactcgggaggttgagcgggacggacggcttgagctcaggccttccaaacaagcctgggca

SEQ ID NO: 198141 - DNA, 122 bp, Homo sapiens
gcactgattttcttagtcaccccaaactgtaaggtctcaaaggaccattaatctgacactcggtccgatggtcccttagaagtgcgcccacacaccgcccctagggttccacaccgaagcgg

SEQ ID NO: 198142 - DNA, 122 bp, Homo sapiens
gaggtgcgggttggagctttgcgaatcaccccatagaagcttcgctgcaaccctgcgaggcgggagagaggcgacagcacacacactcccacccccaaaacatacacacacgtgcacgcaca

SEQ ID NO: 198143 - DNA, 122 bp, Homo sapiens
aaatggtgggatacgatgctttaaaatggttgcttccaccttccatcccctaagcgcccgcgcttcccaagcccacgccctgcccgaggaggggacgaaatcacccccggtgaggtcaggag

SEQ ID NO: 198144 - DNA, 122 bp, Homo sapiens
aggccctaggactgtggagattctgtagtaacctaagcgatgttcacaagaacagaagaacggctaatgagaggaacaaaaagctgtacaaggaagagaaagctacctttccacccaataac

SEQ ID NO: 198145 - DNA, 122 bp, Homo sapiens
gccagggtggcgctgaaaggttgggggtcctgtcgtgggcatacatggtggtccccagcccgccagacccgagaagcctccaagacgtcactgctttccgctgtctcaacaatgcatggcgc

SEQ ID NO: 198146 - DNA, 122 bp, Homo sapiens
aggatgccgtggcttccgacttgggtgaataacggcatcattcgtcagccaggacgttcacggagaagagcagagacgggttctgacggttctgctggtgagttctgttctggaaatgctgc

SEQ ID NO: 198147 - DNA, 122 bp, Homo sapiens
aggatggctggcggaggcgtggggcaggccgcaggaccctcgaaggatcgtgtgagaccccgggcagcctcttgggaggccatttcgaggagaaaaccttgatttctgcctcaggaccctgg

SEQ ID NO: 198148 - DNA, 122 bp, Homo sapiens
catcagcagggcccccctgggggcgggactggggaggcagccaatgaagtcagcgctgggcgggcactggagcgagcctggctgcgcggagagctcatcccgggaccacagggcccggggcg

SEQ ID NO: 198149 - DNA, 122 bp, Homo sapiens
gctcggagagggtagcgtgcagatgagcccaaatcccggggagctggcctgctctaggtgcgtttttacaaattaaagcaagaaaaaagaaaaccagcagccagggggaggggtgaaagtcc

SEQ ID NO: 198150 - DNA, 122 bp, Homo sapiens
agaataaagccgtgtgcggtgtggcttcatgtctctcacaatagcgctcccgagtgcggccgctccacctttcccacccaggagaagccgcttaaaaagccaggcaggggctcttcagtgca

SEQ ID NO: 198151 - DNA, 122 bp, Homo sapiens
gggcgaaaagagaaacagtgagggccccacaggccgcaggattcgaatcgaacgtccttacgggagccgggcgctggcggagcggcgccccggccaatcagcggcagtccccgaacgttggg

SEQ ID NO: 198152 - DNA, 122 bp, Homo sapiens
gctcccggcgcggcgggcgggactgggggccgggcggctgggccgggggcggaggcagcgcgcgggggccgggcgaggggcgggagggggcggccctcggggctcccagacggctggccccc

SEQ ID NO: 198153 - DNA, 122 bp, Homo sapiens
tccctgctatcctgactgagcactgggcataactactatttatcttaaagtgtggctcctcggagtaaattcatactgctgtgaactgcccagagctcaaggactggcctgtggttttgtgc

SEQ ID NO: 198154 - DNA, 122 bp, Homo sapiens
cctctggtgacaatgttcactttcagccgaggatggccaggaaacagttaatttgatttgcgaggcgaaaaggtcgcatgttttgttcagccctttctcagccccttcctccctcgctcggc

SEQ ID NO: 198155 - DNA, 122 bp, Homo sapiens
ttgttgtgtgttcatcgcaggcgaccctgtgcctgccgggcctttctggaagaggccgtgcggtgtcccccagaccacccaccccgggctgaagactcttcctgaggtgggttcccacgtgg

SEQ ID NO: 198156 - DNA, 122 bp, Homo sapiens
tgttacagctagaacggctgcacgtgagttcaggcaaggggcccagaagtggccctccggcgactgcctgctccacccctcttagtgcagtcctaaccctttcccaacttgtgctggcagca

SEQ ID NO: 198157 - DNA, 122 bp, Homo sapiens
ctcagatggcttgcctaccagattgctcagacgttccagctcattgaggtcccggttgaccgaatgtaagttgtcctggaagtgcgcaatgaaggccttctcccggccctccagcgtctcct

SEQ ID NO: 198158 - DNA, 122 bp, Homo sapiens
ccacggaccatgcgccttccactcagatgaacatccactgcacacagtggcgtcccaggccgggcgtgactcagtggacacagggcctccacctcaaggaacctggcctgccagggggcccc

SEQ ID NO: 198159 - DNA, 122 bp, Homo sapiens
actcgcggtgtccgggtgaccgcggcttcccgggagcagacctctgtgggcactgtgaggcggaacggagcggcggggcaggagctgttctgggcaggtgaaggcaggctggtggctgaagg

SEQ ID NO: 198160 - DNA, 122 bp, Homo sapiens
actgggaatgaggcccctcagggatcccacaagaggccccctgggtcctgggaccccacccggcctgtctcggttcccagctgcagcagggcctgggcttgctctccccagacagccgggcc

SEQ ID NO: 198161 - DNA, 122 bp, Homo sapiens
ccaaaatgctgaaatacacattgaaaggttttaagcttgagattcacagggtatatttaacgttttacaaagatgactttggttgctctagattgaattgcaggtggacaagattaggaacc

SEQ ID NO: 198162 - DNA, 122 bp, Homo sapiens
aacttccacatccggtggtaacagggccctacacagacccgcactgacctggaaaagcttcgggagcggcgacgggaaggcagcaggaggtggtgcggggacccgaggcgcctcgtacccgg

SEQ ID NO: 198163 - DNA, 122 bp, Homo sapiens
attcggcgtttatcccggcaaacatgcgcagcgtgaagggggcctgcgaggcctgctccccggaatctgctgaaatggggtctgctgtgcatcttaatcgacttacttccacccatcacatt

SEQ ID NO: 198164 - DNA, 122 bp, Homo sapiens
gcgcaagcgcagttgtaccatgaatgcggtcgtcctgctgcagaccacgcccaccaagggcggggccacatccactgcagctgagctcagagccttctgtggggtctgcagtggcaaggcca

SEQ ID NO: 198165 - DNA, 122 bp, Homo sapiens
ttcccacactgctgtaactgaacaatggtctccagtccacgcagggagcgggagaaggggcggtgatcaataggcctagtgaatcccatgttggacacttgaggaataggctttctgccagg

SEQ ID NO: 198166 - DNA, 122 bp, Homo sapiens
gtgtgtcctctctgcatgtccctcctgtgggctgggagcagggaggacaggaggagtgggcgctgagctgaacagtgtgctccaggcccctgggccatcacagggctggtgggccccagggg

SEQ ID NO: 198167 - DNA, 122 bp, Homo sapiens
acatgtactcctggcacagccacaataccagtctctgggaagcatatgtcacctactccacgtgggtcccattccagtcaccacagatggaagcacctgagcctccttgccagtctttccct

SEQ ID NO: 198168 - DNA, 122 bp, Homo sapiens
tgacctcgtgatccatccacctcggcctcccagagtgctgggattacaggcgtgagccaccgcgcccggctggtgtcacctcttaaatcatagggtagtggacacgtgaagctatttagggt

SEQ ID NO: 198169 - DNA, 122 bp, Homo sapiens
tggtatgtgttaccttggaagctgagtttagaactaaaataatgggaaatactacagttacgaatcaaaaaggttgacttgcagtcctaatcttgaagactttgggtaatgtagaagcaaat

SEQ ID NO: 198170 - DNA, 122 bp, Homo sapiens
ccggaaatggagggggtcgctttcctcaccttcctcgctgcgcgggcggcggttggtaaccggtcagaccagcccgagagggacctggtgcctgtacccaggcttctgtcgctctgtcgcct

SEQ ID NO: 198171 - DNA, 122 bp, Homo sapiens
tttatgatagtttgtcctgtgtccttagtgatgtgtgtgtgtctccatgcacatgcacgccgggattcctctgctgccatttgaattagaagaaaataatttatatgcatgcacaggaagat

SEQ ID NO: 198172 - DNA, 122 bp, Homo sapiens
tgagttcaaattctgccttggctactagttgtatgactgggcaaggggacgagtgattcccgggcttctgtttcacctgtgtgatgggcccagtgatgcccaccttacagtgtgtggggaat

SEQ ID NO: 198173 - DNA, 122 bp, Homo sapiens
agcgggcccagggtagggagtggctttgactcgctgcggaataacatcgttagttgtgggcggggcccatcttgatctcaccatagcagcccaggtgctagtggagcctgggagggacacgg

SEQ ID NO: 198174 - DNA, 122 bp, Homo sapiens
attggactactcaatagggcaattggtcattttcttagtgtcctgcagattaattcataccgctctaggtcccaggaaagtaggatcaagtaggcactgcactctgccttttggtgtaacca

SEQ ID NO: 198175 - DNA, 122 bp, Homo sapiens
cctcatgtgatcctccctcctcagcctcacccaagtgctgggattataggtgtaaaccaccgtgcccagcaggacagtcaagaaaattgaaactggaaagtaccttggccttttaccccaaa

SEQ ID NO: 198176 - DNA, 122 bp, Homo sapiens
gtcagggctctgggtgaggctggaagcggtggctccccctcccctgtgtgtgtggacaggcgctggggggtctctgctcactcactggaggccacggtcagcgctcagcccctcccctgtgt

SEQ ID NO: 198177 - DNA, 122 bp, Homo sapiens
acgccccccccccgcccgtgtgcccccgcgttgagactgggacttagagctccgcccacgcgccccgatcccctgtccacagggcccagagacctgggcctagagcctaacccacgcgcccc

SEQ ID NO: 198178 - DNA, 122 bp, Homo sapiens
gttcagccacttttttatgacctgggacacaccactttctcagttacctcttattgaacacgagggagttgcatcaaattctcttcaagtctgttccaactttgtaattactggagattatt

SEQ ID NO: 198179 - DNA, 122 bp, Homo sapiens
ccaggcaggcgggggatttaaccctgagcgtcccctctttagattgagccagcttgtcttcgcaccctcccgacaaggccgggcagcccccttgccctgccagcggcttgcttcaaaggtta

SEQ ID NO: 198180 - DNA, 122 bp, Homo sapiens
aaaataaataaataaatgagtattaagtttgagaagcttgttgttcattgggtctaaccacgaagtgattagctttctatatttagttgtcagaagagggattttcactggatacaaatatt

SEQ ID NO: 198181 - DNA, 122 bp, Homo sapiens
gccaatccaaattgagatggagagaagggaggaagacagagagaaaaagaaagagggaaacgactgacagcgtctctcgagcccttggctgcagcggttcctggatctgccagttgggggag

SEQ ID NO: 198182 - DNA, 122 bp, Homo sapiens
gagggatcgggtgcaagcacagaggccatgcagagtggagagcagagagagtcaagtcagcgggcagtcaccttcaggttcttgactcgagctgatcccctaggtgcttgcagttggctgga

SEQ ID NO: 198183 - DNA, 122 bp, Homo sapiens
ggcgaggccaccagcgcccaccatccaaagggcgacagggaggcgtccccccaaccccggcggcgatgcctcctgagtcctaaccacacgccgtggacccccgcaccctcagtagccccgcg

SEQ ID NO: 198184 - DNA, 122 bp, Homo sapiens
caacgcgcaggcgcggtaaccacggcggcagtgtctagtgaggatttgaaatcggtcgcgcgtgcgcaccggcgacacggcccggcgaccgaggccgcgcttcctcctgccgcccccgtccc

SEQ ID NO: 198185 - DNA, 122 bp, Homo sapiens
ggcgcccctcttctttcaatttgaaactggaaacatccagaggtcttgttcctaagggggcgcgtcctctccctgctattttgcaccttcggactacccttctttcgtaattacacaggagc

SEQ ID NO: 198186 - DNA, 122 bp, Homo sapiens
ccgggaaagggggcggatagcgggtctggcggcggcggcggcgcctggccaatggagaggcgcggccccgggcgccgcgctctgccgccggcatttaaacgggagacggcgcgatgcctggc

SEQ ID NO: 198187 - DNA, 122 bp, Homo sapiens
ggggcccatcgcctggagtggcgtcccagcccaggagaagcaagtggggctgacccaggacgggcccggagccgggacacacagcacccaggggcgcggccagggaggggcaggtgggaggg

SEQ ID NO: 198188 - DNA, 122 bp, Homo sapiens
ggaggcagaggctgcagtgagctgagatcacgccatggcactccagcctgggcaagagagcgagactgtctcaaaaaaaagaaaaaataactcatgcgcagtggctcacgcctataatccca

SEQ ID NO: 198189 - DNA, 122 bp, Homo sapiens
ctaaccactaaatctcccagtaaagtgggagtgaatcagataggttttgacgctcacgaacgcctggggtcgtcctgcggtctcaccccagtttcgataaaccacattgttccctccagcac

SEQ ID NO: 198190 - DNA, 122 bp, Homo sapiens
tgcagcgcagttttccctaggggacgacgtgggaggttgttaccccagttgggggccagacgcctgggttccggtttcccacgggttctggccttgggggaagggctattcgggccggctgg

SEQ ID NO: 198191 - DNA, 122 bp, Homo sapiens
gtctgtttatttccactttacgtaaacttttcaaaatgacagttatttcgtactcgctgtcgcccgaacgcagacgggaggacacttcaggagcaatcgacccgaaggaaaagcacgatcca

SEQ ID NO: 198192 - DNA, 122 bp, Homo sapiens
aagaggtggaggagcagagtcttctccaaactccaccagggcaagggagactccctttcccggtctgctaagtagcggatgttgttccttgactctttttgctaccgctagaccacggtccg

SEQ ID NO: 198193 - DNA, 122 bp, Homo sapiens
tgatcatttttttttcacggcctttgtaacgttggctgatagctacatatagaaaacttgcgagaacatctagatattgcaaaatatccctagatttattaattagccaaactaacgtcaaa

SEQ ID NO: 198194 - DNA, 122 bp, Homo sapiens
atgacactggtggccactctgtaatgactcagacctttctagtgtaggatggcttgagcccgggaggccgaggctgagtgagcattgatggccccaagcactccagtttgggtgacagagcg

SEQ ID NO: 198195 - DNA, 122 bp, Homo sapiens
ttacagtgaatatacccagcaaacatctgtatgtgcaattaaatactgtgtctgttactgcggcacgaacctcaaacaaacaatatacaagtgttctgggggggccaggggaatcccaagtt

SEQ ID NO: 198196 - DNA, 122 bp, Homo sapiens
gttattggcaagttcccctgcagttgtttgggctgtccctgtggctggttctggggtgtgcggccagccatggagcgctctgggcccagcgaaggtgggtttcatgaggcgagtccgggcgg

SEQ ID NO: 198197 - DNA, 122 bp, Homo sapiens
aggagacgggcctgaatggcttcgagggtgattactctggtagaagttggggcatggccacgaaaaggtagggctggtttgaatgataggagactgaatttgtaggctgtggggagctacta

SEQ ID NO: 198198 - DNA, 122 bp, Homo sapiens
aggcaggagtattgcttgaagctggaaggcagaggtactagtgagttgagactgcaccaccgcactccagcccaggcaacagagcaagacttcatctcaaaaaaaaaaaaaaaaaaaaaaaa

SEQ ID NO: 198199 - DNA, 122 bp, Homo sapiens
tccctcattttctgagcgcagctgaggctctggggtgagtgaagatcaaatccgagtttccgtcctattttcccctcaggatcgctctcacagagtcattctgaagatggaagcagaatcag

SEQ ID NO: 198200 - DNA, 122 bp, Homo sapiens
ggactggtggctgtctttgcaggcaggcatttgcttagagcaggctgtgtgcgagcccagcgtcaagtgattccggcctcctcgagtcagcggtggtgggatgaggctctgccgaggggact

SEQ ID NO: 198201 - DNA, 122 bp, Homo sapiens
agtgggagagggatggacaaagaactacagctaccaggaccttgtgtcatacacaggacccggcttcccccgctgggctacaaatcacaaactccttcctaaccccagcttcctcttacatg

SEQ ID NO: 198202 - DNA, 122 bp, Homo sapiens
gagggaacgtagagggggcgggaccaggaacgagagcgcgtgggtttctggggtgtccgccggcgccccctgggattggggagagagggaagggctgaggctcacggtttcggagtaagggg

SEQ ID NO: 198203 - DNA, 122 bp, Homo sapiens
aatagcaaattaagaccacaaagagggcagtgagggtggctcacacacctctaatctcagcgcttgggagtccagggccagaggatcccttgaggccaggaggtggagtctagcctgggaaa

SEQ ID NO: 198204 - DNA, 122 bp, Homo sapiens
cctgctctgggccgggcacaggagtaggccctaaggatggaatagagaacaagacagatacgtttcctgctttaatggagtttattagcctaatggggaagatagaatgaacagacagagca

SEQ ID NO: 198205 - DNA, 122 bp, Homo sapiens
atttcctcgggggccctctgctgaaattcccttccccttgctgtattagcacctcctacccgccttcaacatgcaggcactgcctcctctaaggagccatctgtacttacgtagctgtgagc

SEQ ID NO: 198206 - DNA, 122 bp, Homo sapiens
taaaatggattgaatagacaaatgaatgaacaatgagatggtctccagagcccctcccagcgtgctggctttttgtgtcattgcagactttgcacctctggctccagggagctcacaggcag

SEQ ID NO: 198207 - DNA, 122 bp, Homo sapiens
cgcactctctttttccttctgggaaactaaggttaaggcacctcctgcactgctaggggacgagtgggaaccaaacccaggtgtttgagcctatttctttatgtaatctaacactgcttccc

SEQ ID NO: 198208 - DNA, 122 bp, Homo sapiens
cctcctgcctcagcctcctgagcagctgagataacaggcatgcgccaccacacccagtggcgcattggcccaggctggtctcgaactcctgacctcaggtgatccacctgcctcagcctccc

SEQ ID NO: 198209 - DNA, 122 bp, Homo sapiens
gcaggaccgggcacgggagggaaggagggcagtgggtgggggaaaccgggcgggggcaggcgagacctcagggctccagggcctcgtccccggactccgccgattcctcctcgatgcgggct

SEQ ID NO: 198210 - DNA, 122 bp, Homo sapiens
tttgcctccgtgttcccacttcccagcacaatctgtgaaccgaggcgcggggtgggctgccggacgtcacaggtgtcatttgcaatcgtgttctgaggcttcaaagggggcgtgtaaagaaa

SEQ ID NO: 198211 - DNA, 122 bp, Homo sapiens
ctgttatgctgaaacacttcaaagccataaatatccaggagcccgagaaccgtggtgctccgccagctggggctctccacgtcctagggcagtcattcaaccgaaggcgtgggccccctgcg

SEQ ID NO: 198212 - DNA, 122 bp, Homo sapiens
ttatcgtcctggccagagcgggccttaatctcattaaagaacaggtcccgtttcttggtgcggccaaacaccaggaacagggccttctcgtggacctgccgggcggcgcggtcgaagcccag

SEQ ID NO: 198213 - DNA, 122 bp, Homo sapiens
atgtctttggactccacgctggtgatttcagacccacagcagtagcaatggcagcattcccggagggaaaggaacccaaaggtatcactgataccctgccggacagaggggcttttatggct

SEQ ID NO: 198214 - DNA, 122 bp, Homo sapiens
ccacagagtaaaaagaacgcgaatccttttctgttttccggccctccccatcctgggctgcggctccacacttccccagcgtggcctgcatttctattgggcagctggcgctccggaagtgt

SEQ ID NO: 198215 - DNA, 122 bp, Homo sapiens
ttaggattaaaatcgaggttgccgggggacccccaggcaggagctgagatttgtgtggagcggcgaagtggggcggcggcgcgtttggctttgacttctgatcccccgaagcgctctggggt

SEQ ID NO: 198216 - DNA, 122 bp, Homo sapiens
gatgcagtgaaagacacatggcatctggagttaaacaaacccagactcaagagcatcccacggtctaactgtgtgacctcgggagagttatgcaaacttctgagcctctatttcctcatcag

SEQ ID NO: 198217 - DNA, 122 bp, Homo sapiens
tcctagtaggactaaatgcttaatgttcacccaggaattcatggttctcctaaaaccctgcggtggaatgccttccttcaccgagcatttattgggcacctactaggtgctagggtggctct

SEQ ID NO: 198218 - DNA, 122 bp, Homo sapiens
ggcaggagcggggcgcccagagggcctcacctgagtgagcggtggctctccaccatgaggcggccaaaggctctgtagtcgccacgtctcagggcggccgctgcctgggccgtgcgccgaat

SEQ ID NO: 198219 - DNA, 122 bp, Homo sapiens
aaactgtaaatattttaccatccagggttcaacctcctaccccttattctcctgacagtacgctgagacaaacattttattaactaacatctctctcaacattttcccctgctaattgcatt

SEQ ID NO: 198220 - DNA, 122 bp, Homo sapiens
gcttttggcgttcacaatgaccataattgtgctattgtaagcgtcaatcgggggcgcagccggagtcccaggtcccagtcctggcttccccatgtcaggcttccccttcgggccggtttcag

SEQ ID NO: 198221 - DNA, 122 bp, Homo sapiens
aatgcggagacacggctgcctcgcgtcccttccctgacctgccccaggcggacgcggtgacgtgtgtttgcctcgaggctggaatacatggggatcaaatgcagagaatggagaaaggaggg

SEQ ID NO: 198222 - DNA, 122 bp, Homo sapiens
cgcacgggacaaaacaagcttgcagaacagcagggggcagagaggctgtaaacaagccaacgggctgcacttgtagcggttctgttgccaatgccattcagaccccagtccgggattccgcg

SEQ ID NO: 198223 - DNA, 122 bp, Homo sapiens
agctccgccgcccgcctctccgcccggcctttcccggcgtccccacgcggggcgcaaccgcgagaaagaaacgcaggtcgcaccgtcagcgcccagagcagcgccagtttccgggcccgggc

SEQ ID NO: 198224 - DNA, 122 bp, Homo sapiens
tactgactcacgggatcccattgctaaacagagccatcattgaaaactcaatcatataaacgtaaaattacgtaaattatgttaaaaacaaaggcagtgaaaatactaaaaactcatcactt

SEQ ID NO: 198225 - DNA, 122 bp, Homo sapiens
tcgggggggtttccagacaggggccgcttttgttgagggcacagaatgtctccaaaaggtcggttcgttatcacgagtcaccagagagaggggaacggagagaggaacgccgcagcctccag

SEQ ID NO: 198226 - DNA, 122 bp, Homo sapiens
gcgcccgcactcctcagggtggatgggactgggcgccgtggagcagggggctgcgctcgtcggggaggctggtgccgcgcaggagaccagggggaggtgggggggaaggctcaggcatggcg

SEQ ID NO: 198227 - DNA, 122 bp, Homo sapiens
ccggcccggcccgggagtgagcctgcagcgagggattagcgcggtaatagccgggattagcgcaggctgcgagcgcgttagtcactaaactgcgcgttcgcatcccgagccacctcccctgg

SEQ ID NO: 198228 - DNA, 122 bp, Homo sapiens
gtaagtatggggcctagcttgcgattatttctgactggtttttgcgtctacactaagttgcgcgtcccatgttttatgttgttgttttttttttccttgctggcatttacaagcttaagtac

SEQ ID NO: 198229 - DNA, 122 bp, Homo sapiens
ctttatcgccgcttattattccaggaacacgcgaggccctctgggacccgattccgcgttcggctcactgacttacaaggtcaagaagggggaaaatcagccagaaagtagcagccccccat

SEQ ID NO: 198230 - DNA, 122 bp, Homo sapiens
caaaccccagacctctgtgatccttttctttttaaaacagaactctcccaagagggcccccgctctcccggcttcatgggtggaaatggcccggcctggtttcctatcagttcaactctggc

SEQ ID NO: 198231 - DNA, 122 bp, Homo sapiens
tgattctgctcccctcccccaactcctccagctaagcaaggagcagtaactgccgtgaatcgggtggtttaatgttgttgtgttcagaaacccaggcccaacaacatgaaactacctaattc

SEQ ID NO: 198232 - DNA, 122 bp, Homo sapiens
gggaggagggtgggcggacacaggcggagcgagtctccccgtcgcgggtggttgtctgggcggacatcctcggtggcctgatcgctgctggaataacttcaactgcttccacggaggagctg

SEQ ID NO: 198233 - DNA, 122 bp, Homo sapiens
tggatgacctccccacacccttccaatggattcccagtgttggttaggttggccagcactcgtttctgttgcttataaccctagtgtcttggtgaatacaaggggattcaagttagtcatcc

SEQ ID NO: 198234 - DNA, 122 bp, Homo sapiens
tcggggaactccaacattggggtgtccagaaacactggggtttcaggcgctctgtaaatgcgtccgaggtccgcggttctgcccgcaagcccagaccccggcctcacttccgccccgcgccc

SEQ ID NO: 198235 - DNA, 122 bp, Homo sapiens
cagagtcctctaatctcccactgtcctggtcaaacatctccctcgtccggatccttctaacgcaggagtctcagacgcaaatgccggcaagggccaggcaggtgatgtaagatgcgtggagc

SEQ ID NO: 198236 - DNA, 122 bp, Homo sapiens
gctttgcctgatgcagttcccagcttgacttttccctttgccttagactgattgtcttttcgcagcagtatcacttgccactgctttgtcttattctttctattccagaagccagcccatct

SEQ ID NO: 198237 - DNA, 122 bp, Homo sapiens
ctatattataggagcttagaatcccagctgctggctctgggctgaagttctctgatggctcgtgcagggtggactggcctccttcccctatatgtgtgtctactgctgacctgtggctttgc

SEQ ID NO: 198238 - DNA, 122 bp, Homo sapiens
caggaacctggctgcacaacagaaggtggggggcagtgagtgagcattaccacctgagctcgcctcctgtcacatcagcagtgacagtagattctcatgggagccccgaaccctgttgtgaa

SEQ ID NO: 198239 - DNA, 122 bp, Homo sapiens
ggcctggtctgcggggcagctccctgccaggatctgcccaccttggcttcagtaggccagcgtgggcagagtccttcccggcccggccatcccgagggtgtcctgccgtgtttggaagctca

SEQ ID NO: 198240 - DNA, 122 bp, Homo sapiens
ctaggacagtcccggggcccaggggtggccactcacttccctgcctgagatgggcttcctcggagtggatttgcccagggcaagcgagtcctggcttcccgggcttggctgcctcatgcacc

SEQ ID NO: 198241 - DNA, 122 bp, Homo sapiens
cctcggagcgaaggaggctccagaactggtagagccgggccatcgggctgggcacctccccgcggcgcccgcagcgcggagtccactgaccggctcaaaggtctgggaatctcggggcggcc

SEQ ID NO: 198242 - DNA, 122 bp, Homo sapiens
gtgaaaggtttgtgagccggttaacatttttacaagctgattaaattctcaagttcaccccggactcaatggagtttaagctgaaaagattcctgagtatttccacatttccaaccagaaag

SEQ ID NO: 198243 - DNA, 122 bp, Homo sapiens
ccgtgcccgggggtgggacccgcgccgggagctgccgagtgcgtggagggagccaggctccggctcgcctgatggattgacttggagatggatcgaattacaccatttgccgtgcatcggtt

SEQ ID NO: 198244 - DNA, 122 bp, Homo sapiens
ctccaagccagtggggacgcccagctccgaaggacacgcttgcacaaactctcggccagacgggaagagcgagtccaaggcttcctgcaggccttggaactcaagcgagctgactggctggc

SEQ ID NO: 198245 - DNA, 122 bp, Homo sapiens
cccgcttcccaacggccggaggccgctagactaatcggcttcgccctgcgcgctgtaatgcgcatgcgcacgcgcacaagttcctgggcccgcccatcttccggacttgggcggggcgtaaa

SEQ ID NO: 198246 - DNA, 122 bp, Homo sapiens
cccccgggcaggggctccacgatatcttctggcctttggtctggggcggggggcttctcgcgcttctaaagacaggcagtgggtacagtggcgggatggggtcggtgcatgggctggatggg

SEQ ID NO: 198247 - DNA, 122 bp, Homo sapiens
cggtgtgggcggggccgagggcctgtcgccgccgcgcccgcgggcggggcgagggcagcgcgcagctttgttgtgtctcgtctgagattcgggaagcttctgtgcgtaggcgatgcagtttg

SEQ ID NO: 198248 - DNA, 122 bp, Homo sapiens
tccttgacctgcattcagcaagaatcccattaagccagtttacaagaatcccctctaccccgatgtctcctcctagtgatttttcatcatggactccctcaccctgcccactggattcactg

SEQ ID NO: 198249 - DNA, 122 bp, Homo sapiens
cccagctctactaaatgaacatttaactatgtgaatcacagtgcctatactttctccagccgactttgcccactaatatttttacccataggtatagaattacaggaagttggtaggaacaa

SEQ ID NO: 198250 - DNA, 122 bp, Homo sapiens
agagaactgctgatgagagagctgctgaataaaactacatttcacctgtctacaccgccccgaatgttctttcagctattcatctatccatccactcctctcagacctcatcatgggctgca

SEQ ID NO: 198251 - DNA, 122 bp, Homo sapiens
ggtttcaccatgttggccaggctggtctcaaactcctgacctcaggtgatccgcccacctcggcctcccaaagtgagctgggattaccgacgtgagctactgcacctggccggttccaagtc

SEQ ID NO: 198252 - DNA, 122 bp, Homo sapiens
cactgcaaagaccaaatgcgggagaggccggggcagctctggccaggacacctggggcctcgccgggcacgtgctccatgatgctgatccggagtggagcaggccagtaccagactcctgcc

SEQ ID NO: 198253 - DNA, 122 bp, Homo sapiens
tctgagtcgctcttatgaagcaggcacttgtcggagacactctctatctgaacacagagccgggagcggcgggcagccccagggcgccatctaggaccagccttggcctcgacccacacagg

SEQ ID NO: 198254 - DNA, 122 bp, Homo sapiens
ccaggcatggtgctgggcatggtagagctacagataagaaccagctgctgcccttgatcacgtagtctggtggaggagacagctctgaggaagaatgatgcttatctgactcagtgtcactt

SEQ ID NO: 198255 - DNA, 122 bp, Homo sapiens
ttctgctgttgccctggatccgggaggtgggggtgtgtacaaacttgcagagcctccctccgggctctgcctgacggtttggggttgatttagaagcaaacgggtttgtaattaagaaattt

SEQ ID NO: 198256 - DNA, 122 bp, Homo sapiens
agataatacaaactttgttcttttctttactctttttgttatcagtaaacaaagcagatccgctgctggggtgacactgagggatgagatgcacagtgacaaggtgcctgaatatatatttt

SEQ ID NO: 198257 - DNA, 122 bp, Homo sapiens
ccagctcccgccgcttgtcagcgccaacgtattcggagagcagcaggtcccagagtgacacgctacaccccttaaacctccctgtgctgacgggcaccttcatggccctcagagccaccgcg

SEQ ID NO: 198258 - DNA, 122 bp, Homo sapiens
actccctctgttggctggtgacagtgctgaggtcccgatagagtggtagggagaccctgccgaacagataattagagggtgccaatatgatctgggggggaacctgggagacagggagctcc

SEQ ID NO: 198259 - DNA, 122 bp, Homo sapiens
aattcttttttctttatagataagctcttcttctggagttctttgagagccatggtaaatcgaagagccttaaaagaaaatctcactgatactccaggagtactattcccactgagtcagca

SEQ ID NO: 198260 - DNA, 122 bp, Homo sapiens
cccgaggctgcctagcgtctcccctcagcttctgctcggggggcagcgggttttgcccgccgctcctccgtcagaagggcggccagggctgggacaggaatgaattccctgcgggtccggca

SEQ ID NO: 198261 - DNA, 122 bp, Homo sapiens
ggaaggaagaagccaacatttattaaggtcctattgtgtggcaggcacattcgcaagcatcgcttccggccagcccttggccctgtgaggtgcacttgcattgagccgtcattgtggggatg

SEQ ID NO: 198262 - DNA, 122 bp, Homo sapiens
gaagacaaagtacaaatacagacaggaagagcaccgacaaaaccatatggttaagcctcacgaagtcatcctcaatcaccactgtattcacaacacccataagggttaagagcctcaaaagt

SEQ ID NO: 198263 - DNA, 122 bp, Homo sapiens
tgcccggctcatcacctctgactcctgcgggccttccagccggcgctatctcgcagcccccgaccagctcggcctgctgtcgggcatctctgctgtcctccggctgtagggctacctgcctc

SEQ ID NO: 198264 - DNA, 122 bp, Homo sapiens
gataggaacaagttcctcaagccaacttacaaatcctccttttcttagacaggaatcgcccggggatgagctcaacacatactccaccatgctaacgcctagtcccccactctccgatcgtg

SEQ ID NO: 198265 - DNA, 122 bp, Homo sapiens
gtctagcggcttcaggcccgggcgtgcgcaggcgcgtcccccgcccgccgcccacccggccgtcccgctccctgcgccgcgcacctgaggcagtcgttgtctctcacaaggcgcgcgctctc

SEQ ID NO: 198266 - DNA, 122 bp, Homo sapiens
ggagccccggcggaggccaggagggcttgcgttgcacaatctggagcggatccccgggggcggctgagggcctgggaccccagtctccctcgaggtcttcactcacccctctgctaaggagc

SEQ ID NO: 198267 - DNA, 122 bp, Homo sapiens
atcttcttataatagaggtagaagagggaatgaaaagcagtgcacagatatgaaaattaccgcagaaagaaaatcaaaagaggccaggaatggtggcttacgcctgtaatcccagcactttg

SEQ ID NO: 198268 - DNA, 122 bp, Homo sapiens
agagccccctcggccaggagttagaagctgctcctctgacctctggaggacccggcactccgaaccccgcgcagcctgggaaaggcctgagattccccgctattgggattcacatcacgacg

SEQ ID NO: 198269 - DNA, 122 bp, Homo sapiens
tgagggacagcacgtggctgctgtgggcgcctgccctgtcttgtcctgccatgtatgaaacggatcaatcggaaagtgctctgcaagagggcacatcgacgttttggtcatctggttgccgg

SEQ ID NO: 198270 - DNA, 122 bp, Homo sapiens
cacttcatagaggggttttgaggattaaatagacaaaatacttaccgatgataggcttctcgacgatactttttcagggcatgcttatccatgttagcaggcatatctgctgcattctgtaa

SEQ ID NO: 198271 - DNA, 122 bp, Homo sapiens
cagcaactcgaggaactcagacgctttggctctcggtgccacctttaaatgctaaaccaccggtaggtagtcgctaaatgggaaagtcgtgttctcccggttttcaggtgggaaaagctgag

SEQ ID NO: 198272 - DNA, 122 bp, Homo sapiens
tttccgcctctggagcagggtcgagaaccctctttggtcctggggcctgagagctggtcccgagactgcatttccatcacctccccattgacctctggttgccaggccccaggggtggctcc

SEQ ID NO: 198273 - DNA, 122 bp, Homo sapiens
ctgcggcccgcgtcggcgctggggacaaaggtgcgtgtcgttgtcgggtccgggctctctcgttagccttgccctagttttgcacttttgaaaaagttgtgacaacaggaagacagatgccg

SEQ ID NO: 198274 - DNA, 122 bp, Homo sapiens
gagtgaatatgactgtgtagaggcagtgagtataagtaagagagtataagtgtagagagacgaaagttttctgtggctgtgggtttgtgtttccctgaaaggttaactgggaaaatttaggg

SEQ ID NO: 198275 - DNA, 122 bp, Homo sapiens
gctggtgttgtgttcattcttgaacagacgcggcaggcgtacagctggccttgtctagggcgggaagggggaagagtgtgcttctggccctgccacttgctcaccacctttgagaacagagc

SEQ ID NO: 198276 - DNA, 122 bp, Homo sapiens
gcctgcgcaccgccgggaaagacccagagtccgagtccagcctagctgaggcctgcgcaccgccgggaaagacccagagtccaagtccagcctagctggggcctgcgcaccgccgggaaaga

SEQ ID NO: 198277 - DNA, 122 bp, Homo sapiens
tggggatagtttcaggatgaaactgtttcacctcagatcatcaggcactagttagattagcgtgcaacctagatcccttgcatgtgcagttcacaatagggttcgcactcctgtgagaatct

SEQ ID NO: 198278 - DNA, 122 bp, Homo sapiens
gcaacgcgcagcctaggtctctggtgggaaacttctggaggtctcgagcccacgcctccccgaagatggtgggggagttcttgaacccttggggaagcccggtccaagtgtactgagtagtg

SEQ ID NO: 198279 - DNA, 122 bp, Homo sapiens
tgtccacgttaaagtaaagctccgggaagaacgacatggctgctgcgggagcggcgggaccggagaaccaggaccggccggcacgaatcgcgactccccaggtcagctgacgctgcgtcctc

SEQ ID NO: 198280 - DNA, 122 bp, Homo sapiens
ttacagaccgtattatcacttgtactgattggtcttctcttacactttaaccccaggttccgttgcaaacatttttaaagggctggttattcttcctgaaatgagtttggtgattagaaatc

SEQ ID NO: 198281 - DNA, 122 bp, Homo sapiens
ataagggcagtacacactactacttttaatactatttgctccaaactcaacagcttttgacgtacttagaccaacacactaaaatattttcaaaaacactctcttcctagcacatcagtcac

SEQ ID NO: 198282 - DNA, 122 bp, Homo sapiens
cggagggtggcggcggcgtggagggcagaggcaaggcacacggcgaggactgcgttgggccggcctgtggtctgtttcacagcagacagggaatagcagcagcctgcagtgtgctccagaag

SEQ ID NO: 198283 - DNA, 122 bp, Homo sapiens
agaaacagtgagtgctagaggcccggctgctaagcaacggcagagggcgggaagtttgaacgttctggacccgccccgaaggcaaataggccaatcagcgtccagactcttcagctacggca

SEQ ID NO: 198284 - DNA, 122 bp, Homo sapiens
gaaccacgcgccccacagcggcaataaccagcatccaccagagaacaacgtgccctgcaacggcgataatcagcatcagctagagaaccacatgccccacagcggggataaccagcatccac

SEQ ID NO: 198285 - DNA, 122 bp, Homo sapiens
tgtagcacccacctcactgtagtgtccttctactatgcaccctttgcttatacctatgtacgtccaagatccctgcgatctccaacagaggacaagattctggctgttttctacaccatcct

SEQ ID NO: 198286 - DNA, 122 bp, Homo sapiens
cgtcccgccccgtaccgtaccaggccccgcccccgcccgggccgcccccgcccccgtccccgcccccacagcccgcagacccccaacggtcggcgggcttctaggcctcggcccgggtctta

SEQ ID NO: 198287 - DNA, 122 bp, Homo sapiens
ctgaatttcgagagactcctctttcccagccgctccaggaaaatgtccctgggttggctccgattggaccaacttggtcatgtgcccatcccaaagccaatcagtgtagttagagagctgaa

SEQ ID NO: 198288 - DNA, 122 bp, Homo sapiens
ggaacgtttcccccactgtgttccagtgcagaggagacgaagcctgtcctcaccgcggctcgctgggcccaggctggctctggaaagcctgtgcggtcctgggcaggaagcccggcccgtgg

SEQ ID NO: 198289 - DNA, 122 bp, Homo sapiens
ctcggtgggggccaatgcagagcccctcaggatggggtgccccgtcaggggctggacggtcgtggggcgggtgcagggctcaggcctgccccctgagctacaggagccctgggtgagccccc

SEQ ID NO: 198290 - DNA, 122 bp, Homo sapiens
agtctattcatggcacattgcaaacactcagtgaatgttgctgtcagtcttgctgctcttcgttgccttgccggggtgccttggcctggtttgtagtggtctccacattcagcctgcctgtc

SEQ ID NO: 198291 - DNA, 122 bp, Homo sapiens
gtcgcttccagctggattttcaacacagggaattggttagacgtccctggcggggtgtgtcgcttcccactggattttcaacgcagggaattggttagacgtccctggcggggtgtgtagca

SEQ ID NO: 198292 - DNA, 122 bp, Homo sapiens
aagcctcgaacaatgtaaatcctaaccgtgcattcctgtgggacgctgtcaggtaattcccgaaactgtctgggaggggctggcacgctggggtcatccggcagagggtagatccgaaagga

SEQ ID NO: 198293 - DNA, 122 bp, Homo sapiens
tacataaacacctttttcacttacaagttgcagagaatttaaatgttacccctgtgtgcacgtatgtttcttaaggcatatggataagccccactgaggtgcaatcagatactgctagcaaa

SEQ ID NO: 198294 - DNA, 122 bp, Homo sapiens
tgcctccagttctgaccattcctagcccatcttgtcagctcattgagtcatttgtcttgccgggtcatcttggtttcttactaactcttgtttgcagtatgcttgaccttgatgtgtgtcca

SEQ ID NO: 198295 - DNA, 122 bp, Homo sapiens
aagtcagttcttcatcagaaatctaggggccaggcctccaggcagctgtgacacagccaacggccaagagctgcgggtattgatcagactgcagggcgtcggtcctcccaaaaaggtgggca

SEQ ID NO: 198296 - DNA, 122 bp, Homo sapiens
cggaagcggcctgcaagctggaccccagcgagttcgcaggatctgcgtagtccctgctcgcgattagagcgcacacgagtttactcctgtccaagtattctgataagcttcctctactgccc

SEQ ID NO: 198297 - DNA, 122 bp, Homo sapiens
tgcttagcgttctttccccgaacaagccggtgagcttccagcatctgtattttctgaatccggcagataagaaatgcttgagccaggaccgattgattagcagcggtttagagatcttatct

SEQ ID NO: 198298 - DNA, 122 bp, Homo sapiens
cctgggattccctgcgcagccaacaacagaaaagaaaaccagctcccacacagaggctcccggctgcgcagaccttgcccagcacaccagattgccagctccgagacccgggactcctcctg

SEQ ID NO: 198299 - DNA, 122 bp, Homo sapiens
cacctctgagctggcccagcagatgtatcttcgtaggctgtcccattattctggactggacgcttctgatggtgtgatgtgtggtgagattagtgctgtggtcacgtccccaccgtcacgtc

SEQ ID NO: 198300 - DNA, 122 bp, Homo sapiens
ggcccaggagaagctgcagacggaggcggctccccagggcggcgggacccgggctgacagcgacccgcagcccctgccgggccgcccacacccgccctgggactccgccggggcgctggtgg

SEQ ID NO: 198301 - DNA, 122 bp, Homo sapiens
ttcctcatgtgaaaaattgaggtaaaaatacttggaaatattgttgtaaaggttaagtaacgtaagaaaaatgcctggaaccatgtcttccaccaaagtaggtaggggctcaacaaatattg

SEQ ID NO: 198302 - DNA, 122 bp, Homo sapiens
cccagacacctgcggaagacaggagaccgacgggtgtggatgtgctggccggccctgccgcgggcctcaccatcggtcctgggttgtcagcaaaagcccggtcgaaggccttgatgtgcttg

SEQ ID NO: 198303 - DNA, 122 bp, Homo sapiens
aatgcatcatgtaatctcccctcacccattagccattgcagtgtggtacaatctccagcacgtaataaaaacctgagcatgcaagaaacagcaaaatcactgctatccctgggagctgctcg

SEQ ID NO: 198304 - DNA, 122 bp, Homo sapiens
gaccttcactctgaaaataaaccttgacgtcgtaaagacgacccacctggagtctccacccggcggtagtggtaagggttaatgcacacttctttctgcttggagccaaatgggaactcaca

SEQ ID NO: 198305 - DNA, 122 bp, Homo sapiens
ccccacccctccgattctggcctggcacccggattcccgcccggcctccgtccctgaccccggaccctcaccccagcctgacctggcttcatggcgagccctggtttgtgcggctccggagt

SEQ ID NO: 198306 - DNA, 122 bp, Homo sapiens
cgtttaacgcagagctttctgggtaatgtagttccccactttccatggcgctaaaaagagcgatacccagagtccatctgcaggaaaagcccgccatcaggtcaggggttctccttaaaaag

SEQ ID NO: 198307 - DNA, 122 bp, Homo sapiens
gaccaactgggcatcaagcggtgcaaaagcaaatccctctcaaagctgggagagtcacaccgtgggctactcctgcatgcagctgggtacatatctcctgggtcctatgacctgcctaaaaa

SEQ ID NO: 198308 - DNA, 122 bp, Homo sapiens
gggcatggaggacagcctgaaggagcagggccgggagggcttgctggacagccccgactccgggctgccccccagccccagccccagcccgcccttctactccctggcgcccggcatcctcg

SEQ ID NO: 198309 - DNA, 122 bp, Homo sapiens
ggtgggcgcccatttgggactgcgccacccccaggcttgttcttgttttactgtattgagcggcggcacccgccggacccgcattatggctgggggcgccagcccaagaatggggaccatgg

SEQ ID NO: 198310 - DNA, 122 bp, Homo sapiens
tccccgaaccccttacctccagggtctgtatctcctgctgggtgaggtcactggacacagcgcacttggtgcacagcccgcacaggctgccaatgaagatgacgatgagcttctggagctgc

SEQ ID NO: 198311 - DNA, 122 bp, Homo sapiens
caaaattctcacacttgtcaaaaaaaaaaaggggctatccaacaaccccgcccttcctcccgggccccctacccccatgcagtgactagagctgtggtcaaggactcttcttccccaaggca

SEQ ID NO: 198312 - DNA, 122 bp, Homo sapiens
acgttcaaccgaggggtcaaggtttcaaacgcacacgttctctatcccaccaggaaagttcgatactgtaacagtgttttcgtttttccttgtccaccctaaaggttttcgtcaggatattc

SEQ ID NO: 198313 - DNA, 122 bp, Homo sapiens
attggcacagccggtgcctcaagtgctcctgctgccaggcgcagctgggcgacatcggcacgtcctgttacaccaaaagtggcatgatcctttgcagaaatgactacattaggtaagacttt

SEQ ID NO: 198314 - DNA, 122 bp, Homo sapiens
aagaaagatgatatgtacttttcctttggaatcatgaaatgtggcattcaactttttctccgtccaggactggtgttttctgcagtgtgtcacaggaaaaaggcacttggtttagggtgtgt

SEQ ID NO: 198315 - DNA, 122 bp, Homo sapiens
gaggcactacgagcctgggtcccactatagcggcttcgcaggtatcagcgaggctgctcacgcctttctctccgctggcgcgagccagtagccacctgcgcgtcgttcgttggttcattatt

SEQ ID NO: 198316 - DNA, 122 bp, Homo sapiens
aggtgggctcctagaagcacagaaagggtcgggctgggggacaccacggcaaggaaccagcggagtacaggggccccaggagcgccgggacatgccaggccgggtaggcagcctggggtcgg

SEQ ID NO: 198317 - DNA, 122 bp, Homo sapiens
ggagctgccactagctccaccccattccatgcaaatgaagtcaaagctgtggtgagtccacgtgattagtcacatggttgatgacacactctccccacccctttagtgacgtcattgcccac

SEQ ID NO: 198318 - DNA, 122 bp, Homo sapiens
ccatcgttgccaagtggggcggccacctgagacacacacaccttactgtagccaccagaacgcccagggacactgggatacaaagtcaccatacttattaggaccagggaagccaggagtcc

SEQ ID NO: 198319 - DNA, 122 bp, Homo sapiens
tctttgaaaaaatcctgagctggtgaaacccaaggatttcaggaaaactcatagacttctcggctgacagatttgtctttagggtgaaattgtaaacatcttgtcatcatttgttcaaaggg

SEQ ID NO: 198320 - DNA, 122 bp, Homo sapiens
ggattccctatccaggatgggggggccctcagggctctgttcccagaggctgagttagagcgatggggaagggggggggcagttttggggagagacaggcagtgctggctttgctcaccagg

SEQ ID NO: 198321 - DNA, 122 bp, Homo sapiens
ttctctcgcaggccgcgtttctcagccaggcttaggggaatccctcgaagcacgtggtcccgctgcgccacagccaggccctggagctccttcaccaggaggctccgcttctcctcctcttc

SEQ ID NO: 198322 - DNA, 122 bp, Homo sapiens
taggatcctccgcgtgcggccggctcaccagccaatcacggcctcgggtggttctcggcgcgccgcgctgcctccttggaagtgtagtcctcaagttgcagcggccaagagtgagacccgcc

SEQ ID NO: 198323 - DNA, 122 bp, Homo sapiens
tacaagccgagcacctctcggccagcgccctcgccaggactctcccgctcaggccccctgcgcagtctctgttactgtcacttccggaggttcgccgcctcaaacctccctccggaagcaag

SEQ ID NO: 198324 - DNA, 122 bp, Homo sapiens
agaaataaggggaaatgatatttctttaaagaacagagatccctgaatagcaccgggggccgttacagcccatgaggacatctccgagtccttctatatgacactagggacccccgtgccat

SEQ ID NO: 198325 - DNA, 122 bp, Homo sapiens
gtaggttttaattacttgtggatgaactgagctgccgcatagccacctacacactgaccccgggagccacgtggaggcgggtgtgtgtcgggagctgagctttggtgtcagctcgctgtggg

SEQ ID NO: 198326 - DNA, 122 bp, Homo sapiens
tcctagcggctaaaagagctccaagcctaggcgaatctgccggtccgctcgccggaaatgcgggctctcctgccggaagctgcccctccaccattttgtggcccgctatggcggcggtgttg

SEQ ID NO: 198327 - DNA, 122 bp, Homo sapiens
cggcctgggggggcctcggctgagccttccgggtcccctgtagcctgagggtacccttgtcgccccgcccgggtcctgcgggccccagctctgggcttgccgaccagaccgtgatccagacg

SEQ ID NO: 198328 - DNA, 122 bp, Homo sapiens
cccggggcctcgaggtcctggggacgtgctttctgtttactttctgccgggcttccacagcgttgtggtttccacttggaagggctgcagtgggaactgaggggcctgctccgggggctgag

SEQ ID NO: 198329 - DNA, 122 bp, Homo sapiens
cctttaggtaattcggtcttgaacggaaatcgcgagtcaggagctgggttgagtgctcctcggtcgggcattcaaagccctccaaatctggccccactttaactatccaatcatagcggcct

SEQ ID NO: 198330 - DNA, 122 bp, Homo sapiens
aaaaaaaaaaaaacatccaagcgtgttgcaggcagatgagcagtcgcgggaatggctttccgggtgacatctgccagtttggtccccatggcgctcatcccgcgggctcggaccccagcctc

SEQ ID NO: 198331 - DNA, 122 bp, Homo sapiens
tcagtgcctcctcaatgaacctgagaaacagtacagtactaaagatgaagataaaaactccggacctaactccagcctaggggtacaaaggccagatcccccgccccaaccatgcgaggtcc

SEQ ID NO: 198332 - DNA, 122 bp, Homo sapiens
tgagcgactgcacttcccaagcgcggagagtctgcccaatgagttccgccctctctagcgcgctttctgtgatccaccaatcaggctctgccacgcccgagctgagtggtcagcttgcctgg

SEQ ID NO: 198333 - DNA, 122 bp, Homo sapiens
caaactcctgacctcaggtgatccgcccacctcggcctcccaaagtgctgggattacaggcgtgagccactgcgccccgccgggctcctgctgtttcaacccattccttggatggtgctgcc

SEQ ID NO: 198334 - DNA, 122 bp, Homo sapiens
taataaaaaaggataaagaggagggaagcctaatgttatgctctttatgcccgaatttggcgaaatcgagccttgcccgctgttttttcctatgacagtgtctgaacctttctttttcccag

SEQ ID NO: 198335 - DNA, 122 bp, Homo sapiens
cccggccaaaaaggggagggcgtggcaggcaagggccgggggcgggagcgcgggcggccgcggactcacgtactggctgtggcggcgccgcgggaacccggccgccagcgggacaaaagcgc

SEQ ID NO: 198336 - DNA, 122 bp, Homo sapiens
tgccagcattccagctggggcagtgtgtcccagtaccttgtccttgccctcctcaggcagcgctcacctgcaggcagccctgtgggctgtcactcatcatctgccctgtgcccaagcattgt

SEQ ID NO: 198337 - DNA, 122 bp, Homo sapiens
gcgcggggctttcctccagagctccagggcccctggctcagcccggggttgcgctgggagcgctggaaactcggcagccccgcgcgaccctatcctggagcaacctgccccctccccacgcc

SEQ ID NO: 198338 - DNA, 122 bp, Homo sapiens
tataacaaactaggctatgccctgttttttactgttttctattgccacaaagtcaaattgcgtggggtctttttaaagtccatagacatgttcactctaagcagctgcccttctctttgaaa

SEQ ID NO: 198339 - DNA, 122 bp, Homo sapiens
agattcacagtgtcctggggtaagggggggttcacagtaatcatggtctactcctctttccgtggctgggggtagacttaataaagagagaaattcaagaactgcttgctttatttaggggt

SEQ ID NO: 198340 - DNA, 122 bp, Homo sapiens
ccctagctcacaggattgtaggtccccagcggatgaatgaactggctgtttgctgggtgccgggaagatgctttggagccacccatagatggacctgcatggggacttgcttttccaggaga

SEQ ID NO: 198341 - DNA, 122 bp, Homo sapiens
acttttttaaaaagattaaattgaattttgttttaaatattaattaagcaaaaaaaaagtcgagtagatgttttaattcaatgaaatagacaatagggcgaaaggtaacattactctgttcc

SEQ ID NO: 198342 - DNA, 122 bp, Homo sapiens
gccagaggacaatgctccagttgttaaaagtgctttattctggagcatggactttctacacgacatggtctgagtgtgtcctggtgaggaggctgaaccgtctgtggaaatgagactgttca

SEQ ID NO: 198343 - DNA, 122 bp, Homo sapiens
ccggaggaggcagggagctctgcggcggccgcggcagcagtaaatggcgtcatgtggatccgaggcggaacagagcagttgttgtcccagaggatatatcgcatccggtcccagctcattgg

SEQ ID NO: 198344 - DNA, 122 bp, Homo sapiens
ctccattttccttactcccctcagtgaagaatcagacaagagcaggttgtacagcaacagcgtgcttgaactttacagttttgcttccgtgaaaaatttatttgtagtttttgtttcttagt

SEQ ID NO: 198345 - DNA, 122 bp, Homo sapiens
tcgtagttatcccaaaatacccaagaaggactacagaaggaaaatgagagaggcagccaacgagatcttacacatggcaaaaactcaacaactagctggttcaacaaacaagttatgagtca

SEQ ID NO: 198346 - DNA, 122 bp, Homo sapiens
aagcagtcctcctgccttggcctcccgaagtgctgggattacaggcatgagtctctgtgccggcctggacctatattctaaaaatagcatgtattgattttgtttgaatatatatatatatt

SEQ ID NO: 198347 - DNA, 122 bp, Homo sapiens
gacaatctagatggtgctggggcccagctggcctcggcctgggaggatgactcacagcagcggggccttgttaacctgtttacagtgagtcatcggagcccctccgggccttgttccctcag

SEQ ID NO: 198348 - DNA, 122 bp, Homo sapiens
cctgctgtgcacaccggtgttcggaagggcagcgcactgcacatcctggccaggctgcttcgtggccgtctctcccaccggggtctgcaggtgctggccgcccactcttcctcggcgtctcc

SEQ ID NO: 198349 - DNA, 122 bp, Homo sapiens
gcgctgcttccgatccacggcgccgctcaagcgaaggctcagggggtcccccgcccgaggcggccccagagccgcccctctggtctccatcccggagcagcgcccttccaccctccttgggc

SEQ ID NO: 198350 - DNA, 122 bp, Homo sapiens
ctacaaaatgtaccatggggcagcaacaccgtacccacctcataggcccgcggcgatgagcgaggggcctcgacagcaccctgcatggccctgagtgcacagagaccctggggaggaaggcg

SEQ ID NO: 198351 - DNA, 122 bp, Homo sapiens
gtgatctgcccgccttggcccgccaaagtgctgggattacaggcttcagccaccgtgccccgcctaaatctgcagttctgatggaatgttttgactgaagactgaacgtagaaacagtacct

SEQ ID NO: 198352 - DNA, 122 bp, Homo sapiens
tcctttattacatcaagtaatactaccaaatactgctcctctagcatttgccctgtgctgcgcatgtgctcgccctgcaaccacctttggggcaggtactatcgtatcatatcgtatcatca

SEQ ID NO: 198353 - DNA, 122 bp, Homo sapiens
agataatgttaaaatgcaaacgccttaggacaaccccaagattctgactcagcaagtttgcgaaggtggactaagaatttacatttccacaggctccagctgatgctgtctgtgatgttccc

SEQ ID NO: 198354 - DNA, 122 bp, Homo sapiens
gagcttgggaagaaagattgggccagccagaaacctggagggggaggaagtctcgagatgcgcttggggtgccagataatggggatcagagattggagaagtgacacttagggacaagaggt

SEQ ID NO: 198355 - DNA, 122 bp, Homo sapiens
aaaatggcatggtcaaatttacttttgaaaagatgactctgagtgcactagagacaaatgcgtctggcagcaggaagtccagttaggtggctgtggcaacaatacagaggggaaaaaggaga

SEQ ID NO: 198356 - DNA, 122 bp, Homo sapiens
cgtgggggacctccatcccgacgtgaccgaggcgatgctctacaagaagttcagcgcggccgggctcatcctctccatccgggtctgcagggacatgatcacccacggctccttgggctacg

SEQ ID NO: 198357 - DNA, 122 bp, Homo sapiens
aacccctccgggtccgccgccaccgccgccgtcgtggctttggctctgagaaggggcgcgcgccctctggtggctgctgagcagtacagcttcctaggccgatgagaggacgccgctctggc

SEQ ID NO: 198358 - DNA, 122 bp, Homo sapiens
caaactcctgaccgcaggtgatctgcccattttggcctcccaaagtgctgagattacagtcgtgagccaccgcacccagccgaaatgtagatattcctaaagccttggacctatgttttttc

SEQ ID NO: 198359 - DNA, 122 bp, Homo sapiens
acctgggtctcctctgggctaagaggtcatcagtcctcatcctgccccatgcctgctttccgtgctgtcccctcatgatctcttccctgctccatgtctcctcccctccttatatcacattc

SEQ ID NO: 198360 - DNA, 122 bp, Homo sapiens
ctcaccggccacccgccgtcaccatggcagatgcccttggccggaactaataagaggcgtcggggccagcttccggtcccctgcagtgatagagggcttggtgcctagctgagtcctcgctg

SEQ ID NO: 198361 - DNA, 122 bp, Homo sapiens
cgtgatctgcctacctcggcctcccaaagtgctgggattacagacatgagccacggtgcccggcctagatttctttaaattttaaatggtcggggttccagaaaggaaaatcatccatatta

SEQ ID NO: 198362 - DNA, 122 bp, Homo sapiens
taaggtgcactcggactggcaggaggcgcgggtgcagggctgctttcccagctcggccagcgcgcccgtgggggtaacagcgctcacggtgctggagcgggcctcgctggagttcgcgctct

SEQ ID NO: 198363 - DNA, 122 bp, Homo sapiens
agatgattggtcttccggcaggtaggtggggaatgagtgctacccccacccctccctcttcgaaccggaagtgtctctgggtctttccagctggttgtcatttcactcggctcggtcctgag

SEQ ID NO: 198364 - DNA, 122 bp, Homo sapiens
ttcctctcgcagcaattaattacacagagcggcgtgttttgacgcggaccacagcaaacgcgtcaggtcacgggcatttacgcgtatctgagagcaacgtctttatcatcagcacggtgcgt

SEQ ID NO: 198365 - DNA, 122 bp, Homo sapiens
tgaaaccagtttgatctctctaggaattgcttttcagttatgttagaatagatctagggtcgcctttagcccagggctaatttggtcctgctaccgaggcaatactctttcaagaacgctac

SEQ ID NO: 198366 - DNA, 122 bp, Homo sapiens
agtctttatttgattaaatgattgatgaactaataaattctgactcaatactttcatcctcgagttcagaaaaacaagagatcagtgagtttaaagagatcagataaaggaggatagaagaa

SEQ ID NO: 198367 - DNA, 122 bp, Homo sapiens
gctgagaatgcaataggaagtagacgacaaagatgacttggactgtccttgtggacttcccgagttgttccaataagtacaggcagagagagcaaatactttatgatggatccttccctctg

SEQ ID NO: 198368 - DNA, 122 bp, Homo sapiens
ttggctctgtggtggctctttataagtcactcaggagcacagtgttggtacatctctctgcgagctaaaactgctgaagaaagctgtatgaaatgaagcttttttcatcctgctttcttagg

SEQ ID NO: 198369 - DNA, 122 bp, Homo sapiens
attttatttctgcatacactgtcagaatagattttttttcagatggggaaaatccctatacgctggattctatctttgaaggtagaagagaaaggatggaaaatatcatgtactttaaatac

SEQ ID NO: 198370 - DNA, 122 bp, Homo sapiens
gaaagtggtgcccagatcccgtctcggaattcatttgttcagcatttaccttttgaacgccggtttcctgtaggaagtgtcgcctagctgatccgtgtagggctgttgggaattgggggtgg

SEQ ID NO: 198371 - DNA, 122 bp, Homo sapiens
tcacgtggacgcagggagggctgtgaggacccctcgagcacaggggctgcgttcttgtgccgccacgggccacctggctcctcttattttttttagcaaattgccttcaagaacctggtgca

SEQ ID NO: 198372 - DNA, 122 bp, Homo sapiens
cgcctgggcaggtgtgtacgtggggtccgggaaacacagggctccctctggctgtgcccacgcttgggcgagcaggcacacgctcagcacaagcccggtccctgctgcccccagcggctgtt

SEQ ID NO: 198373 - DNA, 122 bp, Homo sapiens
aacatcctgtttacagaagaaactaacctcaaggccgaagctatttatggtggagcatgacgcgggaaagtacacgcgggaaaataagatgttgggaaacacagtggaaacaaccacaagga

SEQ ID NO: 198374 - DNA, 122 bp, Homo sapiens
agttagtcttggtgaagtaagatgtttgtagactttagagttctttaattcttggcacaacgtgactgttgagctaacaccaaatagtgtgttggcaatacttttcaaatggctgaaaacac

SEQ ID NO: 198375 - DNA, 122 bp, Homo sapiens
gccgctgctgagagggggcgcgcgcgggtgtgagcgtgtgtccgtgtgcgagtgtgtgtgcgccgggcgggcgggcactgcagcttcttcctccgtggagcggagagcgagacagagctaca

SEQ ID NO: 198376 - DNA, 122 bp, Homo sapiens
ctgtccccccccccttaattttttattttatgtcctgggctgcttttaacctggtcacatcgtcatcccagccctctccccccgcattccttaaatggttgtccatgaagaagaaaagggaa

SEQ ID NO: 198377 - DNA, 122 bp, Homo sapiens
ctgtttgagaagacagccatcgtcctcggggtccctgtttgaggagacagccgtcgtcctcggggctcctgtttgagaagacagccatcatcctcatggtccctgtttgaggagacagccgt

SEQ ID NO: 198378 - DNA, 122 bp, Homo sapiens
cgcaagtggtgcattggcgcgcggcgccgaggggcggggcccgagccgggcgcgcgcgggcgctgctctataaataccgggccgcaccgcccgctgcttcgttcgctccgcgccgcccgcct

SEQ ID NO: 198379 - DNA, 122 bp, Homo sapiens
tcccaggcccccggctccgcttcccactcagagctctcctcccctctcttccccgccacccgtttctacgcagatcggtgccccagtccctggaggagcctccgccaactccgcaggacccc

SEQ ID NO: 198380 - DNA, 122 bp, Homo sapiens
tgggattatttgggggattaaataagactgtaaacccacttagcatagttctatggctatcgtagttgttcagtaaatattaatcgttctgatagtgatggtaagaattctgatgctgataa

SEQ ID NO: 198381 - DNA, 122 bp, Homo sapiens
tccccttcacaagactcggcctgcagagttcgtgcagggagttcgcacataggagagcaccggtccgggagtgccaggctcgtgcccggccggggagaggagtgggagactaagtcgcaggg

SEQ ID NO: 198382 - DNA, 122 bp, Homo sapiens
cattcgggaaggggtgctgtgccgaggaagggcatgggcttgcagcaacacggactggagcgcaaccctcttctcacctgtttgctttgtgaccggaggcaagtcacttgagtgtccccagg

SEQ ID NO: 198383 - DNA, 122 bp, Homo sapiens
atttcacttaaaaatatatcatctttctataatagtagagtgccttcctaggggtaattacgctttttccactttgtgttgataacactatattgtgaatatctttctaagattagtcctgc

SEQ ID NO: 198384 - DNA, 122 bp, Homo sapiens
ttttaaatatatagacatagagtatgtgggccaccattcatactcttgccacagatgctacgggtcaacatgagtccagcatcccaaccacaaatacatttcagaactaggctggtgagcac

SEQ ID NO: 198385 - DNA, 122 bp, Homo sapiens
gcctctagagcaggtctgtgaggcagggaacccggagaggggtctctggccaccaggtggcgccggtgctccccaccgggcctacaggaatgagctgccgccacaggaattcaagccatttc

SEQ ID NO: 198386 - DNA, 122 bp, Homo sapiens
acctagggagggggcaggtttcggggcgcggtgaagggccatcgcagctcgggtgcgacacgcctgtggaggtcaaggccaggcccggcgccgacccccgacccctcccgcctcggccccct

SEQ ID NO: 198387 - DNA, 122 bp, Homo sapiens
ttttcagacaaatcattttacctctctgagcctggcctctttggggtcacaaagggctgtcgaaattatgttgcttttataaaacaggcagcttgttgtgtaaaaagaaaaaaaaagaagaa

SEQ ID NO: 198388 - DNA, 122 bp, Homo sapiens
gggatgagagtgagaaagtgagatgtcacctccctttttgttcctcttgcacagctctgacgttgggggactgggcacccctcttccagctgccgtgttttggcaggaactctgagaatgct

SEQ ID NO: 198389 - DNA, 122 bp, Homo sapiens
atgggacaggagaagggaacgggctttcttttcaggccagcgtggcagcgggcggtagggcgaaagggagaaggaaacgagggtttattccgttgcccactccgcggtaagcgacgttgtag

SEQ ID NO: 198390 - DNA, 122 bp, Homo sapiens
cccgctttcattcccggaccccgagcttcccgggcagggtctccccaatcccctcgcactcgccggacacacacctcagctctgccaaggcaagggccgacaaacttcgtgtcctgtgggaa

SEQ ID NO: 198391 - DNA, 122 bp, Homo sapiens
ccagccggaggccacaggagaaccaatgagcctggctggactcctgcaaaccttgagggacgccgagattcacattcactgaattttcatgccacgtgacactcttcttcttttgttccctc

SEQ ID NO: 198392 - DNA, 122 bp, Homo sapiens
caaggaagacatacataggtctgtgtaaggcctcatcacagtagatgaggtacataaggccgaagttccctgtaatagcaatgctgtacatggtacacagtgggaaggagatccacaaatgc

SEQ ID NO: 198393 - DNA, 122 bp, Homo sapiens
tgggcagagcgggtctttcactccacagcgtgcgctgaagtgttcgcagcgggtcctgcacggccaggcatgtcctccccacgttcccagctgcgcactggacacacccaagtcacactgga

SEQ ID NO: 198394 - DNA, 122 bp, Homo sapiens
tctaatggcttagacaaatatctgaatgcgtaatataattcataacacatgacaggtgctcggcctctgtgtgtgtagcaagctctgacaaggaagggacaacttaggacaagccctaagga

SEQ ID NO: 198395 - DNA, 122 bp, Homo sapiens
gagccgctggccaccttgatggggatggggttggagatttccaggcgcgtcttggattcacgcttggaggagcggttcaggttgaagaagccacgtcgcaggctcatctcctccaggctccg

SEQ ID NO: 198396 - DNA, 122 bp, Homo sapiens
acaataacacaggggaggtctacacgttctggattattgggattaataccgtcctctccgcgcccggatattagctacaagatcacagaagggatgcccacccggtgcgttatttggcgtaa

SEQ ID NO: 198397 - DNA, 122 bp, Homo sapiens
gtaatcattaatgataaacctgccattgaaaataatcctgaatcactgatacaacttgcacgagacattattttcattgtatcaatagaagctttattgcactgcatcttctttgtttgttt

SEQ ID NO: 198398 - DNA, 122 bp, Homo sapiens
aacccggagctgggatcagataagggcttgtccgggggccggggccggggtcgggccggccgggggcagagctgggccgggccgggccgccccctccctccgcagcgccggagccaaacttt

SEQ ID NO: 198399 - DNA, 122 bp, Homo sapiens
agataagctggctcccaagttgctgacagctttcccaagaccaaaacgcagaatttgaaacggtgtttgatgtgacacactaggcctttgatatcagaatactgaagcagagttgctagctc

SEQ ID NO: 198400 - DNA, 122 bp, Homo sapiens
acatgtttacagaaagcagtcaactgagctattcatggaaaggtttgtgggtttggttaacgaagtggaggagtattacatttcagctggaaacacatccctagaatgccaaaacatttatt

SEQ ID NO: 198401 - DNA, 122 bp, Homo sapiens
ttttattttaggcttgggggtaggtgtgtgaaagtttgttacacaggtaaacacatgtcacgggcatttgttgtacatagtatttcctcacccaggtgttaagcccagtacccaataattat

SEQ ID NO: 198402 - DNA, 122 bp, Homo sapiens
cgtcgccgagcgccctaggttccgcctcctggcagtcttgccgccaattccccagttgagcgaggctgctcgcaacccctaacaccgcctgggtctcccagccgcctggtctccccacaccc

SEQ ID NO: 198403 - DNA, 122 bp, Homo sapiens
ccgttttaaggtggttagtcatctgctaaattggctgaaatgcggattacccagttccttcgtcgtacagagttgcattctgaggagtggggctcggggatacagcccccagaaattctgaa

SEQ ID NO: 198404 - DNA, 122 bp, Homo sapiens
actgagtgctccctcctaaaccagaaagcaccctctgtccccaggccagtccatcagccccggcagaagcttctagagtaagagcctgtggatttgtattgcatggatgtaaacccaccaaa

SEQ ID NO: 198405 - DNA, 122 bp, Homo sapiens
ccctagtaatctgacaccgcaggcaaaggcacggcctgtgtgggtaagatccattgtaaacgtttaaaacttcctgttccctgatgcctcaacttccccgcagaccgacgcacctgtgatgg

SEQ ID NO: 198406 - DNA, 122 bp, Homo sapiens
ggcaaagcaggtggaaagctgtatcaagttactaaagcaaattggatctacgtgggtgcacgtgcccctattttagttcgtttcatgaaaacatctcttctcaaggcaaggagtcatggcct

SEQ ID NO: 198407 - DNA, 122 bp, Homo sapiens
aagggaaaaaaaaatgtgatttcaacatggtgttcactaatgctattgcagaaatgtgcacgcagcattcacattttgacaaaagcagtaattaccatattaggaaatagagtcgtcttcta

SEQ ID NO: 198408 - DNA, 122 bp, Homo sapiens
tgaccgagcccgagagccccgggaccgacggcggcgccagcaacggaggctgcgaggccgcggccgacgtggccaacgggcagccgggcttcaaaagcaacatgcccctggcgcccgggcag

SEQ ID NO: 198409 - DNA, 122 bp, Homo sapiens
tgcccgacagtgagccctgccgtcaggtagttctccttctccaagaggttgcccatgctgcggctggtccctggcctggggtacgtgagcagggccgggttggcagggatgctgtcaaaaac

SEQ ID NO: 198410 - DNA, 122 bp, Homo sapiens
gttccgttattttctgagagattttcccttcctttctctttttgccctagaccagaactgcgagcagacacccctagcaccccggaagatgggctatggtctccggccacctcctgcccgtt

SEQ ID NO: 198411 - DNA, 122 bp, Homo sapiens
ggtacaatagcaaaggaaagacacaggaagtttgcccaaaaccttttgcatatacacctccgtacccataaaggccatagagtccctacacccagacacactttgctcagccatgttcctct

SEQ ID NO: 198412 - DNA, 122 bp, Homo sapiens
ctgcagcggctcactgcattcctaggactcctttctaagggtcgatccttcacacctcctcgtgcactgcaaagtaagtcttattgggcttctttgttatgcaaacagggcggtaataatca

SEQ ID NO: 198413 - DNA, 122 bp, Homo sapiens
taaagaaacccatattgtcattttaactgtgttttccaactttctttgaccacaaaagcccgttaatattttcaaaacagctgacagagtcccaccaaacatgactggggcaatgctgtcat

SEQ ID NO: 198414 - DNA, 122 bp, Homo sapiens
ggtatcctcttccaaagcaggctgggaccttggctgaaggaaccagggctggaaagacatcgggctggcagaggggagagactgcatgcaaacattctttgtatcttctgcaatttgagagt

SEQ ID NO: 198415 - DNA, 122 bp, Homo sapiens
tacctctctgtgaccagatatcacatgcttcaaaaagtagagttagtggagatttttccacgtgtgtttgccaggctgacttctgagggtggagatggggcagggagtgagtcagcgcccag

SEQ ID NO: 198416 - DNA, 122 bp, Homo sapiens
ctctcttcctactgggtctcgctagtgactaattgtccttatctaaagtgtgtgtctgtccgcctttttcccccctttttttcccttcctcccaccacccccccaacacacacacactctct

SEQ ID NO: 198417 - DNA, 122 bp, Homo sapiens
tcctgagcccatcgacaatagcgtccagccaagggggccgagcggcctcgcagcccctgccgggtgtgctgggacgcctgctctgacacagccctgctgcaggtacaccgagcctcacaggg

SEQ ID NO: 198418 - DNA, 122 bp, Homo sapiens
tggaagtgtctgctatcttcaagtcgtatgttttgtctttactgcacagcacagcttgctcgtctttatcaccacgaatcacaagactgtagcaaaatgggggaaaaatatatagtttattg

SEQ ID NO: 198419 - DNA, 122 bp, Homo sapiens
gcgcatgtgcttcagtatatcttccttcccttcccacatgagtatgtgtcattggcagcacgtgaacctccctttcttcacagatataaaaaaaaaatgcacctatcttgttcttggaactc

SEQ ID NO: 198420 - DNA, 122 bp, Homo sapiens
atgcatgggattagcatcctttaaaagaggctgaagggagcctgtttgtcccttccaccacgtggggacacagctagaatgcactgtctttgaagcattgagcaggccctcaccagacacca

SEQ ID NO: 198421 - DNA, 122 bp, Homo sapiens
cgcgcccgagcctggggcctgcgctcgccggccggctccgcaagccgcgtcccagcgccccgcgactgcgtcaccggccccccgcacgtaaccacagctgcctccgcccgcctcgggcccgg

SEQ ID NO: 198422 - DNA, 122 bp, Homo sapiens
acactctctcccacgtccacgaggcctcggggtcgctgccctcccgtcccggctgggggccgctccccagcccgccaaagaggaggatgcagttggggccgaccccattttaagcaaagcta

SEQ ID NO: 198423 - DNA, 122 bp, Homo sapiens
gcccttcagcgccctctcctggctgcagccaacaatgccgccccagcagcacctgaagaacgtaaagagcccccaagattacccaggggcagactgccctaggcctggtttcccatctgcaa

SEQ ID NO: 198424 - DNA, 122 bp, Homo sapiens
gtgggtgcaaggatactgcctattgaagccaagcagaggctactgcagtcctgatgtggacgaaggagattgctgctacaaagggtgctgctctgccttgtggaatttctgagatgttctgg

SEQ ID NO: 198425 - DNA, 122 bp, Homo sapiens
agtagggagatcattaggtgagagctggctattcacaagagggcagcctttgatgcgagccgagcagaaagtttggccgaaactcaacacctcttagaagtacagattagtggagaggaaga

SEQ ID NO: 198426 - DNA, 122 bp, Homo sapiens
gcctcggaggtgtggtgccgtcgggtgcgggagctgggtggctgcagccaggccgggaaccgccactgcttcgagtgcgcccagcgcggggtcacctacgtggatatcaccgtgggcagctt

SEQ ID NO: 198427 - DNA, 122 bp, Homo sapiens
ccccccaagtaccgggagggagctcctggttccccccgcagccagcccaacagcttctcacgcctaccaggtttctccaatggggctcctggcccagggacgctcagtcccccttcagggga

SEQ ID NO: 198428 - DNA, 122 bp, Homo sapiens
agactagccttttgtaagcttcactgggcaattagagttcctttccttccatggggcagacgggacagctactggaaaccagccagctacaatggtacaggatagccttagtgtcttcagtg

SEQ ID NO: 198429 - DNA, 122 bp, Homo sapiens
aacaggggggagctcctgggggaaaccccgagggcggggcggggtgctgagcgcgggtcccggcgcatcgcttctgcctagaaaactctcattgtcatcagattgacctcaccgcgggggcc

SEQ ID NO: 198430 - DNA, 122 bp, Homo sapiens
ccggggtccgggacaccggaggggagtcgggtcccctccccggagagctccgggagctcgcggagcggccccaggagcagagaagggggaagtcaggacttacctgtcattactttctacgc

SEQ ID NO: 198431 - DNA, 122 bp, Homo sapiens
gtcttcctgtgacgttgtcttcctgtgacgttgtcttcctgtgacgttgtcttcctgtgacgttgtcttcctgtgacgttgtctgtagccagcaggagacacgacggcacggtggcgtgccc

SEQ ID NO: 198432 - DNA, 122 bp, Homo sapiens
ctcctgggccccgttagggacgcaatgaggacccgttttctgcgggacagagggtttggccgagcaggaaaacatttagacacacccccacacacagcacacgtgggcatcagggctctgct

SEQ ID NO: 198433 - DNA, 122 bp, Homo sapiens
tactagggaaacgagatcctcacagtctcataggcaggagtcaaagccaatcaagagccacgccttcatccccgagtcagtgcccaattactgttcgaagagccctgaggacgcggtcggga

SEQ ID NO: 198434 - DNA, 122 bp, Homo sapiens
tgctgccccgctgctgggccagactccagcgggcccgcctggcatttcacaggccaaaatcgaacagaaccccgagtttgccaggtatcagttttgctttgtttttaagcagaaaaaggcat

SEQ ID NO: 198435 - DNA, 122 bp, Homo sapiens
aaagaggaccccaagtcacaggaggcactctgagagcaccaagcgcccggggaggccatccgcaggtgggcgcggggcctggattccacagaggggcggagtccctcagtcaggcgctggct

SEQ ID NO: 198436 - DNA, 122 bp, Homo sapiens
tccctgttacataaggctcacttacaggcagcacacaccggctcatcgagattcacggctcggtagtgctgaacacgggttaatcatcccattgcgtctgggctcaccggaggggctctgac

SEQ ID NO: 198437 - DNA, 122 bp, Homo sapiens
gtggcagaaggcacaggtctaggaaggatggggtggagaggaggtacagaaaggcacctgcggatttcatggctggagatctcaggtgactttggagagagaggctttaaaggagtgatgag

SEQ ID NO: 198438 - DNA, 122 bp, Homo sapiens
ataatttgttttctcttcatagcctggttcacctggatctgtaattcctgctcaagcacacgggaaaatattcacaaaaccagatccccaatgggactccacagttagtgcatccgaagctg

SEQ ID NO: 198439 - DNA, 122 bp, Homo sapiens
gggatgaaaacctaattacctcctctgcaaagagctttccctagtatattttattgattgcggaggtgggagccggcagggggtctgtgggggtgggcggggaggggattctcttgctccgg

SEQ ID NO: 198440 - DNA, 122 bp, Homo sapiens
gctgcccatggcgcttgcgggccagcacgagttccgggtgggagtgggctcggcaggctccgcactcggagaggccagccggccccgcccaccagggcagtgaggggcttagcacctgggca

SEQ ID NO: 198441 - DNA, 122 bp, Homo sapiens
ggaggctggtgcgtttggtactgtttggaagcatcttatctaactggtgaaggaatctaacgatgccctgcatttatacctctgtttagggatgtggtcagagtcttcttacagttttgaat

SEQ ID NO: 198442 - DNA, 122 bp, Homo sapiens
ttcggccttttcttcctccctcccagccctggctccacatccacaaacaggggttaaatgcgctgaaacagatcatatgaaggagctctctgaaagctctaagaaagtcatgcatcagctgt

SEQ ID NO: 198443 - DNA, 122 bp, Homo sapiens
taatatttcttcgagtaaaggactttttatagtgcgttatacgtattttcttagaaacatcgtgcatgtgcattgttaaacacaacgttgaccttgttgtacagacatttgtatcaccttgt

SEQ ID NO: 198444 - DNA, 122 bp, Homo sapiens
agggggaagtgatgtctgtctctcccttttttccctcccgccccggcatctgttctcgcccgaagaagctggtccttagcctgcgctgcggagcaacctttcagtggccacctggagcctgg

SEQ ID NO: 198445 - DNA, 122 bp, Homo sapiens
tcggcgtgaatgagagcaaaccaacagggctgtgcgtggcgcgtgtgagtaagacgcgagcgggccccacacgcaggcggcggcggcggcggcggcggcggcgaggtctgaggcggggagcc

SEQ ID NO: 198446 - DNA, 122 bp, Homo sapiens
ccctgagcccaccagggacacctcgcccttcagcccaccaccctggcaggcttccatccccgtccatgctcaagatgggtccctggccaccatggtcatcaccacccttccagggcctgagc

SEQ ID NO: 198447 - DNA, 122 bp, Homo sapiens
gcaagtcatcaatggggtatggagattttccaggtgggtgtggttgaaggcagggaagaacgagtttaggagcacattacaagaggaaggtaactgttaagtccaggctgagcaggaatgta

SEQ ID NO: 198448 - DNA, 122 bp, Homo sapiens
tggatgacttcctgcacaaagccctctgggattaagatgctgccacagcatttgaacaaacgtaagaaccattctaatttttcctatcatttgaataccccatgagccagtgaaagagtgac

SEQ ID NO: 198449 - DNA, 122 bp, Homo sapiens
caggctcctggctgaagcgaacacaccacacgtcttagggccttggagtcgcgtgcggggcggggacaaggttctgctgagtgagtcaggctgggcgccgcggggctttgccttggtccccc

SEQ ID NO: 198450 - DNA, 122 bp, Homo sapiens
cgcctcgcgggggaatgtaggtcgtggcggttgagcgcaaaattgttaaaaaaacggaagcgaagaagttcttcctgggcattctcctgggaagttggcgtgtgctttttgggtttggggtt

SEQ ID NO: 198451 - DNA, 122 bp, Homo sapiens
aggttaaataacttacacaaggtcacactgccttgtaagtggtagaggcaggactcaacccgaggcagtctggcaccaaaatccacatcctcacccatactgcaatattccctcgaggatgt

SEQ ID NO: 198452 - DNA, 122 bp, Homo sapiens
gggttgatcataaaaataatgccagtggtacgctcttgcgggtctcttcagggatcaaggcgagaacgttcattaagctgctgcagggcacctggcacacggcactgcctgcgagggacagg

SEQ ID NO: 198453 - DNA, 122 bp, Homo sapiens
tgtcagtgatgctgggcctccgggggcactgtagagatgtagttcattaaggaattacctcggtggtaatgtcttccactgagaagtgctattctgccggggcctcctaaggggtagctgaa

SEQ ID NO: 198454 - DNA, 122 bp, Homo sapiens
ctccctgaacggaccaggctcacaccagagagtatttgcatataaccctgcgtataaggtcgtatgcctttataaataatatattatgtggctattcacacatgaaaataatgcaataacaa

SEQ ID NO: 198455 - DNA, 122 bp, Homo sapiens
gcttatctgccatttaagccagcgccccttgagaatggactacaactcccacaatgcattcgaggggcaccgtgttagggcgccacctttttcccggctgtgctgtacctacagcacccaga

SEQ ID NO: 198456 - DNA, 122 bp, Homo sapiens
ctccactaaccacacatcctccagtgatgcctctgaatggtcccgaggggctgtggtggccgggcagagccaggcaggagccagagtcagcctggggggtgatggagctgaggccatcaccg

SEQ ID NO: 198457 - DNA, 122 bp, Homo sapiens
tgcccggagaagccagcacggcacagatgaggcccctttgtctccagcaccgggacagaccggaacgcggatcactggcctgcgagcaggggccaagttcccaaaaaatgctcttcttaagt

SEQ ID NO: 198458 - DNA, 122 bp, Homo sapiens
tctcgtggacttcctcggcagccgccgcttcctcagacggaactcggggggcgccccttccgccgccccaggccgccttgcaccccaagctgctgcggcagtgacagggaagaagcagaccc

SEQ ID NO: 198459 - DNA, 122 bp, Homo sapiens
catgggttcttcaaagagagtattcccataggaactaaaagggaagaggaatgtgtctggcgggcattgtgggcagcagcaagctttgggccaaattttaagtttgaaaatcaagattccct

SEQ ID NO: 198460 - DNA, 122 bp, Homo sapiens
tttccacatggagcaaataaaggtttcgtgtagacagatattcctcagataaagagctgacgtgtttgtttctctggaatatactgactagtgatgccctaacattctagggtcagctgtag

SEQ ID NO: 198461 - DNA, 122 bp, Homo sapiens
cacctttatttttataaaacggcacagatgttcacacatactgaaggagtggctttgggacgctgctctggtctgtcctgtgaagagtggttatgccagtgttcgtgtcgggaaaacatttc

SEQ ID NO: 198462 - DNA, 122 bp, Homo sapiens
tgatttgaaatgtttggtaagcttttgtttcccttcaccatagtgcttgtgctatcaaagcgaacatgtggcagaactttaaggactgatgccaaacatatggtatccacaaccagtcagca

SEQ ID NO: 198463 - DNA, 122 bp, Homo sapiens
aaggtaggtaagtgcgcatgcgcaggatgcgagtggccaatgaggaccacaaggttgtagcgtgtggcctgagaggacggccaggactggccagaaaagagaggtgtggaatgcagtaagaa

SEQ ID NO: 198464 - DNA, 122 bp, Homo sapiens
tggagggatgacaaggacctcctggcagtgaggaagcgcgactcccggaggacccggacccggaggagagtattgagaagggctcgggatttccatccaatgaaggcagcttctctcatggc

SEQ ID NO: 198465 - DNA, 122 bp, Homo sapiens
gtcaccctccccacgaagggggtaaaaaagtcccccgcgttcccagcttggggtggtttgcgaacagagtgaccagccgtttggtaaaagttaaataacgaactttcgttaaaggagctagt

SEQ ID NO: 198466 - DNA, 122 bp, Homo sapiens
aggggccgcccggcgcctcgggcctgggatttccaaagccgctcccgcccccgtccccagcgcgtcaccatggagactgctggaagttggtggtggaaaacagacctggcgcaaagcaaaat

SEQ ID NO: 198467 - DNA, 122 bp, Homo sapiens
tatttcattatcaatgagtggctgagtggacaggatgcaggggcatctctctaggagtggcgcatgcacccggccctgcctgggagcatcaggggtagaagagcagagttagagtgggagcc

SEQ ID NO: 198468 - DNA, 122 bp, Homo sapiens
gacatggctttgggagaataggaacagattcgtgcactgccttccccacggccgggaggacgggaggcaagaggatgagacgtggggtgatgcgtgcatcctgacgagcctttgaagtgatg

SEQ ID NO: 198469 - DNA, 122 bp, Homo sapiens
cgctgctggaccacatcaacagccatgctgccgagctcggtgtctcggtgcagtatgccacgctgggcgactacttccgtgccctgcacgctctcaatgtcacctggcgtgtccgcgaccac

SEQ ID NO: 198470 - DNA, 122 bp, Homo sapiens
gcgcctcagtttcctggcccccgacctgcccgcccttaagtccccctgcccccgactcttcggctgccgtccccctggccctctggcctccaagcgcatcccagtcgcccgcccggccctag

SEQ ID NO: 198471 - DNA, 122 bp, Homo sapiens
agttttttttaaaactagcatgaactcgagattccctagaccaattccgacaggagaaaacggccacggatccttgtgtgatctgcacctcagggtgggggcatcattgcgactttgaagcc

SEQ ID NO: 198472 - DNA, 122 bp, Homo sapiens
ttaggccaggcagtggatgaggggtagcagaggggcctctgccttcaggggttttgcccccgacctactcgttccacccagatggacgccctgagccggggaggaggcgcgccccctggtgg

SEQ ID NO: 198473 - DNA, 122 bp, Homo sapiens
caaacactggtaggataaaaacaaaacaaatgaaaatggttacccataggaggtgttacccggtgtaatgcctatatgacagttgaattctgatcctgccccaactctgcttacctttaaga

SEQ ID NO: 198474 - DNA, 122 bp, Homo sapiens
agagcagccccaggcgcgtgcctggcaccacgacagctgtgcgggccagacagggcctcccgcagcctctccagggcacccacgcacagcacacgtggcaggcagcctcctcctcccgcttg

SEQ ID NO: 198475 - DNA, 122 bp, Homo sapiens
ggcccggaacggagcctgccttctccttctcagtcacgcttggcccaggctgccccggaccgggccacatccttggccgccccgcacctgacgtgagaagaggctacgtatcatagattcct

SEQ ID NO: 198476 - DNA, 122 bp, Homo sapiens
gacttctactccaagctgggactacaataccgggacagtagctctgaggacgaatcttcccggcctacagaaataattgagattcctgatgaagatgatgatgtcctcagtattgattcagg

SEQ ID NO: 198477 - DNA, 122 bp, Homo sapiens
ctcccgtctgagtcactgcacagaaaaggcacctgttgctcagcaacggaggggaggtcccggcaggtcccagctcccggcttcagactccggcctggttaacccttcacttcccaagtagg

SEQ ID NO: 198478 - DNA, 122 bp, Homo sapiens
tagagcatgtcaggtttcagactagccactgtgcggtgcccgagagccgtgtgtggctaccggattggacagcacggatctgaacaagacagggattttttttgttaatgtgtgttgatgag

SEQ ID NO: 198479 - DNA, 122 bp, Homo sapiens
tcggtcctctgaaagtgccagcggcgtcagaggttggaatcaatgctttcctgacatcatcgcagttagccctgataggttttgggtttacagataaggaacaaggctcaaagacgctgaaa

SEQ ID NO: 198480 - DNA, 122 bp, Homo sapiens
ctgttgagttaccggccacaattaaaggtttcattgaaaagaccagagaaaaactgcttacgaagcttgcccgggtgtcagattattaaaatatcaattctaggtatgttcttaggggcttc

SEQ ID NO: 198481 - DNA, 122 bp, Homo sapiens
tctcctatcccttcagttatgtcagcgtcccccgcagcagcccattgtctggttaggtcccgtcttcaccatggtgccaccttcatctgcctcttcttctgccttccagctgccacatgcaa

SEQ ID NO: 198482 - DNA, 122 bp, Homo sapiens
tcctcctggaaggaatgaatgggctccccgacacacacctctcagaaaactcacctttcacgctgaccttcaaaagaaaagaaagaaagaaaaagaaaaatccgctcgaagcgggaaaatgt

SEQ ID NO: 198483 - DNA, 122 bp, Homo sapiens
ctcggggtcgtcgggaaacgcaggaccgagggacggcgccccctccttcccgagaccacccgccccatccactccgcaccgcactcccgtccagggaagtcttaaggaacccagtcccccta

SEQ ID NO: 198484 - DNA, 122 bp, Homo sapiens
gcgccaccgtgccccccaagttagcgaggaaggagttgcgctgggccgggttggagatctcggtctgtcttgttcctcgtacactgggggaggaatggcagttttggaagactgtgatcgag

SEQ ID NO: 198485 - DNA, 122 bp, Homo sapiens
gctgtggacttcctttctccagttaatccttattgcaaacttcgctggagtcagctttctcgggcctcccgcctccttgtattttcctgtgaaatacccaggcgaaagagacccgtgacaac

SEQ ID NO: 198486 - DNA, 122 bp, Homo sapiens
ggcgcaccctagcctcgccgccctcagcctgggacttggggatcgggcgcttgcccagcccgcgtcccagcgcggccacatggctccactccgcgcgctgctgtcctacctgctgcctttgc

SEQ ID NO: 198487 - DNA, 122 bp, Homo sapiens
ctcccttgttatcgccaagctctagaaagccctccttatgtcattcttacccctaaagaccgttcttgtcaccaattccccagacttcccctatgaaccgctctaagagccctcagctatca

SEQ ID NO: 198488 - DNA, 122 bp, Homo sapiens
taaagaaattattaaaaggaatgtggatagctcacagaatcagcagaagagctctagaatcgtgttttgggctacctagccaagtaaaatggccaagatcatgccacagaactgagccactg

SEQ ID NO: 198489 - DNA, 122 bp, Homo sapiens
ttattgacaaaaagtgctgacagacacaaagtgagcacatgctcttggggaaaatggcaccgatagactcattcgatgcagggttgccgtgaatcttcaatttgtaaaaaacacaatacctg

SEQ ID NO: 198490 - DNA, 122 bp, Homo sapiens
tgcctcccccggccttggggggcgcagagatcccggcggcgattagcgctgcgcggcagccggctccaacccagaggcccggaataggcgcggagttataaatagtgccacccgcaggtgtt

SEQ ID NO: 198491 - DNA, 122 bp, Homo sapiens
gcctctccttccaacgtgcaatgcagggtaggtccccccgcaagccctggggactctttccggagctcagggaaggaaaccgctcacctcctaaatgttaaaacacgaagggaactacgcac

SEQ ID NO: 198492 - DNA, 122 bp, Homo sapiens
tgtccttggcaccagggtttcggcagaggagcctagcgtgggcctacttggactcctccgcgtggggcagctcgggacacccgggcctgcaggagagcggggttctaggctggccccggctc

SEQ ID NO: 198493 - DNA, 122 bp, Homo sapiens
ctgtcttgcaggcaaaggcgacactgcaattacaatgggcaagcaaactccttgcatgcacgtctgtgatgtaaaagtgttttaattcagccccatccttataaagagataaaaaatgtgtt

SEQ ID NO: 198494 - DNA, 122 bp, Homo sapiens
aatgtccccgccagcccaaccgccaggaactctcaccaatcacgtagtcgccgaagcccacggtgctgagggtgatgaaggcgaagtagaagccctctgtgtagctccagccctccatgtgg

SEQ ID NO: 198495 - DNA, 122 bp, Homo sapiens
agttggctccggaatgcggccgccgcagatgttctccgcaaccttccggaagtggaatggcgggagcctcagcattgctgcccaccgaccccccggaagcggaaacagaatccccgcgtgcc

SEQ ID NO: 198496 - DNA, 122 bp, Homo sapiens
tagccatcatgagtaagggcttctttaaaataatccctgacaatatctttggcattaatacgacataaagacaagacagtatatgtatgttttcattcctgttttgtacgagtgcctcattt

SEQ ID NO: 198497 - DNA, 122 bp, Homo sapiens
ctgtgtcgcgtggcccagcgtcggcgtgacggttggacgcgggcgcggcactgcgggtcccgattgctgcagccgcttgtcagtgtgatgaagattggcacccaggtaagctgtcactcaac

SEQ ID NO: 198498 - DNA, 122 bp, Homo sapiens
cttaaattgcacttgcaactcccctggaagttcctgaaacttcccgagaatgaggcggggcggctcaaggggaaagggcagggaggagagaccctcgggaagctgatgacgcgtccggggca

SEQ ID NO: 198499 - DNA, 122 bp, Homo sapiens
tgaaattccaaactagaaccaaactattcttgacctgaagagcctagaaaggtgctggatcgggctggacgtggtggctcacgcctgtaatcccagcactttgggaggctgaggcgggtgga

SEQ ID NO: 198500 - DNA, 122 bp, Homo sapiens
cccgcaaagaagggtggcgagaagaaaaagggccgttctgccatcaacgaagtggtaacccgagaatacaccatcaacattcacaagcgcatccatggagtgtgagtatccctctagccgcc

SEQ ID NO: 198501 - DNA, 122 bp, Homo sapiens
tgtgttcaaggcttgtgctaggagcttacttctttctgtttaatcagaaaaaaaaaaaaccgggtagaggattacaagcaaagaagcttcagtgagaaattgctttatgtttagttaaaaga

SEQ ID NO: 198502 - DNA, 122 bp, Homo sapiens
gagctgcggcaggaggacgtatggagcgagcaggatggagtgccaacctcgcctggctatcgggaggaatcacggcatgggggtgctgctagagaagggagtgggggtctgcatggagctgc

SEQ ID NO: 198503 - DNA, 122 bp, Homo sapiens
gttgtcctgggtcacagtgtcacagtcacgtcatcaccatgttacacggtggtgttgtcacgtggtgtgttgtgttgtctcacagtcatgtcctgggtcatggtgtcccacagttgtgttac

SEQ ID NO: 198504 - DNA, 122 bp, Homo sapiens
aagctatctaagacctagacaatgaataaaatgggaagcagtggggggctgcaggcagggcgctcggaatgtctcttatgcaataaaagcagcagcagagagttggagtcaccttgaccgcc

SEQ ID NO: 198505 - DNA, 122 bp, Homo sapiens
ggtttcccgggacggccggcatcccctccattaaggagcactgtggtttcccaggacggccggcatcccctgcccacaccccgccatcagaggcccactccatccagagagtctcccccacc

SEQ ID NO: 198506 - DNA, 122 bp, Homo sapiens
tatgtaggtagtttatcctttgaagaacccagtggcttgtctcacagcccaagacagattcgagttctcaaaaactatccagcccaaaagaatacagaggaaaaagcttttcccactttctt

SEQ ID NO: 198507 - DNA, 122 bp, Homo sapiens
ttggatccctgatacctttccgtggtgggaactagctaggttttaataatatatgttgaacgaggccaactgtagttgtaataagtctatgtttcctggcactgcttgttttcaggcacttt

SEQ ID NO: 198508 - DNA, 122 bp, Homo sapiens
ggcaaatccgccgttgtgacgaaagtgcagggacaaagcacaaactcggctctggtggaccggatacggaaaagcggtgccttggggagggcgggagcaaattcgctttccccacagcgcgt

SEQ ID NO: 198509 - DNA, 122 bp, Homo sapiens
tattttgcctgtggtgccttcagtacagtgccttctatgtgccggccctgagccaggcatcgatgaaagatgaataagtccaagtcatgacctcaaaggtggcttatagattgatgggactt

SEQ ID NO: 198510 - DNA, 122 bp, Homo sapiens
gcaagatcatcaagcgcttcgagcagaaggggttccgcctcgtggccatgaagttcctcccggcctctgaagaacacctgaagcagcactacattgacctgaaggaccgcccattcttccct

SEQ ID NO: 198511 - DNA, 122 bp, Homo sapiens
aacattacacaattttagaactggtatgctacttcctttctaggacctgtccaaaaactacgttaggcaataaactacattattactcttgggtcagggtttaaatttgtgaatttttcccc

SEQ ID NO: 198512 - DNA, 122 bp, Homo sapiens
tgtaccgttgagctccctgctacagttcatatccagtgtcgtcagaaacaagggtaattccgtctctaccatcaagtaataccatctcacagaaccgagacattccctcgttgggcttcctt

SEQ ID NO: 198513 - DNA, 122 bp, Homo sapiens
gctgcacgaagcgtggcacccggctcctctcgcgctcacacagcgcggccagcgcgcagccgaacacctggtctagggcagaggctcatcagctcctgcccagcctgcgccccgtcccggtc

SEQ ID NO: 198514 - DNA, 122 bp, Homo sapiens
acactgtagggcagttggaagtagttttgtttttgtctttaactgctggccttgcaatctcgggaaactgtgaagatggtaaaatttactatcttaaccatttttaaaggtacaattcagtg

SEQ ID NO: 198515 - DNA, 122 bp, Homo sapiens
cgccacagagggctgaaggtgctgcccacggctttcttggcgtctcgacgttttggtcagcggcttttttccattctttccctccacttcttgagtgagcagccatgagttggactgtacct

SEQ ID NO: 198516 - DNA, 122 bp, Homo sapiens
agtgcaacagaagctgatcaagacccaacgacttctaaaagtacacctacgaactagactcggagatagacttggagataacacaaaaagcaaccttgagtgtaactttaaaaatttagtct

SEQ ID NO: 198517 - DNA, 122 bp, Homo sapiens
aaaactgataaaattccctgcatcttagagcttaaactagaacaagacctgtctttccgtcgtattcagatctaattttgtgtgttttaatacgattgggctctaatttggttgaacttaat

SEQ ID NO: 198518 - DNA, 122 bp, Homo sapiens
gggggctgagcaggcgccggagctgatgaggctcatcagcgagatcctggacaagccgcacgaggcctcgaagctggacgaccacgtgaagaagttcaagctgcccaagaagcacatgcagc

SEQ ID NO: 198519 - DNA, 122 bp, Homo sapiens
gagtgctacttaaatagtaccctgaacgcttctgcttctatattaggaaggacttaattccgagagtagtggcttctcagatgcaagcccaagggagactttcactctctcctttaagaata

SEQ ID NO: 198520 - DNA, 122 bp, Homo sapiens
accgaggggagaagaacgccaaaggtacatgcaccagggcgcagcagggactggggcgcccgctacgtgtcccccggcccgccccgccgggcacgggttccggggacggatctgggtcgcgg

SEQ ID NO: 198521 - DNA, 122 bp, Homo sapiens
ctggaaagctgagggaaaagcctcagagaggaggaacagtgctgcacccacacggttaggcgtcctggaaagggaggtggggacggttggaaaactaacatttcctgccaggcgcggtggct

SEQ ID NO: 198522 - DNA, 122 bp, Homo sapiens
tttcaaagactgagtagtgtcccctgtgtatgtaccgcatcttctttatccatcatttgccgggagactcgaggattgacggcacgctatggctttgtgcgcggggctgcagggatggcggg

SEQ ID NO: 198523 - DNA, 122 bp, Homo sapiens
ggctccaagagagtttccggcggacttcctgtgcgatcgggcggggttccggtcagtatgcgagtcctgtgagcatcatctcagcctggcctcaggccctggagggtctggaaactgagtgg

SEQ ID NO: 198524 - DNA, 122 bp, Homo sapiens
tccatgatggtgagggaggttcccacggtcacgcgtgtgctgggattctgctctttacgccgtccccgggcaacacagacatcagctcttctctcctccagctgagcaaatgtaagctgtcc

SEQ ID NO: 198525 - DNA, 122 bp, Homo sapiens
acattaagcacgtttagggcaaaaggaacctgacttgcaaacaaggaggtgttgactctgcggagaagtggatggtctacagtctgctaaaagctcagtggtgggactggtttgccggtttc

SEQ ID NO: 198526 - DNA, 122 bp, Homo sapiens
cctcaatcccagcgctcatctctgcggccacgcccgccccttcccgccacccaatcctagcgcttgtctctgcggccgggccccgcccccacccgccccccgcccaatcctcgcgcggactc

SEQ ID NO: 198527 - DNA, 122 bp, Homo sapiens
tttctgcaggccccaggagggggcggagggcggtggctggaaaggaaaggaagccgggagcgccatccgtgtccccggagatactggctccggccaccaggaaacacagagaccacaacgtc

SEQ ID NO: 198528 - DNA, 122 bp, Homo sapiens
tcagcatctctgaggtcatcctaattagtctaggtgctgagactcggatcgaggttcactcgaaccattcgcctgtcggtctgggcgtctccagcacacgaagcagttgctgtgggccgagg

SEQ ID NO: 198529 - DNA, 122 bp, Homo sapiens
tgctcactgtcgcaaaagaaccgtccccatgcagtactgtacttttcttttcccttctgccgtcaacctcggagtagcttcgctcccagaaggcctcaaagcgcgaccaaagagcgtgacag

SEQ ID NO: 198530 - DNA, 122 bp, Homo sapiens
tcccggggcgcgtgtgtgggtggcctcgggatgggggaatagggagcggagaaaagaaaccgctttggaaaatgcaatgatttcattctgccgtgttgctaaccccctcattctccctcgct

SEQ ID NO: 198531 - DNA, 122 bp, Homo sapiens
gcaggagaatcaggcagggaggttgccgtgagccgagatggcggcagtacagtccagcctcggctcagcatcagagggagactgtggagggagagggagagggagacgggagagagggacac

SEQ ID NO: 198532 - DNA, 122 bp, Homo sapiens
ccacctctcccggtggaaaccccagctcctggctctgccggatgccccattgtgctccttcgttcttgggggtgtcacgcggcctcccgtcgtcccacccccagcgaccccgctggccgcct

SEQ ID NO: 198533 - DNA, 122 bp, Homo sapiens
agtggctgcctcggtcacgccaggatgtaataaagctgcccggcacccaggatctgccgacgaagagagtgcaagggcagtggaaagagacagcctccaaattccaggaatcacatggtgtt

SEQ ID NO: 198534 - DNA, 122 bp, Homo sapiens
agggttagacccctgccatctcatccccacccgctggcacaggaagccaagcctggtggccggggctctcgttaactcagtcaacgacagatcctgcagctgccagggccgggatggccgac

SEQ ID NO: 198535 - DNA, 122 bp, Homo sapiens
gcagccacagaactggaagcctggtctgtaggctccgtgtctgggagctcttcaggccagcggtggagtcggctagccacgatgacttttgcccggacttaacctcttttttctctaacaaa

SEQ ID NO: 198536 - DNA, 122 bp, Homo sapiens
ctggggttaaaatagcgttcgctaccactgaggcgcttattatgccaaactctgggcgaacgtcttgcggttccagtgtcttatttattcgcataacctctctgtagggctctctgtagggc

SEQ ID NO: 198537 - DNA, 122 bp, Homo sapiens
cagtgccaccgacagggaggcctgtttggaaagagtgaaccggagctctggaaaggtctgcgacactcacacaaccgatgacaaggcggcaaacccacacgcaggtagaagtggaaaagcag

SEQ ID NO: 198538 - DNA, 122 bp, Homo sapiens
cccttttccccaaaccccacaaaactgctcgcagcgacgcggatgatctaccgaattccccgcgaattcggaggattaagttgtcagtcagcacgttgctaccttcccctctatgcactccg

SEQ ID NO: 198539 - DNA, 122 bp, Homo sapiens
ttggtccagaccttcaaggcacgcttaggcaaatgctcacttatttcttggctgtcactacggatacatttcccataggaagcgggaaacaattatccttttccccagcaatcttgaagctc

SEQ ID NO: 198540 - DNA, 122 bp, Homo sapiens
ggtggtgggttcaggggggaatacctacggcaagacttaccacattgtacatttgacacacgtgcagtttatcacatgccaatcaaacctctagaagtctagtttttagaaaaaactgttta

SEQ ID NO: 198541 - DNA, 122 bp, Homo sapiens
atggcgaagtctcagcccccgacgtaggatggcgaagtctcagcccccgacgtaggatggcgaagtctcagcccctggtgtaaaatgccgaaatctttgtgtgtaacctaagaacattctct

SEQ ID NO: 198542 - DNA, 122 bp, Homo sapiens
ccgagggggcgctgtcgggcgcggggaaggggcctggagggggcgctgtgggcccggggccgcagtctccagacccccccgggccctcggactctcccggggccgctctcggctcccggggg

SEQ ID NO: 198543 - DNA, 122 bp, Homo sapiens
ctcgggcctgttcacattggggtcaaaggcacacattgggggctcaaccaaggcgagctgcgttcgcggggccgggtctttccgcacaggcggagggcggtggcgggcgcggaggcgtcgcg

SEQ ID NO: 198544 - DNA, 122 bp, Homo sapiens
cacgtgcatccaaaggacggccgctacccgcgaccccttcccaacgcacgcgggaggttgcgggatcagggacaggggcttcagcagggagcccccagaccggccctgacaggaattcaaga

SEQ ID NO: 198545 - DNA, 122 bp, Homo sapiens
tgcctcagttcccttatccgaccggggttgcgccgagagtgaaatgggcttcagggacctcgattctgggctgtcagtaccttggaacatggccaagcaggcagtgccccgtccattttgca

SEQ ID NO: 198546 - DNA, 122 bp, Homo sapiens
ttatcttatagaatagctattccattttgcttacgtcctacagtgaatttcattacacctcggtcactcttccttcccaggctgcatgcatccccacccacgctcagttcactgctgtgtct

SEQ ID NO: 198547 - DNA, 122 bp, Homo sapiens
tcaggactataaaatccttttaaggttttaagaagagcattgttatctctgtggtactgacgaagaccccgcaagctcaccgagattaagtgcccctgcctaaggttacaaagcctcttatc

SEQ ID NO: 198548 - DNA, 122 bp, Homo sapiens
tcagtgtcacacaaatcagaggcagcaataacaggtgtggctcccatggcctgagcaacccggcacccctgctcagcctcccagagagaggggaaggagcaaaccactcagccttggccagt

SEQ ID NO: 198549 - DNA, 122 bp, Homo sapiens
cagcacattcccaattatacttccaattccagacacagataactacattcctctactcaacggcttttagttgaatgtaactttggaatgtgaaatgactcaaggatcatgtaaagctaatt

SEQ ID NO: 198550 - DNA, 122 bp, Homo sapiens
gaatgaattcataaattcttcaagctcattaaagacaaatacaccctgctatcactaatacgcctttctcaagaaccctcataagtgatagatctataagaacctaatattgtttatcagag

SEQ ID NO: 198551 - DNA, 122 bp, Homo sapiens
ccacccccgtttgcgcgctcgcagtcttcgccggcgcagtcaccgcgcagggcggccgcccggaggtagctaccacggcctgtgtcaacgactaaagctccagtacagcggcgccctcagac

SEQ ID NO: 198552 - DNA, 122 bp, Homo sapiens
agtttacgggcgataggcagctgcgtcctgcccctaatttttagaattagagcagctacccggtgccaggtgctttactgtcgctaattcacaaaacgccatgaacaggagcctccccgtga

SEQ ID NO: 198553 - DNA, 122 bp, Homo sapiens
tagctaaacttcgctaactccgctgcctttgccgccaccatgcccaaaacgatcagtgtgcgtgtgaccaccatggacgcagagctggagtttaccatccagcccaacaccaccgggaagca

SEQ ID NO: 198554 - DNA, 122 bp, Homo sapiens
ggagcagagaacatccagatgaccgtgcgtgccgccgtccactgggctttctcattaacccgtggtcacaccgtccaattcgtcaaagaaacctgaagcaaggggacggacggaaccggcac

SEQ ID NO: 198555 - DNA, 122 bp, Homo sapiens
tccattaaagtgagagagatggatggatggatgggtggacagatggacggacggactgaccgactgaccaacagatagactgaccaggttcccagcctgtctcaatagtgatccaatgacca

SEQ ID NO: 198556 - DNA, 122 bp, Homo sapiens
aggcggcggcgggcggaggctgggccggaggggtggggacggcgaggaggtggaggccggcgctccgctccgctccagctcggtttcatgtcccgccaggcgaaggatgacttcctgcggca

SEQ ID NO: 198557 - DNA, 122 bp, Homo sapiens
cgggtccggagctgagtcggagcccagggcagctggcccttgggagccaggattaaggggcggccctctggctgctgggggttggcgggaagtggaggattgggtgtggggtcgggcagtaa

SEQ ID NO: 198558 - DNA, 122 bp, Homo sapiens
ggttccctagaaatctcacctcattcccaagcttcacacccatctcccgggccactcgggcggccacactcatggcagccactctccggggttgggtgcaggcaatcttcatacccttgttt

SEQ ID NO: 198559 - DNA, 122 bp, Homo sapiens
cgaaaagaacatcagaatcatttcgaccatgctatgctgcacaataaggagtagttcaaacgacaactttttttgatcccaggtgttttattatagggttttctgatagtcttaccggaaag

SEQ ID NO: 198560 - DNA, 122 bp, Homo sapiens
tatgctaaacgaggggtggattattcatgagttttctgggaaaggggtgggggcaattcccggaattgagggttcctccccattgtagagcatgtagggtaactttctgatgttgccttggc

SEQ ID NO: 198561 - DNA, 122 bp, Homo sapiens
actgctcgctgacgcctcacgtccctttcaagctggtgtccaccttcaagaattactactcgttggtgctggacagtgccctggaccgcgagagcgtgtcggcctatgagttggtggtaacc

SEQ ID NO: 198562 - DNA, 122 bp, Homo sapiens
tctggctccggctcctcccggtcgcgatcccggtcttcatcctacagctcctactccagccgctcttccagacacagctcgttctcaggaagccggtccaggtatgtccccagggcccatga

SEQ ID NO: 198563 - DNA, 122 bp, Homo sapiens
agtaaccaggactggaataagagcgatgaatggaagggcgttgtgagcctgtgatcgatgcgatcagagttctattacgttttaaagagacagcacccgtgacgtttaaggtgatcccctac

SEQ ID NO: 198564 - DNA, 122 bp, Homo sapiens
gcggagggcggggcgtgggcggcgcccggccttcccgctcccgcggcgctgcaactctgccgagcctccttaaaactctgccgttaaaatgggggcgggtttttcaactcaaaaagcgctca

SEQ ID NO: 198565 - DNA, 122 bp, Homo sapiens
tggctgctggcttttagcacctggtgggtttcgcgccttgcaactcgacaactgccgggacggagtctggctgcgcgaccccctgcggcaggtgctgggcgaggcgcctcccctgcaactag

SEQ ID NO: 198566 - DNA, 122 bp, Homo sapiens
caaaggaacagtggtcagtgttgagaccccataccaactcctgttctttccccagctggacgagttctatattggacagattccactgaaggaagtgacttttgcaaggctgaatgacaacg

SEQ ID NO: 198567 - DNA, 122 bp, Homo sapiens
ccgtggcccggcttgggtaaatatttttattacaaacacagtgatgcgtaatgggccaaacgatcagtcctgacaaagattgcccacaggactgtgacactgcagtagctgggaaagtgggc

SEQ ID NO: 198568 - DNA, 122 bp, Homo sapiens
ccggtggatcgcgagccaaggcggcgggtggagcctgagccgtgaggccgtggccaatcgcgccgctccgggggaggagccccaaagggggaaaagaaagtgcggcggaaagtaagaggctc

SEQ ID NO: 198569 - DNA, 122 bp, Homo sapiens
ttgaaacagttaaaagagttctaaggccacaaaaggagagatgtcttcagaattatctcccgcctcacatttgctcttaggcaagcagtttaaaaaagcccagtgattgagccagtgatcca

SEQ ID NO: 198570 - DNA, 122 bp, Homo sapiens
accgctcgaggagtccgcatcccgcgctcccagcacctgggaagagtctgggcttcgctacgataaagcttatcccggggacaggaggctgaggtgatgtggttcttgagcctgtcgaatgt

SEQ ID NO: 198571 - DNA, 122 bp, Homo sapiens
ctacagaacgtggtcccagtagcgcagcggaaatgacgttcggctgcgaagagctctttccgtcgcaggcccggagtgcgcgatggcatgccgggaaatgtagttctccgtccctttcgaat

SEQ ID NO: 198572 - DNA, 122 bp, Homo sapiens
gccctgtgattgctctattaacctttagacctgtctgagggactctccggctcgcagccccgctgcgctggggcctccaggctctgacgccgactcccaactcaggcctgacacattcccct

SEQ ID NO: 198573 - DNA, 122 bp, Homo sapiens
caggcttcgcaagagcacattggcatttaaaggaagccagttactcatcagggtggtatccgagctcagccgtgagttcagctcccctaagaaggacagagcaggtgaggaaaaaggaaacc

SEQ ID NO: 198574 - DNA, 122 bp, Homo sapiens
gcaatggactcattcttttctccctactccccccacacccacctaaggcccccaaaggatcgtgcatgggcttaattccctgcctgaaaacaggtcaagatgtgggttccagcccacgagct

SEQ ID NO: 198575 - DNA, 122 bp, Homo sapiens
caggcagaactgtattgtaatctcaggcagagatgacagagcatcctagaagcaaaactacgccatgaacagaaaacttcaagaagtatgcaccccagaatattaaacattggtgatctctt

SEQ ID NO: 198576 - DNA, 122 bp, Homo sapiens
aataaataaataaaaataaatgaatccactcagatgttgataatggaacttggaccaaatcgggaagggcctgtcttccatctgggtgtgggtaagcacagaaaaatactgctgaaagggct

SEQ ID NO: 198577 - DNA, 122 bp, Homo sapiens
ccatgtgcggttactaccgaaaccgaggaaactggggattgcgttggaagtcggcaccctcgagtgagttcggattcgagctgggccgtgaggccgggagattcagcactgggctctaggta

SEQ ID NO: 198578 - DNA, 122 bp, Homo sapiens
agctataaaggaaagaaatccactaatgagtgttcactagcacaggcacatttatgttttcggatttagcatattttcaaaccatctggcattaatgcctctctggttcacccagcctaatc

SEQ ID NO: 198579 - DNA, 122 bp, Homo sapiens
actaccagaaaacaacacaaatcctctggcaaggtaattccatgacctaccttgataactcgctttcctttctccacttgcggaaaatgccctcttaattccaacctaaatcttcgtgcctg

SEQ ID NO: 198580 - DNA, 122 bp, Homo sapiens
atgtgagtggagcggccatttcctgtttctctgcagttttcctcagctttgggtggtggccgctgccgggcatcggcttccagtccgcggagggcgaggcggcgtggacagcggccccggca

SEQ ID NO: 198581 - DNA, 122 bp, Homo sapiens
atggaggagcggtgagaacatggaaccggactccaagatgacgatctaaagacccgggagcgagaagccaaggccaggttctgggtgtagggcccagagaagcagaacagcccagagcccca

SEQ ID NO: 198582 - DNA, 122 bp, Homo sapiens
agctcagataactgacttgcaaaaaatccctgaccaaccgggagcctgagaggtgtgggccgggtagggcgggaggagggggaggaagccctgggtaccccagggcgcaacatggcagggcc

SEQ ID NO: 198583 - DNA, 122 bp, Homo sapiens
aaattctgcacaccttttactctagggataaaaataatacgaaagtggaatgccagactccgaatacacacaccaagtggcctggactcttcactgctacctggcatgggggaggggagtgc

SEQ ID NO: 198584 - DNA, 122 bp, Homo sapiens
ttgcgcccacggtggcacttgccatgacctggagaatgggctcatgtgcacctgccctgccggcttctctggccgacgctgtgaggtgcggacatccatcgatgcctgtgcctcgagtccct

SEQ ID NO: 198585 - DNA, 122 bp, Homo sapiens
catttattgctcgcacttgcaagctgactaggatctcaggcctgggtctctgaactttcacggcttgatttcaaagtcctttttatcctgctacagattataccttggtaaaggactttata

SEQ ID NO: 198586 - DNA, 122 bp, Homo sapiens
aggcctgcgcctgccccacagcacagcctctcctggggtcccagggatctgggatggagacgcctctcctgggccacggcaggagactggcctggctccacccaggagtcccgaagccctgc

SEQ ID NO: 198587 - DNA, 122 bp, Homo sapiens
cgcggcgcacgatctatcttcaggccagagctcggctttcacgccgcagggttcgggctacgccaacgccctgggccaccatcaccaccaccatcaccatcatcaccacaccagccaggtgc

SEQ ID NO: 198588 - DNA, 122 bp, Homo sapiens
ccccgagcctcggcggtgctgattggccggcctggcgggggggacgggcggagggacggccgcccgcgcgtccgcttcgtctccgcgggggcgcgcccgcggcacgcggccgggcggggccg

SEQ ID NO: 198589 - DNA, 122 bp, Homo sapiens
cccccctcggggccctggttgccgggcgctaaagcaaacgggctctatttgcccagtctgcgatgacaatgctgtcgccaaatatttgccagcccctggcggctgcagagcgcggctataaa

SEQ ID NO: 198590 - DNA, 122 bp, Homo sapiens
ggaggggtgaagaaacctcatcgtaataggcctggtactgtggcactccgtgaaattaggcgttatcagaagtccactgaactaattcgcaaactccccttccggcgtctggtgagagaaat

SEQ ID NO: 198591 - DNA, 122 bp, Homo sapiens
catttttggcaactaccaacacccaggaaaaactctgtctgtatctctccttgaccaaaacgtatgtaccacctaaaatgttgttaaaatgaatatcggccgggcgtggtggctcacgcctg

SEQ ID NO: 198592 - DNA, 122 bp, Homo sapiens
ccactggaaggcaccagctcttccttttatctctccagagctggacagtgcaccaggggccggtactggttccccagctaggagacaccttgggcggggctttgctcgccggaagcacgcag

SEQ ID NO: 198593 - DNA, 122 bp, Homo sapiens
gtgtggcggggagcaccgagagagatcactggggcgaacaccgagtgtggcggggagcaccgagagagaagatcactggggcgaacaccgagtgtggcggggagcaccgagagagaagatca

SEQ ID NO: 198594 - DNA, 122 bp, Homo sapiens
tacctatcgacttggtcaaattggagatccccagcccaacttggaggtgcccggcgccgacggcctgctcagcaacgagcatcttcacagtatctacgagagcagcctgtccatcggcaact

SEQ ID NO: 198595 - DNA, 122 bp, Homo sapiens
agcgggcgacagtggcgtgggatctgcctctctgcgagcagctgggagcggcggcggcggcgccatgagcgggggcaccccttacatcggcagcaagatcagcctcatctccaaggcggaga

SEQ ID NO: 198596 - DNA, 122 bp, Homo sapiens
ccgccccgcatcgaggcagacaagcctgttcctcttccctgggctgcgattgcgacaggccggcctggctcccagcgctccctgtccccgccccgcggccagctcgctccactcccacttcc

SEQ ID NO: 198597 - DNA, 122 bp, Homo sapiens
ggcaccgcggagaaatgggccgcctgtggatggacagaatcaaattattcttgaaaagtgcgtctcagactcgtgcacattagagaaagtgccggcggtgacgcagtcaggactggggagcg

SEQ ID NO: 198598 - DNA, 122 bp, Homo sapiens
acctcacaaaaccaggggccgtccacctccttcacgcaggcatgaggaggcttcagaggccgagtccgaagtggccaaccacaacttccaggagcaagaggggcatttcataatgactaggg

SEQ ID NO: 198599 - DNA, 122 bp, Homo sapiens
gacttcaggccaagggcaggagctgaggaagccacaagggaggacattttctgcagttgccgaaccagtagcaaccaggtcctgagaaagccctctcttgtggaagaataactgccaagcag

SEQ ID NO: 198600 - DNA, 122 bp, Homo sapiens
agacgaagagtgagccagaaggagccccactgagggtgggtgggctgctgcagtggaggccggcccgatgccccctccttaacccacaggggaggtcggcccaatatccctcctcaacccgc

SEQ ID NO: 198601 - DNA, 122 bp, Homo sapiens
cctgaggtcaggctggtgatttacgatgtgggtattgatgtggggagaggcaggcccaggcgtctatatatagcagctcctcagaccttaaacgggagggaggcacaggcgcttgctttgca

SEQ ID NO: 198602 - DNA, 122 bp, Homo sapiens
cttggtaggtggtgggcttcctagaggaggcggtgggagggcaggggcaaagagggtgagcggtcctcagttcgtccgtcttcccgggggactctctgaccctttctggtccgtgctgcggc

SEQ ID NO: 198603 - DNA, 122 bp, Homo sapiens
ataccccaacttcccttaagtgatgatgaaccattagacaagagaccggactacagaggccgcagtctatttaataaccatcaatgccttcagctataaaacaaagccagcctaatgtagcc

SEQ ID NO: 198604 - DNA, 122 bp, Homo sapiens
tgaaaggaaaccaggcactgcctgccggctttacatctgttgatctgacctgactggaagcgtccaaagagggacggctgtcagccctgcttgactgagaacccaccagctcatcccagaca

SEQ ID NO: 198605 - DNA, 122 bp, Homo sapiens
ttgcctgcccaggtcacaaggtaggaccaggattccaagcctgatcggtctggatacgaacgctctacccacgcggctttccccctacactctcgggatcaccacacacttccccttggctt

SEQ ID NO: 198606 - DNA, 122 bp, Homo sapiens
cccgagcttcctgctcttcatcttcacgtagccttgcttgacgatgtcactgaaattggtcgccatggttttcccaccttttaggggcgcggggcctggcagaggcgaggggaaggatgccc

SEQ ID NO: 198607 - DNA, 122 bp, Homo sapiens
tgaggacacaaggctctcgaggtctgctttcccttccaaccctcccttcatcccaataggcgtgtgctggtcccaatgtcagtgaaacccagctgggggcctggcccctcggagggggtcac

SEQ ID NO: 198608 - DNA, 122 bp, Homo sapiens
ctcaggcacggcccggctcagtcccgtatggcatctgcactattgagactatggagtcgccgctgagaactgagcccaggagacactgaggtttttcctctttctttgttttccagagtcgg

SEQ ID NO: 198609 - DNA, 122 bp, Homo sapiens
cgcggctggagccggtcacccggcgcagccccttcccccggagcccgcctttcatctccccgcgcctggcgcctgcccgaagcccaggcccgtctacagcccccttcgctgcccctcccccg

SEQ ID NO: 198610 - DNA, 122 bp, Homo sapiens
ctcctgccctcaggctaggtccactaacaggaggacccacactctcgtcatttcaacacccgggcatcacactaaatggttccttcatccagacgcagagagtctctttcctaagctgggga

SEQ ID NO: 198611 - DNA, 122 bp, Homo sapiens
ccttcgcccgcgtccacccgagcccatgccacttgccccacttgctcgccggagtcccctcggtagaagcagggcagttttgcgtcctggcccagcaccacagttaccacgtctgaggtctc

SEQ ID NO: 198612 - DNA, 122 bp, Homo sapiens
gggcaggggggcggggcggccacgtggggcacggagcagctgactcgggcaccgcccgcgcgctcgcccaactggcaggggcccaacccaagccgagggccccaaaagattccccgcgtcgg

SEQ ID NO: 198613 - DNA, 122 bp, Homo sapiens
tcgggtcactgttctcgggaggccgccccgccccacagtcaggctgtgcccatcccccgccgccccccacggtccccgagccccagcgcttcccagccccgcgtctgtgtgccgcgcccccg

SEQ ID NO: 198614 - DNA, 122 bp, Homo sapiens
caaaggtccacccgcccactcagctctccaatggacgtgactgcagacacaggtgcagttcgtagccctcgagcaggctgcgttgttggtgggggtgggtcggctaagcgcatactttggta

SEQ ID NO: 198615 - DNA, 122 bp, Homo sapiens
ccgggccttctgtttggagacgcggagcgcgggctgcgagcccgggtgaaatggccttaacgcacggtacaaggcagtttgtcctggggctggagcgtctgggggccctgccggctgcacgt

SEQ ID NO: 198616 - DNA, 122 bp, Homo sapiens
cgcggcgcagctcgaaaaggaataatcgcccccgattgactgaaattcctccggagccggcgccgcggccgcccgcgcccgagaccgcgctccggggccgcgtcctcctctcctccggaaaa

SEQ ID NO: 198617 - DNA, 122 bp, Homo sapiens
taaagtagcttctttttctttctttcagaatgctcagatgcatcagttccttaatatacacgtgaaatttgaaaactgtacattcggtgagattaaattttatatacaactagcaattgtcc

SEQ ID NO: 198618 - DNA, 122 bp, Homo sapiens
gggtcccctcctgtgcaagcaaagcaggagccccagggcagggcctcgcacctccaggcccggtcccgctcccaggagccagatacacatgccgtacaccaccgcaggtcacaggtgctggt

SEQ ID NO: 198619 - DNA, 122 bp, Homo sapiens
aatttgacacctatcccccaatttatggtagagccaaggtccagacttaacctaccctcccgaagtccattcttgtatgaaactacagaacagttgtctctgggtcttgcagagcactcctt

SEQ ID NO: 198620 - DNA, 122 bp, Homo sapiens
atctgaattaaaggttctgcttgtctgtggttatatctgtaaaaagacttttgacattaacgatgaggtgctgttggctgcacggcagtctggctaagataaaactacttagcagtagactg

SEQ ID NO: 198621 - DNA, 122 bp, Homo sapiens
ataaataaccgaagaagcgccagggagcatcctgagcccgggtttgctagccttcctccccgcggtgggtgaacccataaagtgaaataaaacatccaggccggaaccagcgaaggcgacgt

SEQ ID NO: 198622 - DNA, 122 bp, Homo sapiens
tgattgaatgaatgatgtttgcagtcacttaccggcggagggtgaagtagctcaggcggccgccaggctgcgtgcggccggcatcccggggcgcgggcattctcccatcctttgtcagttgc

SEQ ID NO: 198623 - DNA, 122 bp, Homo sapiens
gatttccattactaagtttacttactctttgccttactgtggcagggcaggtctcgctaacgcaggcctccataacaactgtttcagcactgactgagtggttaagttaaatgttgaaagct

SEQ ID NO: 198624 - DNA, 122 bp, Homo sapiens
aattcaaatctaactactctcttcgtaactgcctaacctttggcaagttgtgaaactttccgcttcagcttctcacctgtacaatgaagataatagtaatatctatctctgtcatagttgtg

SEQ ID NO: 198625 - DNA, 122 bp, Homo sapiens
aaaagccatgaaaatgcccgggagctacacaggtgggggcatggtttccccaccctcagacgtctgagaatcaaaaggcttagtaacaacagtgagaggttttcagtccccatttcactcac

SEQ ID NO: 198626 - DNA, 122 bp, Homo sapiens
aggccccgcgagaagccatctgaggcggcgacgactgttctcagccccacgggaacgccgcggacgcagcgtccctctcccggacaagaaaacagccattctagagtaggttcctccccttt

SEQ ID NO: 198627 - DNA, 122 bp, Homo sapiens
ggaaggagggtgacattctggctgcttcctcaacctggtttcttccctatcgcaactcttcgtagattttgcaacccactttccaccccagccccctctgccatgctgccccttgaagggga

SEQ ID NO: 198628 - DNA, 122 bp, Homo sapiens
ccctcgcaggggccgagcgaatgtagcccgcgagagaaaatggcggcggcggcggggaatcgcgcctcgtcgtcgggattcccgggcgccagggctacgagccctgaggcaggcggcggcgg

SEQ ID NO: 198629 - DNA, 122 bp, Homo sapiens
tcattcatacatggaatccgcaaatactagttgaagcccactgtaagcaaaaacagttaacgacagtgcgtaaacagtgatgatcaagtcaggcagtggcactaaacctacaaattcttgtt

SEQ ID NO: 198630 - DNA, 122 bp, Homo sapiens
acacagcacgcgctcagtgcctactgtgggtgaccggggcaacgcctggaccctcgaagacgagcccggagtcaagggagaccctggaaataggaaaagcaagacaatctgaaggccccaga

SEQ ID NO: 198631 - DNA, 122 bp, Homo sapiens
gccatggctgccctcatggctgcaccgggaggatgactgtgttcccactctcagtcctgccgaggtgcctgacagccctgcacccaggagctggggggtctaagagcttgtaaaaagtgtac

SEQ ID NO: 198632 - DNA, 122 bp, Homo sapiens
cagaccatcacctgtccccaacccatcgcgtttagggctcatcttcctccagaaggtctccgtgtgggagactgcagccaaactcaagtgcccttctgcatttccaactgtgtccggaattg

SEQ ID NO: 198633 - DNA, 122 bp, Homo sapiens
accaagtggcccgagctgttctcgcgctgtgcccgccccccccaccaccgccctcagctgcggccgtggagttaccttgccaccgggggtcctcgctcaggatcttctcaatcatggcctgg

SEQ ID NO: 198634 - DNA, 122 bp, Homo sapiens
gcggggcaggccccagcagtgcctcgctgagtgctgtggccaagcacatcactttgacttcgtggctgggagactgcgaacctcagactacctgcgttatgatttatttcagcgtgactagt

SEQ ID NO: 198635 - DNA, 122 bp, Homo sapiens
ccgggttcccaaaccatcgctaaaggcggacggggggcgccaggagtaacggctgctccccggagaccccaccgagcccagcgcccgcccccgccccctgggcgccctgccccattttctcc

SEQ ID NO: 198636 - DNA, 122 bp, Homo sapiens
accacagacgggcacacgcgctcagcacagccacagtcgcgtgcaaccaggagtgcacaccgcacccacatcacaccgcatgcacagacgcacgggtgtgagaccacacacctcggccactc

SEQ ID NO: 198637 - DNA, 122 bp, Homo sapiens
ttgagcctggctaggaatggtagctcctctccaaattcccagagctctgagaaagaaccacgaggatacgaactcagagatgacacagctacttagaggctctgtgttgaggttttgccaaa

SEQ ID NO: 198638 - DNA, 122 bp, Homo sapiens
cgactgccacccaatgtagcccacatcacattgtcttatttgttttcgggagcttgtccccgcctagcaaggagtcggctaagaactggatcctagcgaggagcccggcacagacagcgaat

SEQ ID NO: 198639 - DNA, 122 bp, Homo sapiens
ctggctcaaaatgctgttctaaaaatctagaaaagccattggaaatcaggtggcagagcacggtgggaaagccaggatcgacgtcctacctattttcttgttccgctcttctccacggttgt

SEQ ID NO: 198640 - DNA, 122 bp, Homo sapiens
ctgccccaagtgcttcagcgtcctggaggatgtctgggccctgtaccgggcctgccagaacgaggagctcatcacctccgtgcagggcttcctgggcaggtaccaccaggccttctccgcct

SEQ ID NO: 198641 - DNA, 122 bp, Homo sapiens
tgttagacatgcatgttcctgggtctcacccttagtggttagtcaaggtctggggtgggccggacatctacattttatttatgagacagagtctcgttctgtcgcccaggctggagtacagt

SEQ ID NO: 198642 - DNA, 122 bp, Homo sapiens
ccaggctcttcgtgaaagccaggtttgaaagtcttgtttgcttctcctttagtggtttggcgtggagggcgggggcagcgtcaatttaactccagtctaaaccacgaacaggtcacagacta

SEQ ID NO: 198643 - DNA, 122 bp, Homo sapiens
gcccctcctccccagcctgaagggcagagtgtgtttgctctgggccaggtgggcatggggcgcgggtgcccgcgtgaaattcacaaatccgtgcagctgggtgtggtgttcgtactgttacg

SEQ ID NO: 198644 - DNA, 122 bp, Homo sapiens
gcgcagccgggagtgccgcgggaggccaggcgccggcggcagcggcgacacgggggtctccgccagctgaaaaattacagagggcttactgtgttctcagtattttactcatggtatcttat

SEQ ID NO: 198645 - DNA, 122 bp, Homo sapiens
tcgccccacagctggtgagaggtgaagctgagccgtggaccttgagctgttgggcaccaacgctggcaagccctcttaaggaagagcactgccagggtccaccttcccaccaccagcacccc

SEQ ID NO: 198646 - DNA, 122 bp, Homo sapiens
cgcagaccccatcctgtcgagtggcatgagcaggctgctggtggctctggtgcacggccacgggccggcaggctggggtccgctgaccgaaaatacaggcagcgcccagctcaggcagtgtg

SEQ ID NO: 198647 - DNA, 122 bp, Homo sapiens
tgcttcctgggagaagtcacctgcacaggtaccttggatccaactgacaggtgagatgaacgagctctccctgcgtgcgcacgtctacgtacgctcgtgtatgctgaggagcaggcattgga

SEQ ID NO: 198648 - DNA, 122 bp, Homo sapiens
tgcatggctttgtgggccacataatctctgtcacaattaccaacatgaatgactgtgtttcgataacgattatttgcaaaaagaagccataggcctgcaggttataatttactttacatgat

SEQ ID NO: 198649 - DNA, 122 bp, Homo sapiens
ggctctgcactcacctcttcagacaagcgattgccctggtgctccatgccaccccatcgacgccttccctgaactcaccctgcacccacgtgccctctgaatccgacgcctgaagaccttac

SEQ ID NO: 198650 - DNA, 122 bp, Homo sapiens
tgggaagccaccaggcacactcactattttcttccacttcatcctccgattctggtaccacgtcttcacctgcaactggctcaggcccagggactcagcaagatctattctggaaagagcag

SEQ ID NO: 198651 - DNA, 122 bp, Homo sapiens
tcaggcggcccctcctaatccggaacacgactcacattccgttggtcttgccttgacagacgtgaccctgacccaataagggtggaaggctgagtcccgcagagccaataacgagagtccga

SEQ ID NO: 198652 - DNA, 122 bp, Homo sapiens
aaccaggacaggctccaggcaggcggcgctcagaagtctcagggcactcggctgtcacagcgcggcacaggggagtacgcagccccagccaggacactacaatgttagagggcgcgggtcac

SEQ ID NO: 198653 - DNA, 122 bp, Homo sapiens
tgttgaaaaaccacaacatccaggcctacacgagagtcacatcacctgtccccatggtggcgccattaccttgcattctatccaaatgggcctagatccaaatgattagccaactcgtattt

SEQ ID NO: 198654 - DNA, 122 bp, Homo sapiens
gttgttatgcctctgcagcaaaagcatctggcattcttggtttgagtagccttaacctttcgggctgctggctgttgctgttggtgaaggagaactgcaggcctctgggatgggctttagga

SEQ ID NO: 198655 - DNA, 122 bp, Homo sapiens
tggttccagggtaatatctggtcaagggcttgcggcagataggaagagttctctctctgccgcctgtgcccaggccactgctgtggcctagatcgggttggctctggccgtgccccattcct

SEQ ID NO: 198656 - DNA, 122 bp, Homo sapiens
tgcgaaaacagaacccgcctaactccccgtcagccaggaggaggtgggaaaccaacacagcgcatggttatttcatatgcggggatacagcgaagatggacgaagatctacacgcaccagtg

SEQ ID NO: 198657 - DNA, 122 bp, Homo sapiens
ttgtgttttgttttgtttttttggatcttctggctggagctgcttcactcgcctcacctgcgcactcctgcctaggactccttcgaaacccttctctctcgccccaagtctgcttagctcct

SEQ ID NO: 198658 - DNA, 122 bp, Homo sapiens
gattctgagcacgggcggagatcaccttctggacccggaagaatggtcggtaggtcagtccgtccccgctacggtccccgccgggcttccggtcccgctggaaaaggttctttccggaattc

SEQ ID NO: 198659 - DNA, 122 bp, Homo sapiens
tagcgctgccggagggggatggcagtcgggatccgcccgacaggccccgatccccggacccggttgacggtaccagctgttgcagtaccaccagcacaatctgtaccgtcgccgccgctccc

SEQ ID NO: 198660 - DNA, 122 bp, Homo sapiens
ctggattgcttctgtctggcggcggcagcatggcggcgggggcggctgaggcagctgtagcggccgtggaggaggtcggctcagccgggcagtttgaggagctgctgcgcctcaaagccaag

SEQ ID NO: 198661 - DNA, 122 bp, Homo sapiens
cacgggcccccaacccagacaaagggtggctcaggctgagccctgctctgctaggctcttcgctgttcagcttcgtgtgcaacactagcgggccctggcgcccgcagccccccagccgctgc

SEQ ID NO: 198662 - DNA, 122 bp, Homo sapiens
ccgcccggtcgcggagctgcggccagctttgggagggccggccccgggatgtgagtgccgcggggcgagggcgggggtgggctcccaggggtcccggtgggcgggcgcgctagggcgagggc

SEQ ID NO: 198663 - DNA, 122 bp, Homo sapiens
tctgcggagcgcggcggcggcgcccgggtctgcgaggttgccgcggacgaggggccgccgcgggccgcacccctgcacaccccacacgcccaccacattcatcacgggccccatctggcgca

SEQ ID NO: 198664 - DNA, 122 bp, Homo sapiens
ggatctttcttgtggccacttacctcttccgttgtagtgtgaaagcagccacagacaaatcgtaaatggatgggcatggctatgggccagttaaactttatttgcaaaaatatgtgtcaggc

SEQ ID NO: 198665 - DNA, 122 bp, Homo sapiens
agccctgagactgtctgcattcgcatggagtgggcacctccgctggggacagattacagacgcgtccggcccaaggaatgctttggagagctgggagtggggctgcaagaagggtactgtct

SEQ ID NO: 198666 - DNA, 122 bp, Homo sapiens
aggtttctaccttcctccagggtcagcacctctggagccttcctgggacacggccttggccgtccagcccacccctcggagataaggcccatctctggaagaggtcaaggccctaaagcaac

SEQ ID NO: 198667 - DNA, 122 bp, Homo sapiens
ccaggcccttcttcggccatttctagcgaggatggaaagttctctatctgccactggccgcgtgtggctcagaacgcttgaaatgtggctagtgcagatgaataactgaatttttaagtgta

SEQ ID NO: 198668 - DNA, 122 bp, Homo sapiens
tggaaaggttgaaggagactcagattgccaacggggcggctactcttgctgcaaagggaacgaggacccgggctctcccggcctcacagctgctcccctcctggggattggcccaggcctgc

SEQ ID NO: 198669 - DNA, 122 bp, Homo sapiens
atgttactcccaatatcacaggcggtgtactccccatatcccaggttgtggatagtatcccgatctgtgatagactccgccacgatgtggggagtaatgtcatccccctctccttccctcgg

SEQ ID NO: 198670 - DNA, 122 bp, Homo sapiens
ctggcggagacagcgcggtaggggcagcttcaggtttcctcctggagccggtgtcgggcgcggccggcgggcgggcctcgccatgtgatgcggccgccgcgagccgggccgggaggtgggca

SEQ ID NO: 198671 - DNA, 122 bp, Homo sapiens
aatgataatttccttattcagtttcagaagaaaaagaatgaaattgggtaactgtcattgcgttagctttatgttgaattgggaaattgtggcataaagcttaaattcgtgtttatcaaatg

SEQ ID NO: 198672 - DNA, 122 bp, Homo sapiens
agcaggcaggcagcacaccaggagtgcgggcaccacccagcacccaggctggtgagacagcggcggaggcagccagcaggagggaactcacctttcttgagtgtccagcaaggccggcactg

SEQ ID NO: 198673 - DNA, 122 bp, Homo sapiens
tagtaaaaaccagttcacaggtccaaacagtttcaatttaaatgtttgatcatcagtttccgtgtattaagtagaactattcaaagtgtttgaaaattatcttagtaaaataattacatatc

SEQ ID NO: 198674 - DNA, 122 bp, Homo sapiens
ggaggcagagcatgcagtgagctgagattgcaccactgcactccagcctgggcaacagagcgagactctgtctcaaaaaagaagaaagaaaagaaaaccaagcccctgccaccacgaagctg

SEQ ID NO: 198675 - DNA, 122 bp, Homo sapiens
gctcccttgagtccaaaaggtgttttgtacatatggttcccatgctcttccactaccacccgccatccctcccactacttcacagaccacccctccaccacataggcagagttaagctgctc

SEQ ID NO: 198676 - DNA, 122 bp, Homo sapiens
agggtgcagcgccaggtccggtgttggggtgtccgagttgccgccggagaggagtggcctcgcccgcttggtgagtctccaggagtgggacggagggagctggccgggatgaagtctgagac

SEQ ID NO: 198677 - DNA, 122 bp, Homo sapiens
ttgctttctaccttgagcgagttttcaaatcttactgggcctcagttttctggactgatccgccttaatagggtttgtgaagattcgattagttagcacgctcaagtgctgaggatacttcc

SEQ ID NO: 198678 - DNA, 122 bp, Homo sapiens
ttccacctgcgagtgtatcacaaaccaggcgcgcgcacccgagccctccctccaccagggcggaaaccagagaacacaacccaaacaccgaaagtttctggtcgcaaactctactcatcttg

SEQ ID NO: 198679 - DNA, 122 bp, Homo sapiens
tgtgcttgcgtggagcagggagcggaagaggcagccggtcctcaccctcctctcccgccacgcacatatccttcttgacttcgaagtggtttgcaatccgaaagtgagaccttgagtcctca

SEQ ID NO: 198680 - DNA, 122 bp, Homo sapiens
tcccccacggacggcgcgggtcccctcgaatcttcgggtcccagattcaccccaaggctgcggaacccgcccagaccctagaccggggagagtctcaggcgcctttacccggttctttttca

SEQ ID NO: 198681 - DNA, 122 bp, Homo sapiens
cccgcgggctccccaagacaacagcgccgggcggccggatgcacgtgcgtcccgggaaggcgggttcagctggcatcgcctggccggttccgttcgctccttaaaccacaagacccccttgg

SEQ ID NO: 198682 - DNA, 122 bp, Homo sapiens
tcgcccgcccgcccccccggccgccctgtccgcctttgcccgcctgcccgccgcccggcgcggcctgctttcagacgctcaattggcgtttgtgttgggtttccccttttcaacatcctgcg

SEQ ID NO: 198683 - DNA, 122 bp, Homo sapiens
catgtgcgctttgtgctctcactggggtgtcagtttccctgggatgagtccagcaatccccgattccacacctgcgtgtgttttgtgctctggctgggatgtcagtttccccggccttccaa

SEQ ID NO: 198684 - DNA, 122 bp, Homo sapiens
gttttaatagacaggcagcaagttcaccgaggctgaagaatgaagccccttcagggccggcgggtcttgagatcaatgagcccaataagaaaaccaagcagggtcatgactcagaaattaaa

SEQ ID NO: 198685 - DNA, 122 bp, Homo sapiens
tttggtcccagtccatgaagtggcacagtcagaataaaaggtgagagcttaggagattagcggagggtagaagaacactctgtcttgtgaccagcttcagagagcctggggccatggcttcc

SEQ ID NO: 198686 - DNA, 122 bp, Homo sapiens
cacccggggggacacacagaccgcctagcccgaggcaatttcacatcacttgtgtgagctcggactcatttaatcccagctgccccaaacatttgctattccttactttgctatgcctgtac

SEQ ID NO: 198687 - DNA, 122 bp, Homo sapiens
aaaagggattgtggtgaaatgagtttgggaagcactaggttaaacaggtttctctattaccgcgctccggagggccttaacatgctgtcagatgataggccttgtgttgatcatggaaactg

SEQ ID NO: 198688 - DNA, 122 bp, Homo sapiens
tttgggatcctgatgcatgcactgttaatggagatttacaggagtcagacccaaaatcaacgttagtggcctcaatttttcttcatctgctgcagcttgttactgagagttctggtgattgt

SEQ ID NO: 198689 - DNA, 122 bp, Homo sapiens
tgggtcacgtccgtgccctgggacttgtctgtgaaacacagggaatgattaactggtttccgagggtttgtccagttctaacattctgtcctctgcactttatacaggattttaatttcgat

SEQ ID NO: 198690 - DNA, 122 bp, Homo sapiens
gcgagctggacagcggcgcgcgccaggcgtggctttctcggccggtgggctaggattggacgcagtaggtagaaggggcaggaccctccgcagcagtagctcagcgattggccaggagctgg

SEQ ID NO: 198691 - DNA, 122 bp, Homo sapiens
agctcagaaaagcgagaatccctttctggaagccctggcccaacctaactggtgtgattccggcgctgtcaaactactggggcgggccacaggatggactgagcggcatgcacaccaggggc

SEQ ID NO: 198692 - DNA, 122 bp, Homo sapiens
tctgcaatgacccttgacctctctcaggcccgggctgccaaaactaactcccaccacctccggcgacccacagtcttagcaacagtagctagggacactacccagtgagcaccttggcagcc

SEQ ID NO: 198693 - DNA, 122 bp, Homo sapiens
acctcccttctcttagctggcctattgctctgtaactagggtccccagttttactctgcccgcccttcaggcctactgtccctaaggcggacagacagaccgatatcttagtaatgtaaatt

SEQ ID NO: 198694 - DNA, 122 bp, Homo sapiens
ctgcgactgcttccgaggtcatgttcccaggacgggcgcgtcttcagggtggaagcctggcgcacgtccggaggtgccgaggacccaaccagcccaaactctgggggaaatgactcccctct

SEQ ID NO: 198695 - DNA, 122 bp, Homo sapiens
tttatatgcatatttttggacataaacagtttatgtaaaattagtaatgaatgatggcaacgagggcactgttatcttcgtttgttttcaatgatcatttagcattcaatgatggaacagct

SEQ ID NO: 198696 - DNA, 122 bp, Homo sapiens
gcccctgactgccctttcttaaagcatttactaaaaacggcttagagctgtgaattctctcggtccctttgagatgtatctcccacccaggagtgtttcttggccaggtgtggtggctcacg

SEQ ID NO: 198697 - DNA, 122 bp, Homo sapiens
gcccgggctgcgctgggcgctgccgctgctgctgctgctgctgcgcctgggccaggtaagcgccgggtgggctcgggcggggggcaggaggctggggcgggactggcattgactgcacctgc

SEQ ID NO: 198698 - DNA, 122 bp, Homo sapiens
gctgtctgagagccagacgctggaatgtgctccatactcaccccaccacaggggatccctcggcgagccgtcaccgtccacgatattagcttcattctacagatgagaaaaccggctcagag

SEQ ID NO: 198699 - DNA, 122 bp, Homo sapiens
tccttcagcttcagcaccagctccgcccctgctgtcctgctctacgtcagttcctttgttcgtgactacatggctgtgctcatcaaggatgatggtaagctctcccgggctctctcacccca

SEQ ID NO: 198700 - DNA, 122 bp, Homo sapiens
tgggtgggtggccgcaggcctcaagcttggccttctgtcttgaggacatgtcggagagttcgccgactcctcccctcgccccacgttcctggttcttcatagctgcttttgggtttcctggc

SEQ ID NO: 198701 - DNA, 122 bp, Homo sapiens
gtgcagtttgggcatagcacagaggtgtgtggtgtggtcagggcatagcgcagaggcgtgcggtgctgtcagggcacagcgcagaagtgggcggtgctgtccgggcatagcacagaggcgtg

SEQ ID NO: 198702 - DNA, 122 bp, Homo sapiens
actaaaagccagcactgtgctaggtggtcctggagatacacagtcatgagaaaaactgtccggagaaaaaccagtacccagagaatttctagtttaactgtacctggtctgataagcagggg

SEQ ID NO: 198703 - DNA, 122 bp, Homo sapiens
cgatcccagtctcagggaggccgagttctctgcctggtgctgggatcttgtggaccccaccgaaggcgtcgtcgcaccccacctcccgcctcatgctgggccttgctgcaccccaagtctcc

SEQ ID NO: 198704 - DNA, 122 bp, Homo sapiens
cgggctccagcggcgaacacccgggacaacttccagagaggcctctcacaccctcacttccgggtcctgcccacctcggtgcacttcgggaaatgtagtcctgcactagcctcaccccgcac

SEQ ID NO: 198705 - DNA, 122 bp, Homo sapiens
tgccaagagtagaaaagggtagtgtatagatatcaattttattgtccagcattccctaatcgaagtcccaagtggtctgaaaacttagacgaaagataaatgggccgcagtaattaaccact

SEQ ID NO: 198706 - DNA, 122 bp, Homo sapiens
ctggcatcccttgctcttggcctgcacccttgctgtctctttcctgcaggactggggtggcggaggaatcctcttcctcggcctcactcccttcatcacagtgcacggcttcatcttcactt

SEQ ID NO: 198707 - DNA, 122 bp, Homo sapiens
cgcccgccagcacgctcagggccagcaggttggaggccaggcccaccacgcagaaggaggcggcgaaccagggcgaggcgatcagccgtctctcctccagggtaatgtttgtgggccggaaa

SEQ ID NO: 198708 - DNA, 122 bp, Homo sapiens
ctctgagattcttcctccatgcaaccacttcccctggggcgtggccacctccctggaagccgccagcatgctcggctgggcccccgcactctggaggcttgagaatctctctatttttgaat

SEQ ID NO: 198709 - DNA, 122 bp, Homo sapiens
ctgcgggaacaaggcgagctcagctggccttagtcacaggtcaattgcttcatacaaatccgcagggatccgcggatgctgtgacaaggggcgggcgagggagggctccgcgtcaggggcag

SEQ ID NO: 198710 - DNA, 122 bp, Homo sapiens
tggaaagtcacgaggccccagcctgccgtggggccctcgtgggtgctgggcagacaggtgcgcaggaggcggcgctgggcagacagacaggcgtcggccagctgaggccggcgttgctattc

SEQ ID NO: 198711 - DNA, 122 bp, Homo sapiens
ctccaaggcacctcccacctacgggtcacccagtcagcccacttctttctgggacaaaggcgtcatcccttagagacagtaggaaaatggtatctcccggaagttacctcacgacctccaag

SEQ ID NO: 198712 - DNA, 122 bp, Homo sapiens
gcttggcacacccaaacaaacccaaggtatggactgcattcagacgtgacagcgcagcagcgggtatgccaggtgctctttccaaaaaggctccaaggcagatgcgacatgtttttagggag

SEQ ID NO: 198713 - DNA, 122 bp, Homo sapiens
cccgcgtccagagcgggtcaggttgatccaacctggttgtccttgtccttactgccttctcgcgcccggcgcctactccacacccctcctttgcgtctgccaggggccggcggggcagctga

SEQ ID NO: 198714 - DNA, 122 bp, Homo sapiens
atgatgatccatgattctcttcttatggtaaagtccacagaacttcaattgctgggttaacggatttgtgctctttaacacttcaagtacattttaccaaacggcctttctaaaagtcttga

SEQ ID NO: 198715 - DNA, 122 bp, Homo sapiens
cgccgccgctgtggtaatgtccgccatgttggccatggcgcagggagcggatcgggcgggcgagcggcggatctagtgtgtggaggcggccgcgggcgcggggggctgttttcgggcggggt

SEQ ID NO: 198716 - DNA, 122 bp, Homo sapiens
gaggccatctgtggagatgcctgatagggcgcctggccctcctgggagctcatctgtggccggatgcaaaagagaaggaactcacacatcaagggtgccaggcagaagtgggaagctgcggt

SEQ ID NO: 198717 - DNA, 122 bp, Homo sapiens
ctgaaccaagggtgcttgctgctcaaccttttgctgatgctgtgttgtcagtagtccaaacgtgtccatgagtgtttggaagatcttgtttaaaagttgcatgtaaatgtatgcttgtgata

SEQ ID NO: 198718 - DNA, 122 bp, Homo sapiens
cctgcctgcctcgagaggtggcagcaaaggagccagtgccctcactggtgctgggcggggcggccgctttcctcggagggaaggggcggcgttggcgggggaagggcgccagggcccaggcc

SEQ ID NO: 198719 - DNA, 122 bp, Homo sapiens
ctatttactccaaatcttcagccttgcagagtacaacaacacgatctagtggtgtctgaccgccccctagccctgatccaatcattttctcatgtggaattcaagctagattaaacaatgtt

SEQ ID NO: 198720 - DNA, 122 bp, Homo sapiens
cagagcaaaagatacgagaaccttaaaagcaggtggtcattgacttcaaggggacgagatcgccctccccactgcctctccccatacagacgctcacagaatagacggggaagcaactatga

SEQ ID NO: 198721 - DNA, 122 bp, Homo sapiens
gcccctggagactctggggacatgagtatcccagtgacgggacttacatccctgccttgccgtgtgctggtgaccctttatggaggtctattgagaccttgcccacttctgttggggtttcc

SEQ ID NO: 198722 - DNA, 122 bp, Homo sapiens
gaaattccgcatttgtctgtgagctgctgccaggtgcccattggcccagctactctgggtcgcaaacctgcagatgccagatacatgaaatttggggacgttcagcttcctaaaaccacagt

SEQ ID NO: 198723 - DNA, 122 bp, Homo sapiens
cccgtctccctcgggcagccattttgtcgccaggtgccgcgcaaaggactccgggaaggccgctccggccccgcgcttggcgcccgactcgcctcgtcccgaacaatgcatgccgggaagag

SEQ ID NO: 198724 - DNA, 122 bp, Homo sapiens
tgtacttagatggaaatagtgctttgcctaaaaagaaaataaaagacctgattgtgcaggcgagtgagaaagagagagaggcgctagggttatttccaccctgatactctttgggtagtctt

SEQ ID NO: 198725 - DNA, 122 bp, Homo sapiens
tacgccagtccctgtccagaacctctcagcacagctgacttttacactcatctttccttgcggggggttggcactgacacattggaaacctgagtcacgaatgtcggcctggatgcctggca

SEQ ID NO: 198726 - DNA, 122 bp, Homo sapiens
ggcggggccagccggcgagtctaaacccaagagcggtaaggacgggcctgcggcagtgggcgggggcgactgcccctgctgctggggagagtcgttgctctcatcggctgggttactcgggg

SEQ ID NO: 198727 - DNA, 122 bp, Homo sapiens
ccttgatgaatacgaaaaggaattattatttaccctaggttacagctcgagctatttcgacgtaataacgatcccacgtacactttaaaaagcaaacttctcacatacatcacttcctggaa

SEQ ID NO: 198728 - DNA, 122 bp, Homo sapiens
aacggagcctggagagtaagagagctaagctgcaagccaccgcagctcctgcagaagaagcgaggcagacggcccggaaaccacggtgctgtcgtcgagggcgattctggaactggaaaaat

SEQ ID NO: 198729 - DNA, 122 bp, Homo sapiens
ccacctccctgggcacatctgtgtcctaagatatggtcattagacccactggaatgtaagcgccatcagggcagcgaccctgtctgctgtgatcacagctatgtgcccagcacagggcctgg

SEQ ID NO: 198730 - DNA, 122 bp, Homo sapiens
cgctccggtccggcttcctggctgctattaagatgttgcctgcggccttctgggaagtcgcgtggctggtctcgcgggaagatgtgacggctccgccctctggcccgtagcgtcagccttgg

SEQ ID NO: 198731 - DNA, 122 bp, Homo sapiens
cttgatttttgtcctggtctccatccctcccatacagcctgctagatccagggaaggtgacgccaaggaatagattctaattatcttagccaatcagtgtattgaattggatctgataatgg

SEQ ID NO: 198732 - DNA, 122 bp, Homo sapiens
agcaaatctagcctgagtcctgtggattccagggctgctcaggagacgcctccatcctggcgtggatgacctcaggatcagccccgtctgccccactcagcccgcagcctggtccccgaaag

SEQ ID NO: 198733 - DNA, 122 bp, Homo sapiens
agccccggctaccccggagaagcctgacttgagaaccctttctgcagagtcccggcagtgcgggactccggtagccgcccctccggtagccgcccctcctgcccccgcgccgccgccctata

SEQ ID NO: 198734 - DNA, 122 bp, Homo sapiens
ctgcgccgccctgcacgccctctacagcttctgcttgccgctgcgccgcgcccaccgctacgacctggtcaacctggcagtcaagcaggtacccaccccatgcccttcctccctctggcaac

SEQ ID NO: 198735 - DNA, 122 bp, Homo sapiens
gtgtggttgctgttggaaagcagtggtgtgagctggttccaggcacgggtgtggagtccccgggcagggccgtgggaggccttatcactgcctcctgcctcagtttccccctctctggatga

SEQ ID NO: 198736 - DNA, 122 bp, Homo sapiens
tcctttttctttttctactctaatgtttcctttggatggggcgaattctagtattgttagcgatcacctatgtaacttttttgcaggtggtgtaaatggaatcaatgaatgcttaaaaccaa

SEQ ID NO: 198737 - DNA, 122 bp, Homo sapiens
tccatccctgtagcacaaaggggcgggacgggtgtgactcagccctttctctgcatacaccggggagtccacagtcccacctcttggctcaggaaatacatagtgtctgtagaagtgctttt

SEQ ID NO: 198738 - DNA, 122 bp, Homo sapiens
tacaggcatgagccaccgtgcccagccaggtggagcctcttctgggagcagcaggcttcacgtggcttcctgaccaggctaagagatgagagaggctgttcccactgtgcgtctcctgcctg

SEQ ID NO: 198739 - DNA, 122 bp, Homo sapiens
cagcctgggcgacacagggaaagcccgtctttcaaaataaaaaccgcacagttcacagcacgccagccgcagacaacgaagcggagcaaagagcccctgggaaggcagaggcaccgaaggcc

SEQ ID NO: 198740 - DNA, 122 bp, Homo sapiens
ttgagggagggggatcaatcagaaagaggagtaggcccgcggccagtctgattagttgctcgaggggaccactccgaggtactttgatttttcaactgccacgcagaaaaaggaggggttga

SEQ ID NO: 198741 - DNA, 122 bp, Homo sapiens
cctgtctcacaggaactgcaacaaaatgggtgtggaacagccaccaccacgtccattgaacgacaggaagggagaggccctgggctccgaccctgggccttaagagggtgacagttcttcct

SEQ ID NO: 198742 - DNA, 122 bp, Homo sapiens
ccaccagcagagggaagggcccattcttataaggagaacaaactctccattgcacaaaagcggcttctttttttctctccgtctttgcacaccatccctcctcgataagtatcaagttctcg

SEQ ID NO: 198743 - DNA, 122 bp, Homo sapiens
gaagcctacaaatgcgcatttccaccaggataccttgtggattcttacacgggtcaggtccgctgacgtttagcacgcctactttaaaacctcttttctgtagggtcctagtcttcaagtaa

SEQ ID NO: 198744 - DNA, 122 bp, Homo sapiens
gtcgcgctcgcggctgacgggcggccgggatcagcagaagtgggcggggtggccgcctctcgcgacagcccgggcctgccgggcccgtcccccccccactgattggctcaggcggcccgttc

SEQ ID NO: 198745 - DNA, 122 bp, Homo sapiens
caggtccctgcagcctccgttctcctccagcccccctcactccctgctactcactgcctgcgtggcgcatcctacagaggtcttaccatcctttgtaatcacatatttatgtgactggctcc

SEQ ID NO: 198746 - DNA, 122 bp, Homo sapiens
cctgctgtctactccccaccttcggtgagcggccgccatggtggagcagggtccgagccacgtcctgcagggcacgtctggggcatttcctgttttgtggtaggaaatgtccctgacctttc

SEQ ID NO: 198747 - DNA, 122 bp, Homo sapiens
ccccagtgctccgcagctcatcctgcccagggatcccgtcgagggtcccactggccgtttcgtcctgtcgcctcctcaggttcctctgggccctgagcttctccgactctccttgtctctga

SEQ ID NO: 198748 - DNA, 122 bp, Homo sapiens
ggcgcgtgccgctttttaaaggggcgcagcgccttcagcaaccggagaagcatagttgcacgcgacctggtgtgtgatctccgagtgggtgggggagggtcgaggagggaaaaaaaaataag

SEQ ID NO: 198749 - DNA, 122 bp, Homo sapiens
cgcggtgcgactgaggcgtggcgtctgctggggcacctgaaggagacttgggggcacccgcgtcgtgcctcctgggttgtgaggagtcgccgctgccgccactgcctgtgcttcatgaggaa

SEQ ID NO: 198750 - DNA, 122 bp, Homo sapiens
gagccctcgcggcgcaccctgccctctcctcgtggtgactctggatcgtctaggccctcccggattctgactcaggaactagggttctggcgttcttcacctttgggaggtggcggaaagtt

SEQ ID NO: 198751 - DNA, 122 bp, Homo sapiens
accccaccctgctcatagacgtggaggtggcactcctgcccaaggaggagctgggagccccggcgccagcagtgacacatcactgagacagaaggagggcaggtcttggcattgagtctgga

SEQ ID NO: 198752 - DNA, 122 bp, Homo sapiens
tgcccgcgctcccgaggggggcgcccagtgggctcgggatttcctggctgcgccaccgcgcgcctcgcccccgacgcccgccacctgtgccctgggccgccttccctgacgccagcggccgg

SEQ ID NO: 198753 - DNA, 122 bp, Homo sapiens
tcgatgaataaggattaggctgcccaaacactcctcgtccctccggcccgaacgggcagacgcattggcccgcgtctcgcccagccttcagccgttctcggttaacagcaagcctgacagcg

SEQ ID NO: 198754 - DNA, 122 bp, Homo sapiens
cgtcacgcacgccgacagacgtggcggcgccggagtcctaggcgcgcaaggtccagttcccgtcttgggcctgtcctggatagcgttagggagacagttcacaggctcttcaatcttcgagc

SEQ ID NO: 198755 - DNA, 122 bp, Homo sapiens
tctcagttaatcctcccacccccagttcatgttgactacagggctgcttgcttctgtcatcgaaatctcattgaaattggttatgtctgttctgtgtgtttgtcaagtaagttaatgtacct

SEQ ID NO: 198756 - DNA, 122 bp, Homo sapiens
agggagaggcagagagaggccgcccgggacggggaagccagcaaaggctgaggaggccaccgccaggatccagcaggcccagccccacccccagtggtaactcccgggcaacagctcttacc

SEQ ID NO: 198757 - DNA, 122 bp, Homo sapiens
cagggcctctggaggggccccgcctcccagaatcggggtgtctacctcgcccaccccagccgcccgcctgtggagggagcagcagcttcacgttcacaccccaaactccacaacccctaatt

SEQ ID NO: 198758 - DNA, 122 bp, Homo sapiens
aaggacaggggcaagggcaggggcgcaggccgggcctggtctccgccgtcctcgccgaggcgtcctggggatccccgtccgcctgccccggagcccaagccgcacccgagcgcctggggagg

SEQ ID NO: 198759 - DNA, 122 bp, Homo sapiens
gtagtgtaaggtagtttactgccacagcttgggtgtccatagagggtggactggaggtaccgcttggaatcaacagacagtagtttggggatataatttggaggataatggaggttggtttg

SEQ ID NO: 198760 - DNA, 122 bp, Homo sapiens
acccggctggcgggctgcgagccggtagggacgctggggtccagggctgctggacagccccgccctgtacctctccccatccctcacttaatcctgggtccgaaatagccccgggtaatccc

SEQ ID NO: 198761 - DNA, 122 bp, Homo sapiens
atgccggcagaaggcggcccaggcgggtctgcgaagggccgcgggcttggcagagctgcacgcgaggaacagtgagtgtaattgctttgcggtgattcatctgaagttgctttaaccttgac

SEQ ID NO: 198762 - DNA, 122 bp, Homo sapiens
tgaggtctgagcgcacaaccctgtggggcctggaagtcctggtctcatgccccaggcggtcgcccacacacagtgaggaacaccccaacttcactttcaggggtgctggcaggatggttatc

SEQ ID NO: 198763 - DNA, 122 bp, Homo sapiens
catctttggttatataagggaggttcaggaagccattcgttctttcgcgtctgcggtgcccggagtgtggtacttctcctagttgcagtcaggcttcatacgctattgtcctgcccgtaagt

SEQ ID NO: 198764 - DNA, 122 bp, Homo sapiens
atctttgaaaggctttcttgaatcatatggctaggtttctgaagagtgaaaaacaagcctcgaggtgagggcattctgtagctcaggtgatgagttttgagaactttattgagctccccatt

SEQ ID NO: 198765 - DNA, 122 bp, Homo sapiens
gaataggagccttgaatacagcaggcaaagtgacatttttgccagatgactcccccttttcggagtacaccgatatcagtgggcgagcacacgcctaaagaaaaagacaaggattattttta

SEQ ID NO: 198766 - DNA, 122 bp, Homo sapiens
tgtgggtgttgaggaggtacaggctttcctgcagacctattcccaggaagtctccctcaccgccgactcgcggaagagtcacctgatctttccccagcccaactacgcagacatgctcatca

SEQ ID NO: 198767 - DNA, 122 bp, Homo sapiens
tccgggacggcagcgcacgcaggagcagcccggcaggtggccagtggttttatgccccatcgccggcgccgccggaccgcccccgggcagccttgggcttcaggattccggcggcaggggcg

SEQ ID NO: 198768 - DNA, 122 bp, Homo sapiens
caagttccggggccggctggggaatgcccctgtccaaaggtgatggtcaccagctgtccccggcgggggcgtgggcctcgtagctggtttcagcgcccgcgaacgcccccacgtgtgtggtc

SEQ ID NO: 198769 - DNA, 122 bp, Homo sapiens
acacagctgtagggctcctcctttaaactccccagctctggctgctcctcccctccccttcggtcctgtagtctgcttcccttgggcccttcttggtgccttctggagtcccaggtctcaac

SEQ ID NO: 198770 - DNA, 122 bp, Homo sapiens
aaacacgtcttcacgtagtgacctgtttaagccaagtttcatttgcattgttttgaagcacgtaattcatttctggaacagaacatctgtgcgctgcgttaagtaaagagcccacttctttc

SEQ ID NO: 198771 - DNA, 122 bp, Homo sapiens
tggcatagacagtggccaatcagatgtccgggctgtgggagcggaggccctgggggagggcgggtatgactactgacccctcgccagggcggcacctgtgcagacccagccacgtttagctg

SEQ ID NO: 198772 - DNA, 122 bp, Homo sapiens
ttccctgcatcttcaccagcactgggtgttatggtcgcgttggatttctgctgtggtgcccggtgtgtaatggggcctacacctgcttgcccacctgcttactccttgtcgcccccccaccc

SEQ ID NO: 198773 - DNA, 122 bp, Homo sapiens
gtgcagcggcggcagcgtgggagcctcgtggccccaagccacatggctggcagagtgcagcggggaggtagagtcttgttccactgaggacgttggttcttcggcatcttctggggggcttt

SEQ ID NO: 198774 - DNA, 122 bp, Homo sapiens
gggcttccctgacctctgcactcacggtgggggcgcgcacagcaggggtagacactggcccgccatatctggagctgaagtagagcccgtcttgggctcgcttagcggagaccataggtgga

SEQ ID NO: 198775 - DNA, 122 bp, Homo sapiens
tgagagtgggcaaagagggaaggaggttgggacctgatacctgtgccaccctggccaccccgctgggccctgctaggactgtgtgctggacttggagccccaagtatggcttttcagatgcg

SEQ ID NO: 198776 - DNA, 122 bp, Homo sapiens
acttgtgtgcaattcctatcttgaccatttttcctgtttcaatttgtccattttctgtttcgtctttgtttgttctacatttaaatttaaaactgtaccctcattgaatttttttaaaagtt

SEQ ID NO: 198777 - DNA, 122 bp, Homo sapiens
ttgacccagagtacatagaatgtggaaaggcgtggtacccttttgcattttgttattcatcgaaacaccagaacaggcaggacaaagtttgcaagcccaggagagactttcaacagcaacct

SEQ ID NO: 198778 - DNA, 122 bp, Homo sapiens
accgagtcctgggccttgtcaggggcggccgtgaggcgccggttgctgggggagcggtgacgtcgcggggtgaaagttgaggggcggtgacgtcgggccggcccgggcggaggctggcgggt

SEQ ID NO: 198779 - DNA, 122 bp, Homo sapiens
ggtcttaggaaactgagcatgtttcacgtgtaattagggtgagcacactgattcaagcatcggcccttacgcaaggtttccaaggcattgcgtcgggtttagctgggcatactcttgtttcc

SEQ ID NO: 198780 - DNA, 122 bp, Homo sapiens
ttcttcctttttaaggcagagccatcttccactgtatgcgcgtactacattttgtttattcgtcgtttgtctgcagactcctgggtcgtgtccgcctcttggccgctgctggtcgtgccgcc

SEQ ID NO: 198781 - DNA, 122 bp, Homo sapiens
catgattcgatgtccctgtccatcacggcgagtcggctcatgctccatcgttgcacaccccgacacagctaagccacagcgttccccttaaagccagtataagtgcatggaagtgtatacat

SEQ ID NO: 198782 - DNA, 122 bp, Homo sapiens
tggaggacttaaaataatcgatgtgttctgcaaggatgctcagaaaggccgcctagagaacgccctggtacggcaacgaccacgcagcgccacagccacacctgactcgggaatatctggac

SEQ ID NO: 198783 - DNA, 122 bp, Homo sapiens
agtcctgcattatttgatggtaatggatttgcaggagggggatctgatttggaaggaacacgtgagtagaatgcacaggagttggcaaccaattggttttaggggacgagagagaaggaaga

SEQ ID NO: 198784 - DNA, 122 bp, Homo sapiens
cggccaggccccttctcctgtggtgtgggcctccagccccaggagcgccaggagctctggcgccttggtcccttcctcctgtccggcgcccccagctgtactctgcctcattaggagtcgac

SEQ ID NO: 198785 - DNA, 122 bp, Homo sapiens
acgcgcgcatcctcgccttcttgcagtccaaggcccgcctgggcgcggagcccgcctttccgccgctgggttcgctcccggagccggatttctcctatcagctgcaccctgcggggcccgaa

SEQ ID NO: 198786 - DNA, 122 bp, Homo sapiens
gaggtgctgcgatgctctcaggcgtgtgcacatttgcatacgggctcgcagaccctgacgcggcgtcgggcttgtcacttttaagcacccaattaattgacttgacggtgcggtgagcttcc

SEQ ID NO: 198787 - DNA, 122 bp, Homo sapiens
cgtgagtgtggcttgtatttctggtcctcccctgcttcactgctttcattttactcttatcgtgctttccagaaagtttgcctgctgggagagtctttttgatcgtttcccatgtgttgtca

SEQ ID NO: 198788 - DNA, 122 bp, Homo sapiens
tctatctgaatggcaaatgtctgagtttatcaaaacaatcgataaattgcatttccaggccgggtgcagtggctcatgcctgtagtaatcccagcactttgggaggctgagatgggcggatc

SEQ ID NO: 198789 - DNA, 122 bp, Homo sapiens
gactaaggaacgcaccccgccgactctgctcccgttacccgggcaactggaggcccgacccggaagtcctactagctcacctaggcgccggcggccgcttccaagatggaggctgcagtggg

SEQ ID NO: 198790 - DNA, 122 bp, Homo sapiens
cctcctcccaaaggtcagccaatcctccaaacacccccatctaccacattcctgagcagacgggcctgtgcttcaggcaggtaataggtaaaataaagcctgctatccttcaccccacaagg

SEQ ID NO: 198791 - DNA, 122 bp, Homo sapiens
tgccgacacttggatctctctagctctttctctcccctgtgttttcaaacaggaagtgcacggctgtctataacgtgctgccgggtctcaggatggaggagtgaagtctcctgtcgccgtgg

SEQ ID NO: 198792 - DNA, 122 bp, Homo sapiens
aggcttcctccttctccaccttcacggtcaggagccccgtctggtcttctgcagactgggcgtccagggctgcgttttttctcggttctctagccattctgacccaaggcagtactcgggtc

SEQ ID NO: 198793 - DNA, 122 bp, Homo sapiens
aataggcatggagtgctgtgccaggtcccagtagaggggcgggagaggaggccatcttggcggaagggagaaaggagtggagctgcaagagagaacaacctcccaggagtgcgcagagccct

SEQ ID NO: 198794 - DNA, 122 bp, Homo sapiens
aatcagaggagtctggtgatagttcagcctctatttttgtaaaagaggtgggcgcagtctcgcccctggccttgcagggtgacagcttgttcccaagggcttgaaaatgggttggtgttccc

SEQ ID NO: 198795 - DNA, 122 bp, Homo sapiens
cgggcaggaaggatggcctctccacctgtctgcgaatgcagcccagccagtttgagcctccgcagagggtgcgctccgggactgggcgcttctcgtgctgtgagaacgctgggccttgttag

SEQ ID NO: 198796 - DNA, 122 bp, Homo sapiens
tcgccatccccaccaaggaggaaacacatccgctggggagttgtggagcacagcctgcagcgtgggggtggcggcatcgtgggagcagggggctgaggtctccctacctaagaggacgcccc

SEQ ID NO: 198797 - DNA, 122 bp, Homo sapiens
ggcggagaaagaggcgaggccccgccccaaggactaccaataaatgggcgaagttggaatcgcccggatgggttccgttttatgcaaattttagccgaagaccacacccttcctcattccaa

SEQ ID NO: 198798 - DNA, 122 bp, Homo sapiens
cagcgaggatccatccctgcctttcacccatgcacctttcagcaaggtacctaacctttacgaactctggttttctcatcccagaaacgcaggttggcgtgaggatttagtgagcgcatgca

SEQ ID NO: 198799 - DNA, 122 bp, Homo sapiens
gaataaaaattcctggcagcacgccagctcggccttcccacattagtacggccgtaataacgacttgggagtaataatccaaaaattcggatgtggagagggagatgacactgcatcacttt

SEQ ID NO: 198800 - DNA, 122 bp, Homo sapiens
gtctgacgcgtacttgaagcgtttctcgcagtctgggcacttgagtggcttctcgcgggccggatcgcagcggtgctgcacgaactcggaagaggagaagaagcggcgttcgcaaagcgtgc

SEQ ID NO: 198801 - DNA, 122 bp, Homo sapiens
tgagagccaaaaaaagtgctataaacctaatttggctagagcaagttcacacgacacgaccgtgctttaaaaacttgctctccattatgtacttccttccatcaggttggggaaaaaaaaat

SEQ ID NO: 198802 - DNA, 122 bp, Homo sapiens
cccctcaggatcccgtttcctgagcgcttttctccctgggctgcagaggtcagcacccagcggccggcgctggcatttcagatgtccaggccaactcctcgctgtcacgtggacgcagggag

SEQ ID NO: 198803 - DNA, 122 bp, Homo sapiens
gactttcctgcaccacggcaatccctcaagtctgcctccctccctgtcctcccatccattcggcttctcttcaaccaggacttctcgtgggctaactgcctggagtccagattcccctgttc

SEQ ID NO: 198804 - DNA, 122 bp, Homo sapiens
ctatgatgccttttgaaatgtaagattaaatctttttctaagatgtaggtacttatgcgacgggtgctttatacaaagcagtagcgtaggggccttaattaaatagtattttaacaaaaggc

SEQ ID NO: 198805 - DNA, 122 bp, Homo sapiens
aaagaccctgctttagtggtggctcgcggctggagtctcagctactcttcaggcagggcccgaagatcgctcgtgcccaggagttcgagactaccctatgcaacatagcgagaccctttctt

SEQ ID NO: 198806 - DNA, 122 bp, Homo sapiens
ttgataccatctataccttgatgattttcaaatcaatagccctagcttggaccatgtattcgtctgttctcacactgctaataaagacatgcctgagactgggtaatttataaaggaaagag

SEQ ID NO: 198807 - DNA, 122 bp, Homo sapiens
aatgaacactctctggagtcccgctctcagtagccatctggatgagaaatgatctcttgccgggagcagtggctcacgcctgtaatttcagcgctttgggaggctgaggcgggcagatcacc

SEQ ID NO: 198808 - DNA, 122 bp, Homo sapiens
tttcggcaagaactggattcgtggcgccacaagctcattcactgtgtaggtgagaccctccgccgaccgccgccgcccctccggccgccccgccgccggtcgccccagaccagggaggaagc

SEQ ID NO: 198809 - DNA, 122 bp, Homo sapiens
ctcgcccggccccacccctcccaccgcctacagcccggccccgcccctgccgtccgcacccgtccgggagagttggcctggcccccgaggctgtccacaccccagctggtgctgggcttatt

SEQ ID NO: 198810 - DNA, 122 bp, Homo sapiens
aggaccgaggagaacattgtatgcacagggttttgctcaggaaagctagcagcccgaaagcggcgcgttttcttcagcagcgggtcccgcacgcgagagtgctgccagcacgctttctgcct

SEQ ID NO: 198811 - DNA, 122 bp, Homo sapiens
cacagccatgtggaaactgaggcatctcaagagtctatgactgggctgaggttctggtttcgagcccagggttccttccaaggcacagggccgtcctccatgcaagaggaggggaccctctc

SEQ ID NO: 198812 - DNA, 122 bp, Homo sapiens
ccacctgtctccccggcttccttccggccctttgtgttttcttctcttgctccgccccctcgcctgcccgctaagcacttaagctggtgaagtcaccctactgccacctggcagtcactttc

SEQ ID NO: 198813 - DNA, 122 bp, Homo sapiens
ggtctagggcaagtatgaaagcactagtgaccttggggagggggaggaagctctgggattcggcgctagggaaaagtggaagaggacaaacttttaaaaaatccgttactgggtataggcca

SEQ ID NO: 198814 - DNA, 122 bp, Homo sapiens
cagaggcgagaaactctctgacctcgaccatttagctataacccccgaccctaacttcagcgctaagctttatctcatgatctactcggggatttcttacagggtatccttacactaaccaa

SEQ ID NO: 198815 - DNA, 122 bp, Homo sapiens
actcctggccctgggttcttgctgctgcccaccctctgctccctgggatgggccccgaggcgagcagcttcagcacaggcctggccctgctccaggtgcaggaaggaggataaggccgggcc

SEQ ID NO: 198816 - DNA, 122 bp, Homo sapiens
cgggtccagatttccagtttgtccttgtgattgattcatgacatcttgagctcacaagaacgttccctgccatcaccactaagtgttcagtggacgttttgggcttttggaaacggaagtga

SEQ ID NO: 198817 - DNA, 122 bp, Homo sapiens
tccttagccaggggccagtttgcctggggtcagtgggcagcgcctgggagtcgagtgtctcgagtggggctctgcttggtttctccttgaaggtctggcagggtcagaccctgcatcggcag

SEQ ID NO: 198818 - DNA, 122 bp, Homo sapiens
ctggtcattaaacaggagctttctctttctaattaaagctttccctgacagagttgccttcgagcaggtgtactgaagttcctttgaaatgatgaaatgggagaagcaagtgagtctttata

SEQ ID NO: 198819 - DNA, 122 bp, Homo sapiens
gctgggccagtgatttgcaagaggggacgtggcctcttaggagagtctgtcacagacacccgggcccggggaaggcggggctccggcggtgtccacaggagagggtgggcagagggtggctg

SEQ ID NO: 198820 - DNA, 122 bp, Homo sapiens
gaatttccttatttaaaggattgttttaaattagtacttgaaagatttgatccagttgcacgtaaaacactttaactgggtccctatcgtgagccagctctgtgctggtcagtgatgtgttc

SEQ ID NO: 198821 - DNA, 122 bp, Homo sapiens
tgttacagatgagaaaaccaaggtacaaatatatatatatatatatataacaaaattagccgggcatggtggcgcattcctgtagtcacaggtaccttggaagctgaggtgggaggatcact

SEQ ID NO: 198822 - DNA, 122 bp, Homo sapiens
aagccacggaccctcacggtgagcgttacagctcttaaaggtggcgcgtccctagttattcgttcctcctggtgggttcatggtctagctgacttcaggaatgaagccgcagaccctcgcgg

SEQ ID NO: 198823 - DNA, 122 bp, Homo sapiens
agaaaaactggcataagctgttgttaaatctgtgccccttctcctcggttgactggagtacgagttttaacattttgccattttgactttcctttctgggtcccctgggtcctctcctccca

SEQ ID NO: 198824 - DNA, 122 bp, Homo sapiens
gtggaaagatgactgtaagtgggggcaacctcagctggccttgggtttgaccatggaatgcgaggcacaaaggggcccattttgcatactttctcagaggctgtagggcacccctgccaggg

SEQ ID NO: 198825 - DNA, 122 bp, Homo sapiens
atggtctgcatggcacagtgtgtggtctgtatggcacagtgcatggtccgcatggcacagcgcgtggtccgcgtggcacagcgcgtggtccgtgtggcacagcgcgtggtccgcgtggcaca

SEQ ID NO: 198826 - DNA, 122 bp, Homo sapiens
acggatcaaatacccacgagggcctgcctgacgcaggctgcgcagcttgacgccccattacgtgcgtgggaggagatccttaggtatttggtaactaaaagaatgaactgaaagccggggag

SEQ ID NO: 198827 - DNA, 122 bp, Homo sapiens
tctgatctgacaggaggtgaagctcatgtggtgatgctggtttgccccctgctcatgtcccgctccggctcgctcactgctcacctcccgctcacccactgctcacctcccgctcccacttg

SEQ ID NO: 198828 - DNA, 122 bp, Homo sapiens
acctcaggtgatccacctgcctcgaccattgaaattgccgggattacaggcgagagccaccgtgcccgacccagcattatatttgtaataacggagaggtaacaatactgcctctttagtaa

SEQ ID NO: 198829 - DNA, 122 bp, Homo sapiens
tagggaaaatgttgctttcttgattcagactctttcctctctatccttcctgctgatatacgcctagatgcaatggttggacttgaagcaggcttcctgcaatcatgagacaaggccaagag

SEQ ID NO: 198830 - DNA, 122 bp, Homo sapiens
ctgcgggcttgggccgggccgcagttttattgcgctcggaggattttctgctcctcctcccggtggctggcggccaatgcaggctctgggcgctcccagcagccccctcctccccctccgcc

SEQ ID NO: 198831 - DNA, 122 bp, Homo sapiens
actaaagagcaggcaggtgtgacagtgctgtgtggtccctgcctagatcaagctcacactcgcttccggtcacactcatttacacacacccaaacccattactgtctcccaacatgtgccca

SEQ ID NO: 198832 - DNA, 122 bp, Homo sapiens
tgtttcttcacaccaaggataacacaaccaacagaaaggcagggagtcttattccaaatacgcaggtatccaccttttgattgggttccccagtgattccaggcatcttttggctaaggttt

SEQ ID NO: 198833 - DNA, 122 bp, Homo sapiens
ggagcagcagtttgacttcttgaaggacctggtggcatctgttcccgacatgcagggggacggggaagacaaccacatggatggggacaagggcgcccgcaggtggggccagggcctggcat

SEQ ID NO: 198834 - DNA, 122 bp, Homo sapiens
gcccgctgggggtgacacctctcggctgggagccctgcaggctggcagccactttatgcccgctggggcgattggccaacacctcatgaggtgggtggggatggggaggggggagggcaggc

SEQ ID NO: 198835 - DNA, 122 bp, Homo sapiens
cccagcagggtctcaaccagcgactccccagtcagcaaccggccagcgtgcgtcacgtcacgcagacacggcctctgctccactcagggcccgtttcagccacctggaagccgcagttcacc

SEQ ID NO: 198836 - DNA, 122 bp, Homo sapiens
tagaacagagcccatgccacagctctgggggccgcagagcacagcaggatttagtagggccgtctgggggtcgccgtgctgtgtaatgcggggggcactgggagggaggagaggaaagcctt

SEQ ID NO: 198837 - DNA, 122 bp, Homo sapiens
ctccttagtcgccgtccgtccatcagtacctgcaggggggaggaggaggagggaggaaagcggaaagaggaaaaagcataagcttgagccttccgatccgaccacgaatactcctgtaataa

SEQ ID NO: 198838 - DNA, 122 bp, Homo sapiens
ggcggctaatgcagaattttcttgagccacaggttcctgacctcatccctgaggtccccccggcagctggtgacgaactgcacccagcggctggagcaggggccctgcaaagaactctccca

SEQ ID NO: 198839 - DNA, 122 bp, Homo sapiens
ctcgggaggccaggccgagcatcaggggataggcacggcaggggtgttgccacggcaaggcgtcaggaccggctggggctcccggctgtgggcagtctgtgcctcgctggcatttcgggcag

SEQ ID NO: 198840 - DNA, 122 bp, Homo sapiens
tggccccgctcagcgcctgcaacagtccggtcctgacccttaccaaagtggaaggtaatgcgcggccgcctcgccccgggggtccctgcaccctagccggggaatgctgccaccctgagggg

SEQ ID NO: 198841 - DNA, 122 bp, Homo sapiens
agagatgagcctttcttatttcaaaatacatagcacttcttggccaggtgcagtggcttacgcctgtaatcccagcactttggtaggccaaggccggcagatcacttgaggtcaggagttca

SEQ ID NO: 198842 - DNA, 122 bp, Homo sapiens
tgttagaattgtgctattttttttgagtctcgctctgttgcccaggctgaaccgcagtggcgcgatcttggctcactgcaagtgattctcctgcctcagcctctcgactagctgggattaca

SEQ ID NO: 198843 - DNA, 122 bp, Homo sapiens
tcataaatcattcaggaccatccttttggacagaggtgtgctccccctgccaggttggaacgattggttcaaacagcctcggcatgcagtcactgatgcgacaagcgatgaagttctattgt

SEQ ID NO: 198844 - DNA, 122 bp, Homo sapiens
ataccaatctcatcactgtcaaagtcatctgagtattcagaactcctttgtctggctgagcgagctgtaattgctcttattagctcatcctgaaatgagatactgaaatcaatttccatcca

SEQ ID NO: 198845 - DNA, 122 bp, Homo sapiens
agccgcgcagcggaacaaactcgccgccgccgcccttcagcgactggggccgcctggaggcggccatcctcagcggctggaagaccttctggcagtcagtgagcaaggagagggtggcgcgt

SEQ ID NO: 198846 - DNA, 122 bp, Homo sapiens
atgaaacaatccatgtaaagttctcagcatgaaaccagcatctgcacctatacaagcaaacgtaaaaagtgggcaacggtgctcggtgttcatccatcggcaccgcgggcccctgacgctgc

SEQ ID NO: 198847 - DNA, 122 bp, Homo sapiens
tctgccccacgagggcccagcacaggtggcgcaggtggtccttttccccactcggcggcacgtggctctgtggcaggtcctgaggcacccacatgccacgtacagacattgggacacgtggc

SEQ ID NO: 198848 - DNA, 122 bp, Homo sapiens
acgccactgacgggcattgacttcgtgaagcggctgccgtgtggcgatgtggagaagacccggcgggtgagtgagcacaggacctgtcatctcctgggccactgttctccagaaccactccc

SEQ ID NO: 198849 - DNA, 122 bp, Homo sapiens
atcctggtagtgatggcttagggtggtgttccctggtccgaagcccggagctaagggcaccgggtctgcggtgcggctgcgaggagcagggaagcgcaggcccatggcagccgcgaggcgga

SEQ ID NO: 198850 - DNA, 122 bp, Homo sapiens
gggatggagcctggaccctgagctggctttgtttacgcagccgcctccgcgttacgtaagcgcaggtgagtgctcctatcggtaaagcgctcagctgcctgtctgtcttcctggaaccagga

SEQ ID NO: 198851 - DNA, 122 bp, Homo sapiens
cagagacatgaggctgagctggttccgggtcctgacagtactgtccatctgcctgagcgccgtggccacggccacgggggccgagggcaaaaggaagctgcagatcggggtcaagaagcggg

SEQ ID NO: 198852 - DNA, 122 bp, Homo sapiens
acgggccccagttcggctccgaggtggagctgagacactcctgaggtgacccggctgggtcggccctgcccaagggcctcccaccagagactgggatgggaacactggtgggcagctgagga

SEQ ID NO: 198853 - DNA, 122 bp, Homo sapiens
ttacagttgaaaaaccagacacacaggtatctggggcgcccggggctgcacacctcagttcggtattctgcacacacacagctcgcctggtcgggggatgggggaaaggggaaacacaacct

SEQ ID NO: 198854 - DNA, 122 bp, Homo sapiens
gggaccccacgtgcgccccggcccagcctggggaccagccgctgcagcgcctggcgtttacgctggccaacgagccacagacagtcctggagaagcccccgcccaggttcaggcggcgcggc

SEQ ID NO: 198855 - DNA, 122 bp, Homo sapiens
gcaaaaccgttttcacaactcagctcccaatgtgaaattagtttcatggtgactgagcaccgtgtgctgcccgaatttctcaccaacctcagacgctctcgttttcacgtgccacggagcta

SEQ ID NO: 198856 - DNA, 122 bp, Homo sapiens
cgctggaggggcatcctgagactccttcctcatgctggcgccgatggctgctggggacagcgcccctgagctgcaacaaggtggaaacaagggctggagctgcgtttgttttgccatcacta

SEQ ID NO: 198857 - DNA, 122 bp, Homo sapiens
gctggatagaggagaggagggcagagtgaggctggctgggcccgggcggggaccagcccacggtgccatctcagaacatcagggcctgtttgactccatggcgttctcaggcggcccctctg

SEQ ID NO: 198858 - DNA, 122 bp, Homo sapiens
gagcttggagctctaattagtgcccgacggggcatctcacccaccacgggagggcaggggcgaggcgcagcagcaatgtctcggagctcccctgcccatccttgggtccagctgtgaggaca

SEQ ID NO: 198859 - DNA, 122 bp, Homo sapiens
ggagtccatgcccggggacctcagccagtcctgcagcctctggtcccccatggtggccctcgctgtggtgccacgtctccagcttctgaggtcccagatccctgccgctctagtcgctagga

SEQ ID NO: 198860 - DNA, 122 bp, Homo sapiens
catgcgggggcggggggctcatgcgggggcgggggctcatgcgggggcggggggctcatgcgggggcgggggctcatgcggggggcggggggatcatgcgggggcgggggctcatgcggggg

SEQ ID NO: 198861 - DNA, 122 bp, Homo sapiens
catcagcctgtggcaaaactagagctaaacccaggtctggctccaactctgggattttttcggaaattctgctctgtccttgaagggttttgagcaaggacttatgtaattcacatgttagc

SEQ ID NO: 198862 - DNA, 122 bp, Homo sapiens
ttctagagaagggcgaaggctgtggttgttctgggtttagctgttcacgccgaagatccccggcctgatggccaaaatggaggctatttttcgcgggcattatcactcagacaccacgcact

SEQ ID NO: 198863 - DNA, 122 bp, Homo sapiens
tacacaaccttatgggacctgtctgcccttgtggagatgggagcaggggaagaccaaaaccgtggattgtgctaaatgctccagatgttgttctcagtgtacactgccagggaggagccact

SEQ ID NO: 198864 - DNA, 122 bp, Homo sapiens
ctcgtcgtcctcggggatgcggaaggggctggcaggcaggctgcccaggctgccgccgagcgcgcaggtcccgcgccgcggtccgggccccgccgcggggtaatagtagctgtcatagctgc

SEQ ID NO: 198865 - DNA, 122 bp, Homo sapiens
acttagagcttccaacagcacaatcctcctaagcgcttctgccccatccctggtctggggcgacattggacacccatcgagaggaaagcacctccgaggttcctagagaggccggcttggcg

SEQ ID NO: 198866 - DNA, 122 bp, Homo sapiens
tttaaaaaatcacatttcttggacacagatttctgacctttagccggcggtctgggtctccgctgcatagagaatttacagatactttgaatgatttccaggctgggcttaagttattcatc

SEQ ID NO: 198867 - DNA, 122 bp, Homo sapiens
caatgaagaggatggggaaggtgatgaagagtaggaagacgtgcggcaccacgttgagcgcgtccacaaagcagccgttgttgaggaccccctggtccacccggtaggcggccgagtggttc

SEQ ID NO: 198868 - DNA, 122 bp, Homo sapiens
ccttcaccgaggcggcgacccaggcttagttggggaggctgctctgccaccttcggaaggcgggcctctgtgcccgcccggccaatcgcgagcaacctctccggtgtgggcgggtagaagcg

SEQ ID NO: 198869 - DNA, 122 bp, Homo sapiens
gaggccaccctgctcagggctgggtgccaggccacagggcatgcccgacgaacagggagtcggaaccccctcaggccaccctcgggagtcctggggtccagaggggtgtccctgtacccctt

SEQ ID NO: 198870 - DNA, 122 bp, Homo sapiens
cacggatctcgaagcatcctgcgaccccctggagcccgctgcccggaccctgcggcgtctcgcagcgcagcctccgccgcagtctcagccagcccaaacacccgaaagttcggcggccccgg

SEQ ID NO: 198871 - DNA, 122 bp, Homo sapiens
gccttcatgctaagtaaagggtggcacctgtcctttaagcagacacagcccctgccagagcgtgtgacttggagaacacaaacgggctcccactcatccactccacagctctagcagaccct

SEQ ID NO: 198872 - DNA, 122 bp, Homo sapiens
gtggcagcatcacagtgtctggagggccaggtacacatccaagtgcacaccgtcatgcagcgatttagagacgggccccaacctctgcaggcttcagccttggattgtgaacagaggggaca

SEQ ID NO: 198873 - DNA, 122 bp, Homo sapiens
aggtgccacgcctgtcactccccagcgctgatttcgtcccagcaccttcctgataatcaccgcccagcaccaggctccaaaaggagcggaagccccgcccatctcccagcccctcgctctcc

SEQ ID NO: 198874 - DNA, 122 bp, Homo sapiens
cgcccccttaccagctggagcaggaagccccagagtagggcggccccggcaggggacagccgccgctgcggccccatcggactggtgggtgccgggtgggacggcacggtgcggcgcagctc

SEQ ID NO: 198875 - DNA, 122 bp, Homo sapiens
tggggagcatgagaaatacacggaggtggaaacgccggagtggctggcgggtaaaggcagcgggcgcagatgaagcgggctgggcgtcccacgcgcagaaccgtcccggacagaagccgcag

SEQ ID NO: 198876 - DNA, 122 bp, Homo sapiens
tgtcctgggtgcgcctcgggccgctgcgctcctggccagctccccccagcgcctgggaggcgacccccagtgcgcccgggttcaaaggcccggcgaggcagttccagcccctctggggggcg

SEQ ID NO: 198877 - DNA, 122 bp, Homo sapiens
gctgcagcctcagcctaggagcccggcagagcccaaaggttccgtggttactcccagtttcgccaacgcggggcctgccagcgtcccactccagtggaagcacttgtgaaaatgcagattcc

SEQ ID NO: 198878 - DNA, 122 bp, Homo sapiens
tgccatcactagaattggctctgatattgctatctggcaagtggactagtgcagtaacaacgggtccagaatgctgtaaactgttcatatgggtggaggtgaccatgcttaaaagggagatg

SEQ ID NO: 198879 - DNA, 122 bp, Homo sapiens
tcttgtcctccacacaggcctgaaacagcacaggactggggaggtaccattggaagcacccgcaaccctaaaggcactgaccctaacctcacgtctccccactagggagagaagtctttttt

SEQ ID NO: 198880 - DNA, 122 bp, Homo sapiens
gcgggcaccagtccccgagctgggggacgccctttatttgttcacaaacatttctttctgcggtaatgaaaaattaccaagaggggtgattagagaatccaggtccagattgtgtgtgcggg

SEQ ID NO: 198881 - DNA, 122 bp, Homo sapiens
gagtgtggagcaaaacgtgggtactagggtgggaggcggggaaaggccacagcacactggcgctccagcaaagccaaatcatgtctcctctggccactgcggtcctctccttggtacatgtc

SEQ ID NO: 198882 - DNA, 122 bp, Homo sapiens
ggggagaagaaagttagattcctggcagatgtcaccagccgaagccttctatgaacaaaccgggggaatttcacaatgctggaagcaaacaaatctctaagctcagcaaaccaacgggctcc

SEQ ID NO: 198883 - DNA, 122 bp, Homo sapiens
ctcccaagaacgctccaaactctcaaagtcagatcttctgcacccgcacttttcattgggcgaaagggagccaggatccgccccacgagcaggaggcagccaatgagagacgcgcgaccaaa

SEQ ID NO: 198884 - DNA, 122 bp, Homo sapiens
ataccagggctcttctcccagctgtgcagtcgtgaccaaaaccacttgggcttgagtctccgtggcctctagagtgaagtgcggatggaacaacagccactggaattgccgacgggtgcacg

SEQ ID NO: 198885 - DNA, 122 bp, Homo sapiens
ccgggcagggacaagtggcactgaacaggccactgtgaccatggtgtcatcagaggacatcgagatcctggagcatgcaggcgagctggtcatcgcctcgccggagggccagctggaggtgc

SEQ ID NO: 198886 - DNA, 122 bp, Homo sapiens
gttcagagggagaaaaaaaaaaagccttagtcgcgattctgagcaaaaacggcaatgcgacgccacgctctcttgagcctcggccaatcatcgcccttacaggaagtgacgttatcatgcct

SEQ ID NO: 198887 - DNA, 122 bp, Homo sapiens
ttacatctttggggagagggcatacggggagctacatttcattttcctgaagattttccacgcgaaagtgctggggagagagttgggcctgggaggctgcgccttcttcccgcgaatcccga

SEQ ID NO: 198888 - DNA, 122 bp, Homo sapiens
cgtgctctgcgcaggggctcctgcgaggccctagtccctccctgggagctaagagcaggacggaggctgtacctgactgctgcttggagggaaccctggctgagtccagggaggaggagcca

SEQ ID NO: 198889 - DNA, 122 bp, Homo sapiens
cggcaggaagactggagatggcctgagcctgcagctgccggcgcgcggacgcgtctggggcggttcgccttagccaagtggaaagagactccgcgccgcgggctacttaatagagggctgtt

SEQ ID NO: 198890 - DNA, 122 bp, Homo sapiens
aaacctgtggcttcccccgacagatagggacctgagatctaaatcgatctcaggctatctcgtgttttattgagaatcacagaacgttagtgcttgtagaggttattggagatactttagtc

SEQ ID NO: 198891 - DNA, 122 bp, Homo sapiens
cgggcttggcgggcgggttacctgggggaggccgggccgggcgctagcgcgcggggtgggcgtggcgggcgcggggcctggagctcggcgccgggcgtgggagccactgggactactgggtc

SEQ ID NO: 198892 - DNA, 122 bp, Homo sapiens
gcccgggggctgagcggccggggcgtcccaccgccggcagccacagcttcctcctccgcccgggacctctggccggaagcagtccgttcgccttactagacccgctccaagcctttgagcag

SEQ ID NO: 198893 - DNA, 122 bp, Homo sapiens
cccagagtccagttttaccttcatgtgcctctcactcacttcaggcccaggccaggttaccgcaaccacttcactttaatgtccgcctcccagcgcttcagactcaaccacaatattcaaac

SEQ ID NO: 198894 - DNA, 122 bp, Homo sapiens
acactgaagtttccggttccaatgtctttgttgctttttctaattttttggctgagagctcgtgtgctttcctcctcccaggggttctgctgagcaggcctggttggaagagatcccaggcg

SEQ ID NO: 198895 - DNA, 122 bp, Homo sapiens
tgactgacagacattgtaaccaattacaaacttgaagtgaccttggctttcgctgtacgtcgctaccggagccagtaaaacagcatttcagacgctttttttttgcgacggagtctcgctct

SEQ ID NO: 198896 - DNA, 122 bp, Homo sapiens
atctcgaggcaggcgagccagagcctggcgctagctgagggggagccccacccctctctccggtggctccacgtggctccgtcaccacgcatgccccgccacacatcaaacgggcacgtaag

SEQ ID NO: 198897 - DNA, 122 bp, Homo sapiens
aatgtgccaggagctgaggcaagatcctctgtctgcagacgaggaaccgtttctgatcttcgccaaccggtactacctgcgcaagctcaacctggacgggtccaactacacgttacttaagc

SEQ ID NO: 198898 - DNA, 122 bp, Homo sapiens
tgagactgtgcggcccggctccctgtgttacctgtatgtaccacgttgtcagtatccacacgtggaggggccgtgagaccgtgcagcccgcttccctgtgttacctgtatgtaccgcgttat

SEQ ID NO: 198899 - DNA, 122 bp, Homo sapiens
ccgctgagctcctcctcgcacgagtaccagatgccggtgtggaaattcctgaagaggaagcggtcgtcgccggtctcccagctgtagagcgcgccgccaggggggccgttccccgaggcggt

SEQ ID NO: 198900 - DNA, 122 bp, Homo sapiens
cgtagctgcctgttcctgggcccaaatcgaaacgaaaacgaggactttattataaaaaaacgttggaccacgttgggctgggcaccaggacagtgtcctggcacgtttccaggcgagccgcg

SEQ ID NO: 198901 - DNA, 122 bp, Homo sapiens
aaaacattaaaataataatggaatgattgaaataataaacatttttcttattcaagatttcgtcatggctattgtaaaggaaaccctaggaaaatggtgaaaacttgggcagaaaaagaaat

SEQ ID NO: 198902 - DNA, 122 bp, Homo sapiens
cagccccttcaacctcccacactacagcccctcctacccgcccatcacccgctcacagtacgactacaccgaccaccagaactccagctcctactacagccacgcggcaggccagggcaccg

SEQ ID NO: 198903 - DNA, 122 bp, Homo sapiens
agcagaggcagctgcggggagctgccctcctggccagggcagcaggtaaacaacagagggcgcctgggcctcagagcccacccaccctcagccactgcaccaccggccccctagcttgatcc

SEQ ID NO: 198904 - DNA, 122 bp, Homo sapiens
gcgccggagctcacaggtctcgccttgtcccgaaagccccgcaatcgaggcggaggcgaccgagcccccgactctcctagaacgttgccacaagaagggggaacgtcggaacagtgcatcat

SEQ ID NO: 198905 - DNA, 122 bp, Homo sapiens
tctcggcatagcagatccagcctgaggtgacagggggcacacggggctggcgggggcgcacggcggcccccgcacccacaggcagcagcacgacattctgggggcgggcccgctcatacagg

SEQ ID NO: 198906 - DNA, 122 bp, Homo sapiens
aggctggagggcagaggcacattcacggctcactgcagccttgaccttctgggctcaagacgaagaaattggggattggcttaagtaattgcccaagtaattgcttaagtaattgcccaagt

SEQ ID NO: 198907 - DNA, 122 bp, Homo sapiens
gtccgcgggctgcgtccctgccctgtggccgagactgtgacagtctccgcagttggcagccgagtgcactgacacttaggctgagtccgcaaacagaaaagcaccaaatctcagtggctcca

SEQ ID NO: 198908 - DNA, 122 bp, Homo sapiens
gacctccctgggttttatatgctctgctgacagcatgtgatgtgcctgccaccctagaggcggggttggtgctgtcttcctgtgcagggtggccctgtcccatgttctgagttcattgacat

SEQ ID NO: 198909 - DNA, 122 bp, Homo sapiens
cctgctggaggcttactctgtagcccggctagccagaggcgcccagtgggcgggagacggcgtagaggaactgaggaaaggacaagggcggagagagagaagctggcggcactgcccgtctc

SEQ ID NO: 198910 - DNA, 122 bp, Homo sapiens
tcccgtgccgcagccgccgcctcagcaccgaatccagtatcttggcgtggaacttccgcccgccttctccagctacttccgccaggcgcgcgccccacagcgacctggaactacaactccca

SEQ ID NO: 198911 - DNA, 122 bp, Homo sapiens
gctgccctcccctccacaggctgggcaggcaacagaaaagcagacttcaggagcaaaaggcggaggccccagaccccagctctcccagagcagaatggagcagaagggacgggccggtcctt

SEQ ID NO: 198912 - DNA, 122 bp, Homo sapiens
ggaggggatgggccgaggtgcaggatgagggaggctccatgtgctggggcctcacacccacgtttagagcacgctatttgtctttggccatacgctgctgggtttggaaaccgggttctaat

SEQ ID NO: 198913 - DNA, 122 bp, Homo sapiens
cagcgacgggtttggggctccgggaggggtgggggggcagcgggcggcggcagcagtggccgcacatctggatggaagcgagctttgtccagaccaccatggctctggggctgtcctccaag

SEQ ID NO: 198914 - DNA, 122 bp, Homo sapiens
caggcctagggctgcagattcaccatctgtgcaatgaaggacacagacctggactgctaacggtcctgtcacctatgagagccgctgaagatcggatatcaaaggctgacaaatgaaaaaaa

SEQ ID NO: 198915 - DNA, 122 bp, Homo sapiens
cgggcacgcgcgcgcagaacgcctgcctccggcgatgcacatgcgtacaccgccgcccgacgcgcatgcgtacaccgccgtccaacgctcctgccagctccgctcctctagtccaagtcctt

SEQ ID NO: 198916 - DNA, 122 bp, Homo sapiens
gaagccacagcccgctctcaacttaccgttcgagatgtaaaccatcttgtcccacttccccgcttcggagccaccgggcgcctggcccctgtcggtttctgtatctccctctgctccccgcc

SEQ ID NO: 198917 - DNA, 122 bp, Homo sapiens
tcatagggcttaaagttatggttagtgaattaacagattagtcaatagacaaggaggaaacgaacccaaaaatagaagatcagtcctggatcgatgatgactactggtggcgtatgagtctt

SEQ ID NO: 198918 - DNA, 122 bp, Homo sapiens
ggttaacctggtatagcaggggaaatgaatagtaactgggaggcagcataaggggaggttcggggtactggcaattgtctgtttcttgatctgagcatttggtacatgagtgttgttctgtt

SEQ ID NO: 198919 - DNA, 122 bp, Homo sapiens
gagggcagagccccaggccctgcagcgggtcagggctggcctcccttctggaaagccggccgggtctcctgctcagcttcaggccaaaccaaacacggcagcttcagacagctcatctagaa

SEQ ID NO: 198920 - DNA, 122 bp, Homo sapiens
aggttattgtgattttttttttcccatgcaaaaggacctgcctttctttccctgttctaacgaaagggcaccccccactgagttccaaagagccgttgccccttaaagtgccctctgccatg

SEQ ID NO: 198921 - DNA, 122 bp, Homo sapiens
gccccaagaccagccctcgtcctgcttcctgcctgctctccggcctgtggctttggtgtgcgccagtgtctataggctgtcctggggccagcagcaaacacaagcaaagcccacttttgtct

SEQ ID NO: 198922 - DNA, 122 bp, Homo sapiens
gttacatcagtacaatttcttgcatccttccctgaggccaagagagccccccagtctgtgcggaatggaatggaagagctcccttgtatacgttatttccttttgttttcacaagaccttgt

SEQ ID NO: 198923 - DNA, 122 bp, Homo sapiens
cttgccactgtgctctcagcccggcctgtcctgtgtcaggctccctctccgtcctcagaacgagaggtggggctgttgacagtcatttttgtaaactgttttaagaaacctgtaagcagttc

SEQ ID NO: 198924 - DNA, 122 bp, Homo sapiens
ttccttccaggcctgggtaggataaaacacggagcgcgcagcgctgagactgcgcatgcgcgtcactagacgacacggctgtcttctttcctggagaatttctcaaggactgctggctggaa

SEQ ID NO: 198925 - DNA, 122 bp, Homo sapiens
tgtggttaattgcctgtggcactccaaatacagcttcagactcagtgttcagccaactcgcgagattccactgcaaatatctgctgattggctctgtagtcaggcagtaaattggaaagcca

SEQ ID NO: 198926 - DNA, 122 bp, Homo sapiens
ttgcagaaatgatttctggaaacacctgtgttcgttgttagcccccttagaatgcccatccggaggcgggctctccctggctcggaaggcctccccgcggagggcctggcttgctgtccgct

SEQ ID NO: 198927 - DNA, 122 bp, Homo sapiens
accctcaatcattgctatgaactccacataataagactagttcatgaggaataaatctgccgaaaccattaactatatcatggataccaaagagattgggttagcaggtcatattgcctttt

SEQ ID NO: 198928 - DNA, 122 bp, Homo sapiens
ctccccgcccccttgctctgccagtccagccctaggttctcctgaatcctgcggtcccagcgtcgctccggacgctgccaacctgttctccaccgtcgctcgacttccacctctaagactcc

SEQ ID NO: 198929 - DNA, 122 bp, Homo sapiens
ctctgggcctcgtgcatgcacggtggtgagacactttcgcccatgggtgtggatctctgccgcgccgtttgtcttccacaccacgggtgcctcaacctcccctttcaagagttcctgccacc

SEQ ID NO: 198930 - DNA, 122 bp, Homo sapiens
aagcatcatctcgggcagggaggaatttgctccaccagctggtgggtgttttgcaatcatcgagcactggttataggtcatggccaagtcactcacatgtgatcattggtcaatggtaaata

SEQ ID NO: 198931 - DNA, 122 bp, Homo sapiens
ttggtgtagacgttgatctcatcggtaagcgggtgccggatcaccactgacatcctcttgcggacggaatcgaaacccagtgtgtgcaggagctcgaaggtgagcctgcccaggtggggcag

SEQ ID NO: 198932 - DNA, 122 bp, Homo sapiens
cccttgggaaggggaattagccccaaaagtccctggaacacccacttgctcagctctatacgccctcaggtcattcccaaaagcaagttcgtcttggtgaagttcgacacccagtaccccta

SEQ ID NO: 198933 - DNA, 122 bp, Homo sapiens
aaagagtttaaatccatctgtggcttctcattttctctagaacaaattcctaattccctacgatgaaattctcttgctatcctaattttttgccggctcaaaggactaaccgttttccccaa

SEQ ID NO: 198934 - DNA, 122 bp, Homo sapiens
acatgttctttctggttccagcgttccttctttcccaagtgtacttgttttttttgtgtgcgttttaaaattctattctgcaaagcttgctttcccatgaaacccagactgttttctacagg

SEQ ID NO: 198935 - DNA, 122 bp, Homo sapiens
cggcggtggtcaggttggccttgagtcttccatgagaatctgcagaatgcggcacacaggcgaggcaagactggggacttccttgaataacaaggtgtccagtgctttaaaaatactctaat

SEQ ID NO: 198936 - DNA, 122 bp, Homo sapiens
gacccaggagccccctgggaggtggcggggtgcagctggaccctggacccccgccgagagcgccctgggacgcgggctgtggtcacgtcccctgaggccctgggctgtgtccagcaggtctc

SEQ ID NO: 198937 - DNA, 122 bp, Homo sapiens
tccgccccaccctacacaggccccggaggtactgggcctgcgcccgccacaccttggccgcgagtggcctctgcttgggtgggctcccgtcctccggcatccgcccccaccaaggctccaga

SEQ ID NO: 198938 - DNA, 122 bp, Homo sapiens
tcgtttcccttgggaaacctggaaaacagaaaatcttcccacagaaactcctcaggggcgcgccgagatctgggcttgcgcacttggacttggccggcgctcagcccccgcctcaagccggc

SEQ ID NO: 198939 - DNA, 122 bp, Homo sapiens
agttacagctactcgggaggctgaggtgggaggatggcttaagtcctttttgagtgggaccgtgtctcaaaaaagaaagcaacagtactgaccatttggagtatggcttcgtgttaggtact

SEQ ID NO: 198940 - DNA, 122 bp, Homo sapiens
gcgagggcgggaggcttggctgtgcttctcccgccgcctggtgcaaactttcaaaagatgcggcggccgcggccccgcccctgcactgttggaggcggtgggaggcgggggcggagccggcg

SEQ ID NO: 198941 - DNA, 122 bp, Homo sapiens
taagcatttttggaagagagtcgaaggggaaggggtggcttgccagtcagttgagtgatgcgtgagggaggcgttaaatgtgcatgatgcactaaaatgcatgtttcgagatccagtatgac

SEQ ID NO: 198942 - DNA, 122 bp, Homo sapiens
tggagaggcctaagggagaaaaatgaaaaagcagagtctggcttgagtcgtttggcccttcggcctaaaaccctctcaacagggaagccccgaccaggcgtcggagcggagagagcccacga

SEQ ID NO: 198943 - DNA, 122 bp, Homo sapiens
tttcaggtgtaggttttttgtctcgcgtgtttccacgtctgcttgtagcgctttccgcttcgccgttccctgcggcccttccttccgtgcccggtgttcatcctcttgaatgctcttttcct

SEQ ID NO: 198944 - DNA, 122 bp, Homo sapiens
tttaaaaggaagcagcgctttgcttccattcaggattcgtgcttgcccagagctgtttcccgtattctctccattcagtgggactgcgagatcatagccggcttattaaatctgaagagctc

SEQ ID NO: 198945 - DNA, 122 bp, Homo sapiens
tgcaggcaagggctgtgagaggcttggaacaaggctccacccaggagagatctgggtgggcgttggtgaccagtagaacctaggtgtcctgggccagtgcccttggagactagtcttcttta

SEQ ID NO: 198946 - DNA, 122 bp, Homo sapiens
cccatcagtgtctcagccccgacacaggaagtccctctttagtatgtactctaacccactcgctgaattagcgaagcctacttcctctgcttctgtgttcaggcagcgctgggaggatgcac

SEQ ID NO: 198947 - DNA, 122 bp, Homo sapiens
gccaaaggggctcaaccttcatggagttttgggaaaggttagtaaaaggtggtgtcccagcgtcagaacagatgggcagccagcgagggcactgcttcatatctatgatgggaatgcaagaa

SEQ ID NO: 198948 - DNA, 122 bp, Homo sapiens
gtgctgcccctggatcccgcagagcctgaaatccgcctcaagtacatttcctcttgcaagcggctgaggtcagacagccggacccccgccttctcacccttcgtgcgggtggagaagcgaga

SEQ ID NO: 198949 - DNA, 122 bp, Homo sapiens
ggtgggtggatcacctgaggttgggagtttgagaccagcctggccaacatggtgaaaccccgtctctactaaaaatacagaaaaaaattagacaggtgtgatggcatgcgcctgtaatccca

SEQ ID NO: 198950 - DNA, 122 bp, Homo sapiens
acctccgcactggggtctgcggacgccaggcggcccggccccacgcagcaccccccaccccgcccccccgccgactcctgctagtgagccctggaccaagcttgggatcctccccatccctc

SEQ ID NO: 198951 - DNA, 122 bp, Homo sapiens
agacagtgtaggcggcaaccgacggccgggacgtctaacctcaagtcccagcaagccccgcggccacgtcctctgactacctcgcgccagcaagacccaaactacggatcccgattgactcc

SEQ ID NO: 198952 - DNA, 122 bp, Homo sapiens
cccggtgcgcctgccaggctgcattcccagaaccaggggcatgggtttggagggagctaccgggggaccatcttcagcctgacctggcaggacctggaggacatgacagcctgtgaggggtc

SEQ ID NO: 198953 - DNA, 122 bp, Homo sapiens
tacaatatggataaaccttcaaaacagtatgctaagcaagaagctagacacaaaaggccacgtgctgtatgattccatttatgtgaaatgttcagcatagacgaacccacagacacggaaag

SEQ ID NO: 198954 - DNA, 122 bp, Homo sapiens
tccctggcggcctcagccggcatcgaatcaccgcggttcccagagggcgtgaggggctggcgtggacacaccgggaatggaccgtaccctttttcaaaaggaactcatgatgtatacaagta

SEQ ID NO: 198955 - DNA, 122 bp, Homo sapiens
gaaagaaggaagcaatctcctgtataaacagtaaataaatagaagtccagctgccatccacgaaggtggaagctatcgactccctcaaatgcttattatttccttgacattcttgcagcctt

SEQ ID NO: 198956 - DNA, 122 bp, Homo sapiens
gacatagcatttacattttattaggtatcgtaaattatctagagtataatttaaagtatccgggaggccgtgcgtagttcatatgcaaatactgcgccatgttacatcagggacttgggcaa

SEQ ID NO: 198957 - DNA, 122 bp, Homo sapiens
tgagaacattctactggagcctacattatctgaacccaaaggaagatggcaaccacgagtcgccaagtaaaggaccgctctatctcgcctttgttctcctctcggtggttactgcgcagacg

SEQ ID NO: 198958 - DNA, 122 bp, Homo sapiens
gccaagaagcctagatttagtagccttcttgctttatttttcccattaatctcacagcttcgtgtagctataccttggcttctctcttgagtttcaaaatgctttttagctggtttgcttta

SEQ ID NO: 198959 - DNA, 122 bp, Homo sapiens
cccggagcaggaggcagcccccgcggaggagcccgcggccgccgcagcctcgtcagcctgcgcagccccctcacaggaggcccagcccgagtgcagtccagaagcccccccagcggaggcgg

SEQ ID NO: 198960 - DNA, 122 bp, Homo sapiens
aaggtcttctctgccttacttgcttctcttcctcccatcagagcctgccctcgcaaaacccgatcttgaagaatatcaccgactacctgatcgaggaagtaagcgccgaggaggaggagctg

SEQ ID NO: 198961 - DNA, 122 bp, Homo sapiens
ctcctcagcccctgggcggtggatgggaccgagccccgtggagcagggggcagcgctcgccggggaggctccagtggcgtggacggaggggggtggggctcgggcatggcaggccctgcccc

SEQ ID NO: 198962 - DNA, 122 bp, Homo sapiens
ggttttgttcagtggaaatagactggtagagagaggaaggcagtgaatcacatgaaggtacgtgtgtaggttttgttcagtgacttcttcagtgtctcagccagctgagcaaataaagacac

SEQ ID NO: 198963 - DNA, 122 bp, Homo sapiens
cagtttccccttatcccagcagttttcagctttttgtttctggttgcaaatgattgactccgctgattgctggaagctacacaggtgactccccaccctcttgggctaccccaccagtgaca

SEQ ID NO: 198964 - DNA, 122 bp, Homo sapiens
tccggcctgtactgagttcctggtatttctctctctgcgccaaccagcactgcttgctcacgcctgtttctccttttccttgccggtggggaggtcatgggatgcgcaagcactttgtctct

SEQ ID NO: 198965 - DNA, 122 bp, Homo sapiens
aggcgaaggggagggggagggggagggagggaagggacggggcaaacctgtctgtcaggacgtgctggttccgctcactggctgctggccccaagggctttcagactcttctggacagttgt

SEQ ID NO: 198966 - DNA, 122 bp, Homo sapiens
cccattggcggcctgtgtggatggtgaattcggcttctttccacggcggtcgctttgcttcgtggctgtttccagaaccatcagtgcgaagcgaggacttgttggactttctgttagactcc

SEQ ID NO: 198967 - DNA, 122 bp, Homo sapiens
gcagcgcggtgggcgggacggagctcggcggtctgcgctcggttgctagccgtttgctcccgctttcagttgctttgctgttagcctgttggaccttcgagcctagctgctcgcacaggact

SEQ ID NO: 198968 - DNA, 122 bp, Homo sapiens
aggtacaacagatgcgacaccatgcagacacgcagctgtgaacgacagttcagaactcagcgtaagcttgtgctatgaacgagcaccgtcagagaattcccacccacacgtacagaaacaca

SEQ ID NO: 198969 - DNA, 122 bp, Homo sapiens
gaacgggcagagtaagtttgctcccaccgtttcagacctcttaaaggagtcaacgcagaacgtgacctccttgctgaaggagtccacgcaaggagtgagcagcctgttcagggagatcacag

SEQ ID NO: 198970 - DNA, 122 bp, Homo sapiens
aacagctcctgtactcccctgacctgtcagaaaaagaaaagtttatggagtactctgttacgagagtcccagtacaatggaaaataattaagcaacatgtgtaccattaaatgatgctgtat

SEQ ID NO: 198971 - DNA, 122 bp, Homo sapiens
gacaacacggtcactgcacaagccagctctgcgtgggtttcctattctcactgcactgaccgcggagccatggacgcaggatggggaggtgcttaggaatctgttagaaaacctttccctgg

SEQ ID NO: 198972 - DNA, 122 bp, Homo sapiens
cttactggatgcataaactcacttaatctgaactcctccttcagagatgtagtaatattccggttttataggtgaaagaatggagactcagagagacgttcagtaacttgcccaagtcacac

SEQ ID NO: 198973 - DNA, 122 bp, Homo sapiens
ctaccccaggccccacgttggtgcccatttcacaggtgataaaaccgagacccaaagagccggtgtccggcccaagggcacttagctgagaggctggcgcctgcggaacctggtgccttccg

SEQ ID NO: 198974 - DNA, 122 bp, Homo sapiens
ggaaatcgggaggggacagattcgctactctgtgccagaagagacggacaaaggctccttcgtgggtaatatctccaaggacctggggctggacccccggaagctggcgaagcacggagtcc

SEQ ID NO: 198975 - DNA, 122 bp, Homo sapiens
ctgcccgtgcttcgtgctttggactaccgcccagcagtgtcctgccctctgcctgggcctcggtccctcctgcacctgctgcctggatccccggcctgcctgggcctgggccttggtgggtt

SEQ ID NO: 198976 - DNA, 122 bp, Homo sapiens
gtggcatgcacatcaggttgctggcctgcctccagataccatgccacagagctggctacccgtccctagggctctgtgggaaatcgaggtggggggggtgtaggctgggggagccaagaatg

SEQ ID NO: 198977 - DNA, 122 bp, Homo sapiens
cgcggtcccgccttagtcctggagtcccttcctgggccccttcgcctgggtgcggaggggcgcgggcgcggcgggcagggccacggggcgaggggacgggctcgcggctttgggttcaggga

SEQ ID NO: 198978 - DNA, 122 bp, Homo sapiens
aggtgtgtggaagcctctgcttacctggggcgtgagtgcgtgtgctcagcgctgttctgccggattgccatgtcatgggcctcaccatgtgctcattcctgtgttcattcctttcaggtatt

SEQ ID NO: 198979 - DNA, 122 bp, Homo sapiens
gagacacggtctgctttccaggcttgggaagtcccagcacttaactctgcgcgtcggtgtcgctcgtttgccagccagactataaagtgcacccaacggtgtatgcgtctctttacttccgg

SEQ ID NO: 198980 - DNA, 122 bp, Homo sapiens
cccctcatcgaatcccagggtctaccccacagcatcccacctcggaaatggaatcctcctcgcgcatattcagaggcaccattatcaggcccctgaatagaatggatgaggtccttgtctct

SEQ ID NO: 198981 - DNA, 122 bp, Homo sapiens
acctcagagggaccggaacgttcgttggaaggatcctcgtttctcagggacgattttggacgcgaagcgtgccccgcacaaggatggttgccatgaaccggaagtaactggttgttttgctg

SEQ ID NO: 198982 - DNA, 122 bp, Homo sapiens
attacaggtgtgagccactgcaactggcctgcctacatttataccaaagaaaatcttggccggcgcagtggctcatgcttataatcccagcaatttgggaggcagaggcaggtagatcaact

SEQ ID NO: 198983 - DNA, 122 bp, Homo sapiens
gggattacaggcgtgagccactgcacccggccagtctggtttttattgcatcaaccctaccgttgttttgtaggctattgctgatcatttataggctatccctgacccaaagtcttttggga

SEQ ID NO: 198984 - DNA, 122 bp, Homo sapiens
gcgtttatcttgagccggggttccgctggccacctgggggcctcattgccccatcccctccgcctgcaaagcctgcgctacttgctgacccaccgccagtcctcgccgcctgtcgcgtgctc

SEQ ID NO: 198985 - DNA, 122 bp, Homo sapiens
ctctatctcctggcctcataatacgcccgcctcggcctcccgaaatgttgagattacaggcgtgagccatagtgcccggccgttatatgcatattattttataaacaatttatgataaagag

SEQ ID NO: 198986 - DNA, 122 bp, Homo sapiens
gagaataatttttaaaaatagagttttcttccctgaaaacttggagaggtccaggatgcgcgccattctgtgatctaggttgactctccacctcttcagttggtaccacctttcccaaatag

SEQ ID NO: 198987 - DNA, 122 bp, Homo sapiens
tgggggatgggggtggggagcggccagtctgctggtccacacctgaaaacggggtttccccgaccggatgcctgccgtccccccgcctccactctgcggggtcgcctgctagggtcgggaaa

SEQ ID NO: 198988 - DNA, 122 bp, Homo sapiens
aaggggccgtctgagatgtttagctctttaaaaatagccataatactcataaagctggcccgtcactgggttaaatgactcaaaaccacatgactcatttgtgttcacgtagatttgagggt

SEQ ID NO: 198989 - DNA, 122 bp, Homo sapiens
gtgcctttccctttttttaagtaaggaaatatatttttttctgaattattttctctcatgcgagtatattgatccagaaagaaaacttgcattgtatatattttaaaatgagaaatctaaaa

SEQ ID NO: 198990 - DNA, 122 bp, Homo sapiens
tgtcttacaggtggaacttggagtgggtcaggatttgatgtcttctgggaacaggaagaccgtatgaagttacttccaaacacatcagacactaaaggaatgagccaagaccaagtctatca

SEQ ID NO: 198991 - DNA, 122 bp, Homo sapiens
accgcaggcgccagaactctggcgggcgggcgggcgggcggcgagaagggctgtctagggcgcacgcctcccgcaggggcgtcagagggtcggggccgcaggaaaggaggtgggcgaggact

SEQ ID NO: 198992 - DNA, 122 bp, Homo sapiens
actcatgcagatctggaagggagaggtcccagcgtcaggattcagaaatgctcacccacacgtacacaacaaagaaatgtgcgccaagcaaaggaaagccagaggttagcaacaggggagcc

SEQ ID NO: 198993 - DNA, 122 bp, Homo sapiens
ctgacgaatacagtgtgggccgtgagagcgatgacgacccacgctgcaccgcagctgagccgcgagggggaagtcagtcactgaggacagcatgccgtgtgactccatccaggagaaacgtc

SEQ ID NO: 198994 - DNA, 122 bp, Homo sapiens
tgaactcctgaccccaagtgatccacccgcctcagcctcccaaagtgctgggattacaggcgtgagccaccgcacccagcctccaatatgttttgctagtggtgtcatagtttcaggtctta

SEQ ID NO: 198995 - DNA, 122 bp, Homo sapiens
ttgaggttttgttagttttatagtggctatagctgtcttccagaattgaatgagtatacacgtacatctcaaagtttgctttgaaagtatgattgagttcatttagggatggatacattgga

SEQ ID NO: 198996 - DNA, 122 bp, Homo sapiens
ccatcccccagcgggtagcgttggtagcgggggacgctgaaaggcggcagggcgtgaaagcgccgttccagcagcggctccaggcgtgaagctgacgggtccgcggggtggaagaggttgta

SEQ ID NO: 198997 - DNA, 122 bp, Homo sapiens
aaccgggggaggaggtctgggacctatgaggctgctgtccctgcattgccttaggcttttcgcctgtggtggcccttctctgcggcctcgggaggagggaaggctgaagaagggaaccgcgg

SEQ ID NO: 198998 - DNA, 122 bp, Homo sapiens
gagacacgcgggccggccagcccctgagaatcgcccgggagcccggccgggtggtccccgcgcctccctggtctgtcccagtcaaaggtcctgatttatcgggggattttgtgggactggaa

SEQ ID NO: 198999 - DNA, 122 bp, Homo sapiens
tccagccccgtctggtgacccaacccgggcccgtggtgcatgctggggaaggccactggccggcccctgggcttcggctcctgaggaggcatggccccacaccctgcccggccataaatata

SEQ ID NO: 199000 - DNA, 122 bp, Homo sapiens
gaccgactcctgacctcgttctttcccaaggggacgccagggccttttctgcttccattccgtcggatctgcagcatttgtggcagctagcgcggcggacgcgctgccgattcgggttattt

SEQ ID NO: 199001 - DNA, 122 bp, Homo sapiens
gtccccagacaaggggtctcccgacagagctgctgatccccagtggggtctgtgggtcaccgggcccgaacttggcagcaccctctgtgctgggacgaggtttgcaggctgggagctagggg

SEQ ID NO: 199002 - DNA, 122 bp, Homo sapiens
gaccagccaggacaacatagtaaggcggaatggggggtggggaagataaaaagaaaatggcgcagggaggtttagttcaaaaatccagtattctatatcaaaatatttgagacgccttgaaa

SEQ ID NO: 199003 - DNA, 122 bp, Homo sapiens
catcactggccatcagagaaatgcaaatcaaaaccacaatccgggaggtattgccaaagacgatgtgggctttctgggcaatgtccggcctgagctggagattctgggacgcggtcaagtgg

SEQ ID NO: 199004 - DNA, 122 bp, Homo sapiens
ggggtcacatgagcagaatactttgtggaccactgctttaaaacactatttctctaagtacggttgagggaccaacttacagaatcacctgggaagggtggctgactttttaaaaatgccga

SEQ ID NO: 199005 - DNA, 122 bp, Homo sapiens
cctccctccggccctcctgagccctactgagccctgctgagtcctggaggccctgtgacccggtgtccttggaccgcaagcatcctggtttaccatccctaccctggctgacctgagagctg

SEQ ID NO: 199006 - DNA, 122 bp, Homo sapiens
gggggcaaaggcggggtctctttttgcaaaccaatgacacaaccccacatgggccggcctcgcccccttcagatactcctcactacaaatcggctctctcgggggattagtggctccgcgaa

SEQ ID NO: 199007 - DNA, 122 bp, Homo sapiens
gtcgcagaggagagggcgtctcggggaggccagggacaggtctgcgacgaagtccagcaccgtagtgtccacgcagctctccggataggccgccatcgcttcggcttggccctgcctctcat

SEQ ID NO: 199008 - DNA, 122 bp, Homo sapiens
ttaaaaaaaatacaggttcctgggactcatccaaggttaatgaattacgctctcttggggcgggatttgggactctacatttttgaactgcctcaagtgctttttaagtgtgccttaaaatt

SEQ ID NO: 199009 - DNA, 122 bp, Homo sapiens
acccgggccagaggctgcggagggtgtgctgggtctcccagcagtgccggcccagcgctgcgctgcgctcgatttctcgccgggccttagctgccttcccgcggggcagggctcgggacctg

SEQ ID NO: 199010 - DNA, 122 bp, Homo sapiens
ttccgattaagtttgcagtactgccgcaatatgggattaggtgaggattagcgcttggagcgcaagtgcccactagggggtggtgtttcaaaacatatacaggcccacttggccccacttgg

SEQ ID NO: 199011 - DNA, 122 bp, Homo sapiens
gaaaccacagatctccaattgaagccaacaccacaagattcattctgcttctctccgagacgcctgcctgcctgccttccttccttccttcctccctcccttcctcccttcttcccttcctt

SEQ ID NO: 199012 - DNA, 122 bp, Homo sapiens
acataggtaatttctatttgttcattttttgcagtctttagccagaattctatccttagccggaaaatatgttagtccccacatcaaataataagcctgctataattccaaaccacttagca

SEQ ID NO: 199013 - DNA, 122 bp, Homo sapiens
tgttaccgcaggagtatctgctgagtctgcgggtgtctgcaaagccccaagtgtcatttgcggcttagggtttcatggattagactttaaacggtgtctagcccggctgacattagcttcct

SEQ ID NO: 199014 - DNA, 122 bp, Homo sapiens
gaggcgagccggaagtgggggggttgtctgctctcaggccccgcctccccggggccggctcgggccacttcttgcgcgctgccagaaggagctattttgagcaggtctgtggcggaagtggg

SEQ ID NO: 199015 - DNA, 122 bp, Homo sapiens
gggttctctcagggtaagaggggtggtgttgcagagtcgaccttgagctccaggctcctgcgggtctggttttttccggaggccttgtattcaactgggatccacctggtgatttttactgg

SEQ ID NO: 199016 - DNA, 122 bp, Homo sapiens
ctcgctgtccgtgctcctgggctccctcttgtggttgagaacccaagacgcctgggtgttcggagctcctcccacctcggagccctcctccccggccggcctagtgctgaagcccccactcc

SEQ ID NO: 199017 - DNA, 122 bp, Homo sapiens
ctacccccacccccacgctatcagggcccacccccagtctccttgtagagcagggactggcgcctggagccgtctccgggtctcattctgaccagaccaggctcctgttaccctgcctcctg

SEQ ID NO: 199018 - DNA, 122 bp, Homo sapiens
gccccaggttcagagaccaccccctccattgactgtgtcaccccttccccagcagaggagcgggctgttctcagagcgctgcaggaagcccagacaagtgccttcctctggctgctgcttcc

SEQ ID NO: 199019 - DNA, 122 bp, Homo sapiens
cctcccttggaagcgcattccccacctccgctagtgctgccctatttccggtacccagcgcggaattccactgctcttttgttggtgcatatttattggatacctccttcttcaggatatgt

SEQ ID NO: 199020 - DNA, 122 bp, Homo sapiens
aagtgcgcggccgcgggcgcatggtccctcccgggcccggccccagttccccgcaggccgcgcctcgccactagcccggcccggagctagcacgaggttgtgcagcaacagggaaggtggag

SEQ ID NO: 199021 - DNA, 122 bp, Homo sapiens
aacaggagtgcaaggctgggtgcagtggctcacatctgtaatcccagcactttgggaggccgaggcgggctaatcacttgaggccagtagtttgaaaccagcgtggccaacatggtgaaacc

SEQ ID NO: 199022 - DNA, 122 bp, Homo sapiens
cctgcgggtgggaaggaggcccgggaagagcgtggattcctcccagcgcaatagggcgcccgccgcacttggggcaggccgtgcgcctgtcgggggcgagggcggccgcccggcgcccggcg

SEQ ID NO: 199023 - DNA, 122 bp, Homo sapiens
aacttttttttcaaaagtcattgtcttaaaagacttcaaaattgctttctgttctcccaccgcaagcccccgccccacctcttggctctgcctatcccctcccctccggggtttctgcccac

SEQ ID NO: 199024 - DNA, 122 bp, Homo sapiens
acctctcgtggacgcccacagaaatgcactcgagaggaacataaaagcatcacacttaagcgctcgaaagaaagccccacgaacccataaaggctcctccccgctccttcctcgaagctcct

SEQ ID NO: 199025 - DNA, 122 bp, Homo sapiens
tcactggcagaaagcaggataagaagtagcacaagacataaatgaagaagtctgtctttccgcattgtgagggataaatctcagggttgtgtccaactctctgccctcagcctcgccctgga

SEQ ID NO: 199026 - DNA, 122 bp, Homo sapiens
tccagccgttgccgtctagatccagccgataaagggctgggctggcggcgaagatgtccccggatagggcgctgagcgcgttgttgcgcaggctgagctcgcgcagccggcccaggtggccg

SEQ ID NO: 199027 - DNA, 122 bp, Homo sapiens
ccttgctcttctcaaaactggctccttctttgcattcaggtgttagctcaaatgtcacctcggagagaactttcctgactgtctttcatacacctcaaaccagtctgtcacagccctgtttc

SEQ ID NO: 199028 - DNA, 122 bp, Homo sapiens
gggcatcgcctgctccctgaatcctttccacatgcgaacagcctgggcaggggtccccagcggtcagtagctactcccgccagcgcgggttcatggatcaggaggctcccagtgtgtcaggg

SEQ ID NO: 199029 - DNA, 122 bp, Homo sapiens
tgcgagtactgtatgtggcgctgcagatgctcagctcagattgtctatgtctgtctgaaacgggcaattctgcctaaaagtgcatgtggctcctctggcagttgttaacagtctccttagca

SEQ ID NO: 199030 - DNA, 122 bp, Homo sapiens
aaggcggtgctgctgatggagccgaccgccttgcacgcgttgcggatcacctcccggctccgagggtctgctgtggagacatggctccatgagacacgggtcccctctgccaccggtggagc

SEQ ID NO: 199031 - DNA, 122 bp, Homo sapiens
ggcaaaacaagcctgtaagtgcgcgtgcgcacctgacggtcagacgtaggcggaacgccccgaggtcataggcggggtcacgcggaaggccgggcagcgcagggcgaaaggaggctgtgtcc

SEQ ID NO: 199032 - DNA, 122 bp, Homo sapiens
aggtaggaaggcacactgcccaggaaaaaaatcaatcctccgcccaaggtacagcagaagcggcctccttggcctaggaggcagacttcctcctgcggggaaatcccttcctggctgggagg

SEQ ID NO: 199033 - DNA, 122 bp, Homo sapiens
cgagtgttcagcctgtcggaggccgacagtcatggcggccactgggtttagtgctccgaacggcagctgccacggcacctcacgcacagtcaattcaggcaggtctcccctgtgagccgctc

SEQ ID NO: 199034 - DNA, 122 bp, Homo sapiens
tgtcctgcaggtagaggtactgcaggctgtgcaggccgccaaagacgccggccggcaaggcgctgagcccacacttgtagaggtagagggcgtgaagcttcaccaggccctggaaggtctcg

SEQ ID NO: 199035 - DNA, 122 bp, Homo sapiens
aggctctgttcttcactacagtagattacagtcccttccaagatgcaaaagtcttgtcagcgtcaatttcgctctgcctactggtccataaagacagctgccaaggggcaggcagccatacg

SEQ ID NO: 199036 - DNA, 122 bp, Homo sapiens
gctaaatagctcatctgtgactcctctgcaaggtgtctttatactagggtgaaggccagacgtggccaggtgcagcagagggcaggagtgagggcttctggagatttggggcacacacaggc

SEQ ID NO: 199037 - DNA, 122 bp, Homo sapiens
tcctctctccgtctccctctcacgctggtgccagctcgcctgcttttttcttctctctaacgtcaccagctggcttctggatgtaggtatgagggccctgccccctactgtctcagtgcggc

SEQ ID NO: 199038 - DNA, 122 bp, Homo sapiens
ctccagtcccaccagtgccctagagcatacctcagaatgctcctttctcctggtgggatccgtggagtctgcctgctcttccaaggatgcctcagccttttaagtaaggcctagggaggggc

SEQ ID NO: 199039 - DNA, 122 bp, Homo sapiens
ggggtggcaggtgggcgtgagcgtcgggaccgggagccaaagccatctggggctgaaaggcgggacttcctgcttcgcttaccttcctagtcttttgtttcatagcaacagagtagtggctg

SEQ ID NO: 199040 - DNA, 122 bp, Homo sapiens
tagagccaggtcttgacctgcttccccagtttctctccagatccccatatgtttctacttcggtacggccaggactatacctactatctttctgcagaataatggtctgaggcagccttaaa

SEQ ID NO: 199041 - DNA, 122 bp, Homo sapiens
ggtgcattcgactaggctgcctgggttcaaaatttcaacgatactgaatgagtcccgcggcgggttggctcgcgcttcgttgtcagatctgaggcgaggctaggtgagccgtgggaagaaaa

SEQ ID NO: 199042 - DNA, 122 bp, Homo sapiens
acaggatgggggtgctgggacaagtgactggcccaatgtcacaaacaggacccaggtccccggaaccctttcctactcagattcttgggacccagaagggaggggccccgggagcccaggat

SEQ ID NO: 199043 - DNA, 122 bp, Homo sapiens
gggaggttgcttctgtcggaggactgctgcgagttctgccagagagagcagctcttgtcccggaacatgaggtaggtggtggggcttggggacacgcggctggactggccggagaagtcctc

SEQ ID NO: 199044 - DNA, 122 bp, Homo sapiens
ggcaactcatccatgccacacgtgtctttatcactaccggaaagctccaatgcgtcctaacgcctccggtttgatggttgactctgtttcactctgaacaccacagaagaagacggccgtgc

SEQ ID NO: 199045 - DNA, 122 bp, Homo sapiens
accttggcctcccagagtgctgggattacaggcctgagccgctgcgcctggccgtatttacgatcttaagagaaagggcaggagtgtttccttgaccccacattctcacttccctatacctc

SEQ ID NO: 199046 - DNA, 122 bp, Homo sapiens
aggtgaagccctaccggagcagaaagctgttccacctgcaccaagaatgcgcgctggagacggttgccccggaggccctggcccgagagaaaaccagtccccgctgcccgcgcctcccggta

SEQ ID NO: 199047 - DNA, 122 bp, Homo sapiens
ctggggcgctccgcttactgattggttcgatgccagattggcaggtccccgccggcagtgcgtgtggtgaggcaggacatggcggaggcaggaaaagtgcccttgagcctcgggcttaccgg

SEQ ID NO: 199048 - DNA, 122 bp, Homo sapiens
acaacagacttaaagggggaaatctcttctttcaattatttgccattccatggaaaagcacgcaggcagacaggaaggcagaaggccatagtgagctgttgctgagttgagcacagtgcaag

SEQ ID NO: 199049 - DNA, 122 bp, Homo sapiens
accacgccctggggctgccggctgaggtggtggagcccgaggggcccgtcgcccagcgagcggtgaggctggcagtcatcgagttccacctcggggtgaaccacatcgacacggaggagctg

SEQ ID NO: 199050 - DNA, 122 bp, Homo sapiens
gccgcaggcagctgaccgcaaacagcctcgcccgtgtcccggagcagttgtgccaccagacgtaacactggatacttgtctccgggccccaagaaggagagggaaagagccctccagaagac

SEQ ID NO: 199051 - DNA, 122 bp, Homo sapiens
cttgccgtcaccactccatgcagacgctgggatactaaggttttcacctgctgcttcctgcgggatgtcgctcatgtggaggagggcctctcgttggaagcccaggctcactccatggctgc

SEQ ID NO: 199052 - DNA, 122 bp, Homo sapiens
cctggtttcccaatggggcgtcgcagctgctgagcaggattccagactggagactggcggcgcccgttgaaacatgactggcggttctgcggcttcacagcctcacatgttgctttgaataa

SEQ ID NO: 199053 - DNA, 122 bp, Homo sapiens
aaagccgcagcatccttttctccaagaatgacaggtggtttatctcaggcttttctgtcccggcgcctttctctccaatgcagtctatggaatatatatatagagagagagcgtgagagaga

SEQ ID NO: 199054 - DNA, 122 bp, Homo sapiens
agctctgaagcgggcagaggagctcaagactcaggccaatgactacttcaaaggtgcgcccgcctggcagggagggtggacagtggcccaggctgaggggtgccgggcccgcgcggaaccat

SEQ ID NO: 199055 - DNA, 122 bp, Homo sapiens
ctgcggagaggagtcagacaggccacggcggttcctcgccggcaagtgctttcgcatcgccgctccagaccctaaaatgcaaaagcgaccagcgccccccaaggcggagagcctcagccgag

SEQ ID NO: 199056 - DNA, 122 bp, Homo sapiens
tggatttgtagctttgcactccccgtttctgcagaagctgcaaggcagcaaggtagcgaacgttgctggggtctggagggcacgccaggtttttctcagacaggagggaccaatgcaggcag

SEQ ID NO: 199057 - DNA, 122 bp, Homo sapiens
ctgcgctctctcccttctcccctcaccccgcccccaccagcccagtgcgccctgccgccgcgcttgggaggccaagctttaaacatctctggttcctagtttctgattattcggggatgggg

SEQ ID NO: 199058 - DNA, 122 bp, Homo sapiens
ggattaccaaatgtaaaaaaagagtaaatttacttcccagacactcactggctgatcaggcgagggcctgggatacatcaaatgcaggtaagcaagaatttcaagtcattatccctgtgcat

SEQ ID NO: 199059 - DNA, 122 bp, Homo sapiens
catctttgacagccgagcaagggcgtcacgcaggggtgatgctccagaggcggcgccaagcgcaggccctccccggagccagctgcctggtgggggacaggactcccacagacgcagggcca

SEQ ID NO: 199060 - DNA, 122 bp, Homo sapiens
gggtatggtggagtcaaatgcattccgtgaattcttcccctattgttttaatcaaagcaccgattttagcacagactcatgtgccaaacaaactattgaaaaactactgtgatacacattta

SEQ ID NO: 199061 - DNA, 122 bp, Homo sapiens
ttccagcagctgcctacatgatctcattgtgctgttttgccagttttcctcctctgaccccgcccgggaccatgtgcctgaattgaaatgaattaattaagatgcactggaacaaaagacaa

SEQ ID NO: 199062 - DNA, 122 bp, Homo sapiens
cgtgcgactcctcagcccttgggcggtcgatgggaccgggcgccctggagtagggggcggcgcttgtcggggaggctctggcagcgcagaagcccggggcggtgcgaaactcaggcatggcg

SEQ ID NO: 199063 - DNA, 122 bp, Homo sapiens
ggtccccccacccgtcccttcccttatcagcacccgcggccccggcagcgccgacgcaggcgcactgcaccgcgccgccgccattttgtgtctgagcctgtggagcgattaaaccgtgcgcg

SEQ ID NO: 199064 - DNA, 122 bp, Homo sapiens
gaggttcgcgcctcttgattgaaggatcggaatggatggcgaaggggcaggctcgctgagcgctcactagcggctcctcgcagcctctaggatcgccttagtgctgattgcaacgcgcggtc

SEQ ID NO: 199065 - DNA, 122 bp, Homo sapiens
agctgctgtacctgaacacttttatgagggcagatggatcctggggtaacaggggtggtacgagggctggggccccctcagtttgtgtaaacctgagttccgatcacacgcatgatttcctt

SEQ ID NO: 199066 - DNA, 122 bp, Homo sapiens
ccttaaggaaatacttttgagattcgtccacattgctgctttcccacaacctgatgataacgtctgtgtggttctgtatttcatgggtgtatggcaagagtggaaccaattctttatttttt

SEQ ID NO: 199067 - DNA, 122 bp, Homo sapiens
ccagcaccagcagctccaggatctgctccttgctgtgcatctcaggctgcagccattgtccgcagagttctcggagccggctcaacgcctcgcgggggcccgcagcctccgggtagcggaag

SEQ ID NO: 199068 - DNA, 122 bp, Homo sapiens
ctctgctgttactgtctggttgtaggtaagataaagcaattaaaagtgggtgggggtgggcggggaagcaacttaagcatttctaacccactttggaaagtcaagcatccttcaatgggctt

SEQ ID NO: 199069 - DNA, 122 bp, Homo sapiens
tgaggtcatttggatgatataaccaccatttctttgttcttcttttgtatgtcagttttgcgcacaatgcctctgctctcgtttcctcttgaatcacccaggtttaggtgtttgttttccca

SEQ ID NO: 199070 - DNA, 122 bp, Homo sapiens
ataagtgtctgcaggaggagtgtcctgcgcgccagctctgcgtttaagacaggaagctgccgggttaccgagtcaaatgggagtgacactattcctctccatcagcaaggaaagcggaccac

SEQ ID NO: 199071 - DNA, 122 bp, Homo sapiens
ccacgcaccctgaggaccctcagcggctccggagtccccgtgttccccgggtgccggtcgcggcctaatcacaccacaggggtttgtaggtgctggcatcacctcatcagtgacggaccagg

SEQ ID NO: 199072 - DNA, 122 bp, Homo sapiens
ggggaggccgcggggacggaggggaggggaggccgcggggacagcggggagctgaggctgcgcctcctggttccctggctgagagggtaactctgaccacctgggtgcagtggagccgccag

SEQ ID NO: 199073 - DNA, 122 bp, Homo sapiens
tttgtttctccgttggggccgagcccgggccctagttggagccggagtcggagtcggagtcggatccggattcggattagcagcccgggaagagtgccgtggcacaggcgccggagggagcg

SEQ ID NO: 199074 - DNA, 122 bp, Homo sapiens
caaacttggcgcacagtaggcgctcaacaagttgtatttttcccttcccttgcagtagaccgcggtccccaggcgaccgcgaaagaaaaaaaggggtttctctacctcgcgtggtctgcacc

SEQ ID NO: 199075 - DNA, 122 bp, Homo sapiens
agacgccgaagtcgcgggcgctcatggcgggcctggaggtactgttcgcatcggcagcgccggccatcacctgcaggcaggacgcgctcgtctgcttcttgcattgggaagtggtgacacac

SEQ ID NO: 199076 - DNA, 122 bp, Homo sapiens
ggaataacggcgttgcgtcagctaccccacacatcctcagccagacccaagggtgatctgcggagtccaggctgagccgctgcactctgaagcctgttaagctatcgtttgggacgcatttt

SEQ ID NO: 199077 - DNA, 122 bp, Homo sapiens
cctctcctgatctgctttgcatcatcagaaatttatgactttccatcctgaccaattaaacgatatatactgtatttaatttcctagattcttactccatttgaaactatttcaacaaatgt

SEQ ID NO: 199078 - DNA, 122 bp, Homo sapiens
cgcgctctcgcgttaccaagtctgcgcagccgcacacccccagtcccggcgggccccgcgcgccaggccccttcccgacaggccccaggagccccgctgcatgccggggcttgaggtctcgg

SEQ ID NO: 199079 - DNA, 122 bp, Homo sapiens
tccgcggttaataacaggcctcgcgctccctgacaggagctgcagaaagcgacgcccgaccgagacgcgacgaagaacgccacggccactgcaaaactcccacgctctcatgctcctttacg

SEQ ID NO: 199080 - DNA, 122 bp, Homo sapiens
gctcacctcctggagagactgatgaaccaccggagagctgtcctcttggaaggtcttcaccgagagctgcaccttccgggtcaccaggtccgggctgctgccgctgacgtacttgtggcggt

SEQ ID NO: 199081 - DNA, 122 bp, Homo sapiens
atctccgtgtagtacatctccagggtcagcggcgtgcagatcttgtgctgcgggaggggccgggtcagggtcggtggggctgagccctcctgtgcgccccgggcccaggccctcccgcttct

SEQ ID NO: 199082 - DNA, 122 bp, Homo sapiens
tcacacttctttatgaccaagcttccaacctaccccaagtgtaaacatcatttgtttgtccgtcatctggtgatggacatttcacttgtttccattctgggactcttatgaataatgctgcc

SEQ ID NO: 199083 - DNA, 122 bp, Homo sapiens
aaggaattaacctcggccagggctctcccgagctggaggcccaaattggcattctccccgcgaagggcatttaattcttcgcgcagggccacattcgccatgcggaggctgttgagatttcc

SEQ ID NO: 199084 - DNA, 122 bp, Homo sapiens
gttccatgactaaaatggaaaccccaggaggccaagacttttacttgttttagtcactgccgtatcccttgtgcctggagcagtgcccagcacgcggtgggcatgaggaagtgtttaccgga

SEQ ID NO: 199085 - DNA, 122 bp, Homo sapiens
aatcgttggttttagcactagtctgtgtaaccaaataccacctgtaccccctataacttacggaaaaaaagtgaaatgtcttttgcactctgttatttcgagtttgttgatttttagcaaca

SEQ ID NO: 199086 - DNA, 122 bp, Homo sapiens
tccgagctccccgcgagaggggacagtcacgaataacaacagtacccagcgcagactaggcggggaggaaagtttccggcccgcagcagagcggagtccgccaaggctggaggaaaagggat

SEQ ID NO: 199087 - DNA, 122 bp, Homo sapiens
aggtgagaaggcggagatatgaccttagaggtcagacccatgataaacttgagcccctaacgaaagggtgtctcgaatttacttgtcctggtggcagagggtgagggacacattttgggcgc

SEQ ID NO: 199088 - DNA, 122 bp, Homo sapiens
gctgttctcgcccagatcctgtccattgggctgcaggtcagggcagctgcaggtagacttcgccttgttccttccaggcatggccagaataggaaagggtctggcagcagcagagtcttcgc

SEQ ID NO: 199089 - DNA, 122 bp, Homo sapiens
catccccacttgctcactgccccagccccctggccttactccattcctcccgtagagccccgagttgtgggtggtcgctcctgtctaatcattcaccctcgatacaaatgtgcttttagaac

SEQ ID NO: 199090 - DNA, 122 bp, Homo sapiens
gcatgcacagcacacggccatctgatcctgtgctgcagtggacgctgactttcgccacgccgtcctctctggcccagcaccggcctcctggcctcagaggagcagacactcccagtcccagg

SEQ ID NO: 199091 - DNA, 122 bp, Homo sapiens
atgctgaaggttataagcaggggagtgccatatctagatctttctactcttgtggcagtgcgaagcagggactggaggaggttaatgctggaaattgggaagctgacagctaagctggttat

SEQ ID NO: 199092 - DNA, 122 bp, Homo sapiens
ccccgcgcaccccctccccgatctgggctgggctaggccgggtgggaggatgcgcgttgccgaggcccggcccgcggaggtcagttcccacgcctcctctccagcgtgactagtggctgagg

SEQ ID NO: 199093 - DNA, 122 bp, Homo sapiens
tttatataaacagcagcagtgggtccgacagggttgggtagtctgggacaacaactaaatcgctgtttcataacaaggagtccaattctagcttcttcatttaataaagatagcaaaagtat

SEQ ID NO: 199094 - DNA, 122 bp, Homo sapiens
ccttgtccgggaacatcttcggagaccatgtatgggtaggggggagccaggctcctccatcgagtccatagaactgtttacctggaaacagcaagaccgaggcagctgtgctctcacctttt

SEQ ID NO: 199095 - DNA, 122 bp, Homo sapiens
ccggtttgactgacgagcccggggcttctgagcagggcactgtggctgctcacagcctcgcgagccttcgtcagcatccaggtccccatggcaaccacctccaaaacgccctgttcccgttg

SEQ ID NO: 199096 - DNA, 122 bp, Homo sapiens
cgaatcttctatccatgaaattgtgaagaaggaaaaagaaatttgtgccagttttgctgtcgcacctcaaactgcaaaagttatggctacagtgtgtgagaagcacttagttaggatggaaa

SEQ ID NO: 199097 - DNA, 122 bp, Homo sapiens
cctcctcctaggccggctgacagcccaggccccgccccaccgccgccgccagagccgccgcgcacgcgcgcttcgacgccacgttcacagccccagaagagagaactaaggcgcatgctcgg

SEQ ID NO: 199098 - DNA, 122 bp, Homo sapiens
gcggcagcggcagcggcgtggagaggatggggtatcttgagaggcaggcgcggttatttccggggacggtggccaaagtaccctcacacccagaggcgatgacagtcctgaggcctgcaagg

SEQ ID NO: 199099 - DNA, 122 bp, Homo sapiens
gccacctagtatgacctgatagttactgcctctttccagatagtggaaaccaagagaaagcgctcccacttgctcacaagtcaagctctcaaggacataaaataagatgagaaggaacctca

SEQ ID NO: 199100 - DNA, 122 bp, Homo sapiens
agccagtttaacacaggaggtaccactgtgccacgcaattccctcttagcacacaccatgcgtgagctgcagtctttgccctccaggccttttcctatcataacacaggtgtgtccaaggca

SEQ ID NO: 199101 - DNA, 122 bp, Homo sapiens
tttcttttcattcttaaaggtcaagccttgtttttgccgtatatgtaactagagacagtacgtttgaggctaaataactgtagtactagggaatgacaacacgctcacccaagacaccgcag

SEQ ID NO: 199102 - DNA, 122 bp, Homo sapiens
cagctctgtagggagggaggtgtcctcatagtctcaccttgcaccgggtgctgtgttcttcgtggagtttagtcctcttatggagaactcctgatctcattgccggataagcacaccaaggc

SEQ ID NO: 199103 - DNA, 122 bp, Homo sapiens
acgcctgagattggggggaccaaattaaaagcagctgtttaacataccttccgagccaggcgaggagtcctgaatgggggggaacgccccccacgggctattggctccccggcgctcacgtc

SEQ ID NO: 199104 - DNA, 122 bp, Homo sapiens
actggctctcacacctgcccgtcaaagacgttcttccgggggcgttgggaagaacacactcggtcctgcaaatcaaatcaccccggtttgggtgggactgcacttgaccctccccttacgta

SEQ ID NO: 199105 - DNA, 122 bp, Homo sapiens
cctttttattcaccacggggattgcttaagagtactcgggtgtcctccagtgtagttccacgttctccaaccgtcgctctggcgacccttcgatccgggttcgagccccaagtttgggtgct

SEQ ID NO: 199106 - DNA, 122 bp, Homo sapiens
ccatgaacccaccaaggacaagtagggcctggttttagctgcaaatgcaacaagtctctccgctgagccgcagctgctaccctctgccttctgctcctccgccagggcacggccccccctgc

SEQ ID NO: 199107 - DNA, 122 bp, Homo sapiens
ccagcctcttgccatcaccataatcccgggccaggtaagtcggccccgagggaggctctacggcccataccccaagctaccgggctcccctgtgaacagcacccttctgcccccacccatct

SEQ ID NO: 199108 - DNA, 122 bp, Homo sapiens
ctcctcttcactctgctccatccactctggcctccctgctcttccgggaacacagcaggccgccggatatctgtgtgggtggcttgcttggttccctctggcctttactcaaaaatcactgt

SEQ ID NO: 199109 - DNA, 122 bp, Homo sapiens
gggaaagggcgaggagccggaccctatcccctcctgcccagttccaacgatcccttactgcgcaggcgccacacacagacaatgaaaaggggttgtgcgagggtctcacccacacgcttttc

SEQ ID NO: 199110 - DNA, 122 bp, Homo sapiens
gaggcccacagagttgggggtcacatctgtcactgtcagctctcctaggcgtggctccagcggggactcagtggctggaggggtctcttcttgttgtggggctgggacagagatggtagggg

SEQ ID NO: 199111 - DNA, 122 bp, Homo sapiens
ctcaggctgtcccgggtgtctggagagcgttcactctcccaggccaagcctgccttgggacggggctctggccaggcctgcctgccctgctgcagtggcccagcccatctcctccgatggaa

SEQ ID NO: 199112 - DNA, 122 bp, Homo sapiens
ctgtacactaaacatagcaatattagtaggcttttaaaaaatcttatcatcacaagcttccgtttatatctctcagccttgatgaaaggaagctgacttttgctttactctaagtagcattc

SEQ ID NO: 199113 - DNA, 122 bp, Homo sapiens
gaatatgaaccccaaaacatcccttggataaggattattttaagctgattatatagcatacgcaggagaagctctgaaaacagtatgttacccttttgtaaggataatttatattttataaa

SEQ ID NO: 199114 - DNA, 122 bp, Homo sapiens
gcagccgccgctgcccgggaggaaaggagcccccggcggcggcggcggcggcggcggcggcggcactcacccatagtacggatgcgctgcaaactgcacatgctcgcgtctgacaggcgctc

SEQ ID NO: 199115 - DNA, 122 bp, Homo sapiens
cgagcagcagcatggcggggctccgacgcccgcagcccggctgctactgccgcaccgcggcggccgtgaacctcctgctgggcgtcttccaggtcctgctgccctgctgtcgcccgggaggg

SEQ ID NO: 199116 - DNA, 122 bp, Homo sapiens
gagaaacagctcccgaagagctttgctcaaacacggggctgtctggtggtgggcgttctgcggaggcaactccgatgcccacgaggggtccctgccaggtgccacaggccaggcgtctgacc

SEQ ID NO: 199117 - DNA, 122 bp, Homo sapiens
tctatgagttaggaggtaagtacattactgcctacatcactgcccctctgggaaaaatgtcggttaaggggccacagcactggtccccttcccagttgtaataatgcttgcatgtcccttaa

SEQ ID NO: 199118 - DNA, 122 bp, Homo sapiens
tctttttctaccaactagaaatgctgagatgaggctaatagtagcacagccatatttcaacgatgaggcaagccttgattctgagaactatgtgataaggatcaccaagcatgaagactaga

SEQ ID NO: 199119 - DNA, 122 bp, Homo sapiens
ttatcgtgcatttactttgtgcttatttgtaatacagcaatttaaaatccatagtcttttcgtaaggaacattttcataggaaataggacccatggaaaattaaatgatactaaacatcgaa

SEQ ID NO: 199120 - DNA, 122 bp, Homo sapiens
tcctccttttgctttacaagccctggggcaagtggttcaggctggcaggatgaaaattggcgtgtgagttttgggaggagtattcactaactttacttgttttgtgattctcttggaaggta

SEQ ID NO: 199121 - DNA, 122 bp, Homo sapiens
taaatctagtgcaacctagtggcaagtggagaaaaaaataactgccaacctggcttcctacgaggtcccccggagttctcgcaaagttgcgacccagttggcaaaaatacagtgtgtgcaaa

SEQ ID NO: 199122 - DNA, 122 bp, Homo sapiens
aggctaggcatagtggcatcccttgtgggaggcagaataatgccacccaaaagatctccacgtcctactccctggaacctgtgaatatgtttctttacatgacaaaagagactttgcagatg

SEQ ID NO: 199123 - DNA, 122 bp, Homo sapiens
acagatagccccctcccatccctgacggccagggagatggagctcggatctgcaacaagacggattcttaatgattcttactgaagggctttattgagcaggctatgcaaatacacacgaag

SEQ ID NO: 199124 - DNA, 122 bp, Homo sapiens
agagagtatttctactttatattttagcttatgttcacagcataaactacttcattcacacgaaactgagaaaaagctagaaaaatcttaccattttagggacaactgttatgacatgcatg

SEQ ID NO: 199125 - DNA, 122 bp, Homo sapiens
ggaaccatttcttgggcaggacttccggcggaaaagcgggctgtctcggaaactcagagccgggttcctcccgggtttctgccgggtttctccctgcggctcctgggttgttgagactcttg

SEQ ID NO: 199126 - DNA, 122 bp, Homo sapiens
aagtaatcctcccacctaggcctcccaaagtgctgggattacaggcataagccaccgcaccggtccccaaagacttttgaaaagtgtgggctcattaggagaactaatccagaaggaaaaga

SEQ ID NO: 199127 - DNA, 122 bp, Homo sapiens
caaaagtcacaaaccatcatgtctgctatattctatttattagaagtgagtcaacaagttcggtccacattgaaggaaaggagaaaattaaactccacttttttttttttttttttttttga

SEQ ID NO: 199128 - DNA, 122 bp, Homo sapiens
tccccatttttctcattcacgagccactctttgacaacagcgcaggtaagtgatgggaagcgaggtctcctcagagctccaggtggcgttttcagccgctccgtcctacctcggcggcgtca

SEQ ID NO: 199129 - DNA, 122 bp, Homo sapiens
ctcccagcagggcctccaggctggggaccttcaggcaggtacctccaggctggggaccttcgggcaggtacctccaggttggggacctcccagcagggcctccaggctggggaccttcaggc

SEQ ID NO: 199130 - DNA, 122 bp, Homo sapiens
atcaggctgcgagacctgttgtgcacgtggctgtggggcgatggctgcccctgtggtgggcgccgctgcgtgactatgtgtcctcgtcgcctcctcctccctctgctgcggggcatctggga

SEQ ID NO: 199131 - DNA, 122 bp, Homo sapiens
agccgggcctgccaactgattcggaaattcccagaatttgaccatgggcttgcggcggggcgggagacctgtcaggccgtgtggccgtcgctagactcggggcagagcagctcccacccacc

SEQ ID NO: 199132 - DNA, 122 bp, Homo sapiens
ggcgagctgccggctccaagcggtcctaggcgagctggaggcggggcccggggaggggcccgacgctccggggcggagcccgggactcacggccccgcctccggggtgggaggggggggcgg

SEQ ID NO: 199133 - DNA, 122 bp, Homo sapiens
gaaaagagaatctcttcatgttctagcacagtcattacccagaaatgtaggtattgcaaacgtggttgtaattgatccctgaaagcagccagaacatctgacccttgggcacggtgatgttt

SEQ ID NO: 199134 - DNA, 122 bp, Homo sapiens
gaggcaggtaaggaggtgcctgtgcgaggtgggggtggagccaaggctgtgtacctccgacgctgtgcacctctctgatgggacccagtccagacaaaaattgtatataacaaacccttgta

SEQ ID NO: 199135 - DNA, 122 bp, Homo sapiens
ctctgcgcaggctgctgcggggatgcgtgtgggatttgagctgtgcgctcaggactcgtgcgcttttctctgtatgtgctgtacttagatacaatatttacactaaaaaatcggggctgtgg

SEQ ID NO: 199136 - DNA, 122 bp, Homo sapiens
gcatgtgttactgacatcagttaattctagcattaccattattaaagtcttttattgtcacgaggaaaagtgaaggcaattttgatgcatcagcactttaccttagtataaatactttaaag

SEQ ID NO: 199137 - DNA, 122 bp, Homo sapiens
gtcaaaggacgatgtgggggttgcagggtgacccgaggtcacgtaggcaaggtcaaaggacgatgtggcggttgcagggtgacccgaggtcacgtagggaaggtcaaaggacgatgtggggg

SEQ ID NO: 199138 - DNA, 122 bp, Homo sapiens
cctggggcggcgcggtggagcgtgtggaggtttccgggaagacgcctacggctgcggctccgactgtgcgggctcccgccgcccaggcaagagcgtccaggagcgcgctggaagctgcggcg

SEQ ID NO: 199139 - DNA, 122 bp, Homo sapiens
aaaatccatagctcctggaaactcagtgttgggctatgttgctcactgattctggcaggccgcggtgcacattcctgacccaggctttgagtttgttttgagaaaaagctgtcatcagcttt

SEQ ID NO: 199140 - DNA, 122 bp, Homo sapiens
gagtggagccaggaacaggcagaagccccgccccctcctgagttgatagggtgggaccttcgcgctcacgggtgcagcctctgccgcccggctgtggctgccgaccaaggcctccctgtgct

SEQ ID NO: 199141 - DNA, 122 bp, Homo sapiens
tcttacctgatctgttaggaagggtgcagtattctaaagtgtactgcagacgtgtgtaaacgccatgcctgacacacactcaagcccccacgccagccggagcaggacggggcagcagcagg

SEQ ID NO: 199142 - DNA, 122 bp, Homo sapiens
cagcacgcagctaggacagagaccaccggatgttcccacctggccactgatgggccctgccgcaggagcaacaagaatcacaaaccatagctcccggaaccagagataaaagaaattctttc

SEQ ID NO: 199143 - DNA, 122 bp, Homo sapiens
aaactcgtgattggtgcggccagcgattttaataataatgacagctaagattgatcgtttcgttaagtgttttatacacatcctctcattcagtcctcggaacacaccaaggagaatcatag

SEQ ID NO: 199144 - DNA, 122 bp, Homo sapiens
tgcggcttatggtgggtcttgagagcaagctaagatgtcccgccagacgctcaggaccatcgctctgattttcatattttgcaaatatgaaaattttcagcggttacgaaggactgaaaaac

SEQ ID NO: 199145 - DNA, 122 bp, Homo sapiens
cgctccacccaggccctagagcccacccttagagctgcgcgctttagggtgagccaggcacgatgccttgccaacgtggccgcccccttcctcccaggcggaattcgctcaggcaacattgg

SEQ ID NO: 199146 - DNA, 122 bp, Homo sapiens
gctgaaatggttaatattcctgtctctgcccgcctcctcctgtattctaatgtatgaacccgctcattcagatgtgagtgggacttggggacagcttgccttccctacgcgattgtgtatgg

SEQ ID NO: 199147 - DNA, 122 bp, Homo sapiens
gacctcaggcgatccacccgccttggcctccaaagtgctgggattacaggcgtgagccaccgcacctggccatattacgtttaattttataacctaaaaatgtgtgggccaggcgcagtggc

SEQ ID NO: 199148 - DNA, 122 bp, Homo sapiens
attcttttagtgtcttttctgctgtgaagcagttttggggcaagatcttttgctctggtccggataactctgggcaatatactccaagtcaaaggctacagtgaaactgggtgactggcaaa

SEQ ID NO: 199149 - DNA, 122 bp, Homo sapiens
gccagctgagaaaacgcccaccccggcggtcccgccacaggtcacaggcggtgcggaccccgggactgtgtccgggcttcggtgtccagagagctccaagacacccaaaccttccgtggttt

SEQ ID NO: 199150 - DNA, 122 bp, Homo sapiens
gctctgattcaagtgagaagtgcagatgtttgtgactgccgaggggcgtgtacgtgcagacgacccctgcaaatgcacagccggcctgtggctggagaaccgaggactggggtggggctggg

SEQ ID NO: 199151 - DNA, 122 bp, Homo sapiens
ccttccacctccctgctgggcgccgcgtgcttgcctggtggccaccggggggcggtgatgcgccgtgaagggctcccaggactgcagagctcgtagccgcccggccgcaggaagcctgcaag

SEQ ID NO: 199152 - DNA, 122 bp, Homo sapiens
gggttggaaagtctgggggtgctcgctgggcatcgcctgacccctgggctcttgaactctcggatggtgaagactctcccgtcctcctgggattcccaggagttggcgtccacctgaggcgc

SEQ ID NO: 199153 - DNA, 122 bp, Homo sapiens
ccagctggagctgttttcccagggtctttcaaaagatttacagatatgcaccattagctgcgaacactttctagtaaatgacctccttttgctctatcccactgtcaacgggcccctcttgg

SEQ ID NO: 199154 - DNA, 122 bp, Homo sapiens
ttattctatgccagcaccaaaaatatttcagagatgcttttaggcttctctcaagtatgtcgggaacagaaaaggattatagaaatatttatagtaggcataaacttgcacaaaagctcaaa

SEQ ID NO: 199155 - DNA, 122 bp, Homo sapiens
acctgatctcgacgttatatgattggttaaactctgtaagccccatgccgtgcctagagacgagaaacgctggggcgaactgacaggcccagatttaggagtcatgacgaagatcctgagac

SEQ ID NO: 199156 - DNA, 122 bp, Homo sapiens
cacacattctacccagactacccagctgtaagcagagaggtgtagatccaagtctcctgccggcagggtgatttagcgcagttgtcaataatctgtacaacacgtaacaataaagttattga

SEQ ID NO: 199157 - DNA, 122 bp, Homo sapiens
atgcggtacggggagacattgaagctggctccttcctccgcgtctcagtgttagcagctacgacagaggccagccctacgccaccgagtggtcagacgacgagagtgggaacccctttgggg

SEQ ID NO: 199158 - DNA, 122 bp, Homo sapiens
cgacccatcccgctagaatccgtccagtctctgctcgcgcaccgtgacttctaaggggcgcggatttcagccgagctgttttcgcctctcagttgcagcagagaagcccctggcacccgact

SEQ ID NO: 199159 - DNA, 122 bp, Homo sapiens
tgcagctgctgggagccacatgtgcagagcaggcggagcacaagctacccctggggctagcgagggtgggggctgggaccatctgtctgtgtctgtctgtctacaacacacacatgcatgta

SEQ ID NO: 199160 - DNA, 122 bp, Homo sapiens
ctctggctgctgctccacggggcttgttttggatccccctgcagtgaaacaggtcctgtacggctccgccactgtagtagaaatgatgtctgcggtatactctgctctctcctcctcctcct

SEQ ID NO: 199161 - DNA, 122 bp, Homo sapiens
ctgttctgtggtgggagcgcagtgggagccgcagggcatcggggtcttcgaaggaaagcccgtggattatgcatccaggaattaaagcagtccatgcaatggcagccgccaagcagagacgg

SEQ ID NO: 199162 - DNA, 122 bp, Homo sapiens
acaccgggccggcaccccacagcgccagtcacccaccccacgcggctggtctccccgcaccgggctggcaccctgcaacgccagtcacccaccccacgcagctggcatccccgcaccgggcc

SEQ ID NO: 199163 - DNA, 122 bp, Homo sapiens
ctgatgcacctgaatgtggggtacacgtcacacgcagccccccatggtaccacatcctgacgcatctgaatgtggggtacacgtcacacacagcccccccacggtaccacatcctgatgcat

SEQ ID NO: 199164 - DNA, 122 bp, Homo sapiens
caggagcagcagcactggcctgtcgacagtgcaggtggctggcaatggccttgctgacctcgagccgggcccacgtggggacctttggagcacagcctacgatcctggtgcaaggaatgtcc

SEQ ID NO: 199165 - DNA, 122 bp, Homo sapiens
gttccttaacacctgagacaaccgtgaccacagcctccatgtaaattctaatccattgcccgtctagcggctgggtgacgccacaaggagcagagaagaaatctaggcaaagaacaagtgac

SEQ ID NO: 199166 - DNA, 122 bp, Homo sapiens
tttctaatgaactattttaactactatgctctgcgacttgccctgattctttgccgtggacgtctaagaacctgctcttgggtctggaatgagaccctttttctgttaattcctctattcca

SEQ ID NO: 199167 - DNA, 122 bp, Homo sapiens
cagtccctagtgtgttctaggtttcggtactgaacgacacaagatgtgcgccagattgagcgcaggaagaaagaaacaccctttagtgcaatacgaaatgtgactcagccagcggggagcgt

SEQ ID NO: 199168 - DNA, 122 bp, Homo sapiens
ctctcgtgtattcggtgccgcgactttcacgatggctcgcccaaccttactaccttctgtcggccctgctctctgctgccttcctactcgtgaggaaactgccgccgctctgccacggtctg

SEQ ID NO: 199169 - DNA, 122 bp, Homo sapiens
ccccagcgagggcgtgcggagtttggctgctccggggttagcaggtgagcctgcgatgcgcgggaagacgttccgctttgaaatgcagcgggatttggtgagtttcccgctgtctccagcgg

SEQ ID NO: 199170 - DNA, 122 bp, Homo sapiens
ggcatccggggtttgagatcgcggtgaaaactcacggatttaaggcagatagatcagattcggggttgaaggctccccactggagtcggcatagagcgaattccgcttggttaaaggcgcat

SEQ ID NO: 199171 - DNA, 122 bp, Homo sapiens
ctctaacaattctaacattcttcagcacaagcttaaagaattccccctttgggccaggtgcggtggctcacgcctgtaatcccagcactttgggaagccgaggggggcagatcacgaggtca

SEQ ID NO: 199172 - DNA, 122 bp, Homo sapiens
aggaaaacttaacctggcagaatgggagggcagtggtggtcaagaaacaaggataatgttcgggtttctggatgattagatggtggtgtgatttattgagatttgggacaaaggatgaagag

SEQ ID NO: 199173 - DNA, 122 bp, Homo sapiens
tgggaaatgggcttcgcccgtacgaacaatccggggaaatcgcctcaaggaggatccttacgcagcatgtggaaaaaagttgagggcaggggtctgtggccacattttccatcaaaaagtcc

SEQ ID NO: 199174 - DNA, 122 bp, Homo sapiens
cactcagaaatctccatgtggccacaggaatgctgacttggcttcccagcaccatgtcgtcgtccttggcaggctggagctgggctttgtggtatgttagatttgttttttttcttctggag

SEQ ID NO: 199175 - DNA, 122 bp, Homo sapiens
actgactgagggctggggagagaccaactggacccacagcagctctgggggatccccaatcgggggttctggcagagaacgagcccggcctgcttcagtagcatggagctgggggtccagaa

SEQ ID NO: 199176 - DNA, 122 bp, Homo sapiens
gaactcgaagagctccttgagcgccttcatggcctccaggatggtctcgtggatgttctgcgccaccaccgagtcgtccgcctgcatccacagctcgccggggcctgtgacggccgagcggc

SEQ ID NO: 199177 - DNA, 122 bp, Homo sapiens
aaagaccgcccagagtatgaagttttaaacaagggtcaccttcagattcagatggaaaaccgaggtcttgaccagtttcatacatttgttaagcagactccgttctgagttagatgaaaaca

SEQ ID NO: 199178 - DNA, 122 bp, Homo sapiens
cccggcccctggcccgactgcccccccggccttcgcttcgctctttcccccgggactgcacgccatctacggagagtgccgccgcctttaccctgaccagccgaacccgctccaggttaccg

SEQ ID NO: 199179 - DNA, 122 bp, Homo sapiens
ggggagacgggactggggttgtttgggagggggagaaggtgtatcgctttcggagggtgacgggagggagttcgttcccaagccctgctgtccttgttcgtgcacccaatactggcatgccc

SEQ ID NO: 199180 - DNA, 122 bp, Homo sapiens
gctgcagtcacctcagaagaaagatgccccctgctctggctggtcaaacggaaccaagtccgtcttcctgagaggtttggtccccttcaaccagctacagcagggctggcaatgcccagtcc

SEQ ID NO: 199181 - DNA, 122 bp, Homo sapiens
ctaaaagaaagggtgcgtgttctgtgttctcccgccggtgtgttcctcttcatgtccagccgcttgtgtctgtgcccgctagggtctcgggagtttttataggcacaggatgggggcgtggc

SEQ ID NO: 199182 - DNA, 122 bp, Homo sapiens
gtagagccgttcccactgtgaattcagtgtaacgtgtaatcaatacccattctagggacacgacaggcctcaccacactcaacttaatgctactgcactggccagtcacttccaccacgtgg

SEQ ID NO: 199183 - DNA, 122 bp, Homo sapiens
ccgcagcctctgcttgcccttatcggcgctgcgctgggagggcgggcgcgcgggcggcgccgcggatttggctcctgatttcgggccgtcttgccttgcagattaagtacacgggcttcagg

SEQ ID NO: 199184 - DNA, 122 bp, Homo sapiens
gaagggatccgagagcgcagctgtgaaactggctggggctgggggcacgaaaccgatcagcgctacggagcgcagcggccggcgggttccagtgtcctccggcggcgcggggagcaggtgaa

SEQ ID NO: 199185 - DNA, 122 bp, Homo sapiens
gccgcggcgccgggaggccgaggccagtgcagcgacgcatggggagtcgctctggcgtgacgtcagaatccaatagaaatggcggggaccctttctgggtgccccctgcctgtcagacgctg

SEQ ID NO: 199186 - DNA, 122 bp, Homo sapiens
ggagctttttgaaggcatgcgagagagcaccaaggtactttttgtctcctctgtagtagtcgagagacttcgattcctcacacattttcctgtgtgacagcacttcatttgtccaagtggga

SEQ ID NO: 199187 - DNA, 122 bp, Homo sapiens
ggatttatctcggctcctacttcgagttctgtgactacgcccttcggaacgccagttgtacgggctagaaagtgtgtctgagctctgccctctgtccctatccccggttgtttcttctcttg

SEQ ID NO: 199188 - DNA, 122 bp, Homo sapiens
aagagaaggtgagagtacacctgtgtaaatggagcaggattaatagatcaaaattccaggcggaggttcagtggaagagaaccttttagtttcaccagagatgtaagtccaacagtcaggaa

SEQ ID NO: 199189 - DNA, 122 bp, Homo sapiens
gagaatagacactttacccacctctaatttttatcctgcttagactatttttgtaacctccgatggttcttcctttgctttctgggtagatattgtttgaaaaaaatgcttgcagagaaatt

SEQ ID NO: 199190 - DNA, 122 bp, Homo sapiens
ggtaggtaaatcggccgcagaaaagaccaatgctaactccaccctgcatttgcagagatccgtcgctcacaccttttcttgtcttccgttgaaaaaagagaatcgtgggagtaggacctatt

SEQ ID NO: 199191 - DNA, 122 bp, Homo sapiens
ctgcctaccctggcaagagacggtcaccacgcagcaaaatggggaagaaaaccaaacagccgtgacctcacggctcaaacgccagaggagccagtggagaacacgcagaaggcccggctgag

SEQ ID NO: 199192 - DNA, 122 bp, Homo sapiens
cttcagaattacacccggtgaaagtggacgtctctgtccgttcccctggatccacggcggcggccgagagctccagggttttctcgcgctctgtcttctgtgcggcacccggctctggggtc

SEQ ID NO: 199193 - DNA, 122 bp, Homo sapiens
accgggattcccctttggccatctctcattctttcaattctaaagatggagactggcgaacggcgatggggtctgcggtgggcggtgtttcgtcgcgacagactctaggaaatttcacgata

SEQ ID NO: 199194 - DNA, 122 bp, Homo sapiens
atgtaccgcgccatccaagaccagctggtgttcagcgtgtctgtggagatgctgcgctgccgcaccgccagctacatgaagaagcacgtcgacgagttcctgcccttcttcagcaaccccga

SEQ ID NO: 199195 - DNA, 122 bp, Homo sapiens
aagggccggaggggaaaaggacctgtggccacagtgccccctggtggctagagcttcgcacggtagccttgctatggcgcgagaagtgatactgcgataggaactgagggtgggtaaaggtc

SEQ ID NO: 199196 - DNA, 122 bp, Homo sapiens
accagaaaacacaagaaagacaacattgccaaatcaaaaaagtaacaaattgggagcagacgtggggtttgttttcacacttctaggtacattttctatgaacgggggagaatgaaagcata

SEQ ID NO: 199197 - DNA, 122 bp, Homo sapiens
agaaatggttttactgtttttaaactctgggagcctactcctttaagagattaggcagtacgcctattctcgcctggtcccagcgtaccttgcgcggctcgccgtcccccactcacgtacca

SEQ ID NO: 199198 - DNA, 122 bp, Homo sapiens
gccagtccactctaggtggtatgattgagtgccatggcggccagagaaccctgtaagagacgtgaatagttacccacacaaatacaaatatatttgcctagacggctttgggaagaagtgag

SEQ ID NO: 199199 - DNA, 122 bp, Homo sapiens
ttttggaataagtttttatttatctaactgtgaatttcactagagttgtaaaatgtatgccgaacataggatttggggattgcaagcatttacagctgatattcaatttctttcttttcacc

SEQ ID NO: 199200 - DNA, 122 bp, Homo sapiens
tcacttacgcacggcgggtgacagttcacaaggcacatgacatccctcatcttgatctcccggtatccgcgcattttaggaagaaacatgctcaaagggatgaagggtccgctctcaagcat

SEQ ID NO: 199201 - DNA, 122 bp, Homo sapiens
ccacccacatcatttatcatctttctgaacacttccccagaacactcctttggttccaagcggggtaaagtcctgggcacaagccagcgtcacccatggagcacatggagatggtgagtgca

SEQ ID NO: 199202 - DNA, 122 bp, Homo sapiens
gcggcgcggccacggccccgagcccgactcgcccttccgccgcagcccgccccgcggccccgcctccccgcagcgctgacctccacgcccggacccctggccaccccgacaagcttcgccga

SEQ ID NO: 199203 - DNA, 122 bp, Homo sapiens
gtcttccaggtcattcctgcacaggacagtccaccatggcctcagatcaccagacccaggcgggcaagccacagtccctcaaccccaaggtgggtacctctcagaggagggggcatgcaatg

SEQ ID NO: 199204 - DNA, 122 bp, Homo sapiens
gattgagatggtccatcttgaactgattccagcgttcaggcacgaaccttttcgctgagtcgccttgggccaatcactgaacttctctgagcattggattcttggtacagggattggattag

SEQ ID NO: 199205 - DNA, 122 bp, Homo sapiens
gagtcagcctttgggctggagacacgggagcgggtggctacagtggtttacgttgttgcacggggcgagtagaacgtatccttctttgcgtccaaaatctggttccttgttggatttgaaca

SEQ ID NO: 199206 - DNA, 122 bp, Homo sapiens
cgcgcctgcgcagtgaagctgggcgccttcggggcttgagcttctgagggtcgggtccagcgcgtgggctgctggatggcggaaccccaggcggagtcggagcccctgctgggcggggcccg

SEQ ID NO: 199207 - DNA, 122 bp, Homo sapiens
gggcagccccgagaatgaggagcatatcctgtccttcgagaccatcgacaagatgcgccgcgccagctcctactcctccctcaactccctcatcggtgagtccgcctgcccctttctgcttc

SEQ ID NO: 199208 - DNA, 122 bp, Homo sapiens
aggacccccgagagccctgccgcgtctacacggatcaccccctccggggcccagctgcgtcgacaagggctacccctctcaaaagtccagccacctggactcgggtcaccccccaggaaccc

SEQ ID NO: 199209 - DNA, 122 bp, Homo sapiens
gcggcgggtgcttagtaagtatgggctccctttacctaccccctccgcccctacaagcctcggggttcaccctttaagacctttgccacagggtgtccacgcggcctccggggtccccaggc

SEQ ID NO: 199210 - DNA, 122 bp, Homo sapiens
tggagtcgagaaagaggaagaagcgagggcgcgtcagtacagaccgtgggctgcgtgtcacgtcactgctgagcgaccgcgcggttccctgctatttgtaccgcccaaggcagtcctagctc

SEQ ID NO: 199211 - DNA, 122 bp, Homo sapiens
cttcctgcatcacatagctcccggccactgacagcttaaaaggtggctgctttctttgtccggggctcagacttttctggacactagtccaactgagccaggtgatcaccttttaataaaga

SEQ ID NO: 199212 - DNA, 122 bp, Homo sapiens
ttcataaattagaagagttgatatcatttcaaaaacaagcacttatggaggaagggctgtcgccaaactgcgcaggctggcctcagcgagccagagcagagctgtgccagcatcttcagcag

SEQ ID NO: 199213 - DNA, 122 bp, Homo sapiens
aattgcatagtaaatttgagtttattctagtataaattttggatgttttgaagaattgttcgcttgaacgatctggaatggttaagtcacatgtttacttgataattttgcagtcttctgcc

SEQ ID NO: 199214 - DNA, 122 bp, Homo sapiens
ccatccttcctggtggggagcagagtccggagcccccggggaactttccatcccttgtggcggaggatgggggtccggcgctatttggctgcaagaggccgtttcctgcctcagaagtgcag

SEQ ID NO: 199215 - DNA, 122 bp, Homo sapiens
acttcggcttcgaccccagccttttcttcctgcctccccccgggcgagtgactgctttcacggccgaccctctctgaccaccaggacgaggggccaaaaaagaaagcacacgacccggcgcg

SEQ ID NO: 199216 - DNA, 122 bp, Homo sapiens
gacagggggcgctctgcacagggaccggagggagcgggagccgaacttgcgtgagaggcgcggggccacccgtgcaggtgtaggtggagccactctgccaacccctgggcactgggcagggc

SEQ ID NO: 199217 - DNA, 122 bp, Homo sapiens
ccattcgggtcgccatgtcatccctgggggcctctcctagcgtgcccacctcggctcctccggggcaaggtcatccaggctacacagatgctcagggtcctccttgccaggggctgcaaggg

SEQ ID NO: 199218 - DNA, 122 bp, Homo sapiens
cagcgtctacacattggggctcacagagagatctggaatgtgaggctgtgataggccacccgaggcagagccgggcagttggtggctttgattgtgtgtgtgaaagggtgtctagaatgatg

SEQ ID NO: 199219 - DNA, 122 bp, Homo sapiens
aggcactacctgacttggatcggtggcttcccttctcggtgtaatggacaaatcggactccgtcccttcctaaagcccggtgtggaagacctcagcactaatgcctgccccaccctctctgc

SEQ ID NO: 199220 - DNA, 122 bp, Homo sapiens
tgggcacagccactgtggtgcaggggatttgggccttgaaagctccaggagccccaaggacggcgaagggcagcctggagttggggggcgtcagcgagggcgcgggcaggggagagaggcgc

SEQ ID NO: 199221 - DNA, 122 bp, Homo sapiens
gttggggtctccagcaatgactcttggcgaccccgcctatcctggggagcccggggaggacgttcgggatctccttccaaagcctccgtcttaactgaggggagaggagagggtgaggtgtc

SEQ ID NO: 199222 - DNA, 122 bp, Homo sapiens
aaggatggagcggtcaccacgcctttcctcctgttcatcctgtgtgcacagttccgacgccggaggagatgtccaacctgacaccagagtcgtccccagagtaagtggcccctgctggaggc

SEQ ID NO: 199223 - DNA, 122 bp, Homo sapiens
catagaagtaatcaggggaccctgggcacaactccctctctccttccccatctaccaggacgtggagtcacactcctaggcatgtgtggacaggctgcctacacacgggcaggacatgtata

SEQ ID NO: 199224 - DNA, 122 bp, Homo sapiens
cacatagctattagtagtcactttctcctcttcctgtaaccactaatctgcttcctgtctcgatggatttacctgttctggatattttatgtaaattgaatcatacgccctgtggccttttg

SEQ ID NO: 199225 - DNA, 122 bp, Homo sapiens
ttaagactaaacccactggaaaccagccacggtgatacaatctgcagagttcatctttctcggtcacagtgtagggcagaggagtatgtagaatggagtgaaggtgtggcaaatggaaaata

SEQ ID NO: 199226 - DNA, 122 bp, Homo sapiens
tggcctacgggagacggtagtgaggaggcccttcccacaaatgtccccccgcagcggtagcgggtccctggggctgcttcgcctggtctgtgccccacatcaggaatcatcccccgaccttt

SEQ ID NO: 199227 - DNA, 122 bp, Homo sapiens
tgctccgaaatgggcgcggctacgcaggtccaccagcaggtggcgcaagggcctgggagtcgctcgctctacgagcgaagccgccagatgggataaacccctcccgggcgagggctcccctt

SEQ ID NO: 199228 - DNA, 122 bp, Homo sapiens
atctatgcttgctgaagtgacccgaacaaatgcagatggagtggggtcgagtgggggaaacgctttctagggagagggaacaccacattctaaggctacacatccagaaggagcttgagcaa

SEQ ID NO: 199229 - DNA, 122 bp, Homo sapiens
aggagcaccacctcacctgtgccagggccaaactgtagcagggccgggctgtttctcgcccgaccccgagtcccgtgattagacgcttcagggcatatttcatctcggacccctgcggaacc

SEQ ID NO: 199230 - DNA, 122 bp, Homo sapiens
aacgctgcctctctgagaccagctgtttccttattctcaatgggagacagagtggggagccgccacgtcaccaggggaggtgacagctccctcctacctgacaaacggttacgatgtcaagg

SEQ ID NO: 199231 - DNA, 122 bp, Homo sapiens
tgtgtgtgtgcgcgcgcgcgcgcgtcgtgggttgggcggggggacaccaagattatccggcgatctgttttccagtcccctcgtgcgctctcaccgcgcgcctgtaccagctcggagacgtc

SEQ ID NO: 199232 - DNA, 122 bp, Homo sapiens
agtgtctttcccgtgctcatgtcatcgtaccagagaaatgccgccccgtggggcagggggcgcgcaccctcctgaaggggcagcggcaggggccaggcagagggctgggagctggcagacgt

SEQ ID NO: 199233 - DNA, 122 bp, Homo sapiens
tggaggaattgctggaggacgcctttgatacctttatggagaatgaatgggaagcctttgcgtgtggctgacacaaatggttgtcacacgccatctagtggccatccgtgaaactgtgcata

SEQ ID NO: 199234 - DNA, 122 bp, Homo sapiens
caatggattgatctttttctaatctgaattaggccaggcacaaacaggtaagttaccttccggtttccataattacgggaacaggcaagtacttcttccaaactcaggccttcagagaaaaa

SEQ ID NO: 199235 - DNA, 122 bp, Homo sapiens
aggtgggcgacctggctttccctcgctttgagatcccggcgcagaggtttgccctgcccgcgcactacctggagcgctccccagcctggtggtacccctacaccctgacccccgccggcggc

SEQ ID NO: 199236 - DNA, 122 bp, Homo sapiens
cacgcccatgtactacttcctctgccacctggccttggtagacgcgggcttcactactagcgtggtgccgccgctgctggccaacctgcgcggaccagcgctctggctgccgcgcagccact

SEQ ID NO: 199237 - DNA, 122 bp, Homo sapiens
acaccacccactgaccctttccctcatggcttgagtgtaacaaagcgtttgagtgggcaccgtgcaggtgtaggttttctgcccgagtaccgacgtggcttccttggtcatctaaactcccg

SEQ ID NO: 199238 - DNA, 122 bp, Homo sapiens
agcccccgctgtccaggcgcccccgttaggctcccgcaccgagccccagtccgggagcggcgctcagtggcccccaatagagcccagccccttccagcgctcaaactcttttgttttaaatg

SEQ ID NO: 199239 - DNA, 122 bp, Homo sapiens
gcggagtcccaagagaggcgcgtcccattggacaatgctgagcggaagagcccaagatagcggggggagttgtgacaggctgctgcagacgtacttagaaaaggggtgcatactggatattc

SEQ ID NO: 199240 - DNA, 122 bp, Homo sapiens
caccgtaggatttaagcagtagtgcttccatgctcttaagactcctgctgcctggaccttcgtcagctttgacacctcttttctgatttaaagacaccaaggaaaactacaactgtctttag

SEQ ID NO: 199241 - DNA, 122 bp, Homo sapiens
cattgggggcggaaattttaaccaaaatggtgtcacccctgaacccactgcgacacgccacgtaagtgaccacagaaggagaaaagccctataaaaagagagacgatagcgctacattttgt

SEQ ID NO: 199242 - DNA, 122 bp, Homo sapiens
ggtgggcaggacctcaggtaccaggtctactccaggcagcaccagggacagctcccaagccgctgccggctctggtccccagggaggggctggctgcaccatgggcctgctcatggccctcc

SEQ ID NO: 199243 - DNA, 122 bp, Homo sapiens
gtgacgtggtcggtgactcctgatgggaggtggcagtgctgtgcggcgagtggggaccttcgtgtcacatcccatctgtgcctcagggcttggatgaattacttctggctggaccttgttcc

SEQ ID NO: 199244 - DNA, 122 bp, Homo sapiens
cacgctgtgcgggaccggggtgctccacccacgctgtccgggaccggggtgctccacccacgctgtccggaactggggtgctccacccacactgtctggaactggcacagaatgtatctaag

SEQ ID NO: 199245 - DNA, 122 bp, Homo sapiens
tggtgcctggagtgacgtcgggtcctcggcgtgtggtgcctggagtgaccggcgggtcctcggcgtgtggtgcctggagtgaccttgtgacctggccattccacttctgggcatattcccag

SEQ ID NO: 199246 - DNA, 122 bp, Homo sapiens
atggtggtggcggcgcttctcctttctgatgcctttaagatcccatcaagtagtgacggacgcgtgacttgctcatactccaagatcataagtagaaaagtcatccggagattgagggagag

SEQ ID NO: 199247 - DNA, 122 bp, Homo sapiens
cactgtgcacacacggcctcctccagcagggcagtgacaaagctgggcctgactcatcttcgtaggctgctagttctttcagtcagcagataaggtattgttaaccctcgagacctgtgcga

SEQ ID NO: 199248 - DNA, 122 bp, Homo sapiens
tgtgtaaaaagaaaagtttttgtatttatatcaccagagttgattgcaagtgcatgttttcgcttctaaggctgttgcaaccgtgtggtcttggccatttgactgtgaagtgaagtcagtgc

SEQ ID NO: 199249 - DNA, 122 bp, Homo sapiens
tccgctctctcaggtattgtcggttcactgcatggacaaagaaactgaggcccagagaagcgacatgacttgccctaggtcatatcattggggtagcagtgaggcctctttctgctgcaagt

SEQ ID NO: 199250 - DNA, 122 bp, Homo sapiens
aggagggcgccccctctccgctcggggtcgtgtcaatgctttgcacttggggccggcgtgcggctgcgggtccttccccaaggccccgggacccgggctcccctcgcctcaggccctttcgg

SEQ ID NO: 199251 - DNA, 122 bp, Homo sapiens
atggcagtgcccgggttttgaatctgctggttatcaccaggattctgtggagagaaagctcgtgtggtcacaggaagcaaatccgcctccgaaccctctgagagctgccttggctttcggca

SEQ ID NO: 199252 - DNA, 122 bp, Homo sapiens
acatggcctgggcagaggctcgcccaggtgccccacctctctggctgcttccttatagttcgggcttcggaagccacattcaaccctggcacacagtggtttttcctcgtgctggggccacc

SEQ ID NO: 199253 - DNA, 122 bp, Homo sapiens
actcactccatcttcctgggtgggaggcaagcatggatggggcccatatcaggtccctaccgccccgcgtccgaaaagccgcgggctgggcggtgtgggaaatggctttttggctccgaggc

SEQ ID NO: 199254 - DNA, 122 bp, Homo sapiens
gcgggagctgggggcctccctctacctgggctgggcggcggctgcactgcttatgctgggcggggggctcctctgctgcacgtgccccccgccccaggtcgagcggccccgcggacctcggc

SEQ ID NO: 199255 - DNA, 122 bp, Homo sapiens
caggccaggcgcagtggctcacacctgtaatcccagcactctgggggaggccgagatgggcggatcacttgaagccacacagaaattgaaaggagtttgagtctagcctggccaatatggcg

SEQ ID NO: 199256 - DNA, 122 bp, Homo sapiens
tgaaaattaggaaaccatgctgttggcaatctcttcttcataattgtatgggagtagcaccgagtctgctgtttttggcaatcacagacaggttggtgactctgtagagagcagaggtgtgt

SEQ ID NO: 199257 - DNA, 122 bp, Homo sapiens
tgagactctggactttggacttttgagttggtgctggaattagttacagcactggggctacgaggatggaataactatatttgtacgtgagaaggacatgagttttggggaacttaggggca

SEQ ID NO: 199258 - DNA, 122 bp, Homo sapiens
cccagcctgccatggcagctccaacaaggaccgtctgggatagcacctctcagtcaacatcgtggggctggacagggctgcggcccctctgcccacactcagtactgaccaaagccagggct

SEQ ID NO: 199259 - DNA, 122 bp, Homo sapiens
cttctttttaaaggctgtagcatgctccgtcatgtctataccacgccctgcttgtctgctcgtctgccaagcagccgttgggatggttcctttcttggctgttgtgagcagggccgacacgt

SEQ ID NO: 199260 - DNA, 122 bp, Homo sapiens
tgagcatcgtctctgagcctcagtttcctgtctatatctagtgccaccaggcatcagaaacgtaagtgcttcaaggatcttgggtgaaaagccgctttagcggcgagcatacactaattaat

SEQ ID NO: 199261 - DNA, 122 bp, Homo sapiens
cttgaactaccactgtcagcgtcacaatgaaaatggcaatgctggggattcaaccccaggcgtgaagatgaaactctttctgctagcaagactgcccctcctagagagattactgccaccct

SEQ ID NO: 199262 - DNA, 122 bp, Homo sapiens
aaagggcctctgcagcctggcgtgacggccagaggaggtgcctggctctcggcagggagccgcagggctctttcttcctctctggttcgtacttctcctctctcatgggggtcccccaaagc

SEQ ID NO: 199263 - DNA, 122 bp, Homo sapiens
agcatgatgggccacttcccagtccccaacccatgaggacggagcccaggaggctgccggcgttcaccctgacagcacaaagacaaaccaggaaaacagtcaacacccgctccaggcgccct

SEQ ID NO: 199264 - DNA, 122 bp, Homo sapiens
attccttttatttaggaaccaaaatgtagttactaggtgtgctcattgctattggagtatcgttgcttttaggccctctcaggggacagagctaggtaatatctgtgtgaatactaacccat

SEQ ID NO: 199265 - DNA, 122 bp, Homo sapiens
tattatttttctgtgtgtgttgtgtgtatgcacgtgtgccccttttaaactagaaactcccgggaggcaagtgttttctcttccacagggtgtccccatggggctaggaacacagacatctg

SEQ ID NO: 199266 - DNA, 122 bp, Homo sapiens
ttacttgcaagcatgtactgagcacccgctgtggatggtgaggtaccatgccaggacactcgcctgccctcagtgagcgcacactcaggaggaggccctgcacaccaagggtcctaaaccca

SEQ ID NO: 199267 - DNA, 122 bp, Homo sapiens
tcccctgtgccaggtgtggtttggtcctcccagggcgccgtaggcggtgcatcccgttcgcgcctggggctgtggtcttcccgcgcctgaggcggcggcggcaggagctgaggggagttgta

SEQ ID NO: 199268 - DNA, 122 bp, Homo sapiens
tggctgatctctaagccactcagctgagctctgtcggtgggactcagatgggtgtatcatcgcttcccaaaaaaatgggacttgcccaggggaggggaatctctagcagccgaatggataat

SEQ ID NO: 199269 - DNA, 122 bp, Homo sapiens
ctcttctctagagcaaacagctgcaatgctttcagtcctttcttacatggtagggtttcacggctcctgcctgatttggttggtctataccttctgtgggatctgcttttcaaagctgccct

SEQ ID NO: 199270 - DNA, 122 bp, Homo sapiens
gtcaccactgtgagatgagatgagcatgttgagaaggccttcctcttgccttctactgtgcggatacggagaatagcaacaatgataaaaccataggagatgcaggtaagaataaagtcccc

SEQ ID NO: 199271 - DNA, 122 bp, Homo sapiens
cacaaaaattccatttggtcccaggacgaccctgcaggctgcccttgactaaacactaaacgacaaggccttcaatcagagttaggtggcgactgactaaccaagggcgtgacagagcttta

SEQ ID NO: 199272 - DNA, 122 bp, Homo sapiens
ggcgactccctcgctcgccctcactgccggcggtcccaactccaggcaccatgttccccgcgggcccccccagccacagcctcctccggctccccctgctgcagttgctgctactggtggtg

SEQ ID NO: 199273 - DNA, 122 bp, Homo sapiens
gcacatccaggacacaggacacagggcgggcgacaggggatgcaggcccgcgtggctgcgcgcatccaggacacagggcaggtgacagggctctgtgtgcccagcacacctgtggagttggc

SEQ ID NO: 199274 - DNA, 122 bp, Homo sapiens
ttgccgcggtcggtggtcgttatggattctccatgggacgagttggctctggccttctcccgcacgtccatgtttcccttttttgacatcgcgcactatctagtgtcagtgatggcggtgaa

SEQ ID NO: 199275 - DNA, 122 bp, Homo sapiens
ataggcagaggccacgtgggtatggctgggacgatgggcagaagccacgcaggtaggccacgtgggtatagccagaatgttgagcagaggccacggggtacagccgggacgataggcagagg

SEQ ID NO: 199276 - DNA, 122 bp, Homo sapiens
tcttgaacgtctccttttcttctcccttaagattcttccctaatgaagggggcaggcgaacggagttaaagggcttccattgctgttagaatacagcccaaattcctttccataatcaaaag

SEQ ID NO: 199277 - DNA, 122 bp, Homo sapiens
ggctgacttcatctttcagggtccacgaggctggtgtcagacctattgggagaccctctgcgttagtgagaaaaacggcaagaaatgggagcacgcggaaacctccaagactagagccacca

SEQ ID NO: 199278 - DNA, 122 bp, Homo sapiens
agggagaggcactcagattttgatctccgtccggaaggtctgctggacgtgttctgtatgcgggtgacgccgtgcccggatagtgaggctgccgtcctcccgcagagccgaggtcaccgacg

SEQ ID NO: 199279 - DNA, 122 bp, Homo sapiens
tgcacccgaggctctggggacttgcgcctgcgagggcctctgactccgacaaaggagacccggatttccagctgcttgaggaggggtgcgggcgggtaggggccgcgagggcagcactcccc

SEQ ID NO: 199280 - DNA, 122 bp, Homo sapiens
tccactattccatccaactagctcctctattttttctctctcctcctctatctattgatacgctcaggggtccaacaattctaaaatacccttttcccaacctggctatacacctaaaacta

SEQ ID NO: 199281 - DNA, 122 bp, Homo sapiens
gccctgagcatggcaagggggtctgtctctgccgatgctccttccgcggcactgactctgcgccgtgtcacatggtttttgaatcacactgcagctgctttccatttttatatatatataaa

SEQ ID NO: 199282 - DNA, 122 bp, Homo sapiens
cggaacagctccagaaactgagggctgtttgctcagcgccccagcatctgtgcagagcaccggaaaagctcaccaactgtttcacttcctgttggggtaggttttatttccctccagtgtgc

SEQ ID NO: 199283 - DNA, 122 bp, Homo sapiens
caatcccgccaggccgcggcccagtggcgccggcgcacaccgaagacgacaccagccatccggccaatcccgccccgccgcgccccgcaggcccgcccactcctcgcttctccacttccctt

SEQ ID NO: 199284 - DNA, 122 bp, Homo sapiens
cgtagtgtgtgccttccttccagccatggccggctgtccaccactaccacccgaaaccgccggccctctgtccaagcctcctgaagaattcgtgataccagagatgagctagagtgaatgaa

SEQ ID NO: 199285 - DNA, 122 bp, Homo sapiens
gaacgggtgctagctgtggacttgtttgaattccaggttggcccataactggctctgtgacgtcgggcaaattacttgagctctctgagcctcggttttgccaattataaagtaaggataat

SEQ ID NO: 199286 - DNA, 122 bp, Homo sapiens
cctaaattccagttcccgagggggaggtagtgagatgggatacaggtgcgtctgggtcctcgcttgggaggggttctcccactttgggacccctcgtggagcagcccataaccgaccggcct

SEQ ID NO: 199287 - DNA, 122 bp, Homo sapiens
gcggatgcctcacaagcttacgactccagacaggctcacccaactgcctcctccacccaacgctgcagcccactcaaggtccacgtagtccaagctgcattccttcctcgcactcccttgcc

SEQ ID NO: 199288 - DNA, 122 bp, Homo sapiens
gaattatagagattggtgctacaaacccctgattaaaatcctgatttacagggctgggctcggtggctcacgcctgtaatcctagcactttgggaggctgaggcgggcggatcacgaggtca

SEQ ID NO: 199289 - DNA, 122 bp, Homo sapiens
agtctatccagcaaccaatgtgatttttagatcgggcaaaatttgggcaaaacaatcattcgagagactgttgcaggaatccaatcagaggatgagtgcctgaactaagcaagtagatgaaa

SEQ ID NO: 199290 - DNA, 122 bp, Homo sapiens
aggtccttgtggcctgacttgcagtgtgggctccctagagagtggtgccctggtccctctcgctggcagcagctgtcccattgcaccccagtccatgtggccccatcctcatcctctggtcc

SEQ ID NO: 199291 - DNA, 122 bp, Homo sapiens
cccggcccctcagggccacggctttagcggtgtcttttgcggtaagtgtctgctttttcccgccccagactacggagggggagcgaggggcagccccagcgctgctcaggaggcgagagact

SEQ ID NO: 199292 - DNA, 122 bp, Homo sapiens
cccacagtgctgggattacaggtgtgagccaccacgcctggctggaaatgtagtttttagcggggtaggcatggtggaaggtggattcattcttgccagacattaatcttccttcgtgtagg

SEQ ID NO: 199293 - DNA, 122 bp, Homo sapiens
cctcagctaatttcacatgtaaacaaaacaactcacagaggttctgcaacctgcttccaccgtctttctagaaggaggtcagaaagggaacagatgctttgcccttttcccctctcccctcc

SEQ ID NO: 199294 - DNA, 122 bp, Homo sapiens
agcccagaatctgctccctggtagctgactttgcaggcaggggccttgcccacgcagcctcggcagaggcccccgcacttcgcgaaccccagcaatggccccttccagacgccacgtccagc

SEQ ID NO: 199295 - DNA, 122 bp, Homo sapiens
ctgacgccttccactgacggggctccctggcctgggtcctgtcgtctctccggggtggggcggtggcgcttccctccggcaaatgcactgcatccctgtcccagatccggaagaccacggcc

SEQ ID NO: 199296 - DNA, 122 bp, Homo sapiens
cacagttggttgggagcgcctggattttctctagcaaaagactcgtggaatccatgctttcgccgccacgtgacgaggcacacgcggactgggacatcgtcctccaccctccagaaccaaac

SEQ ID NO: 199297 - DNA, 122 bp, Homo sapiens
aaccacttgtccccgagtggacgggttgggggggcgtcggggggagtccgcaggctgccccgggtgtcctggaactgttgctgtgtgggattatttgcgcctcctccacccaggatgctacc

SEQ ID NO: 199298 - DNA, 122 bp, Homo sapiens
tccaggccggtctctttccttgggggatgccaggctaggggcagcggagagcgaaagccgcggagtggcttccctgtctcttggccagagagttctggccaggcagttcggctgcaactttc

SEQ ID NO: 199299 - DNA, 122 bp, Homo sapiens
gggcacaggatgaagggcagagtaggacgggcagggtggaggaaggatctccaggaccagcgaaggaggtgagctcaaggtgctcaccatggatggttcaaaaagcagtgttccctggcagg

SEQ ID NO: 199300 - DNA, 122 bp, Homo sapiens
tactttctccatctgtgaaatttaaataccaattcctcagccgggctgcagggaggagggcgtgtgggagcactgggcctccagcccaggacccgacagggacagcctccttggcaggctgg

SEQ ID NO: 199301 - DNA, 122 bp, Homo sapiens
aagggccctgcaaccttgttctgcagaaaatcatcattagcgcccctgagtcttaacaatcgaggcgctgccgataccacggatacctttattgctccctggcattcacatcctaagcccat

SEQ ID NO: 199302 - DNA, 122 bp, Homo sapiens
actgcttagtcttgtgtgcgtttagggaaagaacaggtggggagtgggggaggtacacttcgcccaaccatttgcttgtagatcttcatggactcctcccagagttcacctttgaagactaa

SEQ ID NO: 199303 - DNA, 122 bp, Homo sapiens
caccttgcagaaggcagggctgtgactccatcatcgtggctcttgataactcctctgccccgttttagaggggcttcctttgtactgaccttggcacactttctagctcagagccccattca

SEQ ID NO: 199304 - DNA, 122 bp, Homo sapiens
ctgcgctgacactgaggggtgtccgggagctgctgaagcgtgtggacctcgcgacggtcccgcggagacatcgatataagaagaaatgggtaaggtccggctgggggcgcaggagggaaaag

SEQ ID NO: 199305 - DNA, 122 bp, Homo sapiens
ttgcccagatgtttcctcatttgtcttctaggctaccagaaagatgttagcttagaaaaacgtattctggcgtttattccaacagatgagaaggcagtttctccagtgatgaataattacct

SEQ ID NO: 199306 - DNA, 122 bp, Homo sapiens
tcacgttaggctagggcaggtgaggccaacaaacagcagccttgtttcaaccctattgctcgccaactagtaagacaaggaggatgagaggaggataaaacactttttaacttgttttatgc

SEQ ID NO: 199307 - DNA, 122 bp, Homo sapiens
gcaaaagtcctgcacaaagtcagcccgaatccagtgattgaggctaggactcgaacctcgcgttttgatccagggtgcggcaagggcgccccattaacgtgtcccgcccgaggatgcctgag

SEQ ID NO: 199308 - DNA, 122 bp, Homo sapiens
gaaggagtgcagttgctgccaggggcagccttccttgctctggcggaaaaacttcggccccggccccagcagaaggttacagcttcacactcaccaggtccccagccggcagccggcgctct

SEQ ID NO: 199309 - DNA, 122 bp, Homo sapiens
tccttacatttgtttccatatccttagagcccagcacatagtagacactcaaagcatgctcgtggagctgtttaacttcatggtcccacctgtccatctttgcgaccctcttctctatgtgc

SEQ ID NO: 199310 - DNA, 122 bp, Homo sapiens
ggcaggggccatctcacactttttatatctgctgtatagcaggtggcaccatgtgggctgcgcagttgaggctgggtaattatgaagtgcagtccagtggaaaacattaaaccctgggctgg

SEQ ID NO: 199311 - DNA, 122 bp, Homo sapiens
ggcgccgggctcgcagggcgcgctcctaacccgtccccagcggctcgacgctgtggatcccgccgccctccagccccggctccggcgccgactcctgctcaggctcctgctcctgcccccgg

SEQ ID NO: 199312 - DNA, 122 bp, Homo sapiens
ctgtctctctcctcacccccggtacatcactgtccatttctattcttaggacaccgtgttcgctatgctgagtctgtacagctcccttaaagccctgcacctggcattaaggcccccatgat

SEQ ID NO: 199313 - DNA, 122 bp, Homo sapiens
gtccaaaccccagattttcaccctgcctccagatcgtagccccaattcttagtgttacaacgagccttgcccccagccccattcttagccccgccccggccattctctaaaccgcacactcc

SEQ ID NO: 199314 - DNA, 122 bp, Homo sapiens
cagcaccccgccacgctcgccgattcccctgcgccgtcgcgggtcgggcagccggatgaccgacccgaaagcctaggctttgggaatgagactgatggacacaaaagcgccatttatctaga

SEQ ID NO: 199315 - DNA, 122 bp, Homo sapiens
ttcctcccccgggccctaccgggctgtgcgtttgataggcagctggaagacccaggtgggcggttcaatcggtcacgtggacacgcagctcagccaattagaatctcgcggcagttgattcc

SEQ ID NO: 199316 - DNA, 122 bp, Homo sapiens
acttgaatgtactgtaatagaaatcatcagttgccatggcgacgtgttccaagagcagatcgcaccaagtcacgtgagcagagagtgctcagtaatactaacacatcatagagtgaggccac

SEQ ID NO: 199317 - DNA, 122 bp, Homo sapiens
agcggacacagccagacatccacatgggtgaacggataaacatggatcacatctgtgcaacggatggaagaacattcggccttcaggaggcaggaagcacggcactcacacatgcgacgaca

SEQ ID NO: 199318 - DNA, 122 bp, Homo sapiens
ctccatgtgctaagcaaggccaggtactgccaggtctctgaacacacaggctcttctctccgcctgaaccccctcaccccttcccttgtgctatcccagcatccagctcatgttttcttctc

SEQ ID NO: 199319 - DNA, 122 bp, Homo sapiens
ccgggagtccgcgcggcccctccctgcccgtgcggaggctcccggcccgcagcgccacctcgtgctcacgcatggccagacaccccagatcccagcggggccaagagccaggaccggggcgg

SEQ ID NO: 199320 - DNA, 122 bp, Homo sapiens
gcgccccgggagccctcgccgtctcacctcgcgcgctgccgtccgctggaagcacctccgcgcctccccaggcgccagactccatcccgccccactgcgccccgccccgtggctgagccgag

SEQ ID NO: 199321 - DNA, 122 bp, Homo sapiens
tttcgcttctgcagccgcagcgcctcccgctcctccgacgtggactcgtggctgtaatagcgcagcaggaagggccagacctccccgcggattgacacatcaataccgccaaagaaaatggc

SEQ ID NO: 199322 - DNA, 122 bp, Homo sapiens
acagcatgtacttcacagggctttttaaattgtagtataacatatatacagaaaattgcacgtaatccaattgcacattgtgcaactcagtgagccctcacacattgaacacatgcacttta

SEQ ID NO: 199323 - DNA, 122 bp, Homo sapiens
ctcgctaggcagccgagaagcgctctggagggctccatggagcggccgatccatagggtgcggggccgccgccgcccgcaggagccgccgccgcctattgttcatgcgcctccgcagagctg

SEQ ID NO: 199324 - DNA, 122 bp, Homo sapiens
cacttccaggacagaaggccacgctgccgcactcgtatccgaagtttgaatgtcctcagccgcagatgcgttttttgttatgagtgacaagaacgctgacacaagacactaacctttctaga

SEQ ID NO: 199325 - DNA, 122 bp, Homo sapiens
tacccctgcgaccagggaactgccctctaatccccattggagccactatttgcactcaaacgtggggagccagagtgtggacttgcctgacccagccccaactagctttgcccatccaccta

SEQ ID NO: 199326 - DNA, 122 bp, Homo sapiens
tatcagtgtctcgtaggcgctgcacgaactcctcggcagaggtgcagcgctgtgcggtaccgatcagaaactgggcgacgtgccgctcgctcagccccaacaccgagtgcagctcgtcctga

SEQ ID NO: 199327 - DNA, 122 bp, Homo sapiens
gaccattttcactccatcacggacatttggaagtgaccggcgtttcacactgcagctgtgcggtgcgaaaacccctcagggctgcgccggggctcggggcctgcctgcgttcctgctcaggt

SEQ ID NO: 199328 - DNA, 122 bp, Homo sapiens
cctagcatgccttacataagaggctggcactgtcttcactatatctctgtacagctggctcgggactaggcacaagtagcccctcaatacatactccaggagtgaataagtgtttcttattc

SEQ ID NO: 199329 - DNA, 122 bp, Homo sapiens
cactgaatatactataagccagtgaactgtacacttttaaaatataaactttgggccggacgcagtggctcacgcatgtaatcccagcactttggattaaatgggtggatcacctgaggtca

SEQ ID NO: 199330 - DNA, 122 bp, Homo sapiens
gcaggtggccccacctcaatgagcctgtctcccattcaaaaagcagaacgagtgagagggcggggcctggagctttacccaatcagtggcgtcggagtggaaatcctccaatcgggagtagc

SEQ ID NO: 199331 - DNA, 122 bp, Homo sapiens
actccagggtcacatcagcaatggcccgggacagacgagggggagccttcatctgtacttcgtgtctttccagggtggcaatgaccatgagatcttcacagaccccagaaccatgggctact

SEQ ID NO: 199332 - DNA, 122 bp, Homo sapiens
ctggcatttcgtgttaagtgcagtcccacagcgtgagaccctttgtgtctagcttcctcccgagcgtgaggcttccaagcttggctcctggttctagctgagaggcctgcagcaggcacggc

SEQ ID NO: 199333 - DNA, 122 bp, Homo sapiens
ttatagggcacatctttcttcctctctctctcagtgatcttgtgctgctctgcctgatatcggtgtctgaaaatcgttgttttgtatattttgtccggatttattttcttgtttcaaaaaag

SEQ ID NO: 199334 - DNA, 122 bp, Homo sapiens
tcccgcgcggcgccgggggcggccccgggactgggggtggtgccctgggagctgtgtggccgcgtgcgcgctccgccggggtcctggaggcctctgggcgcgtgcgcgggcggtcgctacct

SEQ ID NO: 199335 - DNA, 122 bp, Homo sapiens
gaagtcctggtctccccaggtggtctcgcactgcaggtacagggcatcgtgcagcagtggcgtggacacgagcatgccccgccggtcatcccacaccacctcctgcccgtctggccacagca

SEQ ID NO: 199336 - DNA, 122 bp, Homo sapiens
cggtaccctcagtcggccgaccatagagcttgtagacctccaggactcctagagagcttccggaagtgcctttggggcaagatgcgtgctggccggtgttgtgcctccgcagatttagaagt

SEQ ID NO: 199337 - DNA, 122 bp, Homo sapiens
agagccgttcgtatacagcctccagctcctgcagctctgtcagggagcgaatgagctcagcggagatttcggagcagcggccacctcccaccccctcagacggctgctgcacccctgacagc

SEQ ID NO: 199338 - DNA, 122 bp, Homo sapiens
atgcagtggattaaaggttaaaatataaaataaataaataaaatcatataagaaaacctacgaatcataaatgtaatctagagacaggtgagctaggctttttctgagatggtagaaacact

SEQ ID NO: 199339 - DNA, 122 bp, Homo sapiens
cggggtttcaccatgttggccaggctggtcttgaactcctgtcttctgagtcgatccacccgcctcagcctctcaaagtgctgggattacaggcgtgagccactgcacccggcctgttctag

SEQ ID NO: 199340 - DNA, 122 bp, Homo sapiens
ctctcaggggcggcgcccacctgctggtggctcctgctcccacgtcttcaggtcgtactgcggggtgggcctctctccaggaccacagctgccagggactttagacatcaccctgggaggcc

SEQ ID NO: 199341 - DNA, 122 bp, Homo sapiens
taagtcacttaacgtctctgggtcgcagtttcttcatctaaaaaatgggactagtagggtcgggcgcggtggctcatgcctgtaatcccagcactttgggaggccgaggcgggcggatcacg

SEQ ID NO: 199342 - DNA, 122 bp, Homo sapiens
gatttttaaacgaactttattagtagccagggctcagattgagtggctcagcagcagctccgccgggggtggtggggcgcgggagtctcgactcccctcatctgtggacccgccgcgctgcg

SEQ ID NO: 199343 - DNA, 122 bp, Homo sapiens
acaacttctggatcaagtggagacgtcgggataggtggggcccacggcccccatgggctccgcttgtctgcaggcgcgggaggaaggcgcacaggcttcgctgggcgagaaagctgctgtgc

SEQ ID NO: 199344 - DNA, 122 bp, Homo sapiens
gggcctgcgctcaatgggccgcgctggtcccgccccactgtgatcgtgagactgcagacccgctaataaaatccaccccaacaatcgctgtgtgccgctttagtgcgctcgccgtcggctct

SEQ ID NO: 199345 - DNA, 122 bp, Homo sapiens
ggggtgggggtgggggtgggggtcaagacccttagacgagctgcagctccttgctgagaacgtgcacacactcaaaatttgtggggggcccatggtcctctggggctcctccggcaccccag

SEQ ID NO: 199346 - DNA, 122 bp, Homo sapiens
gtcacatgatggcagtgcctacagagatctgggtaggaggttctgctgctgtggccccctcggtgatgctgtgctcagaggcccctgagggtgatgtgagatggggagggagctgagggatg

SEQ ID NO: 199347 - DNA, 122 bp, Homo sapiens
cggtgccgcggagctgccgcgtcccgggccgccgggcacctgggaggtaacccctttccgcggccgcccctccccgattcccgccacctgccgcctggccaggtggaaggggcgctgccgcg

SEQ ID NO: 199348 - DNA, 122 bp, Homo sapiens
tgagccactgtgcctggctgcttgttcttttaagaaccaaatatcctactagactgcaatcgagtttaactacagtctatagatagtgtgaggaagggttgggaaggtgatcaaatgaaggc

SEQ ID NO: 199349 - DNA, 122 bp, Homo sapiens
ccggggcccttcacggaggaccgttggcccagcgcaccccttgcccgtgatacaggagcacgagtgcttccaggaggagctgaggaaagcgcaaaggaaattactgaaggtgtcccgggaca

SEQ ID NO: 199350 - DNA, 122 bp, Homo sapiens
aaaggggacacaaatgcccctgagagagcagccgtagactgggatagatgaggatggtcacgtggtggagaggcgtgtttttgggtaccagcccttcacctgcgtcaatcttctcaactgaa

SEQ ID NO: 199351 - DNA, 122 bp, Homo sapiens
agattgcactgctcttatctgccagggggtggtgagagggtggctgagctggacagatggcgggcagggacgggctctgcggtctggcagctgacattgatacaagcaaaaaaagagtcttt

SEQ ID NO: 199352 - DNA, 122 bp, Homo sapiens
ccagtctgagaatcaggtgccagttcttttctactgtgtgtctagtcacattggtgtagacgtccaggcaggaggagaagcaagttgtaggatcagctacatctgggcttccaaaggtaatc

SEQ ID NO: 199353 - DNA, 122 bp, Homo sapiens
ggtcattctaatgacccatttcttcactctgcctcttaagaatatcaaatgtgggccaggcgcggtggctcacacctgtaatcccagcactctgggaggctgaggcaggaggatcacgagct

SEQ ID NO: 199354 - DNA, 122 bp, Homo sapiens
ctgcctggtaccaccatgaatgacacaagagctagtttaaaaagaaagcaaagaaacaaacgcaaaacccgaaaccgcatcctccaccgcaaaggtactcggatggggcgcccgccctcccc

SEQ ID NO: 199355 - DNA, 122 bp, Homo sapiens
acggattcggaggccagctttttgacaaccttgtaaaggaatccctggcggcgaccttttcgttgtttaccaattgtgccggaaaggttttctcctagtgttcaggaccatttgttgttctg

SEQ ID NO: 199356 - DNA, 122 bp, Homo sapiens
ctcgtgtttccgggtatgaccggaaatagcgcatgggactctaggcaggcgacaccttagcggttcctaaagcgagctatgctacggaagcctcagagtgtcaaaattactctcgttgccaa

SEQ ID NO: 199357 - DNA, 122 bp, Homo sapiens
ttcaatttgttgtccttcttccacttcatgcgccggttctggaaccagatcttgatctggcgctcggacaggcagagtgcgtgggcgatctcgatgcgccgtcgccgggtcaggtagcggtt

SEQ ID NO: 199358 - DNA, 122 bp, Homo sapiens
cccacaggaggcctggggcctggcgatgatgcttgccggagcctgagggcccgtcccctgcggggctggggcccaggcccctctctgcagagctggagtcttcctgctcactcggctcaaac

SEQ ID NO: 199359 - DNA, 122 bp, Homo sapiens
ccgagtcccgagagcctgggggcgcgcccagcccgggcgccgaccctcctcccgctcccgcgccctcccctcggcgggcacggtatttttatccgtgcgcgaacagccctcctcctcctctc

SEQ ID NO: 199360 - DNA, 122 bp, Homo sapiens
gggccctgccccgcatcccggccttatgcactgcccctcccacccggccccgcccaggcacggccgaccccgccccgggcaccgcccaccgagccatcctgcctcgcctccccccacgcctg

SEQ ID NO: 199361 - DNA, 122 bp, Homo sapiens
tgttagccacactcggttcccctgccaaggcctctcctccttcctcagctcccagcactgcgttcacacgtcaagagaggaggaccggcttctcagactccctgtgtgccacctggggacac

SEQ ID NO: 199362 - DNA, 122 bp, Homo sapiens
gccagaccagccaaagtccacggcccaggctgccaggcggttcctggaagagtctctggacggccggaatcggcgcctgggtacaggactcctgattggaacacgattagaagagggaaacg

SEQ ID NO: 199363 - DNA, 122 bp, Homo sapiens
tcaagtcgccagccatcccagagggtaaggagacgctgagcaaagtattggaaacagaggcggtagaccagccagatgtcgtgcagagaagccacacggtcccttaccctgacataactaac

SEQ ID NO: 199364 - DNA, 122 bp, Homo sapiens
atacatggcacaagaaaatgagaaacaaaggaggcataaccagaccaaggattcaggcagcgtccccaggaaaatgatctttaagcccttgaaggataagtagggtcctgggaagtgaagaa

SEQ ID NO: 199365 - DNA, 122 bp, Homo sapiens
agaggaggtgagaagtgcgtggacacggggcagctcaagaggagtggacaggccagcccacgaccggtgagggcagggtggcgtggggtcctggaggtcccttccttggcctgggactaaca

SEQ ID NO: 199366 - DNA, 122 bp, Homo sapiens
tctgagaatgaaacagacatggaagaccccagagaaatccagactgattcttggcgtaaacggggagagagcgaggaaccgtcatctcctcagtccctgtgtcatctagtggccccagggca

SEQ ID NO: 199367 - DNA, 122 bp, Homo sapiens
ttatcactggcactttacagatacagatactagggccagagaggtgaaacagttgcccttcggtcccacagctggcgacagcgggctggaatctggatcgccaggctcgcagcccggccctc

SEQ ID NO: 199368 - DNA, 122 bp, Homo sapiens
ggcaccattggctaagccggccgttgggggcgtggcaacacggccgagtgggcgggtccgcgacgtgcactgtggttaatgtggtcctcaaaggcacgcattgtgggtaacgtagtccagca

SEQ ID NO: 199369 - DNA, 122 bp, Homo sapiens
ggtggccggcggggccctcctcacgctgctgctctgcgtaggaccctacaacgcctccaacgtggccagcttcctgtaccccaatctaggaggctcctggcggaagctggggctcatcacgg

SEQ ID NO: 199370 - DNA, 122 bp, Homo sapiens
gtgggcagctcgggggctgaaagctgggaagagaaatctgaagaacagccccatctctttcgcctgcacacttggaactcagcaagaagggactgtttctaggtgggctgggcgcgagcagg

SEQ ID NO: 199371 - DNA, 122 bp, Homo sapiens
ctgctgttgctagctctgtcatgcttcaccaccccttaaccttgcccacatccctgcaagcggtccttcactacatgctcctgagacacccagtttgagatgctgtttacttcctgatggaa

SEQ ID NO: 199372 - DNA, 122 bp, Homo sapiens
tcttagtcacgccagcgaggaggcgaccaatggtgactgagatgggcgtgctggggaagtcgggctcagacctcagcaggtcgcggagagaagggggaatgaactcttcgagaggactgtca

SEQ ID NO: 199373 - DNA, 122 bp, Homo sapiens
gctgtgaacatctgttctttcttcctcttctgtctactgcatgcaggcccggaagctgagcgttagtcaaaggtacaggaagggaaaagagaagagggcaaggcccatcccccaagaaagga

SEQ ID NO: 199374 - DNA, 122 bp, Homo sapiens
cactaagcctggcaaaatcctgcccattctttaagatttaatatatatcacgttttcctgcggtacttcctggacttcccttcggacgcctctggtccccagtctggctccttcttaggcct

SEQ ID NO: 199375 - DNA, 122 bp, Homo sapiens
ccctcaccataggcagcaccaggccctggttgtagtccgtgtgttccccgatgaggttgacgcggcccggcgctgacacggccagctcgggctcggccccgaactcctcccggaaggctcgc

SEQ ID NO: 199376 - DNA, 122 bp, Homo sapiens
ggggccggcgctctaggctgcagcgggccgttcacacagcctcatcatctcgctggtttccggtgctcggcggctactctagccctcagccgggccctgggactctatcccctaaggccggt

SEQ ID NO: 199377 - DNA, 122 bp, Homo sapiens
tactcctacatattagggagaaaatgacagagtggataattttgagagctgcgaaggatgcgggaacttagtgaactgttggtatagatgtagacagtgcaaccactctgaagaggaactgg

SEQ ID NO: 199378 - DNA, 122 bp, Homo sapiens
gcacattcagataatcattgcacagtgaacgtcaccgatttatcaaaacacaccttccgccgtgtgctgcaacgtggccattacgcaacgtactcggagatccaagatgagatcctggatag

SEQ ID NO: 199379 - DNA, 122 bp, Homo sapiens
ggaggtttagtctggcccagaagccctaagaccacggactgtgccaggtcccactccaaacgccggggagacgctctaggcaagctacacgttctttgctgcggtgccactctagccgcgag

SEQ ID NO: 199380 - DNA, 122 bp, Homo sapiens
aagttacaagtaataattttatatggcaaaaaaaaaaaaaaaaaaaaaaaaaaagagaaacgaaaccctgggagacgaatcatactgcaaatcatatccctgggtagcagggcagaaataca

SEQ ID NO: 199381 - DNA, 122 bp, Homo sapiens
ctcggatcgaggaggtgggggacgaaggcggcggcgggatgggggtgcaaagcgtggctccgcagggcaagagggaggcaggcgttctggacctgcacccccaaccccgcccccgcccctgc

SEQ ID NO: 199382 - DNA, 122 bp, Homo sapiens
gggcagcaagcagctgccggggtggggggcgggctgctgagcccacaccaggcttggagccggagccctatccctaccgctgcccccgccttagggtgagatgcagatagtccccggggttc

SEQ ID NO: 199383 - DNA, 122 bp, Homo sapiens
aagcaggaagtgcaacaaacccttagggtttcatgatacagtgaattttcccctccccaacgtttggaaaaaattgggacacttgctagttcttccctgtgggaagaatctttctaatatta

SEQ ID NO: 199384 - DNA, 122 bp, Homo sapiens
ccaatggataccttagggcactgacaattctcaatacatagaaatgcttgagggttgtgtcggttcccctggccacagtttgtcaggttgtttagccagatgccccattggtaaggtagact

SEQ ID NO: 199385 - DNA, 122 bp, Homo sapiens
aaatttgcaaagatgcagtagccttgacctagactgatatctacctgtcatcacaggtatcgacatcacagatgtccctgccaaaagcttggggtgctcctaccagttggtactaatagagg

SEQ ID NO: 199386 - DNA, 122 bp, Homo sapiens
cttgagcaggacaacagccaaagagtattattgcatagttcctgtcccctatctgggctacgattgtgtctgagagtaatagcacttatttattaactggaagaaattttacaggcacctat

SEQ ID NO: 199387 - DNA, 122 bp, Homo sapiens
gtgtcatccaaggagcccggcacagaccccgtgtcacccccatgtcacccgcagaccccgcgtcacccatagatacgcacaccccgtgtcacccccatagcacccccgtgtcacccacagat

SEQ ID NO: 199388 - DNA, 122 bp, Homo sapiens
agggaaactccctttcccggtccgctaagtaacgggtgccttcccaggcactggcgctaccgctagaccaaggtgtcctcaagcggcctttatcaggatgtgatagaggactttcactctta

SEQ ID NO: 199389 - DNA, 122 bp, Homo sapiens
tgagtgcccgggatggggctctgtccattgcctggggccgccaattgctactctgggttacggaagaaggacagggtcctgagagacaccagagacctcacacagccctgaaaacatggggc

SEQ ID NO: 199390 - DNA, 122 bp, Homo sapiens
gagaggcttggaaagtgccttggagacttgagtgcattggcagctgcaccgtgccacctgcgtgttagctctgcttacatttgggaggagaaggctttcctgggagtgaagctcaatttggg

SEQ ID NO: 199391 - DNA, 122 bp, Homo sapiens
acaaagggcaggagatcgacggcttagggagctggaggacgagaggtgggaggggctccacgacgccaatcacaataagcagggagccagtcagattaggaaggaagcacgagaccagagac

SEQ ID NO: 199392 - DNA, 122 bp, Homo sapiens
aattcttcctaagggctttcttagttccactgccagcagtagttccccatttctatttctcgttaggtctcaactcttccgtcatgagttctatgttccccaggattccaagagcccaaatc

SEQ ID NO: 199393 - DNA, 122 bp, Homo sapiens
gcaggaggtcccagatccccgctgtaaggctccgtgggcgagcgcccaggtggggctgggcgaggtgggggttcccggcgccggccccgcgcgccgccctccccgcccccgctcccgccccc

SEQ ID NO: 199394 - DNA, 122 bp, Homo sapiens
agctgttttctctagtggcttttgggataacacaggagaaaaggctaaactactgaatttcgaggcaagtaggtatgactgagcaagacttccaaatctgactcatttttcccaagaacagc

SEQ ID NO: 199395 - DNA, 122 bp, Homo sapiens
cgccgcctcccgcacctgcacgtggccactccagatgctccggagggattgagcaccccgcgcacacccagctcacaccatccaatccggaggccatgggccgacatgggggctgagcgttt

SEQ ID NO: 199396 - DNA, 122 bp, Homo sapiens
aggtggagggtgctgctgctgggaatcaaccccctcagactttccactgcgaagcgaaaccgtaagccctggggtgcggggggcgggccgggaggaggggaagtggggaaggtggagggaag

SEQ ID NO: 199397 - DNA, 122 bp, Homo sapiens
ggcttgggggtagaggagaaccttggcctcgacaagggggtttggtctctgcacagaacacgggccctccaggggcagcattgacttgaacaaaaccactctgcggctacaagcagggcctg

SEQ ID NO: 199398 - DNA, 122 bp, Homo sapiens
cccaggaggaggtgggagctctggcttctccctgcccgcccggccacccttacaggagtgcggcatctgtggggctgccaggagagaatccaatccaccccgacacccaacaccagaggccg

SEQ ID NO: 199399 - DNA, 122 bp, Homo sapiens
caccccggcgccgacggccctgtgcaggggaagcagatggagttcaagctggaggctcatcgcatcgtcagcatctctctgggcaagatctacaactcgcgggtccagcgcggcggcatcaa

SEQ ID NO: 199400 - DNA, 122 bp, Homo sapiens
tgcctcaagctgcttctcctctctctgcaccaataggaacaggttggtcacccagataaacgagtatgacacatagaaaggagggctggaaagccaaggagatggtgtgcaacaccagtcag

SEQ ID NO: 199401 - DNA, 122 bp, Homo sapiens
agaatcctatgaaaagcaaacagcaggaggccagcttatacatgatcgccacaagatagacggcttccttcttggcttctgttgtagagaactttcaactgtctcctcattctgcctgctca

SEQ ID NO: 199402 - DNA, 122 bp, Homo sapiens
gccgtgagaggagacagtataagacttcctggacccaagggacgccgggtcccctggaagcgcccatcgcattgaagaccacgtgtgccttgctggggtcccattcagacaagtcccgggtc

SEQ ID NO: 199403 - DNA, 122 bp, Homo sapiens
gttcgctgtttgagggatttcccggagagcctgttaaaagatgcgaagtggtgggtgtaccgctcagccacctttaaaccggctctgtgcgttctggctctggaaagcaagtctccaggcat

SEQ ID NO: 199404 - DNA, 122 bp, Homo sapiens
cccaccaggcatcccaatttacaccaatagaaaagggaggccagtaaaagagacccttcccgggttcctcagacctgcctgctctgggtgtcagggctctgcacagcatctagtgcagatct

SEQ ID NO: 199405 - DNA, 122 bp, Homo sapiens
tttctggcgaggccggtgttcggctggcggctagctgggactagcggaacggcggagtctcgattggcagtgcctggacaggcgcaagggccggcgcgggctccgggcgctcccggcatccc

SEQ ID NO: 199406 - DNA, 122 bp, Homo sapiens
agtttcctgccagttgccggctaaaggcataagggtctgcggggcacgtggacatgcgggcggagacagcgtcttcctggtttcgctatcgggcggagccccctggggggaaaagccaggct

SEQ ID NO: 199407 - DNA, 122 bp, Homo sapiens
gtgtgggcaggggcgctgaaaagagcagagcaggcccatgggtcaggaggcaggaccctgcgcaagggaggcagtgctctcccaggactggagtgagcatttcttagcggcctcctctaaaa

SEQ ID NO: 199408 - DNA, 122 bp, Homo sapiens
ttccaggaacttcttgggattgggtagacaaatggggctttgacagtggttagcaagacccggaaccctgacatagggaagaaacatcacagtgggaaccctgccatatattctcaaaagat

SEQ ID NO: 199409 - DNA, 122 bp, Homo sapiens
ggaaggtggcgagcggattgctgcttgggcatgtggcccgttcctagcccttctccacctcgcccagattctagaacaggggtcccatggagtactcccaagccagcaccccaaatacattc

SEQ ID NO: 199410 - DNA, 122 bp, Homo sapiens
cctcaaagaagaaattacattatgcagttacagtaccttatcagtggagctcgacttctacgctgcaaatggaaatgtattgcaacagtgctaaacagaagttgccctcctctttggagaaa

SEQ ID NO: 199411 - DNA, 122 bp, Homo sapiens
ctccgagaggcggtgatgccgcgctccacgcccgccaccgcgcggcagacagctccccaccgaacgcggacactcactttctcgtggaagatggactccatgtttatttgtctggagccaac

SEQ ID NO: 199412 - DNA, 122 bp, Homo sapiens
tcatcatctccatctccgtctccatctccatcatcatctatcatctccaatctccatctccgaagttatgcccacttcctggaagtttggaggcacgggaactacattgcccaaaaggcgca

SEQ ID NO: 199413 - DNA, 122 bp, Homo sapiens
acttaggtttccgtctcgccgaagagtagctactgcctagtgcaagcacctttgtaagaccggcgatcgcagtggtcgctctgagcagtaatatttaccggcttaactgaagcacccgctct

SEQ ID NO: 199414 - DNA, 122 bp, Homo sapiens
caaaaagcaggttatcaagtgggtttcttcccctgttgaactaggaaagattgatctgtgcgctgtaatctagaagatgcaaacttattatcttactattgacagctctgcagatttccctt

SEQ ID NO: 199415 - DNA, 122 bp, Homo sapiens
tgggctggccctggatgaatgagtcctcctcttcgcctgcttgggtcttagccagggagccggtggcagcctctgctctttctccaggacactgagctccattcctcctccaagtcctgccc

SEQ ID NO: 199416 - DNA, 122 bp, Homo sapiens
tccctcttattacctgtatctcatggaaaagtcactctagaatgagcaatatttcttggacgagcccatattggtccactactgttcaaaatctttgcgtgctatcctccactaccttgact

SEQ ID NO: 199417 - DNA, 122 bp, Homo sapiens
gggtccctggcccctccacttactggctgtgtgacctcaatttcctcatctataaaatggcgataatagtgcattgtggcttttgagaattaagagacaattgctgtgaaactcaaaaacag

SEQ ID NO: 199418 - DNA, 122 bp, Homo sapiens
actcaggggagagaaagcccacacacatctacaaagaaaagcaactctctccttgaggtacgggaagatgagggaaaagcatctcacttgcctttctttcacgaattgtgtttcaggacagc

SEQ ID NO: 199419 - DNA, 122 bp, Homo sapiens
gtgtctgcttggttttggttatctaagctgtaataagtagccttgggacccctgaaggcacgccccacacacttatgctgtgtgacctaaggtcacaagtaatggctgcaagctaattgatt

SEQ ID NO: 199420 - DNA, 122 bp, Homo sapiens
atctttttatcatcaccatgctttggccttttccaaaatgttgtatagttggaatgacaccgtttgtagccttttcaaagtgacgtatctcagttagtaatatgcgtttaaggttcctccat

SEQ ID NO: 199421 - DNA, 122 bp, Homo sapiens
ttggcaaaactgacatccacagaacaccacccgcaatggcaggatccactttcaagtgcacgtcattttgacaaaattgatcacatcctgagccacaaagcaagacccaacccttttcaaag

SEQ ID NO: 199422 - DNA, 122 bp, Homo sapiens
tcctgctgggttccgggcacgagtgcaggcccagggggcgagcaggagcaacaccaagaccggcccggcgggcagcggcaggggctggacctgtggcgccggggccttgctccacaccacac

SEQ ID NO: 199423 - DNA, 122 bp, Homo sapiens
tcgcccggctggaatgcagtggcacaatcactgtcactgcagcctcgacctcagagcaagcgaccctcccgcctcagcctcccgagtagctgggacaacaggcgcgcgccaccacacgtggc

SEQ ID NO: 199424 - DNA, 122 bp, Homo sapiens
ctcccgtgccgagagcttgggatgaaaatagcttcttcctctttacccttcctggacccccgccccaggacgactgggccccttcattcatctttcagcggccacccaggcggcttgggcgt

SEQ ID NO: 199425 - DNA, 122 bp, Homo sapiens
tccatgcctggactcctaaatgcaccccccgacccaaattttgagagtatatacagagtgcgatccctctttgaaaattttgtgttaaatactgctgccctgctgcattctgatttttctct

SEQ ID NO: 199426 - DNA, 122 bp, Homo sapiens
gccgggactgatgtgttttgacgtccccggaaattaacgtccaagaaaattattgtgacccgtcgaaatggtgagtatatttagaagacttgggaagcaatgcttaaatttagaggatccca

SEQ ID NO: 199427 - DNA, 122 bp, Homo sapiens
aaaataaaataaaataaaataaaataaaataaaataaaataaaataaaataaaataaaatcgcacttcccagcggttacacccggccacggaggtccccaggctggctgcgagggcgccggg

SEQ ID NO: 199428 - DNA, 122 bp, Homo sapiens
cccgaggtcggcttgcgttcctgtcctcctgctaggagggtcctggggtggggtgggctgcgccgccctcaggctggggcagtgtctctccctaggaccggctgggactgatcgacccatcc

SEQ ID NO: 199429 - DNA, 122 bp, Homo sapiens
ggtgcggcgccagagcaaggtggaggcgctgtacgagctgctgcgcgaccaggtgctgggcgtgctgcggcggccgctggaggcgccgcccgagcggctgcgccaggcgctggccgtggtgg

SEQ ID NO: 199430 - DNA, 122 bp, Homo sapiens
ccgccagagtccgtcctctcgttcgccgccgccggccccgcgccctgagcgcccgtctcgcggctccagccaggagacaaccacttccccgggtaatcctcgccgccaggcgcccgctggcc

SEQ ID NO: 199431 - DNA, 122 bp, Homo sapiens
gtggcagctaccccgacccttaggagcccaccaggacctctccaagtccccatctccgggcgaaccaagcatccccagccagcgcctggtccagcccccagtgtcaacgtgtcggtctggga

SEQ ID NO: 199432 - DNA, 122 bp, Homo sapiens
acgtgggggaagaagggggttacgccatcaagtcctgaagcccgtcggaccacccatcgccgcctgcgcagacccaaatcttggtcccgccgtaaggtgccgcagtcccgaatgttccagaa

SEQ ID NO: 199433 - DNA, 122 bp, Homo sapiens
tgcagttaacgggaccagctctgcggagtaagtatggggcgggcggtgaacctcggggcccggctggggaggcccgagccggggagcaggagcgcgcgccaggctccgatctggtttgtcac

SEQ ID NO: 199434 - DNA, 122 bp, Homo sapiens
actggcacatagctgctcagtaagcagctgtggcccaatgagcagatggggtttgggcggcgtcgagaacagaggcgtcccttccatccagccgcccatatccacagcctccatttcccaag

SEQ ID NO: 199435 - DNA, 122 bp, Homo sapiens
acgaagacctcttccggacacgtgctatggcccaggctcaggccgttctgcttctctagccgagccaccactgcctcgatgctcttgtgcgccacttcgctcggcttccgcccctcaggtct

SEQ ID NO: 199436 - DNA, 122 bp, Homo sapiens
gtctgccttcatgggcctgtgagtgggtagggccttctccctgggtagcgctttcctcttcggtctgggcaaatttcccactagcccttggaagaaagctcagaagtccctgctacgtgagc

SEQ ID NO: 199437 - DNA, 122 bp, Homo sapiens
cagggggcgggctgggaggaggtgttggatagagaaaagatgatgtttgaaagtgcagaacgcttgctttaagaaatgtatgataagaaggatgctaaatcccggttctgctgctttgggta

SEQ ID NO: 199438 - DNA, 122 bp, Homo sapiens
tctgcgtggaagatgagtggggcagcacgcccccggaccccgccctccagaatagaagggcgagcagatgtggccccaggatccaacaccacccggggcggtccctgggccagcatgggaaa

SEQ ID NO: 199439 - DNA, 122 bp, Homo sapiens
cccacaatcgttcacactgggactacatagacacagcagtttgcctaacatgcatatcttcgggatgtgggaggaaactgaccggggtacctggagaaaacccaggaagacatggggaggac

SEQ ID NO: 199440 - DNA, 122 bp, Homo sapiens
gtgcagagaaagagccagccgggtccctgggcccagcggccaatccatgaaatgggctggcggaaaaggtgctgtccttggcgccggcctcagccactggggctgccaaccccccaggagca

SEQ ID NO: 199441 - DNA, 122 bp, Homo sapiens
gttaacatcactatggcaggggactctggcaatgggatgtccaccttcatcagtgcccttcgaaacacaggacatgagggtaaggcctcacctcctactgagctggtaaaagctacccaaag

SEQ ID NO: 199442 - DNA, 122 bp, Homo sapiens
tctccatagctttcctgtatttttcgtaatgcatctgtggacctgagctccatgagagcccgcagctctgcgagcgtaattccaaagtctccatcatgattagcttccttcaaagagttttt

SEQ ID NO: 199443 - DNA, 122 bp, Homo sapiens
gagagggccagccgggcagcgccccctgcgccgcggggaggcgccgggctggcagcggtgcggcgacttaccttctggtcgacaatggagcaagccatctcgcggacgtgcgccaggctgta

SEQ ID NO: 199444 - DNA, 122 bp, Homo sapiens
agtcgacgccgcttccctggaccaccagccgcctgcagcgggcgtttagacggggacttccgtgccctttcgaaagctctggaggggtggccccaaaatgctataggttaagttcgagcgtt

SEQ ID NO: 199445 - DNA, 122 bp, Homo sapiens
ggcgggacccggctggcactcaggaggttggtgaaataggggcgtggtctccctcgggggcgtggcgatccggctcaaaaggcggggcctgggtggaacctagcctatggcaattgagaagc

SEQ ID NO: 199446 - DNA, 122 bp, Homo sapiens
ccggtccgaagaaaaaaaggcagccctcattgggctgtcgcctggaacaggagaccaggccgggagaaagggaggggcgtgcctaacgtactgtaccacccatcgaaatccggacggcagcg

SEQ ID NO: 199447 - DNA, 122 bp, Homo sapiens
tactccattacagtcttgggaggctttggaggactagagaatcgcggtggtgcggaggtgcgcaggacaatgtgggttctccggggctgggacgaaaccttcatcatctgagcagccgactc

SEQ ID NO: 199448 - DNA, 122 bp, Homo sapiens
atctggggtcacttgaacttcgttgggattcagctgttcagagatacaaattaggaatcccggcagcagagaggccctacccacaggcccagaggtcgctcacattacacccggcttccttc

SEQ ID NO: 199449 - DNA, 122 bp, Homo sapiens
gggatccgcggtttcaggttcctcactgcggggcgctgcggccatggcccgggtttagttcgcggagctgcggggcgggactgggaatgccgcactttcccatgcccggtgggtggaattca

SEQ ID NO: 199450 - DNA, 122 bp, Homo sapiens
tttgtttcaaatgtttaccagaacatttgaatgtttaccagaacatttgatgaaagagcacggcccctgctgagcgagctgacctccctggtgcctttttacaacagaacacctcatttgct

SEQ ID NO: 199451 - DNA, 122 bp, Homo sapiens
aggccaaagcagagatggggcagagaagaaatatgacaacttctcactctttcccacatgcgatctgttaggtgtctcccattggctgaacaagcagaagccagccagcccatgagggagcc

SEQ ID NO: 199452 - DNA, 122 bp, Homo sapiens
ccttttctcaaaacctagtgccctagtattggagtattggcttctatgcacatctggcagcgagcacttttgcttggtaacagcgccaggttctttttaacaaccagctattgcggggagct

SEQ ID NO: 199453 - DNA, 122 bp, Homo sapiens
gctgccccacgggcatgcactggaccaggctggacctctcccagctaggtacggccacctcgtgagtacacctgccggtgccctgactgccctaaaccggcatcacaacgtgatgtcggaca

SEQ ID NO: 199454 - DNA, 122 bp, Homo sapiens
gtcactgtttccttccctgcctcactaaacccacatgacacaggacaaatgtgatctgagcgtggccaacataactcacctgtaccattgttaattgcggtctggatcgtggcttctggccc

SEQ ID NO: 199455 - DNA, 122 bp, Homo sapiens
aaagcccagattcccgtcggttctttatgctgcagcagtggcttctcacccagtcagatacgttgcaaaaaaactgtgttttccttttctctcctcactaagtatttagttaatttgattta

SEQ ID NO: 199456 - DNA, 122 bp, Homo sapiens
ttctgctgtccacgagccatatccgggccaggagaatcttgcgtcggagagacagtgcagcgcgagagggccgggagaggacgccggagggaaaggaagggggagcgcgcccagcatcgctt

SEQ ID NO: 199457 - DNA, 122 bp, Homo sapiens
gccattttgttctgcggtgctggtatttagagcgcagcggctgacgggccggatcgccttcgccgccgcccgcccgcaaaccttcgtgcccggcccgtcctcgcccccgcctccgccaccgc

SEQ ID NO: 199458 - DNA, 122 bp, Homo sapiens
cactgctgcggccctggccagggatcggggaggccgatccagctggcgagttctgtgagccggggagaagcgccagaatttcccagtcggccccctagccctccgcttgccgcctcacctca

SEQ ID NO: 199459 - DNA, 122 bp, Homo sapiens
ttgttctaaaacatctgccatggaggctttttgcattagagagagggagattcaggaaaccggagaggactcagcagtgccaaacaggttgtgagtcagagctcctgttgaggggagggaga

SEQ ID NO: 199460 - DNA, 122 bp, Homo sapiens
acacacagaaatgatgcaaattcactggcagggaagagcaagagaatcagggcaagagaacgcagctcaggggttgcaaatacaggataaacattggttttgtgatacagaaaacttagcag

SEQ ID NO: 199461 - DNA, 122 bp, Homo sapiens
caggtcagccaagctggcaaagcgtgttcttgctgccccgtggtggcagaacatatggagcgatttttcatagatgccaacagaagagacacatcccacaatttcttgttgattattactat

SEQ ID NO: 199462 - DNA, 122 bp, Homo sapiens
tttaccatgagggatatgaacttgcccaggatttgcaccgcataagcaacagctgcagttcgacttgcagaatacaaggaataattttgaaagtactcgacaagacgtagaggggttgatgc

SEQ ID NO: 199463 - DNA, 122 bp, Homo sapiens
atccagatgttcagcctccctccccgccgaggtctccgcagggagctgcgccagcgagcgcgaagtcagcagttggcccgagcccatttcccagatgggtgaggggaagtcggctctgtgct

SEQ ID NO: 199464 - DNA, 122 bp, Homo sapiens
ctggggagctgggtcgtcggtttgagtctgaaccccacttcctctgtcctcagccatctgcgccaagccttgcctgaacggaggcgtctgcgttaggcctgaccagtgcgagtgcgcccccg

SEQ ID NO: 199465 - DNA, 122 bp, Homo sapiens
gtttagggggttcccttcctgaccgcctccctgtgggctttatcaccagcctctccatggcgtaggctcagtccctgcggcaaattcctactcatggtcggcttctctggtggaagtctgac

SEQ ID NO: 199466 - DNA, 122 bp, Homo sapiens
ggcgggtgcggacgcaaggcgcagcggcaaggacaaggttctgtgctcgctgggctgacgcggtctccgcggtgtaaggaggtttatatatatttctacaacatctcccctaccgctatagt

SEQ ID NO: 199467 - DNA, 122 bp, Homo sapiens
ttaataatcagagaatgcaaatgaaaaccacaatgaactatcacctcacacctgttaggacggctattatcaaaaagtcgagagataaaagataatgatggcaaagctgtggagagagtgaa

SEQ ID NO: 199468 - DNA, 122 bp, Homo sapiens
ccctctatgcaccgaacccaatacgttcattccccgtatgatcgtcctggttggaaccctcggttctgcatcatctcggggaaccagctgctcatgctggatgaggatgaggtgagtgtggt

SEQ ID NO: 199469 - DNA, 122 bp, Homo sapiens
caaagtgcgataggggtgtgggggcggagcgcaaggctggggggaatccccgtcccctaccgccaaacgacgcgcgctcacaccgtgaaagcactggtctgtccgtcggtcggtcccccgcc

SEQ ID NO: 199470 - DNA, 122 bp, Homo sapiens
acctcgggctccccgcctgctggccgaaactgagtatgtgcagtaggatggatgtttgagcgacacacacgtgtaacactgcatcggatgcggggcgtggaggcaccgctgtattaaaggaa

SEQ ID NO: 199471 - DNA, 122 bp, Homo sapiens
aacacattattcacacagagaggagacacagccgggtgtgggctccgcttcagtagtgggcgttggtcccccatggccatctggtccctccatttggcctgcacacacagcctcttgagaag

SEQ ID NO: 199472 - DNA, 122 bp, Homo sapiens
gttccaagcgctgaggatacaagaattgaacttggcaaagtttctaccccctggagtttacgggacaattttagatcctccttcgaccccacccccagcccatccttggatccgattgaaat

SEQ ID NO: 199473 - DNA, 122 bp, Homo sapiens
tgggagctgcttcttgcctttcctgcttcctggacctctctggagcgttggctggggagccgcagccacagccttgacccagggcctccgaagccgcggcttaaacggaggttgcaccatca

SEQ ID NO: 199474 - DNA, 122 bp, Homo sapiens
gtgagccacgacgcccagtctgattgtttttgtaaaccaagttttattagaagacagccacgtgatttcatgctacaatggcagagttgagtagctgtgacagagactgtatggtccacaaa

SEQ ID NO: 199475 - DNA, 122 bp, Homo sapiens
gatggggagacaggctcgttgctcccctgtatcaaagaggtgcagggaccccttgcagttcgcagtccgcagggcgcggggccgggctctgggccgcgcggtgcgtgtggctggcgcgccct

SEQ ID NO: 199476 - DNA, 122 bp, Homo sapiens
cagttgaaatcctaaatgctaatatgctcgtctgggttatttcttctgaactcgataaaacgtaaggaaaatttgactcaagtgaactgaggatttctcctgagaggagggacaggacagga

SEQ ID NO: 199477 - DNA, 122 bp, Homo sapiens
ggcttctaggccctgccaggtagattcggagcaggaagagtccctaggtcggatggtacccgggtgggtgtgggggtgtggccctgatggccaagctctatgttcagagcttcagtgctttt

SEQ ID NO: 199478 - DNA, 122 bp, Homo sapiens
gggcagcagacggggttttggggtcaccactcctcttagagaatccctttgagctggggccgcctgtgcctcagtttcctcattagtcctggggccagtggttgaactggggcccttgaact

SEQ ID NO: 199479 - DNA, 122 bp, Homo sapiens
tattcttgctatttttatcttgatttctttaaagattttgtgggaatatctgcagtgggtcgcaggagtaggtaagattgctaaggatcaaaaacaagtttcatgagaatattatttttgct

SEQ ID NO: 199480 - DNA, 122 bp, Homo sapiens
tccacgcagtgtctctcctccagggacttgggtttctccactcatctcttactgaactggcgattcagtgactgttcagttactcgatggctcccaaatgattattctcctgacccccacca

SEQ ID NO: 199481 - DNA, 122 bp, Homo sapiens
gcagcaccccgactccagccaggagcccccgcccccccggagcgcaggaggaccccggcccgcctctcccaggcgcagcgcccagcatctcgctgctcctgtcgtctaagcgtcggcgtcgc

SEQ ID NO: 199482 - DNA, 122 bp, Homo sapiens
ggcctgcctctgttaagagtctttatattagttatatttctctaaatccatctcttagtccgattttggagctggataaaccagcactagattcaatcaagactccttcccaatttttttat

SEQ ID NO: 199483 - DNA, 122 bp, Homo sapiens
aacttaagggaatgggagagcggcccatagaggtggacggagggcgcgattggagtaaagcggaccctgtgtaggtatagagttgagtcaagtggagtcactgcctctgtccctctggtcag

SEQ ID NO: 199484 - DNA, 122 bp, Homo sapiens
aggctgcctttggaccagattcttgaacttttccaccaaggatgttgctgctgtttgtagcgtcggatcctggaaaatcgctgtgttggggagcagcaggctctcccttgctcccccagggc

SEQ ID NO: 199485 - DNA, 122 bp, Homo sapiens
tcaccaagaggtcagcagagcagaggtttctaatcacaatgaccgctgacatttattgagcgcttagtgtctacctctcccctccctgaacctgtgccatcccgatagtgccggagctctct

SEQ ID NO: 199486 - DNA, 122 bp, Homo sapiens
ttccttttcccaaatagtccaacgttttgaggagaaatatatgaggcaggttgttttatacggcactgtaccctttaggaaacctaacatttcagtgaactgggaaacttcacaacataaac

SEQ ID NO: 199487 - DNA, 122 bp, Homo sapiens
aggcgccctccaccacgcccggcgaatttttgtatctttagtagagacagggtttcaccacgttggccaggttggtcttgaactcctgacctcatgatccgcctgcctcggcctcccaaagt

SEQ ID NO: 199488 - DNA, 122 bp, Homo sapiens
cccacacaatggaataatcaatacccaggcgcccggggctgccccactgagcaggtgcagcgacccgcccgccgcggcgcatgccgggagttgtagtctgttcgcgcccgcccgcctgcctc

SEQ ID NO: 199489 - DNA, 122 bp, Homo sapiens
gacaggcacgtgttccatgcacatccgtgaaccaacctctcccactaacctaggtgtggccgcctcaccgagaccacccgaaacgtccgattccccaaacgctggcgggacaaggacagcgg

SEQ ID NO: 199490 - DNA, 122 bp, Homo sapiens
tgctgatcatgtgtattttaattttacggaactattaaaagtcaatataccggccgggcgcggtggctcacgcctgtaatcccagccctttgggaggccgaggctggcggattccttgaggt

SEQ ID NO: 199491 - DNA, 122 bp, Homo sapiens
ctattggtggtctaattttaatatttcaaacagctgcgtattatagctagggtgtttggacggttgtcatggaaataagccccgccccttaagctgcgtcctctctttgacctgtcagtgag

SEQ ID NO: 199492 - DNA, 122 bp, Homo sapiens
aattcttatcgcctactgatgtcattgctgtggtcacatcatagtgcaacgcattactcacgtttgtggtgatgctggtgtaaacaaaccctactgtgctgccagtcatttaaaaaaagtag

SEQ ID NO: 199493 - DNA, 122 bp, Homo sapiens
cccactggcctccctcccgctgtaggcgtagtcctgcagacctgggtgctgaatcagttccggctagtccctctggacaagattgaccaagtggtgatgtcctatgggggcctgcggggggc

SEQ ID NO: 199494 - DNA, 122 bp, Homo sapiens
tttggtaggtaaaagtctctcatatgttgcctaaggggccctctggctttcagcctttgtcgttagttgattaatcacacaagcctttcatttactttttccagtgcattagtgtcactcag

SEQ ID NO: 199495 - DNA, 122 bp, Homo sapiens
tgcggacctggatcctcctccaggtgcagcgtttcgtcatctagcccaagcttggtctggcggcttcagtatccccaccgggccgagctgtgtctacttggtgcccgcgtatttgctttagt

SEQ ID NO: 199496 - DNA, 122 bp, Homo sapiens
tgaaaggcgccctctgcagtaccggatgcggcagcggctcagaagggctgtgcaggggatcgctggttaattgatcagagccagttttctttatcaatgctgggaacgcgggggtgaggtga

SEQ ID NO: 199497 - DNA, 122 bp, Homo sapiens
ctcacacagattcacccaacaaggtctatccagaaacatgactggggagcttgtcacggacgggaagccatttggctcatgagaaaaggggcatgttccacacgtgctctccaggcagggac

SEQ ID NO: 199498 - DNA, 122 bp, Homo sapiens
tctcactattgagtgataaagaaaaaaaataactccatgatgaaagagttttacatcttacggaatgctttcatatgaataatcggacctagcatttccctatgagctaactatgccatata

SEQ ID NO: 199499 - DNA, 122 bp, Homo sapiens
atggaggaggacgacgaggactccaaacaaaacatcttccacttcctgtatgggaagacccgctctcgcatacccttgctccgtaagcgttggttccagttaggccgttccatgaacccgag

SEQ ID NO: 199500 - DNA, 122 bp, Homo sapiens
acatcctcagtggctaccctgagtcactgctctgatcagccctgagtcaaagcctgggaccgaggcgagttagtcatggtctctggagctcaaaggggcagacagacgggtaaacaaagagt

SEQ ID NO: 199501 - DNA, 122 bp, Homo sapiens
tagctgtatgttgtggctggttacctgttaccaaggattaagctatacaggttttggttacgcttatggaaaaatatgtccattcagtacttatgaagccttgggatctcttttctgtatca

SEQ ID NO: 199502 - DNA, 122 bp, Homo sapiens
aagcgtgtatgtaatagaatttttttttttctatatagctctataaggctgcattgggaacgggagagaaaagatacaaggaactgattttgctcaatgcaaggaaaagctgtccatgaatg

SEQ ID NO: 199503 - DNA, 122 bp, Homo sapiens
ctcatggactcctgacctggcattcatcaggattgaaatcattttcctgcttgggctgaccgtaggggatgccgctgaccccacttccgtagcgccaggaggcaccatgatcatcgctgagg

SEQ ID NO: 199504 - DNA, 122 bp, Homo sapiens
ccaataaacttgatgccccaataaatctacatctcagggcctgtttttgcaggaacccaacgtaggagaaaccctaaatacctcttacttttgtgaaaacatcagtgcctcctggagacaca

SEQ ID NO: 199505 - DNA, 122 bp, Homo sapiens
atgttagctgacattgattgaacttccgctactcaaaagtatatgtaattataagtgaaacgtggtgagaaaggctattactttgacaaatggcaccagaattctttggagtgttaaggctc

SEQ ID NO: 199506 - DNA, 122 bp, Homo sapiens
gcagggccgggctccagatgtctcctggcaaatgcgccccgacccccgaaatgcgccgggcgggtcaccgcaccccgagatgtgcccccaaggctctttcgaccgccgtgaagtggcgggcc

SEQ ID NO: 199507 - DNA, 122 bp, Homo sapiens
gcctcgaataaaaatgacgagcacgggtcctctctcgggcccgcagtgggtggactgcgtcgcagacccgtagtggaggcgcccagctcgccggggagattcgagtggaaaccctcacggcc

SEQ ID NO: 199508 - DNA, 122 bp, Homo sapiens
ccccgcgcgttgaacccaggagccaggccatgtccggagaggctgagcgccctccagcaccggccacctggccctagcccagctgcaagcaaaggctctgtgcctagcgtggcccggcccca

SEQ ID NO: 199509 - DNA, 122 bp, Homo sapiens
cacagcagcctagaagagtagtgaaaggccccgcgtcctggatgctgggagcccgggaagcgaggacacacgcacactcgcacactcattcacatccacagacacactcgggcacacagttc

SEQ ID NO: 199510 - DNA, 122 bp, Homo sapiens
gcacgacgggagaggggcggggtcggcggggccgtttcgcttcgaagattgtttcagaagcgttgggcggggcgtccctgagagaaattagtaagcctcctcatgcggctctggtttcggtc

SEQ ID NO: 199511 - DNA, 122 bp, Homo sapiens
ttcacaaaagtcctggtaggaaggaagcatcctgaccccattgtacagacagagcatcagcgtttacatgaagtgactcaccaaggtgcacacagtgcccacagcaggtttggaacccaagt

SEQ ID NO: 199512 - DNA, 122 bp, Homo sapiens
gtgggtgtgtggactttccctggctcccccaggctgtctggctgcacagctttggggaaacggccactgggtcaagcgggccgagaagaggaagtctgtggtttgtctctgctacagactgg

SEQ ID NO: 199513 - DNA, 122 bp, Homo sapiens
tggcacaatgcttaataaatgttggttaaatcttataatcattttctgtaggaagtgggacgacaaagttaagggtctaggtggtcagagaagagcaaggactatgtcccttttttgtgcag

SEQ ID NO: 199514 - DNA, 122 bp, Homo sapiens
ggatacacacgggtgcatgcgcgcagacacacacacacaccacacccgggcacacacacacggacacacaaagacacagacacagatagctcaaagggagacctcccctcatattgtcttat

SEQ ID NO: 199515 - DNA, 122 bp, Homo sapiens
ctgaaggggctgagcctatctgaggattaaagcacagcttttgtcaggagtccgtgcctccggtctttgttccagcgacctgaggaatggcatgcatcagaagccgcttccgtgtctcagat

SEQ ID NO: 199516 - DNA, 122 bp, Homo sapiens
ctgcaggagaagatcagcaagatgaaggccaatgagacaaagctggagggcgacaagcggcgcctgaaggaggttctggacgcctccgagagccgcactgtcaagctggagctgcagcggcg

SEQ ID NO: 199517 - DNA, 122 bp, Homo sapiens
tcaggaagctgaggcgagaggagcgcttgagccctgggaggtggaggctgcagcgagccacgattgtgctactgcactccagcctgggtgacagagtgagaccccgtctcaaaaaaaaaaaa

SEQ ID NO: 199518 - DNA, 122 bp, Homo sapiens
gcgctggctctcagctttcaggatttcacttcaccctcagtcagtgctgaacagttgtcgcggaggcctgcgtgagtgaggcctggcgtgccctggaaacattcccctgagttgaagaaaga

SEQ ID NO: 199519 - DNA, 122 bp, Homo sapiens
ctgcccttgtttgtggagttacagcctcaaggttgtagcatgtgtgctggcaatcagggccgcagtgtgttctgcgcctgcccagagctgactcctgatttaaccgctggcgtaaccgcggg

SEQ ID NO: 199520 - DNA, 122 bp, Homo sapiens
gtgggttgggggtggggtgtggaactggagtggcccagggagacgatggcaggggcggggcggggcaggtcgttgtactgattcaagatacaatctccatccaaataatggattgttattaa

SEQ ID NO: 199521 - DNA, 122 bp, Homo sapiens
atctttcttcatttgcacagtataccaataagctcttactacttctcagcacaggtaactcgccttttgcagagcaccctccgccgccgaacggtcagagcctggaggaacccgcaccagga

SEQ ID NO: 199522 - DNA, 122 bp, Homo sapiens
ccgctctgctccccggcagccctccttggctgcccggccgcccattccgccttttcaattcgattcaattaggccgccccgctcggaagcttgtctcctctgatatccagtttaactgacag

SEQ ID NO: 199523 - DNA, 122 bp, Homo sapiens
acagcgactgtgtccctctctggcatggctgtgttggccccaggaccaacacaggctggacgccgaggcgccctagcccgaggttccagagcctgcgggaaggatacggtcataaggacgcc

SEQ ID NO: 199524 - DNA, 122 bp, Homo sapiens
acccaggaaaccagtgcgctgccggacgagagtaggccatcggctttccgcgggcacacgcgggtggctgtggttgaactgactctcgggtttccgctcctggctgttcaagccgattaatt

SEQ ID NO: 199525 - DNA, 122 bp, Homo sapiens
cggactctcccggaagcgaccgacgtctctaaaagtaccagagagtggactcggctgacccggcggctacagcgcccccatattttctgggagacttcccttttgacaataggtatccgaga

SEQ ID NO: 199526 - DNA, 122 bp, Homo sapiens
agttttcccacttctgagtcctgcattgcaatcacagtgcaaggcttgattagaacctcccgggggtagtggaaaggctgtgcatggtaatatcaactttgcctgccttacattcctttaga

SEQ ID NO: 199527 - DNA, 122 bp, Homo sapiens
tagaagcagctccgaggcagccttctgagtggctggctagaagcgttctgtatcttaatccgggtagtgggttacaaagactctccttgatgacactctgaagaggcttctctgagccctgt

SEQ ID NO: 199528 - DNA, 122 bp, Homo sapiens
tctgaagcaagtgtcttcgatgcctatgtgcttcccaagctgtgtgtgaagctacattaccgtgtgagttgtgcaattcacagcaaagtagtcaggaatcgatctcgtgaagcccgcaagga

SEQ ID NO: 199529 - DNA, 122 bp, Homo sapiens
tcagactcatcaaacttgagctacaccatcttggaatgctttatcaaactttaaggatcccgattttctagaaaacaaaagcatctatgaggtgctagagaattgtcttgagagttcatagg

SEQ ID NO: 199530 - DNA, 122 bp, Homo sapiens
cgtgctggagagggacggcggcttggccaatgcggagctgggtctggcgcggcaggaaggcgggactgccagtggggcgccggggcggggcggagagccgagcgccaacccgctagcgcctg

SEQ ID NO: 199531 - DNA, 122 bp, Homo sapiens
agaaagggcgggattaccaactgcgctaggcgattggctgttttgacccagagaagggaccggtggccaatggaaaaggaaaaagggtgagagtccagccaatagtgcggtagggcctgaat

SEQ ID NO: 199532 - DNA, 122 bp, Homo sapiens
tccgcctcgccgggcaccgccatcttggattgtcacatgatcagctagaaccaagtctcgcgagaacaccgcgagcaacgttccagcccctgcgttgcgagattgtgaaaattctaactagt

SEQ ID NO: 199533 - DNA, 122 bp, Homo sapiens
tcctagtctttgggaaacgggttgtgttttttttcctttgccgtgttggatttccggtcccggctgacacctcccttcgtgtgtgcgcccctccccacccctgcctttgtttcggtgccctg

SEQ ID NO: 199534 - DNA, 122 bp, Homo sapiens
ccggcctcaagcagcacaagcatatccacagcacggtgaagcctttcatatgtgagtggtcgcccagcctggccgcctgccctccgggtgcgcggatgccgtggcggtcgggccgaggtggg

SEQ ID NO: 199535 - DNA, 122 bp, Homo sapiens
ttccctgtccctgcttgggtgagtaaatccctagtgctttgattcgcttgcccctccttccgtctctccccacttcctcctcgctcgctcgttccctctgccttcaatctgagctgggccct

SEQ ID NO: 199536 - DNA, 122 bp, Homo sapiens
tataccagaccctgtgttcgaagattctcatccattttctcatttgaacttaatcctggccgggcgcggtggctcacccctgtaatcccagcagtttgggtggccgaggcgcgcggatcacc

SEQ ID NO: 199537 - DNA, 122 bp, Homo sapiens
tcaggcctccaaagctctgcatacgttgccctggcaaggtcagaccctttggctgcaacacgtccgtcaagaagccaggcaaatctagcatgcaaactaggatcattttcgggcgttggggc

SEQ ID NO: 199538 - DNA, 122 bp, Homo sapiens
ttgacccagttgatgcaggcgtggaagacctcggactcgcagcgcacgttcaggtcgtcccggctgatgagggtcaccagttggcagtgggacaggttgaagaactcctcttgcttggccac

SEQ ID NO: 199539 - DNA, 122 bp, Homo sapiens
gacgagacgcccaccttcttcccggccgtgtacaatgtgtctgtgtccgaggacgtgccacgcgagttccgggtggtctggctgaactgcacggacaacgacgtgggcctcaatgcagagct

SEQ ID NO: 199540 - DNA, 122 bp, Homo sapiens
tcggcgctgggaaactcaggagcttgtgatctctctggttccgacttccagccgccttcccgagccagttaggcgattgcgaccctgccccgccccctgggtcctgcaggcgcccgattggt

SEQ ID NO: 199541 - DNA, 122 bp, Homo sapiens
agcccatctcgctgctcgaggcgctcaacggcctccgggctgtctccccggccatcccctcggcccctctttatgaagaaatcacctattcaggcatctcggacggcctgtcccaggccagc

SEQ ID NO: 199542 - DNA, 122 bp, Homo sapiens
cagggtcaggggttctgccgtgggggcggggagggcctgagaagcggcacccttgggtttcgtggctttgagcctccaggccaggctggaagacctgggaggcctcagacaagcgtgccaag

SEQ ID NO: 199543 - DNA, 122 bp, Homo sapiens
aatagaaaaggacagagaagcctccaaaagtctaagcttgcatggcagccgcggctcgctcgccctccccccaccccccaccccccaaacaaaaatataccaccacttaaagaggtcctcgc

SEQ ID NO: 199544 - DNA, 122 bp, Homo sapiens
atcacctgggcaggctatgggacctgaaaggtactatctcaggtcctgtctgcctaaacacgctataccacaattcccacttcaccacgacctccccatgtaggcacagtgctctctctgag

SEQ ID NO: 199545 - DNA, 122 bp, Homo sapiens
gagcggcgtccctgaagttttggggttcgaccattcttggcgagaagagcgactttccatcgcaggcacccagcgctcgctccaaggctgagctagttagggatctgcggcatcgtccttta

SEQ ID NO: 199546 - DNA, 122 bp, Homo sapiens
tccttgcccttgagtctggacttgtcaatgatcttcatcgcataggcctgcctggtctcgcggtgtctgcactccttcacgacagcaaagttcccatccccaatgacccggccagtctcata

SEQ ID NO: 199547 - DNA, 122 bp, Homo sapiens
ggaggcaatggccggagaggatgggcagttagcgggagggactgagtggcgccggcttcacgctcattctgctgagggcttgggggcagctcatcagtcttccgcaatgggcctgctcgctg

SEQ ID NO: 199548 - DNA, 122 bp, Homo sapiens
gtcatggttaatatgctgctgcagtcgctatctctttgggaaaataccacatgccgtccgcggcctgcccagctggtgcagagggaggcggaaaacacacagggcgtttatttatttattga

SEQ ID NO: 199549 - DNA, 122 bp, Homo sapiens
gggctgggcagctggtggggtcctggcacacgcacatgggggtgttgttctcatccagctcgcacaccttgccgtgtttgcagtggtggttctggcagggatctgtagggcagaaagacaag

SEQ ID NO: 199550 - DNA, 122 bp, Homo sapiens
ctgctgctgggagcagcctctgggtgggtggcggaggctgaggcgatgctgtccaccacacgtggcacgcgggcagccttgactacgcaagcccctggggcacgtacacgtgtgttttcaca

SEQ ID NO: 199551 - DNA, 122 bp, Homo sapiens
ggaaaatccaattcttagatttttctagaaaattcaaatagaccaacattgaggttaaagcgttcccactggcttcatgttgtcaggtctttgaaagagaaagaatgccagaggatcccctg

SEQ ID NO: 199552 - DNA, 122 bp, Homo sapiens
agacttcccagcgtcagctccgacctcctctttctctaccacgatcccggccagcatccccgcccagcagcggctcagccacaaacccaagggtctccacctgaagcaggcggcggaaggga

SEQ ID NO: 199553 - DNA, 122 bp, Homo sapiens
cgaagaaccaacgtttctgtcggtttacgcccttaagcacgaggcaagggctcactggcccggctgaagttcggggtcctgatcccccaccagccccgccctgttaggcctttagccgtttc

SEQ ID NO: 199554 - DNA, 122 bp, Homo sapiens
tgaaaccgtcgtccaggatgtagccttcagggcactcacagctagcctgggtgttggggtcgcagtcggctggacaggcagtctggttgcaaaacatctggcacctgtgcggctcgtgggga

SEQ ID NO: 199555 - DNA, 122 bp, Homo sapiens
ccggcgctggatgctttgctgccggggttcgggagtgacctgcgcctagagcaggtcgggcgcactgcagtcccgcactcggggctcttcttccggtcacctgtagagcccggccgaggaat

SEQ ID NO: 199556 - DNA, 122 bp, Homo sapiens
cccaggccgaccccgccgacccccgcggaataagcggggccaggagccccggaaacccggcgccttaatgcaataaacaggaaatcgcggggatgatctgggttccgggggaagtggaatta

SEQ ID NO: 199557 - DNA, 122 bp, Homo sapiens
ttggtttacaaggtgcagcagcacaatggaatcatcttccagtttgtggctttcatcaaacgaaggcaaagggctgtacctgaaatcctcgcagctggaggcagatatgacctgctggtgag

SEQ ID NO: 199558 - DNA, 122 bp, Homo sapiens
acacacaccctgacccctgagtcagcacttgcctgtcaaggaggggtggggtcacaggagcgcctccttaaagcccccacaacagcagctgcagtcagacacctctgccctcaccatgagcc

SEQ ID NO: 199559 - DNA, 122 bp, Homo sapiens
gaagcattccaatcttcttggagtttcttcccaagcaggtcctccgccctgccacctccccgagcagcccttcgatgactccctgtcttctgtggtgcgtttcagttacaaaaagcccaagg

SEQ ID NO: 199560 - DNA, 122 bp, Homo sapiens
aaaaaaaaaaaaacagtgcaaccacaggctctcagtttgccagtctagctgtggacaccgcgctgcctttgtctcatcagtgttctttgcccaccacatccttcttcccaattctgatccaa

SEQ ID NO: 199561 - DNA, 122 bp, Homo sapiens
gctcccgccgtgttgctcagagcagctcacggtgggcacgcggcgactctgaggaatgggcgttcccacagctccccggcttccgtgacggccacgaccggctctgcagggcaagctggcct

SEQ ID NO: 199562 - DNA, 122 bp, Homo sapiens
ctgggcatagaggaatggaggtggcccgtgatacaatcctatttatgggacagaaaatgccgcccaaaattgccagacaaaaaaatgtgtcctctgccccatgtaaaaataaaattacaaac

SEQ ID NO: 199563 - DNA, 122 bp, Homo sapiens
aagcagtgagggaggcttcggggcggctgggccgcttcagggagccccagatcgtgggtgcggctgcagggccggggtgctgggttcttgggagactggggcttgtgtctttcaggcaccga

SEQ ID NO: 199564 - DNA, 122 bp, Homo sapiens
ctggacttaggagctccccaagccagggctgtgacatcctctttgtggctctgcagttgccggcatctccaagtttctgggtgccaccatgttccacagtgcttgtagtgggagccacttgt

SEQ ID NO: 199565 - DNA, 122 bp, Homo sapiens
acagtccctccacgtacccacaggaggcccagactcagcggggcgggtgcaagcgcggggcggggcctctgcgtccggtcccatctccgcctgcaaaaggagcagctggctccaggctccaa

SEQ ID NO: 199566 - DNA, 122 bp, Homo sapiens
atgttaaagaggttattttcaaagttaccttaaataagtaatacagcatgaaagaaaacccgacctactacgcctcacaggctgagtggagtgttttgcagtctcaaagccttatcgctggc

SEQ ID NO: 199567 - DNA, 122 bp, Homo sapiens
agtaacaagagaataactctacacaattttaaaagcaagtaacttaagtttatgttaacacggcacatctaattgtcaacaaatgcagcctgtattttatttttttaactcagcctaaatgc

SEQ ID NO: 199568 - DNA, 122 bp, Homo sapiens
tcccgccttcccccggcatttcggggttcttcaaaattctgggagctccggggagggctccggggataggggtccaggtgacgtccggcgcccgtctcgcgggtagggaaactgaggccggg

SEQ ID NO: 199569 - DNA, 122 bp, Homo sapiens
ccttggagcggggcaaaggtaccccttagtgccgttgatctccaggggcattgttagactcgcctgttatgccttccgagggggcctctgctttttaaacactgaaaagagtctgagttccc

SEQ ID NO: 199570 - DNA, 122 bp, Homo sapiens
gagcaaatgaaaaaaaagctgcctgtgggaacatgctgattgtggcaacaatgacactgccgccatttgagacattctagatatgcagactgaggaaatcagtgaaggtgaacttatagaca

SEQ ID NO: 199571 - DNA, 122 bp, Homo sapiens
ttgcacccaagtcccgcagccccagtcctggcaagtccaagcgacaccgcagccgcagcccgggactggccaggttccctgggcttgccctacggccctcatcccgtgaacgccgtggtgcc

SEQ ID NO: 199572 - DNA, 122 bp, Homo sapiens
cggcagggctgtgaaggtttccgggaagccagccaatcattcccaacggaaactcagtagcggcattttcaactggataaactggccttagtcccgccttctcgttccagagttttgtgcga

SEQ ID NO: 199573 - DNA, 122 bp, Homo sapiens
cttcagcccacttctccatacaaactaatggacaggccttcataagtttaaatgtttccacgaaacctgaagttgctactaaagctgaagtctaaataactttgatcctgaatatatattga

SEQ ID NO: 199574 - DNA, 122 bp, Homo sapiens
acacatttagtataaatagactaagacaacactgtataaaaagtaagtgtcttctgggaacgctgacacagcactgatatggatgcagctctgcagtctttgccctgcccctgtttccagtt

SEQ ID NO: 199575 - DNA, 122 bp, Homo sapiens
gtggctgttaacagtccttgacacgtggcagcctcactccaatttctacctccatagttacgttgctttctcttttgtctgttaagtctctcctgtgtgtctcctatgaggacacctgtcaa

SEQ ID NO: 199576 - DNA, 122 bp, Homo sapiens
cctcttgcttcttcctccgcacggtgcgcatcacctcctccgccacctctactgggtgcacgccgtaggtcagcttcctgaaaaagactgaaaggccccagttgggggcgggggttatgacc

SEQ ID NO: 199577 - DNA, 122 bp, Homo sapiens
atattctccatgactagtgctggcggcggggaggcggagcaagctatcttttctaccagccgtgtcacacccctcctagcactaacccctcctcctcagccttttcacacctctacccacta

SEQ ID NO: 199578 - DNA, 122 bp, Homo sapiens
ccctagagactgttggctgagatcatagcagatagccaatcagtgttttccatctggctccgttacctgttgaattaatcttgccatctgcttattgtgaaagccaaaaagctaagtgttta

SEQ ID NO: 199579 - DNA, 122 bp, Homo sapiens
ctagcctgacctggatcctgtctgctaggtgtggggcttctaccggggcctctcgctgcccgtgtgcacggtgtccctggtatcttccgtgtcttttggcacctaccgccactgcctggcgc

SEQ ID NO: 199580 - DNA, 122 bp, Homo sapiens
agactttgtcacacacactacacacacacacacacacacacacacacacacacacacacacgagaaaatggaacactgtggggggcctttggatgcgtccagaaatgaatgtagttcttcag

SEQ ID NO: 199581 - DNA, 122 bp, Homo sapiens
attgtcagatggcgccctttccactgctttggatgggtgcgcgggtagcgttttttttcccgggctagcagtgggtaagcgtgtgcgcaccttgcgccgggcgctgcagggagtctccagct

SEQ ID NO: 199582 - DNA, 122 bp, Homo sapiens
cggagcagagaccagcagcagcaggggcagcggggacacaagccgcgaccgagccgccgccgcagccctggctgccacagctgtgtgggatcccagccgacactgcagaaagctccttttac

SEQ ID NO: 199583 - DNA, 122 bp, Homo sapiens
cctcattccgtcgcggctgtgggggtaggcgggggctgggctcccagctccctagagagccgagcggaaaccctacgtttaggcccgttctgaccggggttcgctgtgtgaccttgaagttt

SEQ ID NO: 199584 - DNA, 122 bp, Homo sapiens
acctggcttgggggtatcggagccgggattggggggagcgggccccacgtgcctgtgacgcgggggcgcccggtaggtggcggcggcgacgcggggccggcggccgtgcggtgccgggaggg

SEQ ID NO: 199585 - DNA, 122 bp, Homo sapiens
agaaaccggcccgcgccgcgtagcgcaatgcccgcacgccacgtacggggggcgggtctccgaagcccaggctggaggtcccaccctgccgctgggaaggaacgagcccattggtccgtgcc

SEQ ID NO: 199586 - DNA, 122 bp, Homo sapiens
ctcaagtgatccacccgcgttggcctcccaaagtgctgggattacaggtgtgagccaccgcgcacggcctacaggtcctctcttaacagaagtttctctcaggagtggcaggacccgaaaac

SEQ ID NO: 199587 - DNA, 122 bp, Homo sapiens
tcggcacgaaactccaaagtgttgcaggataggtcctttcacgggtcatgttgtgatctgcggggtaggcgttcagttccagcattgctactaactgcatgaccttgagaaagtcacttttt

SEQ ID NO: 199588 - DNA, 122 bp, Homo sapiens
tcagctgaccgcctttgcttacaccaggtgcacgccggctgcggggagcacaaagcggggcgcaccgcgggcgccggcaacgagccggtgaacgaggcgaggcccgtgcgcccgcggctgca

SEQ ID NO: 199589 - DNA, 122 bp, Homo sapiens
cgtcacctctacaatgagaccagaatgggccacagtaacatggccgtgagaaacctagtgcgtgtgtatactctacccgcagactaactctgttccatcctatttagcactgacttgagtgt

SEQ ID NO: 199590 - DNA, 122 bp, Homo sapiens
cagtgcccctgacagcgcatactggtaagtgactaaagtaaactcacctgagatgcagagcgaagatccaagctacacgttcggaaaccgagccacatattaagatgctcttttggtttagt

SEQ ID NO: 199591 - DNA, 122 bp, Homo sapiens
agtcggccaggatgtctcaggtacagcgcgtgcacagccaggctgcgaaggtgcagcgggcgggaggcccgttgggggctcagccggctgccagaagctctcgggctctttccttccgtgcc

SEQ ID NO: 199592 - DNA, 122 bp, Homo sapiens
aaactagagagcagccaaaccagtgacccagctgaggcagtactgttcccttaaggagcacgtggaaatctactgggtggctgtgaatatcaccatgtcaagggtgggcaggtgggacactg

SEQ ID NO: 199593 - DNA, 122 bp, Homo sapiens
ctggcaagtttcggccccgagttaaacattagtgagcgccgagcccgctgggtataaaggcgccgcgggcaggctgcagggcaggcggcgcgggagcaggcgcgcgtggcgcggggcactgg

SEQ ID NO: 199594 - DNA, 122 bp, Homo sapiens
aaagaggagagaaaacacgggaggcacagttccacatccttgtcacttgcaccggctccgcgacaactcgtcgtttgcacccgagggtttggggttggtagtttaattttttttttttccta

SEQ ID NO: 199595 - DNA, 122 bp, Homo sapiens
tcccccgtctgctgacttttcgggccaggtgaagtgtttgggccacgcgtgtacctgtggcgagactcgggaggcgatcttggggggcgcgcggtcgcagttgggcatcttgcctgggtcgg

SEQ ID NO: 199596 - DNA, 122 bp, Homo sapiens
acttgtctctgcgttgtggggaggacgcgcgctcgcgcgggattttcaagcgtaggcccccgggaactcgagctgccatgagcctctgggtggacaagtatcggccctgctccttgggacgg

SEQ ID NO: 199597 - DNA, 122 bp, Homo sapiens
gcaattttctttttggttactgccatagggattttgtaactgagtcacaccgggccgaggcgggacctcattggctgcgaccgaccacgtgccgcagtcgccccggcggtcggggccccgcc

SEQ ID NO: 199598 - DNA, 122 bp, Homo sapiens
ggggcggggcggaagggacgaggtggagccagtggcagcactctggtgccgtcatagcaacgaggggccgcttcggccaatcactgctcgggaagcgagggggcggggactgggcagggcct

SEQ ID NO: 199599 - DNA, 122 bp, Homo sapiens
gcctaagtgaaggcgctcaggagcctcctgctggaacgcgacccatctctcccaggaccccggggatcttaaggtcattgagaaatactgttggatcagggttttgttcttccacactgtag

SEQ ID NO: 199600 - DNA, 122 bp, Homo sapiens
tgggctgcagggccactgcaggtgagacctgacaggtgcaggcgggcgccgtgagggaagcgtgtgcaggggcccagcctgggcgcctcccctccagggacacccatttccacccttccttt

SEQ ID NO: 199601 - DNA, 122 bp, Homo sapiens
gactaaagaaggcaaagacttaattcattttcaaaaggttctctgaatgtgcacagaacacgtggctcaaatgagaacatttgatggcttaaaaagtaaatgcgttagaaatacagttctgt

SEQ ID NO: 199602 - DNA, 122 bp, Homo sapiens
gtccaggcgtctcattttacagcggaagacacaaactctgagatccaaatgacctgctcacggtcacagcacgaagcccgtgggccctgtgtctacagtcaccaacttccaggcttgcgact

SEQ ID NO: 199603 - DNA, 122 bp, Homo sapiens
ctccggcgaccccgaactccgctccggagcctcagccccctggaaagtgatcccggcatccgagagccaagatgccggcccacttgctgcaggacgatgtgagtttcccagcctggccccgt

SEQ ID NO: 199604 - DNA, 122 bp, Homo sapiens
agccagatcttgcgtgactccaggcggtggcatctgaagtcaggcaccgtggcgctgcaccgcacgtggacgggtgctggcgattacatgcggggaagaagagcgagccttctcaggcctgt

SEQ ID NO: 199605 - DNA, 122 bp, Homo sapiens
gtgccgagcgatcattcgtcacagtcgggcggagtttcacagtggcaaaggggttttctccgctgcaggggataagaaaaatctttcagaacttctgctctacgagggaaactggattttaa

SEQ ID NO: 199606 - DNA, 122 bp, Homo sapiens
ccagcagcactgagatgcacagtgtcatcttctcgccgcagtcggatggcaggtagaagacgaggatggccagcaaggtggtgagcacgcaggggatgatgaggttgatggtgtagaacaga

SEQ ID NO: 199607 - DNA, 122 bp, Homo sapiens
ggcagcatggaacccaacagcacggaaccggaactgacagcacagaacctgatgtctgctcggaacccaacggcagcatggaacccgaaagcacggaaccggaactgacagcacggaacctg

SEQ ID NO: 199608 - DNA, 122 bp, Homo sapiens
tctctataggcagctaccctgagttctccaaatgcagggtagaagcaagcacaagctgcccgtaaaacttgggttcctgtgaatgaatacacatctccactgaagcctagggacctatgacc

SEQ ID NO: 199609 - DNA, 122 bp, Homo sapiens
cacacacttttaacctccagaatatcccgaccaccaagcaagtactttgtcgcacccttgcgacgtttctttactttgctctgtgaacagagtttatctggtccccgaggcagtgcaatgca

SEQ ID NO: 199610 - DNA, 122 bp, Homo sapiens
agtgttatttataaatgagtctgagtccctgctgggtcctgccttgtctgtctttgtatccgagtatgcagcacagaaccttgcattgagtgttgggtgagtcgggagaggcttagggacaa

SEQ ID NO: 199611 - DNA, 122 bp, Homo sapiens
actgggaatgctggggggatgataaagtataattcctaatatagtggtcacaatgggcctcgctgggaagatttgaagcatatgaacgaatgagccaagagtgtatcagagagaacattcca

SEQ ID NO: 199612 - DNA, 122 bp, Homo sapiens
aagggccaggaccaagccagggagaaaggctggacgtattactcagtggacatctcagcacgaaagcatgaagcaaggggaatggcagttactctctggggtagggaaattctctagttgct

SEQ ID NO: 199613 - DNA, 122 bp, Homo sapiens
ggaggccgcggtggcggtggctcccgcccctcccaccccaccctgcggcggtggcggtggcggtggctgcagctgtgcagcctcccctcagcgcagcatggctcccttttcggtccctcgct

SEQ ID NO: 199614 - DNA, 122 bp, Homo sapiens
cacctgccactgtcgcaccccacctgcccgtatcggagaaggtacagccccaccccatcacgaacaggaagcccactggacagagctacatctgacaccgtagggccctccctttcggtatc

SEQ ID NO: 199615 - DNA, 122 bp, Homo sapiens
gggtccccaccccggggcggaatccccacccacgggcgccgcagtgcagcggcgggcgggcgggcgactcggccctccccgcacccgcgtcccgccccccgggtcccctccctctccccacc

SEQ ID NO: 199616 - DNA, 122 bp, Homo sapiens
actcgctcttggagctgaaggtcttgaggcgcaggctggtgtccagggggcggctcatcccggcggcgggaaacttgctgtgggtgaccatggcgcacggagccagcgtggatctgcgcggc

SEQ ID NO: 199617 - DNA, 122 bp, Homo sapiens
tgagctggtggacttcggggacctgcacccccagaggtccttccgggagctgcttttcaacggctgcattctctttggcatcgagttcagctacgccatggagacggcgtacgtgaccccgg

SEQ ID NO: 199618 - DNA, 122 bp, Homo sapiens
cgagaacttgaaataggggacaccactttttgatgctttcttacctcccatgttcacacccgtccccgtgcccagcaatactctttctaaatcacgttccaaggggatgtgctcttaattgt

SEQ ID NO: 199619 - DNA, 122 bp, Homo sapiens
tgggggtcagctgtggcacagtaggacatggcccagccagaatccatacttgagctaccccggtgctcaggtgtggcctgtccctgcatgtcaggtccaccatggattgaccacagagttat

SEQ ID NO: 199620 - DNA, 122 bp, Homo sapiens
atgctccagcttcattgagccactcaatgttccctcaacacaaagtgaactttgatgcttcgatgcctttgttctccctggtccctctgtctgcactaagtgttcatctcaacccgggaaat

SEQ ID NO: 199621 - DNA, 122 bp, Homo sapiens
ttgtttttgttttaggtttgtgttgctagttaagctagcttgtattgttgtggcttccttcgttctctgctggctgccattctttacagaaagggaacaaaccctgcaggttctaagaagac

SEQ ID NO: 199622 - DNA, 122 bp, Homo sapiens
cttattttataagtcaatgtttagaggtctcttctctgaggtgggtcagtttctccagagcggtatcctccagtcatttattgagaagatacaggattataccgggaaagaatgaagcaggg

SEQ ID NO: 199623 - DNA, 122 bp, Homo sapiens
gaatggaggagccaactcacagacctgggccattcgggtggttttaagaagtttgaactgcggttcaatccagggcagtgccttgagacactgtttggaggtaagggagggtcagaggatcc

SEQ ID NO: 199624 - DNA, 122 bp, Homo sapiens
gatgcgccctcacctttcctccaggatgcccgggatcccaaggagggtcgtgggtctccgcgtcccaacctggagccttggcccgggatgatacccttggccaccggcagcaggtctctggt

SEQ ID NO: 199625 - DNA, 122 bp, Homo sapiens
cacgcccacccattaatggagtctcccgtttcctttttttgagacaggcagtcgttctgtcgcccacggtaaaggacaatgatgcgatcacggctcactgcagcctcgacctcctgggttca

SEQ ID NO: 199626 - DNA, 122 bp, Homo sapiens
tgtggtttggctgtgtccccacctaaatctcttcttgaattgcagtttccaaaatccccacgtgttgtgggagggaccaggtggcgataattgaatcatgatagcagttttccccatcctgt

SEQ ID NO: 199627 - DNA, 122 bp, Homo sapiens
gcagcaaccctactctgaaatgctgggtgatcctgtttctgctcttccagtaagtgtgcccgtccctatgcaccgttgaggatttccaaatgtttcacagggtctttgttctttgaccaaat

SEQ ID NO: 199628 - DNA, 122 bp, Homo sapiens
acagtctggaactaagaactggcaatagcaacttcagggcaggtcaaatcctataaaaagcgtactttttttgtttgtttgtttgagactgagtcttgctctgtcccccaggctggagtgca

SEQ ID NO: 199629 - DNA, 122 bp, Homo sapiens
ctcacaaaagtgcgtttgtttgatgagaggaatgagcatgaacattgccatggtggagaacgactctggtgaagctttcccaggtattttatcctaaagctgttgctaatttttgcaaaata

SEQ ID NO: 199630 - DNA, 122 bp, Homo sapiens
gcagaagaagcacgcagaggagccctgggtccacctgcattactatggcctgagggtgagcggggcttcgtggggtcctgggggaaacacctcggtgcccggaagggtcatggtgtggcctc

SEQ ID NO: 199631 - DNA, 122 bp, Homo sapiens
ggccccgccccgatcccctccaagaggggcggggtcccccggccttaggcgagtggtcgccgcagccccacccgaacgcccgtggccgagcctgcccatgagagccccgttctgcaccagct

SEQ ID NO: 199632 - DNA, 122 bp, Homo sapiens
agagccccaggagggcggcgagcttcatggcgcgggggctcggggcgcgcggggaacctgcggctgcccgggcaaggccacgaggcttcttatacccggtcctcgcccctccagcgccggcc

SEQ ID NO: 199633 - DNA, 122 bp, Homo sapiens
ttcgctctctttcttgatctctagctctttattcctctgacattctgccccatctgctcccggactcttccgccgcatctgtatcttagtctctttctaactccctgcctggggcccccacc

SEQ ID NO: 199634 - DNA, 122 bp, Homo sapiens
tccctaagctctgtaggttttgaaggcgacgaggcactcacagttcagctgacacccatccgtacgatgagggcgagtgtccactctagatccctaagctctgtaggttttgaaggcgatga

SEQ ID NO: 199635 - DNA, 122 bp, Homo sapiens
tcccttgccatgtaacgtaacttaccaacaagattctgaggcttaagacattgacatcttcgagtaggtcattatttggcatataattccttctgtcactcacattcagtgttactggaact

SEQ ID NO: 199636 - DNA, 122 bp, Homo sapiens
ctgtggagccacaaacgatgtcgtttcgttcggattccgtgtttgtgctccctcgggagacggagcggctcctgtgaaattgcgcggtagtcttatctcagttgcttgagtggtgatttcat

SEQ ID NO: 199637 - DNA, 122 bp, Homo sapiens
cgtgcaaacaaaaccggcttccaggttgacaagttgtaattgctcttccccagttggctccggggagctttttctaagactgacgccccccatgtttggtgacattttatatacgccaccta

SEQ ID NO: 199638 - DNA, 122 bp, Homo sapiens
actaagacctacaatatcgaacaggccgtgcatcgatcgggtgagacaccaactcccagtcgactgcaggaggagagaggccgcgtggagaggcagtgggaagccgacgacgccagctgaaa

SEQ ID NO: 199639 - DNA, 122 bp, Homo sapiens
acatgtcaagccgattgtaaatgctgttatttccacatccttcagggacaccagtccctacgaagaccttgggcgattttgaagtgcgggcacctcgattccccgaatctgtagtgtggctg

SEQ ID NO: 199640 - DNA, 122 bp, Homo sapiens
gggttcctccgcccctctctgtcctcctgccaccacagccaggctggacgcagaaccgcacggaagcctccccaactcctgcctctgggagtgctcctgcctgcttcaaggaatctgggcag

SEQ ID NO: 199641 - DNA, 122 bp, Homo sapiens
tcctgcacgcggcccaataaaccaaaccaaaatggagtccctcatgctaaaagttccacacgaccgagccaaaactaattggtttatatgaccttctgagaagtcaggagacggagagctgg

SEQ ID NO: 199642 - DNA, 122 bp, Homo sapiens
gtgaacagagaggatgtgcttttccaaatggccttcctaatgactgctcttctcgtaccacgtgcttgcctggtgatgagatcccctagaaggactgttcacctgggtctgtctagcaaggc

SEQ ID NO: 199643 - DNA, 122 bp, Homo sapiens
tttttcctctatttgcagcagtgctggctccactggacggaatgcgtgtgttttgcttggcggctgttcataatactgtcttggcagcgtttccttggagcgcacacggtgaacctggctct

SEQ ID NO: 199644 - DNA, 122 bp, Homo sapiens
gaaccggatgttcaggaaacacagcacaagccacgatgccgagtggttagtcacatggcccgtcgtgagccaaaggacaagaaagggaagaacagaaaggcactggggatgctgtgagtacg

SEQ ID NO: 199645 - DNA, 122 bp, Homo sapiens
tctcaccctgacgcacactccctgcctgcaacagcctggcttttagcagctgagaggacacggtccctgcctgggaggtggcagaggagagtgactagaagggaaggtacaatgggggccag

SEQ ID NO: 199646 - DNA, 122 bp, Homo sapiens
ccgcgatcaggtgtgtggacagtcgcaggcacgcagcggtcctgcagcagcagggcgcaccgcgatcaggtgtgtggacagttgcaggcacgcagcggtctcccagcatcagggcacaccgc

SEQ ID NO: 199647 - DNA, 122 bp, Homo sapiens
ggtccccgaggaacccggaagcatcgtcctctgcagattccaaaggccttttctccaggccgaggctgcagggctgctgtctgcctctttacctggcttctaggccgccaggaagctggctg

SEQ ID NO: 199648 - DNA, 122 bp, Homo sapiens
ccaatggccgtcagccgacgtcagtagagcatggcgtgaagtccggcggctcaggctgagcgttggaagccattttggctgcaacctacctgaagcgatgtctgcctttggtcacgacgagg

SEQ ID NO: 199649 - DNA, 122 bp, Homo sapiens
tctttttaactcctatattgtgatgatctctattttaaactcagtgttggtcagctgtgccgaaactccaaaaaaatgagggaatataatgaagcatgtctgaactcccttcccattatggc

SEQ ID NO: 199650 - DNA, 122 bp, Homo sapiens
ccagctcggggacgtgatgaaggagtccgcccacctcgctatcagctggctccgcagcaacgcaaagaagtaccagctgaccaatggtaggagcctgcacccggccaggcaggcgtgaccca

SEQ ID NO: 199651 - DNA, 122 bp, Homo sapiens
agtggctcatctcaggccaattccaggcctacaggagttaatcctggaacctctccaaaccgttctccacactgcctccaccaacgacaaaaacaacacaactcaatcagatgatgtcactc

SEQ ID NO: 199652 - DNA, 122 bp, Homo sapiens
aactgtgccacgaccgggtcaatatgagtgttccaggagagcggaggaggaggaaagctccgggttacatcccagggcagccgaacaacctggagcgcacatttgggacttcctgttcttat

SEQ ID NO: 199653 - DNA, 122 bp, Homo sapiens
agccggagctggagggaggccggtctggcccggagcagggagtccttctgctccctggcacggctctgcgctgaacccacccggcctgcggagagcagacaagtgcctcttgggcccgcttc

SEQ ID NO: 199654 - DNA, 122 bp, Homo sapiens
gcaaacaacacatgttgccacttcacccaaaagcgatgttttcactctcccctttcttgacggctcaataggtcattagccacaggcccattgagtgcttttaaaagggggagtatagcaac

SEQ ID NO: 199655 - DNA, 122 bp, Homo sapiens
ctcttggccaagctcctggcactcaggagagaggtgggaggaagagaagggaaagcacgtcgtagactctttaccgagataaaacaatagtttggagaaacaggagttctggccctgtatgt

SEQ ID NO: 199656 - DNA, 122 bp, Homo sapiens
ctgcaatgcttggcaaaggcctaatgaaagaagatgatagctgatctcgaagggtgggtacgttgcatttagattggcacagagtaaggcattgcatatgggctgtgctatataagtgaagg

SEQ ID NO: 199657 - DNA, 122 bp, Homo sapiens
gcagcgagcgcctgctgaaaggcctctgctccaccccggagctactggccgtggaggctgcggcggtggtggcggcggcggcggggcgaagatggagagcccgcgaagctcctccccagggg

SEQ ID NO: 199658 - DNA, 122 bp, Homo sapiens
gccatagatatgactcaaggagagaacagtgaacagagaggactgtggcttcagtacccgcgggtcatgtcagaataatcatcatcatcatagcaaaagagaatggcagattctttcatttg

SEQ ID NO: 199659 - DNA, 122 bp, Homo sapiens
ggaggcttcaagaaacgaaagccgagagtctagctagaccagagccatccagcccaggagcgatggccacgtgtggccgctggacacgagagacgtggccagtccaaactgtgcagtgcggt

SEQ ID NO: 199660 - DNA, 122 bp, Homo sapiens
gttagccctctcgggtactcctgcggatctagagcagccggttcccagtcatcggtgtttcgttccaaccaggagatgagggctggtttgggacctgcgcaccctggggaaagagaacaaat

SEQ ID NO: 199661 - DNA, 122 bp, Homo sapiens
ttgttccctcctgctctcctttttgcctccttctctccctcctgtggtcctaagcagaaacgggtggatgctttgccatttttacttgtgtatgttgtggctgtgctgtcttcctggccctt

SEQ ID NO: 199662 - DNA, 122 bp, Homo sapiens
ggaggcccaaggcaagtggttcacttgagcccaagttcgagacaagcttgggcaacatgacgaagccctgtttctataaaaaatataaaaattagcagggcatggtggcatgtacctgtagt

SEQ ID NO: 199663 - DNA, 122 bp, Homo sapiens
tggtggcacagctactcaggaggctgtggcacagctactcaggaggctgtggcacaagatcgcttgaacccgggaggccaaggttgcagtgagccaagttctcaccactgccctccagcctg

SEQ ID NO: 199664 - DNA, 122 bp, Homo sapiens
aaacacaattccaagagagaaggaatctgcgcgtggaaagcccaggccccttgcccactgcgaggagccagaacgtccctccacagccgcgccgcccctggctcgacttcccgagcgagagc

SEQ ID NO: 199665 - DNA, 122 bp, Homo sapiens
cgtgccacagagaggggaggggccacactgccgacggggcgggcatggagttgcaggatacgccacagagaggggagggggccacactgccgacggggcaggcctggagttgcaggacgtgt

SEQ ID NO: 199666 - DNA, 122 bp, Homo sapiens
gcctgggccaaccagggaagacttcctggaagaggtgaccggggcggagacccagtgatgcgtctgctccaggctaggggctcggtcctcttttctgttttgacctcatgggggatggaatt

SEQ ID NO: 199667 - DNA, 122 bp, Homo sapiens
caggcggggtgtgcgccccggccgcttccagtcggcgcgggagctgggacggaagctgtgcgccctcggagcccctgcagtcccctcaccgggcgctcccaaacagcccgcggggcgctggg

SEQ ID NO: 199668 - DNA, 122 bp, Homo sapiens
accgcagcagccacagcacagccctggagagctgctccaagagtgggtgctgggaaggaacggggctcaggacttaccagtgagaggcgactcaggaaatacagactccagtggctgagtct

SEQ ID NO: 199669 - DNA, 122 bp, Homo sapiens
taaaagatgacatatatagaagcttcctatgtgtcaagcactgttctaattactttatatcgactctgactcatttaatcttcacaagaaccttgtaaagtagtattactatcttccatttc

SEQ ID NO: 199670 - DNA, 122 bp, Homo sapiens
aggttcttttcccccctctctctctctcttctcaaatcatttggagtcgaacgcagcccccggcctttgtaattctagtaaagcacttaaagtgcacagtaggtgttcatgaggaccatctg

SEQ ID NO: 199671 - DNA, 122 bp, Homo sapiens
acctggctataccccatgcctgttcaaagccaactttttactttctgaaggcttatatctcgcagcccagtgtggctggagaaaaacaggtacctgtgctaactggtcttattttaaatgta

SEQ ID NO: 199672 - DNA, 122 bp, Homo sapiens
gccaactacagtcttaaatccagttacactactgagatacattgttttgggcctatagcacggaccctccaagctttttttggaaaaggcaaatgtctcttagcatttatcatctcttaaca

SEQ ID NO: 199673 - DNA, 122 bp, Homo sapiens
ccgcttggactccttcaccttatcgctcaggcaacacgccatcatggactccagagtcatcgtcccggccacggccgccacccaccggcccccggcccgactttggccgaagccgcctcggt

SEQ ID NO: 199674 - DNA, 122 bp, Homo sapiens
gctcagaatacagcagtgaacaaaacagacccccttcatgggggcgatcctacttgggggcgatggatgggaaacaaggaagtaagtgaaacctatttagaatttgtacgatggaggggagt

SEQ ID NO: 199675 - DNA, 122 bp, Homo sapiens
gggtctcgatcttggtgagcttggcgtcctcggggaacgtggggagcacctcgcgcagcgcgtccagtgccgcgttgaggttgtgcatgcggtttcgctcgcggttgttggccttcagtcta

SEQ ID NO: 199676 - DNA, 122 bp, Homo sapiens
atccagcaggaaggagggggctccagcgtggcgggaactgagtcacgcggttgcctagcccgactcgagactgagacgggagccgcaccacgcgctttcggacaaggagggtgctgcggccc

SEQ ID NO: 199677 - DNA, 122 bp, Homo sapiens
tggcaggggtgggtttccccttgaatggcccctcctctggagaggggctgtgggtgtcagcgtctgtccctgaagcgaggaattcccaggggaggtgagggtgccacatgacctgcccttgt

SEQ ID NO: 199678 - DNA, 122 bp, Homo sapiens
ggctaggcgtgagttgctggtggtgaggggcatagcgctttaaatggagggaagagtgagcggaggtgggctctactgtgcatttgatcatgtgaagacagaaacttctgagtttacaggta

SEQ ID NO: 199679 - DNA, 122 bp, Homo sapiens
cggggcaagggcccagggctgcagggggcgtgggagcgcgcggggccgcgctcagaggggcgcgcaggagctggttaccgtgtggttcaccccccacatcaggacgctgaggatcggctcgc

SEQ ID NO: 199680 - DNA, 122 bp, Homo sapiens
tgagaaaacaggaagcgcccagtcaccacaggaagcatgtgtgcgccgcctccccacccccggcccattgcaaaacgccaacagcccattaccacaggcaccgcacagcggcccagagaaac

SEQ ID NO: 199681 - DNA, 122 bp, Homo sapiens
gggcacagggaggctctaaacaaacatttcctgcatgaacgcagaggtgagaaggaatgccgggaagcctgcagctgggcatcctgagagccacctggcagcagaggcagagagcagagatg

SEQ ID NO: 199682 - DNA, 122 bp, Homo sapiens
ctaggctcgcgcgccccggcagtcagcagctcacaggcagcagatcagatggggattacccgccggacgcaaggccgatcactcagtcccgcgccgcccatcccggccgaggaaggaagtga

SEQ ID NO: 199683 - DNA, 122 bp, Homo sapiens
ttcatttgttcagctaatattaaaatacttgtggaactggcagaagccaagcactacccccgagggttttgcagctttgcagtggctaggattcattctttcgttcactaaatacacctacg

SEQ ID NO: 199684 - DNA, 122 bp, Homo sapiens
tcctgctctgagataaggttccctccactctcacaccttcgcatgtaggggaggagagggcggagtgaggcagagaagggggttaatgctactgactccctggccagcctttctcaaacact

SEQ ID NO: 199685 - DNA, 122 bp, Homo sapiens
accagtctctgaattttcttcctgagagtggatcccattaaatctctagccaaggaggagcgtacttctgtgcttctagggctagacagaacggaagatggtgcagcagccccagcgtggga

SEQ ID NO: 199686 - DNA, 122 bp, Homo sapiens
ctgcctctccggaaacccgaaatccgcccaaacctcatcccaggcgctcacggtaccagtcgcagggccccgcactataggggctgccaccctctgcccccggagtccccacgccgagactc

SEQ ID NO: 199687 - DNA, 122 bp, Homo sapiens
tatttagttctaggttaaagtatcatatataaaaagtgaagatgcctagggattttcttacgtgtcttttagtgttttattgatgtttatggtttgaataatattagttcgtgtatttaaca

SEQ ID NO: 199688 - DNA, 122 bp, Homo sapiens
ttcacattgtgctactgtctgcacctgtcactagcagtgcaatgttaaaagggcattggccgtgtagtgctacccagcgctggctgcctcctcagcattgcaattcctctcccatctgggca

SEQ ID NO: 199689 - DNA, 122 bp, Homo sapiens
atggaaggaccccaaaggtggaacatcccaatttaacaagagtaactttctgaacatcttcgttatgctaaactctgggctaggcatttatggttttagctcatttaatcctctcaaccaaa

SEQ ID NO: 199690 - DNA, 122 bp, Homo sapiens
tggccagcatgtgacggccatttcaggtggtaaagcaggagcagatttgctttttgtgcccgaaaccccttctgacaataacagcagcttccctgttcccctgcacctccctgtcagccgag

SEQ ID NO: 199691 - DNA, 122 bp, Homo sapiens
cgaagggaagagacaggagtctggcccaagctggtcggtggtctggccaaggctcccaagcgaacctgaagaagcgtccagatgtgccagaggcagggtgaggggttgagtcgcctcctacc

SEQ ID NO: 199692 - DNA, 122 bp, Homo sapiens
tggggcggggccgtggacgcgccacagaaacaggagggcctcgcttcacttctgccttcccgaccgcagcacatccagctggtagatgccaactcgcatccagcccccagctgccagggatt

SEQ ID NO: 199693 - DNA, 122 bp, Homo sapiens
ccctcaagcctatactctggggaatctcccagctactaggacctgtcaggagcactcctccgccccccgccccgaccgcacattctccaatcagccttaggaaagagctccttcctaaggag

SEQ ID NO: 199694 - DNA, 122 bp, Homo sapiens
tgggagcccgaagctgggtaggcccaggcgccgggagagcggagggatggatgctgcgctcgcaaaggtgatgaaatggcagcagcatcagcaccacgcactctgactcatcactgacaacc

SEQ ID NO: 199695 - DNA, 122 bp, Homo sapiens
aagtcaagtggcgggggtcgcgaccagtgatcgggatttcagtctgatctcagtacccagcggaacaggaccataacctaaagaaatgagctttttccggagcaaagagcggccccgatttc

SEQ ID NO: 199696 - DNA, 122 bp, Homo sapiens
tttgcaagaagggcacacagtttcactgctgcaccatgctggaaaatacttcatacaaaacgagttagactgagtcaactgctcaaaacacttaaaaacgttagcttgttttatccaacgtt

SEQ ID NO: 199697 - DNA, 122 bp, Homo sapiens
agaagtccattagaggtagagctggggctagtccacccagtggtctgggttctatgagagcgtagagggcattgctcattgttggtttatgaaccaacacttgtttatatgaagggaaaaca

SEQ ID NO: 199698 - DNA, 122 bp, Homo sapiens
aatctgtctgcacagtttgtagttcatgatgactgttcatccacagcattgctttgtgggcgtcctctcttttgatcttctcgaaacagcccctgcgatggggtcatattttgcactcacat

SEQ ID NO: 199699 - DNA, 122 bp, Homo sapiens
atgggatgatccaactgaactacagaggcggcacaccctataacaatgaaagacacacaccgagagctacgctcatcacctttctctgtgatcgagacgcgggagtgggcttccctgaatat

SEQ ID NO: 199700 - DNA, 122 bp, Homo sapiens
tctctggttgaggtcgaccattcatttattaactatttagagtggagtataattaattctcgatagatgtcattaaatacactttgtttcgagtacgtcgaggcttattctctctagtgtgt

SEQ ID NO: 199701 - DNA, 122 bp, Homo sapiens
tctttaaactcctcatctcttgatgaatttcttaaggctgaaggaatggagagagtgggacgtggggtaatctttaccacttttgttaaaacatgaggcagccatgggttgggagatcatag

SEQ ID NO: 199702 - DNA, 122 bp, Homo sapiens
actctgcacttgcagacttggaaggctcctggaactctgttgtagcagatctgctaatgacggtggtggattacaagtgtataagcaatttaattctccttactcttctccattttctacaa

SEQ ID NO: 199703 - DNA, 122 bp, Homo sapiens
cggcggccgagcggtcacgcatgagatcgctaaaggcgtagtccatgggtgggcggaagccgagcgtgggcaccaagccggcagtggagtagggcgccatgaaggccagaccgcggctgtgc

SEQ ID NO: 199704 - DNA, 122 bp, Homo sapiens
caagattttcctaaacagaccgaactcaaggagtctttctggttgttagtccacgtgtcccgatttggggtttccaaaatacacgcccactggaaccgggccaggggagccagcctggccaa

SEQ ID NO: 199705 - DNA, 122 bp, Homo sapiens
ttggggggctgagcaaggggggaccccaggggatgtgagtgggatgtcactgcatgtccccgaggctgggcacctccctgtgtaagaccccatgctggctgctggaaattgccagaaggcag

SEQ ID NO: 199706 - DNA, 122 bp, Homo sapiens
gtgaattttctaaaaattagtcctggttcagacaaaccactgcacccagtgcttggtcaacgtattaggattattaaagtcacagatgactttgacactctaggatctagaattatgtaatg

SEQ ID NO: 199707 - DNA, 122 bp, Homo sapiens
agagagaagcccgctgagagggcagacagttgagaaactcgatcccaactccccagccggcgcctcccgaaccgccccgagagcccagattagccgggcagtggatcccggagcaaagtgcc

SEQ ID NO: 199708 - DNA, 122 bp, Homo sapiens
tccagtaaccccctgacagcaacaggggttcccaggaacaaaggcaaaccgaggaggctgcgtgcttggcccgtcctcccttgactttactagagcagaaggtctccaggatcccttcctgt

SEQ ID NO: 199709 - DNA, 122 bp, Homo sapiens
cacacaatactattaataacagtgctcagctacatatttcctcattaaacacagtgcaaacgttaatggtttcacacatcacagttataactagctttgaatatttttttccctgtagattt

SEQ ID NO: 199710 - DNA, 122 bp, Homo sapiens
tgcggacttgtacaaagtaagaaactccgtacacaaaacagaggggagcacggagggcggcgggacaaagagggtggtcggcaaaggctgtattttccatagatgtaatcacagtttgaatc

SEQ ID NO: 199711 - DNA, 122 bp, Homo sapiens
gcattttcagagactgagatgttagtcgggtgggctacgggagagggtgatttgagggggcgagaactacaagggaggaatggttggatgctaaaaaaaaatgcacggatgtacttcaaaga

SEQ ID NO: 199712 - DNA, 122 bp, Homo sapiens
ccaacttcattcagctcttcttgccacagtctctctagtcttaacaagggcacacgtcctcgttacacatctcctcgggggaaaggcacacctagctccccgcctgccaccactttttgtct

SEQ ID NO: 199713 - DNA, 122 bp, Homo sapiens
acacacacggccggggcttgggatggtgggcggtcggtggtcggggctgtaatttgcacacgtgtttgtgatttagtgattccgattgtcgtgcgaggccatggagtaggtgcctggctgct

SEQ ID NO: 199714 - DNA, 122 bp, Homo sapiens
cgccgcctagtacttacccatccatggcccagatggaggcgcgcacagagcagggactgacgggctaaccgcgagcagaggaagcaggcggcggcagcagggcggttccggggacaagcgag

SEQ ID NO: 199715 - DNA, 122 bp, Homo sapiens
ctgctcctcaatctgctgcttagtcttggccacctgggtaggagggtgaagtcaggttcacgctctgagtcagaggtgaagagcaagtgcccgggaaccagagctccagagtgggatataaa

SEQ ID NO: 199716 - DNA, 122 bp, Homo sapiens
ctgtcagcctgtgggtctgcccagggagctcagggctccaggcccagggggctggctctgcgctttgtttgctgctttctctgaacaggaaagcttcagaatgaggcttctagagaaatgag

SEQ ID NO: 199717 - DNA, 122 bp, Homo sapiens
aacctgggctcgggctgaatttttctcacctgcacgcgaggctgggggcccccggctgttcgcacccgggtgtggggccgcccctggccatatggggcggctttatggcccggtggccggat

SEQ ID NO: 199718 - DNA, 122 bp, Homo sapiens
aggaaaggatcacagaggacagcagcaaagggcagagcccagagctgtatggaggagggacgagggtgggcctaccaggacacggcagctccaggctccttttaaggaggaatccgtaagtg

SEQ ID NO: 199719 - DNA, 122 bp, Homo sapiens
catagggccctgtgtcctccattaattcttctctgggcggtttctgttcagcacagctttcggggcaaattctagcttgtccttaaggctcaccacctgcgtgtggtccttgcctagaagct

SEQ ID NO: 199720 - DNA, 122 bp, Homo sapiens
ggactgggactagagaagataaaaaattattcctcgaagagaagaaaaggccaacggacacgggagcagatacagcctctccctgtaaaccaaagaaaggcaaattcaccacaaagagaagc

SEQ ID NO: 199721 - DNA, 122 bp, Homo sapiens
ttagggcgatgtccttgctaatttggagactgattcagtccccttttggcccccaagttacgtaaagataaggactttggagatgttttctcaggaaggacagagctgaaaaacaaagttcc

SEQ ID NO: 199722 - DNA, 122 bp, Homo sapiens
agtcacagccatagccccggacgccgcttctcctcgggttccgagaatcacgcgaggtcccggctcagccacccgctctcggcccaggaatcccgcactctcccaatgacccggaagtatcg

SEQ ID NO: 199723 - DNA, 122 bp, Homo sapiens
tattagccgaagggcagcagacatgagaagaaaagagaagtggtgttcacagtcgaaggacgtgcttttcagtagtgattcagacaattcagaaaagcttactcatctctttcctatctgct

SEQ ID NO: 199724 - DNA, 122 bp, Homo sapiens
ttttttgttttcttttcattacttctttcagtttgggggaatcttcctgcacatttgactcggctctgagtgcgcagaccaacgtgtttcctctttctccagcctagggcggtgccagccca

SEQ ID NO: 199725 - DNA, 122 bp, Homo sapiens
ggggtaggttggattacccagataattgcttcggctttcgttttcctccgcgataaaaaccgcgccacgccagatcgagatactctcatagtgattgtgaatcaatcgccatcctgctctag

SEQ ID NO: 199726 - DNA, 122 bp, Homo sapiens
aaacacctaaatcccaaagctgccagcctaaggagcacacgtctttgaacgctggcttcacgctgtcatttaagtcatttcgtcctcttggagcctcggtttccacgtgggtaaaatgatcg

SEQ ID NO: 199727 - DNA, 122 bp, Homo sapiens
actatatttattgaactgggttaccctagattgagttgagaacactcctgcttctttcaacggggccacaagacctagtccaaaaccccaagactaattgtgtagaccttaagtaattgctt

SEQ ID NO: 199728 - DNA, 122 bp, Homo sapiens
tataatttggaataatagacgttaatatttgtaaagtgcttaaaattatgtctgaggtatcgttggcaatgcaagaatgtctactgttactaatattgccattaacctgcatttcatttttg

SEQ ID NO: 199729 - DNA, 122 bp, Homo sapiens
aaagaggtccctggacctgctgtatttatttgggggactcaaagagatgtgtgatggatccgatggctctggacctgctatccagccagccctcttgaactgtcctggggggcttgtggaga

SEQ ID NO: 199730 - DNA, 122 bp, Homo sapiens
ggcagcatgccttgcacagtacgccagaagatgcggctggggacctggaagtggtaggggcgtcgagaagggttggtgttcatccgcttgtggaggaaagccaggtacttcaacttgtttct

SEQ ID NO: 199731 - DNA, 122 bp, Homo sapiens
aaaaaaaaaaaatcgaagagccccggggacgcctgggaaatgaagttccgcgtctaggggcgggcccaccagtcccaattgacgcatgagctcttcgcctggcgcattgacttctggatttg

SEQ ID NO: 199732 - DNA, 122 bp, Homo sapiens
tttagaatggggccactcggccactcgaataaatgtgcttgaaagcaagtggaagataagcgtccacaggagtcttatcacgaagtcacctcagacagcacaatcttcaatgtctagccaag

SEQ ID NO: 199733 - DNA, 122 bp, Homo sapiens
ccccacgccaagcagcgaccctgaggcgacagccggagcgcccggcaatggcggcctcgacggcctcccaccggcccatcaaggggatcttgaagaacaagacctctacgacttcctctatg

SEQ ID NO: 199734 - DNA, 122 bp, Homo sapiens
cagcctggcgctggagggcggcctgggcatgatgaacggccacttgccgggcaacgtggacggcatggccctgcccagccactcggtgccccacctgccttccaacggcggccactcgtaca

SEQ ID NO: 199735 - DNA, 122 bp, Homo sapiens
tcacgcatcaccttcctcttcctacagagcagctgctggtcgggctgaaggacaaggacacggtcgtgcggtggtctgcagccaaggggtaggtgtctgtggccgcagaagcaccccggggg

SEQ ID NO: 199736 - DNA, 122 bp, Homo sapiens
tggaagcagcagagcatgctgatcccaattctacctcctagacatccccctcagccaccacgacaaaatgtaaagatagatcttgcttcccaaggagcccatgggaaagcactctgattaga

SEQ ID NO: 199737 - DNA, 122 bp, Homo sapiens
ccgcgcgtgcttgccctcgtgcgcgcgcccgcccaatgctcccgaccactgtttgccagccgacccccaccccaaccggcctgtccatttccccgggagcggagagacccaacgggacacgc

SEQ ID NO: 199738 - DNA, 122 bp, Homo sapiens
ttgcagttcagctttctctttttttatgtatctctagccaaagtgctaatgagcactaaacgtataagggattaaagaaaagagaaaatatattgtaaaagaatggataaattagatttatt

SEQ ID NO: 199739 - DNA, 122 bp, Homo sapiens
tttcatttctgtagggtgtatacacctaagagtggaattgcgggtcatgtggtaattccacgttttactttgagaaactgccaaacttttccaaaggactgtcactagtttccattcccact

SEQ ID NO: 199740 - DNA, 122 bp, Homo sapiens
agaggttgcagtgaaccgagatcacgcgactgcactctggcctggacaacagtgagactccgtctaaaaaaaaaatgcttaaacaagcaatcatgaacactgttgaaacaagtaaaaacaaa

SEQ ID NO: 199741 - DNA, 122 bp, Homo sapiens
aaacacggccgggtcagtcctgctgtggtgggagggtgtgcgtggtgacactcaggaacacggtcgggccagtcctgcaggggtgggagggtgtgcgtggtgacactcaggaacacggtcgg

SEQ ID NO: 199742 - DNA, 122 bp, Homo sapiens
ccttgaaggtagcaggaactgccatcctcagtcactcaacaaatgaatcttctatttatccgttaatggtccaggtatctctagtacctggaataataattgatacccactatgtgtcaatt

SEQ ID NO: 199743 - DNA, 122 bp, Homo sapiens
actcaccaatatgccactactttcagtcttctggctagcacccaaatgggatgaaaactccgtgtttactgcttcgaagaggaaatgatcaccacctctttggggtgtcttctttcctcatg

SEQ ID NO: 199744 - DNA, 122 bp, Homo sapiens
cgcgggcgccggggcaggccggactgtgccattcgtggggggtaccatgtgggaccgagccgcctcacccagggctgtccagctagaaactccccggtgccacccccgcctcagtccgaggt

SEQ ID NO: 199745 - DNA, 122 bp, Homo sapiens
ctctgcccaacctgaacatcacgactctcgatgcctcgcatacaacgaggcagggcgggtcgcccagccccaggggaccgggcggcgtctcccgagcctgcagcccaggccgcgggcggcgc

SEQ ID NO: 199746 - DNA, 122 bp, Homo sapiens
ttgacacacaggcaagggtgggctagagccatggccagcagccaggaggctgggtagcctcggtcttcctccccgtggtggagtccagtggaggctctacaccgcaccctgggcgagagaga

SEQ ID NO: 199747 - DNA, 122 bp, Homo sapiens
agttctcatttgcccgcagagtagttcctccaaagaaattctcttctctctttctacctccgtatcttttgtttccagaaccccggtggcagaataggtacgatttgcataacgctgctgtt

SEQ ID NO: 199748 - DNA, 122 bp, Homo sapiens
ggaccgaagtcccgctgcgggcagttgctggcttaggcttggcaccagcccagcccacggcgctgggacactcctgctgccgcctcccagagcagctgtttcagactctcctccacagctgg

SEQ ID NO: 199749 - DNA, 122 bp, Homo sapiens
atcaataacaacagcaactaccccttttagtcctataccagatgctttgattgcatggtccgagagaacctttatggtacagatgaaaattcaaatacctacagggacctggcagatgatca

SEQ ID NO: 199750 - DNA, 122 bp, Homo sapiens
ccattctgtaaaaaaaacgcctcaaacacactcgcgcctccccagggccttttctgcctccgtcatttggctctaaagacgcctggcagtggcgtctccacgacgcaggatgagaggacaga

SEQ ID NO: 199751 - DNA, 122 bp, Homo sapiens
aagactgatttgcaggagttgcccctttcttgttccttaaaatgatttcaagtcctaaatcgcaatttggtcgtgaagacactgaagacactgaccaaattttctaagggtaatctcttgta

SEQ ID NO: 199752 - DNA, 122 bp, Homo sapiens
tcaacacacccaagaacagaaccctgcaggcgccacgagacgcccaagaaccaagccctgcggacaccacgagacaaccctagggctccgtcccttgcttgagctctcctagttgagaaaaa

SEQ ID NO: 199753 - DNA, 122 bp, Homo sapiens
aaaaatgagacctttcttctctaaacctgcttgctacgtgtccctgtgctgtaggggggacgatgtcgcttttttcccccttccctaagtgcattttaatacccttattctacatcctaatt

SEQ ID NO: 199754 - DNA, 122 bp, Homo sapiens
ccttggtgtgccgtctgatactgttctctaaagacgttaggagtcacggcatctggcctgcggttgggtgaagcactggccgttgggcacagtggatgtgtgaaaaggtgccattcagagtt

SEQ ID NO: 199755 - DNA, 122 bp, Homo sapiens
ccctgtgtctccagcattcagcccacagatcccatatatgctgtggaaagctcactgtgccgcaagtgggtgtgtgagcaaaggagaggtagcattttctttagagacatccacaccctctg

SEQ ID NO: 199756 - DNA, 122 bp, Homo sapiens
caaagaaaacacaatgtgacccatttgcctcgagaactctaggcgtctgctgttcagcaacgactctgggtgctcagaacctcgccccaacctatatgcgcagcgcatacaggtcagaagga

SEQ ID NO: 199757 - DNA, 122 bp, Homo sapiens
tctgcccccgagaggctagcaaccgggcctgccggcgtctgattggccgtgggggcctgacgacaggggctcctggttgctgattggccccggccagctctggctgtttcctagctattaat

SEQ ID NO: 199758 - DNA, 122 bp, Homo sapiens
tctgaggaggccgggaaagaacttccgtaaacagggaaattaggggtggggttgtctccccgcccgctcattgataccagatttcctcaaatcgatttctagctctgtggtaaagtagaggg

SEQ ID NO: 199759 - DNA, 122 bp, Homo sapiens
taatggccagcagagggcagcaccgaacacgcccaagctcacctcgagttgcccattactcgagcaagcgggggaaaatgggcaagtttccccactttaaacgccttcttttgcaggctaca

SEQ ID NO: 199760 - DNA, 122 bp, Homo sapiens
acagctcccagcgtgagcgacgcagaagacgggtgatttgtgcatttccatctgaggtaccgggttcatctcactagggagtgccagacagtgggcgcaggccagtgggtgcgcgcaccatg

SEQ ID NO: 199761 - DNA, 122 bp, Homo sapiens
ggttcctgtgataactaacagttgttggcatttcttggtttgtagatgcatcactccagtcgctgcctcccctatcacatggtattcccagtgtctcggtcttcacatggccactgtcttat

SEQ ID NO: 199762 - DNA, 122 bp, Homo sapiens
tctgtacagccaatattccttttttaaaaaccttgcccaacaacttggcagtgtctaatgcgagctacaaaacattttctattctttgatcaagcagtttcactcttggtaaagtaggggag

SEQ ID NO: 199763 - DNA, 122 bp, Homo sapiens
ccagtcttgggatctctgtcctgggctggggactgccccctcccctggcctggctcctgacgcccgtgctgccggtgaaacgctgttgacatgtcctgaattattaagcgtggggagggctc

SEQ ID NO: 199764 - DNA, 122 bp, Homo sapiens
tgggggcggggggctcccccaaacccaggaggcagagttgatcgagagccagctgaagggcgcgctcgtcttccagcagccctcggtccttagcgcttcccccgaaacatcctagttctcca

SEQ ID NO: 199765 - DNA, 122 bp, Homo sapiens
ggcccgggtgctcggagccttcccttcgctgccctcctgccccctccctgcttctgcaagcgtgtttcaatttgtacaacgtgcataaaacatgaaattacccttggccacttccaggcgcg

SEQ ID NO: 199766 - DNA, 122 bp, Homo sapiens
aagctggagacattacactatctgacttcaacatatattacaaggctctagtgaccaaaacggcatagtattggtataaaaacaggtataaaatgaaacagaatagaaaactcagaaataga

SEQ ID NO: 199767 - DNA, 122 bp, Homo sapiens
gaggcggcggcgacgaaggccgggctgcgaatgagtgggcgccgggcgagcacaggggagcgccgagctgagcgcctggcaccagggcgcagactcggagcggcggcgagagaaagagaggg

SEQ ID NO: 199768 - DNA, 122 bp, Homo sapiens
gccccgctgcagcctcccattctgatttttgcatacaaggtgaaatcttgaatgtcttagcgtttcaagcctgaaccttgttccctccctgggtcttctagtttcagacaagtgctgtgaaa

SEQ ID NO: 199769 - DNA, 122 bp, Homo sapiens
gctggaaggcagtttattcacagaataagcagcttcccacgctggaccctgagccccaggcgccgtccgcgtagaccccgcgccgcgcaccgcggccggcggggggcgctcgggtcgcaccg

SEQ ID NO: 199770 - DNA, 122 bp, Homo sapiens
tcctccttgctccccagatgctgagcctgctgctgctggcgctgcccgtcctggcgagcccggcctacgtggcccctggtgagtcccagccggggtccaccctgcccctcaccacattccac

SEQ ID NO: 199771 - DNA, 122 bp, Homo sapiens
aatgtcgctctaacatgagccgcccacgagatggactggagagaaccttgtgtgaagacccggacgggttcctgacaccactgcacggcacctgccatgggtgacctgtgcatccgctcaga

SEQ ID NO: 199772 - DNA, 122 bp, Homo sapiens
acgcgccggagcatccgagggctgtgcaggagcgcacttccccaccctcccctcagttcccgactcgggaagctctgcgccttctacacgacaggggaggaatccacacgccacaccagcag

SEQ ID NO: 199773 - DNA, 122 bp, Homo sapiens
ctaagcccagcattcttgctcttctgataacaaattccctccctcttttcttttacaagacgttccttctctccctagtagtgacccaaattgaaggtatggcatgaaacctaaccttgacc

SEQ ID NO: 199774 - DNA, 122 bp, Homo sapiens
ggacatccaacctgacaaactcattacatactctcccctgtgggccacggcacctagtaccgaataaaatgagggatattaattctaacaatcagaataacaacaacaaaaatcaagacaag

SEQ ID NO: 199775 - DNA, 122 bp, Homo sapiens
aaggaggagggtgcgggcgagcccccgaggtcaggctgggcagggcgggtaaggaggaagcgtctggctggcagtggagctgagtcagagctgtcctgtgtcctgctcttttccagggcttc

SEQ ID NO: 199776 - DNA, 122 bp, Homo sapiens
ggcccagtgtttggagaacaggctgggggctgggattgcaggttctcccaggtctcagcccggccaaaggggtctgctgggttcctgcggagaaggtgccagccccacctccacctctagtg

SEQ ID NO: 199777 - DNA, 122 bp, Homo sapiens
cagcattgcccagaaaaggcataaattatacctttttcccctttttttgagacggagtctcgccctatcgcccaggctggcatacagtggcgtgatctcggctcactgcaacctccgcctcc

SEQ ID NO: 199778 - DNA, 122 bp, Homo sapiens
gctccgctgcgggttgagcagggtgccccgagccacccgctgcacagcctcccaggtgggcgtttctctcagacccgcttcgcctgggatgcccgggccctagggcgttcccacagcccgct

SEQ ID NO: 199779 - DNA, 122 bp, Homo sapiens
cctgcccctgtcggtggtcttcatcggcatgatcaccttcaataacctctgcctcaagtacgtcggtgtggccttctacaatgtgggccgctcactcaccaccgtcttcaacgtgctgctct

SEQ ID NO: 199780 - DNA, 122 bp, Homo sapiens
ctaattaggcaaaaacaggaggtaaagatatagccaatcatctattgcctgagatcacagcgggagggacaatgatcgggatataaacacaggcattcgagccagcaacgctaccctctttg

SEQ ID NO: 199781 - DNA, 122 bp, Homo sapiens
gcgcgggccgcgggtgcggcagggcgcagggcagcacccagagccccggccagcgcgaaacggacgcaggcgcatccccagccctccgtggcgtctcagcagcagatcacccaggcctggcc

SEQ ID NO: 199782 - DNA, 122 bp, Homo sapiens
aactatggaaaatgtcatgggacatgtattgggtgggcctgagaagggccttggagaagtcgaggcttgggggatggcaggaaatgtcttcctcgtgacctcaagtctgctgccataatatt

SEQ ID NO: 199783 - DNA, 122 bp, Homo sapiens
gggcagcgtacagtgacgcggtggaggtcggtaacggctggaaaattgagccttgagcagcgcgtgcttgttgtcatagttacaccactaacattcgggaggaggggtagagatcatggtgg

SEQ ID NO: 199784 - DNA, 122 bp, Homo sapiens
tttctgcaagagaggcgagaggctataggggatgaagtggagcaagaagagagaacagtacgaaggggcagggcacaacccggtccccaggtcccagcccacccccacccttccgcaggagg

SEQ ID NO: 199785 - DNA, 122 bp, Homo sapiens
tccctggccgccaacacaccactcccggagctgattccctgtgcccagctcctttcttggcgaggcttcagtcccttagtcggcctcagtctgtccaccttcggagaggtctgagcgctagc

SEQ ID NO: 199786 - DNA, 122 bp, Homo sapiens
acgctcgctctcccgccgacatgcgcgctaaggtatgtcaagatggtgactcccggccgccggccttatgggacttgtagttttgacgttgcacaaactcagaagagaagacggggacgggg

SEQ ID NO: 199787 - DNA, 122 bp, Homo sapiens
gcgagcgcttatttcaaaacgggctgcgattctcttaagtccccacgtggggcgggtttgcgactcccctgtgcatttctcagaagaaaggtcccctaaatgcttacggccagtgagctcga

SEQ ID NO: 199788 - DNA, 122 bp, Homo sapiens
atttctaccagtgcccctgggattatgccttggggactcaccttaagacagtcttgctctcgagacagagaagtctgcaaatggtgtccaattcaagtctagagactggctgaagccagaca

SEQ ID NO: 199789 - DNA, 122 bp, Homo sapiens
ggagaaacagccccggagagagccgaggagtcagcgacaagggagagggacacatgcagacggagagcaggactcactgggagacagcctgggagtgacagccacagcaagacagcgagaga

SEQ ID NO: 199790 - DNA, 122 bp, Homo sapiens
tgaaggtcgaaaagaaattaaattcttgtggctctggtaagtctggagcgcctggatcgccgactcggtgagcttcacatgcagtacggtgatgttgtcctgccccagccgtccgcacgaga

SEQ ID NO: 199791 - DNA, 122 bp, Homo sapiens
tagtttccccacggtccagttcaagaagcagctaatagtctggtcactgtatttctgattcggtgctttaatgatgagggtcacaggaatctccatcccactttggtccatggtgcccccaa

SEQ ID NO: 199792 - DNA, 122 bp, Homo sapiens
cgtgcaccacggtccctccccgtccctgggctcctctgcagtccccctcggccttctcaacgcagctttcccagcagcttaggatatcggtttttgttggacttgaaattgggagttgaggg

SEQ ID NO: 199793 - DNA, 122 bp, Homo sapiens
cggcttacagacaagaaactggtttctcacagatctggaggctgaagtccagcatcaaggcgccggcagcttccgtgtctggtggggcttcctggctcacagacagggctcctcctcacatg

SEQ ID NO: 199794 - DNA, 122 bp, Homo sapiens
ggcagccatcacaaccagggcctggagccgggcatcgtagaggaaggacccgggctgttccgcaggcaggtcccggcccccaaaggtccagcgggcatgggccaagttggaggagaggtggc

SEQ ID NO: 199795 - DNA, 122 bp, Homo sapiens
cggccttggcatcacgagtcctgggaggggtcaggcgcggagagcagataatagcagccacggtgcttcttcccgactgtttgagatccgggccccgaaggcgggcccagaggcgagcgctt

SEQ ID NO: 199796 - DNA, 122 bp, Homo sapiens
tagcagctgcgaggacgcggggcgagccggaagtggagtgcgctgcggtgcgagctgggccggcggggtggttcgagagcgcgcagagtccagactggcggcagggcccgaggggccgaccc

SEQ ID NO: 199797 - DNA, 122 bp, Homo sapiens
ccggtgggagtcccgaggcagctgctgggggctgggctttgagctcggtcccgagagacccggcagggctggtcagaggggcacagccaccgcctgtgcctgcccctctctggcccactggg

SEQ ID NO: 199798 - DNA, 122 bp, Homo sapiens
tggaatctaggtttgaggctggtggtggtgggggtgtgtgtgagaagaaaaataagggcccgtctgtgactaggaatgtgggaaaatctgtagagtggagagaatatttaggggtgggggag

SEQ ID NO: 199799 - DNA, 122 bp, Homo sapiens
ccggaggcctggaagtgaagcagggagaacccggacgcagcgtcgcggccaagcggggcacgcgcttcccaggccccaaaggaagaaggatacgagggtcttgacctctaagattatagctt

SEQ ID NO: 199800 - DNA, 122 bp, Homo sapiens
ccagagggaggaagggtgggcaagaatcctagataacccgaagtttctaaggcagaatcccgagcatgatggcgccacccgggaaggagcaggtttgggagaggaggcgagagggtttgttt

SEQ ID NO: 199801 - DNA, 122 bp, Homo sapiens
gaggagagcccagagccagggtccagggtccagggagaagcagaggctgtccgatgagctcgtgagagaagcccagaggttgtcatagatgttcagctcccacccccagccctcctaggctt

SEQ ID NO: 199802 - DNA, 122 bp, Homo sapiens
agcactgtcatttcctcttaagctagcatctgactcattatcattaggaactgctggatccgttaatttattcatcatgtgtgtattgagcactgctgtgctgtgctaggtactcaggaagc

SEQ ID NO: 199803 - DNA, 122 bp, Homo sapiens
acaacttagtggaggggcagacatgcaatcaaacaattagaatacactctgttaaagccacgtgtacaaagatctagggtgctatagaaatgtgtaaaactaggccaggcgtggtgttgctc

SEQ ID NO: 199804 - DNA, 122 bp, Homo sapiens
ttttttcttgaaatgatctacattcccttctgaaagcagcagagggactcaaggtttggacgctgggttcctggagctgcagccgccagtaagtgtggcgaggtcccaggcttccaggcaat

SEQ ID NO: 199805 - DNA, 122 bp, Homo sapiens
ctccctcatgcaccgcccgcacgtcccaggatgcgctgcgattaaggtactgccgcgcctcgtgtgcaaggacagacttccggggtcgagaactacaacttccgacttgcatcactgcggtg

SEQ ID NO: 199806 - DNA, 122 bp, Homo sapiens
gctgctcctgcctggcggttgctaggagccggggaagcgcaggcgcattgggaggggccgcgggcacgccgagcagcgaccactcggccttcccctgctcctgcctgccaggtgctaaaaat

SEQ ID NO: 199807 - DNA, 122 bp, Homo sapiens
acacccccactccccccacacccagatctatatataacagctctgaagttgtcagcctaacgagccactttctggcagacccgttgctatggcaatgcttgctaatgagcccagtgccgtga

SEQ ID NO: 199808 - DNA, 122 bp, Homo sapiens
gtgggaaacttacagcatattaacagacagttatcaatgacaaaaacattaaaattatgacgagtgctaagaaggaagcactctaaccaaatacttagcttattattatagtaatatttgaa

SEQ ID NO: 199809 - DNA, 122 bp, Homo sapiens
tcccagcacgtccgaacggatgcacagaaaactgagcacccagacgggtcccgtcgaccccgcacgttagctctaaactgtgtgcaattctggggcgaaaagctaaaactcgactgcgttca

SEQ ID NO: 199810 - DNA, 122 bp, Homo sapiens
accagccctgcgttcccgccccacgtcagtgagagttggcagagttttcaggacattccccggaaggggaaggcatcctgaagttccagctactctagccccagtcacgtgtgaagacgcca

SEQ ID NO: 199811 - DNA, 122 bp, Homo sapiens
cattattttatttaatgcaataacacacactgaattcttactagaaccagcattcaatcacggctcaatgtccaaatttatccctgagctggcaagactcccaagccaggtgtacgtgcgtc

SEQ ID NO: 199812 - DNA, 122 bp, Homo sapiens
ggttgcaggttctggagcccagaggtggcccaaggcgccaggtgtctggcaaactccaaccgcggatgcaggcgacagccccagtctccaaagattgagtggctgccactggctttaggata

SEQ ID NO: 199813 - DNA, 122 bp, Homo sapiens
ggagcgtaaaaagaagaaaaagcagccacctggatattacagctgtttgaaagatggtggcgatgatagtatttccgcagaagccctggtcaatggcatgccaactcagcagaacagtgtca

SEQ ID NO: 199814 - DNA, 122 bp, Homo sapiens
ctagcactaagggataaaatgggtggttcacattctcaaggggcttgcaggctagttaggcgaacaggtaagtaaacataattttaatgtgaagagataggatccattatagagacatgcat

SEQ ID NO: 199815 - DNA, 122 bp, Homo sapiens
agtagctggggtgaggccgtcgtcgccgcacgggctggttggggctgtgtctgtgggaggcgccggggtgatggcggtggagactctgtccccggactgggagtttgaccgcgttgacgacg

SEQ ID NO: 199816 - DNA, 122 bp, Homo sapiens
gcctggtgggtctgcctgtgctgggcagtgtgtccagcctgccgaggtcacgctctggtgcgcggtgccctcagtggcgccttgggtctcggcgcctgggcctcactcctgcgcgatgctcc

SEQ ID NO: 199817 - DNA, 122 bp, Homo sapiens
attgggaatcccaagtgtagctcaaggctactggtcttcgaggtaccaggctgggtatgtcggggaggtaggtgcctggtgtctgcctgctggcgacgatgactgcgagccctttctcaaga

SEQ ID NO: 199818 - DNA, 122 bp, Homo sapiens
ccactcgaggcggacggggccccctgcacccctcttccctggcggggagaaaggctgcagcggggcgatttgcatttctatgaaaaccggactacaggggcaactccgccgcagggcaggcg

SEQ ID NO: 199819 - DNA, 122 bp, Homo sapiens
ttataatagctgctttccggagctagtaaaccatatcctcctacactctgagcaatctcacggggtagaccgcaggttaacacctctcagactccttgaaaaatagctggtgacgggtcagt

SEQ ID NO: 199820 - DNA, 122 bp, Homo sapiens
agcattatttactcccactagagatcaggcctcccagtcccaggggtgagtgatgtgtcccggcaagaaactgggctgttttacaaaataattttataggtgggagtttcctactcaaacac

SEQ ID NO: 199821 - DNA, 122 bp, Homo sapiens
ggagtatggactcacccagggagtgcttgggcggagaagcagcctctgctccaggccttccgctgcggcacctaaagaggccgggcggcccagaggcccgcaagccacgcccccttccaggc

SEQ ID NO: 199822 - DNA, 122 bp, Homo sapiens
gccgccgccgccgccgctgccaggactctcagtgccggttttaatgggcagctccctcttcgccgcccccctgtgtgtcccctccctcgatttcgctgggaggacgagatggacatttattc

SEQ ID NO: 199823 - DNA, 122 bp, Homo sapiens
tggggtctaaaccgcaaacaggcgaaattcccgccaccgcgcgcccgcgctccggaaaggcggggccacggcgcagccctcccccggctaccaatcgcctcgcgatatctgcgcggaaacag

SEQ ID NO: 199824 - DNA, 122 bp, Homo sapiens
gtgaggagggcgcagacaaccctggaaatcacctctggtctaaggttctgggatgcaccacgggcagctccctgagcgccacaatgctcgcttttacagagcggcactggctccgatcaggc

SEQ ID NO: 199825 - DNA, 122 bp, Homo sapiens
aaggctgggttggctgccggtggaatctgatatggaggacaagtctgtcagggagatgtgcgattccatttggtgtatgtcactgggctggagctgagcctgccatggggccccagaaaagg

SEQ ID NO: 199826 - DNA, 122 bp, Homo sapiens
gagtaagcactttacacaggtctcacctaattaccatcccctgcttccctggagtcaggacgagccacagttggaacccagctaaaacactgatttgctgtgtgaggcccggagcctcactt

SEQ ID NO: 199827 - DNA, 122 bp, Homo sapiens
gacatcaggagggcccggggggcggagcaggaagacgagtgaccacgacgccaggtatggcgctgagcaccacgtgcaggcctagccggtgaccctcacaagccctgcataaggtcagggtc

SEQ ID NO: 199828 - DNA, 122 bp, Homo sapiens
tccgggctcagaattttccaggagtgggttcttgggcagtggctgtgggagcaggaatggcgcagctagagggttactgtttctcggccgccttgagctgtacctttttagtgtcctgcctc

SEQ ID NO: 199829 - DNA, 122 bp, Homo sapiens
attaagttgaaaaatttgccccggctctgttggctttgagaattgcctgtctgtgtccctcgagagtgctctctttctggtcctctctagtcagcactgggctcagggtctgaagccaagcc

SEQ ID NO: 199830 - DNA, 122 bp, Homo sapiens
ctctatttttattttttatttcatttttttttatttttttgagacagagtctcactctgtcggccaggctagcgtgcagtggctcgatctcagctcactgccagctccgcccccgggttcac

SEQ ID NO: 199831 - DNA, 122 bp, Homo sapiens
ctgggtttccccctgcctaaaaaggattttgtgcttcgtggcttgtccaggcaagcaggccgtcgcgggacctagaccgagacagtgagtctctctttctcccgggcctcccttctgtttcc

SEQ ID NO: 199832 - DNA, 122 bp, Homo sapiens
tcggttgtcgccaccgccagcctcacttcccacaacctggcgcactaggagccctccgaccggcaccgcccccacgtgttgcacgccgcttccgctttccggcccagacctcaagaccgctt

SEQ ID NO: 199833 - DNA, 122 bp, Homo sapiens
aacaaatgatcaattttgatctcttgttggatagcacactcaacgttaaagagtagacaccggtcgtgatagggaacactttcctcccagtgggtaacaggtctgatagtggcttgctttgg

SEQ ID NO: 199834 - DNA, 122 bp, Homo sapiens
cagggctcaaggtggacgcatgcctgggtggtcacagacagcactggaggttggtgtggccgggtaaagtgggcagagggagacagccggcaaagaggttacagcgagcagaaagtgcaggg

SEQ ID NO: 199835 - DNA, 122 bp, Homo sapiens
tacctggaaatgccaggtcatcttggcatatgaaagtcagcgtaattcactacagtaatgcggtaaggaagtgacctcatgagcatctcactaggtgcaggaaaggcagctgaccacattca

SEQ ID NO: 199836 - DNA, 122 bp, Homo sapiens
caggggagggatggagcagggggcagggcaaggagggatggggactcagggcggggcacacggaagcaactgcaaggactaagggagtccgcagcctggggcattggagcccttcgccatac

SEQ ID NO: 199837 - DNA, 122 bp, Homo sapiens
gagtagaaagtgaaagtgcctggtgccatcctcccggctgatggggacaagttgccttgccgccccagggttcttttctgtggtgcctcttttatgttttccccctgagcacctgagcatct

SEQ ID NO: 199838 - DNA, 122 bp, Homo sapiens
ttagtttcccaggtaaccatatcctatttgaaaggtgaggtcacaaggacctcacaatgccgacgtactggggttttatgttctatgttccaactttaaaagggaaagaaagcaacaagtct

SEQ ID NO: 199839 - DNA, 122 bp, Homo sapiens
agcaggaaggcttcgagaccagacatggagaactccgccttcatttacccttgccatcaccgagcgtggcccagctagctgggtccttccttggtgcagtatctgtttatgtccctgagtgt

SEQ ID NO: 199840 - DNA, 122 bp, Homo sapiens
aggcgctgccaccgccgacacacacacacacacacacacacacgcgcgcgcgcacacacacgccccgagcccgaggcctctcggctaatctgggattccccgcgccccctcccccaccctca

SEQ ID NO: 199841 - DNA, 122 bp, Homo sapiens
gacaacatatagacgaggaaaatacgtcaggctaacattaagctcaggaccacagaagtccgttagaggaagaaccaatgccatggcaactgaaaaccgatgtaatttcatttgctatttaa

SEQ ID NO: 199842 - DNA, 122 bp, Homo sapiens
ccacccccagccctgcggggctttctgcctgccacacgccgtccctgctcactaccccatcggtttccttcgggagtcttcaaagccagtgcacgtgctcccaggtctcagggaggcgaccc

SEQ ID NO: 199843 - DNA, 122 bp, Homo sapiens
gctgggggaccttgggcaccgggtggaacgggcggggcggctgtccttgtgctcgggcagcgagggcgccggcgagaagcgcggctgcagctgagcgctccgcatccctcctgccgttgctc

SEQ ID NO: 199844 - DNA, 122 bp, Homo sapiens
ctagtcggtctagctgggccccatcccctttcccactcggagcgtgagcgcctggagacacgtacagccaaccagtgagaaggagtggccgcgagtggcatgcacttggtccaattacctgc

SEQ ID NO: 199845 - DNA, 122 bp, Homo sapiens
taagccacctgctgagttcatataacacagacttagacttgattagaaaatcttacctgtcgggaacactttgtttcacgaagggcttttaggcttccattccagtgcaatagttggaaaat

SEQ ID NO: 199846 - DNA, 122 bp, Homo sapiens
tctggctgcgcgctgaccctgccggcctgcacgggtcgcagcccccgcgccgctgcctggcgctgctgcatctcctgcagctgggttacctgtacaggtgagtgcttcgccccgggagggga

SEQ ID NO: 199847 - DNA, 122 bp, Homo sapiens
tacaaagccatccctagctatcccagtcagcccacactggtctccatgacatgcatgaaccgaagtttttagaacctttgacacttatgtctgccctggatgatttgttcattatcttatgt

SEQ ID NO: 199848 - DNA, 122 bp, Homo sapiens
cagccatttcgataaaaaatagatataagaaataggacagaaaatgtcagatcgtatgtgcgttctagaccgctgattcgtcgatttgtaaaacaagagaaggataagatggtttccagatg

SEQ ID NO: 199849 - DNA, 122 bp, Homo sapiens
ccttctggggaagacacagttggaattctctaatcctaatcacagtaaattaaagaaagacgagaggagtaatccagcagactagcttcaggcaactggactcagatgaagaagagtgtctt

SEQ ID NO: 199850 - DNA, 122 bp, Homo sapiens
gcggggccccgcagccccgcgggcggcctccgctcggtcgggctcacttcccagcagcctcgccccactcgccggttcgccatggcagattcgagacccctcctggatctccttgccccgct

SEQ ID NO: 199851 - DNA, 122 bp, Homo sapiens
gcacagagggctgttggcagcaggacctgggggaagagcgagaggagagggcccccgtggcggccctgccctgtcctaaaggagaggggctgcctcccagatgagagccctgagaggcccta

SEQ ID NO: 199852 - DNA, 122 bp, Homo sapiens
tactctctcttagagatttcatgaagctccagctatgacagctgatatcaaataagccgacgcagcctcttctagcaaagcccatataactgcgccaaggcagtttctctttttttaatctt

SEQ ID NO: 199853 - DNA, 122 bp, Homo sapiens
ctcctcctctgtctgtggatctgcgtggtctccatcactgatctcacctctaggtatttccgagagagagcgcctcctccgtcactgtggatctgcgtagccggcatcactgatgtcacctc

SEQ ID NO: 199854 - DNA, 122 bp, Homo sapiens
gggatcaggccctgacctttttccggcagcctcaggagcagcacgttgctgtcagggcctcgagcccggccagaggatggtctcactttgaactcgtagtcttggccccagtggaggcctcc

SEQ ID NO: 199855 - DNA, 122 bp, Homo sapiens
cgagttcaaacctcgcggaaccatacctgaaaactcggggtaattcttttttcttcatttcgcctctgtccagtttctctgacgccccctgatggtcagtctgtgagtgcttcgctcacgca

SEQ ID NO: 199856 - DNA, 122 bp, Homo sapiens
acaggagaaccaggggattcacccgtcatgagagcagagctcctataccctggcatcctgcgccccaggcacccgagggatcctgggaaaacccaaagctatgtggctaaaactcctgcttt

SEQ ID NO: 199857 - DNA, 122 bp, Homo sapiens
cctccacccggcagccgccctgtctgggaagtgaggagcccctccgcccggcagccaccccgtctgccaagtgaggagcccctccgcccggcagctgccccgtccaggaggtggggggcacc

SEQ ID NO: 199858 - DNA, 122 bp, Homo sapiens
ccctccgctgggaggctgcgcgccacttccggtctgtgcctccgcgggctcgggtagaaacgtgagctaggagaggaggttcctgggctgaactgtagctgtctggtttccctgcactctgt

SEQ ID NO: 199859 - DNA, 122 bp, Homo sapiens
gctcccagctccgatcttgcacttgaaccaccggcggggccgggggcggagccgcgccgccgcctcggaaggtaattcacagccccgagaactcgccggcagcgccaagtcccccagtccag

SEQ ID NO: 199860 - DNA, 122 bp, Homo sapiens
ccaccacccctcacctctcagccagcgcccgccaacggtttcaaccggccgcggggagcacgtggactcgccgccgccagcccagcgccgcagctacctgcctctcaggcttcgcggtgcag

SEQ ID NO: 199861 - DNA, 122 bp, Homo sapiens
cctcacctcaccccgcccccgccccggcagcgctctggaaagcctcaaagcccagcgctgcgcggaaatgttagaggcccaaggcaggtggcctgtctggactcagacccgacccagatgtc

SEQ ID NO: 199862 - DNA, 122 bp, Homo sapiens
ctgttcatgagaatttctaaaaaccgatttcagattcattaaaggaaccattaaaggcttcgtctaataggattacatttttaaacatgaaaacctaagattcacttttttgagttttattg

SEQ ID NO: 199863 - DNA, 122 bp, Homo sapiens
cacaggagctctgggggccgagctgcggctcccgcctgtgctcaccttgtgggggaaggtcgaagcggacatgcccatcataatgcatggtgctgtggaacttgctgtcacaggcctcgcag

SEQ ID NO: 199864 - DNA, 122 bp, Homo sapiens
cacctattttcatcagtaggcagggcagtgctatcagaagagtaggctgcccttctatgacgacagaagctgttcctgatacttagttctgccttgcacatagtagactcaggtatcagtaa

SEQ ID NO: 199865 - DNA, 122 bp, Homo sapiens
tcacgtatgaaacagggcttattggacaaatggaatggtataaggcatctaaacatgtcacgatgttgaacatccaatgaggcatcagacttcagtgacttctcacatcacttccgcaggtt

SEQ ID NO: 199866 - DNA, 122 bp, Homo sapiens
aaggactccccccagtacttagacctgctgtggggactagcaatgtgtgagtaacttttacgtctctcattaagttaaacctttgctaattggagcatgtcaagatctagtaccagccaccc

SEQ ID NO: 199867 - DNA, 122 bp, Homo sapiens
gagctcattaggaacttggggagcaggctcaccgctgtaggctggggccacccaccaggccgccatggcaggtatgttggaagatgagcatcagagaccgtttaagagaaaacactcccagc

SEQ ID NO: 199868 - DNA, 122 bp, Homo sapiens
aaagcaatgctaactcatttgggaccagggctcagatcatcccctgcactgtctctctctcgctccatgtctcaatcctctgcctctggtgattttttccttaggagggtttccttatgtgg

SEQ ID NO: 199869 - DNA, 122 bp, Homo sapiens
tttggaagcgaggcggccttaggcttcctggttatcagtttccttttagcaggccgtccccgggcgctgtttccttcccaggggtctctcacccgtgtcccggctttctgagctggttgtta

SEQ ID NO: 199870 - DNA, 122 bp, Homo sapiens
agttttattaacatttaaacacgtatgacatttgaacattctttaaaatgaccatcaacacggtttcgtatgtttcagtagattttttttttcagttgcttctgttttttttttttaattta

SEQ ID NO: 199871 - DNA, 122 bp, Homo sapiens
ttagaaataaaacaggagcagcgtcaacagaagatgtcaggagtgggggcctcgtttctgcgtggtgaattctgagaccagagcacaccgtcccaagagggcagtggacgctggggaaagtg

SEQ ID NO: 199872 - DNA, 122 bp, Homo sapiens
cgggtgcgggggcttgaaccacagatgtttattccctcacagctgtggaggctggaggtccgagatcaaggcaagagcagggctggttccttccagaggctcagagggcaaatccatcccag

SEQ ID NO: 199873 - DNA, 122 bp, Homo sapiens
cccctttctgacaaagccaccaccattttgtaaggaactgtagcttctctctgaaactgccgggaaagggaaaatctttttaaaatagacatcacacaaccaacagggtcccctaggttcag

SEQ ID NO: 199874 - DNA, 122 bp, Homo sapiens
tttagtcacgtgaagttttcatgggtaattctttctttccctttaaactacaatcagaatcgaaactgaaactaagaaaagctcaaggacgtcagtatttgtcttttaagctgttaacaaaa

SEQ ID NO: 199875 - DNA, 122 bp, Homo sapiens
cttcccctgccagcgaatccctccagagctcacccaagtccaggttcgtctctgggggctcgtggtggggctgagatgctggaggtgtcctgagaaacgaggctggaggctgcagtcaaggt

SEQ ID NO: 199876 - DNA, 122 bp, Homo sapiens
atggtgaaggtggagaattgtgttaggcaatgggaaatgcctctcagcaaagaggggagccggagaggggacaggacaggcaagtaatcttcccatgaaatccggctgtctccagccggctc

SEQ ID NO: 199877 - DNA, 122 bp, Homo sapiens
agggggacaccccagggagcctctgcacaaacccagagtctctctctctcccttaatggccggcactaggtcacatgcccagttatgaccaaatcaaggttctccacaaagggagagaagac

SEQ ID NO: 199878 - DNA, 122 bp, Homo sapiens
ttcacatggattcatgtcggtcctccctcctcagtggccactcttcacatggattcatgtcggtcctccctcctccgtggccactcttcagatggcttcacgtcggtcctccctcctcggtg

SEQ ID NO: 199879 - DNA, 122 bp, Homo sapiens
caccttctcacccacacagtggtggtacttcagcagggggctggtgcagatgaagacctgcgtgctgcggagaaggacgcggttaccgccgggagccaggagcccgcccaggactccgcccg

SEQ ID NO: 199880 - DNA, 122 bp, Homo sapiens
gcccgtgtggtgcctgcccagcatctttgtggctggctgcagcgtctgttgctttgatgtcgcacatgattagatgccgtccctggaggagcgattgcagggagactgggtggaggaagagg

SEQ ID NO: 199881 - DNA, 122 bp, Homo sapiens
gcaagatgactgacggagcccagacaaaattttagttccttcaaagaagtgttttgctttcggggccgttgctcagtaaccctggggccgctggctgaaggcagcataggcacttctcaaca

SEQ ID NO: 199882 - DNA, 122 bp, Homo sapiens
gtgccatgcactctgggatccctggacaagccccggaagctccctgggccacagtcacttcgagtgtaaatcaagagcaccaggctatgcagacactgaagcctctgcaggatttttccggt

SEQ ID NO: 199883 - DNA, 122 bp, Homo sapiens
cagaggcccccgctataaaaaggccggtttaccgccccgcaggggagctctccagcagtccgggtcccaggggaggcctgcctcagacccccaagtgccctgagtttatgagaaggctgcag

SEQ ID NO: 199884 - DNA, 122 bp, Homo sapiens
acatctagctcaatcttttttccacaaccttgtagcctcccattcaggaattggcaatcacgtcctagtataaaatgaactttgaaaatagccagcttcctgaaaatgactggaattcaatt

SEQ ID NO: 199885 - DNA, 122 bp, Homo sapiens
ttatttctcagagtactggaagctggaatgtccaagatgccagtgagtttagttccaggccgggcgtggtggctcacacctttaatcccagcactttgggaggtcaatgagggcagatcgct

SEQ ID NO: 199886 - DNA, 122 bp, Homo sapiens
ggggagggggacagagagacgcgcaaacagctgaaagccccactgggcagaagctgaatccgtgcaccgcgaagcagtccgaagaaataacgacaaccaagcgccacactccactttctcca

SEQ ID NO: 199887 - DNA, 122 bp, Homo sapiens
acatttattttccccttgtttgcccccaaggagaatgtaaactccacatattgtatcttccgcaccaggcatgatgcctgatgcatactaggggcttaaaaatatgttgactgagtgcgtgt

SEQ ID NO: 199888 - DNA, 122 bp, Homo sapiens
tcagtgcacatctgtgtgcatgtgcacgagcgtctctgtgtggatcagtgcacgtctgtgcgtgtgcacgagcgtctgtggatcagtgcacgtctgtgtgcgtgtgcacgagcgtctctgtg

SEQ ID NO: 199889 - DNA, 122 bp, Homo sapiens
ttcagcagtattagctggaacgctgtctggacagtggaaggactttttgcagggagctgccgtcagaggactgagagccagcgttcagcacggcatcactgagggcgcctggcatgcctccg

SEQ ID NO: 199890 - DNA, 122 bp, Homo sapiens
ttggaggtgaccagacacagggcattagtctttaagagtccatcagtcagccgagaagcgcggctcattagagacgcagggtggggcctggagaagtcagcgggaacacgcgggggcacaca

SEQ ID NO: 199891 - DNA, 122 bp, Homo sapiens
tgtaatggcctgaactgaatttcaaggggtgtggaaaacagttactctttaacaccactccgtcttccccattagccatttggataagtcaaagatagccttagccatctcctatcttagtt

SEQ ID NO: 199892 - DNA, 122 bp, Homo sapiens
agcatcaaaaacaaaatgttatgagctttctgatgttcacatccttattcttgcccaaaacgtcttgaccctaggaataacgagaaaaagatataaaatgagacagtcttcaaagtctgaga

SEQ ID NO: 199893 - DNA, 122 bp, Homo sapiens
cacagtacaaaaaaaaaagaaagagagagagagagagaggggagaggagtgggcggggaccggacccctcctgagctcttcccgccaggcccaggctccgctcacgtcagagtactaaggag

SEQ ID NO: 199894 - DNA, 122 bp, Homo sapiens
ttttactttccagtatttaaaaatgctgtgtatccttttaaatgaaaacgacttaaaaagcgtggctctcaggctagcaatagagataccaacccgggaatctccgcaccaccccccaagag

SEQ ID NO: 199895 - DNA, 122 bp, Homo sapiens
accccgtgcaccccgaccaccccgtccaccccgcccaccccgcccaccccgcccaccccgcgcgccccacccagccggcgcaccccgtccaccccgtccaccccgtccacccagcccacccc

SEQ ID NO: 199896 - DNA, 122 bp, Homo sapiens
gtaaggcaggtcgttattccagcctctaagcgctttacagcgccagatggctcgcgcacgcgctgcgtcttagtataggtccttgttaatagttagaagtgctgttctcattgatataggaa

SEQ ID NO: 199897 - DNA, 122 bp, Homo sapiens
aatcaaattctaagaactttgatatggatttcttgatggcctcctcagatcagattaactcgagtccatttcaggaggcaagtgttcatgttgtttaaaccaccaacccagccggcactgac

SEQ ID NO: 199898 - DNA, 122 bp, Homo sapiens
ctgcgccccaggagacagctgcctagtgtccactgagccatgggcttggagcagaaggagcgagccaagtcatggaggaagggtgggggagaggggagttcccctgaccagaaccctgtggc

SEQ ID NO: 199899 - DNA, 122 bp, Homo sapiens
acagaacattcctgaggggttaccttacatcctagcagccacaggagtcggcacatcaaccggtcctgctccagaatggccagtaattcaagacccggccacagacgagacacaggtggttc

SEQ ID NO: 199900 - DNA, 122 bp, Homo sapiens
aacgccaccaagatgctgggcatcccgaacttggtgtttggacacttgattgtggacctgcgctgcaggcgctgtctgggggctggcccagggggctggagcctggccctggctctgggctg

SEQ ID NO: 199901 - DNA, 122 bp, Homo sapiens
tgtttctacaaaagcattccagtgtttggtcattagcttcatgggtgaaagtggaaggtacgatggcagcttcctgatccctaaatctcaggtatgtattcttgaactcagcagttctagtg

SEQ ID NO: 199902 - DNA, 122 bp, Homo sapiens
caatgtttatcattgtaggcttctattttctacttctttctttctgccagtgtgtgaatgcgtggagacacacacacacaattgacccacggcttggctcagtgtcatttagactcctttct

SEQ ID NO: 199903 - DNA, 122 bp, Homo sapiens
cgggcccagctgtgctctcccggcgccaggtgtctgtgtgcctggcctctgggagggctccggagagctccttctgacctgtgacttagaaactgagggtgcagcatcactatccttgctac

SEQ ID NO: 199904 - DNA, 122 bp, Homo sapiens
atctggggcagaaggcgaatatcccagagtctcagagtccacaggagttactctgaagggcgaggcgcgggctgcatcagtggacccccacaccccacccgcaccccaagcgctccaccctg

SEQ ID NO: 199905 - DNA, 122 bp, Homo sapiens
aggtctaatgggggaggcggcgtcccagtctgtgttgcagcagcattctcatcgggggtgcgcacaccatcgttactgtcgggcagtaactgccgcttgccttgccgcagtaggagggaaat

SEQ ID NO: 199906 - DNA, 122 bp, Homo sapiens
gtccctgcgcagtgcgggcactcgcgtccctcgcgcggtggagcgccaatcccaggtctgcggccagtcctatgctgggcattaatgaagtgtgcagagtctattaaagtggtttattcggg

SEQ ID NO: 199907 - DNA, 122 bp, Homo sapiens
agcccctccacaacagcctcccttccagatgcctggggtttgctgcttggaaccaagcaccgtagtcatctcctctcccctgcccttcctgttcctctgaagctgaagtcacttccctggat

SEQ ID NO: 199908 - DNA, 122 bp, Homo sapiens
aaatgagctttttagctttctgcaaaaagaacaggcctcctgccttgggtaattcagactcgttgctagaatatggaatatgttgttggcagaaaacagacaggtgagcccagcaggtatga

SEQ ID NO: 199909 - DNA, 122 bp, Homo sapiens
gtattatacccattttatagatggagagattgaacctcagagagggtgtctcttgccctacgtcatacctcagtcagtggcagagctggtacttgagcctgggtctgcttggttctaaagct

SEQ ID NO: 199910 - DNA, 122 bp, Homo sapiens
tccggcgggaccccagcgctgcaggcggtgcggctgagccagggagccccccgcgccctgcggctggatggtgaactcctcgccgtccagcaggaaggagccgctcagcccgcggcacaggc

SEQ ID NO: 199911 - DNA, 122 bp, Homo sapiens
accggatcggggacgcagagctccgggagggccgggctggcgtgactcagccgggtgctgcgacccagctccaactgcctttacgtaggtgctgcagggtgtttgatgatgcaagaaggagg

SEQ ID NO: 199912 - DNA, 122 bp, Homo sapiens
catctggtccctcacttgatctcccactgctagttataaacaaatcttgtgcaaacctcccgggctcatccgcagtcccgcggagcggctagacgttgatgaaggatccctggtcgcctttg

SEQ ID NO: 199913 - DNA, 122 bp, Homo sapiens
ggtgatctgcccaccttggtctcccaaagtgctgggattacaggcgtgagccaccgtgcccggcctttagctgttttcaataggagaattgatctgaggaacttggcgtggcattcccagaa

SEQ ID NO: 199914 - DNA, 122 bp, Homo sapiens
agtatctctgtgaactttttatgacttcgtaatttcccctagcctcctgaagtccacattcgtacttctcagtttattgttctaacctaacctttcattgtctctatatgaatcttaacttc

SEQ ID NO: 199915 - DNA, 122 bp, Homo sapiens
tccggtccctctaaacccccaggcctcctctctgcttggtatctgtttgggattgaagaccgttggttccataaacctccatgaagatgggagtctacctgaagaggtgggaagagaacttc

SEQ ID NO: 199916 - DNA, 122 bp, Homo sapiens
cttacacttcctccctgaacccctgcggtttcacaactcctgcaggcacacctccctccccgcctgccagtgtcaccagcctgttgcctctgtgagaaagtaccactgtaagaggccaaagg

SEQ ID NO: 199917 - DNA, 122 bp, Homo sapiens
cggtaagcatcttttgctcgtcctccagtcccatgtctggctacggttctagatttaacacgagcagcaacagcggcacctcaatttttgtatttttagtagagatggggtttcaccatgtt

SEQ ID NO: 199918 - DNA, 122 bp, Homo sapiens
ttttttaccaggggccctttgcaagagtgtgaagcttggtgattacccaggagactcctccgcctcgttctgtgcccgagtttgtctgtgttttacagcctgatattccaggctgctttttg

SEQ ID NO: 199919 - DNA, 122 bp, Homo sapiens
atatatatatatatatatatttgtgaatatgctggctgccaagatcgaaacgatcaggagcgtcaaagggaaaaacgaagtcagaggcagaagaaaaaggtgttccccaggcgatgaaaact

SEQ ID NO: 199920 - DNA, 122 bp, Homo sapiens
tgtttatttttaggtgaagttgagtcctccctctttcttccttgcctttcgccggccacacgccccgttgccgtgcatgggcccctgctcagtgcctcacctgacccactgcacctggccag

SEQ ID NO: 199921 - DNA, 122 bp, Homo sapiens
gatggccagaaagctgaagattcatgaaagagcagcctgtagagagcattacctatttagcgccactgctccctggaggaaaacaaagatcttttctgaaatctacagaaaccaaaataatt

SEQ ID NO: 199922 - DNA, 122 bp, Homo sapiens
cgcgatctcccgctctagagacccgcgggatgcgtccccgcccgctgccgggaggtggggcgccagcattgtacagtctgcgcgcgccccctgctgctcgccgcgagaaatgacggcctacg

SEQ ID NO: 199923 - DNA, 122 bp, Homo sapiens
tcaacagatgcgagctgaggctgaaggcctcgccgcactcggggcacgggtagggcttctcgcccgtgtgcaggcgccggtgcttgagcaggtcggcgcgccagctgaagctcttgccgcag

SEQ ID NO: 199924 - DNA, 122 bp, Homo sapiens
cggcgcctgggctcgcatctgggtggtggtttttcctgctgcaccaccagggtgccttggcgctgggactacaggatgcacagaggaccgcgcgtggtggaagagaagccagcctggcccgt

SEQ ID NO: 199925 - DNA, 122 bp, Homo sapiens
aaaagtggaggtcccaaaaatcctaacctcccctcttttgaagtccatgtaaatttagcccgtcataagttgagatgtagtagtggtttctaagttttttacaatgtttggctttgtgtaat

SEQ ID NO: 199926 - DNA, 122 bp, Homo sapiens
tcgttttagaccttagtttttatgagctggacttgtaaccgcccaacaggttctccttgccggctgctcagacagagatgatttatctagataggaaattgcaatagagaaagaatttaatt

SEQ ID NO: 199927 - DNA, 122 bp, Homo sapiens
caattaaatctcctttctttataataattacccagcctcaggtatttctttatagcagtgcgagaacagcgtaatacagttggttaagtcaccaaatgacttggaataatgcttcttaagga

SEQ ID NO: 199928 - DNA, 122 bp, Homo sapiens
ctggactcaccgcgcagccagccggcacccgcgtgcgtgtccttgaggcggaagaggcggcggtgcgcggagctgcggcccacgtaccacagcatccacagcagctgcagcagcatgagcgc

SEQ ID NO: 199929 - DNA, 122 bp, Homo sapiens
caggccccacagccgcccccttcctgctcagcccaggcctggcttgcgtcaggaagggggcggaacttggctgtcacaggtagagagtccctctcaagggggcatctggcatgggtgtccgc

SEQ ID NO: 199930 - DNA, 122 bp, Homo sapiens
gtacaagtacttttaaagatgatctaacaagccatgaatataactaggcttttcgcccatcgttttctttcagaaatccgctgtgtgggccattgcaaaccaaaaggttgtttgtgattggt

SEQ ID NO: 199931 - DNA, 122 bp, Homo sapiens
cttaaaataagagcaaaccaaatgcttggaaggagtgaaattatttcaactattgagactcggcaagaatttcttctgagaatcctcgtaaagaggaaacagatacagcacaaggtaatgac

SEQ ID NO: 199932 - DNA, 122 bp, Homo sapiens
tcctgcttttggaatttaatacttatagtagctcttggctgggaatggttaccctcctcacgtgcgagatgaggcaatgggcacacaggggctgggcacttctcaggacccagaggccccaa

SEQ ID NO: 199933 - DNA, 122 bp, Homo sapiens
tatattgaatgatgccttccattggccaattacttttaactgaatgcaataaaaagaatccgcacttcaagacctcactaacaactacaatttttccccctcttaaatttccagttctggaa

SEQ ID NO: 199934 - DNA, 122 bp, Homo sapiens
ctcgctgcttctcccctagtcttcgggtcccttgaacgcaggtcgcttgtttgccttacgcgtagtcagcggccagtggctatttatggcagtaaggaatattatccacatttcacatggag

SEQ ID NO: 199935 - DNA, 122 bp, Homo sapiens
agtaaacatctgaacatgcaatttcacattcagtgtggaataagaagtgtcataggttcgcgtgtttttcacaactgattatgatgtccatgatgacagcgtgcactaagcgctgtgtccaa

SEQ ID NO: 199936 - DNA, 122 bp, Homo sapiens
ctgggaactcagggaagcgcctccagaagggaacagctcagaaaccctgaccagacctggcggacaagaaccgtgtgggcgggggacaggaacgcccacccagaggccgggagagcatggtc

SEQ ID NO: 199937 - DNA, 122 bp, Homo sapiens
cgacgtctaccagcttcagactcaaaggttaggaagcagaaaacccaccgccctcttcgacgtctaccagcttcagactcaaaggttaggaagcagaaaaccatgacattcttcggaagtaa

SEQ ID NO: 199938 - DNA, 122 bp, Homo sapiens
tagcaccaaacattaggagtgctatggcttcctatagagaacttccatctttggtcacagcgttaagagctctgggtttcacagcctcataagccctctttgaaatgacccatacaaatgtc

SEQ ID NO: 199939 - DNA, 122 bp, Homo sapiens
ctaggtgttctttctccctgagaagagactcctggaatcacctcatgattctgtccctcacgggtatgaacagggaaccagctgtgctgccggttgtgagaacacagagcggtggcccagca

SEQ ID NO: 199940 - DNA, 122 bp, Homo sapiens
aaactctagtgcaatgctgacagcattccctgagctctgggaagctctcaaagaaggtggcgaagcaagtctgggtgatatttttggaggaggcatggaaacctggcggcctcctagcaggt

SEQ ID NO: 199941 - DNA, 122 bp, Homo sapiens
cctcctgtctgtggtgaggactcctccacaaaggacatgtgctctccagtcctcaacccacgcctgcgtcacccagggtacccagccaggactcagaccaaccgttttatgacccacagaaa

SEQ ID NO: 199942 - DNA, 122 bp, Homo sapiens
tctgtattataggttttgaaataaagtgtttcatattttttttccagaaaaatgaaagtacgatagagatgttgaaatcatcaataaggaatggctacagtctgcataatttctagctgttt

SEQ ID NO: 199943 - DNA, 122 bp, Homo sapiens
tgccgcactttcctcagttgcgaagggcacggccgctggggacacaacctaatgaacaaccggagctcttcagagatgcctttagcaactcagctccttaaaaataataaattcctcttagg

SEQ ID NO: 199944 - DNA, 122 bp, Homo sapiens
cacacacagcagatcaggaccacgtgctcccatgtcaccacacacagcagagcaggaccacgtgctcccgcgtcaccacacacagcagatcaggaccacgtgctcccacgtcaccacacaca

SEQ ID NO: 199945 - DNA, 122 bp, Homo sapiens
ccccacgttcctggcaacatggccgcccctacatacacccatgtgtgtagaacatcatggcgcctgtatttgcatattaaaaggctagggtaggaaggctagttttttcgtgggctacttga

SEQ ID NO: 199946 - DNA, 122 bp, Homo sapiens
tgccggcctcgcctccctgctctgggcctggctcctcaaccagttcctcgaaaaccctctcgcgcggctccttcaaaagtctctgtcactgtccctcgcagggtccctcgcactttccctcc

SEQ ID NO: 199947 - DNA, 122 bp, Homo sapiens
ctaaaacgatccgcctgcctgggccttccaaagtgctaggattatatgcgtgaaccaccgcgcctgaccatggaatcagtttttcaatctgtgctcgaggtgttgtgttcttaactatcttc

SEQ ID NO: 199948 - DNA, 122 bp, Homo sapiens
tgaaccaggagctttggacagcctcggattgcacccgcatatccaaggacaccacatcagcggacaagtcataaacagccttgggaatacgcggaaaggtcaaatttacctaaacaattaaa

SEQ ID NO: 199949 - DNA, 122 bp, Homo sapiens
gggcaagtccatcatgtccaccatgattatggtccaagactgcggctggcgggaaacccacggacgactgaaactgtgcgccccgcgggtgtctatggggcagatttctcggcaccaatcag

SEQ ID NO: 199950 - DNA, 122 bp, Homo sapiens
gcgaatgccgtccgagcactgcctgagcatacacttctctcaaagggttctgctcatcaacggagccggccagtgacttttctgatcgcttaatggcataaatacatgtatccagcctctcc

SEQ ID NO: 199951 - DNA, 122 bp, Homo sapiens
tggagacggggtttcgctgtgttggcctggccggtctccagctcctaaccgtgagtgatccgccagcctcggcctcccgaggtgccgggattgcagacggagtctcgttcactcagtgctca

SEQ ID NO: 199952 - DNA, 122 bp, Homo sapiens
gcgccccagcagcggagcaggaatgcaaacccaggatctccgccgcgagatccaccccggcgcccccgagtcccgcagttcccggcttcaggacaaccccttgccaggtccaacccgagctc

SEQ ID NO: 199953 - DNA, 122 bp, Homo sapiens
tttaatttaaaaactttctcagtttctcagtttttttaaaactttgaacaagttctcactcgtaagtggagttgaacaatgagaacacatggacacagggaggggaacatcacacaccaggg

SEQ ID NO: 199954 - DNA, 122 bp, Homo sapiens
accgaggggaaagcccaacatccccgggatggaacagagaggcggccacccgtgagtgggcgtgacccattggttcccttgcgcagcatctgtggagaattaagctttcccctcctctcttg

SEQ ID NO: 199955 - DNA, 122 bp, Homo sapiens
cgcttgtcccggagccggggcaggtgcgcgcggggggcgctccagggaccgcgctgaggccgcagacgccgcccgccgagccccgccccctgctcgccgaactcagctccccgttcgccgtc

SEQ ID NO: 199956 - DNA, 122 bp, Homo sapiens
tgccgcggccgcgcgagtcctggaaagcgttgttggcccggttgctctggagccgggtctcgggtctggtggctgccggccctgcggcatctcgccatggggagcacggagagcagcgaggg

SEQ ID NO: 199957 - DNA, 122 bp, Homo sapiens
gggtggtgctcctgggcgattggttggcagaatgagggcgctgcgcaaaaacggagaagccgagcgctcggagctcagaaactgccagcccagaccacaggctcagaggctgaagcaggagg

SEQ ID NO: 199958 - DNA, 122 bp, Homo sapiens
tcaaaaacctagaagggggtctcctgtaagaagagctgaggccaggcaagagaagagtcacgcagtttgcatatgggttggtaaaagcttgctcagcgaggcaatgcatctttagggaggga

SEQ ID NO: 199959 - DNA, 122 bp, Homo sapiens
gcgccacctgactcccaagtccctggctttggagtgggaagtgaggtgtgggaagtaggtcgctttctgatgaattcagtggcagtgaattgagaccggagggaatctggcccctagaggct

SEQ ID NO: 199960 - DNA, 122 bp, Homo sapiens
ggctgctcagcaacgcttgcttgatcctggggctataaaacgagtccaccgtgagcgcagcggagcagcagcagctccagctcggtgcagaagcccagcagccggcgtgccgccgcccggcc

SEQ ID NO: 199961 - DNA, 122 bp, Homo sapiens
atgtttgtatttattgcttcatggccgactggaatcctgagtcctgggaagctggcactgcggggatcttgcccggtgtcctggtcctcttgcttccgtcgcggccgcatgtgcgtgtgtcc

SEQ ID NO: 199962 - DNA, 122 bp, Homo sapiens
ctggcggaggcagaggggcggcggagtcagggctggcaccggtcctaggtccggggatggcgccttcggaaccctaggctccgctcccaggccggccgctcccctccctgccctctgcccgc

SEQ ID NO: 199963 - DNA, 122 bp, Homo sapiens
gacgtcctgacaggcgatgagttaactaggctctggccactctactcatgtcccacgtcccgggcacccatgggacaccgccgctttatccccttctctgtccacagccgcccccaccccac

SEQ ID NO: 199964 - DNA, 122 bp, Homo sapiens
aactttccattccactgacccctcacactctactctttgcctacaagtaccagctgtcaacgtggtattgagctgggttgttttcctatattgcaacagacttgagtaaagtcttccccagc

SEQ ID NO: 199965 - DNA, 122 bp, Homo sapiens
tgaaaggcccatctgaagcttgcatcttatggctgaactcacctatgctgaggaatggcacgtggaggcaggagaactagggtcagtcagaagacaaactacattgtctttccaaataaata

SEQ ID NO: 199966 - DNA, 122 bp, Homo sapiens
tttattagtaattgtttctgtctttacattttggcacagttttagtacctgatacttactcgtttaatgaataattctgagaccctagtgggaatcaggcaccatgctagttacagtgtgag

SEQ ID NO: 199967 - DNA, 122 bp, Homo sapiens
tttgcttgagcaatggccgcatcaaggtcgtgttctccaactcgaatatctaagtggatccgctgtacaaacagtaaaaaggaaaaaacggcatgtttttaaaaacagctccactctttttc

SEQ ID NO: 199968 - DNA, 122 bp, Homo sapiens
aattagcaacataaaagctccgagatgcttgaacatgtggtgcgctggcagccaggagcgcggggcaggagcggggcaggagagggaggggagactctgagtcccaagaagggcaaggcgct

SEQ ID NO: 199969 - DNA, 122 bp, Homo sapiens
cttatggggaaggtggttcactgttcctcttgctaagatcctcctggccccttccactgacgatgttccacaaggaatcctaaattcttgggtcctagagactggcgtccagtcaagcacag

SEQ ID NO: 199970 - DNA, 122 bp, Homo sapiens
cgcgtgcgctccgcgtctgccaggctttagggctgcgcggacactgggtgggtggtgggccgaggcgaccggaaggtcctggccgcctttccggtctcctcagcaccctggagcgccgccct

SEQ ID NO: 199971 - DNA, 122 bp, Homo sapiens
tggaggcagtgcatgccctgggcacagtgcccagttcctgcccacccaggaagtagacttcgggtggaggcagtaggctggggaggggcggggagcttggacaggaaggagccttgctcatt

SEQ ID NO: 199972 - DNA, 122 bp, Homo sapiens
gtacactaaggaatgattatagaggctgatcgaaattctgcaaaaaaagcgtaaattttacgtttcattcaagcagttcagactcacgattttaactagagtaatctggggtttgtttgctt

SEQ ID NO: 199973 - DNA, 122 bp, Homo sapiens
cataagtctattttaagataggagggaatctgagtcaagtgtttaacatagggcctggcacgtggcaggtactcaataaatgatcatttaaaaattattatgtgcttgatcagaaagaaagg

SEQ ID NO: 199974 - DNA, 122 bp, Homo sapiens
ccgctgccctgcccactgccaccaccaatgaggatcccagggtcggccgcataattcacccggtgggccctgcagcttcaggagagtgagaaaggtccactcagccccatcccggttgctgc

SEQ ID NO: 199975 - DNA, 122 bp, Homo sapiens
cagtcttgggctgcataacgatggcacactggcgacagactgcatatacaacggaagtcccgtaacattagaataccgtatttttactgtaccttttctatgtctagatacacaaacaccac

SEQ ID NO: 199976 - DNA, 122 bp, Homo sapiens
gccctcctgagtcccgggaggaaagtgctcgcccattcctgacctgtgacacgctcactgcgaaggcaggttattagaagagtcccatgaaagtaaacagggtattaaaacggatccttaaa

SEQ ID NO: 199977 - DNA, 122 bp, Homo sapiens
tgtttaaaaattcatctgcgttcgttctcccaggagtgctccagggaaccacaggcttcccggcacttgaaggctgaactgagcgtgagtgccctggtccccaggaagcaggcggatgctgc

SEQ ID NO: 199978 - DNA, 122 bp, Homo sapiens
ctgccttggtagctggctcagaacagctttgggggccctctgcaagacgtgtcacatctccggttttgttttgttttgtttttacagaaagaaaagctctttgtgtggaattttatttgaag

SEQ ID NO: 199979 - DNA, 122 bp, Homo sapiens
ctccctcatgcagtgtatgtccatagtttttcacacaacacccttcttctctcagtctgtcggcctctctctcaatctcacacacacacccccgccccccaacacaccgttggccccgcccc

SEQ ID NO: 199980 - DNA, 122 bp, Homo sapiens
ggtggctgtggctcatgtttgaagatgcgcacagggtcatctaggaggcaggggtcatagcggtcagggtggaccttgtggggatcccagagtcaccccagggggttacgggagtcattgca

SEQ ID NO: 199981 - DNA, 122 bp, Homo sapiens
tcctccttcggggggctacagcggcatcctgtctgggtccaacggattgcttgcgggcaacgagaagctcaccatgcataacctcaacaactgcctggcctcctacctggacaaggtgcacg

SEQ ID NO: 199982 - DNA, 122 bp, Homo sapiens
acagaggagccagcacactgtgacatgccggcatcgtgatctggaattccctgtggtacacgtgggttctggagctgtaggttttaattacttgtggatgaactgagctgccgcatagccac

SEQ ID NO: 199983 - DNA, 122 bp, Homo sapiens
aggtgtgtggtgtaagaagagcaccgcatggaggaggcggtctggaggagagcaggggtgcggtgggtgctccagggaggaggctaagtctgcactcagccttgacaagaggcactcactgg

SEQ ID NO: 199984 - DNA, 122 bp, Homo sapiens
tggagcccaggtgaggattccacatgaactcgtcgttcctagacttgaagagtttcaaaccgggagaggccgaggcagaagcagtaaatgcctccttcgtttgcccccctgttgcacggaga

SEQ ID NO: 199985 - DNA, 122 bp, Homo sapiens
gttgccaatgcggatctactcaaccggacttggtcccggggaggcaatgaacaatgtctccggtacatcgccaacctcatctcctgcttccctagtgtgtgtgtccgggatgagaagggaaa

SEQ ID NO: 199986 - DNA, 122 bp, Homo sapiens
tttgttaatttctaagagatctttaaagcattaattgaggtctccccaactctcccctcccgtccctctctgcaactcctcccttcccaaaaatatctttaggagaagcgagttctctcggc

SEQ ID NO: 199987 - DNA, 122 bp, Homo sapiens
tacacagggaaagcctgggggcaggatccaggggtgccagggacaccccgcaaccagccacgccctgcaacctctgcccccagcgagccccagggaggcccctggtccgccctcctgacctg

SEQ ID NO: 199988 - DNA, 122 bp, Homo sapiens
tgctcttcttctccagccatcaccctcagcctttcccttaaaatcattgctctttcctttcgggtcacgctagcactgttgcgttggtctctacatgcatcactccacacacctgccccgaa

SEQ ID NO: 199989 - DNA, 122 bp, Homo sapiens
gcctttgcggctcttttcccgctccgaagtcagcacctgccccgctccagagagggtcaacgaactgggactgattgtcgattatgccataccaaacccaggttgatttcgctccgcaggat

SEQ ID NO: 199990 - DNA, 122 bp, Homo sapiens
cctgctgggccccgccctgctcctcgcccccgcgactgggctgggcgcgctgtcccctagcgcagctatgtcccgagcgcgcccccacctgtgcgttaatctactgggaatgggggtggact

SEQ ID NO: 199991 - DNA, 122 bp, Homo sapiens
cctccatcggggctcaccgggtgccttcccttccccgggaagctcccacgcccagcctgccggagtctctgcgaaaatgcaggtgatggtggtcggcttcctaactctgaggagctcgggat

SEQ ID NO: 199992 - DNA, 122 bp, Homo sapiens
cgggccctgaccacgctcatgtggaagtcacgcccgttgggcagttgtgtgacacggaagcggcagtcctggccgggctggctgcggtcctcggggaaggcggccagcttgtccgtctggtt

SEQ ID NO: 199993 - DNA, 122 bp, Homo sapiens
cgcagtattctatcagggaatgtggggccagctgggcatctggtagcccagttggttcttcggataatgggctgctcagtgaaggaacctggtgctgtaaaagtgattccccctctccttcc

SEQ ID NO: 199994 - DNA, 122 bp, Homo sapiens
tttctcgtcccagttttacaatcaagggggccaaagctctgagaggtgaagttacttggccgggccacacagacagtaactggtggaagcaagcattcagccaggctgattcaaagcccggg

SEQ ID NO: 199995 - DNA, 122 bp, Homo sapiens
ttgttttagcattgcagattgagccacacttattatttttcttgacttctggtgcacaggcggcatgattaccaagtgatcttatgtaaacaaaaggctgttttgtgccgataaatggattc

SEQ ID NO: 199996 - DNA, 122 bp, Homo sapiens
ttccaaatgttatttgggagcagaaatgttttgggtcactggaccgtgctttacgtggcacggcaggttggcacgctacgcagatgcccttttcgttaacatttccgcttgccagttgctcc

SEQ ID NO: 199997 - DNA, 122 bp, Homo sapiens
taggaacttggtcactcatttctacatctcaggatgttcacaaagtccttgcctctatctcgtttaaaccccaagtgaggtaagtgaagtctgcatgtgaattttctaggagtataggacaa

SEQ ID NO: 199998 - DNA, 122 bp, Homo sapiens
tcctgcgcagccgaggttccccagcgccccctgcagccgcgcgtaggcagagacggagcccggccctgcgcctccgcaccacgcccgggaccccacccagcggcccgtacccggagaagcag

SEQ ID NO: 199999 - DNA, 122 bp, Homo sapiens
gagcccagtggcgagatcttggctcactacaacctccacctcccgggttcaggcaattctcgtgcctaagcctcccgagtagctgcgactacaggcgccggccagcatgcctgtctaatttt

SEQ ID NO: 200000 - DNA, 122 bp, Homo sapiens
ggcttgaacctgggacgtggagtttgcagtcagcagagatcacgccacagaatgagactccgtctcgagaaaaaaaaagaactattggtccaacaccccctccacacctagcatcttatacc

SEQ ID NO: 200001 - DNA, 122 bp, Homo sapiens
ttcccttctaccccagcccagcattttgtctttttcccctttgtccagcagtataactcacgctgcccctccgggctgagaggagtgtagacctcacctgctgagcacaactctggcgggcc

SEQ ID NO: 200002 - DNA, 122 bp, Homo sapiens
tacgtaaacatctagcgcgctgacgctttccaagcacgcatgcgcagttgtgaaatattgcggagttttcggagtccaaaatggcttgaagttgctagaacagaatctttcaaagactcatt

SEQ ID NO: 200003 - DNA, 122 bp, Homo sapiens
gagaaatagtaaccaactgaaacctggttaatactcattgacagtgtgggaggtctaacacgtaaaatagatatttttcttgactcctctccttcccctcacttccattttctttatttcct

SEQ ID NO: 200004 - DNA, 122 bp, Homo sapiens
tggcatttacttacctgggtgtgccaatctcgaagagtggagagagaattcagcccgggacgaggtctgtcccgcccccaggatgcaaaatccggctttgaagtggaggtggttggtgtggt

SEQ ID NO: 200005 - DNA, 122 bp, Homo sapiens
gcgggctcccgggcccagccgggctgaggtggcgtgggcgccctgcgggccgggcctccgcggcgcgtcccagtcccagtctccgcgctggtctggcccggtccctcagctccaccccctgc

SEQ ID NO: 200006 - DNA, 122 bp, Homo sapiens
tgaggagcgtctctgcccagctgcccatcgtctgagatgcggggagcgcctctgccccgccgccccctctgggatgtgaggagcctctctgcctggccgccccgtctgagaagtgaagagcc

SEQ ID NO: 200007 - DNA, 122 bp, Homo sapiens
acagagagaatcgtgagcgccggggcaggtgcgaggtagggagaggtcacagccagacagcgcttgcctctcaggacctcctaaccctgtgttttttctgagataggagtttcctatccagc

SEQ ID NO: 200008 - DNA, 122 bp, Homo sapiens
tacgcggggtggctctggtctggaccgggtcgggaaccggaccctgggttcggagtccggcgccgccgcagaacctcagcgccctagtctgtgccgtgcggaccctgccgcgaaaacggccg

SEQ ID NO: 200009 - DNA, 122 bp, Homo sapiens
gggcggccgtggcccggcggtcttacttcgggaagggagccgcggtgtgggcgtgtgttccgcctggcctttgggggcgaccgagccgctgagtttcggaaacgtctctgtacccccagcag

SEQ ID NO: 200010 - DNA, 122 bp, Homo sapiens
gcgcgtctgtcatcaacagcttaattccgttttcgcatcaaaccacaccagcagacagtgcgttctctggaaacacttgtattttcctggctccgggctccatcaacaacacattcaaatgc

SEQ ID NO: 200011 - DNA, 122 bp, Homo sapiens
ttgggcttatttgaaacacacgcacaaccaatcaagcggcgcctgccgggacttggagagcgtcgaccaatcaccgcccctctggagactcctgcctatgggaaagaggttgacatcacgcg

SEQ ID NO: 200012 - DNA, 122 bp, Homo sapiens
ggacttccgtcttgagtctcctgaggctgagaagcagcagatgccgaacctgccccctgacgtggacgtacacctcaagacctaaaatgcgccctgcctggagactttgaacttagtcttct

SEQ ID NO: 200013 - DNA, 122 bp, Homo sapiens
agtgagactctgtctcaaaaaaaaaaaaccataaatcaggaatatctagaatatctagatcgaaaattcaaaattcagttgggagtggtggctcccacctataatcccagcactttgggagg

SEQ ID NO: 200014 - DNA, 122 bp, Homo sapiens
atgaatatagcttctccaggtacagttcacaaacgctaccaccggaggaaaagtcagggccggggctccagctgcagtagttcggagaccagtgatgatgattctgaaagccggcggcggct

SEQ ID NO: 200015 - DNA, 122 bp, Homo sapiens
agcgcagcgcctgacacacagcaggcagctgacagacaggtgttgagcaaggagcaaaggcgcatcttcattgctctgtccttgcttctaggaggcgaattgggaaatccagagggaaagga

SEQ ID NO: 200016 - DNA, 122 bp, Homo sapiens
atgtgaggagcgcctctgcctggccacgaccccatctgggaggtgaggagcatctctgcccggccaccccgtctgagaagtgaagagcccgtccgcccagcagccgccccgtctgggaagtg

SEQ ID NO: 200017 - DNA, 122 bp, Homo sapiens
gatacctttgttggttttcctgcagagattataaaatcacagagaggctattgttctgcacggataggaaagccagaagtacacgtaatggagaaagggagacagtagattgttttcagtag

SEQ ID NO: 200018 - DNA, 122 bp, Homo sapiens
gggcagcccctgcagcactgggcagacatgctggcccacgcccggcggcccattgcccagcggcaccccctgcggccagccagggaggtggaccgcatgctggccctgcagccccgccttcg

SEQ ID NO: 200019 - DNA, 122 bp, Homo sapiens
atgcattcagacacaagtcacagtttttgagctccttcattgttgttatttttacacacacgttttccaatttaattctcactaaaatgcctcatgttgtcatatccatctctgcattagat

SEQ ID NO: 200020 - DNA, 122 bp, Homo sapiens
aagtcagaccttaggtcattcgtttgcctggcaggtgctcccaggaacagtgggtcctcccgcatgcccggccctctgggcaggtctgtgccgggagctgggcagagtcggcagtgcccgct

SEQ ID NO: 200021 - DNA, 122 bp, Homo sapiens
atgccaccttctggtcccacccgatacccactcagctcacaactgtggcagctaagctcccgcctcccctgcttactcggttggctccgggaatcagctcacctcccagccctgggggctgc

SEQ ID NO: 200022 - DNA, 122 bp, Homo sapiens
tgtggatttctgaacactggtgcacactcacatgcgtgtgtttcgtggcctcctggttcccgtctcagcactatttctctttcctctcacacagtgctttgcctgatttttttttttaatgg

SEQ ID NO: 200023 - DNA, 122 bp, Homo sapiens
caaattcaaaatttaaagtaataccatcctgaccaaacaaaacacatctataggtggcaccgggctagtggtggctaatttgggagctctgttttcagatgagaagagatttaagtgagcac

SEQ ID NO: 200024 - DNA, 122 bp, Homo sapiens
taaatgcggatttggaaattcttctctctaaggagtgttctttgaggttcttgctttggccgaccatcaatggtgatggtggaagcgtctattatggctacggatcagaagtggatgttaca

SEQ ID NO: 200025 - DNA, 122 bp, Homo sapiens
gtgtgcccgggacttcagcgataagtgtttcggtgttcctgcgtgcggatttgtgctctccggggaggtctgcggcccaggttcgattcctgcgacttgtcctaggcaggcctgtatgtgcg

SEQ ID NO: 200026 - DNA, 122 bp, Homo sapiens
gtaaacatgtccacctgaatacaggtgccgaatgcccacgtaaacatgtccacgtgaatacgggtgccgaatgcccacataaacatgtccacgtgaatacaggtgccgccgaatgcccacat

SEQ ID NO: 200027 - DNA, 122 bp, Homo sapiens
gttcactgacactttgcgagccttggggcaagttggcgatgtcaaaacatgtttttagggcgtgtttgccaacatacaggtcttgggcaggattgcagacctctgcagatggtaccaaagta

SEQ ID NO: 200028 - DNA, 122 bp, Homo sapiens
tggggactcgcgggtgtctgcgccgcccagggaagccgggggtctagggggccgggggtccgtctgcctgcggcgcgcgcggggtgcttgtcccaggctgggtcggggccaggagagacccc

SEQ ID NO: 200029 - DNA, 122 bp, Homo sapiens
ggcccaggggcgccgcatctcgttccctgccgcagcggtctggccgggcgatggtggtttcgcctcagcggttcccagaagcttctcgggtggaagaaggatccagccagcctcccaaactt

SEQ ID NO: 200030 - DNA, 122 bp, Homo sapiens
tcctgagaacagatcaccagtaccagccttggtccccggatgggcttaggggaatgcccacggtgttgtgtgtctgtgtgacatcgagacagttggcaccagaaatctgggaagagatgggg

SEQ ID NO: 200031 - DNA, 122 bp, Homo sapiens
aggtttgggctctggcctcctgctgtcccgggctggagggatgtgtttggctggcatcatcggcaaaatcacgcccggaggcttgggagtggggccccggagctgctccgtcctctgccgct

SEQ ID NO: 200032 - DNA, 122 bp, Homo sapiens
ttgctaagtttctatctgcctcccgggtagactccactaggcagtatttcaagaagttaacgcacttccaatccccatctaacctatattctttgccgcaagccaaatacccttagttcttt

SEQ ID NO: 200033 - DNA, 122 bp, Homo sapiens
tctgtgatgagttcgcttttattaatgacgaatataacacagatggcctgttttcagtaccgctaccgcccggtggtgtgcgggcgccacgcctgaggcgggactttccagggtacgtgaat

SEQ ID NO: 200034 - DNA, 122 bp, Homo sapiens
atccatccttgtttcctcagcagaagtggtgtttctgttaaagccagttattttcttccccgaaaggtcacctgaaaagtgtatttgaagggccagatcataagcctgacatgccaacacaa

SEQ ID NO: 200035 - DNA, 122 bp, Homo sapiens
gcctggaccgggcgctgcccctgcccctcccttgctgcctctagggagccccctcaccatcgcctcggcctcacggctccacgctcactcactctgaaccgcattgtagggtgctggtttga

SEQ ID NO: 200036 - DNA, 122 bp, Homo sapiens
ttgagttaccagaaatggtgcagactgctctcctctttcctaaggggaggtatctgtcctcggcaatggatatggttaattttaaataacagttaaatataatctgtaatagcaggattatg

SEQ ID NO: 200037 - DNA, 122 bp, Homo sapiens
tggccggacccggcgagctggcccaacagtggggccaggggtcccgggcgcgggggggatcggagggagcgaggccgctgccggacggggcggggcgccgggaggggcggggccgcggccgg

SEQ ID NO: 200038 - DNA, 122 bp, Homo sapiens
tcctctcccaccaattggggtcctgaattagggtgcgagcagccaggcgccatcccggggcgggttgtggggtcctcggtatggggaggttgggaaacagagaggacactggggagaggaaa

SEQ ID NO: 200039 - DNA, 122 bp, Homo sapiens
tcttgggtctaccactatcatgctcctacctcctggaaataactcacagtgatctgaatacggtcacctaaaaactacatctaaagacttaactatgcatgccattgaagagagaattccat

SEQ ID NO: 200040 - DNA, 122 bp, Homo sapiens
acccttgctctaactttcgcaaaacgcaattactcctgcaaggcataaaaccgcagaggtcgcgcaaaccagggcctaatccagtctaacttcaaccccattacgatagccctattcgcgga

SEQ ID NO: 200041 - DNA, 122 bp, Homo sapiens
tttccagagacaaaacaggaataatagacatcattaaatatacatagggccccaggcggtcggcgtggtgggctgggcctcccttccccataacactgagctgctctgctgggccaaccgtg

SEQ ID NO: 200042 - DNA, 122 bp, Homo sapiens
cggctgctggctacgggaacgctgggtcctcgatgccatggtcggggttgcagctgaaggcgatggtgatggcgtaacgggtgccccagtggaccttctccacgcggtgtaggttctcggac

SEQ ID NO: 200043 - DNA, 122 bp, Homo sapiens
tgtggcccaagggtcctggtccatttcccagcctgggcaaaattcctctgcccagagagccgctagaaactgacaatttgtacatctaaatacagcagcaatgaaccttaggctttcagtca

SEQ ID NO: 200044 - DNA, 122 bp, Homo sapiens
atatttattaatcatttcttctgcactagatactgtaaaccacccacaagaaccgtagggcgccgcacgcaccttggagggggcccttctgccggccacccgcctcagagggtttcaggcca

SEQ ID NO: 200045 - DNA, 122 bp, Homo sapiens
tcgggccccgcggggcccgtccgctcctccagccgctgcctcccgggcggcgctcgccggcgcggcggcaaagactctatttttgctggatttaaaacattgtttttatgggtaaaatgtaa

SEQ ID NO: 200046 - DNA, 122 bp, Homo sapiens
acaagggatcaaagggtgcagaggccacccccacaccctgcccacctcccagggatgagccgcccagggcacctaaggatcatactcctggaattccaatcattcctaggagctggggtggc

SEQ ID NO: 200047 - DNA, 122 bp, Homo sapiens
acagctccccacttacccacaaggatgcattccaggaaccccccgccggatggctgaaaccgtcagtagagacggggtttcaccatattggccaggctggtcttgaactcctgacctcgcga

SEQ ID NO: 200048 - DNA, 122 bp, Homo sapiens
tcatacaactcctctccaccccttcatttccatgaagttccatctttaaggtagactgaccgggatgatctgtccggaggctgcgacatcactagccttatcttttaatgttgttaattcta

SEQ ID NO: 200049 - DNA, 122 bp, Homo sapiens
ggagtgcgtccaagtggacagtgccgtacagtaatgtctacggggagttccaggagagctcggctactcctgcgcaggataacctctcccccaccacccgagtcccgtgctcgcgggcagga

SEQ ID NO: 200050 - DNA, 122 bp, Homo sapiens
gctagcagataaaagcagagcaggtgaggataaacaagtgaaaatgcaaaggaaagttgacgcacataagggaagacaagtgagtcaccactgaggatggcaaaggggacaggcgaaaggct

SEQ ID NO: 200051 - DNA, 122 bp, Homo sapiens
cttggaatcctggtggcggtggcgtcagccagcaccactctgacgcagtgtccactaggccgccccacgagaaggaggcaggcgaccccatccccagggcagaaggcacccccatccgtggc

SEQ ID NO: 200052 - DNA, 122 bp, Homo sapiens
tagtcggaatgctacttttcacggtgcaaagctatgattggctgcgcgcggcagggctcgcgcagttaccaggcagcgggctagactgaggctagttaccacgtcagtgagctgacagggaa

SEQ ID NO: 200053 - DNA, 122 bp, Homo sapiens
ggagtggctcgccgcgggaggtaggaagaatgttgggctttagctcggctcaaccggtgccgctgcgggtctcccacaaagctccaggctctaagggttccagcctcgacgtctgcctgaga

SEQ ID NO: 200054 - DNA, 122 bp, Homo sapiens
gagaaaggaagagaacagcagagaacaagtacctgattgtttctcactacttccccgctgcgcagacgccagagagagagagagacagtcagagcctctcctcaggtgaaaggcagggggat

SEQ ID NO: 200055 - DNA, 122 bp, Homo sapiens
cacccctcccctctccttataacttcaccatattgtttctatcaccagcagagcccgcagcgctctgagattgggcctccctggcccctggtgccctagagagaaggaaaagaatgaagagg

SEQ ID NO: 200056 - DNA, 122 bp, Homo sapiens
actaaggttgcctaaagggcagatctgccctctccatgtcttcgtcctggcaaacagggtcgtcttaaaattatgcgctaattctgtatgggagcactcaaaaggcattacttagagattga

SEQ ID NO: 200057 - DNA, 122 bp, Homo sapiens
agaaggtcgggctgcgctgtgggctgcggggagccggaggcctcttgattggctctttgacgctttcggaccaattgtgttgctgcataggcgtggttttcacaggtcgagtgctgggggat

SEQ ID NO: 200058 - DNA, 122 bp, Homo sapiens
aggtcctctccggcctgaagctgcgaagagaggcagcagccatgagaaggtggctaaccccgtcgggggccatggctgcctaggggaggccggcagagcctgcctgggggtcggtaaggacg

SEQ ID NO: 200059 - DNA, 122 bp, Homo sapiens
tgcactgccagggcctgtgagctgccacaccaggacactgcctggcttgcttggggctggcgggatcccctgagctgagatctggtctccctttgggaagggtgggagaatggtgagagaag

SEQ ID NO: 200060 - DNA, 122 bp, Homo sapiens
ccctccagatggaggctcacgaagtagggtgggcgggggactccatatcccagcgtgccccgcggcgggccctaccggccgcgactccgggcttggccccggccctagctcgtcggctgtgt

SEQ ID NO: 200061 - DNA, 122 bp, Homo sapiens
ccacgtggaaagaaacacgcccactgcctacaggccacgcccttcctcccttcgcgcatgcgccccacccgtcctgaggacctccgaacctgcagggggcgatgaaagtaggcttgcgctcc

SEQ ID NO: 200062 - DNA, 122 bp, Homo sapiens
caccctcctctgagacgccatgttcaactcgatgaccccaccaccaatcagtagctatggcgagccctgctgtctccggcccctccccagtcagggggcccccagtgtggggacagaaggtc

SEQ ID NO: 200063 - DNA, 122 bp, Homo sapiens
atcagcgtgtatacgttcatcttccaccttcccttatttgtcacgactttacaacgccaccgagttgatgtgtcaatctgcttctgaaatgctgctcgctgaggctttgtttgctgctgatc

SEQ ID NO: 200064 - DNA, 122 bp, Homo sapiens
caaaaaaaaaaagaaaagaaaaaagatagaaacatttctttggtacacagctatgagtaacgagacataatagctactatagagctatatccaaccctcactgccagaacccagtaacctac

SEQ ID NO: 200065 - DNA, 122 bp, Homo sapiens
agctccttgtcccatggagggtcaaggaccaccaactcaggagaccccgccatttttcgtcggaactgtgggcggggcactctgggagcggaaaagcgggttcacactggtgtaaccagcat

SEQ ID NO: 200066 - DNA, 122 bp, Homo sapiens
aaggacagcagcatttctgctccgagctgccccactcccaccccatgagaagaacctgcccgggctccaggctccagatgagacacatggaatagcccaggattctgccataagaccctgag

SEQ ID NO: 200067 - DNA, 122 bp, Homo sapiens
gagggtcccacaatgtggcccgggctgtgatttacctgggtgagacagcttgagccccatcgtggattccaagacatccctgctgagagagccaaggtaagcagtcagcatccctccaccaa

SEQ ID NO: 200068 - DNA, 122 bp, Homo sapiens
tcaccttcagttctgtgaacccctggctggccgcttccagccacgctagccaccctccagcgtccaaatgaggcagccacagctcccctgccaaggtcttggtctccagtccaccccaaccg

SEQ ID NO: 200069 - DNA, 122 bp, Homo sapiens
gccttcaagagggtctctctgtcctttgctgtggtcagatcaggctctgcacttatcagccggtcctttgtggcaacgcagccctgttctgtttttgcttttcctcttcttgaccaaagcat

SEQ ID NO: 200070 - DNA, 122 bp, Homo sapiens
cccctcgtgggctgggcccttgattctgctgccccacgcctcctacctcccaccccgcaccgcaatccaccacgcacttacaagggtagtggccgcgctccgaatccagccaggcggcgcag

SEQ ID NO: 200071 - DNA, 122 bp, Homo sapiens
ctccggccggcctccgcctccctccccgcgcctttaatactcgcccgctgcggcggtcgccgagtccgcggacatgtccttcccgcagctgggctacccgcagtacctgagcgccgcggggc

SEQ ID NO: 200072 - DNA, 122 bp, Homo sapiens
gcgggtcaccggcccgggtgagcttacctgcagggctgcggccaggaggaaatgcgccaccgcccaggccagggcccctgggtgcgggaggggcagaacgtgggacctggagcggggaccga

SEQ ID NO: 200073 - DNA, 122 bp, Homo sapiens
cggctgggctgccctctggcggctttatccgggtgccatccagagtcaaaccctcgaaatcgcttttcgtactgagttggtctgcagaaagaagaacagatttaggaggaaggcggtcatag

SEQ ID NO: 200074 - DNA, 122 bp, Homo sapiens
atgtgttgtcatgacttgttcctagggaatgaagcatggactgtgtgactctaccaggagcgaccccttggaagcttgtatttggtatcctctggacttcattcatgtactttttccctttc

SEQ ID NO: 200075 - DNA, 122 bp, Homo sapiens
acgtagtaggtactcaaaattttttgcttgacaggctagaaaaggtgaataaacacaaagcgggagcgaaaagtctacttctaggtcaggcactctttggacttcacgcaacgtgtgagcgc

SEQ ID NO: 200076 - DNA, 122 bp, Homo sapiens
ctacgctgcggtgagatgtagcagtaatcagctcccagcgacgtgtgtagctggggctgccgctcgcaataatcactattgatttaaagctttacttagccttgatctgtaccctcgtagtc

SEQ ID NO: 200077 - DNA, 122 bp, Homo sapiens
cacgggggtcagccaggtccgggcggctccctgaatcctggggacccaaaatgacaccctcgacctgagagctcaggccctaccagctcgggacgaccggattttctagctggaaggagcca

SEQ ID NO: 200078 - DNA, 122 bp, Homo sapiens
tctgtgttgtgctagaaaagacactcccacccttaccaggtctcacaggtggctgaacctcgttttgatgaactctgtccaagaatatcttcaattgttcagcatctgtggaggataatcct

SEQ ID NO: 200079 - DNA, 122 bp, Homo sapiens
ggctttcaggtagctacagaagcatgtggtgtgtctcagtgggtttgtatctgggagcagcgaaggaatgtaaatatcagtgatgttaccaccaataaaactctatgccataaaatacctcc

SEQ ID NO: 200080 - DNA, 122 bp, Homo sapiens
gctttcccagggacccctccaggaatgaggagcatggcctgaaggcctggcctgtaggagcgacgtgaggactggggtcggggtgctctcttccaagcagtgaagccagctcctggggcacc

SEQ ID NO: 200081 - DNA, 122 bp, Homo sapiens
gcggtcatgttgaaacctcagaaccacaagaggaaaagcaaaaaccaacaaggcattccacgggaaatggacagagcagctctgaataagaaacctctgaggagtaggaacgccgtccacag

SEQ ID NO: 200082 - DNA, 122 bp, Homo sapiens
tctgttctatttatctgcaggctactccgaggccctgtctgtggacagttgcttaacagacgctttagatgactacagaaaaaaacgtgttaggaaaactttcattctcacatcttatcatt

SEQ ID NO: 200083 - DNA, 122 bp, Homo sapiens
gcagcgacaactgtacaagggggagtacgatatattcaagtatgcaccgatatttgagagcgactttatccagatcaccaaaaggggagaagtgattgatgtgcacaaccgtgtccgtatgg

SEQ ID NO: 200084 - DNA, 122 bp, Homo sapiens
ggtgagggatataatctcgtggtgtgccgttctttaagccggtctgaaaagcgcaatattcgggtgggagtgacccgattttccaggtgcgtccgtcactcctttctttgacttggaaaggg

SEQ ID NO: 200085 - DNA, 122 bp, Homo sapiens
gtgtgctccttgggtggggacgagcatggaaggcgcgtgggactgaagccttgaagaccccgcaggcgcctctcctggacagacctcgtgcaggcgcctctcctggaccgacctcgtgcagg

SEQ ID NO: 200086 - DNA, 122 bp, Homo sapiens
ggggcgggagtgtagggtctggcttgggtatcactttaggtgtgaaggacgggggttgagcgagtcagagcctagagtctggtttgtggtctgagtgtcttgcctggtacgaagagtttcta

SEQ ID NO: 200087 - DNA, 122 bp, Homo sapiens
cccagaaccaccagcacgttcaggatgggaccattgcccaagttcagggctgccacctgccgggagaaacaaggtggtcacagagaggctagcagaagatataggaacccgaggaaggggtg

SEQ ID NO: 200088 - DNA, 122 bp, Homo sapiens
aagacgcggctgcagactgcacaggggaacttcttggtgccggtgtgggtctggaggtggcgctgcagctcgtccgagcgcgtgaagcgcttgccgcagaagagccagttgcacacgaaggg

SEQ ID NO: 200089 - DNA, 122 bp, Homo sapiens
ccgtctcgccggctccgggctcctcacctcacagcctggagctccctcccggcgtccggccgaaaaccctcctgtggcggcggaagtccagggcagccgtcctcatcctcccagcccgcccg

SEQ ID NO: 200090 - DNA, 122 bp, Homo sapiens
gcttccacctccgtcatggcctgggccaggctctgctgacactgggcgagcagctcccggcgctggggctccatggtggcgggccgcgccgccccgccccgccggacgcctcccgggccccc

SEQ ID NO: 200091 - DNA, 122 bp, Homo sapiens
ctgcagcggctgcgggaggtgcgggcggctgcccaggccaggaacatggagagcttcctccgcatgcacggcctttccctggacggctgcaccgcccagcgcacaggcatgaagtatcggta

SEQ ID NO: 200092 - DNA, 122 bp, Homo sapiens
cccctctacaggcccctctcccctactccgcccccgggcaggggtaggggagggtctattcggcagggggtggcctagctgtccgtactccccaaacgcaaccttccagtcccaaacccagg

SEQ ID NO: 200093 - DNA, 122 bp, Homo sapiens
cagggcctctcatatcactggaggacttggggtggagggtgctgggtgctcagcctctgccggtccaactggcccaaccacttctctctggcactgcccactgtccctgctcacagctctgc

SEQ ID NO: 200094 - DNA, 122 bp, Homo sapiens
acctgccttgtctcctcaggggacccgtgatgacactttcacaaaaggcactgtgtgaagcgcggaagggctgccaggacgagcccgggtggactgagggcccaggaaggagcaggtagggg

SEQ ID NO: 200095 - DNA, 122 bp, Homo sapiens
ccgagccgcgtgaaacgcaaggccctcgtgtgtgcgcagctgacaccctaggcggggctgcgtcgggggcggggacaggcgcgtcccagcccacgcagccggaacgcctgagcgctgggcgc

SEQ ID NO: 200096 - DNA, 122 bp, Homo sapiens
ggagaggcgttgagcagcccgtgtccacagactctggagtgggacttatgaagccaaacccgccttccggttcgctgctcagcccggcggcttccacatctgaactgcttccgcgccctgca

SEQ ID NO: 200097 - DNA, 122 bp, Homo sapiens
ttaacctgctttctaatacatttttgctcacttataccagagtacatcaagctaaccgcgcggttcggggtccaagtcttcaaagagcccacttgtattcctgctgctctcctttttcctaa

SEQ ID NO: 200098 - DNA, 122 bp, Homo sapiens
gacagacgaaggtttaaacagttgtcaaattctattcaagcacttcttccccgtcacaaacgcagacggggaaatgcagatctagcccgctgctagcaaggaggcgaatgcgataccctgaa

SEQ ID NO: 200099 - DNA, 122 bp, Homo sapiens
gcaaaagtggcttgcaatgtcaaattagcacagacctgggctataagcacactcttcacgcgtgtactgtgtccaggaacaatttctcaaagcggccaaggggatgctgcaaagccagtgac

SEQ ID NO: 200100 - DNA, 122 bp, Homo sapiens
ggatggtggcatctgtgtcctgggctccggggccacctcactgtgaggaggaggtgtgggcgttgtgggaggtctcatctcggggccatgctgatctgggctctgagagctggtgtccgctg

SEQ ID NO: 200101 - DNA, 122 bp, Homo sapiens
tgaggcggggccggggtgcgcgagggggcggctactggcctgggtgaagcggcggtgcctcggtgaccagctggggggctcgaagcgccccgggggtcggagtccgggcccgccccactccg

SEQ ID NO: 200102 - DNA, 122 bp, Homo sapiens
gaggatctgaatttttagcaagatccttgtggacgcttcttttgcatagactttgagagccgctgcactaagaccggaggctgtgtcttgctgctgggtctgggtggagcacaggaagagca

SEQ ID NO: 200103 - DNA, 122 bp, Homo sapiens
atgagaacagctagcctttgcctggagaggacggacgtctgccacgaggcagagcctgtccgcacacttgccgagcactcatacgctgtttcttccgtagctgaagcttacagaagtcagcc

SEQ ID NO: 200104 - DNA, 122 bp, Homo sapiens
cggggccccggggcctgtgtgctctgccagagacaggggatgcatttgaggaaacgcctccgactacatgcctcccacacaagcggtctgtgcagatcgcatctgacgcctacccggaggac

SEQ ID NO: 200105 - DNA, 122 bp, Homo sapiens
tcggggcacgtgtcgttcctcgggacctctgcaggggagggaaggcgagtttggaggctgcgttttaactgcgggctcccttccagcctcggaggctttgctctgtgccccctcccgggatc

SEQ ID NO: 200106 - DNA, 122 bp, Homo sapiens
ctgcaatgagctctagaggctgtgggtggcagcgtcctcctcccctgcagttcttgcaaacggcagcagcagcctctggctctcactccctccgctttttctggggcttttcctggcagggg

SEQ ID NO: 200107 - DNA, 122 bp, Homo sapiens
gatgcctcttgaggggtcactttgaaccatggccctttgcacctcaccaaaaaaggtttccgctgccaggggcagaggacgccacgggcaaccacccgcgtccgtgctgggcgcagaggacg

SEQ ID NO: 200108 - DNA, 122 bp, Homo sapiens
ctgagttcctgcctccctatatattcaacattagaattttgccaggttatcttttagggtcgttcaactctaacatatatatgagtctgtgacactgaactcagacacttcagaacaggaac

SEQ ID NO: 200109 - DNA, 122 bp, Homo sapiens
agtggacagtcccctgggttcccctctgtcccttcatagcctcatccctttgcttgacatcgtcgaagagaagcatgcatgatgtcagcagcgggacagttggaacttcttgggagacaagc

SEQ ID NO: 200110 - DNA, 122 bp, Homo sapiens
ggctccgctggtcgcacgacgcgcgctccttccctcaccccactgcccgctccggcgtggcgctcccctctgaacccccaggagactctggagcccctcggtgagaggccgctagtcttcct

SEQ ID NO: 200111 - DNA, 122 bp, Homo sapiens
gcaggacactgctgcttctgctgcttctcatgcaactctgctgtccccagagccaatggtcgtcctgcttcccacgcactcagccttctaggtgctcatggctcttggcagccatccctctt

SEQ ID NO: 200112 - DNA, 122 bp, Homo sapiens
ctccgtgggtccgagccaggcgaggggttttgggggacgtctgtcttccggcggtggcagcgacgcgggcgcccggctgctgaggagaggagtcgtggaggagccctgagccgcccgccgtc

SEQ ID NO: 200113 - DNA, 122 bp, Homo sapiens
acgtcctcataaccttagacctgaaagggcccataaatatactatgttcacgatcagacacgcactgcattcggcagagctccagtgagcaaggcacgaccctcagatctcagtctagtgaa

SEQ ID NO: 200114 - DNA, 122 bp, Homo sapiens
ctgtggttactgtatagctacttattatccaaacaaccctgaaacaaaagacctgaaattcgctgttttggatgctgcttcctgctgccaggaggaggtgtgtttaacttacaagagactga

SEQ ID NO: 200115 - DNA, 122 bp, Homo sapiens
caccaggtcgggcgacgtgaggctcagggaattgtggaattaagctaattaagtggaagccgtcctcctggggctgtgtgttcctgcggctctgaacgcatcgtcttacacacaaaagcagc

SEQ ID NO: 200116 - DNA, 122 bp, Homo sapiens
gtcaatatggaaaggggaggctgacgcaggctgcccaagagccagcctttagcttagtgacggtgatgcggatccgccatcttgaagcgccgcccggcagaggactctcaagacgccacagc

SEQ ID NO: 200117 - DNA, 122 bp, Homo sapiens
agccctcctcctccactctctccttcctctggagtcccttcaaagtcatctggacctgcccggtcctccccaccactgcagcctggctccgctctggatccggtcaccagtgctgcaatgtc

SEQ ID NO: 200118 - DNA, 122 bp, Homo sapiens
tggaacacttttctcagcactcactctccagtgggcagggggccactgatggagaccccacgtggagagaaatcaaatgggccagtttcccttctttctgctccctcttaggtacaccaaga

SEQ ID NO: 200119 - DNA, 122 bp, Homo sapiens
ctgaaagcgccgggcccagccgctgcacgtgggtgccgcgggggcggggcctccggccgccgctcgcccattcgcacatggcttctcaaggatcgctgttgtcatcctcggggcggggtcgg

SEQ ID NO: 200120 - DNA, 122 bp, Homo sapiens
catccgaggataacctttcccttttctttccaagaccaaataagggggctcttccctctgcgcgccaggcccgcggcagttaggccaaggggcgtggaaaggaggatccgggaacgaggctg

SEQ ID NO: 200121 - DNA, 122 bp, Homo sapiens
cccagacgcggccgcctggcgtcggtgggtgtaggagatgtggggacaactttcatacaacgtcagtgcgcacagaagacctggccaagaggggcggcccatccgctgcttgtccaggtgat

SEQ ID NO: 200122 - DNA, 122 bp, Homo sapiens
tctgggtcataaattctcccattcctcatttactctgcagcaccgggtggctgcgaactccgctcttctgcttgggtttccgcatcaccagcagcttctttccttcccaggtgtcgccgcct

SEQ ID NO: 200123 - DNA, 122 bp, Homo sapiens
ctataccggattccattttcagttcaggcccaaatccccgggggttggtcgaggctgaggcggggctccgtcgaggctgaggcggggctcagcggcctgggctgaccgcagtcgctgggaat

SEQ ID NO: 200124 - DNA, 122 bp, Homo sapiens
ctctttcctagtcaaagaaaggggtgacagacggcactggaaaatcgggtcactcccacccgattactgcgcttttccaacgggcttaaaaaacagcgcaccaggagattatatcccgcaca

SEQ ID NO: 200125 - DNA, 122 bp, Homo sapiens
aaagagattcacgctaatcacactatagcacggagtgttaaagagaggcggataccgggccgtgaggacctcaggaagccctcagccctccccggattatccacgtgcttctcacagcggtc

SEQ ID NO: 200126 - DNA, 122 bp, Homo sapiens
ggaaatcaaaatgttgccttcccactcggcacgcctttgggataaatcgaagtttccaaccgttggatttccctcccgggaggctccccttgctctgtaagcaatgaatgcgggccccgggg

SEQ ID NO: 200127 - DNA, 122 bp, Homo sapiens
gagccagggagtgggagctgatgacagaagagtgtatctgagatgggggtggagctggggcgcagaactctcagggtgagcaggacagggtaggttcctgcttgcgcctgagggaccttgct

SEQ ID NO: 200128 - DNA, 122 bp, Homo sapiens
gggtgcggcacgggagaggaggcggcagtgcgtccaccgcagggcggctatgtgggctgccgcggcccgtgcaactattcctccaacctactaattccgaccttcacgccacctccgttagg

SEQ ID NO: 200129 - DNA, 122 bp, Homo sapiens
tcgtcgccgtcggtgctggagatcctggatacggcgggcaccgagcagttcgcgtccatgcgggacctgtacatcaagaacggccagggcttcatcctggtctacagcctcgtcaaccagca

SEQ ID NO: 200130 - DNA, 122 bp, Homo sapiens
tcatcttcccttctctaaggactagttggaaaagtgatggctgggatgggcgaactcggccgctggcctgcggtgcatgctccggtttgccgggagcagcggtgctgggcgctgaggacagg

SEQ ID NO: 200131 - DNA, 122 bp, Homo sapiens
tcttgtctgccagagaaccgagcgtggacagttgtgcggcatgacaggctgtggacaactcgagtgacaggttccagcatggagcggccattcctgggggctatccagtactggaatgcatc

SEQ ID NO: 200132 - DNA, 122 bp, Homo sapiens
caaatttgaaaagaattgcataaaacactggagaaatccaagaggggaagtccacaagggcggtggctccctacaaggtcacagagcaagctggtgtcagagcctggacctacagcgctgtt

SEQ ID NO: 200133 - DNA, 122 bp, Homo sapiens
tccaggcgaaaggagccgcctcctgggagctcgaggcccggggtgttagcttctagaagccgggggtgctctagacccctgattctcaaagtggggtccctggagcacagcagccccgggga

SEQ ID NO: 200134 - DNA, 122 bp, Homo sapiens
gacccctgcggtccgccatgccactcccggctcctagagcgccgctcagcacaccgtgagcgcccaataactgttgggcttcaatgacgccgcggaggcggccccgtccccgcgctcccgcc

SEQ ID NO: 200135 - DNA, 122 bp, Homo sapiens
caagcaatactctttgcttttctccttgtttcaattataccttaaaaaagctgacgctggcgacgcctgtaatcccagcactttgagaggccgaggtgggcggatcacgaggtcaggagatt

SEQ ID NO: 200136 - DNA, 122 bp, Homo sapiens
agcggggctggcgatactggggacactgtccaatccgggcagggggcgaggccgggggaccgggcgggcctggggagcaggcacgtgtggagggcggacccgccgggggtcgaggcctgcct

SEQ ID NO: 200137 - DNA, 122 bp, Homo sapiens
acttaatacaattcttgaaattacagtgttagtgccattaattcagctttactattactacgagaaaaagagaggttgcaactatgcattagtgaattgtagaaatagatactttgagtgtt

SEQ ID NO: 200138 - DNA, 122 bp, Homo sapiens
gtgccactgtctgtctctctcttgcctcatcgcctgtcctcgcagcccagtccttggggccggtctccataggccccaatgcccaggacagcccgtctgcagtgcctcatgctcctgagcca

SEQ ID NO: 200139 - DNA, 122 bp, Homo sapiens
gaagagctcatcctggtgctacacttctctcggaaccctctcctggtcctcctggcaggccgggtgcccaccttttgtgccctgctgggttcttgcagaccccactgctgcccccgggcatg

SEQ ID NO: 200140 - DNA, 122 bp, Homo sapiens
gcggtagggtacccgcacttggatggtggtctgcccgggcaggttgggcggcccaggcaccgcgccgttgagtgccgtgttcttattccgggaggcgcggatcatggagaagtgctcggcag

SEQ ID NO: 200141 - DNA, 122 bp, Homo sapiens
tgtgtgtgtgtgtgtgtgtgtttccatctctgcgtccccagcgcctggcccagtgcctgacgcatagtaggtgcacagtgactgttggttgactgcatcgacagactaggacacaggtagcc

SEQ ID NO: 200142 - DNA, 122 bp, Homo sapiens
cgaggcgcgcgagggaggggtcggcgcgaggacacgcaggcctggcgcgcagggctggggcgcccgcgatgggcgggggcgcgcggcgcgccccgcctctcgccccgaggctggattggggg

SEQ ID NO: 200143 - DNA, 122 bp, Homo sapiens
gctcacaactctaagggggtctgcgtgagaggtcatgatcgattgagcaagcagggggtacgtgactggggtctgcgtgcaccgggtaatcagaacggaacagaacaggacagggattttca

SEQ ID NO: 200144 - DNA, 122 bp, Homo sapiens
cctggggcgcgttgtattgcacaggggccagaaggggcctatggggattccgctccaccccgggccgcctgcagattcctcagaaagggcaccctcaaaaatcgaggacgcttctccccttc

SEQ ID NO: 200145 - DNA, 122 bp, Homo sapiens
aagtgacagcacccgcagagctgcccgagcctctgggaggtcacggggaggaagggaagacggaaacaccgtgacggccacttctgcctaaatcgttaggaactatttcagagtccctgcaa

SEQ ID NO: 200146 - DNA, 122 bp, Homo sapiens
aggacttggcacaaagtaggcgctcaataaatggcagagctacgggtgttactattgtaacgggtaaaccactgggcacagagcctggcacacagtaaggactcaaaacatgttaatttgta

SEQ ID NO: 200147 - DNA, 122 bp, Homo sapiens
gccagacctgcagccacagtacacatgcacacaggcataacagccagtccccagcctattcgaattatcctagacaagactgacttgggtctgcttttctggaagaagctgtgtggtggagg

SEQ ID NO: 200148 - DNA, 122 bp, Homo sapiens
gctagagggcagctgtcttgcttctagttcctggttcgggtacctcctgagacctagtttcgtgtgattgaccattcattcagtgactcaagatactgactgaggaccagcactgctcccag

SEQ ID NO: 200149 - DNA, 122 bp, Homo sapiens
caactctgccctggaaactcgatccctgtggcccctccgtacgtcctctcttccccccctcgccccccgccggctccaccttgggtcaccacagaaccaagggcgcctcagtgactccggtc

SEQ ID NO: 200150 - DNA, 122 bp, Homo sapiens
gtccttgtctgcgttccgtgtccaggcaggtgcaggcgccgcggggccggatcctccgcgcggccgagtccatctcctgggaaatggggcggacagtgtttccttgactgactattgtgagc

SEQ ID NO: 200151 - DNA, 122 bp, Homo sapiens
tccacttcgtcagggcctcagctctttcctggtgattcctgtgggctgatgtacccatcacggggcacagagtgggacgcctgccatgccgtcctccctgcaaaccacagccaacgtccagg

SEQ ID NO: 200152 - DNA, 122 bp, Homo sapiens
gcgacggcccagcggctgcctgggattggtgggggccggcgtgagtgacagacaggggggcgagctgcgcgaccagcggtttgtttttcggagcgttcctgaggtggagaacggtggccgga

SEQ ID NO: 200153 - DNA, 122 bp, Homo sapiens
tttgaccctcactactgtgtggccgttttgctttttatctacacataaaacagcatttatcgacagcagtctacatctctttcagggaaataacaaaagtggctttatcttttactttcaaa

SEQ ID NO: 200154 - DNA, 122 bp, Homo sapiens
acgtactttccagcttctggggaccggctgcctagaataacaggcatttgccccagaggccgtggagtggcctcactttggggtcgtgggcagatcgctggctcccacgcctggacttcggg

SEQ ID NO: 200155 - DNA, 122 bp, Homo sapiens
gtggctctggctgtgggggtggggtgtggggctcaggcttttccttgccatctccaggcccggctggacattttgaagattcattctcggaagatgaacctgacccgggggatcaacctgag

SEQ ID NO: 200156 - DNA, 122 bp, Homo sapiens
cgcagaccgacgcgcaagaggcgaccgcggctgcctcggctcccagctctgttaactgcgcggagtactttcgactttggagataggagggcgatcgcctcccccacccaccgcctccgccc

SEQ ID NO: 200157 - DNA, 122 bp, Homo sapiens
tggtcatgattgctatccttcacttctaacaactgcacacacctacaaactttctgattgcgtcgctggcctgtgctgacttcttggtgggagtcactgtgatgcccttcagcacagtgagg

SEQ ID NO: 200158 - DNA, 122 bp, Homo sapiens
gtatgtctcaaaagcacatagatccccagttatttttctgtattgtggttctcatatacacgtacctccatagctcagtatatgtttctgtactatacacctgttcctgagggagtgatagg

SEQ ID NO: 200159 - DNA, 122 bp, Homo sapiens
aacgaggctttaattcaaggtcaaagagtcgagaagttggtgagaaaacccgtcgcccctcggggccctgctggacacataaacggccaaaggatggctcttttcatctcctcttttaaaca

SEQ ID NO: 200160 - DNA, 122 bp, Homo sapiens
ggaggcgggtttcgacgaacccagcgcaagagtacgccacggcgcctgcgcatcccctgacgggtactttccattcgccagatgggggaagccagggggaagcaggttactgtttttgcatt

SEQ ID NO: 200161 - DNA, 122 bp, Homo sapiens
ctccttcccgccaatggggtggcgggagctggcccggggacggcggcgtgctgacgttcccgggagcccggggctggccgggcgggagggctggcagcggggcgggcggcggcggcggcctc

SEQ ID NO: 200162 - DNA, 122 bp, Homo sapiens
ttgaaagcccctcttaagtgcaaagcccagcaccaaggatgggtggcaatagaaagacctcgccctgaatggggtgcttctaagccaggtgtgtaggtggatgggtagataaggcagcactt

SEQ ID NO: 200163 - DNA, 122 bp, Homo sapiens
cagacctctgaccggggggcagccagcgtccaggtaccccaacccctgccctgggtccggcgtccccccattagtgagtcttggctctacttatagcatctgacaccagaggggccgaaaat

SEQ ID NO: 200164 - DNA, 122 bp, Homo sapiens
gactgtgattggttgaattggctgccattcccaaaacgagctttggcgcccggtctcattcgttcccagcaggccctgcgcgcggcaacatggcggggtccaggtggaggtcttgaggctat

SEQ ID NO: 200165 - DNA, 122 bp, Homo sapiens
cgtgggcgccaagagggccggctgtgcatccggcgtgggcggcacagaacgacctcgccccgcccgctgggtccccaagcccgccctgcacagccgggcctcggtcacctcggtccccaatt

SEQ ID NO: 200166 - DNA, 122 bp, Homo sapiens
cacgcggagagaaaggcggttccttcacagagcagcctcccctcgtgaagctcccccacccgaactcacttagaacagtccagccccgcccagaaccttcgctcacagcctggcctgcttaa

SEQ ID NO: 200167 - DNA, 122 bp, Homo sapiens
gctgcagcgcagaggagctggactattacctgtatggccagcagcgcatggagatcatcccgctcaaccagcacaccagcgaccccaacaaccgtacgtagccgcagcccgcgcgctctctc

SEQ ID NO: 200168 - DNA, 122 bp, Homo sapiens
gcgctccagcgctgccaccgcggctgctctgggctctctcgggctcacgctgcctcccatcggctacgagcacagagcatcatcatcatcagcctgccagccggccccgccgccgcctcgcg

SEQ ID NO: 200169 - DNA, 122 bp, Homo sapiens
gctgagagtggctaggcggggaggcgaccctgcggtgagacccagcccaggtagtagggacggaggcgtcaggggcacggagaccccagtggagacaccccccacccccgccccgccccgag

SEQ ID NO: 200170 - DNA, 122 bp, Homo sapiens
gctggccctgggactgaggacaagcaaacaagctcgaggggcccgcggccagggtggaggcgagacgcaggccgtccccgagttgcagcgagcagggcccggtgtcgcggagcgctggggac

SEQ ID NO: 200171 - DNA, 122 bp, Homo sapiens
atgggaaaaatatcgctgaattccttttctcagcatggaacgtccctgagaaagagaatgcgcacctaggggtagatctctgaactgccccccgcggggcgtacctgtctcttatggttgag

SEQ ID NO: 200172 - DNA, 122 bp, Homo sapiens
ggggctcccccacctcctggggttgcccgggctgaaggtcagggaaggggacagagggggcggggagactcctggcatttggggcacaaagtaaacaacatgaatttaaccacaccaacgac

SEQ ID NO: 200173 - DNA, 122 bp, Homo sapiens
cccccggccccgtagtgtccgcctcaggcgcggcccagagagcccggggcctccggctcccgcttggccccgcggacacgccccccaagcaaccattggtggagacgccaagttagacccac

SEQ ID NO: 200174 - DNA, 122 bp, Homo sapiens
tcgaaagggggtgtgtgcgcatgtgtgcacgtaccagggtaagagaggaagggtgtccgccggggttctggttttctatgtatgtcagtctgtgtgttgccaagtttaatatgtatgagtat

SEQ ID NO: 200175 - DNA, 122 bp, Homo sapiens
accttgtgatccgcccgcctcggcctcccaaagtgctgggattacaggcgtgagccaccgcgcccggctggaggagtatcttagaaaggcctggactgggtcctccccaatccctcaaggga

SEQ ID NO: 200176 - DNA, 122 bp, Homo sapiens
gtccccggggaccaacgacctcctttgccccagcactgccaaggagatgagctcctggatcgcgcgcatcaacttggctgcggccacgcactccgcgccgcccttccccgccgctgtgggct

SEQ ID NO: 200177 - DNA, 122 bp, Homo sapiens
ccccaggagggcccaagaaggccacgagccctcgctcccatccctgccctcaggagcgggcggagggaagctcgcagctttcccaaggaagtgcaggctgcagggaatgaagttcagctcgg

SEQ ID NO: 200178 - DNA, 122 bp, Homo sapiens
ggtctagaatctacacctttcctgcttgcagtatggtattagctagggtccattccatcacgaaagtggcagctcatcattttgggcagtcagaaaaataggcagttgttataatagctaca

SEQ ID NO: 200179 - DNA, 122 bp, Homo sapiens
ccgtcctgctctctggtcctcgcaagggctgagaggtgtaccggcattttggcaaggcaccgggaaccccgtacagccacaccaaaccatacatccgctccaagggccggaagttcgagcgc

SEQ ID NO: 200180 - DNA, 122 bp, Homo sapiens
agtgcacaagcagcaaaacagagagagatactaagatagcagaattaatgaccaccgccccgccaacaaagccaaacacaaacagcagcatgcatccaggactcatggcgctgtgctggcat

SEQ ID NO: 200181 - DNA, 122 bp, Homo sapiens
cccttggcggacacagctgggcttctcagagactcctaaatcctgcctcgcatctcaaatcggcttaacgacgcgaaagagctgggcgacgcgcgcgcactctcgcggaagcttgagtctcg

SEQ ID NO: 200182 - DNA, 122 bp, Homo sapiens
ttattggcacctttttaaataagctctcatgatcaagatggtgatggtagagaagctgcccggaataaactgaatttcatatgttctaaaatgactagcaatggtttaaaaaggaagaagag

SEQ ID NO: 200183 - DNA, 122 bp, Homo sapiens
agggtgaatccagatcctggggccacaggccaatttttcccaatgggcgagatctgagagcggctcatggtgctggaggcatggacggcgcccccgtgccacatgttgtgggggaagcggga

SEQ ID NO: 200184 - DNA, 122 bp, Homo sapiens
ttttttttttttttttagtacttagccaaggactacttctttgttccgaagagaactgttcgttattgatcttagcgattccctttgctgccctgtagcctccagtgtttgctcatgaccat

SEQ ID NO: 200185 - DNA, 122 bp, Homo sapiens
gaccctttgaggaacccgtaactgacgcaagtgccataaatgctactttgattgattctccgccccctccattcttctcttcctgcaattgctctatcacttcttccctctcaagtcccgcc

SEQ ID NO: 200186 - DNA, 122 bp, Homo sapiens
cttctggctgctcagcagatggggtgactttcagcggttacgggagggcacttggatccccgaggaaatgttccacgccgggatattggatctcacaggcctgctctgtggtgacgtcctga

SEQ ID NO: 200187 - DNA, 122 bp, Homo sapiens
ctcagcctcagtttcctgattttggattaaagtgcgtttgccctggccctgggttcctggcgtgtccctgggccctcgccgtactgccctctgcagcctgccttgtccaggaccggcgggcg

SEQ ID NO: 200188 - DNA, 122 bp, Homo sapiens
tctaggccagcgattggattcacctcttctttcgcgtacttacgggcaaccgaggccatccgaggccctggtcccgaacgaacttgagtagcgagagattcacaataaagaactaagtgtgg

SEQ ID NO: 200189 - DNA, 122 bp, Homo sapiens
tctccctcgcagctccgcggcctgagtgagccccagcggggtggaagtgcgaccgacgaacgggatctctgcccaccacacacgtccagtgggaagaggcctaagacagcatcctcctcagg

SEQ ID NO: 200190 - DNA, 122 bp, Homo sapiens
tattcttttccttatattttactctttctgtagctgtcctttctgttcctttctctccctcgccaaccacatttttggggcaagaactttctatttttttttcctcattccacctagaaaca

SEQ ID NO: 200191 - DNA, 122 bp, Homo sapiens
ggcctctgcctgtgcctatgggcgtgctcttcaacccatgtgctcctgtcaacgtccagccgcccgtgtgttcctctgctgacgtgcttctctgtccagccacctgcgtgtctgcccgctag

SEQ ID NO: 200192 - DNA, 122 bp, Homo sapiens
gtatgatgtccagctatgcaaaatgactgtttgatctgccttttcagtgtatttgtgtggcgatgtctgtaaaatgccagaagcctcttatgttattgctgctgctgctaccagccagcaac

SEQ ID NO: 200193 - DNA, 122 bp, Homo sapiens
tcctggtggagccgacttgacccagccagtttcctgcgaagtcccgcatgcgcacttccccgggggcagcttcccagcaagttctgcgtgagtcctaggtggctttgccatgagttcagcgc

SEQ ID NO: 200194 - DNA, 122 bp, Homo sapiens
gcccgacctggacgatgtgaaggaggccgtgacctctgggaggatgcatgtttttaagaacgactctcccggcctaacgcaaggaccttcgccctgttttcagcccaattgctgttcgtttt

SEQ ID NO: 200195 - DNA, 122 bp, Homo sapiens
gcacccgccaccaggcctggctaatttttttgcatttttagtacagtcgggatttcaccacgttggctgggttttagactagggtttcttcacctcagcagtactgtcattttggagggcaa

SEQ ID NO: 200196 - DNA, 122 bp, Homo sapiens
ccgcagtgccttgcatatattatatcctcaatgagtacttgtcaattgattttgtacatgcgtgtgacagtataaatatattatgaaaaatgaggaggccaggcaataaaagagtcaggatt

SEQ ID NO: 200197 - DNA, 122 bp, Homo sapiens
tctgtcttctaaaagaaattcctcagtaggaaaaagggcaagaaggaagatctgcataaacgaagacctccaagctgcaggtcactagaaaagtgattgcaaagtttccaagaaagtcctag

SEQ ID NO: 200198 - DNA, 122 bp, Homo sapiens
gagagagagggctggcctcagagggggagagagagggctggcctcagagggagacagagacgggcctcaggagcatctacggcaccaggacagctgagccagagtcatgagcagggaatggc

SEQ ID NO: 200199 - DNA, 122 bp, Homo sapiens
ccgaccccagccacccttaaagctgccgccccctctgagccccagtcctgctgggccgtccgcccaacccgagggcccctttaagaggaagggccaaggccagggagaaggggaagggcagc

SEQ ID NO: 200200 - DNA, 122 bp, Homo sapiens
actctcccgctccccccaaactagtgcaaaaaagcttgccagggcctgcagaaagcgccgcgactgcgaggctgacacgcgtctttccttccctcccccggggaatgatcccagcatctctc

SEQ ID NO: 200201 - DNA, 122 bp, Homo sapiens
cagctgtcttttatctctttgtcttgcgtctttatttctacgatctcttgtctctgcacacggggagaaaaacacacagaccctgtggggctggtcccttcatgtgactggtgtgctcctgg

SEQ ID NO: 200202 - DNA, 122 bp, Homo sapiens
gtttgaagggaagtgggtgttgacctgcgggcaactgacgctgttgtcagattacacccacgacggtgcgggtctcgggcgttctggagatacgtaggggtgaatttatgtttccgacgatt

SEQ ID NO: 200203 - DNA, 122 bp, Homo sapiens
aattgccagtaaggcaacacattctcagaaaacatctgagcccaagatttctccaagcctcgttaattcattgagcattttaaaaatgccttctgttagccagacactgtgctagattctgg

SEQ ID NO: 200204 - DNA, 122 bp, Homo sapiens
ggaagcccagggtgaagccccagccctgtcaccagccatagcaggtggctttgtggccttcgcttgtcagcctcagctacagtagagtagactcgcctcaggtcccgtcacacactgacact

SEQ ID NO: 200205 - DNA, 122 bp, Homo sapiens
cccggcttggcgcctgtgctgagagcggagaaggacgtcgcgaccggcaggcctggagggcgcattggtgtgcagagtgtagcggctggtctggccctgggaaccccagacccgcgaagctg

SEQ ID NO: 200206 - DNA, 122 bp, Homo sapiens
ctgcccagtcgctttaggggccgctgcagagcttccgctgccatcttcggatcctgtgtccgcaggcgggctccaccagggcagggatggtggtgagagttcctcgtggtcccctcgcgggg

SEQ ID NO: 200207 - DNA, 122 bp, Homo sapiens
ccctacagcatctccccgcattctgcccccaaatgagggcacaggggtgggggagccaggcgtggccccgcccccagcccggggctctgccaaggcttacacagtgggggcagctccacttg

SEQ ID NO: 200208 - DNA, 122 bp, Homo sapiens
catcctgcaagcccaggttagaattagatggctcacagacaggcccacacgccgacatcccgccagcccggcaggtggcaggaacgcagcacctcccgagcaggctgaggaccagacgcccc

SEQ ID NO: 200209 - DNA, 122 bp, Homo sapiens
tcctcctgttcctccgggacacaggaggccacgcccaccacgggggaggcgccggggtcccgtgtgccggggtctctcagtgacacgggagctccttgtccacaagggcaggcacctcagag

SEQ ID NO: 200210 - DNA, 122 bp, Homo sapiens
aggctcgtctttctgaaaaggggaacacggcactaggggacacgccacccatgtggctgacgggagcacaaaattgctgtccacctaagggagcctggtggtgcatgagcactcggcggccg

SEQ ID NO: 200211 - DNA, 122 bp, Homo sapiens
ctcacagcactggagccgttaaaaagtgactcaaccagaaagtgcgtttgaagtgacgcccgccagggccccagagccccagagccccagagccaaacctcaaaaagacgaagtgagagaga

SEQ ID NO: 200212 - DNA, 122 bp, Homo sapiens
cgacatcgcacactgcagccacgacgagacagcaccacacacccatcaggatggggcagacgggacagcagtgtgagcacgctgatgctcgacattgcacgctgcagccacgatgagacagc

SEQ ID NO: 200213 - DNA, 122 bp, Homo sapiens
ctcgccctggcttcctccctctttccctgcagcttacctggccattgtatggaaacccggcgttccaggaagcagggtcacagccaatggcctggacagtcaggactgtactccatagcccg

SEQ ID NO: 200214 - DNA, 122 bp, Homo sapiens
ggtgtcggctcgtggcggacgcttgagggcagggggcgctcgggctgctgcctggtcggccggtcaaccggagacgctctacccgaagcgcagctctcgatgagccgcgccctgcgtcctca

SEQ ID NO: 200215 - DNA, 122 bp, Homo sapiens
tagctttttgaggaagctgcatcatgttttctataatgggtgtagtagtttacattcccacgcaagtatacaagggtttcttttgccccacattctcaccaacccttgccatctttcatcaa

SEQ ID NO: 200216 - DNA, 122 bp, Homo sapiens
gcagcagacacttttagcctgactttcctgcgttcgcttgcgagcgtgtgagcgtgtgcgcgcccaggaggagctgtaacctgctatttatagaccgaagcctcagtacccggggctgagaa

SEQ ID NO: 200217 - DNA, 122 bp, Homo sapiens
gcagacttgacgtccatcttctgccgcatcatgaggtaggcgataactagcgttggggagcggctataaccttcccggcagtggacgagcacccggcctgtaagaaacaggggagacgtggt

SEQ ID NO: 200218 - DNA, 122 bp, Homo sapiens
aaggaaggcagctctgagaggcaacagggggcaagcggaggcagagaaaggggatcaaagcggcgagatcccagacggggcccccgaggagcttctgcagaaaggactctggggctgtcccc

SEQ ID NO: 200219 - DNA, 122 bp, Homo sapiens
cccgattcctctgagaacctgctgccatctgcctggacctcctgtaagatggctcctacgcgaccacgctaccagagaatcagctctacgtgccaccaacattgccaccaactgtccataga

SEQ ID NO: 200220 - DNA, 122 bp, Homo sapiens
cggtcctattaaaaggcacgcaagggtgcgggctgcacgcggtgacacggacccctctaacgtttccaaactgagctccctgcaggtccccgacagcacaggcccctgtcccaggacccctc

SEQ ID NO: 200221 - DNA, 122 bp, Homo sapiens
tgactctgccgagggaataccgcagactaggcaggaaggggttaacgcagctactgcgctcgaatggagcgccaggtgaggcaccacccatcttggccttcaggtgtgtgggtggggaaaga

SEQ ID NO: 200222 - DNA, 122 bp, Homo sapiens
ctacaaggctgccaagttccgcgtgggctccaggaagaccaatagcgtctcacccatatccgaagctgtggaggtgggtatctcagcaatccttaaaaatactcgacttgcatctgtacagg

SEQ ID NO: 200223 - DNA, 122 bp, Homo sapiens
ttgcaccatgccctccagggtatggagaactgaaaggttcactacacaacaacccagacacgccagcttagcccagacacgccaacttgttaattttcattgagaaataacgttgcagcttt

SEQ ID NO: 200224 - DNA, 122 bp, Homo sapiens
cttttgcctatattggccagtattctcacatttagaatgcttgataccataaggtatagtcggccaaatagtttggtagaaatgttacagacagatctgaaacaaatgattcacttaaagtg

SEQ ID NO: 200225 - DNA, 122 bp, Homo sapiens
gcggaggtggcaacaggttcccatttgtcctgttgctggcgctgcgggcgctgtgggccccgagcactgagctctgactttggaaattgagcccctcatggcctcctcccaaatgctttctc

SEQ ID NO: 200226 - DNA, 122 bp, Homo sapiens
atggctgggaatatccgtctccccacgcgggctgtgggcctccgagggcacagacgctgccgtattttccctgctagcgtctagacaaagcctggcataggagggaagtcctgggaagtgtt

SEQ ID NO: 200227 - DNA, 122 bp, Homo sapiens
ttcgtgtacgatttcgttttaatgtacccttttcttccagcatccttgtttgctactcggcgagacagttacaacaaaccgggaagcgatcaggtacgcgagctggtcacgactcacagtcc

SEQ ID NO: 200228 - DNA, 122 bp, Homo sapiens
ccgtgttatctcaaatgattatctgcaacactgagtgagtccttgatctggctcctagaccgctgtctccatccttgtgatcactcccttggtcttgggattcatttcaactagctgctggt

SEQ ID NO: 200229 - DNA, 122 bp, Homo sapiens
agaaatggcagtctgcctgcctcggggacactagtgacagtataaagggcaaaggaaaaccgagtatctggccttcacgtaaatcctggccacattcaccaaccaaagggggacagtgattt

SEQ ID NO: 200230 - DNA, 122 bp, Homo sapiens
ctcctccccctgtagattagagcgttttctgggtcgggaaggggaggacgagatggagctcgtggccttgggttccctcctgcgtcgccccctgtaactgcgtcccccagcacgcactgctg

SEQ ID NO: 200231 - DNA, 122 bp, Homo sapiens
accttgggtctgtgacaggtgcattgtgaccatagccactgccatatctatgggtgtcttcggtgttcatttaattccattgagtcagtttcataggtacagcacacatctaagtgcacact

SEQ ID NO: 200232 - DNA, 122 bp, Homo sapiens
cgcctccgagccaatgggaaggctccatactgcagggtgcgaaggggccggcgccgctgccgagttacgagtcggcgaaagcggcgggaagttcgtactgggcagaacgcgacgggtctgcg

SEQ ID NO: 200233 - DNA, 122 bp, Homo sapiens
tgcctgtcaagggtttggcttgcctgcagccatacaagatttttacgagcctcaacaatacgataaacactacacacctagctcccaggatgggctctcaaaattgctgtgcatgcaagatt

SEQ ID NO: 200234 - DNA, 122 bp, Homo sapiens
aatacataaacacaaatcagcagtgattagcctagattaacctcaaaaatacgtattagccgttggaaaaaaaaaggatttgaacacgcgctttgcaaaagtagataaacagccaataaacc

SEQ ID NO: 200235 - DNA, 122 bp, Homo sapiens
ttagacgcaaatcctttttaatcaaggagtgcattcgtgacttcgtctcaagccagaccccgcattacttttcccttgtcttcacacagtccataattattcctctctatttctacttgcta

SEQ ID NO: 200236 - DNA, 122 bp, Homo sapiens
cccgcgtgtgggaaactcgagcaccctacaggcaccagggtaaactgcctgtgcctggcccggtgagggtcgctcccccaggccccgtctccgcccgaggactgcaggcctaggcctgcggg

SEQ ID NO: 200237 - DNA, 122 bp, Homo sapiens
gatgttctattttaatgtctggcatgccagttaggctataagtgctgggacactcttccacgataagctgggctccaatatccagatttgttgatgtatccatgatttcaactgtagtttca

SEQ ID NO: 200238 - DNA, 122 bp, Homo sapiens
actcgacattgtcgggctggggcgtggcccgggagtccgtgtggggcaggcaggtgcctacgaggggcaggggcgtgtgttggccccggcctgggcgcggtgctgcaggtccaggggctgtg

SEQ ID NO: 200239 - DNA, 122 bp, Homo sapiens
cccgccaagttgaaaagttgaacctgcctcccaaactttctcctgtagtccagacggggacgccctgagggagcgtttgtgtcagtaatgggaaatctgcaagctagacggaaatgacctgc

SEQ ID NO: 200240 - DNA, 122 bp, Homo sapiens
agagactgcttcaccctccatcaagtcctccacctcgtcctccgtgggcactgatgtcaccgagtaagtgctctttggctccctgccacccagcctgttaccagtgtaagctgtgggctaga

SEQ ID NO: 200241 - DNA, 122 bp, Homo sapiens
tcctggtggtcgctgtaatacggaaaacttactacgctgctgtgggacttgtgctcgctccgccaggaggccgagggcgtctttagttcgttaacagaggagcaggcggaggcgggtggaat

SEQ ID NO: 200242 - DNA, 122 bp, Homo sapiens
aaagcacccaccttgttgaggacatctcgctggcagccaagataaagattgggaagaattcgggttggcccaatgttggcaacaggtaagcaaggctgagaaatgcaggtagggactagagt

SEQ ID NO: 200243 - DNA, 122 bp, Homo sapiens
gagagagagagacagacaggttagcagtgtgaatagtgggcaggggacttcagagccttccgctctgttactgatcttgtggctctctagcaagaaggctcttgtgcttttgagcaagtcat

SEQ ID NO: 200244 - DNA, 122 bp, Homo sapiens
taggtacactcctttgctctctgccacacttcttgagaaatgaatggacattctagttaacgctttaaccacgggatttgactgatgttaatctctattctctagtccacccagactgtagg

SEQ ID NO: 200245 - DNA, 122 bp, Homo sapiens
atagtatttgctatttcatgtgaattggctttgcagacttaaaactgcttcagggctgggcggtggctcatgcctgtaatcccagcactttcagatgccaaggcaggaggatcgcttgcgcc

SEQ ID NO: 200246 - DNA, 122 bp, Homo sapiens
ccttcggacgcctccacgtcagcgaccctctcccgcggtttccggaagcgcctggaaacacgaacttccggtctcttaggctccgggccacagagacggtgtcagtggtagcctagagaggc

SEQ ID NO: 200247 - DNA, 122 bp, Homo sapiens
gagaaaggctgcagcggggcgatttgcatttctatgaaaaccggactacaggggcaactccgccgcagggcaggcgcggcgcctcagggatggcttttgggctctgcccctcgctgctcccg

SEQ ID NO: 200248 - DNA, 122 bp, Homo sapiens
acttctttctcctgtgggcggggccaggaggggcgggagctggtgagtggtgcggttccgcgctggggccagtggccgcctcaattaattgtgctaaataaaatgagaaaggggagggggaa

SEQ ID NO: 200249 - DNA, 122 bp, Homo sapiens
gactcccgattggccagaggcggcagaacggggtggggccaaacgacgcgcgttctgtggcgcgcggcctggcgggcgtgcaacggccgttagaggagctgagggagggaaccaccgctcac

SEQ ID NO: 200250 - DNA, 122 bp, Homo sapiens
attctagtctctcatttaagacttagtaagatacccaatcacagaattaccccagcttcccgaacacatccaatccacagtaaagctctgcttcccttaccttcccctaagaccacctgaca

SEQ ID NO: 200251 - DNA, 122 bp, Homo sapiens
gatggggcctgagcgggtgccaaggaatgactgttaatttgaacattgccctaagggaaccgcaagtgtgttccagagtttcccgtacttggcgccttgcaacctgaagttcataggaagaa

SEQ ID NO: 200252 - DNA, 122 bp, Homo sapiens
tcaataataaaccttttttgttgttgctcctagcataatttgtaaattacttcccagagccgcctttactaaatgtctgtgaccttattgtcaagaaaggcttgacaagcagaagctgctgc

SEQ ID NO: 200253 - DNA, 122 bp, Homo sapiens
gaccttataagagtgtgtgctgtctgtcaagtgggggtgtgcactgggcaggtagacacacgcaggcagaaaaacagaatggagtcagctgcactggtttgttctaaagtcaaggaacatga

SEQ ID NO: 200254 - DNA, 122 bp, Homo sapiens
tggaaatgagataacggctggtgtaagcaagaaagaaacacacacacacccacgcgcgcgcgtcgtttcctttgtgttactgtaaggtcaaggagggcggcgacacagaaattcatgatgac

SEQ ID NO: 200255 - DNA, 122 bp, Homo sapiens
gggcccgccccgcgccgtcgagaagggcccgcctggcgggcggggggaggcggggccgcccgagcccaaccgagtccgaccaggtgccccctctgctcggcctagacctgagctcattaggc

SEQ ID NO: 200256 - DNA, 122 bp, Homo sapiens
gttgcatggaggtcctgcagaacgtgccatcagaaccgttgcttctgcagttcaaaaggtcgtaagtcaaatccaaacattcaggaactctactgagcttccaggcccatggatttctcacc

SEQ ID NO: 200257 - DNA, 122 bp, Homo sapiens
cttgcagctcagaagagaggacaggtggttcacggcacacttaccgagtgccagacactgcgtgctatgtatacaggccctgtcgtatgtatgtagtaccacaacccagtgacacaggcgtc

SEQ ID NO: 200258 - DNA, 122 bp, Homo sapiens
aaaccttggctctaaccagccctgttataacttctgcaggcctctttgcactaagagaaacgtacttcccttaagcagcaagaatcaaccttgcccacttcgctgtaagaaatggatctatt

SEQ ID NO: 200259 - DNA, 122 bp, Homo sapiens
agtcattagctgtggacgtagaaatagcctttctcccttcttttcagccctggaatctcccgtctgctttacagtcaccttgtgggatcgttgggcatggggggctccctctgacgccgctt

SEQ ID NO: 200260 - DNA, 122 bp, Homo sapiens
atgccagctccacccgggcggacccacacatggtaggaacgtgagggggcgggcctgttccggcgcctctgggccaatcgccaggtggaaggcactcagccaatggcagaggggctctgggg

SEQ ID NO: 200261 - DNA, 122 bp, Homo sapiens
aagtcagctcgtacgtttgttttggtttttcgtctatttgcttcccaatttaaaagtggccgcctaggcgacaggcctgcggttttcacagtgtaaaacggatcagagggaaagctccagcc

SEQ ID NO: 200262 - DNA, 122 bp, Homo sapiens
cagttggccctgcagtcacagctggggatgtccatagacagaaacctctgcaaaccctcccgtctcccctggctggagcaccaggcaagcaaaggggagtggtcttcaggaggcctctctga

SEQ ID NO: 200263 - DNA, 122 bp, Homo sapiens
tgaggaatccctgatcccagtgaattcgtgccaggcggactcaccactcctccagctctgcgtccgtcttgcactgggcaggaagtttcctctagacccaggcagggacccaacttacgcac

SEQ ID NO: 200264 - DNA, 122 bp, Homo sapiens
cagctaggaaccactggagggacaaataacaaggcgcaagccagaagcgccctgctctgtcgcaggggcagggccattttcatccagttctgatgtcttctgtggccgctgcgagtcggcgg

SEQ ID NO: 200265 - DNA, 122 bp, Homo sapiens
ctaccccagtttccggaaacatgtaatcatgacaatatccagagacattattttctcctgcggaattttaaagcaaggaaaactctttccagacactcttttaaaaatcgccctttaatttc

SEQ ID NO: 200266 - DNA, 122 bp, Homo sapiens
cttggacctgagtagtgcagtggaaattaagaaaacagaatggaaatattttctagatgacgaccatagaatttgccaatagactgaaatgtggagaattaagaaagtctagagtttggggc

SEQ ID NO: 200267 - DNA, 122 bp, Homo sapiens
caggcgaaggcgagtgcacacacacaagcggacattgtaaggctgtttgcacaaccccgccgtgctcctcgcggatttcctgccaaggagacatttagatctcacagaggcggctgcagaca

SEQ ID NO: 200268 - DNA, 122 bp, Homo sapiens
tccgtgtccccctatggccgggtactgagcggggcccgggtggtctgcggccgtggcccccgcccctcagcgcaggcgaccctcctggccctggcgggcacagcgcctctcccgtgacctgg

SEQ ID NO: 200269 - DNA, 122 bp, Homo sapiens
gcggcccagacccagcccgcggcctggacccctggaccgctttgcgcacttaccgccctgcgggccacagggcaaaatcgccataggccaaggtgcatatagaaaacaaaggagcattaagc

SEQ ID NO: 200270 - DNA, 122 bp, Homo sapiens
agtgttaaatctcacatctgtggaagttttggtagctcacttctgataagattggccagccgggtgcggtggctcacacctgtaatcccagcactttgggaggctgaggtgggtggatcatg

SEQ ID NO: 200271 - DNA, 122 bp, Homo sapiens
ctgatccagaaggggtagaagagtctgcacaagcttctgtgcacctgggaatgtttcgtgcgttgagaggagaggtggggtctcagcaggaggaggtcctgcaggtggtgctgcaaggggtc

SEQ ID NO: 200272 - DNA, 122 bp, Homo sapiens
ggggtcgtttcactgtttcacgttaggatgtgattcggcccagaacaacagggagaaaaccgatgcttctgcaatgagtatcatttaattttggtcatttagagctgcgggtggacaccaga

SEQ ID NO: 200273 - DNA, 122 bp, Homo sapiens
ggcggcgggacgacccagtgaagccggccccgaacgccaagtgagtgtgtgccgtgcgcgcgcgggtagctgccgaccgcaacgacataaacttgaaagtgaccgctgtcccggagctccct

SEQ ID NO: 200274 - DNA, 122 bp, Homo sapiens
atgcgccccttctcttttcctttctgtcttttctgtgctgtttttctccttagcatttgtcgttacgaagcattgtataaaatttacgtatttatcttttttaccatcttactttctcacta

SEQ ID NO: 200275 - DNA, 122 bp, Homo sapiens
tgggcccaggcagggggcgcccgcggtttagaaaccacatttcccatgagcctaagcacgcgcttccgtcactcggcggccgcgggggcgaagcgcgaggccccacacagagcatgcgcatc

SEQ ID NO: 200276 - DNA, 122 bp, Homo sapiens
ggaggcattagggttggtggaaattaaatctagagtgggagcctcaggccagtaggctgacgccctgaacagtgtcccagagcaggaagaggaagtcctgaggcttctcagagccaaattgg

SEQ ID NO: 200277 - DNA, 122 bp, Homo sapiens
cgctttcctgctccccgcgccctggcgaaggtctcgggttcatttggttaaacggaggtgcgcacatgggtgccctgagccttcgcgcggcgccgcgggtccagtatcggccccaggctctg

SEQ ID NO: 200278 - DNA, 122 bp, Homo sapiens
aatacattctgagtattcttttccacttgcgtttaggttcaaacgggaaacaaacccttccgtcctcagctgttaattccttatagaacctccactcccttgacttctttccctacctacag

SEQ ID NO: 200279 - DNA, 122 bp, Homo sapiens
ctggacgcccggtgcggggggctaattccctgggagccggggctgagggccccagggcggcggcgcaggccggggcggagcgggaggaggccggggcggagcaggaggaggcccgggcggag

SEQ ID NO: 200280 - DNA, 122 bp, Homo sapiens
gttttgttaaattgaggattttggctcaaatttatttttcttaataggctatgagttacacggagaagtagaaagaaaatagctcaagagaagtgtcaacaaatactgttgggggggtactc

SEQ ID NO: 200281 - DNA, 122 bp, Homo sapiens
gcgtgccggtgtgaaagtcaccttcggtgcccccagctgggcgggagggggcgcgcggggcgcggccgggattggagcgccgcggagccccgccccccgcccgcggagtcagacccaacttt

SEQ ID NO: 200282 - DNA, 122 bp, Homo sapiens
ggggaggtgggatgagaagtcgcagaggagctcgctgagggtggggacacccgccctgggcgctcctccgtgctggaaacagcaggttgcggcccccatcgccccaccgcagaagccggcga

SEQ ID NO: 200283 - DNA, 122 bp, Homo sapiens
aggtttccaatcagatagctgctcctctgacagcaggcaaagaacttccctcagctatctcggaggcctcatacctccatcatgtgaagagtcaaccagtcccatctttcggaatcctcttt

SEQ ID NO: 200284 - DNA, 122 bp, Homo sapiens
gcttgacttccaccccccggacggagggcttttgtttttgtttttttttgtttgttttttcgtaacatatcaataggaaacaaggacttcggcttacagctgataccagaaccttcagaaaa

SEQ ID NO: 200285 - DNA, 122 bp, Homo sapiens
ttagacagacttggttcagcaccgcctccgccacaccctcgcctgggatcctaaacaagccgcatcttctctgcatcgtagtgtgcttgtctctgtgatgggagagtgtagggataatagtg

SEQ ID NO: 200286 - DNA, 122 bp, Homo sapiens
ctccccatggggcgcggcgagctggtcctggcaccgtgcgcccctggccgccgccgccgccgcctccggttcccgccttgctccacggcccgcgcttcggctcctgcttcccgggctgctgc

SEQ ID NO: 200287 - DNA, 122 bp, Homo sapiens
tgcttttttgtgaaagaaaaacataagctgttcccaataccttcccaagcagccgacaaacgagggctcttccgccttaaactttccccataccgggcggagccccaagccacaggaaacct

SEQ ID NO: 200288 - DNA, 122 bp, Homo sapiens
taagctgtccatgcagccccagggtcaaaccctcccggcatctcaggcctggccgaggcccgcgcaccacgcccccttccgcacaaggccctggggagccaataaggagagggaggggcggg

SEQ ID NO: 200289 - DNA, 122 bp, Homo sapiens
tagcaccgtgccagccgtaaggatgggctgccaagctggcagccgttgctgtttgaaggccgtgttatccggtctccgagtcttcgcggtgccccccggagcacacgggggcccaccgtcca

SEQ ID NO: 200290 - DNA, 122 bp, Homo sapiens
ggggggcggcgggcggccgcgaggcgctgcggcagcgcggagcttgtaaacagatccggccgcaggtgaccatgtgaactacctgctcccgggacgcttattgtccttctctcgatccgcgc

SEQ ID NO: 200291 - DNA, 122 bp, Homo sapiens
ttcctccaggctgcagccgcatttgcgagtgtgccaagctacgccactactgatttactgcgctgggaacagcactccatcaatgtccccgagctgccattgccaccaagctccccctgtcc

SEQ ID NO: 200292 - DNA, 122 bp, Homo sapiens
ggctcctcttcctgccttcctctcccaccccctcatgtgctcccagcagcctttgggtgtcgattccggggtctccacccccgcagatgggagcaggctcctcatgcctgccttctgagctc

SEQ ID NO: 200293 - DNA, 122 bp, Homo sapiens
tgagctgtgatcacaccactgcaccccagcctgggtaatagagtgagacccagggtggggcggggagagaatcaatcagtcaatgcatgtatggacctttctcaagaccaaatcaaactaat

SEQ ID NO: 200294 - DNA, 122 bp, Homo sapiens
ttacggattttagttctctactggttcctaaggttgcttgcagctctctaattcttttatcggcctattctagcctactgctgttcctggagtatgaatggagcctctaatcagagcagctg

SEQ ID NO: 200295 - DNA, 122 bp, Homo sapiens
ggaaaagccggctgggcatggtgtcattcacccccagctctgtgtcaaccagaagcccggcgccacaccctgccagcccatggccacctcccacgtgactgcagccgtggctgtggctggaa

SEQ ID NO: 200296 - DNA, 122 bp, Homo sapiens
gaaatagacggatgggagattcagcattccccagtgttgcaactactcttgatgctattacgggaaaggttcaagaggaaaagaattaagtacctctttcaaccttagcctgactcaagctc

SEQ ID NO: 200297 - DNA, 122 bp, Homo sapiens
gttcccactaggtggccacaggtcactgggcgagcgggtctttgtgggcagaggcaggagcggaggctgcggaggacgctccaagcccatcttccgtggctcagcccagcggctcccgcggc

SEQ ID NO: 200298 - DNA, 122 bp, Homo sapiens
gccgagtcgaggggcgcaatggaggagcgccggaacaggtctctcattccgagtagctaccgttgcactgtgcgagtgtaaaagtcacttccacccggtctcagttgttccaacctcagttg

SEQ ID NO: 200299 - DNA, 122 bp, Homo sapiens
ctcgcgcggacgcccgggcggggctgtgcgaggggtggggctgcgggaggccctggagcgcggcggtgatggcggggccggtgaaggaccgcgaggccttccagaggctcaacttcctgtac

SEQ ID NO: 200300 - DNA, 122 bp, Homo sapiens
taaatcttccctccccatttcctttaccactgtttcacttacacagtaccagcaccaactcggcagcaaagagacggatggaagcctcaggaaagcagccaacagccgaccaaagggagtac

SEQ ID NO: 200301 - DNA, 122 bp, Homo sapiens
ggaacacagtgagcacataaaaagtgtttagctattattgtatgtcatttccccagccctcgtaggcatcttagtatgggacccccaatttaaaccaatcttctcagccctggttgctgatt

SEQ ID NO: 200302 - DNA, 122 bp, Homo sapiens
ctggcctgaagcccggggacgggactgaggcgtagggagagtgctcaacacccaaccactcggaccctccctcgccggactaggcggatctgagcttcccaaacccctacagtctctccatc

SEQ ID NO: 200303 - DNA, 122 bp, Homo sapiens
tgtcaaacttcgtaagcgtcaagccgggtgctctcccgacaagaccgagactgagtcccgcggagccgctctgcgctcctgctctgcccgccacagaggctggtgcagcttccctcccgccg

SEQ ID NO: 200304 - DNA, 122 bp, Homo sapiens
agaaggacccgacacaagttgggagaagaagtgaaactcaggggagtggggaatccccaacgctgcgcctccccattgcagacgcggccctcggagcctgagaccctgagagccccgtccgg

SEQ ID NO: 200305 - DNA, 122 bp, Homo sapiens
gcgctcagcgggactgcgggtccggtggaattccggccggacgtggcgcacaggaagttacgcacgggaggcggtacctggttgtggagggtgacgccatgggtggggcggagcgtctggga

SEQ ID NO: 200306 - DNA, 122 bp, Homo sapiens
ggtacactgtaaatgcatatgaagtaacaagaattttctcaaagtctcaactctttaacacggtctctcctttgtgcacagggatgtaaccaaaaagctaaacacagggcactcctcaccct

SEQ ID NO: 200307 - DNA, 122 bp, Homo sapiens
cccgaccgcctgtggcccccatcccaagaacccggggggctccgaggcttaccattggtccgcaggcccctccgtgccgggcacccacctccagctctggctgtgtcgagcgagaagtgagc

SEQ ID NO: 200308 - DNA, 122 bp, Homo sapiens
gtggacccttgggagacaaacccgcgggggcaggcaaggcactaagtcagagggggctaccggccctgagcttcctgcaggttgcctcgcctggcccttgggcaggcttccagctagggctt

SEQ ID NO: 200309 - DNA, 122 bp, Homo sapiens
ttggctgattcctcctgggagtatttacattttaaaggggataaaagaaaactctctttgcgatgtgtttcgtctctgttattatttagggtctttattaatgcttatgcctgatgttgatg

SEQ ID NO: 200310 - DNA, 122 bp, Homo sapiens
tggtgagttcttagaactctttccaaccggaaactgcccagtgcaccactctcagatggacgggacccagtctgtacctgatcaccccggctctaatggtatggtctccaaggctccttctg

SEQ ID NO: 200311 - DNA, 122 bp, Homo sapiens
atcacagctcaatgcaatctctgcctcccgggctcaagcaatcctcccaccccagcctcccgggcctgggactacagacacacaccaccactcccagctatattttgtacatttgtagagac

SEQ ID NO: 200312 - DNA, 122 bp, Homo sapiens
cgccccggagcggtggtcctcatttcccttcgtcccggctggcgagccacccacctcgcccgcaggttctgccagtcccgcggcccgccagagcccaagctatcctctccgcccctttcccg

SEQ ID NO: 200313 - DNA, 122 bp, Homo sapiens
ttaaactttcccacaggccttgtcaaacaacccctggagccggcctgcaggttttcaatgcgcgcctttcaccgtgcggggcgcggcggggagcggcgagccgggggcgggcctcgtggggg

SEQ ID NO: 200314 - DNA, 122 bp, Homo sapiens
tgacagctcagggccctcttcgcagagaatcgtttctgcacaccgactcagaatcgcacacgttttcaaggttctcctgggagctcctagtgtcaggctagtttgacctcgggcttacttca

SEQ ID NO: 200315 - DNA, 122 bp, Homo sapiens
caggggcaaagtcccagatgagcagcccaaggttacagcagtgaggcagtggaggcctcccgggagtaagggcttctcttggcccctgagacgatactagagtttatggtctgggaaaggga

SEQ ID NO: 200316 - DNA, 122 bp, Homo sapiens
gaagttcctccaggcctgggtgggggccgccagggaaggcgcagagggagggcaagttggcgccgctagttttagagaaatcctaagtaaacagtgaacccgagcaggaaacctcagctttg

SEQ ID NO: 200317 - DNA, 122 bp, Homo sapiens
ctagttaagaccatgtcttctttgttcaccattgaacagtactcagctaagcacagggcacgtattgagtactcaaccagtatgtgaggaaagactggttagaggtataaatgaatgaatga

SEQ ID NO: 200318 - DNA, 122 bp, Homo sapiens
gcgaatgcgctgttaatgctctcagtgcgtctccgctccttcttgggtcctgagcctttccgccggccaagacggccgccaagcgcctccagccgcccggggctctgcccaggcctggcgtc

SEQ ID NO: 200319 - DNA, 122 bp, Homo sapiens
caattgaaggtgacagtagggagcgggggcagggttggctccagggcccaggaagcccaccggaggcatcagccttttgcttatgtgagctcccactgtgaggggagggcggtgccaccttg

SEQ ID NO: 200320 - DNA, 122 bp, Homo sapiens
atgatgatgatgagcatgatttaaaaaaaatcagtctccctcttggtgaaccagagcatgcgtgccggagggactgcactgctggcggcggcggccgggggaaggagagcggcgcaggaggc

SEQ ID NO: 200321 - DNA, 122 bp, Homo sapiens
ttctggatggccaaactgattatctaaaatagaaaattagcacacaatgggtttactctgcgatacccctcatgcaactaatggcaaagcttgttaattggttgtaaatgccagcaggttgc

SEQ ID NO: 200322 - DNA, 122 bp, Homo sapiens
ggagatgtgcaggtccggagatgcgcggggcggagatgtgtggatcggagatgctcagatcgaagatgtgggaatgaggagatgtgcggggcgggatgtgtggatgggagacgcgcgggccc

SEQ ID NO: 200323 - DNA, 122 bp, Homo sapiens
ggctaatatgcataataggaacaggcggaggcacctgttttgattctcaccctgttggagcgctcaggtcccacagttttatagataacagatctacaggtaatacaaatattatgactagg

SEQ ID NO: 200324 - DNA, 122 bp, Homo sapiens
actcattagagggtcagatcgaacagggttgaagctccgttctgccagctgtggctcagacgggtgtcatgcgttggccttttcatctaagcctccacccgcgctgcagggcataggaccct

SEQ ID NO: 200325 - DNA, 122 bp, Homo sapiens
caacctgctcattccacctgcagaccccaccctcctgcagggaggttcccgactcacgggcgctgtggtcagagacctggcatcgtggcctgcatgcccgcccccccacgctcacgctgaaa

SEQ ID NO: 200326 - DNA, 122 bp, Homo sapiens
catgtctcaggcagtcagaaccagagttgagcctggggagttttttgaacccatctgagccgcttgccccccaacccccgccccgatctctgcagtttaagggcacagcaggtgggggagag

SEQ ID NO: 200327 - DNA, 122 bp, Homo sapiens
tagagctgcggaacaggacgccctctgatgtgaaagaacttgtcctggacaacagtcggtcgaatgaaggcaaactcgaaggcctcacagatgaatctgaataactggaattcttcagtgca

SEQ ID NO: 200328 - DNA, 122 bp, Homo sapiens
ttccttattctaaataacttcttcctgctgcacggggtcgtctcctttaaccacggctaccgcagttggtagtgctggatcccatttcagggtgatgggatgctggatcccatttcagggtg

SEQ ID NO: 200329 - DNA, 122 bp, Homo sapiens
ggatgaaagtctccatggacccttcaaccagaggctctgtgacttgtcccgtcttcagtgcggtgtgtaaaccctgccgccggtccaagttcacgaggtgtgctcccttctccagtgcaagg

SEQ ID NO: 200330 - DNA, 122 bp, Homo sapiens
tctctacatatagatccccgatgcgtcgacagagatgtgtctgtatgttaaagttttgcccgggttcagcgtttgttctcaggaatttattatggcattcagactaaactgctggaaaaata

SEQ ID NO: 200331 - DNA, 122 bp, Homo sapiens
gggccggggccgagttggtccgcggcggtggggaagcctgggacaccaccctggtgctgtcgcccgtcccgccgtccgcgcttggggtgcctttgtggggatccgggcgccgcacagctggg

SEQ ID NO: 200332 - DNA, 122 bp, Homo sapiens
ccggctaggcagcggtctctgtctgggatggacgccgcgccccacgcggacctcccgccccgacttcacccagctctgctgcccgtaactcatatgacaagaacatcaggaaccggactatt

SEQ ID NO: 200333 - DNA, 122 bp, Homo sapiens
tgatattgccaactccacaggtcacagagcatgaagaccaaggtgaccagtggctccagccgccgtcctgccggactaacacaagaagcggagagagatcaggctgtgccgcctagaggggt

SEQ ID NO: 200334 - DNA, 122 bp, Homo sapiens
cgcgaaggggtagaggcaggcgggcagcaggaagaccagcagcggccagtggtacggctccgcacggaagccggggccgcccgccagcgccaggagccgccacaggaagtacctgcggcggg

SEQ ID NO: 200335 - DNA, 122 bp, Homo sapiens
ccagtatttcagacaccctgacaggcaccttgcatgaaaggttcactatgaagccaacaccgcgaggccctgacagcaggatcttctaaccttcatgttacatcagcacaccaaatctgcca

SEQ ID NO: 200336 - DNA, 122 bp, Homo sapiens
ggctggggcctgcaagggggactcgaagcctcccgccgcctcccgccccttgcctggcagcggaggacccaagcaagggcaaagagttccaacccagccagagccgcacctcttgcagcgac

SEQ ID NO: 200337 - DNA, 122 bp, Homo sapiens
ccttcaggcggcccatgggtgagtggtcgccaagatcccgggaagcgtttctggtagtcccgactactttcctacacggctggcctcgggctcggctctttgtaggcggccttcggttggcg

SEQ ID NO: 200338 - DNA, 122 bp, Homo sapiens
ccttcagagaggaagaatcttaaggcgcgtccaagacaagcggagtcgaggactccgtttcggggaggtttacctgaaaagctgtgtggaaaaacccgactgcgactttcaagcttgtgctt

SEQ ID NO: 200339 - DNA, 122 bp, Homo sapiens
ccgtgtctctgtggactgtgggtgtgccggtgtgtgcacccttctgtgtacaccactgagcgtgtgtctgcgtgtgcaccggggtttggctctcggggctgatgtccgttaggagcagcccg

SEQ ID NO: 200340 - DNA, 122 bp, Homo sapiens
agcagggagaaaaatgggagctgggactgctggcaggagcaacacaatggcccccttgcccgcagatcccgccgcttgccccaggcaaacctccgcctacagccctaggctgatgagccagt

SEQ ID NO: 200341 - DNA, 122 bp, Homo sapiens
aaattggacttatagctcagctgctggcataaataagtccctttgatagttagtggaagacgttatgacactccagggtacaggaggggacattggcactgtcattttttttctccagccct

SEQ ID NO: 200342 - DNA, 122 bp, Homo sapiens
acggaagggattccaccctggggcggtgtggggtggcttccctgctctccctgctctctgcgttcccacggtgcaggatggcggcgttgagagccagaaacgaaaccctgagaagcagaagc

SEQ ID NO: 200343 - DNA, 122 bp, Homo sapiens
ttctccacatgcgtggggacacttggcttggtgggtcttgactgggtgccctagtgggtgcggcagcatcttgctgtggctccaacttgcatttcctccaggaccagtgatgtgagcatcgc

SEQ ID NO: 200344 - DNA, 122 bp, Homo sapiens
cttggacagtcagcggcccaatagtgtgctctacgtggggcggggctcaggtgcggacgccgccggttgtcctcttcgctgctccgtagtgacggggattgttgtgttgcagaaatccggca

SEQ ID NO: 200345 - DNA, 122 bp, Homo sapiens
ggcctgtcctcaatcccttgactctggtgggtcggccgggcccaacaggagtcctctagccgacattagcatcccagaagggctgccccagaccctacacccaaatctgtcatttggagcaa

SEQ ID NO: 200346 - DNA, 122 bp, Homo sapiens
actcgggtccagggcgcagggaagacccggggatggtgagcgttccagggtgccaagtcccgtgggtctaacgggcttgttggcgagcgccgcgggctctgcagtgcctgaggccagaatct

SEQ ID NO: 200347 - DNA, 122 bp, Homo sapiens
tgcgcctggcgcactcacttccgcgtcccgccgccctccggcccgcgcgcgccgatccgccgccgccatcggacaatgggccgccagccccagctgccgtgaacttcctgccgctgctcggc

SEQ ID NO: 200348 - DNA, 122 bp, Homo sapiens
ggtgacagaggcgccttcccggaatggggggcgcgctgtgcgtgcctgcagtggaaggggcgcctccccctaggggcggaggtctgacgggcccttcccgtgctctgtgccgcaggtggagt

SEQ ID NO: 200349 - DNA, 122 bp, Homo sapiens
agctgttcagttaaagcagccccatgtcgctcccaagccccacctttgtgtaaatctatgcgagcaccgatggggcatgtcccagacccattggctccgcccacctcacctcctcgcctatc

SEQ ID NO: 200350 - DNA, 122 bp, Homo sapiens
gcaggttctcactcttcccagggccttggcaccttcatcccttctcaccctcaccctcagcgcacatgcccctccgagatcctgcttctcaaaggctcccatgcatgtgcacgctgccctgg

SEQ ID NO: 200351 - DNA, 122 bp, Homo sapiens
aatttataaacataaatgtaaagataaatttcataattatggaattaatgacttagtaagcgtgatactaagaatataaatcaaaaaggaaaagactaacagatgtggctacgtaatagtta

SEQ ID NO: 200352 - DNA, 122 bp, Homo sapiens
aggatcatatagcctttgtgtttacattgagggtttttacaggaaagccaaggagtccttcggccaaggtcaaggttaacataactgatgatgtgaatcctttgtttgagggttcctacctt

SEQ ID NO: 200353 - DNA, 122 bp, Homo sapiens
tgtgtggatggacagtcattttctttccagctttgctgattattagaaactaaagccacccggagaaaaaaggtatggatatacatttatccatttaagtatgattcgtggaaacaggagtc

SEQ ID NO: 200354 - DNA, 122 bp, Homo sapiens
cttggcctggaacgggtaacggagtgtttggcggggatggcccgaggagtttcggcgccgcgaaagtggagagtgtggatgcctctgccgtggggatttagacaaatcacctccatttcatg

SEQ ID NO: 200355 - DNA, 122 bp, Homo sapiens
ctctacatttatatttccttcgttaactgtggagccgttcctaaagggaagcttttaaagcgataatgaagatgctcagaagagttcaatacaaggttacatgtgaaaggaatgtcagcagc

SEQ ID NO: 200356 - DNA, 122 bp, Homo sapiens
cgggggtgttattctggtacagaatcccccgcgggggaggcccgagaagtgaggcacccccgcttctttgtaggaccgccacagaacgggctgcaggccgcgagtatagagcttggctgggc

SEQ ID NO: 200357 - DNA, 122 bp, Homo sapiens
cctctcgtcaccgtgtggctccagctggggcctggattctgttttacaacatctgctttccgcagcatttccgccccgtgggctggagaacagcctgcgctgagcagaacgcaggcctggcc

SEQ ID NO: 200358 - DNA, 122 bp, Homo sapiens
ggagacggggccgggcactgggagcttgaggctgggtctccatccttcctttcatcctctcgggagcccgcagagacggcggcttcagtctcgctttacgggtgggaaagcagcgaccttga

SEQ ID NO: 200359 - DNA, 122 bp, Homo sapiens
cacactgaccgccatctgtgcccctcacaatgacaccagcgtggccctgcctcccttccgcgcggccccgcctctcgccccgccgaggccccgcctctcacaccaaggtcccgccttcctcc

SEQ ID NO: 200360 - DNA, 122 bp, Homo sapiens
tccctcctaatagcatgtctgtgtatatttagagtgagaaagaaggatgaagagataattcgtctttgtcaccatccaggtagtcatgggagttgggacctgtggtataataaaaaataaat

SEQ ID NO: 200361 - DNA, 122 bp, Homo sapiens
attgaatccggttgctgactgcgcgcaactttaaggagtgtttactccttaaagatggagcgcttaacggaagtgtgtgcgtgtgtgttcccgggttgttaccttgcacacctacttatgcc

SEQ ID NO: 200362 - DNA, 122 bp, Homo sapiens
tggggaccgaccgacctgaccggaaaccagagggagtcagcaaactccagtgccaggactcgggtctcggacctcagaccacgcccctgcggctacgcaccccgaccgctgtgccccattgg

SEQ ID NO: 200363 - DNA, 122 bp, Homo sapiens
gcagggcaggtgctcacctcttttcggcgggcttcacgcccacggacagcgaggccatggcggtgaccgtctcggcttcttcgttctcgcaagtctgagcctcgatcagagaacgccccgct

SEQ ID NO: 200364 - DNA, 122 bp, Homo sapiens
gagcagtcgcgcgccccgcccaggccggcccagcccgcccagcccggccccgccccggcccgaagccccgcccccgcccgctaccgtgctgacagatcccaggctgtcccaaccctgggtct

SEQ ID NO: 200365 - DNA, 122 bp, Homo sapiens
tgctaagatgtggatttctctttttcccagaggatctgggaaacacaaaaagcggggctgcgtgtagcacctaggtgattctgatgcacactcaaatttgacaggtgagccggggggaagaa

SEQ ID NO: 200366 - DNA, 122 bp, Homo sapiens
taccccagcctaaggtgctgggcgacgtgtggggcgagatcggaggctagccgggcttcacgcctgcgcccccaggtagccacggtctctgctgccccctcgcggctgcttcttgcctcgca

SEQ ID NO: 200367 - DNA, 122 bp, Homo sapiens
cccgggctgggaccaggccagcctctctccaaacagagcacgatgctccgtcccttgatgcggcaacggagccgctttcgtattgaatgacagagaccaggggtgtcaaaggctctgggccc

SEQ ID NO: 200368 - DNA, 122 bp, Homo sapiens
tacgtgttgacgccatacgccggggcggggccgagagtttggagccccggagtggggtgtcggcgcctcattcgggtggagctgagccggagacaggtaaccgtgcgctgtcgccgcgcccg

SEQ ID NO: 200369 - DNA, 122 bp, Homo sapiens
actcctagttcctgcccataacataatgcaaatctgttcaaaaacctattccctggatgtcgatatgaaactcgggttttaatcttaagtggtctagcataaaacatgcttgtccctatttc

SEQ ID NO: 200370 - DNA, 122 bp, Homo sapiens
ccaaatgtatttctcccctaaagagttttctctgactccataaattcatctttgtaagtacgattgccaatttgaatgtgtgatctttatctttttctgaacttcagacctttcctcccaga

SEQ ID NO: 200371 - DNA, 122 bp, Homo sapiens
ttcctggggctccgacggggccgtcgccctgactccgagtccccttctcctgctgcagcgcgctgtgatcttgtgagcgtttgctccaccctccgagaagtgggctgcctgggaggggcgtc

SEQ ID NO: 200372 - DNA, 122 bp, Homo sapiens
aaaataccaaagtgctccacgtggccaaataaaagggcaattccttccaggaccccaaaacgggagtctggtccctctgcatatgacccctgtctgtgtcgagttaagggtgttcctctcct

SEQ ID NO: 200373 - DNA, 122 bp, Homo sapiens
ctcccttctccgcccagctggtgcagaggaaagacagtctggggaagaagcaggaggtgtcggtactgccacctagaagtgaccccaccagcggtgcgctcttagacaagactggccttgag

SEQ ID NO: 200374 - DNA, 122 bp, Homo sapiens
tggaggatgttgtggttggcactcaactccagattgcctacgttgatctgggtgtaatcacgaaggaaatcctctgcaagctgtcttacttcttttggccaggttgcactccacatcagtgt

SEQ ID NO: 200375 - DNA, 122 bp, Homo sapiens
tgtgccacgctcactctgagtagcacctttcgacgtgaacgttgggaccctgacctgcagcgtctttgggagatgggccatcacacgggttcgacccagaatgttaagttcattcacaaaga

SEQ ID NO: 200376 - DNA, 122 bp, Homo sapiens
atgttggcggcctggagatatttagatggagtagaaggcagattggggtactaggggaggcgccaagtcaatagaaattggaggaaaaataacgttgttgaagggagaggggaatgaggcaa

SEQ ID NO: 200377 - DNA, 122 bp, Homo sapiens
cgcgagccagggagtcctggagagcccgagcgcctctaccatgtctccatcagctttgatcgctgcaagatcacgtccgtgagctgcggctgtgacaaccgcgacctcttctactgtgccca

SEQ ID NO: 200378 - DNA, 122 bp, Homo sapiens
gctcgctcatgtggtcgccctgctggttctgagccctgggactcggagcactgacccctgcgcttggattgctagactcctcttcctcctggaccccatcctctaccatccaagccctgtcc

SEQ ID NO: 200379 - DNA, 122 bp, Homo sapiens
aagaaccccgtcctctggaccctggcgcagcaggaggggagaagcccgcagaggcccggacgcccccctcaccggcccccgccactgtgcttggagcaggtgcatcctgtctggagcttgtg

SEQ ID NO: 200380 - DNA, 122 bp, Homo sapiens
ttaatcatctcatcctgtttctgcaaccaaggaagtcatcattcattgtgacatcatgttcggggaccaggcaaatagaggtgaggtcacaacataggaaagttgcttggtgtataattagt

SEQ ID NO: 200381 - DNA, 122 bp, Homo sapiens
aggaccctgggagaggcaagggaagggctccggaaccagcgcagcagcgggacgctagcccgcccacacggcggccacttgaaggtcctccagggaacacctgaggcagtgggagcgtctgc

SEQ ID NO: 200382 - DNA, 122 bp, Homo sapiens
ctgagggagacacgggcaaatgagcctttgggctggcaccccaaacctggtccctgactccgggggccacgccctgctgcctgcgcgcacaccttgctatagacacagccaccacgctgcac

SEQ ID NO: 200383 - DNA, 122 bp, Homo sapiens
ccaaacacgcacacgcacacgcacgcgcggaccgggccggcggacgggagcgcgggagcgcgaggaatccctggaatgaggcaccggccaacctgagccgggctccgccaggccagccaggc

SEQ ID NO: 200384 - DNA, 122 bp, Homo sapiens
tccgcctgtgccgcgtccgcccggcgtttacaagccgcgggggtgccgcctgcaagtcagcgcctggcacttcctgccgcccatctggcccagcctcccgccccgacccgcgggcaggaacc

SEQ ID NO: 200385 - DNA, 122 bp, Homo sapiens
atgcgctgtcctcaaaaacaaccttgcaaacacaataaatgtaagtgcctattttatttgcgacttcctcctcttcacctgtctatttaatcatttgcttctatgatttatagtcagaaaaa

SEQ ID NO: 200386 - DNA, 122 bp, Homo sapiens
aataggaaaaaaaactcttggctcactactgggcacataagaaaagcttaaaaaatattacgtgattgttagttgctaagtcatttgatgtatgaatggtacaagactactgagatcacaag

SEQ ID NO: 200387 - DNA, 122 bp, Homo sapiens
cccaaggctctctgactgactccttctcggcttagcggctgaagactgacgctgcccgatcgcctctgaagctccacagaccatcacggacaccgagctttgggtaactctcacagtggagg

SEQ ID NO: 200388 - DNA, 122 bp, Homo sapiens
cgctccctgattggctgctggcggcgggacggggcggggcgggatggcacgttgccgctgcgcctcgggcctgtgcgggcagtcctccttcacttccccaagtccaccctgactggcttggg

SEQ ID NO: 200389 - DNA, 122 bp, Homo sapiens
ccacatgccctgccctgtgttcagacacggctgcgtcgtgataaagaaatatattcaaagcggctgacatcagcagaaagcccacgataagactgtggacaagtctggtgaggcaagtgcca

SEQ ID NO: 200390 - DNA, 122 bp, Homo sapiens
tgagttccatttgtcccagaatacggtccgctaccgctgtgacatgagtgttagggaaggcgggttgtcacgtttctacaagccttccagtcaaaagggaaaccttgcctaagtccttgtag

SEQ ID NO: 200391 - DNA, 122 bp, Homo sapiens
taggactatttactaaacacacctgtctttgttttttttccggcattcattttattcctccgtggtggcctcttagaggaccgcgtcctctgctcatggcatctgtgtgtcattaggatgaa

SEQ ID NO: 200392 - DNA, 122 bp, Homo sapiens
cctgtagctcagggacctagattaaacacataaccaaagtccagagccctgtgccccagccgcccagtttctaggctacaccacacagaagcagcatggaggagcctcttgacccagggagg

SEQ ID NO: 200393 - DNA, 122 bp, Homo sapiens
tactgacagaagctggaggagttccagaaagccaaggccggctccacaggcacccgaccccggcctgaagcgcaggtctcctcctgaggcccgacaaccacctgccccgcctcgtcctcgcc

SEQ ID NO: 200394 - DNA, 122 bp, Homo sapiens
tggtggggaggcagggctggcaggagcagcgcgttctcccagcagtgtgcctttgggctgcgcctgtcacagctgccgggccgcctgccacacacacgggaggaaaagcccacatctgtctc

SEQ ID NO: 200395 - DNA, 122 bp, Homo sapiens
cttgcagggcctgggctgtctccctcccactctcagaaataaggcacacgcctgggcattcgtgggccaacgggccttggctaaaccgtccccacatttgtcaggtaggcctgtagggtgac

SEQ ID NO: 200396 - DNA, 122 bp, Homo sapiens
gactgcatagaaaactcatcagcatttgttgcctctgagcgttattgtcagaggtaactgcgtgtctgtagactgggggagataatggctgaagtagaaagcagataaagcccaggctcttc

SEQ ID NO: 200397 - DNA, 122 bp, Homo sapiens
ctgtaaatagctgaagactctggagccagatggttctgcaaattctccaaacaggagtcacgttaagaagcacgagtgggcacaaaaactgtttttcaagacacaatttcaatttggcttgt

SEQ ID NO: 200398 - DNA, 122 bp, Homo sapiens
agaacggactgggagagcgaggtccgggtttccttctatttatttgcatcgatgtcgctccgagtcttcagcactgggccgcgtatgacagcatcttagtgggtgcggagcgggacagcgcg

SEQ ID NO: 200399 - DNA, 122 bp, Homo sapiens
aggaagcttggaagtatccctaatctagatagtgatggtaggctaaatatctacggcttccgtaaacgttcctctaaacctccctgtaaaaaacacactaagctgattgtgtaatgagctga

SEQ ID NO: 200400 - DNA, 122 bp, Homo sapiens
ggaatgatccccgcgttaaatcactccgcagctgtgtcgcatcagctgcatgggtggcagcgtacaggggagagagagagagaaagagagaaagcgcggggggattgaggagagtcctgggg

SEQ ID NO: 200401 - DNA, 122 bp, Homo sapiens
tgacgtgcaggatctggttggcgatgtagccctggatgaccttcacgaaatgctgcatctcgtgcttgaacagctgcagctgacggaactgcacagagccggccatgtggctcagcagggct

SEQ ID NO: 200402 - DNA, 122 bp, Homo sapiens
ctacgtgcccctttcccccttaaatgtgcgctctgttcgtttatggaattgctgctttagcgtgtctcgccattagaatataatgcccaactcattagagttttcttgtggaccatcatggc

SEQ ID NO: 200403 - DNA, 122 bp, Homo sapiens
cgcccaacgcaactctcacctgcattgcggcggccgaggcggctgccacgatttcacttccggttttccagtcagcaaacgcctacgagaaggcttcgtccaccaatcagaaaactggaact

SEQ ID NO: 200404 - DNA, 122 bp, Homo sapiens
tacttgggaagctgaggcaggagaattgcttgaacccaggaggcggatgttacagtgggccgagaccacgccactgccagcctggatgacagagcaatactccgtctcaaaaaacaaaaaca

SEQ ID NO: 200405 - DNA, 122 bp, Homo sapiens
ggcggaattgtgtaggactagaggatgacagccgagtggcagataccagggtcaagcttgcggggagaagggggacgggggtgggggagagtaaagaggagacgctggtgtttggtggtgtt

SEQ ID NO: 200406 - DNA, 122 bp, Homo sapiens
ggcgctgaggatcatgatgaaaaccaccccggggcttttcacaagctgcactggagtcgacggtggagaagttacagacacgcagtgtgtgtgtcacctgcgggccgctaattagagcgccg

SEQ ID NO: 200407 - DNA, 122 bp, Homo sapiens
ccacagacctctctctttcaaggcctgtgtcgtcaggacgcaggccagaagaagccacgacgaggcgcaggcgcgactccacgagggccacgcccctcctagagaaggaccgacccgttttc

SEQ ID NO: 200408 - DNA, 122 bp, Homo sapiens
ttctgcggcaagatgacagacgtagagcagaagaagcggaccttccgcaagttcacttaccgcggtgtgggcctggaccagatgctggacgtgccctacgagcagcttatgcagctatacag

SEQ ID NO: 200409 - DNA, 122 bp, Homo sapiens
tcaagaccagcagataaaaaataatttttaaaaacctcgtgagactgatttgccgcaggacgggaggaggaagaagcaagcgtggaaggtgctaacggaggaacctaaacctccatcctctt

SEQ ID NO: 200410 - DNA, 122 bp, Homo sapiens
taaagtgtcaaaatggccaacccatggctagaactagaaaagtttacctcagaaactgggcgattcgggccatgattgccccggccccaggctgcagcacatttcctgtggacaacaaactt

SEQ ID NO: 200411 - DNA, 122 bp, Homo sapiens
gaggctgctgagaaggtgcacagagcctgggtgcaggaaaccatccagaatgctgcttcccgccatctgtgagatcttcgttttctctaacactcaaaaatagatgtttctgttatgctctc

SEQ ID NO: 200412 - DNA, 122 bp, Homo sapiens
gcggcgctctgcagacctagtactgggctgtggataaggaagagcagagcggatgggttacgccgaggatgcccaggctgagcctcggagtctggtgctcctggactctgctgagggctggg

SEQ ID NO: 200413 - DNA, 122 bp, Homo sapiens
agtcccttcttcctgcctgtgcttcctgacggggtgccgttggggatggatgagaccaggcggcctcactgggtttcctagacctgtgctctgcagaagccgccgtgcaggttggccgtggt

SEQ ID NO: 200414 - DNA, 122 bp, Homo sapiens
tgggctgtccagggtccatctcctctcccgagaggtccctggactcaccaaggcagtgcccgctacagcatgtgtacgagaagccctgctgtcctagcaggaaggagcaagaggacaaatcg

SEQ ID NO: 200415 - DNA, 122 bp, Homo sapiens
gtacaagagaactgtctcctcatctcctggatctttgcccagcaaaacctccaaagagaccgctccccacagcctgggtccaaccaagggggaggggagaagaactgcaataaactagagag

SEQ ID NO: 200416 - DNA, 122 bp, Homo sapiens
agtcatctctgcagggtcccagctgaacacccgcctatctgtttgccgatgctggtcaagcgtaaggcttgctccaataaattgagtaagaaatgaaaatcttcaagccatgacaattcagc

SEQ ID NO: 200417 - DNA, 122 bp, Homo sapiens
agggattggcaaactttttctgcaaggccaaaaaggaaaagcatgttgggcttttagggccgtgtggtctctgttgcaaccactcaactttgccacggaagcaggcatggatgacacacaaa

SEQ ID NO: 200418 - DNA, 122 bp, Homo sapiens
cagcgccccacgaccttcctccgaatctgcccccgcaggctccgcggctcccccgccccgcgccccagccccacggccccgcgccgcacggccgctcccgttccgtccttggagggtgtgga

SEQ ID NO: 200419 - DNA, 122 bp, Homo sapiens
accgccaaccccctggcctacactccacccacctcccaaacgtgttggttgattcttcagcgtcacattacttcattgggctaggtaaaggtctatcagtcttcagggaggccctggaccag

SEQ ID NO: 200420 - DNA, 122 bp, Homo sapiens
cctccacctcctgggttcctccacctcccgagtagatgggactaaaggcttccaccactgcgcccggctaaatttgtttgtattttttttagtagagacggggtttcaccatattggccaga

SEQ ID NO: 200421 - DNA, 122 bp, Homo sapiens
cgagactccgtctctaaaaagaaaaaagtatatagatcacttcctataagatgggctcagcgttttgcttcctgaatccagtgacaggtggtctccctggctgcccagtgggcagtatatgg

SEQ ID NO: 200422 - DNA, 122 bp, Homo sapiens
tgatggtccggcaagacttccctctacaggggcacaggcgacttagggctgggcgcgggccggcccagggctgccctccccacgcgtgggtctgagcagagctggacagccatggcccagca

SEQ ID NO: 200423 - DNA, 122 bp, Homo sapiens
gtcctgacgggacctgtgtgtcccatgttttctcagctttggctgtcactgacttcgcgacgatggcaaggaggaaacggctccaactggggagagcagcggccccgacacgacatgtgtct

SEQ ID NO: 200424 - DNA, 122 bp, Homo sapiens
gatcagtagagaagatgctagtctcacagcaacttgtccctggcctcccttcagggcacacgcccaggactctcagcagcccctctggagttgctgacacactggtcctataaatgtccttc

SEQ ID NO: 200425 - DNA, 122 bp, Homo sapiens
atgttgcccaggcgggccttaaacccctggacccagagccatctgcctgcctccgtctcccgaagtgctcacaggcagagccgcagcgcccagcccaaggctgttttttaaaagaagaaact

SEQ ID NO: 200426 - DNA, 122 bp, Homo sapiens
ccgggacgcacgcagtcttcagcctgctcctttaagcctctggagagactcggctctgagcgggtccgcccgacacccgccccctccccccactcctgagaactctttactttttgtttgga

SEQ ID NO: 200427 - DNA, 122 bp, Homo sapiens
aaaagtctgcctgtctgtgactaagcaccagagtagataacgtaacaatttgttttacttcgggaatgcattttaaatcaggaagagaagtttctgtcctacttgaacccagcttcactctc

SEQ ID NO: 200428 - DNA, 122 bp, Homo sapiens
cggcacaggtagccaccgtcaagggccaccgcagagctcaggcaacgatgacgatccttccgttttgctcaatgctccacagtcgacaaagagcgttctggtccacacacgactgtgtgctc

SEQ ID NO: 200429 - DNA, 122 bp, Homo sapiens
aggctgaggagcagggcacgcaggtgcagtgctttcgatccgcacaggtagctcagtagacgcaggtccgggctcgctgggttgcttggctcctggcgggctcggcagcaggtagttagttc

SEQ ID NO: 200430 - DNA, 122 bp, Homo sapiens
gcaagagagaaggagccaggatctggagtgggaggtcacagctgctgggtggggcagccccggaggccagctccatctcagagggcctgtggaggctcaggcctggctttataggacattgc

SEQ ID NO: 200431 - DNA, 122 bp, Homo sapiens
agggccagatgagaccaaagaggaggaagaggaccctcctctgcccaccaccccaaccagcgtcaactatcacttcactcgccagtgcaactacaaatgcggcttctgtttccacacagcca

SEQ ID NO: 200432 - DNA, 122 bp, Homo sapiens
aataatgctggctaaataagtacagttcattacctcccaacagtcaaggagtttaagatccgtcaattcatcccacgtgagggagattatgtgatttacatgttaaagtgcccctgtggttt

SEQ ID NO: 200433 - DNA, 122 bp, Homo sapiens
gagagccatgggctggctcaccttcctccacctgttaccacccatcccaggactgctccccgctcctccaatgataagaggcttagctcagctaccctggaaaaaacagtttcacttgtcaa

SEQ ID NO: 200434 - DNA, 122 bp, Homo sapiens
tggcccgtgtcgcttctgtcccaagaaccggacggagagtgagggcacgagggtcgctgtcgggggctgtcgtcttccacgtacacgtcgtcgtgaggagcgcagtccggactcttcccgca

SEQ ID NO: 200435 - DNA, 122 bp, Homo sapiens
ccagcgaagtggtggccccagacatctcactcataggctcactccggcttgtttcaggcacgctttcccgggagctaaatcttactcgggaactagatcgagagctgaggtccggactggtg

SEQ ID NO: 200436 - DNA, 122 bp, Homo sapiens
gactcgccctccttaccgtgcccccttgtcttgtgtgcaataaatatcagcgcgcccagccgttctgggccactaccagtctccatgtcttgatggtagtggtctcccgggcccagctgttt

SEQ ID NO: 200437 - DNA, 122 bp, Homo sapiens
ggctgggagcagggtgagcccacagtagctgggattcagagattattgaactcaggctatcgtccttgaggctcagtctccaggggcgactaagtacacaaatgcatatacaccgctgtctg

SEQ ID NO: 200438 - DNA, 122 bp, Homo sapiens
aatagactatatcaaacaatataccaagtaaggataggttttgttttaggaaactgctttcggttacgtgtttgtatgtaagtgtgtcttgaattgctacgtaaaaacgtgagctttcttac

SEQ ID NO: 200439 - DNA, 122 bp, Homo sapiens
cccagcaagagctaacagccctccttgggtgtgcactttctcctcccctcaggcacctcgcgcattctcccgcctacctatcaatcatcgtgctccgctgtccagttggctggccaaggggg

SEQ ID NO: 200440 - DNA, 122 bp, Homo sapiens
agactgcactggttgctgcaaagctcaggcctgaatgagcaggaaacaaaaaaggccttgcgacccagctgccataaccaccttagaactaccagacgagcacatcagaaccctttgacagc

SEQ ID NO: 200441 - DNA, 122 bp, Homo sapiens
ccagatggggctgccctgctcttcactctttcttcccacctgtcttggtccattttctgtcgcttataacagaatatctgaaactgagtcacttgtaaagaaaaggagtttatttcttacag

SEQ ID NO: 200442 - DNA, 122 bp, Homo sapiens
tctgtgaaggaggagatggctgacccaggaagagaaacccgcactaaccacacattcacccgataaatgttattgggcattctctatgctccagacactccctttaggcagtgcttgtatgg

SEQ ID NO: 200443 - DNA, 122 bp, Homo sapiens
acttacaaaaagaaatggactgtgttaggattgcacattttactttgtttctcccaaatacgtgttctttgaatttttttccttccagggccaggactggagtgatggttgagacaggcacg

SEQ ID NO: 200444 - DNA, 122 bp, Homo sapiens
accaccgtatctggggtgatgtctacggggaagggctgggcaagaggtccgagaggtggtcggaaggtaataaggcaacaggggggagtcggaggtccccctattatttattagtcacagat

SEQ ID NO: 200445 - DNA, 122 bp, Homo sapiens
cagaggaaaaggagaaaagagaaagagacacagctatgccccttggatgctaaagaaatacgaggaagaggaaaatgactcagaacgggttggggatcaaattcttaaagacagattgtggg

SEQ ID NO: 200446 - DNA, 122 bp, Homo sapiens
ccttcatttatgtcattcttcttcctggtggtctagtcctatgctgtcttatatagtagccgctagccccatgtagcttttcagcattcgaaatggggtaatgctagagattgggtctcact

SEQ ID NO: 200447 - DNA, 122 bp, Homo sapiens
tgagaagtcagctaagagcctgagcagatactataagaatccatcgtgattgctgttttccgtttctctgtgtgttggttgtggaaggagtcttagcacgtgtacacacagcatgtgcattc

SEQ ID NO: 200448 - DNA, 122 bp, Homo sapiens
cgagcggagatgccacctggtggcagctccaggcaccgctcccggagcagctgaccccggcggccgaacagtaaacacgctgtcagaactgctcaacagcccacgcggtcctcatttgaggc

SEQ ID NO: 200449 - DNA, 122 bp, Homo sapiens
cagggggcgacgtccaagagcatattgtgtggctgcgtgcactgagtagagctcaacgcccgggacctaaaaaaaaaaaaaaaaaagggcgtggagccggagggtcggtcccagctcggggc

SEQ ID NO: 200450 - DNA, 122 bp, Homo sapiens
atccttgacctccccctccctgtctctgatgtgttttgatgcccatgacacattcctgagcgccgcttgctgtcttaccatttggcctgttcctgtagctttggggtgtgccccaggaaggt

SEQ ID NO: 200451 - DNA, 122 bp, Homo sapiens
ttacatcacattcagaggcactatgatgttagatttcaacatacgagtgtggcatgggaccgaattccacctctaagaggtcaaatagagtcaaaacagacctctaagtaggatgtggaact

SEQ ID NO: 200452 - DNA, 122 bp, Homo sapiens
gtgtcaagacagttgcaaaagcctggacgattccgccccaggaacgcaccgccccgggaacgagctgggaacacaccgtgccaggaatgcaccaacccagtcctcccggagccatgtgaagg

SEQ ID NO: 200453 - DNA, 122 bp, Homo sapiens
gtctcccgagggtacctggccccagaaacccagactggcggtcatcctgcacaaaagaggcggttgaatcacctgcagcgcctggagatgaggaggtaggcgggcgcccgtcatttccccgg

SEQ ID NO: 200454 - DNA, 122 bp, Homo sapiens
agtctccaggaccggggtgagtgggcttgcagcctcgaacccagaaccctctaccaggaacgtaagcgcctacccaggacccctcacgtgtgcccggttccctgcccgaaatcccaggaccc

SEQ ID NO: 200455 - DNA, 122 bp, Homo sapiens
ccagtcgttctggtcacttaggcgttcgcgtgagcgctcaaccccttaccgccacctcatcgtcactctacaccattctgagcgcaaaaatgttttgattgagacaaatttagaccaagcaa

SEQ ID NO: 200456 - DNA, 122 bp, Homo sapiens
cctccacccggcagccgccccgtctgggaagtgaggagcccctccgccccgcagccgccccgtctgggaagtgaagagcatctctgcccagcagccgccctgtccgggaggtggggggcagc

SEQ ID NO: 200457 - DNA, 122 bp, Homo sapiens
caatcaggcgtgcggccgcagcagcgcactagcaaatgggaatgccacggaaatgtgaggcgctcgttatcggggactcagcctctgcccaccgctcggctcccttccacggagcatcttac

SEQ ID NO: 200458 - DNA, 122 bp, Homo sapiens
agacaaaaccctgaagagttaagaacaaacgcaaggaaataatttttattgtttaaagcccggaatgactgtaactttcacacaaggtacgcatctatgtttttgggggaggtgatgtagtt

SEQ ID NO: 200459 - DNA, 122 bp, Homo sapiens
gaccaagcgggcgcccgggccggccagagggaagggccggagagcggagggaggggtctgcggtcccgcccaccgcccccggccaggcgctgcacaatctgaacttgccacgtgggagctgc

SEQ ID NO: 200460 - DNA, 122 bp, Homo sapiens
aattactgacagaataaagtctaaacacctttgatattcttctatgacctggcttctagtcgcttatgtaccagtcctctgataaactttctccattttatcccatcttttctgcttatttt

SEQ ID NO: 200461 - DNA, 122 bp, Homo sapiens
ctctgagtagggggagaggcaccacctggggaagactgccttggagggcaaaggtgacatcgtggaagaccagttgggcccaagcctgggatagtagatggggagggagaacagaaaaatac

SEQ ID NO: 200462 - DNA, 122 bp, Homo sapiens
cattgtgaaaacatcatagtgtgtacttaaacaaacctaggtggtatagccttctacatacgtaggctacatggtatagtttattgctcctagactgtaaacctttgagcatgttactttac

SEQ ID NO: 200463 - DNA, 122 bp, Homo sapiens
gtagactggtggatatgtacctctgtagctcagagggaaggctggagagggaaaattggacgtcattaacacacagctgttatataaagcctagttatataaagcctaggcataaacaagct

SEQ ID NO: 200464 - DNA, 122 bp, Homo sapiens
ctcagctacagccgccgcagcctcccagggaaccggctccgcggcgcccctaaaccccggcgaggagccggagcggactcactcacccgcgcttctcctgagcagggaaagggccaaagccc

SEQ ID NO: 200465 - DNA, 122 bp, Homo sapiens
cctgccaaaaaaaaagacacattgaacacttcactgccaagtaatgaccataagcaacagcgactgaccagctgagagggcttgagccatgctgaccctgtgcaggcatgatgctgtctgct

SEQ ID NO: 200466 - DNA, 122 bp, Homo sapiens
agacacccgggcgcggcgcggggccctgatggatgcggtgaccgaggctgtggctgcgggcgcggcgtctccgcggcagtcgctgcctccgcggccccctccccagccccagccccagcccc

SEQ ID NO: 200467 - DNA, 122 bp, Homo sapiens
ggggcacatggggtggacacactgggagtggatacctgaggtgggcacgtggggtggacacgtgggtgtgagtggtcacctgaggtgcacacgtgagggtggatatcatgagggtggctgtc

SEQ ID NO: 200468 - DNA, 122 bp, Homo sapiens
tggctctcggggcaggtggggccatgcaacgaacaaagggcacgactccgcccatgcatgcgccacaggggaacacggtcagccaaggaggaaggacatggcggcgtctccgtggcttcgct

SEQ ID NO: 200469 - DNA, 122 bp, Homo sapiens
tccattcgtggtcatgaacacgtggattgagccagctcaagtgaatgtggagctgttagccggggaggagctgccccgatccaactcaggaccctcactcagctgagccccactgtgccggg

SEQ ID NO: 200470 - DNA, 122 bp, Homo sapiens
atacacaggctgctacttcagactagtcaattacaatttgatttatggataatcatattacgaaatatctttgaaaatctattgagaagtccccacataatgtctttaaaacccaggaaatt

SEQ ID NO: 200471 - DNA, 122 bp, Homo sapiens
cccgacgtgcgcgcgcgtcgtcctccccggcgctcctccacagctcgctggctcccgccgcggaaaggcgtcatgccgcccaaaaccccccgaaaaacggccgccaccgccgccgctgccgc

SEQ ID NO: 200472 - DNA, 122 bp, Homo sapiens
taccatattataagcatgacatgcaaataaataagtgctgctgggtctgtgtgggtaggccggcaggatttatttcaggtgacggaggaacatacacggaatatgaatttccgcaggagtgg

SEQ ID NO: 200473 - DNA, 122 bp, Homo sapiens
cttacacacaaccaagccacagcacactggtgcaggggtggtggaactgcaccttcaaatcgtgcctggctactgaccagtgctggggtgtgtgctttttttgaaagaaaaaaatcccataa

SEQ ID NO: 200474 - DNA, 122 bp, Homo sapiens
taccttgacaccactctggtctgttgacttgtctttcatttacctacctggtgagctgtgcggtttagcagctagattcctgggcatgctggagagatactggagaactgacactggtgcct

SEQ ID NO: 200475 - DNA, 122 bp, Homo sapiens
ttctgatctcctggggtggcgagggcttcctggagtagccagaggtggaggaggatttgtcgccagtttctggatggaggtgctggcacttttagctgaggaaaatatgcagacacagagca

SEQ ID NO: 200476 - DNA, 122 bp, Homo sapiens
ggggtggcacatgtgtgccctgtgctctgaagctgcccctacaggccctggaatcctccccgtgtctcaacacactaccctctggggagtcagttctccccagagtccccgttcctgggcct

SEQ ID NO: 200477 - DNA, 122 bp, Homo sapiens
aatgtaggagaatcaatgggaaacaacgtaaagccttctgctagggcataaataggaatccgtctatgtaatcaagaaattactttgcctcctgatctaaatgcttgcctctagtctagggc

SEQ ID NO: 200478 - DNA, 122 bp, Homo sapiens
tgccggcctcctcaaggctgtcttcgtcctcagaccggggctgccccgccgagcctggcgcggtgagcacctgcttaatggtgaccacggtgccatcctcggccaccacctccttgaccagc

SEQ ID NO: 200479 - DNA, 122 bp, Homo sapiens
acccacatcgggacgcgtgctccactcgtggcattccaggctcacaatgtcgcccttatccgatgatcagccacctcggatgtgtccatcaagcttttaaaattcacaaacaaaaacaaaag

SEQ ID NO: 200480 - DNA, 122 bp, Homo sapiens
aaagacagaaaagtacaacaggggttaccaggggtttggggaagggaaatgaggagttaccgagtaatggacagtttctgcttgggatgattaaaaagttctggaaatggatggtggttaat

SEQ ID NO: 200481 - DNA, 122 bp, Homo sapiens
tgggcggttgttaaggcgaccgttcgtgacgtagcgccgtcaggccgagcagcccccaggcgattggctagacaatcgaacgatcctctcttattggtcgaaggctcgtccagctccgagcg

SEQ ID NO: 200482 - DNA, 122 bp, Homo sapiens
gtccggccggttccgctgcagctgaacagcaagatgcggcacccaggttaccctgatcatcgcagatttctccccggggctctgttctgaggcctcaaaagtgctccttgtagatgggacca

SEQ ID NO: 200483 - DNA, 122 bp, Homo sapiens
ctttcctttccctttcccctttcctttccttttgatacagggttttgctctctcaccctgcgtgcagtggcacgttcatcactcactgcagcctcaaactcctaggctgaagccatcttcct

SEQ ID NO: 200484 - DNA, 122 bp, Homo sapiens
gtaacatggtgtgttggagagatgctcattattggggtgggggtgctggagaaggcttcacggggcccctgacacatcaacggcatttgacatgaaaagaaaggggcaaggaggtgggggtg

SEQ ID NO: 200485 - DNA, 122 bp, Homo sapiens
ggtgacaacgtgctagcagccatcgctcgctctctgcccctcctcagcgtcggctctggccgccctcgaggagcccttcaacccgccgctgcgctgtgggggcccctctctggggctggctg

SEQ ID NO: 200486 - DNA, 122 bp, Homo sapiens
ccgccggggtccctggggacgcgccagcccggcagtggctcgacgatggaggagccgcagcgcgcccgctcgcacacagtcaccaccaccgccagctccttcgcagagaacttctccaccag

SEQ ID NO: 200487 - DNA, 122 bp, Homo sapiens
caggagtgacgcgcatgtgaataacacaccagccagtacacagcaaccactcaggactgacgcgcgtggtgaataacacaccggccagtacacagcatccactcaggagtgacgcgcatgtg

SEQ ID NO: 200488 - DNA, 122 bp, Homo sapiens
cgcagggaaggcaacttctcaccgcgagatagttacaaatatagtaccgttgctactacccggtgccttcaatgagcagtcttgacaggggaggcataatctaatcctacttctgctgccaa

SEQ ID NO: 200489 - DNA, 122 bp, Homo sapiens
agcactttcctagaataaggcaagtgctgcttctctttgttatgctgtctcagacttgtgcggagtggaatatactgtgcggagtggaatatactgtagcagaagaaacagaaagtggttct

SEQ ID NO: 200490 - DNA, 122 bp, Homo sapiens
gtctacaagcaatacgaggacatggtggtggaggcctgcggctgcaggtagcgcgagggccggggagggggcagccacgcggccgaggatccccagctgatgagcagcagcgggccaccctg

SEQ ID NO: 200491 - DNA, 122 bp, Homo sapiens
gccatgcttccttcaatactctgaataagctcctttcttgcttttttcagcttctgtgggcgctgtcaatccttgaagttccttggcttgcagctgcatttgtccatctcacatgatgctct

SEQ ID NO: 200492 - DNA, 122 bp, Homo sapiens
tggagtgggatgatcagcgatatgataatcgatggagagaaaggtccaacctcaccacttcggaacagtgaaaatctgagcagtcatgccagtatttattgagcacctactgaatgccaggc

SEQ ID NO: 200493 - DNA, 122 bp, Homo sapiens
ccttgtagcgcaccatgaggatgacgatgaagaccagcagcgtggccacgatgatgcccccgatgaccaggatcatggtgccgcccagaatctggctgtgcatggactggcactgcgggtag

SEQ ID NO: 200494 - DNA, 122 bp, Homo sapiens
cttcagaggagcaggggcgcaggccagggtaggagcaggcttctcgaacagtggccgccccggcttgctgcccagaaaggcaccttgcacagaccagatctgccagttcagaaacagtcact

SEQ ID NO: 200495 - DNA, 122 bp, Homo sapiens
agatggtggctcctgtggggtcggggattgggggtctccgttcctttcatcctccagcctcgtgggggagtcaagtctccgtaggcggagagcccggatgcaggcgcggctaggctgccctc

SEQ ID NO: 200496 - DNA, 122 bp, Homo sapiens
gcaggccagcgtgaaagggactggcaggagtcctgtggggacaggctgggggcaggccagcgtgaaagggactggcaggagtcctgcggggacaggctgggggcaggccagcgtgaatggga

SEQ ID NO: 200497 - DNA, 122 bp, Homo sapiens
atctgatttaagccacagtatttatgtttctattacaacatttaaaacagaatcacaggccgggcacagtggctcacggctataatcccagcactttgggaggccaaggcaggtggatcacc

SEQ ID NO: 200498 - DNA, 122 bp, Homo sapiens
cagaaaagggcattctcgttgagggtatggaaagccagaaggcaggactagagtaacaatcgagaatgatttcaggacaggggtaagctaaacccagttgtggaagtcatcctccagtgtcg

SEQ ID NO: 200499 - DNA, 122 bp, Homo sapiens
tctcagagcttactcaattgttcctttatcaactcctgtgatttcctaatgtcagtcattcggccagccttattaggtaatttctattcttagtgggtagtacaaagaagagaaaaagacaa

SEQ ID NO: 200500 - DNA, 122 bp, Homo sapiens
tccaggctctgagaggagggcatcggatgagcgcatcttcacccgagatgcatctcctgccgccgctctttccagccttgtcaacaccacagcagataccgaacaacgccggcttgcccgca

SEQ ID NO: 200501 - DNA, 122 bp, Homo sapiens
gccttccactagcctggaattccagacccagccaatcgagcatgaaggtggaataaagcccggtggtagtggtcaggctggtcactaaagggctcaaagtcccttggtgactgcacagcaca

SEQ ID NO: 200502 - DNA, 122 bp, Homo sapiens
aggtgccggggactggaggttttatgggtttaaaacaggggcgtccgcctgggaaagcagcggcttccactccctcgctgccgtgaagctgccgccctccctttcctcccgcggctgccacg

SEQ ID NO: 200503 - DNA, 122 bp, Homo sapiens
gcatgtgtgctgctcagaaacacaggtatgcacatgtacaaggtgtgagatttgtatttacgaggtaaaacacacttatactgatagttatgtaatatgttcatcaagtattagagtaaatg

SEQ ID NO: 200504 - DNA, 122 bp, Homo sapiens
tttcctttccttgagatattcattctattagatcttccctgctttcagagagtcagggagcgtcgccactcatgagggtggtcagggcgtcaggggccagattccccggaacaatcctgcct

SEQ ID NO: 200505 - DNA, 122 bp, Homo sapiens
gaggagcgttatcagcaccactgaatgctccagaagttcaaacaacaacaacaacaaaaacgcaacacgcgatcagaggcgttttctgccagtgacccgcgaactttgccccccacccctcg

SEQ ID NO: 200506 - DNA, 122 bp, Homo sapiens
atcatatggggatggcttcgcaggcgtgtctctctgatcatatggcgacggcttcgcaggcgtctctctctcatcatatggcgatggcttcgcaggcgtgtgtctctctgatcatatgggga

SEQ ID NO: 200507 - DNA, 122 bp, Homo sapiens
aggccggcgcggggcagcaggcagcagggtgggggggtgccctcgcgcctgtgtccctcacgccgccccagctcctgcccaggtggctgtggctggcgttccgggacctctgtgaccttggg

SEQ ID NO: 200508 - DNA, 122 bp, Homo sapiens
cctagatttttgaaaatcatgatttcagaaggatttcaaaacaaatctcggaaactgacacgggctttactaattctttattttggacagtaaggaaagtaaaaaagttaatttccatctac

SEQ ID NO: 200509 - DNA, 122 bp, Homo sapiens
gccgggatgggcctgtgggccggcaggactccgggcggccctacagcttggtgggctgctcggggctgagggggccaggcccgctgggcgggggcagcaccatgggcagcgagttgctgccc

SEQ ID NO: 200510 - DNA, 122 bp, Homo sapiens
cgtctgtcagtccgtgccctccccacagccccgccccagagtcaccggaggacccactggcgccgccgccgccgcagcagcagtgcagcaaaccccacccacccgacccgccgccgcggcaa

SEQ ID NO: 200511 - DNA, 122 bp, Homo sapiens
ttaaagcattttattgcattttatgacttggagtttatgtgaaacctcaacggtattagccgaacagcctgccgcaccttccgggagttccagagtgggcctacaactcccacagggctccg

SEQ ID NO: 200512 - DNA, 122 bp, Homo sapiens
tttagtagagacggggtttcaccgtggtggccaggctggtttcaaactcctgacctcaagcgatccgccccgcttggcctcccaacgttctaggattacaggcatgagccaccacgcccaac

SEQ ID NO: 200513 - DNA, 122 bp, Homo sapiens
gcccatcttgaccccggcgttgtaggcttgccaggcggtcgagttcgagggggcctgttccggaaatgagacgggggctgacgagggcatctgctgggccctccaggccaggagcgtatttc

SEQ ID NO: 200514 - DNA, 122 bp, Homo sapiens
ctgaggacacagctgctgccactgcctggggccagccacgcatcctccccagacagggaccggtctagctgtaccagccgctgccccggacctgctgccctgccccacccccccctcccctg

SEQ ID NO: 200515 - DNA, 122 bp, Homo sapiens
cctccggacgccggcgctggggacgtgggcgcggcacggggtggccggggggcaccgccgcgtccggagcccgtccccagactcgccccagggttccgtttctggatcggagtttccgcggc

SEQ ID NO: 200516 - DNA, 122 bp, Homo sapiens
ccagccaatttaaaaagattcataaccacatattatgatcaaagttaacaaatcaacattcgtttgcctgcagatggtgaggatacagcatcacttttgtagcattgccaaaaaggcatagc

SEQ ID NO: 200517 - DNA, 122 bp, Homo sapiens
ggcgcggcactctcggagttctgcgcaggcgctggcgtgggcgaggcggggctcggggctcgcggtcgctgtagccgcgcggggatctggggtttctctgggacagcggcggcggcggtggg

SEQ ID NO: 200518 - DNA, 122 bp, Homo sapiens
tctgcgatcccagctgcgctcggggcagtacgcgaacctgcgccccgaactctcctggggcggatttcttgtcctgacactggcacaggccagctgactactggagggaagtcacgtttgac

SEQ ID NO: 200519 - DNA, 122 bp, Homo sapiens
tcgcggtcttcagcctcagaccacgatgaattaatacggatgaaacttcccttgcccgcccgccagcgctcgcctcctgctgtgtggcgtggttcctaaccggtctgtgacccaggggttgg

SEQ ID NO: 200520 - DNA, 122 bp, Homo sapiens
aatatcttcctctcccccgctgccctttaggagcaatgttacacaaggggtgtacacccccggctatattgggagtgatatcatcctctccgtccctttatattaggaacaatatccctagg

SEQ ID NO: 200521 - DNA, 122 bp, Homo sapiens
gccgtgtttggggccagtccccgcaccccgcttcttccccacctggggagcggggcgccgcggtaggggcactggagcgcacgatgcaccccgccaacgagtcctttctgcagacggggttc

SEQ ID NO: 200522 - DNA, 122 bp, Homo sapiens
ctggaacttgcagtagctaagtaaggggcattcatttctccctttcttgttaaggaactacgctgttgaatactcacttggaccacccatagctctttctcaaagctgcttctgagcacagt

SEQ ID NO: 200523 - DNA, 122 bp, Homo sapiens
cggccgcgtggctgcggaggtgtgcttgctcagtgacgtcaggcgcggctgccgttgcctcggcaacctcacctgatccgaatgccgtgggcacacacgctgacttctgggctctctgcttt

SEQ ID NO: 200524 - DNA, 122 bp, Homo sapiens
aacatttaaaaagactagcagaggaggtcgcggcgccggaggccccagaaggctcgaaggcgccgcgggctggggtcggtggcttagggagcccgtccggccatggtggccgcgggtggtgg

SEQ ID NO: 200525 - DNA, 122 bp, Homo sapiens
accattccttctggtatggaaatcatatcagaaggttcccaggaagcgtcttccaggctgcggttccctggacggtcccatctcagctcagtttttcctcccccagctattgtgatgacccc

SEQ ID NO: 200526 - DNA, 122 bp, Homo sapiens
gtctacctataggcaccccccagagaacaatacaaggcaactttgagttactgtgaaaatcgccagtgttatgcgcatttacagaagagagaaacattgtggagagctggaactcattcaac

SEQ ID NO: 200527 - DNA, 122 bp, Homo sapiens
tcacggccaggagcactgactgttcctgctcccacgtcacctgggtggtgtactgattcacggccaggagcattgactattcctggccacctccttgcacctttcctggttccctcagcctc

SEQ ID NO: 200528 - DNA, 122 bp, Homo sapiens
tcctgtcctcgtacatccccctacactacctctcacacccaggccacccaaccctcggcgcgggcccgagcgcgggggattccgagtgtcagtgctttcctccacccgcgactccgagaagg

SEQ ID NO: 200529 - DNA, 122 bp, Homo sapiens
cccctcgagtcacgtgatccgcttcaccttgtcgcgcgcccatcctaaacccgcgcgccccgcctcggctgcaacgttgctgacaggctggcgtgtcccaagctctttcattctgttaccgc

SEQ ID NO: 200530 - DNA, 122 bp, Homo sapiens
ttgggcccaacagtgactaatcgtggacagaggatgggaggcgccagccgatgaagtcctcgcgcttccttcattccttccatggtctgtttcacgtggcttctgtagccagcctagtaagg

SEQ ID NO: 200531 - DNA, 122 bp, Homo sapiens
tccccgtctcccggtggggagggctgctatggcttccagggtccccaggactttgggcaacggtggcgggggctgctggaggggcctggcctgcgcctgccgagtggggtgggggaaagagg

SEQ ID NO: 200532 - DNA, 122 bp, Homo sapiens
cgtgctccgctccctctgggtcctggcaggccaggggcggcagcgcgcatgctcctgggtcgccgctacttgcagcccgcgggcgccgtagggctggcgcagggtgcggtggggcggttggt

SEQ ID NO: 200533 - DNA, 122 bp, Homo sapiens
atgaaaagccaccccctttctgtaggataatctgcagaagaatatttgagagttgcttaccgctaaattctcctatcattagaagcccgtcttttctgtgcccccttcccattctcaatgac

SEQ ID NO: 200534 - DNA, 122 bp, Homo sapiens
cagccaggaccagctgtggagggagcaggcatgctcaggggagcccacccgccttcaggacgcctcctcagggcacccagggaacagggggccagcaagctgccctatccgcacccagcctg

SEQ ID NO: 200535 - DNA, 122 bp, Homo sapiens
tgggaacaccgacgtcctgagacttagtaagaagagtctgaggggctactcctctctccccgtggccccagttactgggtgttctcgtatttcaggtatctaatcagcctgcctgggagcgg

SEQ ID NO: 200536 - DNA, 122 bp, Homo sapiens
acgtatgcatctgcacgtgggcccacatctgcaagaacaggctgctcaggccatgaggcccggtgcatcacctgcacttctctttataacgggtagtaaagtctccctcgctctgtgctact

SEQ ID NO: 200537 - DNA, 122 bp, Homo sapiens
aactgcgaggcacacagccttcccagaatggcagcaaaaccaaacatggccctgggaggccgcggggaagtcctaccttgcagagctctgctccggggccagggggcgctggctggggcccc

SEQ ID NO: 200538 - DNA, 122 bp, Homo sapiens
tcgtggtcaggctgatctcctcgcctctctgcagggctaccagatccccaagggctggagcgtgatgtatagcatccgggacacgcacgagacggctgcggtgtaccgcagccctcccgaag

SEQ ID NO: 200539 - DNA, 122 bp, Homo sapiens
cgtggccgcagctgcttggctcaccacagcggaagtcggtctctctcatcctggagtccgcgcggctgagggcgaggtgtccttccgggggccctgaggggctctgtccccggcctctcccc

SEQ ID NO: 200540 - DNA, 122 bp, Homo sapiens
ggctggggaggggccgggcgcggcggtgggtgggtttgaccctcatttgctggaggcgggcggcggaggaggggaggagggggcagtgggcggaggcgggggctgggaggaggtgccgcgag

SEQ ID NO: 200541 - DNA, 122 bp, Homo sapiens
tcataggcttgtgttccaccagctgcacagtggctattatgaaagtatttcagcctgcgtcgaccccagtgtttgtgcagtcaagattatatatacccacgatccatagcctgccagagagg

SEQ ID NO: 200542 - DNA, 122 bp, Homo sapiens
ggccctcccgcattcaggaggcgtaggctcaatgaaacattctcattcttcaaaaggacacggcccacgccagggcgttgggaggcgcacctagtggagacgcagctctctgccctacacca

SEQ ID NO: 200543 - DNA, 122 bp, Homo sapiens
cctcaagcgtggctctcagggtctcaggccccacaggcggtgtatgggttggggaggccccgcgttggggattctctcctccttctcctaacctgtgtcgggtccttcttcctggatactca

SEQ ID NO: 200544 - DNA, 122 bp, Homo sapiens
taaggagggagcagtgcggggtttaaatctgaggctaggctggctcttctcggcgtgctgcggcggaacggctgttggtttctgctgggtgtaggtccttggctggtcgggcctccggtgtt

SEQ ID NO: 200545 - DNA, 122 bp, Homo sapiens
gctcggggggcgccctcgttcctcttatcgcgcctttgtccctccctccgttccttgccccgcaccctcactttcgccgccctgtgcgttgcctgtcccggaactggttccctcaagccgcc

SEQ ID NO: 200546 - DNA, 122 bp, Homo sapiens
ttggaggctcagagacgtcgactgacttgctcccagtcacacagctggttgtacctaactcgcagtccaatttttcaccattagcagatggggctctatgggggagtggtggggggtggagg

SEQ ID NO: 200547 - DNA, 122 bp, Homo sapiens
ctgcctagctggacacctgggggttctgtatcccacactccaggggcctccttcacatgtcggtgacctctgacactccaggggcctccttcacatgtcggtgacctctgaccgctgtttca

SEQ ID NO: 200548 - DNA, 122 bp, Homo sapiens
acacccagaccgacgtggccactgtagtccccgatagcaacaaacgccttgaacctggtgcgctggccagcacgggtctgcttctgcactggcataatcttcaaaacctcatccttgagaga

SEQ ID NO: 200549 - DNA, 122 bp, Homo sapiens
agctgccccagcgacggcggagacggcggcggctgctcctcaccggcccgttgttccacccgcccccatcttccagacccccgcccccgccaggctaggacgagcagccgccaccgctgcca

SEQ ID NO: 200550 - DNA, 122 bp, Homo sapiens
ggggcgagcggcggggcgggggtacagccgggtgacatttaccaggtctcaggttcacaccgcgggcggccgtccgaaggctcctctcggacggtccccgagacctggagcacggcctgagg

SEQ ID NO: 200551 - DNA, 122 bp, Homo sapiens
cccagcaccactgctggtcctgcctctggggtgcgacctgtgtagccccataggccacctcgcttggcttaagactctgccattgccatcctgaaactctttacagtttttgaacaaaggac

SEQ ID NO: 200552 - DNA, 122 bp, Homo sapiens
cccgccccccggcccgctcccctgtttaatatttcagtgctgggtggtgtgagcgccagtcgccggccttcagcgtggcggctgctgggcggcggcagggtggcggacggagcgggggaccg

SEQ ID NO: 200553 - DNA, 122 bp, Homo sapiens
tcctttttgaaagtatattttctctatggaagcctgagaagcttcagtgtagagcagggtcgggtggcactcagtgtggatgcaaaccaaattcctaccgcgacatgttggaccttcttttt

SEQ ID NO: 200554 - DNA, 122 bp, Homo sapiens
acccctgtagggtgggtattgttaattaagtggagtggttagatgtccagtgagtagagtcgagtccaatccgggcaatgaatcacgatgctatgaactggtgaaggaaagccacggatctt

SEQ ID NO: 200555 - DNA, 122 bp, Homo sapiens
tttatgtggtcctcctctgtgccaactccagtccgggagaaggactgttgattggcgtttcggctgagctgtgtagaggcttctgtttaatgagaatgcagacattctgaagtcgtcctggg

SEQ ID NO: 200556 - DNA, 122 bp, Homo sapiens
ctgttcagtgcatctcttgattcttccagatccacagaaccccaatcttggatggctactcgtgtccctccaatctccaggctctcctccctctggttcacactgcacattgcttcactaac

SEQ ID NO: 200557 - DNA, 122 bp, Homo sapiens
tcaggggtgggggctgcagggtggcctcttgccctgtaaccacagtcatcaaatatgcctcgccatctttgaggggctttcctgagatgacagattcctttctggcactgtgtagccaactg

SEQ ID NO: 200558 - DNA, 122 bp, Homo sapiens
ttcttggattaaatgcctctaaaggagcctctgtctcagaagtgtcatgtagaatgtttccgctgacggagaacatgacctttaaaaccccgagtaaaggaagcagagctgccaggggaagc

SEQ ID NO: 200559 - DNA, 122 bp, Homo sapiens
agagctggacgcgggcgctgacactaccctcccgcggccggcccggccctgcgcccggcgcgctcccagctcccagctcccagctgcaggcgcgccggcttcgctcggctccgctcggctcg

SEQ ID NO: 200560 - DNA, 122 bp, Homo sapiens
tgcccaccccttcccccaaccaggaccctaactgcggactctggcaccagacactgccaccgctgtcaaccaggccctgcagaggcaggaaagctgaactggctgctgatccccttctggtt

SEQ ID NO: 200561 - DNA, 122 bp, Homo sapiens
tgggactacaggcgtgttccaccacacccagcacttttcaatttttttgtacagatggatcgccctattttccaggcttgtctccaactatcagttgagcacaagctgattttatctcagcc

SEQ ID NO: 200562 - DNA, 122 bp, Homo sapiens
aatgcgtgaatccagggctctagtgagtgcggcctgtcctttgtgcatgagctttagaaacgtgctacattcttgtgggcctaagtgcctctttaggatgaaatcttttcaattagcaatca

SEQ ID NO: 200563 - DNA, 122 bp, Homo sapiens
agagagccttagactctttccagtaatgaggcttgtaaatcctgcggaatcggagcccaacgtgtgtaatgccggggctgtgcttacaagatcgtgctccagtccgcatggaaaattactcc

SEQ ID NO: 200564 - DNA, 122 bp, Homo sapiens
attaagccaaaaggaggcccaggccagcatctttttatgcacgcatacctgggcctagtccgggaagaaaccagagttggctatttgcagggcatccaaagacaacattgtctgcaccaaga

SEQ ID NO: 200565 - DNA, 122 bp, Homo sapiens
cggagcgctggaggtacctgagccgggcgtggggaggccaatccgcgggtgccgtgcgcccggtgccggtcgcagtcccaaaagctcctggaggtgacatccaggagcaccaccgcgctgcc

SEQ ID NO: 200566 - DNA, 122 bp, Homo sapiens
gcctcctggggcgctgaggaggtgcttttgcctttccagccccttttctgatggtcctcacggaggatgggccgcctcctggggcgctgagccactgcttttgcctttccagccccttttct

SEQ ID NO: 200567 - DNA, 122 bp, Homo sapiens
tgactttctgaaattttctaaagtatgcttttacaaatattggcattatcacaagcattgcgactagggttccaagcctgagagattaaaatagtctttgtgctaaaaaacaatctgacttc

SEQ ID NO: 200568 - DNA, 122 bp, Homo sapiens
ctgaatatttgtttctcaaaacacttgactgatatttgataattgaatgcagcagaaatacggacgattaaagtccacaaataattccaaagtttacttgatctagtagtttttacctttac

SEQ ID NO: 200569 - DNA, 122 bp, Homo sapiens
atgaagccacagcaggagcagcaaaggttggtttaattatgttaaaagcaaccctaagaccggaaaaagcttttaacattcctagcacataaaaatagttggtcttgatgttttgctgctga

SEQ ID NO: 200570 - DNA, 122 bp, Homo sapiens
tccggggaagggatgcgggctgaaggcgcaagcttccctcccactccccccgcaagtcggcgcggggaccacccaccccctggaaggattcctagcctagccccagcaccctcccctcagtc

SEQ ID NO: 200571 - DNA, 122 bp, Homo sapiens
ccgcaggccgccagctgcacagccaggccagcgtgctccttggctagcgcctccttctcccgggccacttgccccagcgtctccacctgtcactgggcctcccaccgggcctgctccagctc

SEQ ID NO: 200572 - DNA, 122 bp, Homo sapiens
cagagcatctgatgccacgtggagaggcgaagtacatgggtcggattccacgctgggagccggcctggatctgcgctttaggaagccactgcgggcgaccctatcttgtcgccaggacttcg

SEQ ID NO: 200573 - DNA, 122 bp, Homo sapiens
aagagagagtaagtgattgggggtgggtggcatgaggagaagagaatgaaacagagcaagcgcacaagagaaaaacagccttagaacttcaaagctgcatagacaagcagaatgtcaccagc

SEQ ID NO: 200574 - DNA, 122 bp, Homo sapiens
tctttaaaaatgcatatgggggtcagtaggtaaaagaaaagagaaccaagagagctgcagcggggagcacagcttgctttaaacatgagatccagctcagtgatcatgcgggggaaaaggcc

SEQ ID NO: 200575 - DNA, 122 bp, Homo sapiens
attctagcttcttagggaaaccatagacaacgacgtttcagagagtgccagaggtgaagccgacccgaaaccacattacagaaaggcttcctgtttcaaacaggtccaataaagccaccaaa

SEQ ID NO: 200576 - DNA, 122 bp, Homo sapiens
aaggatcgcgtcagaccccgaaagctggtttgttgattagtgatctaagaccgccggaagcgcttcttctcaatcaagctatgcaacaggaagtcattacgatcccgttgtaacctctaaat

SEQ ID NO: 200577 - DNA, 122 bp, Homo sapiens
ggatgagagtgcacaggccaggctgctcttgggtttgtggaagggcagctctggtttctccggccccgaaacacattgtatttgggagttttcccctagatcttaaaccctgtttatttaaa

SEQ ID NO: 200578 - DNA, 122 bp, Homo sapiens
gccacaaaggcagctgcagattacaagttcccaaggaaagatcctgtggctggactggggcgccggcccctgagacctcctggatactcagaatcaagtccccaaaacaagcactttgtctt

SEQ ID NO: 200579 - DNA, 122 bp, Homo sapiens
aagggctttcttatggggataaatgtgttttgtcactgaagtttttatttgttctgtcaccgagccaatctttattgcgtgagaagcagaccctgctgtattaaatgtgctgatgggaaacc

SEQ ID NO: 200580 - DNA, 122 bp, Homo sapiens
ctgttgctgtgaagctcagaccagacagggttctatttcatcttccacgccaacgtgtaacgtatctgctgacccaattttacagatgttctcttcaaaacggactcggctttgtgaatatt

SEQ ID NO: 200581 - DNA, 122 bp, Homo sapiens
tcagcaggggtccccaagccctgggcagtggaccaaccagtctgtggcctgttaggaacccggccgcactgcaggaggtgagtggtaggccagtgagcattactgcctgagctccgcctcct

SEQ ID NO: 200582 - DNA, 122 bp, Homo sapiens
catcgtaaggctgccggtgagtgtggagtaagagctatacgctggcccagcgcagaagtccgccaaattgccattgctgctgtgttgcaggagcctttgtaaagacattgtgaataaagatc

SEQ ID NO: 200583 - DNA, 122 bp, Homo sapiens
atcccgtccatctccaaaactaagggctttcctgcaaacttcacactcaggaatccatgacgtcgcctcctccgcggccagccagctccgtggctccttcggccgccagcacaagtccctga

SEQ ID NO: 200584 - DNA, 122 bp, Homo sapiens
gctaagcgacaagagaatgagaaccagcagggaaggcccagccttcccccaccagcacaccgggcggagcagccagcgcctaaggagaatcccaaaggaaccactgaagcccacagatggtg

SEQ ID NO: 200585 - DNA, 122 bp, Homo sapiens
acagcagaatggcacaagtcagctgtgcaacagagagccaggaattcttttgcactacagcgtaaccaagaatggggaatattcccatccacaggtttaaatatagtgctggttcctaagcc

SEQ ID NO: 200586 - DNA, 122 bp, Homo sapiens
aggacacccctgcaggtgaggatccccctcctcaatctgatcctgagaagacgccttctccggccctttggtcccacccaccctgactctcccaggtgaaaagcagctgttggtgatatttg

SEQ ID NO: 200587 - DNA, 122 bp, Homo sapiens
tgactctccacattgggagccccctcatttgtcctcagtgacttctaaaaacaccgctggcgtgggctggatatttgatcttggggccaagtgcttccagactttgttctctggccttaaag

SEQ ID NO: 200588 - DNA, 122 bp, Homo sapiens
tgatgacaatgtgagtgttcttgggatccggaagcattccctttgcagtgtcatagttaccgaagtaggcagcaggcagctcggtagataataccctgcacagacacgttaaagccttggta

SEQ ID NO: 200589 - DNA, 122 bp, Homo sapiens
caagtgccgcccccacaggttggacagagacttgaaccggctcccccaggacctgtaccacgcccgttgcctgtgcccgcactgcgtcagcctacagacaggctcccacatggacccccggg

SEQ ID NO: 200590 - DNA, 122 bp, Homo sapiens
tttagcctattttggtcacatatccctttgaaaatcttaagtcagctatagatccacttccgtacaaatccacctttcacaattttaggaggttctgtctcctgaaacccattgctgtatca

SEQ ID NO: 200591 - DNA, 122 bp, Homo sapiens
cggacacaggaactatggcaccgtcccacgcggacacaggaactatggcaccgtcccacgcggacacaggaactatggcaccgtcccacgcggacacaggaactattgcaccgtcccacacg

SEQ ID NO: 200592 - DNA, 122 bp, Homo sapiens
cacgtgggaccgttatgtttactcgctcaaggtcacaacagtcaggggcagaagaattttcgctccgattctgaagctgaagctgttaccttctctagtcttgagaccaaaggaatgcgaga

SEQ ID NO: 200593 - DNA, 122 bp, Homo sapiens
gggcagcctcgaattccacggggttggggttgcgccttttccaaggcagccctgggtttgcgcagggacgcggctgctctgggcgtggttccgggaaacgcagcggcgccgaccctgggtct

SEQ ID NO: 200594 - DNA, 122 bp, Homo sapiens
cctccccgggccaggtgtgtcctggagggcagggaagcgtcttggcacgcgggtgcgcgccgccccctcggcctcctgggctccctgaacctcgcaggaccccggcaacttcgagccccgcc

SEQ ID NO: 200595 - DNA, 122 bp, Homo sapiens
tgtacgcggctgcatacccactgcacgatgtaagtaaccttgacacacgatttatctctgcgtcatttgactccccaaatcccgccgggccacacccccccgggagctgcaattatcctgtg

SEQ ID NO: 200596 - DNA, 122 bp, Homo sapiens
gatgacaaagcaggcatcccccggcactcgcgatgaccaaaggaaagtctcaggaaagcacgaagatccaacagtcatactagtgctgcagactttcagaatgttttaaacctatctgtggt

SEQ ID NO: 200597 - DNA, 122 bp, Homo sapiens
tggggagtttctgtgccccctcccccaccacgggaaacttgccctcttgcacacgtggtgcggaaggcgccattttggcccagttggtgctgagtaagatgttctcgcttctctgctcaggg

SEQ ID NO: 200598 - DNA, 122 bp, Homo sapiens
tccctccctccaaaattaaacaacagtcgccccttcctgagcaggcttcagtcccaggctcgagttttcctgcgatcaccccacagtcacccacagcagctgttgctgcttctgtcgggttt

SEQ ID NO: 200599 - DNA, 122 bp, Homo sapiens
aagaaagactctatggccctagccacgccttctactgagttatgtgagaggaggagaccacgatcagactgtggttcatactcaaaccctaggtggttctccaggagctttttagctgcatg

SEQ ID NO: 200600 - DNA, 122 bp, Homo sapiens
aggggaagagaggggaagggaggaagaagtgccggcttcctcggctccgccctcgcggaccgattcctagactcgcccactccttgtaaactacgcggacttggtctttcacccttcctgtt

SEQ ID NO: 200601 - DNA, 122 bp, Homo sapiens
ttttaatggatttacttatttaccactggaaagaacatagcattaatagttttctgcccacgtactgttctaaaattacatcagaaggattccttatcaatgcaaaaatgagtcacagaaca

SEQ ID NO: 200602 - DNA, 122 bp, Homo sapiens
gaagagacagacctttccaactgagactgtgttcttgtcatttccgccaaatcataaacacgccttacatttatttgtttagtgtgcagctaacctctaggtgtactcacagctgctcttaa

SEQ ID NO: 200603 - DNA, 122 bp, Homo sapiens
aggtgcgattgccgtctccgtctcgcagcgcctgcctttctgacacggccctcttgatctcgtccagcaccaggttgagctccttggagcgcttgaggctctcctgctcagctgcgtgcaac

SEQ ID NO: 200604 - DNA, 122 bp, Homo sapiens
ttctgtgcgcaatgccctcagaaggtactacctgaatgggcactggaccgtggactggcccggccggtacaaattttcgggcactactttcgactacagacggtcctataatgagcccgaga

SEQ ID NO: 200605 - DNA, 122 bp, Homo sapiens
tgctgtcgtcatgaacggccacgtgcacgacctccagatcctcgactttccacccatcagcgccttccctgtcaatacgctccaggtaggaggaccctggggggcatgggttagtggggaaa

SEQ ID NO: 200606 - DNA, 122 bp, Homo sapiens
tccgcggcgctcgctctgcccgcgtcgcgctgccctggtcgctccctcgcgcggcggcggcggcgtcactgcccctacagtaactgtacagtacagccaaagccccgtatgatgctcgcgac

SEQ ID NO: 200607 - DNA, 122 bp, Homo sapiens
tgcaccgcggagcattcagatcacgcgtcaaggaaagcactaaggtaacacccagcatgacgcgtgtgcaccacggagtcactcggatcacgcgtcgaggaaagcacaaaggtaacacccag

SEQ ID NO: 200608 - DNA, 122 bp, Homo sapiens
aaggggtggaggggaggctgcgcagcagacactaagcaaggatcagagcgctcggagaagcggacgctaagcgaggatcagagcgctcggagaagcggacgctaagcgaggatcagagcgct

SEQ ID NO: 200609 - DNA, 122 bp, Homo sapiens
ccccgccccttggcgcccagttacctcccagaggctgcaggaagcagcatttggcattagcgattctgtctgattagcccaaagtggggacagataatggggattgttaccagtgaataaca

SEQ ID NO: 200610 - DNA, 122 bp, Homo sapiens
tcagctgttttcttcctgaagattgctccaggatctgatgacttaggcaactgaccatgacgtagcagcttcacgagaacctcagaatgttccgtgaaaaagttggggagggtacaatagaa

SEQ ID NO: 200611 - DNA, 122 bp, Homo sapiens
ttcttgtttgtccctctccaagatggctgctgaagacaaattactgctgccacagctccccgagctgtttgaaaccagcaaacagcttctggatgatgtagaagtagtgactgaacctgccg

SEQ ID NO: 200612 - DNA, 122 bp, Homo sapiens
tgtgtattccactaactgaaatatggcaacttagaggcgctgtttatttactgtatacgtcgacctattttagatgcgcatcagtatgaaattgtctcaatcttggatgtttcattttatga

SEQ ID NO: 200613 - DNA, 122 bp, Homo sapiens
taggtcaatattgaaggaggggctatagccttgggccaccctcttggagcatctggctgtcgaattcttgtgaccctgttacacacactggagagaatgggcagaagtcgtggtgttgcagc

SEQ ID NO: 200614 - DNA, 122 bp, Homo sapiens
tgaccactccgctgtcgaactgcttgggtcacgtggatctggtgatcagttctctttcagcgtatccccttcgcacagctgcaaacgtggctgcggatcagaatcactatcaaatgcagatg

SEQ ID NO: 200615 - DNA, 122 bp, Homo sapiens
aagggcattcactcagtagtgaattttgagtgactgacccaatctttaaacagattccctcgtcacaggtcaacagagtccctggttgacaactactaggtagattttacaagaacagccag

SEQ ID NO: 200616 - DNA, 122 bp, Homo sapiens
tggatggaggcaattaaaatgcctgtcaggcatttggtaccagaagcccctatggcaaaccgctaaatcgtaagtgagggctgcatcctattgtcagtgaatgatggcggagctgagtggct

SEQ ID NO: 200617 - DNA, 122 bp, Homo sapiens
tttcagatggcatctaagcctcctagacatccttctgttatcttattctctctctccctccgtcctcagggccacctgtaggctgaatgtggtgttcacttccaagcacaggttagactttt

SEQ ID NO: 200618 - DNA, 122 bp, Homo sapiens
ggacgttgtgatagagaggtcttgtcatctcttgattccaccttctcaaactaggagcaccgggattctctctctactaatgatgaaacctgtgaccaaggaatcacctaccacactctctg

SEQ ID NO: 200619 - DNA, 122 bp, Homo sapiens
ctggcgctcgctttctctgtctgagggtcggactccacgtcaggctgtctctggtgcgctcgcccctcccctctgaggagatgttatttccctcctttcttctccgaggggtcaagattctt

SEQ ID NO: 200620 - DNA, 122 bp, Homo sapiens
ctctttcaggattgataactggctctgtattagggtaacacctgactcgaatgttacacccgactgagtagtgttacggaggaaaacgacccagaagaacctgcaatatgtaatttggtgtg

SEQ ID NO: 200621 - DNA, 122 bp, Homo sapiens
gggccctttaagaaggagcgaggggcgcggccaggtaggggcgggtccagggcggatcagcgctgcgccggcgccggcccgggagccggatttggagcgcgaggcgccggtgggggcggagg

SEQ ID NO: 200622 - DNA, 122 bp, Homo sapiens
gaaatgccagtcctcgggcaggccctggctgtgatctgcgagagccgggcacgcacgccccggcgccctttgtgtaggcagagcacactgttaggagacttgccgggccattagcagtcaga

SEQ ID NO: 200623 - DNA, 122 bp, Homo sapiens
gccaggccgcgcggcgcctcgagctgcctcgggcctctgacggtgacggccgcccgcaggcgtgggaccccctgtgaggctgaggcccgagcaggtactgaccccttgtccttccccacagc

SEQ ID NO: 200624 - DNA, 122 bp, Homo sapiens
ctgagcccggcaggcagcccttcctcctcctccccttcagcaaagaaaggcagataaaaacgtgtttttataaatagctccagccccagctgatttgtaaattcagtgggttttttgtgtca

SEQ ID NO: 200625 - DNA, 122 bp, Homo sapiens
acggcggcgcgtcctgacctggattccgccgagttgggagctccaggcagcaggcgggcgcgcggcaccggctttccccttgtcctcaggagacgctgcctgcaattccgaaattaagtctc

SEQ ID NO: 200626 - DNA, 122 bp, Homo sapiens
gcgccttacctgtggggacgcccgcagcgccaggagctgccgccttgccaccccacgggacgcgcacctccagccccaatccacccgcgccccgctgcctcttcgcggcgctctcgcagcca

SEQ ID NO: 200627 - DNA, 122 bp, Homo sapiens
aaaagaacaaaattagcagagcatggcggcacttgtctgtactcccagctactcaggaggcgaaggcaggaagatcacttgagaccaagagttcgaggctgcagtcagctatgatcccacca

SEQ ID NO: 200628 - DNA, 122 bp, Homo sapiens
acgcctggcaatatggggagtgacatcatcccctccccccatggatattacaaacaatatcgcaggggtgtctacaccccctgcaatatggggagtaacatcatcctctgttcccgccgtga

SEQ ID NO: 200629 - DNA, 122 bp, Homo sapiens
ccgccccgcggattggccgctgagcggaagggaccccagcgggctgcctggcggaagagacgaaggaaggtcgccggcgcggcccgggcccgctgagcgaggctgagcgattgactcgcgga

SEQ ID NO: 200630 - DNA, 122 bp, Homo sapiens
ggcactttgggaggccaaggcaggcggctgggatgtgtaggttgtagtgagccgagatcacgccactgcactccagcctgggcaccattgagcactgagtgaaggagactccgtctgcaatc

SEQ ID NO: 200631 - DNA, 122 bp, Homo sapiens
tctcctgcttgtgggagggcctttttctctcctcccgacagaaaggctatctttggtgttcgttcccttgaactgtaacatcctgtaagggtatgattccatgcctctgtgtgggtgtgaat

SEQ ID NO: 200632 - DNA, 122 bp, Homo sapiens
tgcaggagaggcggggccaggcctccaggtgacccctctggcttcctgggcctgcagaggcgccgaaacgtgcaggcgccggcgtccatgaggcgtggggcgcgccgggcgagtccctgctt

SEQ ID NO: 200633 - DNA, 122 bp, Homo sapiens
gaagtgagtcaacttctggaatgcagtgaattcaacatttagccccaagttagtcaccatcgcaaatagcagtgagggctgtggctcttgttccatctccttttcagctgcaacaaagtgac

SEQ ID NO: 200634 - DNA, 122 bp, Homo sapiens
gccgccccctgccctcctcaccctgccctgctcctcttctctgctccctccccccatattcgcaggtctgcacaacccccggacctgttcacacccgcatggggacagctgtctgtgggctg

SEQ ID NO: 200635 - DNA, 122 bp, Homo sapiens
cctgtgagctggggactggcaggcaatgggcggtgaaagcaaagaggacatctcgtcccccgccctgtggaccatgcggctgagctgctccagctcctggtcgtcgtactgcatggagcagg

SEQ ID NO: 200636 - DNA, 122 bp, Homo sapiens
gaggggagactcaaccctgtccgtgcccggagcaccttccctgtgcgaggctcctcagggcgagtggggggcaaatgtctccttctgatctgaccctttccagcaggcatgcatcttcttgc

SEQ ID NO: 200637 - DNA, 122 bp, Homo sapiens
aacgggactgggttttggttgggtgcagcggaggttgcgtcaggggtacctaagcggtagcggcgtgggggtggggtgtacttggtccaaagctctgggctcctctggcgggcctccctgaa

SEQ ID NO: 200638 - DNA, 122 bp, Homo sapiens
gccctcgccttcggctcagccccgccaggccagggctggcccatcccgggcgggccgcagcgcccgcctcgccccctcacagccccgcacacccgagtccaggcgagccccgcgccggcgcc

SEQ ID NO: 200639 - DNA, 122 bp, Homo sapiens
gagcagccggagtgggagatgctgtttgctgagctgctttgtgcgtctgtcagaaagcagcggctctctttcgggcctgctaagctggggatacatactaaacactgaagtggagctcatga

SEQ ID NO: 200640 - DNA, 122 bp, Homo sapiens
cagatggtgttcagcccaagttacggggcagctttggtccactctggatttgcctggattcgcgtatgtgggggcgaacgcgtcttatcggggggcggccggttggggccaggcagcccgga

SEQ ID NO: 200641 - DNA, 122 bp, Homo sapiens
ccctgcccgtctgggtccctctgcgtgtctctgcttgtcctagcctgtgtgtgtcagtgacgtctaagagtgtgtgtgcgtgcgtgcgtgcgtgcgtgtgtgtgtgtgtgtgtgtgtccttg

SEQ ID NO: 200642 - DNA, 122 bp, Homo sapiens
tcttcatgtttcttctttgtatatttggtgactgtatcgtcatagatgtacatattgtgtcggtagggctatgaggcatgttacaggaatgtaattttctcagaatttacactcactcgcag

SEQ ID NO: 200643 - DNA, 122 bp, Homo sapiens
atcaccggggaaggctcccgtctcccttggcaggcaaccccactcccacgccgccagcctcgggagcctgctcctcagcttcctagaaacagagcatcgtgtgtgcagtctttcgcgttggc

SEQ ID NO: 200644 - DNA, 122 bp, Homo sapiens
tgattcaagtaatggtcaatatcaaggagtcagaggacagaaggatggggatggggtgagcgtggagtagaaactcaaaaaatgtgccccctgttgtcaggaaaccacatggcctgatgaag

SEQ ID NO: 200645 - DNA, 122 bp, Homo sapiens
gacctcatggatcccacatgtgccagcatggacagacctcatggacctcacgtgtaacagcgtggatggacctcaaggacctcacatgtgccagtgtggacggacctcacagatctcatgtg

SEQ ID NO: 200646 - DNA, 122 bp, Homo sapiens
cgccacaccgcccgcccgcctcgccaagaccccctcctccagctcctcccagacctcgcccgcctcccagcccctgcccagaaagcgccccccggtcacccaggctgctggggccctgcccg

SEQ ID NO: 200647 - DNA, 122 bp, Homo sapiens
ctgctgtgaccagcctcattgtccaacccatgggcacctggaacagaaagaactttagagcggctggatcccctgcaggggccttcctgcccactacctgtgcccccgaccccaggggccca

SEQ ID NO: 200648 - DNA, 122 bp, Homo sapiens
atggctgcctggtgttccatgattcacttccctagtgttgggaatgttatgcccccaccccgtttcattttgttgtttgctattataaataatgttgcagtgagctgagatctgcaaatgaa

SEQ ID NO: 200649 - DNA, 122 bp, Homo sapiens
tgctccgagtctcgcctcctgaacccaatcattgtttatccccaccctaacgcccgcctccgggaatcttatcctgcccccatgcaaggccccgcctccaggacgcctccaacctggacgct

SEQ ID NO: 200650 - DNA, 122 bp, Homo sapiens
agaggagaaacacatcttccctagagggttcctgtagacctagggaggaccttatctgtgcgtgaaacacaccaggctgtgggcctcaaggacttgaaagcatccatgtgtggactcaagtc

SEQ ID NO: 200651 - DNA, 122 bp, Homo sapiens
tccatagagacagaaagtacattagtggctgtctagggctagggcagaggggaaaaatagcgattgactattaaagggtttcattttggggtatgaaagtgttttaaaatcagacagtggtg

SEQ ID NO: 200652 - DNA, 122 bp, Homo sapiens
gaatgtgtcaccgcgctgggaaagttcaaggttacagccccaagcactgcggcaggatcccggagtggtgatcgcaggcgaaactttgccgcgagccgaccatgtgtgtgcgcgaggggcag

SEQ ID NO: 200653 - DNA, 122 bp, Homo sapiens
ttttgatgttctgaatttttaagttaatcttttttcctttctttctctatagggtatgaacgtgatttctgatgaaactggattggaataattttcatgatctttgtatatttatatatata

SEQ ID NO: 200654 - DNA, 122 bp, Homo sapiens
agctcccatgaaagcacaaaagaagtgtctaacctgaccggaggagttcaagagacagagcgaagaccagcagctcctcctccagcttccaacgcagagcgcagtcggcgagactgcagctc

SEQ ID NO: 200655 - DNA, 122 bp, Homo sapiens
ctgggcaacatgagccccagatgctgagctagaggcatgtactggtgaaatacacagtaccggactcagcatgctgagctaaaaaaaatatttttcctaatatgtccagtttaaaaacttgt

SEQ ID NO: 200656 - DNA, 122 bp, Homo sapiens
cgctgctccggagcatggcctccgccaggggcgttacggagacaaggccccaggaccaatcgtattggccagtggggggcggggcctcgttgccagctccagaccggcgctatgggcactcc

SEQ ID NO: 200657 - DNA, 122 bp, Homo sapiens
ttaatatggcttataagtcctttcagactctgcctctgcctcttcctagtatgctggtttcgctaataaccaccccctgcctccaattttctgccctaacagcatgaagcctctcagaattt

SEQ ID NO: 200658 - DNA, 122 bp, Homo sapiens
ttcccggctacaacttccccttccttcctgaaacaccagcgccttactcgctcagtcccccgttgccacctccgtcacctcctcggccgccgctcctgctggcactgctggcgctagcgctg

SEQ ID NO: 200659 - DNA, 122 bp, Homo sapiens
ggtgaggagggcgctcagggaagcaggagacagaggcggaggtgggcggccagggaggaccgacaggtctgggtttccgctcttgccccacaggctgacctgaccgagcctcagtttcctcc

SEQ ID NO: 200660 - DNA, 122 bp, Homo sapiens
taatctcatccacctcccacagtgactggctcagggatagacaatggacccagcctacatcgatgagcttaaagtggtgttctaggaccagatgctttctcctgctctgagtggtggagtgt

SEQ ID NO: 200661 - DNA, 122 bp, Homo sapiens
ttaaatgacagttcagtggcattaaacatatcacatttttgtgcaactgtcaccattgtccgtctccagaacttgctcatcatcctaaacagaaattccatgtgcattaaatacctctgcat

SEQ ID NO: 200662 - DNA, 122 bp, Homo sapiens
agagatgcctgtcttggtggctttggtgagagggactcagcaagcaaggcctggcaagaacgtcaagaggctctgggggacggttgcaattttactctagcctggctgagaggtgatgtcag

SEQ ID NO: 200663 - DNA, 122 bp, Homo sapiens
gtttgcattcacggcagtagttagcccaggtgtggggaacgagagtgcactgcatgatagcgttctggtgagctgggaaggacccaccactgccactgaggattgttttggaagaaaggaat

SEQ ID NO: 200664 - DNA, 122 bp, Homo sapiens
ttagatccaccacggacagacagactgggcccggagggtagtcggctctcggcggcttctcgtctccctccaccttctccgggcccaggtaagtagaagaacaggctctgaagcaggaagtg

SEQ ID NO: 200665 - DNA, 122 bp, Homo sapiens
aaacataccgaccacccttttattaggttccctaaaattgtaggcagggacacaacagaacgctcgggagactgcaagccccaggatgccgcgcggccacctgcacctgccgccactagcac

SEQ ID NO: 200666 - DNA, 122 bp, Homo sapiens
caaaaacagaagggtttgtttggtttgcaaggcaaacatgatcctgtctggtgattttggcgatacctaccacttattggaggggaagaccaaatatgaaggagctaggtaccactagatgc

SEQ ID NO: 200667 - DNA, 122 bp, Homo sapiens
gacatcaccagggcaccgccgtgtggggagctgagcagggtggcgagggcctgcaggacacgcaccgtgatgcccggcacctcggggctgccctggacgacgcgggccagctcctggcccag

SEQ ID NO: 200668 - DNA, 122 bp, Homo sapiens
agtggtttctttcaaagctttcactgcagtcccctgaacaaatacttttttcccaagaggcgttccccaggctgaaacaaggggaagtaaatgtgaccccactgcattgcctcccacaagtc

SEQ ID NO: 200669 - DNA, 122 bp, Homo sapiens
taatttcatcccagaaccatcccccatccccaccccggcccatggaaaaattgtcttccacgaaactggtccccagtgccagaacggttggggaccactgctctatgaaagtagtttctttt

SEQ ID NO: 200670 - DNA, 122 bp, Homo sapiens
aaggacttaagactaagagaggtagagtgatagggtgtacaagctctaaaggcaagaagacgtggattcaaatcacggctgggacatacctttacatgtgaacctgtgtaagcttttaccct

SEQ ID NO: 200671 - DNA, 122 bp, Homo sapiens
ttccgcgctccggtggggcggcggggcaagctgcccgcctgacacactgtcctgcggggacgcggtagcaggactccaggaagcccgcgcagccgcaaaaagcaccggcgcggaggtcggag

SEQ ID NO: 200672 - DNA, 122 bp, Homo sapiens
tctctgcttctcaaccataggctatgatgtgtatggtgctcccatgagttgtgcagtacacgacctgcacaaccatatgtggcagtcctgcctaccctcaatggaagcaggatggagatgtt

SEQ ID NO: 200673 - DNA, 122 bp, Homo sapiens
tgagcaaattttaaccctatgcaattttaagccaacgcacgaggacatcagtggtggccccggtgctaccttaagtgctgctgcatttgggaagctgacgtggggcacgttttctttaacag

SEQ ID NO: 200674 - DNA, 122 bp, Homo sapiens
agtagggccgcaccgcgctttgcaaacaggtggactcggcagaggcgcgaccgccctcaccgcagagagctgggccacctgcaggctctcaggacacccaaggccccacctcccacccggaa

SEQ ID NO: 200675 - DNA, 122 bp, Homo sapiens
agacacgcatatgcacacacatgcacactcatgtacttacacatgtgcacgcgcatgcaacgcacaaacacatggacacacatgcgcatgcatgcacacactgtacccacgtgcacacacga

SEQ ID NO: 200676 - DNA, 122 bp, Homo sapiens
ccccccggattccagaacaggtctttgagaactcgtctcatgatccactggaaacagacccgttcccctagcgtggcagtggctgctccgctgaactcgtgccaagttcccgctggcgtccg

SEQ ID NO: 200677 - DNA, 122 bp, Homo sapiens
ctgcctgcctccttctactgatctgtcagctccgatctgactcaaggaccaaggcttagtcgtccttctacctgctcgggttcttgcacaagaataaacaaatcgataaaaaccctggattg

SEQ ID NO: 200678 - DNA, 122 bp, Homo sapiens
gtggagccgcagtccgggcagcggcctctgcctggcatctcacaaccggccccaaagccgcggaagccttcagagactcctgggtctgcaacagcaaccgtgaggcagcaagaagtaggagg

SEQ ID NO: 200679 - DNA, 122 bp, Homo sapiens
actccccaaattgtcagttttgatcccacctctgccaggacccctcctttcctgaacccacgttcccccaaagcaaatggcctgggtctttttgcagtcagcccctttcaacacacatctcc

SEQ ID NO: 200680 - DNA, 122 bp, Homo sapiens
tacacccaaaagcatgggaagcagagactcaaacaacattcatggcacatgattcgcaaccgtcaaagcgggagcaacccaggtctccatccacacacaaagggatcagcaaaatgtgggat

SEQ ID NO: 200681 - DNA, 122 bp, Homo sapiens
cccctcctttcctgttgaagaggcaggggaagggttaactcaaagcagaggggatcaggtcgccagcactggctccagatgtgcacttcctgggggcggccaacaggcaggccccccacctc

SEQ ID NO: 200682 - DNA, 122 bp, Homo sapiens
acagagccttgcagtcaggtggacaaatagcagctgtggacacaaactttcatgcatgtccgtgtgaagagatcaccaaacaggctttgtgtgagcaataaaagcttttaattgcctgggca

SEQ ID NO: 200683 - DNA, 122 bp, Homo sapiens
tgaccctagagcacacctacgaatctgggtttgcacggcactgagctccgtgccggctcccgtatctctaccctcaagaaacacaggtattgtgtgtgcgtgtgagatgcagggtgacagaa

SEQ ID NO: 200684 - DNA, 122 bp, Homo sapiens
ccggggcgtcgtttgggggcggccggggagttttctacttggaagcccctctgaagccaccgcgtctcctttgcccggcctcgtctccgctgcccacgcaggctgccgcgctctggcctcgg

SEQ ID NO: 200685 - DNA, 122 bp, Homo sapiens
acctggcccccggtctccagcagggagcagtagacccggcggctgggcagtggcgccaggcgcttccactggaagtccttgacgttaggcacctccatggcagccttggggagcgcccgggc

SEQ ID NO: 200686 - DNA, 122 bp, Homo sapiens
tgggaagcacggaagggggcaacgagggtaaagctgcatggtcaccttggataccaaggacgcgacttcttgtttggagagggtggagctttggagtgagacccaggaggccaaatcccaaa

SEQ ID NO: 200687 - DNA, 122 bp, Homo sapiens
tccctggtggggccagttgtacgctgcggcggtcggcggagatgagcaggcggcggtgtgcggtcccagggtccagggtcaggtcggctggagacggggaggcagggagaggacctcatgag

SEQ ID NO: 200688 - DNA, 122 bp, Homo sapiens
tccgcaggaacgatgggttatgcatgaactttgtagaacatggccttgtcttcaccaacgcggaggagagcccgttcggttccagagaggatgctgcctcatctcgtctctaaaagaggagg

SEQ ID NO: 200689 - DNA, 122 bp, Homo sapiens
cagcgggggtggtgggctgggtcagccgcaggtcacccggccctcccggggccaccatgccgcaccctggtgtgttggggatcctgatttcagcctcagcctgggcctggcgcctgcacagc

SEQ ID NO: 200690 - DNA, 122 bp, Homo sapiens
agaggacgctgcggggagggacctggttgtgtgcttcaggtgccccaagggacacggagacgcgcgagggttgggatcaaggcgttgaagacagagcgacagcccttctcggcctcccaccg

SEQ ID NO: 200691 - DNA, 122 bp, Homo sapiens
actgcctctgtccctcctctcacatgccattggttaaccagcagacagtgtgctcaggggcgttgccagctcattgctcttatagcctgtgagggaggaagaaagaaacatttgccagccag

SEQ ID NO: 200692 - DNA, 122 bp, Homo sapiens
gtcaaggctgcagtgagctgtgattatgctactggacctcctaccctggacaagggtagccgtgatcatgctgcgtggtctcctaccctggaccagaaagtgagaccctggctctaaaaaaa

SEQ ID NO: 200693 - DNA, 122 bp, Homo sapiens
ttaacaatgcctcactgactcttttaaaaaatcaaatgcatggccaggagcggtggctcacgcctgtaatcccagcactttggtaggccgaggcaggcggatcacgaggtcagaagtttgag

SEQ ID NO: 200694 - DNA, 122 bp, Homo sapiens
aggtgcttcaagatttgtttcttgatgatcccggccatggtaccgaggctggagacgccgcggtctcgtcctgttgctcactgcctcctctcttcgtggccgtctcctctctgtcccggcta

SEQ ID NO: 200695 - DNA, 122 bp, Homo sapiens
agaaaggacaaaagttcaaaatacaggggtagaggagggacaggagccagaagaatggagcgatctgaaaggtgtacgtcctactcactggtaggcctgttttggactccgctgtgggagag

SEQ ID NO: 200696 - DNA, 122 bp, Homo sapiens
gcatcagcacaacacgcgcaacgccaggcactccggtccacgccgcactgtacatggtgccgtctgagggattcctccatccagtcaggagacaaccccagacaaaaccaacggagaggcac

SEQ ID NO: 200697 - DNA, 122 bp, Homo sapiens
acgcctctcctggcatccaatcgactttctggaaaaaggtcccatcccggcctggtgccccgtgctgggtggagaagccccccgccccgacctggcaccgcctgcactactcacggggtgga

SEQ ID NO: 200698 - DNA, 122 bp, Homo sapiens
ggcggaggagaggccccgcgttgcactccagcagtccttctctaagctcttcaaagacatcgggctgtccccgcgggctgtcagcaccacttttggatcaagagtcaatgtagcaatatgtt

SEQ ID NO: 200699 - DNA, 122 bp, Homo sapiens
gaagctggctcgcccagtgccctgatcccacccgccggccccttcctgtccacacatccccgcttttccctggaagcctttggtgacaagtgcagacactctgcccctcatcgtctggggtc

SEQ ID NO: 200700 - DNA, 122 bp, Homo sapiens
gagttctgcggggaggtggccttaaacctgggccaggtgaaactcatggttgaattactccgttcacagtctttaaaaatcccctcgccctggtatacagctggctctcaagaaacgcctta

SEQ ID NO: 200701 - DNA, 122 bp, Homo sapiens
acccactcccaccgcgcctttaccttgcctctgcctggaatgtccttaactccctcttgccggcaatttcaccagatttttgatttcttatccagtctcacgggaagcctttccggcatctc

SEQ ID NO: 200702 - DNA, 122 bp, Homo sapiens
agcaaatcatcgggaataacccgggagcctggcagggaaaccgctgcactatggagaggacgcttccagatacagaggacaaatcaagtgaagggacggaacaggtcacacccagagcggca

SEQ ID NO: 200703 - DNA, 122 bp, Homo sapiens
tgctaagtcccccattgcccggggccagcagggctggccggctgctccgagtgcggggcccgccaagcccacgcccaacctggaactccagctggcccgcaagcgcctcgcagccccagttc

SEQ ID NO: 200704 - DNA, 122 bp, Homo sapiens
gaggagaaatgaatttgcctaactttcttgctaaataaatgtgcttttggatgctgacatcgagagagtggtgtgtgaagtaccataaatatttgctttattgtctgcgcggtgtgactgca

SEQ ID NO: 200705 - DNA, 122 bp, Homo sapiens
cctcatattttccatccacctcctcgctcctgccctcccccgccctccccaacccacgcccgggtgggccaatcgctgctcggtattccaggcgctttctcaggtttctgctgatcttgcag

SEQ ID NO: 200706 - DNA, 122 bp, Homo sapiens
ggggaaagcaagaagcgggcttgggtgaaatgaaggccatcgagggctcccgggcagcctcgcccggcttgctaggatccgggtgcagcggtcggggctgcgcgatctaacggaacaaacga

SEQ ID NO: 200707 - DNA, 122 bp, Homo sapiens
acataaacatcatattaaactataccaataaattattaacaccttctttccagtttcactcggctacaagtagactatctgtaaaaatgggaatgggcatcttcctattgctataaggaagc

SEQ ID NO: 200708 - DNA, 122 bp, Homo sapiens
gtcggggattgggggtctccgttcctttcatcctccagcctcgtgggggagtcaagtctccgtaggcggagagcccggatgcaggcgcggctaggctgccctctctatggtgagccccccgg

SEQ ID NO: 200709 - DNA, 122 bp, Homo sapiens
ccgccccgctgaccggtctccacagagaagctgcgaagagcaccccgccaccctcagggtcggcctatactggcgcgcatccatttactatcattgactgcatgtaaataaacaagcagtca

SEQ ID NO: 200710 - DNA, 122 bp, Homo sapiens
ttttaggagacagaagaatccactctagctgagactccagattgcctgggctgtaatttacggtgctatcacaaaggggtcctttttccgcatggtgctctgcggtgatgagccagaagctg

SEQ ID NO: 200711 - DNA, 122 bp, Homo sapiens
aggcacgtctggcatggttgatgttttcattgatctagtgagttcagctcccagggctgccggctatggagacagtgagctgacgtcagtactggctttggtggggggctgggcctaaaagg

SEQ ID NO: 200712 - DNA, 122 bp, Homo sapiens
taagctgtccagacctggcttgaaaacccatcccatggcaaggcagggattcgctggccgcggttggctctatcttgatctgagcaagccgctggacgtccctagttatcttcttcctatcc

SEQ ID NO: 200713 - DNA, 122 bp, Homo sapiens
ggagcctcccaggatggtgcccctgccatgtcgctggatgtgctggggcggctcctccgtcgtcggggacagcgctgagagctgagactggggcggctcctccgtcgtgggggacagtgctg

SEQ ID NO: 200714 - DNA, 122 bp, Homo sapiens
ccacgtgcgcgtagggcgccgggatcacgtggggaggcagaagccaatggggaagcgtttcgtgtaggtcttctgaggtggtggcgccagcggctacctcctgcctgtgaggagctggctga

SEQ ID NO: 200715 - DNA, 122 bp, Homo sapiens
aatcagatgcaggatgcagttcaacaccctgctgaactcttcaagcttatccatgctcatcgctttaaatacctctgctagaggcagtggagccatgaactctgcaggagtcgaaaccctgg

SEQ ID NO: 200716 - DNA, 122 bp, Homo sapiens
cggatcacgatcgctggcattttatttaccttcttccattacaaccccaggcgagtctcccgggccccgagaggagggggtgactggtcagggtcatcggtagcggcggcaggggcctgcat

SEQ ID NO: 200717 - DNA, 122 bp, Homo sapiens
gggtggcgcctggggtgagggtcaaacaaggaaggccagaatgcctgtttgcattcgcaacgggaacattggaagttcgggtggaaaaacaatcccaccggcctttatttaccacagtgggt

SEQ ID NO: 200718 - DNA, 122 bp, Homo sapiens
ctgacttacatacttatagttgaaaggtcaaattatgcaaggttgagcttctgggagagccgatgagatttaggagttcagaaatggcctatcatatattcagacactaaaagaaccaatga

SEQ ID NO: 200719 - DNA, 122 bp, Homo sapiens
agacccaggtacaaatcctgactctttcataggctattcccacgaacttgggtaactcaacggctctgggccttagttttcccacctgtgaaatgggtctattcatggctttcttagggagc

SEQ ID NO: 200720 - DNA, 122 bp, Homo sapiens
tcacgaccccccaaccgcgcccggcagccaggcgactgcctggcaccgatgctccagctgcggccaggcctttggccagagacgcttactgctccttcatcaacgcagccaccaccaggtgg

SEQ ID NO: 200721 - DNA, 122 bp, Homo sapiens
taaatgtatttactcttttcctcaaaataatactttcctatttctttctgagttcccatacgcccagatttgatgtttcaaatgctcactttacatggttataaccacacctttacagtaaa

SEQ ID NO: 200722 - DNA, 122 bp, Homo sapiens
gcaaaaaaacaaacaaacaaaaaatcccaagcttaaacaggaaccaatgggtgggggaggcgggaagagctgttgaatgtcttgtgattaagtaaaagaacctctcacttgaggcctacgga

SEQ ID NO: 200723 - DNA, 122 bp, Homo sapiens
tcatcgagtaaacgcgtgggactgggaaggacccagtcatctgtatattggttaccaacacgtggccgcgtagaatcatgggggaaaaaaggccccatcccaatactaaccaacagaatctc

SEQ ID NO: 200724 - DNA, 122 bp, Homo sapiens
cattggggggccacgtgtaggtgatgagcgctccccccttcccaaagatgtatgtggtcccggctgcagagagaaggaaagggagacaagaagaaatgacatcaggaggacgaggtcagcag

SEQ ID NO: 200725 - DNA, 122 bp, Homo sapiens
ccggcaccctggcacccccgcgctcttccgccccggcagccgggcaaccccgcgctcttccgccccggcacccgggcaatcctgcggaggtacagccacagctggacagacgcctagagccc

SEQ ID NO: 200726 - DNA, 122 bp, Homo sapiens
ctttggcgacattacaacataagaactgcagagaggtgtaatcccagtggaagactgaatcgagagactcaaaaaggaaggtaaacacttggaaaaatcagaatagtgacatctcctttgca

SEQ ID NO: 200727 - DNA, 122 bp, Homo sapiens
cagaggtagaggacaagggaacggcagaagacgcagcgaagggtggccacggcagcagcacggcgcagggcgcagctgaatcgccgctctgttcccggcgcgcactgaggggctttcttcgc

SEQ ID NO: 200728 - DNA, 122 bp, Homo sapiens
cgagcaggaggcaggctctgggccctcctggggacctgctggacctgctggacctgggtgcgacgagtgggcggccacgctggtttggcgcggggaaggaagggggtgtgccgacttgtatt

SEQ ID NO: 200729 - DNA, 122 bp, Homo sapiens
ccctcccccgcgggtaaactccgggcatccatcagtctgttaattgcactaattagagatcgcagaggtgttaattggaaaaccctggtattgtgcctgtttgggggaagaaaacgtcaata

SEQ ID NO: 200730 - DNA, 122 bp, Homo sapiens
gaggcagctgcttgactaggccgcagccgccatggcgatgaactttggggaccatgccagcgggttccgccatgatgatgtgatcaggttcatcaacaatgaagtcctcaggaacggcggca

SEQ ID NO: 200731 - DNA, 122 bp, Homo sapiens
ttagtggctttccaatacctgactgaaatccaaagtaagaaatattcacaattggccgggcgcggtggctcacgcctgtaatcccagcactttgggaggccgaggcgggcggatcacgaggt

SEQ ID NO: 200732 - DNA, 122 bp, Homo sapiens
gtggccccacccccaagtacccacgcggagaggcctccagtcatacagcacaaagggcatcgccttgggcagctcaggctcactctgttccacactgtctgcggtgggaggctcgggccggc

SEQ ID NO: 200733 - DNA, 122 bp, Homo sapiens
tctctccttgccaagcctagactggcttagttttcactgctctgtggtctcacagtgccccgtggctatggctgtagatgcacttaccacttgttttacagttgtctcttcacgtggtcata

SEQ ID NO: 200734 - DNA, 122 bp, Homo sapiens
atttagttcacaaaaaaccaaaaccaggtcgacctcactgcagtatatgatggcagcgagcgttttaaagcgcaggacctttagtctcctcaatagttttgtgtaaagttgtccaaaagtgt

SEQ ID NO: 200735 - DNA, 122 bp, Homo sapiens
acagctaaagtagatataaatggctaaacacagatccccaatcccccaccaggcgggacacggccaattctataatgttgcagccagaaggctgtgggcttacaggcagccaaggggagaaa

SEQ ID NO: 200736 - DNA, 122 bp, Homo sapiens
tttactaacatcgctcttgtttttccatttagtctttgggaacgtagcctcaatcttaaccgcgtatgatcgtttccactgcacctgtgcgggagagacaggcgcatatccccgtggcgtcg

SEQ ID NO: 200737 - DNA, 122 bp, Homo sapiens
gcgggccaggcatcgacatccgcaacgactatcagcagctgaagcgcctggagaactgcacggtgatcgagggctacctccacatcctgctcatctccaaggccgaggactaccgcagctac

SEQ ID NO: 200738 - DNA, 122 bp, Homo sapiens
aatacctgaaatacatgcaaaccactcagagaagtcaaacttttttttttctgtcttccccgccaaggtctcatatttactttatcccaagagcaatttggtctcggaaaattggaccccca

SEQ ID NO: 200739 - DNA, 122 bp, Homo sapiens
cctggtggccctgggatggggaactctggtgccttccgcggaggtttcggcagtggcatccggggccggggtcatggccgtggacggggcccgggccgaagctgcggagcttgctgaggcaa

SEQ ID NO: 200740 - DNA, 122 bp, Homo sapiens
ggcacctagggacagccacactctgtgtccacgcacctagggacggccacaccttgtccacgcaccgagggacagccacacctgtatccacacacctaaggatggccacacctgtgtccacg

SEQ ID NO: 200741 - DNA, 122 bp, Homo sapiens
gctaataccatatttcaattcaaaagtatatctagtactttcttatccttatgccttcagcgggaaggtaagaggatgtgacttagaagcagtgcctttggaaatgacccatgtccagagcg

SEQ ID NO: 200742 - DNA, 122 bp, Homo sapiens
ttttctgtcggaggacgcgaaccggcacgctgcgcctttaaggagtccagctgggctgggcgccggagctgggagcggcgcgggtaggagcccggcggcaggtcccagcccggggctagaga

SEQ ID NO: 200743 - DNA, 122 bp, Homo sapiens
cagaggaagaggtgggggcgctggagatcgagcccccctgctgggacagtgcacccggaacgctcgcctgtggctctgattattgctattattgtccttaggatccaggcagtcaggagcta

SEQ ID NO: 200744 - DNA, 122 bp, Homo sapiens
ctcaaggaatccacctgccttggcctcccaaagttctgggattacaggcgtgagccactgcgctggccaggcaaatattaaaatttttgataagacaatcttagagtggggaacataaattg

SEQ ID NO: 200745 - DNA, 122 bp, Homo sapiens
ctggggagcgggcctgcggctgcccagctgctaaaggacttcctactcgtgcaccgccgccggctccagggcaaaccccacgccatttagaaatgctggaagtttctgtctctccctccccc

SEQ ID NO: 200746 - DNA, 122 bp, Homo sapiens
tgtacaggatgcgctcgtaggtcatggctatccgccagtcatccgcgccattgtcgatcacgaagagctggtgggagcagaaagtccattagtgtggccaggaccaggaagcccacagcagg

SEQ ID NO: 200747 - DNA, 122 bp, Homo sapiens
tcgaaaagaggcgccgctccagccagtcacgtcgcgaggtgcggtcggggccggctgacgcgactgcgggcctcagccaatgggcgtgccactgcccgtccgctcttcagcagccggtcgcg

SEQ ID NO: 200748 - DNA, 122 bp, Homo sapiens
gtcccctgcccctccccgcgccccggggattccacgcagccagagaacccgcaacaactccgctcatcttggcgtcagaacgcggccggagaccctcatgaaaaccccagtttccccatcag

SEQ ID NO: 200749 - DNA, 122 bp, Homo sapiens
tcgagcacagcagctgctggcccaggtgctaagcccctcactggccagggccggcagggccggctagcggctcccagtgtggggcccaccgagcccatgcccacccggaattccagctggcc

SEQ ID NO: 200750 - DNA, 122 bp, Homo sapiens
catcatcgcacacgcagcacgtccgcagcggaagggcccgtcagtagtgagctggtgacacgtgggcaccattactcttacagactaaatgtctgtgaccccctctagaattcacggacccg

SEQ ID NO: 200751 - DNA, 122 bp, Homo sapiens
ccgcgcggtggggcggtgcccagcttgggggaaggagagcggcgcttatcgaagtgtggtcgacctccatccgcccaccgagcacttgggacccgctgcacatatccagagcagggaaagct

SEQ ID NO: 200752 - DNA, 122 bp, Homo sapiens
agtggccacggcggggtggggacgggcggcgttcgggactgggaagctacttgactgccacgtgctcctgcctcgcaacagcggctctagattccgagttatggggacaactgctcgagagg

SEQ ID NO: 200753 - DNA, 122 bp, Homo sapiens
aaggttctaaggggagaggaagccagtgcaggaacagcaccgcccacaaattttctgcagcgtgatttgtccccagtggcgactcgtagagagttcggggctcgctaccagcccctctcctg

SEQ ID NO: 200754 - DNA, 122 bp, Homo sapiens
ccctctctgtatgaaccctgtgttggggggcagaagatggaagcccttggcaagctcgatcgaaccaagctactaaattgctgagctcgttttaactgaagtgtgagaaggaggtttaaggc

SEQ ID NO: 200755 - DNA, 122 bp, Homo sapiens
ccaacatggctcccggccgccccgatggttcgctccacctctgccccggcgcccgaaacacggtggtacaacccatcgcgcatggcagctctgaggaccgaagatgttgccgccatctttat

SEQ ID NO: 200756 - DNA, 122 bp, Homo sapiens
gcggaggcagccaaggcggggagtgtcgagctccctcacactctggaccttaccttctggcgtcttcgcccgggaggctgcagggggaggcggacccagccggccacaggggcaggttcgcg

SEQ ID NO: 200757 - DNA, 122 bp, Homo sapiens
ccttcactttgagaaatcaaggtggggcagatcgtgtgaagtcagcagttcaagatcagccgggccggaatggtgaaacctcacatctacttgaaaaaatacaaaaactagctcggcttggt

SEQ ID NO: 200758 - DNA, 122 bp, Homo sapiens
actgcaatcacagccctccgtgcacaccttcaccacaggccatttcacccgcgaagcggccgagtgaggcggtcatccagctggcgctgatttttatcgcccacagctcctaggacctgtag

SEQ ID NO: 200759 - DNA, 122 bp, Homo sapiens
gcaccaaatgcagactgctgattaggcagctcactgccttgttcttcactaaggattggacgcctggcaaggccattgggaattgggggtggtgaggcagtgaaggggattagtaggaggca

SEQ ID NO: 200760 - DNA, 122 bp, Homo sapiens
gaaaaggcctggggtgacccggcaccccctgcagcttgtagccagccggggcgagtggcacgtttatttaacttttagtaaagtcaaggagaaatgcggtggaaacttcttgcttgtccaca

SEQ ID NO: 200761 - DNA, 122 bp, Homo sapiens
actgaaaatgaacattcaaatacaggcgtttttcctctgctctcgggtgttggtctcgggcgcctatgaatatttacattgtgctgcagattgaaggcgcttactgggaacgcgttgtcctg

SEQ ID NO: 200762 - DNA, 122 bp, Homo sapiens
gggctctttacggcgacccgggcgactcacctccactccgctccagagccattccagcgtcgagccctggctcgaccgggtcattcagggctcgtccacctcatcctctgcatcctccacct

SEQ ID NO: 200763 - DNA, 122 bp, Homo sapiens
cctcaccggcatcttggcggcgcccgggtttcaacccagaggagcaggatccaggtacagcggagcgcttccggtctggcagcctgggcgaggtaggcggaagcgaaacggaaggggcgggt

SEQ ID NO: 200764 - DNA, 122 bp, Homo sapiens
tcagctcctgggccggcctcggggctcggggatcatcacagcgctttcccacactcacagcgtgtggagacagcaaggagttaaaatgaagccgggagcagcactgagacccagccacctcc

SEQ ID NO: 200765 - DNA, 122 bp, Homo sapiens
cagcttctagcccttaagaacacatttcagcttccagctccttccaagataaaatgtggccgagcaaagaggagagcaggaaatgcaagtaaataaggaaaactagtcttttaaaaaatata

SEQ ID NO: 200766 - DNA, 122 bp, Homo sapiens
tcacccgctgcgcctcgtttatgcactgctggtagctgccgatgtagaaggcgttctttacgtcgaacagctcgtctacctccccggagccgccggaggccgggccgggggccggaggcgcc

SEQ ID NO: 200767 - DNA, 122 bp, Homo sapiens
cgacgcaaccgcccattagaaaaacacaattccaaattaaaaacccggagaactgagcggcggggctggcgccaccgtcccgggacagcgcggcctttcccagccacacccctgcgcgccgc

SEQ ID NO: 200768 - DNA, 122 bp, Homo sapiens
gctggggcctctccatgagtcatccctgcttcagccctcagcagccctcagcagagggaacggtctggtcaccaagctgttgtcacaaaatccaccttttatggtctgcctcccagtatctt

SEQ ID NO: 200769 - DNA, 122 bp, Homo sapiens
cgggctctgctctcctcgcgcccgcccgccgggccggcccagcccccgccccgcgccgctcgcacccccgctgccccgccccgcccccgccggcgcgggctccctcacctaccgccccacgc

SEQ ID NO: 200770 - DNA, 122 bp, Homo sapiens
gaggggcgggagccttgaacctgcctcaggggaagagaaacccgactgcgggctcggagccgtttcttgcaagggcgagcgtcaactcggcagggattatattaaccaggtcagcgaaatga

SEQ ID NO: 200771 - DNA, 122 bp, Homo sapiens
cagggtgcaggagaacaacgtagaccaatgaggcagaatatgtgttggggatatagaccacggttccgcaggggccctcctcgcccaaaacagcctagagaggacggcaatgaagaagataa

SEQ ID NO: 200772 - DNA, 122 bp, Homo sapiens
ctcagttcatttacttcactgtattgaactgtgtgcgtcagggctttggaactatagattcgtgtcatcacagcaataatgtgggcagaaggcacatgtttgtgaagagctcactgtgtgcc

SEQ ID NO: 200773 - DNA, 122 bp, Homo sapiens
ccgccgggtctcaaggctgaggctaaggctccggctccagctccgcccgccctggcgctgcggacccgtgttgatgccagaaaggggtccagatccagaccccaagagagggttcttggatc

SEQ ID NO: 200774 - DNA, 122 bp, Homo sapiens
cagcaaccccttctcaaacttgtttatgtgtttggacatttcaatggcccagataggcagcgtgtccgggcccgagggatggaatgctgccccggggagcggctacagcgcgggatcctggg

SEQ ID NO: 200775 - DNA, 122 bp, Homo sapiens
gggcgcaggcatccagggtaccggaaggcgcgatccggcccacacctgcgtctggtgggacgctggcgccacctcgcgtccttccgcagccctgcagccctccgcccaagagctctttggac

SEQ ID NO: 200776 - DNA, 122 bp, Homo sapiens
ccggagaggactgtggctgggttgagtaaggagccaaacccctagctggctcccggtgtccgcacagccttcaccacggagcaggtccgtgccttggagggcgtcttccggcaccaccagta

SEQ ID NO: 200777 - DNA, 122 bp, Homo sapiens
ccaaagtgggtcatccggttggctaggcctgaattcccagcagtttccaagtgccttggacgttggctccatttccggaccctcctcagacattcattgagcaacaagctgatgctaggctt

SEQ ID NO: 200778 - DNA, 122 bp, Homo sapiens
cgtccttccctctctctccggccagcctccccacagtccgcagtccccgaggcctggagccgggatttcggtcctcggtctcaagaagctcccgacagttctcagcagcgccaaccaggcca

SEQ ID NO: 200779 - DNA, 122 bp, Homo sapiens
tatcagaatggatttgtataaacacacacccaggagttatttacccagaaatcagcgaaacggacacttgttaacgttgcgggtttcacttgcgtgctggtgggcctggaaattgaggcaca

SEQ ID NO: 200780 - DNA, 122 bp, Homo sapiens
gggttcggagccccacccccagctcccatccaatcaccgtccctccctccgggggctgggcggacgggctgcactccaagcagctagctcctgcactaggctctcagccagggatgatgcgc

SEQ ID NO: 200781 - DNA, 122 bp, Homo sapiens
ccaggcagtcctctggctgctgctggcaggggctcagagagcctgtgtgagtcacatccacgtggctgatgtggggagggaagaagggatggggagggctcatgcccgcgcagggccacgct

SEQ ID NO: 200782 - DNA, 122 bp, Homo sapiens
gagaccagcctggccaatatatggtgaaacctcgttgctactaaaaatacaaaacatagccgggtgtggtggtcacctataatcccagctactcgggaggctgaggcaggagaatcacttga

SEQ ID NO: 200783 - DNA, 122 bp, Homo sapiens
gttaagtgaaatgtatatgaaaactccaaataaggactggcatgagctacacaaaggccacgtgtacaggactgtaatggatgcaaacgaaaggcaggacccaagcccagcttgcctaaaag

SEQ ID NO: 200784 - DNA, 122 bp, Homo sapiens
tgcactgcagagggggctgtggggagaggggctctgccatcccctcagccagatgggtgtcgtcttcctgaacatagaagggaaccgggatgccatgttctaacgcccgtgtgtttccacac

SEQ ID NO: 200785 - DNA, 122 bp, Homo sapiens
ggacgagctcgggcctttccgggttggctccaagcggggcctgtcacctactgcagagcgcgagccggaggcccagggcttcctccatggattcctcatctgcctcctgagccccgctccct

SEQ ID NO: 200786 - DNA, 122 bp, Homo sapiens
acactctcagaaacgtacctctccttgcccaaaagcagtttagaaaacacagccaggtagcgtttcatattgcatgtattttgcttgaagtaataatgcagttgaaaataagcccacctatt

SEQ ID NO: 200787 - DNA, 122 bp, Homo sapiens
attgaagcaaacaaacaaaaacagccactgggtttgtcttttcccctactcctgcctgagcgccgccgggtttctgagctgctccgggcgcggacctagctcacccgcagccggatgtcgga

SEQ ID NO: 200788 - DNA, 122 bp, Homo sapiens
ctgagagcactttgaaaccaaaacagtatgagtgaagatgctaacactgaaaaacaagagcgggaggaatgtccacctcccagtttgcatgcacgtatccccaatcctggatgaaagatcag

SEQ ID NO: 200789 - DNA, 122 bp, Homo sapiens
aggagcctcgggagccgccgccgccgccgccgccgcccggccgggccccgccgccgcccgcgcgcccccgggcccccgacacacatgagattcttcaggctcactttcaagtgcttcgtgga

SEQ ID NO: 200790 - DNA, 122 bp, Homo sapiens
ttcagggattcatttcatttgctattaatgttaaggtcagaagactgcctggcattttgacgattctttacacatatttatttatatgaatgatttctcataagatactttaatcgttttta

SEQ ID NO: 200791 - DNA, 122 bp, Homo sapiens
ttcagtcctgtcctcagggacagaattcccttgccatcccagtgaacggtccatgtcccacgcttcagactccctgtcagaaagctctaggtctaattttatctcccaggcaaagttcctca

SEQ ID NO: 200792 - DNA, 122 bp, Homo sapiens
ctgggggccgcggcttccccctcccggccagcggcggctcctggcccctcctcccccggccgcccccatccccgccgccgccgccgccaaagctaaacccggccgttgcctgcaggagccgc

SEQ ID NO: 200793 - DNA, 122 bp, Homo sapiens
gccgcaacgctgatgccagaaaaggacaacctctccagaatcgccgcagtgtgcttccagcgcatgcgctgctaacgccccttaaccccccctccgcgccccgcctcccccacgcgccgctc

SEQ ID NO: 200794 - DNA, 122 bp, Homo sapiens
acagcatggagtctccttcagcccccacttttgagggcaggtgcttggcaagtcattagccggtttctatcttatcagtgggttcaatctgcttttgtagctgcagtcaggatgctgcctat

SEQ ID NO: 200795 - DNA, 122 bp, Homo sapiens
gggcggggcaagcgggaggcgggggcggggccggggtgacatctcaggctgtgattgggccgcgccgcgcctgtctccatgtgccgcgcagctgaggcacaacattcaagcccgggggtggg

SEQ ID NO: 200796 - DNA, 122 bp, Homo sapiens
ccctctgggaagtggagtctggccggcggaactgcagcagccctgagacttgtgggaattcggcccaagggttcccagggcaacgcgcaagcgcagttcggctcccggctgcagactccagc

SEQ ID NO: 200797 - DNA, 122 bp, Homo sapiens
ccgaaaagtggaaactttaaggtgcttattattttcctcctgccttgttcctgtatgtgccgcttcaccggtatcacgtcctgggtctggtgggaccccggcctggctgccctaccggaagc

SEQ ID NO: 200798 - DNA, 122 bp, Homo sapiens
ttactctcatcctctcactgaaccctccccacagctctgtggaatagctctcactacccccgctttacaggtgatgaagtgggagtgaaggaacttatcaacagtcactcagctagtcagtg

SEQ ID NO: 200799 - DNA, 122 bp, Homo sapiens
gaactcgtgctttctcggcttatttcctcctcgtctggcctctaatcccgcctctgccaccgccgaggtgctgtgaccttcgtctcgccaactctctagccccagcttcatctgcaaggtgg

SEQ ID NO: 200800 - DNA, 122 bp, Homo sapiens
gacataatcagcacccactgcgcaggcgcaaacagcccaaggctgcggccggctgcaaagcgggaacaatcatttacagggttgctgtggagaccaaaggcagctcagctttgttcaaagta

SEQ ID NO: 200801 - DNA, 122 bp, Homo sapiens
tctctgggggtgggcccgcctcccccgcaacaccagccactccgactgcccggctgccagcgctcacactcgcgccccctgccggctcctccaaggagcccaaggttccagtcttccttttc

SEQ ID NO: 200802 - DNA, 122 bp, Homo sapiens
gggggtgggggcacctggacgtcaggctgcctggctaatgggtctacacaaatgacatttcgagtcacaagttatttaatttctccgccaaagtcaagaaagtccatgggtctggggaagtg

SEQ ID NO: 200803 - DNA, 122 bp, Homo sapiens
agcctccttcccgtgagcagagcacaacacgccaggtggaagaagtctcccgggaaggaccgcgccggcgctcactggaggatgaaacccggctggtgtggagggagccggggcgggggtct

SEQ ID NO: 200804 - DNA, 122 bp, Homo sapiens
tgtcctcgtagaagcactgcttggcgttgtcaggaagctcgaaggtgatctcagaggcgccgccgggtccaggcaccagtagcagcagtgcgagcagcctgcacccccaacggcccgcgacg

SEQ ID NO: 200805 - DNA, 122 bp, Homo sapiens
tctgggttccctaacacctttttctaagctaatgctccttgacgataatgagaaaggaggcggggaatggatgaagtttcataactgagtgaagaggcaggttcaggataaaaggcccagtt

SEQ ID NO: 200806 - DNA, 122 bp, Homo sapiens
aggtcacctggcgggatgtggagcatctgggcctgaaggtcttggcgcttccaaaagctccggccgcggcgtctcttgagttgtggctcgtcccctcccactgggcaggactgggggttcct

SEQ ID NO: 200807 - DNA, 122 bp, Homo sapiens
agaaagaaattggccaaggcaggaatattgacaccacaggaataggcaagcgctacaaatcgggaaactgagtgttgttgcttttgctggccccaggtggccggttgttgaccgttaactgg

SEQ ID NO: 200808 - DNA, 122 bp, Homo sapiens
gtttaaagggctgaccgcggacggggaaggctgcgtgggtcccacatggcacagggcggccgctcgccttgtcctgagaagaccacggtctgcagaggcccaaggggtgagggaggaaaggt

SEQ ID NO: 200809 - DNA, 122 bp, Homo sapiens
tcctgggttaaagcaattctgctgtctcagcctccctagtagctgggattacagtcacaacgccaccatgcctggctaatttttacatttttagtagagacagggtctcaccatagtgatca

SEQ ID NO: 200810 - DNA, 122 bp, Homo sapiens
agaaagcggggggcctctgtggccgtgggtggcacgcgaggtttggggggcctctgacaccggcctcctcgacggccccttgtctcctgggctttcctaggggtctctggtctgaaaatgtt

SEQ ID NO: 200811 - DNA, 122 bp, Homo sapiens
ccctggcatttttgcccctcagctgggtctccgactttcctcttgggaggcgaccgggttcgtctggatgcagagtcccggccttcccgcaaccctcctggagagggggcttccggaaatgc

SEQ ID NO: 200812 - DNA, 122 bp, Homo sapiens
tgacatctggaattaaaatgacttcctaagatttttgaccatggctctgagcttttgtctcgcttccttggcttaccttagttctaccttcttcctttggacactctctccacagcccagaa

SEQ ID NO: 200813 - DNA, 122 bp, Homo sapiens
tctacgagctgtggcaatggaattcagcagcgcggccgctcctgcgatagcctcaacaaccgatgtgagggctcctcggtccagacacggacctgccacattcaggagtgtgacaagagatg

SEQ ID NO: 200814 - DNA, 122 bp, Homo sapiens
ggccttgaactgaactttccatctctgcacctcggcttttgacaccctatttgcctggagcgtccactatcaccactttggttaaagctactgtcacctcctgcaatagactaattcatctc

SEQ ID NO: 200815 - DNA, 122 bp, Homo sapiens
cttctggggattgatgtaccttttgatggcttcaaccaggatgctgaacatcagcgccaccgcaaaaatggtgttcccaaatgctcccacaacatctgcccgaagaaagccgtaagtgctct

SEQ ID NO: 200816 - DNA, 122 bp, Homo sapiens
gccacccaacccctgcatccaagctaagagtttatttctcaaaaaaacagttttccatctcggaagctctcaaatgaattcagtcaatatgtgctgagtaattattacgagcctgcctcttg

SEQ ID NO: 200817 - DNA, 122 bp, Homo sapiens
cgggcaaaaattggatcccacgccggggaggagaatctgctgtttcactctgtattttttcggagcctgggattttagcgtatataggaaccgcacattgctttgccaggttctcctaggca

SEQ ID NO: 200818 - DNA, 122 bp, Homo sapiens
ccagactggagaacagctttgggttgtcaacactccccctccagccaggccagtcacagacgacatctcagcagccaggagaaggcccactaggtccggggccagcgcagtcccagcagctc

SEQ ID NO: 200819 - DNA, 122 bp, Homo sapiens
gaacctagcgtccccaggttctcacgtgacttagtttcccaggcaatagcgcttttctcccggatgtagcagtcagctgaaatggagagagtgcttcttaaagttaaccctcaaaccaccat

SEQ ID NO: 200820 - DNA, 122 bp, Homo sapiens
gagagagaagagcgaaaaattggcgcgcagagctgtaaagcgtttttctccaggtcacaccgcagcctgtaaatttgtgacacttggaccgattatgggacagcttgcaaacaaattatctg

SEQ ID NO: 200821 - DNA, 122 bp, Homo sapiens
gacgcgggtgggaaccggggctgcacgcggtgcttgccggccagcgcgattttgggtggacgtggcacttggagcgccggccggccctgccggccccgggcagtgaggggattagcaccagg

SEQ ID NO: 200822 - DNA, 122 bp, Homo sapiens
gaagaagaatgccacaatgctgtacacggcctctcaagcatttctccgccacccagatgtcgccgctacgagagccaaccgagattatgtgttcaaacaagtccaggaggccatcgccggca

SEQ ID NO: 200823 - DNA, 122 bp, Homo sapiens
cagtgtggcgcgggggtctcctgggatccgaaagaacctgcctttccgcccggaagtcggcgtcttgagtcataggagtgagccacgcccgggctgtgggaataagatggcggggaagaaga

SEQ ID NO: 200824 - DNA, 122 bp, Homo sapiens
cgcttggggaatggggagagggtctggtccggggtgccctcacgtcggggctggctcgggcgccccccaccctcaccccggcccagacggtggcccaccgggccccagaggaagctgcgtgg

SEQ ID NO: 200825 - DNA, 122 bp, Homo sapiens
caggcgctttggcaagctctgcccagaaggcctggaggtcattagtgcgccagggggtcccggggcacccagcggagcaggtggtgggaaatgtggtggctggcttaactggtcaaggaggc

SEQ ID NO: 200826 - DNA, 122 bp, Homo sapiens
atattacaagaatgccttccaagggcactggataagctgttttgttttgttttgtttctgcgtttctctagtgcagtgcctggagatgaccaccaaacggaaaatcatcggccgtctggtgc

SEQ ID NO: 200827 - DNA, 122 bp, Homo sapiens
atttgaattgggactgcgtagcagaaaatagcaaagaattattgttaattttgatatgtgcgataatggtgtggtagttatagaagaaaacatgcttatcttttaaatggtgtatattaaag

SEQ ID NO: 200828 - DNA, 122 bp, Homo sapiens
taagtgatccactcagtggcttagggttagagacaaggttaagacccaatgtataatacccgtttaatgaggctagggaaagaccttgcaattggggctttttaagtctgaccacattcaga

SEQ ID NO: 200829 - DNA, 122 bp, Homo sapiens
gccaggagccgggcggcgtcgccacgccggcaggggtaccgccactgtggccttgggggacggaattcaaagcctgggaaaagttgctgcactttgagaaggacgaaccactagtgggagac

SEQ ID NO: 200830 - DNA, 122 bp, Homo sapiens
ctgctcatcctaggggcgccagcttcgctggaggacgccgcgctctgcgggtccccgcctcggttccaggcccagctgcaggtgccacccaggtttcaggcgctgaggagcggagagcactg

SEQ ID NO: 200831 - DNA, 122 bp, Homo sapiens
ggtcaagatagataaatggtaaactgagatatcaaatcagggctgcctgactttcgtgcccgagctctttctcctgcaccaaaaagttggaatcattagaatttcccggccgggcagggtgg

SEQ ID NO: 200832 - DNA, 122 bp, Homo sapiens
aggcctccagtgaaacctattatcaagagattcctctggtctcctcgaagtcatccccagcgccccccatccgccgcccacacattattgcttctctcctccaagtgtcttgattaaggacc

SEQ ID NO: 200833 - DNA, 122 bp, Homo sapiens
atcagactaaagcacattagaaacaaaacgtcatcgttttgttactggtttccagagctgcgtatttctggggttgctggggataacggaactctgcagatgtgggatctacattaacacat

SEQ ID NO: 200834 - DNA, 122 bp, Homo sapiens
gctaaaaaggcaacaaaaggtggggcctttcagatgatttcaaatttggagaggagacctcgagggaatgagcaggggcaacctggggccaccccctaagttgacaacagtgccttgaagtc

SEQ ID NO: 200835 - DNA, 122 bp, Homo sapiens
gccgtagaggaacagggagccctctggattgaggggccgcacctgaggcagcaggcacagcggtcaggccacgcctccacccccggcgctaccccagggctctggcggaccctcaccttctt

SEQ ID NO: 200836 - DNA, 122 bp, Homo sapiens
actcgctctcagggacttcccaaccagcaccatcttctccctgcggggatggcgagggagcgcgggccggccccggccctgcctccgcgctcgcgctcgacggtgtcctgaagcgcgctccc

SEQ ID NO: 200837 - DNA, 122 bp, Homo sapiens
cgatatttggagtcatatcatcgtctcccctcaagaatattaagaacaatatcgtaggggcgggggttgtataccccctttcatattcgatatcatcctctttccccctggatattaggaac

SEQ ID NO: 200838 - DNA, 122 bp, Homo sapiens
accaggacactccgtgatgggggatcaccaccctcagaaagaggaagcgactagcaggcgcgcaatcccgcgagaccaggaggccccgcccgaagcccggcctctgtgaccggaagtgaggc

SEQ ID NO: 200839 - DNA, 122 bp, Homo sapiens
ctttgcgtggactgtataggagtatttagcccatcctgcctcctttaatctaacattctgcgtcttctttccttcagcttctcggcgccccctttggccagcactgacatcttagtcatcgc

SEQ ID NO: 200840 - DNA, 122 bp, Homo sapiens
accagctttatgccagcagtttgtgacctatagtttgtatctataaagcaatcaacacaacggctagtgttatctctatcttttaaaccaacatctttatcctttaaaataatcgttcctta

SEQ ID NO: 200841 - DNA, 122 bp, Homo sapiens
aaggtgttgtaattatcacattttatggatgagaaaactgacacacacagagttaaggaacgtgcccagagtcacacagccggaagtggaagaggtagaagtttaacccaggtcattctggt

SEQ ID NO: 200842 - DNA, 122 bp, Homo sapiens
agtgcccgaccccggccccaagagtctctccaacccccagagtcggtccccgggtggggtcgactactggccaagctagtcacccgggggtgggcaggaatagaccacttaccagcagagcc

SEQ ID NO: 200843 - DNA, 122 bp, Homo sapiens
cttgaatgtatttgatcgaagtctcatgtctccctaaaatgtataaaaccagctgcaccccgaccaccatggcacatgttctcaggacttactgagggctgtgtcacaggccatggtcactc

SEQ ID NO: 200844 - DNA, 122 bp, Homo sapiens
actgttcccgggggggtttgtggaggccctggcttgcacccagggtttgtgctgcgcccacgtgtggcacctttaagaggcaagaaggcccccggtggaagggaacagacgccaggcttgaa

SEQ ID NO: 200845 - DNA, 122 bp, Homo sapiens
ttctcatggcggcagaggaaaacatcactgattcggccagagctcttgagagtgtgtgttcgggaggcaaaggagagggtcagccggtcatctgagcccgtgaacttcatctgagccagatt

SEQ ID NO: 200846 - DNA, 122 bp, Homo sapiens
catgctgtaggagggtcacccataagtctacatgctaggcagctccccagtcatgtccctcgctcctctgctccctgtccttggcgccatctgctctggatcacaggtccagcccaggagac

SEQ ID NO: 200847 - DNA, 122 bp, Homo sapiens
cgcccacgtgaccccagctgggccaatgaacggcggcgggaggtgaaatccggttctaaccggtccggggctcccagcgctataaaaactttataaaccccccggagcccgagcagtgtgaa

SEQ ID NO: 200848 - DNA, 122 bp, Homo sapiens
cactccggcgcagagaaggacacaaaggctgagggctttccacgtccccctgacccaaggcgcatcctgtactgttgtacttcttatttctcaccggatgttggggcttcctgcaatgaata

SEQ ID NO: 200849 - DNA, 122 bp, Homo sapiens
ccccagccatgtcccccacccttaggagggactattgaaaacatattcttccccaacagccgggacagctccacccactggtgtccagggaccttcccggaggggcctgggcactctgccct

SEQ ID NO: 200850 - DNA, 122 bp, Homo sapiens
gactacagctcttgcccgcacggagcagcctcggacagcgcggccgctttaagagaggggcggggcccgggtacaggcaagtcagggccagcccacaaggctccttttcctttttgatccat

SEQ ID NO: 200851 - DNA, 122 bp, Homo sapiens
ggaggaaagggttccctttaagggtctgatgaagctttgcactttctttttagaaatatgcgcatatggagaatatcttgagtacaacttcagggaatttgaagactttctgaagtccatct

SEQ ID NO: 200852 - DNA, 122 bp, Homo sapiens
tggaaaatatttaaacaacgcctggctccatgcatttgccattacgattactatgtgcaacggggccagcttatggaacagtgctagtatttccattttacaaataagggcagggaagctta

SEQ ID NO: 200853 - DNA, 122 bp, Homo sapiens
tcccggtgccccatgggtgctgtcaggctggcacaggcaggaccaccaaccttgtccacccggggaggcccggtctgggctttgggggcatcctcgaggcgaagaccactgcggccggtgcc

SEQ ID NO: 200854 - DNA, 122 bp, Homo sapiens
gcgctcccatccgccaatggcagcaccgaagcccggcctcttccagcgagctagtgtgagcgccatccaggaagtctcttgagggtggaaggtcctaggaggatgagaagggtacgtaggcg

SEQ ID NO: 200855 - DNA, 122 bp, Homo sapiens
cagctcaggccgctcccgccgccgccgccgcttccattcatggagccccctacccccctacggagaccagctggtacctccgtactcgcttccgcttccgccgccgcagagacgcacgggac

SEQ ID NO: 200856 - DNA, 122 bp, Homo sapiens
ctgaggtaatccgcccgcctcggcctcccaaagtgttgggattacaggcgtgagccaccgcgcccggtcggagaacagggactatctttgtaactccaatgccaaattggcatcatgtctgg

SEQ ID NO: 200857 - DNA, 122 bp, Homo sapiens
ccagcgagggccgcgcaaaaccgcggaaatgcccatgggcgaggtcgccccgctacccctcgggaaaaacacacgcacgcgctaacaacaacaaacccagtccggcaacaccctcgcagtcg

SEQ ID NO: 200858 - DNA, 122 bp, Homo sapiens
gcattctgccaaacatttggagggcctaaccatatttcttgggagtctcatttggcagaccgtggagaccaggtctctaaatggatgctttacctttaaacatgacagtttggttcaaatat

SEQ ID NO: 200859 - DNA, 122 bp, Homo sapiens
tggacagcctacttttgcccccggaccttaagaagtcctgctccgggatcagccgccgaccggaaagtcaaattagcagtgcccagcgcgagcttagagcagcctcttcccaaatctcagcg

SEQ ID NO: 200860 - DNA, 122 bp, Homo sapiens
tgcctggcaacgggaggcgacgcccggattgagagagagtaggtgggtgcattgggtgagcgcccacgacagaggccgttttgaccgttgggccttgtcagttccttaggactcgcctgggt

SEQ ID NO: 200861 - DNA, 122 bp, Homo sapiens
ccgaagttcctcagtgacattttgccctttagccagttcccctctccccaggcttcctaacgcagaagaaagctgctcaagtgctggagtggccaaccccatgccgttcccaattctccctt

SEQ ID NO: 200862 - DNA, 122 bp, Homo sapiens
tacatgcacacacatgtgtatataaacatggaaacacatgcacacaaatacacatatgtgcgctcacacaggcaaataataacagaaaatttcaaagattttggaaaatcatggagggttcc

SEQ ID NO: 200863 - DNA, 122 bp, Homo sapiens
accaacatggtgaaatcccgtctctctattaaaaatacaaaaattatctgggcgtggtgacgtgcacctgtaatcccagctactcaggaggttgaggcaagagaattgcttgaacccaggag

SEQ ID NO: 200864 - DNA, 122 bp, Homo sapiens
gagagttttactcaaatcagatgctggcccagagaaggaagtagacatgaattcaaaaaccggtaaaaggccctggtagaacactacatgacccctctgataaatcatgccctctctgatgt

SEQ ID NO: 200865 - DNA, 122 bp, Homo sapiens
ggtgatgatggtaagttgggaatggaaacagcagtctgaattgttccctatgccgtggagcgtgctggtgccgtctgttaatagtagggagtagttctcacctcgggctgcacatcttcatc

SEQ ID NO: 200866 - DNA, 122 bp, Homo sapiens
tttgcaccccaaggcgaaggcgctgaaaatgctcctgtcaccttagatctcagtgatgaacgacaggaggaggagtagacactaacgttgcaacagtagatgccttttcttctgcctctgtg

SEQ ID NO: 200867 - DNA, 122 bp, Homo sapiens
aataccttccctataggcacactttctcagtggaaccacaaaactgataggggaaagtttcgttttatgagcatattccagctgacaaatgaagaaggtgcgatgagactagactatcccca

SEQ ID NO: 200868 - DNA, 122 bp, Homo sapiens
gggcatatagttagcaaatagtttccctagtctcaacacaaacgtttccgattcctggttcggtgctgttactcacacacctgcagcctctctgagcccctggtgtgttacgggtgctgttt

SEQ ID NO: 200869 - DNA, 122 bp, Homo sapiens
caatgaacattcctgttttgttgacgcctgcaagtccactgtgggagcaccactgttatgcgtcagagtggttggcacaatgttggccaagaaatgtaagtggctgaatcactaataatcat

SEQ ID NO: 200870 - DNA, 122 bp, Homo sapiens
agggcggcggcagcagcgccaacttccacccaggcctcggcggccgccggcgccgcgcagcgctgcgcacaatgagccgctggcccctcccccggtccgccaccctagcgcaacctgcagca

SEQ ID NO: 200871 - DNA, 122 bp, Homo sapiens
cctctgcagatttcggttctaccaacaaccaccctctctgctccacacaccccaaagacccggcctcagccttaacccagcgcttgagcctggcatagagtcagctcatgcagtactctctc

SEQ ID NO: 200872 - DNA, 122 bp, Homo sapiens
gctgcacctaggaattatatctcaaacaagataatgcagaattctgtgtataagccagcacgaaataccatacaattgttcccttcaaagtaagtctagcagctctaaacaattttaattac

SEQ ID NO: 200873 - DNA, 122 bp, Homo sapiens
atacagccacgctggattctcagggcactatagcgccgagactgaagagagctctgaaaacgtttgtgtgcagggaggatctgggttggaacgttgtacccacacaacatttagaatccaag

SEQ ID NO: 200874 - DNA, 122 bp, Homo sapiens
ccaggcatcactgaagggtatgtaatttgggaacaggcaaaagggagaacgggtattaaccggagaggaactctagttcttgaagatgagccatattcttgaagagaagtgcgtgccctgtc

SEQ ID NO: 200875 - DNA, 122 bp, Homo sapiens
gcagtaacgccctcgcctgggaaggtgccgattacctagtggaccttggcctagcggtagcgtcagtacctggggaaggcacccgttacttaacagaccaggaaagggagtctccctttccc

SEQ ID NO: 200876 - DNA, 122 bp, Homo sapiens
ctgtgtgtttgcaggcgcccctcagactccaactggaatgtgtccgtgatggtgggaggccgggctgtggtgctcctagtagggctatggtggcaagctttaggaccttgtgagcctgattc

SEQ ID NO: 200877 - DNA, 122 bp, Homo sapiens
cctttcgctctcttggtgtttttttgtgtgtcctctcttcatctgggtgcacacaggccccggtgacacaggcaatcccagagcccgcccacggcacccagaccgaacacagccagcgatgc

SEQ ID NO: 200878 - DNA, 122 bp, Homo sapiens
ttctgctctgttcagtcaggctcctattccagatgttcagagttgattatgcaatcctcacgatgttgaaaagcttcctgtaatatgatgatacatagaagaatgtgaatggttggtttgtt

SEQ ID NO: 200879 - DNA, 122 bp, Homo sapiens
gttccctcagggcctctggaggagttgatgccaccagtgtctggccgtgggacacctgggcgtgggcgcccagcaccaggggttcgctgacagctgcagggtttccggccatgcgcccgcgg

SEQ ID NO: 200880 - DNA, 122 bp, Homo sapiens
cctgcactggctggattcattcccggacccttagaaactcagcaatgcagcctgggccaccgagagactggggaagcctccgtgcaggtgggttgacaccaagaagcagccctggccccatt

SEQ ID NO: 200881 - DNA, 122 bp, Homo sapiens
cttccggatgaggcggacttaggtcaatgcgggaaacattgcatgtcacctcttcccactcggagaggccgggtgtcttcctgagagctggcaggaaagcggccgaggcgcagaggcgcccg

SEQ ID NO: 200882 - DNA, 122 bp, Homo sapiens
cagccctgtggaagcaacatcagcagtccctccctaagcagtcactacttcagctgcaggcgctccccaccctgacctcgatccatcaattagtctgcctggttttgtactttatgcaaatc

SEQ ID NO: 200883 - DNA, 122 bp, Homo sapiens
cttctcctcggggcacagtctgaccccagtccaggacagggagagggaaaacgccatccccgtttcagcagcaggagaggtggttgagaaaggcctggctcagaagctccagaactgaaaca

SEQ ID NO: 200884 - DNA, 122 bp, Homo sapiens
gcgggaagtttacctggtgccgcgggcggcccacgatggacgggaagacagcgcggggcgcgtcatcgcccgcaaagccggccttcaccagcccagagccgttgtcgcacaccagggcggtg

SEQ ID NO: 200885 - DNA, 122 bp, Homo sapiens
agaatggagagcaatcctgggcaatattgttctgtgagaacctatggataaatgagcaaccgcaggaggaagaacaaactcccatgctaagaagagcctcaggaaagctcttgttactattt

SEQ ID NO: 200886 - DNA, 122 bp, Homo sapiens
cgaggacatgttgacgtcgtccgagagtcttaaaatcctgctctggccggattccagactcgtgggggaaaggctggtatgttcgttttataacaggagttttagcgtcatcttttgtcctt

SEQ ID NO: 200887 - DNA, 122 bp, Homo sapiens
agagaacacagtggcacagcaactgctggctggattccacgggctctgggccagaagatgcgtgtacacgaacgccctgtaaacttccacattccaccacttcctttccagatagcagcagt

SEQ ID NO: 200888 - DNA, 122 bp, Homo sapiens
caccgctgctctggtttctgttaaacattgacctgcagggctccaggagggcaggggagacgcatggaggggagcatggccactggagggcacatccgagttgcctctcagaccaggcctct

SEQ ID NO: 200889 - DNA, 122 bp, Homo sapiens
cgtgtggcaagccggggaaggggtggagtgaacggccggagaccacgtggagaaaggggccgctttggcccttccatctgggtgccgggagcccctaggccctccggccatggccgacagcg

SEQ ID NO: 200890 - DNA, 122 bp, Homo sapiens
agaaacattttacagcctcttctctctgaagcctgctaccctatccgaatacttcatctgcgtgataaaacacattggtctccacaacctcttaacccagacattcctttctttaatcccag

SEQ ID NO: 200891 - DNA, 122 bp, Homo sapiens
ggcctgaccaggtccctccagccacgtggaccccacagctgccagaggccggggcggctgcggcctccagaacagcgtcctcccagatccgaggggagacggtgacacgagtgagcccacag

SEQ ID NO: 200892 - DNA, 122 bp, Homo sapiens
tttaggtatacacattagctgagtactaggaattttaaatgcatgctatttagttttgaacgttcaagtacttagttgaacttaagttatgaaattgtaaaggaatggtgtctaccagtgac

SEQ ID NO: 200893 - DNA, 122 bp, Homo sapiens
ttttttttaattttttttaattttttttttcagtgttttggtgctggtggagcgaactcacgcccctagccagccttccccgtgactcttgccaagagaactcgtacaccggcaccgcccct

SEQ ID NO: 200894 - DNA, 122 bp, Homo sapiens
acagaataaacatgggttgggtggggagctgttgcctgcaatcacagcactttgcaaggccgagacaggaggattactgaggccgagggttcaaaaccagcctgagaaacacagtgacactt

SEQ ID NO: 200895 - DNA, 122 bp, Homo sapiens
acataggatcacagaacatcccggataccacatagaatcacagaacatcccagatggctccggttgcagaattctgagagataataattgcttatgtgttaggctactaaattctgaggtgg

SEQ ID NO: 200896 - DNA, 122 bp, Homo sapiens
tttcctcttaagttgaaaatggttttaatgcaaagcgccttttttgagcaggtagagtcacgcatccggcaggcggggcgagctcccctctgtctggggcagggtgggggagaggggcaggg

SEQ ID NO: 200897 - DNA, 122 bp, Homo sapiens
taaactacttgtccagggcagatccactcgtaatgaccatcagctcagagttggaagtagcgctggagaatgaggtggtttcaggttgctatgcttccctgccctctcttccagggatgcca

SEQ ID NO: 200898 - DNA, 122 bp, Homo sapiens
agccgcgcgaccgcaaatatgacaagcatttgagctatttggcaacgtggggccggtcagcggggcgggcagggtccccgcggggggcgaggggcagagagctggcccgggcgcccgtctcg

SEQ ID NO: 200899 - DNA, 122 bp, Homo sapiens
tttagggatgtggtgtttttacgatcgaaggaatgcgattctggaccccctcatcgccctcgggtgtaaacagctttggaaagctagacttttacaaatccccagtctctaaaagttttccc

SEQ ID NO: 200900 - DNA, 122 bp, Homo sapiens
cattgccctgggcttcctggcggccacgagctccggctcacctcccgctctgaggagccgcggaccctccagcagacccaggtctgttctctgcaattagttatcttgcagttgagcccctc

SEQ ID NO: 200901 - DNA, 122 bp, Homo sapiens
agaagctacaaagaatgacgggaaacactctaactgcagggtttgcaagtactatccccccgcctcacccccccttcttttctttgataggcagaaggaaataaaataaatagacccttgaa

SEQ ID NO: 200902 - DNA, 122 bp, Homo sapiens
tttttgcactaaaatagagatcaacaagcaatgattctgtgtcgtgcacgcacgcagaaacgcgatgacgtcagggttgcttggtaacagaagggcagaaagccacttgtggattgaaaaag

SEQ ID NO: 200903 - DNA, 122 bp, Homo sapiens
gagacaacggccacacactgtggggtagggcatggggacactgatacctcatattcaggccgatctggatcttctttagatcttgaatatcttttaacaagattagccagctctccactggg

SEQ ID NO: 200904 - DNA, 122 bp, Homo sapiens
tcagccctaactgttccagactcttctcccggctccagagaggcccgagtccccccccctcggccttggcccccaccgccctcatcccggtacctgtgtggctggcacgggaccctctccgt

SEQ ID NO: 200905 - DNA, 122 bp, Homo sapiens
taaggctagggaaggggcctccagcgccgtgtgagggccctgaccgacagtggggaggggcgcccatgtctctgggagaaccccggagtccccggaaatggaggcggagtttggggagtctg

SEQ ID NO: 200906 - DNA, 122 bp, Homo sapiens
ttggaaactggtatcttattgctacaaagactctgtttggtcagcctcaaggtctcttaacgtgaatgctggtcagctgtgcccgaattccaaaggaagaaataatgaggcgtgtgggacct

SEQ ID NO: 200907 - DNA, 122 bp, Homo sapiens
ggctggctcggtgggccccagcacgggcccctgcagcactggcagtgctttcccaaacaccgcgtttttgatttaaccaattcaaaaaggagttaacttctcctgaagagtttcacataatt

SEQ ID NO: 200908 - DNA, 122 bp, Homo sapiens
tctctctggactcattctagctgtggcctgcctgtggacagcccttccctttggcccatgcggcgggtccaggcagctcctgcagctgtgctcatggctgctggcccagaacttctcatttt

SEQ ID NO: 200909 - DNA, 122 bp, Homo sapiens
gttgctgtatgaaatcaacttaaatagcctagtgcccttctttaaacctaattttcctatcgctacccccacttgttttttaaaaatataagtcaacaaatatttattatgcccttattatg

SEQ ID NO: 200910 - DNA, 122 bp, Homo sapiens
cggtggggaaggggacgggccagggattcagactcgggctctcccctcaggatgcagcaccgaggcttcctcctcctcaccctcctcgccctgctggcgctcacctccgcggtcgccaaaaa

SEQ ID NO: 200911 - DNA, 122 bp, Homo sapiens
tggtaacatctccctacagagaaaactagcacagaacttatgggcctcattgaacagttacgtgggttggttggacagaaaaatgttggttcaattttcaaatactaaggagagcttatttc

SEQ ID NO: 200912 - DNA, 122 bp, Homo sapiens
gaactgcccctcccgcaaggctcagcgctcggaccgcgcaagcgcacatgccctcctccgcggcccctacaaacagggcaacgcacagggcgtagcccgctccctacagaggctgcgcctta

SEQ ID NO: 200913 - DNA, 122 bp, Homo sapiens
gggcctgggacggccgggccacctgcgcgacagagaacacgaggggcgggactcaggccgcgggttttcctcagccaggaggaggcccaggccgtggaccaggagctatttaacgaatacca

SEQ ID NO: 200914 - DNA, 122 bp, Homo sapiens
atgctaaaactttcttgtgccaaaacccttgactattttatttttaaaataagcacttggcgtgccctcgcagatgtctgagctgagaggtcggggcgatggtagaagagcagtcagtgtcc

SEQ ID NO: 200915 - DNA, 122 bp, Homo sapiens
tggagacattctacagagatagaacctaagagcaaattaaaagtggagtccgtgacaggtcgctttcatggtaaagcctggtctcgtgtgtcttactatgactatatggtcaatgattactg

SEQ ID NO: 200916 - DNA, 122 bp, Homo sapiens
gcctgcgcgcggggttacgcaagcgcgcagcctttgcgcacgcgcacgaacgcacggccgcgcagcatctgtcttgctggaagctttttcctagaggttgagcggtttgcacaatgtcggaa

SEQ ID NO: 200917 - DNA, 122 bp, Homo sapiens
tggcacgagaggtgctccaggcgggacgcattttaagcgaggcagacaaatagaagtctgcgcgagcgcaagcggtacatactagggatcgctatctggcgaggatggggccatggagtttc

SEQ ID NO: 200918 - DNA, 122 bp, Homo sapiens
gtgaaaaatggagttcttgtagctctcagggtatgattctgattctatggagggtggaaacgagtaaaatacccagattaaaagcttagtattagttaattactgcttgatttattagtaaa

SEQ ID NO: 200919 - DNA, 122 bp, Homo sapiens
ccggccctagggcagtgaggggcttagcagttgggccagcagccgctgtgctcaatttctcgccaggccttagctgccttctggcgggcagggctcgggacctgcagcccgccatgcctgaa

SEQ ID NO: 200920 - DNA, 122 bp, Homo sapiens
ctgcgttccatcccgacccggggccacggtactgggccctgtttccccctcctcggcccccgagagccagggtccgccttctgcagggttcccaggcccccgctccagggccgggctgaccc

SEQ ID NO: 200921 - DNA, 122 bp, Homo sapiens
gacttgtcatggctccaatcactgcatctgtggctagagtggcttttaaaggctcagactcgaaccactgatccagcacctggacagcacaacagcagagagaagggcttaggagcctggat

SEQ ID NO: 200922 - DNA, 122 bp, Homo sapiens
ctccatctcccgggttcaagcaattctccagcctcccgagtagctgggattacaggcgcccgccaccgcgcccggctaattcaatacaaagattaaagcggcactttttttttttttttttt

SEQ ID NO: 200923 - DNA, 122 bp, Homo sapiens
gcccatgcagtctggaattccaatctgctcccctgtttaacatctcatccagtcaataagcgcctctgaagtctttactttgtgagtagcatctttgacatgtttgtgtcgggtggatacca

SEQ ID NO: 200924 - DNA, 122 bp, Homo sapiens
ttctgggtgggtgaatgtcagtagctggagttatttttaaagaggagaggtgaggcttgccgtgcaaagctggaaagagggcgtttgtttgcagagcagagctgacatcaaagtgtagatta

SEQ ID NO: 200925 - DNA, 122 bp, Homo sapiens
gtgactttaccagtgtgcctgggatccaggcagggccacattcaagctagctgggtgctccgctcactaaggacaggagccaggagtgggaatctaaattgccacatccctagggatgggcc

SEQ ID NO: 200926 - DNA, 122 bp, Homo sapiens
ctggcttcgcctttggagcagctccggcacttggcggaggagctgcggttgctcctgcctcgagtgcggggtgagctgacggagttagaacgggcgacggcaggggcgggctcggggtcggg

SEQ ID NO: 200927 - DNA, 122 bp, Homo sapiens
gaacagcaaatgcaaaaactctacgcagtacctcttttttctcctgggcatgtgtgtccacgtgtgcatacacacagacacacaaatctgaaaacttgtcaatatcttttatttctacatgt

SEQ ID NO: 200928 - DNA, 122 bp, Homo sapiens
agcccacccctctctgggctatactatgataagcctccttccctttatggttgagcaccccggacgccttgctctctacattcacagagatgggtgtcagctcttcctgcacttaaggtacc

SEQ ID NO: 200929 - DNA, 122 bp, Homo sapiens
gctagccaccaggagacaaaaggcaggaggcccgcctcttcctgcagcttcccgcccgcccggcatcttcccacgtcccgggaccgctccctcccaaagggacccggcagttccaaaagcca

SEQ ID NO: 200930 - DNA, 122 bp, Homo sapiens
ccattaggtttctgtctccagataccaatcagggaatgactggccaggactggaacttaacggccttgagaacatgtgggatttgtctttgagccccattggcttgtgatgttttcctctgt

SEQ ID NO: 200931 - DNA, 122 bp, Homo sapiens
ctgcccttgactcccacagtctagaccctcagaacaggcccagatcctgatctgggcatgcggtccctgacctgcagccccggagtcccctggacctggccaggccctgacccaccctctct

SEQ ID NO: 200932 - DNA, 122 bp, Homo sapiens
ctaggaatccaggggagagaaagggcccatgagaagttgttggggacttgaggatgcccacgtcagagcctcccgggatggagctggggagaaaccccttctgccaatctcaccttccttgt

SEQ ID NO: 200933 - DNA, 122 bp, Homo sapiens
atggcgacctcctgcaccttccatattcttgtggccatgccgaagcccacctctaagactcggccccctttggaggtggtgaaggcagcgaagggggttgcagtaggggcgctcttgctgca

SEQ ID NO: 200934 - DNA, 122 bp, Homo sapiens
ctctggtaaacacacaatgtatgttcaattagtttctctgctccagaagaactgtctcttcgtgccctcgcaatgagattctgctaattgaaaacacttcattctatctgcttgagaggatt

SEQ ID NO: 200935 - DNA, 122 bp, Homo sapiens
aagtgtttttcagtccagaggcagccgcgggctttccttgatcttcacaccatgctgggtcggaggctctgccaacatccattttccagctcttttcgtgagtcccaggttctgagattgtc

SEQ ID NO: 200936 - DNA, 122 bp, Homo sapiens
gctggcgaacctgtctgcgtgggagccggtgagcggggccagagcaaaacaggaaggccgcggcggcgcaccctgttcccggcgccctcggcaggtggcagcattggcccgagctggcctct

SEQ ID NO: 200937 - DNA, 122 bp, Homo sapiens
ggcaccccacccccactctagcctggggaggcccagatcgacctttcggggataagagggcgcccgtgccccacgctgcggacccgggggtgggctcctcgaatgctagctgcgggccttgt

SEQ ID NO: 200938 - DNA, 122 bp, Homo sapiens
tggaggtgactaggatcctttttcttccgtctgaggcttggacccagcgcagccaaactccgaccctggcctgggcggcttccccttcctcccaaggccggagcttccctctctctgtctac

SEQ ID NO: 200939 - DNA, 122 bp, Homo sapiens
gggcgggtcacgtgatggggtttaaatctcccgcagccggagccgcgggggcgccagtgccgcgcgtcgagcgggagcagaggaggcgagggaggagggccagagaggcagttggaagatgg

SEQ ID NO: 200940 - DNA, 122 bp, Homo sapiens
gccgccgcggccgcaggcccggcacggattcctttcaggcagaggggaaacatttaaactcgctcacctttgaactgccagggacgctgtttaccttggctgcccgagtggcagttttacag

SEQ ID NO: 200941 - DNA, 122 bp, Homo sapiens
accaggaatagttatgttactcctgctctcctctcacattgtgatgactgaatcatggggcgagctatgttttctatttttgccttggccagcaggaaacacagggacatttggtaataact

SEQ ID NO: 200942 - DNA, 122 bp, Homo sapiens
gagaggggagtgggaataaaatgttgccttccccacttctcaccaccaccgccatcatgacgctcatactggcttttgcctgtttgtagaggaaaaggtgggctggttttagtactctgaag

SEQ ID NO: 200943 - DNA, 122 bp, Homo sapiens
ctggttatcttgagttaatgagccaccctgtcgtctggccggaggcaagagactgtaaatcgattgattgttcaacattccttcccaaagtgggacactcggcaaccttggttgtctcctaa

SEQ ID NO: 200944 - DNA, 122 bp, Homo sapiens
gtacaaggagtatgagggtatgattgctgagtcttgtacatgcagatgacagcaacagtacggctagatcaggtttcccaggaaactggaggagagtttaaaatatcagtgttaaagctgca

SEQ ID NO: 200945 - DNA, 122 bp, Homo sapiens
ggcggggacacagacccaaaccacatcaataggatactaagaaacaccagtaatttcccccgaggatgctgcgaaacaagttccttggccattcctttagctataaagtcccagttattaag

SEQ ID NO: 200946 - DNA, 122 bp, Homo sapiens
ggtggaaagcttatttattgtcagcagcctggctcagagattaagaaaagctcgggtctccggcttacacacacatagctgcaggcagcagctgctccagacatggcattcaaccacagggg

SEQ ID NO: 200947 - DNA, 122 bp, Homo sapiens
gcaccatgtagacaccctcgggaggcagctccaggccctcgcgggcaatccgccccaacacgggtgtgggtgccggctcctcgctgtactccccgttcacccacttctcgatcactgcccgt

SEQ ID NO: 200948 - DNA, 122 bp, Homo sapiens
tttttctctctggtttaatatttgtgctcctggcccacctgatgccttagcctcagagtacgttattgtattccaactcatacaaattatgctcaactcattcatggtcagaccacaggttt

SEQ ID NO: 200949 - DNA, 122 bp, Homo sapiens
gtttgtttgtttttcttcccccccgcacttgggtatgcaggctggcctgcaacttctctgcgccgcgccgctggggggctgagtctgtcgctccctgcgcccggaaccatgcgctgcccggt

SEQ ID NO: 200950 - DNA, 122 bp, Homo sapiens
acccggttgccatgggaacgcgcggcaggagcctaggcgacacgagcctgggtgggggttcggagagccgggcacaccccgagtcctcctgcaccctccctgtggctgcggcacgtggggcg

SEQ ID NO: 200951 - DNA, 122 bp, Homo sapiens
acaggaggtaagttagagaaccacacgcaggggagggatgctgctgcttccaggggcgggcgcggcgctgtccgcagcccccggtgctgaaacgggccgcgggctggagagaaagtgaaaaa

SEQ ID NO: 200952 - DNA, 122 bp, Homo sapiens
tcagaagtcactggcaatgttttgctttcagtgtgctatctggaagtctccacgtctccccggcaccccccgccaccaaatgcattaacaagctcctacactccaacccgcttgtggttttt

SEQ ID NO: 200953 - DNA, 122 bp, Homo sapiens
tgccgccgcctccgccaccgcctggggccgagcccgcgtgtcccggctcatccgcggccgcgcctgagtacaagacgttgctcatcagcagcttgagccccgcgctgcccgccgagcacctc

SEQ ID NO: 200954 - DNA, 122 bp, Homo sapiens
agcctaaactgtggtctatcctggaggatgcttgtgtgtgtgacaatttatattcttcaacgtcttagattctattttggaggctcccaaggggattgtgtgtccctgtgctggaactcaag

SEQ ID NO: 200955 - DNA, 122 bp, Homo sapiens
agtaaggacaattcctcccaatggtttggatagggctgtcagaactaaattcaagttgttcgaagtctccttccgcccgccctgccaacttgcctccctcttcaccctcctaataggaggtg

SEQ ID NO: 200956 - DNA, 122 bp, Homo sapiens
ctttggcactgcacactgaccacctgtttgtgggacagcaatcacacagtcacctccttgcgtacacgaagaaggtgaacacagccagtttaagggaccacctatacgttgtgggataaaat

SEQ ID NO: 200957 - DNA, 122 bp, Homo sapiens
ggggctcagcgaccagtgaggcacagagcacaggcagcgtgcgcggggctcggcgaccagcgaggcacagagctcctcctgcagcagcagctgcagcagtgcaagggttcactgctcacccg

SEQ ID NO: 200958 - DNA, 122 bp, Homo sapiens
gagggggaaattacaacttttggagcttaaccttatagataactaagctctcccacaaaacgtgcccattgccagtagacggaaatctggtttgtgcggactgctgatctgatgcagaatgg

SEQ ID NO: 200959 - DNA, 122 bp, Homo sapiens
ccctcgccgtctcacctcgcgcgctgccgtccgctggaagcacctccgcgcctccccaggcgccagactccatcccgccccactgcgccccgccccgtggctgagccgagccgggccgtgcc

SEQ ID NO: 200960 - DNA, 122 bp, Homo sapiens
agagtgctgggacagccctcccagagcttcctgggaatggcctctgttctctgcagtgagcgtggctgcagtgctggctgggggtgtgtgggcacaggggctgcgcctggagccggagatgt

SEQ ID NO: 200961 - DNA, 122 bp, Homo sapiens
acggccgcgaggcaaacagcaaacggccgcgaggccgaatggaccacattccaggcgaggcgggggcagtgttcagctgtagctgctccctggggacccacaccctgaccccgtgctaggga

SEQ ID NO: 200962 - DNA, 122 bp, Homo sapiens
caaactaggattcaaaagatctgttcagggcccagctcttaagtagaattaatacctgaacgaaaaccccctttcagcagggtcttctcaatactttattgtaatagtttatcaggaacagt

SEQ ID NO: 200963 - DNA, 122 bp, Homo sapiens
ctattgggttaacactggaggctctaagatggcggcagtggcaacctgcggtagtgttgccgcgagtactgggtctgcagtggcgacagccagcaagagcaacgtcaccagtttccagagga

SEQ ID NO: 200964 - DNA, 122 bp, Homo sapiens
ggatgcggcaggtcttgctggcctggtccagctgctgtcgcagctcctgcagctgatacacgtcctcctccatatagacgtcccgcatctccagcatctcggcccgcagctcctcaatctcg

SEQ ID NO: 200965 - DNA, 122 bp, Homo sapiens
gccaccagcctgtcattctgagagcagttctataacctgaacgcgcctgggagggcgcagcggacgtcccggacgtgcaggtttgtggggcaagcaaaacaagacggttacagcccaatcgc

SEQ ID NO: 200966 - DNA, 122 bp, Homo sapiens
ctccaccgtttccagcttggaccccctcccaggtaacaggtttcagacggcaggaccacccgtctgcacaggcggagcttctgcacgccggacaagatggggcgcggactcctctccgtgtg

SEQ ID NO: 200967 - DNA, 122 bp, Homo sapiens
cccacaacaaccctacgaggttaagtcttaccatcatcctcattttctagatagggaaaacgaggcagaagtgtggtcaagtaacttggccatgtttactcaacgagtggctgtgctggggt

SEQ ID NO: 200968 - DNA, 122 bp, Homo sapiens
aaagagtctcaacactaatgtaacatcccaccctgacccatctttgccctctgagaaaagcggcccgaaatgagttgagttattcatccccaccgcggagtcagggacaaggagcagttgag

SEQ ID NO: 200969 - DNA, 122 bp, Homo sapiens
aatggcggcggctcggcggtgccggcctccaggcagggcattgcgcctgcgcagccggagcgtcggaactacagtgcccagaatcctcagcgcctgagccccccgccccttttgtctgcgtt

SEQ ID NO: 200970 - DNA, 122 bp, Homo sapiens
gggtgctcccctctccacatagaagtgggctcccggaggcggtgaccactgctttacagccgcatccgcaccggtgccacgcagaaatactgcgcgatctgggctgctggagctggcagcta

SEQ ID NO: 200971 - DNA, 122 bp, Homo sapiens
cttctgttctgcaagcagcagagctgtgtctggcaatatgtggtccaggataaataactgcgggaattggctttatatgcacatcaaaggcagcctcaaaagaggaaaagaagtagagggct

SEQ ID NO: 200972 - DNA, 122 bp, Homo sapiens
atcatgcccggggcaggtaaacctcatgcccatgtgcacaagtgttgtgtcgtgcagtgacgtggtggtaaatatgactcctccctccagttcagcttttacgcagcttttcctggtgcgtt

SEQ ID NO: 200973 - DNA, 122 bp, Homo sapiens
tgccaggtggcgttggccgatcagttcaaaatcaaactccggcgtggcccttatttaaaacgaggattccgggcccggcgctgtggctcacgcctgtaatcccagcactttgggagaccaag

SEQ ID NO: 200974 - DNA, 122 bp, Homo sapiens
aattccccgccgtacaactcagtggtgcggactttgcctcctgctaccctgttgctgcgccgagcggggtgggaaagtttctggagttgtcagtcgcgcagcccgtggccacctagacccga

SEQ ID NO: 200975 - DNA, 122 bp, Homo sapiens
ctgaggaagtaggctacagctgggagagatggcaaggagctgggggttcactcccttggacgtttctaagagggacatgtcactcccctgggtgctgctgtgtaggggtaaatccttggagg

SEQ ID NO: 200976 - DNA, 122 bp, Homo sapiens
ggggaggctgcgtcttctgcctggtcctggaattctgcaggtgccacccttgtcttaaggcgccgtcgccccctacatcccccctcgtggtgggccctgctgctccccaattcttcccttcg

SEQ ID NO: 200977 - DNA, 122 bp, Homo sapiens
tagagccccgggctgggtacctggacctataccttcatagctgccttaggctcaacttttcggcggggatccctctgcagacgtgcaggtggcgggagagcagaggtagccgcagtaagtgc

SEQ ID NO: 200978 - DNA, 122 bp, Homo sapiens
aggatcactgcaaagggacagatggcctacatcaagctggaggacaggacgtcaggtaaccggaagggaggctgcatcaagctgaggggccgcaccccactttatgaagggagaggtggcct

SEQ ID NO: 200979 - DNA, 122 bp, Homo sapiens
cgtccagcacaggtggagacccccatgaatgctgggggtgggggctctcgggaacgtgagcgtggatgtggttcaacacccttttgagacctgcagccaccgcctcaccccgtaaggcggtt

SEQ ID NO: 200980 - DNA, 122 bp, Homo sapiens
gggagcccgggtctcctccgagtgtgcagcgggctggcctggggtcccccgaaaggccgccgaagacaagcccaggatcaccccgtctgcagcagggtgcaggcttggagtcaccccaaggg

SEQ ID NO: 200981 - DNA, 122 bp, Homo sapiens
ctgtctgcgtttagccaagtggaagtagttatgtggtcaaccaattcacttgtattttaacgtagacgaacaaggaaaagtttactatgtgagtaataaggcatttgtaagagtaaatggca

SEQ ID NO: 200982 - DNA, 122 bp, Homo sapiens
tacttcccctgtggctttaaatcaagggcagcttctgttaaatttaattactttcccctgcggtttacatggcaaaggtgtcattactactttcggagtgcttctggccaaagtgaaagctt

SEQ ID NO: 200983 - DNA, 122 bp, Homo sapiens
cagtcgcagtttgggccccttgaattttactttcaagtaatgggaaactgaggaggcgggcgctttccccagcgtttttaggggcccactaagtaaggcctagcgggagccagattttacaa

SEQ ID NO: 200984 - DNA, 122 bp, Homo sapiens
acaaatattctggaagcttcctttcattgtgttgtttttggagggagaatgacagcaacacgatacccccatgggtgagaccactagaaaccaaacccctacactgatccagcaggcagctt

SEQ ID NO: 200985 - DNA, 122 bp, Homo sapiens
ttggctgcgtccccagatgccgcgtgtacctgtttgataccccaggtacctgtttgcaagcgatgagcaaggaggtgaccccaagcagctggaagcagtctgcagccaccggcgtggtggtg

SEQ ID NO: 200986 - DNA, 122 bp, Homo sapiens
aatttagcaaaagcctgcatgctgaggtggggaaggagccagctccagctccaccacacacgggctgcatggtccagggtgagttgctggcttgcttgagcctcagtgccctctttgcccgc

SEQ ID NO: 200987 - DNA, 122 bp, Homo sapiens
gtgatgggggactgggggaaggaaaggagggagagagagagggagagggggaggagagagcgcacacacaagcatgagagagcaattaagatgggagctgcagtctttttaataacctaatt

SEQ ID NO: 200988 - DNA, 122 bp, Homo sapiens
ccttcctggcaggtagcagactctccccagccctgtgccgaaacccattgctcagatgagcgaagcaaggctggggagctccgagcgccgacagcaggaggaggagggtgaccctgcggtgt

SEQ ID NO: 200989 - DNA, 122 bp, Homo sapiens
taggcaacataggaagacctcgtctctataaaaagtaaagttagctgggtgtggtggcgccggcctttagtcctaggtattcagggggctgagacagaagaatcacttgagcccgggatttt

SEQ ID NO: 200990 - DNA, 122 bp, Homo sapiens
aagtggctacgcctggcagcaaatgctccacatgccaacggccagagcacagccctagaccgatggcggtgcggctgaaccacgaggcctccgcagctatttatttcagagccttggtttta

SEQ ID NO: 200991 - DNA, 122 bp, Homo sapiens
tgttgggtgatggggctgaacaaagtgtccagggataggcggggaggtgctggcccaggccgggggaccagaggtttgggggaagacgtggaggcccgggcctcagccagccgcccctcggc

SEQ ID NO: 200992 - DNA, 122 bp, Homo sapiens
cgatcagcccctcttggcgttccggtgtagctgaccccgccccgggctctggccgggctgcgaagccgggaaccagcgaccccccgcccagcccctgcggccgccccgcccctccccgcccc

SEQ ID NO: 200993 - DNA, 122 bp, Homo sapiens
gaacatttaatcaattagcattgccgttgccaaaacttgcttcccaccgagcccaaaagccgccggcggcacatcccagcggcctccctcctcccgggctgggattcgcctctgcaagaaac

SEQ ID NO: 200994 - DNA, 122 bp, Homo sapiens
cttgagtgatccacctgcctcggcctcccaaagtgctgggattacaggcatgagccaccgcgccgggctaatatgctcattttagtgaggcaaaaatagaggctcagagtctgatttgtaca

SEQ ID NO: 200995 - DNA, 122 bp, Homo sapiens
atgagagaacactcctgtggatgtgatattgagggaaagtgtgttgcaagcagaggaaaacgtaagtgcactgaggcaggagcatgcttggcatgcccaagggtcatctcctgattcttggc

SEQ ID NO: 200996 - DNA, 122 bp, Homo sapiens
tgtgttcttaatgccgaggagcccatctgcacgggacctgatgctcatgggagcagagcccgtccacgtggcctctctgtgtcgtggtcaggccctgggggcgtggccgcctcctgcccttt

SEQ ID NO: 200997 - DNA, 122 bp, Homo sapiens
aaagtgttctgtctgcagacatctgtggccatcctcaccttggaatttccccttcttagacgagccagtctgacatcagtaaaaaacagaagtcaggcatttctcccctgtagaaagggaac

SEQ ID NO: 200998 - DNA, 122 bp, Homo sapiens
tacatacatatataatatataaatataaagacatatatatgcacagacttaactccaacacgattggagtgtcgggagggcaactgggctgccctctccgccctccaggactgcgggacaag

SEQ ID NO: 200999 - DNA, 122 bp, Homo sapiens
gagcatgccaccacgccccactaactgttgcattagtctttttctatagagacggggtctcgctatgttgtccaggctggtctccaacagggagggatatttctttttggaagatttttttt

SEQ ID NO: 201000 - DNA, 122 bp, Homo sapiens
ggtgtaaccgtccttgaccctgtgccatcctggtggctggcaccgagggtacaatgaccacggacaggggtcctgacctttagctagtcctgaccttgagcccaaccaaaatccccattccc

SEQ ID NO: 201001 - DNA, 122 bp, Homo sapiens
cactgcgggagcgggcaatggtaccagccgaggaaaggagggatcgatatgagtagcgctcgctgtggctttgaacctctactcagcaacagaacatttcccagcagaaaggctgggagtgt

SEQ ID NO: 201002 - DNA, 122 bp, Homo sapiens
acccacaggcccaacaggccacttggctatgaggccagagcgtcgccataggggcccgaacgctagcgtttagggaatccgcaggctagaagtggaggcgggacgccactggtcgtctgagc

SEQ ID NO: 201003 - DNA, 122 bp, Homo sapiens
ttaccaccatattcatcagcagtaaactattccccaatagatatctgcaaccccaggcctcgtgaaagttatcaggagacagtgtcttgatgatgttaaatgacctgcacaacccaggaagg

SEQ ID NO: 201004 - DNA, 122 bp, Homo sapiens
ccctgagcccccgatccaggaatggcctctgtgcaggccctgtgcccaggcagagcagggcgaggggggcatctctggattccactccctctgctgtgtagtcagcagcagtcaggtgggag

SEQ ID NO: 201005 - DNA, 122 bp, Homo sapiens
gccacctctcaagggcacagggacatgaaaaccctcccacttcccagacccttctcttatcggaagcaaaagcctcaaaccacttccctggggcaggaaaaaccttctaccctggaggctca

SEQ ID NO: 201006 - DNA, 122 bp, Homo sapiens
tatcccagaacattctggaggcagggagaaggggaggcagctaatcagagtctgagagcacgatgatctcttctggatcgcattgtgtggccacacttgtctgcagggaagtgagagacaaa

SEQ ID NO: 201007 - DNA, 122 bp, Homo sapiens
tcatcacatttcagacgggttcagtggtatgctggtacaatttaacaactggcttgggggcggggaagtgcagccctgatttgcagcatttgccaatttccatggtgtaaatcctcccatga

SEQ ID NO: 201008 - DNA, 122 bp, Homo sapiens
ttgagtatataaaacagctacaatattccagggccagtcacttgccatttctcataacagcgtcagagagaaagaactgactgaaacgtttgaggtaagaaaggtcttaaatatcattgtaa

SEQ ID NO: 201009 - DNA, 122 bp, Homo sapiens
gggcttttgtgcaatcctcacgcatgtgtggataccagtatgcatgcccttgtgctcacgcgaaccgccctacgccctcaggtggcctgcaggggactggtgcagccccgaggacactccca

SEQ ID NO: 201010 - DNA, 122 bp, Homo sapiens
agttttgctgtgaaatccgccactttcgctggccccggcaaaaagcaaggcgcctcgtcccgagggcagagtttcttgcaactgccggataaacatttcccgaaagcttcccgcggccccca

SEQ ID NO: 201011 - DNA, 122 bp, Homo sapiens
tactcggtttctggttcattgtaatttcatgtacattcacttgagtattactttagcatacgtgtgagcttggctagtgtgatactgtaggcaaatattgtaattctcaaggggaagtttca

SEQ ID NO: 201012 - DNA, 122 bp, Homo sapiens
gatggggcggggacggagccatggggcctcgttggagccgaggcctacacgttgcaggggcggggcgctgggcggggaggggcggggcctaggccagataccctgcaggggcggggcggggc

SEQ ID NO: 201013 - DNA, 122 bp, Homo sapiens
tgtgacgagtcacgtgacgcaaggagaataacgggcctgtgttctcgggctttttgtttccgtcaagcttcatgacctgcaggaagtaaaaccaggtctgcctcacgctctgcacacccctc

SEQ ID NO: 201014 - DNA, 122 bp, Homo sapiens
aatctgggaaaacccaactggttagtgggaaagagtacaacgccggggacacggagggaacgattacatctaagatcagtgaggcaagtacggttacttcgggaaaagggattgctgttcaa

SEQ ID NO: 201015 - DNA, 122 bp, Homo sapiens
gaccctgttgcgtggtgatgggttgccagggagacatacaccttttctctgggcctgggccgcagctgcgcggagcgccgggcacggatggcggcggctgaggggagcgaagcgagggaggg

SEQ ID NO: 201016 - DNA, 122 bp, Homo sapiens
gctccatacaggggagtctctctctctttttctttccaacccgggacccttggtgggcggcgcctaaacatggaagcaactgctggtttctggcagtggccagtgaaactaagggggttccc

SEQ ID NO: 201017 - DNA, 122 bp, Homo sapiens
tattctatcatacaggataacaacttttcaggggaagttatctttaacttccctgtgccccgactaatggtattactcggtgagaatgttgactgcatgttgatccccactgggggattcta

SEQ ID NO: 201018 - DNA, 122 bp, Homo sapiens
gtggaagggaccgggagattattggcggagacgggaagaaagagggcgtgccttacgcctcgcgtttattggtcaatctaaaagtaggcgcgccccagtgagccgacagactggctccgaca

SEQ ID NO: 201019 - DNA, 122 bp, Homo sapiens
ggcctcaggtggacaccgggccctaggagaactccaggccccagctgaagatcaatgccccgggtggacacccaggccctagctaacgaccagtccccaggattccatcaggccccaggtgg

SEQ ID NO: 201020 - DNA, 122 bp, Homo sapiens
atcctgaagtgaaattcaaaccctggtgagttaaaaccaccatctaacacctttccctcccgaagcaattgcacagaatcctctcaatcaaaaaaaattcgaagaacctgtataaaatggca

SEQ ID NO: 201021 - DNA, 122 bp, Homo sapiens
caagaaaccaaacatttatttctattgtcactctgtacagcacacagatattcacacatacgaagggttctagactcaagcagccccagaggtaggaaggggcctggttttggaatgtcaga

SEQ ID NO: 201022 - DNA, 122 bp, Homo sapiens
gagagctaggaagaaaactgggagagcatagtgtccaaaggccaagtggtttcaaagaaacgggaatgatcaaccatatctaatgctgccaataggtcaggatgagatctgagaattgatta

SEQ ID NO: 201023 - DNA, 122 bp, Homo sapiens
attcccagcaggccttgggcctcagtgcggccgcgaagcagagcgggctgtagagccttgcgcgcgcagtggggatggaacgttgctaggcttagcgggtctggctgctgggggcccgagca

SEQ ID NO: 201024 - DNA, 122 bp, Homo sapiens
aaagtgccgggattacaggcgtgagccacgacgcccggactctctttttcttttgagacacgatctggctctgttgcccaggctggagtgcagtggggccatcatggctcactgcagcctcg

SEQ ID NO: 201025 - DNA, 122 bp, Homo sapiens
tcatgatcttccttctgctaccaccattggagctacgggtactatgatgggtgagacccacgaaactccacctggctgcttcccttcctcagatgtccatagtcttctacgattggctctgg

SEQ ID NO: 201026 - DNA, 122 bp, Homo sapiens
ccctgggaggcagtcaggaccagctccccctcatttcacagatgggcagactgagggccacggcctaggcagcagtgccaaagacccagagtcctgaccatcagccctcccccaccaccagt

SEQ ID NO: 201027 - DNA, 122 bp, Homo sapiens
gagaaaatgtaaacaaaactcttaacatagcgcctgtcacattaataaatgctcagtaaacgtaagttccctgagggatccaggcacctcacaggcacccaacaacacttgatgaaataatg

SEQ ID NO: 201028 - DNA, 122 bp, Homo sapiens
gttaagctgtggatctgagtcatagggtcagggaaagaggaaaaatggcaaggaggatgacgttactgcccatgagcttatcctctgagtgggtggcgacttctcattgtccttttcccaca

SEQ ID NO: 201029 - DNA, 122 bp, Homo sapiens
actccgttccggccacgcgccatgtgtggaaatcagacccgtcagtgcgtcagtcagggccgggttcagtcagtcaggaaatttgaggccaggcctgatgagagggagccccaatggcaaag

SEQ ID NO: 201030 - DNA, 122 bp, Homo sapiens
tgcccccatctccacggtgcctgctgggcactgtagcaacaaaaatgcaagtgtcagctccggctttgtgttgtcaccatccagggccctcattctagagtcatgctacctgagtctgaatc

SEQ ID NO: 201031 - DNA, 122 bp, Homo sapiens
aagctcgtgctctggtcgggtaagtgcggcggagccgggtctggggggcgggaggtgccgcggtaagatgggggcacccttggaaagaacaggctcaggcctgagttttggagagggcgggg

SEQ ID NO: 201032 - DNA, 122 bp, Homo sapiens
gctgacgtgaagatgagcagctcagaggaggtgtcctggatttcctggttctgtgggctccgtggcaatgaattcttctgtgaagtgagttctcttcaacctccctacttgccagcttcaca

SEQ ID NO: 201033 - DNA, 122 bp, Homo sapiens
acatgcagccgccatcattgattcgataggcgacgcggggagcggaagccctttacactacggtgtttccggcttcaagatggtcgcctaagctgtttagtgaaacttcttccacctttctc

SEQ ID NO: 201034 - DNA, 122 bp, Homo sapiens
gagatgagactgcgctccgagctctagagcccaatgaggtggtcaggttgcaacagcaaccgggcgtgttaaaacctagttcctttgaatatgtttcattcaccagcccgcatattaacttt

SEQ ID NO: 201035 - DNA, 122 bp, Homo sapiens
tgagtggctgcatctggctgtagagtagccagtgcctagtgtggggtagtcagcagtgctcggaggacaattcacttgagctcctgggcccctttccctggaaataggtgtatttttgacag

SEQ ID NO: 201036 - DNA, 122 bp, Homo sapiens
ggaactcctgacctcatgcgatccacccgccttgccctcccaaagttctgggattacaggcgtgagccaccacacccggccatgaattgtttttagtggagattcagtataccctgtcttgt

SEQ ID NO: 201037 - DNA, 122 bp, Homo sapiens
ggcatctcagagcttccccatgtggaacggaacttacaggagatccagcaggcgggagagcgcctgcgttcccgtaccctaacacgcacgtcccaggagacggcagatgtcaaggcgtgagt

SEQ ID NO: 201038 - DNA, 122 bp, Homo sapiens
ttcgctgaaaagtgaggcggggtttactagctcactcgctgaaaagtacggaagtggcctcgggttctaaaagcccctcagaacacagtctgtcttggctgttttccttggcctcactctcc

SEQ ID NO: 201039 - DNA, 122 bp, Homo sapiens
gagcagaagggaaaccaaacagttggagaggatgccacagcattccagaaaaggggaagccgggttccttttcaggaaagttgagctaaaaatagaacatcaccattcaacagttgctcgag

SEQ ID NO: 201040 - DNA, 122 bp, Homo sapiens
gggagccaccgtacccaaggtcgcagcatccctgggaaatggtcctgcccagcaggcttccggatgtctggttcaggaatgtctccccaggcccactctgtagtggccagagacagaagggc

SEQ ID NO: 201041 - DNA, 122 bp, Homo sapiens
atggagcctggaattaaggtgggcatcgggggcccatctggggggattgctgaggcatcgcgggagcgcaagcgtgccctgtctgcccttccactcacctcaaagtgccttgtacgcgacag

SEQ ID NO: 201042 - DNA, 122 bp, Homo sapiens
tcaaaaggggagtttgagagttgagactcctctctcctccagtatggagtatccaaggggcgtggaaaggggggggctccccgccactccttccgccccccttcttcaggaagtcccagtct

SEQ ID NO: 201043 - DNA, 122 bp, Homo sapiens
gccacggcgccccctctagtcacctgcacgccacggcgctccctctagtcacctgcgccacggcgccccctctagtcacctgcgccacagcgccccctctagtcacctgcaccccacggcgc

SEQ ID NO: 201044 - DNA, 122 bp, Homo sapiens
ctttggtgtctctgcacctttggctggtgactcagtgtgtcaacaatactgatttagccccggctgggtgcagagttttctgatggatgtcacaaaggtggccaaaaccaaaggaaatgaaa

SEQ ID NO: 201045 - DNA, 122 bp, Homo sapiens
gatgcacctaaatcaccaggattgctataatcctttgatagttaggcagagtgttcgtctcggtctggcgttacagctgggctgtttacggagtgttacggtgtacttttcaagggagatag

SEQ ID NO: 201046 - DNA, 122 bp, Homo sapiens
cggccgctataagagcgcacggggcagacgctcggttccccgccgtgcctcctcgctggccgcgctccctcccggtgccggcttctctgagtcaccaacctgaggctgccccggccgcctgc

SEQ ID NO: 201047 - DNA, 122 bp, Homo sapiens
attggagatcaatcttctccccttctctttctaaagtcagcttcagagtcagccttgtctcgggggaatgaatatgattggcctcttatctctttctctgttcttttttcacccattgttta

SEQ ID NO: 201048 - DNA, 122 bp, Homo sapiens
gcccctctttgctactgacctgcccttaagaaccgtatttccaacatgcacacaggctcccgggcagtaccacagtcttcagggctgctaactgagctcgtcctctcaaaggcatcctgcgg

SEQ ID NO: 201049 - DNA, 122 bp, Homo sapiens
caaacaaacaaacaaacagagagttgcaggaatgactgtcttaggtggcttgacaggctgcggggtttgaattttgttcaaaggcctctcaaatcccaccctgcaggaactctagctactag

SEQ ID NO: 201050 - DNA, 122 bp, Homo sapiens
gagaagttgcactgggcttggctgtgagggctccttttgggtttacctttctgttggtctcgtgatggtaccaattttcggggtacaagtaacctattattttttcatctggtaaaggacat

SEQ ID NO: 201051 - DNA, 122 bp, Homo sapiens
aaagaaggaaccgtgaacattttagacacccttttctttggggtaggctcttgccccaggcgccggctcttctcccaaaaaaaaaaaaaaaacactaatccatttccctaacctagtaacct

SEQ ID NO: 201052 - DNA, 122 bp, Homo sapiens
tccggggaaggcccgggtggggccagggcctgtggttaagtcagtggccctctgcagacgcgcacgcagcaggagccacgccctggtccctgcccgggagtggcctggtctcccccagctct

SEQ ID NO: 201053 - DNA, 122 bp, Homo sapiens
gagctatgcccccaccttcctgaactgtctcttgctcctgtttgatactgtcatgctgcacgaagcttacacttgctatctctcacttccctcttagtcatctgtgatgctggctaagggag

SEQ ID NO: 201054 - DNA, 122 bp, Homo sapiens
ttgaaaaaactggatccagatctctcttctgaaggaactagtaatacatgattagcagcacgggtgactttttaactatgcccttcaaaatccaatcattgaaaacttattgaattaaaagg

SEQ ID NO: 201055 - DNA, 122 bp, Homo sapiens
gatcctcataaaaattttattgagggacgtaaaaacaagctacttgcccacgaccgaggtcgctcttttgccttgcccgctctcaccctggctctctgcagacagagcccgggagcgacttt

SEQ ID NO: 201056 - DNA, 122 bp, Homo sapiens
aacaagtgttggatggatgcacggcgctatggcggaatcacaattgtgacagtgcattcccgtgaacttttggctactctatcaccacagtcgttccgtgttcaagctgcaaaggacctcag

SEQ ID NO: 201057 - DNA, 122 bp, Homo sapiens
gctctttcctattggctggaaagacgaattgaagttcccttgcccatgttaggaggtgtacgcctcctgaactaaagatagaaacagctggcccttccaggcagctaaaagcctccagacta

SEQ ID NO: 201058 - DNA, 122 bp, Homo sapiens
acccaggagggcacttcttagctatctctttacttagttcttccagcaaactagctggcccgtggtaacagctcattgctgttaattaggaactattgttttcttttctttttaactttaat

SEQ ID NO: 201059 - DNA, 122 bp, Homo sapiens
gacgcctgcgccacgtgctggggtcggaggccgagctcaccggctggttgctctttagagcgggcaggagccaggcgggcggcccgcccctctagggcggagacttccggagctgcggactc

SEQ ID NO: 201060 - DNA, 122 bp, Homo sapiens
acggctgctttcacataacccagggctccagaggggccggaggcaggcattccagggccacgggaacatgcaagtttttaaaatagaagtgaaggacttaaaaaaaaaaaaagcctgggaat

SEQ ID NO: 201061 - DNA, 122 bp, Homo sapiens
gggagccctgagcttctgcggctggaatgaaccaagtgtccgcccggccggggagaggcgcgctgcgctctcggaaatgactcgctccaatcccgcttcgcggggttcgcgccggggggcgg

SEQ ID NO: 201062 - DNA, 122 bp, Homo sapiens
tgggggaacgctgtggaccggtgtggagtctaggacgacaggtggtgggctctgtccccacgcgcctcgcggccagcagaggccccctcactgcggccgccgggcgggactggcgcgggcgg

SEQ ID NO: 201063 - DNA, 122 bp, Homo sapiens
ctgtggtcagattctcaccataggtggttctccagccttggcacatcagctgagtgcaggcgctcctcactttgtctaacatatgtgttagagtaaggctgtgtgaacatcatagttgtgta

SEQ ID NO: 201064 - DNA, 122 bp, Homo sapiens
ctggccctgacagactgcagaccagaccggggcattgttctctttctcggccttccccgccgtggacgggccccccacctggtttgtgaaacctgcgcccaggctgagttcacagctaaact

SEQ ID NO: 201065 - DNA, 122 bp, Homo sapiens
acacctgcccacaggctgcaggactaagcagcatagctcagggcaggatggagggtgaggcggatgtcctggactcactgtcatcgccttcatacctgtcacctggcccaggatgccagaca

SEQ ID NO: 201066 - DNA, 122 bp, Homo sapiens
atttagactagaattgcagtcaaaaatgaaaagaaatagttgtgccaactgcaaagtccccggaggggaaatactgatcatatcctgagaaaaaactgatgccccataccaaaggcatggca

SEQ ID NO: 201067 - DNA, 122 bp, Homo sapiens
tgtggggtggccagggcaactctcggggacaggcaggtgggccccggggtggcggatttccgcgggctgcctcggaaccgagcttcgcgcccagcccggggccggttctgcgcccagacgat

SEQ ID NO: 201068 - DNA, 122 bp, Homo sapiens
cagccttccctccgccctggaaggccaggtcacaaaggccatcagggcttgtccgggagccggtatcccctaagactgccctgtgcctctcgcggcgatcccggcccagcggctgggcgtta

SEQ ID NO: 201069 - DNA, 122 bp, Homo sapiens
cggcgttgcgctcatttttcctctcgaaagaggcgggggcacaaggggtaggaccagcctcgctgggcagaggcaagtgctctttggagttgcccactcggtgcacctcgatcacctccagg

SEQ ID NO: 201070 - DNA, 122 bp, Homo sapiens
cctctgtagctgttttgggggatgcagcacagacagcaagcgtccagctgcttcaggggacggcagccttgggaccaccttgttgcgtctggcaggtgggtgtggaaggcaggagggggatg

SEQ ID NO: 201071 - DNA, 122 bp, Homo sapiens
gtaatcaagccatagtttgtttagagaatctgtgagaggagctttgagataagcagtgggcgaggttgatatttgttgtgacgtttcaggtaacaaagagcctgggatttgtctcacatcta

SEQ ID NO: 201072 - DNA, 122 bp, Homo sapiens
taagcttcttgcctataagatggaataatgataatgctatgtttgcgtctccccaaaatgcgtatgttgaaatcctaacaaccaagtggatggtatcaggagatgggacctttgggaagtgg

SEQ ID NO: 201073 - DNA, 122 bp, Homo sapiens
gggctcttcctccaacttctaagctttagtggttcaacttcttcctttgttctctcagcccgagtgggtagctgcttcttgcagttactaacttaagtgatactgcagatttgtttttttga

SEQ ID NO: 201074 - DNA, 122 bp, Homo sapiens
agatgaggggcttaggggggcagaccggaggttcacagtattccgcctgcctctgtcccgcgtgctaatcggagcccagtgattcccgctgcaccaatggctgagtgtgttagggagcagaa

SEQ ID NO: 201075 - DNA, 122 bp, Homo sapiens
accgggagggcagatagggaggcaggccggctggaggggccagataggcagccaggctggcgggcgctgagaggcgatggagcgagcgggagcccgcacgctgggtgcaggcacggccgact

SEQ ID NO: 201076 - DNA, 122 bp, Homo sapiens
gctcccctttgtttgtttcgggcttcagggtgcaggctctggaatcagtcactgtttccccgggatggagagaacctggggccaagcgaggagagtgccagcggctgctcagcaccttggtc

SEQ ID NO: 201077 - DNA, 122 bp, Homo sapiens
tatatgttgcagtggtgctggcgctggagggaatgcccagggaggctgcagtgctcaccacgaagcccaggtccacggagggagccaaggtccacagagggccccggggccagagggaggcc

SEQ ID NO: 201078 - DNA, 122 bp, Homo sapiens
actaaaactcaaacccatgattctttcactttaaatgatatggttctgaaccattaaattcgaatgctactaagaatggtgaatgctaagcaatgttaagctacacattgttattattaaca

SEQ ID NO: 201079 - DNA, 122 bp, Homo sapiens
gggcgactggctgatgggcgagggagggcgagggagggcgccgcaacggaacgaggaacccggacagtgaaggaggaagaaacaaaggagccagcagcactagagagttcccttctggtgtg

SEQ ID NO: 201080 - DNA, 122 bp, Homo sapiens
cagctggcagccacttgggcaggtactgagctgtaggagtttctgcgtactctggtggctcgcagtaatccagtgaagcaggagatccatcaactcccatgagaagagggctgaagccaggg

SEQ ID NO: 201081 - DNA, 122 bp, Homo sapiens
tgtatagtcatcccactataccctttagtggggcgactctcatggccctctcagcattcccgaaactgctgggaccctgaggcaggtggggttaattcttcaaaagagacttcagctactgt

SEQ ID NO: 201082 - DNA, 122 bp, Homo sapiens
tccctttcaagccttatcttcccttctgggtcttcttgccactttgggctgcacgccgcgcgtgccacacgctctgtgggtgccaaccaggcacgccaggatccctggggcatggcgcaggg

SEQ ID NO: 201083 - DNA, 122 bp, Homo sapiens
ggtccggctgctccaggctgggagagtgctcacctacctctgcccccttccccaccacagcgagcagttaaagtgtcacttaacattctggagaatgtgaaatatactgcgcggtgtcaact

SEQ ID NO: 201084 - DNA, 122 bp, Homo sapiens
cctgcccggggcgggtcgcggggtgggcgggtgaactgccagcgaggaggcacctgcttgcgcgggtgcagcctgggctgcgccattgttgggggaggggcggctgctgagggcggcgagta

SEQ ID NO: 201085 - DNA, 122 bp, Homo sapiens
tccctggatggacactcaagaggaggcaccacccttgccccacctggccctgcaccccaccgtggccccaggtggagtcccagcccagcttctccaaatcctgacaaacacgctcgtaatga

SEQ ID NO: 201086 - DNA, 122 bp, Homo sapiens
tgctgccgagcgtccacgtctgttcggttgtctttgcacactcctggctcccagttagaccgctgctcccaggcggaacgtctgccacaggggacacgtacatgcggccaccatggggactg

SEQ ID NO: 201087 - DNA, 122 bp, Homo sapiens
aactgaggtccagaaacccaatgtgccaggaggcagagccaacagagaaccccagactcccgactgccggtccaagggcccctttggctatgagagacacactgccactttttctgtcactg

SEQ ID NO: 201088 - DNA, 122 bp, Homo sapiens
caagccagtcaacaaagactgctatatctccaggatgttcctgcacggggacttggtcatcgtggtcctgcggaacccactcatcgccagcaagtaggggccacctatctgtcgacagaact

SEQ ID NO: 201089 - DNA, 122 bp, Homo sapiens
ccccgtttcccatccctcagaatgttctagaaatctcagcacacaggaagatgcagtggccgaggcccgtagaaggaagcgggcgaagggcggaggaggacgcgcggggccggggccggggc

SEQ ID NO: 201090 - DNA, 122 bp, Homo sapiens
ggacgcgggggaggcggtgggagcgagctgcgggcgctgcgcggtggccctgctgtctggcgtgtgcacgctagtgtccacacacgtgtgcgtgggctctgggtgccctggcgcggccggca

SEQ ID NO: 201091 - DNA, 122 bp, Homo sapiens
gaccactttctctgccaggaggtggcactgggagaggatagggactccggaggggtgtaccgtcctccaggaagccctctgctgggtcggctccgtgcctctgtcttgggaagtgatggact

SEQ ID NO: 201092 - DNA, 122 bp, Homo sapiens
accagtgattacaggaggctcccccaagacctaggagctggtaaagggctattgctctcccgtctcaccgcaaagcacgcctgcgaacgcaaagtacaaaagagccttgctaccggagatag

SEQ ID NO: 201093 - DNA, 122 bp, Homo sapiens
tgaagtggcagagccccaggctgaaacctgggcttgtgctgccaggatctgccctctgaccgctgagtaaagaataaagggtttggagcaccaaccctaggcctgaattccagtcctatgac

SEQ ID NO: 201094 - DNA, 122 bp, Homo sapiens
cttgtcgaactgcacatagccatcctgcttgccgctgctgctgacgctgctgtcacactgcgtgtccaggaaggagctgctgtcgctgagggagcctctctggaactcccgctcacaaagct

SEQ ID NO: 201095 - DNA, 122 bp, Homo sapiens
ccaaatacagaaactcgtacatacaagactggaaaatgaagctgtattacctgaaaggagcggagtggtgatggggcaagagagaatattatcacgtttttcttattacatcttgatagcct

SEQ ID NO: 201096 - DNA, 122 bp, Homo sapiens
tgagaacgaagaccccgcagtgccggtgcccgctgggccgtgcaggtctcggccgccccacgcccgtgtccgtctccaccgtgaccccctcgcccccggcacgcccagggtcaacccccggg

SEQ ID NO: 201097 - DNA, 122 bp, Homo sapiens
tgatgcatcttctaaccaggctgggaacacaacacgcgcacacgcgcacacacacacgcacgcacccaccccacccggctgccggacgcaagcgtaagtcaaggacttgcatgctagaatca

SEQ ID NO: 201098 - DNA, 122 bp, Homo sapiens
tctccctctgcgatgtctctcccgaaagtgtgtgacttgcccatgtctgtctcttgtctgcgcctctcccctaaattccctccctccccagccctcgccgcgagcgtgtgtgcgcgcgtgtt

SEQ ID NO: 201099 - DNA, 122 bp, Homo sapiens
cttcttttctcctattctcttaagaaacatgcccatcacctgcagtttctctgggctccccgttaatctgccttcctcatctcctaatgctgcctcctccctcccattgccggtgcctggaa

SEQ ID NO: 201100 - DNA, 122 bp, Homo sapiens
tgtttaatgcccatgcccgtcctctgacgcggatgctgtcaacatcctccacacgcacatcgggagacggcggtccctccagaagcacaagctccttccagaggctggctcctgaccccttt

SEQ ID NO: 201101 - DNA, 122 bp, Homo sapiens
aggagctgtgcactgaaggagccacccgcactgcgggagctgggcactggaggagccacccgcactgcaggagctgggcactggaggagccatctgaactgcaggagctgggcactgaggaa

SEQ ID NO: 201102 - DNA, 122 bp, Homo sapiens
aagaagagagattgatccgattacttctaagacgttttttagcccaacctggccacactgcggaggcgccggttctttcaccccgctaacccctccgtgttggcagccaatagaagcactta

SEQ ID NO: 201103 - DNA, 122 bp, Homo sapiens
tgctgagaaatggggtggaatagggaactgtaatggccactgaagcacgtgagagaccctcgcaaaatgatgtgaaaggaccagtttcttgaagtccagtgtttccacggctggatacctgt

SEQ ID NO: 201104 - DNA, 122 bp, Homo sapiens
agcgtctctgcccggccgcccatcgtctgggatgtggggagcgcctctgccctgccgcctcgtctgagatgtgaagagcgcctctgcccggccgccaccccgtctgagaagtgaggagcccc

SEQ ID NO: 201105 - DNA, 122 bp, Homo sapiens
agacttggacactgagcccacctcacctgcctgctcaaggtggctgagcccaggcacaaacgtggggctgctagccctgattccctgggacaggctcctcttccctgcccactgatcccttt

SEQ ID NO: 201106 - DNA, 122 bp, Homo sapiens
gtcgcctcctataacttctgtaggtggagccctgctacctcttgcctggcctgaggacagcggcgaagctacgacaagtgcatggatagcagctgggaggggaggctggcaagaggctctcg

SEQ ID NO: 201107 - DNA, 122 bp, Homo sapiens
atttaccttagaaaacattaggactttcatataagttcctaaaatcataaattctaaagccgttagatttctagaacttgacaagatttctttaaaaaacagggtcagataagaattttgcc

SEQ ID NO: 201108 - DNA, 122 bp, Homo sapiens
attagtggttttagcgactgacttgttatgcgtctaagaaattaacaagagcaacaagtgcggcagatctttaagaacaggtatattttagctggaggacatattacccaactcttaaagca

SEQ ID NO: 201109 - DNA, 122 bp, Homo sapiens
aggacgggaggacagggcggtggcatccctctagcgagagagagccagagccctcggcggcgaggaaagctaaaacccggcagtcccgggccagaggaggccaaggcaagatgctggacggg

SEQ ID NO: 201110 - DNA, 122 bp, Homo sapiens
agaactttctattgtctgagaagcttcactgaacaaattgtccctaaaactttagagctgcgaagagcggatcagggcaggttctagtgtggccctgtgccccggagcctgcctgccataaa

SEQ ID NO: 201111 - DNA, 122 bp, Homo sapiens
aaagctgcgctccagtgcggccgcctagcccgcccctgcgcgggcaacgccctctcccttcgccctatcccagcgtgccccgcccctccaggacgcttccagcctattagcgtgcgccccgg

SEQ ID NO: 201112 - DNA, 122 bp, Homo sapiens
agcttcactcctgaagccaacgagaccacaaacccaccgggaggaacgaacaactccagacgtgctgccttaagagctataacactcaccacgaaggtccgcaatttcactcttgagccagc

SEQ ID NO: 201113 - DNA, 122 bp, Homo sapiens
acctccaaatcgagctctgcgcgacgatccaagtcctcctcggtctccaggtctcgctcgcggtccaggtcttcatctatgaccaggagtcctccccgggtatccaagaggaaatccaagtc

SEQ ID NO: 201114 - DNA, 122 bp, Homo sapiens
aattattttgtgtatccctctccaataggcttctgaggaaaagagtcaggctcagccactcggccataaaggcttcattctttatattgtggcagggctgggatgggctgagagatactata

SEQ ID NO: 201115 - DNA, 122 bp, Homo sapiens
tctctccaatctgccagttttcatggaagcccactcctcgctcccgtttccctgggagagcgggagacccttctcgtcagcccagacccttcggggcccctgagcaccctgcccgcccctcc

SEQ ID NO: 201116 - DNA, 122 bp, Homo sapiens
gacactgttctgacttgtagcactgctctaggcctgccaatttatgaaacaattggccctcgtcttggcaaggttgtagacctacattccccaacacaggtacattgaagaactggctacga

SEQ ID NO: 201117 - DNA, 122 bp, Homo sapiens
gtccccgccttctgttattctaaggcctcagtgattggcctacagaagccggcagagaggcggagtcctatagaatttgagggggcggagctgtgcactacggaaaggcccaaggcccaagc

SEQ ID NO: 201118 - DNA, 122 bp, Homo sapiens
ggcgcgctctgatcctttaattcccgagactagatcttggtcgctgtgaattgaattttacgccccccttcccgcgccattcggtcaaaaggcacctctgcgccctctggcggccgccgctc

SEQ ID NO: 201119 - DNA, 122 bp, Homo sapiens
gttttgctcttgttgcccaggctgcagtgcaaaggcatgatctcggcgcaccacaacctccgcctcccagcttgggttcaagtgattctcctgcctcagcctccggagtagctgggattaca

SEQ ID NO: 201120 - DNA, 122 bp, Homo sapiens
taactctcagaactctcatgtgccttagggactgagtttgttcctttcttctatttgatacgcttgtcgggaaagcttgagatacagtgctccagggtttaacagggaaaagggactcagat

SEQ ID NO: 201121 - DNA, 122 bp, Homo sapiens
tcacaaagaattgccctttgggatgaattttatatgctcattctcagctgaggggtgactcgggtggtgcgaagtttggtgaaatttcatttgagtagtccatgcataaaaatacattccag

SEQ ID NO: 201122 - DNA, 122 bp, Homo sapiens
ctttttcttctgttattgattctcgcctatagacagacgaggaatgactgctgatgaaagcgtctgcgtagcggccactcagactgtgtcaaatattcctccggcgtcccgccccgggctct

SEQ ID NO: 201123 - DNA, 122 bp, Homo sapiens
attctcacgcctccacagagcaaatggactccatttcccaagataccagcgaaacgcctgcgggagtctaattgcccggtcgatgcgcaggaaatttggctcccgcaggcgtttcgcgagta

SEQ ID NO: 201124 - DNA, 122 bp, Homo sapiens
ggtgaggcagagaggtggctcgtgcctccctgccagggtgggtggacagtggattgattacgcctgacaactcctacttgggccctgtcactgttgtgctgatatagaccttgaggagtatc

SEQ ID NO: 201125 - DNA, 122 bp, Homo sapiens
gcaggaatggcatgatgttgaagccccacttccacaaggactggcagcagcgtgtggccacgtggttcaaccagaagatccgcagaatcaaggcccggcaagccaaagggcgctgcatcgcc

SEQ ID NO: 201126 - DNA, 122 bp, Homo sapiens
ctggaataggtcttccccgactcagccctgggcttcctgggcgagtcgctgtctcctgcccggttccactggcatggccccacagttggcattttagttgggattgggcgttattcaactct

SEQ ID NO: 201127 - DNA, 122 bp, Homo sapiens
gggctgtggcaggctggagcaggcaggcaggcctttctggaaacttgagaaggcaggagccggaatgggctttggatgccttgtgctggggccagcttctcaacagcctgggcccctacctg

SEQ ID NO: 201128 - DNA, 122 bp, Homo sapiens
ccgcttgcatcccacttgcccacagtcctgcccccgccactcagagcgcggctggctcttcgtggcatggacccacctccggccagaaaggagcgcagccagtagaagtctctgcgggttgt

SEQ ID NO: 201129 - DNA, 122 bp, Homo sapiens
ctgattggctgcctatgacatcaccaggctgggctgctattggcccttatgtgtgattggcgtttggagaggcagtgggctctgggcagggggtctccagggcggggaggcgctcaaggcag

SEQ ID NO: 201130 - DNA, 122 bp, Homo sapiens
tatcacagattagcccaggaaacagctagtcatgaatcacagaggctcatggatctctgccgaacaaagaactccagctctgggaaactttctggcccagcctctccctctgtcccagtgga

SEQ ID NO: 201131 - DNA, 122 bp, Homo sapiens
aacaagaagagaggcctgcgcctaggtatcggccgcctccagagtttcaatatggacctccgaaggaggcacctccacctccatgccagtgctggtctcctgacaagagagggttcgcctac

SEQ ID NO: 201132 - DNA, 122 bp, Homo sapiens
aaggcgtccccgcttctcaggtcctcctcgcagcttgagcgactgcagggccccgcccggcgcttcttgagcaactggaggttcgggggtgaacctctggccctttcccgtcctccctccag

SEQ ID NO: 201133 - DNA, 122 bp, Homo sapiens
atctcaaaagatatgaagacgtaattcagaggaaaataaatgcaattctatcctggcacacgaaaagatattcaggctcacttaactgcaaatcaaatatgtggggtagcatcttccaccag

SEQ ID NO: 201134 - DNA, 122 bp, Homo sapiens
gcgtgcccagtgagtcagccagagattacgtaaaaagcaacagagaacagcagcgtggggcgcatgcagcgactgtggatgtgacaggaccagacgtgtgccttgaggagctgtccctaagg

SEQ ID NO: 201135 - DNA, 122 bp, Homo sapiens
ctctctgcagcccaggaacaataaatacttcctccccatgtttaaaaataaccccatgaccgcttttggcagtcataggtgaggcgggcaccacctaaggcccccccaccccatgccgttct

SEQ ID NO: 201136 - DNA, 122 bp, Homo sapiens
cagagagtggagagtttttctaggaattctgggaagtgtagtttgggagccccgtgtagtcgggtaacttccgctctaggaggctgaggccgtctccctgatcccgtcgagaattctgggaa

SEQ ID NO: 201137 - DNA, 122 bp, Homo sapiens
ccggaccgagtgatctgtactataattaccctgtgaggggcgcacgctgccgtcctagagcgtcacagacaccagcccccgggcctgttggtactcgccggaggtccctgcgtgcccagagt

SEQ ID NO: 201138 - DNA, 122 bp, Homo sapiens
agcccgccatgcctgagcctcccaccccctccatgggcttctgtgcggccggagcctccccgatgagcgccgccccctgctccagggcgcccagtcccaccgaccgcccacgggctgaggac

SEQ ID NO: 201139 - DNA, 122 bp, Homo sapiens
ctttggggcaagatgcgtgctggccggtgttgtgcctccgcagatttagaagttagtggccggaggggcctggtccgagtacagctttcatcgcctttactccccgaccttccttcgagtct

SEQ ID NO: 201140 - DNA, 122 bp, Homo sapiens
gcctgctcaccccggaacacagtgtatgaatataaatgtaaattgcacttgcattacagccgtggagacgtgttgctgaggaagcagagagcaaagccccgctgggatgtgagtttgcttct

SEQ ID NO: 201141 - DNA, 122 bp, Homo sapiens
cacaggctcgcgcggccggacattgtgggtgtgcgtgctggatttctcccggatgctctccgactaacatggatgtcccaccattccttgcagtggaaggttgttccttggcgcagtgagtg

SEQ ID NO: 201142 - DNA, 122 bp, Homo sapiens
gtagagcccgtcctgcccccgccgcccgccgcccgccgcccgcctccgctgctaaacccgcggacaaccgccgggacgaccacccagagccaccagagccccctgacacccgccccgaggca

SEQ ID NO: 201143 - DNA, 122 bp, Homo sapiens
ggatgggctgagggagtggagggggacctcagaggagcaggaccagggagactcccaggacggtaagcaacatttgaggaccattcactaacgcttctctgcaggggtttcctctccatcca

SEQ ID NO: 201144 - DNA, 122 bp, Homo sapiens
gggtaaaggggttttggtgacgtggttcccaacgaatcaagaataataaacaatgcccttcgtcctcaaatctcaaaggtcaaatacttcacaactaccaataggcaccaagagctcgcgtt

SEQ ID NO: 201145 - DNA, 122 bp, Homo sapiens
ggaaaagaagagagggcaggaagccagcggtgggccggggcgggacgttccagacctcatcgggggcccgggcgtccccctgctcggcctgtctggggcctccctgcccacagtcctgactc

SEQ ID NO: 201146 - DNA, 122 bp, Homo sapiens
gaggggagagaaagcaggatcctcaaggaccagagaggcagtgggtcccacagtcaggtgcggggattcaacagaaacagaaggagggacgcttctcactctgaccccggaaagaaggaaga

SEQ ID NO: 201147 - DNA, 122 bp, Homo sapiens
ccagcctgctgcccgagaggccccagtgcagctgagcacaggtccaagccaagcctggttcgccccagcccttggggaggggaggcaccgaggcgctggagaggtgttgcagcaccgggcca

SEQ ID NO: 201148 - DNA, 122 bp, Homo sapiens
gggctttttcaaccacacacacttctctgggcagtgcctgattgacagttcccacgaacccgccccacgcccctgattggatagggcgtcaggtcccgccccctgagggctgattgacagaa

SEQ ID NO: 201149 - DNA, 122 bp, Homo sapiens
gtgtcccgtgcggcgcgagggctagtgcgcgccactgccgggagccggggtcgcgactcgcgttccacgccgcgcgctactcgctccaggtgacatcatccccctgccgggctccgcctccc

SEQ ID NO: 201150 - DNA, 122 bp, Homo sapiens
ggcccttaacgtccgtacatgcctgggcccagcacggcctgcacggcaccctgctcacctcggtggggctctcctgccaaggaggatggccctgaagtccgctgagatttccaaagctctac

SEQ ID NO: 201151 - DNA, 122 bp, Homo sapiens
taggttaagagttgatcagttttgcatctatatagcctatatactttttattatgtggtacgctttaacagttttttttgggaccttatatagtgttgctttcaaccagtgtctagtctagt

SEQ ID NO: 201152 - DNA, 122 bp, Homo sapiens
gggccgatctggagactaggaagccacttctctttcgacagcccccaccacagcccagcccgtgccaggcacccagcagctcctgaagcccactggcattgaacatggcattcaatccctgc

SEQ ID NO: 201153 - DNA, 122 bp, Homo sapiens
gagctgagcgcttagagccgccgaaccatagagatcggaaataggagcgagcggcagcgccggaaaggaggccaagagcgcgggcggcgaggcaagatggcggcaaccaagaggaaacggcg

SEQ ID NO: 201154 - DNA, 122 bp, Homo sapiens
aggtagtcccacatagaataagcatttctctactgagcaaaccctccacagcctgttggacgagaggggagtgggttctccagctgccctgcaaaagccccttcttcccggctccaaggctt

SEQ ID NO: 201155 - DNA, 122 bp, Homo sapiens
gggtcgcccgcgctctccgggtgacccgggcccggcagcaggcgcgcgcgggggcggcggcgcccaagcccaacttggcctccgcctcgccctctgcccagcccgccggtgtcccctccttc

SEQ ID NO: 201156 - DNA, 122 bp, Homo sapiens
gccgcatggcgtgctgtggtgcaggtggccgaagggggcgttactgttgcgactggcatccgcatccggcagatgtagatggaaccaaagtccagaagttacgcgtcacccttgctctacag

SEQ ID NO: 201157 - DNA, 122 bp, Homo sapiens
catcaggattctttaatctggctaaagacaggctctttgtttctaacttctgatcactagcgccctcctcgggaaaaaaaaacacgacaggtttcttccaccaacaggctgctccctgtttc

SEQ ID NO: 201158 - DNA, 122 bp, Homo sapiens
ggatttaaggcccggctgctgaggataagataaaggtcctcctgggggagaacagagtcccgaacaccatggccgtctggcttgcccagtggctgggccctctgctcttggtttccctctgg

SEQ ID NO: 201159 - DNA, 122 bp, Homo sapiens
gcccgctgcccgccccttcccacccttcccagcgtgcccccaagcccctcatccccgggccgtccgcacccaggcagcgagcacatcccagcccagggtaaatttggggggtgttccaggct

SEQ ID NO: 201160 - DNA, 122 bp, Homo sapiens
ggcaggggtttctgtcaccgggagagctcagccacgttcagggctaccttggcgtgggcacggtcactgcttctgtctcattttcttccagcaacttcgtgtacgacgacgggaaccaaccc

SEQ ID NO: 201161 - DNA, 122 bp, Homo sapiens
ggtggcaaggaagggggcgtgtgactgtctgagcagaaaccaggatggtgctgggagccacgcgtgcgtcggggcaggggagggaactggcgcctccccctccccttactccatcctgccct

SEQ ID NO: 201162 - DNA, 122 bp, Homo sapiens
agacacacacggctgagacggccgggatagctctaggcaagcgcccttgtaggacaggcccggggacccctgccgcggccggctgagcggtgtccaggttctggagccggacttgtccaccg

SEQ ID NO: 201163 - DNA, 122 bp, Homo sapiens
tttatgatttgaaatataacaatttggtcattgagtgatgaaatgttctaaaattgattgcgatgatgcttgcacaatgctgtgaaggcactaaaaacgatttaattgaatacatcaaatga

SEQ ID NO: 201164 - DNA, 122 bp, Homo sapiens
gggtacctgacctgtgctgcggctaggggtatagcacccagtccctgccctcacagaggtcgcagtccagtgggagaaacagtaataagatgttctcatagatagttctagtaatcataatt

SEQ ID NO: 201165 - DNA, 122 bp, Homo sapiens
tgcctagccagttggtaagccaggtgggcaaagaactactgcgcctggcctacagcgagccgtgcggcctgcggggggcgctgctggacgtctgcgtggagcagggcaagagctgccacagc

SEQ ID NO: 201166 - DNA, 122 bp, Homo sapiens
aaactcgttcaagatagacaatgtcatttttattacccatgaaacactgtttcacctgtacgtttacttcaccaataatggctctcccaatcaatgaatcaggatttagcggcagaaataca

SEQ ID NO: 201167 - DNA, 122 bp, Homo sapiens
cgatccactcggccctcttctctgccctgaagcccaggacctagcccgccaaaacacgcacggggccctcttagcccccagtttaccctctagggtttgcatagtcgggagctctagttccc

SEQ ID NO: 201168 - DNA, 122 bp, Homo sapiens
tctggtgaccaatggaacattttccgttaaaacctggacaaatctgagactcactgataccgaagggcaagtcttggcattcaaatccaggatttcaggatgttctgtgcagaacaccccat

SEQ ID NO: 201169 - DNA, 122 bp, Homo sapiens
atagaggacatcctgccttcccgttctgccctggttctcccttgtgaccactttaaaaatcgactcatttggccaggtgtggtggcttatgcctttaatcccagcactttgggaggccaagg

SEQ ID NO: 201170 - DNA, 122 bp, Homo sapiens
gaagtgggggggcagccgcagctctgggagcagtgggtgtggggtttgggctgttgttcacgtgtgagtggggaaggggaccctctgctgaagcccacccactttggtctctcccagggcaa

SEQ ID NO: 201171 - DNA, 122 bp, Homo sapiens
aggccaaggccacactgtagcacagttcacaccaagaacagcccatccagccctgccccacgttggtctcatgcccccactggagactcatcctgtgcccccacacacccacacagaagtct

SEQ ID NO: 201172 - DNA, 122 bp, Homo sapiens
gtgtgtctgagcggcgctctgcctgcagctatctccgtgtcaatggcatcctttgatagtcgcagtggaccgggtcacacccctttaatctgacttgtgggggaaagaagagaattatcctt

SEQ ID NO: 201173 - DNA, 122 bp, Homo sapiens
gccccaagagactcaccatctggggaaagtgtggccttttgttctcctactttagaaaggcgatacttccaggtaataggtttcttatcactcaccctccagggaaagctttaaaacaactg

SEQ ID NO: 201174 - DNA, 122 bp, Homo sapiens
ttttctttttctatgaacaactcagaatcacatctcaaaaggtgtaggcactttcaagaacgcttcatccgcccgctttaagcacgcgcaccgacgaaagagtttggggagcgagcgcctcg

SEQ ID NO: 201175 - DNA, 122 bp, Homo sapiens
tgtagctattcaggaagccaggtagtgctctaactgggagaacccaggctcgttattccacggggtggtgccatgctgcatgtcacaggttggagcctgtcctttgttcctcagcaccctgc

SEQ ID NO: 201176 - DNA, 122 bp, Homo sapiens
gatgcagaacaggaactctcacttaatactagtgttgaggatgcagaacaggaactctcacgaactggtggtggaagtgtaaacgggaacaggcactttagggggagaaatggtaatatctt

SEQ ID NO: 201177 - DNA, 122 bp, Homo sapiens
tatagtcatcatctttctggtgccctcgccacacatgttttggtattttgaatggctccccgcatatgtacgtagttgtggcgtgtgagttcttcgtgtgtgtctcagattgtgggtgtccg

SEQ ID NO: 201178 - DNA, 122 bp, Homo sapiens
cacactcctgtgaccccgtgcagaacgaaggagcggggactgtcccttgagtgaggatgacgctagtgttctcttctatcaatagcaagtttggctgaaatgcaaatatccaataaccagag

SEQ ID NO: 201179 - DNA, 122 bp, Homo sapiens
ctgtcccaccagagctttgggctgctgggaagaatggggaagaaagggccccagagggagcgaccttggggctgtatgaatgggggaaagagagtgagacttaagcagaccccaaggaattg

SEQ ID NO: 201180 - DNA, 122 bp, Homo sapiens
gcagtgcggcagactggatctctgccgtcccccatccccaacctccaattaaggtatatacggccagttggatgatccactgtgcttttattttaaatcatgatggacagattgcgtgaaaa

SEQ ID NO: 201181 - DNA, 122 bp, Homo sapiens
ctggtcacagcaggggctgggtttctaaggcaggtttctaaggtgtcttcctacagacaccgctgctgctaccttgctaccttcagcgctgggcacagccaggggcagcgcgagagggaggc

SEQ ID NO: 201182 - DNA, 122 bp, Homo sapiens
acctcgtgattcgtccacctcggcctcccaaaatgctgggattataggcgtgagccaccgcgcctggccggtccttggaccactctttaagtagcccctcctatggagaaattccttgtgct

SEQ ID NO: 201183 - DNA, 122 bp, Homo sapiens
agaacccaggcgtgctcatgggcggccgatacacaccgcccgactgcaccccagcccagacggtggcggtcatcatcccctttagacaccgggaacaccacctgcgctactggctccactat

SEQ ID NO: 201184 - DNA, 122 bp, Homo sapiens
tcttgaggtacttggtgacagtacagtgcagtctttcctgggcattactctttgctctcccgaaaacccactaacgggttgtgtgtataataaggttttattttattttattttatttttta

SEQ ID NO: 201185 - DNA, 122 bp, Homo sapiens
ccctccctcccagagagcgcgactgctagagctcacacatgcgcagtgtgggcccagggccgggccgccgagcaggaagccggcgcagctaggcggccggcggggcctgttaattggcaatt

SEQ ID NO: 201186 - DNA, 122 bp, Homo sapiens
gctctgaattacaggaaaagtgggggagggcactgctcctgaagctccgtttcctcctcccgtggtcctaggtatctgaccacctgcagccacagtccctgagcacactgtgcatgcgggaa

SEQ ID NO: 201187 - DNA, 122 bp, Homo sapiens
agacacgagtcaactgcgcaaggcggcaggcaacagcggtgaccagggccgcacctttgccggacccatcctctgactgcaggaacgtgaccacacagcgaggggccagctcccgcactgtg

SEQ ID NO: 201188 - DNA, 122 bp, Homo sapiens
gggattccccctttgggaatttcagtttcctcatctaaaaataattggctctggtgggcgcggtggctcactgttgtaatcccagcactttgggaggccgggtagggaggatcgtttgagcc

SEQ ID NO: 201189 - DNA, 122 bp, Homo sapiens
tgaaagccctgccctgatgtgtagtatttgctgatttctgtgatgtaaattctcccaccacgacgtatttcaagttaccaatgcgaggccacagaatgcaatgttggaaagagaagtacatc

SEQ ID NO: 201190 - DNA, 122 bp, Homo sapiens
aatgtggtaaacagaatcctcccatctaaccacattcaaactgaagcactctgcatatgccgttgagacatttgtgttgcatattatttcaagatgtagatattgagtgctgagatgtccaa

SEQ ID NO: 201191 - DNA, 122 bp, Homo sapiens
agcagcaaaacaggagtgaaaagcgagcagagagatgaatcagtgtgaaaatggattgcacgaatccaatttttgcaggcaggcctggtggcccacagtagggaaagcgttcccactctgcg

SEQ ID NO: 201192 - DNA, 122 bp, Homo sapiens
ggggtggggagggtctgcatggtggtgaaggaggtggtgggcaccaagacaaagagaggacgatgggggactgcgtgagaccttgcaaaggaagatgcagtaactcagcttagaagtgctga

SEQ ID NO: 201193 - DNA, 122 bp, Homo sapiens
ccccccttgcctttccaagtctttccctctggttccgcctccttttcaggagtgacataccgttgcccaatcagagcctcaggcctggcgtggcacagccaaccgcgcggcgtggggaggag

SEQ ID NO: 201194 - DNA, 122 bp, Homo sapiens
acagtgctggagaccccacaatgccctgggcctatagcagtcaattcccaagatgccccgcgtgaacacaataggcacccgttccaatgctcgagcaaagagaccagggcaaaaccttccac

SEQ ID NO: 201195 - DNA, 122 bp, Homo sapiens
agcccgctgctgttgccaaggtgacgaggcataaagccgcggtggatcggtgcgtgggggcgcggggtgggtggtgaagggagaacgaagctcgagcggaaagacaggaccgcgaccgcttg

SEQ ID NO: 201196 - DNA, 122 bp, Homo sapiens
tcatcccacccctgtggacctgtggcagttggcaagttcccggggaggccaggtgaaccacgatgaaccacggcgacggcaggggccagcgtccccgtctccctcccgttctagaagacata

SEQ ID NO: 201197 - DNA, 122 bp, Homo sapiens
cccaaaggctacctctgctcactctgactctgaacttgaaaccaaaagcagttccccaggcgtcagctgccccagctcaggcgtcgccaccacaggttacgaggccgtccactaaccgaagc

SEQ ID NO: 201198 - DNA, 122 bp, Homo sapiens
aaaacggggagggaggcgcggaggcggttacagtcctgcccccaccagcgatgtaacctccgcgcctcctctgggcagggcttcctggtcagcgtcctctactgcttcatcaacaaggaggt

SEQ ID NO: 201199 - DNA, 122 bp, Homo sapiens
taccgaatgtagccaacttgaggccggtgcagaagctgccagcgataggaggtcttgtcccgccagcccacatttcgtgggtctgtccacagcagtcgtacctgatcaggggtgtggccagt

SEQ ID NO: 201200 - DNA, 122 bp, Homo sapiens
aaaaaaaaaaaaaatccacagctcagcgtcggccctgggcagaaactgacacatcttaaccgggcacggaggtcaccacgagataacagcaaaggttcagatatccacgtgggggccacccc

SEQ ID NO: 201201 - DNA, 122 bp, Homo sapiens
actccaagaagcgggtgatgtactcctcgctgcacttggaccatgtcagcggagtgggatcgtactggagctggcgggacatgatgtacggatgtctgcccacaggctcacagtcattttct

SEQ ID NO: 201202 - DNA, 122 bp, Homo sapiens
cgcgcgaacccacaagcggggagatggcttggcagggagagtcgggaggcacccctcgcccggagacccccgtggggcttggcaaaaaaaaaaaaacccatctcgggcgctgctgggggcgg

SEQ ID NO: 201203 - DNA, 122 bp, Homo sapiens
aagcagagcccggggccccaactcgcttcctcatggcgggcggggggcagccccaggcggcgccatctgacgcccccgccctgcgcgctcctaccccccacgtccgctgccgtctgtcggtc

SEQ ID NO: 201204 - DNA, 122 bp, Homo sapiens
gtattaagaactgtaaagaagaggagagaataaaggggaggagagcaatatttaaattggcgagtcaggaacatgatatttgagctgatacttgggtgtgatgaggttggaggagggagtgc

SEQ ID NO: 201205 - DNA, 122 bp, Homo sapiens
ctggggcagcacttcggccaaatcggactcgccagtagcacctggcttcatgatcacccccgcaggccacagcaacgcggcatccacaggtctcgagtgccgaagtccttcaggattggggc

SEQ ID NO: 201206 - DNA, 122 bp, Homo sapiens
tctgtttccttgaggctgcaacagtaacactccaagtgtcttgtctttcagtgcccatgacgcttccggagacaaccctggaaacactgaagcataaaatcaacccctcggcgggggaggcg

SEQ ID NO: 201207 - DNA, 122 bp, Homo sapiens
gacaccgtctcaaggagaaaaaaaaagtttctaaaatgaataaaaatgacagagtgaagccgggcagggtggctttcatttgtcatcccaggttctcaggggcagaggcaggaagatccctt

SEQ ID NO: 201208 - DNA, 122 bp, Homo sapiens
cccatctgatcctagactgtatctccattctgactcattcttactttttttccgtagaaccgatggtaatacagaataaaattttattgtagaacttattttgtgtaataaagacaatggaa

SEQ ID NO: 201209 - DNA, 122 bp, Homo sapiens
ggccaagactcagggagacattgagacagagcgcttggcacaggaggagcggggtcagggcgaagtcctatggccccaggcgtggctctcagggtttcaggccccgaaggcgatgtattgat

SEQ ID NO: 201210 - DNA, 122 bp, Homo sapiens
cgggcgggggtcgggcttggagggaccggctaggggcccgggggagtagcagaacgggtgcggcaatagcgtgagactggtggcagggacgtagacccttagctggccggtgaccccatgtc

SEQ ID NO: 201211 - DNA, 122 bp, Homo sapiens
gtgtatcatacacatcaacctccatgtccttagtcctgggtttttgaaaaagtgctaaaacggacaagtagaataaatgttgctgtggaatgccatgctttagaacaaaccctttttgatct

SEQ ID NO: 201212 - DNA, 122 bp, Homo sapiens
aaggatgtcctattagtggtaaattactatgcctttaaaaactgccttcttgtccaggagcggtggctcacccctgtaatcccagcactttgggaggccaaggcgggaggatcacttgagcc

SEQ ID NO: 201213 - DNA, 122 bp, Homo sapiens
tgtggcaggcggatcacctgaggtcaggagttcgagaccagcctgactaacatggtgaaacgtcgtctctaccgaaaataaaaaaattgggcgtggtggcatgtgcctgtaatcccagctac

SEQ ID NO: 201214 - DNA, 122 bp, Homo sapiens
gctaatgaggttaatgccctttgtatctcaggcctccacatcttcattacgcgctatctccggctgcacggagcggctcagagagccgcaatccactccaacgccccccttcccggcccaaa

SEQ ID NO: 201215 - DNA, 122 bp, Homo sapiens
agtcccaggtgtcctgcctgtggatgctgctctgttttgagtgccgactgtgagggcctccgtgctgatcccggtgcgttgctacaggtctgtggggtccacgccccttgttgaatccagca

SEQ ID NO: 201216 - DNA, 122 bp, Homo sapiens
cttccattttaaccaagaaaactgagactctgagaacttaagtaaccatgtccaaggtcacgtaatgagacagtgatgtttctggaattcgaaaagggctctttcacatacattgcatggtc

SEQ ID NO: 201217 - DNA, 122 bp, Homo sapiens
aagattttgaatttcattctgaatgggcctgagagctctgaataatctgagcaaaatggccgggctcggttagtaagtggtgtattcaacgggttcacacaatcaagagcactcctaaaata

SEQ ID NO: 201218 - DNA, 122 bp, Homo sapiens
acctctcttgggctgtgctggaagcatctctgagctctgctcaggtgggagttactgacacgcatatccgtgcgagggctggcgtttccttctttcatcaaactgcccatcccctctgcagc

SEQ ID NO: 201219 - DNA, 122 bp, Homo sapiens
gccccgcaccccagggctttgcttcgcgccctccgcccggaccctggcccttctcttcttcgtctgcgtggaactccctccagggcagggcctggcactgtgtagtgaatgtcggcctcgtg

SEQ ID NO: 201220 - DNA, 122 bp, Homo sapiens
attccagcaggggtcggagatttggaactacacctcacagcaggctgcgcggcgaagaagcgcggacctaggggaagatttgccctgaaacctcttgggattggtagttcccgatgctttaa

SEQ ID NO: 201221 - DNA, 122 bp, Homo sapiens
gtgaagctggctgagtaacagagacaagcgtgccagatacagggaggggcaatgtaactgcgacaggattcaagaatatggccaacatcagctatcgtcgagatcgcggctgatctcagcaa

SEQ ID NO: 201222 - DNA, 122 bp, Homo sapiens
tgtaatttggaaatgggaagggaaaattcattagggttaaatgcacagaaagaacaccagcggctttcctgtgtccatccagaggcttttagagacttattgagtcctggtacacagagagt

SEQ ID NO: 201223 - DNA, 122 bp, Homo sapiens
agtgggaaattagggggcgtagtgaagaggactctcaaaaactgactttatagtctatggcgcagtggctggggtgggaatgtgtgtggtgctgccccctagaggacatgcagcaatcaatg

SEQ ID NO: 201224 - DNA, 122 bp, Homo sapiens
tggatggagcacgacgcgactgtgatttagggagtgatttagtgccgggcttccccagctcggcctgcctgggcctttttatttattatttatgccctcccggtcccgacggggctttggtg

SEQ ID NO: 201225 - DNA, 122 bp, Homo sapiens
cctgcgctgaaggcgttggggctcctgcagttctggggcagccacaggcgcccagggtttcgtgccgatcagcccaggacggtcttcccggtgcagtttctgatgcggggagggcagtgctg

SEQ ID NO: 201226 - DNA, 122 bp, Homo sapiens
gcaatgcaggggagctggaaataggcagaagctagatcaggtggtgactgacgtggcagtcgactaaaggagtttcttcaggtttctttgtaaaaggcaacggcaagcctttgaggggtttt

SEQ ID NO: 201227 - DNA, 122 bp, Homo sapiens
ccctgttcttcctttaattaaaaaacatgcttattgcaatacttgccagaatcactttaacggtattttaattgtaatgtctctgcctgattaaaaaaagaaaatatgaactagaaagtgtt

SEQ ID NO: 201228 - DNA, 122 bp, Homo sapiens
gggcactggattgatggcatgtttagaatgtggaagtagagcggccacagaaaggcagcccggcagagtgctcgcacaaagactgggctagagactccccactgcatgtgatgtatctgagg

SEQ ID NO: 201229 - DNA, 122 bp, Homo sapiens
agcactttggataaaaactcttaagacctggccatgcctaatgaagtactcttacttgaacggacagaaatctggaaggatcctcctgcttaaaaggttaggaatgataagcaagatgggaa

SEQ ID NO: 201230 - DNA, 122 bp, Homo sapiens
tcaggaagctgtgggcattaaactcctttgggtagctgtgattggagactggctcaacctcgtctttaagtggtaagaaccatatagagaggagatcagcaagaaaagaggctggcattcgc

SEQ ID NO: 201231 - DNA, 122 bp, Homo sapiens
gagattccaacaaagtggacttttgggagtcacagacctccatgggaatgatgaaagctgcgtaccttctttccgcacaaatgcaggcccacctttaattctgcaaaccactttaggccccg

SEQ ID NO: 201232 - DNA, 122 bp, Homo sapiens
attattataggaacttagagtaaaatattgtcttttatttccaggaaaaacatcctgctgcgtttagtggtacaagtgagaaggttcacatataaatagccatgctcacttttcataatgtc

SEQ ID NO: 201233 - DNA, 122 bp, Homo sapiens
gacctggctttccacaggggaaatcatttgcagtgccctgtgctgaagagtcacaggacccgccatgataggtttggccccaccgacccctggaatttcacagaagggaatggccattctca

SEQ ID NO: 201234 - DNA, 122 bp, Homo sapiens
ccacctcataccctgcaaatgagagatcgtggaggagaaatccctccatgtatattatttcgctcagattagctgaagggttctttgggaagcttgggatgccaagtgtgccttctaattat

SEQ ID NO: 201235 - DNA, 122 bp, Homo sapiens
ctaagtagaatgttaagcagagacccaaaccctaggtctgctgactcctagtccagggctcgtgatggctggtgggccctgaacgaggggtctggaggcctgggtttgaatatcgacagcct

SEQ ID NO: 201236 - DNA, 122 bp, Homo sapiens
aacaggtgcgtaccacaacacctggctaattttaaaaatttttttgtagagacagcatctcgttaggctggcctcaaactcctggcctcaagtgatctttccacctgggcctcccaaagtgc

SEQ ID NO: 201237 - DNA, 122 bp, Homo sapiens
gttatgactcccaaacgtgcattagagtcatagccattaaacacagagttctggggcccccgccctggagtgactggggagatggggaatttgtattgatgaaaggctccaagaggcttggc

SEQ ID NO: 201238 - DNA, 122 bp, Homo sapiens
taagccacaaaggtcaaatggaaaaagagtatctcagcatgcatcaaaaaacagcaactacgatggccattcaaagaattcagagaatcagtgcaagattgtaaagtgagaagaattttgct

SEQ ID NO: 201239 - DNA, 122 bp, Homo sapiens
ggcaaaggaggatgtcagtatattgttcaaaggttagtgagtattggtgagggactgtctcgtacaaagctaaacaaaatgaaggtgtgaggccattagtctccagagacctacttactggc

SEQ ID NO: 201240 - DNA, 122 bp, Homo sapiens
tgtggcccaagacatttctttttccagtgtggcctggggaagccaaaagattagattccccggaattatagcacactgtccctaaggcgtggggtggctcagcagggcccacgatctcctct

SEQ ID NO: 201241 - DNA, 122 bp, Homo sapiens
cccacgccgttctgcaggagggcccgcccttgtttgtctgagacactccttataggtggtcgctttctgccagtctttccgtcgaccccgccgccttaaaataaaatccaatttgataggtc

SEQ ID NO: 201242 - DNA, 122 bp, Homo sapiens
cctgggggtgggggacacacgcacatgccggagtgtgcacacacatgctgtgaggccccacggcccgcatgcacactctaacacatgcccacaaacaacacgcatacgtcgccctccccgcc

SEQ ID NO: 201243 - DNA, 122 bp, Homo sapiens
tttagaagtagtagtagtggttggctgggagagagatatgcagaaagctgggtaggaaggcggtcaaaagacatgtgatggggctgattaacaagcaggctttgtaagctgggctgcgggga

SEQ ID NO: 201244 - DNA, 122 bp, Homo sapiens
tgtcctggccagaggcctgtgcatggcacagagcagagcccgagactgagcccaccagctcggataaagttaccttcttgcgcggccgaagcttgtcccgccattccttcaggttctggtta

SEQ ID NO: 201245 - DNA, 122 bp, Homo sapiens
ttccagactcctggctcatcctccagagcttgctagtgctgctccagtccctgggatctgcggtacccctgggaccccaagtcaagacctcctcttggcttacgtaaggacatttacaaaca

SEQ ID NO: 201246 - DNA, 122 bp, Homo sapiens
gcagggctttgcattttacattcttgtttgcatccccgttccagacaattccagggctttcgaatcgtgcttcagccttcctgaccgctctcgcctccaaagcccgaaaaatagagtcgctg

SEQ ID NO: 201247 - DNA, 122 bp, Homo sapiens
gggcggacggcgtcagagcgagtcgcttccggaagtgacgtgcggaaggggtgcccgggacgaagccatggccctggaggcggcgggagggccgccggaggaaacgctgtcactgtggaaac

SEQ ID NO: 201248 - DNA, 122 bp, Homo sapiens
gctgagcgcaggggggcgctgtcctcacccacgcgtaagtcgccgcagggcgtttccgggcggagaaaacctacacgtgatgggcgcccaccgagtgccagcaccgcctcctccagctccgc

SEQ ID NO: 201249 - DNA, 122 bp, Homo sapiens
gttggggtgttacccaggctaatagaaaaaaaattatatcctagaaagacagaacaggtgcgacttctgagaagaaaggttagagaagactagaaaggctgggaccaccttgaatttggcac

SEQ ID NO: 201250 - DNA, 122 bp, Homo sapiens
tgtgcggctgcaggcaccggcgcgtcgagtttccggcgtccggaaggaccgagctcttctcgcggatccagtgttccgtttccagcccccaatctcagagcggagccgacagagagcaggga

SEQ ID NO: 201251 - DNA, 122 bp, Homo sapiens
cggggaggggcgagggcgagccgggcccggcgggctggggagggtacgcgatgaggcgggcgcgtgcgggagcggcggcggctcctttgtttcccgaggcccgacggccgggccagcgaagg

SEQ ID NO: 201252 - DNA, 122 bp, Homo sapiens
ggggtgacgacagcaacaccctgagtcttcccctcgcaggaatgctttgaaactgttaggcgggactgccgccggtgcgcagttttgggaagcagcggactcagcggggtcccaggctgccc

SEQ ID NO: 201253 - DNA, 122 bp, Homo sapiens
cacgacatcggcgcagcacaagcatccctctgtgcggatgcccagagcgggtcccggccgcggtgggaaccgaacaccagatccctctgagaaggttttctttaaatccagctccaatgcat

SEQ ID NO: 201254 - DNA, 122 bp, Homo sapiens
tcaggcccctcagccttggcaggtgttgggggcgctggcagctgcaaacgcgcgggctggcgctgcttacggctgtgtgcagcaccggggtgccccgggggacgtgcagccagcaggtggcg

SEQ ID NO: 201255 - DNA, 122 bp, Homo sapiens
gagacatgttgacgattctttttccactgatttcaaagcaccctcagtccgcatggcagccgccacctctgattcatctagtttgaggtctgttcatgcagcagatggaagttagcatgccc

SEQ ID NO: 201256 - DNA, 122 bp, Homo sapiens
cttttgacaaaggcctcttcctgcactgagaaggaccttcagctaaaacatgaatttacacggcaaggaagtgatcctgctggcctgtgggcccagttcctgagcttttaaagactgaaaat

SEQ ID NO: 201257 - DNA, 122 bp, Homo sapiens
ggcatattcagtgattctaggggactgtttctttaatttcccccccgtctgtccctggaacgtgataaaaatacccagcattgatctttttttcttccctttctgccaggataatgtttacc

SEQ ID NO: 201258 - DNA, 122 bp, Homo sapiens
cgctgctcgcggctgaaaggcccctttgccccgtcgcatgctgggaagcgtagttcccatcgcgagctgccgtccagttagcttcggccccctttgggcctccgctacctcgcccccagccg

SEQ ID NO: 201259 - DNA, 122 bp, Homo sapiens
tttcttggcacaagctgggcagttgaggtggcaagggtttcccaatcttcactaccccctcggccctctggtcttagaggctgggatagaagcaaggtgaggtcccttgagttcagtggcct

SEQ ID NO: 201260 - DNA, 122 bp, Homo sapiens
ggattatattttatcataatataattatcacttcagataagtttcaaataaaaaaaaccacgttatggcaggtgactgtgccccagcccactactgtgttggtggaaaactagaatttagtt

SEQ ID NO: 201261 - DNA, 122 bp, Homo sapiens
agcagccaatggaaaaatcacgacttctgagactttgggagtttccacagaggtgagagtcgggtgggaaggaagcagggaagagaaagcaggcccagctggagatttcctggtggctgtcc

SEQ ID NO: 201262 - DNA, 122 bp, Homo sapiens
gatgtgatgaaatcatgcagagaaagcagcctgttcgggcggggcctgcgattcctctcccgcccttacctaaagccctccctgaagcaggaggtgaccttgggcctcagtttacctccatt

SEQ ID NO: 201263 - DNA, 122 bp, Homo sapiens
attcccgcgagggggcgctgcaggacctcgcgcctgacactgcgctctagccccgcgcgccgtggcaccccaacaccggcagggaacctaccctcggctcccgggtctcccctccctcgcca

SEQ ID NO: 201264 - DNA, 122 bp, Homo sapiens
tatagcagtgtgaaaatggactaatacactccgtatggcagatgcacctgaatgtgtgttcggagtcccaggctaagaaatccgggagtagcgaccaccctggagatccattccttatttat

SEQ ID NO: 201265 - DNA, 122 bp, Homo sapiens
ctcccggtctgacccgttgcccggccgtggttcgccacaccaggcatccaaagctgaggtcgctcctacggcctgggctcgccttcgctttagagatgtttggcctcttccctcccaaacag

SEQ ID NO: 201266 - DNA, 122 bp, Homo sapiens
ggcggggcaggacgtgcagaggtgcctagtcctccagccccgccccatatccatgattgacgctggcgaggacgaggagtccgccccttgccccgcctccgtcattcccagcccaaaaaaca

SEQ ID NO: 201267 - DNA, 122 bp, Homo sapiens
cgcaagcgattacggggtggcgcagaaagtccctcgaggcaatactcggtcttcggagtccgcccctgaagcatttccagtgttccccgcgactagggcgcccccctccgggccttggcggc

SEQ ID NO: 201268 - DNA, 122 bp, Homo sapiens
taaggctcggccgagcctaggaggagccggagctggctcggggctgctcccacccgccagcgccggctgcccagcctggcagtggaccgggtgtgcaagccacttagcacctgacaggttaa

SEQ ID NO: 201269 - DNA, 122 bp, Homo sapiens
ttaatgagaaggttttcagtatttgctaggaatgcagtaactggttaggactgtgggcgccgctgttcactaatctggtagatacaggcagtacacacaggtcaggaggaggaaaaaaaaaa

SEQ ID NO: 201270 - DNA, 122 bp, Homo sapiens
ctgcctgcgcctccgcccggtgtgctgttcccccagaaagccaggtgccctcgcctcctccggcgcctcccctgacctcactggaagtggcgaggacagccacagccctccccgattcactg

SEQ ID NO: 201271 - DNA, 122 bp, Homo sapiens
tttaactccaagccgacagcggtctaggaattcaagttcagtgcctaccgaagacaaaggcgccccgagggagtggcggtgcgaccccagggcgtgggcccggccgcggagcccacactgcc

SEQ ID NO: 201272 - DNA, 122 bp, Homo sapiens
aatgtgtaaggtttctgtcttcattaaagtttgaggctgaatcaagactcactggggtcacgtaagggcaattttgcaaacccaaggcaagctgttaacaaaatcaacctgggccaatcatc

SEQ ID NO: 201273 - DNA, 122 bp, Homo sapiens
agtgctgtgcagtttacgaatcgcgttctatcgcctcaatccctcagtaaggtacaggggcgtagtccttttccgtttcacacacaaagaagaaactgactccctgagacacctctcctaag

SEQ ID NO: 201274 - DNA, 122 bp, Homo sapiens
tgaccggcgggaatggcgcaccttctgggagccagaagacgccgagatctgggcccacaccgctctgccgcccatgctttccgcaaccagaagtccaaaaccctcggggccggccgcccggg

SEQ ID NO: 201275 - DNA, 122 bp, Homo sapiens
gaggaccgcgagccagtcgaccccaccaccaaaggtcaggggtctgaggcagaggcacggcgtgacggggatcccaggataagatgtgcaggggggtggccaagggggtgggcagctccagc

SEQ ID NO: 201276 - DNA, 122 bp, Homo sapiens
tgtgtaccaggcaccgtcctcggaggttaacgtgcagtaactcactcgggtccccactttcggcacaggcagcaggcccaaggtcacgcagtgccaagggactgagtcagacccgagcccgc

SEQ ID NO: 201277 - DNA, 122 bp, Homo sapiens
cgcttgtgtcatccacatcagtagatctgactatggcagtatcagaaagcaaaaaacagacgtatatcaaaccagtccctgcttattttaattcaactatcaataataatacttcatttaaa

SEQ ID NO: 201278 - DNA, 122 bp, Homo sapiens
cgtccctggaggggccctcaggttgagcgtcagctgatcgggcctcagtaatccccgctgcgacgcccgtccggactcccacctcaaccccgccgcggcggccccagtccgcgtgccaccct

SEQ ID NO: 201279 - DNA, 122 bp, Homo sapiens
gaaaggatagaggaagtgctgccctaggctgcatgagtcgaagcaagcgtgtttccttcccgccaggcaagtgcccttagaaaccgggccccgcccccttcctggcctgcattcccatcccc

SEQ ID NO: 201280 - DNA, 122 bp, Homo sapiens
tccctttcctcttgggagacattaactgggagcctagggagccaaagtatcaagtggcgtcgtttcctcccttcagagccaaccttgctgggcttctccggtcagatcagccctggcccggg

SEQ ID NO: 201281 - DNA, 122 bp, Homo sapiens
gggccttggggcggggaccccggggctgccctaatggggcggggctggatggggcggggtcgcggctcctcccccggccgaggcggcgaggggaggggaactggcctgaggggctgctcact

SEQ ID NO: 201282 - DNA, 122 bp, Homo sapiens
cgccccttactccaagccaagcctgtcttcttcaatgggttgcttacgcaaaggtaaggccggttatcagtgctagggagccgcagatcagcagccccagaaggcggcttgccagcattttc

SEQ ID NO: 201283 - DNA, 122 bp, Homo sapiens
tttcaaaaacctctctcactccatctttggtctttgctgaacactccatgtacccaaaagcgccaatcctgtttgccatatctctgccttcttcaggtttcaccggctcctagcaaagaaaa

SEQ ID NO: 201284 - DNA, 122 bp, Homo sapiens
ggaaattagcagaggggcgtgtcccacaccggaagtcagaaagcggagcctttcttacaccggaagtcaatgaagcgggtctttcctacgctaaaaaccactgagtggagtatttagtacac

SEQ ID NO: 201285 - DNA, 122 bp, Homo sapiens
ccctctgagctaattgtcctcctcaagaactcacatcaaataccccctcattatcacatccgacaaagcaaatcctagctattaatgacaaattggaatgttccagttacctctctgtccta

SEQ ID NO: 201286 - DNA, 122 bp, Homo sapiens
gcaactgagagggcgtcccggcagggtatgaatggccagcaggacgctgaggctgcgtggcgtttccaccgtgctgcaggaacaagatgcacatcgtgcaggagccgcagagcacgcgtgca

SEQ ID NO: 201287 - DNA, 122 bp, Homo sapiens
acagaaccttgcgcgctcccgccgctccacctaagggcggggctccacgtgacgtaagagcggggctcgagcctccacactgcggctgcgcggcccaagcatttccacccccccccccccgc

SEQ ID NO: 201288 - DNA, 122 bp, Homo sapiens
tttttcttcgggacccacaatcaaaggctttcctccggcatgagaaaggagtaacattcccgcctggtgagtttttagtgctggagtgactcccagccggcccctaccccgctcaagctcct

SEQ ID NO: 201289 - DNA, 122 bp, Homo sapiens
ccttcccgcgcccccacggttgcggaccgagcgagaacccccttaagcaggtgtggggggcgtgcggggtggcacgagacaaaaggggcacgggggtaagcccgccatggcctcccggagcc

SEQ ID NO: 201290 - DNA, 122 bp, Homo sapiens
cgccattctcctgccttagcctccccagtagctgggactacgggcgcccaccaccacgcccggctaatttgtgttgtatttttaagtagagacagggtttcaccatgttagccaggatggtc

SEQ ID NO: 201291 - DNA, 122 bp, Homo sapiens
ctgggaagatgtgcccccatggtgctggatacaggcccccacacccaagggcctgaggatcgctatatgtccccccatgccacaaaataatcctgacacatgcacgcatgcaccactgtatc

SEQ ID NO: 201292 - DNA, 122 bp, Homo sapiens
agttgttgaaaaatttggcagccacatcagacctattacttagctagggaacatgtcgtacggggaagaaatctgttgtgaaaatccacggcagacattttttaaaaagttggttccgaagt

SEQ ID NO: 201293 - DNA, 122 bp, Homo sapiens
cccctgggaggtgaccgaggccacagccagcccctccctgttcagcactgaagaatgacacgcattacagagctctggagcagcccgcagtggaaagttggagctgaggtgtgtggcaggca

SEQ ID NO: 201294 - DNA, 122 bp, Homo sapiens
ggcaccgcaacaaagagccggagtccacatgccgacccaccgcaggaggaaatactcacccgggcagaactcagtgctgggatgcccacactgcccaccacgcggaagcctggcccggaagt

SEQ ID NO: 201295 - DNA, 122 bp, Homo sapiens
ccctgtagcagcaagaacagtgggctgcacgtcaccagcaaatcatcgtatccaaggtttcgctccagcaacttacagaaaccaggagaagaaaaagctgtgtctgagaaaatggttgttgt

SEQ ID NO: 201296 - DNA, 122 bp, Homo sapiens
ggaggcggaggttgcagtgagccgagatcgtgccactgcactccagcgtgggtgacagagcgagacaacgtcaaagaaagaaagaaaagaaagaaaatataaagagctgacagcctacatgc

SEQ ID NO: 201297 - DNA, 122 bp, Homo sapiens
aaatgggacttgaaggccaaatttcccctaactgccttcaagtgattttccctattagagcgtttgcctgccacccccctgctggcaacaccgcaatcacatcagaaagtaaagtggaatgc

SEQ ID NO: 201298 - DNA, 122 bp, Homo sapiens
ctcggctaataatccaggagaaagtgagaatcatcctgaacttgagaaatctactgctgccgctgctactgctactgaagctattgcagcttccgctttcagggttgtaagcagaataaata

SEQ ID NO: 201299 - DNA, 122 bp, Homo sapiens
aaatcaagccgtgtggttatattaggtctggttcattttagcttctgtacagaacagtcacgaattaatcacagtcggtcctgggcaaactgaccacaggtttttagtttctcactgtggaa

SEQ ID NO: 201300 - DNA, 122 bp, Homo sapiens
cgccttggcaaactttccacacctcacccggcatgagagaaacagcctattcctaaggaacggagcgcgcactcccgacgagacgcccgtgcgctcccgagtccgttattgtgtcaacgctc

SEQ ID NO: 201301 - DNA, 122 bp, Homo sapiens
tgtaggtgagtgccaccatgcccagctgtcatctaccatcttgtaccatccctcactacacgatgaacagtccatgatctggaactgtgttcattctatctttgtcactcttacaaacattt

SEQ ID NO: 201302 - DNA, 122 bp, Homo sapiens
ggacctgagctctttttgtaacgagttgttttttcatgaggcctagtcacaagggcccttcgcgaccaggctcaaggaacgcaaaaaggtcaacttgttcttgcaattgtctgttgtttttc

SEQ ID NO: 201303 - DNA, 122 bp, Homo sapiens
gattagaaaaccaagaccaccgagaatgagcctcagttgtttagtcacggagcacagagccgtgactaaacaactgtgggaaactggtcccagaaatctaacaaaatctggacggctgatca

SEQ ID NO: 201304 - DNA, 122 bp, Homo sapiens
cccgcgggaaggaggcccgccccctcatgaatagcaagcagcctcagctctcgtagtgcccgcctccctcatgaatattgtagatcttcccagaagccctagcgggaaggaggttccccccc

SEQ ID NO: 201305 - DNA, 122 bp, Homo sapiens
ccttagctttctcttgttagcattttgattaacgaatgtgggcacgaacagccagctgaccgaccgcgcgcgcagtcgagcgtcggttcctcgccttgggagggaccactggaggccccgcc

SEQ ID NO: 201306 - DNA, 122 bp, Homo sapiens
gggcggggcccgcgggctgaggcagcggctgtggcggcgacgctgggcgtgaggtggcggcggccgcgccctggttgggtccccactgctctcgggggcgccatggacgaggccgtgggcga

SEQ ID NO: 201307 - DNA, 122 bp, Homo sapiens
tactcaccacatctgtcagatcagattcaacttcagaatgaagagaatcccagacaagcccggtcgtttctttgcaatgttcttcatggtcgaggtcatccagctctgtcttctagggaata

SEQ ID NO: 201308 - DNA, 122 bp, Homo sapiens
gcgggggcgtggccatggcgggggcgctccggcgggggcgggccctgggctcccgcccttcgggtcccacagtttccagccgccgctctcctcagtgcccggtggcccaggagggcctggga

SEQ ID NO: 201309 - DNA, 122 bp, Homo sapiens
cgccggcggctgagaatccgcgttgttccgtgttgggggcggcatggagcgggagccgggcgccgcgggagttcgccgggctctgggccgccggctggaggcggtgctggcgagccgcagtg

SEQ ID NO: 201310 - DNA, 122 bp, Homo sapiens
tgtctcttgaagtaccaacccttaaatatgggtagtgcagataatggaacagaatcaaggcgcaccctttcaagccagccaccctgtggataagctcagaaagctaaagtggcttgcctaaa

SEQ ID NO: 201311 - DNA, 122 bp, Homo sapiens
gcacggcgcaggccaggttcacgaacaggtagcacatgaggaagaacctgcagggacggccggccactgatacgggcccactgggcccccctgagcccccagtcactgccacctgggagacc

SEQ ID NO: 201312 - DNA, 122 bp, Homo sapiens
gtctttcactgccaacaaccaaacagatgtggtgtatgtggggactatttacgcactcttcgcccaccacatgctgtataaaggaggtatggctgccttgctcagcttataggtggttccct

SEQ ID NO: 201313 - DNA, 122 bp, Homo sapiens
tggtcatagtcctccctggctctcagagggggcctatcttttaaccgggagatggcctcgcgttcgctggccaggtggagggcgttgtcggagcgagagcgtcgggaacgcctggacctgtg

SEQ ID NO: 201314 - DNA, 122 bp, Homo sapiens
acacacagaaagggacacttactgcttagtacaacagggtgcatggaagctgagggtgcgcggcccgcaccagctgtcccaaggtggggaggagctgtccaggaacaccgtgatatgtttgg

SEQ ID NO: 201315 - DNA, 122 bp, Homo sapiens
cccagctcctcgtccgccccatccccgaggctggaggactccggacccccccaaggcccgcgcacctctagtccagtccaccacttgtttggggctccacttggtcacgggttccatggtaa

SEQ ID NO: 201316 - DNA, 122 bp, Homo sapiens
cacggaaatgggccgacggtgagtggccgcgcacccagctgcctgcgctggagaggcccacgtgtctctggaagggggttcagagtcagcagggcccactctgagtcaggccgggcgcggcg

SEQ ID NO: 201317 - DNA, 122 bp, Homo sapiens
ctgagccccagcgggctggcgggcctttttcctgcgtcccagcctgcacccctccggccccgtctctcttggacccacctgtggggcctggggagcccactgaggggccagggaggaaggag

SEQ ID NO: 201318 - DNA, 122 bp, Homo sapiens
ggtgagatccctactcacagcctagggcgcacccgagccgccagagcacagcctcctttccggctcatcacctgcttcctgcgggaggagaatacgcaactccttcgccatgcacatgcgca

SEQ ID NO: 201319 - DNA, 122 bp, Homo sapiens
tatttggggatccctcagtgacaacatagtacccctgtgagcgtgccttttctatctcttcgaagagggcagtggcatcctgtcttatgagtcagtgtgcactttagtgtgcctagtgaccc

SEQ ID NO: 201320 - DNA, 122 bp, Homo sapiens
tcccaccggctccagttcccacctggactggggtcttccgctgctgcagcctcctccagacgcgccgccgcctccggttgctgcacccagctcggagcccgcagttttcaccggggatggag

SEQ ID NO: 201321 - DNA, 122 bp, Homo sapiens
atagagcccggtgcagcccagtccccggcactcacacaccgcagcatcttccagggctagcgggcatctcttccacgcaggcggcagcgcctggcacttgtgacttgaaagttataaagggc

SEQ ID NO: 201322 - DNA, 122 bp, Homo sapiens
gttttcttccgtatagtgcccacgtactgcccaggataccgtccctgtagcagacactgacgtgttcccagaactacaggatggtgctctcggtgaagcgccccagcaaaacagtctcctta

SEQ ID NO: 201323 - DNA, 122 bp, Homo sapiens
ggaagggtcccgacacggggatcttggcgtccttcaagataccttctaggtccaagggggcggcgttctcgctgaggtttctgatatacggtttgttcattgtgaagaatggttgtttaaaa

SEQ ID NO: 201324 - DNA, 122 bp, Homo sapiens
ttccgctccaaccgcgtgcctgattggacagttcccaggccagcgtctctgacttgttaacgtttaagatccctcgccctcacgccctgagtgacagaagatgtgaccaaatgctgggctga

SEQ ID NO: 201325 - DNA, 122 bp, Homo sapiens
ttggaggctggatttcggagagactcgggattggggtctattgccggcccctcctggatccggcttgattttcatattttaagaagattttcttattacctttgattactcctttttaccaa

SEQ ID NO: 201326 - DNA, 122 bp, Homo sapiens
acaaagacactcccccaacccccccaccccccaaccctgctgctgtaggctgggaagctgcgaggagctgggagccagaaaaggaagaggacagccccaccttgcagaccccaccctctagg

SEQ ID NO: 201327 - DNA, 122 bp, Homo sapiens
tccagggagggagaacgcgccgaagccctgcactggcactgacgctccctgcctgggctgcggaggccctaagccagcaggtgttggctggagtcacatggggtcccaccccgaggctcctt

SEQ ID NO: 201328 - DNA, 122 bp, Homo sapiens
cctcacaggtcaatgagtacgtcgatgctcgggacacgaacatgggggcgtggtttgaggcgcaggtggtcagggtgacgcggaaggccccctcccgggacgagccctgcagctccacgtcc

SEQ ID NO: 201329 - DNA, 122 bp, Homo sapiens
ttttgtcttcaacatcttgtacagtgtgacataaatagctcccaataaatatttggtgaacgagtgggtaaatgaatgaatggacaagctgagaacatggacaccctgttttatgatagctc

SEQ ID NO: 201330 - DNA, 122 bp, Homo sapiens
tagaggtcagggaagcagctgctagcagcagagactcaaatcaaaggggagtcccacaaacgttttgaaggctgacatcagaaggagcacgcaccaagggaaatttcccacccccccgcgat

SEQ ID NO: 201331 - DNA, 122 bp, Homo sapiens
aaagacggaggctgggaaaaccgtgcctccaagttagggccggatgccatctttgtccctcgattctgggcaggaagcatttcccttcctggactccgaagaccgggctctaggtctgcaat

SEQ ID NO: 201332 - DNA, 122 bp, Homo sapiens
cccatgaggagtgcaaagtgcctgaattttctgactcttctcagatcctccaaaggcacacgttgcccaccaccccatctctgaccatgaggccaccctgaggtgctgggccctgggcttct

SEQ ID NO: 201333 - DNA, 122 bp, Homo sapiens
tccccttaatcccgcctaccgcgccgcagcgccgctctagatcacggactccccgccctccgcggtctattcaagcccgcggcctgtgccgctcccgcttccgcttctgccagcccactttc

SEQ ID NO: 201334 - DNA, 122 bp, Homo sapiens
ccgcggagtgcgatcggcctgatgccccctcgtgctccccaggctgggtgtcccgctgggcgccttccacgccagcctcctgcactgtctgctgccacagctgagcagcccgcgcctggcgg

SEQ ID NO: 201335 - DNA, 122 bp, Homo sapiens
attgccatttctcacactggggtcctctacatcactgagacagatgagaagaagattaaccgtctacgccaggtaacaaccaacggggagatctgccttttagctggggcagcctcggactg

SEQ ID NO: 201336 - DNA, 122 bp, Homo sapiens
aatgtgtccccttccccaccctctagtgtatttcacagaaaacaaaacctcccaataaaacggttgaaacctgaatctctggatcttgatggttatctcccaaaagctgggtacctggcagg

SEQ ID NO: 201337 - DNA, 122 bp, Homo sapiens
caccaccacatgccaagtggtggcgttcctcctgtccatcctggggctggccggctgcatcgcggccaccgggatggacatgtggagcacccaggacctgtacgacaaccccgtcacctccg

SEQ ID NO: 201338 - DNA, 122 bp, Homo sapiens
tataggattctaatggacacagtgatttatacagcatgccatttcattcaatagatcatgcgatcatgcatctccaagacagtttccttcgtgagcttttttttttttttagacagaagaat

SEQ ID NO: 201339 - DNA, 122 bp, Homo sapiens
cctggcacacacgctggggacctttcctcagtgctgcctcgacatccgaaggggctgggacgcccgtccctggtgggagcgagcaccggggcgggtgaggggtgcgccgcgggaggctctcc

SEQ ID NO: 201340 - DNA, 122 bp, Homo sapiens
cagccggctcgcagggctcggggcgccacgcggaggtgcagctgcacctcggggatggggcggccaaggagccgagaggctcggcgtccaccagccggggctccctactcacgctgcactgc

SEQ ID NO: 201341 - DNA, 122 bp, Homo sapiens
ttctgttgtttcggaggcggggcctgctgccctgcctgcactccgattggccccgcgggccgtctacctctggccggacatacctacaccggctttttgtacgactgttggccctggagaac

SEQ ID NO: 201342 - DNA, 122 bp, Homo sapiens
gaaaaaaaatctgagccccaaagagattacaagacttgcccaagcttacaccgaaatattcgaagttaagcctaaaactcaagttttaacccccactcccggcaactgtactacataatgcc

SEQ ID NO: 201343 - DNA, 122 bp, Homo sapiens
caagtaggtgtcatcgtcctctttgtgcagatatgcaaaaggggcggggcggggggggggcgctctgagaagcccagtggctttcccagagagacacggcaggggcagaggtgagtccacct

SEQ ID NO: 201344 - DNA, 122 bp, Homo sapiens
tccaaccagtgcaaatgacttagtgcaaattaaattcagaagggacgggggaaacagagtcgtggaggctttgaatctctcagaaaaaaggaaagacaggaaagctcagaaacaaagagaca

SEQ ID NO: 201345 - DNA, 122 bp, Homo sapiens
taaccactagcgttcctgcttcttgcaacattcatcccaggcttccagctcagcccgccccgggccaggtgatcggccgccacatcccctgcgactgaagcacctgctccgccatgaacctg

SEQ ID NO: 201346 - DNA, 122 bp, Homo sapiens
ttgtcctccagagtcgtgtattgagaacttactgagcgccacctccttgtcctccagagtcgtgtattgagtgcttactgagcgctccctccttgtcctccagagtcgtgtattgagaactt

SEQ ID NO: 201347 - DNA, 122 bp, Homo sapiens
agacagcgccttcctctgggccatgctggtaggcccgggtccagggccgggtgacgagaccgtagccccccattggttctcgcagaaaccacgtgctagctctgcaccttcctcccccagcg

SEQ ID NO: 201348 - DNA, 122 bp, Homo sapiens
ttgatttatgcttcagtaccagggacttgatatcaagtccctagagaaatagggacataccgggactattagtgaatcaaacagaaaagaagaagtaggctaataagcatccttaggaaagg

SEQ ID NO: 201349 - DNA, 122 bp, Homo sapiens
gcactaaaggatgtttttcaggctcaaacttgcagggctggtaagagtgggacctgccctcgggttgagtcatggggctttctcaccttctcaccagggtttcttcttgctcagctgtgcag

SEQ ID NO: 201350 - DNA, 122 bp, Homo sapiens
tgtggcgaggccccgcgtcttctgcgggggcgtcttaacaggatcctggggggcttccagcgagcggaaagccccgggatgtcaccgctttccggggcaggcaggggacagaaggcttctgc

SEQ ID NO: 201351 - DNA, 122 bp, Homo sapiens
aggaaaattctacctagcaccagacacaattactgggtttctaaaatggaattattcccccggccccctgcatccagcagcctgctgcagggaagctcctccgaaggctgtaggcaggagcg

SEQ ID NO: 201352 - DNA, 122 bp, Homo sapiens
aaagtgattaatttggggagcagggattggagccgggaggctggggaaagccagcccctccgttcccactctccgggctcgctgcgagccacagtgtctcagccaggggcagggccggggaa

SEQ ID NO: 201353 - DNA, 122 bp, Homo sapiens
tgattttatgggatgcttgctcaggtttatgcccacataaaacttctgagctgttgttttcgagcatcatttccacactgggaatatgctctgtttttctgtgtgactccacgtttactttg

SEQ ID NO: 201354 - DNA, 122 bp, Homo sapiens
tgaggaatggtggaggcaccttttccatatagccccttctttgtgtttccaggaaatcatcggtagtaatactcttactgtggtcataaacattctgcgggaagaatgcatgtcatgtaaac

SEQ ID NO: 201355 - DNA, 122 bp, Homo sapiens
catgtgccatgttggtgtgctgcacccattaactcatcaagagcagttaaacttcttacacggcaattggctctgcccagagagagcattctttaagagaaagaaaatggggctggccaggg

SEQ ID NO: 201356 - DNA, 122 bp, Homo sapiens
cagtggcgcaagcagaaggaggagcgcagcggctgcaagcacgtgaccggggcctgaagccggaagctacctatctggtagggagctcccccagcaccgaagactgcgatggtgagtgagga

SEQ ID NO: 201357 - DNA, 122 bp, Homo sapiens
caatctgacagcctggatctgccatgcggggcagagatgggctggagtggatgatggccccgggacacccacggctgactggccccacccctctagctgcccgtggacctcacgcagccgcc

SEQ ID NO: 201358 - DNA, 122 bp, Homo sapiens
ttgcacccacctaattgttagtgtacctgagctcctttgctttcatcctcccctgccaagcgtcaggttcctatcggcctgggctacatcacatacaaccctgtatttcaccctccatattc

SEQ ID NO: 201359 - DNA, 122 bp, Homo sapiens
ggggctggcgcggggccacgccccgccgcagcttctgctccatccgcaggtaggagaccgcggccaccaccagcgtcaccagcagcaccgccagcttagcctgggcgtaaggagagggatgc

SEQ ID NO: 201360 - DNA, 122 bp, Homo sapiens
tgaaggtacacaagttgtggcagcaaccatctggcctgcagtttccagaggggagtcaggcgtggggtgggactggagtgaacgggtagatgcttccacatgcggcagttggcactgacggc

SEQ ID NO: 201361 - DNA, 122 bp, Homo sapiens
aaaaaaagaaacgtgcggggaaacgtatccgacagcaaagaacttaccaaggactatgaacgtcttgctaacatagaagcgaaactgaagcggttctcattgccaaaaaagaagatttgagc

SEQ ID NO: 201362 - DNA, 122 bp, Homo sapiens
gttgccgctgcggggctgaggacagaggacagaggcctcgggcaggccttgggagatcgccgttagtggctcggggtggcgggcacgggggtcagacgagcgcgctcacttctccacacagc

SEQ ID NO: 201363 - DNA, 122 bp, Homo sapiens
ttaatgaaactcgacccgtccgctgatgtccaggtggacgcgagcctccaaggaggtaaacgtcacttggccaagccagtttttgtagccaaccttcagcggtgagggctcagtggagctga

SEQ ID NO: 201364 - DNA, 122 bp, Homo sapiens
gctccttctcagggcatcatcctgctgtgatccgcagggcggaaccatcctgcagtggtccgtcaggccctggcggccgcggggaccccagccgctagcctggccacgccccgacgctgatg

SEQ ID NO: 201365 - DNA, 122 bp, Homo sapiens
cttacagaggccaaggcaggagacaggcctcgatgggcagctgccctggacacagtccctcggtgtccgtgcctctgctctgagcctggccctcaacattgtccaggtagaggcaagtaggg

SEQ ID NO: 201366 - DNA, 122 bp, Homo sapiens
ggccccgcgtccagcgggctgccaccccgcggggaggaggggccggtggagcctggcgggcggggccaccccaagcgccaccaaattccttgtaagggctgcggagccccccgcggggcgcg

SEQ ID NO: 201367 - DNA, 122 bp, Homo sapiens
tgggttccaaccccaggtcttccacaagttagctgggtgacctttctgaatttcggttaccgatttgtaaataagtaacaactactgtctgctcccgtcacaattttactatgacaattagt

SEQ ID NO: 201368 - DNA, 122 bp, Homo sapiens
tctcagtgatcttcaggctgttggccccgtgcttgtccccaccgttcttagagccatccacgaaggcggccgggagctcgtccatctcagcctggtacaccttctggtccacacactcctgg

SEQ ID NO: 201369 - DNA, 122 bp, Homo sapiens
atttcttaggctttatggaagcgataggaatggcaatagtggtttggaatggagactgcacgcaccagtcaacagggtgtgtcccgaataagcagtgggtaaaggacatttactgaaatgct

SEQ ID NO: 201370 - DNA, 122 bp, Homo sapiens
cgggaggttttgcctcctccctcttctcctttctctgaagagagcagcggtagctgagcccgtcattatctcggcccttttctcctgcctccagaggcagcccgggactcgggtcccattgt

SEQ ID NO: 201371 - DNA, 122 bp, Homo sapiens
tagcttagtgtgggccggggcgggcgggagccacggcgccacgccgtggaggaagcgcggcgctgcaggcgggtcttcagccgctcacctgcctcgaccgctgcagccgtgcgccagctctc

SEQ ID NO: 201372 - DNA, 122 bp, Homo sapiens
tctcaggcacttaccgctgcaaggcggccaatgatcaaggcgaggcggtcaaggacgtaacgctaacggtggagtgtgagtgggggtgcgcagggtgcatttctatctggttcaaggtctgg

SEQ ID NO: 201373 - DNA, 122 bp, Homo sapiens
agacaaacagaacacctggagagaacacatatcgctcacaaggttctcacaggctgtgcacgctcttccacacaccgaggcacacacccactgaccggcacgcagtctccccctccacacac

SEQ ID NO: 201374 - DNA, 122 bp, Homo sapiens
atgaggctcaggggtggggtgtctggttgctgttgccaggactggcagggaaacctgggtcgcctggatttgctggttgcagagcaaaatcaaatacaaaaagtggtgtgtcttatgcagag

SEQ ID NO: 201375 - DNA, 122 bp, Homo sapiens
ggcatgagtggggcaaagctgcaagtcctttgcacattttggcaggtggcttagctcctccgctttaagtacaacttcttaacagcagagccagtctttgaaaacttcaaaactgtctggga

SEQ ID NO: 201376 - DNA, 122 bp, Homo sapiens
ccccagacccaccaagccactcagtccctggacgaggtgcgcttcccctcctcgtagaaacgcccccagcccgctcccgccgctcaccccaacccgaggcagccaggctgcagctcgctagg

SEQ ID NO: 201377 - DNA, 122 bp, Homo sapiens
cgcaccgcaaggagtcgggctgagcttggactttgggaaggtggtgatggacacaggacacgtggccacacaatggggacacacgactgacctcagtcacttcggtaaactgcccttgcttt

SEQ ID NO: 201378 - DNA, 122 bp, Homo sapiens
acagacacttcctatacttgtgtgcagatttccataatatgtagcccactctgccagaaacgatgtagtcttattaaggtattattctgtaatagatgattcttgtctaagcagtccactct

SEQ ID NO: 201379 - DNA, 122 bp, Homo sapiens
ggggcaggcagggtgttaaggcaggggaccaccgactcagacaacttgaggtctgccccacgccagccccatctctccaggcgggcagacacatgttgctgtaggtgcttaccctcacaccc

SEQ ID NO: 201380 - DNA, 122 bp, Homo sapiens
gcaggccatcgaccggagcttgctggaatgttcggccgaggagattgcgggggtgagtgccggaacccgggcgggtgcgtctgcccctcgcaggccgcgcctgtggggaggaaccgactcct

SEQ ID NO: 201381 - DNA, 122 bp, Homo sapiens
atgagtgcgccaggctgggcgtgactctgggtctggggacagtgggcctggactgggacccggcacaggaatgtgtatgagatcgcgagagtgcttctgtgtgtgactttgtgaatgtgact

SEQ ID NO: 201382 - DNA, 122 bp, Homo sapiens
ggacacagtcccgggcccagggaggacctggaacattcccttcctccccccccccccccccgcccccgcccatcagcccagcctgcaaggaggcgccaccggacctgcacactcaggagcag

SEQ ID NO: 201383 - DNA, 122 bp, Homo sapiens
ggggcgcacgggcgaggtaggcggggcgcggggcccccgcggcggcacaaagaggccggccgcggcagttttgaaaataccaaggaagttgatctgggccggggcccaagaagtgacgagga

SEQ ID NO: 201384 - DNA, 122 bp, Homo sapiens
agggaccccatctcttcccatgccttcattttgctctctttttcaggtgcttctggcctccgtgctctgcttcacctcttctgtggacacaagataccaagtccagatagtggggctgttgc

SEQ ID NO: 201385 - DNA, 122 bp, Homo sapiens
atgtgaaatcaataaccgttttaccatgtgcaacgttagccttggctggtttggatttcacgttgatgtatttctacaaaatccaatttttcacttgttcaatgtctgccacttttcagatt

SEQ ID NO: 201386 - DNA, 122 bp, Homo sapiens
ctctgtagttttccccaaggtccgaagactaaacgctgttctggtccgacagctgggctacgggtctgtccggggtcggtctgcccttcccccgcgcgcaaacacctgcccgcccagagctc

SEQ ID NO: 201387 - DNA, 122 bp, Homo sapiens
gacgacccagccagacgccccctctgcgggggaggcgagggcggtgatctccgggcccaccggactcacctgtttgaagcagaagggcatggtgaggacactgacccctacgatgctgttca

SEQ ID NO: 201388 - DNA, 122 bp, Homo sapiens
cgccactgcagcggacagacgaggtcactgcgctcagggcgcaggtggtggctgtgttagcgcctgtgggaggggacgggggaggagaggagaggtggcaggagggagcgcccccaccacca

SEQ ID NO: 201389 - DNA, 122 bp, Homo sapiens
ggcgggggcgaggccatggttctcacaccatccagaggaagcatggctgcgacgtgggcccgacaggcgcctcctccgcaggtatgaacagttcgcctacgatggcaaggattacatcgccc

SEQ ID NO: 201390 - DNA, 122 bp, Homo sapiens
ggtcatctctggatttccttcatgagttggggacgagcacactaaggcacgagtcaccagcgaacacgctcggcacgatgaagtcgtcagttttcatctccagtgggactcgctcccttggt

SEQ ID NO: 201391 - DNA, 122 bp, Homo sapiens
tggccaccgcactggccgtggagcccatgaagtttgtctacagaggcaggtgatgcgctgcggacccccacgccgggagtagattccttcatttgcagctcgggaagtctttgtgcagtaga

SEQ ID NO: 201392 - DNA, 122 bp, Homo sapiens
ccagaatcgcaaaaacaaataaatcaacaaacaaccccaaactccatttcaggtggaattcgaaaccacagacttaatgtagatgaccttgtctcacagtaactgacattccagagcactct

SEQ ID NO: 201393 - DNA, 122 bp, Homo sapiens
tctgaatacgagaaatgactaaataaaaaagaaaccactatgaaagtgcattagcaagggcgtgactataaaagaatgcctcttgctgaatctaaagaacactaatcaacctggacccataa

SEQ ID NO: 201394 - DNA, 122 bp, Homo sapiens
atgggcgtttacacccctttcaaagatctgtggtcctgtgtctcaaaagtttacatttaacgtgtgcatgtgtgtgtgtgtgtgcacatgtatatatatagatagatagatagatggttttt

SEQ ID NO: 201395 - DNA, 122 bp, Homo sapiens
gggagggggtgggggcctgccgattggattctttcgcgtgtgtgtagaagcggccgccgccgccgccgcggcggagacgacaacaacttgctggttttcaggttgggttaacggcatggaga

SEQ ID NO: 201396 - DNA, 122 bp, Homo sapiens
ggtcccagcgattccgagaatcgggagcctcaaagcgcagcgttagggcctccaggagttcgggagagtaaaaggcaccggacccatgctttgcagatttctctgaatccggagtcacaaga

SEQ ID NO: 201397 - DNA, 122 bp, Homo sapiens
caagcagagcctggtcatggatgcggatgacgaggcagtcctgaacctcattgcagagtgcgagtgggacctcggcaggcctcccgggagcacgagcttcagccagaaggggcgtgaggccg

SEQ ID NO: 201398 - DNA, 122 bp, Homo sapiens
atgatcgccaggctcctggcttgtggtatgcggtgctgcctgcccagccccacccaccaccggatggctaggctatctcactaggacaaacccaaacataccgagggctgtgaggcgcttcc

SEQ ID NO: 201399 - DNA, 122 bp, Homo sapiens
atgccccagaagaccccggggcatcgctgcctttcagcttcttttgcgctttctgcagctcgtgtcacattccaaggacactcagctccgcacatgcacagagggccgcgtctgtcccgggg

SEQ ID NO: 201400 - DNA, 122 bp, Homo sapiens
cagcgaaaaagtcgctctgcggaagccctggagaacttctggaaggagttctcaggcccgcgctacttttgtagtgcaggaagcaggcggggcgcggagaggaggtagaaacgcggagctcc

SEQ ID NO: 201401 - DNA, 122 bp, Homo sapiens
atccctgaaaattacaaaagtacaagctcacatgtaactcatatttagtctttaaatattcgtattcagaaaaaaaagatgttacactactctttacctgtcttaacgttttttctccttta

SEQ ID NO: 201402 - DNA, 122 bp, Homo sapiens
aaccgaggtattcagtccctcggaaacccagttcctccgtttccaggcttctcgcccacacggagacagtcgctctcacacgtacctctcgcgggctcttactcgtggtcccggtctcctcc

SEQ ID NO: 201403 - DNA, 122 bp, Homo sapiens
tctgatttgggttgtgatatctacacagaccgtgtaaacacagaccgtgtaaacacagaccgtgagatttgctttctttgtttggagaaaagatttcctgagttccttgtcccaggctaatt

SEQ ID NO: 201404 - DNA, 122 bp, Homo sapiens
caaaaaaaaaaatccctagggatccactgggagccagttgagcaggagtggattaagacacgtgtcgcagggtgtatggtggaaagaaacgttttcctttgctagaatgaaccttgggaagg

SEQ ID NO: 201405 - DNA, 122 bp, Homo sapiens
tggagaagaagtagtttgcactacagagtttagcgcgagagctttctctttttctaaccacgaaatcaatcatttgtccagactgtgggagtcagagttagttactgaaaagagctccgtat

SEQ ID NO: 201406 - DNA, 122 bp, Homo sapiens
aaaatgtattgctatctggtgtgaccgtgacagtgacgtgtgtctggcgtagtaggtgaccgtgagggtgacgggtgaccgtgacagtgacgtgtgtctggcgtagtaggtgaccgtgaggg

SEQ ID NO: 201407 - DNA, 122 bp, Homo sapiens
gccctccatgcgctgtgttgaaaacgcgcgggtgactgcaggaaaccacagagcacagctcgggcctctactgatcgggaaacgtcggaagacagaaaaatgggcaatcataaaacccacgg

SEQ ID NO: 201408 - DNA, 122 bp, Homo sapiens
aatgaccgcctggcgcctgtgaatttctctgtgtttgttgaatcaacaaagtaaaagagccgtggataatgagtgcttcctggacacgggacccgtgcggacacaggagaggcctgggcccg

SEQ ID NO: 201409 - DNA, 122 bp, Homo sapiens
acctaggaaaccgagggcagccggcaggggctggtaccaacttggcggttctcggaggggcggggcaggggcggggcggggggaggggagaggacgcttgcagaagcgtcctcagttgccat

SEQ ID NO: 201410 - DNA, 122 bp, Homo sapiens
ctttctgcccgcctctcatcctctttagccattgggcaatacctctgtccatcaagggcccgcctccgcaattgagccaaccagggctggcgggagggcgcttccttctggagctgggtcct

SEQ ID NO: 201411 - DNA, 122 bp, Homo sapiens
taacatcttaaaggactcactagggttttgggacaccaaagtactagcacttctttatgtcgctcttcctgatcaaagaatcccctctggcacttatgggaattcacagcacaagaatgtaa

SEQ ID NO: 201412 - DNA, 122 bp, Homo sapiens
ggcagatatgcattgcatccagcggcttgtcgccatataggaatgtggatcgtgttgatacgtttttctgattttcaagagaagtcaagaattaggactgtttcatgaaatttctcaatttc

SEQ ID NO: 201413 - DNA, 122 bp, Homo sapiens
tcataacgttccccccaaaaagccatccccgtgtcaagccctcctccacccactgatcctcggtaaagccccagctcccgcaaagagagagagacaggatccccaaagctgaccgaagggcc

SEQ ID NO: 201414 - DNA, 122 bp, Homo sapiens
tgagaagtttggagccggctttactcagttcctaagcagctgggttatcagtggatacagcgctgctcaccctgtaaaagattgcgggaaaaccggcaggcccttttaaggacttctgctca

SEQ ID NO: 201415 - DNA, 122 bp, Homo sapiens
ctttatgccctcacttgggtcctgtgctggttttgcttcagaaatgacctgcaatagtcccgttgctcacgagcgtctcatttcctgctgggcccatgccctggcaccgcaggctcccctgc

SEQ ID NO: 201416 - DNA, 122 bp, Homo sapiens
gcacgccgaggggcgcgttgagcgctggggggcggagcctgatgcgggatgattggcgtccgagcgctgggctgttccgtggacccgcgcggccacgccagtgtgctgtgcacgggaaatgt

SEQ ID NO: 201417 - DNA, 122 bp, Homo sapiens
cagtgaagaagcgggagggctggccacagaaggcggcacgctccgagtggagcaggtgagcggcgcgcactgaagcaagcatcacgcaattgaaccgctcacccacgtgttcccccccacca

SEQ ID NO: 201418 - DNA, 122 bp, Homo sapiens
ctgcacggctccgggtgtgacaagagcccagcagaggaccccatggccatgcgggccaagcgcgagacggcccctccttgcgaccccgcaggccgccacatctgggaccagcggatcgcttg

SEQ ID NO: 201419 - DNA, 122 bp, Homo sapiens
cggtctgtgtcttggtgtccttgtttcctcttcttaggcggacactggtcatagcagatccgggccccacttgcgtggcctcattttaccttacgcatctctaagggccacatctccagata

SEQ ID NO: 201420 - DNA, 122 bp, Homo sapiens
atccatctgcctcggcctctcaaagtgctgagattacaggcgtgagccacttcgcccagccggctattttacattctagagaaccccagggctcagtcttgcctactctctccccgctgccc

SEQ ID NO: 201421 - DNA, 122 bp, Homo sapiens
acagaagggacgacagagtgcctgccctggaaacactgtcaacaccagaagcaccagcaccgagggtgaaactcttggcagacttgtttcactcgcacggaatctcaaacggtatttaacat

SEQ ID NO: 201422 - DNA, 122 bp, Homo sapiens
gaactgggctggttgctccatcattgtcctgctgggccagcagcgtcgctttgacctgttcgacttctgttaccacctgctaaaagtgcagaggcaggacgggaaggatgaaatcattaaga

SEQ ID NO: 201423 - DNA, 122 bp, Homo sapiens
tctcccaccccgcattgtctttctgaaaccgccccctcccggagcaagtccctgcaccctcgcccagaatcccgggctcgcacacactccgcgcaggccgctccccctgcacactcctccct

SEQ ID NO: 201424 - DNA, 122 bp, Homo sapiens
agtgaggccgcgcagtgaggggacggactcgcccgaggtcgcagagcgttcagattgactcgacaggctggggggcggggccggggtccccacgcggagtccggggccctgcaacgttagct

SEQ ID NO: 201425 - DNA, 122 bp, Homo sapiens
tcctaacgaaattgaagtgctttgtgctgccagtggaaagccgggtgacccgcctcggcccgctgagcagccgaacgcgctgacggatccattaggccgctcccggccccggccccctctcc

SEQ ID NO: 201426 - DNA, 122 bp, Homo sapiens
cgtctcaaccaccacctccagaaaaaacgcgccaaaatgttttacaactgcctcctcccacgcttcaatgcagaccaacttcccaagcagggggcgagggcttgattccgagccaaggaaag

SEQ ID NO: 201427 - DNA, 122 bp, Homo sapiens
gaccttggggatcagaggtcaaggggggaagggggccgcagggagccctaccgtggtgctcgcagttggggcccgtgtagccagggcagcacctccaggccaaagaggtcagcaccttctgc

SEQ ID NO: 201428 - DNA, 122 bp, Homo sapiens
gagtcccaactgggccggtcttcatagaggtggggtgctgtggagcgctggcttgtaaagcggatgggccagctaagagtcaccaaagcccacctgcaagtgagtcacaagagaaactttgc

SEQ ID NO: 201429 - DNA, 122 bp, Homo sapiens
ccgcagcagttccccagctgcccgccgggcggcgccccgcgcctcgctgcgctcctcccgcgctccccgcgccgggctcgctcgcagccggacacagactgccttcagctgcgggcggatcg

SEQ ID NO: 201430 - DNA, 122 bp, Homo sapiens
gcagctgtttataacccttaagtcatgactcttccacctgtctgggtaaatctatccatgcgacaaatgcagacacacttggaggattcaggaatgatggtttacaagatcataataggaaa

SEQ ID NO: 201431 - DNA, 122 bp, Homo sapiens
ttcccgtgtgcggggggagggggaccaacaaaccggaggccctcgctcttccaatactcacgccctagctacagaggtcaaggaaggtttccccaggagcagttttggtttcagacggcgcc

SEQ ID NO: 201432 - DNA, 122 bp, Homo sapiens
cgaaacgtgcggtgcccatgggtgccttcttgctccaaacctgctcctcagggcccaggacgtataagtcccggaggctgctcgctccgccctcgcctctccctgccttgccccccgagatg

SEQ ID NO: 201433 - DNA, 122 bp, Homo sapiens
gttgttaggattggcacagaattcagtgtgacagtcaatcttaatgccagaacacttgaacgaggatttttcacttattttgctagttgtcaccaacagtagcaaaaggaaaaataaaatgc

SEQ ID NO: 201434 - DNA, 122 bp, Homo sapiens
tcagacaaggtgtgccccgccctcgggcgcgcccccgggccttcgaaccccctggtttctcgtagatcggtccccagagtcctgagacacgctcctcacaggcagccccctcaggccgggac

SEQ ID NO: 201435 - DNA, 122 bp, Homo sapiens
gaaaaggagctgggaggtccctttaaaaggctgggcctggtggacggaacttcggtgcgacgctaaagtgtgcgcccgggaggatgagtacgctacacccggaagtgtcttcagggagagga

SEQ ID NO: 201436 - DNA, 122 bp, Homo sapiens
gagcccctcggcgggaagcgggcgctggaagcccaggacccaaagcggggcttcggggcacgcaaacgagcgacattggcgtgtccagccggcaggtcagaggatagcagagacgtagggag

SEQ ID NO: 201437 - DNA, 122 bp, Homo sapiens
gtgccgtcactggccgcctttgacaccctggctccaacatggagctcctgggatgccagacgtccggcgggtttggacgggctcttgcgtcacgcggcctgggccttgcgcggtgggcccgg

SEQ ID NO: 201438 - DNA, 122 bp, Homo sapiens
ctcagtgcgcgggctactttgatttcacgtggaggtgttaatcggggtcccctgcagctccggttcttttaattctcaatgcctttctgcggggggtcgagagctgttggctgcggggcact

SEQ ID NO: 201439 - DNA, 122 bp, Homo sapiens
tcggcctcttttccaagtctagaattgtatccctaggcaggaaactgtaagattctcctccgagagaacagaatggttgagaagagatctacagaaactggcatttggaggtctcatgagga

SEQ ID NO: 201440 - DNA, 122 bp, Homo sapiens
ccaacatcgaggcttcaacccagaggtctcaagttggtggttccagggccaaatctggcacgtggatatgttttgttcaacctgctcagtgtttgttggttttatttacatttcccttaatg

SEQ ID NO: 201441 - DNA, 122 bp, Homo sapiens
caccgcatcggatagtcctgacacacgtggttctctaatgtttgcatgcaaaagcagcgccgagggctggttcaactcagatgcccaagccccacaaccagagcgtctgactcagcgggagt

SEQ ID NO: 201442 - DNA, 122 bp, Homo sapiens
ggcctctgcggcatagccacgccaagagccagtccgggtgggggcggggcctctgcgggacggggcggggcctcggtgcaagcgcggagagagggcctctgcggcaagagggcaggggcggg

SEQ ID NO: 201443 - DNA, 122 bp, Homo sapiens
tcagttaccttggtccacagaccccatgatgcggaggggatggcagtgccccagtctgaacgcagcctctctctgcatctggagggcacggggacttggcgcgtgtttggaaagggggatct

SEQ ID NO: 201444 - DNA, 122 bp, Homo sapiens
agacatgacgagcaagaggagtctcacccaacgctttgtgaggactctggcctgaggcagcgcctttatacgacagttggcggaccgaactgagaacctgaaagaagtcggcgggaagtccc

SEQ ID NO: 201445 - DNA, 122 bp, Homo sapiens
gagacatcctctcgtggtctgcacagagcaacagctctggcctctgctggctctgccccacgtgtatagggctgggatcttcctgcagttcaccttatagctccgctgacaagggggctgga

SEQ ID NO: 201446 - DNA, 122 bp, Homo sapiens
tcaactttattcagcaaagctactgacttgaacaaaagcagtactgtacctgctcctggccgccagaaacaatgacgagcgccttgataagattagatgtaattttaaatgcagcagggaca

SEQ ID NO: 201447 - DNA, 122 bp, Homo sapiens
gtggctgggaaagcgcgctccaaagacaccgtgcccggcgcagcggggagcctgggcgctcggtagcgctcgcgaatccctgtgggaaatcccggcccagctccccgcctcccgccccttcc

SEQ ID NO: 201448 - DNA, 122 bp, Homo sapiens
gacccgggcctcttcgtagttgactctgggttctgagacccaagtccccctggcgcacctcggccctggttcctctcaggccgcagggtggggctgcgacggcagccgagacccctagccgt

SEQ ID NO: 201449 - DNA, 122 bp, Homo sapiens
gccctgcaggctctctggatgcagaagccagactcgctgcagaggcagctgtgctgttcccggagcctggcttcaggggtgcatccgtcactcagggttcattcacccaggcaggctccaag

SEQ ID NO: 201450 - DNA, 122 bp, Homo sapiens
attgagctccacctcttaaggaggattatcaaagaatgtatggacatatctctaaaaccacggcactacataatttttaccctatgattcagaaaccccacttgaagaatatatcccaaaga

SEQ ID NO: 201451 - DNA, 122 bp, Homo sapiens
tgtcatctgcttcccagggtgcggtgaaagttacggtccatgtgcctgcaacagtgagagcgacgcctcggccacgttcaccttagcgacagccgccgtcctcaagttacacacaaggccac

SEQ ID NO: 201452 - DNA, 122 bp, Homo sapiens
ctgcagaggaagggggtgtcggggagctggtgcggctgtggcccccctgggtgactgacacggcggtcttgacagcatagatgtttgcctcctcttggaactttccgatgtttttcttatag

SEQ ID NO: 201453 - DNA, 122 bp, Homo sapiens
gtcatgttgggcccatctgattccaggcctccatccatgacggtcctgtcttcatcagtgcggcggcggcgggagcggcggcgcctggcacttgctggggggggttccccaggttctgaatc

SEQ ID NO: 201454 - DNA, 122 bp, Homo sapiens
tgcgcaggcgcatcaatgaggtactgcaatgtcccggaccgtatagtttccaggacgtctcgccgcgcgcatgcgcagaaacactgggcacagggggaggtaactgcagtaagtcccgcttg

SEQ ID NO: 201455 - DNA, 122 bp, Homo sapiens
gcacggcagttctaaagaggatcacagcatggccgctgccagagtctccggctctgtcctcgtgcaaagggcagccgagcctttccttgcccactccgggcagcctttacttgaccagagct

SEQ ID NO: 201456 - DNA, 122 bp, Homo sapiens
ctggggctgcagggcagatggcagagccgacatgtctgggatctgaatgctcctgcccctcgtgatcgcggcatttcagagccggaagtctccctagaattctccccagtccacaagacttg

SEQ ID NO: 201457 - DNA, 122 bp, Homo sapiens
ctgtgctgaggagaattagtaaaagaggaaggcctctgtctcataccgaacggaatgtctcggtataaaacccgattgtagaaaaccacactggcaggaggcgagatatgctggcggcaatt

SEQ ID NO: 201458 - DNA, 122 bp, Homo sapiens
tcaattgtacaaataggctggacgcttcagcgattatcttccgaccactccctgtgtgctcgcgcgggcggagtagggggcgcttctccactctccgcgacctcaatgtatgcggaaatcct

SEQ ID NO: 201459 - DNA, 122 bp, Homo sapiens
tcagcaggtctggggagcccaagatctgcatttctaaccagctctccagtgaagagctgtcggcctctggagccactgtgagtagtgaggtcctaggagactttttctaatgattaggataa

SEQ ID NO: 201460 - DNA, 122 bp, Homo sapiens
ttgcgctgacacttcacagcatttgcctcagagatcagtcgttatggcttgttcaatacccgttttctccaccagagggcagcaagaggccgcaccaagattactctctaaatgagtcattc

SEQ ID NO: 201461 - DNA, 122 bp, Homo sapiens
ccccccatgcatctgcagggcctaggggacccttggcatccctggttcatggccttggagcgcctcagtccatggaggccagcctaaggcggcaggaaggcttgaaaggggaggtcgaggca

SEQ ID NO: 201462 - DNA, 122 bp, Homo sapiens
gggcagaggacagagggcagggaggtcaaccagaaatactccatcaatggtggtttcagccgataaattcagccagattttaagatcaagcatttggaatttgagaacttcccacaagggtt

SEQ ID NO: 201463 - DNA, 122 bp, Homo sapiens
agggaagcaggtggcccagcgtgggacagggtgattggggaactttcttgggggcggtgacgctgggctcagtcaagagggacctgaggctgaagaggtatggaactgggaaggtggcctgg

SEQ ID NO: 201464 - DNA, 122 bp, Homo sapiens
ccataaggcaaagcgccgcatcttgtttgctgtttgccatcccctcaaccaggaggaggccgtggggacaccaatctggctgcagggaggcaggaagcagatgtcccacgtcctgaccatcc

SEQ ID NO: 201465 - DNA, 122 bp, Homo sapiens
ttcactgtggcgtccccagaacctgcacggcgccgggcactgagcgggcgctcacatgtgcgtccaatgaacgaattaacaaatgaaccctcagtgcgctactgggaggcggggaggggtaa

SEQ ID NO: 201466 - DNA, 122 bp, Homo sapiens
ctaagagggtttggagaagttcaagggaggaatcctgcaaagaagaggggcgactttttccgtgtctccggacagctaatcgttttagtgacaggatgagagagcccttcgtgttctgaggg

SEQ ID NO: 201467 - DNA, 122 bp, Homo sapiens
agtgggtttttctccatccatctgtaagctgtctctgatactgagtgctgggctggatgacgtgatgccagctctatcacatgcccaagttaagcctgaaggctctgctcttatgtaaaatg

SEQ ID NO: 201468 - DNA, 122 bp, Homo sapiens
ctagggcgtaagaccaaaaaaacgccaatgccagaaagaagacactgcacatgcgcagaacgtttccctagccctactccagaactacgcttcccagaaggcccggctgcgactccatcttg

SEQ ID NO: 201469 - DNA, 122 bp, Homo sapiens
ggccagcccctgcggccccaggtcagagggcagggccggcctggacagagctgcccagaacggtctgcggccgggtccacatgagtctaggtgcctctgagggcactgggacggcggtggcc

SEQ ID NO: 201470 - DNA, 122 bp, Homo sapiens
ggaaaaccataaggattcgaatcttgtctcatactctcaggtagtgctgccacaattctgcgtagctcctccaggaccagccccaagtagggccgagcggtagcgccgggctcctccatagc

SEQ ID NO: 201471 - DNA, 122 bp, Homo sapiens
gccttcctgaagccctgcagggatgacagtggtccaggcagcaaagacttccttcagccccgtgcaggagagctcccagctgagactcagtgcatgtgtcaggcctcgaggattgccgaggc

SEQ ID NO: 201472 - DNA, 122 bp, Homo sapiens
cagcggacaagagggcagctggtagcagggtgggatgcccgtggcatagggccgagcccccgctaggcacgcgggagcagcaaggcttccggaagcgcagggagcgctggactggcgggcgc

SEQ ID NO: 201473 - DNA, 122 bp, Homo sapiens
gcgggcgtccagggggcggggccgggaagcgcttccgggggcggggggcgcgggctggggcggcagccggagcggcggggactggcctggcgccggcggcggcggagggggcgccgcgggcg

SEQ ID NO: 201474 - DNA, 122 bp, Homo sapiens
gcacccggcgcgtctatacagcgtgttgccgccggggcggagcccggtcgcatcacgtgacgaagagtcagcttgtgcaacagcgtcggaggctcactagaaaaaaaagggcagggtcccat

SEQ ID NO: 201475 - DNA, 122 bp, Homo sapiens
aagctaaatcccttgcccaaggtcacacatgcagttagctacacatctgggtttccaactcgagtctattttgagagcctctgatctattccattgccctactttttgccaattccaaactt

SEQ ID NO: 201476 - DNA, 122 bp, Homo sapiens
ttactggcttatgaaatgcaatgggatgaggtggggtgagaggccatagcccagactgaacggcacagtgaccaggtagggtggagcaaggccactccagcaagaatgccaaggatagcctg

SEQ ID NO: 201477 - DNA, 122 bp, Homo sapiens
aaacctttggcctcaaaggtccttctgtccagcatagccgggtccaataaccctccatcccgcgtccgcgcttacccaatacaagccgggctacgtccgagggtaacaacatgatcaaaacc

SEQ ID NO: 201478 - DNA, 122 bp, Homo sapiens
gagtcattttctgaggatgaatggaatttactgtatgttgcagtaactcgagccaagaagcgtctcatcatgaccaaatcattggaaaacattttgactttggctggggtaagcagaacggg

SEQ ID NO: 201479 - DNA, 122 bp, Homo sapiens
ggtccaggtccagaagtgatgtctctctcctgcctgcatccattggccagaacacagccacgtgactgactgctcatagcttcaggggaggctgggaaatgtagtttacctgtgtgcccagg

SEQ ID NO: 201480 - DNA, 122 bp, Homo sapiens
aaagcaagctgtgctccacctccaggacgcccatcccaggctgcagggcccactagcgaccgcatcccttatcgaggcaaccgaaggaaacccagggccccagaaacagcgaggagaccctc

SEQ ID NO: 201481 - DNA, 122 bp, Homo sapiens
agcatgaagaaattttttctcaaatttacctgggtaattctggcttcctgaaaattctctcgttactaaggcaacattatcccaattatattcttaccctccacattgtcacactgctcagc

SEQ ID NO: 201482 - DNA, 122 bp, Homo sapiens
ggccctgttcaggctttgggaagggccggcggagatgctggtgggcttggacgccctccccggcccgacgccccggccgcagtgccgggattgcacctgtaggcggcctccgagcagctctc

SEQ ID NO: 201483 - DNA, 122 bp, Homo sapiens
tctaggatttctcagcagcatgattttcttgatgtttagaaaagtttgacttgtcaaaagcgttggcacatctttcaggtttgtagagtttctctccagtatgaataatattatgtctgtta

SEQ ID NO: 201484 - DNA, 122 bp, Homo sapiens
ggggaattcccctgctgctccccgttctgtgggaaccagctccagaaagaaatcctctgccgcccttcccaccctactccaactttggatctgctctctgacctccttcacttggccctagt

SEQ ID NO: 201485 - DNA, 122 bp, Homo sapiens
cggcaggctgggcgcgcaggggcgcgagcccccgcccggcgcgcagcagcaccatgggcacggtgctgtccctgtctcccagctaccggaaggccacgctgtttgaggatggcgcggccacc

SEQ ID NO: 201486 - DNA, 122 bp, Homo sapiens
gagagaaaagtgctgatgtttcatttcacctggtccttccatggttgacctgtcagaaaacgctgctgggatctatataggatcctgtggtcaccagcactctgtccagatggacacgactc

SEQ ID NO: 201487 - DNA, 122 bp, Homo sapiens
acatccaacactgaactcttgctcttctctctgaagcctaatccttcttgctatctaaaacggcaacaccatccctctcaagatccctaccaaaaccttaaagtcaatcttgattcctctct

SEQ ID NO: 201488 - DNA, 122 bp, Homo sapiens
gcatgcccctctccagggagctggagctgcggagtggcaggaggtggtggcccggggtcccgccccgcctccgtccttgcacccccacccccggcctccagcactgcagcggccgaagcacc

SEQ ID NO: 201489 - DNA, 122 bp, Homo sapiens
tccatctccgaggtgagaggcctggcctgacgcgctctgcacccgcttcctgcccagccccgtgggaactctggtccctgtagtggtttcctggggctgccatcaccaagtgccacaaactg

SEQ ID NO: 201490 - DNA, 122 bp, Homo sapiens
ctactgcctgccctagaccagccctcgattctcgtcccacagtgatttgcagggtgtaagcggcgaagaccctgcaatccagcgttgcttcgaacattgcaatgaaaacggttgagttgctg

SEQ ID NO: 201491 - DNA, 122 bp, Homo sapiens
gggatgcccaggaaagcagagacagggcccccgggggtcttcaggcgaatgccccgcagccggcccccacgcaccgtcaccagcagctctgcatcctcccggccctcagcccccactcctcc

SEQ ID NO: 201492 - DNA, 122 bp, Homo sapiens
tgtttttgcgaaaatgacaaaacaactccttgctcagggcagcccgggaagagcggcgggcggatgggaattaccccgggtccccctgcggcgtctcccgctgcccacccacgggcggtgac

SEQ ID NO: 201493 - DNA, 122 bp, Homo sapiens
atctcaggtgatctgcctgtcttggcctcccaaagtgttgggattacaggcgtgagccaccgcgcctggctttaatcttgttttaagcattatatttttgatatcaggtctaaaaactcctt

SEQ ID NO: 201494 - DNA, 122 bp, Homo sapiens
gccagagtggcactactgcccggccagtccaggctcaggcaggaatcggacgctggggcccgggctctgcacagagagctgggcttgagtggagtttattgtagatttctcccaaggggatc

SEQ ID NO: 201495 - DNA, 122 bp, Homo sapiens
ggccgggaccgaggctcggcagaaagaccgcctggagcttccagaaggctgcggctgctccggacgctgctgccactgccgtttctggccgccggcttcctccccctcctctgttttgattc

SEQ ID NO: 201496 - DNA, 122 bp, Homo sapiens
gattttgccgtattgcccaggctgttcttgatctcctgggctcaagccctccatctacctcggcctcccaaagtgctgggattacaggcgtgagccattgtggcaagcctgtctttttattc

SEQ ID NO: 201497 - DNA, 122 bp, Homo sapiens
ggagccgctgcctgccaactcctacatcggcgacgacgggaccagccccctgatcgcctgcggcaagtgctgcctgcaggtccatgccagtgagtgccactgtggggcccagaggagctgcg

SEQ ID NO: 201498 - DNA, 122 bp, Homo sapiens
ccagggcaggtgcctccctcacctctctccttctgtccccacagggcctctgattcgcgccggcccgcattcctgctcctgtgccacttgcccctgcagctccgcttgctggcgtcgtctgg

SEQ ID NO: 201499 - DNA, 122 bp, Homo sapiens
ccagatggaaaacatgattcactcttgttgcttggaaacccttcccaaatgggaaaatatcgtcatcatgaggtacgtccctgccactcaaagcagaagtttggcaatgatgggattccttt

SEQ ID NO: 201500 - DNA, 122 bp, Homo sapiens
gctaggggaactcccgcgagtgggtgcacccaactgcgcctcgtgagtaccttagctctccgctatctctggcagtgcccagtccggggcagagggccaggccccagcctagcagctcccac

SEQ ID NO: 201501 - DNA, 122 bp, Homo sapiens
aaagtgagaacggtgagtggcacccatcatcactgtgcgtgcaaccccaacaaacacacacgcgcgcgcgcgcgcacacacacacacacacacacacacacacacacactgtccatgcagac

SEQ ID NO: 201502 - DNA, 122 bp, Homo sapiens
ggcgaggctggcaaccgcgacctcctgagcagctggggcgcttgggggatgttggggggccggggcaccctgtggtactgagggccgggaagggcggtgcgggacgtccaggggcccccctc

SEQ ID NO: 201503 - DNA, 122 bp, Homo sapiens
gaggctgcagacccaaataagacttagctgtcatgtgggtgcagctgccatcatctgccacgacactgctggtggcagcaggtcccaacctctctcgggggcccactggcttcaggacagcc

SEQ ID NO: 201504 - DNA, 122 bp, Homo sapiens
ggattgaggcaatttaggaatttaactttacataagtctcgtccaaccacactgattattcgtccccaagtaacagaaccatttaagaatgatgggaaagctcggtcaaatttttatttatt

SEQ ID NO: 201505 - DNA, 122 bp, Homo sapiens
gaattaggaatgcaagggtcaggaggaggcttttaagtgctggaacgtgaatacatcacccgttaaaaacacggctaattactattcaatagggtctccaataatgatttgaggggttggtc

SEQ ID NO: 201506 - DNA, 122 bp, Homo sapiens
taaaaccttaactctctacctttcagagtataacatgagattcttgttaaaagaaggagacggagcatcgagctatgagccaggaaatccaggcccctgtcgtccacccacagtcctggcga

SEQ ID NO: 201507 - DNA, 122 bp, Homo sapiens
cccggggccgcagcccccagagacaaacgaacggatgggccgtggcggagtctctggaggcgccggggcagccttggatggggcttgctggtcttggccggccgtgcgcggtggaggagggc

SEQ ID NO: 201508 - DNA, 122 bp, Homo sapiens
ggacctgggcgagtccgggagagagtcggcggaccgcacgcacgcggctgtttggaggggcggggttcagctaaagggacgggatctgaaccccagggctccaaaccggcgaggggagcagg

SEQ ID NO: 201509 - DNA, 122 bp, Homo sapiens
agaagggtgcctgcctatatgagtgtatgtgtctatgtgagtctccagaagagtcaataccgtctgcaaaaccctcgcatttcagggcttgagaggctcccttttttcagaaaacatctact

SEQ ID NO: 201510 - DNA, 122 bp, Homo sapiens
gcagaactcaggctgggccttgcagtcccagtctggcgctccttccaccctactctgcagcgccatggccctctagagcctcctggccccacctccgtgggagtggcaggtgtgggactgcc

SEQ ID NO: 201511 - DNA, 122 bp, Homo sapiens
cgagcgcggctgggcggggccttgagaggccggccgggggcggggaggctggcgggtcggcgcgggcccagccgtgcgtgctcacgtgacgggtccgcgaggcccagctcgcgcagtcgttc

SEQ ID NO: 201512 - DNA, 122 bp, Homo sapiens
gacaaaacaaaaaatattccagcaggctgttaaaactcagccaagctggcagtacaacttcgcttccagcttcagatgaaaaccagtgcatttttgcaggtgcaaactgggccatttgggca

SEQ ID NO: 201513 - DNA, 122 bp, Homo sapiens
atagactacctggctgaagacagtgaacctagcaatgctagtgttagatatcagtaatgacggcaggatacagttacagtactaaaccctttaaacaagtggtctactggctattcaaaact

SEQ ID NO: 201514 - DNA, 122 bp, Homo sapiens
accgccggggtcatgttatcatattgggacatgacaggccctttcaccttctgccgagcacggctctctctccggatggactgcatgcggtatttttccatgtcctcaagatcccatgaggt

SEQ ID NO: 201515 - DNA, 122 bp, Homo sapiens
catcgcccgcagaggcccagccccgacacctgccatcgcgcctcagcccctaagcgcctgcgcacatttgcgcatcgctctgcgcctgcgcgccaccctagcgaccctgagagttaggggaa

SEQ ID NO: 201516 - DNA, 122 bp, Homo sapiens
caaattggtcaccaaaatctaaaaggattaaatagatggaaaatgcatgagggagaaaaacgctaaacttcccagtatacaaaagacgctaagagcaggggagttaaactttaggtttctgg

SEQ ID NO: 201517 - DNA, 122 bp, Homo sapiens
tgtgaaattcagttgtgtggaccatattttctaaactagaatctgcacaccatgctctcccgccatgttctcccctaggagaaaattgtagcttgcaggcagaaatgtaaacacataatcaa

SEQ ID NO: 201518 - DNA, 122 bp, Homo sapiens
acgcgaccactggccccgcgttcggggaggagccgggcgggcggtcctgcactggcgtgccgctcccccagccactgcaatagagagctggatctgggtccccagccctgcgctggcagctt

SEQ ID NO: 201519 - DNA, 122 bp, Homo sapiens
caggagagagcatctttctctattgataaaccaaggagttcagacactccctttttgtagcgggatctgattcttctgcggtaggtctaaaccaataaaatgaaaattctattaaagtcaca

SEQ ID NO: 201520 - DNA, 122 bp, Homo sapiens
ggggcgggccggaaggcgctcgccaagccgtggctgcggctcattggtccgggcggacatcgctcactcacatatccaatgggaggcggccgggtagaggttaccggtttggttttttttca

SEQ ID NO: 201521 - DNA, 122 bp, Homo sapiens
ctcaggtgatccacctgcctcggtctcccaaactgttgagattacaggtgtgagccaccacgcctggccaatgtcagtcatttctactgctgtgcatgaagggcttgctgtgtgctggaaac

SEQ ID NO: 201522 - DNA, 122 bp, Homo sapiens
tggattcgcggtaacagcaaatggggctctcactcctaccatctcagtgacagtttaaagcgcaccctaccgcaggaaagtgcccatatttgcacacacgcggcagagggcagggctgaaaa

SEQ ID NO: 201523 - DNA, 122 bp, Homo sapiens
ggtggttctagcaatgtctgtccttacaatgcatgtggcttatggatgacactaaattagcgggcccttcctgaattttgccttggtaatgaaaatcatcttcctggaatagaggagaggga

SEQ ID NO: 201524 - DNA, 122 bp, Homo sapiens
ccgaggccggtggttccgaagggtggccacggccactagcctgccgtagaacatggaggccgccatttctgagtcggaccccgtcccctcggcgccgcgcgcaggcgcacaggcgacaggcg

SEQ ID NO: 201525 - DNA, 122 bp, Homo sapiens
tctgacccgggctcgcacctcccctcgttctctgctctgacccgggctcgcacctctcctcgttctctgccctgacccgggatcacacctccgacccgggctcacacctcccctcgttctct

SEQ ID NO: 201526 - DNA, 122 bp, Homo sapiens
ctgcctgaagtgcaacacgtttgccgagctgcaggagaggctggactgcatcgacggcagcgaggagcccagcagctttcctttcgaagaactgcctgctcagtttgggccagagcaggcaa

SEQ ID NO: 201527 - DNA, 122 bp, Homo sapiens
tttgcgtgtacgactgcaggaccagcaaatgatcatcttcgatagagctctctagttacccgtgcttctccctccctatggtatgtgtttgtgtgtgtgtgtgtgcgtgtgtgtgcgtgtgt

SEQ ID NO: 201528 - DNA, 122 bp, Homo sapiens
ggcccaggtggcaccatggcaggggcagatcttggtggtagtagtaaatattcaaatgagcgttttgaaggccaaagtggagaaggattccatgtgaaaagcagttgaacatgggtcagtcg

SEQ ID NO: 201529 - DNA, 122 bp, Homo sapiens
aaacaagagttggtttaattggtgaatcccgtatgttccccatcgtagggctctgcagcacggtggctgtgcggggagatcagatgtcaccgcaccgctcctgcacctgcccgccgccagcc

SEQ ID NO: 201530 - DNA, 122 bp, Homo sapiens
aagactgacaaaacagactctttgtggcagtaaggtagcaaattcctgcctctggtatagcgtcacataacaggtagcaaaccctgaagaaaataaaaatattttaccctgaagtatatttc

SEQ ID NO: 201531 - DNA, 122 bp, Homo sapiens
cgccgacccaggggcctaggccgcggcggccaagccggaggcccgcgccggactcggagtcggccctggcttcctaagatggccgcgctgccccgcggcccctcgcccctctctgcccggga

SEQ ID NO: 201532 - DNA, 122 bp, Homo sapiens
cattcggacgccagcactactggatggtggtgatcaagaatcacccttgacgagcactctcgatagagcgaagccccgagatttcctagaggtgaagaagccggaggaagtggtttttgaaa

SEQ ID NO: 201533 - DNA, 122 bp, Homo sapiens
acccggcgcttgatggacatggtggccacgttctggagcacaacgtactgcacctcactgcggagaggacgggtcagagcaccccgggcccctcggttggggcaagggtcagcggatgaggg

SEQ ID NO: 201534 - DNA, 122 bp, Homo sapiens
ccgctaaagcactttgaaaagtgacagctctgacaatgaagttcaacaaagttctccactcgagcttcattcgccggaggctctggactctctgattggcgcaggggtgcaatttatgattg

SEQ ID NO: 201535 - DNA, 122 bp, Homo sapiens
agttttttcaaaaaaatttttgtagagacagaggtctcacttttttgctccagagggtctcgaactcctgggctcaagtgaccctcccactctggcgtttcaaagtgctgggattataggca

SEQ ID NO: 201536 - DNA, 122 bp, Homo sapiens
ggaggtggagattgcagtgagccaggatcacgctactgtgccccggcctgggcgacagagcgagactctgtcttaaaaaaagagagagagaaagagaaaagtaaacaaggcaagaaagaaag

SEQ ID NO: 201537 - DNA, 122 bp, Homo sapiens
aagcgatgcttctgctctgggcctgcctgaggttccctctgcggagggagggggctaacacgccaagaagggtgagcagatggcttgggccgtgcccctcaatggctccaaggaagcgtagc

SEQ ID NO: 201538 - DNA, 122 bp, Homo sapiens
aaggagtgctcagacgagggctgcccggccaggcgtgggaggcatcctgggacaacgcggcgccctctccctgaatgtagagtcccgtccagggaggcgctcagccccagctgctgtctgtg

SEQ ID NO: 201539 - DNA, 122 bp, Homo sapiens
actctgctgtgaagccaaaacaaccagcagcatcaggaaaaatcagacatgctgcttggccgagcaggagcccgcaggtccgtgggccgcgggtactcactccagccagggatttctggatg

SEQ ID NO: 201540 - DNA, 122 bp, Homo sapiens
ccgcggccgtcagtgctgcttctgccccagctcccatggcaggtaacgggctccccttggcgccatgtttgaggagaaccgcccagggctcccttcctgtggtggggagagggttgcactgt

SEQ ID NO: 201541 - DNA, 122 bp, Homo sapiens
atggatggggccacaggtgtgtaccatcacacgtagttaatttttaaactttttcagagacggggtttctccatgttgcccaggctggtcttgaactcccggcttccagtgatcctcctgcc

SEQ ID NO: 201542 - DNA, 122 bp, Homo sapiens
gccaataaagctgtactggttttgaatcgcggcgcgtttcccgccgctggggtcaggggtcgaggttcgggtcgtggggcggagggaagagcgggcgggcgggaggcgccggcgccagacgc

SEQ ID NO: 201543 - DNA, 122 bp, Homo sapiens
agactccatctcaaaaaaaaaataaaataaaataaaattaaataaaatgagacaagttatcgctatgttgcccaggctgctgatactgaactcctggccttgagtgacccttctgcctcggc

SEQ ID NO: 201544 - DNA, 122 bp, Homo sapiens
attgctctccgggagtgagcacatacacaaacatggcattgcaaggcaagtctccgggctcgcccggcacgctcgctctaccttgggctgctgtctgcacatgctcgtaacgacacccccag

SEQ ID NO: 201545 - DNA, 122 bp, Homo sapiens
cttgccccctgcgcctgtgggcggctcggggctggtgcgacagagcgagaggaaccagcgcgcgggagcctgagcaccgcgtccttcccgcaggtacctgcgcgccctgtacctggggctgc

SEQ ID NO: 201546 - DNA, 122 bp, Homo sapiens
gcacaccaaggtggcccggaagaaccagaagtgcagcccctctcacaggcagctctgagccgcgctttcccctcctccctgggatggacgctgccgggagactgccagtggagacggaatct

SEQ ID NO: 201547 - DNA, 122 bp, Homo sapiens
gcgccagcttcgcgtagctgctctgacgccgctgccgccgccgccgccgccgccgccctccgcagcccagctcgcgccccgcggcagctccgcagtgcactagccaccaccgccgccgccgc

SEQ ID NO: 201548 - DNA, 122 bp, Homo sapiens
gcgccctctccactgtccctgcttcccgcagcgcttctagtctcggcgcgaggcggcgagcgaagcccggctgctgagccgccggcgcttttatacagttcccgcccgcctgctccggacac

SEQ ID NO: 201549 - DNA, 122 bp, Homo sapiens
tcctgtaattaaatctgagacccccccccatgtgacgttgagatgaagccacttacataacgcgactaaaaataagctgatgaaggctgcacacttacactctctgcctccagccctcctct

SEQ ID NO: 201550 - DNA, 122 bp, Homo sapiens
tgctgactccgaatcgcagtcagagtcgttctgcttgtgccgtgttgaattcccggcatccggcatccagactcagcctcctccccaggccacggccgccgtggccagtcggtcaagccctt

SEQ ID NO: 201551 - DNA, 122 bp, Homo sapiens
acgcccgcaaaggctggtttttaagcgggagcatctcttcactcgcagcaagtgcgcgtgcgctgcctctcagcccaaattggaaacatggccgtacggtcgctgtgggcgggccggctgcg

SEQ ID NO: 201552 - DNA, 122 bp, Homo sapiens
atcagcaagcaccacgcagtcccttgcaaggtgacagactgctgtggctttgtgctggtgcgcctcatccctgcacccagaggcactggcattctcttagccctagtgcccaagaagctgct

SEQ ID NO: 201553 - DNA, 122 bp, Homo sapiens
atgacgctgagatgtgtggtgatgacggcatcactgagacgtgtggtgatgacgctgagacgtgtggtgatgacgctgggacgtgtggtgacgacgctgagacgtgtggtgacgacgctggg

SEQ ID NO: 201554 - DNA, 122 bp, Homo sapiens
ctcggacctagagtttccaggttccggagggatgcggttgttgaccgctagcctagaatccgtgagggctgaaccgggacgaaggcctaggacagagaggtggtgtggaaggacccagccgc

SEQ ID NO: 201555 - DNA, 122 bp, Homo sapiens
accatctattctctgctcctacaagtttgactatttcagattcctcgtcagtgggaatcacgcagtagttgtcctgtgactggcttatgtcacttagcataatgtcctcaagattcattcat

SEQ ID NO: 201556 - DNA, 122 bp, Homo sapiens
gccgatcgctctctgagcccgagcctgcctgccaggcctgccttctacagttctcgcattcgtcttgagccctctcggaaactggggactgtttaggcagaaacactcgtaggtccccttgg

SEQ ID NO: 201557 - DNA, 122 bp, Homo sapiens
gcgactcacctagacacgcgacttctgcgtggctaagacgaaatggccagcgggcgcctgcgcaacctaaataaggtcccttgtgcgagttctgcgcacgcgcagccagctgcccgcaccgc

SEQ ID NO: 201558 - DNA, 122 bp, Homo sapiens
cagacactcttcatgccttcaacggcttacagttaagtttttcaaacatttgaaacataacgaagcttttggttacttaaaagaattctatggtattagggagcaacacctgttttgtaaac

SEQ ID NO: 201559 - DNA, 122 bp, Homo sapiens
ttgtctcccacagaccagccccatacaatggtactttgtgcaagagctctctgcatgggccggccgggcccccttccctccgcctgccaacgggaggagacgcgaggcgctgggagctccag

SEQ ID NO: 201560 - DNA, 122 bp, Homo sapiens
gggctggtggccttgcccctctgagatgtgggcattgctgaagttctactttcctagccacgggggaagcattcccctctccgagcttcagcccataatgagctcaacgaggggtcacaggt

SEQ ID NO: 201561 - DNA, 122 bp, Homo sapiens
gctctgccggaagttgtgcgcgcgcgggacaggaagttcctcccttctccagagcgccgtcgaccccacgccacgcagaggtgaagatacgcaggacgtcctctaaagcaacttccgtgggt

SEQ ID NO: 201562 - DNA, 122 bp, Homo sapiens
tctcttcgctggtccttttcggatcctgctactagcggtgcagttttgcaatgagacacacgggccaggtcagattgcgcctcagctctttgagggctgggaataagcttttatcattctaa

SEQ ID NO: 201563 - DNA, 122 bp, Homo sapiens
tttattaatcatttcttctgcactagatactgtaaaccacccacaagaaccgtagggcgccgcacgcaccttggagggggcccttctgccggccacccgcctcagagggtttcaggccaggg

SEQ ID NO: 201564 - DNA, 122 bp, Homo sapiens
cagcagaagggtaaagcaaaagtcgcgagaacagccctgctgccacacccctggagaggccgggattggggagaacgaggccagggaatgaggtaatggccaggggacgccgcctaggattg

SEQ ID NO: 201565 - DNA, 122 bp, Homo sapiens
tggcctgagtggcttcccttcagattcctttccctgcagttgttattacggaagcacacccgtggccaggaaaaaaagatttgccaagtgtcgtggatacatttatgacttcgtttatgaac

SEQ ID NO: 201566 - DNA, 122 bp, Homo sapiens
aagcagatgagaggtgtggcattatggccaacaacttttatattagccatccactcaagccgtttcccagcatacatatgcagcttaatcacagctatacatctctacaatgtgaaattcga

SEQ ID NO: 201567 - DNA, 122 bp, Homo sapiens
gctggcagtggaaggcccccggaaagagctggccacggctggtgaagaagccgctcacctcgtactctggctcgtcatcgcctgctttggtggcattcttgtccccagcatcggaccccacg

SEQ ID NO: 201568 - DNA, 122 bp, Homo sapiens
caggagacctcatcccttttctggggctgatgggtccaggacaccaggacctgcggcgggcggggacatgggggtgcaggacccggcagcccccatcccagggcggggtcttccctggaggc

SEQ ID NO: 201569 - DNA, 122 bp, Homo sapiens
ctcctcgacccgcccctggaggcggaccccacttgacttaaactctggggcccgggaggccgccggttttctccccgcttgccggggtggtcctcttccctttgtcggtaagtgtgagacga

SEQ ID NO: 201570 - DNA, 122 bp, Homo sapiens
tactctccaaagccagcacctttccatagtaatgaccactcctagaggtctctaaaggcacgacactgttgaaataggaaataaaagttgaaagaataatagggcctatcagtcttattctt

SEQ ID NO: 201571 - DNA, 122 bp, Homo sapiens
agatatgacactctaatggaaaaataatcacacaaacacaatcggcagaaaacccagaggcgaggaaaagcaagggcggccagaagccccagggaatggacccatgcaatctgagtgacgga

SEQ ID NO: 201572 - DNA, 122 bp, Homo sapiens
accgatcctgcccgcgccgggttgagttcagtttgtgtctccgcgcgctgcgactttgcgcgcctgggggcctcccagctattgcctggctatgctggcgggaaaagtgtaagaaacgctgt

SEQ ID NO: 201573 - DNA, 122 bp, Homo sapiens
cgggggctggagggaggccagggagcagcgaggctgcacggcagccctggcacagagcctcggctgccgtctggggatgaaactgggctctggcaccaggagcgtggttccagctccctgac

SEQ ID NO: 201574 - DNA, 122 bp, Homo sapiens
taggctgggtcgctggaggtgcaggatgtgcggtctcatttggtcctcacgacaaccccacggcgcagctacgactcctgtctccgtcccaggaagagacgggggccacggggcagctacga

SEQ ID NO: 201575 - DNA, 122 bp, Homo sapiens
attctgtttcaaaaaaaaaaaagaggaaatggggaaaatgtttgacacttcactaagaaacgtgtataaatggctaataaacacaagaaaagatgtacggtatcattaatcattagggaaat

SEQ ID NO: 201576 - DNA, 122 bp, Homo sapiens
tcagacccacatacgctgccactgagtcaactgctactatcatccctgtgtgacctgaaccgaaacccactcacttgcgaaactgctggaggcttcttcactaaaacccatatgcatgctaa

SEQ ID NO: 201577 - DNA, 122 bp, Homo sapiens
atcctggactctgaaggtaattcacacaaaagtatgggttctccacagaaactgacctcccgccccaagggtttttaattgtgaagattagcagtttgtcagttgctgtttaagggttcctg

SEQ ID NO: 201578 - DNA, 122 bp, Homo sapiens
ggcaccgcgggggcactggcggggcggcgggagtggcgctcgggacacggggcagccgcgcgagggccacccccggcccatccccgggccccgccaagtcagcttcagaagttgtgcgcgcg

SEQ ID NO: 201579 - DNA, 122 bp, Homo sapiens
tggtccggggccagcccaggtaccagctcaagtagttgcccatgacagcaatgcagtagtcgggacgttctcttagaaattcagcttccagaagtttccgaagtctgcggccggggccaagt

SEQ ID NO: 201580 - DNA, 122 bp, Homo sapiens
gctatttcaatgcaagaccagatgtttggcccattattccagcaactccctttgacaggacgatttaccctgctacaaagaagcacaagatgtggtgttgcttaaaaagtcctgtatgtgag

SEQ ID NO: 201581 - DNA, 122 bp, Homo sapiens
aaaagaaaataggctttctccgctctaccgcctcgggcagccacacctccacacttccggcggtgtaccggccaaatgccgcctgccagcaacttccgtcctcctagctaaaagcggaaaac

SEQ ID NO: 201582 - DNA, 122 bp, Homo sapiens
cctcaggtgatccgccccctcttggcctcccaaagtgctaggattagaggcgtgagccaccgcgcctggccataagccatttttaactggcgtgatattagattgatctttattactaaaat

SEQ ID NO: 201583 - DNA, 122 bp, Homo sapiens
tctcagacagatgcctctcctttttaatacgcatttgtgcagctaaaagactgggcttctcgctttttaatcacacattcagagtttatttttataaaaaaattgattttcaagtacatgtg

SEQ ID NO: 201584 - DNA, 122 bp, Homo sapiens
cgagaatgcagcacgagggcagcagttttggctcctcttgtgttgctcatctcacttctccgagccggaaagctttctttgtacttaatgcagaatccctcttgctgggatggaaacctgta

SEQ ID NO: 201585 - DNA, 122 bp, Homo sapiens
caatacggaacttcagggacaaagtaggcccctcacaaagacaccgccagcacctgactccgcccgagcggaggaggctccaagtgcggtaagaatatgggactgacagttgggtgcagtgg

SEQ ID NO: 201586 - DNA, 122 bp, Homo sapiens
tctgtgctcacactgtcaaggaattctgcagggaacacgatgtgaacgttccttttcactcgagtttttgctgccaattcacaacatatcgtagaaacctgtgttacttggttgacatatgc

SEQ ID NO: 201587 - DNA, 122 bp, Homo sapiens
ggcaaagccagccagagggttgacagaaataactggataaatctgtgcccctgcccctgccggctcacacggctgcagcccacggctggagccaaaaataaccgcgcagttgacgccacggt

SEQ ID NO: 201588 - DNA, 122 bp, Homo sapiens
gcccctgcgctgctgcccggcggaggcggggtcccgggtgggtgctgcggcgcggcgtcccggcgtccgcaaaagtcctcgctgtcctgcagcaggctcgggttgctcatgaagtcggcgct

SEQ ID NO: 201589 - DNA, 122 bp, Homo sapiens
gcagcaggaggccctgggtcacggagagcattcactgggcacctgcggctggggctggagcgacctgcgatggcaccgctgaccagggctgagaacaagcctgggctccataactggtggcg

SEQ ID NO: 201590 - DNA, 122 bp, Homo sapiens
attctttgtgtgtctctgggtgtgtcccagagcgggtctgcatacggagacgtatccttgcgggggtgttccttggatggggggccccagagtgcctgaggccagaagtccctccagggcag

SEQ ID NO: 201591 - DNA, 122 bp, Homo sapiens
tagagtcagtcagtcgagactcccccagacctggaactggtgctcccacagaggtgggcccggtggtttggtccggcctggcctactggaccagcctgtgctcggtcggccacggctctgct

SEQ ID NO: 201592 - DNA, 122 bp, Homo sapiens
atgtgtcccaggataggaggccatcagatctcccacatgaggcattttcgaccctctctccgtcttgttctccagttgcccctcgccatggcctgcagagtctcgggaaagttgccattgcc

SEQ ID NO: 201593 - DNA, 122 bp, Homo sapiens
aaaacctcctactatggtctatcacagtaattctcaaactccagtatgaattagaatcaccgggagggcttgttaaaacagatttctgggtcccaccccagaatttttgattcagtagggcc

SEQ ID NO: 201594 - DNA, 122 bp, Homo sapiens
ttttttatactgaaacagtttgtgccttcaatctcttgcctccgcacctaggtattcctccgcccacacatatgtgggggaaaggaagcgagatcagactgttactgtgtctatgcagaaaa

SEQ ID NO: 201595 - DNA, 122 bp, Homo sapiens
cctctctgaaagtaaaacacactcacactcatcttccattcctgcttccactgatcccatcgaaagtgacatatccataggccaggcatggtggctcaggcctataatcccagcactttggg

SEQ ID NO: 201596 - DNA, 122 bp, Homo sapiens
ggagtcagaccagagctaagctgttgttttactacatactagctccaagaccctgggcaacggctccagcttcaatttctccaagtgtaaaatgcagatgatcacagtatctttctcaaaag

SEQ ID NO: 201597 - DNA, 122 bp, Homo sapiens
caggcgcagggggcggcctcagcccagggtggagtcttgttctcccgggacaggacagtgcgatgtgccccccgacccaggccacgaccttccgggatcccagaggcaggccgtgtccccga

SEQ ID NO: 201598 - DNA, 122 bp, Homo sapiens
tggtgtcaggtggaccaggtacaacctatgccagcccgactcactgtgccaccttaactgcgtgtgacaccatgtccacagctgtcaaatgcacagaggcttctccgggatctgggaggctg

SEQ ID NO: 201599 - DNA, 122 bp, Homo sapiens
gagctcaagcgatccgcccgccttggcctcccaaagtgcgggattacaagcttgagctgccgcgcccagttctccaagatatcttgtatatttcttgccccggttcagggatcaccattcct

SEQ ID NO: 201600 - DNA, 122 bp, Homo sapiens
agcctccaagccgtggctgagctcgcccaggggggagcagcagtagccggaggaagccgccgctggtcccccaagcaccagcgcccgggtggaaggggcgaggaggcgggggcggcggcggc

SEQ ID NO: 201601 - DNA, 122 bp, Homo sapiens
tgtggtggaatgcagtcggttttgtacagaggttgaggaggcggtgattgatttacacagcgctcagggaattggtttgaccagttgtgtcatttacatagcccacgaaaagactgactctc

SEQ ID NO: 201602 - DNA, 122 bp, Homo sapiens
tgaggccctgtctctggacaccatcgagttaactgtctgccctgtaccattctgcctctgcgcaggtgacgagcaaaagggcacctgtgtcgcctgctctgtccagccggagaagccacggg

SEQ ID NO: 201603 - DNA, 122 bp, Homo sapiens
actggaaaaaaagaataaaatattttcgtaggttctgtacagatctggtagtattatctgcgtgtctggttcactgtggtaggcgccacagaaatgggtagattgataatgtgttggatttc

SEQ ID NO: 201604 - DNA, 122 bp, Homo sapiens
aggatatgagtgatcacacaggtctccagatgccctccgggcctgcagccatacagcctgcgggccaccacatcacatgagccatactatctttagccagggagagatatttatagccccca

SEQ ID NO: 201605 - DNA, 122 bp, Homo sapiens
gctgagccccctagaagagcagtttgtttccagctgtgaggctgaaatctgccctgggatcgggggcctgaaacgcctcattttatccatgcctccatctcactcaacaaagccctctgaaa

SEQ ID NO: 201606 - DNA, 122 bp, Homo sapiens
taacgtaattaaaacacctggcacacgatgggcactaacataatatttccttttctccaccgtctttaccccttttccttcagctcccctaaaccttttcaggtccagcttttttgagtggc

SEQ ID NO: 201607 - DNA, 122 bp, Homo sapiens
ctgaccgacacccacagaatcacacaatgttagcccctcccaagagatgtcctttctatacggagtgggggctggaggaaccaggagcctcaaagctttgctttcacctttgttttgctctt

SEQ ID NO: 201608 - DNA, 122 bp, Homo sapiens
ggtcacttaaatgtaaagaacaaaatgccacccagaggcttaacctactctattcttttacgtttttgtcgttataaaaagtagcacatgctggaaaaataaaatttagaaaatatgtcaaa

SEQ ID NO: 201609 - DNA, 122 bp, Homo sapiens
tcacaagatgcgtctttcctggcagttaaaatctgtatgttcagactacctcattgattacgtgcctggtgtgtacagggactcatattgtttctaaaattcagctttcatcattttactct

SEQ ID NO: 201610 - DNA, 122 bp, Homo sapiens
ggagggaggattgccctgtgcacaggtggaagacatttcacctcttacaaatcctgagggcgcttttgcttgtttaagggagtttgggagacagtgttgcaaagggtccagtaatagttgca

SEQ ID NO: 201611 - DNA, 122 bp, Homo sapiens
cacttccttttgattttttcttatagcttctatctctgcttacgtcacccatcattcttgcgtgttgtatgcttttcgcattagagccctttgcatgttaatcagttattttaaatttatga

SEQ ID NO: 201612 - DNA, 122 bp, Homo sapiens
ggttcccagtccctgcctgccgggtgggagctgggacctaagacccaggtggccatctgtcgcgacccccagcctagggcaggtccagagtccttcctctgaccctctccctcgaggcagcg

SEQ ID NO: 201613 - DNA, 122 bp, Homo sapiens
aggagggtctctgggtcgggcaggggccacctcttggcccgccccttgtcgctggacgtccgaagattgggccatttcccttgccgcgcccttaccgcatatcggggtgcgcccggcccggc

SEQ ID NO: 201614 - DNA, 122 bp, Homo sapiens
tgaaataatatgtacaccaaacccctgtgacatgtaattgatctatagaacaaacctgcacgtgttccccttaaactaaaatataagttaaaataaaatcctcgttaaatcactgcctgaaa

SEQ ID NO: 201615 - DNA, 122 bp, Homo sapiens
ggcacaggagcatgctcttcacccgattctgtacacggggccgcccgaaaacggtgatttcgactaggttccctgagtcaactatgtccactgtcagcagggcctggctcgtccactccatt

SEQ ID NO: 201616 - DNA, 122 bp, Homo sapiens
agcggctcggacacctcccaggtctcagttcctgggcctcacttaggaagaggcttcaggcgtgtgctggagccaccgtgaacagaggggagcgaaggcaacaggaaactgacgtgggagcc

SEQ ID NO: 201617 - DNA, 122 bp, Homo sapiens
tggcagacaaagcaccctgtaggcacagacaagtctggcacttccttggactacttgtttcgtaaagataaccagtttttgcagagaaacgtgtacccatatataattctcccacactagct

SEQ ID NO: 201618 - DNA, 122 bp, Homo sapiens
ccctggctgcacccagaagtgactctcgcatctgagtaccagccaggaagccgttctccacgcaacctggcaccatccgctcgcctccaagaaacccagccaagatatttttacggtgggga

SEQ ID NO: 201619 - DNA, 122 bp, Homo sapiens
gcaagttgctttacttctgtgccttactctccttacttgctaagtggtgagaattaaacacgttaatataaggaaatgtttagaacaggcctatgttcagcgctcagatatgtcagctatta

SEQ ID NO: 201620 - DNA, 122 bp, Homo sapiens
taccatctctcaaagcgcaaaaatatttaaagcaatatttaaaatactttaagtgcgccccgtttcctcctgccacccgtcccaaagcccacacagtctttctcaaaaatgtggatattcag

SEQ ID NO: 201621 - DNA, 122 bp, Homo sapiens
caggttcgcgggtgacctccccaagatggccgccgcctgggggcgggcctccacgctgcacgggtgttgattgggtgagacgactcaatgatgagcaatgattggttcacacggcgcaagct

SEQ ID NO: 201622 - DNA, 122 bp, Homo sapiens
ggcgtttgagcgtcacgttcttccagagcagcagctgcagctggtgcaggaagcccatggcggggccacgctccgccgcctcagcgccgcggcccgctcctctgcgcgccccgccgggcccc

SEQ ID NO: 201623 - DNA, 122 bp, Homo sapiens
tggcggggtcgatgatgtgcccggtgccggcctgggcttccaacagggccacggccatgtcggatggcagcaggtctttcttcagggcattgtagatactcagcttctgccccgcctcctcc

SEQ ID NO: 201624 - DNA, 122 bp, Homo sapiens
ctctcttaaaatttaggcgtttacagttaaatgacccacgaacttctgaaactggaagaccgttttttagcaaaggagaatactccagggccccgcccatttcatccttgactccaccttct

SEQ ID NO: 201625 - DNA, 122 bp, Homo sapiens
acatgtctaattcagggcccttcctgtgtcttagcagtgacttaactaaaataaacatgtcgaatgtaaatctgggaagtaccactgggctttcaattgtcatattgcacagtagccattta

SEQ ID NO: 201626 - DNA, 122 bp, Homo sapiens
tggaaaagggcctgagaattaaaatttttaggtcctccagtgatgtctaggttaccggtccgggaaccacccattaagaatcactgttgtatctggtcctctgcctctttctgcacatctta

SEQ ID NO: 201627 - DNA, 122 bp, Homo sapiens
aactgatagctgcatgaaagtgagattcgtgttactttggcttttctgtctctgttgacacggttgcacatttccaagttactacagcgtgaaaactgtgtgtttaaaaaaaaacaaaatta

SEQ ID NO: 201628 - DNA, 122 bp, Homo sapiens
gcgctccaccaggatgtccagatgggctttgattgcggcgatgccggccagcccgccctgcgggtcaaagcgggcaaagtcaccaaactcaggcagacgccacacggcctcgcttttcttca

SEQ ID NO: 201629 - DNA, 122 bp, Homo sapiens
cagtcaccatggcaaccataaatctgagccagcacaggaaccacttctcctatcgctccccgtcagcctcgcaaagcgcagttttctaagactgggcaccactggcttcgctgtttcctaga

SEQ ID NO: 201630 - DNA, 122 bp, Homo sapiens
tgttttagctcttcctggatcgtctcagatctgccattcctctggatatgaacctgtggccgtggcagaaacccagaaatcagtaggggcttgttgtgttcttgtttgatcttcacgttaag

SEQ ID NO: 201631 - DNA, 122 bp, Homo sapiens
ctaatcttttatgctgactacattttgaaattataatcttgggccgggcgcagtggctcacgcctgtaatcccagcactttgggaagccgaggtgggcagatcacgaggtcaggagttcagg

SEQ ID NO: 201632 - DNA, 122 bp, Homo sapiens
tgattctgtctatattttatacgaagatatttccttttctacttttggcgtataagcgctcgaaatctccaactgcaaatatcacaaaaagaggttttcacatctgctccttctaaaagaag

SEQ ID NO: 201633 - DNA, 122 bp, Homo sapiens
gacatccagaattgagacttggcctgggcaacaagcgcagaggcccagcagaggggtacccgtctgtttctccccacttccatccccaagggcccggcctaggttccttcgagggatgaagg

SEQ ID NO: 201634 - DNA, 122 bp, Homo sapiens
cagaacacttctgatgcaggatgggaaagtggctctccttccccacgtcacacgatgctccggcggacactgagcatcctataatatcctggcatatgccctgccaccacccacctggaggc

SEQ ID NO: 201635 - DNA, 122 bp, Homo sapiens
gatttggggttcccttagggctggggctcttggaatttggtgtcttgaaacccatggactcggggcattgaaattctccagtttccagggatgggaattcctgtgtggggtttcctggtgcc

SEQ ID NO: 201636 - DNA, 122 bp, Homo sapiens
tcttagactgaagtactgactccacagtcgttgttaagaatcctagttgtttaatagaggcggtcttgggctcttgctgggccgcggtgtgttctgggaagtgtagtcacctgagtctccag

SEQ ID NO: 201637 - DNA, 122 bp, Homo sapiens
ctggtgggactgggaccaccacctactccctgggtgaagttgggcgtggttctgtcctctcggagcctctatttccccatctgtgcagtgggcataataacatctacctcacaactgttgta

SEQ ID NO: 201638 - DNA, 122 bp, Homo sapiens
tgctgagtgggtgccgcgaagtgagcttgggtagcactgcctgaggttagaccctgagttcggtgtactgaggacgtttctgagagccgtgactctcatggagggcttcaggaaggctctgt

SEQ ID NO: 201639 - DNA, 122 bp, Homo sapiens
gcaggcagcccctggtcactggctcgctgagactaagctggtccctgcactggcctaaaacgctgtttttgatcctgcagagtgaacactacagcagccctagaatgtcaaatcccacctgc

SEQ ID NO: 201640 - DNA, 122 bp, Homo sapiens
gctgggagaggagcagcgaggaggagacgggtgggggaggagatggggatgaaagggaagcgtttgcagcttgtggagcactgggaagagcagggacatcaagggcaccaaataaaggtcca

SEQ ID NO: 201641 - DNA, 122 bp, Homo sapiens
aagatgaaacaaggagggtctgctaagtgcctaggtattggacatcctaactggacatagcggcgcccaatttccagccaagcccagctagctgagtttgtctcagctaagcaggcagaaaa

SEQ ID NO: 201642 - DNA, 122 bp, Homo sapiens
tataatctgggacgtcctttgtatacaagggacacacagaattttgtcctgggccgcctgcgaagctagagagctgagagggcgggccctggggcagcggccactttcagcttgtgctactt

SEQ ID NO: 201643 - DNA, 122 bp, Homo sapiens
agcccgcgaggagcctggggcccccgggctggagtaagagccgagcaccggcgcagcctgcgggactggcactcaccgggcctctcaatccccagaccttgccactgcagttggagctggag

SEQ ID NO: 201644 - DNA, 122 bp, Homo sapiens
cctttcccagtgcttctacctctggtcttattcgcctcttgtgacacagctatgatgtgacgtcctgcattttactgatgtggacgctgaggtccaaagacaagcagcctcccagggacaca

SEQ ID NO: 201645 - DNA, 122 bp, Homo sapiens
agtgctgtaacggctcacaagggccgaggactttggcggtggcacgctgctgctggtcctcgctgccatcaagggagtgttctttttgactgcctgaactgaccgaggcggccaccctttaa

SEQ ID NO: 201646 - DNA, 122 bp, Homo sapiens
gtccaatattggctgatcggcggtgaggatggagaggatgataatcccggcagtggcagtcgccctgctgacggtgggtagagcaatagtgctgttaccctacaagaggcggcgaggcagcg

SEQ ID NO: 201647 - DNA, 122 bp, Homo sapiens
gcctctcctgcggaaacggccctcgctgctgtgctgccctgggtgctgttgtccgggttccgggtggggagcaccccagaggaagtagagcaagcccggggacctggggggcgccccgcctg

SEQ ID NO: 201648 - DNA, 122 bp, Homo sapiens
ggtgagaaccccagctcctctgaaaaatgccacgggctagtctttaagcaaaccttacatcgtcagcatgatgatgctattctagttaaacagaatattgaacaagagaaaatgtcattcct

SEQ ID NO: 201649 - DNA, 122 bp, Homo sapiens
gtgggaaagacgcgcgtgggaccttggcagtggtccactagggccgcaagggtcttcagtcgtattttgggatcataggtccaaaccaggaggcgccgaagtgttaaactactctcaagtcc

SEQ ID NO: 201650 - DNA, 122 bp, Homo sapiens
cgtcctcttccacctcttgggtgcagactggccctcccactccgaccgcaggtcccccaccggccacacagacggctacgctagaacccagccaaacaccggggttgccaggatggtcccac

SEQ ID NO: 201651 - DNA, 122 bp, Homo sapiens
tatatgaccttcctctaggaattctcgactggcaagggaaaaatgcctcaaatgagcacgcgcacaacttcagtaaacacactgtgagtgcggccactcccaagtgctggcagaccactgca

SEQ ID NO: 201652 - DNA, 122 bp, Homo sapiens
ccattacaatgttctcatttttttctaggttggtcagaccatgcccatggttcctcctctcgacttcactatgaatgccgcatctgttgaatgaatgcagtttctgctcttgcttttggata

SEQ ID NO: 201653 - DNA, 122 bp, Homo sapiens
cccctctgaacaagctactacttggaagttatgaaaagccactcttctggctgtgaccatcgtttcatcctgtaagggggagattgggtcctagtattattcattccactctaatactacat

SEQ ID NO: 201654 - DNA, 122 bp, Homo sapiens
gcagctgctcagatgcacacaggttctgtttgtgcagtttcctcctgtgtttcccagaggcgaatgaggaggacgggccatggcaacattcaacaagctggcctcacccagcacatacacac

SEQ ID NO: 201655 - DNA, 122 bp, Homo sapiens
tgaacttgtcaataaacacaattgtttgttaaccctgggatgccggccagtggggcaggccgaagcgggcgctgccagtcgctccaccgcttcggtggcagaacccggtgtgtgtccagggg

SEQ ID NO: 201656 - DNA, 122 bp, Homo sapiens
ggaacctgctgtcggcgtgggcggtggcggtgccagcgcgcgtgcgtcgaacggctagggcgggtggctagaattctgcggtgaatcagaaaagctgtcctgatttcctctcgctgtatacc

SEQ ID NO: 201657 - DNA, 122 bp, Homo sapiens
taactaaggcgaggccactgtactgtggatacaagtccgtgcaaccctaaatcccagacacgaacgtgatagagccacctgcagtctccggcctcagtttcccagcctcgtgccggggggcg

SEQ ID NO: 201658 - DNA, 122 bp, Homo sapiens
ggttctgttcattgtcatcctgagtgtgtgtgtgtgttgagggtggtagataacttcccacggcagtttcagaaaacctgaaagacaaagggcctgtggggccttgcgcaggctgctggagt

SEQ ID NO: 201659 - DNA, 122 bp, Homo sapiens
ccctcgtcaaggcgcccacggcctccgagcgggtgactgggaatggcgggggctgtgttccgcgataccgcgataaaacccccacgtcgccgcggcaaagtcgcgagagtaccgtggacccc

SEQ ID NO: 201660 - DNA, 122 bp, Homo sapiens
caagactcctggatttgccatttttcctttctgaaggcaggtctcacctatctcctggttcgatctaggaaaaaggaaaggaagggatttaaaagtaaacagtgaaatgagaaagaattcac

SEQ ID NO: 201661 - DNA, 122 bp, Homo sapiens
ggagataatatgagccttcgtgatgatctgaaagggggaggttctgtgtcccattgattgcggtctggcccaatgccaggcccaagcctgaccgacagttgaaccatatcattaaggcgtgt

SEQ ID NO: 201662 - DNA, 122 bp, Homo sapiens
ggtttcgccatgttggccaggctggtttcaaactcctggcctcaagtgatccacccacctcggcctcccaaaatgctaggattacgggcgtaagccactgcgcccagccaagggggatcatt

SEQ ID NO: 201663 - DNA, 122 bp, Homo sapiens
gatcaaagtaggcaagatggcgtcgagcggcggggagctagggagtttatttgatcaccacgtccagagggcggtatgcgacacacgggccaaatatcgagagggacgacggcctcgtgctg

SEQ ID NO: 201664 - DNA, 122 bp, Homo sapiens
tgccccctcctggctgctcgaaggacctccggtctcctctcctggagactggcccaaacccgaatgctctgagcctaggaaggcaaatccccagcaatcccctattgaaagatgggatgtgc

SEQ ID NO: 201665 - DNA, 122 bp, Homo sapiens
gaataggcctggctttcaggccacatgaggctgtgacccacagctggcactggtcacctccgctgtctcctcttcctctctcctccttccctcacacccccttcctccatcctccctcttct

SEQ ID NO: 201666 - DNA, 122 bp, Homo sapiens
cataatggcatccgcaggagtctccaggattgggtgaggccccgccttcccggcccccgacggaacgcacacctccaaggggccccattaccgcccccaacaaataaatgtagaatctacac

SEQ ID NO: 201667 - DNA, 122 bp, Homo sapiens
gaggtgggggtggctctggctggcctgggaggagacaggtgtctttgggcctcccagaggcggggcgcctggagcctgtgatttgtcagggaaatctcagccacctgctcccctcatgcaaa

SEQ ID NO: 201668 - DNA, 122 bp, Homo sapiens
ggtatatatgtataggaaaaaacagtgtatagaggtgtctatactatccatggtttcagacgttcactgggggtcttggaacgtatgtcccatgggtaagagggaactactatattttctaa

SEQ ID NO: 201669 - DNA, 122 bp, Homo sapiens
acctcccctgggctcgcccagcccctccttgccaccctcccggctggccccgccccctcccgcccctggctctaaaataaattagccacagaggggaaaaaagagcaagtgaccctcggtgt

SEQ ID NO: 201670 - DNA, 122 bp, Homo sapiens
acccctgtttttttttgttttgttttgttttttgtttttttccctgcattatggtggtggcgaggatctttttgattttttgcttaataagtggtagaggacacatgataagatttaaaaaa

SEQ ID NO: 201671 - DNA, 122 bp, Homo sapiens
agcctccggcggtggcaactacggcggcggcgccggggcgatgctgtgggtctcgttgggcgccggtgtcctggcctcttcctcaggtacccagccccgcttgcccctcgccccggggaacc

SEQ ID NO: 201672 - DNA, 122 bp, Homo sapiens
gggagagctgcgggtgagacacatgcagcatcccgtctccaagatgattccaaggaccctcggctgttcatgcctgaagcccctccacggggtctctctcgggctggcctgaacaccccaag

SEQ ID NO: 201673 - DNA, 122 bp, Homo sapiens
caacaaggctggagaactccaggagaagcaaagactgcccagcagtgtgtccctgctacacggtcaggacactccttacggctgtgatgcaggcatctaaaaggagcctcacctcactgaaa

SEQ ID NO: 201674 - DNA, 122 bp, Homo sapiens
ccaaggggagggaaactgtgcttgaggtgtgcaggagaagtcttcccttaaccgtagcctcgtagcaaccactgtgagttcttactagctccacttttcagatgaggaaactgaggcacaga

SEQ ID NO: 201675 - DNA, 122 bp, Homo sapiens
ctggtattacaggcgtgagccagcacgcctggcccagttactcagttttgaatctgaggccgtgacatcactcatggtctgcagtcagtgctctgcccctgagctgtaccctctcctatgat

SEQ ID NO: 201676 - DNA, 122 bp, Homo sapiens
ggacggggagcaaaaagagggagtcgggataacgggcccaaaaacaatcaggggaagagtcgagccccaaacagggcttggaagggagctacgttcccaggcctgcaaagtcagcagctgag

SEQ ID NO: 201677 - DNA, 122 bp, Homo sapiens
cgtcgctgacgccccctggccgctgattggcttcccctgacagtgggcggaacgcggccccggattggatatccattcgccgtccctcacccggcacctgcgtgcactctccggcgtcccaa

SEQ ID NO: 201678 - DNA, 122 bp, Homo sapiens
gcctgcgcccttgagttggcggtgaggctcacgggtaactcggtgggtgtctgtgtggttcgtgcacgatggcctgcaggcccctgagtctcagtgagcgtgggcctgcggcctccgtgggg

SEQ ID NO: 201679 - DNA, 122 bp, Homo sapiens
cggggacacgcaggacacccagccgtggtcacatgcggggacacgcaggacacccagccacggacagacacggtgacacacaggacacccagccacggacagacacggggacacacaggaca

SEQ ID NO: 201680 - DNA, 122 bp, Homo sapiens
gtaccttctcagacttgtcccccatcaggatggctgcttgtaccgcagccccatatgctacggcctcatcagggttgatgctcttgttgagatcacgtccattgaagtagtcctgaagcagc

SEQ ID NO: 201681 - DNA, 122 bp, Homo sapiens
cccaggaagggggaaatggggcatttggggcccagacctacacttggagcccaggtccagcgttcccccgaccgctttcccctacctcccggcccccgctcccgccccagcacttttggctc

SEQ ID NO: 201682 - DNA, 122 bp, Homo sapiens
cctagtttaactgcatttgtgcgaaagctaatgagagactgctggttaatccttagtgcccggggccagctttatcccaagcccgatcaaggcttgtggtgggtgaccttggcctttggcct

SEQ ID NO: 201683 - DNA, 122 bp, Homo sapiens
atcagcgtcaattgcactgttgaccaagctgcacactaggaggactgaacccgagcaatacgaaacgcgttaaagagatattgtctttctcttctagttacttacagtgcactacttccaat

SEQ ID NO: 201684 - DNA, 122 bp, Homo sapiens
tgaatgggcgaggggcgttggtgggcgaccgcgttatctgaagccataaacttaacaggacgtaaaccccgggcggggcgtcccacgcccgcagactttgaatcctgcatgggctttccgag

SEQ ID NO: 201685 - DNA, 122 bp, Homo sapiens
tggcacccagtatgggacttccatccgctgtggggcgcctcctctaggggacctctagatcgccccttaagagtcgccagccccggtatcctcaggagtgcctcggagctcgctcctcgccc

SEQ ID NO: 201686 - DNA, 122 bp, Homo sapiens
aggtccgctcatgggcttctcagtacggactcgccggcgggaacaattaattgagcaaagcgcccctttctgggctggagcaaggttcgcggctgcagatatctcaagctgaaggcaagagc

SEQ ID NO: 201687 - DNA, 122 bp, Homo sapiens
cgggcgtggtggtgggcgcctgtagtcccagctactcaggaggctgaggcaggagaatggcgtgaacccgggagaatggtgtgccccgagcctacttcccgcgcagtcctccaagacgcggc

SEQ ID NO: 201688 - DNA, 122 bp, Homo sapiens
cggctccggggactacagcccccggcgagcactccgaggctaggccgctcccgcaggacgcgtcctccaatcccaggccgcgctcgcagaccgcgcccctccaacggcaggccgctcccgca

SEQ ID NO: 201689 - DNA, 122 bp, Homo sapiens
cgcagctagcaccccagcaaggggctggttatgacttggctggaccagttccatccctgtcgccccctcccccagccctgtcctctcctgtcccatccccgtggttctacctgttgcattgg

SEQ ID NO: 201690 - DNA, 122 bp, Homo sapiens
gaagtttctgtttcaagacaccatttatatcatgacacaaaggctgctttcactacccttcgtcatcgttctctgagtggtgactgagctgaatttcactgctagtttggaagaatctaagg

SEQ ID NO: 201691 - DNA, 122 bp, Homo sapiens
acaaacagggcagaagcatgttgtggagggcagtaggggcaggtaggcaggcccctatgacgaggtggatgtatatttgaactgagacatgaaaagtaagaaagactcagctgtgaaaaaag

SEQ ID NO: 201692 - DNA, 122 bp, Homo sapiens
gctgagggcctttgatctgggacttgggcagctgattgatggagggcgtcctgcctgccccgcgcctcccatcgccgccagccgcacacgcagagggcccggggccacatgccgctgctggg

SEQ ID NO: 201693 - DNA, 122 bp, Homo sapiens
tcccttctcgactacttatggcactcagtgcagcctccgccttctccaggtgggtggggacgtggtgggaccggaatgcggggtgctgaagccgcgcccagggaagagcccccagcgcattc

SEQ ID NO: 201694 - DNA, 122 bp, Homo sapiens
ttgggccaaaagtaacaccaggtgtcttcacctgattcaggcgcccgcctgggtaggggacgctagcaccaccaggctaagccacgggtggtcctctcaggtcaggcccaagcccaggcaca

SEQ ID NO: 201695 - DNA, 122 bp, Homo sapiens
ccttccgcgagcactgggagcgctcgtgggtgagccagcactgcaagagcctggccatcccgtgcccggcgcactacacgccgcgcatgtcgcccgacttcacggtctacatgatcaaatac

SEQ ID NO: 201696 - DNA, 122 bp, Homo sapiens
ataacatgtttataaagtgctatgggaacactaaggaaaagcatgtgattattcatggagcggggctcatgggaacgtttcacaggaggagtgacacttaaagaaagatggtctgctaggga

SEQ ID NO: 201697 - DNA, 122 bp, Homo sapiens
cggaattgcaacgtgaaggtgtgaggcggctgacagcagccccctgagctcctatggggtcggcgcggggtccccacacacccactcagcacacgcgcacgcagcctttaaagcgcacgccc

SEQ ID NO: 201698 - DNA, 122 bp, Homo sapiens
acttgcacaaaaagccttaacaacttcacaatttgattaattatgccgccttggaccacgcgtgaaaaacagcaagacccaaggcctatgctattggtctggggactagacccacctggctc

SEQ ID NO: 201699 - DNA, 122 bp, Homo sapiens
cggtaattggaccatttgtccgccagtgcaaaccaaccgacctttccttactttcgggttcgacagaaaggcggcaataaaaagacccattggtcccgcctctctactgtcacgggttagta

SEQ ID NO: 201700 - DNA, 122 bp, Homo sapiens
gcgggcccgggaggccatgatccggataatcctgtctgcctgactgtcacaaacaggacccgcgcaccaccgggcagcggcggtgtggttcgcccgggaaggggaagggctgcggtggggag

SEQ ID NO: 201701 - DNA, 122 bp, Homo sapiens
tgtatgtgtatgtgtatgagtgtgggcatgtgtatgagtgtatgagtgtgtgtgagtgtacgtatatctaagcatgtgtatgtgtgtgagtaagtgtatgtatatgtgagcgtgtgtatgag

SEQ ID NO: 201702 - DNA, 122 bp, Homo sapiens
ggctacgtgtcccaaggacactgagtcacgaggtggaagagctccatggaacccgtttctcggagtgggtctggcacccctgttccccacagaggcttctcggggagcctagaacccatgga

SEQ ID NO: 201703 - DNA, 122 bp, Homo sapiens
tagacacggctacttcctggttcagagtctgctctcgtgccctgttcagagaggctcacccggaaggaggcagccccagtcagagaggctcacccggaaggaggcagccccagtcagagagg

SEQ ID NO: 201704 - DNA, 122 bp, Homo sapiens
gagcgcattgtcattcaggctaatgctgtttcccagtaaactctgagacagagttcactccgacttccctggcaagactgaaaatagaccccttagacttgtctgcaggagagagggagagg

SEQ ID NO: 201705 - DNA, 122 bp, Homo sapiens
gcgtgggccttacatttcaaggcgtctttgatgaatgacttgccctgagaacacacaggccggggaagggagagaggggcagaaagcagaagacctcgttacatgcttggacatttcagccc

SEQ ID NO: 201706 - DNA, 122 bp, Homo sapiens
ggaaattgctccaagcactaaggaaagcgggaccgtgcctgtgctgaccgtggccttgcgcgagcgcctcccggcggtgctctctggctctctccaaacaggacgcttccttctctgattct

SEQ ID NO: 201707 - DNA, 122 bp, Homo sapiens
cagatttgggcgggctaggagggtttgggtcttcaggtcacatctggacggagagacctccggggcctccgttggtcggtccttccgctccggataccgttccggatgtcaggtagttcagg

SEQ ID NO: 201708 - DNA, 122 bp, Homo sapiens
ctaccctaaagggactttccctccagaatttcctcttccccactcttggggactcctctccggacaccttcatgcaaagtactaatgataggagtgggacatctattccccagagctccatc

SEQ ID NO: 201709 - DNA, 122 bp, Homo sapiens
tgactttgcctgggcatgaagactgccactccccttggtcattaggtcagatggtataggcgctatatcttgccatccccaaacccccagggaccatgaagccaggaaagggatgcaatgtt

SEQ ID NO: 201710 - DNA, 122 bp, Homo sapiens
gtcgctcgccatctttgtgtcctccacctggcactttgctttcacacagtaggcacatagcgttgaggtcccggaaggttgtcaagtaaccggccaggagcttgagggcaggacattgtctc

SEQ ID NO: 201711 - DNA, 122 bp, Homo sapiens
agcaagttcttctttctcagcaagctgctttcacccacgtttgtggttgctgattttattcggttttgttttgtgtgatactgggacttagcatgacatctccgaatgtaagattgctctct

SEQ ID NO: 201712 - DNA, 122 bp, Homo sapiens
ctgggccagcaggtgctgtgctcgatttctcgccaggccttagctgcctccctggagcgccgccccctgctccagggcgccaggtcccatcgaccgccctagagctgagtagtgccggcgca

SEQ ID NO: 201713 - DNA, 122 bp, Homo sapiens
atgattagcagtttctcataaaactaaacatgctgctacttcatgacctagcaattccaccgctaggtatttaaagctttatgtgggcagagattttcatctgtttgtgagcaaacagtgca

SEQ ID NO: 201714 - DNA, 122 bp, Homo sapiens
gtgagccaccaagcctggcccactacaaagatttttaaacattactgcattatggccggtcgtggtggctgatgcctgtaatcccagcactttgggaggctgaggcgggcggatcacaaggt

SEQ ID NO: 201715 - DNA, 122 bp, Homo sapiens
gcgcggccccggcgctgcagggtcttcaacccctacacggagttcccggagttcagccgccgcctcatcaaggacctggagagcatgttcaaactgtgagctcccgctgcgcgcccttcgcc

SEQ ID NO: 201716 - DNA, 122 bp, Homo sapiens
caagaaacgcctgggcctctgtgtctaaattgtcatagaacataggacctgttggctgggcgcagtggctcacgcctgtaatcccaacactttgggaggctgaggcaggtggatcacgaagt

SEQ ID NO: 201717 - DNA, 122 bp, Homo sapiens
aaaaaaaaacagtcctcacctttttctataaagcacggtaaactgtgcagcagcatcagacgtccatgcaaatgactggcattctcttgaacaggaaatttgagtggcactctcagttctaa

SEQ ID NO: 201718 - DNA, 122 bp, Homo sapiens
ggcccaggcagccaaagaaactgctacaggtccggcttcgtagacgcgcccccgcgcctccgcttgcttcaaatttggctccgcagcacgacttcctggagcgggccggaagtgacaacaca

SEQ ID NO: 201719 - DNA, 122 bp, Homo sapiens
aattcaagttgtagaaaatcagactcagagttcttacactcgggggtgttttagcagctgcgcctcaagattctaaattcaaacgcacacggaataaaacatttcggtttatcgccaggcgc

SEQ ID NO: 201720 - DNA, 122 bp, Homo sapiens
gcagcttctgtcttgtttcttgggccgttgctggacattggtttagctggggcagcatttcgaggtcgacatttgtgttctggccatgctttaagggcgcgatactgctgtcctctggttcc

SEQ ID NO: 201721 - DNA, 122 bp, Homo sapiens
acccgcagtaagtgtgctttagaattaaatgggtgggaaggggagctaggcaaaacacctcgcacttagcactaaataaagttcgctgttgccctaagagactgaaaaggttactttaacaa

SEQ ID NO: 201722 - DNA, 122 bp, Homo sapiens
ttcatgcggcctatactgtctgaaaacattttctttatgttgcactcattctctttttaacggagtagctgtcctttcaaagttaactactcctccagtgcacaagtaatattttcccacaa

SEQ ID NO: 201723 - DNA, 122 bp, Homo sapiens
gttaccattttactcctatgaatttaatactaaagtgacccagtgaggtttttgaatagacgggtgctaaaatttacagggctgaaatagcttattattctgctggttaatgtatcttacgc

SEQ ID NO: 201724 - DNA, 122 bp, Homo sapiens
aggaggaggcggcagcggctgaggaaggtgaagaggagacggtggcgtcgggggaggagtcgctgggctttctgtccaggctgccccctggcccggccggcctggactgcagcgccctggat

SEQ ID NO: 201725 - DNA, 122 bp, Homo sapiens
tattccttccagggacagagcgaggtactggggacacaggaaggacgaggcagagctccgcgctgacgaaaccaagggccaagcgtgcgagtgaatacgaacatcctggcgttaaaacgtct

SEQ ID NO: 201726 - DNA, 122 bp, Homo sapiens
taactacatatgtacatacatgaaataagcttagtgctatccaatagggagcatcctcttcgtaaatacagaggtgtttggatcctgatggtgtttaccagtgtcctcactcaggagtcatg

SEQ ID NO: 201727 - DNA, 122 bp, Homo sapiens
aggtgaggagcgtctctacctggccgccaccctgtctgggaggtgaggagcgcctctgcccggccaccaccccgtctgggaactgaggagcgcctctgcccggccaccaccccgtctgggaa

SEQ ID NO: 201728 - DNA, 122 bp, Homo sapiens
cttcttattagagtcagccaatcaaagctcgagtgcggaggctggcccaaacacctgacccgaacgtcacgtggtaatagtttactccctccttccagttcctcctgcgcaacaaacaagat

SEQ ID NO: 201729 - DNA, 122 bp, Homo sapiens
ccgcgtgcgggacatcgcctcgctgcggcgctccctcaggatgggtttcatgacgatgcccgcctcccaggagcacaccccgcacccctgccgcagcgccatggccccacgctccctctcct

SEQ ID NO: 201730 - DNA, 122 bp, Homo sapiens
gagcggccgcacaactgggctgcacatctggttctctgtggcacagctggggagccaggacgccggaaggggcgcctggtccttgcgcctttgctcacaggccctcgcctgcttccttgtgc

SEQ ID NO: 201731 - DNA, 122 bp, Homo sapiens
ccgagatgactccagtgggggctggctgcctgtggggggcgggggcctcagccaggtgagcgtgtgtcgggtccgaggggccaggcccgaggggggggcccgccaggggcactacgtcatcc

SEQ ID NO: 201732 - DNA, 122 bp, Homo sapiens
ggtgggttctggggatcttgccaaggtgcaaggggaaggggtggtcctgaagggggtgggcgctggctgccaggagggtcccacccagagatactagcctgggtttggctgcttccctctgc

SEQ ID NO: 201733 - DNA, 122 bp, Homo sapiens
acactctgaagttggcttcaacatagagcaattcaggtccagtcattctttttcataattcgactcattatttggcattcaaatataattgcagtttattcaaaatatttcaaaagtaagtt

SEQ ID NO: 201734 - DNA, 122 bp, Homo sapiens
gggatcgcgagtttctgcccagcctctcgtcaggctgagggtccagggcgggaaggagagcggatctcgtcgggtctccaccgccgccgcctgcagccctcgggccttccccttaaaggggc

SEQ ID NO: 201735 - DNA, 122 bp, Homo sapiens
gtgcggggtgtgcagggtgtgcggggtgtgcggggtgtttgagggtccggatgtgcgtcccgaggtcggagggttggacgcccctgtgtccagttgttgggaggggtgggaggcctcgccct

SEQ ID NO: 201736 - DNA, 122 bp, Homo sapiens
atgatctggaaaggtacagctcccttccaccctttgaattttgagctgcggaatgcggcccgggctactaaggcagataaaagaatgagactcaaacaggcagaagccaagagagcagagaa

SEQ ID NO: 201737 - DNA, 122 bp, Homo sapiens
aaaacggattccctgtggctcagggaataaagtgggacacaagaaaaaagaaaaccgcaccgcacccagactctcggcgggacgccccgcccctcaacagtggccgcctcctcgcgcccctc

SEQ ID NO: 201738 - DNA, 122 bp, Homo sapiens
cgagactaatggttgaggtatttgtgagaagcatttgtatcatagtgacagactgcagggcgctctttcctgtgttacagattgctaggaaattggataggacctcctgagatattctatcc

SEQ ID NO: 201739 - DNA, 122 bp, Homo sapiens
gagataataggaacctggagaaaaagcagccacagggggtgttcggcttcaatccaggtccgttcaccccttacgttcaaaacagcaaatttcaggaatgccacagtccgttaagcatcaaa

SEQ ID NO: 201740 - DNA, 122 bp, Homo sapiens
tggggacctcaccagagaggactggtctcagcaatgtccttaagtggtcaaaacatgctgcggttgaggtcaggattgtgaggggatagaggtgacgtagagaagtaactgagtgcatttag

SEQ ID NO: 201741 - DNA, 122 bp, Homo sapiens
gaatacttaaagcccatgcaggtgcaggccttacctttcaccactataaatagagtagaacggtgggctctgcctctaggatctttcattctggcactgataactcttttccaggagttcct

SEQ ID NO: 201742 - DNA, 122 bp, Homo sapiens
gctcagagtcgaaccgcatttggtcttatacatttccccacactcggccagggcctgcctcggaacagcccctcggcccccaatcctgaatgtcagctccctgttcctgctccccaaaggac

SEQ ID NO: 201743 - DNA, 122 bp, Homo sapiens
ccctccgcctgcccgcgccacgccccttcccccgccctgccacgccccctccgcggcccgcgccacgccccttcggctgccctcgccacgcccctccgcccgccctcgccacgccccctccg

SEQ ID NO: 201744 - DNA, 122 bp, Homo sapiens
cgctcattaggtcaattagtagccgcgtggattagtggaacaggtgacagcagagagagacgatttctgtgaagaacacagtctgtggggaatgagctggttagtgactgtcaaagacatta

SEQ ID NO: 201745 - DNA, 122 bp, Homo sapiens
acaaagacgcggggacagcggggagggccggccgcagcctgccgggctgcccccacggcgcggaacgcgcgcagcaacctccaccaggcctccgcgtctggactcccgccctgcctctgggc

SEQ ID NO: 201746 - DNA, 122 bp, Homo sapiens
atgccccctccatacaaggcacatttgctagataaaagcattaaactggaatggcatctccgttcttagcatttacaacctcggttacatcaaccaccccctgatcaatgtccatttctaga

SEQ ID NO: 201747 - DNA, 122 bp, Homo sapiens
tttgggccgaagtgtccgcacaccctggagcaagagacacttgtgcactgaaattctaaccgtgggatgcaaggagagttgaacaggggaacaggtctggctcttggctctaggtttaagag

SEQ ID NO: 201748 - DNA, 122 bp, Homo sapiens
tcgtcgtcgtggcccgggcttcacgtctctgcggcctggaacagaagtgagcgggagggccgtggtcagcttctaggcgcgtctgggcacctgcccagaaacctgcccccagggaagcgcta

SEQ ID NO: 201749 - DNA, 122 bp, Homo sapiens
tgtgaaggtgtgtgtatgtgtgtatgtccgtgtgtgcatgtttgtggaggtgtatgtgtgcgtgtgcatttgtgaaggtgtgtgtgcatgcatgtgtgcacgtttgtggaggtgtatgtgtg

SEQ ID NO: 201750 - DNA, 122 bp, Homo sapiens
caagggatagcaggtcctggacacaaaattcagtgattgacagcgacaaaaaataaagctcggtgattgacagccataagagacatggttttgggggtggcaactactgaaaaaaaagcctt

SEQ ID NO: 201751 - DNA, 122 bp, Homo sapiens
gctccttcgggggtgtggccgaagagctccgagggcggggctgaccgagccatattcgggcgtggccggtggtgattggtgagggcggggcctgccgcagggggcggggcctgcaggtttgg

SEQ ID NO: 201752 - DNA, 122 bp, Homo sapiens
caccggcccctcctccacatctggaaggcccagcttgaaagtcagcactttggtcatcaccgcaggacctctgctcccggcactccagccacccccactgacccctccaagtgagggcctcc

SEQ ID NO: 201753 - DNA, 122 bp, Homo sapiens
gacagataaaaatgagcagcatcatattgtttgacagaatgatctcgcatgatgaagtgtcggctccgaagggggtgaaaatggtgaattcctaaaaacccagccctgggctcctcctcgag

SEQ ID NO: 201754 - DNA, 122 bp, Homo sapiens
cctgggatatgcatctgcgttcgaggcaggcagtgggggttaggctgctgaagaccctgacggacagggtacaaggcatcaaagccctcaagcagctagagaagaggggggctcgagggctt

SEQ ID NO: 201755 - DNA, 122 bp, Homo sapiens
agcctctccgtcaggcctcgaaggttcgtcaccaactcgtgcagcagatagacggcagtccgggctgtggcaggtgacagcccagggcccagacaccggccagcctcatagtgctcgccgca

SEQ ID NO: 201756 - DNA, 122 bp, Homo sapiens
cagatcaggaaggtcaagtccggtacgattcttccgcttgcagcttcgtgttgctcggtgcgcagggcaacgtcagagcacctctgactccagggaggtggaagcggcttccggggtgaatg

SEQ ID NO: 201757 - DNA, 122 bp, Homo sapiens
tgagtcacaccgaaaagtttaccgaacactctgggcctccctttctcacttgggcaaaggcggctgccttctcaccacgagaggccggaagggtcactttcttctgctgcatctgtgctggc

SEQ ID NO: 201758 - DNA, 122 bp, Homo sapiens
gccgggccgccgccgctcggagccgggtttctggccgctgcgagcctttgcaaacctcggcgcccgccttgcccgcctaccccacctcgcagacccgaaatgcggaaccaacaaaatctcgc

SEQ ID NO: 201759 - DNA, 122 bp, Homo sapiens
gggttgcagggaaggggacgggatgcggagtgtttgccccacgagagcggacccggcagccgcggccaccgggtgacagaacagcagtggctgggcttcccctctccctcgccctcactaat

SEQ ID NO: 201760 - DNA, 122 bp, Homo sapiens
cggctggtggagtcatccagacggtggccagccagatggcccccggggtccccggacacacggtcaccatcctgcagcccgccacacccgtgaccctcgggcagcaccaccttccagtccgg

SEQ ID NO: 201761 - DNA, 122 bp, Homo sapiens
ggagggttggaggaagagtgggccaagttacatccctcaaatgaaagaaagaaaggcaagcgtggggaggaagccaccccggactgagaaggcagttactgcccctacctctaccccggagc

SEQ ID NO: 201762 - DNA, 122 bp, Homo sapiens
acccctcctctccctccgcgagaaacccgaggatccgcggacgatacccacctcagcaggcgagagaggtggtgcccagtacctacccggtcatcctcaaaaatgattttggctggtatttc

SEQ ID NO: 201763 - DNA, 122 bp, Homo sapiens
gaccgagtggtgacccccccctccacacacacacacacacaccccgccccgcccctcgatcggaaccggcagctgcagcccggagccaaacttgaggcttggcttttcgcaccgagccaaag

SEQ ID NO: 201764 - DNA, 122 bp, Homo sapiens
gacccgataagaaaaaagccccgccctgccatcttcccaagcgggtcccttggaggggtccgcagaggtggtgcccccctaattcccaggggcaagtttctcgccttactgtcccccgccgt

SEQ ID NO: 201765 - DNA, 122 bp, Homo sapiens
atggtcacttgggagaggcggctcccaagcggacacccaggagtcggccaacccctttaacgcccgcatcccctgctctccacgacctcaaagggcctgtaagtggtcgacaaaaaggggcg

SEQ ID NO: 201766 - DNA, 122 bp, Homo sapiens
ccccaggccggcctgcgggcctccgtggagcccggtccactggctctgcgcctgaaaggacggaaatccggatcccccgggacctcacccagtctcagggacacaccttcccgccttccgcc

SEQ ID NO: 201767 - DNA, 122 bp, Homo sapiens
cgtaatccacccgcctcagcctcccaaagtgctgggattacaggtgtgagccaccgcgcccggaccaaatgatctttaggagaaaaaagaaggaaatactgggggaggcacagtaggagatc

SEQ ID NO: 201768 - DNA, 122 bp, Homo sapiens
caccctttccccaccaaaaggtgacatctaattttaaaaaaatggcatcttcctggccctcggaaaaacttgtcatctggtctttcttgccttaattcagcttctgtattattcttcgctgt

SEQ ID NO: 201769 - DNA, 122 bp, Homo sapiens
ttgaggatgaaaggtcggaaaatagattgacggtgcccatatgtaaggaaataatgagttcgttttgtgtaatagatgactccagcccaggaagagctattgggaaactcagatctgacact

SEQ ID NO: 201770 - DNA, 122 bp, Homo sapiens
ttggttaagatatggctgagggaggcatagggattttttttcaatggtagtcaccacagacggttgagggtaaattggcgttgttctcaataagggttattgtgaccatggtccaaagtctg

SEQ ID NO: 201771 - DNA, 122 bp, Homo sapiens
ctttaactggcacctcctttctctatctaacccactccctccagcctctggtactctctacgtgtatgagttcaacttttttagattccatatatcatgtggtgtttgcctttgtatgcctg

SEQ ID NO: 201772 - DNA, 122 bp, Homo sapiens
tcgttggatttaattcattttaagcaccactatttgaagctcattgagataagcacaccacgtgtgatgtaaataaggcttggaccctgccttctagacacaggaatgaataatgctaatat

SEQ ID NO: 201773 - DNA, 122 bp, Homo sapiens
ttcatggtacatagtcagggccactaaggatcatcccataccacagccctcatagccatccgtgaccaccatgacaagtcaggtgcagcaaggacttgagctccctggtgcttgtttcagtt

SEQ ID NO: 201774 - DNA, 122 bp, Homo sapiens
gggtagggaaggatatccttgtctcttttgcttattgttgtatatgcagtgcctggcacacggtaagagcccaataatggagtaagttcaagttttgcagctcaagattgatttgcagctga

SEQ ID NO: 201775 - DNA, 122 bp, Homo sapiens
agtcccacagcagcgccagggcctggcccatcgaggactcggtggcctcggccaggtattcgcaacacagccagtcctcgaggctgggagcttccccacctgcggcccgctctgctaggcgc

SEQ ID NO: 201776 - DNA, 122 bp, Homo sapiens
gcctcattttctagcgcgatcccagcagatggtctgatgtatctcatcagatgctgagcgcgggcctcactggcccagccctcctttccacaagtctggtggtctccttttttatgactcca

SEQ ID NO: 201777 - DNA, 122 bp, Homo sapiens
tctccttatttcaaagaattctattcaccctaagaaaccttgctcagattccttcttgttcgtaggtgttttagctcatgcccatctctcttgttctaacatcattgcacttattaactgaa

SEQ ID NO: 201778 - DNA, 122 bp, Homo sapiens
ctgtgagtacagacgcccaagtggacgcgtgttacaaaactcagatttgctgtctgcagacggcttgtgtgttaatccgctcaatggaccctctgccttatctcaagagcctggggccagtg

SEQ ID NO: 201779 - DNA, 122 bp, Homo sapiens
tagcctattgctcctaggctacaaatctgtacaacatataactgcacctaacactgtgggcgactgtaacacagaagtaagtatttgtgtatctaaacatagaaaaggtacagtaaaaatat

SEQ ID NO: 201780 - DNA, 122 bp, Homo sapiens
aaggagcagccacctgagatcagtgatggctcttcgtccgtcaagcagagcgagctgggacgaaacgcgttcctcacacaccctcacacagaggcatcagccgggacaatgacttgtgtggg

SEQ ID NO: 201781 - DNA, 122 bp, Homo sapiens
tttcttatatccaaatacaatagacgtggaattctaaagccccaattaagtggaaaaggtcgcttgagaggtaacaataggccagaaccaagcaacaacaaaaaagctacttagtttggcaa

SEQ ID NO: 201782 - DNA, 122 bp, Homo sapiens
gctcacaggcttggagggttttaagtgacttacccggcggcggagtactgatcttagtaccgcccgccgccccggactgccccgcccctccctagcccccccatccccgcccctccctagcc

SEQ ID NO: 201783 - DNA, 122 bp, Homo sapiens
tataagtatgtcccatgcaatatctggaacgtacttgtactaaggggtttctccctccatcggcacatcccaggcatcctggcagctgctggcctccagcaaccccacattctagttgtgtg

SEQ ID NO: 201784 - DNA, 122 bp, Homo sapiens
ggcaggttcggcagcctaacattgttcaggcgcatggcccctgcggtgtgtacacgaactcggcttcttttgtcctaggtacgccaagggcaggtttctggagactcccttgtgcccgggat

SEQ ID NO: 201785 - DNA, 122 bp, Homo sapiens
ggggagggaaaaaagggattcttaaaaggcacccttccagaggtgtcccagaaactgggacggtaatgatagcctatgtccagttctgggcacgcgtttgtggatcagaatatctcccttcc

SEQ ID NO: 201786 - DNA, 122 bp, Homo sapiens
taccttccgtacgtgcaggattcaaagatggctgcctccagtatccgtgacgagaggacgcgaacttactacctcccagtcgtccgtgctccgtacacctgcaacttcagaccttcctcggc

SEQ ID NO: 201787 - DNA, 122 bp, Homo sapiens
ggtgtaccctcctagtgtactgggaccaaaattcggaagtgtctgcaaacttgctttaaccgtatgggaaataacctctatcacctggaatttccttgggactttggaaaatacaagagaag

SEQ ID NO: 201788 - DNA, 122 bp, Homo sapiens
atctttcattctgattcaccaaaaatttcctacatggcctagaagcgttactggtgtgagcgaggaagagctgacaggaagatggcgtggagtgagcaggagacgcgaccccactcccaaca

SEQ ID NO: 201789 - DNA, 122 bp, Homo sapiens
ggcacttcccacccttaaccgaaaacggagacagagagggtcagttttcaaaatctgtggcgtgaccccgccactgagatagatctgcagatgcttcgtcccagtcagggaggccgtctcgg

SEQ ID NO: 201790 - DNA, 122 bp, Homo sapiens
ttcctcatggcctcatccggccccaccaagttccttgtggtcccctaaacctcctcaggccggcagcgccatctcctgggtgggtttacctccctggctcctcctggaaaatcgctactcac

SEQ ID NO: 201791 - DNA, 122 bp, Homo sapiens
ttgctgccacattatgtcacaaatccagtcacttttcattgctgtcagtctagtgtctcacgtcatcatcctttctcccctagatgactgtagtaacttctcaacttttccctctctatggt

SEQ ID NO: 201792 - DNA, 122 bp, Homo sapiens
ctgtcttggcagccacactcttcttttgtctccacagttctgtgagattgcctgatgctccgctgctatccttacatgcggtcttctctttggcttcctcaggaaacagcaatgcctggaat

SEQ ID NO: 201793 - DNA, 122 bp, Homo sapiens
ccacggaccgtcacttccggtctcccccaaacctgccaccgacggccacttccgtttccccgatagtatttggggatctcgaagcgatacttccggctccccccaggtccccaagctttact

SEQ ID NO: 201794 - DNA, 122 bp, Homo sapiens
gacgcaccgtgatgctcaagggcttctggctggggtgtgtgttgatgctgagtttggccacgccatctccctgggttagagactgcacagtgtcctcgccctggactgccacggggactcgg

SEQ ID NO: 201795 - DNA, 122 bp, Homo sapiens
ggggcgctggggagaaggatggggcagctacgaggggactcaccttcgtgctgccagtcgcgacgggggcaggcccgggaggggcgagggcgcggcccgctcacccgcccgctgcgggactg

SEQ ID NO: 201796 - DNA, 122 bp, Homo sapiens
atcaatatgacagcccaaatttcatctaccaacctccacttctatcccaagctctactctcgtgggacaagacacactcaatgtctggcacagggcgtggcatacatgaatgtttcacacac

SEQ ID NO: 201797 - DNA, 122 bp, Homo sapiens
gcacacggtcagagtcccgtaagtgttggttatcttccccaagcgcaccgggtgaacctgcgctgtcgtggcgaagcatactcattcagcacgcgcgcgaggggctgcgggggtacagagac

SEQ ID NO: 201798 - DNA, 122 bp, Homo sapiens
aaaacaaaacaaacaacaacaacaacaaaaacaacccagaaagtatcttctagagccagccgcaagagctgtgagctgcttccaagttaggcgagctggtggtggtaccctggacataatgc

SEQ ID NO: 201799 - DNA, 122 bp, Homo sapiens
tcgccacgctgtgcctggcccccgcagaccctctccctggcctcagggctactacgtctgcgggcacagctcgtcgccgtctctccctaacagcccctccaggaagttctctcacactagcc

SEQ ID NO: 201800 - DNA, 122 bp, Homo sapiens
ctcaccccaccagtgacttacgtgcctgtagaatctactgccacagcccggaccccaccacgatgacagagaatctttgccagtggctccttcatagctggactccataaagacacagtacc

SEQ ID NO: 201801 - DNA, 122 bp, Homo sapiens
ttatccgctgtgttattagtcccatactgccaccattggtgttggtgctaaagcgccggccgtcgggagctcctgcaaaccagctcctaggtttttctggcaagcctccaatccagtctttt

SEQ ID NO: 201802 - DNA, 122 bp, Homo sapiens
aagttgctggagtgaataactaagctggaccagctgactccgggctccaatcagctagagcgtgatgtaagtgtttagcagctgccgggctctgaattagcgtgctgaagtagaggtagtac

SEQ ID NO: 201803 - DNA, 122 bp, Homo sapiens
cccggggctcgctggccacactgcccgcttggggaattaccctgctcgaggaggaggcggcggctttccaggccagtcagtgtgtggcccttaggcaacaggtgtattattgggatacctgg

SEQ ID NO: 201804 - DNA, 122 bp, Homo sapiens
tgacctcgtgatccgcccgcctcggcctcccaaagcgctgggattacagacgtgagccaccgtgcccggcccagtagtcgatattttttaaaattggtgagatttactacaaaactgtcttt

SEQ ID NO: 201805 - DNA, 122 bp, Homo sapiens
cttggtcactgcggcgcagacgcaggcctcacaccggccaggcctgttacacgctttgcacgctttacacttcccaccgtaccttcaggaggtgggccttgctcttatcatgcccattttgc

SEQ ID NO: 201806 - DNA, 122 bp, Homo sapiens
gctccccggcctctccccacccttaagccccgcccccactgccaaagccccatttccccgcgccagagcccgggagcgccccgccacccgagttctggagaactcctcatctccacagcccc

SEQ ID NO: 201807 - DNA, 122 bp, Homo sapiens
ggctcataggaaatagagtccgttacttgtcctgggaacggcggtgggtgtcccaggaggcggacttccggtgcactcctgcgcgtgtgcacctctccctgcgtgcgtgttcgcgcgtgcgt

SEQ ID NO: 201808 - DNA, 122 bp, Homo sapiens
ctgtagtcgcctgctttgttgctctcgggtgggttcacaggtttgccctccactcggggccgaacgacctgccgaaaaggactggacaggggaaagccactcacactgattccatctacaaa

SEQ ID NO: 201809 - DNA, 122 bp, Homo sapiens
atgaagtgttctggcccccatgccggatgcactaaatcagcatctttttctcttttaacgcgttccaggcactgggatacaagttgaagtttgatagccaaagccctagagtctccattgct

SEQ ID NO: 201810 - DNA, 122 bp, Homo sapiens
atcgagttagcttcggccgcctcctccttgctgtttctgcggaaggaagcgctgcggcggcggcagcccttggtgccagcatgtatccctccctgaccttagctgagattcgctgccgcggt

SEQ ID NO: 201811 - DNA, 122 bp, Homo sapiens
aacgggaaatttcaagtccaccactttcatcaatttcccttgttcttcccgttctcagtccgcactcccaaggcacgggcagcttcgccgggaagcggcttgagggagttggcctgcctcgt

SEQ ID NO: 201812 - DNA, 122 bp, Homo sapiens
ttggccagtgtggagaggaaaggagccacaggagcgggtgctacacccggcaagacagagcgtctccatctaaaattcctagggcaagcttccaacccggcccaagggccgcatgtggccca

SEQ ID NO: 201813 - DNA, 122 bp, Homo sapiens
cttttggtgtttgttctccgaaaggcgggaaaagcgaactacacctcccgactggccgcgcgcggctgcgcctgcgccctgttacctgtcgccatcttgccccttcagaggcaccgcaaaca

SEQ ID NO: 201814 - DNA, 122 bp, Homo sapiens
cgggagagctgagagcatggccaggtgccgcgtggggatctgcctcagtcacttaaagatcgcgaaacccgagccctggacgcactctgattggaccggctgagctgcttcgccacgtagcc

SEQ ID NO: 201815 - DNA, 122 bp, Homo sapiens
acagtttctagggcattgtgagcgctcagtacgtgtctgcggaatgaatgttagggactgcgtgccaaagttctcgaaggagccctctcgtttggagaggctggctgaaggcgaaggggtga

SEQ ID NO: 201816 - DNA, 122 bp, Homo sapiens
ccccggccccatggatgcatagggcggtccacacctgtatctaccagcgctcacctccagcgttaaacccaggtgcgcggcggccgggataaagtggggcacgcgaggaactgactttctat

SEQ ID NO: 201817 - DNA, 122 bp, Homo sapiens
gtctgatcatcacaacacatccctaccgcagattcatgaatattttaaaacttttttgaacgaggcttttggcgtgctctgtttattcatacatgctggctagtgataaataagaaacatca

SEQ ID NO: 201818 - DNA, 122 bp, Homo sapiens
gttcaaaaccagcaccagggccagtccaagttctccagtcacatactcataaagtgctggcgggaaattcacaacctaggacagagttgataagaggatggagcagtgaaagtcaacccaga

SEQ ID NO: 201819 - DNA, 122 bp, Homo sapiens
caaccagggcaggcgccatgagtagacgtgaacgagcccagggccagcccaggctctgaccgtgggtgtgcgtcggggagggggtggggaggagtgggtaggagtcaggaaagtgggtcggc

SEQ ID NO: 201820 - DNA, 122 bp, Homo sapiens
tggctgcagctctgaggaaagtactagggagatgtggttcctcccagagcatcagggtggcgactgtgatcaggaagggctagcagggactcccacagcatcagagtggtgactgtgatcgg

SEQ ID NO: 201821 - DNA, 122 bp, Homo sapiens
tccttggcctgcaggtggtgctgcagctccagcgccaacctgggctggctggtcctccctcggaggtttcggggtggcggcgcctagcctgcctgtcatgagtgctgtttcacagactctat

SEQ ID NO: 201822 - DNA, 122 bp, Homo sapiens
taggggaccagcaatctggggcatgtaacagatcccctccagggtgaaggacaagtgctgcgtgggccctccaccccctactctccaacctccttcacctgctgtattttttcccatcgcat

SEQ ID NO: 201823 - DNA, 122 bp, Homo sapiens
agatggcagcagtaccgtccagctttggctccgcatcagagggagaccgtggaaggagaccgtggagagggagagggagagggagagggagagggagaggggtttttgttttatttttaaag

SEQ ID NO: 201824 - DNA, 122 bp, Homo sapiens
ggcggggcgtcctgggtagggctgcaggtgacgtcactccgggccttgggactcggagagcgtctggaggcggggcctggacttcacgcccggcgcgctcctcccctttaaggcgcgcggcc

SEQ ID NO: 201825 - DNA, 122 bp, Homo sapiens
acaggagagaggtgggaaaggaagacctagactgaaaatggaagttgggcagcagctccacgaaagaaagaccagcccccaagtgcagtgacagcgcagagtagcgaccgagaagttcccag

SEQ ID NO: 201826 - DNA, 122 bp, Homo sapiens
tttcctgcttgctctcctttcctgcctgcgtgcttcactgacttactcaccatattccatcgctcctctctcaacagagagtctgtcttcctacagtgtgggtgcctgccagcaataatgga

SEQ ID NO: 201827 - DNA, 122 bp, Homo sapiens
atgtttatgagccttgacatttttcagctgcgggccctgccctagatggccatcggtgtgcggccgtcggagggcacagttgatttcatggaaaggtttcgccaaggctctgttcccgtttc

SEQ ID NO: 201828 - DNA, 122 bp, Homo sapiens
ccgcaccttgcagccacggaaagatccgcctggcccgcggcccctccacgcctccgaggtcgagacagtgacataagtcaactctcaagcccagggcgtctctccactctgcctagacgtcc

SEQ ID NO: 201829 - DNA, 122 bp, Homo sapiens
gactgcctttctgttttaactacaaatgttggattctgctaagcttcatttataaggcaacgtaacagccttggtattcttttggtttttttttttttgagacggagtcttgctctgtcgcc

SEQ ID NO: 201830 - DNA, 122 bp, Homo sapiens
cacggacattttactctcacctctggcgggaggggcgcggaaggtgagccggtcgggagccgctgtcatggccgcgaccacccgcgggacctctcggcggcgctctcgcggctccgcctctc

SEQ ID NO: 201831 - DNA, 122 bp, Homo sapiens
gctccttcactcataacatttcttaggccccaggcttactactatattgcccagtaccctcgccctattggtgtgactttgggtgagagctttaacctctatttcttttattctgcaatttg

SEQ ID NO: 201832 - DNA, 122 bp, Homo sapiens
agccagttaaacccctgaaatattttgatttatagaggacttgcttgaaaatggatccagcgccttaatatctattttttttaaggctgaacttttggctgaatcattttccctaaatttgt

SEQ ID NO: 201833 - DNA, 122 bp, Homo sapiens
agtactcacatcagacacatcggtactgagctgcatcggaatcttgtccatgcactgttgcgaatgctgcagggctgactgtgcagctctctgcgggaacctggtatgggccatgagaatgt

SEQ ID NO: 201834 - DNA, 122 bp, Homo sapiens
taggtggagagtcatggtccagtcaggcggccccgacttcaggtcagagggcacggaggacgtccgggcagaggacttggaggacgtcagggcagaggacttggaggacgtcagggcagaga

SEQ ID NO: 201835 - DNA, 122 bp, Homo sapiens
atcttctgaaatgatgctgactatcctaggtcactaggaaaattcatactaaactttcaacgctcagcctaggcaacatggcgaaaccctgtctctactaaaaatacaaaaattagcctggt

SEQ ID NO: 201836 - DNA, 122 bp, Homo sapiens
acttactatacaaatgttctgaaaaaaggaacattttcaaagaaattttaaaacaaaaaacgatttagactgggtacaattactgggtgaggtggttcaggggagtgatatttaaactgagg

SEQ ID NO: 201837 - DNA, 122 bp, Homo sapiens
gcccctgtccggcctggaggggtcaccctcaggaggcaggggctcccgtgggggagttggcgcgctcagcccaggtgcagccgctcgggcgcaggggcgaggagtcgggcgctcgagggctg

SEQ ID NO: 201838 - DNA, 122 bp, Homo sapiens
gactgcattagataactgtattaaataaatggcaaataccattaaataaatctggccgggcgcggtggctcacccctgtaatcccagcactttgggaggctgaggcaggcggatcacctgag

SEQ ID NO: 201839 - DNA, 122 bp, Homo sapiens
caccctgacttgcatggaacagtcgacataatgtggcctactgcttccacctgagcgccccgccaggctgtaattccgcgggcccacgtgacctccggggccgcgccttccggacgcaactc

SEQ ID NO: 201840 - DNA, 122 bp, Homo sapiens
ccctctgcgggactgccagtccttctctctccgcctggaaccagaggcgcctgcctgccgcgtcatgcagcgcctgacatgctcgtgacaaaggctgacattcccttgacaaaggctggcat

SEQ ID NO: 201841 - DNA, 122 bp, Homo sapiens
caggggacggtgcaggtctgaatatcttacccacagctcacctttttggtgcctttgatccgtgttaggaattatccacatcttctctctgggcagtattctactttctttttctattgacc

SEQ ID NO: 201842 - DNA, 122 bp, Homo sapiens
ccagcagccttcttgtccactgctttgatgacacccaccgcaactgtgtgtctcatatcacgaacagcaaagcgacccaaaggtggatagtctgagaagctctcagcacacatgggcttgcc

SEQ ID NO: 201843 - DNA, 122 bp, Homo sapiens
aagcttgaggaaggcggccaagtgtacacccccaccccacagaggtggtggtgaataagtcgctcgggcagagggagctggatgagctgaagcgctactgccttggcttctgcctgctgtgg

SEQ ID NO: 201844 - DNA, 122 bp, Homo sapiens
atgtcatctgttatgtttagatggttgttttgcatgaggactgaaaaactcactcacatccgtctcaagggctcaaggacgtctgtgaaggagggataaagaaggttgcacaccctccttca

SEQ ID NO: 201845 - DNA, 122 bp, Homo sapiens
gaagacgacttcgggttccttatctttgctgtcagccacgaaccgatggtgctgcgggagcgcgcgagagggagtcaatggcatgcacgctccagggcccgccccgccctgctcccttaggc

SEQ ID NO: 201846 - DNA, 122 bp, Homo sapiens
ttgtttttttaaaaccaaatttagcagtggggggttgtataccaactttagtgaccctaacgttgataagttctgataacccactactatcggaccagccacccttactgatctttgtccct

SEQ ID NO: 201847 - DNA, 122 bp, Homo sapiens
gctctgccgccgagcgcagcagaaatacggtgtgcaggcaggacccgaaacaggagagaccggggggaccggggaggagaggaaggctggctgtggcaggaacccgggcgctcggcacctcc

SEQ ID NO: 201848 - DNA, 122 bp, Homo sapiens
aagtttccaggccaacgtgaagttttcctgtcttgggtacatgcgagccccacgcgtctgcgagtttgggttagtgtgtcaacagggtcagtccccgtatctactttgcgaaagcttcgagg

SEQ ID NO: 201849 - DNA, 122 bp, Homo sapiens
tcgctgcggagcagggggcagtgcccttcaggagcgggggtggtgccggctcgggcatggcgggctgcaagttccgagccctgccccgtggggaagcggctcaggcccggcgagaattcgag

SEQ ID NO: 201850 - DNA, 122 bp, Homo sapiens
gcgtgcacaccaaaccctccagaacagcaccccggtcccccaccccgccccacctgtccccgccctgcttcagtgcctggagggagaactgactggtcgcttgagggaccccatttcgggcg

SEQ ID NO: 201851 - DNA, 122 bp, Homo sapiens
aagcccagtttcttcctttttacaataataagctggatccaaaaattgtgatttatcttacgtgccccacgtggctagtgacacgatctaggcctaaaattcagagctcttgagctagcact

SEQ ID NO: 201852 - DNA, 122 bp, Homo sapiens
gtgcgcatgcgcagaggaggggctcaccaacaacgatatgcagcgccgaggtttctgcgtcgctggtgcccacggtggagtaacacacgcagtccgttgaccctgtaaagggaaaaagaagg

SEQ ID NO: 201853 - DNA, 122 bp, Homo sapiens
gggggcggggcggcgtgtgttgggggatagcctcggtgtcagccatctttcaattgtgttcgcagccgccgccgcgccgccgtcgctctccaacgccagcgccgcctctcgctcgccgagct

SEQ ID NO: 201854 - DNA, 122 bp, Homo sapiens
cccggcctccgcgcggggccgaggcgcctgggtgggaccgaggaggcggggccttcccggcggacggatgatggacagcctgactctccaatcgcgtccttaaaagggtgcgggcaggccaa

SEQ ID NO: 201855 - DNA, 122 bp, Homo sapiens
tctatacctaactttatccgtaccagatacctagcctcactcagggccccccttacctggcggtgccgggatcaacaaatgaaattgtgacgggaagtcctggcccttggcccaacctcctg

SEQ ID NO: 201856 - DNA, 122 bp, Homo sapiens
ccgccggaggaaacgctgtcactgtggaaacggtaatgctgtcaggcgacgcgcaggaggcgggggccgaggccgggcggcccttcgcggaccctccgagctcatagtcttcaggctgtgga

SEQ ID NO: 201857 - DNA, 122 bp, Homo sapiens
ctgccagccatgagcaacaaatccgagtgacatgtcttcttcatggtcctgacacggacgcgtgggttcgatctgacagcagcctgtgccatcatagctactgctcatgcatgcattcgggg

SEQ ID NO: 201858 - DNA, 122 bp, Homo sapiens
aaggagccctcctatctatcctgggctggttaggatgacgtgccatcattcagggcggtgcgctttgctgtcccatttagcaaggattcctattcatattcattgtggggccgccctgggac

SEQ ID NO: 201859 - DNA, 122 bp, Homo sapiens
cggcgccccggaagaggcgggcggcatggccgctggcgtggactgcggggacggggttggcgcccggcagcacgtgttcctggtttcaggtaaacacgcgcgcccgggcggcggggtcggcc

SEQ ID NO: 201860 - DNA, 122 bp, Homo sapiens
gcgatctggcccacctccttctccaccccgccccctgactctgtcacacccgctcctctgcgctgtgtgttttccctgccaaagggcctttgcacttgctgtccccaccaccgtgagcatgt

SEQ ID NO: 201861 - DNA, 122 bp, Homo sapiens
cggctgctgcgggggctgctgctgagggggtggcggggcctgctggggaggctgcattaacgggtgcctggagcccactgagggctccagacccacaggcatctttctggccccactgaacc

SEQ ID NO: 201862 - DNA, 122 bp, Homo sapiens
tcctcagaaccccctccaagcctctgcatgtgccacgtcccccactggggctcactcacccgagacttttaaactgagactccctcaaaagctactaagacgatcaccagccgggcgcagtg

SEQ ID NO: 201863 - DNA, 122 bp, Homo sapiens
tggggctgatgccattttaggcctcagcccacctgcacccaggcactcattaaaacagcacgctgctccgcactgcctcgtgttgtctgttggcatgctctcagggatcaaaccaattcaag

SEQ ID NO: 201864 - DNA, 122 bp, Homo sapiens
aataaaagatgcctacgttgtcattttcagatctatataaccctatggtaattgtccctacgtgaaaaaatgtttcttctaagccctccccaagaagttcatgagaatgaactcaacatgta

SEQ ID NO: 201865 - DNA, 122 bp, Homo sapiens
ggactgcactgacgagcctgcagcccaggtcactaacagagctgactcagtgctgggcagcgtgctgtgtttcacagacaccatccatgtgatcctcaccacaaccctgcagacacagcacc

SEQ ID NO: 201866 - DNA, 122 bp, Homo sapiens
accgtggacctgccacccgcctcctccgaggctcggaactcggccttcggtttccagggccgcttgctgcacctgagtgccggccagcgcctgggcgtccatcttcacactgaggccagggc

SEQ ID NO: 201867 - DNA, 122 bp, Homo sapiens
accatagaagggaggtagcgggtgtgtgtgtgtgtgtgtgtgtgtgtgtgtgtgtgtgcgcgcatgtccttccaataagcaaccaggccactgctccagaggttctgaccactcctaaccca

SEQ ID NO: 201868 - DNA, 122 bp, Homo sapiens
ctggggaggctgaggcaggacgatcgctgtagcccaggagttcaaggctgcagggtgctacgatcatgccactggactctagcctgggtgacagagggagactatctcaagaaaacaaaaca

SEQ ID NO: 201869 - DNA, 122 bp, Homo sapiens
cggcctcggggtcggagccggaacggagcctgcagctccgccgttttccaccagggcgcgcgcctgcaccacttcccggagcagagcggccttgcgagtcccacctggctccctgtcctacc

SEQ ID NO: 201870 - DNA, 122 bp, Homo sapiens
agttggctatggagggaggtcaagtagcccagggaggtgggcattccaagtgtacctcctcgtgcagcccaccctctccacataaaattgggtcctgattttatgtggaagatgttgtgtgt

SEQ ID NO: 201871 - DNA, 122 bp, Homo sapiens
ctgcctccagcctgttctggagacctccaagcaggagctggaggaggatccgcccagcaccgcagcccgcgccgcctcctcctgggagccccaaagacactctctgctcctctcatcccaca

SEQ ID NO: 201872 - DNA, 122 bp, Homo sapiens
cttgtcatgcagcccacggcgtggcggctgcgggccggggactggcggcggcgggcgaggcggcgcccacagcactcgggactcagctgccggagggacaaactaacttcctgagcgcggga

SEQ ID NO: 201873 - DNA, 122 bp, Homo sapiens
aaagcagccagaaaaatccgacttttatttcttaaatactgtgaaggaagaggggggaaacggtcccctgatgaggaagggccatagagcaaagagctaaggatcatcagcaaaggcccgct

SEQ ID NO: 201874 - DNA, 122 bp, Homo sapiens
tgacggcctggagaaaaagagggtcactgtatgtagggaaggcatgaaggatctctgtaacggaaaggattcagagatcaaaccacaacaaggaccctgatgctaatacccactcatgagct

SEQ ID NO: 201875 - DNA, 122 bp, Homo sapiens
acaccactgagtgaaagccgcgtggtctatcggaggtctctgttctagttgtccgtgggacgtaggcagggtgtccacatcagtgtcccagcggcggccctcagacctccactggaccctgt

SEQ ID NO: 201876 - DNA, 122 bp, Homo sapiens
ctcagcttataagaccttcacactgggagtcaatggtaactgaaaaacaacccccaacttcgttacatgaaagctgaggcaagttggtctggtgtggctacaaaatctatggtaaaactttt

SEQ ID NO: 201877 - DNA, 122 bp, Homo sapiens
ggggatgacaggtacaaggaggagagcatgaaaggcaagggcatcttctttcagttcccacgtgggattccaggagtagaggtcaaaacacatggtcacacagaaggaggcctgattggtac

SEQ ID NO: 201878 - DNA, 122 bp, Homo sapiens
tatataggtcaggtgtttctttaagccaaagggcaatttcctttctttatttgagtttgtcgttaggccacaccacattaggaaaatcacagaagggaggaaagataaaggaagctggttat

SEQ ID NO: 201879 - DNA, 122 bp, Homo sapiens
agatgccctggcatgttggctgtagttatccccggataatgccagatgcgctcctgcgatcgcacagaatgttccttcacaacagcacgaatttgtttatcgcctttacccactgcctttcg

SEQ ID NO: 201880 - DNA, 122 bp, Homo sapiens
tggggagaggtatcttcagagggcctcggccccttgcccaatgagcataagaggactgtgcggggctagttccgagcggcagtatttagggccaacccagtgcggggctggaaggggcacag

SEQ ID NO: 201881 - DNA, 122 bp, Homo sapiens
ccacggctgaggagaggatcctacccacaggtgcccctggtgggttcagccggcccctgccgcgggatcctgcttgatttctggtactccaggcctcgccactgtcattcccgctgggcatg

SEQ ID NO: 201882 - DNA, 122 bp, Homo sapiens
tgaggttaccttctgcacagaagcaagaacagatgtaaaagtacagggcccactcagggccgaggctggcggcccctctactctgtctgcttaatgtcaactaatacaggtccctctctcac

SEQ ID NO: 201883 - DNA, 122 bp, Homo sapiens
aaagtacagtggagcagcccgtctcagctctccttgcaaaatgattggtcaaagtttttccgactgcctgataaagcgtcagctccgacataaatcaatcgggcgagggggctgcgctctcg

SEQ ID NO: 201884 - DNA, 122 bp, Homo sapiens
gtgtaactttagttacagaacattctccctccggatcccgtacctgctgactgctggtggcggctgctcagttctctctgttctccatccctagaggcagccttttccagaatgtcacacaa

SEQ ID NO: 201885 - DNA, 122 bp, Homo sapiens
ccccgactcctgccacagcgtcggctccctgcagatgaaagcggcgtccccccttcccaacgcagcatcagctccccgggccatttcgcagaaagaaattgtttagcaaaaaaaagcaaaag

SEQ ID NO: 201886 - DNA, 122 bp, Homo sapiens
gggtccgcggcgctcgctctgcccgcgtcgcgctgccctggtcgctccctcgcgcggcggcggcggcgtcactgcccctacagtaactgtacagtacagccaaagccccgtatgatgctcgc

SEQ ID NO: 201887 - DNA, 122 bp, Homo sapiens
agcctgcaggcgggagcagatatgttctgcttggaaggatgcttgggacaaagccagctccgggagctcctcgtgtggctggacacatggggcaattcctgggctaggggaggaaggcggcg

SEQ ID NO: 201888 - DNA, 122 bp, Homo sapiens
tctatcacgttctgcgtgtggcctcgatcacactctgcatgtggcctctatcacatgctgcgtgtggcctctatcacgttctgcatgtggcctctatcacactctgcatgtggcctctatca

SEQ ID NO: 201889 - DNA, 122 bp, Homo sapiens
tcgaggcctggtgaatgtgcccattgtcctttcggggcctctcccttggagcccggcggccgcacccacgaaactgaccagaaatggatgaagccggagtgcagcgggaaccgaagcccgca

SEQ ID NO: 201890 - DNA, 122 bp, Homo sapiens
tgcactgtggagaaagaaccatcctctcggcattgagcatcagcttatccaagccagcaacgaacccacacagctgtgcccaccttgttctgttatacaagatccccacaatgggagttacc

SEQ ID NO: 201891 - DNA, 122 bp, Homo sapiens
gccgctgctgcccggccggccccaggtgaagctggtgggcaacatgcatggcgacgagaccgtgtcgcgccaggtgttgatctacttggcccgcgagctggcggccggctaccgccgcgggg

SEQ ID NO: 201892 - DNA, 122 bp, Homo sapiens
atctactgtgtactaggtcccattcaaaactcaaaggtcatttgatttggtaggagagatcgacatgttagtaaacatttatttctacagtgtgtgatgagtgcaaccttagagggaataac

SEQ ID NO: 201893 - DNA, 122 bp, Homo sapiens
tcgcccaggtactcgctctcttgtcattctccgggatgtaaaagactcggggtctcttcacggatcactgaaaccgccttctccgaggcctccagggtgactaaaagaaagggtgcgtgttc

SEQ ID NO: 201894 - DNA, 122 bp, Homo sapiens
gaaacttctccactagaaatgaggataggcacctgctctggctcctctggggatccagatcgcatagtcttggaaggttggagaccatttgtcccaccctcgggcacagatggaaggtgtgg

SEQ ID NO: 201895 - DNA, 122 bp, Homo sapiens
gcttcaaagtccaggccctccagagaaggcaagcatgtaagaggttcatgcagcccagcgcggtggctcacacctgtaatcccagcactttgggaggccgaggcgggcagatcacctgaggc

SEQ ID NO: 201896 - DNA, 122 bp, Homo sapiens
acccgtgccctttcctgcttctcggagctggaaggctgtggactgaggcctgcgcgaccccgccagagatggggctgagtcccaatttagacaggttgggagtatttaaagcgctttacagt

SEQ ID NO: 201897 - DNA, 122 bp, Homo sapiens
tcttcacattcccgatctcacaccggatcctctggatgagccggttcagctccaccatctcgctcctggtgtgtttcaggtcgtcaccatgccgactggctgccagctgcagctcctggatc

SEQ ID NO: 201898 - DNA, 122 bp, Homo sapiens
ctctcactagcctccctgctcccagcccccgcctcaccggggccgcccctggccctgccccgcctcttgatccccaaccaggaagcttgcagtggtcccggggcccctcccttcctgctcat

SEQ ID NO: 201899 - DNA, 122 bp, Homo sapiens
accctcatgggaggagccggccctcactggctctgggacctgtccacccacctgggagcccggctttgctggggttcttggcagccctgggtgcctgttccatctcccactaacctgctggg

SEQ ID NO: 201900 - DNA, 122 bp, Homo sapiens
ggcagccacgcgagactcccagggtcaggcccacgcgggccaccagccgcactactcttccgcttcccaagtcggcacacacggcgcccgtgcctccacgctgctgactgctgcaagtcgaa

SEQ ID NO: 201901 - DNA, 122 bp, Homo sapiens
ttttcaagagcatcgcctgggcggatttggtttctttggccggctgtccagctataagaccgccctcttcttcattaaggaggagccaaaaaggatatcttcacatctcagaacacagacca

SEQ ID NO: 201902 - DNA, 122 bp, Homo sapiens
aggtttccagccactggtagagctgctgcggctgagccatctcggcagatcagagcccagcggacagaaatataaatacgaaaataacgccactaaatataatcacaagggagaagcttaga

SEQ ID NO: 201903 - DNA, 122 bp, Homo sapiens
ctgtaagtcctatctaggcttcctgatctatcaattcagtatcatgattgttaacccaaacgacttcctggaaaattcccagccctagatgtatccaagccctcctaccctcaccagttatt

SEQ ID NO: 201904 - DNA, 122 bp, Homo sapiens
acttcgctcctcgtgcccagactccaccagctgccattgacgtcacgcgtgcgtcagcgtcgccagcccaaccagacggcacatggggggaagaaggcagacttaaagggccagacgctcgc

SEQ ID NO: 201905 - DNA, 122 bp, Homo sapiens
ccgggtgagaaggtataggcggtcaactctgcaaatcgtgccaatggctttccaaagcggcggcacagtccaggttcccagcaacaggaaacggcagggccagctcctccacagcccccacg

SEQ ID NO: 201906 - DNA, 122 bp, Homo sapiens
gtgagtttctcccggctccgaggctgaacggggactgtgagcgatccccctgctgcagggcgagtggcctgtccagacccctgtgaggccccgggaaaggtacagccctgtctgcggtggct

SEQ ID NO: 201907 - DNA, 122 bp, Homo sapiens
ccgagggctctgaggtcagcaggtggccaccagtcaagccgatgtcctgacctgggagtacgcaggacaaggaggcaccgagtcagcaacagacccctagatggtcagagagatattcccgt

SEQ ID NO: 201908 - DNA, 122 bp, Homo sapiens
gtccggtcccgggagcacctgcgccccgcgtctgccttcaggctaagcctgcgaggggttcggtgtggccctcccagtgagtcagaatgggctgtgtttcctgtggttgttgtggaacagtt

SEQ ID NO: 201909 - DNA, 122 bp, Homo sapiens
agctcatcccagccgcctcccacgcccggggacccgatgccagggcttgggcgagcaggacgtgcgggggcccacgcaccttccctccgtgatctccaggtgacagccccgctccgcccttt

SEQ ID NO: 201910 - DNA, 122 bp, Homo sapiens
gaacgtgcgggttctattttgtattcgacgtgccggatcgaaatagagctcgcggcactgcgaagaccacagtaggaagttaaggacggggtcagtgctgactccaccctgtgggcatacgt

SEQ ID NO: 201911 - DNA, 122 bp, Homo sapiens
ggatccatcccactctgaaaatgccccgaacagcgaacagcacaggtaaatcaaatcaaacgtcagagccagcacagcctgagagcgccttgaaactcagactccacaatctatggggaaag

SEQ ID NO: 201912 - DNA, 122 bp, Homo sapiens
gtgctttatcttacaggggaaaccgaggcacagaggccgggcctatcctgggtatgtgggcggctcagaagcgcgggtcccaggccgggtgcagtggctcacgcctgtaattcccagcactt

SEQ ID NO: 201913 - DNA, 122 bp, Homo sapiens
acggcaggaatgcacagagcttgccttcagttctttaacatctatggtgccagttccatccgcatcgaaaagatcaaaagcttcccggatctcctgcttttgctcttcagtaagctcaggct

SEQ ID NO: 201914 - DNA, 122 bp, Homo sapiens
aaaaacataaagggctgtttcactaaaaaccatatgatattgggcacaagcagtctgcttcggggttcccctaacacaatgatctccatttcttctgactgtactatgactttggctgtttt

SEQ ID NO: 201915 - DNA, 122 bp, Homo sapiens
tatcataggctaataaatcctacctcctgcacgctttaaaacagtatgaagcagctttaacggagctccagataactaatttcaagcatggctgtctagcgtgcctgtcactcctattgtcc

SEQ ID NO: 201916 - DNA, 122 bp, Homo sapiens
atttcactgtgtcccataagccactggagatgtcctcttggggcctatgtcctgggggatcgtgatccttcagagtccccccagactcctggagcctgccaggcacaggaccttggggaaag

SEQ ID NO: 201917 - DNA, 122 bp, Homo sapiens
acagaaagtccagctacagaacactacccgggagtagcagagggaggtagaggactcatgcgcccacctgctctcctgccaccggctgggtttctctgcctgcctgccttctcccccacctc

SEQ ID NO: 201918 - DNA, 122 bp, Homo sapiens
accgccctgcgagcagaggcgttcgtgtcggagcccccacacctggggagcggggagctgcggtccctggttgtcccacaggagaagggggagggaacggggcaggcggggaggatgagcgc

SEQ ID NO: 201919 - DNA, 122 bp, Homo sapiens
agtcttcaaggaaggctctcctgtgggtatgatacctgagccaatcagagattacaaaggcgaagaaggcaaggactattccacccatcattgcaactcagcacctagggctcagatatttt

SEQ ID NO: 201920 - DNA, 122 bp, Homo sapiens
gctcacctgtcctcctcttttcagggtcacaagacctgggagatggtatttgtccaatagcgcttgtggagcagccagcggggcacgtgtggcccctcggtgcccgccggcacgtgggctgc

SEQ ID NO: 201921 - DNA, 122 bp, Homo sapiens
cacagaaactggcaacgccacaaagccgagggttgtttgttttttctccccctggagagccggttgtaagtattcaccagcacacccctgctgcagcaagcctctctggaggaggaggagag

SEQ ID NO: 201922 - DNA, 122 bp, Homo sapiens
ccgggtctcaattttcaaatcagaaaagaatctggcaaaggaggcaaggccagcgacccacggcggcagccacacacctggctcagggctcccgtgagaccacgccacgcaggtgcagctca

SEQ ID NO: 201923 - DNA, 122 bp, Homo sapiens
aacggccaaagggaaaagctgtgggggtgccgaggactcaggcacttggttcagaaatcccgcaccgcacctctcacccccgcacagggccagcgcacggtggtcacccggtcccggggagc

SEQ ID NO: 201924 - DNA, 122 bp, Homo sapiens
tcaaaggactccctatagctacatatctaattccaagtgacgctgccacactgatcagaacgttcatggaattcctctttggaatcactttccaagttacataagaaaaccagtacattctt

SEQ ID NO: 201925 - DNA, 122 bp, Homo sapiens
ggtcttggacagtcagcggcccaatagtgtgctctacgtggggcggggctcaggtgcggacgccgccggttgtcctcttcgctgctccgtagtgacggggattgttgtgttgcagaaatccg

SEQ ID NO: 201926 - DNA, 122 bp, Homo sapiens
gtcctatgacaccgggtgttcttgcctgccctgcaccagcccctggaaaatgcgctcctccgggatgcaggcgtcttactccaaagccctcctgtgattgtgttggccaaagggatcaggag

SEQ ID NO: 201927 - DNA, 122 bp, Homo sapiens
ccttctgtgcagctgccagccagctgcgctgcccttgtcagtggcgctataaataaggcacgtctggacattggccaggcctaggagataagaacccagcccctggctcccacgtgcctttt

SEQ ID NO: 201928 - DNA, 122 bp, Homo sapiens
ggacaaacaatggggaaaatgccgcgcgtctagccaggcagataagaaaacaactatacccgtcaggcccccaacccggcgccgccataaatggccccggcctcgccattttagttcttttt

SEQ ID NO: 201929 - DNA, 122 bp, Homo sapiens
ggcgcctgtcactcgagcctggagcgctgcctctgggcccgcacgtgcactcacaaagggcgtgtcccccccaactacctgcacgcagcaggggcctctcagtgcacgcagggtaataaggg

SEQ ID NO: 201930 - DNA, 122 bp, Homo sapiens
aaaaaaaaagcgcgctctccctgcccctgaaacattcccagaagcccacgcagaccagaccgatgacctgtctccactgctggaggcgagtcagggacccgaagtctctaaacactcgcctc

SEQ ID NO: 201931 - DNA, 122 bp, Homo sapiens
gctttgccaaagccatcctgttaatagttgatcacatgttgatgagaaccttttcttctacgagaggattacccattaccggtgatatgcacttctgacttatttctctccccccaacccca

SEQ ID NO: 201932 - DNA, 122 bp, Homo sapiens
atttaatatctatcgttggctcattaacgttgggctcccggccaacggcaccataactcacgcctggatgaagctgcctaacacacggttttctccgtagggcacagccgggccttctgggc

SEQ ID NO: 201933 - DNA, 122 bp, Homo sapiens
gtatcttctggcagtcctttgagagctcagagacctaagatcagcatctctgagtggcttcgttttccttttctgcatttaaaagtgaaggcttcacctggggctggtgcaaatggcttagg

SEQ ID NO: 201934 - DNA, 122 bp, Homo sapiens
gtggctccacagcccgagggaaccgacgcccccgggccggctgtctgctcccccacggcacgggccccacccccaatccttccggcgccccagcgcccacccacccgggcgcgggagtggga

SEQ ID NO: 201935 - DNA, 122 bp, Homo sapiens
cccggtatcccttagttgtaacctgaaagccttcaggaaatcgccctcgccaggccattccgccactctgcccattccttcctcactccctccccctccgcccaatttggtatcatgtttag

SEQ ID NO: 201936 - DNA, 122 bp, Homo sapiens
aaaaaaaaaaagccccttcatttctgaaatgagaaagggaattgctggtaccaaaattcacgtttcctttttggtggaaattctccagccaagcttggcgctaacagagtaggcgatttcac

SEQ ID NO: 201937 - DNA, 122 bp, Homo sapiens
ggtgtcagggagttccctttcctagtcaaagaaaggggtgacagacggcacctggaaaatcgggtcactcccgccctaatactgcgcttttccgacgggctaataaacggcgaaccaggaga

SEQ ID NO: 201938 - DNA, 122 bp, Homo sapiens
gggcaatttgcatcttcctggctttttcccctgttctgttcacctctgttatcaggatgacgttatttatttaatttttttcaagatcgccatgtgtttattatgaagatttctttttaatt

SEQ ID NO: 201939 - DNA, 122 bp, Homo sapiens
tttcccccttcactgtgagccttgacccaaccatccctgatcttcctgtacctcttcctgcggtcacaaaggtgtagagaaggcatgggagtctttcacttgccctaactctggagacaagg

SEQ ID NO: 201940 - DNA, 122 bp, Homo sapiens
cctcggtgtactcggcttcccactgtgccagggacttgactggaagggcgggcctgctagcggacttggggctgctgaccacaccgttgctggtgggcctcttgaggatgcggacctgtgga

SEQ ID NO: 201941 - DNA, 122 bp, Homo sapiens
aacacacttgtttcaagttagggaagagcctgtggttctcttcctgcgttcaggggaaagcgaacacacaatgttcgtttcctaaatacgggatgtgctgtgctggcaggtcattttccacc

SEQ ID NO: 201942 - DNA, 122 bp, Homo sapiens
aggatcctttttttttttttgagacagtctccctttgttgcccaggctggagttcagtggcgcgatctcggctcacggcaacctccgcctcccaggttctaagagattctcctgactcagcc

SEQ ID NO: 201943 - DNA, 122 bp, Homo sapiens
ggtgcgggatataatcccgtggtgcgccgttttttaagcctgtcggaaaagtgcagtattcgggtgggagtgacccgattttccatgtgggtctgtcacccctttctttgactcagaaaggg

SEQ ID NO: 201944 - DNA, 122 bp, Homo sapiens
caataccccaccctccctgttctcagtcacttggggacaaaaaagaaagcctgcagaacacgactgctggcccacctgccagagtagccaaggaaacaggatgcccgctaaagcatgttaag

SEQ ID NO: 201945 - DNA, 122 bp, Homo sapiens
gcggcgggggctgggcctgggggtcggcgctgaggcgggaggggccgcccgggatggagacgttgcggccggtggccacagaaacttgagccgcggcagagaaacctctgctccggtctctg

SEQ ID NO: 201946 - DNA, 122 bp, Homo sapiens
tgacgtcacgtgaggcgcacgcgcacaaaggctggggagtgcgcggaggatcatcggctgcgcctgcgcagttgctgcgtgaggcgggatctgcgccgagtgggcggggggtttcctttccc

SEQ ID NO: 201947 - DNA, 122 bp, Homo sapiens
gggggcgggcctggcgcgtctagctcgcggtcagaggtcgggaagggcgccatgggtgtacgtggggacggcgccgggctgcggctgagccgccagggcctgctgagggcaagcggggcctc

SEQ ID NO: 201948 - DNA, 122 bp, Homo sapiens
ccacgcggagcagtgggctcgtccaagctccacggtttgctgggaggtgggcacggtgcccgaggcattcattcattcattctttcaggtgtgatggggataaagcagcgagaagcccccaa

SEQ ID NO: 201949 - DNA, 122 bp, Homo sapiens
ccacttctgcctccccgtatggcccttcctctccgggatctcccgtcctgatcccccacccggccatgtgcctgccgcccttatggctcccctcaatctgtctaccccagcttgttgctgcc

SEQ ID NO: 201950 - DNA, 122 bp, Homo sapiens
cacttgttgtctgcgggctcaaagccctccacagtacccttctttggaatgggtttggttcgaccgtcatctgaaggaaaaaatgcatcctggtgaacacggccgcgtacgtggctgagcgg

SEQ ID NO: 201951 - DNA, 122 bp, Homo sapiens
ggctccggcctcggccagcccccagggcagtggctggctgaagggctcctcaagtgcggccggagtgggcgccgaggcggaggaggcgccgggagtgagtgagggctgccagcatgctgtca

SEQ ID NO: 201952 - DNA, 122 bp, Homo sapiens
gagaatctgaaaatgagacccaagcgaaagtatagacattttattgtggagcaaaaccaacgacaccctcaagggaggagtgcaggcactcaaagatttgagtcacaggcaatgtggttcac

SEQ ID NO: 201953 - DNA, 122 bp, Homo sapiens
cctctggcctgtggctcactgcatgcagcccctggcgtgcaatactagtgctccacggcgcgatgtgcttctagcccttgcactgcacctaggctcagggttcaaacggccagcccgaaaag

SEQ ID NO: 201954 - DNA, 122 bp, Homo sapiens
gtccgccattgctggggactgactgactgactgaggcggcggcggctgctcgggctgcggcggagaccctggccacggccacgcgccccgcgcaagcgcccagcggtggcgccgaggggggc

SEQ ID NO: 201955 - DNA, 122 bp, Homo sapiens
acttggaggggcggatgagccctggaaactcagagctcgccggaaaaggccgggggcggccgggctcttcttccccaccttccctctctcgtcgctctccgcccctttctctttcccactca

SEQ ID NO: 201956 - DNA, 122 bp, Homo sapiens
tgccgccgcctccagcccagcccggccgccgggtttgcaacgctccaagtcggacttgagcgagcgcttttctagggcagccgctgatctcgagcgcttttttaacttctgcggcctggacc

SEQ ID NO: 201957 - DNA, 122 bp, Homo sapiens
gactgcaggaaaaaagttgatgaccagatgccaattccctacaagaattgtagtccactgcgggtatacgagaccttaaagtactactatcaaggactgagttctaaagttagactttaaac

SEQ ID NO: 201958 - DNA, 122 bp, Homo sapiens
tggcagttaaagagaaggcaacgctcagagttgcaggtggagcagcggcggctgcatcagcgtctcaaattgcgaaaacattttgggctgaagtatttctttgtagcatttcgtggagcccc

SEQ ID NO: 201959 - DNA, 122 bp, Homo sapiens
ccaccgccagcccacctccacttctaattgggccgcaaagccgtttaatggtgtctgccacgtctgcagggctgctcggggcggaacaatgcgctattcatgtcccacatagcacactagtg

SEQ ID NO: 201960 - DNA, 122 bp, Homo sapiens
caaaaagacgatgtggtggttaatatcggaaagaatgtgtggttaatatcaggaagaacacgtgaaatggagaatttcagggctaacatttcttgttttgtttctgaaaacatcggcatgtc

SEQ ID NO: 201961 - DNA, 122 bp, Homo sapiens
gtagtattcaccttgaaactcaactttaaatagttcctgaaagagctcctttctttatgacgtcccagaatcttagaaataaggcatttgatcaaaagaaggcattatagactccgagttcc

SEQ ID NO: 201962 - DNA, 122 bp, Homo sapiens
agggccaggcttctgctctgagggccacttctctgggtgcattaggaaaaggcacccctccgggcaaacacaatggatttcagccccaccacatcctcagctgtgtgcctctgttccacaca

SEQ ID NO: 201963 - DNA, 122 bp, Homo sapiens
tccatctccagcacccagctgggggcaggtatcaataaaacgtgaatgaggggtcaacgtcgggaccctagggctgcagaagggatttgagaggaataactgggtgaggaaatgctatgcct

SEQ ID NO: 201964 - DNA, 122 bp, Homo sapiens
ttagggccaagaaggttataatggcttgtgcctccaaagcctcctgccagccaaaggcagcgaggaaaatgagaagtcgttagtccacatgggacctaaggaaacagggaaggtgactgtgt

SEQ ID NO: 201965 - DNA, 122 bp, Homo sapiens
ccacggagagacagagcatggggctcatgatggcggtgtagtgcaggaggaagcagatggcggtgtagtgcatggggaagcagatggccacatagcggtcataggccatggccacaaggagg

SEQ ID NO: 201966 - DNA, 122 bp, Homo sapiens
cgggtccaccagtgtggctccttgatggcggagaacttgacctcagggtgcagccgcaggcggtcatagaggtctgtggtcccgcacttgggctgccctatgatgtagaagtgcggcaggca

SEQ ID NO: 201967 - DNA, 122 bp, Homo sapiens
cccgctctcctccccgcaccttctgctccttcttcctgcgccaccccgcccccgcctccccgcccccagcccggctgttgcccgggccccctcaggctgctcccagggccccagcccgcgcc

SEQ ID NO: 201968 - DNA, 122 bp, Homo sapiens
gctcagaagcctgattttctttggcatccaaaaatggtaaaagtctaaggccaaggtaatcgttacaaaagaaagaaagacttctgtcccacaggccatcagcatggtctgcagaggggcct

SEQ ID NO: 201969 - DNA, 122 bp, Homo sapiens
gctcccggacgccctctccggcgtcccttcgctgagcccggcctggctagcccgccaccccgcccgctgttacccgactgcccgcaccgaccacctgcggccgccaaggtgcggcagggggc

SEQ ID NO: 201970 - DNA, 122 bp, Homo sapiens
ccgacccggctcctgaggctccatggcctgcttctcagtttcttgctgtccttccagacacgtctccatgcacgcacgtgcgcggctggactcacctgtccttccagacacgtctccatgcc

SEQ ID NO: 201971 - DNA, 122 bp, Homo sapiens
gcgcccgaacgcctgccaggccggcaggctgggctgggaggcagcaggcggagtctggcccgtagggcagggagggagcaggggtcgggcgggagccggaggtcaggccacctccaggagcg

SEQ ID NO: 201972 - DNA, 122 bp, Homo sapiens
aatctgatcgtaccccagctccctgatgatatagcctctaactgaggggttctcaaggtgcggaccagcagcagcatcacagataacttgttggaaatgcacattcatgggttccacaccag

SEQ ID NO: 201973 - DNA, 122 bp, Homo sapiens
gagtggagcagggatgtgaatgtgactcctgcacaccatcttcccacttgcagcccctctcggtgctctccacactctctgcacctctccatttgatggcattcatgatgtacagattcaaa

SEQ ID NO: 201974 - DNA, 122 bp, Homo sapiens
acagggcggggtttccctcgagaggcgaacgccgggtaaaagatcgggagcggaagtgggcgagtcagagcacatccggtgttagaagcgctggtaggccttggagaggcgggttaggaagg

SEQ ID NO: 201975 - DNA, 122 bp, Homo sapiens
acgcacatgtccacgccaatgtattatcataggcccttccccccctcttaaagcctcccacgaagtctgaacctggtactgatatacgcttcagccctcagaaggcaaccgcttgattctct

SEQ ID NO: 201976 - DNA, 122 bp, Homo sapiens
aatctccccaggtctccagcccactggaattttctcttccaagcgtggccccgccctctccgctcgtgattggccctaagttccgggccccagtttcattggatgagcggtcgggggaccgg

SEQ ID NO: 201977 - DNA, 122 bp, Homo sapiens
cctaccagtcctcccctctggtgtctggggacacttcctgggggcctttcaggtggttggcgccggtgcagggcctgagagcctgggggcgcggcctcagggtccccacatgccgcagaggc

SEQ ID NO: 201978 - DNA, 122 bp, Homo sapiens
gggataaagttcactgaagagaaaataaagcacatttattaaggcaaaggccaagctggccgctcagaacatggccaaggagcgtgaagggattgctccactttaccaccactcagggcacc

SEQ ID NO: 201979 - DNA, 122 bp, Homo sapiens
tcacttcttttctatgaagagatctgaacccctggcctgttggtcccttggaatgcaggccgtacaggggatccaggccctttgttgtggcttaaatggaggttgctaggtggagagggctc

SEQ ID NO: 201980 - DNA, 122 bp, Homo sapiens
aatgcgggagaagcgattgggagggtcgacagacaccagaggggtgtgcagacattaggacgaggagcgaggcgaggcgcgatgtaaggagaagaaacgggggcggcgaagaggagagggca

SEQ ID NO: 201981 - DNA, 122 bp, Homo sapiens
aggtaatgattaatctgtcaggcacaaaagggattgttttggggatttcgggttctaagtcgcagattcaaacaaatagcagcgaacagggaatgacagttccaccagaagacgattaagcc

SEQ ID NO: 201982 - DNA, 122 bp, Homo sapiens
cggcctcggccaggatccgggtcagagccatgatgtagctcagggccatctgcagggtctcgtacttggacagctttttatcctggccccactggggaaccaccctgcgtaagcggtcgaag

SEQ ID NO: 201983 - DNA, 122 bp, Homo sapiens
tatttctccctctttcatttgcaaatctctcttccagggcattgttctgtgaattcttaccgtctcaactttatatagataaactcatttttatccaaatgtgcagggaaattgggtttttt

SEQ ID NO: 201984 - DNA, 122 bp, Homo sapiens
gtagctgggatcataggcctgagccaccatgctctctaattttgtattttaagtagagaccggttttaccatgttggccaggctggtctctaactcctggcctcacgtgattcgcctggcct

SEQ ID NO: 201985 - DNA, 122 bp, Homo sapiens
tcctagtcctcaggcctctccgaggtcgcattgcttcgaccaggcctgggagctgcgctccggcaccccatatggggctggttccctgggtgaccttcagaccatcaaaccctggcagtctc

SEQ ID NO: 201986 - DNA, 122 bp, Homo sapiens
tcagggctgtgggcggggcccatgcccgggggcggggctggaggtgggaccagacccagccggtggcttcggtggcagaatggaccaggaaggcgaaacgtcgggcgatggactcgcccctc

SEQ ID NO: 201987 - DNA, 122 bp, Homo sapiens
ggaacttgagtcttgcttcccgttgtgctaccacatgacagcactaaggcaaactcatgtcgccaccttgagcctcagtttcctcacctgtaaagcgagagtgtgggctggatgatgtctgc

SEQ ID NO: 201988 - DNA, 122 bp, Homo sapiens
ctgcatatcatctgaagtcatctctctttggggacatcccacaggtccagaactgccagacggtagtggggtggccggctaggctgtggggagcatggagatttatctgcaaaggaggacct

SEQ ID NO: 201989 - DNA, 122 bp, Homo sapiens
ggggtcccgcgggtcatgaccctagtcagaggctccgagtctgcagctaacttaagtcttcggcactcgctacctgctgcccctcctcctctcctgcccactgcgggctccagagtttcttt

SEQ ID NO: 201990 - DNA, 122 bp, Homo sapiens
atttactaacttttccacttgtctcaatatttctgattctgcaaaatgggaattaaaaatcgcttcaaaagccactgggttgtttctagaatcaaatgagagaggacgtatgaaaatgtttt

SEQ ID NO: 201991 - DNA, 122 bp, Homo sapiens
agtgactcagtctgcatggagatcccaggacagtgacagctgaacaaacccttaccaacacgctcgtcccgcgccggcccaagtctcccccggcctcctgcaggcgcacagacctcatccgc

SEQ ID NO: 201992 - DNA, 122 bp, Homo sapiens
accgagcaaggcgccctggtcagcctgaagacactggcactaggtctaagacggtgtggccgtgctggaggtcacgcagagttaaaagtagcttacccgtgacccggcactcccattcccag

SEQ ID NO: 201993 - DNA, 122 bp, Homo sapiens
agtacattaatgcattttctcaagagaatcaagggaaaatgatgcttcagaaagatgtcccgcatttatcctgtggcactcaaagtaccccaggttgagacaatatgaggaagattcaagct

SEQ ID NO: 201994 - DNA, 122 bp, Homo sapiens
aggaacagacgaaaatagttttgagccctaagtccgccgattccagtgctttcttgaacccgcatttactaaaatattttcatgactgccaagctttgaatagcctgctgtgttcatggagg

SEQ ID NO: 201995 - DNA, 122 bp, Homo sapiens
cttcttagcaacaggaagccctttcttgctcagcataaacaagcccaaacactcccccaccgcccattcccctcaaggtgccagtttgctttgaaatccacagcaaaggatttcgaggtgtg

SEQ ID NO: 201996 - DNA, 122 bp, Homo sapiens
gcatgtgcgaatgtagggggcgcggcgggccgggaaggagcttggaagagtctcgggacgcgggtggagtcggctgttaaaccgagtctctgcatcccagacaggagatcgggtggctcttc

SEQ ID NO: 201997 - DNA, 122 bp, Homo sapiens
cgtctgtcacaacaggcagggctggagcttgacacggttgagaatccctgatgctcaacccgtattttctggctaccagttgaaagaaagggtgagaggatgcttggctccgagcaagtggc

SEQ ID NO: 201998 - DNA, 122 bp, Homo sapiens
aaaccagtgactcagaagcttctggaacacagcccactgtaagctggggcctcctgccttcgatctcaggctcccaatcggaccttgagagctctctgcccctcctgctctgttcccaaagc

SEQ ID NO: 201999 - DNA, 122 bp, Homo sapiens
tctctgaagaattacctcaatgatctaatctctaaagtaataccttagtgatcccatttccgttatttcagctcctctgaagtaaacctcagtggtcagagctactctgcagtacccactag

SEQ ID NO: 202000 - DNA, 122 bp, Homo sapiens
gaaacgcaggaggtggcgatggcgggtggggtgaaaccgccgggaaagcagcgctgcaaacgccctgcgctcccagacgcggctcacctggggcggcgggctccgggctccgctctccgctc

SEQ ID NO: 202001 - DNA, 122 bp, Homo sapiens
cgcacttgaggagctcttcagcctgtcgctgtgctgtgggggccccactctggggctggccgagtctgtaaccagctccctctgctcttggggaggtgtggagggagaggtgccggcgggag

SEQ ID NO: 202002 - DNA, 122 bp, Homo sapiens
gaagagaagaggaaacattgaggaattcctgccttgacacatggcttcaagtcagggctccgctgggaaaattcgggtcacaacttgtagctgaaactccacgtgcaccctgcggggccgct

SEQ ID NO: 202003 - DNA, 122 bp, Homo sapiens
gctcggacacagacagcttctacggcgcagttgagcggcctgtggatatcagcctttccccgtaccccacggacaatgaaggtgaggtctttctccgcatccactgcccgtttgcctctccc

SEQ ID NO: 202004 - DNA, 122 bp, Homo sapiens
cgcccccttcggagcctcggagccgctgcccggcaacgcgcgggcccgggcgcgggacggcgagcaccccctcccggccggccggacgcctgcctgcctgcctgcctgcctgcctgcggggc

SEQ ID NO: 202005 - DNA, 122 bp, Homo sapiens
ctcttatcacttgattatgtgaatagttaccacatgactattctcttcaggtttcagcaacgaaacagaatggttgaatgtttgctacttccacattgcttcattcaaggcaaaataactca

SEQ ID NO: 202006 - DNA, 122 bp, Homo sapiens
gttcccggcgctcgctcgagggggggctgttggaacttggcggggctggaccagcccggccgtgggaggtgcgggccgcggcggctgcagcggcggggtggctgcgctgagcaaacagcggc

SEQ ID NO: 202007 - DNA, 122 bp, Homo sapiens
ggcgactttacgttgacgtctttgaaaacctgcttacctttttcagggctctccagccctcgcctccagatgtgaattggacttaggatagttttttcagggcagtaggaattgcttgtgga

SEQ ID NO: 202008 - DNA, 122 bp, Homo sapiens
taggcacctagtaggtgctcagtaaattacatgtggaaacaggaaattgccaagcttgaccgtttggcgcccccgtgtggccgccgctgacccccgcgtgtccgtccgctctccccaggccg

SEQ ID NO: 202009 - DNA, 122 bp, Homo sapiens
atgtggagtctgagggttttagactctcagacctccagtaaggccctagaaagttcccaccgggcctactaaacccgggaacggagtgtgtggtaggaatggtagttggcggccgctcccca

SEQ ID NO: 202010 - DNA, 122 bp, Homo sapiens
gatggagaagggatgagaggcctaggcctagttcgtgtccatgaagcctctccacgtggccgacttcccttagagaagtcccacaagccctcagccctcacagcctcgcccgcgacgccgtg

SEQ ID NO: 202011 - DNA, 122 bp, Homo sapiens
ttctcaagaggcgggtcttccgagagtcagccaataggagctgacgggcagggcaggtcgcgttaggacagcgtcgctcccgcagggcaaggttttaggtacaaactcgtgagctggactcg

SEQ ID NO: 202012 - DNA, 122 bp, Homo sapiens
ctgtttcctcacctgaaaaatggtgacagcaagagtagccaactttgggggttgctgtgacgtttaaatgagcaagtacatgccagtcttagaacagcaagctcggtacagtgccaggcacg

SEQ ID NO: 202013 - DNA, 122 bp, Homo sapiens
acgcaaagcggcgggtatgatgcagaagagccgggggtcacggtggtctcctggagaagacggcactggaggtgagccctcatgcagaagcgcaccgttcaagatcgcccaggaacaggcat

SEQ ID NO: 202014 - DNA, 122 bp, Homo sapiens
aaacagctggaggatgggtctctatagccaaaatgataacaccaaggtgaacagccaggccgctgtggcttcaagacctgacgcagaggaagtaagcaaataatttaaatatcaggagaagg

SEQ ID NO: 202015 - DNA, 122 bp, Homo sapiens
tctcaaaaaaaaaaaaaaaagatagggaaggccaggccatacagggccttgcggctcaggcgaggatgttggtctttggcctaagaataatgggataccattatgggatttttggggttttt

SEQ ID NO: 202016 - DNA, 122 bp, Homo sapiens
acaatgtctttacatacctcagataatacagacatctcacaagtggtaccttcaaagctacgagaaatcaaaatgaatatttagggaaaacatataaatattaaaaatatccaaggcacaga

SEQ ID NO: 202017 - DNA, 122 bp, Homo sapiens
tgtgtaatctggacactcgttaggccctgacagaaagagccaaactttccttatgcgaagcggcaggctgcactgaaggagtattcttcctccctaattaaattgtcctctaaatcgatgtc

SEQ ID NO: 202018 - DNA, 122 bp, Homo sapiens
atgattacatttgtagacattttggtgccttaatgtcagcaaggattgcacaatgagtttcgacatggcgttccagagatgcatagaaattctagttttacttataagttttttcgacgggg

SEQ ID NO: 202019 - DNA, 122 bp, Homo sapiens
gtcccgggaaccggctggcttccgagccgcactcgccgatcctccaggcatgccccgctacgagctggctttaatcctgaaagccatgcagcgggtaagtgaccttccctcagagccggtct

SEQ ID NO: 202020 - DNA, 122 bp, Homo sapiens
aacagttaccgagaggtaactcccccttcatctgggacgtggctcaagattacaggtgatcgcggtgccccgaggcgccaggaggcaactttcacctgggggaggcgccgggcgccagcggg

SEQ ID NO: 202021 - DNA, 122 bp, Homo sapiens
aggcagggtctggcagggccgagcccctcagagccctctgccccgttggtgctgtgccggcgaaaggccacgcctcttcaatctggggcacccctgccgcctgctccacctcgcccgtcctt

SEQ ID NO: 202022 - DNA, 122 bp, Homo sapiens
ggacgaggagtggacctcagcttgagatcagggcagggtctccgggtccctccaaggcaccgcccccccatcagcccgcccgcccgcccaggctccagctcacctctccaaaccctccctgc

SEQ ID NO: 202023 - DNA, 122 bp, Homo sapiens
ccgctttccgattcggactccatgcggcgcaagcggcggatccacttctctgggcccaaacgcctcccagagtcagctctgcgcgacgacgcggaactcgagcccctcctcccggcaggaag

SEQ ID NO: 202024 - DNA, 122 bp, Homo sapiens
gagcagaaaagtgggtgatttatcaaataggaatgtgaaatgggcatgtttcaagtaggtcgtctgggcccagtgaactataattgttgctttttgaactttcggggtgggggtgggtgatg

SEQ ID NO: 202025 - DNA, 122 bp, Homo sapiens
ggcgtcctatcacctgtccctgggctcccccaggtgtgggacatgcagtgatttaggtgccgaagtggatttccaacaacatgccaagaaagtattcccatttcatgtttgtttcttttttt

SEQ ID NO: 202026 - DNA, 122 bp, Homo sapiens
ctggccatgctgctcaccagccaggagtcgtagctgggtgcctggacagagcccagggaccggtagttggtgtagaaggcggagtgagtggtgaagctcatgctgtccagggaggagggtga

SEQ ID NO: 202027 - DNA, 122 bp, Homo sapiens
gggacttccgaaacacattcggggatgtggggctgctcaccggggatgtacagctgcatccggaggcctcctgcctcatcatgaccacagagatccttcggtgagagatggacactcaatac

SEQ ID NO: 202028 - DNA, 122 bp, Homo sapiens
gcctgcaagcgcaaggaacaggagcagcagaaggagcgcgccctgcagcccaagaagcagcgcctggtgttcaccgacctgcagcgacgcacgctgatcgccatcttcaaggagaacaagcg

SEQ ID NO: 202029 - DNA, 122 bp, Homo sapiens
cccaaccgccagccccagccccgcgctgcgctgcccggtcctctcccggcggggtcgtatcggcgtggacatggctggccgcgtccctagcctgctagttctccttgtttttccaagcagct

SEQ ID NO: 202030 - DNA, 122 bp, Homo sapiens
acggctgtcagctgaggttgaaataggacaaagcaacagcaatcaaactgcttccatgtgcggcaggtaattacagaatcggctacattacagtgattacgcattgccaaggagaagtcaaa

SEQ ID NO: 202031 - DNA, 122 bp, Homo sapiens
ggctttgacaccatactgacagcgttttctaacagagacacggcatgtcaggctcagccacgctaataaaacccttctcctcacgtggctctgggaaccgatgtgggctgtgggctgctgcc

SEQ ID NO: 202032 - DNA, 122 bp, Homo sapiens
ccgcgggcgttccggccgcggttgccaggggttaccgtcccgcgggcgggcggagctggccgtccagagcccgccttcctggaactctggttggctgatatagctgtccgtcgaagcggcat

SEQ ID NO: 202033 - DNA, 122 bp, Homo sapiens
tgctggtgaatcagatccctggcgttctccgttggcagttcagcccaacagtttctctgccggccgtgcctctgcaggtccctcctctgatctgattggattaatatttgaatcaatagact

SEQ ID NO: 202034 - DNA, 122 bp, Homo sapiens
ctcggatgcgaaacgccgactacagttggggaagggtggggcgtctgctgccctaacccgcgaagcgctttctcaggccccgcccccggtccgacccggacgaccctctgagtcctccacaa

SEQ ID NO: 202035 - DNA, 122 bp, Homo sapiens
gctttactcctgaggccagcgagaccacgaacccactgggaggaagaaactgaacacttccgaacatcagaaggaacaaactgcggacacgcggcctttaagaactgttaacactcaccgcg

SEQ ID NO: 202036 - DNA, 122 bp, Homo sapiens
tccccagacccgagacccagcccgggcgaacacactgcagactcaccacccaccacggaccggagatgtcagatctcacacagacaaatactgggacacccacgcgagttcacagcaccccg

SEQ ID NO: 202037 - DNA, 122 bp, Homo sapiens
gccccggcggcccaggagggctcggctctcacctcgccggttcatgggtcgtatccgcaccgccactttcactttggagtcccccatcctgcagccgccgaggaactcgttcggcttccgtc

SEQ ID NO: 202038 - DNA, 122 bp, Homo sapiens
tagcatcgtaccttataaggaaggcgccggtcctccatttcagccttttctctgccaggacgcggccgtggcatttctggtcttgtaaacatcagactctttggggccttaaaaaaataaag

SEQ ID NO: 202039 - DNA, 122 bp, Homo sapiens
ttacccgtgcagttctgacaagtttggaaattacacaaatcgcgtttgcaattgaggccgcgggaatccaaaagggaaacaaacgaaaccagatgaaaaaaagtgattccaagtcaagattt

SEQ ID NO: 202040 - DNA, 122 bp, Homo sapiens
gtagcggccacgagttgttgaggaagccagactgcaggtacttggggggcgccaggtagccgtagccgtcggccccggcgcccgccacgccgcacccgcctgcggcgcctccggccccgaag

SEQ ID NO: 202041 - DNA, 122 bp, Homo sapiens
gccgcgcccactgcgcaagcgtcgcccgcccaggccccgccccttcctctcccggacgcccgcctcttagtgtcgtcacaaactcgtgacgtccccgcgtgacctcaccgctgcggggcgat

SEQ ID NO: 202042 - DNA, 122 bp, Homo sapiens
cacgcagacgctgtttcacacggtgctcatgtgcctgctctctaagcgctgccctctatgcgctgcataaacaatcttccaggggcctttcaccagtgacagtccagaggctcagcaggacc

SEQ ID NO: 202043 - DNA, 122 bp, Homo sapiens
tgaagaaggcatttgattattatccctgttagtggttgaattgtgttctccaaaaacatacgtagaagtcctaatccctgccaccagtgaatgtgatcatatttgcaaacagggtatttgca

SEQ ID NO: 202044 - DNA, 122 bp, Homo sapiens
gagtcggccccggggcggggcctgtacctcagctgctagcggtgccggcgcgaagtgggtcggggtgcccagctgggggccggcctcgcagcccgcgacccccggatgcgcagagtatgcag

SEQ ID NO: 202045 - DNA, 122 bp, Homo sapiens
gcgtctcccttgcccactggcacgggactacaaggaaaggggttgacccccaccctcccccgccatgcccaggagggtgcagacacaactgggaaggtgctagagaccccggggggaggctg

SEQ ID NO: 202046 - DNA, 122 bp, Homo sapiens
tccgcctcctttgctccctgtgagatgggcacggagaatgagtccctccgtggacgtggacgcctggtggttctcggccgagatcgcaccctcgtggcacctgccggggaccgcccagctcc

SEQ ID NO: 202047 - DNA, 122 bp, Homo sapiens
gaacagccgcggcttggccccagaccgcactccgctgtggcgggcttcgatttcctcttgcgtaaaagtaggtggtgaccaaatgcttagtcctctcccggccagcctcagctcagcgatcc

SEQ ID NO: 202048 - DNA, 122 bp, Homo sapiens
gggatccagagaagcgattctgtgtgctatgtgactgcgatcccgttggctctgtgtcaccgcaatgtgatattacaggaagatgtgtctgtaaatcaggcttcgtagggaaacagtgcaac

SEQ ID NO: 202049 - DNA, 122 bp, Homo sapiens
cagccctggtggtgggtgcaggagtgagggtagcccagggtcgcaccctgctcccaacctcggctcgtccccaccctccacggtcgtccgcagctcgaggcagcctgcatttctgccagtat

SEQ ID NO: 202050 - DNA, 122 bp, Homo sapiens
tagtgcgcccgcgcctgccagggaacaaagactcggggcgcggcgggcgaccgctgcggacgatcacccaggcatttagcgacctacgcggtaagaaaaacccgctacacccggactcgacc

SEQ ID NO: 202051 - DNA, 122 bp, Homo sapiens
gctgggacagcctccccactcactctctctctctttctcccccgccgcgccccgcagtggcggctctgcagactgagatggagaacttggccctgcatctcttctacatgcagaacatcgac

SEQ ID NO: 202052 - DNA, 122 bp, Homo sapiens
cccggtgctgggactagggctgcccgaagatcgcctaacttaaaacctgcacacttaagccgcattggggaaccaaaagccagggttctcaggaccacgaaaggcaaaaccagctctaagag

SEQ ID NO: 202053 - DNA, 122 bp, Homo sapiens
gcggggaccgaggcccagcggggcgagcgtctcggggtgtgcgggaggctgaggaggctccggagcgcggagggttgctcgcgagcgtctgtgggaacagcggcacctccgcgatggtggcg

SEQ ID NO: 202054 - DNA, 122 bp, Homo sapiens
gttgccccaggagtgtgcagttcccagaaactcatggcaaagtcctctataatctctttccgagcaggggctctgagaagctctgcgcctgtttaagggttgggtgggtttggaggggtgaa

SEQ ID NO: 202055 - DNA, 122 bp, Homo sapiens
tggatattaagaacagtatcacaggagtctttctacccccagcggcattgggtgtagtatcgtcctctcccacgttgaaattatgaactatatcactgggggtgtgtccaccccatgcgata

SEQ ID NO: 202056 - DNA, 122 bp, Homo sapiens
ttcctcggaggcagagcacactgacgtcagtctgcagatgtgcctgggctgcgtcgggtgcgcatgtgtcctgggtcgtcacgtggagggggaggggaggtagaggtacaatcggggtaacc

SEQ ID NO: 202057 - DNA, 122 bp, Homo sapiens
catactccagaaaggcgtcaggaggacagggcacatgggaaggtcgttagctgctagcaccgtgttcatcaggaaaggtcttattccagaaaggaggttaaggagagtggccgtgagagtgc

SEQ ID NO: 202058 - DNA, 122 bp, Homo sapiens
gcgcaccaccaccgcgtgcactcgggggagcgcccgtaccagtgccccatctgccggctgcgctttacagaggccaacacgctccggcgccatgcgaagcgcaagcacccggaggccatggg

SEQ ID NO: 202059 - DNA, 122 bp, Homo sapiens
ggacctctgcttcatctctgtcacagtcccccagtccattgcaaattcacttatgggcaacggttacatttctcttgttcagtgcattcttcaggttttcttcttcatagctctggcctcat

SEQ ID NO: 202060 - DNA, 122 bp, Homo sapiens
ctttggcctctgctatccactaggggccagttccaccccctagcacctcaggttaacaaccgaaaatgtcttctagactttgccgaaggactcctgggggcaaatacgcccccattgagact

SEQ ID NO: 202061 - DNA, 122 bp, Homo sapiens
tccccttccaaaagtcagtgcctctccaggctgcccatccccagcaaagatccggaagtccgctgcccctggcaacagcacccagcacctagccctctgcttcgccgtaccgcacccggaag

SEQ ID NO: 202062 - DNA, 122 bp, Homo sapiens
ggtctctgcctaaatcggtctcagagtggccttccctgactatcctcttcaaattagttccgcagcctctaactttagtagagtaccctttacagccctgatccccgtgtaattattgtatt

SEQ ID NO: 202063 - DNA, 122 bp, Homo sapiens
cacacccccttcggcccctagaccgtgcgccagacatgcattaaggcaggagtgacttatcgagctgtcagggggagcgttttaagacagaattataggggagaggaaaaagatttttacca

SEQ ID NO: 202064 - DNA, 122 bp, Homo sapiens
cacgctgtaaaacgccaccggcaccatcacattccacttgaaggtcccagtcagctccaccgtgcagaccctgtccccgacctgtcccccagtctgggatagaggaagtatgttctggcttc

SEQ ID NO: 202065 - DNA, 122 bp, Homo sapiens
ctccccggaacgcccacactctcaatcgctacattgttgacattcggcgctgacgtcacccgctccccattcacaataactttacgggagccgggcagcgcacctccccggccgctggggcg

SEQ ID NO: 202066 - DNA, 122 bp, Homo sapiens
atggtagattgccccagcaacttgggaggccgaggcaggcggatcacaagttcaggagatcgagaccatcctggctaactcagtgaaaccccgtctctacaaaaaaaaatacaaaaaattag

SEQ ID NO: 202067 - DNA, 122 bp, Homo sapiens
gcccatttcttccccatctgctcgggttttgtcttgagtatttcgcacagctcccccatccgccctctggcgcttcagagtctggaggaatcccgagctgcgcctccctctccctgcatccc

SEQ ID NO: 202068 - DNA, 122 bp, Homo sapiens
gccacagcagaagcaaaggcgtggcacctggaggcccacttccttctggacacggagtcccgcactcagggtgacctgtcacctcctctgtcacgtccaacatcacctacgatgaagaagat

SEQ ID NO: 202069 - DNA, 122 bp, Homo sapiens
cgctggtcagctgatgcctgggagacccaggtgacacggaaggaggatacgccagtgacgcggtcgtagtagcgtttcttgaccttcccacagtccaccacgtacttgatgccagggatggt

SEQ ID NO: 202070 - DNA, 122 bp, Homo sapiens
aggaagactacagagagagactgtcaattaacatttaaattggactttgttagctaagtacgaaatgccagtgggataaacgtttgtgtgttgcctgagcaggaaattccaacagaggtggt

SEQ ID NO: 202071 - DNA, 122 bp, Homo sapiens
gcccccccggtcaatgataaggaaacgaaattcatcacaaaccgaaaggctcaccattcgcgaagctctggaacaaggagagagccagtatccacatgcccctgccgctccccggcctcccg

SEQ ID NO: 202072 - DNA, 122 bp, Homo sapiens
gggaccttcacctgcccaggaactttccaccctggaaatggctctagcaacattcttgcacggttttgtttcatgtatttacaaaagtaggatattttgatattttttattaaagagtgttc

SEQ ID NO: 202073 - DNA, 122 bp, Homo sapiens
gctgccagccccgccccgccccggcaggcgcgggccaatcaccgcgcagctcaccgcccacgccgccgccacccggcccggcaggcaagtcccagtgggccccagactcccgcagcgcgtca

SEQ ID NO: 202074 - DNA, 122 bp, Homo sapiens
ccatttcctgaatagtttgctaaagtggaacaaagcccagcatatttcatgaacattcagcgactccagtttacttttaaagaaagtatttctcgttgacatctggtttttcacaagtttcc

SEQ ID NO: 202075 - DNA, 122 bp, Homo sapiens
ggtgttcgatgggggtgggggttcagtgtgggaaggtgagaaagttctggagatggatgccggtgacatctgcacgacgtcgtgaatgtacatagtgccacagaacagtgcacttaaacacg

SEQ ID NO: 202076 - DNA, 122 bp, Homo sapiens
ccggatcgtctgtgggtgagtctcgagccaggaggctctgagccagtggcgattggctgacgcggtggctgcgcactcggcctgagaaactcggcaagcgcgcagtgtcgactccccggtct

SEQ ID NO: 202077 - DNA, 122 bp, Homo sapiens
ggtggcgccgcaggcccccgaaccttggtaaaccagacacacgcccggaagacacctgctcggcacatacaggtacaaaccatacgtctttttgaaacgaatgaagaagaaatttggcataa

SEQ ID NO: 202078 - DNA, 122 bp, Homo sapiens
gcatctgcaaacagccggctcaccctctcccgctctgctacggctgcactctgcacaggacgacagtagagggggcaatgagggcaaagaaccgtcccggactgtacccccctccttccctg

SEQ ID NO: 202079 - DNA, 122 bp, Homo sapiens
tgggtgcgttttatatccccttgactttgatactgattctctattaccggatttaccacgcggccaagagcctttaccagaaaaggggatcaagtcggcacttaagcaacagaagcacagat

SEQ ID NO: 202080 - DNA, 122 bp, Homo sapiens
gaattttcctaagcaagcagtatctagttctactaaatatattctttacaatcttattcccgtactgtttttctctgcaagtaatttgctaaatgttttaaaatttaatcttaaccttcctt

SEQ ID NO: 202081 - DNA, 122 bp, Homo sapiens
tcgcccttgtgtggggagctcactctcgccatttgttttccttccaaaacacaggtgactcgacctcccatttcaagccttcctgccgccttgagctggcacctgtgggctcgaggcactct

SEQ ID NO: 202082 - DNA, 122 bp, Homo sapiens
gctcgggcggccctggccggggagacgagttgcatgtgttggttcagctggcgatagcggcgggagcggagccggcggggcctgtgcgaccgcctgggtaacgaccccaagtgcttctcccg

SEQ ID NO: 202083 - DNA, 122 bp, Homo sapiens
ttccgggcggcgggcacgatggcgggcagcggggttgacatgttattgccgcacatacaccgcctcagctcacagcgcaagcggaaggaagagcgggcgcccggccgcggcccaagggcgtg

SEQ ID NO: 202084 - DNA, 122 bp, Homo sapiens
tgggcagagacattgccaaggtggtcatggtttccggctagcacgtaccagggcactttgcgaagggagcggtcagagaatacgtcctcaaaggtctcctgtagcaaacagatagggcaggc

SEQ ID NO: 202085 - DNA, 122 bp, Homo sapiens
ttgtgtgtctccctgtcgctggcagcggatcactttctggctgaagaaaagacaaaacgacgagggaaacaataggacctgtatgttttacacacagttctcattcgaaatgtatcatgatc

SEQ ID NO: 202086 - DNA, 122 bp, Homo sapiens
ttgtgtcaccatcacaggggtcgtatctgatggggtgttaaaggaggtgatccgcgaggccgtttcaccccaggccactgccacactgggcctgaactcttggctttgctgccccagtgccc

SEQ ID NO: 202087 - DNA, 122 bp, Homo sapiens
aggtttgatagaggctgtcacgttttaggaatctcaatggtcccccagacaataagccaacggcctttggcgggtgggattttgctgaagtcatttctttgtgactctgtgggcgaggcaag

SEQ ID NO: 202088 - DNA, 122 bp, Homo sapiens
ccctgtggcccaggctgcctcgcctggggaggccagcctcatcccagggcaagaagtctgcgcggccaaccctgagggctactcctagacactatttgttccaggtggctggggtggggctg

SEQ ID NO: 202089 - DNA, 122 bp, Homo sapiens
ccagcttcccacaacttgttcctagccctgtctcctgtttcctctggtttctgagtagcacgaccactagccagtccatctccatctccatccccatcctcacccactttccagcctttaaa

SEQ ID NO: 202090 - DNA, 122 bp, Homo sapiens
ccgcaccgtgagctttgtgactgatccgaggcggcgagcgggggcactgcactgctgtggcggggaagtcacggctgacaagaactgccagggacgaagccacgtgcattaattcattaaaa

SEQ ID NO: 202091 - DNA, 122 bp, Homo sapiens
ggtgtacgcactgcagcccctggaccacgaggagctggagctgctgcagttccaggtgagcgcgcgggatgcgggcgtgccgcctctgggcagcaacgtgacgctgcaggtgttcgtgctgg

SEQ ID NO: 202092 - DNA, 122 bp, Homo sapiens
cccctccccgcagcttccctgttccctccccagttcctcttgtctgtagggtgggcaaggcggctgactcctactcctgagttaccacaagtcagctgcctgcagatctccccaccccatga

SEQ ID NO: 202093 - DNA, 122 bp, Homo sapiens
agcaagtgggaaagacctgagcaagaagagctgcatccttgatacattgaagagcagccacgactctttcagctgcttgagagaatgctgtgagatgaatctgaggaattaggcagagcctt

SEQ ID NO: 202094 - DNA, 122 bp, Homo sapiens
cgctcagtggcgcctttgagaccccgtccgccaatagtcaacatggggccgcagcgcaggcgcagagggaaggtagccttgccggtgacgtcactgctccaggccagatggcgtgcccaccg

SEQ ID NO: 202095 - DNA, 122 bp, Homo sapiens
gattatggatcattcattccttcattcattccctccctccttcatgagagaactactgagcgagtgtgtttctcactttgggccctggcatgtgcagggtgtgagtggggagagaaagcaaa

SEQ ID NO: 202096 - DNA, 122 bp, Homo sapiens
aggtgagctggaggaggaaaagacaaacttggagagccagacattgagattccattgaggcgttggaggtcacaacgcggtcaaaaacatgttgagaggacttagctgcaaagttgttaact

SEQ ID NO: 202097 - DNA, 122 bp, Homo sapiens
caaaccgtgcgattctgatggaaaattcattagtcggctggtctctttccctcccctctccgtgttcccaggcagctccgcgcctggcgtgtcagcctctccatccagattatctggagacg

SEQ ID NO: 202098 - DNA, 122 bp, Homo sapiens
gaaccccgccccgcgcctccagccaatgagaccggagcgcgcccccggagccccgccccgcgcccctagccaatgagtccgaagcgcctgctctcggagccccgcccccacgtctcagccaa

SEQ ID NO: 202099 - DNA, 122 bp, Homo sapiens
caccatacgtcattttataaagccggaaactacatttcccaaaaggcctttatttttcctcgcgggaaaagggattgcaattactataggttttacaggtatcgcgagatttcgtcaaatct

SEQ ID NO: 202100 - DNA, 122 bp, Homo sapiens
agggatcctggggaacacactgcttcccgcttagactaggcctcttgagggctgagataacgctccgctaaatcgtggagttttctagagcctgggatactgtctcgctctcagatctgagg

SEQ ID NO: 202101 - DNA, 122 bp, Homo sapiens
ctggccggtgccgtgtgcacagctctccccgagcctctggtggatggagacaggtgggcccgtaggtggaactgcccattccccgagaatgaacacttctgcctgttattcttgtcattcat

SEQ ID NO: 202102 - DNA, 122 bp, Homo sapiens
aactacatgagtggagaggattctgggaattcaatggagtagtaagcaccaggactccatcgccccacctaaacagtaattgcactggtagaatgtgtttgatgtaataattttgaaactct

SEQ ID NO: 202103 - DNA, 122 bp, Homo sapiens
agggcccgttccccctcccacatccccccactgtctcaccagtcccccccagggacagggcgaggcacagaaccaggaaccacatggtgacagaggtgtccaggggccagcaggtggaggaa

SEQ ID NO: 202104 - DNA, 122 bp, Homo sapiens
cacattacctgggaaccgtgtcttactcatgtctgagtctctagggcttagtgccacatccgaggggctagcttaacatgtaacagtcatccactaatcacgattccttatggtcagcagct

SEQ ID NO: 202105 - DNA, 122 bp, Homo sapiens
ttaatatttttaacgaaccccaagcccctcaccctcagccttcgcgggacgcctgcgtctcgcaacttcagtttgtatctccaaactgctgagcattcaaagggttaaatgggaccgggagg

SEQ ID NO: 202106 - DNA, 122 bp, Homo sapiens
ctctccatccttagtcattaaagaacagcagcgcctggcacgttcttggaggaccccgggcgcagaggaggaaagggagcaggcgcagggggactggaaaggcagcatgcgctcgccaggag

SEQ ID NO: 202107 - DNA, 122 bp, Homo sapiens
atagcagccatcagccctcatcattcctagaggactacccagtctggttcgtggcattcccgggtgtaactctgcttacacaataggaatgatattcagatgggctcatttcaggtcaacgt

SEQ ID NO: 202108 - DNA, 122 bp, Homo sapiens
cccagggtcgaatcctgcccgggccacctccccactcggtggcctcgccaaggtgcttctcgctttgcgcccttgtctgcgggcagaaggttttgtgaacattggtgccaggattgcgatgg

SEQ ID NO: 202109 - DNA, 122 bp, Homo sapiens
tcatgctcagaacacacttttcttcccagggtacatccacttttgcaccccaagaggatccggagataaagaaggtaccaggcaattccaaacactggggctgggtcccagggagaacaact

SEQ ID NO: 202110 - DNA, 122 bp, Homo sapiens
aattctgggaagtgtagtccagacgctcagtggagtcgcggtcagtttggctccggctggcgggtcccggggaattctgggaagtggagtccaaacattcggtggagtcgcggacacttccg

SEQ ID NO: 202111 - DNA, 122 bp, Homo sapiens
ctgggtccaaacaggaacctctctgttggcacgaagcttttgaggggagcaggcaggcctcggaggcaggggagggtctcctcctggggaaccatccccgtccagatggtgcccccaaccag

SEQ ID NO: 202112 - DNA, 122 bp, Homo sapiens
tggactgtggggttggagctggggagcgcaggagtgccgtggggtccttctgccgcagctcgcccgggccttgtgctggaggcacgtgcagggagcaccaaggaggaaggcaagctgggtgc

SEQ ID NO: 202113 - DNA, 122 bp, Homo sapiens
tgagcacacatagtacctagttacatcttaagatcaggtttataaaactgtggagtggagcggtatggtatggaatgacttggaatgtaagctgtcagggagaaaatgttgttacacttttg

SEQ ID NO: 202114 - DNA, 122 bp, Homo sapiens
aagtgggccagacaagagaagtctgatggccagtttttctccagtgttaagttaactcagcgtaacagcttttccaaaaattaaaatacaaatattttccctaatttcttaagacacgaagg

SEQ ID NO: 202115 - DNA, 122 bp, Homo sapiens
agcggatgatccagagccctccgcacagatacctgttgctgactacaagagatgagagtgcgcatggaaatcttctgtcccctccatgtctaagccctctgacttcctttcttccccagcaa

SEQ ID NO: 202116 - DNA, 122 bp, Homo sapiens
ttatgggcagagatcagagctggcagcaggggtggcacagcggctggcgaggagaggaggcggttggtgctgaacacgtgcatccttgttgaagctctgcactgtgtgctccagtctcagag

SEQ ID NO: 202117 - DNA, 122 bp, Homo sapiens
ctcccaaccatgaaattaccaatacctacgtgatcattcatctattattctgctacaaagcgtgacacaaaggtagcaaagtttcatatcctttattcaccaaaacaaacgtaattgttgat

SEQ ID NO: 202118 - DNA, 122 bp, Homo sapiens
cccgagtggaagccaagcttcggttttccggcctgtaaaatggtatcatagctcccatctcgccccctgcgctgggagaaatgggcgtcttgtcttcgctgcgcattgcatgcggaggagca

SEQ ID NO: 202119 - DNA, 122 bp, Homo sapiens
gtttgctgaacttaatctttgacttattgttctagccactatcgaaaacgatcggcatcccggggtcgctctggaagtcggtctagaagtcgctcaccctcagacaaaagaagtaaacgtgg

SEQ ID NO: 202120 - DNA, 122 bp, Homo sapiens
tcactgccccgggccagcggggtcggctcgcccctcccagtgcggggcctgtccagcccacgcccacccctgaactcgtgctggcccgcaagcgccgagcgcagccccagttcccgcccacg

SEQ ID NO: 202121 - DNA, 122 bp, Homo sapiens
gcgcgtgcatgcattttggggggctggggctgtcctcacttatcaaagcaattcccaaggcggcctctctgagtgaggcagggtctggcagggccgagcccctcagagccctctgccccgtt

SEQ ID NO: 202122 - DNA, 122 bp, Homo sapiens
ggccgggagcgatctgggtcgaggggcgagatggcgccttcctcgcagggcagaggatcacgcgggttgcgggaggtgtagcgcaggcggcggctgcgggcctgggccctcggccccactga

SEQ ID NO: 202123 - DNA, 122 bp, Homo sapiens
acctgccttttcctgatttgaaatggtgatctgcgttggtctcaagaccttgtgcagcctcgcagagattgctctgcacacatgtgattgcatctaatcaggactttttctgaaactgctgc

SEQ ID NO: 202124 - DNA, 122 bp, Homo sapiens
gacgggcgggtggtactggtcaccggcgcgggggcaggtgagcatgcgaaggttggaggccgcgccccttgctgaggcgcagctggctgctcttttcgggccggcatacgcgcgcagccgca

SEQ ID NO: 202125 - DNA, 122 bp, Homo sapiens
cagatgtccccctccatcccttcccagccctttctgtgttgctgtgaatctgtccatcaccgagaactggtggggagatgtgggggaggtggggagatttctttgtgctgtgtcaaggcatg

SEQ ID NO: 202126 - DNA, 122 bp, Homo sapiens
gcattgggattacaggagtgagctattgtgctgggccataataactttaataactactttcgacaatgttaaaaagtccgagttcaagtccctgcaaatttcaagaggcatcctctatttcc

SEQ ID NO: 202127 - DNA, 122 bp, Homo sapiens
cacttggccaggagggccttgcccaaggaggtaccgagtggacagccctgtctcccagcacgagtccagcagatgccactccagggcgggcatagtgcttggggtctgatttccagcagctg

SEQ ID NO: 202128 - DNA, 122 bp, Homo sapiens
cagtaacactgggagcagaacttgccgcagacccacgggctgaggggaaggaaatggggccggacgtttccaggataagtccttgcgtccacaggcgccacctctgagttgctcctccccct

SEQ ID NO: 202129 - DNA, 122 bp, Homo sapiens
gtaatgccaaaaaattacactgtagtaaatttaaagcacccagccaggcctctgattcagcgttccagtacaagtgtttgtcaaggcacagcccagggtttgagtgcgtgtttccatggttc

SEQ ID NO: 202130 - DNA, 122 bp, Homo sapiens
cttttcgattccttgtatccctaggctgtgaggaggtccccctgcctggggggatgggcacgggaggtggaatagatggaatggcaagacctgggttagctctgataggaaaagaaaaatat

SEQ ID NO: 202131 - DNA, 122 bp, Homo sapiens
tgtctggtggggtggaggagaccacgggcagcgcgaggctgtctggtggggtggagactgcgggcaacgcgagcctggtgctggcgggtgtctggtcgggtggaagagactgcgggcagtgc

SEQ ID NO: 202132 - DNA, 122 bp, Homo sapiens
cagcagctggcatgatgggatagacggtgaagcgccagccccagccattcacagacccatcgctgatgaacttccactttaactcatcccctgggatgcgcagctcgctggaccagtcggac

SEQ ID NO: 202133 - DNA, 122 bp, Homo sapiens
gtggcgggcgccggtagccctagtgtttggaggtgggggagggatttggaatagacttgtcgcccctctgggaatcatctgggttggggaaccttcgggaatcagctttccagaccaagttt

SEQ ID NO: 202134 - DNA, 122 bp, Homo sapiens
aaactgactggtttgctaccaattggacacaggccaggaattcaattggctagcttcatacggagtgcaatggctatgtgggactaatctttggccctgattacccattggctagataggac

SEQ ID NO: 202135 - DNA, 122 bp, Homo sapiens
gggcagacggcggcgggggcgccatgagtcagaggcaggtgctgcaaggtagggccgaggcgggcaggtgccctaactagctggcgccgaggagacccgggtgcggtgggctccaccgactc

SEQ ID NO: 202136 - DNA, 122 bp, Homo sapiens
gaaatctgtgtgtgtgtgtgtgtgtgtgtgtgtgtgtgtgtgtgtgtgtgtgcgcgcgcgcgcgcagttagtcttcggggctgcttattgtgtgtgagagccaagtctttctaacacacgag

SEQ ID NO: 202137 - DNA, 122 bp, Homo sapiens
gcgctcaattcctttagctggatccttccagttcatgactgatcggtttaaaatatgggtcgttcaaaagccgtgtgaacccgggctagtggctatacctctctgagactgttttcttagtg

SEQ ID NO: 202138 - DNA, 122 bp, Homo sapiens
cctcattgctgagaaagtgcaggtagggagtgagctgcctgtgtctcccctctggatggccgagacctcggcttcctgaggatactgaagtgcattttctcctaggcggagaaaccggatat

SEQ ID NO: 202139 - DNA, 122 bp, Homo sapiens
gacgctaatgggaaggggggtggacaggatcgagtctggccagctgctccgcagtgttgacgctgccagtgtggcctcttcagccagcctgttcaggagacagaatagggggatcaaagata

SEQ ID NO: 202140 - DNA, 122 bp, Homo sapiens
ccatcgccgggcacaggcctgtgtgcccagggcagagcgcctggtgcatgctgtggagggcgtgggcaatggcgtacaccgcatcaatcacaaactgcaccttgccctcctgctcgtaggtg

SEQ ID NO: 202141 - DNA, 122 bp, Homo sapiens
cctctaatttgaaaaatcagttgagaaagccaaagttgaagcatgtgaaagggacagccccggagtttaattccctatgaaattaatgatgccaaatggacaagcctttggaagcaaggaag

SEQ ID NO: 202142 - DNA, 122 bp, Homo sapiens
aagtctatcagcttgattgtgaagtcctcggcgatcacgatgttctcatccttgatgtcacggtggatgatgtccttcaagcgcaggtatcccactgctgacactagctggaatcaggaggc

SEQ ID NO: 202143 - DNA, 122 bp, Homo sapiens
tctgctcagggcttcggggaccctttccagccattgccctgcacctacccaccagatcgccgccctggtgggcgctcctggccctgtcctccgcgcttagtttgtcattgggcgcccagatc

SEQ ID NO: 202144 - DNA, 122 bp, Homo sapiens
gatacccagactgagctggaactggaatttgtcttcctattgactctacttctttaaaagcggctgcccattacattcctcagctgtccttgcagttaggtgtacatgtgactgagtgttgg

SEQ ID NO: 202145 - DNA, 122 bp, Homo sapiens
tgtacttttcaaattcatttgattacgtatttcttttataatcaaaaacaacgtggcggccgggtgcagtggctcacacctgtattcctagcactttgggaggccaaggagggcggatcaca

SEQ ID NO: 202146 - DNA, 122 bp, Homo sapiens
atgagtgaaggaacacgctataatgctcactcaatgcagcatcggtgataattgcgccggcgggcgcggtggctcgcgcctgtaatcccagcacttttggaggacgaggagggaggatggct

SEQ ID NO: 202147 - DNA, 122 bp, Homo sapiens
tttggaagcagccacaggaggcctaagggacctatacccttggtttgaggaagactgtggcgagggagagagggagggagggctggcagtgagggcaagggctgggaaaactgagcacgggc

SEQ ID NO: 202148 - DNA, 122 bp, Homo sapiens
tttgcatactgaatttgtttcttttaaatatagacccagaagtggcattgttggaccatacggtagctctatgtttagttttttgaggaacctccccactgttctctatagtgagtgcacaa

SEQ ID NO: 202149 - DNA, 122 bp, Homo sapiens
gggcaccgagcggaggcgcttgaagatggtcaagatgtcctgcttgctggggtcccccatcgtcagctgtgagccgcggcgcagctggcccagccaaccggtaagagtcgacgaaaagcggc

SEQ ID NO: 202150 - DNA, 122 bp, Homo sapiens
cggagcacggggaccaaaatagacacgcttgctgcagctctttggtgtctgttccttgcacgagggggagggcgggcgtgggcagcgggagagctggggtcccccggctacagggtgcagga

SEQ ID NO: 202151 - DNA, 122 bp, Homo sapiens
gatgatgatcgacatgagacaacaaggtagggactttctctgactgttcaacccaagagccgtctgcatcagaatctctggagactgaagcttggacttccttcctccctaggggccggcag

SEQ ID NO: 202152 - DNA, 122 bp, Homo sapiens
gaggaaatgaagccttatatttactcatagatgagtcaatggggaagcccggattcttcccgacatctgtgtggtagccatcttccaagatgacccccatgattcttgcccattggtactca

SEQ ID NO: 202153 - DNA, 122 bp, Homo sapiens
gcggccgcgcggatctgaaggaggcgccagagcactaggcaggggccttgagtggtgcagcgtgaggcagcgcccagaatggagatgggtcttgaggttccagaatctgagatcaatcacct

SEQ ID NO: 202154 - DNA, 122 bp, Homo sapiens
gcctccctgggccattccaggctctgagctgccgtgtggcggggtgggcaggctgccagccgagggagcccaccacaggggagccgtgtgcattcccagacgggcacattcccgggcacatt

SEQ ID NO: 202155 - DNA, 122 bp, Homo sapiens
gcagggccggcagtcctggcaaacctagaaggcgggaataaccctggtgacgggcggggccgggctccggcgctaactgcatccactaggtttggtcaacacagagccgcgccaactctctg

SEQ ID NO: 202156 - DNA, 122 bp, Homo sapiens
tgcccgattatgcacatggcaggcagatagacctctccaagttgcaatctaggtatattgcgacttgcctaaagtcttgcagtggcttttgttgctcttaggatcgaggccaaggatgctac

SEQ ID NO: 202157 - DNA, 122 bp, Homo sapiens
cgggaaccgggccccggggggagtcggccgggctgctgctgctgctgctccaggtgctgccgcccggggctacggcagggccgggacgccggggcacgcggggcgctggcgctggcggcggc

SEQ ID NO: 202158 - DNA, 122 bp, Homo sapiens
atttcagagctcagcgctgaacacttcgcttcagagccgcgcctctagatggcggaggaacgctgcggggaggggcgcagacttcccaaggatgcagttcagacctctggtgatttaatagc

SEQ ID NO: 202159 - DNA, 122 bp, Homo sapiens
cgggccccgccgcgggcaccaggggtcctgaagggcacgcaggatgctggggcactgggccggcggaaggctcctagtggccggccggggttcgagttcgaggtgggaattctgggtttagg

SEQ ID NO: 202160 - DNA, 122 bp, Homo sapiens
ggtgggcctgacctgagcctgcgctcagggtgctgttatgctgaggcgggcatcctgcaacgtcacatgagcccccagccactcccaagagctcagacacctccacacacagatttgttcca

SEQ ID NO: 202161 - DNA, 122 bp, Homo sapiens
gaccggccccaaggagcaggggcgaacgtgggcgcctcgtgccctgattggccgacggggcgcgcgcggcctggaggggcggggcggacgcagagccgcgtttagtctatcgctgcggttgc

SEQ ID NO: 202162 - DNA, 122 bp, Homo sapiens
aggccaacggttggccccaaccgccactgactacagcctgcgcccgcctcttttcgttgccgttacctgtttccggcagtcgacacgctcttcgcttctcggggcttgtctccgtgtcctcc

SEQ ID NO: 202163 - DNA, 122 bp, Homo sapiens
tggacagagtaagttctttatgggacatagggcaagcattcttatactgcctccagaccacgcataatcagtaaaactcatttatgggtattttcaggaaaacaaagtaaactaaataaaaa

SEQ ID NO: 202164 - DNA, 122 bp, Homo sapiens
ataatgtacaaatataagatttgactgcaaggttagagccacattaagaaaatcatcccccggtacagtcactctaagaacagaaaccagctaataccaaacaatgaagtagtgttggttcc

SEQ ID NO: 202165 - DNA, 122 bp, Homo sapiens
ggaccttctggaggtaaatctgcagaatggcattttgtttgtgaattctcggatagaccgcgaggaactgtgcgggcggagcgcggagtgcagcatccacctggaggtgatcgtggacaggc

SEQ ID NO: 202166 - DNA, 122 bp, Homo sapiens
agatgtacataggctatgccgtaaccgaagtttggttggtgtagggtggattggggggagcggtgttttaagcgcagcccttcatcccgccttgaagtctagcttgatcctcccaggaaagg

SEQ ID NO: 202167 - DNA, 122 bp, Homo sapiens
caccagggcatggtacattagcgggtggaggtttggcccacccctgacctggcagaaaggcgcctgtgggcgtgggcataagccagaagctccctgccagctaggaggtgggggctatgtgg

SEQ ID NO: 202168 - DNA, 122 bp, Homo sapiens
agcaatctgccaccctgggagatgaatgggaaggtgcttccacatcctccatgatgaacacgactccacacggcccgatcacccacctaagcactcgccacaggggtgggctgaggatgggg

SEQ ID NO: 202169 - DNA, 122 bp, Homo sapiens
ggctgtgctttttttttcttttcttttcttttttattaacaagcaacataatcggccgggcgttgtggctcacacctgtaatcccagcactttgggaggccgaggcgggcggatcacgaggt

SEQ ID NO: 202170 - DNA, 122 bp, Homo sapiens
tccccacccagatgtggcagtcaggccagcaaccaaagctgaactcaatgcagaacttcacggtcaaagaaccagcccacgggcagcaacgaggttaaaccctcagcagggatggcctctgc

SEQ ID NO: 202171 - DNA, 122 bp, Homo sapiens
atgaatggtgccagccagaaacactctgagtccccagtacagcccactgccagggtgctgcggcagtggtgctaactcagcaagggctcagccagacccaggacttttttggctaggccttc

SEQ ID NO: 202172 - DNA, 122 bp, Homo sapiens
aatagtatgcttgagggtgctagctatctattgctgcaaaaggaatgaccacaaacctagcggcttaaaacaactcccttgctatttcccagtttctgtaggtcaggaatctgggtatggat

SEQ ID NO: 202173 - DNA, 122 bp, Homo sapiens
ttcgattccccgtcccaagcaggggtcctgggaagcaggtgcagccctcgcccttggagacgccatggtctaccgcaaggtgagatggccgcggaggcccgccgtccacgctggagacccac

SEQ ID NO: 202174 - DNA, 122 bp, Homo sapiens
ctccttcctgatcgtggcaggcgccaccacgctcttctgcctgctgcactttggagtgatcggcccccagagggaagaggtgagtgcctggccagccttcatccactctcccacccaagggg

SEQ ID NO: 202175 - DNA, 122 bp, Homo sapiens
tccgagcccctgtcgtcgggctgggggagtgcctgctcctgtaccggccgctccgagccccggtcgtcaggtgccaatgaaccatgtcaaacagatgacgtggatttttctgaatctgctgc

SEQ ID NO: 202176 - DNA, 122 bp, Homo sapiens
gcccacacaatgcgccccgtgggtgggggtggcaggccgagcgggaggccgggtggagggcgctctgtgcgcggcggagctcgccgcctgactggccagaaatgggtggagctggcgcgggg

SEQ ID NO: 202177 - DNA, 122 bp, Homo sapiens
atcatttcctccgcaaccatgaagctccaggccttagcaactgaactaggccagagcaaccgaactaggcagaatcgaacagaatttggcgcggtcgggctggccaggctgctcaagagtca

SEQ ID NO: 202178 - DNA, 122 bp, Homo sapiens
tgtcttcgactggatcctgagccaggaccagtcctgccttgggggccactggctgagtggcgcaagagatgagtttagaaacggagtgcagtccacatacagggcgggttgtgtggaagctg

SEQ ID NO: 202179 - DNA, 122 bp, Homo sapiens
gcaccggctgccagctgagaccccagaggggtaactaacggcctgaggaaggcatttcttcggggaacatggcgtgcccgtcgtggctacgttctgccaagccctgtgacgttggaggggag

SEQ ID NO: 202180 - DNA, 122 bp, Homo sapiens
tagctgtttatgggaaggaggggctagagacagcgattgaaaggcaacagccagtaggttcgaatccagaccctgcatacctccacgtgtggccttgggctatagattgcagctttaaaaaa

SEQ ID NO: 202181 - DNA, 122 bp, Homo sapiens
tcttgcctgagctctgaagataaaggaggaaaaggggtggcattaccgatagcgactaagcgacaggtagctgagaaactgagctctgactggaaaaaagggggaaacccgcacccccaaga

SEQ ID NO: 202182 - DNA, 122 bp, Homo sapiens
aagatggagacagcttctttctcgcctttccgagattatttactatctgcgagacacttccggacgcacagcgcaacccgcccctcagcctcgcgtcacttccttccaggcctgggtaggat

SEQ ID NO: 202183 - DNA, 122 bp, Homo sapiens
gagttactatccctttaaatacaggcgtttcggcctagctgccgccggtccaatccgcagcgcttccgtgccccactttcccgcgtcagcctggctccggcctccaccagggggtgctagtg

SEQ ID NO: 202184 - DNA, 122 bp, Homo sapiens
tagtatcatacagaatagtttcagtgccctaaaaagccctctgtgctctgcttatgttaccgaaacaccaaaggtttggtctctgtcctgctgctcaccacacagaaagccaatcactgaga

SEQ ID NO: 202185 - DNA, 122 bp, Homo sapiens
gggggaggccttggattgggattgaggtggggggcgttaccacaggggcaagcatctgaacgcttcagtctaagagtggtggcagtttctgggtcttggtactcaaaaagtttaaggtgact

SEQ ID NO: 202186 - DNA, 122 bp, Homo sapiens
gcaaaagtcgcgagaacagccctgctgccacacccctggagaggccgggattggggagaacgaggccagggaatgaggtaatggccaggggacgccgcctaggattgtgggatgtgtagttt

SEQ ID NO: 202187 - DNA, 122 bp, Homo sapiens
ggcgaggggcggggagagctgggcacctccccttggggcggggcggggcgggacaggaggcgctggactgagctgccttccttggtctgggtgggaaggtattcctggaagtggcgagcagc

SEQ ID NO: 202188 - DNA, 122 bp, Homo sapiens
gcgctgggccgaggacacacatgcacacgcacacgcacacgcacgaggagaccggggaggcgcggggcccctgcaccctcccagactcacaccgacacacgccccgtacacggggcccccgg

SEQ ID NO: 202189 - DNA, 122 bp, Homo sapiens
cctgcctcactctcctctgagcccagccatagtcctggcttcccacttccagcctggcgccggccccgcaccttaagcgccctggctgcccagatcccagctggttcccctcggggtgtggg

SEQ ID NO: 202190 - DNA, 122 bp, Homo sapiens
gagagtgggggctccactcagagttgaccaccttctctgccacaacagggaggttctgcccggggctaaggggtggggagggaagcctggggatatgagcttagtgagggccacccgccgtg

SEQ ID NO: 202191 - DNA, 122 bp, Homo sapiens
ctaggctcttttgggattcaggtggagtgtattggtcagaacaggagtcttcacatttgccgggtaactctcttgcttataaattttggggatgatcctcaaagatcaagttggggcagttt

SEQ ID NO: 202192 - DNA, 122 bp, Homo sapiens
tacacgatgagaacaggcaggaaggtgggaaggatggagctgctggttacagcctcgcgtcgggcttagcccatgaggctgtcccgaatgactgacggcagagaagtttgaacagaaagagc

SEQ ID NO: 202193 - DNA, 122 bp, Homo sapiens
cggagatccctgagctgcgccgccgcttccttcgtcaacatccagcagctacttgatgagcgccctccagtgggccttaggtccctatgccggcgcggggttacagcagtggacagacaggc

SEQ ID NO: 202194 - DNA, 122 bp, Homo sapiens
cggccagcgggcgcgcccgcgctccccgcaccccgcctggccctgccggccacccccgcgcgcagcctagtcccccagcgccctgctccgccagcgccccgtcccgcccgcacacctccgcg

SEQ ID NO: 202195 - DNA, 122 bp, Homo sapiens
ccaaaggacagctttcctggctgaacaagatgtaaacagtttacgtgatttccaaccaagcgcaaaagtacaggtgcaaaagaagacggcagacaccaaacttcccctgcagccacgccctc

SEQ ID NO: 202196 - DNA, 122 bp, Homo sapiens
actaaggtgtggggagccgatttcaggcagtgcgacaaatttgcagaaatctaagcccctcgtggaaggttgccaaggtgaggtgaccttgagtgaatgcgtgtaggtggaaaaaggttccg

SEQ ID NO: 202197 - DNA, 122 bp, Homo sapiens
cgcaagagccgctccgccgggagtgccggggaagttcgcgctggcagcatggggcggtgacgccgcaccggccttccgcgcctgccagccgggcgagagcaggcggaggagaaggaggatgc

SEQ ID NO: 202198 - DNA, 122 bp, Homo sapiens
gcagtgaaaagatgtggagaatgtccgttgtcattcttgccactgtattccatttgctaccgagatataacattaaggtggacacattttctaactgtattaattaaaagtcaatggataca

SEQ ID NO: 202199 - DNA, 122 bp, Homo sapiens
tcatacctatgaaaattcttcagttattaaataactttgtcagtgctacctatggtaggccggaaacaatgtagattaggaagtttcatgaaaattaacttttggggctatggagaaacagt

SEQ ID NO: 202200 - DNA, 122 bp, Homo sapiens
gctttcctctcttctagtcatgtgcctgggaaagattgatgccagctccagaaaggcatccgaatggtctaagtaatgccatccatctgtcagtaatagattcagaaatgggtatgtgattc

SEQ ID NO: 202201 - DNA, 122 bp, Homo sapiens
ccatggttccagcgggactcagtcaagggctgtgcttttagggaaggttccacacacacacgagcagggagatgcagcatgcctcacagcgtccccacccggacctggccgtccccaggtcc

SEQ ID NO: 202202 - DNA, 122 bp, Homo sapiens
aacacctgggggctgtgcttcccctatcaaaacacagtctgttggtgagatttgggctctcgtgcattgatttagtccactgttgtgactgacttgcatagttgaactcaaacccacaagag

SEQ ID NO: 202203 - DNA, 122 bp, Homo sapiens
tccggaactcgggctagtggactctggggaatcaggcgctgggagaggccttcgcagctgcgtctctcctgcccagcatattgtgttgaatgaggcaagggagtgagggggtcgtaaaggaa

SEQ ID NO: 202204 - DNA, 122 bp, Homo sapiens
cccacaataggaaacatcatattgtgacccagttcacatgtacctagaccgaatattatacgtacatgtgaactggatcataatatacatacacacacacatatgcattatcactgaaacaa

SEQ ID NO: 202205 - DNA, 122 bp, Homo sapiens
ctgggcagggctggcccgggcttgacgtcacagggcacttaggtcagagttataattaaccgaggctcagcagagggggaggaaggcctcaacagggtgggggaggacaggcaacccctggc

SEQ ID NO: 202206 - DNA, 122 bp, Homo sapiens
taatggctgtgttaattacacaggggcgatttcgcggggtcagggagatggggccagctccgaaagaacttttccaaaaaggaaaaggaaacgaagggaactaccccacaccgtttgggtgg

SEQ ID NO: 202207 - DNA, 122 bp, Homo sapiens
aaaggggacattccacctagtctgcccaacaagtaggtctcagccactgtgccaggagctcgggactccctccctccagaggtttctggaatgcattcagcaggaaaagctaaaagaacagg

SEQ ID NO: 202208 - DNA, 122 bp, Homo sapiens
atctgcattgttgtcattctgcagcagcagggcggcggctttcgtgtcgtcttttcgggccgcgatatgaagagctgggagacgcacttttcctttggtgtcattctctagcaggagcgaaa

SEQ ID NO: 202209 - DNA, 122 bp, Homo sapiens
ccggcttcactaatactcagaggtatgggtccaaatctgtttcccctttgagagcccatccggggaggggcccaggctcatcactggtatccccagcactcagtccaggtctcaagccagaa

SEQ ID NO: 202210 - DNA, 122 bp, Homo sapiens
tttttcccccttccaggatatgtagcggcagaggccaaagtctataaatttctgactctgcgccctactcattgtccgagtttccgcgtttttcatgaacgctctcggccgccgggaattct

SEQ ID NO: 202211 - DNA, 122 bp, Homo sapiens
aatggactacaactcccaggagtctccccgcgagcccgcccgccgggccgtgggtctcggcggccccggcttcccaagagctctgtgggaaatgtagttctctggcgcgccctgcgctcggg

SEQ ID NO: 202212 - DNA, 122 bp, Homo sapiens
gcagccaggcattgcccgggccgagcctgtgcgcctccagccgcgccttccgcacgaccccgcgcgctccgacggcgctgtctgtgagctcctacctggccctcactcatcacgcgggactg

SEQ ID NO: 202213 - DNA, 122 bp, Homo sapiens
tatattgatgagtagagcctgtgatagatttagagagtgagaaagccagctcttacaatgcgtgtaatgccatctcatgggacagaaatttggctaatatactcctggagatcaagtttggc

SEQ ID NO: 202214 - DNA, 122 bp, Homo sapiens
tagacaccacaaaacaagggcagcctacattacggccaaatataggatgtgtttctaaatcgtgatgcagtaaagcctacgattccttttccagcgttcaaaatcctttgaacactcccaaa

SEQ ID NO: 202215 - DNA, 122 bp, Homo sapiens
tccccgccctggacctgcgcctccctgccccaaagtggaagggcttaagtgtccctagagcgggcctgaggtccctgggcaagcccactcccacccagaaccagaaaggaccccaaacactc

SEQ ID NO: 202216 - DNA, 122 bp, Homo sapiens
gttcggaagcactcttattatcttagcagcagcatgtgtggaaatcatttctcattacagcggagggcaggcattgtgcagagggttaagtgggcctgcttgaagttggttgttgttagctc

SEQ ID NO: 202217 - DNA, 122 bp, Homo sapiens
ttactgcctgtcccactgccagctaccttctcaggatactccttgcctagcaagccagatcgcctctggccatggaagccctggggataaatacatgctgtagggccagggagtggggcttg

SEQ ID NO: 202218 - DNA, 122 bp, Homo sapiens
aagtgagtactttcccacctggggagagcctaccaatgggcagtactcctgaggaagccacggggagccttgcaggatgttttgctggaagggaggagccagagaagatcattttacctgtc

SEQ ID NO: 202219 - DNA, 122 bp, Homo sapiens
gaatcttaaacctaaaaatagagatctgactgatgctctttctctccctctgtcacatatcgtagattttataggttcagaaagtgtgtctcagaggagttagagaagaccgattaatagat

SEQ ID NO: 202220 - DNA, 122 bp, Homo sapiens
ctgtaatcccagctcgcacacgcagccgcggaagcccaccatgccttactgcctcctcctcgtaatctcagcctgcaatgatccctctaaccatgatgatcagaggagttcacacacatgaa

SEQ ID NO: 202221 - DNA, 122 bp, Homo sapiens
tctgagcttcggccggcagtttccgagcccatggagtcccgccgtcaagctgcggttggccggcctctgctcgggcactgacatcatgcaagggaaggaaatgacagtggtcccgtctcccg

SEQ ID NO: 202222 - DNA, 122 bp, Homo sapiens
cttgtggggaggctctaatttctccagagatgcttctctacttggaggtctgccctgtgtcgggagcattagtggccctgcagagaggtgggacgttatttggatactcttgctcgtaggga

SEQ ID NO: 202223 - DNA, 122 bp, Homo sapiens
gggaagcctctgcacgccctcccccgctgctctcggtcgcctcctcgccgccagccgccccgggtgcatcccggcttgctccgctccacgcgacccagattcctgccccgcccccgcccctt

SEQ ID NO: 202224 - DNA, 122 bp, Homo sapiens
gcggcggaggtgctgggacccagcggcctgcaggccggcagttccgttttctcctccacgcggccgctgacagccctgcttcctgccgagttattttcatctgcttcctgtttgtccctggc

SEQ ID NO: 202225 - DNA, 122 bp, Homo sapiens
cactcctatgtatgtatgtagtaggaaggaagccgctgagtgcagctgtgcgcgccggggcggtgcctgtgcctctctggattccgtgtttcttcgggggtgctgagcagcggtgcttccgc

SEQ ID NO: 202226 - DNA, 122 bp, Homo sapiens
ctcaacaaggcctgcatctccggactggagctcaagtatagcccagcgagtgtcaagaaacgaaattctccaagggtggcggaatcaagccccaagtcccatgtgtcactggaccggtgagg

SEQ ID NO: 202227 - DNA, 122 bp, Homo sapiens
aaacccacccaagccagaacagagccactcgatctgggtttcctgttaaatgttcttaagcgaggagcaaattatcatataatcccagtaattggcagacacagggaaggatcagagtaaaa

SEQ ID NO: 202228 - DNA, 122 bp, Homo sapiens
ttccagaggcgagggtgtcccgggagtgtgggtgtcccaggggtgtgggtgtcccgggggcgtgggtgtcccgggagtgtgggtgtcccgggggagtgggtgtcccgggagtgtgggtgttc

SEQ ID NO: 202229 - DNA, 122 bp, Homo sapiens
gcgggcacactcctcccggttggctccgtatttctccacagtctcgcacacctgttcatccgtcatctccaagaggtcctccaggctcagctggccgggggagatttcctagaggaggggag

SEQ ID NO: 202230 - DNA, 122 bp, Homo sapiens
tccaccttctacctccagcctgccgacgtctacgggcacctggtagggacctgggacaagcgctctcctcccgccaacccctctccccccgccccgcgctgcggcaacgccttgcgcctgcg

SEQ ID NO: 202231 - DNA, 122 bp, Homo sapiens
tgtgttcttaccacaataaaaataaaataaaattctggaattaacatcaccaaacaggcacgatgggatttgattatattgcaacgtatgctaagaaggggttattcatctggtgacagtgg

SEQ ID NO: 202232 - DNA, 122 bp, Homo sapiens
ctgcgtcccggaaggagcgagcttgcggagcgtgaaccagtgagtgaaagcggcgccgcccgccggccgcaggtgcggcaaagccagtgtcatctgccggttctcttagggctcccggaaag

SEQ ID NO: 202233 - DNA, 122 bp, Homo sapiens
aggaaaccgtgtgtgcctactgtgtgcaaggcacttttttaaatataacttccgttttctcgtaagatggaattacatattttttgtctttttttccctttttgtggagaatggggtctcgt

SEQ ID NO: 202234 - DNA, 122 bp, Homo sapiens
ccaggatggccagaggcaaaatcaggaaaacaggagcaagagaaagtgtggaaggcacagcgtgagggccctgcagacacaggggagatgaatttgctgataaatatttgattagagccttc

SEQ ID NO: 202235 - DNA, 122 bp, Homo sapiens
acaagacgctgtgtcctgcagtcatcccctttacacagcagagccccaattctgggaagccggggtcaccccgagcctcccttccccgtgacagctcggccggtgcatcaccttccctcgcg

SEQ ID NO: 202236 - DNA, 122 bp, Homo sapiens
aaacacaaagtctagtcccactaattctgtatgtacgtaaagtcatttaacatcagtcaccgcatgttctcactcacaggtgggaactgaacaatgagaacacatggacacaggaaggggaa

SEQ ID NO: 202237 - DNA, 122 bp, Homo sapiens
ggacaattatatcataactctcagaactaacagaatgaatatgtcctggtaaaacaactccgataagcaagaatctagctaaacataaacaattccatgttttgtcatcctaatataaatgg

SEQ ID NO: 202238 - DNA, 122 bp, Homo sapiens
caccgggaaactgtgctggttcttggacgaggcggccgcccgcctcctgaccgtgcccttcgagaagcattccactttgtagctggccagagggacgccgcagctgggaccaggcacgcggc

SEQ ID NO: 202239 - DNA, 122 bp, Homo sapiens
cctcacccaaatcatatatacactagagttttcactttcattcggggttcgcatcacaagcgactgtgcgatgaaatattctaaaaatctagcatctcttttaaagttcactttgaaattta

SEQ ID NO: 202240 - DNA, 122 bp, Homo sapiens
accgggcgctcaccacgggtgttgggacaagcagcggagcctgcgggctggagccaggctcggaccctccgcgccggggcgggcggccgagcggacgcagctggcagtggcggcgggagagc

SEQ ID NO: 202241 - DNA, 122 bp, Homo sapiens
gagacctctaagaagtccaggtaagagccatccattctgtggcccctctgctacccttaacggcagggatctcaggctcctgccctgtggggcagtgagtgatcttgatcactcactggggg

SEQ ID NO: 202242 - DNA, 122 bp, Homo sapiens
gaggaggaggcgagccagaagttcctagagcagtcgctccagccggggctgcaggtggcccggtggggcggggttgcgcttccccgagagcacatcgagggcggcggcccgagcgacccctc

SEQ ID NO: 202243 - DNA, 122 bp, Homo sapiens
ttcccttcctttttcttgattctgtcattcttcctgaccgacggggaagaaaagtcacctcgttgtgataaaagaacctgaattttgctggttagagacacttcttattaccaagtcacagg

SEQ ID NO: 202244 - DNA, 122 bp, Homo sapiens
aggcgggaggtttcttctgcagacaagatgaatggccacacgtcccttagagcacactcccgaggtagaatcacacacatgatattcagaagcaggcacagtacatcttccccaactttagt

SEQ ID NO: 202245 - DNA, 122 bp, Homo sapiens
cgaaactgcagctgccgtacataaagaaggaccagagcgacgtgtggccgctggttgtcccgtccccctgccccagtacgttgaagaagaaggtgaagaagatctcatccagaaagccgtgc

SEQ ID NO: 202246 - DNA, 122 bp, Homo sapiens
cttgaaaaggacaaagtcagaggactcacactcccgaattcaaaacttattacaaaactacgtaatggcatcagactaaacatatcaatggaatagaactgagtccagaaataaagccttaa

SEQ ID NO: 202247 - DNA, 122 bp, Homo sapiens
tctgtgaggagggaagtgaaagcaaaagagcccggagacgctcccgtgggggctggtgtgcgtgtctgcagaggctgccgtgtgagcctctgtgcagagcttggctgcacctcagcttcccg

SEQ ID NO: 202248 - DNA, 122 bp, Homo sapiens
cctcaagtcactctctttcccctgggcaggtggaaccgcatcgtggagctagtggaacagcgcaaagaggaaatgagcgcggtgctgctggtggagaaccacgtgctggaggtggccgaggt

SEQ ID NO: 202249 - DNA, 122 bp, Homo sapiens
gttgtcccaacaagttgagaagacgcacagtgggcagctccttcccgcagctggtacttccgacttcgcgtgactccggctgcgtccggggagcggggtttttatgggttcagaagggagga

SEQ ID NO: 202250 - DNA, 122 bp, Homo sapiens
atgcacatgtgcagttggacagaatctcctttaactcttgcaacatcctttaggacaggccgtaacattccctacggacaaagagcaaactgagagcttccaggtcatccttaaagagaagc

SEQ ID NO: 202251 - DNA, 122 bp, Homo sapiens
ctcgcgccccggagcggtggtcctcatttcccttcgtcccggctggcgagccacccacctcgcccgcaggttctgccagtcccgcggcccgccagagcccaagctatcctctccgccccttt

SEQ ID NO: 202252 - DNA, 122 bp, Homo sapiens
ggcgcgtttaaaatgagggaagcagcccctgccacacgcccaggccgtccgccgttctcccgcctgtcctgttggatggaggccgttagacgcatatgaaactgcatgccgcctcctccaga

SEQ ID NO: 202253 - DNA, 122 bp, Homo sapiens
ggaaagaaaggtcatggagtcactgagtcccacctatggctgagcttgacaaacaagaaacgcagagtaaactccatttcttcaactttgaaactgattccctctctgttaatccctgaagt

SEQ ID NO: 202254 - DNA, 122 bp, Homo sapiens
gcaaggtgtccggagttggaggtggcctctgggaggtttgctgcccgagggtcctgttgccgccaggactggtgaggagactgaggattgaaggggccaaaagctgacaaaattctgtgcgg

SEQ ID NO: 202255 - DNA, 122 bp, Homo sapiens
aacatcttcagatacctagaaggtttgcccctcagtgggaagaaagcttccaactcccagcggttccagcagaagtcctggggctggagagctgttcctgagttgcctgtgatcacatacca

SEQ ID NO: 202256 - DNA, 122 bp, Homo sapiens
gcactgttcagccaacactaagagacaggtacagcgcacccttgtgcccggaggaaggatcgaagccgtagaggctccatggctccgaaggaaaaattaaaatggcacctaacctggcaatc

SEQ ID NO: 202257 - DNA, 122 bp, Homo sapiens
tttggggctggggggaattctgccaggtaggaactgtcgtgtctacttgaaaatggtgaacgggctcaaagaagtcacttgcccaaagtcacaatgtgatcttgttcttgttctaacacagg

SEQ ID NO: 202258 - DNA, 122 bp, Homo sapiens
cagaggacagtgagcagcagggatagaccccaccgaggacagcgagtcgggcacagaccccgcagaggacagcgagtcgggggtacagaccccacggaggacagcgagccagggggacagac

SEQ ID NO: 202259 - DNA, 122 bp, Homo sapiens
caaaaagtggcgaatctgacaactgaaaatgcgagtcgggcctcgatgagtcgtcccggtcgaacgctggcgcaggctgcggcgttgcagaggacgcgtgtcccggagcgccctgcggggcc

SEQ ID NO: 202260 - DNA, 122 bp, Homo sapiens
gaggggagtgagggcaggggaagccatgggaggatgacaacatggaaacaaggtgcatgccgggaagcagcatcctgggcagaccttgaaaagagacactaggtcggccggggaggctgctg

SEQ ID NO: 202261 - DNA, 122 bp, Homo sapiens
gtgggaagtcaaaaccaacacgtgagaaacggtggatgccttggtaccaaagtcatgcaccgtatcttgggtgaacgaatagaacaatactgcttgcacttttacagcattctactggtgga

SEQ ID NO: 202262 - DNA, 122 bp, Homo sapiens
gtattcagggtgggggccagcaccaaccaccaggcctgtgagcgagtgctactgctgccccgctgctatcaacacattcactgtggcagctgtttggtttcctgaccagtctgtgagcacag

SEQ ID NO: 202263 - DNA, 122 bp, Homo sapiens
tctccccctgcacacacctttggtcaagttgaccccaagaagaaggacaagtcctctgcacggcgatgaggccatacacacagtctgtggcccggctttgggagactgatgggacaaaggat

SEQ ID NO: 202264 - DNA, 122 bp, Homo sapiens
tagttaaggtctcccggctttgtatacagatacgttctgccacctgaaaaaactgataaccggcatttccaatgtgataaattcgaggccaagtaatttaaattcaattgcagaaaggaaga

SEQ ID NO: 202265 - DNA, 122 bp, Homo sapiens
gcagggacgcctcctccagggcgaagccatctgcgaaggtgggagcaaaggcatgaggcccgaaggacgcttgcagccccgggcccgggcccaggaggcgggggaggcctggcacggccggc

SEQ ID NO: 202266 - DNA, 122 bp, Homo sapiens
cacggtgacttgattacactctctcattcatggtcacttccgaagcgctttagtgccttccgtccctaaaccgccaacagccagaacggcttctccccgcggtttgtcactgatccgcaggg

SEQ ID NO: 202267 - DNA, 122 bp, Homo sapiens
attggttaacattaggttacaccaggttaaggactaaaacaggaaacttaattgtcatgacgattgcattttgaaatggcctggttggaaaattggctgttgtctctctttcctgacttctc

SEQ ID NO: 202268 - DNA, 122 bp, Homo sapiens
ttctatgccccaccccttgtggtttcttagggctgctgaaatgaatgaccacacacctggcggcttaaacaacacaaatgtcttatcctacagtactgtgggacagagctccagcaaaggcc

SEQ ID NO: 202269 - DNA, 122 bp, Homo sapiens
tttcctggagtgaagaaaacttgaacaagaaattggtattatcaaagcattgctgagagacggtgggaaaataagttgactttcaaatcacgttaggacctggattgaggaggtgtgcagtt

SEQ ID NO: 202270 - DNA, 122 bp, Homo sapiens
cggggttacgatggtgggctagggggccaggtaggaccaaagacacacggaggcggcctccgggacagccagagggcccgcgggcgctcgggaaaggggcgggtgcacttccggcccccgaa

SEQ ID NO: 202271 - DNA, 122 bp, Homo sapiens
ggagtccccccatccaggcctggaaggagaaagagaggtcatctggtgtccatcccacaacgtggacctatccgcaccctgccagggaagcaggggggcctcaataaccccagacgcactaa

SEQ ID NO: 202272 - DNA, 122 bp, Homo sapiens
tcacctcccagacggggtggaggttgggcagagacactcctcagttcccagacagcgtcgcggctgggcagaggcgctcctcacatcccagacggggcggcggggcagaggcgctcctcaca

SEQ ID NO: 202273 - DNA, 122 bp, Homo sapiens
aacatggcagagagtctgacatttttgtccggaaggacttggggatgaaaacactgaatccgcggtttcccaaaggtccttccaaaggtgacggccccggcacgagttcacaaaccacagct

SEQ ID NO: 202274 - DNA, 122 bp, Homo sapiens
ctctgggtcggaccccaagccgagccccccaaccccgcggctgggctgggcgattggggacgagctccacacatggagaacctggcctcgcctcgcaagaccgcgggacgcgcagatgtgaa

SEQ ID NO: 202275 - DNA, 122 bp, Homo sapiens
tggataggtcagtttagctcacctgtactttccttcgcccgtccacagcgccgtccaaaccgtaccagcatctctgacgaggtgtccatgatgctcctagatctggaaaagtgactgtggcg

SEQ ID NO: 202276 - DNA, 122 bp, Homo sapiens
ggacacttccctgggcgggactgtctcgtggcacccggtggaaccgaggagaacgtggagcgccgggagcggcgaatatggacgactacagcctggatgagttccgtcggcgctggcaggag

SEQ ID NO: 202277 - DNA, 122 bp, Homo sapiens
aaaaacaggtccacccagttaggaactcagattctgaaccctcgcagccacggcattctgcgagccttgtgtgacttccctaaaaaccacaactgctcctggaagctcatctttctaggcca

SEQ ID NO: 202278 - DNA, 122 bp, Homo sapiens
gctccggcgcttcctttccctgagctaaaacgactgggtcctgggatctggcctctagctcgcctgccgagctctttccaggcaaaggttggagaccgccgaagtgccggcctcgcggtgcg

SEQ ID NO: 202279 - DNA, 122 bp, Homo sapiens
ttgttgatgtattcaactgattttccgtgagcacccactttgtgccagacagtaaggactcggagataaaaagcagccctctgctggatacgtttacaggctagtggaggtgacaggcaccg

SEQ ID NO: 202280 - DNA, 122 bp, Homo sapiens
ctttttcagagtccctccctgttgtactctccgcagctcaggatttcactttgtacctatcgtccctcttcaattgtataacaaagaacaaagtgtcccctttttcaagagtttattacttc

SEQ ID NO: 202281 - DNA, 122 bp, Homo sapiens
tgcgctgcgggcctcagaggacttggtgctcggcaaacccagagactcaaacgccatgtccggggggtggggggagcggcggtaggggagatcctcacgctgtgttcggcagcgaggcggcg

SEQ ID NO: 202282 - DNA, 122 bp, Homo sapiens
ttggtaatacagcattcattttccttctgtttttaatgtgactgtgcttaggttactttccgcaccagaatctatcactgcaacatcaacagtcagggagtcatctgtctggacatccttaa

SEQ ID NO: 202283 - DNA, 122 bp, Homo sapiens
actgtttcctagcgcccataaaacaccttttattaactccttcgcgtccggaaaggcccgcgtggcctctcggcccctgctacggtgtttacagccaagactaatggggtcccatattcacc

SEQ ID NO: 202284 - DNA, 122 bp, Homo sapiens
aaatccccctgggagaggggacaagttgtagctcatacatcctttgcactagacagggagcgaatttctgtaacctgggagagtaccaattcacttggatcctgtgggcccataatatggag

SEQ ID NO: 202285 - DNA, 122 bp, Homo sapiens
tctctccaccagacgccaagccaggcacagcggagcacggatgggtccaacacagtccagcgcccccggcagtgtcagcgcacacccgcgtgggagctggggaaggcaggcaaccacagttt

SEQ ID NO: 202286 - DNA, 122 bp, Homo sapiens
cccgcccccaagctggtacaagggaccaaaacctttcccagaggcgagccggggaagcgacgcgaagacccccgtccggcgcaacccgctcgcgtggacgcggaaagtggcgggcggcgggt

SEQ ID NO: 202287 - DNA, 122 bp, Homo sapiens
acacctgggctgtccggcggtcagtctgtccgccccggagccccctgggccccacctcctcgtcccgctctcggaggcctgcggcttcacggccagacagaaccaggacagaacaaccccag

SEQ ID NO: 202288 - DNA, 122 bp, Homo sapiens
gccgctgagagccggcaactcttaggagccccacgttggccccatggcgggagcggagggcgtaggggaaggagaggcgcgcgaggaggctgcggctgccgcgaggtttgcgccaactctcc

SEQ ID NO: 202289 - DNA, 122 bp, Homo sapiens
ccgccgatcccatggctcccttctccacccttgggatttctcgtttgttcgcctcctctccggtaccctcaatcccgtagatgcaggtgggcatcctccagccccagcaagtactgcggacc

SEQ ID NO: 202290 - DNA, 122 bp, Homo sapiens
cgcccggtccgctctcggcgcccgaccccgcagcccgggcagcgcgagtgctccccactgcgatgcgcctggaggctccttgacttgccctcacacttaatcctgtgcaaactttttacccc

SEQ ID NO: 202291 - DNA, 122 bp, Homo sapiens
ggaggcatgcaaaagtgaacacagcattgtattatgcattatatgtaagctctggccgggcgcagtggctcacacctgtaatcccagcactttgggaggccgaggttggagaattgcttgac

SEQ ID NO: 202292 - DNA, 122 bp, Homo sapiens
ctctgccggccacgcctcttataggcccggaagtttaccccaccctgcaccgtgattcaccggaagcgctctagggaaccctggagcttccgcgcctgcccagttttgctccgaaagactta

SEQ ID NO: 202293 - DNA, 122 bp, Homo sapiens
atgtttcaaggttgcctggtgaccaaagaccctagaagacacacatcagagcctcagtgacgagctattgtaggcttctggcacctgcacagtgactgccctttgcacctgactcacacata

SEQ ID NO: 202294 - DNA, 122 bp, Homo sapiens
agccgtttaaattagaaccacgttgggagcgtaggtgacgccaacgttgcggcaccagtccggggagcacttaaaagtagccacctgaagttaattaaaaccttacctgtcaaacccagtat

SEQ ID NO: 202295 - DNA, 122 bp, Homo sapiens
caccactgcactctagcctgggcgacagagtgacactccgtctcaaaaaaaaaaaaaagacgagcccactgtggtctgcctgtacaatggaacattattgggccatgcgaggaatgatggac

SEQ ID NO: 202296 - DNA, 122 bp, Homo sapiens
gaggacatgccaatctgacacaccacgaggtcctctccaaatgtatgcttgaatttccgccggacaactctaacttcaatacgtttctgcaagagttttacagctagctctgtagctcgatc

SEQ ID NO: 202297 - DNA, 122 bp, Homo sapiens
ttttgatggtctctttctatttctctaggaatattaacttgctgattccctccttcatctcgaaatcttttttttcctttaatttcagctgactctctgacatattagggtaagaagaaaac

SEQ ID NO: 202298 - DNA, 122 bp, Homo sapiens
acctccatggccgtggcggtggcctcgggctccgcgcctcccggtggcccggggccaggccgcacccccgccccggtgcagatgaacctgtacgccacctgggaggtggaccggagctcgtc

SEQ ID NO: 202299 - DNA, 122 bp, Homo sapiens
cttcctcgtctctgcctcttttcctttcttttctccctccgcctctctgtcagctcttcccgtcgtttcctcggcacccagctccagtccaggcgctgtcccagggtaggaagaagggcgat

SEQ ID NO: 202300 - DNA, 122 bp, Homo sapiens
actcggtgccagcggttgcacagtcattgggcaggggcaggggttgaacgctgctggttacgcggacgggcaggcgcagccgcagcagccggaggtcgtgctcgtggctcgtcgaggctccc

SEQ ID NO: 202301 - DNA, 122 bp, Homo sapiens
gggtgcgtctaagtagctcgcctttgcggcccacccaaaatatctggataatggttaccccgtcctcagtgcgttggacttgcatagacgcgagttcggtctcgggggccaccacgataatt

SEQ ID NO: 202302 - DNA, 122 bp, Homo sapiens
aaaatacttgttatcaatgtgaaaattttacacatatgggaaatttggctggttagctgacgccagctctatgcatggcagaggcgtttgctctcacttgacatcacacttctctatctaaa

SEQ ID NO: 202303 - DNA, 122 bp, Homo sapiens
tgggtgacgcatttaaaagacagcgtgagactcgcgccctccggcacggaaaaggccaggcgacaggtgtcgcttgaaaagactgggcttgtccttgctggtgcatgcgtcgtcggcctctg

SEQ ID NO: 202304 - DNA, 122 bp, Homo sapiens
gtgtcaatcggaatggtgaccgggcgggactcagagcctgaggaggcggggcttttcctccgcccaggaaggaaatgcagaaatgccttcctatgcttttagggagagcgctgtagcagaag

SEQ ID NO: 202305 - DNA, 122 bp, Homo sapiens
acgaggtcaactgccgggctcaggttctcccccggagcctaggttccaccccgccccggccgtgcggcacagaactgcctctctgggcccctcaccgaacgctgcagctccccaagccaaaa

SEQ ID NO: 202306 - DNA, 122 bp, Homo sapiens
gttttttattagagaacaagtcagtggaaggtcatgctataaaggatggatgtgtgtctgcgcatttgtctgcatttcactgtaataagatttgtttgctcatggtagttacctttctcttt

SEQ ID NO: 202307 - DNA, 122 bp, Homo sapiens
aggtgctaagcccctcactgcccggagccgtcagtgccagtcgcccgctccgagtgggcccgccgagcccacgcccacccggaactcacgctggcctgcgattgccgcacacagcccgggtt

SEQ ID NO: 202308 - DNA, 122 bp, Homo sapiens
ctcccagacggggtggcggcggggcagagacactcctcagtttccagatggggtcgcggccgggcagaggcgctcttcacatctcagatggggcggcggggcagaggcgctccccacatccc

SEQ ID NO: 202309 - DNA, 122 bp, Homo sapiens
tacttcagctcattaccgtcacccatgaaaacggaatgaaggactgggaagccaatctgccgcgttcaattggagagaaatgactgtcggaagaggccctgcggtaaatagcctctgagccg

SEQ ID NO: 202310 - DNA, 122 bp, Homo sapiens
tgtgatctctctcttcccaactttcccccactgtagagttcttgatgtcactcctccctacgtggtatgtacctccgtctcagccaaagtgtctaagaatgggaaggcagagaagtgaggta

SEQ ID NO: 202311 - DNA, 122 bp, Homo sapiens
cggtgggcgggaacggaggaaacagacccgagaggccgcgagaggacggaactcacttcccgccgccgtagcgtcctcgtcagctcgccctccgactctccgcatgggcgcgcagagttccc

SEQ ID NO: 202312 - DNA, 122 bp, Homo sapiens
ctcttgagcttccgcctcgcccaggtggggacggtagggagaccggagggcacacgcatgcgcacgaaggaaacggtaaagcctgaagggaggtgcagagcgcatgctctctcttgcccgag

SEQ ID NO: 202313 - DNA, 122 bp, Homo sapiens
cttctggaggaaagtgaagattagaaaagttagctccacagcagcacagtggaattaggacgcatagttcctgagactctctgtcatgagttgtgcatactaggcaaagaagactagaatta

SEQ ID NO: 202314 - DNA, 122 bp, Homo sapiens
cctctcagctattgccccagatccaaggcgcgcggggaagacggccacgtaaagatacggcgccctggtgactccgcctcgcccaatcagagcccgcgcaacccctgaaccaatcctgagcc

SEQ ID NO: 202315 - DNA, 122 bp, Homo sapiens
tggcgcggccgccgctccctctcgacgctctactccgacgcggtgccgcctcacagcagccgactcagaaccccactccatggccacgagcctcagctgccagcccaaccgccccaacccgc

SEQ ID NO: 202316 - DNA, 122 bp, Homo sapiens
attaagagagacaggagggcaagtttttcccttcttttaaagaaatcatcctatttcctacgagacatagactatctgcctgaagcatgatgtactagccccactcaccggctccctgatgc

SEQ ID NO: 202317 - DNA, 122 bp, Homo sapiens
actcggagcagctcggggctgcgcagcgggaaggctcgcctagtcggtccgcatccgtgtcgaccacctgtctggacaccacgaagatgccacccgttgggggcaaaaaggccaagaaggtg

SEQ ID NO: 202318 - DNA, 122 bp, Homo sapiens
ccctctgccaatgagcgaggtccgagaggcccgtcgcccagcccagtcccgatcggcgcacgccgctgttcgcgtgtctggttccaaataaagtttttcgcgactttgaattttttttttaa

SEQ ID NO: 202319 - DNA, 122 bp, Homo sapiens
atttctgaagttcctcagaaacaacgccattgagctgttgggagagttgttgcaggctctcggttaatgagaaggtcctaagggcagagacacaggcgtcaggggtgcaggtggctcaatgg

SEQ ID NO: 202320 - DNA, 122 bp, Homo sapiens
aggtttgtgaaactgcagtggatggagcaggaatccagtagcagttgagatattcccactcgctgacctgaaaggtgatgtctcagatgttaacaaaaagacaattgtgtagacacacaaag

SEQ ID NO: 202321 - DNA, 122 bp, Homo sapiens
agagcagttttctaaggacagtccaaagccatcttcagatcttcaaggagatccatgattcgtgaaggattcactcctctggatcagaggttctgctgtagtgacactcttttttttttttc

SEQ ID NO: 202322 - DNA, 122 bp, Homo sapiens
aaaccatttcacacggaggtgtggcccactgccggacacgccacatctgtgtgcatgtgccggtgcacgcttgctgcttaaaacaaatcaatctccatttggtagaatttagagtagcttcg

SEQ ID NO: 202323 - DNA, 122 bp, Homo sapiens
ggttggaaatgtttgaggaggcatttatcatgaaagccgtggcctttgctcctaaagcttcgtctcacaagtacaataacaaaaactgctaattaaaagagggaaaacaaccaggagtcaaa

SEQ ID NO: 202324 - DNA, 122 bp, Homo sapiens
cctttcagggctttggagagagtgattttatatctctattttcatgcatctttctatgtgcgttacaaagtgccacgaagtttgttgattcctactggctaccactagcatcaataaagggt

SEQ ID NO: 202325 - DNA, 122 bp, Homo sapiens
cgggtgggggccagagacgagaggcccggcaggtagggaactgagtataggaggcgagaacgaaatggaatgtcttctgagtgtcgctgataaagatatcgtgctgcagggaagcttgacaa

SEQ ID NO: 202326 - DNA, 122 bp, Homo sapiens
ggacctggtcaagtcacatccccactcaacctcagtccacaggttgcaaaatgagggaatcgattagatcatggttcatgtcccttccagctctctgatactaatcatttagcattcagcaa

SEQ ID NO: 202327 - DNA, 122 bp, Homo sapiens
ctgggggtccagctccgtgggcgctcctggctgctgcgccgcccgcgcctcgcctcccgccgccagcctcccccgggccgctccacgtggccgctccacgtcgccctcccggctggagccgc

SEQ ID NO: 202328 - DNA, 122 bp, Homo sapiens
tcgtgacaggtatatcctaggcggccaacaccattggcccggggcactgtctacactgtgcgcttgcgggccacgtcggtgtctgctgagcggtggctgctccaggagcccgcgcccgtcag

SEQ ID NO: 202329 - DNA, 122 bp, Homo sapiens
gaaatagacgattctttcatgatttcaggaaaatgtgaattggctgtcttggtttatgttcggccactgatgcactcagacctcaagggatcttaagaatgattatcagccaatttcactgc

SEQ ID NO: 202330 - DNA, 122 bp, Homo sapiens
caacttcacagtcccctcagctccaagagtcccgactgaggagactggtggcttgtgaggcggagaaggacaagcacaagtgtgcagaaggcagcaagcaagttgcgttgccgaaggaaggg

SEQ ID NO: 202331 - DNA, 122 bp, Homo sapiens
gcgctgggatctccaaagggcagcagagtcaactccaaatagaaaggatattgttcgcgccgcgggggcagctcctgaaagctgaggctggcgggggttgggtcccgctgggaggggactgg

SEQ ID NO: 202332 - DNA, 122 bp, Homo sapiens
tagcatctgccacccaaatcttgctgaatagagtgatttatcttcaggcctactagccggcgacaggagcgcacctcctcccttctcctagctgtcccgggtttattcattccctgagcctg

SEQ ID NO: 202333 - DNA, 122 bp, Homo sapiens
acgccaccaccctggcccctgcactcctgcgtgagcgacttccattcgggacggctcagccgcccgctaccgcagccttcccgcctgggtctcccacaggcctcccggggcacctagaactg

SEQ ID NO: 202334 - DNA, 122 bp, Homo sapiens
ccatgccttccagaatgaagaagatcagttctaaggtttcttactatttctaccaagagacgaccatcggcattccacagacggctcctctagctgtgcacaatgcctgttcttatcgttat

SEQ ID NO: 202335 - DNA, 122 bp, Homo sapiens
caggccccgccccactctgttcagatctaggcccaactcaggctccgcacctcaaggctccgcccccagcaaggctccgccccaggcccggctccaccccgcacaggccccaccccgagtca

SEQ ID NO: 202336 - DNA, 122 bp, Homo sapiens
ttttcagctgttactacaatggtcaacaataacgacaaaaaccacttaaagttggacagacgtctactgcaaccaactctcaaaaagtttagaacagcgcactacgccccgcccattggcga

SEQ ID NO: 202337 - DNA, 122 bp, Homo sapiens
gcctcccctcagctccgccccccactccagctcccatgtatggaaaataggggtggagcgcgctctgccatgctcggtgcttagagaactagtgaagaggacagtgtggggaggatggaatc

SEQ ID NO: 202338 - DNA, 122 bp, Homo sapiens
tatcttccaatcaggtgctccgggggcgggtccggaaaactgtccaatcaaggcacggggcggacaccgggaagcggattgcaggtttgcagtagtgtccaatcgaaggccccaggggtgaa

SEQ ID NO: 202339 - DNA, 122 bp, Homo sapiens
taaacttggaagccagtttcctcgaacagtcaacagggcgcagacacagcgcacaggttccgtaatgtggcgctgtccggcagagaacatggccgcgcccttatggtgtttattcgcgtggg

SEQ ID NO: 202340 - DNA, 122 bp, Homo sapiens
aaaaagcagcagcaggagggcagggagacagacacgtgggggggagtcggcaccccggcccggctctctgtgcccgcagaagggagtgccactgccccgggcaggccccttgcgccggcctc

SEQ ID NO: 202341 - DNA, 122 bp, Homo sapiens
ccctgagcagacaagcatagagaattagtttgtaaaattgcggtgggggcaagcccagaccgcgtccagggctgccaccaaggagctggggggattcccaataggagctccgagcttcactt

SEQ ID NO: 202342 - DNA, 122 bp, Homo sapiens
gcctgtgtgcgcacacgagtgagtggacactcctcggtgcactgatgggagcgagatgcccgtgtgtgcgcatgtgtgagtggacactcctcggtgcattgtgccatggctgtccctgggtg

SEQ ID NO: 202343 - DNA, 122 bp, Homo sapiens
gagttttcagttcacagctgctgtcatttttaagtaagacacagggtcattcatatgcttcgcaaatgccctcacaaataattgtaagaattgggcctgccgaggagagtctgctaactgtg

SEQ ID NO: 202344 - DNA, 122 bp, Homo sapiens
cgcagtcgtgcgaagttgaggtatgggcggggacccagagtcccgggcgggtccctgcatcgggggctcccgggccgggatcctgtggggcgggggcctgggacagacactcgggacccggc

SEQ ID NO: 202345 - DNA, 122 bp, Homo sapiens
gaacactcctggtttttcatgaaatgatgtgtgcggtctttaggttctttagacttatcacgggagtacatgcttcgtgtgtgttataggaaccaagtcattgcatcttaacattaatcctt

SEQ ID NO: 202346 - DNA, 122 bp, Homo sapiens
gtccgcatggtttcaacatgcagttcttcctgcgaagtccactaggtggtactaatgccacggacaggatcactcacaaggaaacccagagccagccgggtgtaggttgcctctgccctgca

SEQ ID NO: 202347 - DNA, 122 bp, Homo sapiens
ctttcatgttgtaagaaactccataagcaaccatctccaggaagtccttttcatactggccggtgtccttcctgctgccgccctccttgtaatctctgcccttctcttctgggacttttctt

SEQ ID NO: 202348 - DNA, 122 bp, Homo sapiens
aagcggtttcttgttcttctcttggcggcggagtggggatgagcggtgtccccaggtgtccggcgtgcagcggacagagcctggaggaaggtgtttagggcatccgtgcttgccgagaaccc

SEQ ID NO: 202349 - DNA, 122 bp, Homo sapiens
gcggtttctaggtcctcctggtggtttctaggtcccccttggtggtttctaggtcctcctcgtggtttctaggtctccttggcggtttctaggtcccccttgacagtttctaggtctccttg

SEQ ID NO: 202350 - DNA, 122 bp, Homo sapiens
atggcaagtgatcctcccgcctcggcctcccaaagtgctgggattacaggcgtgagccaccgcccctggccgagcatattaaaatctagttttcaaaaactgaactgcaggcgccgctgtac

SEQ ID NO: 202351 - DNA, 122 bp, Homo sapiens
ttgaatctctaaacaaaccttgcaaattaatacaagtctcaaggaccaggctgaagagaacgagacgggacctggagaatataaaaaagcgggtatcagctgggcgccatagctcatgcctg

SEQ ID NO: 202352 - DNA, 122 bp, Homo sapiens
ggctcccacggaccccgccttcgccctctgtcctctttgtgtgtttcgtgacaggagggacgtgcgacgtccacatatttttcctggagcaggagaggggtggagtcgggggaggaaggagg

SEQ ID NO: 202353 - DNA, 122 bp, Homo sapiens
acttctgcattctccacaacaccttaaatagtctgcagtcagtaaactctgacttaactacgttttcttttaaactcactagactatccaaaagagagccaggtccccctccatcctcacct

SEQ ID NO: 202354 - DNA, 122 bp, Homo sapiens
ttacataattatgatccctgtgggggcgggcatggactcagccctggattccattgtgagcgtcttgagttcgattcctgaccctgcctctttaggatccgcacgttgctgcctttcagcct

SEQ ID NO: 202355 - DNA, 122 bp, Homo sapiens
gtgttcaaaacatatcgtcacagaactgtgcttgaacaccccgcggcttcccactgcattcggattaaaggccctgtcctgaaccgcagggccccacgtcgcctggccgccgtcccctgacc

SEQ ID NO: 202356 - DNA, 122 bp, Homo sapiens
agcacacttccaacttacaataatacctttaatttattcagcacacccctacctgagaggcgacacagtgatctatggggtggagatttgagtgccctatcccctctgcatgctctcccaaa

SEQ ID NO: 202357 - DNA, 122 bp, Homo sapiens
ccgcgcgctgccgggggagcagcaacctctgcacgccctcacccgcggccaaggcgcctgcgtgcaggagtctgacgcctccgctccccatgctgcaggtaccacagtcccgcccctgctcc

SEQ ID NO: 202358 - DNA, 122 bp, Homo sapiens
tccgtaggggggaagacggcgtatctctggccctttaaataggggcgtggtgaagaggcgcggaccgcccaggagggggagcagtgcgaggaggaaagcggaagcgctgcccgcagtggtag

SEQ ID NO: 202359 - DNA, 122 bp, Homo sapiens
gcagtggctgtgtccgtgcccttcttgctgctctgtgtcctggggacctgccctccggcgcgctgcggccaggcaggtaagttagccgtcctctgtgcctttgggccataccatttcccggg

SEQ ID NO: 202360 - DNA, 122 bp, Homo sapiens
aaaaatgagaatagcctccttgcagcagtaattccctcttactggaacagttcaaaaagtcgctgataacgaccagtcaatcattagagaggagactcctcgtcctgggagaaagccgattt

SEQ ID NO: 202361 - DNA, 122 bp, Homo sapiens
aagcatcgtagacttcgtgcgttctcaacccaacaggaagcgtcacatctcagtgagcttcggctctcacagcccgaaactgcaaggagctcctctgcccggcctctctttactcctcctct

SEQ ID NO: 202362 - DNA, 122 bp, Homo sapiens
cttaagagtcattcacaggctcagaccccggcttcctaatttccctccttccggaagatgcgttggccttggcggctcccaggcccaagttatcaggcacactttgcggtccagctgcttag

SEQ ID NO: 202363 - DNA, 122 bp, Homo sapiens
cttaggcggcttaagcctgccgtgtggaacatccctgcgggcgactctaactagcccgggcgacgcggatcctgagagtgctccctggtaggcatttgccccaggaggacgcttcgccagag

SEQ ID NO: 202364 - DNA, 122 bp, Homo sapiens
acaaaaacccacagttaacatcacacttagtggtgaatgactgctttcctcttctcaccacgaacaaggcaaagatgcccacttttgctatttctaatcaatgaggcaaataaagaaattaa

SEQ ID NO: 202365 - DNA, 122 bp, Homo sapiens
ttccttgttccatgggtggtctccaccttccagttagaacattagaataagtactattgccgggcgtggtggatcacgcctgtaatcccagcactttgggaggcctaggtgggcggatcaca

SEQ ID NO: 202366 - DNA, 122 bp, Homo sapiens
aaggaacgtaatcgtccttgcaaagtggaaaaatgacgggttaccagaggctgtcagaggcggctcgggtgagctgtcagcccatgcacaagtgactttttaattgaaatcggtttctgttc

SEQ ID NO: 202367 - DNA, 122 bp, Homo sapiens
tgctgttgtattcttggtcccactttgccatttttaaaacaggaaaacgtttcccttactcgaacgctaaagtgcaaagctgctggtgacgctgccttctcccacctccgcactccactgtc

SEQ ID NO: 202368 - DNA, 122 bp, Homo sapiens
atcgaggacgtgcagtcgctgctggacgaggagcaggagcagatgttcgccttccggtcccgggcgcgctccaccgacacttttaactacgccacctaccacaccctggaggaggtgagggc

SEQ ID NO: 202369 - DNA, 122 bp, Homo sapiens
ccgcgaaccgccttagaggtcgtgccaggcttgctgtagtgctgggtccactatgcatggcggaacggtccgggcgcacgctcacggaccagcctcccccaggccgagtattttggagcact

SEQ ID NO: 202370 - DNA, 122 bp, Homo sapiens
ctgggccagagacaggcagggcccagtccaggggccccaggcctccccagtcccagtgtgcgagccccacttggacacaagtgttcagagaggtccccctctgccacttgacagggaccttc

SEQ ID NO: 202371 - DNA, 122 bp, Homo sapiens
ggctccaagtgtttttgcctgtgaaccctccccagtctcacaattgcatgaggttggggccgtaactatcctcattaaataaccttgggaggtggtatcatgcccagggtcacagaacccca

SEQ ID NO: 202372 - DNA, 122 bp, Homo sapiens
gcgcacgtacccagcctcaggtgaggcgagtgtgcggcaacggctgcagccggagctagccggcttgcagtggccattaaggagcttctgcccgaccttctgtttgtgcccgccaggcgaca

SEQ ID NO: 202373 - DNA, 122 bp, Homo sapiens
tccctctagtgccaggtgggggactgggaagccgcctctgccatctgccaaggacccacgcggcctgagtgatttacccattcccggcaatggcgagatttctttctaaaaaaaaaagaaaa

SEQ ID NO: 202374 - DNA, 122 bp, Homo sapiens
cagctccggcgcagatcggaatcccgcagtcaccctggtggcctcgtggtgggaaagacgcgccccagcgaatcggtcgcgtcacttccggagcacgctgggaactacggcaggctagggcg

SEQ ID NO: 202375 - DNA, 122 bp, Homo sapiens
ctggtggacatgccaaaattaggaaaatggtagaacagaattaggtcattatttgaggatcgggaacacagaccagagatagatggatgctaagtgaagccccttgattcaggcttcctggg

SEQ ID NO: 202376 - DNA, 122 bp, Homo sapiens
ttctgtgtgctgctcctgtgtgtagggtccatgaatgggggctttgagaacttgtcctttcgtggccagatatcaaagtgctgctcacacatacagattgaccgcctcaaggtgcggcccgg

SEQ ID NO: 202377 - DNA, 122 bp, Homo sapiens
atattcgggctctctattgctaagcatagcgagtgtcggttttctctctccaacagacatcgctattgcggttccgaggcagtgggaagagatgcggcccctggacatcgtcgagctggcgg

SEQ ID NO: 202378 - DNA, 122 bp, Homo sapiens
gctggaccctccccgcccctatcactaccccttacccccgcagcaagggctgcgaccccgcgggtccccgctgagcaccgcagcaattaagtacgtgcaagccatttgcggcagcgggtttg

SEQ ID NO: 202379 - DNA, 122 bp, Homo sapiens
gacaaacaacgagagaatgaaactggcagccatagaatccgggccttgatgcccaggcctcgccatgcatacctgctggccggcatctccctgagacccgtctggcacaggcaacggcaggg

SEQ ID NO: 202380 - DNA, 122 bp, Homo sapiens
gggcgcatgagttagctggatgcggccaatggaagcgtgcaaagcgctcctatgtgggggcggggctagactgcacaccaatgacagggaggtggtggcgccatcagtgtgggctgtgccgt

SEQ ID NO: 202381 - DNA, 122 bp, Homo sapiens
gtggaatgctcaaggctcacctatgtgctgggcccagttcaggtggagatggccgtctcccgaggccgaaagtcattgtcatatagtccctagagtgggtgcaggtaggaagattcctccag

SEQ ID NO: 202382 - DNA, 122 bp, Homo sapiens
tttttttttcctgagacagggttcactgtcacgcaagctggagtgccgtggcattatcaccgctaaccgcagccttgaactcctgggctcaagcgatcctcctgcctcagcctcctgagcag

SEQ ID NO: 202383 - DNA, 122 bp, Homo sapiens
tccacacactcatcaaaatcacctgttctgttccaacaggccctcaaccaagggcaacagcgctacttttacagcattatgaggatttacaactccaggccccagtgggaggccctgcagac

SEQ ID NO: 202384 - DNA, 122 bp, Homo sapiens
gactttatctcggtgagcactgtgccagcttgagtggtgtgtttccgattcggttgaaagcgtatttcctttccgtggaggggcggcggtggtagtgcctgcaagaacactgcagcttgaga

SEQ ID NO: 202385 - DNA, 122 bp, Homo sapiens
cagctccacctgtatagccactagcagaatgccatggagatggtcataacaaatgttcttcgatttaagaaagaaaacaaagcaagcataggactttatagtctactggaattaactttaga

SEQ ID NO: 202386 - DNA, 122 bp, Homo sapiens
acactgagagtccaggaagaagcccagtgggttcagtgtgggccttgtgtgaagtgccagcgatgaggacaggagacacagagaagagagttggcctgccggcttgtcagctgtgacatcca

SEQ ID NO: 202387 - DNA, 122 bp, Homo sapiens
atgctggctgaagacggagcatcgtgccgcgagtatgccggctacctgctctactcagagcgcaccattctcaagagtatccacctgtcggatgagcgcaacctcaatgcgcccgtgcagcc

SEQ ID NO: 202388 - DNA, 122 bp, Homo sapiens
tcaggacccatctgtgcaggtgagagggtgtcccaggaccctgggcttatcaccctcctccggagtccacctgcagccctcagtcccaaagacagaatgccagtgccctcgagggcagggga

SEQ ID NO: 202389 - DNA, 122 bp, Homo sapiens
gcgagcgtttcacaggacaggagcaggagcaagacggagggtcatgggggaggtgccacacgcttttaatcgaccggatcttgtgagacctcactatcatgaggacagcactaaggggaggg

SEQ ID NO: 202390 - DNA, 122 bp, Homo sapiens
ggcctctgagctggggcctagggttattttttatgcctcgggacctttagaaagagacctcgctagagcaggggacatctgtagtttcagttctttgaggagtttccagctatttagctgtt

SEQ ID NO: 202391 - DNA, 122 bp, Homo sapiens
ctgggctgggatgagacatctggttttgctttatggggttacttttccttacccgaaaaacggggatacaactatgcactgcttcccttatgaggctgccgtgagtcctcggcaagaaaacg

SEQ ID NO: 202392 - DNA, 122 bp, Homo sapiens
tatagctgtggaggttcagagaggccagctcctcaggtcacacagctaagagaagaccatcgagcatgtaaattcagattaatctgtctccaggctgggcccagtggctcacacctttaatc

SEQ ID NO: 202393 - DNA, 122 bp, Homo sapiens
atccgtgtgttctcgatggcatgcgatggtgcttctgggtggtcttgtccttcagcgccccgggagaacagtgagccccttcccctcccacagtctggggggcgtcttccccttcctggacc

SEQ ID NO: 202394 - DNA, 122 bp, Homo sapiens
ctatttgtggatttgttagaaacagacattcttttggccttttcctggcactggtgttgccggcaggtgggcagaagtgagccaccagtcactgttcagtcattgccaccacagatcttcag

SEQ ID NO: 202395 - DNA, 122 bp, Homo sapiens
tctactcacagaagattgggtataaacaacatagcgcagctctgtcctctgcagatgcatcgttaagttcttgggaagatgctcttgttgcctgcaggctctcaccattcactttcaaccta

SEQ ID NO: 202396 - DNA, 122 bp, Homo sapiens
gcagacagccccactcctccggggagaagtacacggccacgtccgcgaagctcacagtcccgggcttcctgcaaccaggccgggtctccccgggcctcggcgccaggagcggggctgggggc

SEQ ID NO: 202397 - DNA, 122 bp, Homo sapiens
tgagctaaccacctctctcttaccccaaaggcaggagttacggctgcctctggtgctgaacggtggacactgtgaatcaagaccaaattcgtgacaaactcacacatttttaaaagaagcaa

SEQ ID NO: 202398 - DNA, 122 bp, Homo sapiens
tagaaccttggaggtgatggcttcgcctggcagtgaggtgaacagagcctccagcagtgccgggcgtgtagccagggcagctgcagcaggaggacgcccagagccttggctctgaacagata

SEQ ID NO: 202399 - DNA, 122 bp, Homo sapiens
caaaagggccaggttggggaccactgaaaacaaaagtaatggtttagactaacaaacactcgctcaccaaaattctatacccttcccctctggctcagtgcagaatgagtagggagaaaaag

SEQ ID NO: 202400 - DNA, 122 bp, Homo sapiens
tccatcttgggaatttggatttgggaccaaatgatgacagtttagtccttgctgacctaacgtaaagagattagaatccaaggaaattgtggtacagctgacttctactgtacgagtagcag

SEQ ID NO: 202401 - DNA, 122 bp, Homo sapiens
tacccatcctagtgcctgtcattgactgaactcaactgtaagtcaggggcaagagactaccgtggaaatgcatgagcctccaggagctgaagcaggaagaggctagaacatgggggaggagc

SEQ ID NO: 202402 - DNA, 122 bp, Homo sapiens
ggttggcatgaccacggatccgccggcaggcgcgaggcgagccagggatccgcgtggggacgcactgcgcggcggatcaaaggaatggaggggtcaccgaccctcctcacagcaaccagccg

SEQ ID NO: 202403 - DNA, 122 bp, Homo sapiens
gccccctcgcggcgccttcacggccctcccgcccctcgccctgcagagtacagcggccgccggcagccctaccccttcgagcgcatgatcttcggcgcctgcgctggcctcatcgggcagtc

SEQ ID NO: 202404 - DNA, 122 bp, Homo sapiens
cgttttcttgattccactttttggagacaaagtccagttcttctccaaggtctcaccatccgctcgccgtctccctctgacgtcccaaggacggtcagccactcccccgctaagttcggagt

SEQ ID NO: 202405 - DNA, 122 bp, Homo sapiens
aagttattaattccccatttggtgggttcctcaaccccagccactggggacggtccacgccggatcaccagcagctcaggcttaaggccacgacgcgcaagcgcagcctgccagcctggctc

SEQ ID NO: 202406 - DNA, 122 bp, Homo sapiens
gggacccatcgggaggagcataggactggatcctgggaactggacattgtgattttgtaacggctccattgtctggggtatataccctggttctttgtcatggccgagaaaattcacgacac

SEQ ID NO: 202407 - DNA, 122 bp, Homo sapiens
tggcgaaggttgtggctgtaacaggattggtgtcgcgtcggtccctgatgaggccggacccgggtgcttgtggggggtcacagtgttcctcctctataccatgtgagttgcatcttctaaaa

SEQ ID NO: 202408 - DNA, 122 bp, Homo sapiens
ctatagcatttcctggcctggatctgtctagggctggtactctgagaatgaggctttctccgggccagggtaccctgtatgtacctggacagggaatccggtgctgtggagcagagatgggc

SEQ ID NO: 202409 - DNA, 122 bp, Homo sapiens
cctaccacctcacgccaggggctgttctaggcaaaaaatttagacaagcagggggcctgccgtcatggttttatgtaagtggtgcagacagaaaaataaaacatcagatcatttcagagttt

SEQ ID NO: 202410 - DNA, 122 bp, Homo sapiens
gcatggtggttgggaaaatagggaggatgccattctctttttggagggacatggtgctcccgtctcttgcctgtggatgttccctataaagcagcctgtcactgtgaaaaatgcacacactg

SEQ ID NO: 202411 - DNA, 122 bp, Homo sapiens
ggcgctggctaccgcgcccgcgggcctggtttatccgccaggagctcaacgtcacggccgcggcagcctgagcaccggggggtgcccctccagtcccagacggcaatgttcctccctccaac

SEQ ID NO: 202412 - DNA, 122 bp, Homo sapiens
gatttactttggcaaatatagttcatcagtgatactctatacttcttgttgctttacatccggaggctgataatgtctgcttttctctcttttctaattatttgtgaaaggaaaaatgtggg

SEQ ID NO: 202413 - DNA, 122 bp, Homo sapiens
ggcagccaggacttcatctgcaccactctgggccaatacggcataccgccacctttttaccgagcagcgttgacgcccatctgctcaaataaattaacgtttccatctcaaataactcattt

SEQ ID NO: 202414 - DNA, 122 bp, Homo sapiens
gtgggaggggtgggggaagaacagagacggcagcctctctcgttcccactggaagaagagcgacagaaaatgcccagcagtgatgaggctcccattccagaaaacaacgagggcagattcat

SEQ ID NO: 202415 - DNA, 122 bp, Homo sapiens
tgcgattggtgttactattaatgaatttttaaaacattgtgtaatacattttctaaattccgaaggtatgtgcaattcatggggaagagacacattcaagttgcaacataaaccaattttcc

SEQ ID NO: 202416 - DNA, 122 bp, Homo sapiens
aaattggcagttgtaattttgataatacagcaccttttgggaaaattgctgcttttcctccgatgggttaaattttgcagacggttggatttcatctggcttgacagagagtgtttatgact

SEQ ID NO: 202417 - DNA, 122 bp, Homo sapiens
gagagagcaccgtgagtttggcgagctcgcagggagattacgccaagtggcaggggacgacgaggggctatgtttcagcctgagcctctcggtgggcccggagccggagtccgtccatcagg

SEQ ID NO: 202418 - DNA, 122 bp, Homo sapiens
cctgatgggaaagagctctggctgggcttgtgggaggaatgagtccctttggcaggttctcgggatcccctgggtgacatgcctttctctgcaggaggcaccatgcaggagctgcatctgct

SEQ ID NO: 202419 - DNA, 122 bp, Homo sapiens
tgcctggctgaaatcttcatgtgttacttgtacatcccatttagtaattgcctaaacctacgccatccattgtcttttgaataactattagcatttgatacatttctaccatttctccaagt

SEQ ID NO: 202420 - DNA, 122 bp, Homo sapiens
cagggtctcccacctccagtggatacacagctgcgacctggacccggaccggagcctcttcgcgcggggatgaacataccctacgatggcgccagttacctcgtcctaaaccaggaactgct

SEQ ID NO: 202421 - DNA, 122 bp, Homo sapiens
atgacatgtattacccattatagtatcatatgaaacagttcctctgccttaaaaatcctccgtgctcaacctattcatctttccctcaccccaaactcttggcaaccactaatctttttact

SEQ ID NO: 202422 - DNA, 122 bp, Homo sapiens
atacccattttagctttcccatgcatacttaactgcacttgctttatctccttgggcattcgtacttaggattcaatagaaacatgtacagggtaaacaattttttaaaaataaaacttcat

SEQ ID NO: 202423 - DNA, 122 bp, Homo sapiens
tgcctcactcccggccaatcttcacactccacgaagaatagccgtagggggcgtatgggacggtgcgtagagcgatgcccacgccggccaaccggatgtcggggcttgcgcgggagggcggg

SEQ ID NO: 202424 - DNA, 122 bp, Homo sapiens
tgcccggacttttctgggcgcccagggggcggggccacgcccatccgcttagagctttcgcggaatcacagttgtcacagcggaaagggcctagacccagtcctccaagtcctcccatttta

SEQ ID NO: 202425 - DNA, 122 bp, Homo sapiens
gcacagcggcgaaccggactaatccctgagcactattccaggagaggcgagggcttgggccgcgcgcaggcgcagaccggatggaagccggggccactggcagcctgtaactggttcccctg

SEQ ID NO: 202426 - DNA, 122 bp, Homo sapiens
ccgcggtaagcctcctctgagaagctgcttgtgcctggcggcggaggattccgacacacgcggactgtaagccctttggcattgtgggcatagaagacctacaccctaactggcatcctgag

SEQ ID NO: 202427 - DNA, 122 bp, Homo sapiens
gaactgcaagcgaggacccaccgcgactcacctagacacgcgacttctgcgtggctaagacgaaatggccagcgggcgcctgcgcaacctaaataaggtcccttgtgcgagttctgcgcacg

SEQ ID NO: 202428 - DNA, 122 bp, Homo sapiens
actataagcctattcatcaaaaaccaaacaaacaaaatactttcctcaaggactttagctcgtctttttagccatttaaaaccactcgaattcatgtagtcctagacacatcttccataacc

SEQ ID NO: 202429 - DNA, 122 bp, Homo sapiens
tctctggatctccccttctcccatccttgacgctcatccctgtgttctttgcggtgggcccgtcggccctgctgccatcgatagaagcagcactctccccgtctgatttcgcagggccaaag

SEQ ID NO: 202430 - DNA, 122 bp, Homo sapiens
agagttaagtttcgagtgaaggtatcggctgagccatcttgtagaatccagtcagtgaggcggcccgtaaagaatggaatggccatctcccctggagaaagagaagagaggtcacgcacaaa

SEQ ID NO: 202431 - DNA, 122 bp, Homo sapiens
agaggggacaccgttgcggagaatagggctccttcctttttcctccccacctccccactgcgcaaatgctggaggtttgagcagttagggttctcagaagggcctcgcagatagcaccagtg

SEQ ID NO: 202432 - DNA, 122 bp, Homo sapiens
aacaccaatgcaatggcccgggagcgcaaagaccctgtggggtgttcatccaccaatcaccgggtgcctctgcccttccagccccactaaagtgaggaaacaagggccgtaggagaagccac

SEQ ID NO: 202433 - DNA, 122 bp, Homo sapiens
ctagagcagcgccgccccgcctcctgtctccgtcctcacctccccgccccctcccagcttcgcgtctcctagctcgacgcgcccgctataatcacgtgattgcctcatccgggtcttttgcg

SEQ ID NO: 202434 - DNA, 122 bp, Homo sapiens
gggtacgaagcaggggtgtgggtgtgcacctgtgtgtggcctgtggcggggtgtgtgtgccggggatgtccctctgtggcccaggcctggcctttgggctgctgggatggcctggccggggc

SEQ ID NO: 202435 - DNA, 122 bp, Homo sapiens
ctacaggaggacaggggacaaatcgacgtattcactctgtccccatagctaagcagggcccgagcatgccgtcggcgccccataaacatttgcacacatgcagacaggcacaaggtacccga

SEQ ID NO: 202436 - DNA, 122 bp, Homo sapiens
aagaaaccaagagaagtaagcaaacatttgaactagctcagacaagcagcctgcttcacccgcagttcacaaggaaaacccacaatcataacgttaaaaatattcccaagcgccgggcgcgg

SEQ ID NO: 202437 - DNA, 122 bp, Homo sapiens
cccgctgtcgcgcaagctgcataagatcctggagacgcggctggacaacgacaaggtaaccggggctggcggggccggagtcacaggttcctgcggggctgagccgggccaggggcggcgtc

SEQ ID NO: 202438 - DNA, 122 bp, Homo sapiens
tatttcaaaaatgtgttccaatctcacaaaaagagttatgtatagagttccaaggaaaagcggagagccacaaaccagccagtgaatcacctcccaagaggcctcagtccctgggggccttt

SEQ ID NO: 202439 - DNA, 122 bp, Homo sapiens
aagccccaaatcctcaaggcgcatatgccaacgcaggagcccaggcataaactatcctgccgaccttttcacctcatcatcaaccaatcctaactctgcttccagccacgtgggctctttct

SEQ ID NO: 202440 - DNA, 122 bp, Homo sapiens
cggagacccgaaggcggcggggtcggggcgatggggagcctgaggtgcaggtgcagggtgcgacgcgccctccaggtaccccgggggcgggacgctccggacgcagaggtgtcctgggggct

SEQ ID NO: 202441 - DNA, 122 bp, Homo sapiens
cactttggcatctccgtgaagtccacctggagaccttcaaagggggctgctccacaagctcgtatgccgggcggaacggctggaccttgactcccatcttgctgtcagcaggtaacacaccg

SEQ ID NO: 202442 - DNA, 122 bp, Homo sapiens
gattatgagcatactgtccagcctggatgccagctaagttagaagtcaataacaaaaagccgaaaaatgcagaactcgtctgtgaaacttttcttttcttttcttttctttttttttttttt

SEQ ID NO: 202443 - DNA, 122 bp, Homo sapiens
cggcagcagcaggtgaaatcaagttgtttaccctctaagggctgcttttcttcctggcttcggtccctaattctcttcataagttaccttctgggtccctttgcttctttgtccagttgtct

SEQ ID NO: 202444 - DNA, 122 bp, Homo sapiens
acggagggcctgctggagcagtgtgtgcatgcctgccagcagggcacccagctgctcctccggcaggttggcgctgaccccaagacgctgcacagcctctcggcagtcctccccctgcaggc

SEQ ID NO: 202445 - DNA, 122 bp, Homo sapiens
tccagcatcagcatattgagtgtttcgatggactgttcaatctcctgctgggaggctgctcgcgggaactcagggagactggggatgggggtctctgccaatggctgagggctgggcctgct

SEQ ID NO: 202446 - DNA, 122 bp, Homo sapiens
cacaccaacacccacaaatgcctcatatagtcacagtcacacacccactcaggggacacacgccatcactggtactttacggcacccagtcacaactgaactttcactgtggacatacacac

SEQ ID NO: 202447 - DNA, 122 bp, Homo sapiens
cctgcgccgggggtgggggggcacttagcgctgctgtccgtacagcatcccacctcgctgcgccaggggtaccgggtgttcgccgcctgggctcgcggcaccctcgggagtgaagctgccga

SEQ ID NO: 202448 - DNA, 122 bp, Homo sapiens
ctaaagcaacatttcccagggtcccctgccacaacctctccctgggagctgggaattgagcgcagccagctggactctggttagtgggtttcataacgtgtttctgttttgcatagcgtaaa

SEQ ID NO: 202449 - DNA, 122 bp, Homo sapiens
ggtttccacctgcactcccatggcggctgcggacgctgggtgggcaggcagcgcgaggggcggcgtggactcacagcgacctggcagcggttccatggctctgcctagtcccctttcgccgg

SEQ ID NO: 202450 - DNA, 122 bp, Homo sapiens
tagccacctcctagcacctcaggttttttacctttgagtctatgaagcctgcggaggtcacgccctagggaaagaaggagcccactgggtgtcaggtcctgcctctagggaggggaccgcgg

SEQ ID NO: 202451 - DNA, 122 bp, Homo sapiens
tgttgcctgcctagaattgaaaagtacaggacattcctctgctcctattgcccctgtttccgttcttttcacactgtctgtgggtgctgtgccctgttggaactctctttaacgtcttacgt

SEQ ID NO: 202452 - DNA, 122 bp, Homo sapiens
gcccggcgcgacacaaagcccccggccccgccgccgcccactgaccttgggctccggcgccgggctcccgcagcgtcttggtcaccgccttccagacgtggcagcccagcaggcacagcagc

SEQ ID NO: 202453 - DNA, 122 bp, Homo sapiens
caccagcctcacctaggcccccaggcacccacccagctggggtgtttttgggggagtcgccgccaagcccaggctgctggagccaggcaccctcctctgtcacttgctgcttggagccttaa

SEQ ID NO: 202454 - DNA, 122 bp, Homo sapiens
ctacagtgctctgtcagggctgtaggggggcacgggacagtaagggaggaggctgaactgcgcgattttacctggcttctccagaagggtaaggcggccagttggacccggtccttgtgttc

SEQ ID NO: 202455 - DNA, 122 bp, Homo sapiens
aatgatttcatgaaatctgctcctaattgtactggaaaaatgagaatgaagaatggagaacgccagcaacttctatgtataactctatgtgagaaagttgcttgggaattcagtgctcagaa

SEQ ID NO: 202456 - DNA, 122 bp, Homo sapiens
ggggtaatccccgactccagctgctcctgacgtcaccgcgtggagccaccgccccccgcgcgcccctgctccggggcctcctcgaagccccgcccccagccttagccacgccttctccccct

SEQ ID NO: 202457 - DNA, 122 bp, Homo sapiens
agcacagggttgatgcaaccattgagccaggtgaggttggcagcaagcatgtggaccacccggggagcctggactctggcatccagaatgttgagcagcaagaaggggatgtagctcagggc

SEQ ID NO: 202458 - DNA, 122 bp, Homo sapiens
taaatggaaatgccgagagtctgggaataacacaaagacagagccaacgggatttgctgacggatttgatagaagattttcaaaagaagagcagatttttactttgggcccgatcatctgaa

SEQ ID NO: 202459 - DNA, 122 bp, Homo sapiens
tgccgcggggttgccaggggcgtaccacgaccgggccgcgcactctcgctgccgccctggcgttttggttgtaaattgagagattttgacctctggaaaagctcccaaatggaaagtgctgg

SEQ ID NO: 202460 - DNA, 122 bp, Homo sapiens
gagaagcaggatggatcttgcgaggtaaacaggggcagccctggggatagttctccagaacgtgagggcagacacaggatgcagcaggtctgggctccctgctcctgagtcagtcttgagcc

SEQ ID NO: 202461 - DNA, 122 bp, Homo sapiens
ctggatgcctttccccggagaagggggggtgtgcggagtcggggtggaagagaccttgctcgcagagctatatcaagtgatgtccagaggctgggagccccggcggcctctgtcccttgcct

SEQ ID NO: 202462 - DNA, 122 bp, Homo sapiens
tggcctggccgatgggtggctggagtgttggagccaccaccaggccctagagccggctgtcggggccagtcagcagcagactccgagtgtgttcccagcagctccggagacgctggctgtgc

SEQ ID NO: 202463 - DNA, 122 bp, Homo sapiens
cggaatgtgccatttggaccggtcggcagcagctacggttgccggtcccgcactgaaaaacgacagtggtgacgggtgagctcccagaagcagaagaatgacaggcaacacctgaagccacg

SEQ ID NO: 202464 - DNA, 122 bp, Homo sapiens
ccgggcaccttccgggtggagttcagtgaaagggcaggtgagcttcgggcggccaggctgcgaaagccctctgggggcccggcccccgggtttccaggcggacccagttccagctgacctag

SEQ ID NO: 202465 - DNA, 122 bp, Homo sapiens
agtcattgttgtgaactgcccgtgaccactgcgcctgacttctaggcccagtcataattacgcgtggcagtaaggtcagacctaactcattgctaatgtgattacactggtaaagtctgtgt

SEQ ID NO: 202466 - DNA, 122 bp, Homo sapiens
ctctctgggtgctgggataagcaaatccagggcaagcaggagggggaagtggcacactcacgcccagcggaagcttctggatccagtgccagagccagcacagcagttctctgcctgtgttc

SEQ ID NO: 202467 - DNA, 122 bp, Homo sapiens
aggacacccgccctggctgggagtcgaggccgagtttgcatccaaagctgtagcacagtgcggcccacagcaaagggcatcctcaggaagcaaggtgcttgtgtttgtgccttcgtccttta

SEQ ID NO: 202468 - DNA, 122 bp, Homo sapiens
ggaaccagcgcggcttctgtgtggcagctactgagtgcacgctcgacctttgccaccctccgcgctgatggaaactggaggaggatgtggtttagacacaatgtggcccaagcgtccttgtt

SEQ ID NO: 202469 - DNA, 122 bp, Homo sapiens
tacaaatcatttaatcatacctttggaacctcgcctgccctatggacagttttaattatgcgtaatttagatacattgccaaattggtcaggagttacaagctgatgttattcataaaagaa

SEQ ID NO: 202470 - DNA, 122 bp, Homo sapiens
cccggggcgtgggagaagcccctgcttggggggaccgtctgctgtttaggggctccccttcgacacgtgggaggcaaaagtgcagagcgcaccatcatccagctccggccgcactgcacagc

SEQ ID NO: 202471 - DNA, 122 bp, Homo sapiens
gagaagggcggtggagtgggacttcccgctggcctagaaaacttcagctagggctgggggcggtggctcctgcctgtaatctcagcactttgggaggctgaggctggaggatcgcttaaggc

SEQ ID NO: 202472 - DNA, 122 bp, Homo sapiens
ggccatgagctgattggttcccctggcctgtgccctgtggtcccggagtggctctgggatcgtgtggggcagccagcatggacagtggagatgctatcaaggccttcagtagggtgcagccc

SEQ ID NO: 202473 - DNA, 122 bp, Homo sapiens
aagggccggctccccagcctgctcagagcctgagtctcccgctgctgcagtgggaggaagcgcgcaccggcaccggttcactcggtgtgggggcgctgattgtggtgggggcgctgattgtg

SEQ ID NO: 202474 - DNA, 122 bp, Homo sapiens
gggcgaagctggggaggaatttcaatcccgggagcgaagttagagcttgaaggacggcggcggctgcgggcgcagccccggaaccgaggccgggcgggcaggtaagcggcgagcgcggccgg

SEQ ID NO: 202475 - DNA, 122 bp, Homo sapiens
taggtgctgtccacatgggctgttgtttcctggctagcacctactgtgtacaataattaccgggaaaggacaaaacctgcttgcattttgtcatcagtggtttgcacagtcagcatcttttg

SEQ ID NO: 202476 - DNA, 122 bp, Homo sapiens
gggtgcgggaaaggggcagccctgtgactaccgacgggggcgggccgggtgggacgcacccggaggttcctgcttcctggcctcccgcaggtgaagaccaagacgtaaacagacgccgagca

SEQ ID NO: 202477 - DNA, 122 bp, Homo sapiens
tgccaccttagctcttcctggtttcaccttgcttcaggatccttggctacttttctgtcccgcttctcttgcaacactgtatcctgcttgggcttggggtagtctctactgtataacttaac

SEQ ID NO: 202478 - DNA, 122 bp, Homo sapiens
ggttctgagacctccatccaccaccgatgtgacattctttgtgttcaaatgtctagctgacgtctgatgcttaaaacagcccatgccttcacccctctctgcattgtcacagccctgtatca

SEQ ID NO: 202479 - DNA, 122 bp, Homo sapiens
ttctcatccgtaaaacagagataatgcttcttcgaagagccggtgtggggttacaggcttcgcagagacgtttaatgaatactcacatcttccttctcttctgacttaaatccagtccaggt

SEQ ID NO: 202480 - DNA, 122 bp, Homo sapiens
catccctctggatctagcagggtgtccgttgtgctcctgatccagtgagacgcccattgccgatcccgactgggctaaagacttgccattgttcctacgcggctaagtgcccgggttcatcc

SEQ ID NO: 202481 - DNA, 122 bp, Homo sapiens
ctctccaagtcactggggtctgacttctaagaatgtaaatgtacagccatgggatgcctgcgtccacacttctaggtggtacatcccaaaggcagatcgaggccttgggccatgtgagctca

SEQ ID NO: 202482 - DNA, 122 bp, Homo sapiens
ggtgaggacgggaaaagtgaataatgactgggtgtggccccgccagccacataaatcatccgctctgttaacatcaggtcactgtctccactccccgcttcccagctattgaaatatctatt

SEQ ID NO: 202483 - DNA, 122 bp, Homo sapiens
gccccttcttgggtggggcccgtcccacagtggcggtgctgtgtttggtttcccgagtgccgtaggaaggtcttcgcaggccgggctggtgtcctgaatgtccattttcaggagaggaactg

SEQ ID NO: 202484 - DNA, 122 bp, Homo sapiens
gaccaccaaggagtgcctccacagattctgctctgactgcattgtcacagccctacggagcgggtaataggagagacatgtttgagatgagatgaaggggtacaaagttagggccctctcac

SEQ ID NO: 202485 - DNA, 122 bp, Homo sapiens
agcgctggggacggcgatggaacaaaacacacttccggttctctggagtttacatatcggcgtgtatgtaggggctggggcgttcattatgcattgctggggggcttctagtacggccagcg

SEQ ID NO: 202486 - DNA, 122 bp, Homo sapiens
tccagtattcttacacaggcactcagggctttcagttagctttttagtacccacacctcacgcaggtagacaaccaatgattatgagacagcggaggagaatttctaacataaagagcaggt

SEQ ID NO: 202487 - DNA, 122 bp, Homo sapiens
gtgtaaacgtagggccagattttgttcgtctccgttccggaaaattggtggagcactcctcggctcttgtataattcaatgactggctttgccgcgtctttgtactgtcttagcctggcagc

SEQ ID NO: 202488 - DNA, 122 bp, Homo sapiens
cgggcctagatccaaggtagttgggtagaggggggctctgcagtccctgaccccaggcagcgtcacccaccggtgaggcactcagggcgcttggctctacctacaccatatgcgctcggggg

SEQ ID NO: 202489 - DNA, 122 bp, Homo sapiens
cgtccaggcagaagggagagcgtgagcaaggggcccgtgggactgagtgctgcgtgtcgccgcagaggggcatgaggacagtgctgggcacggcggctgtgggcagtgtgggccgacagaat

SEQ ID NO: 202490 - DNA, 122 bp, Homo sapiens
cttggggtcagaaggccccttggggtctcgggagggcctggccgaggatttggggcgccccgagactcgcgtgtcagcgccggtggcgctcagggccgagatctgtctcctccccttcctcc

SEQ ID NO: 202491 - DNA, 122 bp, Homo sapiens
tctggtggctgcctccctttacctggtgcatcatttagatctctttgcattgtaaaaagacggaaatcctgacctcacctggcttaaggggaaaaaggaatttactggctcatatgataaga

SEQ ID NO: 202492 - DNA, 122 bp, Homo sapiens
gaagagaggagggggaggccgatgacctgggctctgggcctctgaaggcaagtaggggtgcgtgaggtggggggccgtggtgtgggggtggtccgccagggtggaccggctggcaacctgcc

SEQ ID NO: 202493 - DNA, 122 bp, Homo sapiens
caccctgccccagccagcactgccagaggcctgtgcaggagggagggaaacgcatgactccgcccgaaaccaggtcaccctcccgtggcagccccaccagcccaagggccgagactgaagct

SEQ ID NO: 202494 - DNA, 122 bp, Homo sapiens
gccgctgcagtctcagcctcctgactcttggctgctctgtctctgggcacttttcttggccgggcgcggggctggtacctcccagctcttggaagccatggaggaaggcgggctggaaccgt

SEQ ID NO: 202495 - DNA, 122 bp, Homo sapiens
ccgctggaggcgcgatcattcactgccccctagtggaccagatgtgcatgagccaggatccgtgcttccgctttgatgtgggctctgagcaaatcagagctgcattttatttcagtaagttt

SEQ ID NO: 202496 - DNA, 122 bp, Homo sapiens
cggtggccctgtaagattatcatcagctggaagactcctactgtccagtgacctcatagccgtcacaatgcatgactcacgtgtgacttaccctggtagagaaaccccctgtgcagccaccg

SEQ ID NO: 202497 - DNA, 122 bp, Homo sapiens
gccaagagtacgggcagaagacaacccaccagggttggccagttaagactgggtcccagccgcttaggcaaaaacaggacccggtccccagagaagctcttcaaggtatccaggtccatctt

SEQ ID NO: 202498 - DNA, 122 bp, Homo sapiens
gacatgtagaggtatgaaagacacagggcagaggtgccggggcatggctctgtgagggcacgggtatgaggctagaggagccctgggtctgcctttacttacccgggtctgctctagcccta

SEQ ID NO: 202499 - DNA, 122 bp, Homo sapiens
tgccagcgtcccctttcccgccccaatcccttggcagagagccagacaactgtatacagacgatttaggttgagcaagctgcacaaaaccagggagtcactcagtgactacaccgatctgga

SEQ ID NO: 202500 - DNA, 122 bp, Homo sapiens
ctcgcagtctccagaaacacttgttctcactgtgacctttcgctcaacaggcaggcagtgcggcgtctgcagagccggaaccggcactgcgcgctggacgcaagcaacaagcacgacaggcg

SEQ ID NO: 202501 - DNA, 122 bp, Homo sapiens
ctgaagctccagcctttcctggtgccccagtcttctgcactaagctgtggtgagcacatccgggttccactggatttttgtgcggggagggggttttctacgttgggtcaatgatgagaatc

SEQ ID NO: 202502 - DNA, 122 bp, Homo sapiens
gaggtggttgcggtgtgtttctctcgcccaagaggccaggtcagggctggtggttcatctcgctggatagcccctaaccctagaacccgggaaatgataacccggtatgcgtagcaggtcag

SEQ ID NO: 202503 - DNA, 122 bp, Homo sapiens
aggcacatgcctgccatgaatcctgaccgacagctgtctctcctggctgacaggtccaatcgggcctctgagcttgttcaggaatttggtttgttaacattatgaatgaactcattggatag

SEQ ID NO: 202504 - DNA, 122 bp, Homo sapiens
gtgggagcgtgtgggctaggccttatggagagtgggctggcgctcaggagaccccaccctcgtcccctgcatttttctcaccttcctcctccataatcaacctcgctgcaagctttccctct

SEQ ID NO: 202505 - DNA, 122 bp, Homo sapiens
cgccgtcctagtggcggggagcgcacctccgagggggcatgagatcggagaaatcccttacgctggcggcgccgggggaggtccgtgggccggagggagagcaacaggatgcgggagacttc

SEQ ID NO: 202506 - DNA, 122 bp, Homo sapiens
ccagggggaggaccagctcaggcgcaccacaggtgtggggcggcagcccgtgtggttgggcgtgggcctcatgtccccaggacaggcctcgcatgtgaactcgtccacctggaagcggtacc

SEQ ID NO: 202507 - DNA, 122 bp, Homo sapiens
gatgctggaggtgctgattgtggctgtggtgggagctctatgtccaggtggtatggagctcgctggggaggggttggtccatgtcccatcccctggccagctcctgtcccagtttggtcctg

SEQ ID NO: 202508 - DNA, 122 bp, Homo sapiens
gtaggcactcaaatattcactgaataaattaataaattaatgactggatcaaccaaccaacgagatcaaagtaaaaaaaatgcagagctactttgaggctggactgcagagggtcttcactg

SEQ ID NO: 202509 - DNA, 122 bp, Homo sapiens
tgggccctgggagcgccccctaggtgtgtgcctgtgtgaactcctgggtgtgtgtgtccacgtacaccctgtgagtgcacgctaggtatgtgcatgcatctgcaacgcttgtatgtgaatga

SEQ ID NO: 202510 - DNA, 122 bp, Homo sapiens
gagcggatcctgctattacgggtgttatcaggcggtgatcgcgacagaacgtgctgtgtgcgtggcaagtgcaaccactttgcagcgtgcctggataatccccaacatccctcaaagcggga

SEQ ID NO: 202511 - DNA, 122 bp, Homo sapiens
gttcatctcctgactagccatgatacaccaccatagcatatctctatagtggaacactaacgccagtatatatttcttcttaataaggcaggtgtaaggattattaaatttgctatcatcag

SEQ ID NO: 202512 - DNA, 122 bp, Homo sapiens
cgcccaggcaggtggcggcccaaagcagtgagcgggagagccgcgacatcgtgtcctcagcgctggcgttcgggagaaagctaaggctcgcaacgctcagtcaacccctcaatcccctgcgg

SEQ ID NO: 202513 - DNA, 122 bp, Homo sapiens
ggcaccaggacatagtggacaggctccatggggctgcctctccgctgctccacaaggtggcgagcctggattttggcagcgttgatctcctcacccatgctgcccgtggtgtccaggacaaa

SEQ ID NO: 202514 - DNA, 122 bp, Homo sapiens
agatgtgtgcgtggataactcccagagccccgcctgtgtggcaacacgcaggcgcaaggtcgcgtgccctgcgctgcaggctctgattggtcgccacgggtaagggcaccgcccaatgggag

SEQ ID NO: 202515 - DNA, 122 bp, Homo sapiens
aaacaatgacatagaaacaagtgtgctaagtactgagtggaggagagagatggaggcagacgctgcaggggaaaaaaaatctgattaaaaagggccctttgattccacaggcacaaaaatcc

SEQ ID NO: 202516 - DNA, 122 bp, Homo sapiens
aaattgcctgctggaaaaaataccctaacattttctggaagaattaaatacccagaggctcgtaatattcaaaatgtccaagatgcaatgcagaatcacgtgaaatacatgagtcaggaaat

SEQ ID NO: 202517 - DNA, 122 bp, Homo sapiens
agccgcttcctctcacgtgtgtggccttgtgtgtctggcagatgtgaacgagtgtgcagacggtgcccaccccccctgccacgcctctgcgaggtgcagaaacaccaaaggcggcttccagt

SEQ ID NO: 202518 - DNA, 122 bp, Homo sapiens
ccaggtccatgcctgcttgactcagagtgacaagcccagctatagcccagtgtgaattaccgtgcacagggcctgtccctgctgagcaagtgcagggcagaaggggtggggtgggggagggg

SEQ ID NO: 202519 - DNA, 122 bp, Homo sapiens
gtcaaccaaccccatcgccaactaagcgaggcatgcctgagagacatggctttcagaaaacgggaagcgctcagaacagtatctttgcactccaatcattcacggagatatgaagagcaact

SEQ ID NO: 202520 - DNA, 122 bp, Homo sapiens
cagctgaccattccaagaattccctcccgcatcccgatcttccacctggagaaccaacggcgcagccagggaagtcgaggcacgcccacagtggcaccaacagctgggacctcttatcgcat

SEQ ID NO: 202521 - DNA, 122 bp, Homo sapiens
acttttgaaggaccaaagggaactcgctctcctccccgtgggaccccagcccatttcatgcgcactgtgcaggccacattcttcagcatagttaacctttaaggtctttccagctactcgat

SEQ ID NO: 202522 - DNA, 122 bp, Homo sapiens
tttttctttatcttcatgggggtgactgaattttacattttaactgccatgtcctatgaccgctatgttgccatctgcaagccccttcattacacatccatcatgaacaggaaactctgcac

SEQ ID NO: 202523 - DNA, 122 bp, Homo sapiens
ttggcgtttggaggggtgaggggcgacccgcagcgcgactcgacggcgccccccaggggccgcccgacacgtttctgtcaccttggctccagactgagcttctccatccctttctttattat

SEQ ID NO: 202524 - DNA, 122 bp, Homo sapiens
actttggcaaatgttcccctcccacctcgcagccccacccttaggccaacccctcctcaccgcccgctccacgtaaaaagcaagaacaaggggcacgaagtccaggaggtctgtggtcctgg

SEQ ID NO: 202525 - DNA, 122 bp, Homo sapiens
ggcgagattaatgtcagatcttgggagcatttccagtacaggttaaaactgtcacgcggtcggcgggattgcaggtgatgcagcaagcctggtgtcctcgacaggagacgtttcccatctag

SEQ ID NO: 202526 - DNA, 122 bp, Homo sapiens
cttcttcaaaaggtcacattttgcctccaaggaccctgttcctggaggagactccgcccccgctctgacactctttctcattcgttttctttcccaacttccagcccaaagaaccctttcct

SEQ ID NO: 202527 - DNA, 122 bp, Homo sapiens
cgaggctggagtactctggcaccctctggggtcccgaagtgcctgagtacctgtttgagccgcgtgtaggtgactgcgcacctgtttgaactgcgtgtaggtgaccgcgcacctgtttgagc

SEQ ID NO: 202528 - DNA, 122 bp, Homo sapiens
agaccctaaggcctatcagcttctatcagcccgcagtgcctgcctgctgggcctgttggccgccaccaacgcgctgaccaatggcgtgctgcctgccgtgcagagcttttcctgcttaccct

SEQ ID NO: 202529 - DNA, 122 bp, Homo sapiens
ctttccccgcctctggccaccagggggacctgcaaccaagtatgtgttctttcaggcgagcgggaacgcgtctgcataaatctagtccaatccagggccccgtagcaaggcgccaaagctgg

SEQ ID NO: 202530 - DNA, 122 bp, Homo sapiens
ggtgctggacactgcaggtccaaaatggaagtgtggcagggccaggctctcaccgctccccgccgttcagcttctgtgtggctgcagcccttggtgatctcagctggcgatggcgaaactca

SEQ ID NO: 202531 - DNA, 122 bp, Homo sapiens
gaccttcttcctctcccaaagccctgggtggtcgccgctgccaaggaaggggtctcccttcgaatgtcttccactagaatcccggggtcttcagtcccagctccactgtcacaccctcctag

SEQ ID NO: 202532 - DNA, 122 bp, Homo sapiens
ggataaataatgggaaaaatttctcaaagacaagctgctttggagcagtttctaaactgccgctgggggacaggaaggaaccacacgtgaaagcgcgggtgctgctgggagctcaccccgtc

SEQ ID NO: 202533 - DNA, 122 bp, Homo sapiens
tcagcacctctaccgacccggcgactgcccgggctgcctctgggccgtacagaaatatggcgacctcctgacagccgctccttgatccccgcccctaattaattattggcgtatgccatagg

SEQ ID NO: 202534 - DNA, 122 bp, Homo sapiens
ggagaggctcaccagacaaggcccttgctctcagaagtccccagcctagagcaggcagtccgacaaataaacaggcaaatagttaagtcctgtgattgcaggacagggggacggtagataaa

SEQ ID NO: 202535 - DNA, 122 bp, Homo sapiens
gccgccgccagggggaggcgctgggagtgggattgggaacgggacctcagctgccaagctcggcccggaccctaggtgcaggggaggcggggtcccgggctcgggctgcctgcccggacctg

SEQ ID NO: 202536 - DNA, 122 bp, Homo sapiens
cagatggggatgggagttggggtgctggggaaggtccgtctctccctattcctcacctcccgcacttgaggaggaggagtctggaatgcacatctcccttaatgtctcaatgcctccattcc

SEQ ID NO: 202537 - DNA, 122 bp, Homo sapiens
aaggctggggactcagattccaggtgtttcaggttgtagctgcccagccggcaaggtaggcgctgagaggtgcggcagacggtggagagtcgtcaagcgtcgggtatcacccaggaagggtg

SEQ ID NO: 202538 - DNA, 122 bp, Homo sapiens
tcttttcccccaacgttggcttctgtgctaatgccttattctagtgagggaggctaacagcgggatttcggggactgaggcaaggccatgaggaactcgtgggcggggaggcctttgttctg

SEQ ID NO: 202539 - DNA, 122 bp, Homo sapiens
gagtttatctattctggagcattgtctgacatctgcaaaaagatgctgagggcagaaaatcgggaactgattttacaactgacactttcatggagtcactgaaactttcatggggacattgt

SEQ ID NO: 202540 - DNA, 122 bp, Homo sapiens
tttcaagtctgctccttctgcacttgacgtccttgccagtgtgatccagagctgctcacacgagcaagcgtcctcgagtcctagggatgctgttaacagggcagcgggtccagggagctggt

SEQ ID NO: 202541 - DNA, 122 bp, Homo sapiens
aggctgaggcagaaatatcgattgaacccgggaggtggagtttgcagcgagctgagatcgcgccgttgcactccagccgcctgggcaacaagagcggaacaatgtctcaaaaaacaaacaaa

SEQ ID NO: 202542 - DNA, 122 bp, Homo sapiens
ggagagagaggttgtgttatagtagtcaggcagacatcagcaggccaggagagggctgcacgcccaaccaggaatgtcagacgaccatcaagtgatggtcaggtggttgttacactgttaca

SEQ ID NO: 202543 - DNA, 122 bp, Homo sapiens
atttaacgtatattcattgacttcataaccaatcttttggtacaactggaacccctccagcgaccttttcaaactattgcctctggtctatttaaatgtattggggaccacatggagacttc

SEQ ID NO: 202544 - DNA, 122 bp, Homo sapiens
gaaattcgtcattcgaaacatagtggaggccgtagcagtcagggacatttctgaagcaagcgtcttcgatgcctatgtgcttcccaagctgtatgtgaagctacattactgtgtgagttgtg

SEQ ID NO: 202545 - DNA, 122 bp, Homo sapiens
ttcgctaataaaaggacatgggcccatgaggtttgcttgctactcagcttctaatcctttcgtattgttcattcacaattttactactgctccttaaaaaaaaaaaaaaaaaattttaagct

SEQ ID NO: 202546 - DNA, 122 bp, Homo sapiens
cggcctccgggcccgggacccgcggcgcaccctgctgaccgcggactcgagggggacactcgcaagcttggatggtggttttggggggaattttaccgctcaagttctccaacttggttgag

SEQ ID NO: 202547 - DNA, 122 bp, Homo sapiens
cgccccacaaggaggctgtgcctaacggtctgacccgtttgcacgccaggggcgaggggccggatgctgggtcctccccgctttggagggttcttcgctggcctccttcggaagctcccctc

SEQ ID NO: 202548 - DNA, 122 bp, Homo sapiens
tctgcgcgctgcgtgcgttccgggtgggagtggcgggggcaggagcacgcacccacaaagcgaggaagggcaggggctacggagtgggggcaccccgaaagccttgagcccccgagtttgct

SEQ ID NO: 202549 - DNA, 122 bp, Homo sapiens
ctgcaacctccctgcctaattctcctgcctcagcctgcagagtgcctgggattgcaggcgcgcgcagccacgcctgactggtttttgcattttttgatggagacggggtttccccgtgttgg

SEQ ID NO: 202550 - DNA, 122 bp, Homo sapiens
gctgtactcgctgggagtgagcgtcttctccgaccagggcgggaggaagtacatggaggacgttactcaaatcgttgtggagcccgaaccgacggctgaagaaaagccctcgccgcggcggt

SEQ ID NO: 202551 - DNA, 122 bp, Homo sapiens
ttgagtagttgtaccagagaccctatggtttgtgaagactaaaatgtttactatcggtgccgtgtaaaaaaaaaagtttgctgagtcttgctctaggataaccagcagaaaatcaattcatc

SEQ ID NO: 202552 - DNA, 122 bp, Homo sapiens
agttggtttggatggggtccttgcattgacgttttaaccctgcctccaaggtgatcctagcgcagaactaggatgtgactgttcaccacctgcctgacttcggtgagttatcttagctcaca

SEQ ID NO: 202553 - DNA, 122 bp, Homo sapiens
gggatggaaaattgattacctgcaagggctcggagtgcagagtgcacttccctgggtgggcgctaaggggagatggagaccgtgtgctcatgtatccaagcatggctgtcactcggtgatag

SEQ ID NO: 202554 - DNA, 122 bp, Homo sapiens
acctccgccgctgacttcccctgctgacctctgccactgacctccccctctgacctctgccgctgacctccaccgctgacctcccccgctgaccttccgccgacctctgccgctgacctccc

SEQ ID NO: 202555 - DNA, 122 bp, Homo sapiens
ccaggttacaagcatccagtgacaagtctgttttgttacattcttttgcatcacatagatcgtctcagttatcagaaaatgattttgtattttggcataaactctgtttctaaaatttccat

SEQ ID NO: 202556 - DNA, 122 bp, Homo sapiens
gaggaacttgaggggatgggattcactctaaggagtcctgggcggtcggagctttcccctcgcgtgacccagcctaagggggaagtggagaaaaacagctcgacagatttgttgcttaaatt

SEQ ID NO: 202557 - DNA, 122 bp, Homo sapiens
ttgtctcctgtagggtccagccacagcaggcccggcgtcccggtggaaggcagccctgggcggaacccaggcgtttaacggctcactaggcagccccagatctggggaacagatgagcacgt

SEQ ID NO: 202558 - DNA, 122 bp, Homo sapiens
tcctgggcaatgctctttaaggaaaaacttattcagtccagtgactggtgactaagggaacgatggagcacagggaattgggcgggatctagactcctaataatgcctccttagccaatgaa

SEQ ID NO: 202559 - DNA, 122 bp, Homo sapiens
aggtaggtcgaccctggtgaattttgaagtccactctgggtggggagctggcccgggaggcgctggggagtctgtcccctgctcggcagctcacggttccactcacgcctgccagggagccc

SEQ ID NO: 202560 - DNA, 122 bp, Homo sapiens
gcccggggccccggggagggcggccggagccggacatccgtggaggtctcggtggcaccccgcttcctgcagaccacatggtgccccagcaagacacagcagtgggggcacatggtcctgga

SEQ ID NO: 202561 - DNA, 122 bp, Homo sapiens
ctgagcgtgaaaggaactcattgaaccaaaatcttccaaaaagactggaacataagagagcggatgaagagcataatagaagagaagtgccagggaggaggattatcttaggcagagcacac

SEQ ID NO: 202562 - DNA, 122 bp, Homo sapiens
tctaccgccaccccgcagctgctgcaacagttggggcggcggcggccacagtgctgtggtcggtgcgcttgttttggtcgcagtgggcttgggggtggggaggctttggggtaactgggcca

SEQ ID NO: 202563 - DNA, 122 bp, Homo sapiens
tgtggtcactcaactccatgtcccatcttgaactccatgtcccatcataatgaccattagcgcagtacaccttcttacctgccttgcaggggtgtgggtatctgttttagacagctgagaaa

SEQ ID NO: 202564 - DNA, 122 bp, Homo sapiens
gcccgggccccacttattccgcattcaacccatttattaaaccactaccttgcaactggacgctaaggttatagggaggaatcagaactggatgctgtccttctctcgagatcagtttagta

SEQ ID NO: 202565 - DNA, 122 bp, Homo sapiens
cactgcggggggcagcccgcctggtaggagagcctgtgctgggtgccaagatggagacagcggctaccttgctacggcgggacatcgtatttgcggccagcctctacacccagtgaatgccc

SEQ ID NO: 202566 - DNA, 122 bp, Homo sapiens
tttgcacatgaggaaactgaggcacagagaggcgtggcttgccccggaggtcacactagtcgatttggtcccaggccagggcgggttctgggtcggcagcccgcgcaggtgcactcgggagg

SEQ ID NO: 202567 - DNA, 122 bp, Homo sapiens
cgttacaatctcattcattcctctggggacatgaggatgccaggtagggaggttggggggcgggtggcaccaccgcagcttttgccccagggctgcactggtgccagggaggtggatgtggg

SEQ ID NO: 202568 - DNA, 122 bp, Homo sapiens
gcgcgctgctcttctacggcacagacttccgcgcgtcggccgccccgctgccgcgcctggcgcaccagagctgggcgctcctccacgaggagtcgcccctcaacaacttcttgctgagccac

SEQ ID NO: 202569 - DNA, 122 bp, Homo sapiens
ggaagcactcggtcagccttcggaagcagctcgcattattagaaggtccatcttccatgtcggagccgaagagcagcgcggccgcggcggcgagggcgaagctggcgccctggggacgccgc

SEQ ID NO: 202570 - DNA, 122 bp, Homo sapiens
gcttagtccttcataacatatatctccacggaaaagggtatttcctcccgtcagaaaaagcgccccagtctggtctgggttggtttttatttcacgttgttgcaagtaggcgaagtcccttc

SEQ ID NO: 202571 - DNA, 122 bp, Homo sapiens
aagggaccaaacctcggtgaactctgcaaccctctcccgaacactcctcgctgctgccggcggttccagcctgcaaactcagagggggctgcctggatccagtccccagcaggagaaccgac

SEQ ID NO: 202572 - DNA, 122 bp, Homo sapiens
caggcatggtggctcacgcctgtaatcccagcactttgggaggccaaggtgggtggatcacgaggtcagagattgagaccattctgaacaacatggggaaaccccatctctactaaaacaca

SEQ ID NO: 202573 - DNA, 122 bp, Homo sapiens
tttcaggttttcagatattgtggagatggaagtactgttgaatctgcctcccatacccctcgaacccgccggtcctcacctgtgtcaccctcgaccccgccggccctcacctgtgtcaccct

SEQ ID NO: 202574 - DNA, 122 bp, Homo sapiens
tgtcagaaacagctgcgaggagcatccagcctagggctcagcaggtgtgacttaaaggatcgcaggtgacagccctcagtggacttctgtcctcaccatgtttcccactggcacaggtgggg

SEQ ID NO: 202575 - DNA, 122 bp, Homo sapiens
acggctgaaagcctttatctacaaaaatgtggcctggtgctcaacggtaagaccaattaccgggagtgcagaagacagaaagcacaaaggtgcacacatcagtttaagcaaatgaggaatta

SEQ ID NO: 202576 - DNA, 122 bp, Homo sapiens
cgctcccctccctgaaacctggagtcctgagtttttcctccgcggccgctactcactccccggtgacccccagctgccgtcttgccccccagcaatcttcaggcagtccttacccactcccc

SEQ ID NO: 202577 - DNA, 122 bp, Homo sapiens
ctcacgtaaaagggtacaacgcagtttctcttccggggttcaggacccaaaaagaacgcacggacgttgcccggcctgagcgcgcaagaccggaagctgctgggtatccgcgccggaaccgc

SEQ ID NO: 202578 - DNA, 122 bp, Homo sapiens
gacggggtttcaccatgttggtcagtctggtcttgaactcccgacctcaggtgatccgcccgggcacaggctcagagttttaagaaaaaccacaaagtgctatgaagtttgaggctaccagg

SEQ ID NO: 202579 - DNA, 122 bp, Homo sapiens
ctgtcttagtgtgtttgggttaccataataaagtgccacacactgagtggcttaaacacccgaaatttatcttttcactgttctagaggcttgaagtctgagatcaaggtgctgtctaggtt

SEQ ID NO: 202580 - DNA, 122 bp, Homo sapiens
tggccagaattttcaggatgctttataagggagccctcagccaggtgtaggaggacgagccgcagacaaaactcctcagataccaagttaaacaaggaaggggtttattcggccgggagcgt

SEQ ID NO: 202581 - DNA, 122 bp, Homo sapiens
gtttggggccgactttccgaggttcttggctggctttgtctactgtgtgtgtcctcctctcgcgcctctttagcttcagaaaagaaaaactggtcccatccattgtcttaattgtttcagtg

SEQ ID NO: 202582 - DNA, 122 bp, Homo sapiens
gacagcgggccgggggctcagggaccgccctgggagggcgggcactcaccatgttgacttcggaaaccatgtcgatgctggcgatgtcgatgttcatccccacgcagaccgggggacctgcg

SEQ ID NO: 202583 - DNA, 122 bp, Homo sapiens
cgaaccggaaatgatgaccaagccactgtctgccctcagcaaagacagcagcagcgatggcggggacagcctgcagcccacaggcacctcccagcccgtccagggactggtctcacctttat

SEQ ID NO: 202584 - DNA, 122 bp, Homo sapiens
catctaagatgtgggtcaacctttcaaaaaggggcagtatttggaccctaggccctttgccggccatggcaggatgttatactgtggcccaggcttctgctaaggccttggttatttttggc

SEQ ID NO: 202585 - DNA, 122 bp, Homo sapiens
aaattttatctaaactaaaaaggaacttcaagaacttgtcgcgggtgacagcgaggtgtccgcgcacggctggtgggtgcccggctggcccggggcgggaaggggcggcggcgctgtggcct

SEQ ID NO: 202586 - DNA, 122 bp, Homo sapiens
tgcgtcttgcaggatcgttctggcttccgtacaatcctgcagagagcagcaaagcgcgcacgcagcctccgcctcatactccgcagtggcagagctggcgcacagaacacccgccagccggc

SEQ ID NO: 202587 - DNA, 122 bp, Homo sapiens
tttgtagtgtcagccaaaggaatgataatattgttttagtgtctcctacatagaagggaacgcccagtatggcctaggcagtgttctagactctgcagatagaacaaggaacaagacttacc

SEQ ID NO: 202588 - DNA, 122 bp, Homo sapiens
aaaacgcctggtgaacgcgcaaagaaaggagaaagccaggtgaacgcacagggagaacgccgcacaaccgcacaggtaggagaaagccatgtgaacgcacaaagaaaggagaacgctgagtg

SEQ ID NO: 202589 - DNA, 122 bp, Homo sapiens
agggaaggaggcctgagggccgcgtgcagcgggcgggcagctgggtgggctgggggcggccgcgcggcgtcccggagcctcgggccgcccggagccggcgggcgggcggaggcggaggcggc

SEQ ID NO: 202590 - DNA, 122 bp, Homo sapiens
cctcaagggcaaatctggaaactactttcccccgcagagtaacacaatagcaggccccaccgactcaacaaacagaaacatccagctaaccagatgtacgggacagtagcccacacacgaac

SEQ ID NO: 202591 - DNA, 122 bp, Homo sapiens
tatttacaataccttttcattgggagatgaggacagcatttggacacaactgtacaggcacgctaagtctcatccttccaaagacgtcagtcacattcagcccctttagcagtttcatcaac

SEQ ID NO: 202592 - DNA, 122 bp, Homo sapiens
aagtgggaaaaggaaaatgaaaaagaatgttcatgtttcattctataatggaaaagatcccgagataggagaaaaatactttggaatgccaaaaatgacatttgattttttttttctcagtg

SEQ ID NO: 202593 - DNA, 122 bp, Homo sapiens
accaggaggaggagaggggcatgggcaggtagcagccttagtaatataattgcataatgccggtcaatgggtctggcccgattaaaccaaatatagggtttttatttggcaacaagagttat

SEQ ID NO: 202594 - DNA, 122 bp, Homo sapiens
ttaaagccagcagtagtgggttgagtttctctcaagctgccacttctcctcctcttcttccgttgttgcatctctctgacccactcttctgtcttactcttccacttctaaaaactcatgta

SEQ ID NO: 202595 - DNA, 122 bp, Homo sapiens
gcgaggatgagggcgacgcccccaaacaccatgctgcttccaccgcagcctccaacccggcgcacaacgggcgggtgtgcagcacctggggcagcttccactacaagaccttcgacggcgac

SEQ ID NO: 202596 - DNA, 122 bp, Homo sapiens
ctaaagcacccgcttcttcgcttgagaactaccctctcttttcatttttggcctccccgccgggtgagtggaaaccgcttgcacattctatagaacccgattctaatccagacgatccggag

SEQ ID NO: 202597 - DNA, 122 bp, Homo sapiens
tcaactccagctggaccccctccattagaacattatctgcctataaaaaatgagcccaaccgtcaacaaaatctctcaaaacttgctgggtgtggcggcttacatctgtaatcccagcactt

SEQ ID NO: 202598 - DNA, 122 bp, Homo sapiens
caagtgccggctctcaacagcctccccacgcccggaaagctccggagctacaggtggttccgcacggatgggacctgcttctcactcctgcacagctgaacctccaggactggctgggcgac

SEQ ID NO: 202599 - DNA, 122 bp, Homo sapiens
acggtcgggataaaggaggactcggccgagaaggtgcaggtttaaagggctgaccgcggacggggaaggctgcgtgggtcccacatggcacagggcggccgctcgccttgtcctgagaagac

SEQ ID NO: 202600 - DNA, 122 bp, Homo sapiens
ggagccaggtctcagggatgaggagggaatgggaagaaaagagtgacggggatctgtggacgacattctttaaagcaggcaggccgtgaaggggaggacaggatatggcacctgaagaagga

SEQ ID NO: 202601 - DNA, 122 bp, Homo sapiens
atcaaagaaaggggtgacggacggcacctggaaaatccggtcactcccacctgaatactgcgcttttccgacgggcttaaaaaacggcgcaccacgagattatatcccacacctggctcgga

SEQ ID NO: 202602 - DNA, 122 bp, Homo sapiens
tcctcgtgcgcacgcccggagcccgggtcaccttgtcgtctacaagaaccaaggtgtgcccggccaccccggcactccaggccacctcagcacccccggtcaccccagtcactcctggccaa

SEQ ID NO: 202603 - DNA, 122 bp, Homo sapiens
agcagatgcagaagggcagcagccaaagtctgcgggttcctgcgggggccaggggaggggcgagccctacaggcaacttgaacggagagcgctttgatcactcaccagcccgggaaggcaag

SEQ ID NO: 202604 - DNA, 122 bp, Homo sapiens
agcccagaacgctctccggactgcacctgcgcgcctccaggctctcctcgtgcctgctcccgtgcaaactttctggcccgtggtggctttggggagcgtcccagtagcctggagtggcccgc

SEQ ID NO: 202605 - DNA, 122 bp, Homo sapiens
ctgccaatttcttgttcctctgagtgttaagcaggggtgtaggaagagacttgaggtgggcgagtctggcccctgggtcctgtcccactttgcatcactaggcagccttggcaggtcacctg

SEQ ID NO: 202606 - DNA, 122 bp, Homo sapiens
ttcttaggtaagagggaggccttggagaagaccctggaattcttacggtagacacggactcggtagttggacttggtctcctttccattcctgttcattgcctggcaccggaaaatcccctc

SEQ ID NO: 202607 - DNA, 122 bp, Homo sapiens
aaggcgggctgggcggcctggcggggggaccgcgggagcagttggcacccctggtggtggcggggacagcggcagggggctgggggtggctggcagggttggccggcgtgtgtgtgtgtgtg

SEQ ID NO: 202608 - DNA, 122 bp, Homo sapiens
ttgtcccagaatacggtccgctaccgctgtgacatgagtgttagggaaggcgggttgtcacgtttctacaagccttccagtcaaaagggaaaccttgcctaagtccttgtagttgagaaatc

SEQ ID NO: 202609 - DNA, 122 bp, Homo sapiens
ttggtctgcgagaaatcaaacttcgaacaggacaagcccgaagcccgcttctccgggagacggggtgccacaattgcaaggtaaaactagcagacatagttgcactgtctccccaggcggga

SEQ ID NO: 202610 - DNA, 122 bp, Homo sapiens
acctccaatagcaggaggctgctctaggggtccttgcaagggatgctggcagcttggacccgagtggtgggatgcagatggaagaggcaggtggacagatgagacagctgaagcaggaaaag

SEQ ID NO: 202611 - DNA, 122 bp, Homo sapiens
actttgtgcttcaagtatattacaagtggtcttgtagtgtagctgagaacgtttggggtgcgttaaaatgcgtttcaattggagtatgatttagcagccatttcttcccgtgaaattttgca

SEQ ID NO: 202612 - DNA, 122 bp, Homo sapiens
agctgcagatggatccccagtgagtaggaggcagccgtgtgagtcaggcagcggagggaacgggctgcatcgcggagaggaggtgcgaagcagcgcgccgtttccgggctctggaagccgag

SEQ ID NO: 202613 - DNA, 122 bp, Homo sapiens
gctgccccccaccccccccccaagcctgagacgtgctgagacccaaatgccagtagcgggcgggaggcagtgcagagacctgtgaaaatcttccgatgtgaccaacccacccccacccaggg

SEQ ID NO: 202614 - DNA, 122 bp, Homo sapiens
cggaaaacaaaagaagagtaactttttcccttttggtttatcccgctctggtcctcagggcgatagctaccacctgacacacagcgacctgggaaagagggaaactcaatcactgccctcgc

SEQ ID NO: 202615 - DNA, 122 bp, Homo sapiens
ttgatgctataaatattggatgccacgcttacctgacaggcttcttccatcccacctgggcgcgggggctcagagcgagcgcgcgagccgcggctggagcccgcctctcgcggctggagagg

SEQ ID NO: 202616 - DNA, 122 bp, Homo sapiens
cttttatccacatgcaaagtttcttttctacttcaatagattcctgtgttttcgacaaagcgaacaaaaaaatgtagccagtcagttaagtttggaaagagaaatggaacaaaaaggcatga

SEQ ID NO: 202617 - DNA, 122 bp, Homo sapiens
ctgccagcacctcgctggatcgagccattatgtctaatgccattcaataccatccctttgcgtttgatgtctaaaacagaagactgaaatttgaagagaaggaagtacttgggatgccaaat

SEQ ID NO: 202618 - DNA, 122 bp, Homo sapiens
tttctgtgctacccctacaaacccatgcctcactgacagaccagcattttttttttaacacgtcaataaaaaaataatctcccagaaagtttatctttgcttctgtttgtgtttgtttctta

SEQ ID NO: 202619 - DNA, 122 bp, Homo sapiens
agccttcggggacagcgccatcctcgtcgtgccaagtggatacatagctgtctggaaatacgtcctcagctgacccagctccccgaagaaaatctctcccggcaccactgtagtcagcgagg

SEQ ID NO: 202620 - DNA, 122 bp, Homo sapiens
ctgaggcccggagggacatggcggctcaccccaggtcacagggcaaggcagttgcagaaccggactgggatcagaactgctggctcccagcctgctccaccctaggtttggtgactcccgtg

SEQ ID NO: 202621 - DNA, 122 bp, Homo sapiens
accgggtgagctcaccgcccagcccaaaccaggagattgcgagggagcgatgcggtgcagcgcggtaagagcagcagccgggttcccgcagtgttcgctggcgggttggtttatcgcctcag

SEQ ID NO: 202622 - DNA, 122 bp, Homo sapiens
tcgccctcgccaatcgttggcaggttagagccggctgcgcggcttacggggctcaatcggcggcgagagcggcaggcggggcgggccgaacgcgggtttccggcggggcccggcaggcgccg

SEQ ID NO: 202623 - DNA, 122 bp, Homo sapiens
taaataaatacaaaaaacaaaaacaaaaataaaacccatctgcccaggaccatttagggtcgcggtgaccggagaaccaccccgagtccaggcggcgagaggctgcaaattccctggttccg

SEQ ID NO: 202624 - DNA, 122 bp, Homo sapiens
ctggatttcttttttcttcaaactccagccctggaatactgttgctgtcctatttgtcaacgaaccactaatagaaatttcttaggaacatactgtactagatgcctaggaaaagaaaatat

SEQ ID NO: 202625 - DNA, 122 bp, Homo sapiens
ccactaatgattttatgattttctgctctgggtaaccgcgctcagcggaatccctccccacgccgtggcgacgggggccggcccaaccgagggatgggggtatgggggcgtttgttttttcc

SEQ ID NO: 202626 - DNA, 122 bp, Homo sapiens
aactgttaacaagggcagttgagaaatttggcagaaagctggagttcaagcaggagtccacggaggtaccgacccctcgtctactttggtcagccctggccaggcccaggcagcaatcaact

SEQ ID NO: 202627 - DNA, 122 bp, Homo sapiens
gtacatcattcattcacaaagactgacacacaggacgtgaggcatgtggatgaaggcgagcgtgcaggcaggcgcaggggattcgtgagcccgtgtcctcaaagggctttaggagtattgga

SEQ ID NO: 202628 - DNA, 122 bp, Homo sapiens
acgaaccgcgcgtgcgccgcgccagcctgcgtcgagccgtcgcacacggctccgggagcccgcgtctaggcacgctctccaggttgccaagcagggtgtcaacaagtgcgcacgcgcggacg

SEQ ID NO: 202629 - DNA, 122 bp, Homo sapiens
agaattaatttccttgtctgtggttgcctgcttgtgctctggccttgttgtggagtggggcgctgggtgggaatatagagagtaggacaaagggaacactgggtagagtaggactccctgtg

SEQ ID NO: 202630 - DNA, 122 bp, Homo sapiens
cagggaatgggaagctgcgcgccattgagtccctccctcccccgcctctaccacacaaagcggaatgagatggatactcacagatcctgacactggagacttagaagtattttccttcgctt

SEQ ID NO: 202631 - DNA, 122 bp, Homo sapiens
gcatctctgcagagagaagccgctaaataagcaccgtcctttaagtagaatttctccttccggtccagatcccagtccacagtccacatgtatgcctcagtttctttgactgatccacaatt

SEQ ID NO: 202632 - DNA, 122 bp, Homo sapiens
gcaaccttctcagaagtcagccggaaaagggtctgggagtaacctttgcgccaacacccgcggctcctggtttcgtttcctgaatcttacgtacacaacacggtttccttttcccggttccc

SEQ ID NO: 202633 - DNA, 122 bp, Homo sapiens
gaaaactcaaaatgccatgcttgatcacagaaccagtcatctctcacctgctcaaaccatcgccttttgtcctgtatcaagaaaacatccggcttcagagctacctttagggtgacagacct

SEQ ID NO: 202634 - DNA, 122 bp, Homo sapiens
tcgtccctcatcttgggtgctttgagacagggaaaatctctcgccgcgtccagaacggaacgctgggcttggggtgcggggcggggactccaactcgcgcgctacgctactcgtgtctcctg

SEQ ID NO: 202635 - DNA, 122 bp, Homo sapiens
tttttttttttttgtgtgacggagtcttgcccttgttgcccaggctggagtgctgtggcgcgatcttggctcactgcaacctctgcctcccagattcaagcaattctcccacctcagcctcc

SEQ ID NO: 202636 - DNA, 122 bp, Homo sapiens
gcatgatgttcccgctgcccgttgccaacgggaagggccggcccgcctccctggccggggcgcaattcagaggttcaggtcttgagaactggcccagctcaggctcctggggcagcggcgac

SEQ ID NO: 202637 - DNA, 122 bp, Homo sapiens
tcatcctgccgaggtcaaatcccctccccttcatagcacctagtatggctacaacagtctcgagtgtatagaggatggggtggggtgaggtcacaggaatgatgctcccttctatctggggt

SEQ ID NO: 202638 - DNA, 122 bp, Homo sapiens
tttaaaatttttttcagagacagggtctctccctgttccccaggctgcgatcacggctgccgcaccctccccttcctgggctcaggcgatcctcctgcctcagtctcttgagtagcagcgac

SEQ ID NO: 202639 - DNA, 122 bp, Homo sapiens
cttccctctctctctgagagcgacctgttaaccgcaaatacgtgagtagaaacagggccccgcttctgtgtgcgctgctgtgcgtctgtgtgtgagccagggcattcccaggctctgcctgt

SEQ ID NO: 202640 - DNA, 122 bp, Homo sapiens
aggggttggggggaggtgcaggggcgggcactgtggggggtggggcggggccggtggccgcgactccaccccgcgcccctagtcgagtaaacaagccacgggcggcgcctgggggccgctcc

SEQ ID NO: 202641 - DNA, 122 bp, Homo sapiens
gagaagccccggcatccgcttgtgaggtccggggctgtggtctcgagtcccgccccgcctcggcgggccccgctcccatgcccgccccgctatcgcccccgcgctcttctccgcccgcccgc

SEQ ID NO: 202642 - DNA, 122 bp, Homo sapiens
tctcctaccagccagtgatgaccccgaagacagacatttaccactgtgttggttttcaatcgaaatgatgtacataaatttggggcgtgcttgcaccgtccgaatgggcctggggtccggcg

SEQ ID NO: 202643 - DNA, 122 bp, Homo sapiens
caggttcaagcgattgtcttccctcagcctccccagtagcctcccctaggattacaggcacgtgccaccatgcacagataaatttttttgtgtgtgtatttttagtagagacggggtttcag

SEQ ID NO: 202644 - DNA, 122 bp, Homo sapiens
tttggatccaccacacagtccacagagcaggtgcccagggattccatggtgaggctcgtccggaagattctgtgacttccagggctcatttttattcctacactgaaggagccacatgggga

SEQ ID NO: 202645 - DNA, 122 bp, Homo sapiens
aacctgtctaaagctgcaaggaaatcttgctgggaggagcttggaatctggaatgaagcccgagggcaaggctgaagtgggtcatttaaatgctgcaactcagagattcactcagaagactg

SEQ ID NO: 202646 - DNA, 122 bp, Homo sapiens
ctgccgttgataaggcgacggaagcctcaggagcgaggacgcagtgaagccatggaaacacggctgaggtgtgaggctggctcagccgcttcccccaggtggccacctcccaggcctggcgg

SEQ ID NO: 202647 - DNA, 122 bp, Homo sapiens
cacggagttggttaactcctctcaccggcccctggaaagggttccaagtcctttagtacccgacgctgtctgggaattccgggcgtttcggctccttggtcgcagaggcaggaggcgtgcgt

SEQ ID NO: 202648 - DNA, 122 bp, Homo sapiens
atccctgagggaagcgccgcctctgctcccgggttctccgcccgccgactccttcctggccggaccccgctgcgctccaccccagtggctggaggagcagctctccagtcagcctttgcagc

SEQ ID NO: 202649 - DNA, 122 bp, Homo sapiens
agtattctgccgttacaatgacactgtgagcgccttcatccccttctccacgcacaagagcgtgaggttctctgggaaacatctgtgacttaggtttgaccccaggtaaggcgtaagggggc

SEQ ID NO: 202650 - DNA, 122 bp, Homo sapiens
gagcaaagtgacccagcacccttctagagaaatggtttcatatcgaagcttggaagtcaccgagccccctgattttataactgaggaaatggaggcaccccgtgttgggtcccacagctcac

SEQ ID NO: 202651 - DNA, 122 bp, Homo sapiens
cccttactgaaaaattcagtactaaattatttaagtgagaccaagcaaaacagtcatctgcgtgagagttaggatagtggaaggcagagagtggtaaggaaggtatctatggagcaaagtag

SEQ ID NO: 202652 - DNA, 122 bp, Homo sapiens
tagaccccaaagccgctccatgcttgtgtcccctcctgaagcctgcaggctgtcccccagcgataaaccgataaaccgtttgtgggagccctaggagggccccttatcagtcctggcaggca

SEQ ID NO: 202653 - DNA, 122 bp, Homo sapiens
taggcggggctggagcgtgtgtgtgtggcggggggtgactcgtcctgtttataaaaagctcgccagctgcggaggcgccgagagaccagaataacttagcgcctcgaggcccagccgccgcc

SEQ ID NO: 202654 - DNA, 122 bp, Homo sapiens
gagggcggcgcgtgcagcatggcaggaggcgcacggcggggcgggcattgcgggaggggtcggcttctcctagacagggagagagaggaggtgggttacatatggattccggattgcagggt

SEQ ID NO: 202655 - DNA, 122 bp, Homo sapiens
gttgcctagtcgcggctacggcgtcatggaggagatccggcggcagggcaagctgtgcgacgtgaccctcaaggtaccgcggactgggcggcagcgggctgagggaaaaggggtcgagcggg

SEQ ID NO: 202656 - DNA, 122 bp, Homo sapiens
gaagtgcctctgcctcattcagactctgttaacttctctcagtgacgtaaaggagcagcccgagctcattctctgcccgcagccccccttcatctctctcctcctgctccttttctcctcct

SEQ ID NO: 202657 - DNA, 122 bp, Homo sapiens
atggaaactggggccagagccccaaaagatctactggacaccaatgtcagcaggtgctgacggtgcaggaggatgacagctaactaggagcaggttgttgcccagggtgacatcaggtggct

SEQ ID NO: 202658 - DNA, 122 bp, Homo sapiens
tcatgggagctggcttttccttccaaaagtcttaaggatgtccttcttagagcaagaccacgattactaattaactaaaaattctgatcctggaaataaaagctggccattcatttgcattt

SEQ ID NO: 202659 - DNA, 122 bp, Homo sapiens
tcctgcttcccctgcccaagggggcctgcacaggttggatggcgggcatcccagggcatccgggccataatggggccccaggccgtgatggcagagatggcacccctggtgagaagggtgag

SEQ ID NO: 202660 - DNA, 122 bp, Homo sapiens
ttgaatgctggagaccggaggaacatggactaccaatcccagaatgcgttttatgggacccgctcaccgcgcaggcgctcttgcccaagccactgagagcgggacgcggggctaggtcagag

SEQ ID NO: 202661 - DNA, 122 bp, Homo sapiens
agaccaaacctgggagaaggagggactctgggaacatgcaaagtgggggagcagagaccccgccccaccccgctgctctacaggatggtggctccagctgcatctgggctccgagggtcctt

SEQ ID NO: 202662 - DNA, 122 bp, Homo sapiens
ctcactagggagtgccagacagtgggcgcaggacaggggtgcagtgcaccgtgcgcaagccgaagcagggcgaggcattgcctcactcgggaagcacaaggggacagggagttccctttcct

SEQ ID NO: 202663 - DNA, 122 bp, Homo sapiens
cccttcttttcagagggactccttcctgctgagaggttacctctgttgagttctcagtctcgggccttgattcgtctgggttgcactcccgttacctgacccctgtgccttgcatgtcagtc

SEQ ID NO: 202664 - DNA, 122 bp, Homo sapiens
cacgacccgcccgcccctgtcaccggcaagccggagcggcgacacctcccgtccccgccgcgcatccactagcccgccccgactctccatcgggcctggaggtccctgaccgcggggccgct

SEQ ID NO: 202665 - DNA, 122 bp, Homo sapiens
gggagccccctgagcctaccgcccttgcagggggtcgtgctgcggcttctgggtcataaacgccgaggtcgggggtggcggagctgtagaggctgcccgcgcagaaagctccaggatcccaa

SEQ ID NO: 202666 - DNA, 122 bp, Homo sapiens
aacagcaatttgcgtgaattacccatagcgccgtcacacgtgatagaaatgagcagcagccgctgctctgccacgccctcagcacaagtgaaacctatcgtcagcgcgtcaccaccctcgcg

SEQ ID NO: 202667 - DNA, 122 bp, Homo sapiens
tgggggtgaaaaaccacaacgcggcggggcacctttcaagtgagctgcagatttgattggcgcggggggtgggggaggggaggggagaatgggatggcggaggtcgggcggaggaaagaaaa

SEQ ID NO: 202668 - DNA, 122 bp, Homo sapiens
ccgccctcagggggttgtgcctgctgctggggacagtcagtgacgtagaagccatgctcccgtatcgcccggtagagtgtgatgaacttggatgccagccttgtccgcgggaccacgtactt

SEQ ID NO: 202669 - DNA, 122 bp, Homo sapiens
gggcgggaagcgagcgtccccgggtctgaggctgctgggtggaaagctggcctaggagggcgagtagggagcaaaatagggcctggtccttgcggggccggggagctagaggccgcaggaag

SEQ ID NO: 202670 - DNA, 122 bp, Homo sapiens
cagtgattggtttggggtgggcatatctttcagatggaagccagtcaacatgtcctcagtcgtagtgattacctatttaagatcagtcaattagaataaaacataggacttctgttctaagg

SEQ ID NO: 202671 - DNA, 122 bp, Homo sapiens
ggcttatcaaagtttcagagatgcacagtgatttttgagggccctacgcacttttgccttcgattttctgcaaatttgttctcagcatgttgggaataaaaagccaatagggccgggcgatg

SEQ ID NO: 202672 - DNA, 122 bp, Homo sapiens
tttttttggttttttgagacaagagtctcactctgtcacccaggctggagtgcaattgcacgatctcagctcaatgcaacttctgcctgcagggttcaagcaattctcttgcctcagcctcc

SEQ ID NO: 202673 - DNA, 122 bp, Homo sapiens
ctcaggtctccagcctctgtactccagagccgggtagaggatgctgtcacagccaagcatcgggttccctggaagctgaaatactaaaatggtggtcgtcactctgctgctcagccccaccc

SEQ ID NO: 202674 - DNA, 122 bp, Homo sapiens
cagctccaggcaggaagcccgccttctcccagattgtcaggaagtcctgatgcaactttgcgcttttttttttaaacccgaaagagaaaaagagattcgtgctccccccaccaccgccgcgg

SEQ ID NO: 202675 - DNA, 122 bp, Homo sapiens
gggcaacatcgcaaaagcctggtctctacaaaaaatacaaaaattagccaaacgtggtggcgtgcgcctatggtcccagataggaggctgaggtggaaggattacctgagcccagggaggta

SEQ ID NO: 202676 - DNA, 122 bp, Homo sapiens
caggttcagaaagttctactgggaaggaacaggggtttcaaagtttccatccaaataagacgaagtccgtttgtcttatttggttcgtccaccagcagagaggggagaggactggctggcgc

SEQ ID NO: 202677 - DNA, 122 bp, Homo sapiens
tgcccgaaatcagacaggaagccaaataatccggggcgttgagtcgctttgccctgactgcgagagccgggtgtagggcggggagccaaggatctgaccgcgaggggcgggcgcggcgggga

SEQ ID NO: 202678 - DNA, 122 bp, Homo sapiens
agctcttcttggtggcctgcaggggcctagggcgcattcacttccctctgcttgactttacgtggtgttctagcgtcagacatcaggcgatgccgtgcattacccaagacactggacagctc

SEQ ID NO: 202679 - DNA, 122 bp, Homo sapiens
agctcccgcgttccgatcccggaagggaaaacccatgatcctggcgagggtccgtccacacgtggccagggtggctgatcttcccggctgctgtggttgtcaacaccacttctccggatcga

SEQ ID NO: 202680 - DNA, 122 bp, Homo sapiens
tctttgtcagagtagccaatgcctctcctgtccaaaatctcatacccttggcccttctcccgtcctcgcgctgaggctggagtcaggtcaaatgtcagaacatctggatgtcccaagagtga

SEQ ID NO: 202681 - DNA, 122 bp, Homo sapiens
aaaagttaggacaaaaaggtttggttttctggtcgcagtgctgtcgacggccgcggagagcggcaagttcggagcaggctacactaaaggaatctgcgcggccagccaccctaagtggaagg

SEQ ID NO: 202682 - DNA, 122 bp, Homo sapiens
ggggccatgggctctagaatgtcagtaggatttccatgtctggctaaggcaactggaaagcggttggtagggtgttagagtcaagaacacccacctatgtattcattgctggttctttgctt

SEQ ID NO: 202683 - DNA, 122 bp, Homo sapiens
aatcactgaactggactgaatcaaagggcccagttgtctgagaaaattgtttgccatatgcgcttcgtcttccctgtagttgttgtgcaagcatcattttgctccatacaaggttcactcaa

SEQ ID NO: 202684 - DNA, 122 bp, Homo sapiens
gagtttttaaatatagacactagaatatattctgctgtttgttccaaaaaccctcttcttcgtttctcttatcccacccacgtccgaatatagcatgccaaaaacagagccaaaaacaagat

SEQ ID NO: 202685 - DNA, 122 bp, Homo sapiens
attgtatcattctaatgcctttgtgtcctcatagcttagctccaactaagtgagaacatacgatattaggtttccattcctgagttacttaacttagaataatggttttcaaactgaatgag

SEQ ID NO: 202686 - DNA, 122 bp, Homo sapiens
aatgatctcatatgaagtcagagaggagaaaggaatgagactcaaggcagttgggggaagcgggcaaatggccatgggcattggttgtgtaaaccgaggcacctcctgcagtgtaaaacacg

SEQ ID NO: 202687 - DNA, 122 bp, Homo sapiens
atcatgtaatgcgagccctgcagtttcctgcctgctctgtatgccttttgcaggccagcacgacagccgcaggcctccctggaggctgcccaggcacccgccccttggaagccaggccctga

SEQ ID NO: 202688 - DNA, 122 bp, Homo sapiens
acggaactgagagccagccagcatggactgcgacagcgtgagagtgcatcaaagaggtggcgaagaaagcactagaaggcaaaggagaagtggagagaagaagaaacaaatggaggaagaag

SEQ ID NO: 202689 - DNA, 122 bp, Homo sapiens
gagcccctcccttcggggcgagtgacggctcccacgagggccgcttccggcgggaggtggcggggcttaagtccccagacccacggttgcttttaacgctggaactccgagggagtcacccg

SEQ ID NO: 202690 - DNA, 122 bp, Homo sapiens
gcacatggccacatggccctaggtgtcaccattagatgctctcaatccagattctcaacacgagggttgccataaaggtacaggcctgaagagatttgccatggtggccttcagtggtaggg

SEQ ID NO: 202691 - DNA, 122 bp, Homo sapiens
gctcggcgtcttgtccacctttttgtccgagcctgtggtcaaggcgctgaccagcggggccgcgctgcacgtgctcttgtcccagctgccgagcctcttggggttgtccctcccgcgccaga

SEQ ID NO: 202692 - DNA, 122 bp, Homo sapiens
agggctgcttgcggccagtacagatgctgattccaccctgggaacaggctttctgtcctccgttcgccgcgctagccagcacgtgtttgcaaacaacttaactgacttctcgaatattcatc

SEQ ID NO: 202693 - DNA, 122 bp, Homo sapiens
aaatggtgttaactactgaacacttgcctcgttttccattcctctttccctgggtagctgcggtgagttggctgccgagatgtagccctgaacctatccatcaagtctaaggaagagagagt

SEQ ID NO: 202694 - DNA, 122 bp, Homo sapiens
cgtcccgcatgagagagggggtacttaatcaccgggcttcggtgccaaagcctgcgtcctcgggcactgggcggacacccaggccccgccgccagccactccagaaccggcccaaaacacgg

SEQ ID NO: 202695 - DNA, 122 bp, Homo sapiens
gtgtgaggggccacttgttctgctacagacaccccatctgcgcttccccctcagaactggcgggttctagtaaagaacggtttactagtaaacctccacagtaaagcaaggtttgttgagct

SEQ ID NO: 202696 - DNA, 122 bp, Homo sapiens
atacttaaaaatgttaaaactgctaatgaagtaaaacaacacgtaacttttatgacaagacgccagagagaacgtctaaaataaaatttaaagtccataatcatctaaacaaatatactctt

SEQ ID NO: 202697 - DNA, 122 bp, Homo sapiens
aacttggctggtgctcagggctgctggcagcctcagctggaaatctgtttacccagagaacgaagcatcagataagctttgtggtggaagagagccatgattctcagtctaaatgttgaaat

SEQ ID NO: 202698 - DNA, 122 bp, Homo sapiens
aaggaggccgggccgccgcgcacccccgcaccccttccccggaccgcgaggctccgcgcgcgcatctctgccgggagctcccgaccacggcccagcgcaagggacctccgggccgcccctgt

SEQ ID NO: 202699 - DNA, 122 bp, Homo sapiens
gggcccaagcctgccctgcaacatgctcccctgggactctgagctgccaggctgggcctccgcccacctggggcagatagccaaagcccccacatgctggggatgggggagggtctctgatg

SEQ ID NO: 202700 - DNA, 122 bp, Homo sapiens
ctgaattttattttgacagttactccttcttcagcagcaaagcgtcagctttcctgtcagcgtgagtctcactgaagcctgacctaactctttcggatcggaactagaaagtttattatcaa

SEQ ID NO: 202701 - DNA, 122 bp, Homo sapiens
catccctgtgtagggctctaatctcgggtttggggatcttgctcctcagcttgtccgctccgaggaggtgcacagggcggggaaaaagggatgaatttccctttataccgccctgctcagat

SEQ ID NO: 202702 - DNA, 122 bp, Homo sapiens
cctttagctgcacctccggagccctgggcagcttcacctctggtgccttcggaagatgcacgtcgggaaccttcggcacttgcatttccggcagccgaatctctgacactttcggcagctgc

SEQ ID NO: 202703 - DNA, 122 bp, Homo sapiens
ccggcctcctctttcttcttgtggttctaaagcaagtctctataatcttccttcagcctccgatcctgaccggccaatgtggttcccaccgttttctacccccgatcagccggagctagttc

SEQ ID NO: 202704 - DNA, 122 bp, Homo sapiens
aaagaggtggccgccgggcgctggggcgagagcatgcgcagtcgcggcactcgagtcacccggctgcgactcgctggccctggcgtctaaagcgtagccttaattacccggaagtgcggtcc

SEQ ID NO: 202705 - DNA, 122 bp, Homo sapiens
gtgcgtggcggttggtgcggtataggagactcctctgaccggactcgcctgctggccgcgcggcgggcgaggcccaggcaaaaacaaagtcttcccgctcagtaccggccccgcgaggcgct

SEQ ID NO: 202706 - DNA, 122 bp, Homo sapiens
gcaccagctagagggtgagatgcaggcatgaagtaaattccactccccaccctcctcctccgccccatgagtagagatgtggggaggcctcacctgcatgcagcagttgtctatgatcattg

SEQ ID NO: 202707 - DNA, 122 bp, Homo sapiens
ctcccagagaacacctcccgggcacgtgagaagaacgtgcgtcctgtggttgctgggtggcgtgttctgcagatgtctgtcctgccgggcacgtgagaagaacgtgcatcctgcagttgctg

SEQ ID NO: 202708 - DNA, 122 bp, Homo sapiens
ttctctctttgcatcactgcccacagcagtggggcaggccaggccccattctggtggccacgttcaggctctcaaagcccagcctggggcagagtcccaaaccacctatggcctaggatgga

SEQ ID NO: 202709 - DNA, 122 bp, Homo sapiens
ctgggctgggggaggcaaagagcgaatgagtcttctgaaggatctccccctggtaataaacgttttctgataaagacccaaagagagggatttatgtattaccttctgctcatccacacccg

SEQ ID NO: 202710 - DNA, 122 bp, Homo sapiens
tacctatctgattactccccttatcattaatttattagcatctatgccatattaatacagcgaggcggagaactgtgagtgcaaaatttgtcactgacatcacccacatggctccaggttgg

SEQ ID NO: 202711 - DNA, 122 bp, Homo sapiens
tccccgaggagctgcggcgggaggacgcgggttcagcgatgagggacgaacctcagagcgcgctcggccgcccggccgcccgcagccgcggggctgacaaaccagcggcgggaggctgcgaa

SEQ ID NO: 202712 - DNA, 122 bp, Homo sapiens
gtgatttcgtatttcttcatttgaatacatcagatggccaccccttacggtcaaatgaaacgagcttacatttccattttgagtgagggttttgatgtcagaactggtttggaattctagct

SEQ ID NO: 202713 - DNA, 122 bp, Homo sapiens
gagtaggaagctcacctaccccgagggcaggtgcctcaccctggggcactcacctgcggccgatacctcttggcgtacttataaatctctgccatggccacattggtgttgaactcattctg

SEQ ID NO: 202714 - DNA, 122 bp, Homo sapiens
ctcccacctcagagtcggacaaccacgcacttttagacgagaaagaagactcttatttctcggaaatcagaaactttattgccaatagtgagatgaaccaagcatcaacgcgaacagagaaa

SEQ ID NO: 202715 - DNA, 122 bp, Homo sapiens
aattaaggaattaagtaataattgtgctctgcaaattatgatagtgatctgtatttactacgtgcatatattttgggccagtgaatttttttctaagctaatatagttatttggacttttga

SEQ ID NO: 202716 - DNA, 122 bp, Homo sapiens
ctgaggctctgggaagttaagagatttgcttaaagtcacacaactaataagtgggagagccgggactcaaactcgtagcctggctccaggctcttccaacctcagcgcgatagagtctctag

SEQ ID NO: 202717 - DNA, 122 bp, Homo sapiens
agccaggcacatccctgctcaccctgatgggcttcaggctggagggcattttcccagcggcgctgctgcccctgttgctgaccatggtgagtgctcctgctgtattttttcttctggtcttt

SEQ ID NO: 202718 - DNA, 122 bp, Homo sapiens
gggtgcgccgagtcatggagggcgcagagctggccgggaagatcctttccacctggctgacgctggttctcggcttcatccttttaccttcggtcttcggagtgtctctgggcatctccgag

SEQ ID NO: 202719 - DNA, 122 bp, Homo sapiens
tgcattcaaaatgctactgatgcatagcacctaatcaagtccccaggctgcagttccactcggaggaagctacgtcacctccatcgctactgtgttgtctgctatgttgttcagtgctggct

SEQ ID NO: 202720 - DNA, 122 bp, Homo sapiens
tttaaattcttattttaggatgaggatatgttcatgaaatttgtaagtgaagatcttcatcggtgtgcacttttaacaggtttgaacctattcatatagtttttgtttagcataaaactttg

SEQ ID NO: 202721 - DNA, 122 bp, Homo sapiens
gaggctggggggcggaggctctgggccttcagcccgagggggcggatactgacccgaggacgccgaggccaagctcagcagcaccgcacacagcagcagcgtcagccctatccggacccgca

SEQ ID NO: 202722 - DNA, 122 bp, Homo sapiens
tccgcctccgtccggggcgcgggcgaggtggccggggcgggggaacgcagggggcagggccgcggcggcgaggccggggggcggggaggagtgggcccgataaaaggcggcgcggcggcccc

SEQ ID NO: 202723 - DNA, 122 bp, Homo sapiens
tcggtcccctcctccgcgttgctgccccaggagtccgcttcgtcctccgctgactctgagcgacacaggacaagctctgaattgcattccaggaaaaggggactgaggctttgtatttttcc

SEQ ID NO: 202724 - DNA, 122 bp, Homo sapiens
tcatcgcagtctggctgctctgagccccgagggcgtttttcattagggtgattaccctgccgtcattaaaagccggtaaatagcacccagggacgaggccgcgcggccgcgtctgaaccgca

SEQ ID NO: 202725 - DNA, 122 bp, Homo sapiens
ggctcctcgagcgcagcaactttgggactttgttccggctttttccaaatcgaatctggtcgagggggcggggcggggggggagcacctgccctgcggggggtgccgggagagaagtgaagg

SEQ ID NO: 202726 - DNA, 122 bp, Homo sapiens
cacctttgcgaaggggaggcggagctgccgaggccgcgggaggggaggggagcgccagctcgcagctccgtgtcagcccctcagccctgtgctctgggccagtattcaaggtgtgaggaggt

SEQ ID NO: 202727 - DNA, 122 bp, Homo sapiens
tcctcctctttggctggtgggtttttttctttcttggggtctcaagtgaagcctgagaaccgggtctgtaagctcccaagtgcagattctcaggtctagcggtgacattggacaggacgaga

SEQ ID NO: 202728 - DNA, 122 bp, Homo sapiens
gatcaattctcttgaacagtccgcatgtttgcaatgagagccttcatctgtaggaaaggacgtaataaggaagtggtgtgttcacagcagagatttagcagcaagaggaggcacagcacaag

SEQ ID NO: 202729 - DNA, 122 bp, Homo sapiens
gtctggacccgcggccgcgggaatcaagaagccaaaggccatgaggaagttgagctttgccgatgaggtgaccacatcccctgtcctgggcctgaagatcaaggaggaggagcccggagcgc

SEQ ID NO: 202730 - DNA, 122 bp, Homo sapiens
gttctggggacctctcttctgtggtggatacagctgtcctccacacctgccattgatgcccgatgctcagccacttctccccacttctcagcctgttgatcacattttaccctatacatgtg

SEQ ID NO: 202731 - DNA, 122 bp, Homo sapiens
aaggcagtcatctggtccagcctgtccctgcccctggacccatagccatctttaaccaggcgtcagcggctccagcagaggcttcatctcctgcactccttgttagacctggtaagcattct

SEQ ID NO: 202732 - DNA, 122 bp, Homo sapiens
ccgccctctccccgcagggaaagccccggccccaggtggtgtggaccaagggcggggccccgctggacacctcccgcgtgcacgtgcggaccagcgacttcgacaccgtgttcttcgtgcgc

SEQ ID NO: 202733 - DNA, 122 bp, Homo sapiens
gggcctgtcacagggaagacgttcttttatttatttcgtttttaaataattttctcttcccgccaaaatgtccgtagtagtagcagcagcagcaggtccacggggagcctgccctcggtcct

SEQ ID NO: 202734 - DNA, 122 bp, Homo sapiens
gctggactacgaggcgtaccactgcgagggcctttgcgacttccctttgcgttcgcacctcgagcccaccaaccatgccatcattcagacgctgctcaactccatggcaccagacgcggcgc

SEQ ID NO: 202735 - DNA, 122 bp, Homo sapiens
aatgcctggctggaacggattaaatatttcgtctgcaccctaagcaaaagcttgtgcacacggtagaccagaggcccagatcgtctcctctccacttagtctccccgccgaccgggcatgag

SEQ ID NO: 202736 - DNA, 122 bp, Homo sapiens
agtgtgtgcccacatcccggccacgccacccgcatacggggggcacgtggacactgcccccgccccgccatcatcttgcatgaaaacgtcaggaacaatgacaaacaacttaggtgtccagc

SEQ ID NO: 202737 - DNA, 122 bp, Homo sapiens
gagccaccagcccaggaggcagcagcaccgtcccctcctcaaaacaacaacaagcaagaacgctcgggccctctccccacactgtggggttttcctgatggccacatccggcgctgactgtg

SEQ ID NO: 202738 - DNA, 122 bp, Homo sapiens
ccctggactttgatgtgtccaacaaccacatctactggacagacgtcagcctgaaggtagcgtgggccagaacgtgcacacaggcagcctttatgggaaaaccttgcctctgttcctgcctc

SEQ ID NO: 202739 - DNA, 122 bp, Homo sapiens
agctagtcacccggacaatggtctaggagccaagcgctgcacatcgcacacatttgggatcgaccacacacacttgtgcacaccagcacatgcatgcacaccagtacacacacagttaaata

SEQ ID NO: 202740 - DNA, 122 bp, Homo sapiens
agaagtttgacattttaaagatctaccagcactgatttatttgtcagaaaagcaagtctgcgagttgtttatcatccatgtgagcatatgtgtatgcttcgtactgggaaaggtatacatag

SEQ ID NO: 202741 - DNA, 122 bp, Homo sapiens
aggaattccgagtccggggtggagcgcgatgtggaatctgactcgcttgaaacagcaccgcggtggattcggatccgggtgagtagggaaatgcgcctcagcccctcccacgggccgcccac

SEQ ID NO: 202742 - DNA, 122 bp, Homo sapiens
cgaccccgagtggcgcagccagtttacctgaggccgcgctggcggtggggtggggccggccgtgacacccgagctcagttttctcgggacctggtttacgctaggtgctgtgggtcggccct

SEQ ID NO: 202743 - DNA, 122 bp, Homo sapiens
cgcagtggtcatccttctgtccctgggagagcaggtcctcttccacgtgggcctggggaccggtgctatgaggacactgctagggctgaaggtcctgtagaactgcacagatgcccctcagg

SEQ ID NO: 202744 - DNA, 122 bp, Homo sapiens
ctacctgggaagagtgagcgctgcaagacccagcctgaccgcgctaagattactatgcagcgcccgagcccgctgtctgcccggcaaccgatgacgtcactgttggcgcgcccgtgacgtca

SEQ ID NO: 202745 - DNA, 122 bp, Homo sapiens
ttataccttattcatgaactctctgcgttccaaactatagattgtgattaattattttgtcggtcatgaaatcagtttaatgagtgacaatcagcttttttttcttcccccttggccagctt

SEQ ID NO: 202746 - DNA, 122 bp, Homo sapiens
gtctgcagtcacctttgactctgatgtggagacggtgagtgccgctgggtgtcagccgtgcgacctcgggctggttgcgctgcccttgcagactgcactcggaagcgtaaaataggccgttc

SEQ ID NO: 202747 - DNA, 122 bp, Homo sapiens
gagaacgataaggattgtcactgtgctttgcactctgtcattctaagtttcttctcctcacgtgagctcatgtaccgcgggcagcgactatcagtgagactggggtagacgccacctctttg

SEQ ID NO: 202748 - DNA, 122 bp, Homo sapiens
ggcggttggaaggctctcgcgagagcgtcttgagaattctggccgggggcccaagccgctcggtctcctgtcttcagcacgggagttgctgagtgggtctaacctaggcgaagtggctcaga

SEQ ID NO: 202749 - DNA, 122 bp, Homo sapiens
cccgcagaccctccctgtaccgactccctagctcgaagccccgccggggcctaagccgtccgctgtaagatgcgggaagtatcagctccaagcctggcgagcaggctcaggggaggggcgcg

SEQ ID NO: 202750 - DNA, 122 bp, Homo sapiens
gcgcccggccctgaccaagccagctgggggcatctccgcggagctgagccggggaagggccgggcagcccagagggtcagaagggggttttctcccggggttgtgagttctttggccagcgg

SEQ ID NO: 202751 - DNA, 122 bp, Homo sapiens
tactcttaagaggaactgtgtggagcccatggctcccataaatcctgccggcgggaaggccggcctccccgcgcctgctctgggcctccctccctgcctccctcccgctggcgccaccgcca

SEQ ID NO: 202752 - DNA, 122 bp, Homo sapiens
gaacacattttgaaaatcacaggtatgcacctcattttcatcaagcagtccccaagcattcgcccttgtgcttctgaaacaacttcttgttattggtgaaaataaataacagaaatctattg

SEQ ID NO: 202753 - DNA, 122 bp, Homo sapiens
ctttcagagccgtgtgctgggcaaccacttacaacgaggaaccagcttttggactcaaaacggctggtgaaagtagccaaggctctgtgcccagatctgctggcttttttataatttgaact

SEQ ID NO: 202754 - DNA, 122 bp, Homo sapiens
ccaaacgcaccgccttgtactcgtattgcagactacgggcggttacatccgccatggccgcggctgctcggaggcttcagaccaccacgcctccctaccgcaagctgcaaacggccgcagat

SEQ ID NO: 202755 - DNA, 122 bp, Homo sapiens
aggccgagaggcgcttacaccattgcctgccgtcaggcggtcgctgcgcgcctctcctcgcgtcccaagccacaatcaaatgctgccagctccgcccggccagccggttatagactcaatag

SEQ ID NO: 202756 - DNA, 122 bp, Homo sapiens
gagcaggtccaacagcagggcaagcatccaggtgaccctgaggccgcgcgccagaggttccggcagttccgttataaggacatgacaggtccccgggagccctggaccagctccgagagctg

SEQ ID NO: 202757 - DNA, 122 bp, Homo sapiens
agtggtacgtccttaaggcggggcgggaatacggcaacgggccgcgggggctgttactgtcgctaccaatcaagagtcgagatggctttgatggacaggcatagcgcgagtgcgggctttcg

SEQ ID NO: 202758 - DNA, 122 bp, Homo sapiens
ggagggagtcctggacgaggggtgggattacccggctgccgctgtcgcctggatggtctccgcggccgtcccgggcatagtcggcgcgggactccccccggctgctgcctctgaagccggcc

SEQ ID NO: 202759 - DNA, 122 bp, Homo sapiens
taattcagccagagaaagattaagaaacatttttaaaccccaaactgaaactgaaagcagcgaactggaatcctggcaggaagctggagaggatgacaaagcaaattcatttcccaagtaca

SEQ ID NO: 202760 - DNA, 122 bp, Homo sapiens
ggacacgaaataggatccaaatcggcctcgaggtgggactgggatccgcgcactggctgtcgacgtgcagaactggggctccccaaaggaaacgcagacctctccccaactcccacctggac

SEQ ID NO: 202761 - DNA, 122 bp, Homo sapiens
aactgatgaatctgctcttcctgcccaccattcccttatagtacacattgatatattttccgtcttactatataattattcaatgggcagtaaaaaaattgcctagtcgaatagtattagct

SEQ ID NO: 202762 - DNA, 122 bp, Homo sapiens
cttaattaaatttcattcggggggtgggattgtatacttcgaggtggatttggtgctctacgtcagatagtagtgccttgttcaggcagaattttaacattctttttaaaaggtgctgctca

SEQ ID NO: 202763 - DNA, 122 bp, Homo sapiens
tgtgttggccgggctggtctccagctcctaaccgtgagtgatctgccagccttggcctcccgagatgctgggattgcagacggcgtctcgttcacttagtgctcaatgttgcccaggctgga

SEQ ID NO: 202764 - DNA, 122 bp, Homo sapiens
gcgggagcggtggccgcagggcgcgggacatggtccaggggcctgctgagtccaggcagccgcgagcgcagacccccgaagcccgcgcgtaggcgcccatggctcagcagcttcctcctggg

SEQ ID NO: 202765 - DNA, 122 bp, Homo sapiens
tcagcgagctttttttcttcctgaaagctaatggcttccacagcaattagacattttcctcgcccgccccttccctcccctttctttacatataggagatgggatactcattcccgctgcta

SEQ ID NO: 202766 - DNA, 122 bp, Homo sapiens
ttcgctcctccccttgggggacccccggctccaccgagccaggccagccccactcgacggcgatttaaacatcccttaggcaaggcgccaagttagcgctgctggcccagctctaggcgggc

SEQ ID NO: 202767 - DNA, 122 bp, Homo sapiens
agggtggctcagggctggaacactctcaggcaagagtggtggagctcccgtcaggccctccgccaggcccactgtgggcttctcccctctcctccctccttcccctccaagcaaaccaccag

SEQ ID NO: 202768 - DNA, 122 bp, Homo sapiens
tgacgtcaggtccaaatgagaaattgactggcactccgggccaatgggaggcggcgagagcggccgcgattagcataatagtatagaaacaaggaaacttttcggagctgtcaatcagggcc

SEQ ID NO: 202769 - DNA, 122 bp, Homo sapiens
cacccaggatcgatcgatcggtagggaattttttatctttgggaaggagaggtgaggaagcggacctaaaacgaggggaaaattcgaatttaatatcctgtataggaggtcaaaagaaaaaa

SEQ ID NO: 202770 - DNA, 122 bp, Homo sapiens
cctccaataccccatgtcttcatgtaaaaatgggcaatgccagcacctgctgccggctcccgtgagaactcactgtcgggtgctgaggctgtgctgggctctcaataagggggcaacgtgca

SEQ ID NO: 202771 - DNA, 122 bp, Homo sapiens
tctgggaggccgaggcgggtggatcatgaggtcaggagattgtgaccatcctggctaacacggtgaaaccccatctctaccaaaaatacaaaaaattagccgggcatggtggcaggcgcctg

SEQ ID NO: 202772 - DNA, 122 bp, Homo sapiens
tgtctaagcgggacggggcggggcttcttcgggccacgcccattccgccctgctaagcctcgcccattacatccagactgcgccccccttgccagaaatcggcaccgcccagcgagcgctgc

SEQ ID NO: 202773 - DNA, 122 bp, Homo sapiens
ccccagttttctcacttgtgaacagaaggggttagacttcatgacagctaaggttccttccgtctctaacaaaagtggcctgaagagaggcttctagactatactcacggtgggttcttggg

SEQ ID NO: 202774 - DNA, 122 bp, Homo sapiens
gaatctgaaaagaaatggcaatgagcagaggtctcccaccctcacgtggaggacagggtccgcaaagatgagtcacattgtagaacttcactattcagagaaagccccttcacatgcagaat

SEQ ID NO: 202775 - DNA, 122 bp, Homo sapiens
ctttgctacaactcggtgatccagggtccacaggattggaagccaaggtcaaggcctagtcggaaagaaggcttagatgagcctgaccaaagttcagccaaggagagtttttgccagtgtat

SEQ ID NO: 202776 - DNA, 122 bp, Homo sapiens
ggatgggaaaaacttgcgtcttgtgatctaagctctacttctgttgtttgcctagacctgcggcaatgtattggaattttcaataggcgcataacagtgtcagatcacattggccatccagg

SEQ ID NO: 202777 - DNA, 122 bp, Homo sapiens
agtgaggcacacttgtaatatattgctcaataagtctgcagtggccaagggagaaagccacgaacagcagccgagtctgtgcccttacacggctggtgtcagagcgcaggacccacgctggg

SEQ ID NO: 202778 - DNA, 122 bp, Homo sapiens
gtcatcttattctttggttccatagcatttggctatgcaaatttcatattctcttggcttcgtttttctccagtgcccaacaccaaatagtggaagcagaaagaaatgtcaatggctgcaag

SEQ ID NO: 202779 - DNA, 122 bp, Homo sapiens
tcgaaactaaagttgtgattccactgctcaactcgggcatgcagggatctattgtagaggcggaaactcacagagtttccggtagtcctcttgtgcagagtccctgagcaaaaacgtgcctt

SEQ ID NO: 202780 - DNA, 122 bp, Homo sapiens
ccagcaggatatggcaaggatgtccctgcagtcaggctgttgggcctttgcccaggaggacgcgataaggatgtttctgcagtcacgtggttaggaaggatgtttctcatggcccaagttcc

SEQ ID NO: 202781 - DNA, 122 bp, Homo sapiens
tattccagcaagctgtcgaagcctttgtcacgacgatcctgtccgacccgcgagtctgcccgctgggtcctctgctcagccgacgccaccgccgctgccgcctgcttcccgccgctcaggga

SEQ ID NO: 202782 - DNA, 122 bp, Homo sapiens
aagtccctacagaggctgatcccgtgcaggggctcggttggacctttagcctcaaactcccgtggtggaaacagttaggattggtggacgctgcacccagcatcctgcaaacagaattctga

SEQ ID NO: 202783 - DNA, 122 bp, Homo sapiens
tttctccacgtgtggtgacgacgccctctctgcaaacgccctccccagagggtttcatgccggactctggtgcccttaccttgacagactcctccagctgggacagggcctcctcgtaccga

SEQ ID NO: 202784 - DNA, 122 bp, Homo sapiens
acccggacgcctgtgcctggaagagcagcagacgcctgcagggcacagtggccacgtgggcgccacacagagcccagtgctgagaagcaggggccagcagctgccacccctcccctgctttc

SEQ ID NO: 202785 - DNA, 122 bp, Homo sapiens
agcgctggttaaggccccgcacctgcagccccagtgaccttgaacgattccgctctgcggcgggtgtccctaaactagcagtttagggtgtcaggtaagcgtgccttgcattcaaagatttg

SEQ ID NO: 202786 - DNA, 122 bp, Homo sapiens
tgcgcacaccccccacaaagggccggggccggggtgggagtcggcttacagggcacagcgcggcgcaggcccgccctggaatggccgtgaacttgttgtttttccacgtcatttgctctcaa

SEQ ID NO: 202787 - DNA, 122 bp, Homo sapiens
gccaccgcgcccggcctctgttgtcttgtcagcaaaatggccctggtgtgaccgaggtcacgcagccagcaagtgtcgtcgggtcccctggagcctcagcttctacctccgctccagctccc

SEQ ID NO: 202788 - DNA, 122 bp, Homo sapiens
gctccaggtgacatcatccccctgccgggctccgcctcccgccccagccgcctcacgccgcgtgcctattggtcgacgcgccttatgccccgcctctcgctctccgcccgcgcgacccctcc

SEQ ID NO: 202789 - DNA, 122 bp, Homo sapiens
tagtaggcaatgtgccaagtcagtgctagggaaatacagagatgaacaagagcacacagtcggttcctggagggctgcgtctcagcctggagaggcaaacagcttgtaacatctttggaagc

SEQ ID NO: 202790 - DNA, 122 bp, Homo sapiens
agcatctaagtgaagaggctgagtccgtgaggctaggggtcctggggccccacctgggttcgtgggagggaaaggtggtgctttggggacatagaatgggagcaatccaaggactgaggcgc

SEQ ID NO: 202791 - DNA, 122 bp, Homo sapiens
gcagcacagggctgtcggggtggggatgtgccagccagaggtcccagctcccacaaatgccggccagtgtgaaaaatcctagtgtcttcaaataaccaccaggaagtcagtctggcccagat

SEQ ID NO: 202792 - DNA, 122 bp, Homo sapiens
cagatgtcccaatccctatgtcataatgcaattgtgaattcagagctctctcctcactcacgttactcatgccagaccttgggaagcagagaaatcagggctaatgaaccatctaaggacag

SEQ ID NO: 202793 - DNA, 122 bp, Homo sapiens
cccacaggaacatctccccagctgcttggcaggtacttggctgatttcactttgagtgggcgggggttagaattctgcctccactttctacctgccatgtgatttggagcaaattccttaat

SEQ ID NO: 202794 - DNA, 122 bp, Homo sapiens
ccaaggccgggcgtgcgtgaggccaggtccacgggcacaccactgtgaacactgattaaacgtggcctccacggcttccaacccccaggacaggaccaaccctctgcccccggctcaggcca

SEQ ID NO: 202795 - DNA, 122 bp, Homo sapiens
ggggttccgccgcgaggcagctggctgcaggctgcgcgttgtgaggggcctgagggggggcggtgttggcgacggcggagacagagacggaggtggtggtggagcagcaggggaaggaagga

SEQ ID NO: 202796 - DNA, 122 bp, Homo sapiens
gttttcatgcatggttcaacactacccaatatggcattctgtgggatggttcaacactaccgaatatggcattctgtgggatggttcaacactacccagtatggcattctgtgggaagtagg

SEQ ID NO: 202797 - DNA, 122 bp, Homo sapiens
attcgggggccttgggacctctcccctccaagtgcaagttgtagcaacctgccgggtccacgcatgggcgggtcatactccacgggttccggtttccactccctgtgaaccaaaagccagag

SEQ ID NO: 202798 - DNA, 122 bp, Homo sapiens
ggggacacgggggcgggctgtggctgtcacgtgacggggcgggggcaaatcccatgtgctcggcggcgcagatcgcccggcgcggctccgccccctgcgccggtcacgtgggggcgccggct

SEQ ID NO: 202799 - DNA, 122 bp, Homo sapiens
tgtgattacactatgcgaaaccaaacaccattgtgtattagaattcaactttgtggcagacgagtcattcaatgtatgccagaacaaaattcacatcgccaagggagagcgagaagaaggaa

SEQ ID NO: 202800 - DNA, 122 bp, Homo sapiens
gtgcttttgtttttagggtaccctgagccctctcctagccagcccacatttgtgagcactcggtaaacacagagcaggagggaattacagtgaatggggatttccctcagtgctgcccactg

SEQ ID NO: 202801 - DNA, 122 bp, Homo sapiens
aaaaaaggtttgtttggtattctgcctgagctgttggatccacaacaccctcaaacccctcgccccagcccgaacctctcacctgattctaccatgatgtcctcgtccatgacccgcatctc

SEQ ID NO: 202802 - DNA, 122 bp, Homo sapiens
aaagctggatttccgaggctggaggcgcctggccggctgggtggggaccaccatgggcaacgcggccggcagcgccgagcagcccgcgggccccgccgcgccgccccccaagcagcccgcgc

SEQ ID NO: 202803 - DNA, 122 bp, Homo sapiens
ccagggagaaacaaccacgtggaaaattaaataaacccatgacatttgtagccagcagctcgggtgttttgtagggttttccctgagaagtggggactaatcgcatgaatcacttttttttt

SEQ ID NO: 202804 - DNA, 122 bp, Homo sapiens
ggtctagaggagaagggaaaccagggaagaggggaaaggagggcggcggcagcagccgggcgcgtctcagcgcgggccccaaaggtcccggctccgcttccagcaccgctcgggccacgcct

SEQ ID NO: 202805 - DNA, 122 bp, Homo sapiens
aagatcatgtttgtggtcaatgcagtgtacgccatggcccatgcgctccacaacatgcaccgtgccctctgccccaacaccacccggctctgtgacgcgatgcggccagttaacgggcgccg

SEQ ID NO: 202806 - DNA, 122 bp, Homo sapiens
tgtgtgttttacctggaaataaaacagctgcacccctagggcaggcaggtgaagagacagcgatgatctcattgcctgcccagcccattttcctcgtgacccacgttgcagctggcatgcag

SEQ ID NO: 202807 - DNA, 122 bp, Homo sapiens
ggctcacagaagatcggatgttccccacaggcggttccggcggcaagacgtaaggaatggcgaccccagcacgttgtgctccggaggtgagtgccccagctgcccctaccctcagccccaga

SEQ ID NO: 202808 - DNA, 122 bp, Homo sapiens
atcctggttctaccactctgaccttagacaagttacttaattgtctcagtgccttggtttcgtcatctgtaaatatagagataataaccaattcctttgttatcacctacaagaagaagggt

SEQ ID NO: 202809 - DNA, 122 bp, Homo sapiens
tctgacctctgtccctcaaaccactttttttctcagaagttatcattattgacagtgggacgtggcttcttccagatactttttcccctgtgcatttacaaacttagcacatatatgactat

SEQ ID NO: 202810 - DNA, 122 bp, Homo sapiens
tttcagctgaggccgctgaactccccataagttagttgtcctggacccagccgtccttgtcgactccattcagtagtgggctgcccagtgggagggtcacagggtcagcttggctcagagaa

SEQ ID NO: 202811 - DNA, 122 bp, Homo sapiens
acacagagaaggcatggccgtgtaggacggcccaatcgatttcaggtctaatctcaagcacgatgattccttctgaactaatggcacgcagttgcctgggagagcagattttcaggaacaag

SEQ ID NO: 202812 - DNA, 122 bp, Homo sapiens
tgaggctaagtccatgatctatggaagccggggcaggagccgtgcgcctgtggaaaggggcgctctcagcagtctattaatcacggccgcccgcccggcgctgccgccactgccgggtgcca

SEQ ID NO: 202813 - DNA, 122 bp, Homo sapiens
cctctgaggcccagatgggctagcttgccgggaccaaaggaaatctttgggtctggaaggcgacaagagatcacaggctttctaggtctaccgcgcaccccgatgacgtcacgcggcgacgt

SEQ ID NO: 202814 - DNA, 122 bp, Homo sapiens
cccagcacagtgtgggtccctaaacagtcccaagttcctgagaggggaagtcaaaccctccggggccccccaacagtgcctcctgccccatccagccctatgtggctgcagggagcacctgg

SEQ ID NO: 202815 - DNA, 122 bp, Homo sapiens
tccggagcgctgagcagaggtgggtgtgggaaaacgccccggactgagagctcccggcaccgacaaatatcccatgtctgctaacatttgccgaggactaaactatatgcttactataaagc

SEQ ID NO: 202816 - DNA, 122 bp, Homo sapiens
cgcagcaaacaattcctaactcgctccaggtcttccttcttagctgagtgggttgaaccccgtggaagtaaccccccgcccattatgatgatccagccaatcaccgcgtgatctgctcggac

SEQ ID NO: 202817 - DNA, 122 bp, Homo sapiens
acaatgtcccttcagcacctgaccctctacccgccagttattcctaggttatgttagtaacgcaacaaagagtaatattaaaagctaatgattaataatgtttataataatgattgataatt

SEQ ID NO: 202818 - DNA, 122 bp, Homo sapiens
agaaccagcgtgctcaaaactcggtccttttgtgtgcacagctggtttctctcagtaaagcgcgcacacactcgcacacacgcgcgcgcacaaaacttcagccccaactttggtcggcttta

SEQ ID NO: 202819 - DNA, 122 bp, Homo sapiens
cctcctatctccatggctttcattgtgaacccctcctggggcccatgagcctcatggagccggcccctgcccacctcagacttcattcccctttcatgtcgctttcccctaattccccccac

SEQ ID NO: 202820 - DNA, 122 bp, Homo sapiens
gtggctacgccttccccggcctcggaacggccccatccttcctctttccccgcctcccagcggcgctccactctcggattggctgattgatccgagtcagtttttttcctcgccagaaagcg

SEQ ID NO: 202821 - DNA, 122 bp, Homo sapiens
agctgggcgccgagtggggcgcgctagctagcgcggctcaggcctgcggcgaggcggtggcggcagcagggcgcctgcagcgcttcctacatgacctcgacgctttcctggactggctcgtg

SEQ ID NO: 202822 - DNA, 122 bp, Homo sapiens
tctcttctcaaagcagcaggagaaatccagctaagttctccttctcgcccattgcagcctcgagcttctgggctcaaacgatccttccgcctcggtctcccgaagtgctgagattacaggcg

SEQ ID NO: 202823 - DNA, 122 bp, Homo sapiens
caacggcgcatctcaagtcagccttcctgaaatccaataggtaataaagaccaagccccgcgcttcggagatgagaacaaatacagggattgtattttaaacactctgtgtaaggtctgttg

SEQ ID NO: 202824 - DNA, 122 bp, Homo sapiens
aatttaaaagaggaaatggtgtcacaaagacaacgacggccagggaaccccgtgaagcgccgggcagggtgcacaactgtcctcggagaaagttcaagaggaacttccccgcgaacaggtcc

SEQ ID NO: 202825 - DNA, 122 bp, Homo sapiens
ttcataggcagaatcgttaatctgccaattgcagtattacattgactttccaattcaaaacgattattctgaaagcattttctgtcttggctagcatggttttggccgtgcgatgtgttgag

SEQ ID NO: 202826 - DNA, 122 bp, Homo sapiens
gctgaatacatgcaggtccacacgctcacataagcgcgcgcacactcggaggagcattcgcgcacacagaggctcagcggcagcgccgcctgcagcccaggcacctggatggcgatgggcat

SEQ ID NO: 202827 - DNA, 122 bp, Homo sapiens
gggttatgtaattctttgttgtggggcggtgctgtgcactgtgaactgttcagcagcatccgtggcttctatcaaccagaagccactatcgccccccatcccgtccagtcgtgacaaccgca

SEQ ID NO: 202828 - DNA, 122 bp, Homo sapiens
tcctaaggactgtagaccgggggcgtggaaaccccaccacaacacagcacctagaacacacgtgtgtgacatctcgagtgacgcacattcggaacagatcgtgtggatgtgcagatgtcagg

SEQ ID NO: 202829 - DNA, 122 bp, Homo sapiens
ctggcttacagcggcgcgggtgcggggcggagggaaagaccaaaggcgaggtctggcttgcgagagtcctcccctgcggcccagcctcgaagaacaatggtaatggccccggagtcggctgt

SEQ ID NO: 202830 - DNA, 122 bp, Homo sapiens
cagaaacaaggatctagtagcctgtgggtacccaagctcctggggtcctgcaggagaaggcggctgggggcctggactcctgggtctgagggaggaggggctgggggcctggactcctgggt

SEQ ID NO: 202831 - DNA, 122 bp, Homo sapiens
actgacaatcgctgatctcggctcgcgcagagactgcgggagcgtcggggccgacagagacggattacgtcaagaaatagttcctccacctacctcggtcggcctccccgcccctgcggggc

SEQ ID NO: 202832 - DNA, 122 bp, Homo sapiens
agaggcaagacaagtgcaaaggcagccacaaggcttccgccagttagacggtgtttctgccgcccctgccgtcacccgctgggtcccgtcccgctccaagcgcactcccggcccgcagggtg

SEQ ID NO: 202833 - DNA, 122 bp, Homo sapiens
cacgctccagcgcaagccaggcctaaccgcaccagctgagcctcagtgctggtaaagcctcgcacctggcggccccgcccccggccctggccaggaccctgagtctgcgcgccccgccgccc

SEQ ID NO: 202834 - DNA, 122 bp, Homo sapiens
agccctcccgccctcacgcggcccgtgcgcaaagcggaccgggccggcgacgcgaatctccgccccgccccatctgacagcaaattttcccattggtcgagagacccggcgcggcacggcaa

SEQ ID NO: 202835 - DNA, 122 bp, Homo sapiens
taccccagtagcaggccttgggcaagaagtcaaggctgaatcctcattctccataaggcccggaggaatgtgggctaagaagcagagtcttctgggggtgccggtgctctcacagctctcct

SEQ ID NO: 202836 - DNA, 122 bp, Homo sapiens
ccgccgccgcgcccgccccgacgaactggagcggagggaggggcaccgcgcagccgcgggcgcaacaagttcctcacccgcagccgccgccgccgccttgcgcccgctcccttccttccctc

SEQ ID NO: 202837 - DNA, 122 bp, Homo sapiens
gggggaggatggccgtcgtggcccgaatccccagtgggtggtactgggtgggggggcgggcgggaatcaaaaaaccactcaatctcgtgctttacataaacatctaaaaatcgtcggcctcg

SEQ ID NO: 202838 - DNA, 122 bp, Homo sapiens
cgtgctccccagattagattgctggaaaggatatccagcaacaatgcttgccaagcacatcgttgactggaaattttagacaactaactacggattgcaataatgattccttgtgtagattg

SEQ ID NO: 202839 - DNA, 122 bp, Homo sapiens
atttctcaggtttctgcaaggggcacgtgggggcacgtcctaaaaacccactgcgcctcccgtccctgcccacccaggccgcggctgctcctgtgtctatctctgactccctggaagttctc

SEQ ID NO: 202840 - DNA, 122 bp, Homo sapiens
gccgtccgctgcgcccgccccccatcccctcccctcccccgccggccccagcccggcacccggcggcccctccgcccagtcctcgccgcccaactttgatttaggaggtcgcctggtcccgc

SEQ ID NO: 202841 - DNA, 122 bp, Homo sapiens
ggggaggggcccagtgcccgggaggcggggccgagtccgggctgggctgcgctcaggaggcgggccctgggaggcggagcttagggaggggccggtgttgggagggacccagggactgggag

SEQ ID NO: 202842 - DNA, 122 bp, Homo sapiens
gcttcccccttctagttctctttctcagacacacaccacgaaaggcatgtgacaggtgttcgccagccggaggcaccggggaaggcagccccatgtgcccagggagggtagggaggtgagag

SEQ ID NO: 202843 - DNA, 122 bp, Homo sapiens
ttactacagtttactacttgtggcctgaaaaaaaattttttttaaattgatacaggatctcgctatgttgcctcaggctgccctccaactcatagcctcaagccattcacacgagcagctgg

SEQ ID NO: 202844 - DNA, 122 bp, Homo sapiens
caggccaccagggcatgggcaggactcagcccgccatgggcgcctgctcagcgggaaatgcgattcccaggggtcactggttctcaactgggaggaaacacctgtcatctcttcaagcctca

SEQ ID NO: 202845 - DNA, 122 bp, Homo sapiens
gcgattgggccaataaagcgtttcgtcctggagttaactggtttgtccctttcgggctgccgtcctacagatccgccatattgtctactgaaagctgccgctgaagctgccgccgttgcctc

SEQ ID NO: 202846 - DNA, 122 bp, Homo sapiens
cctgggtctgccccttccccgtgtccgcagcctgccccaggttcattcccgtctcccacccgctgcaggcagtcccccctgcccgcattccagctgctgtgctggctccagactgtctctcc

SEQ ID NO: 202847 - DNA, 122 bp, Homo sapiens
ccgcacagcggccttcaggccttgcctaggagcgtgcgggccgaggacagatgagcccagcgtggtgtcaggccgggccaggtcccctaggtgaccccctctcgtcaccctcccccagccct

SEQ ID NO: 202848 - DNA, 122 bp, Homo sapiens
tacagggaggagagcagtgactggcaaggccagaaggggtgctaggtaagttctgtttgtcgatcagagtggtgataactttcactttgtgaaaagacatttctctgtccgcttaggatttg

SEQ ID NO: 202849 - DNA, 122 bp, Homo sapiens
accatctgcgtggataagtaataaatacggtatgattcggtgtgtgcgataatagaaatgcgtgcatcgcagaagtatacgatatcctattggttattcattcatccgaaaaaacattgact

SEQ ID NO: 202850 - DNA, 122 bp, Homo sapiens
ttaatcccgaacgtaattctaaaaagcagcatcagacaagagctttattaatcccttacacgagcaaatgcgatctctgacctactagacttgttttcctacaatttcacaaaaagcctcgc

SEQ ID NO: 202851 - DNA, 122 bp, Homo sapiens
cggcggggctcaggttcccgatgtaaagcttgttcatcatccgtctcttccccgagagcccgcggctcccccggcccggtacccggcgctcctcgcctcctccgctgccctcgtctctcctc

SEQ ID NO: 202852 - DNA, 122 bp, Homo sapiens
gttacggaggccacagctgtccccatcacagagggctggcaggagacaagtggccttgcccgtctctgtgtgtcagtatttcctactcctcacccttcatgactgcccccactagggtctcc

SEQ ID NO: 202853 - DNA, 122 bp, Homo sapiens
tacatccagctatgggtccctgtgtgatgttaaccatcccattcctacactcaaaaaccccgggcaacttgtttccttataacctccccctaaaactggcaattcatcccatttccttgctc

SEQ ID NO: 202854 - DNA, 122 bp, Homo sapiens
gattaaaagacactttgaaactttacaaaagcttttaatgaagtttaatgcattttgtttcgacggagaagcaggcagaggcctgggttctagtccccaaaagccctcccgggtcttcccct

SEQ ID NO: 202855 - DNA, 122 bp, Homo sapiens
cactaatgaggacagtgtacaagccatcactaatgaggacactgtatatggcatcgctaacgaggacactgtacaagccattgctaacgaggacgctgtacacaacatcgctaatgaggaca

SEQ ID NO: 202856 - DNA, 122 bp, Homo sapiens
ggggcctcctctgggagagtaggagagcgaaaaaatcaaccaccaccttggatttcagatcgaggaaaggaagccaaagcaaaggtgtggttacacaggacatccatagacaaatcgttgcc

SEQ ID NO: 202857 - DNA, 122 bp, Homo sapiens
gctggaatctggggggcgaggcctgcgctcagcccctcgcccggtgggggtggggtgctgcgccagcacctcctcagcgtctccgccgtgactcactcccgggacccaggggaagcacagcc

SEQ ID NO: 202858 - DNA, 122 bp, Homo sapiens
acccaggtgtcgtttctgcatgagcagtgagtgacgaggagaattcgcttgcagcctctccgctacgctctgcctttagagtccctctagccgtggtccctgtgttgccgcttgcccctggg

SEQ ID NO: 202859 - DNA, 122 bp, Homo sapiens
gaaatttggcttgcaacaacctcttcctccccttcctgcaggcctgggagaggattaagccgctggagtctgaaatcggaaagatcccagcttctgctccccagcacctcccctcgccccct

SEQ ID NO: 202860 - DNA, 122 bp, Homo sapiens
cacgctgcacttgacaccctcagggcggaatggcgagttctagacccagctctctagacccggggcttcatgggggacacggactcgacgggaaggggaacttggcatttatggacagatcc

SEQ ID NO: 202861 - DNA, 122 bp, Homo sapiens
ccggagtttctgaggccctggctgcctggaaacaggcactggcctctcatcctcggcctccggtgcccctgtcctcagaccttacacgctgccaaagtctggccctggaaaaaaggtagcca

SEQ ID NO: 202862 - DNA, 122 bp, Homo sapiens
gtccctggccacgtggggccctgacccccacgctacacacagcatccccgccccaggaggcgccccagcaccagcccccaagcggtccctacctgtgaattccttcttgcagcggtcccgca

SEQ ID NO: 202863 - DNA, 122 bp, Homo sapiens
gtaagtactcaccagtacttacaaaggcagtactataacaccttcaagatggggaaaccacggttttaaacagaaacacatattttccctcaacatggatgctttatcatatctctaacata

SEQ ID NO: 202864 - DNA, 122 bp, Homo sapiens
acacgttaacagagcagccagaggcagcttccggagactgctctgtggccagtttctgcccgcccactagcgggctgggcggggccgcgctcaccacgcgcaggcgctgctcctttccgccc

SEQ ID NO: 202865 - DNA, 122 bp, Homo sapiens
tgaggaggcaggaatgtttcccaccactggagctgcgccacagaaggctgggtgagctcacgtggaggaaacaggctgcctgtggtgggctccagggtgcgggagaggaccaaggggggcca

SEQ ID NO: 202866 - DNA, 122 bp, Homo sapiens
gaggccggcaaaggtttcagaggcaaagttgtcggttacaggccagccgcgggagcagggcgcggagcagggaataagcaggagcactctgtgtcagcctggttctctaaagagcgggtagt

SEQ ID NO: 202867 - DNA, 122 bp, Homo sapiens
ctgcaggcgccacgagcacgcagggacctcagacgggatgcgctctgtggggcaggtccccggctcccacggctgagacccatggcccctagagaccagtggcagctccacagacagcagcc

SEQ ID NO: 202868 - DNA, 122 bp, Homo sapiens
attgtctctgagagggtgtcaggctgcagggaagggcagccacctacccccagggagaaacgcggtctgaggcgaggaaggaggggagaactcaggcacctggtgggcagcagggaaaggca

SEQ ID NO: 202869 - DNA, 122 bp, Homo sapiens
tcctgtgtagatgctgtcacttgaggtctagaaagggtcagtgcgtgacgcaacggacgccggggaagcctggtctggatcccgaagtccagctcgtttacctgcaacaggctggaggtccc

SEQ ID NO: 202870 - DNA, 122 bp, Homo sapiens
agcactggcattaaaaccctctttcggtgcacggggagggcctggggccttggatctacccgaggattttacgctcctccagaccctatcaacagcctcactaggaacgtgaacggtggcag

SEQ ID NO: 202871 - DNA, 122 bp, Homo sapiens
catacacacgctcacacacgttcacacacacacgctcacacacacatgcacacatggtcacgggcactcatgttctcaggtgtgcttggtcccatccacactcatcaccgcctcccttaccc

SEQ ID NO: 202872 - DNA, 122 bp, Homo sapiens
agcgttaaggtggtggttgggtgctttgcgggtcacttgttgcgctgcccgcacgtttgtcgcggctcctggatgcctctttggccgcctcgcctgttccggctctcttatctgcccagtct

SEQ ID NO: 202873 - DNA, 122 bp, Homo sapiens
ggatccccagacgggtgggggcagggtcctgtgtcttgcccacctgctctcctggtggctcgtggctctggagaagtccccagccaggtccatgctcactgtcaggcctgccccaactcaga

SEQ ID NO: 202874 - DNA, 122 bp, Homo sapiens
cgcccattaaaataaactcctttgtggtgatttctaccatttctggaacctgcctcgggtcggcgctggcaaggatgcacaggaggccagtgtcctcgtagctgaggtagtaggaggtcgcg

SEQ ID NO: 202875 - DNA, 122 bp, Homo sapiens
gtggaagcatgcagattaattgtgaaacttgggcattgttttgcacctctagctccactgcggtaaatggtagcagattaaaagatttctcagaaaaggatattgtatcttttgttaatgct

SEQ ID NO: 202876 - DNA, 122 bp, Homo sapiens
agggtcccagcatctccacgcgcgcccgtgggaggtgggtccggccggagaggcctcccgcggacgccgtctctccagaactccgcttccaagagggagcctttggctgctttctctcctta

SEQ ID NO: 202877 - DNA, 122 bp, Homo sapiens
ggaagtggggcttcaagaccatgccattccggctgggcgtcatggctgcctacggccctgcggctcctgagcaggaaaacagccgagcggaaaggcctgtaacctcttgaggaactgccaca

SEQ ID NO: 202878 - DNA, 122 bp, Homo sapiens
ctccactgccccaaaccccctggccctgtgagccgatccctgcagccaaagggtccaggtcgcccccagtcagcctctccctggtctgccccaacccccagctctccactcgatctccccca

SEQ ID NO: 202879 - DNA, 122 bp, Homo sapiens
tttgagaaaccataaaaaggggtgctcaagagcacagcttaggctggtcgtggtggctcacgcctgtaatcccatgggagaccaaagcaagcgaatcatgaggtcaggagttcgagaccagt

SEQ ID NO: 202880 - DNA, 122 bp, Homo sapiens
ttaaagtaaaaagagcagttaaccctggaaaaggtgcaaagacaaaggtgaaccgagggccggggaagctgggcaccccagaaacaccgccccaccacccaggaccccagtaccccggcccc

SEQ ID NO: 202881 - DNA, 122 bp, Homo sapiens
ttttctactaatgcaattaaatagaaattctataaaatccagtcctggacagattgggcacgtagcagtaaaattaaatggtgaccaaaaatgaaatttctctttaaggatgtctatatttt

SEQ ID NO: 202882 - DNA, 122 bp, Homo sapiens
aggtgctgggatccggcaggggagcaacaaatgtggttcggcaaattgctaaacgaaaagcggacacccgcccacgacgcctgctctgatctgacctcccggcctacagccctctccaggct

SEQ ID NO: 202883 - DNA, 122 bp, Homo sapiens
gagagggcggggatagcaaacatcgcgcgaattttgagaggcgctgggactacgtaatcccgcgatcttatgactaaacgaacgcgatttagggagaagtaacggtagcgataaagggattg

SEQ ID NO: 202884 - DNA, 122 bp, Homo sapiens
acaagcgctgcatcacctgccgcctcaacctgtgcaacgactgcctcaaggccttccactcggatgtggccatgcaagaccacgtctttgtggacaccagcgccgaggaacaggacgagaag

SEQ ID NO: 202885 - DNA, 122 bp, Homo sapiens
tgcggccacgcctgaaaggcgactctcctgtgagtgggccagaaggcgaacatggcggagcggggaggctggcgggaggcgggaggcgggaggcgggaggcagtggcgctggcctgcggcgc

SEQ ID NO: 202886 - DNA, 122 bp, Homo sapiens
ggcacggccgggaagtacatcgagtagtcgcactgggactccatggggcggcgaggacggcgcgactgggagcccggaccggaggccgaccgccggcggggcccgctagggtgggtccagag

SEQ ID NO: 202887 - DNA, 122 bp, Homo sapiens
atcctggggacggtgacaatgaaagcaaagatgtacatatgcccacttcctaagggaacacgcccctggagaaaaaaaagggccaaagacttaccgagttttgatggaactgagacgtgcat

SEQ ID NO: 202888 - DNA, 122 bp, Homo sapiens
tctgtcggtgcctctcacctggcgaggggcttgtggtgggggtaggcgggaagtccttggcgccgggcttggccaagccctgctctgctgggctgcgggctggtggcgctcacccagctcct

SEQ ID NO: 202889 - DNA, 122 bp, Homo sapiens
ggactgcttcggttcttccccgcttttcctatcccacttcggttcagccctactcccgcccgcccctagccccaggtgatccagatggaaagaagcagagaaggtgtcagggctgaggctgc

SEQ ID NO: 202890 - DNA, 122 bp, Homo sapiens
catgacgaaggcaggccccgcccacccgtccgcaagccccgcccatgccccgcccgagcccggccgcggctagaactccccgctccccagctgggctcactgcgcgtcttccgggcaccccg

SEQ ID NO: 202891 - DNA, 122 bp, Homo sapiens
atctttgcaaaggctcaaaaaatacggtctgcttcagacagagagagggtttgcaatatgcgatgaatctctcagtcccattagaaccttaaagatgatgatagctcacatttaatgtaatg

SEQ ID NO: 202892 - DNA, 122 bp, Homo sapiens
ggccccttatctctccaactcatgtcacaccttggctccagttctcatttctcaggggtgcgtgtttgctgccgcccactccatcctcgcgtcccacgccctcgcgattcctgctcatccta

SEQ ID NO: 202893 - DNA, 122 bp, Homo sapiens
tggcacagggtggccagcgaggggagcttcggagatcttaaggattcctcctagagccggcgcaccccccccccccccgtgcgctgcggcggagaccggtgcgcccctgcgcagtctcctcc

SEQ ID NO: 202894 - DNA, 122 bp, Homo sapiens
aaaaggatctctgcagcagggcttgagagcacctgaaggaatttccagaaatgccatcatcgtatgtgacacagaatttagaaaaatgactttgtgaagaatggccggaagagggaagctaa

SEQ ID NO: 202895 - DNA, 122 bp, Homo sapiens
ctgggggaaaggatgacgtgatgctcttcggaccccgccggccgcagcttcccgggaggtcgccgcagcgcagccggtgactgcttggtcgcccgcaactgccactcccccgggattgagac

SEQ ID NO: 202896 - DNA, 122 bp, Homo sapiens
acgcacactgcactgtgccccccaacggctgacaacgtggagccgggatgcaggagcatccgccttctccaagtgagttctcggcactgccgtgctttcactaaccctttatttacttctgc

SEQ ID NO: 202897 - DNA, 122 bp, Homo sapiens
cgtccaggaagtcgaagaagtacttgactgcaggtggcaccgcgtgcccaggcgccagcacgctctggaagaagttgtccacaaactgctgcagtgtgccctgtgggggggagggtctcagc

SEQ ID NO: 202898 - DNA, 122 bp, Homo sapiens
cagagttcaaggataacctgccctccatttttccttattgttttccatataaaagtcactcgttgtttcccctccagcttacacctggctcctgaaatgactcctctgaatcctctgagaat

SEQ ID NO: 202899 - DNA, 122 bp, Homo sapiens
cagaaggaccatctgcggactcgttttcactgctccagctcccgaaatcgtttctctggacgcggcagtatccgcagcgcatgcaccctcctctggacttccgcagcccagacctgcgctta

SEQ ID NO: 202900 - DNA, 122 bp, Homo sapiens
ttttttaccagcgaagagatcaacttccacatccggtggtaacagggccctacacagacccgcactgacctggaaaagcttcgggagcggcgacgggaaggcagcaggaggtggtgcgggga

SEQ ID NO: 202901 - DNA, 122 bp, Homo sapiens
ggagcgcccgcgcggacagcgcggggaaacggctcaactcgcgccgcgggggcgaagagccgggccgcggaaacccgcgctcaagggcatttaactagttggaagccaaagcgaaagaccgg

SEQ ID NO: 202902 - DNA, 122 bp, Homo sapiens
tataaatttaaacaggagaaatactttttgaagagtctgagaatcttcataaagttcaggcggccacgaattagctgtgtgacctggggcatgccccttagactctgagcctcagcttctct

SEQ ID NO: 202903 - DNA, 122 bp, Homo sapiens
ccaagaaggtgatgtggtaataaagtccaagattctgccacataagtcgggtcagcaagtcggtggcgaaaagagggccacgtcccagactttctgggaggaggcgggacaaaggggcgggg

SEQ ID NO: 202904 - DNA, 122 bp, Homo sapiens
gtgaacactgagcttctacgcgagcaccattggctggcatcaccatatcgagctacccaacgtgtgccaaattctgtctggctgcacaaacaaacacacatctctctgagtaatactgagac

SEQ ID NO: 202905 - DNA, 122 bp, Homo sapiens
tcgcgcctgccctgcgcgctgtggttgcggacgccccgaacccggaagcgcggtcccgcgcgcggctcgcccccagctttgaccatatatagtcaagcgctcggctcggcggctgcggtccc

SEQ ID NO: 202906 - DNA, 122 bp, Homo sapiens
ccgcccccttccctgagtgacagcagaagccccgggtaactgggcgctgcagagccgaagcgactggttctggccacactttccaaggtcagctccctccctccctcccacctttacttcga

SEQ ID NO: 202907 - DNA, 122 bp, Homo sapiens
aatgtcacagtgatgttaaaaataatatgtatgtgggttaagtaactataaaaagatgtgcgcataaaattaccatgtttgtacattgacaaggatggaaagtgcattgagaataaatgagg

SEQ ID NO: 202908 - DNA, 122 bp, Homo sapiens
ggggactctgcaaaaagagaaaaggagaaaaagaagaggatctttattctcttttacccccgtgtgcctgggatggagatgcttctccacccagcctatggcaaacaatcattacagttccc

SEQ ID NO: 202909 - DNA, 122 bp, Homo sapiens
atgctcctgcactcacctggatgcggtcgggtacaccggtgctgtccatgcggctggccacgttcacggtattgccccagatgtcgtactgaggctttcgtgcccctatcaccccggccacc

SEQ ID NO: 202910 - DNA, 122 bp, Homo sapiens
gagcagaggctccaggaggccagagcgactccgccaggctccgcgcactttctgtgcgtccgttccaccgtccggatccccgccacaacagagtcagggaaagcttcctctttttgtgcact

SEQ ID NO: 202911 - DNA, 122 bp, Homo sapiens
gctggatgcggccgggtgagccggggaccaggctgggatgggagcgctgaggctgggatccgaggtcgatgctgatcctcctcctcctttactccagctcctttgacaacagtagtctctgc

SEQ ID NO: 202912 - DNA, 122 bp, Homo sapiens
cttcaaaagaattattgtataaacaatataaaggcattaaaaaaaactgcaaaggaaaaacgaaccacctatgatctcagcattcgagcccaacaaggttgttttcttcctgtctagttctt

SEQ ID NO: 202913 - DNA, 122 bp, Homo sapiens
cttctagtgcccgggccaagagggcgaccccggaggtgcgtaggtggccctccgggttcccgcttctcctagtgcctctgaaaataccgtcagggtaaagggagacaggcagtaagtcttac

SEQ ID NO: 202914 - DNA, 122 bp, Homo sapiens
cacccggtacaggaagcagagtcggagatgttggcattgccagctgtgccgcccctagggcgctttattttaacctcccagagtggatcatcctttattgcaagtagaaataaagcttggtt

SEQ ID NO: 202915 - DNA, 122 bp, Homo sapiens
ttggcggagatgtggagtgattggcggctacaccggccactcagcaggccgagctggcgccgcatccggggggccgcgtctggagtggagggaggccgaaggccccgcccctgccccgcccc

SEQ ID NO: 202916 - DNA, 122 bp, Homo sapiens
ggggctgggcatccccttgcggccatcacttcctatgccctcacttctcggcagggtgtgcggaagcgagggaggcaggctccagctcaatgccctctggctctgtttctctgggtccccag

SEQ ID NO: 202917 - DNA, 122 bp, Homo sapiens
cgccgtaagcatatgcgtcttcagcctgactgggctggagaggcggtgcgtcctcctggccggggggcgggggccgtcgcgctcacgtgacctttgctcatggcggcggcggcggcggcggc

SEQ ID NO: 202918 - DNA, 122 bp, Homo sapiens
acgtcggtggccggcaagacctttgagatcagagtgggagtgatggcccacgtcggtggccgggaagacctttgagatcagtgtgggagtgatggcccacgtcggtggctgggaagaccttt

SEQ ID NO: 202919 - DNA, 122 bp, Homo sapiens
ccgtctgtatcttcctccagctgcctgaggtacattcagtacttgcatcaccagtttccacgtacaaaaacaccagaattcaggcagcctggccaacatagtgagaacccatttctaaaaat

SEQ ID NO: 202920 - DNA, 122 bp, Homo sapiens
ccctcaggaaatacgcgcgtgccttcgcatctagagcaagcgctgcaagaattcacagaacggccagaagttccccatcccgctggtggcactcactgcgttaggcgctcagcctccagtcc

SEQ ID NO: 202921 - DNA, 122 bp, Homo sapiens
agctgccgtttccagactttgagttcattcttgtcgaatccccagcttgttttctcagcccggggtgaaatgcgcagccaaaaggcccaatgagcgtcaaagcgaaagggcaggggtggtct

SEQ ID NO: 202922 - DNA, 122 bp, Homo sapiens
gctgttccccgcgcagagctgggactgtcagacccacagacgagccaagtgcagctgcagcgccgcccggctccgcggacgctgagctgtgaccagaggcgttccgggctcgccagccgtgc

SEQ ID NO: 202923 - DNA, 122 bp, Homo sapiens
gcgtaagagtcaccaggcactctgacccaatcaagatatattaagcatctgggtgtacagcgatccagaagataacagcgatgatatatctgtcaagaaaaaaaaaaaggaaaaacattcat

SEQ ID NO: 202924 - DNA, 122 bp, Homo sapiens
tcccgcgcgcggctgagtgcggactggagtgggaacccgggtccccgcgcttagagaacacgcgatgaccacgtggagcctccggcggaggccggcccgcacgctgggactcctgctgctgg

SEQ ID NO: 202925 - DNA, 122 bp, Homo sapiens
tcatgctgtttccctctcccctagtacagtgcctgatacttagaaatttctcagtaacatcgtgctcagtgaatgaatgaatgaatgagtgaatgaaaacacaagccagatggcaggtggat

SEQ ID NO: 202926 - DNA, 122 bp, Homo sapiens
cagcactgctgggaaaagcacaggcggcctggatgtcagtgtgaggggaccttgtgctgtcgttgctgcaaaaccgcatttggcctgaggctatgttaataaagatactgcctttagaatag

SEQ ID NO: 202927 - DNA, 122 bp, Homo sapiens
tctctctaccttgaaaaccccatagcatccagatgagactgttgacacaggtgcctatctcgctaggattaagtgcattctttccacttcaaggcaatctgaatggaaatacttgatactat

SEQ ID NO: 202928 - DNA, 122 bp, Homo sapiens
cgggcacacgcctggggcgggatggtggctgcgccaaggccgccgaggtgcccgcggcggcgccgaagaaccaggaatccccaccagtgccctaagcgccatcactcaacccccgccccgca

SEQ ID NO: 202929 - DNA, 122 bp, Homo sapiens
gggacggtgcccagcgctcggcacccagccccgaggccaggaccgaggaaggcgaccgggcggacccccaaccactcccgctgtctgcacgcgcagcagcagcgcccagctcaccccgccat

SEQ ID NO: 202930 - DNA, 122 bp, Homo sapiens
cgttacaatgcaacattaacatatgaaagttgccatcagtttcttagtcaagaaatttaacgttgcctcatgctaactagaattgtttaacctggaagcccacttttcaatgttatctattg

SEQ ID NO: 202931 - DNA, 122 bp, Homo sapiens
atttcgccttcccggccccctcggagcccccaccgaggagacgggctggccgtctggggacgacagaggcccggaaaagagtgcgattgtttcgtggtctctttgctaagataggtttccag

SEQ ID NO: 202932 - DNA, 122 bp, Homo sapiens
gcctgccacctctgaccatcagctcagtggtgcagcgcagacgctctgccagcagtggcccgccaggcctggagcctaagggtccagctctcagctgtgctggggagccacacttcttatct

SEQ ID NO: 202933 - DNA, 122 bp, Homo sapiens
tggtcgcttcttctccttggtaagtgtgatccttggtaagtgtgatcagatgcttgccaccggagttgtgggtctaatgctatagatcagtagccgagcttccctaggaagatcatatagta

SEQ ID NO: 202934 - DNA, 122 bp, Homo sapiens
gattccccgcctcattccattttataaatcacggcgccatcccaaaagaaatttggggaccgagggaggagacttcgtaaactagctgcagtgcactaaggcttaggatgtactattagacc

SEQ ID NO: 202935 - DNA, 122 bp, Homo sapiens
cgaacatgcacacacacgctcacaaacccaggggcttgtgcacctccctccctccacagccgacctcaactcgggtgtccaggcctgcgaatggcacaaatgctcactgaaatccatgtcat

SEQ ID NO: 202936 - DNA, 122 bp, Homo sapiens
tcctttgctatgaaggctgccgggcacattccacaccagccaccctccacctcgcatgtgcgtttatcgatgaaacgccacagtgggacctcctggatcaaatagtgcaatgatgtaaacgc

SEQ ID NO: 202937 - DNA, 122 bp, Homo sapiens
atttttatgacttttttacttctcagattcctttcttgtctgttagaaacgtatgtcaaacgaggatacagtgtctggaactattggttctaagatataagtggaatgagcctggatcagga

SEQ ID NO: 202938 - DNA, 122 bp, Homo sapiens
cgaaacttgggggaaatgagttgagggaggcacttggggagttgacgcctcccggggtcgcgcgcttggctgtgaacagggtcttgaggttcagagtccgctttccaggcgcgtcttgatct

SEQ ID NO: 202939 - DNA, 122 bp, Homo sapiens
gcaatgatggccaccagctcatcgcgatcactgacgataggcagcttccctttcttgttacgctgcaggatctcatttgcctctttcaacgtcacacctttcaacgtcagccaccaccagtt

SEQ ID NO: 202940 - DNA, 122 bp, Homo sapiens
ggcggcatgtttaaccactaagatgatcaacacctggtgaggtgagggctgcaccaggcgcgcactgccctttctcagcagtcacttacttaatgcacttaatccactcctccttctcctcg

SEQ ID NO: 202941 - DNA, 122 bp, Homo sapiens
ggacgcggtagcggagctgctcaaagcgaggtgctcagccctgggaggctcagggctgcccgaggggcttagtcccagagccagtgctgtcaggggctgagcatgtgaatagggcagtcgga

SEQ ID NO: 202942 - DNA, 122 bp, Homo sapiens
gctggagaggagtccagtccctccaacaaatattgagggcttcaaagagctcttcctggacgtttctcttaatctggatttaaaagggacaggaggtatcttagggtccaagaacataacag

SEQ ID NO: 202943 - DNA, 122 bp, Homo sapiens
ctctccttgtgccccttcccctatcacctcgtgccaagtaagactgagctctcaagccttcgctcagatgccatctcttccaggagcccttgcctggtgcctttcacccagagcttctgccc

SEQ ID NO: 202944 - DNA, 122 bp, Homo sapiens
tgttgaagagggagatgaaccgctccaggacggggttgtccacagtgcagccatgagtcacgaaactgtgatagtcctgaaactgggggcatgaggagtggcctcagcaccttgctggcctc

SEQ ID NO: 202945 - DNA, 122 bp, Homo sapiens
cgcggcaggtccttggggcgcgcggcgcggctgcagccgcaggtggacagctcgccctcgcggcacgcccggctcatggcgttcaccacccctgctgcgctcaccgcgtatgtgaaggccgt

SEQ ID NO: 202946 - DNA, 122 bp, Homo sapiens
tcgtccgggaggctccggctgcacaggagcccacggaggtggcggaaggctcaggcatggcgggctgcagtcctgaggcctgcccggcgggaaggcagctaaggcccggcaagaaatcgagc

SEQ ID NO: 202947 - DNA, 122 bp, Homo sapiens
gagtgcacttgtacgtgacgttggagtttgcagcaacctccaagtaggaggctgtgcgcgcgtgtgtgtggagtggctgcgcggccggggaggatgtgcgctgcagggcggccgccgcagtg

SEQ ID NO: 202948 - DNA, 122 bp, Homo sapiens
ggtggaccacgcatctcacggctcgctgacgcccagggatctggaacgctctgcgccgcccgggactacactacccagaatcctcagcgcggccgggactacgctacccagcatcctcggcg

SEQ ID NO: 202949 - DNA, 122 bp, Homo sapiens
tgggctcgagcgtaagcgccacacgcagcagagttaagacgctgcacccttaggagcacgcggtgcctgccttcagtgagtcccttaaatcacagcacagcgcgtgggaggagagacagtgt

SEQ ID NO: 202950 - DNA, 122 bp, Homo sapiens
cagagcgttattttgccgcagcctacgcaggcgcagtcagtctttgcattgtggtggccacgccccactcctcgtcttccatgctttgtctctcattcctgccccctcacctctgaagggca

SEQ ID NO: 202951 - DNA, 122 bp, Homo sapiens
ggggtgtgcagggaggagatcgtcctggggccagagctggggcttagcactggagagaaccggctcagctgtgggtgggagccaggcctgggtccctcggtgccccgcccccttcgctgctt

SEQ ID NO: 202952 - DNA, 122 bp, Homo sapiens
aggtcaaagcactcccggggcttgggcttatactcccgcctgggtcgtgaggaagcttcccggatcctgcacttgaacttctgggccagctggtccaggatctgcacggcctgccggtggta

SEQ ID NO: 202953 - DNA, 122 bp, Homo sapiens
aatcccatgacagattataaataatcttaatagcagtattcacgtttgcattctcgcatccgtggcatggagtcctacacacaataggcgccctaagaaagcgtgtttgacttgatcgctgg

SEQ ID NO: 202954 - DNA, 122 bp, Homo sapiens
aacactgcttactgcagcctcaacatcctgagcccaagccatcctcccgcctcagtcgtgcgccaccatgcccagttaatttttgtataaagatggggttttgccatgttgcccaggctggt

SEQ ID NO: 202955 - DNA, 122 bp, Homo sapiens
acagcaggagcagcaggggcagcagcaggctgccgatttccagcccggaggggccgggctcggaccccggcgggcaggggggatttgggggaccgactctcgtggacacgtggcagtggaga

SEQ ID NO: 202956 - DNA, 122 bp, Homo sapiens
tattgcctgccctccttaaagcctgcgtcccagtctgtgcgaatgattcggtcatccagacgcgtcccatttatgtaccgcatggcgttttccgcatctgcgcgtgagtaatatcttaagta

SEQ ID NO: 202957 - DNA, 122 bp, Homo sapiens
tccgggtgggagacgtgtggggttctctggctctccaccctggtcctgtggtgactgagccgccggctctcctgcagaagctggtctgcgcaggccagtatgggccgggcatggcggagctg

SEQ ID NO: 202958 - DNA, 122 bp, Homo sapiens
tttcttttgttcccaacaaaacaatgaaactcgcaaaactgactgtaatgattcagtctacgtgaatttaaagagcaatcaatacttaatgttctcagctctgagtgcacacattgtaagtc

SEQ ID NO: 202959 - DNA, 122 bp, Homo sapiens
gaggcggatgcatggaggcagatggatgcacacgtctagagtttaaaaggagatctgaggcggagatacgaacttgggagctgttagtccagttccaggttccaattcaacgtacttttatc

SEQ ID NO: 202960 - DNA, 122 bp, Homo sapiens
cttcccagaccacctcatcagccaggcctgggaatggaatgtggccgcgaggggctaacgcgttggggtttaggtctagtttccatgttgtgtttgtgagtaagagaggaaaggaatgattt

SEQ ID NO: 202961 - DNA, 122 bp, Homo sapiens
gcagggcaagagcaaaggaaacgtggtgtggcctcgagttaggctgcaagcagcgggtgccgtcacaagcccacccgttaccacgacttcgcatcgtctacattgcaggctcacgttcacat

SEQ ID NO: 202962 - DNA, 122 bp, Homo sapiens
cataaggcatggattcctcaccttcggctcggggagcacagagactgagggccgtggactcggggtgagatggtggcacctccatcacagacccacagtctctgtgtccagcccttccggaa

SEQ ID NO: 202963 - DNA, 122 bp, Homo sapiens
tcctgaatgtaaagtctgagcgggaactttagatgtgtcggtaactcacattcttacacccgtccccccctccccccgcccccttttaaccactgctgtttttttctttattgtttatacct

SEQ ID NO: 202964 - DNA, 122 bp, Homo sapiens
acaagtaaagagcattatcatagagtttgaggtcaacatctgcctcagttgaaatcccatcgtggtcatccatgtactaaccatagacaacttacacaacctcttggggactaatctgtcaa

SEQ ID NO: 202965 - DNA, 122 bp, Homo sapiens
cgggcgtggtggtgggcacctgtaatcccagctacccgggaggctgaggcagaagaatcgcgtgaaaaccagaaggcggaggttgcagtgggccgagatcctgccactgcactctagcctgg

SEQ ID NO: 202966 - DNA, 122 bp, Homo sapiens
tccagcggaaagcctcctgtggctctgacgggcgagaatatccccggtgatttggacacacgcacctcttcctggcggggtatttgattaaggaagaaactccctgtgttatgtaagatctg

SEQ ID NO: 202967 - DNA, 122 bp, Homo sapiens
tcacacagttctggaggctgggaattccgcaatgaagaggccagcatgttcattgcctgacgagggctgtctatctcttcttccaatttggcaccttgctactgcatctccagaggggacaa

SEQ ID NO: 202968 - DNA, 122 bp, Homo sapiens
cccgctccccagccaggcgccaccacctgccgcccaggcagccaggcgactcttctttcgcgggtcacgcggcctgactcaggcccctgctcctgtggccccgaaactcgccgttcgctggg

SEQ ID NO: 202969 - DNA, 122 bp, Homo sapiens
tccaggacctggggcccaaggagctgagctgcactgaactgcaggaactgaagcagctggcgcgccagggctactgggcccaaagccacgccctgcggggaaaggtgtaccagcgcctgatc

SEQ ID NO: 202970 - DNA, 122 bp, Homo sapiens
ggcgagggcgcggtaaatggcgctctgagtactttctgtctcagtccggctggccgctcacgcgtcgggcccccatttactctcgttactgaggagacacggctccagttttgacccgacta

SEQ ID NO: 202971 - DNA, 122 bp, Homo sapiens
tatgaggacagaatcgtctgcaaccttgcaggggactcacagcgtgcgatggccggcgggcgtggtcaggaccacccaagcccagatgcttttctcgcccccagatccgaggacccgggaga

SEQ ID NO: 202972 - DNA, 122 bp, Homo sapiens
cccaagaggggctgaaggcgcccccgcccggcggagcctaccccaacacggagcccagagcgccacgcctcggaccccgctccgggtaagcccggagcaagcccccgctccgttccggacag

SEQ ID NO: 202973 - DNA, 122 bp, Homo sapiens
ttcatgcagcaggattatgataaatgcttaacagacacacggctgggctggggtgaggcgcgcgaactctcaggtttgtgcgagtgcttccttaaattgagtgtcctaggtcactcactggc

SEQ ID NO: 202974 - DNA, 122 bp, Homo sapiens
taattgtgaatttaaaaaacatgaaggggttgtggggctctaaaaaacatggagggggagcgtggccctaagtctgtacttggcctgatggtcttatcttcagaattctggggtatatgagg

SEQ ID NO: 202975 - DNA, 122 bp, Homo sapiens
gttgcagtgagatgagatcacaccattgcactccagcctggataacaagagtggaaacttcgtcgcaaacaaaaaaagaaagaaagaaagaaaagaagcagagttggactcagcgggaaaat

SEQ ID NO: 202976 - DNA, 122 bp, Homo sapiens
agctatggcaggttgggcagctccaggagccagcatgggcactggctccctgtgaggttgcggctggaccaggcataccacgagcagcttctgctgatggtaccagggaatgtggtggctcc

SEQ ID NO: 202977 - DNA, 122 bp, Homo sapiens
aaagacaagagtcaggcctgtgggtaaggatgccggatttaataaatgaaaataccaggccgggtgcagtggctcacgcctgtaatcccagcactttgggaggccaaggtcggtggatcacg

SEQ ID NO: 202978 - DNA, 122 bp, Homo sapiens
cctcctacaagaccaggtctccagtaatgaaatcagttttccaagcagttacttaattaacggcattgagtagacaagtgaggtcccgccccctaggaggagctaacaccgcggaccgaatc

SEQ ID NO: 202979 - DNA, 122 bp, Homo sapiens
ggaaatgcgaccccggggcctgggcacgtgctgttcgccttcccagatacccgcatggaccgacgcttgcgcatccaggtctctgctcaacgtcagagtggagcctccgggccactctgcac

SEQ ID NO: 202980 - DNA, 122 bp, Homo sapiens
gtggctccataatgctttttctcagttcttcatatggtaaaacagtatttcatctggaggcgattttttccaggagccaatacaggagcaagtttaggaaaagatgggatatttcaaatact

SEQ ID NO: 202981 - DNA, 122 bp, Homo sapiens
gacctccttaggctgtgggcgaagacgtcatgggactggggctctgctgccttcgagtgacgacctgttaacccgtttttcaggcgatcgccagctcgagtgcagattccttgctgtgaccg

SEQ ID NO: 202982 - DNA, 122 bp, Homo sapiens
gttgggaccgcggaatccgacccgagaagccgaaccgacaccaactgtcttttaaccactcgcgcccaaagccgaaaggccccgcctcctaacgccagaaatcccgcccagtctcctcgtgg

SEQ ID NO: 202983 - DNA, 122 bp, Homo sapiens
gtgcgcccggagtccattggccaaggcgggccacactcccgggtctggattgggtcgtggcgcagagaaggcgtggcctcgccgcgctagtccttataggctgctccgcgctggtgctaggg

SEQ ID NO: 202984 - DNA, 122 bp, Homo sapiens
tcccgaggcttgttgggcttctatgctagttgtaagcataccccacactggggatgatggcgcccttcctccctccagggccatgatggtgactgactatatgataataatactagaatgat

SEQ ID NO: 202985 - DNA, 122 bp, Homo sapiens
gcctacctcatgccctgtgcagaacacgtgaggctcacccacctccaaacagatgcagtgcgccctctgcctcaggcagggcactccccaacacatgggcagctgctcacacagagatggta

SEQ ID NO: 202986 - DNA, 122 bp, Homo sapiens
aatggaaataacagaaaactacaagattcctctctctcagtgcttcctcagccagcctgacgctcttcttccaggctgagctgcggccctggctgtcagggaatgagctggaagacctgatc

SEQ ID NO: 202987 - DNA, 122 bp, Homo sapiens
cctcctggcagcagcccagttccccacatgaaccgaatggtcctttcttaaattttgagccgggggctgcctaaaaggggctgcccccgcaagcattttacctccctaacaccattctctgc

SEQ ID NO: 202988 - DNA, 122 bp, Homo sapiens
gtggttatttgcgcttgcaatgcgtccggcagggttatgagcgcttgcaatggctccgcacgattatctgtgctcgcaatgaatacggcaaggttatgtgtgcttgcctgcatccggcatgg

SEQ ID NO: 202989 - DNA, 122 bp, Homo sapiens
ctggctgtctggggcgggggtcctgcattcggtgtccgcgggagagtccctgcaggtcggcgcagcccccggccgccccctagccccgccttgcccggccccgcatgctcctgccgggcccg

SEQ ID NO: 202990 - DNA, 122 bp, Homo sapiens
cggtcctagccaagctgaaaaaacgtctcggatttcgcggacagcggcctagacacagcccgatcttccagtcctagtgccctggtcgagacggttctatccttttgcaaagaagccggaaa

SEQ ID NO: 202991 - DNA, 122 bp, Homo sapiens
ggggctgcgggtcacgtgaccctgggagcggacgtggggacgtcacgctgccgcttgtctcggattgtgaagccggtcctggcttccttgtctaaaagctctttgggactgaaatggctgtt

SEQ ID NO: 202992 - DNA, 122 bp, Homo sapiens
gagctgccctagctacccgcccccaccccacctctcgcctttccctctcctcctgaaattcgttttcttgggggacagtagcatgcattccaacgtttccttgtgttttctcccacggaagc

SEQ ID NO: 202993 - DNA, 122 bp, Homo sapiens
cacgtccaaaataggcctgacgacacctggcccagggaactctgcagtgaagatgaaatacgattaaaggcagcccgacctgcagcgatggagcgtgatgtttgaaatgacacaatcaaacc

SEQ ID NO: 202994 - DNA, 122 bp, Homo sapiens
acttgaaactcttctgtaaatttaagactgtttcaaaatgtaaaaaggaataaaaaaattcggtgggaaaaacacaggagaacaacatgaagaaaagcagaaaagaaaaaagtatgatggag

SEQ ID NO: 202995 - DNA, 122 bp, Homo sapiens
cgcacggccgtctggatctccctggaggtgatggtcgagcgcttgtcataatgcgccaggcgggaagcctcacaggcaatgcgctcaaaaatgtcactaacaaaagaattcatgatactcat

SEQ ID NO: 202996 - DNA, 122 bp, Homo sapiens
gcatggaagaggggagggtaaaaggaaacttttattggcaaagtaagtgcagataagctgcgtgaaaacagagtttattggttttgcagactgaaagccagagttggccattgttgaagatg

SEQ ID NO: 202997 - DNA, 122 bp, Homo sapiens
ccaggagagcggtaacttactgggagccaagttttcctgtggggtctgactgggaggggccggggatacctgtgaagctgtccagccactagggcagctcagagctgcttcctgaacagaca

SEQ ID NO: 202998 - DNA, 122 bp, Homo sapiens
tcgtgctgttctagaaagcctgtcgttggaggaaaacacttgatgagcctgcggtaaaggcgtggcttgcgatttcacttgggaagcacattgtcgtgtcgtctgtgtgatttacatcccgc

SEQ ID NO: 202999 - DNA, 122 bp, Homo sapiens
cgtgcaccgcggaatcgcagatctttacagccggaagaagcctcggaggcagagcctgcacgtttcagaccaagaaacggtggctcagagggggatgggaacgggcagggacacctgtttta

SEQ ID NO: 203000 - DNA, 122 bp, Homo sapiens
cgacggcaacccacctgcctgaaactcctgggacaggctggtcccggccaggcccaggcccgcccctctcccgactgaccctgggacttggagcccggcactcactttcccggtcttgccgg

SEQ ID NO: 203001 - DNA, 122 bp, Homo sapiens
gtaggaattcattctttttaaagacaaatttgactttgaaaattaaggcatgtggccaggcgcgatggcctgtcctgtaatgtggccattacaggactgcccgctgaccccgtacccagagg

SEQ ID NO: 203002 - DNA, 122 bp, Homo sapiens
tagccccaagctagttgctgatcctaacaggcccaattaactgctactcatttagcaaagcggcccgggacccatcccgcttcccgctccaccttctgaaactctccctgcctgggtacctt

SEQ ID NO: 203003 - DNA, 122 bp, Homo sapiens
cttaattatccatactgtatacccccagaatccatgttccattctccatttttcatattccgttctccaaacaccattctccatgtttttttctctcaataatccattctccatacaccatt

SEQ ID NO: 203004 - DNA, 122 bp, Homo sapiens
gctggggagaaggtaggggtgacttgcctcttgcagataggggaagtaatgttccaaaagcggacatgactgtcacccagggcacgagtcacaacactgatgaccagtgggagggagctgga

SEQ ID NO: 203005 - DNA, 122 bp, Homo sapiens
taataaccagcgaaaagcatgaaacacccgggcggcctcggggccttatatagggtagggcgcgctgtgattggtgcatcacctaggcaccgcccccgccccttggaggaggagtatttgtg

SEQ ID NO: 203006 - DNA, 122 bp, Homo sapiens
ccaagtctcaactccaagagcagacagattaccaaagacattctggagatcagtatgaagcgcatcctgcttaaaccaattatgctgaaattgtcagattgcagctgacagccaatttcatg

SEQ ID NO: 203007 - DNA, 122 bp, Homo sapiens
caagtgccagctgcagaaggacgtggcgtcctaccacgccctgctggacagggaggagagcgggtaagcctcgcttccgcgtcaattatccaagagatgcatattcatggctttaaaaataa

SEQ ID NO: 203008 - DNA, 122 bp, Homo sapiens
gggtcctgcaggccagggacaggagtgctgggcaggcagggggcaagcagctactcctgccgggaccagagctgggagaaacgggttccccggggagtccctcgtgcacccgtcggcctgcg

SEQ ID NO: 203009 - DNA, 122 bp, Homo sapiens
gtgttggggcgtcaggggtgtgtgttgtttctgcgggaaagagagggttttgtgaattctcgcttggaatggcaacctgagcagccagtaaccatggaaggttgtcaagggagggacagttg

SEQ ID NO: 203010 - DNA, 122 bp, Homo sapiens
cattaatctccactgcagcccagtagactagcagatcagaagctagtgccactggctgagcgcagtggctcacgcctgtaatcccaggactttgggaggccgaggcgggcagatcacttgag

SEQ ID NO: 203011 - DNA, 122 bp, Homo sapiens
ctcatggccttatctgccagatggctcccggaggggatgatttattaggtgcagaaagctcgctgataaattttactgcaagtccccggcagaagactgggggtagcaacagcccggcgcag

SEQ ID NO: 203012 - DNA, 122 bp, Homo sapiens
ttctgccggtgctcggagaagagcgcagtgttttgcaagtgctggagtctcctgaggacacgcgcgtcgccgccaccgcgggtgtgggaaagcgcggacgtgctgggcggctgtgcttcggt

SEQ ID NO: 203013 - DNA, 122 bp, Homo sapiens
ggaggagggccagagaggcagttggaagatggcggacgaggcggccctcgcccttcagcccggcggctccccctcggcggcgggggccgacagggaggccgcgtcgtcccccgccggggagc

SEQ ID NO: 203014 - DNA, 122 bp, Homo sapiens
caggggctgggcttagggttggtctccctggttctctctgcggggatgagtaatacggaccggggcagagggtctatatcaatctagcccagcagaaaaatgaatgaaaattgaattcccca

SEQ ID NO: 203015 - DNA, 122 bp, Homo sapiens
gggaccggggccccagagccccgactagactgattcttgggcctgacagggtggcaaagccgggctatagattcctagtctgagaagaggcgtcatctcctcctgtgggactagagggctgg

SEQ ID NO: 203016 - DNA, 122 bp, Homo sapiens
cctgtaaactagcatgttcacaatgttcttctgaatgaaatgtctgtacataagtgaaatcgcacagaatattcaaatttgtcatctaatgcattaggtagttggtttgtttgatataccgc

SEQ ID NO: 203017 - DNA, 122 bp, Homo sapiens
gcccgcactggtggagtcggaaagaggtggctgcggcgcggcaagtgccgccagtgccagcgagcgcgacgtcgctcccaagcccccgtctctatggcaaccgagtgcgtctctaggaccgc

SEQ ID NO: 203018 - DNA, 122 bp, Homo sapiens
cggcagagaagaagggagggaacaagataagtctctgcaatgagcgccgacacctctccccgggccaggcgagttcctcaagaccccgctcccacctcccggggcccgaagtgggaaggaag

SEQ ID NO: 203019 - DNA, 122 bp, Homo sapiens
gtaaacctttcaccttcaccaagcgccttcttcgggcaaatcagggccctagagagagctcgcccgtggcctgcaggtcaggagcccaatcctgccctggctgcctcgcctcccgaccacag

SEQ ID NO: 203020 - DNA, 122 bp, Homo sapiens
gtggagagttagccaccttttctctgtttcttttttctttttttttaatcgagatgaagtcgtatgcttgttgcccaggctggagtgcaatggtgcgatctcggctcactgcaacctccgcc

SEQ ID NO: 203021 - DNA, 122 bp, Homo sapiens
catcacagcagaaacagggcaacaggcgcctaagggtctctgcacacgacactcccaacccgtgccacacaccgtgagggtctctgcgcacgacaccaccgacccgtgccacgcaccaggag

SEQ ID NO: 203022 - DNA, 122 bp, Homo sapiens
accgcgtgcggaccctcggtgcgcatccagggcgggatcgctggaccgcgtgcggaccctcggtgtgttactgaggcgtccccaagctgtttccacagacgctgtgctgccctgcattccca

SEQ ID NO: 203023 - DNA, 122 bp, Homo sapiens
tgcaggatgtcaggcctacgcaaccttttaactttccaggtagagaccgaggctcagtggcggaagaggcttcctggaaatacacagcaaagccttgatcaaagtgagactgcacagctaca

SEQ ID NO: 203024 - DNA, 122 bp, Homo sapiens
tcctccttggttccttgttgcctgaagaatgtcatgcaaggtccttggcctggcattcagcgccctttacagtttggtgtcctctagcttcccactctgattattgactgactgtatctccc

SEQ ID NO: 203025 - DNA, 122 bp, Homo sapiens
agctgttttgtgatcttcatattcaagaaagcaaaagcctctgttttttttcttgtcatccggttggtggtataaaatgacgtctgtaagaccctctgcaagtaagcaaccattccaggaaa

SEQ ID NO: 203026 - DNA, 122 bp, Homo sapiens
agaccggggctgtggtgcggagagaggctgagacggagaagaggagaggcagagagggcgcggggaccgtcagcagcaccttagctacaatcgttcagctattctcggaagagagaagggag

SEQ ID NO: 203027 - DNA, 122 bp, Homo sapiens
ctccacacagatcgcgcggacagtttccaaaggacatgcagaagtcgtccccgtaaggtacgctccgtaagtccccgccgccctccccaagtctccacaggcatctgtggctttgcctccct

SEQ ID NO: 203028 - DNA, 122 bp, Homo sapiens
caatgacacaggccacctttgaccgaccgttacccctggggcaaataccagtggggataacgggcaaggagaggtgctgtttactgtcttattgttgccagttcagcagcccacaggaaatg

SEQ ID NO: 203029 - DNA, 122 bp, Homo sapiens
aacagcccagatgaatgtctttccaaacacgcggtgcctgcgtttccagggacagggacacgtcttatcaatttctatatattacagctttgtaaacataatatttataaaatcaaagcggg

SEQ ID NO: 203030 - DNA, 122 bp, Homo sapiens
ctggcacgcgctcacggcaggaaggtggcggtaaagtcaggggcgagctcctggtcagggcgcggggagggggtcgggcgtgcagggaacccgcgctccagtttgcggcttggttgaccact

SEQ ID NO: 203031 - DNA, 122 bp, Homo sapiens
gctccccgaggtccagcgctaggcgcgggcgctagactggcggaggggtggtgcgaggggcgggggagggtcggcttcccacgtgggggctgacgccggctgctcagcaacgcttgcttgat

SEQ ID NO: 203032 - DNA, 122 bp, Homo sapiens
ttaaacctgcttaaaatgagagctttgagttctcaaaatcctttaattcggttaaacatccgctaccctgaaaggactccacagcatcccataaaacattatttatatgtgtgcgttaactg

SEQ ID NO: 203033 - DNA, 122 bp, Homo sapiens
tgtgtgtgtccgagtgcacttcacatttgggggtgcttgtgctctcaggaacgactctcccggctgcccggaacttagagagtttccctttaagccggagatgctgctcggacacccccccg

SEQ ID NO: 203034 - DNA, 122 bp, Homo sapiens
atgacttcttccatattctgagctaaaacatatgtttctgaagttcctatctcttagttccggagccttggggcctcccaggacaagtctaatttctttgtacataatagtccatcaggtgt

SEQ ID NO: 203035 - DNA, 122 bp, Homo sapiens
ccccggacccagcagcctggtctggaagtggtggctgaaatcgccggccatgccccggcccgcgagcaggagccgcctcccaacccggcccccgccgcgccggccccgggcgaggatgaccc

SEQ ID NO: 203036 - DNA, 122 bp, Homo sapiens
ccgcttcccgcggccttcccggctccactgctttgtctgccgcccgtggaccccacataccgctccagagctttaggagtccagagcctgccacaccatcagggccacacctacggatgagg

SEQ ID NO: 203037 - DNA, 122 bp, Homo sapiens
ctgcttcagctctgagaagcatgtctaggtcacggagccggtgagggctgaggcggcagccgtgaacgccttgctctgaacgctgccatgctctgatgccggggacagaagtggacaggaac

SEQ ID NO: 203038 - DNA, 122 bp, Homo sapiens
gcctcacggcgccgctccagggcctcccaggcctccccagcgccagctttcggtgagcctcgggcattcctagctggagagtttggctgggggtcgctacagactcttcagagcggctgcag

SEQ ID NO: 203039 - DNA, 122 bp, Homo sapiens
gttttctttctggatgtagagagcttctggagaagctagcctctggagaggctggcaagacgagcggaagaggcaggcatggcccagtgtgtgcttctggagcagtgtggggcagtgggtgg

SEQ ID NO: 203040 - DNA, 122 bp, Homo sapiens
ccccctcgccgctcacctggggcgcaggtgagcgtctcgcgggagcgctgcacgggccgccgctagggacacacttcctgcctccgcgaagcgctaccgcgcacctggaccgaggccccgcc

SEQ ID NO: 203041 - DNA, 122 bp, Homo sapiens
atgtgaccggagctctgaagaggcacacacgcatgccccgcacaggctgttagcacttgtcgcctcgctgccctggtccagactacccttgcttgcgtcagtcaaaactgttgtaactactt

SEQ ID NO: 203042 - DNA, 122 bp, Homo sapiens
gttgggaagccacttccggtaaagttggcgcttgcgcagaagagactcccgggctcttaacgtcgggtatcaggagtttcttcccggagcaaggacccccaagacggaagaggatggccgcg

SEQ ID NO: 203043 - DNA, 122 bp, Homo sapiens
gtgtgtcgggggaggggagggctgaggtcgactgggcagtagaggcaagttgcccaaattcgctaacttccatcccgcaattccgctgaactcggcccgaaaagccccctcttgcctcaatt

SEQ ID NO: 203044 - DNA, 122 bp, Homo sapiens
ggaggagaaaaggttccctcgaaggacgtctttgcttgcgcgttcacggagccttgagaacgagtggccgaggggacccctgcggccctgcgcgcctgtgagtctcccgggcgggcgggcgg

SEQ ID NO: 203045 - DNA, 122 bp, Homo sapiens
tgaaagacttaaaaggaattcaaagctttctagtgacaagttaacatatgtgactgaggccgggcgcagtggttgacaattgtaatcccagcactttgggaggccgaggtgggtggatcacc

SEQ ID NO: 203046 - DNA, 122 bp, Homo sapiens
gctgggcccagggacggggatgccggacatggatgccgctgggcccagggacggggatgccggacatggatgccgctgggccccgggatggggatgccggacatggatgccgctgggccccg

SEQ ID NO: 203047 - DNA, 122 bp, Homo sapiens
tctcccgtctcacaggggataagaagtttcaggtaagggggcaggctttctggctggatgcgcctcccctggagctaccttttgctcatcacagcaggtactgtgtgtgtgtgtgtatgtgc

SEQ ID NO: 203048 - DNA, 122 bp, Homo sapiens
caccgatggtggaccacgcatctcacggctcgctgacgcccagggatctggaacgctctgcgccgcccgggactacactacccagaatcctcagcgcggccgggactacgctacccagcatc

SEQ ID NO: 203049 - DNA, 122 bp, Homo sapiens
gccgaggaggaggtgtgtggcttccgcattaacttccggggcagtgggcggggctaatttcgcgactctggttattccgagcgtgcagaaagcagcgagatcccggggcgggcccaattcct

SEQ ID NO: 203050 - DNA, 122 bp, Homo sapiens
cccgtgccctggttggcccaagacagcgcggaagcggggagttaaagagtctatgcctgtcgtggaagctggcctggcccccggagctccctggagtcggtactgggggcttcgttttgtac

SEQ ID NO: 203051 - DNA, 122 bp, Homo sapiens
cctggagagagtctacgcttgccttacattaaagtgacctctttgactcatgttcacagccgtgttaataagcttgaaaaaggtgccctatccagttatattttttgaaaaaccagaagaaa

SEQ ID NO: 203052 - DNA, 122 bp, Homo sapiens
ggcatcttgggaggccactactggcctaccacaactgggcagcaaaactattacaccctccggtataatagttttggtgtttcaatgactgggaggaaaagggttggaattttttgctttgg

SEQ ID NO: 203053 - DNA, 122 bp, Homo sapiens
cgcttattctctcgcagtcctggaggctggaagtctgaggtcagggtgtgggtggggccgcgctccctctgcaggctccccgggaggaacttcctggcctcctccagcttctggtggctctg

SEQ ID NO: 203054 - DNA, 122 bp, Homo sapiens
gcccccccagggcctggttagttacaaggcctggaggtggggccagtcccaggattgggccgccagagttctagcgggcggggccaagcgctcagaaggcgggtcgaggggctgggtgcacc

SEQ ID NO: 203055 - DNA, 122 bp, Homo sapiens
ttacttactgttggagattgatgcttcttttttgtctctgcagctcaagttctccagcttcgccatttacttcagcaaatattaataaggtaagcaaactccaaagaaaaggtaaagacatg

SEQ ID NO: 203056 - DNA, 122 bp, Homo sapiens
ctggacccttggaacaacagccggaacccctggttccgtgaattctgggagcagaggttccgctgcagcttccggcagcgagactgcgcagcccactctctccgggctgtgccctttgagca

SEQ ID NO: 203057 - DNA, 122 bp, Homo sapiens
aggttggtgctgcaggggtgcggcttggccactgtgcatggcggaggccaccaggctctgcgtgcaggacacgggggcaccacacacacgccacgcggttggcaaatcccttgtaccaaatg

SEQ ID NO: 203058 - DNA, 122 bp, Homo sapiens
atgcttaaacaaaatgccccagtgttcacttttcacaggttgtctccttaacacaactaccgtgtacgacgaatgctattatgcccattttactgaggggaaaacagcttccctctcatcta

SEQ ID NO: 203059 - DNA, 122 bp, Homo sapiens
ctttggtggggactccgagggcgacactgtgcggcgacccttggcaggtgctttgtttgccgtcggggccagcctcactgacaaggctgagggtctgtgctgtgcaaagcccaccggggggt

SEQ ID NO: 203060 - DNA, 122 bp, Homo sapiens
cgtatgccgggcggaacagctggaccttgcctcacatcatgctgtcggcaggtaacacaccgctgcctcaccgttttggcaagggctgagaaactcgagatgtagaaataccggcctaacaa

SEQ ID NO: 203061 - DNA, 122 bp, Homo sapiens
gcctggatgccacccacgccgagcgagccatccccgtgtcgcgggaggagaagcccacctcggctccctcgtcctaagcaggcattgcctcggctggctcccctgcagccctggcccatcat

SEQ ID NO: 203062 - DNA, 122 bp, Homo sapiens
ggctgtgtgagaaagcagagcttgagcagccaagaggggcctcccacaccccccctatttcgttctcacccagggcaccagccagactgtagggcttctctcatgaaggtggcaggattgca

SEQ ID NO: 203063 - DNA, 122 bp, Homo sapiens
gttccccgaggtgtacgtgcccaccgtcttcgagaactatgtggccgacattgaggtggacggcaagcaggtggagctggcgctgtgggacacggcgggccaggaggactacgaccgcctgc

SEQ ID NO: 203064 - DNA, 122 bp, Homo sapiens
tacatcacagacgcaccactgtaactgtaggcatattatatttttgaagtgcctaatcatcgaaagtgacagaaagcaataaactgtcctaatctatgccactggcaatgtggacctaaatg

SEQ ID NO: 203065 - DNA, 122 bp, Homo sapiens
atcttggtcttggcatgaggtgtgggaggagcgtagggctttaagccaggagactgggatcgtccttaacgtgatactttctagctttgtgacctttggaaagtcactttacatttggaaag

SEQ ID NO: 203066 - DNA, 122 bp, Homo sapiens
ttcaatcatttcggtgcccgaagggaggcaagagctcagttttatattgagacattacgccggctgaaggcagagaatgcgtttccctgccaggacctgatgcaatccattcaagccaacaa

SEQ ID NO: 203067 - DNA, 122 bp, Homo sapiens
gcccccgaccctccagccgctctccgctcctcagctgggacggccccgcccccggctcctcgccttcctccaccgccaaggtccaggctccggccccggtcccggccccgcaccgcgtcagg

SEQ ID NO: 203068 - DNA, 122 bp, Homo sapiens
ggggtgtgtgtgacagaggcctcaaaaatctggctgggggtgctaaggcaagcccatctgcgcactgtgccctgaggtgcaagaggatgcagggtggaagtcgtcccaagagagtccaggga

SEQ ID NO: 203069 - DNA, 122 bp, Homo sapiens
gatcgagctttgtggctctgttaattccgccctcttctccgcccccacaccatctgccagcgggaccgttaactggctcagtactcccttttgctgtgtcagtcctggaaggtcatgcttaa

SEQ ID NO: 203070 - DNA, 122 bp, Homo sapiens
ccgaggggtaggtggagagaggcaccgagtccagagccgggatataaatgcaccaggagccggggagcagaggagcaaatgagtgggggaaagtgtgagaggaagagttggagaaaagtcgg

SEQ ID NO: 203071 - DNA, 122 bp, Homo sapiens
agcctgctgtggccaaaaggtgggggtgggggggggtgggagtaacacaggctacacctgcgccttgcccagcctgggtctcgcctgcaccaccacgtaggcctgcccaaggcggccctgct

SEQ ID NO: 203072 - DNA, 122 bp, Homo sapiens
ttatgcaacagcagcggggggagagcgcaaaccagccaggactacgtgccggcgcgaaggcgctgcaatcaaagcagccaccttaaggtggcgagtcccatcctgacaaggcagcaaaagtt

SEQ ID NO: 203073 - DNA, 122 bp, Homo sapiens
aatgataaccttcgataggtttacaaatgctcattaagtcacccttcaagtttatcttcccggagccgataatcacaatgccttcagcttcctccgtgttacaaaaagcaaagcgaagcaag

SEQ ID NO: 203074 - DNA, 122 bp, Homo sapiens
agccgcttacgactgcagtccagcaggtccccgaggcagcggcaggtagtggggcatgggcgctcggcggctaccccagagggctgcccgagttccccgcgaccgccgctgtctgaccggcc

SEQ ID NO: 203075 - DNA, 122 bp, Homo sapiens
aataaaatgttagtctgggctcaggagagctgcagttacacagccccctccatccaggaccgtgatgagtagttcctcgcagggctccctggaaacgtgggtagtagatgaacaggcctcca

SEQ ID NO: 203076 - DNA, 122 bp, Homo sapiens
aagcggccccgggagctttgcttcacgtctaggtaaaacctctttttctggatgtccactcgtttggaggccagctcctggatttcggctgcgcccccggcctgattaggggtggctgaggc

SEQ ID NO: 203077 - DNA, 122 bp, Homo sapiens
taagatgtcttgccgaagtagcaagagcggagggtgactgtgtgagcaggagcgagagggcgccagctcctgcgggggaggttcctactgcgcgccccaccctgtgcaagaatgtcaggctt

SEQ ID NO: 203078 - DNA, 122 bp, Homo sapiens
gcagcaagaaaggcgggaccggggcatctcggggcggggcttggggctggatctatgagccgggagcggggatccaggagcgaggagccgggagcggggaacagggagtcggggagccggga

SEQ ID NO: 203079 - DNA, 122 bp, Homo sapiens
gctccagagctgggccctcactgctgaaggacactgtcagcttgggagggtggctatggtcggctgtctgattctagggagtgagggctgtctttaaagcaccccattccattttcagacag

SEQ ID NO: 203080 - DNA, 122 bp, Homo sapiens
cgcccgagcgtaggaccctccgtgctccatggccagacccatttgctcgatcccgccgtccggtgcaccgtccctgctcaccaccaggcctgctctggcccccgcctcgcaggggggagtgc

SEQ ID NO: 203081 - DNA, 122 bp, Homo sapiens
cgttccctgcaagctataagctttgtaagtggtgcccccagtgtgatcgccttgaagttacgcgtgaagttggaaaactcatcaattttcggggaatcccggtaagggacagtcctgactcc

SEQ ID NO: 203082 - DNA, 122 bp, Homo sapiens
cttggtgcacccatcacccgagcagcgtccactgcaccatatatgttgtcttttatccctcgcccccctctcacccttcccgccaagtccccaaagtccattgtatcattcttatgccttgt

SEQ ID NO: 203083 - DNA, 122 bp, Homo sapiens
ccgccaggaaccctcctccccttctcatctccccatctcagcagccctgcttcgattatccggcttttggattctccgttgtcctgggaactatccgggaccccctcttgcttctccagccc

SEQ ID NO: 203084 - DNA, 122 bp, Homo sapiens
aagcaaaaaagcagattatgaggcagctccacccctcccagcactggggctggggcctggcgagggtcacacctctgagtatgggggtggtgctgggcccccctctggggtcttcgatggca

SEQ ID NO: 203085 - DNA, 122 bp, Homo sapiens
cccagctgagctcaaccagagaggccaagggacgtggagcgtgagaggctgaggccttggcgccagcgccgtagatgcgtgtcagatttgacagctgatctctgacacaaggcgtgcaggag

SEQ ID NO: 203086 - DNA, 122 bp, Homo sapiens
gcaaagctacaggatggggtgcagatccacgttgggggcgcagacgcaggggactgactgcgatgggcacggcaagacttctaggggtgaccgacgcgtcctatatcacgaccgtggttaca

SEQ ID NO: 203087 - DNA, 122 bp, Homo sapiens
ggtgagagagactgaagttggggaggtgctctttcctgctgtctccccgctgagccaccacggtgtctactgaagcccgcagcacctatcagtggatgctacttgctctgggctctggtggc

SEQ ID NO: 203088 - DNA, 122 bp, Homo sapiens
ctggtccggaagcgctgtccccgcctcccgcatagctgctacccgccggtgcagcgccgccgactgatccaccagcgactcggcggccgcatcgtgctcccgtagcctctccagcagcgtct

SEQ ID NO: 203089 - DNA, 122 bp, Homo sapiens
cggggcgaccccccgcccctccgtccccatcggcagctcggcgctcagccctcacgcctgcgcccgcgcccgcccggacttcgggacattccctccagccgcgcagcccccgggacgtaacc

SEQ ID NO: 203090 - DNA, 122 bp, Homo sapiens
tcgggccctgtctgctggctccccacccgtgccgcccggctggaaccctaactcttcatccgggaagggctcaggaggaaacgcgggctcctatatccccagctacacatcgtggtaccctt

SEQ ID NO: 203091 - DNA, 122 bp, Homo sapiens
tggctccggcaccacactcagagaatctgctcggtgctggaggccgagatgtccaggagccgccaggccgcgtaggggttgagctcgtcctggtctcggcagagcgcccacacgtacagcat

SEQ ID NO: 203092 - DNA, 122 bp, Homo sapiens
gaccgtgtgtggctggtgggggtgggatttaatgggatttggcgggttctaaggtaggcgcgacgcacaggtggaggtagaggaagtgaagagtttaatatttaaaaggacctaaaaattga

SEQ ID NO: 203093 - DNA, 122 bp, Homo sapiens
gggggacgttcccgcatgtgagcctgcgggggacgttccagcatgtgagcctgcgggggacgttccagcatgtgagcctgcgggggacgttcccgcatgtgagcctgcgggggacgttccag

SEQ ID NO: 203094 - DNA, 122 bp, Homo sapiens
gcctcgcccattacatccagactgcgccccccttgccagaaatcggcaccgcccagcgagcgctgcccaggcccacccagatctggccggccctggcgacggggctgcaaacgcttcgtaga

SEQ ID NO: 203095 - DNA, 122 bp, Homo sapiens
agtggactcagaatgccctcaaagaacgtggaaacctttttacagacagatcgtctctcccggctcaactgcaattatcaagatgtccccctgcaattcctcattattgaattaatacctct

SEQ ID NO: 203096 - DNA, 122 bp, Homo sapiens
gtggactccagtccccaggttccgccccacggggactggggggaggggggaggcgccgcgcgcattaggcgctgacagtataccgaccccccctccggtgtgcacaggccaacacccataca

SEQ ID NO: 203097 - DNA, 122 bp, Homo sapiens
ggaagacccagtgcagaaggtgtggggcggcggcactgctggcggggagcgctgggaaggcgaggactaagacgagggcgtcaacgataactgggatgacgatcaagacttaaaaaaagaag

SEQ ID NO: 203098 - DNA, 122 bp, Homo sapiens
acccttcctaaggaatcttcccagtggggttggaggaagaccagcccgaggcctgtcacacggcaggtgcttggttattatggggtgcatgctattattttccatctacttgtccatcccag

SEQ ID NO: 203099 - DNA, 122 bp, Homo sapiens
agagtcttcgagatccagggttgctaatgtgacccagtttggaagtggccctgaagtccacggtgtgagtgtatggtgtaggaagaaaggcatcagggctaggggcatagctgaacggtaga

SEQ ID NO: 203100 - DNA, 122 bp, Homo sapiens
ggtttcacacagttcccggtagcttttcacataccctcccttcctggattgcacaggcaacgtcctccctcccctccctggggtccagttccccgcttagtgtgtgatgggggagggcactg

SEQ ID NO: 203101 - DNA, 122 bp, Homo sapiens
aacaacaacaacaacaaaaactatattaatactttaataccctaaagataatgagacaaacgtgcatttgtggaactgcatgtcaatcaggccagttccctgcagagggaactcccagcatg

SEQ ID NO: 203102 - DNA, 122 bp, Homo sapiens
gccggcatgctctggtggtcagtgggcttgtctttggttccacgtgcacctggttgagctcgttggccggtgctgaggcggctgctgtgacaccgcaggctggttcctgctccatgtattta

SEQ ID NO: 203103 - DNA, 122 bp, Homo sapiens
tgatgctgggaagcttccagttcacggcaacctccacggggcaggtaactggctgcagcccgccagtgacgcccctaccacaacctgccaactgctcccctacctggagacaggtgccccaa

SEQ ID NO: 203104 - DNA, 122 bp, Homo sapiens
ctaaatataaacgcatccaggctcaacggagacagaggcgtaactgcagcgctgttcctccgcaggcatgggggacgcgctctgccgatgtgggtgtcctgggagccggcactgcggcctct

SEQ ID NO: 203105 - DNA, 122 bp, Homo sapiens
atcctgggcccccgcccctgtaattcacgtcccctgaggatgtccttggaccccttcattcgttcatgattccccaagcctgaatacctcccagcctggaagcagtttcccatccagttggc

SEQ ID NO: 203106 - DNA, 122 bp, Homo sapiens
aggcttccccgcgattggggacacgcacacccagggccaccggagggacaggtggtcaggcggactcaggtcacaccggcggacgcggggccactcacctgggccggggcggggcagctcac

SEQ ID NO: 203107 - DNA, 122 bp, Homo sapiens
ggggagggagagaccggggcaagtgggagaacctggggccaaggcaggggccgcctcgggcgctgctggaccggcaggagcagtcgatcgcacccagagctgggaaaatgcgggcgccgtct

SEQ ID NO: 203108 - DNA, 122 bp, Homo sapiens
actgtactggtgaaaaggaggacagaccccgagaactgtgctggtgaaaaggacagaccccgagaactgtgctgatgaaaaggacagaccccgagaactgtactggtgaaaaggacagaccc

SEQ ID NO: 203109 - DNA, 122 bp, Homo sapiens
ttcccccggtccctggcgcaacagcagtgcaccgggtctcttggccaggccctttccgctcgcatcctccacgaaccaacactcgatcaccgcgggtcctgctgagacggcggtcgccaggc

SEQ ID NO: 203110 - DNA, 122 bp, Homo sapiens
agacgcgaatgtaaacagaaacacagtgaaaggcgttcggagagcctcgtgactgcggcacggcggcgagccgggaacatcagtgcgtccagagcaaaatgaacgaatgtacgcatgactcc

SEQ ID NO: 203111 - DNA, 122 bp, Homo sapiens
cacaccagggaccgtacctgatcgccaggccctgcgcaggaaggcaaaggcaaaagacagcgccgctcgggatcccactctggcgagcccctccacacctttgcccgcaggccgggaactgc

SEQ ID NO: 203112 - DNA, 122 bp, Homo sapiens
cccgggggaccctaaagaccgtcgggtgggggctgagggcgaggggcgggacaccggggccgcgggcggggcgcacccggaaccccgacagctgtgtcttggtggagctgtggactgcgccc

SEQ ID NO: 203113 - DNA, 122 bp, Homo sapiens
ctggttcagttggatgctgaagagtcatggatgctgggcctgtgggcaccgtcctccaggcgggagccaccgaaagttcttgagcagggcagtgaccaggtgtatgtttggagaaggtccct

SEQ ID NO: 203114 - DNA, 122 bp, Homo sapiens
gcgctggcagcgcaggcttgcgaccactgggccctgtacagctgcggcgacgaggctttgcggcaggttcccacgatccggcaactgaggtcccactgcctgacttaggcgcagtggcggtg

SEQ ID NO: 203115 - DNA, 122 bp, Homo sapiens
tctatccagggaaaggaaggccaagtggggacaacctactgaatgtggcctccagatctgcggctttggctcacctatcctgtgatgattttccttgctcaggaaataggatgggactgcag

SEQ ID NO: 203116 - DNA, 122 bp, Homo sapiens
agagatggtgggagaagccaacctgagacgctgggaccagagagagatagtgggagaggccgacctgagatgctgggaccagagagagatagtgggagaggccaacctgagatgctgggacc

SEQ ID NO: 203117 - DNA, 122 bp, Homo sapiens
tagggggaaaggagacattaagaaaatagatcatgttgttctgagttgctctctccccatcgcccgcccgcctcctcccactcacagcctccctctgtttgctcacccatacttacaagcac

SEQ ID NO: 203118 - DNA, 122 bp, Homo sapiens
cagaagcgcctgggacccgggaagcgcagacttaacacaacacagagcaaaactcacccccgcggtgggaccgtcactccacgcgacccgcttccgggtttgtgcgaatctgctctctgggg

SEQ ID NO: 203119 - DNA, 122 bp, Homo sapiens
aagggaagggtctcagccttactgagaggagcccctgtggaggaagcgggcctgcacctgcggcttccctgcaccccgcacgccgtgcccaggcacttcctccccaacacaagcaaaggtag

SEQ ID NO: 203120 - DNA, 122 bp, Homo sapiens
tttccctgctgggtctttgtcaagtaccttttccccaaaacttgatacggatgtgtaacacggcgcctgcttagcacggtgcctggcacccagtaggcgctcagtaaagatttgttgaacgc

SEQ ID NO: 203121 - DNA, 122 bp, Homo sapiens
aacaagtttgggcccacctgagattggggtgtagacggaaggagtggggagagatgcaaacgacagaacacaaccgaaggcctttttaaaagtcaggatccatagccttacttatcactgta

SEQ ID NO: 203122 - DNA, 122 bp, Homo sapiens
tgttgcggctggcacgcacaggctccacgtgaacggcctcgttgtacttgtccttgagcacgtagcccagctcccgaaactgtggcagtgtggtccagcacgtcttggtggtgcacgagcct

SEQ ID NO: 203123 - DNA, 122 bp, Homo sapiens
taatcgtactttttctccttttctttatttttgtcctctagatttgccaaaaccacctgtcgctcccaagccaaagactaccagtccactgacgccagtgaccgcacccaaattcccttcct

SEQ ID NO: 203124 - DNA, 122 bp, Homo sapiens
gatacctctccgctctggggaaacggccccggccagcgggatcatggagaaccgggggttcggtccccactcgccaaccgctgccggggacttgaggggcggagcgcagagcccgccgtccg

SEQ ID NO: 203125 - DNA, 122 bp, Homo sapiens
aggtctgcagcttcactcctgagccagcgagaccacgaacccaccagaaggaagaaactccgaacacatctgaacatcagaaggaacaagctccagacgcaccaccttaagagctgtaacac

SEQ ID NO: 203126 - DNA, 122 bp, Homo sapiens
aaacatgaaggagtgagcccttgccagaattgaaaccaagacgagtgcaacaatgaaaaacgcttagaacccacgggctggcagccagggcgttcggacttggtatgggcgtatcaacaaat

SEQ ID NO: 203127 - DNA, 122 bp, Homo sapiens
agcggatgtcggctgacttggctgggttcctgagggaccgggggtgcggacgctcagctgcgcagcttcctgctttaggttgacccccggagcaaaaacgtcggatatgaagcccttcggtg

SEQ ID NO: 203128 - DNA, 122 bp, Homo sapiens
gcccggaaggccaggcggggccctgtcggggcctgggcggggctggcggaggggccgggccgccccttccagcgagggcgggctgggcggtcgcctttaaaggcgcgggacccgccgcccgc

SEQ ID NO: 203129 - DNA, 122 bp, Homo sapiens
tctgtgcgcgtggctgtgtgtccacctgtgtatgtgtgtttgtccgcctgtctgtacatgcgactgtgtgtgcatgtctgcctgtgtgtgcaccgcctgtgtgtatgtgtgactgtgtccac

SEQ ID NO: 203130 - DNA, 122 bp, Homo sapiens
ctgtgaggcaccgtcagcatccttgcgtcctgtgtggctgtgaggcactgtcagcatcctcgcgtcctgtgcggctgtgaggcactgtcagcatcctcgcgtcctgtgcggctgtgaggcac

SEQ ID NO: 203131 - DNA, 122 bp, Homo sapiens
catagccttgggaaggagcagggaagggagggaagaaaaacagtaaggaatgcttaagtccggggctcctggtataaagctgcccctaagttaaaagttgggaagaacctcaaagagtgatt

SEQ ID NO: 203132 - DNA, 122 bp, Homo sapiens
ctttcccgggtcaggccgggcggggccggttacgcgcgcgccccctgccgtagtcgtcctcgcccccaaatttggatgtgtccccaggcatctgcctcctcaccgggccagcatgccctctc

SEQ ID NO: 203133 - DNA, 122 bp, Homo sapiens
ctactgtcccgtggccttcctcagctttgcctccatgctgggcctcttccctgtcacgcccgaggccgtcaagtctgtcctgctggtggtgctgcccctgcctgcctgcctcaacccactgc

SEQ ID NO: 203134 - DNA, 122 bp, Homo sapiens
accagcgcgagaaacgggagctggaaggcgtgatcctggagctgcaggagcagctgtgagcgcacggcctgccctaacccctgacccccgccgccccgaccacatcaccgggtgaaccccat

SEQ ID NO: 203135 - DNA, 122 bp, Homo sapiens
ctgcttttcatcaaggtcgaaccacgtagtaaacaacagaaataacttgttgtaataaagcgtggtgttgaaatgtttatcagcaagtccttttgactggcttcaaaaggtatatttgaata

SEQ ID NO: 203136 - DNA, 122 bp, Homo sapiens
agcaccgtcccggtattttcgctgcatcgattctggattctggattctggattctggagccgccgccgggaggagcgggaggcccggcgctccgggtctggcccgggcactgcggcgctgcg

SEQ ID NO: 203137 - DNA, 122 bp, Homo sapiens
agcacttcttgtattgtttttaaggtgagaaataggaaagaaaacgccggcttgtgcgctcgctgcctgcctctctggctgtctgcttttgcagggctgctgggagtttttaagctctgtga

SEQ ID NO: 203138 - DNA, 122 bp, Homo sapiens
gcccgtcggagacttccgcttccggggccgccgccatcgctctcccgggcttagaaggcccggctactgacgcgcagtgccagaccttacccctcacggtccttaagtctcggtcgccctcg

SEQ ID NO: 203139 - DNA, 122 bp, Homo sapiens
acaaagataacagtacctagagagagagtgtgtgtgagtgtgcgtgtctctgtgtgtgcacgtgcacgctcatggccaaatgtgcgcactctacataaaggaggcaggagttcctataggct

SEQ ID NO: 203140 - DNA, 122 bp, Homo sapiens
tttgtgatgggcctgagcgtcatcggctctgtcttcaatatcactgccatcgccattaaccgctactgctacatctgccacagcatggcctaccaccgaatctaccggcgctggcacacccc

SEQ ID NO: 203141 - DNA, 122 bp, Homo sapiens
ggaggccatggccgctgcattccaactggcgagtaagtacctgggcgggtgtggccaccgcgcccttgccccctgtggccttctggtgccacaggagggtcctgaggccttgggtggcctgg

SEQ ID NO: 203142 - DNA, 122 bp, Homo sapiens
catggtacccgataggtcgtttttcagctgttggccccctcccccgcttgccacttttggcgcccaagtgctcattgttcccatctgtgtgtccacaggttcccaatcttcagctcagactt

SEQ ID NO: 203143 - DNA, 122 bp, Homo sapiens
gtggttaagaaaataaaagccaataaggaaccggaaaatgcccctaatcccagcaatagccgcctggtctccgggcggggcagggttccagctccgggccggtcctggctgtgctttggggc

SEQ ID NO: 203144 - DNA, 122 bp, Homo sapiens
ccccacggctggcggggctcccggtgcaggacacacagacaggcacggccgccccgcccacggccaccaagggctttgctttgtccccagaggtgcccttcgatggggtcacacggcagatg

SEQ ID NO: 203145 - DNA, 122 bp, Homo sapiens
cctgcgcctgtcctccagctcagcaagcacaaagatcactggcccaccaaccgggccctccgagacttccagacacagccttgagggacagcagagaagagagaagggtccccagcacagaa

SEQ ID NO: 203146 - DNA, 122 bp, Homo sapiens
ctgtccccgcctccccttaacctgctagctgaggtggggagcggcgggaggagccggccgcgcggtgattggcggaggccgctcccagcccccgacacgcgcccctcccccgctccccactc

SEQ ID NO: 203147 - DNA, 122 bp, Homo sapiens
cccagttgtgtttttctaccttctaaaccgaacattatccccttccctgattgtcttggacgtgaataaaggtgtctgaaaacaaaagtgtctgcagacttgcatggcccctccgtggcccc

SEQ ID NO: 203148 - DNA, 122 bp, Homo sapiens
tggaagctggctgctgttctcggcctctgaccccaacaggggaaccaccggggatctcatcgggcctggccttgtgctgtctactgagaggccagccctggtgggcacagatgcactgccca

SEQ ID NO: 203149 - DNA, 122 bp, Homo sapiens
tcttatattgggtcatcaaggcagttgttttcccaattatgctgctttgtttggagattacgtgtctgcattcaattcattcatgatccaacaaatgttgatctgcacctcctgtctgctgg

SEQ ID NO: 203150 - DNA, 122 bp, Homo sapiens
acggcggttcgtccaagccggacgcctgcagcagccacctcctgggcctcacggcggggccggagaaggccagggctggggcggggcagccgtgctcggccccgggccagggtcccccggta

SEQ ID NO: 203151 - DNA, 122 bp, Homo sapiens
tgacctcgtgatctgcctgcctcggcctcccaaagtgctggaattacaggtgtgagccaccgcgactggccagattcaagatttgaacccaggtcctcttggtcccagaggcccctgtttct

SEQ ID NO: 203152 - DNA, 122 bp, Homo sapiens
cgttcatggcgtactggattgccagtcccgtcatggtgccttgcgccagaggcaccaggtcgcggatggcgcgctccatgtcctcgcggcgagagaacgcgcggagagggaagacgctctgc

SEQ ID NO: 203153 - DNA, 122 bp, Homo sapiens
tagggagacttttaaatccttcactgctactatattctcaccgagtgaggagccactgcacgtgccttttaaagctttcaaaggagggctgagtagttactcaatctgttactgatgcttac

SEQ ID NO: 203154 - DNA, 122 bp, Homo sapiens
ggtggacaggcaggtgtgtcagcacaaccctgagcccctgagctcaagtgcagggatggccgtgaagcaggtgatggggaccctggcttgagcttcatcggtagcggggctggggtggacac

SEQ ID NO: 203155 - DNA, 122 bp, Homo sapiens
ggaaaatcacaagatctgtgacttctcaaatttaacagaacagtacttaccatgaagtggcgtttcattttttatagccctataaaacatgacagtttatatttttagaaaggatctggcaa

SEQ ID NO: 203156 - DNA, 122 bp, Homo sapiens
aaagtgaaataattttttgcaaaggggtttcctcgatttggagctttttttttcttccaccgtcatttctaactcttaaaaccaactcagttccatcatggtgatgttcaagaagatcaagt

SEQ ID NO: 203157 - DNA, 122 bp, Homo sapiens
tcgtggtagtagcgccggtggtcacggccagggatgcggctctttccaggcctcgaggcccgggcctcacagtggtctgaatatttcctgcctgaagatgctggtcccctggccctggagga

SEQ ID NO: 203158 - DNA, 122 bp, Homo sapiens
gcggcggcggcgaggaggacgactgcgtggactcgggcgccgagaccggagggtgagccgcgccgggccgggccgcgggcggggggcgctctccgagttgcgcggcggctcctccccggacg

SEQ ID NO: 203159 - DNA, 122 bp, Homo sapiens
aatagtgccttcagcttctaatcctcctgagtctttgagaatctaatttcctttcatctgcggcactaggtaaagtcatgaagagctaatttgggtgaagtcctggtgacatcataaccaca

SEQ ID NO: 203160 - DNA, 122 bp, Homo sapiens
caccgccgggcctggggcggggcgttcaggaggctctgggaaaggcggcggtggccggcgcggggggcgcgcaggcgcagagcggcgggccgggcgtccgcaaggtggcgcccgcggggcgc

SEQ ID NO: 203161 - DNA, 122 bp, Homo sapiens
ggcagggcccaggaatcttgtctctcagtgcccaccatgtacaggcatcaggcaatggcccgtcccagcgtggagcatttgctgttcaccagagccctggtgcgggaggtctgcccgggagg

SEQ ID NO: 203162 - DNA, 122 bp, Homo sapiens
ggtcacatatactgacctctgacacccttagggaagtcagtgggagtggtaaccaccacacgagtgcagcacgcctcgccagccggcacctacgcccacacggtgaaccgcaactggtactc

SEQ ID NO: 203163 - DNA, 122 bp, Homo sapiens
ctgtaaagatgagaaatctcacaggctctcttgctttagccatggaaaagaatcattaatcgaggataatgttttccaagttcaccgtgaataacacattttttaaaagcccacacttttca

SEQ ID NO: 203164 - DNA, 122 bp, Homo sapiens
gacaaatgtagagacaaatcactgagtgcctcagcctagcatcatcagttactaggtaaacgtcatcctgccttagtcttagacaacaggtctccttgtctctcttaattctttttctgcag

SEQ ID NO: 203165 - DNA, 122 bp, Homo sapiens
tgagactcattcctcaggaacaagggtcgggtgtcaaggagaccttttcacaccagctcccgtcccccgcctacggtgggtgggatcgcgcggcagagacaaaggagatcagtagggccgga

SEQ ID NO: 203166 - DNA, 122 bp, Homo sapiens
cgctctccgtcccgaggcaggagatggcctggttgacccttcgagacaaggcggcaaaaccggtgctgggcttgcggggcagggaatcaaggttcctccggttgctgtaccgtcccgcccgg

SEQ ID NO: 203167 - DNA, 122 bp, Homo sapiens
gggaccgggggcggggcggggcgaggaaaaggacttcgaccagattcttaaagagacaggcgcctgcccaaccccgccgcccaagtttgggaacaaaacgcgacggtgttctagagctttcc

SEQ ID NO: 203168 - DNA, 122 bp, Homo sapiens
cgggtggggcctagggtgggactcggagtacagcggcccacctagccatctcccaggagccgtgtcctacctaagcccagtgggcatgtgaagcagagggcagcccttgaatgcgcggcggc

SEQ ID NO: 203169 - DNA, 122 bp, Homo sapiens
acccgctgacatcatatgctaaatatagctcaggctttgctttaggtgaacaaataatgccgctggacaggaataggttctcttcagttacatggttattatgatcggctgtcaggcttgtg

SEQ ID NO: 203170 - DNA, 122 bp, Homo sapiens
ggtgagccccgcggaaggacgacgacgctcaccttgccgctgcaaggtcgtgcgcagctccgcctcgtagttgtgtctgcacaccttgtccaccgcggcccgctcctgctccaagaagtcct

SEQ ID NO: 203171 - DNA, 122 bp, Homo sapiens
ccgggtcggagatgctccagccccgtcgcccccagctctgcctggaaggacccaggagcccggcgctcactgctgtccctgcagaaatggggagaagccgtgcctccctcggttgtaagcag

SEQ ID NO: 203172 - DNA, 122 bp, Homo sapiens
gatccaagtggagacatgcagatcacacaagagatcggactctccaggatccagccttgccgctaaactcaccaagggtattaacatatctaaggaaaaggccgggcatggtggctcgtaat

SEQ ID NO: 203173 - DNA, 122 bp, Homo sapiens
ggtttcactgaactcattggctggtctggtaaaaggtagcggggtgcttccccagctggtcgcaggaatagtgcgttttctttgtcgcgcaaggggcgtggttcatttaagccggtagttga

SEQ ID NO: 203174 - DNA, 122 bp, Homo sapiens
agattacaggtgtgagccaccgcgcccagccaggaactttttttttgaaactcaatttcccgatcggaaaatagagtcccgtttcccagggtcattctgaaaattggatgtccacgtttcct

SEQ ID NO: 203175 - DNA, 122 bp, Homo sapiens
cccccgacccaccccgcgaggcagaaggcgggggcgggacagcgaggtcaggccgggttccgcaccccatgccttcccaacgcaccacccgcaggcgaggaagaggagagacaaggggcccc

SEQ ID NO: 203176 - DNA, 122 bp, Homo sapiens
gctcccaggacgcagaggcccatggagcggccctgccaccgcatggggtgctgcagtctgcgtaggaggtaccaaagggcagagcctctgtgggaagcctgtggacgcacttcccaatctga

SEQ ID NO: 203177 - DNA, 122 bp, Homo sapiens
actatttctctttcatttgtggggagaagacaccgttaacgcccccaccccccgctcacacgcccaccctcgccggtgccccgggcctgaacgcggcacatctcaaccccctcccacgcccc

SEQ ID NO: 203178 - DNA, 122 bp, Homo sapiens
gaaatgcatcttcatggctgagcggtgtcttgggagtagcgctgggaacccgacctgcggcggcgggcggtgcgcggctctgaactcggcagcggtggacgcagcgcggcctgccacgcgac

SEQ ID NO: 203179 - DNA, 122 bp, Homo sapiens
ggagcaagagccgcttgtctcgggggattccgcttggggggttcccaggggtcgccctggcgctccggccacaacttgggcggctctgtgcggcggccctcgcctgcgcctttgcgcgccac

SEQ ID NO: 203180 - DNA, 122 bp, Homo sapiens
ggcggtggaggtgggggcttccccccagaagacatccacgttcctaacatttatgtaggtcgcgtgataaaggggcagaaatacgagaaacgaattgagcgcttaacgatccggaaagagga

SEQ ID NO: 203181 - DNA, 122 bp, Homo sapiens
ccccggcaggtcagagaagctttggggcggggccaaggttggcccctgcttgggaggagccgggatgcctctctcacagtgatgcagagaggaatttgctgacagtcccttgccaggtgggg

SEQ ID NO: 203182 - DNA, 122 bp, Homo sapiens
tacagacctgtgtttatgcatgagttagtttacatacatacgtttcctagctctaacttccgtgggggcaagaagcagtgacacccactatgaatgagcacacctagtacccaaatcttggt

SEQ ID NO: 203183 - DNA, 122 bp, Homo sapiens
gcaaatgtgggtttttctatatgagagggttgcagaaaatgaagcaaatttccaagggcccggactgcattgctttttacctagaaaaaatgtaaatgctttagaaatctgtttggccaaag

SEQ ID NO: 203184 - DNA, 122 bp, Homo sapiens
tcccccagcgcgcagaggttagcgtgtcgctgatcgtgtggcaggtgaaggcagcaggagcgcggatttgggttagaggccgtgtgcgcccacagttgtctgaaggagagacctatttttct

SEQ ID NO: 203185 - DNA, 122 bp, Homo sapiens
ccgaggggcgcgccccgtccgctgccacccgcgggaggagcctcggaaggcggcgcaccgcgccgcacactcagtccaagaacccgcctcgcgtcactgtcgccgtcagggccgcggagcca

SEQ ID NO: 203186 - DNA, 122 bp, Homo sapiens
gaagcggaagagaaatagccattctagatacctgcaagaaaccactcatgtgcatcctctcgtttaatcctgacaagcacccagctagaatagaaggctctattataattataaagatagga

SEQ ID NO: 203187 - DNA, 122 bp, Homo sapiens
agggccgagctgggggtcagactggtgacaaaatggagttcccctgggtcagtgtccaggcgagcaggtctgtctgccaggatgaaagacttggcccctgcgggaggctcagagatatgagg

SEQ ID NO: 203188 - DNA, 122 bp, Homo sapiens
cacctgctggagatggtcgcacagcgtcttcatgtcccttcctcatggcacggcacggcacggcatgcccctgctctgtggccacactgccccatgctcacacacatgcaccacagcccagg

SEQ ID NO: 203189 - DNA, 122 bp, Homo sapiens
caaggatggtgaagttcttaagagaaactgaggaggaagagaggatgatgtggtgggagacgtgtagagagtccttgtagatctgtcatattgaaggggactatggtcccagaggtacagat

SEQ ID NO: 203190 - DNA, 122 bp, Homo sapiens
gatttctgcttggtctcctgctggggttggtggtactcgttcccaccgcacagaacccggcgcctattattggccaagaaacttgagcagcctgttttgaaaagtccctcgctcagaaatgc

SEQ ID NO: 203191 - DNA, 122 bp, Homo sapiens
tctggtgcataagtctccgtgactcacctcagaagcagagacaagtacccaatgtctccacgaatggcctcaggagagaatggcaaccagtggacatcaaatcaggatgcttttgcacaagt

SEQ ID NO: 203192 - DNA, 122 bp, Homo sapiens
cgcaagcactggcagtaacaccacggcttcagacagcttaggaggttctgtccccaaagccgccaccaccgccacccccgctgccaccaccagcccaaaagagtctagtgagcctcccgctc

SEQ ID NO: 203193 - DNA, 122 bp, Homo sapiens
catgaagagaaagtccgcctcctctgggccgcgtcctcctgttgcaggtgaaccgagttccggtctccattggaaaccaaagcaggtaactttgccctgactcctagttaggaagccatgct

SEQ ID NO: 203194 - DNA, 122 bp, Homo sapiens
aaaacaccgttcaagccagggtatgtcaatacatcaagtgtgatgctgttaaatatgaaccggaaatactgttttgaaagatacatttactaatcacttcaacacgtacactgtaaagttgt

SEQ ID NO: 203195 - DNA, 122 bp, Homo sapiens
gctctccaaagagatgggcgacggggaccctgtgcgagccgtcaggctttgggggaaccccgtccccctcccgcgggggcgccctttccctgcacttcacctttcacgctcgcacggggctt

SEQ ID NO: 203196 - DNA, 122 bp, Homo sapiens
gggagtcaggaccctctgcctgctctctttcctctttagaaatggcagttactggctgggcgcagtggctcacgcttgtaatcccagcactttgggaagccgaggtgggcggatcacctgag

SEQ ID NO: 203197 - DNA, 122 bp, Homo sapiens
cctggcacctccctgtcctgggctctgcaggccaaactcctcccctggtatggggggaggcgagcagctgcccggaaccttccagtccttgttgctggagccagtagagcctgggcagtggg

SEQ ID NO: 203198 - DNA, 122 bp, Homo sapiens
gctgtgaacggtctgcagctgtccccgttctttcagggacatggcagccaaaagagcagtcgtttttccgctcttatttttgtgtgtgtgctgtggtcaactgttaactccccaaattgggg

SEQ ID NO: 203199 - DNA, 122 bp, Homo sapiens
aatggattctgtcatcctgccaaatgcagacctcgctgccagggcggaactgggcgaatccgatttattctgtttggttcaacaagtgcttaaggggcgctcaccgagtgccaggcattttg

SEQ ID NO: 203200 - DNA, 122 bp, Homo sapiens
catgatccacccacctcggcctcccaaagtgctgagattacagtcgtgaaccaccgcacccggcctatattgcaaaatttttaaaataggtcaagaatttagttgccgggcacggtggctca

SEQ ID NO: 203201 - DNA, 122 bp, Homo sapiens
gatggctcttattattttgaggtatgttccttcaatacctaatttattgagagtttttaacgtgaagggatgttgaatttttaatgaaagcttttctgcatgagataatcatgtcatttttg

SEQ ID NO: 203202 - DNA, 122 bp, Homo sapiens
cctttctctttctcgtctgttgttagccgctttgctgacactggctcgcgcccggagtcacggcgatacacaggctttcattgtgctccgataggagagggagagaaagagagagagtgaga

SEQ ID NO: 203203 - DNA, 122 bp, Homo sapiens
gagactccccttcctgagcctgggtttctcctcattctcacttgagaccaatgctgtcctcgcctagtgggggccggcgtcggtggggagctgactgagtccgaggccgtcgagtgaaacca

SEQ ID NO: 203204 - DNA, 122 bp, Homo sapiens
agatggggctgtgaggccatgggcgggtgggtgagggctccagatggagctgtgaggtgccgcccaccccctgcccttgaagtggttgcccagcgcactctgcctcagccaccaccccacct

SEQ ID NO: 203205 - DNA, 122 bp, Homo sapiens
actgtcctaatgaatgtacaattttgcagacaccagttagtctgggatcttgcctatagtcgttactcaatcaatattacttgaactgaaggacaagacagcaatctgtgagaccaaaaaaa

SEQ ID NO: 203206 - DNA, 122 bp, Homo sapiens
catttcactccctcacctcgactccgcctcttcctggaggatacgatcttccgcttcttacgtaagggctgctgggtgtacccgccactggaaccccatttattcgactttgttactttaat

SEQ ID NO: 203207 - DNA, 122 bp, Homo sapiens
aagttaattcctttttatcctgagtttattttaggagctagttaaattgcagggagagtacgtgaggttatactcactacttcaaagagaaggaaactgaagtaggaagaggtgcccagtaa

SEQ ID NO: 203208 - DNA, 122 bp, Homo sapiens
aaggggtggaaggaatgtggtaaactcctaggtagaaggaacagcaggtgcgaaactgtgcgggaagagatgggaatcagagaaattttaagcagttccctgttcctggagcactttcccag

SEQ ID NO: 203209 - DNA, 122 bp, Homo sapiens
tttgatggcgtggcagtcgtgacacccgaggctctcctttggggcactgtcctctgtggccgtcagtggccctgggccctcctcccagccagtctcgccgccccagagcttcaacaccactg

SEQ ID NO: 203210 - DNA, 122 bp, Homo sapiens
gcagcccttactctcagggtcagcgccggctgggaaggccgcgacctaaccaggagattacgaacaatgtcaccagggccacagcggagctcctgccaagtcaagcaactcatggaaccaac

SEQ ID NO: 203211 - DNA, 122 bp, Homo sapiens
tcctcgggactcaggtgattatgcgggccttcagccgcgaggcactcgaatgctacgtgccggtgatcaccgaggaagtgggcagcagcctggagcagtggctgagctgcggcgagcgcggc

SEQ ID NO: 203212 - DNA, 122 bp, Homo sapiens
taggcttggttaggggatgagggatagcgatagtctggtgtggaagcatgataaagcatgcggtggaacagaccctctgaggagctaaagggaggaaagcaagcagtccatgcttaaacatg

SEQ ID NO: 203213 - DNA, 122 bp, Homo sapiens
gtctcttatgttatttccaatccttttttttttttttaacgctgatatattttgaatttacgaatgtgaaagctgaacttcaaaaaataaagggagaggaaacaaagctcgtgaaaaatatt

SEQ ID NO: 203214 - DNA, 122 bp, Homo sapiens
gcaacgcgcggaccaacggggtaccagcgcctgcgcgacctctgactgttggcgtggctccgccccctgtctggggaagattgtgattggcccacagtaatccaccgggaaagaagcgcagc

SEQ ID NO: 203215 - DNA, 122 bp, Homo sapiens
tcattttaatacaaacatgccatttaatgtaaaacagaaatattgattttattatttggacggtgcatattctttcggtatgttttcttggattaacttttgcttagaactaaaaaccaaag

SEQ ID NO: 203216 - DNA, 122 bp, Homo sapiens
tactccggcgacctccagatgttcccgacagtgcggccatctgcttagattgctggggcgcgcagggggagggggcagggatccgggatgcaggaagctgtgagcgaggccaactagagggg

SEQ ID NO: 203217 - DNA, 122 bp, Homo sapiens
ttcgcgcctttgtttttagttttggaaggggcggagttgaaatggctgcgccgcggttgccgaagcaacgctttggttacttccgttggtttcaatgcttccgggttggcgctgcagtggcg

SEQ ID NO: 203218 - DNA, 122 bp, Homo sapiens
aatccaaattgtttttccattccacggacaagctatagaattagatgcctatcctggctacggtcagaggaaagaaaatgggtgagaaccaattccagggaacgacccacggagtttttatt

SEQ ID NO: 203219 - DNA, 122 bp, Homo sapiens
tctctcccctggaaaggacaccatgagcactgaaagcatgatccgggacgtggagctggccgaggaggcgctccccaagaagacaggggggccccagggctccaggcggtgcttgttcctca

SEQ ID NO: 203220 - DNA, 122 bp, Homo sapiens
ccgcgacagtggccccgcagtaagttggcaggagcgagtcccctccgttctcgcctcccccgcaccttttgaacttgttgctgctgctctgctcgcctgcgcctggcttttggaaggtgaaa

SEQ ID NO: 203221 - DNA, 122 bp, Homo sapiens
ccagcccctccctatgtctgcagcgtccgtgtgcctggccctgcgcccctgcctcaacggcggcaagtgcatcgacgactgcgtcacgggcaacccctcctacacctgctcctgcctctcgg

SEQ ID NO: 203222 - DNA, 122 bp, Homo sapiens
agtcgcacaggaactgtggactgggacaaggattccacggccagtccaaagcaattagggcgggatgggagggggttcatgagccttgctagggtccggggtggtggggggctacagactta

SEQ ID NO: 203223 - DNA, 122 bp, Homo sapiens
gctaattataatggctggctccatgatggggtcaagaaatagacccctatggacacccaccggagcccctggaatgtccctcccttgacatggtcccaaagaaaatccaaatggctgctgaa

SEQ ID NO: 203224 - DNA, 122 bp, Homo sapiens
taagtgaataattgacagaactgtatttcctttttaacatcctgtgtcctcctgtgtcagcgagtagtggagatactagaaaaaaaccacttagcaaatgagctgcatgtaacgtaagggga

SEQ ID NO: 203225 - DNA, 122 bp, Homo sapiens
gagaaggtcgggggcttggctctgcctaatggccgcccggggaattaagctgggggtgagcgcagcggcggcggcctgggcctggcccctgctcgcggcgtgtttccggggcgttcgttgca

SEQ ID NO: 203226 - DNA, 122 bp, Homo sapiens
gcaggccccaccccctccagcctcacagtgtttggggtcacccattctagcggggtgaggcgtcgccttgtgggtgcggttggcatttccctgaggtctgtggacactgagccccttttcct

SEQ ID NO: 203227 - DNA, 122 bp, Homo sapiens
tgttgatgggctggaagatgatggcgccactctgctgggagatgggccggcggttgcccacgtagcagcgcaccaggccggggatggagtcgaagctctccatctcgaactggtactgcacg

SEQ ID NO: 203228 - DNA, 122 bp, Homo sapiens
tttgtcagtttccttatttgcagcctcatctcatctccagacccactgtgctcctggactcgctggcagtcccagctctcgccttcactgtggtctgtggacccctgcactgagcctcgtgt

SEQ ID NO: 203229 - DNA, 122 bp, Homo sapiens
ggaccggggagctgcaccaccgcgttccgggccccgcgcctgggcttcgcctcgctgcaccgcgcctgcttgctcctagcgggagcccagagtctccgagtctcctcaacagcttcgcgaca

SEQ ID NO: 203230 - DNA, 122 bp, Homo sapiens
acgctggcttcaacgcgactccgacttaggttcacgcgccgcttccgcctcccccggccccgccccgaccccgccccggcgttcgccccacgcctcggccctccccgtacagccccgcgctt

SEQ ID NO: 203231 - DNA, 122 bp, Homo sapiens
tacctccgagccaagcccagtggtggtcaaaaactacgaataccaggaagcaccgcggcgcggcggcccagagctccgcgcgcaggcctccccggcgcgccgaggccgccgccgctggaacc

SEQ ID NO: 203232 - DNA, 122 bp, Homo sapiens
cagctggaaacctcaggttcagggtcagggccggctcggatggccgggcaggagccacgccggccccggtgctcccagctgcgggtatcactggacgccaccccggggcggccccgccttgc

SEQ ID NO: 203233 - DNA, 122 bp, Homo sapiens
gcatttgggccgtaccacaacctgtagggtcatctgggtctgaaacgggcaccagcgacgcgggagcagggactgacgcccctctagcaaagcatctgtggtacatcccagacccggggctc

SEQ ID NO: 203234 - DNA, 122 bp, Homo sapiens
tacccctactgccaggtgggcaggcgggcctcacgggtcccagagaaccccaggcaggggcggtgggagagggcgagggaccgggcaccccacacgcctccctctctcacgcagggcagggt

SEQ ID NO: 203235 - DNA, 122 bp, Homo sapiens
taatgtatctagctgagaagaggagaaaaagagacaacacaagaccagctgagcatagagcggacagtagtaacaaaattggagtgtataaattaactgacatagtatatacatatgtgtat

SEQ ID NO: 203236 - DNA, 122 bp, Homo sapiens
ggcctacccactcctgcccttgagagtcaacagtgttacaaagagctcagacagctgactcggatccaggcctctgtctctccccgtctccccctgctcttggccctgtgagcttgtcagat

SEQ ID NO: 203237 - DNA, 122 bp, Homo sapiens
ctgtctccaggcctcagtttacccgtgtgtaaatgtggaactaactgatttcccagggctcgggcgcctcacccgggccaggtggcgctctacccaaggggcgcgaccaaatcagtgacgtc

SEQ ID NO: 203238 - DNA, 122 bp, Homo sapiens
ccgagcactgcatagggtaagtgctggaagccccggcatctccagtagtgaaatcaatttcgtctgccatggtgggcaggggagatggtagtttttccgtgggaactacacaaaaagtttgt

SEQ ID NO: 203239 - DNA, 122 bp, Homo sapiens
cacagggctgcccctcagaatgtgacactaatatggcactgggaccatcggcagctcctccgcccttcccatcacagccccggaagtcccattgtacctccattggaacgagagcccatcag

SEQ ID NO: 203240 - DNA, 122 bp, Homo sapiens
atttactaaatgctactttgtgccagagttttacactttaaaatggtgaaatttaggttacgtatattttacaattaaaaaaatgaagaaggctggaaggctggatgtggtggctcacacct

SEQ ID NO: 203241 - DNA, 122 bp, Homo sapiens
ctcctattcatagaaggcccattgcaacccactggtacagaagagaaacaaagtattcagcggagaataccctagctcaataagcggtacaatacagtaagggaaatagaagtgacatgcga

SEQ ID NO: 203242 - DNA, 122 bp, Homo sapiens
gcagtggagctgctgctccccggcaggtcctgggacagctgtccacacagctctggcactcgcccttgtgggtgtggccataccccccaccaggccccaggcccctggcaggctgaagaggt

SEQ ID NO: 203243 - DNA, 122 bp, Homo sapiens
tttttttttttggagagagggtcttgctctgtcatccaggctagagtgcagtggcacagtcgtggctgactacagcctcgacctctcaggctgaagcagtcctcccacctcagcccctagag

SEQ ID NO: 203244 - DNA, 122 bp, Homo sapiens
acggtgtggcagacacagcctgagtgtcgtggcgaggtcctggacctgcacccgggttcccgtcccgcagacacagcgaggcagcagaaaccgcagtgcctgtgctccagcacgcccgcccc

SEQ ID NO: 203245 - DNA, 122 bp, Homo sapiens
acaatcctatccacgttctcctgccagcttgggtggttttcaaaccgagagggtaggacgcggcacaagaagcaactggtatgcacttaaggcgtgaataagcttttgactttgaggcccac

SEQ ID NO: 203246 - DNA, 122 bp, Homo sapiens
ggggtgaccctggctccggaagttgaatctctctctgaagaaggacagagtggccacacgcggttcctgggatccagcctctaaccctcggaacaattgtgagaaaatgcccaggggcagtt

SEQ ID NO: 203247 - DNA, 122 bp, Homo sapiens
gagacggggacttggggaaacagcaggccttcccgacgcatgggtgtggcatttggggttcggattctccaaagccagagtccgggttggggttcttgaagctgccctgctgccattcttga

SEQ ID NO: 203248 - DNA, 122 bp, Homo sapiens
gcagggttactgcgcacccgagaccccgacctcacgccacacacaaacaacagccgcccacggcagggaggtgcagggtcactgcacacctgagaccccgacctcacatcacacacaaacat

SEQ ID NO: 203249 - DNA, 122 bp, Homo sapiens
tgggctggctgctcttgttgtggtgctgctagggagtgcgtgtttggagagggggcggggcgggcttgtctccttgacacttgagtggggaaggatcctacaagatcctggttccccgagcg

SEQ ID NO: 203250 - DNA, 122 bp, Homo sapiens
gaggagcagcagaaggagggcgaggccgaggtcgcggagcactggttttccaagtgggagcgccagtgcctggctgaggccgagcaggaggagcagctgccccccgagctgcaggaggaggc

SEQ ID NO: 203251 - DNA, 122 bp, Homo sapiens
gcgggcagggagggcccttggaaactgacagggctggagtatcctgctgggtttcagccccggttcctgcaggcacagctgccaggctctctgttcaccttcctgcctctggtttgccccgg

SEQ ID NO: 203252 - DNA, 122 bp, Homo sapiens
agggggtctgtttaccgtctcaagatggccgtgtgggctttgttctgcgggcccggaggccgcccgcccgccccgggcccagcgcccggagtcggcctctttggggacccacgcgccccgat

SEQ ID NO: 203253 - DNA, 122 bp, Homo sapiens
gaagaaagcagtttctaggtgggtgcccgtcccgtctgctctcgccgtctgctgggattccgagaaagaagatgctggttgctcacggtatgctcaacccctctgccccacggcgctgcagg

SEQ ID NO: 203254 - DNA, 122 bp, Homo sapiens
ataaaaatccttgaccactcgctggccggagggtggagagggctgcagtgttattcctaacggaatgaaggacagctccagggactgggctagctcctggtccccagggaggcagcagcaga

SEQ ID NO: 203255 - DNA, 122 bp, Homo sapiens
tccttccagcggcactccgagcccagcacccccacccagtacagcgcggtgagaactgtacggacccaggggctcttcagctatagagaagactatcggacccaagtggacacctccaccct

SEQ ID NO: 203256 - DNA, 122 bp, Homo sapiens
ccctacctgtccggccaggcctgagcacagcagcagcagcagcggcggcgggaccgtgagcggccacatgacgcgcccctagcccggcgtcccgacccccgcccgccctagcggcgcctcgg

SEQ ID NO: 203257 - DNA, 122 bp, Homo sapiens
cccacagggtgctggggagcgactgggcggctccgccgcgagcgtctttgaattgcgcgccgctgcaggaaaccaaaaactccctagcaagagggtttcaaaaggtttctggaaaccaccga

SEQ ID NO: 203258 - DNA, 122 bp, Homo sapiens
ggcgcggcgtcgcccgttccggggcgcggggaccttggtgcacagagtcaaattggcactcggccgtcgccgcccccacggttcggggccaacctaccggcgggcgctcctccgcggaaaag

SEQ ID NO: 203259 - DNA, 122 bp, Homo sapiens
cttgcttttccatttacatcctgctttagacagtgaggcatgataaacatttgagttattcgtggattgctttgaactctgagtaaaagatgcatatacaagtctcctgtatttttgtttat

SEQ ID NO: 203260 - DNA, 122 bp, Homo sapiens
agtgatccaccctcctcggcctcccaaagtgctggaattacaggcataagccaccacacccggccatgaaattagttcttcagaaaaacttatctttgaatggtagatatggcttatttcta

SEQ ID NO: 203261 - DNA, 122 bp, Homo sapiens
ccccaagggcccaggtttccctctaagtcagtaccactttcatttcaggaaggagaccaccgtggatgggggctgctgcctgcaggacccgagacctgaaaactgaccaatcaggcagctgg

SEQ ID NO: 203262 - DNA, 122 bp, Homo sapiens
tcaggagtgacaggaggccccaggcggctgcagaaccttcctgagacaggagggacttggcgtgacgggccgagtggtccctgggcatctgaatgtcctcaccccctattttcttctttatt

SEQ ID NO: 203263 - DNA, 122 bp, Homo sapiens
tattccactggagacagcgggacgtccagctcccctctcggtgagtgagtgacgctgtctcggctcactcggttatatctgctgaacacaagagcttgctgtttacgcaacaccaccttcgc

SEQ ID NO: 203264 - DNA, 122 bp, Homo sapiens
gccgggtggagggaggagctactgagaaaggctgtgattgtccaagcctaggtagggccacggagagttccttacaaaccccaagccggggatgatgggtactgctaggaagaaacctagcc

SEQ ID NO: 203265 - DNA, 122 bp, Homo sapiens
gttgaatccagcctgccacctgtttttgtacagctggcagcaagctaagaaccgatttcacgtttttttaatggctaaaaagagaatattttgtggcatgtgaaaattatatgaaattcaaa

SEQ ID NO: 203266 - DNA, 122 bp, Homo sapiens
gcgggcagggcctgaacagatcgtcacatctaatgctacccagtcacttcagccttgccccgccccatatgccaccaaccaaccaggggagcacctgcgcagcaaacctcagcagcccccat

SEQ ID NO: 203267 - DNA, 122 bp, Homo sapiens
taataagtagtgcctacagtgttgttttttctgtaacccttttgagaactttgaatgtcacgggtttcaatgatgatagccaattattttgaggactagcagatatggtaaggaaaaatcaa

SEQ ID NO: 203268 - DNA, 122 bp, Homo sapiens
tgctggtgatttgaggaactcgctcctaaatgcaggctaactgccctccattcaggtccccgggtcttcccctaggagtcccaggcacagccccaccacacctggaaggagtcctctctgaa

SEQ ID NO: 203269 - DNA, 122 bp, Homo sapiens
gttgaaacttaatccccagcgcaacagtgttcagaggtgaggccttcgggagggttaggccgtgagggttccaccgtcaagggtaggattagagccttacgaaagggctgtctgactggcca

SEQ ID NO: 203270 - DNA, 122 bp, Homo sapiens
gtgtgctcatccttggcgggcaggtatcccagggcagaggtgagaattcagaaagcacttcggagtgcctgtcatgcaggtttggggggtatgttgttaggtgggcgggagcatggaaggag

SEQ ID NO: 203271 - DNA, 122 bp, Homo sapiens
ttcgcgccggccgacgagccgcggatggtcccggagaggaagcccctgcccctgggcgagcgcgcttctctggcttgtcccagccgcgcggcccgcagcccagagcagctgtgcgcccccgc

SEQ ID NO: 203272 - DNA, 122 bp, Homo sapiens
cagactttggagcatctcccccacagcagcatggactttggcagatttcttggggaccagcgatgtcctaacctgtttgcttttccagggctgatgtttgcagggtgtttttttttttcttt

SEQ ID NO: 203273 - DNA, 122 bp, Homo sapiens
caaatgcagcctggttctcagagctgggccaggcgcagctcagggagccaggcagaaagccgagaggagaacacatttcattttaatgggaaacagatttgagaggggaaaaaatgagaatg

SEQ ID NO: 203274 - DNA, 122 bp, Homo sapiens
ttacagatgtgagccactgcgcctggccccagaaagtcccttttatacataccctctccccgtctttggcagcaaaagactgaactcttatctgtgtggtaaggagctgcctttttctttta

SEQ ID NO: 203275 - DNA, 122 bp, Homo sapiens
ctttaaacgttccttaaatatcttcatcctcaatttacggttgaggaaactgaggtgtagcgagaccttggaggtttccgaaatattattatggatggcaggtgtagagccctgccaacctc

SEQ ID NO: 203276 - DNA, 122 bp, Homo sapiens
ccacagtcgtgcctgctggaatgtttccacttttcccaaccttcggcaacacaggcatctcgttagacacggccagggaccggcagagccaagcaggcgggccaggcagccgcgccgcccgc

SEQ ID NO: 203277 - DNA, 122 bp, Homo sapiens
aatggtttttatgctttgaatccaaaaaccttactacatcatcaatattgttcctgtatacgccttcaagtctttctgcaggaaatcccatagcaataatgtttagataaatataggtcaag

SEQ ID NO: 203278 - DNA, 122 bp, Homo sapiens
ctgctgaaacgcacccaggccatgctcaataaatatcggctcctgctcctggaggagtcccgggtagggtcagagtcgccttcctcgcctctgggctcctcctcgctgggacactgcccctt

SEQ ID NO: 203279 - DNA, 122 bp, Homo sapiens
tgaaaatatgagaaagccctttcggtgcatttcacttgtctccacgtgcaaatagttgcacggctctcccctcattaacttcattagaaggtatattagcaacaattaaggacgccacagga

SEQ ID NO: 203280 - DNA, 122 bp, Homo sapiens
gaaaatcaaatgaagcctggtttgatgaagcacagctgtacccagggcttttgacagccccgcaatttctgcaaatggttcctaattgattggcttcttctctgtaagggtgcctattactg

SEQ ID NO: 203281 - DNA, 122 bp, Homo sapiens
ctagctaggaagtatccaggctggtggccaccctgttgtgtcttctgaagctgtcagcaccggtcgctggaaaggcccgcaggctgggaagagtctttctgagcctctagggctcctgccag

SEQ ID NO: 203282 - DNA, 122 bp, Homo sapiens
ggctgcagcctcagcctcccctccagatgccggcagcaccagcctctgcctgcatggggccgcgaggtttgcagtgacatcccccgagcttcctgacctgccccggacacggagcacggctc

SEQ ID NO: 203283 - DNA, 122 bp, Homo sapiens
cttcctggtttctccgagggcaagaggggtcctcccttgtcttaaaggtgccgcagccgccggcccccccacgcccagcccgccccccccagcctggcctcggaggccagaacaggctcggc

SEQ ID NO: 203284 - DNA, 122 bp, Homo sapiens
aagggcggaagggagccctcccagactgccctgagggagagctgagggagcccattagcccgagcccttgcttaattgggagccccagctgaggctaagctgccttgccagagagaagacag

SEQ ID NO: 203285 - DNA, 122 bp, Homo sapiens
ctcctggactcaaggggtccgcctgccttgacctcccaaaggactataggtgtgagcctgcgctccatgctcattcaggccttttcttccaccctaccaaaatctatgtaaactctttagct

SEQ ID NO: 203286 - DNA, 122 bp, Homo sapiens
tgtcctgggcgtgaatggctggcaggtggcgctcggtacccggaatcccgacttctccgacgaaacacccccgccgccgcccccgccaccgccaccgcctccaccgccgcctcccggctcct

SEQ ID NO: 203287 - DNA, 122 bp, Homo sapiens
ccaaagcgcagagacagacaggatctgccaggacagcgcgcagggcggggcggggacaggcgcgccaggagcggggcgggcttccagccgctggttttgctgagggctgagggacggctcag

SEQ ID NO: 203288 - DNA, 122 bp, Homo sapiens
tggcaactgttaattaattggatgatgatgaagtggaggaagaaaaaaagccaaccagaacggatacaactctagaggaagtcatggtgtgtagtaattatatgaatttcattcagcaaagg

SEQ ID NO: 203289 - DNA, 122 bp, Homo sapiens
tcagtttccacatctacacattggcagtggagccacatggccttacggatccctcccagccgaaagcagggtaccaagccgacctagccattaaagcagcttcctgtgggcgcggcgcagga

SEQ ID NO: 203290 - DNA, 122 bp, Homo sapiens
gtatcttttaaagactttttcaggctgtcataaatttcctgtcttcttgtcttgctagatcggggcagcagtgcttagggcgggcctcagaggctcacacacgtatcgccagggggagaacc

SEQ ID NO: 203291 - DNA, 122 bp, Homo sapiens
tcttcggcacctctcgcagacccccttcctcttgcctctagcgccaacctctcagcctctcgcataccaggggaggggctttgcaaaaccttccacgaaagtgaatcccagcacagccctgc

SEQ ID NO: 203292 - DNA, 122 bp, Homo sapiens
acgcgcccggaggggcgggcggagcgggggcgcgcggtggtgtggcagagccagccgaatcgctggctgcagacggctcggcccacccacgcgcccgcccccgctcgcccgggacgtcagtc

SEQ ID NO: 203293 - DNA, 122 bp, Homo sapiens
ccgggcaggagagggaatttcggagccctaaactgttgtccatctccgtaagtgaccagacgtctcagtaaaataagggccaggaaactggacgtgtaatccggagtatgaattaacttgtc

SEQ ID NO: 203294 - DNA, 122 bp, Homo sapiens
ctcagctgccagtgcgtcatttcggaaaacgagtcaccttactttggggaagcaggggtccgcgaggtctcgcctctggtactcttagttgctagccttcagtaccagcagacctcaggctc

SEQ ID NO: 203295 - DNA, 122 bp, Homo sapiens
aagaagggcaaagttggattttgttccaaagcatggaatacaacctagccacaattacatcggtccatcgtggtgtggaatgctcaagtgctgggaggagcaagccagttccaggaatgcac

SEQ ID NO: 203296 - DNA, 122 bp, Homo sapiens
tgggattacaggcatgagccaccgcgccctgcctgattataatacatttaaatgttaagtcgccaccccaaatgaacataggtcatatgcaacatacagatttgttcactatgtgtgtaaga

SEQ ID NO: 203297 - DNA, 122 bp, Homo sapiens
tgggctgcgagtgcagggggccgtgagtgcggaagccgcgggtgcaggaacctcgggtgccggctttgcaggacagggaagggtgtggcgtgaaaaccacaattgcgatctcccgtggggaa

SEQ ID NO: 203298 - DNA, 122 bp, Homo sapiens
cgggaggcgatgctgccgacgctattgctgccattactattacggagagatggggcggggcgggagcaccgggcccttcccggaagcccttcctgagcttattcagtgcctggggccgcggc

SEQ ID NO: 203299 - DNA, 122 bp, Homo sapiens
caggtaggcggggctcagctccggctcctcggtcatgatggcaatgttctgccactcgcccgtctggctggacctcttgatggtgtccaccacgcacaaggcatacaggcagtcgtcgaagg

SEQ ID NO: 203300 - DNA, 122 bp, Homo sapiens
aacctcaccaaacatttaaatctcaaagcaattcctgagctacatctgcttcccaccttacgtttccaattgacaatttctttcccttaaaatgagctaatttcatagactcctttgtgaaa

SEQ ID NO: 203301 - DNA, 122 bp, Homo sapiens
actgaagaactagagtgtcactgctggtgaactgtggcacggttgctcaacacatcacctcggacaaattcaggaagcatttctttagcccacaagtccagacccaggtgctctgtatgttt

SEQ ID NO: 203302 - DNA, 122 bp, Homo sapiens
ccagcggaggttggtgttccaggccatgctgcaggggtgcctggccgggctggcagcgggcggttcggacgctcggaggccggcggggcttttgagacccgggcaggggggcggggcggcca

SEQ ID NO: 203303 - DNA, 122 bp, Homo sapiens
gggttctggaaatggctcactgcaatgactgagataaaactcatggattcccctctatggcgattccccactataccctgttactagaccggatacagatagccccaattcccatttgcctc

SEQ ID NO: 203304 - DNA, 122 bp, Homo sapiens
acttcggcgaatctggaccggacgcgtggtctggggcctggactgtggacgcccatgggccgggctccccgcggggacctcgcacttgggtggggaccctgcggctccaggcgccacacaca

SEQ ID NO: 203305 - DNA, 122 bp, Homo sapiens
ctgaggtgatccgcccgcctcagcctcccaaagtgttgggattataggcatgagccaccgcgaccagcctaaattattgatttatatcctacctgtttgccaaaaggattaggtggcatatt

SEQ ID NO: 203306 - DNA, 122 bp, Homo sapiens
ggtcctgttgtccatctcccccatcgcccgcacaccctcggtcctgttgtccatctcccccgtcgcccgccacccacgccgtccccactgccttaggctggctgcccctttggacaggggct

SEQ ID NO: 203307 - DNA, 122 bp, Homo sapiens
ggaatgactaagctgctctttcaaggcagctgaaaggacatctacatctctgtctctggtcgggggactacctgcctgtgacccagagtcctgccctggcccagcagcatgtaccaggcccc

SEQ ID NO: 203308 - DNA, 122 bp, Homo sapiens
agccacgggaacgcaatggaaatctaggagtggaatagctgggccccggagccacgggaacgcactggaaatctaggagtggaatagctgggccccggagccacgggaacgcactggaaatc

SEQ ID NO: 203309 - DNA, 122 bp, Homo sapiens
gcagcggtggcctttggttatggcgtaccacacagccataaaaatgagaagtcactgcctcgtgcaacagcatgggtgaagccggccgacgagatggtaaacagaaggagtacatgcctggg

SEQ ID NO: 203310 - DNA, 122 bp, Homo sapiens
cccggccaccacgacgttccccggctctgcggcgcgccgggagcaggtggttgccctctgcgtccagggcgtgtactgagcccaggctagctgagcgaggctgcagcccctgcgatggcccg

SEQ ID NO: 203311 - DNA, 122 bp, Homo sapiens
tagctctttcagaatgcgtagcacttagctgctagacgttaatgctggaaactataattgcggttagattctagtttcataagtggtgtttctgaatattcaggaaccttctgaactctgtt

SEQ ID NO: 203312 - DNA, 122 bp, Homo sapiens
ccttccaattatctcttagcatgcacccataaatttacctagaggcacaggaacctcctgcgacagtagatctgggtacctcattcccgtcacccttgtctggtggattgaagtgtttccta

SEQ ID NO: 203313 - DNA, 122 bp, Homo sapiens
cattctgggccctgccttggctgaaggcaatccggatatgctttgctgacccaaagccaccgaggggtatttgctgaaaacaaaaacaaaggccagtgatttgggcccgtccctggatgacc

SEQ ID NO: 203314 - DNA, 122 bp, Homo sapiens
gagcaagcggtgcgccaggctcagagccgcagccgcacgacgacccggctcccatcccgccgcctcggcctccagcaaagacagctccaggaagtaggtggcaagtaacatcacctgcaagt

SEQ ID NO: 203315 - DNA, 122 bp, Homo sapiens
ttcaggattagtaaatttaatatcctgtcaaaattcccgtgataatgagccctggctggccgggccggccccgcggcttcagctctgcagccggcgagatagcgcggctgattgatgagcag

SEQ ID NO: 203316 - DNA, 122 bp, Homo sapiens
cttaactaggaaccagctccctggatggggcaaccccagaaatgggcgacttcaaggaggcgggagataacatcccctccagggggcgacgtccaagagcatattgtgtggctgcgtgcact

SEQ ID NO: 203317 - DNA, 122 bp, Homo sapiens
taagcagcgtcaaggaaggagtcccgatcaaggacagggatctgcggccatggccgaggccgcggagccggagggggttgccccgggtccccaggggccgccggaggtccccgcgcctctgg

SEQ ID NO: 203318 - DNA, 122 bp, Homo sapiens
cagggcccgggaggcacgtgaggtgcgagccccagcctgggccggcttccccctgtgtggcgcgcggtcttgatccccagctggcaccatggcactcccgactttgagggccccaacaatcc

SEQ ID NO: 203319 - DNA, 122 bp, Homo sapiens
ggagggggggcgccgggccgggcccgtgggcaccgcaggacgcgcggaccgagccggcgccgggcaccagcaatgacaagccgcctgctcgccccgctccccggcgcacccgctccgggagg

SEQ ID NO: 203320 - DNA, 122 bp, Homo sapiens
cacccgcgcgcccgtcgcgtgcagcgcctggaccgtgccgcgccctatacctgccgggagcgggctcagtgaaggcgtcccctgcccgcctctgcccgccgccggcctttgcccacctttcc

SEQ ID NO: 203321 - DNA, 122 bp, Homo sapiens
aacaattcagtagtttccagccacggaagtccccctgctgggtttagggtgcagtgggtgcgaatccctgctgtagaaaacaggctgaggaaagaaagcgacacaggatgttgtctggagaa

SEQ ID NO: 203322 - DNA, 122 bp, Homo sapiens
gggtagagaatgaaaggagttccatcaaatggcactttgaggcaagcgagaacaaggactcggaccctgcggtgcagggcggggtgctagatcaggggcgcagccggcaggttggagccggg

SEQ ID NO: 203323 - DNA, 122 bp, Homo sapiens
ggcgcgcgcctcacccagcagcgcccgcaggtgcttcaggcgggtcagcacgtccttcttcgggtccagcaccttctgggtggacttcttcacatccccgtggctccttcgggagaacatcc

SEQ ID NO: 203324 - DNA, 122 bp, Homo sapiens
attatctgaggagggacattcctgccgggggacatcgctgctgccgggaccagatagtcccgcggcgggggcggggaggcggggccgcagcctcccgcagcgccaagcccagcccccgcctt

SEQ ID NO: 203325 - DNA, 122 bp, Homo sapiens
aacttacttaggtgaacagttcatgatgacgcctttaagctgctagaccaacccaaactccgaatttgcagtttctgacctttcaccttgaacctgtgccctttctaccctctattctccat

SEQ ID NO: 203326 - DNA, 122 bp, Homo sapiens
cggcgcgccctaaggccggactcttagcttctgccaccacctggtggccatttctggaagcgcagctgggagcccagatccggtgagcaaaagctctcgtgggttccaagagaggccctgct

SEQ ID NO: 203327 - DNA, 122 bp, Homo sapiens
atctcacagcctgaagcaccgctgccttcactcctgatgcatcactaacatggtacccaacgtgctgaactttggagactgtggttaaattggaggagagccctccctgttaatcttaagtt

SEQ ID NO: 203328 - DNA, 122 bp, Homo sapiens
ttagtgaacgctgttcagagaaggcactgatctaagctgaggtgttgtctcagaccctaccgccgaattctagacggaaaaaattgttgaaacaactggtccagcctcttgcatgtcacaat

SEQ ID NO: 203329 - DNA, 122 bp, Homo sapiens
catactagtactgtcctttgaggtctctacgccttcaccctggctccctcattggctatccgccagctctcgtcctcgctcccgccttcagcctccacctccattggctcggctccctacac

SEQ ID NO: 203330 - DNA, 122 bp, Homo sapiens
tagtgactgctgcagaagatataacagagggtctctaagccagagctaggacactaggcacgataaagactgggaatattatgctgaaagcagacagatttgaaaaaaggcttatataatga

SEQ ID NO: 203331 - DNA, 122 bp, Homo sapiens
tcaccaggaagctttgtgttacgggccttgtcactgcatgtgaagatagaccagacgccccgcagagacagccctcttgaaactctcacctaaaggagatgctaccaaggtgagggacctcc

SEQ ID NO: 203332 - DNA, 122 bp, Homo sapiens
cgcgggtgtcggctcgtggcggacgcttgagggcagggggcgctcgggctgctgcctggtcggccggtcaaccggagacgctctacccgaagcgcagctctcgatgagccgcgccctgcgtc

SEQ ID NO: 203333 - DNA, 122 bp, Homo sapiens
gggcggggcgggtgggctggcggctgtcctccagcaacaggtgcacattcccgggctcctcgtcacttcccctgtgctggcggtcccagcggctctctgagcgaagtcactgagcgagccgc

SEQ ID NO: 203334 - DNA, 122 bp, Homo sapiens
ctgcactgttttcccttgtggcgttgtggtgtcggcccgtttggtgcgcagctcagcatccgttcagacatgtggctgccatcctgttcctgatgaggcaaatggctgtggcctgtttgttt

SEQ ID NO: 203335 - DNA, 122 bp, Homo sapiens
gcgtgacaacatacagggcatcacgaagcccgccatccgtcgcttggcccgacgcggcggcgtgaaacgcatttcgggcctcatttatgaggagacccgcggtgttcttaaggtgttcctgg

SEQ ID NO: 203336 - DNA, 122 bp, Homo sapiens
tcagaggtggtcagtggccgcgaggaagaggagagagccatcacctggtgctttaattttcgccctcacctgcctgaaaacccaggtggaagcagggcaggagaatgagcggaggaggaaga

SEQ ID NO: 203337 - DNA, 122 bp, Homo sapiens
ttaggccgacccgggccccgggctagcagagcggaggcgctgccacgaaactcgtacctgcggctaagagcaggtgagtcacagcaccggtttatatctttatgacataacttttttttttt

SEQ ID NO: 203338 - DNA, 122 bp, Homo sapiens
gggccagccatggagcatcacctgagaagttgatagaaatgcagattcctggctgcaccccggagctgctggctcttgaactctggggtgaggcccggcagtgcaagttctaaggaggctcc

SEQ ID NO: 203339 - DNA, 122 bp, Homo sapiens
gactatgcagcacccgccgccgcgggacggggattcggggggcggggtctgcgccgcgcgcgctcattggcctccgctgccgcccaccccgcccccgaacggccgccccgcccccgccgcgc

SEQ ID NO: 203340 - DNA, 122 bp, Homo sapiens
acgccgagacctttcacccccgggcggagcacgggcccccgcagggacgccaaaggaagtcgcgccacctgcggggtcccaagtccggcatatttttgtttgcaagaccaaaagccatgcgg

SEQ ID NO: 203341 - DNA, 122 bp, Homo sapiens
ggtcaaggggcggggcctaacgcggatgggcggggcaggcgtcagcttgcattcgctcaccgtccagcaccgccctctctgcgcgccacttagactggaaggcggggccacagaaggccacg

SEQ ID NO: 203342 - DNA, 122 bp, Homo sapiens
gcgcgcgcgcgcgcggggcaccctgggagagcggggccaggccccgccccttaaagggggcgcgccccagcgcaggctcagcaggtcagctcgcagggactcccttgcaagaagaccccgga

SEQ ID NO: 203343 - DNA, 122 bp, Homo sapiens
ccacatgcgccggctgggcctggcggcctcccccggaaacgttcccccatcctcgcccggcgcctcactcaccaagggccgcgccggggttctgcactgtcactgcgctgcggttccccgcc

SEQ ID NO: 203344 - DNA, 122 bp, Homo sapiens
ccgtcaaagtatctctgacacgtccttagcctgtgtttgaaaacctgcagagatgggatacgcccctttaccagagacagtgcattccgtccactgggagtgacacacggccaagccaggct

SEQ ID NO: 203345 - DNA, 122 bp, Homo sapiens
ggctctgtaattccttttccgcaacgggagctgcagatctaaaggcctctcccatccgtccggcaggcccacgctgccaggaaatttcattaacgctggaaaataggaaaggtattaagcgt

SEQ ID NO: 203346 - DNA, 122 bp, Homo sapiens
tgggcataataacggtagatcggggcatgatgatgctgggcatgacactgggcatgatgacggtctgcatctgggcatgatggctctgggcacaacgatgctgggcatgaagatgggacacg

SEQ ID NO: 203347 - DNA, 122 bp, Homo sapiens
cgaagggaacatttaaccttgactttccacagtcctgaggttcccaaaataaaggggaaccggaaataccaaagggtgaggaggtatctaattgaaagtcagatgggaagaagagaacttac

SEQ ID NO: 203348 - DNA, 122 bp, Homo sapiens
tccgaaggagcgcggaagaaagccctgcttagctacagccaatcaggagcgcccgtgcggcgcttatagacaaaggcgcccccctttcggcttttcggggccgaactggggagcccgctggg

SEQ ID NO: 203349 - DNA, 122 bp, Homo sapiens
ctgagcaaagaaaatttagcgtaaaaaggaatggggaaacattttatattctgagaagcacgacaatgtgcattagatttcaagcaaaaacattttaaagataatttgaaattcaattcaat

SEQ ID NO: 203350 - DNA, 122 bp, Homo sapiens
agatagtgtaactggcactgcggctggagggctggtcccacagtgagctacagccctgcccgctggccgtgggagaggcttaaaacaaacgccggaagcaactcccagccccataaagatct

SEQ ID NO: 203351 - DNA, 122 bp, Homo sapiens
tagtaggaaaccagtgacctccaggacttctgcccctgggaataagctcgccttagcggccgcagacttctaccaccccattgtttagaatggaaactttgttttcctcaacccgcgatcac

SEQ ID NO: 203352 - DNA, 122 bp, Homo sapiens
tatatattctgagctccacaataaggagaacctcttttctcaaagggaatggatggcactcgcctatgcactccacatatgtaagtatatgtgcttggtgatgtcaacagggccaaatatga

SEQ ID NO: 203353 - DNA, 122 bp, Homo sapiens
gtgagcaggcccctggggggaagcagtgctgctgggtgggctgagccgtgaccacagggacgcagccgctgcccaggcctcacctgaagacggccttgtgcaggtactctgcgtgcgcacgc

SEQ ID NO: 203354 - DNA, 122 bp, Homo sapiens
tgctatggtccaaagagtcaggaaacgattgcaaggcaatcgttggcacagagaacagagcgactgaagttacaatccagcattttgtgaatctctgccttaggccagccagggcggagagg

SEQ ID NO: 203355 - DNA, 122 bp, Homo sapiens
ttctgctcagctgggcggcgaggagctggcccagagcggcaccgcgagctccctcaccgccgtctgcctgccatttgctgccactggggacctgcgactgcttccatggaaacagaaccatg

SEQ ID NO: 203356 - DNA, 122 bp, Homo sapiens
ggaggctgaggcatgagaatggcgtgaaccagggaggcggagcttgcagtgagccaagaccgtgccactgcactccagcctgggcgacagagtgagactccgtctcaaaaaaaaatagaaat

SEQ ID NO: 203357 - DNA, 122 bp, Homo sapiens
aggataggctgtgcctcctcccactcccgcccccagcccccctttttttccccctcggaacgcgaggtgccatcttttttcggcgtgtcacgtctttacggtgccatgccaaaccgggtggc

SEQ ID NO: 203358 - DNA, 122 bp, Homo sapiens
tgacttcaaacatttattttattataatagtgttaggctaaaaatcacaagctgaaaggccgtgattgcacttagttcggtagagttgatgattctcatgtatacacgtgacctttcattga

SEQ ID NO: 203359 - DNA, 122 bp, Homo sapiens
acttgaaaactgtaattttataataactataaatgtctggaaggaaacctgcatacatatcgtatgccaggccatgttaggtgatttcacgtactgtgatgttgtttgggtcccccaaactc

SEQ ID NO: 203360 - DNA, 122 bp, Homo sapiens
gcgcgggacagaagagccccactgagaggaggaaaccccgcccccaattctcaggcaccccgtcccccttcgtcaacacagttctggctgaggcagagcctggggtatcatatctgagtccc

SEQ ID NO: 203361 - DNA, 122 bp, Homo sapiens
ctctgtttttgagcacatctggagtgactcacggggcatgtgatctccttggcagtggggcggataaatataatttctgtacttgagttccatgtgttggatgcacccactggaatttttct

SEQ ID NO: 203362 - DNA, 122 bp, Homo sapiens
gcatttattaataggaattcttacatttgcctgaagatgaattattgcaaacaattaaaacgtgcttaatatttgcatatgagtcactgtgtattcacaatcagttcaggggcatatgtcat

SEQ ID NO: 203363 - DNA, 122 bp, Homo sapiens
gacttcaaagtagaaattgttgtttctcaaagagttgtttcttatttattttttaaagcacgctgcgtataggaattggccttctcctggaccattttcacattatctgggagatgcaattg

SEQ ID NO: 203364 - DNA, 122 bp, Homo sapiens
atggagcattaacagttggaataaacgacagagacacggaaacctccgaggtttccagagcggacccggaaatgacgccaggggatgcaaacccttctgcccctttttgctacccctgaagc

SEQ ID NO: 203365 - DNA, 122 bp, Homo sapiens
ggagcctgaggcctgggtgcccagatgcctggtctagggtggggacccccttggtgtttccgctctctctcaatgcccattctttgtgggttcctggttctctgcgggttctttcctgctga

SEQ ID NO: 203366 - DNA, 122 bp, Homo sapiens
ggtgcaacatcgcctgtaaagacagcaaagccaccgcagaagttgcccggcagaagactccggaggcattggctcagtaacttttcacgtcattttctgctcgggagccccttctagcctct

SEQ ID NO: 203367 - DNA, 122 bp, Homo sapiens
agattccacagctaacatttactgagaactctggtcagatattcttctaaaaactttacacgttatttcttttaaacctctaatgagctctgactacttacaatctatgacatattttcttt

SEQ ID NO: 203368 - DNA, 122 bp, Homo sapiens
gttccgagggacggatccctgactttgctgttaatagtgttaaggtctgtggtgaggtcccgtgtctcacgagggttaccggctgaagaagcttatttcacttgggacgcaaatagctaagc

SEQ ID NO: 203369 - DNA, 122 bp, Homo sapiens
cgtttccattacattcacagtttctttcacaaaacagcattcaaaggagaagggaaagttcgcacattactcccagccattgtctttgatcatatgagcaagctcaatgatgaattttcctt

SEQ ID NO: 203370 - DNA, 122 bp, Homo sapiens
ttgtcaaaagtcacaatactgggtggagcttggattcgaactcaggcagtgggtcacccgcggcaggcgcgggctttgggtcgagccaggggcattaggtgaggagaggcactaggcgagga

SEQ ID NO: 203371 - DNA, 122 bp, Homo sapiens
ttctctgcagggcccttgcattggtaatcaacagagcctggctcacagcaggctgtgggacgcagtggttggcttcctccatgtctttgctaatatgcagatgaaactctctcaggtactgt

SEQ ID NO: 203372 - DNA, 122 bp, Homo sapiens
aagttctctcccaggttaaagggattctcccacggcggcccaggagatggtggcggcgggcgcccggctggaggcctgcgcctttaaggagccagggggcggaggggcggggcaggaagacg

SEQ ID NO: 203373 - DNA, 122 bp, Homo sapiens
gctgcccacaggaactgggctcctggggattaagcaatagtcaggactggggtctggaggcggtgcagggtggggacagaggggaggaggagtcggccactgcagccctggcagaaggaggc

SEQ ID NO: 203374 - DNA, 122 bp, Homo sapiens
cagcagccctgcgaggtggggaggagtatcccccacggggcagctgaggctcagacagggcgaggacttgctcaaagtcacacagctaagaatattactaatgataagaataatgacgatga

SEQ ID NO: 203375 - DNA, 122 bp, Homo sapiens
attgacattcagctgcaaagctcttgctgggaaacgcggtggccgagccgtcagcacaggcggcagctgcctcccacacttaagacaggacttctaaagccacagtccctcaaacggcaggc

SEQ ID NO: 203376 - DNA, 122 bp, Homo sapiens
caaactcctgacctcaggtgatccacccaccttggcctcccaaagtgctgggattacaggcgtgagccactgcacccagctgccccaatcttcttatgggtccagtgtaagtggtttttttt

SEQ ID NO: 203377 - DNA, 122 bp, Homo sapiens
gtgcgggagacgaccctttgttgtcggtgctgtcaccctatccctccctgcttgcgtaggcgtaggagagttcctagggcggtggaagactgggctggtggagtgggataggcgacgttgag

SEQ ID NO: 203378 - DNA, 122 bp, Homo sapiens
ctcagggagcgtttccaaattctcccatcccaggaaggcaggtttgcgcgaggggtgggacgcctaggattctgcctaggataagtattggggtgtgaagttttatttatagatttaatgca

SEQ ID NO: 203379 - DNA, 122 bp, Homo sapiens
cgggcggcggcggcccggggacgagtccagtccgcgttttgcgagtgcgcgggagtaatgcgagcgaagtggataatagttgctcgagctcgcccgctgcctctcaagccatgctgggcccg

SEQ ID NO: 203380 - DNA, 122 bp, Homo sapiens
ccctgaaccaaggaagagactgtgactcttccttggttcagggaaggtcctgaaccaaatcgagggtcggtaaagcttaagctccattatttccaaatttgtgtcacctctggtgacagcac

SEQ ID NO: 203381 - DNA, 122 bp, Homo sapiens
tagagggaaaaggaaacgaggagacagataattgcccgcctggagatcccagacactcagcggtaagaccagcaggatgggggaggggtccctcctggcctcgagaattatgcaactttctt

SEQ ID NO: 203382 - DNA, 122 bp, Homo sapiens
tcctgacccacaggacacaggaacacaggaacgctgctgttggacagcactgaagctgggcggtttgctacacacccagagacagctgagcagacagagggagaagagtagggtcacgctgg

SEQ ID NO: 203383 - DNA, 122 bp, Homo sapiens
ccagtattcctcctgtagcctggctctttcttgcatcctggcacccacaggttcccaaggcgcggtggagggacactcgtaaaaggtctcgctgtgatcactgtctccagcctgctgaagct

SEQ ID NO: 203384 - DNA, 122 bp, Homo sapiens
ccatgcctgagcctccccgaccccctacggtgggctcctgtgcggccggagcctccctgacgagcgctgcccccagtcccaccgaccacccaagggctgaggaatgcgggtgcgtggcgcgg

SEQ ID NO: 203385 - DNA, 122 bp, Homo sapiens
ctatatcactaccctcaggtcacagagaggtgcactgagttcatatgagtggaaattacccgccagtcaccagagcgtgagcaaaccggccagagcgaggggccctccccggccctcccacc

SEQ ID NO: 203386 - DNA, 122 bp, Homo sapiens
aacatagtttacactttttgaaaagtatagccttattattagataatcctgcctttgcctcgctttgtgcccttggcatgttactctgcttcagttttcttacctggaaatgatgctcactt

SEQ ID NO: 203387 - DNA, 122 bp, Homo sapiens
tttactatgtaattccggtactgctgggctacctcagtttccacccctgaatatcttcgccgattacatcagtgcttatgtttgtgacttcagagacactgagaaggcgcggctctttccct

SEQ ID NO: 203388 - DNA, 122 bp, Homo sapiens
gtgcttctacactcgctgttcctcaagaaacctcatgcaggcagccttgaataggtcatccggtaacatccctttcctcatcagcctgccttgctaggtgggtaatgctgagagatatggtt

SEQ ID NO: 203389 - DNA, 122 bp, Homo sapiens
gtcccagagggcagtggggctccttctagaattactgaggtatattccaacttatattcccgtaacgtcactacattttaaaaacaaaaatcagatagaattgcaatattttcatacacatt

SEQ ID NO: 203390 - DNA, 122 bp, Homo sapiens
ggcactgcactaagatgctgggcacacgacagtcattaagacagacaacatgcctgccttcgtggagctttgaaccaagtgaggaagacactcaacagttaagtaaacaaacagataaacct

SEQ ID NO: 203391 - DNA, 122 bp, Homo sapiens
tgtatgtgagtttaaacgcgcggggattcacctgtgaaccctggggtctgcactcctgtacgtccgtgactgatgcagatgctccggctttgggaacgctgctgagagcgccagagccacaa

SEQ ID NO: 203392 - DNA, 122 bp, Homo sapiens
tgcagaaatgcctctcaatccttcaactgtgcatgcaggtgatgagactccaaggaaccccgtggaaagctggaggccagaagagcccagcagatagatcttcaccaactgtctggctctgg

SEQ ID NO: 203393 - DNA, 122 bp, Homo sapiens
cttctccaagtttcccttctaattgtaactactgttcacttaataattggatattttggccgggcgcggtggctcacgcctgtaatcccaacactttgggaggctgaggcaggtggatcacg

SEQ ID NO: 203394 - DNA, 122 bp, Homo sapiens
atatgtggggtgtacttgaggggttcctagaagttggtttttattagagtccatgaagtacgaggaccaggtaatgagtgtgactcacactctgatgcatctactgttgatctgtgctgcag

SEQ ID NO: 203395 - DNA, 122 bp, Homo sapiens
cggcgacatggggcaggatagcgagggttatttaaccgccagaacccgtggggcatgcgccgctgcgtgtgggcaaccgccacgaggggattggggtccgtgggagtttgaaggtgacggtc

SEQ ID NO: 203396 - DNA, 122 bp, Homo sapiens
ggccaggtagcaggatgtgtctgcacatggccatgtacttcaactcccagcccgcatgctcgcacctccagcaatggcatttggccctggtgtggccggaggaggagcagcaagaatgtgaa

SEQ ID NO: 203397 - DNA, 122 bp, Homo sapiens
ggactggagccatctcaggggtcccatctccgtgacactctgcagccaggtgctggggcgcgagagcaaggcactgcagttccgtcactccacacaatttctcactgtaaaactgacatgaa

SEQ ID NO: 203398 - DNA, 122 bp, Homo sapiens
cttctgatctgcaggtgcctcccacttgccaaaaccaattgaaagccagattatagttgacgtagcccataaaggtcagtcctgagtcacagagcagagtggagagtgggtctgaagggaca

SEQ ID NO: 203399 - DNA, 122 bp, Homo sapiens
tgcggcctggccaatcagagcggctcttactggcgggtgggctgagccggcccagctgctcggaggctctggcatggtaacatccccgcgcgggggtggaggggctcggggcggtcccacag

SEQ ID NO: 203400 - DNA, 122 bp, Homo sapiens
gaggtcaattttttcttctttgggtttggctggggcaggggcaggtgcaggtgccggtgccggggctggggcagccgcagccgcagccacaggtttcttcacgtctttctttggtgccattt

SEQ ID NO: 203401 - DNA, 122 bp, Homo sapiens
ctctccagctcagagcccggcccccatggccgggccagacctgccccggcctctcccctccgcctgagccacgccccggcttcctgctcaccaggcctgcgttagcatctgcagctgtgctt

SEQ ID NO: 203402 - DNA, 122 bp, Homo sapiens
ggcctgaccttgggctacctctcagggttaggccactgcctctgctgcagacccaggcggcgcccaaagcctgggcgtccctccgctgcagtgaaagggaaaagaaaaccgggctgcggtaa

SEQ ID NO: 203403 - DNA, 122 bp, Homo sapiens
tgtgtcccatctcggttgtttgtcaacctagtcctgctatgtcgtggggactgagcaggccgactcctcccccatcgcacgtccaggatgaagagcgctgtttaggtttgaaacctgcagac

SEQ ID NO: 203404 - DNA, 122 bp, Homo sapiens
cggcggcatgacgtcacggagcgtaccacaccgcagtccctcgcggacggcgaggcggggcgggtagccgaagacttatgtttggtaaattctattagttaagtcttttctgtcctacagaa

SEQ ID NO: 203405 - DNA, 122 bp, Homo sapiens
agcctccaggtccactcagtgacaatgagcaaaaatagacatattaagattagtcatggccgggtggggtggctcatacctgtaatcccagcactttgtgaggctgaggcaggaggactact

SEQ ID NO: 203406 - DNA, 122 bp, Homo sapiens
cttgcgcactaagcctcgccgcctgccttaggagtggagcgggaggccggagtgggcatgcgcgactttgtaggcgcaccgctactctccgtgtaggggcgctgctcgcctttctctgcaag

SEQ ID NO: 203407 - DNA, 122 bp, Homo sapiens
tgccgccatttcacttcattggagacactgaaggccgaggtcgccaccactcctcctaatcgacggagcgagagaagctggcggatggttgtccacaggcggctccggcccccaggtctcct

SEQ ID NO: 203408 - DNA, 122 bp, Homo sapiens
agtctctttttagaaattagaagttaactattgctgtgtaatggggtcaccccaaaacttcgcaacttaaattaacaaaacttatttcagatagtttctgagggttgggaatgtgggagcac

SEQ ID NO: 203409 - DNA, 122 bp, Homo sapiens
cagtcagctctcttcacacccctgctgactcataccccaccatcacccacccataagtgccggctactgagtgcaaccacatcataccacagactggctttatgacagatttgaggtcatga

SEQ ID NO: 203410 - DNA, 122 bp, Homo sapiens
cagggtgagccaggcattgtggtgtgcacgggaagcacaaaggccttgcagcctccgcgtcgttcaccaggggcgctgcccgcgggggccggcctggctccccagcctggcaggaagacgtc

SEQ ID NO: 203411 - DNA, 122 bp, Homo sapiens
atcctcttggccgcgggctggccctggtcgtcggaggattctgacggcgctcggagcgtgcggatgctctcggggctcaccttgccagaggacaagctgcaaggaggagcaagagccgggag

SEQ ID NO: 203412 - DNA, 122 bp, Homo sapiens
gaggccagctgaacccggccgtgggatcccggataggaggaggaggggacccataggacgcgttaacatggacctggaaaacaaagtgaagaaggtaggggggcgctcgtggcgggcggcgg

SEQ ID NO: 203413 - DNA, 122 bp, Homo sapiens
cccacccataatagtaatagtacctccctcatagggtcctgggaaggatgagtgaataaacgcttgtgaagtgtttagaacatagtgagtctggatgactcaacagattgtttgctggtgag

SEQ ID NO: 203414 - DNA, 122 bp, Homo sapiens
tggctaaagagcttctcctgccacccaatcacaatctcctcctcttcgtcttcctctgggcggtgtccacctccaaagacaacagagtgaatcaaatgcttgagccaaaccagcaccacttc

SEQ ID NO: 203415 - DNA, 122 bp, Homo sapiens
aggaaaccaaagtgctctgtatcctccagtctccgcgcctccacccagctcaggaacccgcgaaccctctcttgaccactatgagcctcccgtccagccgcgcggcccgtgtcccgggtcct

SEQ ID NO: 203416 - DNA, 122 bp, Homo sapiens
tggaaaaatctctactacaagctctgaacgaggtgaaagggcgcattttggatgacgacacgatcataaccactctggagaacctgaagagagaggctgcagaggtcaccaggaaagttgag

SEQ ID NO: 203417 - DNA, 122 bp, Homo sapiens
cgggagccggctccctctgctggcggggaggtgtggaggcgcagacgggaaccggggtggcgcgcggccctcgcaggcctgcggaggttccaggtgggcgcggactcggcgggccccgccct

SEQ ID NO: 203418 - DNA, 122 bp, Homo sapiens
aaggattatacgaagtgtgcattcagaacagtgcctggcatatcccagggctttggcacccgtggatgggggtgacaagctggtctccacatgaggtcaattctcccagacccacaacttac

SEQ ID NO: 203419 - DNA, 122 bp, Homo sapiens
gaaagaaaagaagggagggaagaaagaaccagaataatggtgcccaggtattcaagaactcgcactcagcagctcttagggcccggggattggtcccaccaggctctgccaaaggttgagta

SEQ ID NO: 203420 - DNA, 122 bp, Homo sapiens
tactctgagtgatcattcttaagaccactccaaaataagaaagaatagatggagagcagccgcctcagtcactgaagttgagtttgtggatatttaatagattggtgtctccctcatcccat

SEQ ID NO: 203421 - DNA, 122 bp, Homo sapiens
ggagccagggagagatgctcttgactccactcagatccatcctggggaccagagcagaagcggtcctcacagcacccattctctgcttgagctcccgcttcttctttgccgctgggcctcgg

SEQ ID NO: 203422 - DNA, 122 bp, Homo sapiens
ggagatgatgttattcacttgaatgccagccaggctgggccacacaggcaggcctggtcacggctgtttgaatcattaggccccacagacataggggacatgagctttgtaatggcccacaa

SEQ ID NO: 203423 - DNA, 122 bp, Homo sapiens
gcccctcagagcagggcccacggatgccccctgagaactgtggggggtcgggggagaggccggaccccatggaccaggaggacagacccaaggccctcaccttccacacagacctgggcatc

SEQ ID NO: 203424 - DNA, 122 bp, Homo sapiens
gacccggacgggcggaagcggaagtgccggcctggagcccgctctaggtgggtgtcccctcggtgcttcccagctgccgtctgcaccagccatggactgctacacggcgaactggaacccac

SEQ ID NO: 203425 - DNA, 122 bp, Homo sapiens
catggtgtagtgccgatggaagtggggtcagaaggcctcctgccgctgcggcagaattcccgtgtggccttctcccaccagggcctcagtttcccctcgcagttccgattctctggccggcg

SEQ ID NO: 203426 - DNA, 122 bp, Homo sapiens
ggatctgagtctaatgcagggcttaagtgatgcaggcctctgggccactgtaagtcaccacggagcgtttctccaccgagctccagcggctgcggggcccggcgccgccctcgattaatgct

SEQ ID NO: 203427 - DNA, 122 bp, Homo sapiens
agttagagttacagaaaatcccagatttccctattatcagtcttgtgtaattctttctgtcgcataactttataactccaaaatcctagtccatctccaaaacattatgatgttcagaatgt

SEQ ID NO: 203428 - DNA, 122 bp, Homo sapiens
tagaaggagacctcaccagcatcatagtccaagaaaatccccacccgctggagcggggtccgcaggggtagggcagtcattggggaggtaagagcccaatattctttcccataccacaaaga

SEQ ID NO: 203429 - DNA, 122 bp, Homo sapiens
gatgggttttttcctttgtcctctctttcttggattgagtcctcacagcgcggcggactgcggcgtggtaggaactacaccacccagaatactgtgcgccgagcgtgccggggccttagacc

SEQ ID NO: 203430 - DNA, 122 bp, Homo sapiens
cccaccatccgggcccggggctcacctgctgaactctgagggtctcacgctccaaagtggcggccgctgttcgtggcgcctggcaaccgcctttgtgacccaggacggcagggcagcccgag

SEQ ID NO: 203431 - DNA, 122 bp, Homo sapiens
gcccgcctcgcttagcagcatcatgcgcagctcctggaagtcgatgtggcccaggcagggcgcgtcggccgccagcgcggacgggcacagcacggggtacacgggcgccgcgcccccctgac

SEQ ID NO: 203432 - DNA, 122 bp, Homo sapiens
ggagggggctgtgcgcgcctccgcttcccggccttcccagcggggacgagcgccgacccccgcccagtcgggagacgccctcaaggtcccaggctctgcttctgcccgcccgcggcccgcgg

SEQ ID NO: 203433 - DNA, 122 bp, Homo sapiens
tggggaagaaccgcagtgctgatttcaaccctgatttcgttttcactgagaaggaggggacgtacgatggcagctgggccctggctgatgtcatgagccaactcaagaagaaggtgagactg

SEQ ID NO: 203434 - DNA, 122 bp, Homo sapiens
tgtcctcgttgatgagtgaagccaaaagattcccctttatgaagagtcatttgggactcccgggcgcttccatgaacatgtatgtgctcatgtttgatgtttccttgtggggtcccttgggc

SEQ ID NO: 203435 - DNA, 122 bp, Homo sapiens
cgtcaagagttacttccggtttccacggagctccgccccttaggggggttctcgctcggccgcggctgggcattaactccgctccagtgctgcttgtcagactccgcctccctccctcagcc

SEQ ID NO: 203436 - DNA, 122 bp, Homo sapiens
agtcagaagtgtgcaaaatgttgggcagtgagaaaaaagaatgtggtcattcaggaacttcgtcacaattgggaaggagattcactgaaaatattttgtgatttgagcttaattttaaggaa

SEQ ID NO: 203437 - DNA, 122 bp, Homo sapiens
cttccgtcctcccaaaatccgttctcagactctcccgtcctctcaaaatctgttcacagacgctcccgtcctcccaaaatccgttcacagacgctcccgtcctcccaaaatccgttcacaga

SEQ ID NO: 203438 - DNA, 122 bp, Homo sapiens
acgtggggcggtggtgttccaggtccacgtggggtggtggtgttccaagtccacgtgggacggcggtgttccaggccacagcggaaggaggtggggccacagatgactgtcctgggtctctg

SEQ ID NO: 203439 - DNA, 122 bp, Homo sapiens
tgaaatggatatgccctgagaaaggggagagatacaactctctggtggttgccagtaaagcgccagaaaaacagaagagaagcaagtagaagaatttcagcatctgctaagaacatataata

SEQ ID NO: 203440 - DNA, 122 bp, Homo sapiens
acatggtggcggcacaggcggatgagaacgtgggcgaggctggccggagcctgctggagtcgccgggactcaccagcggcagcgacaccccgcagcaggacagtgagtgaggggcgcatgcc

SEQ ID NO: 203441 - DNA, 122 bp, Homo sapiens
gccgggcccagcccgccgcccgggcccctctgggaagggcttggaggcgacgcggggggtcgggggaggagggagcgttcctgcaaatcacatgattttcccgcttatataaatcacagctt

SEQ ID NO: 203442 - DNA, 122 bp, Homo sapiens
ttcaattctcattctgatatttaggccttgtgtggctttgggcaagacacttccgttctccgagcctatcttcttgtccataaaatgaggggttggaccatattctcttcatatcactccag

SEQ ID NO: 203443 - DNA, 122 bp, Homo sapiens
ccgcaaactgctggctgctgagccgctctccaagatgctgcctgtggacgagttcctgcccgtcatgttcgacaaacacccagtgtgagaggggcaggcggctgctgggctggggtttcacg

SEQ ID NO: 203444 - DNA, 122 bp, Homo sapiens
tacatatggagacactgaagctcagaggtgtatgagattagcccaagaacactcagctgacgccagcctaagtctcaggttttctgactccacatgggtgcatagtcttagtcttctctatg

SEQ ID NO: 203445 - DNA, 122 bp, Homo sapiens
accactgcggcgcagccacagatcgcttcgcgctgcagcagacgctcccgccgcggggggcgactgggggaggggtctcgaccgccaccctgagttccgcagctcatccctcccatctggga

SEQ ID NO: 203446 - DNA, 122 bp, Homo sapiens
tgtagaccgggagcgtgggtgggacggtgtctggtgtataccgggagcgtgggtgggacacggtgtctggtgtagacggggagcgtgggtgggacacggtgtctggtgtagacggggagcgt

SEQ ID NO: 203447 - DNA, 122 bp, Homo sapiens
gcccacaatctccgggccagcctgcagggaggacccgcaatcttagagccaggtgccacgcgctttccccatcactcttcccccacgttaacctccgtccacccgctgtgctgcactcccca

SEQ ID NO: 203448 - DNA, 122 bp, Homo sapiens
cgcctgcgcagcggggctgagttggagaacgtcttagactacaagttccgggaatcagcgcggcgaggcctgagaagaagacgtttgcgcctgcgcgtcgcgggcggggcctctggggcgga

SEQ ID NO: 203449 - DNA, 122 bp, Homo sapiens
atcctacctcctgcttcaaaggggttcatccagagtgtacagacacaatgctccccaaagcgatcctctttgacaacatacagaacaaagcaggtaaagatgatatccaggcacacagatca

SEQ ID NO: 203450 - DNA, 122 bp, Homo sapiens
cactgcatacgtgaatagcatgccaaatactgtataaaccaatactggtttttttcttctcgggaggtactatataaataaagcacgtacacggtatctaatatcagaacattcaaatccca

SEQ ID NO: 203451 - DNA, 122 bp, Homo sapiens
ttcaaaacttcaaatcctgcaaaaaactgagtgggtctgtcctcggtggtggattagcgccgcttcgtggcggaaagcgacctctgcgcactcacatttagagaggcagggtcgagattgcg

SEQ ID NO: 203452 - DNA, 122 bp, Homo sapiens
ctcagcattaaagtaattgaatgcaaacgagtcaggacacagaaaaagtgaaaccccagccgtggggttctggcaaaagcatttccaatggtgggagtagaacaactgtccctggtcctcag

SEQ ID NO: 203453 - DNA, 122 bp, Homo sapiens
gccctgggcgtgacgttgttctagtgttgttgccagcagctgcacgtggtcggctgagtccgcctcagactcagagctgcgctcctcgacctcaacgccaggcggttactttgctgctcctc

SEQ ID NO: 203454 - DNA, 122 bp, Homo sapiens
acaggagtgtcccgcggaatgccctgccgcttttcgccacagcatctctcttgcactccgcgttcaactggctacctagagtcttttgctgatgctacttgcttttgccggactggaggttc

SEQ ID NO: 203455 - DNA, 122 bp, Homo sapiens
aatcggcacattaccgggggaccgcggggcgctcaggactgcgacaactctgtgggttaccgcgccggcctagcggcccagcgacgccccccagcggccagagaaggccgcgcttctcgggg

SEQ ID NO: 203456 - DNA, 122 bp, Homo sapiens
ttgctttaaatgttattcctttgttgtttccttcgctcacagtattttattctttttttccgccccttggtaaggtcttcgttgttagattatgatgaatattagggcagccttaaaagtct

SEQ ID NO: 203457 - DNA, 122 bp, Homo sapiens
caagaggaatcccttcctaagcctggagcccccttatcccagagtaaagcctccagctcccgctcctacctgagagcagcagggaaagacacagagcaggacagagctgtggagccagacct

SEQ ID NO: 203458 - DNA, 122 bp, Homo sapiens
aacggtgtgcgttcgtgaaatcggccacgaccaagaccccagtggggagggcctgcgcgccgctcagagagaccctttcatggtaattacagttccttggctgcctgggcgagaacccggtg

SEQ ID NO: 203459 - DNA, 122 bp, Homo sapiens
tcttccccactcctaaattctcccgacagaccccaaagcctctctgagagcctctctgaccgccctgcggcccaccccgagttcccggcatcctctgggatccctcttcctggagccaaaac

SEQ ID NO: 203460 - DNA, 122 bp, Homo sapiens
tacaatgaattttaaaaagtgagcccactcatgactcaaattacccaagtctgacccaagcgaaggtgcccctggagttctggaaaacgcaggaggcctccgcgggctgggtgcgccccgag

SEQ ID NO: 203461 - DNA, 122 bp, Homo sapiens
cttctgatgcggagtcagcttccgctaggaggggccgtaacaggaccagggcgtggctttcggctgctctgaccccgctgagtctggtgggcctaacactaggctggagatgcccaggctcc

SEQ ID NO: 203462 - DNA, 122 bp, Homo sapiens
caaatcctctttccacgccactatcaccattttcctttccaccaatcagcgcctgccagacgctgattttcccatcagtggaacaaggaataaatattccccagccgtctaaaacaagcggt

SEQ ID NO: 203463 - DNA, 122 bp, Homo sapiens
ttttcatcctggtttcccatttacttgttacgtgaactggaaaaattaacaaaacttcttcgtacctcagctcttctcacctgcaaaactaggatgtctgctaaaattggctgttgggtggg

SEQ ID NO: 203464 - DNA, 122 bp, Homo sapiens
cagtggtgcccagaggcttactttaaaacctgtcttgcctggtctcagattttgaggcctcgacccagtccgggtcctgcgcctaccggactgggtttggagaagtgcaaggagccaagaaa

SEQ ID NO: 203465 - DNA, 122 bp, Homo sapiens
ccggcgggctgctgggagtcgaggactgggttgctctcctcccttccccggtcccgcccccgtctgtctgtgtcgactgcggacgctatcgataaagttgctgttttgacaacatggcggcg

SEQ ID NO: 203466 - DNA, 122 bp, Homo sapiens
gccagaagcctgggcagcccttgctccagcagagaggcctgtgactaacgcagaacgctgcgggctatggggtccaggcatcggcacagagtccagttctgagccgggattcaagagaggct

SEQ ID NO: 203467 - DNA, 122 bp, Homo sapiens
aaacccaggacactcaggcaagaatgctccggcaaacattgctccaaaaaacaaaatgtccggtgaaaacatacatcatatctgcccaaaaggacaaatacattgaggaatatgcaagcgat

SEQ ID NO: 203468 - DNA, 122 bp, Homo sapiens
ttgaggttcaaatcactccatgggactgggaaagtgggaagtgaaagagggatgaaagagcgcatttgaagcaggcagactgagggtcagactccagaaaggacttcctcctaggactattt

SEQ ID NO: 203469 - DNA, 122 bp, Homo sapiens
tcaaggcccggagggactgcgggacgcgggcgggagcgagagccctgtgggctgccaagccggcgcggccgcgccgcggcagccgcttcccttgccaccttcgttccaggggctgcggggct

SEQ ID NO: 203470 - DNA, 122 bp, Homo sapiens
gcgcgagtgaaggcagctatctgcaggtaggtgtcctggcggaaagcctgaagtcgctggcgcacctcctcggagagcatctgggggtccgggccggccccttcctcagtcccagtgcctgc

SEQ ID NO: 203471 - DNA, 122 bp, Homo sapiens
taataagttataatacacacatatcactgacagattcatctttttgttttttagaattcacgaaataaactgtattctggtaaatcccctccccgcaacaagagtgtaatgtacctacattg

SEQ ID NO: 203472 - DNA, 122 bp, Homo sapiens
ggttggagtatcctgtgccccggcccctcgcatccctatgtcccaccctggcctcagcctcggaacctctcggggccgctctgcacacacccagcctttggctctcctgccccgagcgggtt

SEQ ID NO: 203473 - DNA, 122 bp, Homo sapiens
gctgtgctctgtgtggcccttgcctgcttgctatctctagctactaaacagcatgagtcacgttcccagaatgtatttgtagctctgttttcaggtcaagtggacaactttccaatttaact

SEQ ID NO: 203474 - DNA, 122 bp, Homo sapiens
aaggaagtgagggaagatgggagggtaagtcttccagtcaactatcgctctctctggggacgtcagagcttgggagggacccaaggggcacctgggctgacctcccatttcatagctgagaa

SEQ ID NO: 203475 - DNA, 122 bp, Homo sapiens
agacataaaattttatactcatgatcataactactagtaaagaaaagttatttgtggaggcgaatacagggacaatgtcacaacaaaagagtcattgtacaagagtggcagaagtgagtggc

SEQ ID NO: 203476 - DNA, 122 bp, Homo sapiens
atgtccaagccacgaagtgaaaaacagagttggaagccaagatgtggggcagtatgggctcgggtgtgcccataccttgtaatgttagaagtgtaagaaaaccctccagacttgtgtttatt

SEQ ID NO: 203477 - DNA, 122 bp, Homo sapiens
cagtgtgccgctttgcgttgctttaagagggaaaagccaaatacagaaagttggagtttgcgaagacaaacgaagaagatgtcaactgtttttgagaatgcttcggcgtgcacaaagccttt

SEQ ID NO: 203478 - DNA, 122 bp, Homo sapiens
agcaatcctcttgcctcggtctcccaaagtgctgagattataggcagaatccaccgtgcccggccctggggccatttaatgacacaaagtataacatcaaagcaggttaaaaaaaaaaaaga

SEQ ID NO: 203479 - DNA, 122 bp, Homo sapiens
agacgaggaggatgaggaggaagacagcgagaagacagaaagcgatgaaaagagcagcatcgctctgactgccccggacgccgctgcagacccaaaggagaagcccaagcaagccagtaagt

SEQ ID NO: 203480 - DNA, 122 bp, Homo sapiens
agcttgcctaggagcacatatctctacaagatggggctggactcacatctatctgccccacgcccacctgcttaacccctgttaagcagctgttctactcatccagaatgaaaatcagagcc

SEQ ID NO: 203481 - DNA, 122 bp, Homo sapiens
caaagtagataaatgtcaattatgaagagacatttattgtaatggaaataatggattcttcggtctagattttcatttactgacctagttcagggaagcttgtacttttagtggataataat

SEQ ID NO: 203482 - DNA, 122 bp, Homo sapiens
ctggagcagattagggacatggcgccgtcaccgtgctccgaggcgccacacgccgggctccgggactagcttctgagcctccgcgagccacttccggtcccccgctgctgccgggactgctc

SEQ ID NO: 203483 - DNA, 122 bp, Homo sapiens
tcggcgcgcttgccacgatcttggacgggtctcgggcctcgacctttgaattccccgctccggctccaagatgtcagcaacgctgatcctggagcccccaggccgctgctgctggaacgagc

SEQ ID NO: 203484 - DNA, 122 bp, Homo sapiens
gcctgagaagggctcagaacaaagtaaaaaaaaaaaaaaaaaaagtgggagtgggcagggcggagcaggagaccacaataagaagcaaatacgaacagatagtgaaagattgattatccgtg

SEQ ID NO: 203485 - DNA, 122 bp, Homo sapiens
cccctccggcggaggtcaatcacaatgaaaccgtgtccagcggacccggcaggggctcgccgcagtctacctggccaccgtgaagccatgacctggcgcccgaagctgccggccggggtgta

SEQ ID NO: 203486 - DNA, 122 bp, Homo sapiens
agagactcagacacggaatcgtagctcagctttattttctacagaaacaaacatgtaagccgtcctcctccagcgacaaacaatcaggcccccacaatgaactggccactcgtgctgggacc

SEQ ID NO: 203487 - DNA, 122 bp, Homo sapiens
agaagtcggccggcagtggggccgcctccttttcttcctcctgcttggacgactgtcttccgcctcaactgtggagcctcgccgaccgttagtcctcacagacacctcaggggcaaccgacg

SEQ ID NO: 203488 - DNA, 122 bp, Homo sapiens
gcctgcccctgccggccccgaccagcaccaggtgagaatggacacgctgccgcaggcctgcgtttctggagcagtcccgagcaggccatttgcacgccagggtcctcggcctctgtcagtgg

SEQ ID NO: 203489 - DNA, 122 bp, Homo sapiens
gtggggtgggagtggtgagtgaacagtgcagtaagccacaaatcagctctttcaaagagccgtagcctcctccacaccctggccaaggaattcagagcctgctgaccagcctttgttccctg

SEQ ID NO: 203490 - DNA, 122 bp, Homo sapiens
gcggtgggcccgggttcacgcctccaggagcaaggcacagaccagagtggtggggacctgcgctcgcccaggccccgaggcccgctccccgctccctctgccgcgccgggcaaggcctcacc

SEQ ID NO: 203491 - DNA, 122 bp, Homo sapiens
atacacacacacacacacaagctcccgtcgcggccccagctcctgcatcaatttcactctcgcatccactgctcccatcgcgatcgctcgcccccacgctccctcgccggcaaagccaccaa

SEQ ID NO: 203492 - DNA, 122 bp, Homo sapiens
catgggttagatactgcctaactccagggtgcctttcacataaactaaggtgtgaatacccgctgcgctgcacttgtgcagtacccatctgtgcagtcataggacttgacccctacagggta

SEQ ID NO: 203493 - DNA, 122 bp, Homo sapiens
gacgggaggcggaagcccttcggtccgggccccgcccccgcactcgccctcgccccgccgcgacttcccattcgccgccaacccatgtgcgttggtgacgtcaccgcgttcaccagcccgga

SEQ ID NO: 203494 - DNA, 122 bp, Homo sapiens
tgaacaaaaccatggggcaaccagacagcctgcagtggaggaatattctacctgacagcccgcggtggaggaatattgtaccggacagcccgcggaggaggaatattctaccggacagcccg

SEQ ID NO: 203495 - DNA, 122 bp, Homo sapiens
cgggcaccacctggggctgcccgtccctgtctttgtactggatcacgaaggagtcaaactcgccctcggggaccgtccagcgcaggagcaaggagtcggaggtcctgtctgtcaccgtcagc

SEQ ID NO: 203496 - DNA, 122 bp, Homo sapiens
ctgacgtcagcgccgggggctttgtgcgcccggagctagggcccgattgggggcagcgggcgcgcggagtctgcaggcaaagctcgcggcttcctctgggacccccccgggcgagcgccgag

SEQ ID NO: 203497 - DNA, 122 bp, Homo sapiens
actccaggttttattctgagtgagatgggggatttggaagggttgtgagcaggggggatgcgtggtctgtgttggaaagatcactctgaccacaagggcattgatagagaatctacccaggg

SEQ ID NO: 203498 - DNA, 122 bp, Homo sapiens
ctgttagcagactgagctttactgtcctgtgccggctgttcagagaccactgtgcctggccgaagactgaggcagggacttcaggccagggggccaggctggcttttcctgcctttcacttc

SEQ ID NO: 203499 - DNA, 122 bp, Homo sapiens
accgccccactccacgtcgcccggagctgaggcctgggagggggtcctgggcggagcgggcgggtggtcgggccaggccacgccccaggccacgccccaggccacaccccaggccacacccc

SEQ ID NO: 203500 - DNA, 122 bp, Homo sapiens
tgaccttgtgatccgcccgcctcggcctcccaaagtgctgggattacaggcgtgagccaccgcgcctggccgagaatatcattttttataaagaagtcaaaggtaatgaggactaagtaaaa

SEQ ID NO: 203501 - DNA, 122 bp, Homo sapiens
ggccttcctgtgttagtcagtctttcctgatcttcacatttctttagccacagatgataacggactgtagaatcccctaacctcttttgacagttctttcttgaattattagtgacattcgg

SEQ ID NO: 203502 - DNA, 122 bp, Homo sapiens
gtggatgtagccgctgattggctgactggggcgcagcttgacggcgtcgggctggagagccgcagtcccggctgcagcacctgggagaaggcagaccgtgtgagggggcctgtggccccagc

SEQ ID NO: 203503 - DNA, 122 bp, Homo sapiens
aagacacgctcatttgaaaagttaagagtcttacgaggggtgcctgggggtccagcctcccgccccgggaaccggcgtcaccgcagcccagccgggtccacgtcagtccctcgagtcccacg

SEQ ID NO: 203504 - DNA, 122 bp, Homo sapiens
cctcatcctgcttactgagaatttagtatttagtaggttagtctttttaaaatagttaaccgcagcctgcattatgaggatggcatgccagcataaggaagttagcatcatcttagagtgac

SEQ ID NO: 203505 - DNA, 122 bp, Homo sapiens
taaaaccaagcagctgtgttcacattaagatccaaacggaaacccagctgaagtaggagccgttggatctgtcccaccaacctgttgtgagcatgagctaggtaaatatttggctgatacaa

SEQ ID NO: 203506 - DNA, 122 bp, Homo sapiens
tccagctccccgggttcgggagaggtcggagggccagagctggccttgatcttggacggccgcgcggccaggctttccccgtctccgccttccccgccggggtccttagtgtgctcagagct

SEQ ID NO: 203507 - DNA, 122 bp, Homo sapiens
tagtaagcatgtgccgaaccctttacgtgagtcaacttagttgatcctcagataatcctgcggcagagtgattgttccagccacagatgaggaaacgcagagccttccaggtgttataactc

SEQ ID NO: 203508 - DNA, 122 bp, Homo sapiens
atggaaagaagagacttctaattaaagcctctaacaacagggccaagaaaccgaaggtcacgggcgaggcgctcacagccccgccttctgcatctctagacggagtctgccgagccaggcgc

SEQ ID NO: 203509 - DNA, 122 bp, Homo sapiens
gggggagactatggaagttgctgaggaggagggaacaggtttgtcaaaagtttaaatccccgtggaaccagtccctagatttgaggtgaatcatacttactgggagatagtccagaagagcc

SEQ ID NO: 203510 - DNA, 122 bp, Homo sapiens
ggttagagtattaggatgggttgaaacctgtcagaagaatgagataaggatgtgtgagtacgtgaaagagattgagtgtaggttatcagacagccaagaaagcagtaaccaagggaaaaacc

SEQ ID NO: 203511 - DNA, 122 bp, Homo sapiens
ggcatgttacagtgttcttttggctctgtcgtccgtggacagcttaagtgttaacagctccgtgggcccgcggttgccctccaccagcaagggcagagggccagcgtgacagcttttgtatc

SEQ ID NO: 203512 - DNA, 122 bp, Homo sapiens
caaggagacaccccagcgctgggatccggcaagtcctccctctgagtggccagggggcctcgtcccttctcccgatgccttctgcccttccttgggtctccggaacccagcttgtcctaacc

SEQ ID NO: 203513 - DNA, 122 bp, Homo sapiens
cgtctcctcgtctccgcaggccacagggggttcggtagagtctgaggatagggcagtcttcgctcgcggctgcaagatctctgaagggggccggcgtgcggaggctaggggaccgggaagga

SEQ ID NO: 203514 - DNA, 122 bp, Homo sapiens
ctaccacctgctacagtcaggagcccccagctgccacctggatgtcaccactcaaaggaacgggacacatccccagtggaggccctgggcatgctctggcctccccctcacagctctgggcc

SEQ ID NO: 203515 - DNA, 122 bp, Homo sapiens
agcgcgagtctcagggtgcttagcactctccaggcccggcacccgcgggaacgggggacacgcgggacttcggcagtcccagtaacttgctttgctgttctgagacctcagcggggcggtca

SEQ ID NO: 203516 - DNA, 122 bp, Homo sapiens
ggactgggtctctctatcctgctacagacctcaccactgaggtgtaacttggccaagtcacgggtgaaaggtacgtgagggagcccatatgtgcttgattctgccacatgggtgacggccca

SEQ ID NO: 203517 - DNA, 122 bp, Homo sapiens
tcgctagcctgtgggcgttccagggcaggggacgggggcggcaccttccaggtgtgcaggcgagatgacaagtgcggtccctccttcctccctccccgcgagcaaacagcctgggggtggtg

SEQ ID NO: 203518 - DNA, 122 bp, Homo sapiens
aagaggactgtggtgctggacgaccccgagcccccagttgggtgagcaagcgtgcagcagcgagaaatgtctgagcccccaggcttcaagcccacttcgctcagcctgggtctcacccactg

SEQ ID NO: 203519 - DNA, 122 bp, Homo sapiens
cacgcgcgctgaggctccgtggggccgccgcgggccccgccccgaggtgggagggcctgacgcatccacagctggccaatcggcggatggcctcgcgcgcccgccccctccccctgcccccg

SEQ ID NO: 203520 - DNA, 122 bp, Homo sapiens
gattctgtaaaaatagtcgagtagcttttgcctcccacagatgtcattaggttcttctaacgtctaaagtgctgtgagtatggaggaacattgtcagacacaagaaagagcatcaagcaagt

SEQ ID NO: 203521 - DNA, 122 bp, Homo sapiens
ccctggagagaaccaagccttagttctctgtccgccggagtgcgtagggtctccccaggccgggccgctcacaaaactgcctggtgcatcctccccagcgagcagctgatgcagctgtacag

SEQ ID NO: 203522 - DNA, 122 bp, Homo sapiens
atgcgtgcggtgggctccgggctggcgagattgtacgcccggggcgctgtgggtgaagagcgccgggggaacctttacgcgaggcagcaatgacaacgcgcgattttaaaggcgagtggtga

SEQ ID NO: 203523 - DNA, 122 bp, Homo sapiens
ctgtgcctgtccatcaaggcagagcccacatccaattggtccgtctgctccattagaaggcggtcctatagctcagtaactgacttctttctaagaccaaatggagcagctggcatgaagtc

SEQ ID NO: 203524 - DNA, 122 bp, Homo sapiens
ccctccgcgcgctgcctcctgacatcccggcgctctcagcccactgaggggaaacccgggcggtgcagccctggagaaaagggatttagttttaagccagtctcccatcgatcgggtcggta

SEQ ID NO: 203525 - DNA, 122 bp, Homo sapiens
ggttccgggacgatgatgcacattagtccctgagaaacccttcacgtgggagctggcggacgctaaggctgtgaagtacacagcaggctttccaagggctgcagtgtggacatctgggcctt

SEQ ID NO: 203526 - DNA, 122 bp, Homo sapiens
agtttaaatatgccccaaaggttaagcatccatactctaagtaaatttggaggccaggcacggtggcgcacgcctgtaatcccagcactttgtggggccgaaacaggcagcttatttgaggt

SEQ ID NO: 203527 - DNA, 122 bp, Homo sapiens
gcgttttctaatgataatgactgttcctccttctgtctctgctcccacttttaaaagattcggattatttgtccactgttcagcctgcatttcaaaatagacgatttaaaaaagagtgagaa

SEQ ID NO: 203528 - DNA, 122 bp, Homo sapiens
acatagggagcaggtttggagtcttggcaacgacctccgagctagcaggggctggcaggccgcagctttctgggccgaaggagacttcagctctaggcaaccccggtcccttacagcttggc

SEQ ID NO: 203529 - DNA, 122 bp, Homo sapiens
accagtttggggagaaatcagaagcagcaaaatgtttcctccttgtaaaatgtgttgcttcgggctggcaaattagcaactccagagaacaaattcacggatttgtcgttagtcattctctc

SEQ ID NO: 203530 - DNA, 122 bp, Homo sapiens
taattataaatgatgacctaaaataggagcctatgttaaagtccagtacagaagctagtccggcagattttgacattttgctggcattttaaaagagaggttgggccgggcgtggtggctca

SEQ ID NO: 203531 - DNA, 122 bp, Homo sapiens
tccccccacaggcgacattgactacagcaccgtgctcctcggcatgctggtgacgcaggacgtgcagctcgggctcttcatggccgtcatgccgactctcatacaggcgggcgccagtgcat

SEQ ID NO: 203532 - DNA, 122 bp, Homo sapiens
tatccaatgttgaaaaaaattccatttgaatgggataattagagtagcccccacttaggacgtaaattgtaccccactgcagccaggaccagaatgctatcactctcaggaatgaaatcatt

SEQ ID NO: 203533 - DNA, 122 bp, Homo sapiens
agtttggcggcttttggctggttgcgcgtgcaacccggggcgtgttagcactgcaaagggcgcctggaaagggtttgcagttcctcctaattctcagctttcttttcttttttttttttcga

SEQ ID NO: 203534 - DNA, 122 bp, Homo sapiens
ttgtcagggaagagtccatagaaggcgtcacctttaggagacatcctctgtcatagtgctcgcagccccgctgacctcgctcttgaccgctggcgccatcttcccgggccgtcgccgccatc

SEQ ID NO: 203535 - DNA, 122 bp, Homo sapiens
ggttcaaggccaaaccgaagttactggcttctatcttccaggagaaccaggagccacagccgcggctcacgccccaccgcaacattaaggtgagtcgccgggtggcggcctggcggggcagg

SEQ ID NO: 203536 - DNA, 122 bp, Homo sapiens
tcctgtatgaagcgaaggcactgaacacactccagcctgcaacgcagaagtgcacattggcgtggagcatttgaaaggcattttctccttggaaactgaaaggtcaatttgtcaaactccac

SEQ ID NO: 203537 - DNA, 122 bp, Homo sapiens
ctataaatgtccaaggtggccccaagggaggacttctgcagcacagctcccttcccaggacgtgaaaatctgccttctcaccatgaggcttctagtcctttccagcctgctctgtatcctgc

SEQ ID NO: 203538 - DNA, 122 bp, Homo sapiens
ggggctggctgcgcgaagggggcggggcctccggaggctggccagccaattgaggtcgtccggaaaaaagtggtcgcggcgttgccaaggtaggctgcgcagtgtctgggatgatgtcatgg

SEQ ID NO: 203539 - DNA, 122 bp, Homo sapiens
tctaatgcacttaatttgcaaatgtactccttaactttgaatacacttttttctctaaggcgaaagtctagaattggagactcttggattcttcttcccattcttttccttcttccttggaa

SEQ ID NO: 203540 - DNA, 122 bp, Homo sapiens
gtcgttaatttgtcaaaggtcacccgcaggcgacaggcggggacagggtctgggaaaacccgctaggcaccgaggcccagagggcgtcgggcgtccccgcaccgagtgccgcccgccgcgac

SEQ ID NO: 203541 - DNA, 122 bp, Homo sapiens
gcgggccgggctcctgacgtcacctcacggggaggcggggctgtgggaaccgcagtgcagcgcagaggggcggggcctgcggcgcgagacctggtgcgggaggcccgggcagggagaagtgt

SEQ ID NO: 203542 - DNA, 122 bp, Homo sapiens
ataccagaaagctgatgggacactccaatcaacagacccctacttaaagaaacagccaggcgcagtggctcatgcctgtaatcccagcagtttgggaggccgaggcgggcggatcatgaggt

SEQ ID NO: 203543 - DNA, 122 bp, Homo sapiens
gaaggcatttacctccctggcactttgatccaagttccctattttcccctactggtcgatcgaggttgggaacagttgctctaacctgggaagcacccgccacgatccagcagggcgcggtg

SEQ ID NO: 203544 - DNA, 122 bp, Homo sapiens
ggggcctctggggctcagcacaccgcctcggagctgcctacccactcgagatctgagatccgaagcttttcacacaagctgtcactcatgctcatgtggaggtaaagcctgacacattccaa

SEQ ID NO: 203545 - DNA, 122 bp, Homo sapiens
cgggagacttcggataagttcgagcttgttcgcctaagtccggttacgctcggtctgcttcgaacaagtccgggtgacgctcgggccgggtcgggcatgttcggtcacgtccggctacatga

SEQ ID NO: 203546 - DNA, 122 bp, Homo sapiens
gccaactggaggacacccactacacacaggttgaacccagttggtggccccagcttcactcgtcttgctccctcaggtagtctttgctataatgctaagccattgagtctgagggcctgatt

SEQ ID NO: 203547 - DNA, 122 bp, Homo sapiens
accctgcccccccccccctccccccccaaatcgtcttcctcccatggcaatgactttaggcgcctgtgagaggcacaaaagcggcaaagcttcttctactagttcttctggtaggcttcact

SEQ ID NO: 203548 - DNA, 122 bp, Homo sapiens
ctgccccgcctggcctctctgcctctacctggcacctatacattctatgtacatacaaaccgggcccccggtcgcgggagggcgcacggggaggccgcagcgctcgtacctatacatatgta

SEQ ID NO: 203549 - DNA, 122 bp, Homo sapiens
ccactcctaaatttcaaataaaggttacactcatattccctggcttaaaaatttttttgacgataattcagggttccccagctgctaaaaacaagatgttatttgtctaacaatgaaaaaca

SEQ ID NO: 203550 - DNA, 122 bp, Homo sapiens
gattgccggcccggacattccactgaattctgtgaatgtgtagcagggttggaggaccctcggaataacccccttggggaggtggacaaggacaatctcagcgaagagcttgctcccctcct

SEQ ID NO: 203551 - DNA, 122 bp, Homo sapiens
cgtgatctgcccgcctcggcctcccaaagtgctgggatgacaggtgtgaaccaccgcgcccggcaagtcggggccaattttaaagcgcagtcttttcctggcacctccgttccatctgtggc

SEQ ID NO: 203552 - DNA, 122 bp, Homo sapiens
cttgtgaatgccaaaaaggcagcacttcgtccgttttgtcacctgcgcccgtaacagtgacggtatgtaggaaacatcaatatttgagtgaatgaatgaacccaatgcactgcatctaaaaa

SEQ ID NO: 203553 - DNA, 122 bp, Homo sapiens
ccagttttagcctggtgataaccaccttgcttgggtgaatgcccacgtggacagtcgtgccgttggccttctcacgctgcacccgctcgatgtagatgacatatttctttctgtacacctgg

SEQ ID NO: 203554 - DNA, 122 bp, Homo sapiens
cgcctagcacagaatagggtctcagcatcttctgccccccaagagcatgaatcaaaggttcggaattgcgtcgtctctcggctgccccttggcagccaggtcctcagtgacctcttcacagt

SEQ ID NO: 203555 - DNA, 122 bp, Homo sapiens
tgccgttcacagtcaccgacttgagctgcccgtcttcctccacctccacgcgctcctgcccgttctccacgatgcgcttggtggtgaccttgtggccattgatcatctcggtggacgacatc

SEQ ID NO: 203556 - DNA, 122 bp, Homo sapiens
gagacggctgaggaaagttgggggtcggggccttggggcggggagcgcggaacccggcgccgatgcccgcgttcatgaatatgcacgagccacctccctccctccgtgacgtcacgggccgt

SEQ ID NO: 203557 - DNA, 122 bp, Homo sapiens
cagaatcttgctcttttgcccgggtgggagcacagtggtgggagcgcagtggtgcgatctcggctcactgcaacctccacctcccaggttcaagtgattctcctgcctcagcctcccaggta

SEQ ID NO: 203558 - DNA, 122 bp, Homo sapiens
ctaagaagccgaaagatgtccaggtcgggcgcggcggctgagaaggcggactccagacagcgaccccagatgaaggtgagaaacggactggtgcttccaaggtgtgctcctgcctcggtttt

SEQ ID NO: 203559 - DNA, 122 bp, Homo sapiens
acctgtttgaggttgtccttttgccctctggagatgagccaccgttagcactaggctggccgtaccagaaaagcctgaagaagcacttttgcctgtgttcccaacaatcaattgtgtatact

SEQ ID NO: 203560 - DNA, 122 bp, Homo sapiens
atccaccggaacccaagcccaggcaggcggtgagagggcggggcctccgcagtgcgactgcgccgctcgaggccgtgcgtcgcgggggcggggccgcgcaggcgtaccgggtgccccggctc

SEQ ID NO: 203561 - DNA, 122 bp, Homo sapiens
agaggacgcaggaaattagccaggttgcgagttgcaaagctgctgccgcggcgccgggaacggagcgcgcccaatctccagcgggagccgccaggcctggcctggccggggcttcccttcgc

SEQ ID NO: 203562 - DNA, 122 bp, Homo sapiens
ctttccaaataactacccttgaaccactttattagcagtacttagtccagcactcgctcccgggaggggcgggggacgggggccttcgctcacctttatttattgctgctttctcccccctc

SEQ ID NO: 203563 - DNA, 122 bp, Homo sapiens
ccggcaggaacctgccccaatgggctgcagagtggttagtgagtgggtgacagacagacccgtaggccaacgggtggccttaagtgtctttggtctcctccaatggagcagcggcggggcgg

SEQ ID NO: 203564 - DNA, 122 bp, Homo sapiens
ggacacggagcaggtcaaactccccgtgttgggcgacggtgggaccgcgcctgcgagcaacgcctgcagttccgcccgggacatccgacgagacccggtctcttttaacttcccttttcggg

SEQ ID NO: 203565 - DNA, 122 bp, Homo sapiens
agatggccgtcgggaaagcacatccgggaaccctgccgtggttgtccagggctgacgcagcgtcaatgtggggcggggcctcctctctgaggaggaaccaccccccacctctctgctttttt

SEQ ID NO: 203566 - DNA, 122 bp, Homo sapiens
cgggtgggagtggtgaaagggccgcgacccggcctgggccccacctagactctcaagccccgccccactttcgggcatttttcagttccaggctcacagccaggacggaagccgctgccccc

SEQ ID NO: 203567 - DNA, 122 bp, Homo sapiens
attactgggtatatacccaaaggattataaatcattctactggtcgggggcggtggttcacgcctgtaattccagcactttgggagggcgaggtgggcggatcacgaggtcagaagatcaag

SEQ ID NO: 203568 - DNA, 122 bp, Homo sapiens
ccgcgaggctgccgagtaccagcctgcggtccctcccttctgccccccagagcccacaggcgcatctgctgctgggctccgcggcgggcctataggttcacaactgccccatatttatcacc

SEQ ID NO: 203569 - DNA, 122 bp, Homo sapiens
cagcaaatcctagtcagccctcctgctgtctttccatcagccagtacccatagtactgcccggcagctccagctccagcactgacatgagccttccgggggacccgtctctacctgaggtcg

SEQ ID NO: 203570 - DNA, 122 bp, Homo sapiens
ggggttgggcttggcctcagggcgtccctggatcccggacgcgcttggggatctccggctcggaccccaggagcagagacagcgctcgagcttgtcactttaaattcaagagggagcgggcg

SEQ ID NO: 203571 - DNA, 122 bp, Homo sapiens
tcatcgaggactaggggccgcccccacctgcggccgccccccgcccctcgcccgcccacacggccccttcccagccagcccgccgcccgcccctcagtttggtagtgccccacctcccgccc

SEQ ID NO: 203572 - DNA, 122 bp, Homo sapiens
tggcaaaagaaaagtgggcctgcaagccggtctataaattagagactcattaacaagaggcgggaagggctttgggggcctgcgcctttcgatttcttgttgagctggtttattgctattgt

SEQ ID NO: 203573 - DNA, 122 bp, Homo sapiens
ctgctccacaaggtggcgagcctggattttggcagcgttgatctcctcacccatgctgcccgtggtgtccaggacaaagctcaggctggaggctggggtgatgtccagcagcctggggagca

SEQ ID NO: 203574 - DNA, 122 bp, Homo sapiens
tcaaaatctttttgcctctatccgctcgccgtagcgctttagcccgctcgagtttcaatgcgcgttgttgcttaacgaagcagagtcctacacactgtctgctgctctcctgatcatggctt

SEQ ID NO: 203575 - DNA, 122 bp, Homo sapiens
ttcaaatcattacttctacctccataattaatatggtattctattataatcaacagcctacgttatgtccccagttatatactctttaaaaaaagggggggctgttctctatgaccattgta

SEQ ID NO: 203576 - DNA, 122 bp, Homo sapiens
ttctctctaggtgtcagttgacctcagtgaattctgtgatgtttctgagatgcagactcccgtgtagtttcagattcttggtccatggatgacaccacctgcccatgcttccttgaattagg

SEQ ID NO: 203577 - DNA, 122 bp, Homo sapiens
ggggcgtctgcgggtgccggtaggagaggatatccaggctgccagacggactttctgcggcgcgcaagtgatgcccggcgcaggcagaggaaacgcagcgaccacacattgaccgctctccc

SEQ ID NO: 203578 - DNA, 122 bp, Homo sapiens
aggaggtgagaggtgcagtttggggctccaggtggttaattttgcaggttcgtgcatacacgcccgccatccaggtgagatatgtgcccccaccaggtaccttccaggaaggctcaccgggg

SEQ ID NO: 203579 - DNA, 122 bp, Homo sapiens
gccgccaaggtgcccacgccacccggggtgcctgccatccccggttcggtggccatgccgcgcacctggccctcctcgcactccgtcaccgacatcctgggcatccgctccatcaccgacca

SEQ ID NO: 203580 - DNA, 122 bp, Homo sapiens
aaggagcaagaagggaccagccgcccgcgcttcccgacgctgccaggcaggctcccgggacgggcagagctccgaggctgcctccgggcagtcacgtccaacgtacctgagcccggccagcc

SEQ ID NO: 203581 - DNA, 122 bp, Homo sapiens
gcctggtgcgcggggctgggcaggccagggtaagttggtgcggcttgcggggctgggccacgatgggagtctcctgcctgcctgtgtttgtgtgtgtgtgtgtgtgtgtgtgtgtggctttg

SEQ ID NO: 203582 - DNA, 122 bp, Homo sapiens
tcctaatttcttgccttggctggataactcggctgcaaaaggtaagattctttgctcttccggttttcgggatcagaggtaacccgggggcctagcacaggtggtctcacatctgggaacga

SEQ ID NO: 203583 - DNA, 122 bp, Homo sapiens
gtctccgcggtgaggtgtggagggcaggggcgggtggggaggtttgttgtttgggaactgcgctagcaaaggaagcggtggctattcgcttggagaggatgacaaatgaactggttgcgtga

SEQ ID NO: 203584 - DNA, 122 bp, Homo sapiens
gcccgcactctatctcctctggaatgtcagctttcagatggactgtactaggtttgttcacggctgaatcctgtttttagagcagttcttggcaagctcagtaaggttttcttggattaaac

SEQ ID NO: 203585 - DNA, 122 bp, Homo sapiens
gctggcggcgtcgcccgggcacccggcgaaatcccccaggcagcccccggcaccgcgccgcgaccccttcgacgctgccaggggcgccgatttcgatcatgtctacagcggggtggtgaacc

SEQ ID NO: 203586 - DNA, 122 bp, Homo sapiens
tagagatgtctgaatcattcagctgaaggaaagatcagacattgaccatgataagatagacgccaagacataaggcaagcctgagctaacatcccataacatgtgaagtaatgcaaatgtga

SEQ ID NO: 203587 - DNA, 122 bp, Homo sapiens
actgtagctttaaggagggctggggccgggtgcagcggcacctggagtctcggtggaacccggcagcggtgggcgcggaccccggagaggctgccccgagcccgagcaccccctgaccgggc

SEQ ID NO: 203588 - DNA, 122 bp, Homo sapiens
ctcccctagctttgtactcgctctgcgcgctactaattggtgctagccgtctgcggggggcggggtgaagctgtgatggacattttcctcctccgctccattttgggaaaatagcgtctctc

SEQ ID NO: 203589 - DNA, 122 bp, Homo sapiens
aaatacgaatgataacctaggaaagaacagtgaaacaaatgatagacaaaatagtcacttcggcaatgctgttaagaatataggcctccaagttaaaaatggatttgaattctagttctgct

SEQ ID NO: 203590 - DNA, 122 bp, Homo sapiens
caaacttttttttccaaactttctaaatagtctccacttgctgtttgacttcttcatcttcgtctttctctttaacccactgtactttgtcaagaactatgaaaggtctgagatttcatcct

SEQ ID NO: 203591 - DNA, 122 bp, Homo sapiens
gcctgagacagggtcatgggcctttgcccagctcgtctccaccccagagaaaggggcatgcgggcccctaatttatgggggttcacctggcgctcacagacccaccagttcctacaggcgga

SEQ ID NO: 203592 - DNA, 122 bp, Homo sapiens
catcgggtgcccctccccaaacttccaacccgtttgctccaggagttcctgccccatccccgagggcgcccaaatagccacactgtgtcctcctgtagtcgctgccccctgacctagcgcga

SEQ ID NO: 203593 - DNA, 122 bp, Homo sapiens
cgccaacgccagctgtatcacctgggaggggaccaacggggagttcaaaatgacggaccccgatgaggtggccaggcgctggggcgagcggaaaagcaagcccaacatgaattacgacaagc

SEQ ID NO: 203594 - DNA, 122 bp, Homo sapiens
agtttgaaattctgacatctgccactcctcatcccccactgtacccacaggatacatcatcgcccctctgtgaaggtggctggagcaggcctctggtccatggactgtccttcctggccctt

SEQ ID NO: 203595 - DNA, 122 bp, Homo sapiens
tctgtccccatagacaagttcagaggtcctcagctagaggctgctttgctctccaggggacgtttgacaatgtctaggaacattttggttgtcacaacttgggggcactactgatagctaaa

SEQ ID NO: 203596 - DNA, 122 bp, Homo sapiens
attctgcctgctgctcagggatgggcaaactacagcaggtcaaacctggttaaggctttgcggtggttaattctatgcgtcaatttagaaggtgttttggaagagatttaaatttaaataag

SEQ ID NO: 203597 - DNA, 122 bp, Homo sapiens
ttccttccctgaaagacagccgtgtccaactagaagtgggcctgacgcctcttattagcccggttgcatttctgtctcgctcttggctgcagtgtgtgagctgatgggccccacgtgactgt

SEQ ID NO: 203598 - DNA, 122 bp, Homo sapiens
ccaactccaaacccacattcacgccagcagcctctccaggaccggcctcgctacagccagcgagggctcgaaatgaggagtgccgcggctttcaaactccgggctccaacttgagcgccccg

SEQ ID NO: 203599 - DNA, 122 bp, Homo sapiens
ccttagccagagggggcccagctgtgctgcgctccagggggcctggttcaggggagtgtgcgggtgggagggagaaggaggggccctctgagggtctggggtctgccaccaggctctacctc

SEQ ID NO: 203600 - DNA, 122 bp, Homo sapiens
gcagagctgcgtggaaaggcgcggggcgcctgcgtggcgaaggaactcagctgcctgacacgcccgcaagtaccacggacctgctccggcctcggcctctgcgggccaaacgcggagcgagg

SEQ ID NO: 203601 - DNA, 122 bp, Homo sapiens
ctagctccccacccccacccaaattccgtttccttctggtcctggcctcctgcttgcggccgtctccacccctcacatccatgggatcctgcacaggtccacggttggtaaaccgcttagct

SEQ ID NO: 203602 - DNA, 122 bp, Homo sapiens
ccaggggtactgggttgagggaaacaggtgaggagagtcagaactaaagaactccataatcggtaccaaaaccgttttcaggggagtagacgaagctctggactgttttacaatgtgtccct

SEQ ID NO: 203603 - DNA, 122 bp, Homo sapiens
ggctattctctcgccagtgagtcccacttcggaagcacacattgcacagtcttttgcgagcgctctgagtatccttggacatggcaactccaagcctcagtttacccatctgaaatatgggg

SEQ ID NO: 203604 - DNA, 122 bp, Homo sapiens
gccatgtttacataataataaaacagctataagagggcagatgttttaggcctagacattcgctagtcagtaacatgtaaatgtgagagtcctcgtggttacggtttcacacctttccatgg

SEQ ID NO: 203605 - DNA, 122 bp, Homo sapiens
tggcggcccccgcagctgcggccctgtaactttaaacctggcctgagatcatcgttttggcgccggccaaacagagcccgagggcgggcctagcgcgcccggacggagaccaccttgcggcc

SEQ ID NO: 203606 - DNA, 122 bp, Homo sapiens
ggacgccctccccacgcctggccttgtccatctctcagactcggcaatgattggcttccgcggcgccaatctccacccgcagtctccgcctcccgcacctgtggtccgggcctcacggtttc

SEQ ID NO: 203607 - DNA, 122 bp, Homo sapiens
ctttcggggttttgtttaggatccggtggccagtatttaatattcagccactgaactatgcgctcatttgtaggtacttacggtagttgaaggcccgctccgatgttggagattctccagtg

SEQ ID NO: 203608 - DNA, 122 bp, Homo sapiens
tgcctttattctctacgagatagaaattttgagagaacaggccacaaacggtattatactcgtggctggagggtaaagcgcaatgcagctaaaatgccagtatatttgtatgagcagaaagt

SEQ ID NO: 203609 - DNA, 122 bp, Homo sapiens
ttcaggccaagtggtaggaaacaagtgtgtaaggaaatggaaacaagagagagttcctgacgactgcggggaaaggaagactcatcaagggcatctaaataattcaaaattaataaaacata

SEQ ID NO: 203610 - DNA, 122 bp, Homo sapiens
gccagaagagtaggtttgggagctgcccagcccggcctctaaccctgctctcttgcagaccgtacgcgtccagggcaatgacatctcacaccggcttcggctgtctgccgtgcggctgcagg

SEQ ID NO: 203611 - DNA, 122 bp, Homo sapiens
cactaattcaaatactgccttaaaggtcctaaatctagaatcctaagattttatacacaacgagttcctcttatcagttgcctctcatttacctgggcacagaactgctgttaaccaacctc

SEQ ID NO: 203612 - DNA, 122 bp, Homo sapiens
gcagaggcatgggtggggggtttgctgctgggtgggccgagcatgctctctctaagccgccggggacaggggagggtttttggtacctgtgtctgggggttgtggtcttgtggggcgtggtg

SEQ ID NO: 203613 - DNA, 122 bp, Homo sapiens
agtcccgcctcttctttgattcaaactcgcttccggaattaaataccaacgagacggcgccgggaactcggcgatcatagagagggagcggctggcgccgggcgaagaggaaggcgacttgc

SEQ ID NO: 203614 - DNA, 122 bp, Homo sapiens
ctcccaccggccctggcagcctttggttctgtgggagaaggagaaacagaatgggcaggccgtttgcccagggtccccaaacaccctggtcttctaagattggaggtgggtttgggggctca

SEQ ID NO: 203615 - DNA, 122 bp, Homo sapiens
ccgaatcgccgcgctcctgcgggccgcgcgcagggtcgccgggtaggcacaggcacgtcccgtggccacggacctttgccctctgaggcaccctagaccttggctttctctctctccattgc

SEQ ID NO: 203616 - DNA, 122 bp, Homo sapiens
tgagcccctcgcacctccactcggatcccgtacaggtatttgatgtggagcagcattagacgcaagatcctgtggggtcatggcaaggggtcccagtgggatccattgatgtccatctgcat

SEQ ID NO: 203617 - DNA, 122 bp, Homo sapiens
actgcacagccagcctccctgtgccaacccacaaagtggatcagtgccttgcacagcacccgcgccgccaccaatagacgcattcagttgctgatttagatagaaataaatgtttatgaatg

SEQ ID NO: 203618 - DNA, 122 bp, Homo sapiens
gagtgcggcgcgatgggcgggttccaggggaggagggggtgtggcctacgccctcggccccgcctcaccaggactctgcaactggctgtgacaggctgtgccagtcgcaggctctccaatca

SEQ ID NO: 203619 - DNA, 122 bp, Homo sapiens
ttaattttttttttttcttagacggagtctcgctctgttgcccaggctggagtgcaatggcgcaatcttggctcaatgcaacctctgcctgccaggttaaagcgattctcctgactcagcct

SEQ ID NO: 203620 - DNA, 122 bp, Homo sapiens
tctccccactgaggtggattctgctccctccgtgcacacacatgaagatgggagtggccccgtcagcgggcgccgactgctcgctcccttgtgtgtgcagctccccttttgctgtaaggaca

SEQ ID NO: 203621 - DNA, 122 bp, Homo sapiens
tctctcctagcagaggtggtgggaggggttggaatttggatgacaaggatctgtttgtgccgccttcattacacaggcctgagtggaatgggactgatagggcttcttctggtttctgcttc

SEQ ID NO: 203622 - DNA, 122 bp, Homo sapiens
gacagctacactgaagacctagataagcttgtccagtcactggctgtaaacctctctgtgcggatgatgcccaagtttgtatctgcagctccggccctctcgctctctcttaaaatctggat

SEQ ID NO: 203623 - DNA, 122 bp, Homo sapiens
ttctggctgtggccgctgcccaagctggcgctgctgcctctgttgtgggtgcttttccagcggacgcgtccccagggtgagtgctggagggagctcgtgtcccgggcgctgccgctgcgctc

SEQ ID NO: 203624 - DNA, 122 bp, Homo sapiens
aatatcctaggggaattttacttttaatgacacacggggtgtacacattgtgatactattcgtagtattctagaaagatattactcctcaggtcacaggggatgtacaccctgtgatattat

SEQ ID NO: 203625 - DNA, 122 bp, Homo sapiens
cccgtgaggccccctcacaccagacaatcccccgcgtggcccggacctaccggtccacagcgcgtgacaatctcccatctcgggcgacctggaggccctcgctgtggccagcttagctcccg

SEQ ID NO: 203626 - DNA, 122 bp, Homo sapiens
gtattattcctgacccgcgctttatcacgtacttcttctctgagatggccccagtgtgtgcggtggttggagggattttggcacaggaaattgtgaaggccctgtctcagcaggaccctcct

SEQ ID NO: 203627 - DNA, 122 bp, Homo sapiens
ttgcatcgaaggcttcttgattccaggctgcaccaacagatgtgggcctcctgtcccaagcgcccaccaacctccttgcagcgtggggaaactgaggcccgcagggggctcacgtgcctccc

SEQ ID NO: 203628 - DNA, 122 bp, Homo sapiens
caggcacagtgcacacggcccgaacacacggtgctcagaggcatctgcggtatgaagagtcggtccaaagccctgggctccagctgccactgaggggagcatccaagctctggagacagcag

SEQ ID NO: 203629 - DNA, 122 bp, Homo sapiens
cctgcgccgccgaggccgagtgacaaggcgcaggaaccgcctattcggtggggctaccagcggaaggaagtttactctgcagtggacactgttttagcactttaagagtagcaggaccattc

SEQ ID NO: 203630 - DNA, 122 bp, Homo sapiens
aaggaaagacagcagcttctccccaatattctgagcctgagtcgtctgagcccttggaggcgaagcaggggccagaaactggacgccagtcccgaagcagccgtccttggagcccgcagtct

SEQ ID NO: 203631 - DNA, 122 bp, Homo sapiens
ggacgctctgtttactgttggcctggatctcagagacccgagagggttccttgacttgggcggccctgcgccgcggcaggacgcgctggccagtggagttccttagcgcggcgagcaggagg

SEQ ID NO: 203632 - DNA, 122 bp, Homo sapiens
ccaagtaaactagaataataagctttatgtctcagatacctgggcttttgccggctggcgcgcagccccagaatcagcacctccccatgctcgcctcgtttgtgaagtgggtgctagcacag

SEQ ID NO: 203633 - DNA, 122 bp, Homo sapiens
attgttgtcatggaatgggaactcacccatcacaatgggcaaaggagtcttctaaaccctcggaggattcttgccactggttccttgcagctgtgactccccagggtaagaggcaaagagcc

SEQ ID NO: 203634 - DNA, 122 bp, Homo sapiens
cacaaagaaaacccaaactccccaaacgtctctaagcagcatggagaagagtctagtggccgggaatgccactacaggcttccagtctaggacggacagtcatctttcagctgcttcacgcc

SEQ ID NO: 203635 - DNA, 122 bp, Homo sapiens
cagaatgtctgagctttgctggagccagcagaggagaggatacaagtgccttcccttcttcgttgccagcatgagccttctccaagccccagacttaggggctctatgtgatgcccatcccc

SEQ ID NO: 203636 - DNA, 122 bp, Homo sapiens
gcccgcgtcgtcgctcgcggattggctggcgcggattccagctgctttccaagttggaggcgcctagtgagggtcagggaggcccggcccgcgccctccccgcccagccgcctccccgtcga

SEQ ID NO: 203637 - DNA, 122 bp, Homo sapiens
gcttaacttctcacagcaacttcctccactcggatgggctgtggtccctgagggaagcctcggcatctgaatttggcagggaatcccattcccatggaagtcagggctgccctcactcccaa

SEQ ID NO: 203638 - DNA, 122 bp, Homo sapiens
gacggccaccaacatctacatcctaaatctggccattgctgatgagctgctcatgctcagcgtgcccttcctagtcacctccacgttgttgcgccactggcccttcggtgcgctgctctgcc

SEQ ID NO: 203639 - DNA, 122 bp, Homo sapiens
cccgcgaggcccgggtcgctcgacggggaggagcagctgaggccacccccgccagcccggcgcccagctctttgttctccaagcaggaaggcggcctcctgcccacccgccgcctccaagcg

SEQ ID NO: 203640 - DNA, 122 bp, Homo sapiens
aaattgcagctcacacagccgggtgatggcgttcacggcagtggctagcagtggggtgctcgtcagcgcttaataatgaacaggctggggccgggtgcagtggctcacgcctataatcctag

SEQ ID NO: 203641 - DNA, 122 bp, Homo sapiens
aagcaactgatgatgtggttgatctctgcagaaaaccccacagaagccccaaactgctcccgctacttccagtttcggtgtgagaatggccactgcatccccaacagatggaaatgtgacag

SEQ ID NO: 203642 - DNA, 122 bp, Homo sapiens
ctccgtgagcacctccgacatctctgtcttggagaacaggccccctgcagggagcagagccgggagttcggggggaaggccggggaccccgccccaccaccagcctgcgaggtccagggatg

SEQ ID NO: 203643 - DNA, 122 bp, Homo sapiens
tcgaccccaacttcttacggttcgtttcaggaactttcttaattctctccgtctcctgcccggccacagagcagagttcacaatcggatgcgtttaagtcggatttttcgtgtcatgtgcaa

SEQ ID NO: 203644 - DNA, 122 bp, Homo sapiens
gccgggcgcaaggcgtggcgctgcggagagcccggcgcctttaggccccgcagcccctcgcgtctccttcccaggccacaggctatcaggtctctgggttccaggcggtccggttatccagg

SEQ ID NO: 203645 - DNA, 122 bp, Homo sapiens
tccggctagagccggggagggagggccgcctgcccgcgccacagccccaccgcccgcccgcggaccttcagccagctccggcccgcggctcccggctgaattaggcatctccgactccggac

SEQ ID NO: 203646 - DNA, 122 bp, Homo sapiens
cagcgcccggcccgcccggtccccgccccgccgccacgtggctgccccggctcggctgcgcgggtcccagctgtcccgtcccggcgggggcacccctgccacgccagcaccgggagtctcgg

SEQ ID NO: 203647 - DNA, 122 bp, Homo sapiens
gggagggcctaacggggagactccgggggcaatcagtgggtattcacagggagctgggcgcgagcatcagcgggatgaaaggcaggtcagggcttgcccgtcaggtccggactgcgccctgg

SEQ ID NO: 203648 - DNA, 122 bp, Homo sapiens
ctctgttgcaactactcaactgtgtagttgtgaagtgaaagcagccataacctggccgggcgcggtggctcacgcctgtaatcccagcactttgggaggccaaggcgggtggatcatgaggt

SEQ ID NO: 203649 - DNA, 122 bp, Homo sapiens
gccaggctgcaggcccaagatgccgtgaggacggcatggacgctgctaagtggtgtcgggcggctccgagtggctggtctcccagagctgacagctcttcgcttggggaataattaattcca

SEQ ID NO: 203650 - DNA, 122 bp, Homo sapiens
ggctgcgggcgctgccacctgctcccaggggtggtgcgtctccggtccagctgtgccgagcgctgccctgggtgcatccgtggcacctctcagggccccatccgccccgtggctaacagagc

SEQ ID NO: 203651 - DNA, 122 bp, Homo sapiens
atcttcgccccgcgcgggagatccggcctctcccgagatcttcaccccaggaaggagacccgtcctctcgcaagatcttcaccccacgtaggagacaggtcctctcgcgagatcatcacccc

SEQ ID NO: 203652 - DNA, 122 bp, Homo sapiens
gtgcctgacaattaagagtcagctattattatagtgctgaaaattaaagctcgatccctccgccccgccacattctcagggtcagattcgtgtacgatttcgttttaatgtacccttttctt

SEQ ID NO: 203653 - DNA, 122 bp, Homo sapiens
gaaccgtgaggtctaccccgggggccgcgttcatctccacgttcacgttgcctccagccgcgcactgaagagctttcatttcctgaaagatatttgtttaacggaattaggatctgaatatt

SEQ ID NO: 203654 - DNA, 122 bp, Homo sapiens
gagcgcagttgggccttgggttcgaaaagactggacagaggtttcagtgagccgagatcgcgccactgcaccccggcctgggcgacagagcgagactccgtctcaaaaaaagaaaaagaaaa

SEQ ID NO: 203655 - DNA, 122 bp, Homo sapiens
ctccattgcgtgggggggctgagctaggtccgtgaagcggggcggttgcgatcaaggccccgactttttttttttttttttttttttttttttttttttgagacggagtctcgctctgtcgc

SEQ ID NO: 203656 - DNA, 122 bp, Homo sapiens
ggcgtaggaccctctgagccaggtgcgggatataatctcgcggtgcgccgttttttaagccggtccgaaaagcgcaatattcgggtgggagtgacccgattttccaggtgcgtccgtcaccc

SEQ ID NO: 203657 - DNA, 122 bp, Homo sapiens
tacttggacttgacagtgccctccatctcctgcagcttgaccttaagctccttgttctggcgttccagctgctgccgagcattctcgttcttctgggcgtggctgcgctccaggttcaggtc

SEQ ID NO: 203658 - DNA, 122 bp, Homo sapiens
cggagggcgagctgggggcggggccggagggcgagctgggggcggggctgcgcgcgggggcgagactgcacggagcgtgtggggaagagagcacaggaggcgtggccacacggcgccgcgga

SEQ ID NO: 203659 - DNA, 122 bp, Homo sapiens
tccccccggggagcccctccgattggtctgtcttcctgccagtcaggcaggagggcgcggcgcccgccccgccccgcccccgcccccgccccgggcagatgccgggagctctcctgccgccg

SEQ ID NO: 203660 - DNA, 122 bp, Homo sapiens
gaagggtttctggttgcttaaccctccctccattctggctcggtggaggcttggggaccccgcgatcagacaaagacaccctaagaactcagcggcgtcaacatctaatgcgtcgactgtcg

SEQ ID NO: 203661 - DNA, 122 bp, Homo sapiens
cctgggctttttgtttgtttcagacaaaggggaaacatcgtataacatttctcaaagccacgtgaggtgcataataagcagagtcaaaggggagttttgattcatagtcttgcttcagtgct

SEQ ID NO: 203662 - DNA, 122 bp, Homo sapiens
ctcatgggaggtggcagctattgtgcaaaatcttaagagtagtggaacttcccatgtgagcgcagactcctcccctctcctgaaacatggaatttgcccatagagaagttggccaccatcct

SEQ ID NO: 203663 - DNA, 122 bp, Homo sapiens
gggggtgggaggagtatctgagggacacatgggtcgggggaggctgcgccctccctgggccggtccccggatggtcccggctgtttgtgcctcgctgtcggaggaaggaagcgacaggaggg

SEQ ID NO: 203664 - DNA, 122 bp, Homo sapiens
gaacccggcgcgggaggcgctccccgaaaagttcctaacagacaaggagcgcaagaagctcgagaagaagctgctggagcagaggcgaaaggaggagaagaagaaggagaaggagaggaaga

SEQ ID NO: 203665 - DNA, 122 bp, Homo sapiens
aaaaatgtaacatgttttatttgtcacactgtctggcataacaggtactcaacatatatgcgaatcaacttttccaagacagaaaatacttcagaggaggagaaatctgacctgggccctga

SEQ ID NO: 203666 - DNA, 122 bp, Homo sapiens
ggccgccgccgggcagctgtgcttgctctacctgtcggcggggctcctgtcccggctcggcgcagccttcaacttggacactcgggaggacaacgtgatccggaaatatggagaccccggga

SEQ ID NO: 203667 - DNA, 122 bp, Homo sapiens
aggctgggggtcaggacctggaagaggcttccaggtgaggcttggggtggagcctggtgacgaaagcgttaagcccaaactcggtccctggaggattagaggatgatctttaagtccccagc

SEQ ID NO: 203668 - DNA, 122 bp, Homo sapiens
gggcaggtggatttgctttcaccttggctcagcagtgagctgagagttgaaaagatgacccgaccacccccagcagcagcctagggacagctgacagagaaaagagaggctgcccagagtct

SEQ ID NO: 203669 - DNA, 122 bp, Homo sapiens
cttcctgcccccggggctggtacgtacaggtcagcacggccagggagcggttcttgggcacgttctcctccctctgggccacgaacgagctgttgggctccgcctggtaggcgcacagcgct

SEQ ID NO: 203670 - DNA, 122 bp, Homo sapiens
tcaaggcagctcagctctacctgcataggcagtggctgctcaaagccctccagcagttcccgtgccctccctcccactggctcttcgggcacatccaggaggtagggaggaactcagtgggg

SEQ ID NO: 203671 - DNA, 122 bp, Homo sapiens
ctgtacgcgtgggccgatgcccagcgctcggatggtcgccgacctgctaagggacaggggcgggaaatcggggctgcgcttcccaggaaagagacctcaggaacatctccgtgctccgtttc

SEQ ID NO: 203672 - DNA, 122 bp, Homo sapiens
acttggacttctttctcttgtgtgttctcgcctcctatttatttttttgatacagggtctcgctctgtcacccagactggagtgcagtggtgcaatcacagctcactgcagcctccatctcc

SEQ ID NO: 203673 - DNA, 122 bp, Homo sapiens
atcaggggaggtaggaggcccaccctacgccctgcccccgcggagcacaagccccgcctgcgtcccgagctcccgggtccgcaaagctgggccccaaagagctccaacgccggaaccaagga

SEQ ID NO: 203674 - DNA, 122 bp, Homo sapiens
tcgtgaaggaggtgggaagagtttgcaaggatgtttcactctgcagtcaacatccctccccgcggcaagacagtctagcagccccccaagagcaaggggggtaattcccttatctggtcccc

SEQ ID NO: 203675 - DNA, 122 bp, Homo sapiens
ctgcttggttttgataggttgtggtttcaccaccactgcgagcctcaaggcccctggcaccgccacagcaagggaaaaaactttgcgcgtgcagcccctcgatttcgcttcatgacaaccgt

SEQ ID NO: 203676 - DNA, 122 bp, Homo sapiens
caggtgtggtggcatgtgcctagctactcaggtcctagctactcaggaggctcaggtgggcggctcacttgagcccaggagttcaaggctgtagtgagccatgattatgccactgcattcca

SEQ ID NO: 203677 - DNA, 122 bp, Homo sapiens
cctcccgcaccctgcccgagcgtcccgcccagcgccaggtcttgcgcccctctcccggctcggctcccctgccgcagccctggcctcgcccagcgtttctccccagggctccctgcctccct

SEQ ID NO: 203678 - DNA, 122 bp, Homo sapiens
agagacaccacactattccccactccctgctggctcacggaagcccctgggcctggagtccgtccagactgggaaagccaccgggaactccggtgactactgcctccggtccagtcccatct

SEQ ID NO: 203679 - DNA, 122 bp, Homo sapiens
ccctagcccaaacctgttgaaccccaatctgcctcttagcaagatccccaagcatggaaacgtgcaaaagaagcccggctggtgagaatatttttgttttcatgaagttgcagagaaagcaa

SEQ ID NO: 203680 - DNA, 122 bp, Homo sapiens
ctcacaccctcatcagtgaacccctgggtacctgtgattccagccgcagtggcctgtggccgtccgtggactggaggcctcacccgcggcaggccttcactctcctgcctctccacaagaag

SEQ ID NO: 203681 - DNA, 122 bp, Homo sapiens
ttcagaaaatgtgtttatcaatataagaaattcagaaaaaccacagaacactttgtactccgacgcaaatttgtcaagtaaatcaaccagtgaccaattcacaagtgcttattgtatgggtg

SEQ ID NO: 203682 - DNA, 122 bp, Homo sapiens
gaggacggaggggtgtgctgcttaaggtgagacgtggatgcagccaagcaaactggaaaacgtcgagttttgaaaactgctttaagtaaaaatattctgaataaaattaggtaaatggcttc

SEQ ID NO: 203683 - DNA, 122 bp, Homo sapiens
acaaaatgtctgtaaaccagactttaatcttagaaatatatatatatttttactacctagcgtcagcagatattatatattctgaacacagagcagagaaagtgagggaattttccccagtc

SEQ ID NO: 203684 - DNA, 122 bp, Homo sapiens
aggagcagcaggttggcggacacccagaggggagaaacagggttggggtccagtgttcaccggcgggaaccaggacccaagggggacacagcggtcttagaataatgcaaggaagactttac

SEQ ID NO: 203685 - DNA, 122 bp, Homo sapiens
tggccacggaggctcgtggcagcgctgaggggaggacggtagcctcctgcctgtggctgccggggctcacatctgagcgccactggcttaccaggactccgactgggcttgccaggcagcgg

SEQ ID NO: 203686 - DNA, 122 bp, Homo sapiens
tgtgcccccctctccactcgggcccgtcccactgtgtcactgcccctgcctgtgacccaccgcagcctcagaggtggagaccaaggccactgctctgcacccattgatcctgacccctgcct

SEQ ID NO: 203687 - DNA, 122 bp, Homo sapiens
tcccttcagccacccaagtgtcacccgagcttgtcacgttttggtagcctttgctgaagacgtagggggtctgtttcatgcaagatctcaatgtcctaacacaggagatgtttattgtcaca

SEQ ID NO: 203688 - DNA, 122 bp, Homo sapiens
aagcggacgggacgaacctgactaaccagaaatcctcacctggggacagccggggcgccacgggcagtgggcgcgatggacccctcggactagacactcaatgcaacttttctcctcccaac

SEQ ID NO: 203689 - DNA, 122 bp, Homo sapiens
agtagatgcagaattcaaagatgtcggttgggagaaactagctctgatcctaacaggccacgttaaactgcccatctggagaatcgcctgcaggtggggccctttccttcccgccagagtgg

SEQ ID NO: 203690 - DNA, 122 bp, Homo sapiens
ccgctcgtgattggccctaagttccgggccccagtttcattggatgagcggtcgggggaccgggccaggtgactaagtttccgcggcgccttctccccggccactgcttgagccgctgagag

SEQ ID NO: 203691 - DNA, 122 bp, Homo sapiens
taaacacttagaaaaatgtcgtaaccaagcacactgtaaaagcattgcacagccaggttccgtggcatttccctcttttggaggacccaggattcagtgaaaaagtaagtttttaattcttt

SEQ ID NO: 203692 - DNA, 122 bp, Homo sapiens
atcccccactttccatccccatcaaagaatgctgtagagtatctgaccactttcatttcacgctataagaacctcagattgcaataaaattacaatgcaacaaaaacaaatttttctaagta

SEQ ID NO: 203693 - DNA, 122 bp, Homo sapiens
aacgagctgactatgaagctgagcgtggaggacgtgctgacccgcgccgaggccctgcaccgccagctaaccgcctgccccgtgagtccccgtccgccccgcagcgccccgcccgaaccccg

SEQ ID NO: 203694 - DNA, 122 bp, Homo sapiens
tctctatattttttcactggagtgcatgcgattctgtttgttttagtcaccgctgtatttcgagagcctcgaacagaactgtgcacataatgggtaccataaatatttgtttactgaattaa

SEQ ID NO: 203695 - DNA, 122 bp, Homo sapiens
acacccctcagcgtccgggccacacagacacagaacgcaagagagagactgacccacccacgcaccggtacccatagacgcagagaccgaggcagaaatgacgggattgccgcagaccggcc

SEQ ID NO: 203696 - DNA, 122 bp, Homo sapiens
atttcctcagcggattcccgaagtctccgcccgcggacatggtggaactagaggagctgtcgccgcctcagcccagagacctcccggaccgatgctgctccagccggctgacgaaaaaggcg

SEQ ID NO: 203697 - DNA, 122 bp, Homo sapiens
ataatttcacttaattttcatggcagctttgtaaaatatatttggtcttcctattatacacgtgaggaaatcatggccctgatgacctagataatgaataagtgtcagattgggatttgaac

SEQ ID NO: 203698 - DNA, 122 bp, Homo sapiens
cccgcctcgctccgctattggaaggaaagcagccaatgggagagccgaggcggggaggtgcggccaatggcgcgggcctgtttgattcaaaggttgcctataaagcgggactgcacgccggt

SEQ ID NO: 203699 - DNA, 122 bp, Homo sapiens
ctccagctagttctcattcatggagcagagattcaccccaggcacagcagactgagaatacgggggtcttgattacctttagttttaaggcagaggttccacactggaggaggcaaactgag

SEQ ID NO: 203700 - DNA, 122 bp, Homo sapiens
ttccctcctcaatccagctccagaggggaaatactggtctgattgggctgtgtcccaaaacgctgggccacgctactagtgggcaagatctccatgcattaaggtctccatgtggtctgcat

SEQ ID NO: 203701 - DNA, 122 bp, Homo sapiens
tttaattaaaaaagaaaacaggagggaagagagagtcttacagggataaggaaaccctaacgccaaagatgtaaagaatttacagctgatcattttctaacatagggcccaggaaactttta

SEQ ID NO: 203702 - DNA, 122 bp, Homo sapiens
accatatgctttcggtcaacgacactcaccacagcatcctctctggcggttgtgatctcccgccctggtcatgacactaggcgaccccgctggctcttctgcggctgctatcgctgctgctg

SEQ ID NO: 203703 - DNA, 122 bp, Homo sapiens
aggtagggtaagccgctcacctgagtctcccaacaccagtaccttcacccgatccagggacgccatcttgccactgccttccctgggttaacgcctgttcctggattgtaagccaatcagag

SEQ ID NO: 203704 - DNA, 122 bp, Homo sapiens
aatggggaaagctgagatgtccccagcagggggctttgggcgattaacttttcggaaagtcgccagagaaagtgtggtgcaggcttgcgctcttttgggtggagttcacaggagtagggctc

SEQ ID NO: 203705 - DNA, 122 bp, Homo sapiens
ggtttgctgtgagtagagacatagacgaaacctgtctgggagcaggaaagtcctgaacgccgtgggtgtcctctccgtgcagcctgttcgggagcctccaggaggagcgagcgcaggatgcc

SEQ ID NO: 203706 - DNA, 122 bp, Homo sapiens
ctccaggggaccagcagctggcagctccgctctcccaccctcaacaatgccgggtttcctcgcttctccggcttttacaagaggtcgggagaacgtttgaattgtggttgcttcttctttga

SEQ ID NO: 203707 - DNA, 122 bp, Homo sapiens
ggtggaggccttgggcaatttcccgtgttcccactgagtggggctgtccctgggcctgggcggggacgccaccaactgccaaggcctgtgtataagggcagccgccgccttagccacagacc

SEQ ID NO: 203708 - DNA, 122 bp, Homo sapiens
actgcgaatatgtcggggttttcagccagcacgccgggggcgttcagagtcatgtgtgtccgtgagaactccccgatgggtctgcctatcagctcgtcgaaggtggcgctccaggccctcgc

SEQ ID NO: 203709 - DNA, 122 bp, Homo sapiens
caaataagaatttaaaaaatagttattctactactgtagggtgctcccaaatattgctcacgtttaatacttacaacaactgctacaaactaggcaaggcaaatatccacacttcctcctac

SEQ ID NO: 203710 - DNA, 122 bp, Homo sapiens
agccaccgcgagtgaccccacccccgtgactccgcgcccgcccccgccccccaccccccgcggggctccccgcacccacccccacccccggcagggccctccagcccggccgcccgccgccg

SEQ ID NO: 203711 - DNA, 122 bp, Homo sapiens
tgcgtcgcgggtgacactgcggtgctcgcgagcagggtggcagctgcctctcggtggagacgtcttgggacccttgcgcccttcttctctccttccttcgctgctgtctcctttccttcctt

SEQ ID NO: 203712 - DNA, 122 bp, Homo sapiens
agaaacaagaaggagatgtaagtcacgggcaccagagcctcgtagagcagaggaagcggccgccccctagtctgcgccgagtggcaccaacaccgtgagccacacgctgcccagggcttcca

SEQ ID NO: 203713 - DNA, 122 bp, Homo sapiens
gctgctctgggatgtgctggtaacagggcctggactgagaccccgtggttgtgtcagtgtcgactttaggtgactcttcccccttacctgaggatgctgctgcctaggatctctctctgtgg

SEQ ID NO: 203714 - DNA, 122 bp, Homo sapiens
ttaattttacagatataaaaaaaatccgagtcagagaaatcatcacgatgaagtcagaggcgagaaactgtcaggtgcctacttgcttttgttaaactaacaacttggctctcagcttcctg

SEQ ID NO: 203715 - DNA, 122 bp, Homo sapiens
gtgggaagcaacgactactacatctccgtgtactcggtggagaagcgtgtcagatagcggcgtgacccgggcccaccaggccacggccgcctgctgtacatagtgaagctgtcactcgccgg

SEQ ID NO: 203716 - DNA, 122 bp, Homo sapiens
tggtgctggaaagcatgacagagattagcagctgtgaatcagccctctggctccataagacgttggaatacttttctaaagggatcctcctttgtactgttccctctctctttctctctctc

SEQ ID NO: 203717 - DNA, 122 bp, Homo sapiens
aggagtcaggagaaaaagtcattgttatatcccaactttagaagccgcttatcttggtaccgttctgaggttctagaaagcaagtaacttatatcagtttactaagtgtgggaaagtgaccc

SEQ ID NO: 203718 - DNA, 122 bp, Homo sapiens
ccccagtgcagagtggagacgaggtcttcccctccttcccagcttgcctgggcggcgacgcgtctcagagacctctgccagggtcaatcctggcccatgctactagctcggggtgtgaagtc

SEQ ID NO: 203719 - DNA, 122 bp, Homo sapiens
aggcagcccttgccttccgctctctgcgagggagcccctggagggcggcagtggaagagacgctctgaagcctcaacagctccagagaccagtgggcagcctttccattcctgtgtgccggc

SEQ ID NO: 203720 - DNA, 122 bp, Homo sapiens
agaggaataaaaataacaaagagttttggaatcatgtcccacagaataagacaaacgcatcgttgagaaaagccatccctgattcaggctggtgacctgccctgagtgccagagactggcat

SEQ ID NO: 203721 - DNA, 122 bp, Homo sapiens
cttgaactcctgatctcaggtaatccacctgcctcatcctctgaaagtactgggattggccgggcttggtggctcacacctgtaattccagctctttgggaggcggaggtgggaggatcgct

SEQ ID NO: 203722 - DNA, 122 bp, Homo sapiens
cccaggacagtcccgcctccgagacggccccgcctccaggacggcccctacctccgagaccgccccgcctccgggaccgccccgccccgcctcgcctccgacccgtcccccgcgcgccactg

SEQ ID NO: 203723 - DNA, 122 bp, Homo sapiens
gcggcagcggcgtggagaggatggggtatcttgagaggcaggcgcggttatttccggggacggtggccaaagtaccctcacacccagaggcgatgacagtcctgaggcctgcaaggcggggc

SEQ ID NO: 203724 - DNA, 122 bp, Homo sapiens
tttttttccctcctgggaggagccgttagaagggcaacattctcctttctcccccttggacgtgtgggtgttggggcaagggtgaggagtgacagaggtctcctgggaagaccataagatgg

SEQ ID NO: 203725 - DNA, 122 bp, Homo sapiens
atacagggtgtatgaccacgttatcaacgcacacttgatttaggttttgtattttagagacgggggtgtgagctgccaaagcaaggacttatgtgtaggaattattctttctgtgagcatac

SEQ ID NO: 203726 - DNA, 122 bp, Homo sapiens
ccgcgctggcccctccccgtgaggtcacgctcgcggccggacctcctggcggggccgccgcgcccagggtcctcggacctggcccccgccagggctcgcccccagcgcccctgtcccagcgc

SEQ ID NO: 203727 - DNA, 122 bp, Homo sapiens
gagcacgcgggacctcggtggagatctccagtgaggcttagaggagcccagggcctcgggcgggttggggtttgtcctcagtgcattggacgcgctgctctctcccctgaaggctgggctcg

SEQ ID NO: 203728 - DNA, 122 bp, Homo sapiens
aagctgcttcccactttggaaacgtttattctgagcaccgggaaggggggcggcggcgggcgcctcactgggtgttgagcttcttagtgtactcctcgagagcgctcaggaagctgaccttg

SEQ ID NO: 203729 - DNA, 122 bp, Homo sapiens
acttcaacttgctacacacttctatgtgttttctaagcaaccaccaattcagagtttccccgcaacaaaaggaaatagtcttctctggggggaggggaccatttttggtaggggagaaggga

SEQ ID NO: 203730 - DNA, 122 bp, Homo sapiens
agctaaggcccggcaagaaatcgagtgcagtgccggtgggctggcagtgctgggctggcccgggtgctaagcctctcattgcctggggcggaagggccggctggccgctcggagtgcagggc

SEQ ID NO: 203731 - DNA, 122 bp, Homo sapiens
gacggtatctactgagttcagaagcatccaggcactgtacttcccatgtgactgtggtctcgtggctgttctgagcttagtgcccctatctactaagtggacacagtaatacctaccttgta

SEQ ID NO: 203732 - DNA, 122 bp, Homo sapiens
cccaccttgcacccggggaggatgctcagagctgtgcagagcccgccgactcagccacgccgccacagactcgcctccccggcagaggcgaaaacaaaagcattaatcttccccaggaggcc

SEQ ID NO: 203733 - DNA, 122 bp, Homo sapiens
cgcggccggcggggcgggagggcgtagggttgcccgcgcgagcgcagggcgggaggcgggcgctgcacctgtcggcgccgctcaggactgggggcggccttccaactggaaggagccgggaa

SEQ ID NO: 203734 - DNA, 122 bp, Homo sapiens
ctccagagcacctttctttctgtgaggcccgaaacatgaccaccagcggccacgcatgtccggtcccagcagtgaacggacacatgactcactatccagccacaccctacccgttactcttt

SEQ ID NO: 203735 - DNA, 122 bp, Homo sapiens
tgtccaggaggaaaaaccgaggcagacaccagagctggggctcattcccacagttgagggcgcatcaccctagtctttaggcagagagtgcttcccatcatggcctgggccccagctcccct

SEQ ID NO: 203736 - DNA, 122 bp, Homo sapiens
gggaaggagataagacagaacgagacgtttcattttcagagagcaggaaggtgtcacacacgtccttgcaatgcgttctgatcatgtgccgccgtgaggttttggagcacggcgtcaccaga

SEQ ID NO: 203737 - DNA, 122 bp, Homo sapiens
aaatgttagttccagatattcaataaaaatgtgacgtttttaagagttctaaaaataactcgcacttctccacaccgttaaatggactctcacagccttgaatgagagagcaaaagtcccag

SEQ ID NO: 203738 - DNA, 122 bp, Homo sapiens
gctcaggcaggcggattcgggggattctgggaagtgtagtccagacgcctgtggcatcatcgacacttccggtctccgagcaggacactgctacttaacaaggtggtttgagccaagtatgt

SEQ ID NO: 203739 - DNA, 122 bp, Homo sapiens
gtgtgatcggggacagggtgggccgcgcactggctgtgtgatcggggacagcgtggtgcgcgcactggctgtgtgatcggggacagtgtgggctgcgcactgactgtgtgatcggagacacc

SEQ ID NO: 203740 - DNA, 122 bp, Homo sapiens
ctctgagctcgcgggctggacgctgtccgcggtgctgaagcggcgcccgcggcagggaggcggacccggagccgccgggcagcacacacccaatcccgggaccgccctcctcccaggctcgg

SEQ ID NO: 203741 - DNA, 122 bp, Homo sapiens
agtgttcagtctgaaatgtctattagaccggagactgctagatatgagtccaaagcctagcggagcagttagagttagagatataaatttgggagacatcagcataaagattatatatatat

SEQ ID NO: 203742 - DNA, 122 bp, Homo sapiens
ttggttccaggacccccacatgtatcaaaatctgtggatgctgacaatctgcagagagatcgtctaactgaaagcaaaaatcagttctatctagtattttctctgagactattccatgaatg

SEQ ID NO: 203743 - DNA, 122 bp, Homo sapiens
agctgccagcgctctctcaggagcatcctgccagcaccactccctaacttacagctccagcggcccccactgctggagaaatggcgcccgcctgcccttccagatctggcatgctggcctct

SEQ ID NO: 203744 - DNA, 122 bp, Homo sapiens
gcggggacaagaccgttgaggctgccaggcgagtcaggcctttctggacctcgcctgactcggctgggctgtgcctgaaattgacccagctctatcagggattatgaaaaaacaaggagtaa

SEQ ID NO: 203745 - DNA, 122 bp, Homo sapiens
ggccctgagcccgggcttagccttcgggtccacgtggccggaggccggcagctgattggacgcgggccgccccaccccctggccgtcgcgggacccgcaggactgagaccatggaggcggtg

SEQ ID NO: 203746 - DNA, 122 bp, Homo sapiens
agccgacaaccccgctggaaacaaccagtgctgggagccaaggccaaactgatgcaaaggcgctactgagccagagcccttctgcaccgagactaccccaggcatgcaccgccctcccaaag

SEQ ID NO: 203747 - DNA, 122 bp, Homo sapiens
gggctttgtcgagacttgagacgtcatccccataggcgaagcctgcggccccaccctacccgggctctctgcccctgcctgaagtctcagttgtggcgctgataacaacgctccctctgtgc

SEQ ID NO: 203748 - DNA, 122 bp, Homo sapiens
tcttccaggtccgcctcatctgcttcatgccattgccaaacccgaaaccaaagcgggagccgcccgggaaggcgcccccacctcgcatgccctggaacatgccgtactcggggatgatgttc

SEQ ID NO: 203749 - DNA, 122 bp, Homo sapiens
aggacaaggcctgagaaaactagagggaaaatcttgacaagatctggtgactgattagtacgtgagaagaggaaaagccaggccctgctgtctattctccagatggtgtctattttctacat

SEQ ID NO: 203750 - DNA, 122 bp, Homo sapiens
cctggtgctgctgcaggatatggcgggcttcgcaccttttgtcaacctgcaggtctgacccgcctgccaatcggagcacagctggactgtgtggctggggcctgacactgagctgtagggaa

SEQ ID NO: 203751 - DNA, 122 bp, Homo sapiens
agcaccgtgcacatgtgggtgcacaaacgtgggtgttggtgtggacggggcgcagatctccgtggatgaactgcgtctggactcttagattcataaaatattcgagggtttgggagtcacag

SEQ ID NO: 203752 - DNA, 122 bp, Homo sapiens
acagcaccccaactccaatttctagcaaggcctcaggcctcaggcctttacccgggggagcggagggagggtggaggatgaggattgggccctcaggcctttacattcagacaggggtggag

SEQ ID NO: 203753 - DNA, 122 bp, Homo sapiens
ggcaacattcaaaagcccaggctgccgtgtgaaatctcctggctcctcctttgtgattttcgggctaaaaataaaatccccgggaccccggtggctgccattgttgctgctattgaaacgtg

SEQ ID NO: 203754 - DNA, 122 bp, Homo sapiens
gtgagtgttacagctcttaaggtggcgcgttggcacgtctggagtctgtcccttcgtggtcgccaaaatgtgtccggaattagtgggttcttggtctcactgacttcaagaatgaagccgcg

SEQ ID NO: 203755 - DNA, 122 bp, Homo sapiens
ccgaagccacctgcgacccaagcacgcctgggccgtgagcgctgccggctgggtcctggccgccctgctggccatgcccacactcagcttctcccacctgaagaggccgcagcagggggcgg

SEQ ID NO: 203756 - DNA, 122 bp, Homo sapiens
ggcgccgcctcccggcgtctgagctgacacctccttagcgctggccgcgggccgcctctgcggcagcgctagtcgccttctccgaatcggctccgcacaggtaagatcaggggacccggcgc

SEQ ID NO: 203757 - DNA, 122 bp, Homo sapiens
agttttgtgggcgcctcttccctcactgaggggctcttcttctctgcagggcatggctcacgccgcgttgtcaggctgcaagccactgcgagagctgctctgatccccaagcatgctctggc

SEQ ID NO: 203758 - DNA, 122 bp, Homo sapiens
gtcatgggttaataaggccggccccgccttcaggagcggtccactgggagatgtgtgctgcgcagccctcttgcgaaagctctcccctggtgggacattctgggcacaaccaacaggccggg

SEQ ID NO: 203759 - DNA, 122 bp, Homo sapiens
agccctcccgggtccggcttcatccctgcccggccaccgaggccctctttttctgcaccgcggattctcctccgcctgcgtgttcggggcccttgtatccgatgtttctttctaaaagttgt

SEQ ID NO: 203760 - DNA, 122 bp, Homo sapiens
ggctctgcaggaagagctccaggagctccgagactgtcacgtccatgctgaggctgcgcccgccggctccgcgccccccgccccgcgtccccgttcccccgcgccgcggcacaaaacggctc

SEQ ID NO: 203761 - DNA, 122 bp, Homo sapiens
tgaggggcggggtgcaaccggaagtcgcagtattctcggctcggccattattctgtgcctcggctgccggaagggctcgttcctgtgtcatctcctagcggcctggcgccgaggcggcggta

SEQ ID NO: 203762 - DNA, 122 bp, Homo sapiens
cctgcttcccttgaaactcattcctgggaatctttggtgtggtagaagacaaaagttatgcggaaattgaatggtacccatggaggtttggaatagccatgtagctaagatgggagcagtaa

SEQ ID NO: 203763 - DNA, 122 bp, Homo sapiens
ccacggacccagagggatcctgatccatccctgagcagtactgcacaacacagagcaaatcgtgtttcacctcaatgagaagagcagcaaaacaagcctgataaaaatattcactccaaaat

SEQ ID NO: 203764 - DNA, 122 bp, Homo sapiens
cctggggcattccggctccaggcaggtagcacccgcgggcctcaggccctttcacttacccgggaaacgtaacggtccttaacggcagccaataacggctcccagcggcccaggcactggca

SEQ ID NO: 203765 - DNA, 122 bp, Homo sapiens
ccggaaagaatgttagatgtagaactctgggaacaagtagggagaaaccgtaacatcaggcgcaaaggcgacaggtcccagtaacagttttaacgttatggactttaagtagagctgccgtg

SEQ ID NO: 203766 - DNA, 122 bp, Homo sapiens
gcagcccgggcgggcagctttaattaccgctcgctgggcccattgagcctcgtgctaatccgggccgccaccgcgggcagcccaggcgggtgtcccctccccctgcggcccgggcacggggt

SEQ ID NO: 203767 - DNA, 122 bp, Homo sapiens
cgagtgaaactaggcggatctgagaggctcctgggcgaccacgcccaatccttcctttgccgccccgctggtatgtcccggacccccaagcaggtagaactcaccacagcggggtggactcc

SEQ ID NO: 203768 - DNA, 122 bp, Homo sapiens
caatggcacggcggcaggacgtgatgtcaggcgcggctgtagaaaaggcgcggaggcttgcgctggcgcggactgcagagccggggctgggctaggcgcgcgcttggagagcattgcgcgcg

SEQ ID NO: 203769 - DNA, 122 bp, Homo sapiens
gctctttgcacgcgcgtgtgctgccggtgtgtaaggcaggggggcgagaacccgggcgcacgcgcagcgtctcacctgcttctgcagggcctttgtggatgtgtaatatcttgggtaaaaat

SEQ ID NO: 203770 - DNA, 122 bp, Homo sapiens
cttccgaaggcaaagcaggagcccgccttattatcataatgtattcaccttggcccagcccgcgggccggcccggggaacccccaagggaggcgggaagcttgggtgggagcggggcaggag

SEQ ID NO: 203771 - DNA, 122 bp, Homo sapiens
agccgcaagatccgggtgaggcccgtgccggtcgggggtgggaagccaggtctcggcgagcgggcggttgtcaggagtaacggggactgtgggcccgggtggacgccgcggcctggcctccg

SEQ ID NO: 203772 - DNA, 122 bp, Homo sapiens
tgggaataaggtcctagagtttctgatccctctcccctcccccagcaaaacgaaacaagtcgtaaatatagcttgctgctgtaggttttaaattccaacactcagcgggctttatgcatatg

SEQ ID NO: 203773 - DNA, 122 bp, Homo sapiens
ggggcgagatggctgcaggcggccgtgcgcccaagccccacgtcctcgtctgccttggggcgctcctggccagctggtcgccgtaggttaaactcaccttacacctgtaaccggtggacttc

SEQ ID NO: 203774 - DNA, 122 bp, Homo sapiens
gacattgcaaccaatggccataccagtggaaggtgataatcatgtgggaggcgggccgggcgcactggcccactcctgtaatcccagcaccttggaaggccgaggcaggcagatcacctgag

SEQ ID NO: 203775 - DNA, 122 bp, Homo sapiens
ctcgccccgcacagcccggccggcccgccgctgcccgcgcccgccccggctcccggctcgcgctcgctcagacaactgagcccgggccgcggctgcacaagaactcatgcaaatcccggacg

SEQ ID NO: 203776 - DNA, 122 bp, Homo sapiens
atcactccatctcccaattctgtgatactcaaaagaatccaatcttttgttttccttctacgtttcgtggtgatcttttgcactccattttcagttcaaattttcaaagtgactcaatgctt

SEQ ID NO: 203777 - DNA, 122 bp, Homo sapiens
cacagcccacgaggccacagggccccggacgcggctcccgcccagcactcgcctcggggccgctgccgagccgaggctgtgattggtcatgctttccatctgcagatgggggaactgaggct

SEQ ID NO: 203778 - DNA, 122 bp, Homo sapiens
cccgtgacaggcgttttgccaagccctggagttactgaagtgaacaagtccctggtctctcgggacccattgccggttgaaacacatcccgcctcctcttccagtcctagaggccgcctcct

SEQ ID NO: 203779 - DNA, 122 bp, Homo sapiens
aaactggagacaccagatctgtctgctctgcaaagccgggctgggaggacgatttggccccgccccaggggaggggctccctgaaccagccccctcctcctccgggggctcagcccctgcag

SEQ ID NO: 203780 - DNA, 122 bp, Homo sapiens
ccagtctctctctgggtcctggtggacccttggttcctcgaggggctccctggccagcagcgccctccgcgccgcacctcaccctctcccgtctctccccaccaggtcacaacgccgacgac

SEQ ID NO: 203781 - DNA, 122 bp, Homo sapiens
gcacatggcgggggtcgtcggggaagcggctctgtgaggaggcgaagccagcacctggagcgagtcccttaaagggaaaacccgagctgagtcctgctcattcacaagggttcctctcggcc

SEQ ID NO: 203782 - DNA, 122 bp, Homo sapiens
ataagtcctcggtttaaaaacaagaatcaacaaggaacaagatttgtctataagtaaaaccgtttctgttgctattttttgaacaacaagagacatttctctaggagattaagccagtcgtt

SEQ ID NO: 203783 - DNA, 122 bp, Homo sapiens
ccgccagccccgcgctcccgctcgccgctgccgccgccgccgccgccgccgcctccgccgcgccgccccgggcccgcctcgggccccacggctccgaagccatgaacttccaggcgggcggg

SEQ ID NO: 203784 - DNA, 122 bp, Homo sapiens
attccttctcccggtcccgtagattgcagagtccgcgggaccgttgaacggaggtactgccggctgagctgggtcttaagtgcccatgggttcataaactagctgtcacttgctataaacat

SEQ ID NO: 203785 - DNA, 122 bp, Homo sapiens
gaagacgcgccccggagaacacgcgccccggagaagaggcaccctggagaactgcctcttcgggggcaagcgcagaggctgctgactcccccggtccaacaagctcttagtttttgcaattt

SEQ ID NO: 203786 - DNA, 122 bp, Homo sapiens
caaaggcaagtcctgattctccttcttttactggaagtgactctggcaggctgggaaccccgtcgctattctgtgatggaggaaacagagagaggttcttttgtagccaacctggccaatga

SEQ ID NO: 203787 - DNA, 122 bp, Homo sapiens
ggaaaggaaccggccctaggtggagaatgggcggggagccctgctgtgtggtcttggccacgcccctctctgggccaacctggttgtccaaaggccccggagaagggagagacccctgtcaa

SEQ ID NO: 203788 - DNA, 122 bp, Homo sapiens
ctgaatggcaacaaacacctggatttccttcaatgaccaggattcccctgctagggttgtcgggagagggtggaatgagggtggagtccggccaaggaagggccgggacaggactgcggaca

SEQ ID NO: 203789 - DNA, 122 bp, Homo sapiens
aggcgggatgaggaggctggagctgcggaggtgttcctccacctcggccgcgctcaggaacgctggtacccggctcatctcgccacctgtgccttctaacctcagtctccgcaccgcgatcc

SEQ ID NO: 203790 - DNA, 122 bp, Homo sapiens
ccttattagacagctcggcgacctacttggtcacagccttcatgcaggtggccatgtcatcgtagtgctctgcctgcttggccagcttggccttcaggatcagctccctcttctccttgacg

SEQ ID NO: 203791 - DNA, 122 bp, Homo sapiens
agtagataaatgggtgcacacatctgtacaatgtctccctgtaggggaatctcaggaccccgctgaggggatgctaggagctgtgtgctgtccagtcactcttgtcttctaggcccagcaga

SEQ ID NO: 203792 - DNA, 122 bp, Homo sapiens
cgcccccatcatctgtatctcgctgcactatcaaaacagaaaggtctgaccactcatttacgcgaatatggacattgcttggatctccgatcagagaaagatccgaagtttgctttggggaa

SEQ ID NO: 203793 - DNA, 122 bp, Homo sapiens
attattcgtgatccctaaacactcagtcgtttccctcttccatgcctcttgcttttgcttcgccctatttcaagtacgattttgtccactcaaactcagctttgcctgtcgaaattctgctt

SEQ ID NO: 203794 - DNA, 122 bp, Homo sapiens
aattatattgactctgaacaccaaaagaaatcagtcatcctctaaggggtcacagaaggtcgtgagggttgggagggcccaaatcttactaaatccagcatacattgggctctttaacccag

SEQ ID NO: 203795 - DNA, 122 bp, Homo sapiens
tatcatctatgcttttcagttttgaacataaagcagtggctctgagcgcgactcggagggcgacgccgcggccgcagccatgggtgctgggcctgcaggggcgcgggggggagggcgacgct

SEQ ID NO: 203796 - DNA, 122 bp, Homo sapiens
caccaaatctgactgaaagcccattgctatcagcattttataacacgctaaagaattggacgtggtggctcacacctataatcccagcttcttgggaggccaaggcaggaggatcgcttgag

SEQ ID NO: 203797 - DNA, 122 bp, Homo sapiens
tctctaatgcttactcagtatactcatatgaaaaatgagggcaatccctaagctacttcacgggactatcaggagacttaaataagacaatgtgagggactgggcgcggtggctcatggctg

SEQ ID NO: 203798 - DNA, 122 bp, Homo sapiens
ggtgagggctgcagcttcgcgcaggccgggcctccagctccttcttccccacccccctcccgcctcctcccagcatttggacagcacccaccaggcgcctccggggacttgtgggttccgcc

SEQ ID NO: 203799 - DNA, 122 bp, Homo sapiens
aaccttgggtaagtttcggaattctctgtgagcttcttaaagtttttgaaagcatgtaaccggataagtgtatttttacaatggaggagttacagtcatcttggtatttgtgggagattggt

SEQ ID NO: 203800 - DNA, 122 bp, Homo sapiens
gacggtgcatgggactgcgggtccttcccaacagcaggggaggtctggctgctgggaacccgggcgctgccggagtggggtgggcggggacgaggtgggcggggcagggacccgaaccggga

SEQ ID NO: 203801 - DNA, 122 bp, Homo sapiens
ttaagaaaggaagaacattttttaatcaacccccgccccattcccccatcacctgcacctcgaggcgagctcttcgaggtaaaccccaggttcgcctcccagggcacccctccggtgagttg

SEQ ID NO: 203802 - DNA, 122 bp, Homo sapiens
ttgcacagagccgggaaactgatggtgcttaacctcaaatggcaagcagcactctactgtcgccaggtcccaggcaactccttgttggctcagccctgggagccatgccttcctcttacttt

SEQ ID NO: 203803 - DNA, 122 bp, Homo sapiens
caccagttatcattttgaggcaatggatagcaaccctatagaaaagcctaaataattccacgcagccaatccattttgttagttgcctgaaggctttacctattttcctggtttgtcctgga

SEQ ID NO: 203804 - DNA, 122 bp, Homo sapiens
tcttcctctctggatggagtcacccccaccctgggaaatcgggcacctgacatggacagtcgaggtccccatccatttaattccttctccctttcagtgaccagtcaaaccttcccttctga

SEQ ID NO: 203805 - DNA, 122 bp, Homo sapiens
aagggacgatgatgattggtagggcagagcaatctgagtcctagttggtggagttctgcccggatggaagctccggccgcggagtgatggtggcctcagcgaagatgggccgggcagggacc

SEQ ID NO: 203806 - DNA, 122 bp, Homo sapiens
gaatatgcttccctgaaacatccagtcaaggggtctcaagaaataggaccaagctggcctcggtatctcatgtctgtaatcccagcattttgagaggccaaggagggaggattgtttgatcc

SEQ ID NO: 203807 - DNA, 122 bp, Homo sapiens
gggattacaattcaacataagatctgggcagggatacaaaaccaaactatatcaacatctcggaggagtttttagacatctcaatgcttgatatggtttggctgtgtccccatccaaatctc

SEQ ID NO: 203808 - DNA, 122 bp, Homo sapiens
ttaagatgactgtaggacaagtttgccctcagtgaggagaggcctgccaagttccactgacgtttggttggggaccacagaaagaaacatcaccattcaaggtatttggcccttattttgtc

SEQ ID NO: 203809 - DNA, 122 bp, Homo sapiens
tgatctccctatctccgagcttactcatctcttatctaccttcaatgctctcacttgaatcgtctttcaaagtacagatcttaatatacagcttttcaatcttcagtggcttcccttagaaa

SEQ ID NO: 203810 - DNA, 122 bp, Homo sapiens
cctaggaatgaggtggctcattaaaggcccccggacagacggacgccagtgcctgcaggacgggttctgggcggcggcgggtgcattcttctctctcagacctttgttgtgttttgaggggg

SEQ ID NO: 203811 - DNA, 122 bp, Homo sapiens
atggagctactaattttgtaaatactttcatgcagttaaaaactcatttaattttccttccgtttacttcttaacagattgctaccactggtcagaaaccaacttcctagaacctcctgata

SEQ ID NO: 203812 - DNA, 122 bp, Homo sapiens
gggtgattgttatggcagcaaagaggaggcacaacccaactaaccagtggtacacaaggccgtagcgaaggcaaactcaagagaagctgataatgtctgtcctggcaccctgctcacctctt

SEQ ID NO: 203813 - DNA, 122 bp, Homo sapiens
attcggatggaatagacaggcacattcagagggcttcaggatagcatccaacactgggggcggacaggatgtgggtagcggactgactggtttgatgagaatagatgagcatacacctggag

SEQ ID NO: 203814 - DNA, 122 bp, Homo sapiens
aaacaggaagttagtggagttgtctagaaacagacaaaaaacttaggcaaaaagcaggaacggcagtggggacacattctaaccgcatgttcaattcaccaggaagactcagcagcttcaat

SEQ ID NO: 203815 - DNA, 122 bp, Homo sapiens
gtgaggaagacggaagttccggagaaggagcggggcatgaaaatggggaaacttgaagtgcggtcagacaactgggatcagtgcgaatctagtggctggtttctgccactgagcagtcagga

SEQ ID NO: 203816 - DNA, 122 bp, Homo sapiens
cacagccagcaaggtaagggagccattcgagccgccttcgctgattggacacagggcgcgcgcgtctgccaacgccggttcccattgggcagtacgctgtgacgtttcacgagcctccccgc

SEQ ID NO: 203817 - DNA, 122 bp, Homo sapiens
ggttcatctcactagggagtgccagacagtgggcgcacgttagtgggtgcgcgcatcgtgcgcgagccgaagcagggtgaggcattgcctcacttgggaagcgcaaggggtcagggagttcc

SEQ ID NO: 203818 - DNA, 122 bp, Homo sapiens
cctccgccacgattgctttggtggaaagtgcttgggcctagagcaccagtgggccagtcacgctgcctctttggtcggccacatctttattcgcgggaaacaactttcaacgcatggttccc

SEQ ID NO: 203819 - DNA, 122 bp, Homo sapiens
ccacaccaggaacacggcgccggcctccgggacttcgccgcattgcccattgctttcttgcgggtgtttacaggctgccagcactcctgtgctgggggtgtttccagcccttctctggtgag

SEQ ID NO: 203820 - DNA, 122 bp, Homo sapiens
ctctctcctcccgagcctgctattttgtggtccaggacttgccatcagaacttgctttaacgcgacgagggaactcacctgtgtgcagagcgccgcgcacacatcggggctcgcgggacagg

SEQ ID NO: 203821 - DNA, 122 bp, Homo sapiens
tccggagttgttcattcctcctgtctggcgttgttcgtccttacagagagctgattggtccgttttgacagactgctgattggtgcgtttacaatcctttagctagacacagattgctgatg

SEQ ID NO: 203822 - DNA, 122 bp, Homo sapiens
catttgaatgttgacccaggctggaggatccacttggaagtggaagatgcacttcccaggcggcttgcaggctccaggctccaggctggcaggttaaatgtaggttgttggcaggagtttct

SEQ ID NO: 203823 - DNA, 122 bp, Homo sapiens
taaaaagaacatgtctggaatagatacccaggaaagagaaacacaagcttctaaaacactcgctagccgtcaatgtccacagccgagagtaagacatttgccggattagagaccagaggaga

SEQ ID NO: 203824 - DNA, 122 bp, Homo sapiens
atttttggaggctttacagaactcaaaagaatgtctggtacacagtaggtaatcagtaaacgtctgctgaatcaatcaatcaatccattccattctgaggaaccaacaggccaaccactatt

SEQ ID NO: 203825 - DNA, 122 bp, Homo sapiens
tcatctttcatatggaggccagagaggcatccactgcatgaagtcacctcacccaaggggcgtggcaaggtggcttttctgattgcagagcctccatccttccctgaaaagtgcccactgtc

SEQ ID NO: 203826 - DNA, 122 bp, Homo sapiens
atccccagcccccgctctgtggttgcaggaagcaaggggggctccgtgtgagtttggcagcgggagccttcccaccacggcgctgcctcagccagaggggaagcatggatagcggccactgg

SEQ ID NO: 203827 - DNA, 122 bp, Homo sapiens
cttgaagtgccatggagtacctggactactccagtgagaaggcataatatggcgggtaaacgctggggctttagaatcacacaggcctcagttggatttcagctctacctctgccttgctgt

SEQ ID NO: 203828 - DNA, 122 bp, Homo sapiens
cacatatgccgcgtacccgacctacccagtaggattcgcctggtacccagtgggacgagacggacaaggaagatcactatatgtacctgtgatgatcacttggaatccacactggtaccgcc

SEQ ID NO: 203829 - DNA, 122 bp, Homo sapiens
ggttacagtgggatgtgcagctggccgaccccctctagccatcctgcaagtcactgtgaacgccctcacgctccaacagcaaagccactgctcagaaagaggctgggctcctgcacacctgc

SEQ ID NO: 203830 - DNA, 122 bp, Homo sapiens
gtgcaggcaggaaccggggctgcacagggtgcttgcgggccagcgcgagttccgggtgggcgtgggctcagctggcacacactgagagcagctcgccggcaccacccgtcccaggcagtgag

SEQ ID NO: 203831 - DNA, 122 bp, Homo sapiens
ccagcccgcgcccgccgtccgcagctcccagcgtgccccgcgccaggggccgtcttccggcggaagttgtctcttcgccgccgccgcagcctctgccccactcgtgagggatccgagggctc

SEQ ID NO: 203832 - DNA, 122 bp, Homo sapiens
agtcctgttctgcatttctgatttaaatctcatgatcgaatcatgatcattgagccgtaccgtcaggaggtcagaggatgagcctctgtttgattctggccccttttgtgggaggagggagt

SEQ ID NO: 203833 - DNA, 122 bp, Homo sapiens
cgaaggccacggggattgacatcgcccacctccgacacccagtgggcgccttggctggtgcggctgctggtccagatggaggaaaccagtgactttatggggctgagctagtagggaagccc

SEQ ID NO: 203834 - DNA, 122 bp, Homo sapiens
gaggaagccgtagctgcctgggtgctctggaaagttcgctgcacccatcctgtcaaggttcgtccaagcttccaagaacaaagaaaagattattgtattgcattgctctatcagtacttaca

SEQ ID NO: 203835 - DNA, 122 bp, Homo sapiens
tttctccatccctccctccatcctggccccggctcacatgcaaagcctcggccgtgggtccggagctcagctcccacactagcaaggttttgtcactctcgatgggaaccgcaaaaggtacc

SEQ ID NO: 203836 - DNA, 122 bp, Homo sapiens
ctcactgcagccccgaccttacaggctcaagcgatcctcttgcctcagcctcccgtgtagcgtggactacaggcgagcaccaccatgcccagccgatgttttaatttttggtagacatgagg

SEQ ID NO: 203837 - DNA, 122 bp, Homo sapiens
gtcagtccccgcagatccttccgcggtgaagttttggggatgagggattcccttggattccgttggaaggcggtagttaattgggaagggggcgttgggtcattggttaggctcacccttct

SEQ ID NO: 203838 - DNA, 122 bp, Homo sapiens
ttcactgcaagctataaactctacaagtggtgcgcccgaagtgatcgccttgaagttgcacgtgaaggaggaaaactccttaatttttggggaatcccagtaagggacagtcctgattgcca

SEQ ID NO: 203839 - DNA, 122 bp, Homo sapiens
acacgtttgaacttgttcctgcagaccaggggtccagagaaggtgctgtgtggggaggaacgagaatggagtctggggagacggggcttcccaacaccctgcactgtgttgctggaaggtgc

SEQ ID NO: 203840 - DNA, 122 bp, Homo sapiens
attttttgctatttacaaacaatattgcaaagaatatccaaatacgcatcttcccaagctcgtgtttgttttttaaataatacatccagaccatggccaatgttcatgtatcttgatttttc

SEQ ID NO: 203841 - DNA, 122 bp, Homo sapiens
gccggcgctcgaccaggaccagggtcactgacttgagaccccaaaacgacagatgcttcccgatgggagtgaaggttgaagagaccggtccacacctccttctgttctaacaccccccttac

SEQ ID NO: 203842 - DNA, 122 bp, Homo sapiens
ggagctagcagaaccgggaagaggctcgattgtgtccggtggggccgccgggagcctcggcgacctttgtctcctgcctggctcctgcactggagtgtgacccggggcgctgcagctgcttg

SEQ ID NO: 203843 - DNA, 122 bp, Homo sapiens
tttgctgtccagtataataaagatatgtctaaggcaaatgtcgggcaagtttgcttgcagcgcattataaaagattgaggtttcctaagcttggagtttctcagtgtgtgtggtccagtctc

SEQ ID NO: 203844 - DNA, 122 bp, Homo sapiens
caacccttctttaatgtcatccagggagggggccagggatggaggggaggggttgaggagcgagaggcagttatttttgggtgggattcaccacttttcccatgaagaggggagacttggta

SEQ ID NO: 203845 - DNA, 122 bp, Homo sapiens
gtgggtgcccccgccggccccgccctcccaggctgcccccggcgccccgggcctcctccgcgcagtccctgagtcccgcaggccctgcgtccccgctgcacacccccgtccactcccgtggt

SEQ ID NO: 203846 - DNA, 122 bp, Homo sapiens
ttctctactagtttattacagatgttcacttatttatacttcattttttcatttatatatcgtggccctctttatttgtttgatggatacaaacccaccttacaggcggtgaaaagccttct

SEQ ID NO: 203847 - DNA, 122 bp, Homo sapiens
gtgagaacagaactcaattttcccatcggcatggagagcaactccccagcgcatgagagccgctctcggtccgaggtgcctcagctgcgggcgtctccctgccagcagggcagaggataggg

SEQ ID NO: 203848 - DNA, 122 bp, Homo sapiens
ttctaaagttggaggattctgacaatcacagccccagacacacacagtggaaaacgctcccgtccttcgccgggcagaggcagctcctgaaataaagcagcagcgccccctggtggcagacc

SEQ ID NO: 203849 - DNA, 122 bp, Homo sapiens
gcggctcacactgtacgcgtgaagcgggtatggccagcggctcacactgtacgcgtgaagcgggtatggccagcggctcacactgtacacatcaagcgggtgtgggcaagcggctcacactg

SEQ ID NO: 203850 - DNA, 122 bp, Homo sapiens
cctggatgcggagaggagaggacacacaccacagcaggtgactgggaggagggcctacctcgcaagactgtttctaaccctgagaacctaaggaattgtgaaggactcggagagggggctgg

SEQ ID NO: 203851 - DNA, 122 bp, Homo sapiens
ctcagcttaaccccacttcctccacaaggccaccctcaccccacacactcttccccaccccggggatcacctgatctcgtgtgcagtccatctgcaccatggaggagtcttgctctgtgagg

SEQ ID NO: 203852 - DNA, 122 bp, Homo sapiens
ctgctctgacttcattttgctaattctctcaatgaaatgcaataatgtgaaggaaaaactcgtctttggggcagggccttcaacatatggtcagcctggactccttcaaaccacacagatta

SEQ ID NO: 203853 - DNA, 122 bp, Homo sapiens
ccctgctgctttgtagggaaaccctgcccaagagaagccccagctcagcaggacggagtccgacgttcccgcctcagggtgcccagagagggcggggacaccctggctgggacaaagtgcgc

SEQ ID NO: 203854 - DNA, 122 bp, Homo sapiens
agatactgactgcccaggaatcaagaagtgctgtgaaggctcttgcgggatggcctgtttcgttccccagtgaggtgagcactagctggagaacgaggagacccctgaagacacaaaagaag

SEQ ID NO: 203855 - DNA, 122 bp, Homo sapiens
acttcctatttatcatttccatagtcatctcaatgtcccctaaaatccctctaatatggccgggcacggtggcttacacctgtaatcctggcactttgggaggccaaggcgggcggatcact

SEQ ID NO: 203856 - DNA, 122 bp, Homo sapiens
tctgggttgggcatggacagaggccctgacccgattcggggcttctctagccccatcccccgcccacctgcaaccccagctgacgccctgaggctgaccactgttccctgggtcgcccgcac

SEQ ID NO: 203857 - DNA, 122 bp, Homo sapiens
gggtcgttggtcctgggtcgttgatccttggtcgttggtcctgggtcgttggtcatgggtcgtcgatcctgggtcgtcgatcctgggtcgtcgatcctgggtcgttgatccttggtcattgg

SEQ ID NO: 203858 - DNA, 122 bp, Homo sapiens
ttaattctgggagacaatgatttcacaactagcgggaagcagtcctaaaagtttaaaatccgataaggaatatctgggacagggtttagatcatgactctacacagataccatgatgagagt

SEQ ID NO: 203859 - DNA, 122 bp, Homo sapiens
tataggcggacgccggttgggcgggtcatgtgactgcgctgcgaaggcggggcgaagggacgccgcgcaagcgcacggaggcgtgtccccccgcccgttaacccattcggcgccggcgcggc

SEQ ID NO: 203860 - DNA, 122 bp, Homo sapiens
ctgaagtttatgcaacccctaagtggctcatccaagattcagatctaggccttctgaaaccgagctcatttgtttatttattttagtactattgtgctcctaacagggaattgagtgagaag

SEQ ID NO: 203861 - DNA, 122 bp, Homo sapiens
tgcggtcatttagcctgatgacccctggccaggttcagcctcaattgctccaaagaactccggacccgtaccccgagcccggcgtcccagcggcgaagttgatgggccccgcaggagccctt

SEQ ID NO: 203862 - DNA, 122 bp, Homo sapiens
cctgcgataggaatcggacccacgctaagctcctgaaagaattccactggcgtcgccaaacgctggcgccgacagataccagtccatcaccactgtccacgaacacgcccagccacggacag

SEQ ID NO: 203863 - DNA, 122 bp, Homo sapiens
tctgtcaactgtggaaaatgaaacccatgtcacaaggttgttcacttctgggcttgtacacgctgaccccagagaaacagggaactctggcatcaccacacccatcttacagacggaaaagc

SEQ ID NO: 203864 - DNA, 122 bp, Homo sapiens
aaatgcaggccatggggaggggtgatggctgaggtggtcagtggcctagatctgcctccccggagcctggatcttatagttaactaggaaacagccagagagcaacacactaatccaagagc

SEQ ID NO: 203865 - DNA, 122 bp, Homo sapiens
gagaggagggcgggagagcggcgcggagccgggccgggctgggggctggggccgctggggcgggggaggggaggacctggcgcggggggcgggggggcgaggggccggggccgcgccgggcc

SEQ ID NO: 203866 - DNA, 122 bp, Homo sapiens
tccacaacagagcaggaaggaggcataggtggagggggaagagcattctatgctgagaggcgctgctacaaaaatactcccatcagaccaaggatgaagccaagtcccccaccctgcacccc

SEQ ID NO: 203867 - DNA, 122 bp, Homo sapiens
tcgctgcgcgggctataagtaggggccggcggggtgctccgctggagtgatggctgccggcgctctctgcgtggttcttcttctcggccgctgaaacccccgcggctgcttcctgggaaggt

SEQ ID NO: 203868 - DNA, 122 bp, Homo sapiens
ggaaccaggtttccccctttccctgagcagtggctgctacaaatacaatctggtttgctgcgggtcatttgttgcagtttgcctttggctcagatcaaaatagaaaatgagccagaacatgg

SEQ ID NO: 203869 - DNA, 122 bp, Homo sapiens
cagcccacctgacgatagaaacgcaaagcacacctcagcatatggtctgcggagtcctcccgggggctccggattcggggtgtccgtggaaaacacatgatgccaggtccacagggtgacag

SEQ ID NO: 203870 - DNA, 122 bp, Homo sapiens
ggcgacagagcgagactccgtctcaaagaaaaaaaaaaaaaaaggatcataactaagactcgaatgcggagggataacagcctctgctacttgaaacctagtccttctggggaggaaagccc

SEQ ID NO: 203871 - DNA, 122 bp, Homo sapiens
atctcaaaaaaaaaaaaaaaaaaagaaagaaagaaattaatgtatgtaaagcacttagcacgaagcctgggacctggtgaacattcaccaagttattactgtagttccctctctaccttcct

SEQ ID NO: 203872 - DNA, 122 bp, Homo sapiens
gagaaagctcacatcaagggaccagacccagcgccggtgccggggagaggagagagggcccggccatgtcatctgaggccccgagtccagctgtcaccttgtctccaactctcctttccagc

SEQ ID NO: 203873 - DNA, 122 bp, Homo sapiens
ctttatctcttgactttgtgatcctcccgcctcggcctcccaaagtgctgggattacaggcgccccgccacattattctgttttttggtaaagcacattgtaatgccagtatataccacccc

SEQ ID NO: 203874 - DNA, 122 bp, Homo sapiens
caatcttttttttacaatttactttttaaccgcccttaatccagttattccttaaactgccgccttctatttactaatttctttaaaaaaaaaaaaagagagaaagaaaaatatatacattt

SEQ ID NO: 203875 - DNA, 122 bp, Homo sapiens
taagcgtttaacgtgtattttctcatataatcctcacaattctgaaataggctataagatcgccattttacagaccaaaacaaggcaaagacaagctaaataatttccccaggggtcacaga

SEQ ID NO: 203876 - DNA, 122 bp, Homo sapiens
cagctccccagcccccggcggcgcgggctgagagcagctccgtctaaggccacgccgccccggcgtccccgacagcgctctccgcggggatagtttccagctttacctctaaagaggcggcc

SEQ ID NO: 203877 - DNA, 122 bp, Homo sapiens
taaaggagaattcctcaggtatgttctttcctccgttgcacgcactgcttcatctgcatgcgattttctgtctgtattttcctgtcccttctttttgtttgcacttggaaatcacaaccatg

SEQ ID NO: 203878 - DNA, 122 bp, Homo sapiens
tgccaggtaccgtgataggccataatgctgcataagacacattcctatcctccagagactcgcagtcctgtgggatagacagctgaggaaatatcattcactgtgactgtactgggacacag

SEQ ID NO: 203879 - DNA, 122 bp, Homo sapiens
gcttgggacaccctcacctcttccgcacagagccctccctctcaggacagcgccagcctccgccgccgctggaccagcccttctattcaggctgtgcagcttagagaagggggcggaaggga

SEQ ID NO: 203880 - DNA, 122 bp, Homo sapiens
agttatgaactgctgcgaacctaaaggcaggaaggcaaattcccttcagttcggcaaacacgaagaccccacattcgcgtcgtctgtgaagaaggcactccgaacctcaggcgctcactcgc

SEQ ID NO: 203881 - DNA, 122 bp, Homo sapiens
gtaatattccatatgaccagacatcactcttaatggtgtagatgccttcaaacaggctttcgggggccatccattttacaggcagacgggcctgtggaaaacccagaggagataagatggtg

SEQ ID NO: 203882 - DNA, 122 bp, Homo sapiens
gtgggggtctcctagaccggcccgggtgacggcggtaggggaccagcaacttccattttccgaccccgagaagggaaactcaacggagggggccggtcgagactcctcctccactccgcccc

SEQ ID NO: 203883 - DNA, 122 bp, Homo sapiens
tgaatgaaatctgcagagaactcagagaaggtcagcttgtcaaaggatcacggcaaaaagcggaagaggcagatacccaaacttagtaggactttgtggcctcccagctcacaagcctgctt

SEQ ID NO: 203884 - DNA, 122 bp, Homo sapiens
aagcaagaggcagaaggtccagtgctcagggcttcaacagccgcatgtcagggaggacggcggacaagccagtcccatcgcaaagctgctgtgcctggctcagcactgacaaagagggaggc

SEQ ID NO: 203885 - DNA, 122 bp, Homo sapiens
ctttcttgagcttggatacttctttccatgttttatcctaaaaacgtggtattgtatacacgtcttttaggacttggtggggaaacttaaagatgcttcgaaaagcctggaaagagcaactc

SEQ ID NO: 203886 - DNA, 122 bp, Homo sapiens
aagggatccagggccagcaaccagctgaaggaaaggctgaaaggagggaaatgcagggtacgatctggatggagttaaaatggcagaaaactgaggctgagtgagaggtctggtactgaggt

SEQ ID NO: 203887 - DNA, 122 bp, Homo sapiens
tcaaatacagttggccctccatttctgtggattcaactgtgtataaaaaatattcctggccgggcatggtggctcacacctgtaatcctagcactttgggaggctgaggtgggtggatcacg

SEQ ID NO: 203888 - DNA, 122 bp, Homo sapiens
tcaggctataattagctgatgagtatccaatctgaggtcttagatataatgagctgtagccgacaaggagaattcaggcaccagcacttaccagatatggcaagctccacctctctctttat

SEQ ID NO: 203889 - DNA, 122 bp, Homo sapiens
gcgtgaacgactgggtttttttttttttaacctccagaaacggaagcctcagcctatcagcgatgcctaagtcccagtcacgataaccaaacggcgtcgcccttttacaccttcccggagcg

SEQ ID NO: 203890 - DNA, 122 bp, Homo sapiens
aggcggacgctgaccgggccaaggagtgggacctgcagtgctggaccacccttttccaagcgcagaagtgccgtgcccgccggctctcaacagggcaagaggcccctctcgccgtgcagagc

SEQ ID NO: 203891 - DNA, 122 bp, Homo sapiens
gatcaagctggcttacaagacaagctctcctctacttgtttgcactgtaagtcctgcctgcgtagacttccttgatgcacagaggccttccttggtgtggcacaacctacaattgggtgcct

SEQ ID NO: 203892 - DNA, 122 bp, Homo sapiens
tggtgctcctgggctgctgggcctccgtgagcgcccagaccgatgccaccccggcggtgacgacagagggcctcaactccaccgaggcagccctggccaccttcggaactttcccgtcgacc

SEQ ID NO: 203893 - DNA, 122 bp, Homo sapiens
gtctctgtgtgcacctgtacaataagaccttcaatgtactcttcatgtagtcctagtatgcggtgtttatctgcatattccaaatattacttattaatacctatgaattccacatattactt

SEQ ID NO: 203894 - DNA, 122 bp, Homo sapiens
ttctcccgcttggttgcttccattattccccaactgcggaaacaccagccaccatatgtccgccggagaataagcgtgagtgtcgcggtggacagttgccgccaaaggtgtccagacggatg

SEQ ID NO: 203895 - DNA, 122 bp, Homo sapiens
gccctcctaccatacaaggtgcaggcagccctcccgccttcttcaaagaggcatctgctccggctcactccaccctcctcccccagtggcctaactagtcgccgggttccaaccctatccct

SEQ ID NO: 203896 - DNA, 122 bp, Homo sapiens
aagcgctgggttctctctgccagtgccgcccgagcctgtggacaagggctggttggaggccgaagggaagcagcccacccctgaacagacgaagaccaagggcgatgggtcctggggggctc

SEQ ID NO: 203897 - DNA, 122 bp, Homo sapiens
agtacacgtggcgggctggattgcagaccggccctctcgcggcggagactcgcgacctagcggattgcatcagcaggaagacactaaggctgctcccccaggccgcccccagatggtggagt

SEQ ID NO: 203898 - DNA, 122 bp, Homo sapiens
catgaaaaacaaaagtgattgatctcaaggaatctcatttaaaatagcaatggctgggcacggtggctcacacctgtaatcccagcactttgggaggctaaggtgggcagatcatgaggtca

SEQ ID NO: 203899 - DNA, 122 bp, Homo sapiens
attttacagaaaactcactcagaaatgctgtgaatgccagaggactttgattttctcctccgtgttgttcacacttgattccttagttgaaaaatgaaccacaccaatttgtccttgataag

SEQ ID NO: 203900 - DNA, 122 bp, Homo sapiens
ccggaccccgccccggccccgccccgcgtcacctgactgtcccgcggcccccagacccggcgccaccgacctgatgacactgatgtggaactcgtcctcgcggaggccccgccaggcgccgg

SEQ ID NO: 203901 - DNA, 122 bp, Homo sapiens
ccaaaaaaaatccagcttcagtcaagcagtcaaccgactcctaggcaattaatctcctgtcgagtttacttattttggttttctttaaattccaatcagcaagtatgtatccagtgcttaat

SEQ ID NO: 203902 - DNA, 122 bp, Homo sapiens
aaatctctgtgtttgctccttgagcatacaacatgtcatcacaggtcagtgggcccgtctcgcactatcagtatttaggaacccatgttctcaagacctccaccaactggaatgtcattgac

SEQ ID NO: 203903 - DNA, 122 bp, Homo sapiens
cactttccagcatcctcggtcacgagggttagtaaatcccaactcactggggatggtgagcgctgctggaatcccggccgcacaataacctctattcatgcagagaatttcgaaatggaaag

SEQ ID NO: 203904 - DNA, 122 bp, Homo sapiens
cacagggcggtgcagtcagctgtccggccgctcggtcgcacttctcatcagctcaatacccgcagaggacgtgcaccggttccctcccggacacccaccccgtggtctccgccgcaccttct

SEQ ID NO: 203905 - DNA, 122 bp, Homo sapiens
ccagtcctggaaaccagcagccctggaagccgtggaaaccgtggaacaactggaaaccaccgccaagggcataagcggaggtgtgccaaacgggtgacttgtcctgagaggcctgctttcca

SEQ ID NO: 203906 - DNA, 122 bp, Homo sapiens
attacaagtactcctcattttccccagtacagctcttctcctctcttcctgccacagtatcggtgttaggcaatctcaggcatttttatactgtacctatgacagacttgatgcttatcgga

SEQ ID NO: 203907 - DNA, 122 bp, Homo sapiens
aaaggggtacagggtcacaggtggtcccccaaacccctgagacatctgtggttgtctaagcgtgctttactttggattctggcatgcatttgtaactcacttatgctggttaatgtgaacca

SEQ ID NO: 203908 - DNA, 122 bp, Homo sapiens
ctgggtccggacaggggagaggccctgcagcgtccctgggtccggacatgggagaggccccgcagtgtccctgagtctcctggacagcggccaccccatgcccagtgctgacgggcgcccct

SEQ ID NO: 203909 - DNA, 122 bp, Homo sapiens
gaggagactgaggcatagagaggttgagtaacttgcccaaggttgcacagccagcccaggcggaagtgggacacccgctgattgacgggtggggagggcggagcctgcagtccgccctgccc

SEQ ID NO: 203910 - DNA, 122 bp, Homo sapiens
tctctttgcaaacgtctgtggtggtggcaggcatgccgtggttctgcataggagctttgacgaactgtgatgctgggagcttagccctgccttgtcctcatgtctgtgttgacgccatctgt

SEQ ID NO: 203911 - DNA, 122 bp, Homo sapiens
gcggacgcggtcgtcatggcggcgactaagcagaggcggcggtggcggcggcggtggctgcgcggcgctggagcggcggcgggggccctggggcagtccgagggtgcggtgaagaggtgacg

SEQ ID NO: 203912 - DNA, 122 bp, Homo sapiens
accatccagtgtctgccaagcaacggtctgattgatggtaaacaaccaaatcagaacacgcgtctctgtgcctgaactttccctatttcatttaacttttaagcatagatggggcttaataa

SEQ ID NO: 203913 - DNA, 122 bp, Homo sapiens
aggcaggcccgcagtcagtcaggacagctgcccagagtaggtggcgtttgggccaggcttcgcaagctgtgtgggggttcgcccagcagaagacgggagagggcgttccaggcagaaggctc

SEQ ID NO: 203914 - DNA, 122 bp, Homo sapiens
tccgcccgcctcagcctcccaaagtgctgggattacaggcgtgagccgccgcacccggcccgaatgtgcagtgttttaagtcaccccatttgtgggcgtttgttacagcagtggccagatgc

SEQ ID NO: 203915 - DNA, 122 bp, Homo sapiens
gaggctggcgatggtcttagggacatttctgtttctcatgcctgaatgggaatgctccaacggttcagcccaggcattctctaacttagatctgccatccatggcccccagatcaagaatcc

SEQ ID NO: 203916 - DNA, 122 bp, Homo sapiens
aaaaccaaacgggacagtgtgcttcctctggaggaatgggtaataatcacgttgcaatatcggacatgatggcccagaaagacgtgccaactgctaaatgagctcagaggaggagggcgatt

SEQ ID NO: 203917 - DNA, 122 bp, Homo sapiens
gccagactgccagtgcctttgtggcgcattaggagctaagccagtgattggccatctgggcgcggggcgggctgagtcagttggagggggcggggctgaggctccggtgaacgccgtaggcc

SEQ ID NO: 203918 - DNA, 122 bp, Homo sapiens
aagatgtggaacccagaacccgggaagcagctgtacctcctgcacccacgccgcctggcccggaccacgagggagccacggctgccccattgtggcctcctggaccccacttcttccctgcg

SEQ ID NO: 203919 - DNA, 122 bp, Homo sapiens
atttccaactataaatgaagccatactaaaacataaatggcagaggtttctgggtatcctcggtgtccaaagtgactgtcagcaagtttattcatgttctgtctctctcttcctatagaagt

SEQ ID NO: 203920 - DNA, 122 bp, Homo sapiens
cagcttacctcagcttgcttgcagttacccagtttccacgctgccctccaaggtctgtgccggaaaacctggaggagggcgcgagctgacgggagggatggaaacgtgggctgcggaagtaa

SEQ ID NO: 203921 - DNA, 122 bp, Homo sapiens
ggtgatgaaaatgttctaaaattaactgtggttgcaaaactctgtgaacatactaaaacccgttgaattgtacacttttacatgggtgaacggtctgtgaattatgtctcagtaaggctgtt

SEQ ID NO: 203922 - DNA, 122 bp, Homo sapiens
ttgtgcagaatgggctggggacacctctgagttttgctgcccgcaacgtgacctttttagcgcggtcctggacgcgttccctcgcagccaacccgtcagtctcctcaggccttatcctgccc

SEQ ID NO: 203923 - DNA, 122 bp, Homo sapiens
aacggcgaggcggaactcaacggaagtgaagaaaagactaacgggaaagaaggacgagtacgcggtcccgggacagacctccaaagcttcttcctgcgccccctggcggccggagggggagc

SEQ ID NO: 203924 - DNA, 122 bp, Homo sapiens
ctccaggatgtccttctggctgttccagtactcagcgtcaggccgccccagctccgtcaccgcccggaactcccccacgtcgctgtcgaagcgcacggactcctcctggttatagaagtatc

SEQ ID NO: 203925 - DNA, 122 bp, Homo sapiens
agcactactctgtataagcattagcaacaaaatagatacctcaagggcttatattttcttcgtttggttgcaagtatgtgttttcttaaaacttaattagatttttaaatgataagagtatt

SEQ ID NO: 203926 - DNA, 122 bp, Homo sapiens
ggcacatttgtggcagggcattgcagggaggtgaggatgtttgcccctaatctgtgaagacggtgctgcctcctctgagctccacttcattgtatcagacagaggccagacttgaggatgaa

SEQ ID NO: 203927 - DNA, 122 bp, Homo sapiens
atctttaaaaggtggatgaaatattatttacagcatgaagccttctataaatagggtggacggccttaccacataaaaacccaggacacacagctgaatttgaatttcagataaacagtgct

SEQ ID NO: 203928 - DNA, 122 bp, Homo sapiens
gcgtccggtgagacccgggaacgcggcgcgggagactaaggagcagagtacagaattgcgcgtgcgcgcctgcagcacgagccccgccccctggctctaaaccgggtggcgggaaaagggac

SEQ ID NO: 203929 - DNA, 122 bp, Homo sapiens
ctgccgaagctgctgtaggcctgatcgtcgtaggtgtcgaagtccgccatttgccgtctccgctccgagaggaacccctttttattttttaataaagcaaaaggcagttgtcccttgtggtt

SEQ ID NO: 203930 - DNA, 122 bp, Homo sapiens
ccagaggcgggcaaggccatggagatgagggagagagaggagccgggggctgggagtgagcgcctcggcctgacttcttgggtgggggccaagaattccccaggtagtgggttgtcggctca

SEQ ID NO: 203931 - DNA, 122 bp, Homo sapiens
acgcctcaggcccccggcatggtgctgctggctgggacccagccacagggtggcggggagcgctgcgtgaccctgccaccgccgtccccactcctaggcacacaggtcgaggaggaccgcgc

SEQ ID NO: 203932 - DNA, 122 bp, Homo sapiens
tagctccagctttaggggctgcttaaattagagtgatgttgaaacacaagatatgtgctgcggtctacactgcaactaaaatgaatgtggactgacgcaaggatctggtccacagtggttcc

SEQ ID NO: 203933 - DNA, 122 bp, Homo sapiens
catggaaacttgaggttcaaacctactgtgttttgactgcaccaatcccaagtggaccagcggcagccctaccagtgcaatgagagagaaactcaccttgtcaatgaaggaggcaaattggt

SEQ ID NO: 203934 - DNA, 122 bp, Homo sapiens
gtcgagcatgatgatgacaattaggatccagggcaggaggataaagaagcgggtgaaaagcgcggacttcatggtgcacgctccctggcctctcggacaccccagagaggggcgagccgagg

SEQ ID NO: 203935 - DNA, 122 bp, Homo sapiens
cggccgggcttcagaggcgcagggcgggagccgcctcgcgcagggtcctccccaagccggcgccaggccctgccctcgtccggccctgccctcgtctggccccgcccgggccgcgagcactg

SEQ ID NO: 203936 - DNA, 122 bp, Homo sapiens
cgccgctgcttcgctattcccaatcctgttattacgcaggtgaaaatggcctgcttggtccgggtcctcctgggcacgtcagcccccaacctgcaaatggcaggccccggttaggggatgtg

SEQ ID NO: 203937 - DNA, 122 bp, Homo sapiens
ataatggggtccctgagattctatgtttcacgtgactaagcctcactctgcccccacctccgcgggggcgtcccgcaggtgcccgactccagccatgctggcgctactgtgttcctgcctgc

SEQ ID NO: 203938 - DNA, 122 bp, Homo sapiens
cgtccttataagagacagaagaggacacagacacagagggcaggagagcccatgtgaccacggaggctgagaccggagacgcggccccaacccaaggaacacctggagtccccagaagctgg

SEQ ID NO: 203939 - DNA, 122 bp, Homo sapiens
cttgctgtgcggcctgttcctaacaggtcatggaccggaaccagtctgcggcccaggggtcggggacgcctgttttgcaggacgcaacagctggtgaggtttattttccttcaatgcatgac

SEQ ID NO: 203940 - DNA, 122 bp, Homo sapiens
aattccccagtaatttggttgacattgggttgcatttttaaacataactttttccacactcgcattcaaggttcctgtcttcccatcctcattcaagaaacatttattatgctccgtttgct

SEQ ID NO: 203941 - DNA, 122 bp, Homo sapiens
caagagagaggccagttggaccagagcgcctcaccccaccatttgccatgtgcccctccccgtggggagtcagaaacacctgagcacaccaggaaaagttttgaaaaacaatgtttttagag

SEQ ID NO: 203942 - DNA, 122 bp, Homo sapiens
gtgatatatgcattccaggggaagggaaattgtggtgcttctgaacccatggtcaattaacgaggcagtttctagctactgcacgtacttcataaagcaggactctaaaagctttgggtaag

SEQ ID NO: 203943 - DNA, 122 bp, Homo sapiens
tccagccggaagctggccaagctgtctccaggtcctgggatcacgttgtttcagtggagacgatggccgccagcttcagattcagaaatggcacttagtgcctcttcccttggagtcacctc

SEQ ID NO: 203944 - DNA, 122 bp, Homo sapiens
aatggaaaaaaacgaaacaaaaaccttgggcttcaagaggcatcctgccgcaaggcccagcgatgtgaattttcaacaaccgtctcaggcagatttcatgctgatggttcaggcactaaact

SEQ ID NO: 203945 - DNA, 122 bp, Homo sapiens
tcgccggtgtaactcatgttggctggggggcctcccggcgcgcgcggagaggctggggtgcgcccccatgcagcatgcttgtgctcaattgcagggtcctcgttctcgagtgtgcagagggc

SEQ ID NO: 203946 - DNA, 122 bp, Homo sapiens
agacagagcgacagagtccctcattcctctggttcaaagaccggacggagtgttgaggggcgtaggcccagtctttccaaactcctggagtgggcggaggaggagctaaagacaggcgctca

SEQ ID NO: 203947 - DNA, 122 bp, Homo sapiens
cccataaagcctaaaatatttattttctggccctttaagaacaaatgtgccaaccgctaccgctactccagacaattcaaactaaaatctaataccttggtaagtttaaagacacttaaatc

SEQ ID NO: 203948 - DNA, 122 bp, Homo sapiens
gatacgagccttttatggtgcttccagaagtctccttaagggaaagggaggcattcttctcgatttgtcctgcatctggctacctggagccatcttgagccaggagggtgccacatccaagg

SEQ ID NO: 203949 - DNA, 122 bp, Homo sapiens
cccccttctctttccccatttccatttccggactcttctcctgcccgcagggcagacgcacgcgcagagagattgccagccctggctgccagagacccggaagcatcgatcggctctgtgct

SEQ ID NO: 203950 - DNA, 122 bp, Homo sapiens
ctccactttccagacgaggaaacagagacacgcagagaaagacagaggcttgcccgaagtcgcacagccagtgttttggggagctggaatttaccctggggcttgtctaactcgagtccgac

SEQ ID NO: 203951 - DNA, 122 bp, Homo sapiens
ctgacaagcccggggcctgtcccaacaagactgaggcccgtgtggagacaactgcacagtcgtgaccggttgtcctgacagacctgctagcacctcccgaggctgggagggcgctaagggga

SEQ ID NO: 203952 - DNA, 122 bp, Homo sapiens
aaattctcttgctatcctaattttttgccggctcaaaggactaaccgttttccccaaacacgcggccctgagcctccggtgctttgcgaaagccgtcccctccggctggaatgttctttgtc

SEQ ID NO: 203953 - DNA, 122 bp, Homo sapiens
cattgctccctggacgggcacgcgggacctcccggagtgcctccctgcaacacttccccgcgacttgggctccttgacacaggcccgtcatttctctttgcaggttctcaggcggcgagggg

SEQ ID NO: 203954 - DNA, 122 bp, Homo sapiens
ctgcgccgccgcagcttggctgcctctccaaggggccgaggtgatctctggcaggacccacgggggacccgcgccactcctcccgctccgcccccggctcctcccctcctgacggaaggcct

SEQ ID NO: 203955 - DNA, 122 bp, Homo sapiens
acggttgaagaggagtgggaaacggccccagattcccggcgcaggcacacgtgcaggagccgtgggggcagcccggccagctgggaaggcctcacggacaagacgagcaggttgctgatggc

SEQ ID NO: 203956 - DNA, 122 bp, Homo sapiens
ggtgggccaatcgctgctcggtattccaggcgctttctcaggtttctgctgatcttgcagcgcccagaaatggaccgagcggacccgccgccgcacgcaccctgctccactccaagctccta

SEQ ID NO: 203957 - DNA, 122 bp, Homo sapiens
gcgacccctccatcgtccgcctgctgcagtgcgaccccagcagtgccagtcagttctgagcgagcggcccctggacagttgcagagaaacacaggcttgtcgtgccgtttaagctttgcttg

SEQ ID NO: 203958 - DNA, 122 bp, Homo sapiens
ctgctgcagcaaaatggctcaaagtccaaccaaagtctggccttttcctgtgagtaaatacgcggcctgtttggttttccgtcccgagtgattcccggctcagtaacgtttctcctccaggg

SEQ ID NO: 203959 - DNA, 122 bp, Homo sapiens
tggcatccaagctcacttggaataaaagtcaaagtccttaccagacctacaggccctacacggttgggtctcttgttactttgataggcacagtatgcaccttctgcctcagggctcctgca

SEQ ID NO: 203960 - DNA, 122 bp, Homo sapiens
tgcccgaggcaagaagccagaggcaccgctgcatgtaattaacatcgcatccaacacagacggacctggacccggcgtgggcaacgcttttcttccgggatatttattgatgggtaacttga

SEQ ID NO: 203961 - DNA, 122 bp, Homo sapiens
ggccgtcttcctcctctttcctttcaccctagcctgaccggaagcagaaaatgaccaaatcggtatttttttttaatgaaatattattgctggaggcgtcccaggcaagcctggctgtagta

SEQ ID NO: 203962 - DNA, 122 bp, Homo sapiens
caatctgaaaagcctcccccagggggagtggcatttgagcaaagcctaacaggatggggacggtttggaggcaaagacaggagaaaggacgttttgaggcaaagagaaaggttgaggccagg

SEQ ID NO: 203963 - DNA, 122 bp, Homo sapiens
cgggcaggtactgacagcttcgccctccatggcccttctgtggtgtttttgttttctcttcgccccccaaaaatatttgaaccaaaaagcctcttttttttttcctccacccacagcaaact

SEQ ID NO: 203964 - DNA, 122 bp, Homo sapiens
ccccaccacccaccccactagtttcagcccacttccagcctttgaacactgactgagcgccgactgtgtgcctgacattgttctatgtgctaaggatacacagtgaacccaacagacccccc

SEQ ID NO: 203965 - DNA, 122 bp, Homo sapiens
agaggctcggtccccgcagaggagtctcatcgccgccggtgctctcgcactgtccattcccgcacccatgcattttctcttggttagagaccagaaggatgcagtggccgtctttcccgctg

SEQ ID NO: 203966 - DNA, 122 bp, Homo sapiens
agtagaggtcgcgcgggcacggcgctggggctgcttacctggcaggctcagcaatgagggcggggcggcggcgcgcgggcctctggaaccctgccggtccaccgaaggtcccgagcccgcta

SEQ ID NO: 203967 - DNA, 122 bp, Homo sapiens
attatggtgcacactctctggaagtgggatacttttgtcttcaatctgtttgcaagtgagcggttgacaatgcatggacagactttgagtttatgtggttctttctttaggtataagaaaaa

SEQ ID NO: 203968 - DNA, 122 bp, Homo sapiens
tgctgtcttctcctccccatgcacaagagagagaggagttcctaatcagtaaattgaatccgatcctttggaagatgaagtgagagaatggacagcaaaaggaaccttcctgggtcagggaa

SEQ ID NO: 203969 - DNA, 122 bp, Homo sapiens
gaggcctcatggagtcccgcctcaggctcgggccttggcccccaaagaaagccactccgacgtgtttgagatgggcttagttcccggacccgtcctactgcccccaggcgctggacagcctc

SEQ ID NO: 203970 - DNA, 122 bp, Homo sapiens
gccccatcgtgggctctcccaactagacatccagcttctgcccaccttcttccccactttcgtcccccccacagagcctgagacccggacgccagagcatggcgggaccaactccaaggccg

SEQ ID NO: 203971 - DNA, 122 bp, Homo sapiens
ccttggagttccagctgctctagaggttctggggagggagctgttagcctcccatatgagcgtgtggcccatcgttgccatccacacctgcccctctgtgggtgaataagtggtttcctttc

SEQ ID NO: 203972 - DNA, 122 bp, Homo sapiens
tcgctcgtcttcccccacccacggggaccaggaaccaacaatcgggcacttttaagagcacgggtttgcttcccacaatttcaagagcttgtgtcaacttgctacaactttggagaagttgg

SEQ ID NO: 203973 - DNA, 122 bp, Homo sapiens
gctcgcacacacacacactggcgtgcgcgcgcttttttaaggggcctatagactccatttcggctgcaggttaaagtcatcccaggaaggagaaaggaaaattgaattccaccttcttctga

SEQ ID NO: 203974 - DNA, 122 bp, Homo sapiens
ttatatcactgaaggcataagattcagaggtgcccgcggtctagcatcccccagtttgggcggaaagtcgaactgctcacaacggcggtcctcgcgagcgcctagcacagcggctgcaatgc

SEQ ID NO: 203975 - DNA, 122 bp, Homo sapiens
tgacccagcccagggcagtcttcctgctcgaaattacaccatcgccaaaattccggctgccgctctccgacccgtttcttctggcagcaggctggttcctcggccccaccgtgctgactcct

SEQ ID NO: 203976 - DNA, 122 bp, Homo sapiens
ggggtggaagtggggtcaaggggaggtgagcgtgcaggacggggcggggcgcactgaccccgcccagaggagcgccatgggtggggacgttacctccaacatgcctctcctgctcgccccgg

SEQ ID NO: 203977 - DNA, 122 bp, Homo sapiens
cactacccgcaggactggttccaagtcctcatcctgagaggtaacgggtcggaggcgcaccgcgtgccctgctcctgctacaacttgtcggcgaccaacgactccacaatcctagataaggt

SEQ ID NO: 203978 - DNA, 122 bp, Homo sapiens
ttctgagtttggcggccttgctggcagtggggcttggggactcagcggtactggacagcccgcggtcccagcctagccctggagaagagtttcgaaagctttggggtgagagaggtgggggc

SEQ ID NO: 203979 - DNA, 122 bp, Homo sapiens
agtcactcatgctaaagttctacatcaccaagtggaaactaagttgtttatctgatattccgataaatcagaagagtgagagatagctagatctccaaaccatcctgttttagctggcagga

SEQ ID NO: 203980 - DNA, 122 bp, Homo sapiens
atctgctgagtgggtcagccggtcagtcctgagcagccgggcctctggtgcccaggtccacgtgactggcaccctttctaggggtctagtacttgtttcttacggctcacaaatcttgaggg

SEQ ID NO: 203981 - DNA, 122 bp, Homo sapiens
cggcgcagatgaaggcgcaggtgccagtcatttttaaggcaaaaatcctgtatttcgggacggtggcatttgtgccccctgggaaggggatgagcactgctgcctcctggtatccaccagac

SEQ ID NO: 203982 - DNA, 122 bp, Homo sapiens
cccgtccgtgtgtggactggattctgttctgtcggtgtgtggactggattctgttccatccgtctgtttatctatccttatgccaatatcacatcgtcttgattacagtagctttgtagtaa

SEQ ID NO: 203983 - DNA, 122 bp, Homo sapiens
ccggctttcccgccacgtgacctctcagttgctgacactagatagggcgtggctgcggggcgggcccaccgctgcaggggagagaggggatggacagtaggctgcggttgcgcgcgccggat

SEQ ID NO: 203984 - DNA, 122 bp, Homo sapiens
gccctttcctgaatgcccagaagaatcttaagaaactcaccttctgaactcagggcgtctcgattctacttttgttgggtattggcctgcctactggctgccctctttcctatttctcggcc

SEQ ID NO: 203985 - DNA, 122 bp, Homo sapiens
gagaaaaatactgccctaaagccttcagggccaagctgccaatgatacatcccatctctccggtttctcatatcacagtatttgccctgtggacaaagaagaagtagccaaaggagcacttt

SEQ ID NO: 203986 - DNA, 122 bp, Homo sapiens
tcccactctcacttaaaacttaactccatccttacaagcagaatgtaccatccagaaactcgccaagtacatctatgcatgacgatcccccttaactttccttgcttatatctaccttcaaa

SEQ ID NO: 203987 - DNA, 122 bp, Homo sapiens
agaggcacagagctttgatttgaaaagcaacacgtatcacaaaaatgccgccaactggctcggctcacttgttccttttctcaatcagcagcagatcattcatcaagcaccttctgggctcc

SEQ ID NO: 203988 - DNA, 122 bp, Homo sapiens
ctggttttatagtttcctaagttattgccacaggtcatggatctgtggcgctcaaatgttcgctcacaaggttcacagcacattctttgcagttgcaccacccagctaggaggggcgaaacc

SEQ ID NO: 203989 - DNA, 122 bp, Homo sapiens
catcttgtatagctctcacaaaagacctgagagtagctgtgattacccgctttttgtcggcgaggacactgaaggtcaggaaaatggagagatgggctttttgctgtcactgcagggaacaa

SEQ ID NO: 203990 - DNA, 122 bp, Homo sapiens
tcccctgccccacagagtgtaagtacccggcatctgggcctgggtttaggccaaggcctgcggctgcccaggcaacaagaagaccagtcaccttaccgcccccagggacctcccagggcctg

SEQ ID NO: 203991 - DNA, 122 bp, Homo sapiens
gggtggaagtcccctttatttggatttgccgctgggtggctagatgacgtaggtggccttcgatgtggaccaggagggcatccagcatgtgcaggaccccacggagcagggtgtggtctgag

SEQ ID NO: 203992 - DNA, 122 bp, Homo sapiens
tattcctcgcaggattcggcggtcccgagtcgcagtcagggaggaggctcgggaagcacacgtgccctggcacactggaggaggtacacaggcacaccaggagggacagggcctcttgggag

SEQ ID NO: 203993 - DNA, 122 bp, Homo sapiens
tcggggcggctgggcagacggcgcagtccccggggccgccctcgacacggccgctgaggccgctgggggctgctccccaatctcttgaccttgggttgtgtaacctgctacggagccggcgg

SEQ ID NO: 203994 - DNA, 122 bp, Homo sapiens
aaagacccagacccctatgctatgaagaagcatgtgacccatacatggccccgtatttcacgtgggggccgcaggagaggcccacacagcccgtgtcctttcttgcacgcatgccgagcgtc

SEQ ID NO: 203995 - DNA, 122 bp, Homo sapiens
tgtgaagttggagtcagaagttagtctctgactctttcaaaacccttgcgaggattggttcgaatgtgtttttaggaagttctgtggtacacttgaatttatacttgatagagggctcttaa

SEQ ID NO: 203996 - DNA, 122 bp, Homo sapiens
cggggaaacttcgggctcggcgtgaaacgcgtcgctcctgattggtcagagtgtggcaaccggtggaccgccggcaatggcggggttttcggttttcaaatgaacccggcaggcgggaaaga

SEQ ID NO: 203997 - DNA, 122 bp, Homo sapiens
actgagccccgggccattgtccatctccgaccagggcagtagccacccccactagccagccgtctttatctcctagaaggggaggttacctcttcaaatgaggaggccccccagtcctgttc

SEQ ID NO: 203998 - DNA, 122 bp, Homo sapiens
ctggaaaggcaggtggatgggtcagagggtcactgcaagcccgcgttcaggggctccactcgcagccaaagtcctccttcagcgcgcatgatcagctccggcttcctgcggggctccgtgtg

SEQ ID NO: 203999 - DNA, 122 bp, Homo sapiens
acaccagggcctgaggcccaggccacgctcacacctctctgctctccttgctcccagccccgaaactacctcaacaccctgtccacggctctgaacatcctggagaaatacggccgcaacct

SEQ ID NO: 204000 - DNA, 122 bp, Homo sapiens
ctccagcgaaccacacggggtggatccaacagccgcaggggcatcgtggtcctgcggagacgccgcccgcccggaggcggcgctgtgacccaggttggagagtcaggagcccagcgccgcgc

SEQ ID NO: 204001 - DNA, 122 bp, Homo sapiens
gtctccacccttcccatactaaggctttgatgcagggccaagcttgtctatttgacacttcgcagagtgagccccaataggcttcatcagcagtctccctgaaaacccctgtcatgtacaaa

SEQ ID NO: 204002 - DNA, 122 bp, Homo sapiens
taacttctcaaataaactggaactaaatcataagaatgagcttttagagaccaaaacttacgagagaataaggaaagcatatttgggcagacttttcctctcaatttatgtgaaatgtgtaa

SEQ ID NO: 204003 - DNA, 122 bp, Homo sapiens
atattctgaatatgtagttctctcactttccctccataggattctgatcaaagctagagtcgcctcaaacaagagcttgattaattgcccttctgaagatcaaaatgtgagaaaatttctag

SEQ ID NO: 204004 - DNA, 122 bp, Homo sapiens
tggttcgcgagaaagatgttacaggaccccaacacttacccaaaggtagccgttgggtcgcgatttctgcactatagtcccttctgtagtcgccagaaatatcttacaggacagaaaaatat

SEQ ID NO: 204005 - DNA, 122 bp, Homo sapiens
gcatgaccaccgttctgcaaaggacaggagaaggcgttactgggtcagctgaaagagggacgggacggtcacaaaaccccaaggttccctctggcattgataatgcctgccccgcaccccct

SEQ ID NO: 204006 - DNA, 122 bp, Homo sapiens
aaacataccaaaaaaggttttaccaagacacatcggctgcagggcagccacagatacctgcgttggttgtgtactatacaactcctgagagcagtgtttacactgtactctacttaagttgc

SEQ ID NO: 204007 - DNA, 122 bp, Homo sapiens
acgttcctgggagctcggtgggaggaacccagccacgttgtgtgctgcgcaaggagccggcggcagggaggggaaaacggaaagacgcagaggagggcaggtgacaagaggcccacagagag

SEQ ID NO: 204008 - DNA, 122 bp, Homo sapiens
gcgggtggagctcacccctcgaggctgtcctctcggcgcgcccgcgtcctcccctactcccggccctgccactccctcgctggcctgaacagctgtttacaacggaatccggacgccgggcg

SEQ ID NO: 204009 - DNA, 122 bp, Homo sapiens
tgtctctctgacctcaatatcatattctgcaaaatgggtgaagctgaaggtttaggccaccgtcaggtaggaccctggctatgagtgttttataactggtaaagatacctaggggaaccgct

SEQ ID NO: 204010 - DNA, 122 bp, Homo sapiens
acaagaagtgtgcatccaccaccgcaggcttcgcactcttccccgagaccctcactggggcggagcccacctcgctggtcattgctcctggcacctgcatccctaacgccgtggaggtgtcg

SEQ ID NO: 204011 - DNA, 122 bp, Homo sapiens
acctcagcagaggcacacaagcccggttccggcatctctgctcctattggctggatatttcgtattccccgagctcctaaaaacgaaccaataggaagagcggacagcgatctctaacgcgc

SEQ ID NO: 204012 - DNA, 122 bp, Homo sapiens
ttaacccaggtccctgttcatccaacatcagagagcctaatacacccacggtagctcccacgtatctgaggtttcatctacccgtatccactacagtccaaaaatagtaaatggaaaagtcc

SEQ ID NO: 204013 - DNA, 122 bp, Homo sapiens
agctccaggagccccaaggacggcgaagggcagcctggagttggggggcgtcagcgagggcgcgggcaggggagagaggcgcccctggaagtggagccggcctggacagaggcagggttcgg

SEQ ID NO: 204014 - DNA, 122 bp, Homo sapiens
gcaacaaagtgagatcatgtctctacaaaaaatctttttaacattagccaggcacagaggcgtgcactcgtagtcccagctactcgagaggctgaggtgggagaatcccttgagcccagaag

SEQ ID NO: 204015 - DNA, 122 bp, Homo sapiens
atacccagtcctggtcatctccgcaggaacaacttcaattctggttaataaggacttcaacgaagggttcattaaggttttccctccaccgaaagaaagaataccgtccccagggagcaggc

SEQ ID NO: 204016 - DNA, 122 bp, Homo sapiens
ctcccgctggccggagtttgcagacttggcgctcaggccgattctcccggagttgggccgcgcgcgccgggccaatgagcgcgccccgcggagggctccgctccccccgcgcgcgctgattg

SEQ ID NO: 204017 - DNA, 122 bp, Homo sapiens
agttttctgcttttattcatattccgatccactgaaccaagacattggagtctgaagaggcgctgccctgccccttctgctttcagttttccaagtagaaagagcgactgaaacgaagtttg

SEQ ID NO: 204018 - DNA, 122 bp, Homo sapiens
tagtaactcaggtctattttttttttgtaagtaaggataatttctttagcacataatcaccgattgtagttttacaattatatatgtgtgtgaatgtgtttctttacaggtgagactctaac

SEQ ID NO: 204019 - DNA, 122 bp, Homo sapiens
ccaccttgaagcttatttttttatagtgacataggttgtccagcaccatccacttgacatcgcctgcccttctgctccacacctgttctcttggcctcgtctctccacttcagcccaataaa

SEQ ID NO: 204020 - DNA, 122 bp, Homo sapiens
ctcggggaggggaaaactggtcctatccagtcctgtgggagtcctatgactcactctgggcgttttccagtttgggtggacttgtcatttcccgctgagggagccgttcctgggcggaggct

SEQ ID NO: 204021 - DNA, 122 bp, Homo sapiens
gtgtgcctgagagtgtgtgtgtgtagagggggtggcggggcggggggggtctgcacattccgccgagtgtcctcatgaacaaaaggcctaaaaaaaagcagagagtaagggagctcagagaa

SEQ ID NO: 204022 - DNA, 122 bp, Homo sapiens
tgcctgtgcagcttctgatgctgcctccttctgcagcggaagatggagaaccgtgattaccgggatgcacaggagtttgctgctgatgtacggcttatgttctccaactgctataagtacaa

SEQ ID NO: 204023 - DNA, 122 bp, Homo sapiens
agagaaaaaaagaatccgcagaagagaagagacctagagaagttgcttagtcctcccccgcgggagggctgtacctcaaaaatgccatattggagggacgtccagttctcctaggtttccag

SEQ ID NO: 204024 - DNA, 122 bp, Homo sapiens
agtgctcctgtctgcagtgccccgagtggtgaagtttatgtctgggctgagcaccgtggtcgcagaggagggcggcgaggccaccttccagtgcgtggtgtcccccagtgatgtggcagtcg

SEQ ID NO: 204025 - DNA, 122 bp, Homo sapiens
tcgtcgctgtgcgggtccgggggacggctccacgtgcgaccctcctagctgcccgggctgcgcctctgggctctggcctctgccacctccgccgccgccgcctgggtcccctgagccaaggg

SEQ ID NO: 204026 - DNA, 122 bp, Homo sapiens
tcttacgccctatttccattccccagagctgcaatcaaggcccgaaccccaccagcagcacgctgggtggtgcaggtccttaaaccttcacagcttccaggggctcggacctttaccctcgg

SEQ ID NO: 204027 - DNA, 122 bp, Homo sapiens
atgcaggcacactctttcctggtacccacgctcaggggactccttcctctccgtcccccacgacaccaccaccaagcacaccagccacatgcctgcacccgcgaaggtgtccacgtcctcct

SEQ ID NO: 204028 - DNA, 122 bp, Homo sapiens
ccagaaagagccaaacgatctagtcgtttttctaaagttctcagtaacaaccagttgtgacgtcttaagagagaaagaaggccttttacagatggacagaacatgctgcttctcggccccgg

SEQ ID NO: 204029 - DNA, 122 bp, Homo sapiens
ctggttggccagacttgcatcatgtgctatggcacaattactctaataggcaggcatggtcggcatggtcctcttcttgctgcttcttctccagaggtaccacaaagagtggaaaagggtca

SEQ ID NO: 204030 - DNA, 122 bp, Homo sapiens
ccaggtgaccccaagatccggaccacactacgaaatacggatccagattttaaaggccttcgaatccaaagtcctcgttttacaaagagcccgcggggtgaaatgacttgctcatggtctgg

SEQ ID NO: 204031 - DNA, 122 bp, Homo sapiens
taatgaaattaacctaatcttttccattcggcagccgggccgcgggccggccgagctgggcgggcggcctaattgccttggttaatctcattaattcctttgtgccgccgcagttaacaact

SEQ ID NO: 204032 - DNA, 122 bp, Homo sapiens
gttgatgtgaaggcccaggtcgaggtgtacactgggggcggggaagtggaggtgaccacacgagcgccccatcactgagcgccgccgcgaaatctgcgctctttgggtcacttggagcgcgg

SEQ ID NO: 204033 - DNA, 122 bp, Homo sapiens
ccaccgcgcctggcccatttttaaactttttatagagacagggtttccccatattgcctacgctggtctcgaactcctgagctgacgtgatcagcctgcctcggcctcccaaagtgctagga

SEQ ID NO: 204034 - DNA, 122 bp, Homo sapiens
acttgactccactgggccccagccttgcatccctcccactcctccagcctagagctggggcgaggtgggcatcaccactaggaatttctcctgaggcagtgagaagaggggacaaaggtttc

SEQ ID NO: 204035 - DNA, 122 bp, Homo sapiens
tcaggaagcagaaggggcgcggaaagatgcgattgacgtcgcaagcgaaccaatgacgagcgagctgtggcaggcctccagccaatgggcagtgaggcctgacgcggggggcggacgctggg

SEQ ID NO: 204036 - DNA, 122 bp, Homo sapiens
ccttccccgactgtatcgacggctccgacgagctcatgtgtggtgagccagcttctggcacggggaaggggcgtccgggctgggttcccccaggaacgtggagtttaggggaggagacgtgc

SEQ ID NO: 204037 - DNA, 122 bp, Homo sapiens
aaccaacccgctcctagttctgggcgccttccccagcagtcagatgggggcttcagaggccggtgcgcggccacatggccccgggccaggcagggggtcgtggggacgcatctgcgctaggc

SEQ ID NO: 204038 - DNA, 122 bp, Homo sapiens
aacctaaaaacagagacgctaggagagaggctgaaagacgcgcaagtcccgccccggccccgccccggccccgccctctgccggttctaaagggcaaggtctcagcgcctcgcgccccgccg

SEQ ID NO: 204039 - DNA, 122 bp, Homo sapiens
aaggtgtcccacaggaagcttgagggcgggaagttttccagcccaggagcctgagctcagcggggcaggaagagggagcagctcctccgtgggggacctttgagagcccaggagcaggattt

SEQ ID NO: 204040 - DNA, 122 bp, Homo sapiens
cctactgggtctgcattcaggaacatgtgtcctgtctgttagcactagaagtgatggacacgtgttggctggaatgtcaaggctgtagccaggccccttattttagacacttagaaatcagg

SEQ ID NO: 204041 - DNA, 122 bp, Homo sapiens
ctgcagagcttctctctggccaaatatgactcaatcaggtcttaagcaaaaggcctggaacgtctgtcacttccagaggcctcatgccaagcacaggatgtgaaagctcacttcttccttct

SEQ ID NO: 204042 - DNA, 122 bp, Homo sapiens
gccaaggtgagcgccgcggggtctagaaagggcccactggggaggcgtggctggagcggccgggggcatccccgacccgccccccaggctcccacgcgagtcgggggcagtcggccgagctg

SEQ ID NO: 204043 - DNA, 122 bp, Homo sapiens
cggaattgcacagggtttggcggggatctctgctccgccttggcactactcggctccgctcgcctccgcgcggctccctgggctttcactcggctctgttcggctcctgctcgggaagggtg

SEQ ID NO: 204044 - DNA, 122 bp, Homo sapiens
tggctgacatttgttcagaccagcaataatgcccagcctgtgtgcaatcttcccaattttcggagctcacacagcttccttgatgctcacaacaaccctgtggggccagcctaagctcagag

SEQ ID NO: 204045 - DNA, 122 bp, Homo sapiens
accttcccaccttgcaccttcttggcagggggagcacggcctggccccctcacccacgtgcggggccccgggactcccacctccgagggtctcgccttgcccgggatactggagcgggactc

SEQ ID NO: 204046 - DNA, 122 bp, Homo sapiens
agaaaggatgaaaaaggtgctgagtgcagacagagtgaagccaaagttgggagatgcaggcgttgtgcccagaatacagttggaacttccagcatttgaatggagcaacacaaaagtaggaa

SEQ ID NO: 204047 - DNA, 122 bp, Homo sapiens
aaatggctccctgcagcagcccctgccacactgttctgacaatcacgctgcccaaataagcgaccatccaatgtgtcaggccactcagatccgccacctgcctgcacccagtggcaccatgc

SEQ ID NO: 204048 - DNA, 122 bp, Homo sapiens
gccaagcgctgctttcaccattttacaggttttcactctttcaatcgttctaagaagctgcgagggccttccttttattatccccatttttcagaagaggaatccgaggccttgggacctac

SEQ ID NO: 204049 - DNA, 122 bp, Homo sapiens
cacatatgtctgcctcctatcatttcttcatgaggttcagggcaaagggcctagtcaagccgatgatctttggttgcccctacactttccccaaaccacctacaaataaacaaaacaagggg

SEQ ID NO: 204050 - DNA, 122 bp, Homo sapiens
tgaacggggtgtggaggcgggacagtgactgtacatagacacaaacagagaaggaaagcacggagacccacaaagtgagaggggagacacccactgcaggggagcaagcagagaagcgcgcg

SEQ ID NO: 204051 - DNA, 122 bp, Homo sapiens
gtgctgtgaagtccattctttcctctgcaagactactgactatgcagaaatttatcgaagcggattattatgaactagactggtattatgaagaatgctcggatggtaattatggcccctgc

SEQ ID NO: 204052 - DNA, 122 bp, Homo sapiens
aatccagaaggaagccttggggggtcaggccctctatcctcatgtcctggtgaagaattgcgcagtggagttcaacttcggacagagagcagagccctactgttctgtcctcccggggttta

SEQ ID NO: 204053 - DNA, 122 bp, Homo sapiens
aaaaaaaaaccttgcccctgccctcaagtagctcactgcccacaaggaagataatctagtcgtgtgaatagatgattacagtaccgtgttgctgagtgcagtgagagattcaagatcaaggt

SEQ ID NO: 204054 - DNA, 122 bp, Homo sapiens
ttgcagtcacctccactttattcttccagatcgagtatgttcaaaactgaactcatcttccgccataaatctgctattattatgtttttgcctgtcaggacatcggcttataattttggaaa

SEQ ID NO: 204055 - DNA, 122 bp, Homo sapiens
gctgagagcctcctctttgtattcggcaagaccaggctccgtagccctcagggaaacattcgaccacaactgtggtgtgtgggccccgctgtttgctagagagcctgagagatgagtcattg

SEQ ID NO: 204056 - DNA, 122 bp, Homo sapiens
tgagctgtaaccccactccaggacaagatagctgggacagactcttgaattccagctatccgggattgtacagatctctctgtgactgactttgtgactgtcctgtggtttctcctgccatt

SEQ ID NO: 204057 - DNA, 122 bp, Homo sapiens
ggaacatttttatggctttcaataaatattttccagttgctttcaaaggggttcccaattcgcagttccacctgcagcgtataagagagacatttcactagatcctcaccagttactttttt

SEQ ID NO: 204058 - DNA, 122 bp, Homo sapiens
gcgagcatcgctgagccccaggggagcgcctcagcatcagcacctgttgctgcaggtgggcggcgagggcggcgcggagggcgggccacagccgggcccagggaggctgggcgcgcacccgg

SEQ ID NO: 204059 - DNA, 122 bp, Homo sapiens
tggcgtcgcaagacctcagtggggacttcaagaagccagctctgccggtgtccccagcggcgcggagtaaggccccggccagcagttcttcaaaccctgaggaggtacagaaggaagggccc

SEQ ID NO: 204060 - DNA, 122 bp, Homo sapiens
tgacattatcaaatgcttcctctgtcccaggcactatactgaaggtttcacccacattttcgagtcctccttataactctgtgaggcaggtgctgttattatttctattttacagaaaggaa

SEQ ID NO: 204061 - DNA, 122 bp, Homo sapiens
tactccttctatctgcccaaagagcctcgggaggacaagtcctctcatcccaaggacccccggggaccctctgtcttgcacaacagcgtcctcagcctctccaaccaggtggagcagccgga

SEQ ID NO: 204062 - DNA, 122 bp, Homo sapiens
tgtgtaatgtagagaaaaatgactgagtctggagactgactgactcaccaagaaatactacgcacctaaaagatacaggaactgtagtggtaaagagacacagttcctgccttggtgggtcc

SEQ ID NO: 204063 - DNA, 122 bp, Homo sapiens
cagttcgggctgggggagaattcagcagagacgggttaggagagcgccccgagtccgggccggtgcggaaactcgggaccgcgccggcagggctcggtgcgaggccaggtcggggtctgggg

SEQ ID NO: 204064 - DNA, 122 bp, Homo sapiens
agaaaaatccagaaaaatattccttttaagcaagtctgaatcgactttcctctctatccccgccaccctcgcctcccacctttgaaataataattttactcccttcagctgagttgctgaga

SEQ ID NO: 204065 - DNA, 122 bp, Homo sapiens
ctcaggagccccaacacacccgactcaccacacccagggactcgatgccattggccacttcggtcagggtagctgcagcctgcagcttggctgggctggccaccacaaccggctggggggcc

SEQ ID NO: 204066 - DNA, 122 bp, Homo sapiens
ccagacttcgcaccctccacactcccgcttccgcccgtcgccttgggccttagcggcacccgcaccgcaccccagcgccacccggcaacacgccccccgctcccggcccccttaccacacat

SEQ ID NO: 204067 - DNA, 122 bp, Homo sapiens
cagcccacagcctggcctgcaggaggcttctagtaaagtggccaattaatccccgagccccgtcttccagggtcatgcacacagtcacacgcgtgctcttcacatgtgtcaccctgccccca

SEQ ID NO: 204068 - DNA, 122 bp, Homo sapiens
aagtgacactcccggaagctaccgcctcttataagccacacatgggcggagttagccttccggcccgcagtcccactggctgacttcgctgcccgtcacgggaatgcgggagagggcggcgc

SEQ ID NO: 204069 - DNA, 122 bp, Homo sapiens
ggaaggcgacaaaggtttctcacaggtcgccgttagggagagggggcagcgcaggaaacccgtttatttaaagttcagttgtgttgggcatctgatccaggacaactcgcccaggagcccgg

SEQ ID NO: 204070 - DNA, 122 bp, Homo sapiens
actagatgggctggttaggagagcatctatctgcttggtgttaaaacaggcctctagacacggaggaaggcaacgggtccccataacagagaatgtataagcaatcaactctggacaagaag

SEQ ID NO: 204071 - DNA, 122 bp, Homo sapiens
agcaagcaagcaagcaagcaagcaagcaagcaagcaaccaaacaagctgtgttcttccagcgccaggccctctctagtgagtacaagtgtgagtatctccccataaatcacagttcagggtc

SEQ ID NO: 204072 - DNA, 122 bp, Homo sapiens
ctagcttttcctcgtggactgccagggctgcctcctgtcctcctgcttaccgcccttgcccgcccagcaggtcgggcaagtgagtgactcacacacctgggctctgtgtgggcccagcccgg

SEQ ID NO: 204073 - DNA, 122 bp, Homo sapiens
gtcccccacacccctcagagctcttaagagggtgttccgtgcttcctccctcgctgtctgcggtcacctgtgtctcactcgtgctgtggccggtcccctcagccacccaacaagtcctctgc

SEQ ID NO: 204074 - DNA, 122 bp, Homo sapiens
tgatgcagtcttattcatcaaaggtatttcctgaagaaggaaaaaaatcaccatcatttacgtgcccatgccttttattttgaaacatatggaatgcaggcctttgcacattttcaggaatt

SEQ ID NO: 204075 - DNA, 122 bp, Homo sapiens
tgggctccctgaagtctcggggagccgtgacccatgggatcgttgagcagccgggtgctgcgccagccaagaccagcccttgcccagcaggcgcagggtgccagggcggggggctcggcccg

SEQ ID NO: 204076 - DNA, 122 bp, Homo sapiens
gatcccagtcctcgcagtgaactctggggcgcagaattcaaaacgcttgcggtcgccgagcgcagccccgccctgggttatgtaagtgacagcgctgggccgtttctcttttttttccggac

SEQ ID NO: 204077 - DNA, 122 bp, Homo sapiens
gaaggagaatggtctggcctggtgtagtctgtggaggagtgcccccaaggcctctagatccgcactcacccactaccggctgtgtatgtgtacttagggagcaggaatgtttacttttaaaa

SEQ ID NO: 204078 - DNA, 122 bp, Homo sapiens
cgcacccacaccgcggccctcagcacccggctgccggtgaggtggtgtcggtgcccccagcgcgctccgcgcccaccgccccgcttcagccggcacccgctcctccgctctaccccagctgg

SEQ ID NO: 204079 - DNA, 122 bp, Homo sapiens
ctgcgcagcctcagttgcgcgccgagagctctgctgggggctgatggttgtgcgttcttccgggccggccttgactgtcttcgaaaaaacctcgtcggggcaatagttaagtggaaagatta

SEQ ID NO: 204080 - DNA, 122 bp, Homo sapiens
tcccgtcctgctaagagtgtcggtgccgcggtgggagcgggtggcccggtatgcagtgtgcgctgccggaatcctgctctccatctacgcctaccacgtggagcgggagaaggagcgggacc

SEQ ID NO: 204081 - DNA, 122 bp, Homo sapiens
atggtggctgtgaagaggtggctgctctgcttccgcagcttctgggcttgtgcgtagaggcggcgggtactgcggcaggaggcaggcgccagccaacttagctccttctaaattgtcctcat

SEQ ID NO: 204082 - DNA, 122 bp, Homo sapiens
cgccctgccccggcccctgcaaccctgcctttcgctcttcttcctcctcccttccgtctgcgcccctcccgtggggccgtggcaaccccgtgcctcgcttgcccaatgagaacacggtttgg

SEQ ID NO: 204083 - DNA, 122 bp, Homo sapiens
aggcaggtggtcggagttgctaaacaccagtcgccagccccacggccatgcccgtgtggccgccttagagggaagccacaatcctattaccagctgcatcattaggagctgggagcagatta

SEQ ID NO: 204084 - DNA, 122 bp, Homo sapiens
aatttctccgaggccagccagagcaggtttgttggcagcagtacccctccagcagtcacgcgaccagccaatctcccggcggcgctcggggaggcggcgcgctcgggaacgaggggaggtgg

SEQ ID NO: 204085 - DNA, 122 bp, Homo sapiens
cccactccacaaaatttttctgccatttcccttttcaccaccaaattttaaatgatgattcgtgtgtgaaaaattggtcccttgatataaaattgaactgtaaactttgtagagctttggtc

SEQ ID NO: 204086 - DNA, 122 bp, Homo sapiens
tccgcctggtggttatttattcctgacctgttgtaaccttctgcctggctctctttcgtccgcacacctagggtttttgcacaaagcagctaaaattcattttcatgcccattgactgaatg

SEQ ID NO: 204087 - DNA, 122 bp, Homo sapiens
ctgacctcaagtcatccgcccacctctgactctttctgggattgcaggtatgcgcccccacgcctggcctaatttttgaatgtttagcagagatggggtttcaccatgttggccaggctgaa

SEQ ID NO: 204088 - DNA, 122 bp, Homo sapiens
gacagccaggtataacccaggttgtctactcaagtgcagtatttttcagttacccaaacacgcttctatttacaatgactcattttgatgttcacaatgctggaagatgggcaagacatagt

SEQ ID NO: 204089 - DNA, 122 bp, Homo sapiens
cccatgtgacatgaaactcaggctccaaactgagcacgggaacgtttggggacaggagcgcgatggccttcctcagatagctggggggctggcatgaagacgggagctacagccagcacagg

SEQ ID NO: 204090 - DNA, 122 bp, Homo sapiens
gcccggatcgccgtctcggtgagcttcacatgcagtacggtgatgttgtcctgccccagccgtccgcacgacagcccatagcgctgctcctcccgcaggccccctgtcccccccgccgccat

SEQ ID NO: 204091 - DNA, 122 bp, Homo sapiens
gccgcttgacctgcccccaaccgaagcatcttggttcgcgagtgctgcgcttgcgcagagcgagagcacgccgcctcttgggctgtatctggtacccggttccaggtccctacttcctgccc

SEQ ID NO: 204092 - DNA, 122 bp, Homo sapiens
cagagtcacacgccggtgacgagcaccatggcagcgtgagatgtcaacagcgagagaaaccgggtgaagagggtatgagaactctccgtccaatttccgcaacttgcctattgaatctggta

SEQ ID NO: 204093 - DNA, 122 bp, Homo sapiens
tcacctctcgcagaggcttaaagccttgtacttgctgtgcagtgcttggctctgcgtgcccgctgtccagtagctgtggatagctcttgagctgtcggaaactggctaattcaactgaagaa

SEQ ID NO: 204094 - DNA, 122 bp, Homo sapiens
tcttaataccctcaaataatttttaaagcagatctttaagcatctcagtatgtgtatagccgcatctttcaagggtaattctggtggcaatgtaaaaatagagcaagtggaaaagaggagga

SEQ ID NO: 204095 - DNA, 122 bp, Homo sapiens
tagagaacaactgtgctaaactgtactgccttcttgttgcatagtcacacaaagcatttgcgggatcatgagctttggcgttatattcattctctctttcctccctttcacactcctctctc

SEQ ID NO: 204096 - DNA, 122 bp, Homo sapiens
tacttgggaggctgagacaggagaatcgcttgaacgtgggaggtggagtttgcagtgagccgagatgatgccactgcactctctagcctggatgacagagtgagacgtcatctcaaaaaaat

SEQ ID NO: 204097 - DNA, 122 bp, Homo sapiens
cttcaagcatcccggtgtagtgcatcacgcaggtctggccgcgcttcaggagggtgtgcgcgtctcctggggcgatggtttccacctgcactcccatggcggctgcggacgctgggtgggca

SEQ ID NO: 204098 - DNA, 122 bp, Homo sapiens
ttattttatttaaatttttaaagttagctttgctacagggactgcagtgatgccgaagggcgggcaccgcagaggaggctgcgccgcagttggtggggagcgccagggtcggtactggcagt

SEQ ID NO: 204099 - DNA, 122 bp, Homo sapiens
aaacttggttagccagctggaacatagatactgacttgaatgtgcaggtcctttgatgaacgtaaatacaaaaagatggaacaatgtaaaagtgtagactgacaatggtatacagaaattat

SEQ ID NO: 204100 - DNA, 122 bp, Homo sapiens
agcagctgaggctgtttgtttaatctgactgttacttgacaccacgcgggtgttgcagtgcggactgtttgcctcttccccaccaagaacaccatttggtttcccccggctgggtctctatt

SEQ ID NO: 204101 - DNA, 122 bp, Homo sapiens
ctggcccaaggcccgggtccaatcctcagaactgcacggctcggccccgcccctcccccacgccgtgcctaaccctaacccccagcctcacgcgtcgcaccgctccccacgccccgctcccg

SEQ ID NO: 204102 - DNA, 122 bp, Homo sapiens
agagtgagcactccagacgcgaaagggcccggcccagccagcttgcggggacccccgagacgaggtccctgccagactgccaatgtttatttgaggctatttgtttaaattcaacttgaacc

SEQ ID NO: 204103 - DNA, 122 bp, Homo sapiens
ctctcccacggggaaaagaaaaaaggaagaagagctgggcagaagaaaactgacttcacccgtcactgaaatacttcatacctgaagcacagctctcttgcgagaagaacatgatggcagct

SEQ ID NO: 204104 - DNA, 122 bp, Homo sapiens
ataaatttggtggttagagtgtgtgcctggcggagaagctcccgcattcaattcccttcgcgccacggcgcgcaacgttgccattgtaaaccggccttggagtggcggggccgcggtgggcc

SEQ ID NO: 204105 - DNA, 122 bp, Homo sapiens
gggtgaccagagccgcctctgggcaggaagccaagccagaaagcccaggacatccctgagcgcctgtcaccatggcaacctgcccgctctgccccccccccaaactcaaatccagtatattt

SEQ ID NO: 204106 - DNA, 122 bp, Homo sapiens
aacccagaatggtgaatagctacccctgggcttacccttttataattttcaacaaacctgcgtttagccccggctaggtgccagcaagttgctagggactgaggaggctctgcagaggaccc

SEQ ID NO: 204107 - DNA, 122 bp, Homo sapiens
ggcgccgggcccggcgcgggggcgctgctcatgccgctgcggacaggaagggtggcaccacgcgctcagcgtctcaagagccccgtttcgagccacacacagcctgcccaacctgggtagcg

SEQ ID NO: 204108 - DNA, 122 bp, Homo sapiens
ggcagctaggcagccgcgagcaacccagcacccagctgcctagggtgctccaggcagcggcggcagcagctagaagctggtgtcattattacacaagccaggcaaatcctgctccagtacac

SEQ ID NO: 204109 - DNA, 122 bp, Homo sapiens
ctcgatctcctgacctcatgatctgcccacctcagcctcccaaagtgctgggattacaggcgtgagccactgcttccggccgcaaaattcttatgttgaagccctatttcccagtgggttgg

SEQ ID NO: 204110 - DNA, 122 bp, Homo sapiens
aaatgtgcctgttggcatctagacctaacctgggttagttcaggctgaaacttttgtgatcgcattttagcttgctttatgaggctcagttatggagccttttcttactggagttgcttata

SEQ ID NO: 204111 - DNA, 122 bp, Homo sapiens
ccactgcctagggctgggttagtgccagggtgcccctgtaagctaaatgccacccgcacccgcgggggaaggcgaggggtcaggcgctcacacagggaaaggctctagggtcgtaaaggtgg

SEQ ID NO: 204112 - DNA, 122 bp, Homo sapiens
tggtgagctttaaggaccatcacctgtgccattttcccaaccagttaaaacagcctcgctcggcagggatcgggggtccctctgtgtggagggtgttggaaactgaatcaggtgtagcatca

SEQ ID NO: 204113 - DNA, 122 bp, Homo sapiens
ccaggacaaattcttggacatcaagttgctggagcacatgataccaacagctgtagggcccggagtaattggcgaaactgtgtatctgtaaggcatttggtaggaaaaatgctaaacagacc

SEQ ID NO: 204114 - DNA, 122 bp, Homo sapiens
atgggagcctcaagcggccccgaggttagcctccttcctggctgttggcagcagcgctctcggatgccagtgccacactctgggctcttgttctgctgcgtctcccagcggtgccccgtgag

SEQ ID NO: 204115 - DNA, 122 bp, Homo sapiens
ttgcaaggtcatttcctaaccaagcaactaatcctacaccatcaacttatattatatgtacgccacttccaagtgccataaaacaattactataccttaaaactgcctctgcaatgcttatg

SEQ ID NO: 204116 - DNA, 122 bp, Homo sapiens
tttggaaatgcagcagacctctaaacctgccagcattggatgcaagaggctgtcattctacggtaggaggagcttctattggtcgggctggaggcgggtaccgagctgagtataaaaggtgg

SEQ ID NO: 204117 - DNA, 122 bp, Homo sapiens
gatatcagccttattcacctttgcatatgtccttctgctcccatatactcaaccagtgcccgatatacaaaccaagagagaagaaacatcaacatttcctgagtatgtaccatgttccagct

SEQ ID NO: 204118 - DNA, 122 bp, Homo sapiens
acctctcagttggtcgtctctttccggaaaacttcggcgcctctcgagaaaaacgtcggacgcgctttgctctcttcagaagtctcttccgggacagctgtaccctctagtagtctcttttt

SEQ ID NO: 204119 - DNA, 122 bp, Homo sapiens
agcccagctggaatatggggccttttaaagcactctttctgccacaacacataaggttgccgtgcatttttgacactgtgacccttcaataccaatacggctttttagacagtaattcctgg

SEQ ID NO: 204120 - DNA, 122 bp, Homo sapiens
acctcaagcaatccaccaacctcagcctcccaaagtgctgggattacaggcgtgagccaccgtgccgggcctggtttcagaatttcttaatggctagcatattgaattgtatacctgaacca

SEQ ID NO: 204121 - DNA, 122 bp, Homo sapiens
ctgacggcgtcgtgatgctggagcacagccatcgcctcatctgctcatagacaatgagtccggtgaggttctgtgggactcagctgagaccccaaggggaagcgaaaggtccggtgctggcg

SEQ ID NO: 204122 - DNA, 122 bp, Homo sapiens
tcagagtagccaatgcctctcctgtccaaaatctcatacccttggcccttctcccgtcctcgcgctgaggctggagtcaggtcaaatgtcagaacatctggatgtcccaagagtgacacctg

SEQ ID NO: 204123 - DNA, 122 bp, Homo sapiens
gtggatagtcatactccaactcctttgacactagcagcagtaggtaacagtagggtagcacggggaagggaacagaaaagtggaggaggaggagactcgataggatattttgcagtatttca

SEQ ID NO: 204124 - DNA, 122 bp, Homo sapiens
ttcctaatccttccactttgtagttcctccagcaccggttgtgtccgagggcccttctggcggagccacactcgctcggcccaaggtcccgccctccagcatcaggatgcacggacagtatt

SEQ ID NO: 204125 - DNA, 122 bp, Homo sapiens
gaaccaaccagccgccttcccggcgggcctcccagacgagcctagcggcaagacgaaggacgccagcagcagcagcaagctcttcagtgccaagctggagcagctggccagcagaagcaact

SEQ ID NO: 204126 - DNA, 122 bp, Homo sapiens
ggtgcctggaaggccctattctgagtaaggtaccatcgccatcaaccctgaactgagcctcgaagaacccaacaacatagatgggccccaccccaggtggagggtgcagacagtatactcga

SEQ ID NO: 204127 - DNA, 122 bp, Homo sapiens
cccaacccaacccagatatgttctaatgcaagtgcagataaccttaactgctgtgtcacgcggctcctccagaactaccctgtgagattaggtaccgtgatttgcctgacttagcagaagag

SEQ ID NO: 204128 - DNA, 122 bp, Homo sapiens
ccaaccaatctttccagtgacctgggtttacgcttcaccacagagaaggaacttttcagacgctcccttggccgcgcacccgggatcggaacagcgctgtcacttgcgacaaaatccctagg

SEQ ID NO: 204129 - DNA, 122 bp, Homo sapiens
acagacctttggatagaatttgtcgcatggtcccacccagcaacaaggaattctgaggaacgtggtctttattccagcagccgtgtgtccagataaaattgatgtcctatcgctaaggacga

SEQ ID NO: 204130 - DNA, 122 bp, Homo sapiens
tgggaaaactggggtgggggtgggggtgggacttctaactgcatgaattaatccacaaagcggctatcttttggggtggagtagaaagggtcttggataccagcacattggagggagatagc

SEQ ID NO: 204131 - DNA, 122 bp, Homo sapiens
ggctctactccaagcccgacctaacgctggaaacctcaaccccaaagctacccgagggtgcggacagcccccagaggcaaccaacaatatttaaggttcttgtaagaggtttcttggcctcc

SEQ ID NO: 204132 - DNA, 122 bp, Homo sapiens
atgagaagcatgattcttgcttccatataaccaaagttaatcttaattgcaatttgactccgtttccttggtagggatagactttcttcagattccaagtgctctcttaaatggcaaattaa

SEQ ID NO: 204133 - DNA, 122 bp, Homo sapiens
ccctgcaccgtgagggtgcagaagaagcatgcagtcacgctgatgtcacctgccaggtaacgggactcggcagggaactcctctgggacgtccactcggggactccggggaaatatggcttc

SEQ ID NO: 204134 - DNA, 122 bp, Homo sapiens
gggaggtgtcaggcaggcattagtatatggttgggccctgacgctaccaccattcttctccgtcccccctcccccaagctggcgcctactatccagcccaaggggtgcagcagtttcccact

SEQ ID NO: 204135 - DNA, 122 bp, Homo sapiens
agaagcatattatacctctcagcatcatgacaatcacagacaaaacaaaaagtttgtttgcgatattgaaagataagattgaacacaactacagtgttgaattttctgctagctctgtgtga

SEQ ID NO: 204136 - DNA, 122 bp, Homo sapiens
ggacgggtttcccaaatgaaccccagctcatccgtgcagacaatggggtccccagggagccgcacgtgatcagaccagtgagtgaggggccatcaggccagcagccgggtctctgcgacctc

SEQ ID NO: 204137 - DNA, 122 bp, Homo sapiens
cagagagcaggtttacagcatctcagccttcaaacctggctcagtgagactccaggagctcgcactacacagcccctccaagtctgcctggagtttttaaggcacaatcctcctccccaggc

SEQ ID NO: 204138 - DNA, 122 bp, Homo sapiens
gcgcagtggccatgctcctacgtctcaccctctctgagcctgagttccttcactttcatacgaagtcacatccccaactcacactgtgaagtctgtgaaatctgattaaacatctagcctgg

SEQ ID NO: 204139 - DNA, 122 bp, Homo sapiens
ttccgtgcgcccgagagcgtgtgaattgctcctaattaccgtgtccggtgcgcctctctgcgtagacttgtgtaacctctcggcttctggggcgccggctcggctgcaccgctcttactggc

SEQ ID NO: 204140 - DNA, 122 bp, Homo sapiens
tatgagctcaatctgttaatttaggttcttattcttaagtgctgctgtctctgtttataacgtaatagtgctactttcattatctcaagagagccgtggggttgtacatgggtctaaaacgg

SEQ ID NO: 204141 - DNA, 122 bp, Homo sapiens
ttagtgaggaagacacgttgaaagctgatacaagccaaaagccaggcctcttgtgccaaacggctagccaagttgtgaatgcaactactgagaaagggtctcactgtcagccaggctggaat

SEQ ID NO: 204142 - DNA, 122 bp, Homo sapiens
gccagaatctgcctctcccccatccttagcttctgccttagaaactgaaaagggtcaggtcgcaccaacacagagttgccaaaaacagcccttcttcctccggaagaagtcggaaactctgg

SEQ ID NO: 204143 - DNA, 122 bp, Homo sapiens
atttaactttaaataaattgaaacaaaataaaatttaaaattcagaactgcaatcacactcgtcacatttcaagcgctcagtagtcacgtgtggctaagggtcaccatcttggacagcacag

SEQ ID NO: 204144 - DNA, 122 bp, Homo sapiens
cgcttgctttctcaacagggagtcttgtggtctgggcaagttgtcagccctggtcactggcggcctggaaatagacagtgctgttgtggggcctggtgggagtgaaaccagcctttaggact

SEQ ID NO: 204145 - DNA, 122 bp, Homo sapiens
ccctctggctccttaaagggcccgcgccttctctccaggccctgcgcgtccccactcgcgcgcgcacgccgccacacacacagacacgcacgcacacacttgggcgcgacgccgagtttctt

SEQ ID NO: 204146 - DNA, 122 bp, Homo sapiens
gcggagctgggagttgatgtacttgttgatgagcccattccaccgagtcagggagtgcagcgtgtgcagcagtgccaccacctcctccgccagtgtgctgctgtgggtggcagtcagcgagg

SEQ ID NO: 204147 - DNA, 122 bp, Homo sapiens
tcattttccctgagtgaaaacacttaatttgggctgtgcgagttagcggagcggccgccccggcctgcgcctccgccggctccggctagggggcactttggctctgcgcttctgccgcctgc

SEQ ID NO: 204148 - DNA, 122 bp, Homo sapiens
gaggtggagaaggaacagcggagggaggaggccgcgaggtgaggccgggcctgcccgggacgcccgctccttggcctgtctgccaccgcggaccccgtgagcggttctgatgccgattccct

SEQ ID NO: 204149 - DNA, 122 bp, Homo sapiens
tgtcccctcgctagcctcgccggccctcctccctccaagcccaagcatcttctaaacctccgggtcctggccctgggcttccaatttgaccaaatggtgagatgaggagtggggtgggattg

SEQ ID NO: 204150 - DNA, 122 bp, Homo sapiens
cctcgtcgcctccgagccaatgggaaggctccatactgcagggtgcgaaggggccggcgccgctgccgagttacgagtcggcgaaagcggcgggaagttcgtactgggcagaacgcgacggg

SEQ ID NO: 204151 - DNA, 122 bp, Homo sapiens
ttggaacctcagctctgccactcggcaaccgcgagccgttagtaagttgctgaatctctccgtgtgcctccgtttcctcacctggaatgtgggcgacctcacacaggaagccgcctcttcta

SEQ ID NO: 204152 - DNA, 122 bp, Homo sapiens
caggaaaatggaaaaaaaaaaatgattttttttttccaaacactttgtcagtttccccagcggtcacctttgaaaagggaaaaatgtctgaaaatagacaaagctgaatataaacatcattt

SEQ ID NO: 204153 - DNA, 122 bp, Homo sapiens
tccatgttgctccccgagggtgaggaaccggcggggcgaggcgaaggtctctggtgcaggcggcgcggctctgtgtcctccctctacctccgtctctatttatttattttttaagagacagg

SEQ ID NO: 204154 - DNA, 122 bp, Homo sapiens
ctttatattttctgtgaggtggatgtggtaaaaagaggtgtgagctgtgtcttcagttgacgtggaggaggggaaatcccatacctcttatttagccccagagctccaacaggaagtggtag

SEQ ID NO: 204155 - DNA, 122 bp, Homo sapiens
gggaacctgcttggaggactgggagagttgcagacagtgctttgtggctggggtgtagaccgagtgggagaggggagtcccaagaactgtcaggcccctcctgagtcctgagtctggggtct

SEQ ID NO: 204156 - DNA, 122 bp, Homo sapiens
cctcaaggacagaattggagatcggtgtcccagtcaacagcgtggtacttatgacagccgcgagaaagcgcactactaaagcccggctagcagagctgggaggcaaaccagaccgtcagcac

SEQ ID NO: 204157 - DNA, 122 bp, Homo sapiens
gagaaataagggacctatttggatggatcccaagaaacactgtctggcatctgatttgaacgaggctcggcgcagccgggcccttttcgcaaagtaggcccactgcagacctgtgggaacct

SEQ ID NO: 204158 - DNA, 122 bp, Homo sapiens
agctggaatttgagaacacatttgaggagatgtccttaagggacatctgagcttaagggtcgtattttgggaggagagattccaactgtacctaagggtcacatctgcggaggaggagacga

SEQ ID NO: 204159 - DNA, 122 bp, Homo sapiens
aggctccgcggcgtcccggggcctctttgttcggccggaggagagtggctgcactgggagcgggagacgtggcccggggtggggcgagggctgcgcgtgtcactgcggagccggatacgggg

SEQ ID NO: 204160 - DNA, 122 bp, Homo sapiens
aatagaaaaatctccatcgttctgctctgctctctttctttctcctctaagcaggtttgccggagaaggcaggggtgagccacggtggctgcccggctgtgcaccggcgccggagtttggac

SEQ ID NO: 204161 - DNA, 122 bp, Homo sapiens
acagactaggcattgggaattcaaaaagttcccccagtgattctaatgtgtagccaagatcgggaacccttgtagacagggatgataggaggtgagccactcttagcatccatcatttagta

SEQ ID NO: 204162 - DNA, 122 bp, Homo sapiens
ctttgaggactcagcaatgaccagagggtgctgggaagggcgagcactacttcgcaggcacgggatcctcagcaccaggggaacacagtagttccaggaagttctgggtgttcctggggaga

SEQ ID NO: 204163 - DNA, 122 bp, Homo sapiens
atctccaatattggaggtggggccgggtgggaggtgatcggatcacagaggcagatccctcgtggcttagtgctgtcctcacaatagtgggagagttctcataagatctggttgttgtaaag

SEQ ID NO: 204164 - DNA, 122 bp, Homo sapiens
tcccctttctgttcagagtgttgtaaagtgcataaagatgaagcaggcaccagaaatcctcggcagtgccaacgggaagactccgagctgcgaggtgaaccgcgagtgttctgtgttcctca

SEQ ID NO: 204165 - DNA, 122 bp, Homo sapiens
ccacggtccttcaaaaacccagctccactgtcgcacctaatgggctcgctggagctggggcgagggtgggagtcccggctgtcgccgtccagggtggcctctccggtctgcttcccgcggtg

SEQ ID NO: 204166 - DNA, 122 bp, Homo sapiens
ttttgcacctgtaaagcctaaatttcaggcctcgacttttgaaattgctcccaggttgaacgtttgaagccaggtccctgcatatctctcttaaaaaaaaaaaaatgaggtgtaaggtcagt

SEQ ID NO: 204167 - DNA, 122 bp, Homo sapiens
ccgtgaactccatggtccccagcacgcggtcctggccagggacggggtcgtccgaactgccgtccagattccccaagggagacaaagacccgaaacacagctcaaagtttccgagagcagtc

SEQ ID NO: 204168 - DNA, 122 bp, Homo sapiens
tttatttcaagcacttatgctcatccttgagtttaaaaagtctaacaaaatctaagaacccgggttcctttaaacatgtttacctacttgtggagacaccaacaggaaccagcaaaccattg

SEQ ID NO: 204169 - DNA, 122 bp, Homo sapiens
ccaggacaaatgccccgcaccagccacagagatgcctggctggagactgcgctggtgagccggaagcaggctctgctcttcacccaggacccttcaaagaaggcgggaccccggagacacct

SEQ ID NO: 204170 - DNA, 122 bp, Homo sapiens
actttatttcctaagggctggccaaggctcccatagaggcgctgtgtcagtgaagatgtacgactacctgttgggaaggacaaagggatgaggctccagagagagttggctgccacagcctc

SEQ ID NO: 204171 - DNA, 122 bp, Homo sapiens
gaagcagggaaatcccggcgacccaaagagagaggaaaggctgtggggggcgggtgggggcgacccagagactcccaagcgagtctctcaaggagagaaggaaacagcagagaccccacccg

SEQ ID NO: 204172 - DNA, 122 bp, Homo sapiens
gcacctcgcagtacccctgcgtccaggtctacgtgaacaactctgagtccaactctagggcgctgctgcacagcgacgagcaccagctcctgaccaaccccaaggtaagaacgccccgcgca

SEQ ID NO: 204173 - DNA, 122 bp, Homo sapiens
atgaatgctaaacccctgggaactcacaggagttcacaaataggagtttatttaatcatgcgcccagaggctgccctttcgccagaaggagcttttcaactgcaattaccacagaccctgtt

SEQ ID NO: 204174 - DNA, 122 bp, Homo sapiens
gactttgtaggcgcaccgctactctccgtgtaggggcgctgctcgcctttctctgcaagccgagctaattcagtcttcgtcctcctggaaccggcccagctcccaggggcaaggcggacgtg

SEQ ID NO: 204175 - DNA, 122 bp, Homo sapiens
acctttctctctgggtccttggtctcgccactgtgcaggtgtcggctcaggacagacctgcgccagtgtgagcatctggacctagggctcaccctcctgccgtggaggtggggcccttattt

SEQ ID NO: 204176 - DNA, 122 bp, Homo sapiens
gcaacctatgggcaacatgtttgaaagagctgaagctgattaaatgctttccagtggtttcgccacgagcctgctaaggtttgtgtagttcagttgcgaaaaagagtcttatttgtgattgt

SEQ ID NO: 204177 - DNA, 122 bp, Homo sapiens
ttgacctgtgagccctgtcctggcgcccccaggcgtgagggttctaaggcgggtcgagcccggtgctgcaggtgttagagaaaagcttttggtttttatcccttaacattgcttcttgccga

SEQ ID NO: 204178 - DNA, 122 bp, Homo sapiens
tggatgacagaagatagtctgccgacttgcagatggacttcgggatctatttgcctttaccgggcttaaaatttgttttatcttagagaaatacctaaatttaacacaactgattcttacgt

SEQ ID NO: 204179 - DNA, 122 bp, Homo sapiens
actctcgccgcgggcagtggccagccagtggccggaggagctggcgtcggcgcggagagccgccgtgctggggcgccgggccggaccagagctgctgccccagcagggcggcggcagaggcg

SEQ ID NO: 204180 - DNA, 122 bp, Homo sapiens
caggtggtgaaggggtgaaagggcatgatgtcttggggtttatagtccactgagcctcgccggaggtaaccccggctcagggatgctttcgttgccatggcaaccgccgggccggcgcgggc

SEQ ID NO: 204181 - DNA, 122 bp, Homo sapiens
tggcaagacaacaaacctccaattaaatatagcctgagctgcagcctcatgattcggttacgctggctgaattccaggcctgcagggcactgagtcaaaaagcaaaagaataacaaatacac

SEQ ID NO: 204182 - DNA, 122 bp, Homo sapiens
acccagttcgagattcccggccgctttgtttacctaatcaaacaactaattcggcaatggcgggcgcccctcccccagcctcactgctgccttgcagtttggtctcggactgctgtgctagc

SEQ ID NO: 204183 - DNA, 122 bp, Homo sapiens
aacacaagataaaaaaaagagcaacttcagagtaaatgttagatgtttgcatttgatggacgccactgcagtttctcaaccaatgcataacaaacaaggaaaggtactgttctggaataata

SEQ ID NO: 204184 - DNA, 122 bp, Homo sapiens
gggtggagctgcttaaaaggcctgggatcacaccctttgggaacacatccaagcttaagacggtgaggtcagcttcacattctcaggaactctccttctttgggtaagactgggagggtggg

SEQ ID NO: 204185 - DNA, 122 bp, Homo sapiens
cagaaagaaaagacaagatccagctcaaagagagaggatggatcttctctctgtcaggaacgggaaagaggaatcagggctaacacacccctatcattgtgtgtctaaattgtaatgtgctc

SEQ ID NO: 204186 - DNA, 122 bp, Homo sapiens
ttcgacactagatcgtgcagtgggctggaagagaattagaaaacgagtaacaggaggcttcgagaggatacagaaaggaacagtgacactacaaggtgataaagtacctgatccaaatgtta

SEQ ID NO: 204187 - DNA, 122 bp, Homo sapiens
tgcacacgagcttccttgtaggttctcctttccttcatctggggccctggaacacctacacggctcagattagtccactgatttcatccatcaaaatggtcctctcagcgatgaggctcatc

SEQ ID NO: 204188 - DNA, 122 bp, Homo sapiens
aagaactactactgggtttcagccatgtctctggcagcctcgtagcctggagactaaagtcgctgagtttggaatcgcacagtcctggtctggaatcctaactcagccatttactcaacatg

SEQ ID NO: 204189 - DNA, 122 bp, Homo sapiens
ctaccgcccactcgccacgctattggtcaaactagcatgaatgataacttttagggccaacgaagaaaaaggggtggactttcttgcccagctcctcccacttggccctgtggctgttttga

SEQ ID NO: 204190 - DNA, 122 bp, Homo sapiens
ctgttgcaggtaagaaaatggtagccaatttacatcctgttccttgtctccttgctcgtgcgaaggtgtccaggggttgggcttctgaactgactttctatggaagccaattcctccgaaga

SEQ ID NO: 204191 - DNA, 122 bp, Homo sapiens
gacgccgcccgccgcggcgccgctggggcgggcggggggtgcgctcaactagctggcggccgccgctcgcctactccggggctccccggagatcggtctagctttacttgctccccgccggc

SEQ ID NO: 204192 - DNA, 122 bp, Homo sapiens
cgcaaatcccggatggactcatctgcgcccccgaagatggcttccctcacatccaattcccggtccagatcggactccagggtgtttcatgatttcaggcccccaagatgccatccgggtcc

SEQ ID NO: 204193 - DNA, 122 bp, Homo sapiens
aggagtcagccaaggactgctgaagctccacttgagcttttccattacataaactgtgtacggcatctggtgtttattttaagctgattaacacagaatctgggaaatacaatcatgctgga

SEQ ID NO: 204194 - DNA, 122 bp, Homo sapiens
agctacagggtttaatggactgacgactgggataaagcttttgtggccaagacaaattgccgagcacaggtttttgcctcatggccttcgtgcttgcagtaccctctccctaaaatgctttc

SEQ ID NO: 204195 - DNA, 122 bp, Homo sapiens
ttggatcattctgcttagtttacaaagaacagagtgatgctcagagagggtgctgcctcacgcagagcctcagctctagtggctgctggcaactggacagatgtcctgggttctgggccctt

SEQ ID NO: 204196 - DNA, 122 bp, Homo sapiens
ttgattaataaatttatcaaagaccactgttaggtagaaaaccaaaattcagtgcagtaccgtactgggccattcttttaaaagtgtctgtgtttttgaacattgaaagtccaaacatgaac

SEQ ID NO: 204197 - DNA, 122 bp, Homo sapiens
agtgatctgtctgcctcagcctcccaaagtgctgggattacaggtgtgagccaccgtgctcggaccccagagttggttttgatttccaagatttagaatggtaaatgcctaaccatagggaa

SEQ ID NO: 204198 - DNA, 122 bp, Homo sapiens
ctttccgggctgtctgacacgatgcaagtgtcagcttgtgttggccggttgcctttctttcgcaagaggggaaaatatcctcacagactttctgtgttctcagagacgatcttcttccctag

SEQ ID NO: 204199 - DNA, 122 bp, Homo sapiens
caggcctgcctcagggtccaaaggggaagggaaggaaaccggggtaaaaggggtcggcaccgcgaccttcgagaacccgcatgctgttctccaccaggtctctcagtcctccctgccccaat

SEQ ID NO: 204200 - DNA, 122 bp, Homo sapiens
ctaagagctgaaccctcttgacctggcaggagccgagagacattaagtgtagtgctgggccgggtgcagtggctcacgcctgtaatcccagcactttgggaggctgggagcagtggggtggg

SEQ ID NO: 204201 - DNA, 122 bp, Homo sapiens
gttccaaagaaaatggaagatgaataatttagtaattttatttgctcagtaggttcctttcgatgccactctttgttgggataagtaacggtactcataagtgcaagattaagcttaccctt

SEQ ID NO: 204202 - DNA, 122 bp, Homo sapiens
cagtagtcgctgttaacacggctgtcgcagctgaggtcagcagagctgtcggccaggccgcggtgagggttgtcctccaaggagccatccagcttatcttccgccgtccagatgggccgcgt

SEQ ID NO: 204203 - DNA, 122 bp, Homo sapiens
gcggctccccaggtctctcctccgcagtcaccgcttccattgaacccacactgggaaggacgcagggccctgtcctgtgacatggggtcttcttgcctgccgagctccagcccttggaaaac

SEQ ID NO: 204204 - DNA, 122 bp, Homo sapiens
cggggcggggagggggcgggtcaggggcgggaccacagccggctgggccggggttctatgcgcatctccggggaggggcggggcgggggcggggccggggcggggcccggtcggtgcactcc

SEQ ID NO: 204205 - DNA, 122 bp, Homo sapiens
ccccgcctcctggcttctattggctgctgcagagatagtcacttctgcctgggttgcccccgaaagccaggctcccaggagtagctgcacggcctgtcaatcagcgggggcaggggcgggcg

SEQ ID NO: 204206 - DNA, 122 bp, Homo sapiens
tcccggggctgcagggccgcggtccctttgtcccgcccccggtccccgcgcggcccggcccggcccgcgtaccttcttgtagttcttgccgagccacagccgcacgttgtcgaactgggtca

SEQ ID NO: 204207 - DNA, 122 bp, Homo sapiens
catgtccctcagacgccacacaaaatgggggtaaccgcgagaacaaagcagggtacccaacggggtgtggcgggacacctgggcgcacgccgccagcgcccgggagagcgaaggcggggaga

SEQ ID NO: 204208 - DNA, 122 bp, Homo sapiens
ccccgccacgccggcccgcaagtggtggcagcccggaggcctggctacccggcggtgttccgcgttcacgcccgggcgtttctttagtccatatggaaggaaataaatggccttttttttcc

SEQ ID NO: 204209 - DNA, 122 bp, Homo sapiens
gtgcgtcctgaaggatgacgggcatcagggcctggcggatggctgtctcccagccccgggcggcctcagccccctgcccacttggcccacccggagtcccgccaggcatctcgcccacgaag

SEQ ID NO: 204210 - DNA, 122 bp, Homo sapiens
gaccccctgtctagactctggatctctatttttaggtcgaagtgctttattcttgactcccgaattcccggaaactattaccaaagcagcttagttttctctccaccctgcctgggtcacaa

SEQ ID NO: 204211 - DNA, 122 bp, Homo sapiens
agtttacctgggatttcccagcagggcctggcctgaggctgatggcgctcagagactgttcgggatgagcaagccggtgcctccctgtacctctacatctgctcagctccccgccgccagcc

SEQ ID NO: 204212 - DNA, 122 bp, Homo sapiens
agctctgcacagcctttcctcattccgttcccgctctccccacccactctgcgttcgatccgaggtttctagtccccagctggacatcacagcaccaactcccactcaggagccggccagag

SEQ ID NO: 204213 - DNA, 122 bp, Homo sapiens
gtgcgctgggacaccctcgaggcggctcagcgcccgcggttcccagcgcgggcggggccgcggcagaggttcccaaaccggttgcacagaaacagcgccaccccctactgcccgcggggcca

SEQ ID NO: 204214 - DNA, 122 bp, Homo sapiens
accttgtgatccacctgcctctgactcccaaagtgctgcgattacaggcatgagccactgcgcctggtcctcaactagccctgctgccagtgtaggtggcttgcccaatgaagtgacccaaa

SEQ ID NO: 204215 - DNA, 122 bp, Homo sapiens
ctcggacggccaatttacgtcatcgcgggtttccatggcaacgcagacaggcccgagacgcgtcttcaggaagaaaaagccattgggggcccactggagcctcgcttctggttccgggccca

SEQ ID NO: 204216 - DNA, 122 bp, Homo sapiens
gcagggctgcgcttctttccgatttccacgcgggctccgccgcccccctcggccctcgcacgtttcttcccagcactcgaggccgccgagtctgttatgaaacccggtgctgcggagtggct

SEQ ID NO: 204217 - DNA, 122 bp, Homo sapiens
gaggacgagaccgagcaccccgtgcccatcatcctcagcaacgaggacggaaggcacctgcggagtctgttgaagcccacagcggccaatgcccccgacccactgcccgaggactggaagaa

SEQ ID NO: 204218 - DNA, 122 bp, Homo sapiens
aagtctacagcttcactcctgagccagcgagaccacaaacccaccagaagaaagaaactccgaccacatctgaacatcagaaggaacagactccagacgtgccaccttaagagctgtaacac

SEQ ID NO: 204219 - DNA, 122 bp, Homo sapiens
aagaaacaccccaaggcccaggggtagatctagggtggagagatcacatatgggagggcccggaaagaaaaggaacagggttgtcaatgggcataccccaaacacctcacccagaaatgccc

SEQ ID NO: 204220 - DNA, 122 bp, Homo sapiens
cgatccaaagaggggcgccacccctggctgtccctggaaacccccctacaccacaagaatcgtcccagccacctctttagcgtaaaggttaggaagaaatctcagccacgatccaaagaaag

SEQ ID NO: 204221 - DNA, 122 bp, Homo sapiens
tggcgggcatgagagctcggggctccgtcacgtactccgagtcccgcacgcactcagcgtcgctctggggccccacgtccggccctcgaccttgctgacaactttggcggcccgggcctgcc

SEQ ID NO: 204222 - DNA, 122 bp, Homo sapiens
tacttgacaaggtgtgtgtgcaacttctcagatgcaaaccagggcaaataccaagttcatcggggcagcccttcccacagaagccccgggaggcctgcatgctgttcacacactcagtcagg

SEQ ID NO: 204223 - DNA, 122 bp, Homo sapiens
tgtacaggtccccggaggcatcctggctgggtgggaagtttctggcggtcacgccctgtccgctttcgctccaggtcacactgagtggctcctgggggaagaagccctggaccaggcaggcg

SEQ ID NO: 204224 - DNA, 122 bp, Homo sapiens
ctaaggagaaaaataaagacagttctgatagaggaggcctcactgtgagtgaaaaccggacggagatgagagacgggccacagggagatgggagcttctggaggaggcgctgcacgcacaca

SEQ ID NO: 204225 - DNA, 122 bp, Homo sapiens
ttccgagcccattgttggatctcgaggcttgctgggttcgatgaactcgagtcaaccccccgacccccggcacgcatggaacgggcgtgaccgcgcgcagcctcgtctcggagtctgccggc

SEQ ID NO: 204226 - DNA, 122 bp, Homo sapiens
tgacaaaactcagtttcaaccaagctgagctgctcttaaatatttgtagcaaagggattacgttcataggtctgagcacttactttttaacctcttcccttctcccctttcttccctttctt

SEQ ID NO: 204227 - DNA, 122 bp, Homo sapiens
gcggcccggcctaggtccacccgccgcccgtcccggagcctcctaaggccgcaggcgacgcgccccgccctccggggacaactaggccccggccttttccgcagactccgcgctccgagccg

SEQ ID NO: 204228 - DNA, 122 bp, Homo sapiens
ctttcgggggtcaggtcagcccaagtaagaggccaacaacctacctgggccgatacaaggcgacacaaggcccacccgtggctgacgcgccctccaccctcactccatcccggggcacagct

SEQ ID NO: 204229 - DNA, 122 bp, Homo sapiens
tctgactttaaggttatctgacattacacaggcaagacttttttcatatttcagtcattccgtttttcattgacaaaatgcataaatgtttctattttaagcccttttaacatgtcagtaaa

SEQ ID NO: 204230 - DNA, 122 bp, Homo sapiens
tgtgtatgctaactgcccattagtcattgacatcatctgcccctgacatccaaccacagacgttatcatggctcagtgatccaggatcacccaggcagatgatcctccttctgatgtatcat

SEQ ID NO: 204231 - DNA, 122 bp, Homo sapiens
tttgaatccagagatgggaaaagttgatttggtggcgccgcccccttgagcttaaagggtcggcctggctaggggaccaggaggggctgcatggggactgcttgctcccgggagggtgtggg

SEQ ID NO: 204232 - DNA, 122 bp, Homo sapiens
attcccacaggatgggacaactgcatggaaacccacactcgggcctgtgttgagcaaccacgtttgagtaagagttatcttatttggcagggtgggttaggtgtggggtatttgtcactgag

SEQ ID NO: 204233 - DNA, 122 bp, Homo sapiens
cctgtgggcccagcacacacagcaggcagtgggtgcgggcttaccctcctggcccgtcagcgtccacacagaggccttgtggcctgtgccataggtcacgatgaggttactcttggaggccc

SEQ ID NO: 204234 - DNA, 122 bp, Homo sapiens
tggtctaggctgaggaaaaagcctcctaagtagatcgttaaaacacgaactcaagaagtgcgacaattcagggatcactgagaagtgagacttcccaaccatctggggagtcgggggcagtt

SEQ ID NO: 204235 - DNA, 122 bp, Homo sapiens
tgcccaggactcaggaagagtctcgaagaatcctctgcacacaagaacactgctatccgccgaagctgatgtcagctattccctgcagactggcctggtccagcagagccagctctgctaaa

SEQ ID NO: 204236 - DNA, 122 bp, Homo sapiens
cagggagaagcatgaacagataagagagtgaggtgctgtgctgtaacaggtggaggggcccgaagacaagggcttgagtccacctggcaaaacgagggaagactcttaggagagggcttggc

SEQ ID NO: 204237 - DNA, 122 bp, Homo sapiens
ccccacccactccggccaccgccccctccccggcctacagttcgcgggtggggcgacctgcgacagcccctttaagaggcgtggtcacgtgctccgcccccacctccgcctcgcgcgccagt

SEQ ID NO: 204238 - DNA, 122 bp, Homo sapiens
ctcgcgcgtgggccgcagctggcagcacaggaagtccaggtggaagagcggcggcgtgggcggcccggcgcggcgcggcgagtgcgggctggtatcggccgagctcgctttttctggggaca

SEQ ID NO: 204239 - DNA, 122 bp, Homo sapiens
gcagatggagctgtgtgggcgagctcctcccagctgcacagtttgatggatagatccttccgatttcctcttctacttgagttaaacacctactcatattcaactggccagagctgccaagt

SEQ ID NO: 204240 - DNA, 122 bp, Homo sapiens
gacgcattaaaacattcctacgcagattctaaatggaggatcaaatggttgcttctgcaacgaagatgggatcccgaaagggcacacgccgcagaaccaaggcacacggggccactgagacg

SEQ ID NO: 204241 - DNA, 122 bp, Homo sapiens
ttgtcattaaaggacgatccacctctgccgaagaagaacttaaaggacaggcatgtaagacgcattaaatgacaaaatataacctgatgaacaaaggcaagggggcagtctcggttcattga

SEQ ID NO: 204242 - DNA, 122 bp, Homo sapiens
atatcctctgactctccagatccatcctctgcccttctctgccagttctctgccctagaacgctgacctcctaggctggaggcatcccctgagcccccaactgcatcttgtggttgtgttca

SEQ ID NO: 204243 - DNA, 122 bp, Homo sapiens
ccccctcctctgtacctccaagccccgcggccagtttgcgcgtgcgtgccaagtgccgcgcggaggcccgctcactcgggcccgccccccaatcccggctgcccatggcgctactcgctccg

SEQ ID NO: 204244 - DNA, 122 bp, Homo sapiens
atccagaggaacttagggatgtttgtcttctaggctcatcaacagagcagacgagcagaccgtttattagctgcaggcaaatacgaagaggctatttcttgtcacaaaaaggctgcaggtga

SEQ ID NO: 204245 - DNA, 122 bp, Homo sapiens
ggagcggcaatgggtgcctcattggatcaggagcacagtggacaccctgccggatccagacggatggcagtcagcagcgggtctgcgacagcggcaaacagcagtggtggacggcgagcaaa

SEQ ID NO: 204246 - DNA, 122 bp, Homo sapiens
ctcgcaggcaacgctgaccctcgcgctcgctagaatggaaagactgcaagacggggctctcgggtggcctgtgtggcctcactcaactgtgcctcctggggccagatatgtgctcccacagg

SEQ ID NO: 204247 - DNA, 122 bp, Homo sapiens
gctgcccgacctgtccgtgtctcgcagaagtagccacttgcactggggcattccggtgcccggggatgattcgcagaccatctatgtatggctggatgccctggtcaactacctcactgtaa

SEQ ID NO: 204248 - DNA, 122 bp, Homo sapiens
tacctgggcctcccaaagtgttgcaattacaggcatcagccactgcacctggcaggaccccgtttcttaaaaaagtaacaaagtaaaagtgcttcagttcaacaaaggttttaaagtgacct

SEQ ID NO: 204249 - DNA, 122 bp, Homo sapiens
acaatgagaacacctggacacagggcagggaacaccacacacccgggcctgtcgtggggtcgggggacgggggagtgatagcattaggagaaatacctaatgtaaatgacgagttaaaggat

SEQ ID NO: 204250 - DNA, 122 bp, Homo sapiens
cagagcaggttggtggccccgggcggcctcccgttggcggctctgggatagaaaccgcggcgcatttgtaagtgcttgcgcgtggttcctcctcgttgtcctgttgaagttgctcttggtct

SEQ ID NO: 204251 - DNA, 122 bp, Homo sapiens
caccaccctgctaaccaggcaaagatgacattcgtgtcatgtgtagcttattgctttcttcggcctcttcaataatgctcagacatgaggcttggtaaaggttggaaagctgttagccgacc

SEQ ID NO: 204252 - DNA, 122 bp, Homo sapiens
gaaatcaaaatcctgtctgtcatttttgtccagctgttgtgcaaatcaatgagcatgcatcgcctgtgtgccttcagcaaagcaggcatttgtgactgcaactctgaatagaagttttcctg

SEQ ID NO: 204253 - DNA, 122 bp, Homo sapiens
cagtaaatcactcgattactcagtgaatctttactgagaattcctcaagcacaggcagcacgtgctagagctggtgtacacagacgagtgggttcacaccatgcagcttactgtctgggggg

SEQ ID NO: 204254 - DNA, 122 bp, Homo sapiens
aaacacatatgacttccacacgtgtaccaacacacacagacatctcgcccagaagccgcccggctcctccatgcagacagagcctcctgggacggcaggctcccagacatatcccccccccc

SEQ ID NO: 204255 - DNA, 122 bp, Homo sapiens
tccttcccaccaggctccctggaagacagtggacatcagagccaggctctcttctcgcagcgacgactgcctgcggcttcaacatcctacagtgaaatgcccggcctggcctcccggggagt

SEQ ID NO: 204256 - DNA, 122 bp, Homo sapiens
gcatctaatctttatacttcttgtgactttttttcccctgcattttactttgtaatatatcggctttataattttaaaatacactggccgggcgcagtggcccacacctataatcccagcac

SEQ ID NO: 204257 - DNA, 122 bp, Homo sapiens
catattctagtttggttagagtcctgtttctcaggatgtccacagaccatagggggtctccgaggctaaaattagtttttgtggtaatgtttacatattattgccatttccactgttggtgc

SEQ ID NO: 204258 - DNA, 122 bp, Homo sapiens
agacgggccgaccccgcccctcgcccccgcctccggcccgaggccgcacgggtgtcctcgcgctgctagtccgcgcgcagcctggcagtttgccgcttcctcgtcctccatcctgcgtccat

SEQ ID NO: 204259 - DNA, 122 bp, Homo sapiens
gtcctgtgcgcacacatccgcgcagaccaggaagcggatcccgtggagtgaaggtcgcaccgcggcggtgagttttgctctgtgttgtattaagtctgcactccccatatccccggcacttc

SEQ ID NO: 204260 - DNA, 122 bp, Homo sapiens
ggagtgcgggcggtggcggcggcggcgcggggaggtgtgcgcggacgccctgcccgctgccgctgccacccccggcccggccccgcccgccccccgagccccggcctcattttcacacggtc

SEQ ID NO: 204261 - DNA, 122 bp, Homo sapiens
cgcttcttggtgggcagttggggccgctgccattttagggacaaggtgcattacagagatcgcatggtcacagccccttctcgcagctgaggcccaaagaggggaagggcagagcctggaca

SEQ ID NO: 204262 - DNA, 122 bp, Homo sapiens
aggagcaattccagcaccgaggggcgagcagagccgcctgttagcactcctgggagggcccggagtggtccctgaatgatggattcacctggaacattttcaccctcttcaggcccaccctg

SEQ ID NO: 204263 - DNA, 122 bp, Homo sapiens
tggtcacgcgagggcaacccaggtgggccgtggcctacggtgcggggtctgggtccggtccgggccctctgtccacacccttgccggcccctggctgtcgagcagggcgtcctggaggggct

SEQ ID NO: 204264 - DNA, 122 bp, Homo sapiens
agctcgcgcagcccgggccaaaggccttgaagtctccggaaatgcggggttcttaggaggcgggaggacagtccctcgaacaaaggtggggggctcctcgtcctcacccagttttcttccag

SEQ ID NO: 204265 - DNA, 122 bp, Homo sapiens
tccttgtgtgtagcccatgttgggaacacgatacaggttctcctcttatttcctatgacacgatttcccttgtggaaatttaagactttaagaactagagtatttttatggtgtctgcacct

SEQ ID NO: 204266 - DNA, 122 bp, Homo sapiens
tccctcgcggaggcgccgccagcaactccccgggggctgctgcacggaagcgctgaggagcgagtcaacagcccctctgctgcctcccgtagatgatccgagccgcgccgccgccgctgttc

SEQ ID NO: 204267 - DNA, 122 bp, Homo sapiens
tttaaggggcgggcctttggagactttggtggatccaagagggggctggtcctgggaaaccgtccagggccgggaagtggaaactaaaggggctgggtaagggagactgaatcggcccttgc

SEQ ID NO: 204268 - DNA, 122 bp, Homo sapiens
ctgagcggagctggggtccctggccagaggcggaacaaaatggggtcatggccaggaagacgcgctaacgcagtaagagtcactcagagggccggaactgccggaactgccgaagacccgag

SEQ ID NO: 204269 - DNA, 122 bp, Homo sapiens
caggagggccggcatggggcttgcagggggtcgcactgggccgccaggctgcggggagaacgagagcagaggttggagcgctgggcgggagagaaacggtcagagggtgagaaacgtagaga

SEQ ID NO: 204270 - DNA, 122 bp, Homo sapiens
tgattggttggaaagggcaggccctaagacggactgtgtgagcccgggggctcattgctccgtgaaagggcaagaccagggaaagagaatcgtgtaaaaggggtggagtctagcgggccggg

SEQ ID NO: 204271 - DNA, 122 bp, Homo sapiens
acaccggagtgggtgcctgccctgcggccgcacacccaccatcactgatcacactgatcacgggcgtctgacacactgggttcgagttccctctctgcatcagactcacccccattagttca

SEQ ID NO: 204272 - DNA, 122 bp, Homo sapiens
caccggtgccaatgtagagtacatggtagagcgtgtctttagcctgcaccaggtccaccacgaggtgtgagaagcgcacgctgtcctgggtgacacagggctcgggtgtcaccggctgcacg

SEQ ID NO: 204273 - DNA, 122 bp, Homo sapiens
ttgagggagtctgggtgtgggggtggcctcctcatcctctttctatccctggctcagagtcggagctgcagattgccctcattgccctcttctctgagatgctctatcggttccccaacatg

SEQ ID NO: 204274 - DNA, 122 bp, Homo sapiens
caatggatgaagccaatcactctgtggtctctgagtttgtgttcctgggactctctgactcgcggaagatccagctcctcctcttcctctttttctcagtgttctatgtgtcaagcctgatg

SEQ ID NO: 204275 - DNA, 122 bp, Homo sapiens
cgcaagctgaggatggagagaaaccggtgtgagctcgctcgcgggttgctccgcagctggcgggggccggcgagagctacttttatgttatatgaatatcgtgttcttcatcacattcccca

SEQ ID NO: 204276 - DNA, 122 bp, Homo sapiens
gcccacggccttggcagtccccgggacaggatggccagccacagctggggccagtgtagccgggaaagcacacgcaacgaccacggacacagcgaccctgatcattgcagtcatctgggcag

SEQ ID NO: 204277 - DNA, 122 bp, Homo sapiens
cccacagcccagggactgggagcaactccacaggggtcagggtgacagaggagtggggagcgcagcagggtggcccccgctcccgctcagaggagctggccctttaaggccaggcccaggcg

SEQ ID NO: 204278 - DNA, 122 bp, Homo sapiens
ctggctgccatgggcactaaatggagcatacgggagaggctctctgggggatggtaggcacgtgaccaccagaagctggcataaaggggagaaacataattattctggaaggacagcccagc

SEQ ID NO: 204279 - DNA, 122 bp, Homo sapiens
tcaccactccagagtcctctgcctcctgcgccccagcccaagccctctccatgttgacctcgtgacacgggagacggtgtctaggccccagattcccacccacatcagagattgtctaccca

SEQ ID NO: 204280 - DNA, 122 bp, Homo sapiens
acacactgcagacgcgacactcgcaagtttcggggatggcggccggcgagggccatactgcgtctttccggagacacggaatacggcaccagccgtccctttatgatgcaatatgtctgcgc

SEQ ID NO: 204281 - DNA, 122 bp, Homo sapiens
tactttattgagtcagggatttggggccaaatgtctgtagggcctcctgctctggaaactcgactgagaatccccgacccttttccctgagcccctcagcagggaaaggtaacagccaaagc

SEQ ID NO: 204282 - DNA, 122 bp, Homo sapiens
gctctgaaccccgcggctcccactccccagtatctttcctccgcgggcccaccgggcccccgtccccgtcacacccacttccgctcttggtcccgccccgggacgcctgggcggagccatgt

SEQ ID NO: 204283 - DNA, 122 bp, Homo sapiens
ggtgggaggtggggggtaattcccgtatgaaatgtgtcgtctcaagaaatcaagtagaggcgaggactgtgttcctccggccagcaggtggcaccatactcgtttggtgcgttccgctggag

SEQ ID NO: 204284 - DNA, 122 bp, Homo sapiens
gtcttctcaaacacggggagcagagtagaaagaggctctggccccttcccttgtgcccaccgggcctgccgcagtggctcagcagccccttcagtagcccgcctgaggaccgatgccagagg

SEQ ID NO: 204285 - DNA, 122 bp, Homo sapiens
gtggttaaggaaacacatcttagttcaagagtcactagaattcaaccttaccttccagttcgagagtagtttagtctgtagggtccaaactgccgcagattcaagtcaaagtgctgggaaag

SEQ ID NO: 204286 - DNA, 122 bp, Homo sapiens
ttcacgcacgagggagccaggcctgcaacgaggtcccttctgtgcctgagagggctaaagcggggatctcgggacccgggccagtggagagtggcgtgtgagcattgcggggacacggccag

SEQ ID NO: 204287 - DNA, 122 bp, Homo sapiens
ctcccacccacagctccctgacattgtcacctacctcctgagctgtcaccacagggcgcacgggactccgctgccccaggttccgggacagtgactacatttcccaacagcccctgcgccac

SEQ ID NO: 204288 - DNA, 122 bp, Homo sapiens
ggggtccccagggggatgcaggtccctcacactgcgggaacacagacgtatgtaaggggtcgctaggaggataccggtcgctcacaccgtgcggggacactgataagaattggaggggcccc

SEQ ID NO: 204289 - DNA, 122 bp, Homo sapiens
gataaaggagtagggcaagcccaggtggcactggtgagtaaccgcctccattacatggtccgttcctgacgtgtacaccagcctctcagagaaaactccatccctacactcggtagtctcag

SEQ ID NO: 204290 - DNA, 122 bp, Homo sapiens
cttccgacccaggaacagctgaactcagcctaaaaagcacccgtcccgagggcctgagtccggccgtggtgcctcctgctgcagagatgtgttttgcacactcctgtgtggcagggagaggc

SEQ ID NO: 204291 - DNA, 122 bp, Homo sapiens
gccccactgccctagccctgatcaaacagggaccatgactgccttgctcacctctgtacccgcagagcccaggacatagtaaatgctcaagaaatatctgcttagtgaatagagaaatgggt

SEQ ID NO: 204292 - DNA, 122 bp, Homo sapiens
taaaaccaagtctgcctgagttcaaagtctgattctcctttgatccttcaattccaacttcgaagaatttggataggacaaaaatccttttcttaaaatagcattatcactgacaaaccatg

SEQ ID NO: 204293 - DNA, 122 bp, Homo sapiens
gcacgccgaagcccctccggcggcggctctttgttccccgcgtcacctcactgcacgccccgtcaccagcgtcgtgctccagcagcggcgctcctccagccaaagagggaggcactgacgaa

SEQ ID NO: 204294 - DNA, 122 bp, Homo sapiens
ggagaaggcgaggcgtcagcgatgctgtctcttccgtgaggagcgcagaggaggtcgcggcgccggaggccccagaaggctcgaaggcgccgcgggctggggtcggtggcttagggagcccg

SEQ ID NO: 204295 - DNA, 122 bp, Homo sapiens
taatcagcctgtaatggagctaatggctgtttgtcatccttggagatataaatttcctggcggtgtctcctgcagacagtgcatgaagtatgctcagtgtgccagcaagggctgataatcag

SEQ ID NO: 204296 - DNA, 122 bp, Homo sapiens
ctttctcccctgtggtctctgctcagcacccctttctctccagccccgactgcccatcttcgcccctaccctcgcgcgtcggggccgtgtctacacccaccccaggacctggtccgtccagg

SEQ ID NO: 204297 - DNA, 122 bp, Homo sapiens
cgccaccacctcaccgagcggcgggcgcgcaatagcacttgtgccccggcggtagcggcccgacagaccacggacgccgccatcttccagctgcagtcggccctgttgcgccgcgcaagcgt

SEQ ID NO: 204298 - DNA, 122 bp, Homo sapiens
agtgttaagaccataaaccttaacagttgaccttctcaccttcagaaaacccaaatgtctcggagtttcattctcacaaacttccaccttcctccaatgatgagatataggaaaaaagacaa

SEQ ID NO: 204299 - DNA, 122 bp, Homo sapiens
agttgatttctcagagattgcagatcaggaagggcctttggaaaccacagcttccacttccgctgtgggggcagaaagcacgggacaatctaaccctttcgtgcctggaaagtaacaaggag

SEQ ID NO: 204300 - DNA, 122 bp, Homo sapiens
tgtcatcatcagggtcacaggcgtcgccctggccgtctctgtcatggtcagcctggttggcgttggagatgtaggggcagttgtcctggttgttctggtggccgtcgtcatctatgtcctcg

SEQ ID NO: 204301 - DNA, 122 bp, Homo sapiens
ttggctcctggctgggcccaagtgatccaccgccctcagccttccaacgtattgggattacgggaatgagccactgcatttggctaagtttttgtttttttttttctctatttttccaaact

SEQ ID NO: 204302 - DNA, 122 bp, Homo sapiens
ggccggaaggccagggaatctctggtggatttgggggttcatattgctcagggtaccagccgatgcgttttgaggggcgggagtcgaggaattagaatcgcctttaaccctcaagagttgcg

SEQ ID NO: 204303 - DNA, 122 bp, Homo sapiens
cacggaacccgcatacacaggcgatgaatgcacggcagccacggtggtcacttctgtcctcgctgctgtctgcctggttcttccactatgactacagctgctcgtgaaagatggccaggaga

SEQ ID NO: 204304 - DNA, 122 bp, Homo sapiens
cctgatccacctcccccaggaccactgtattcaccacccagctaccccatctcatgaagacggtgactagtagtagcaacatggccttaacataccttacctgggtagcaaaatggcatgac

SEQ ID NO: 204305 - DNA, 122 bp, Homo sapiens
tcgtccgtcccgttgacactggatgccggagtagaagatggggctccatgcccggattctcgggattattactcgagggctccatgttctcctgggtcttgtctttggctgtcttggccgct

SEQ ID NO: 204306 - DNA, 122 bp, Homo sapiens
ttgcgttttgctggaaatgcctttggatcctttacatcaagaaggaaaagtgtctaagatcgaagttgccatagcttaccttctgcatccttgatgtgagacgttttgggattaagatattc

SEQ ID NO: 204307 - DNA, 122 bp, Homo sapiens
ccccccacctccgagcgggttctgtgcccaggtggcgctggagaaaggaacagcggaccccgcccaagtcattactaatgtagcaatcgtctgcataaacccaggccacggttcctattggc

SEQ ID NO: 204308 - DNA, 122 bp, Homo sapiens
ctgatttagcccagcgcctccacggatccttcccaactccactcagtcccaaagaaaaagcggctgccctgcccgccgaccgggaccccacccctaaagagagtcccagcctctcccgaggt

SEQ ID NO: 204309 - DNA, 122 bp, Homo sapiens
ggtacccacatggttccaggcaagtaataacaaaataacacggcatcccagttaatgctgcgtgcacggcgggcgctgccggtcaaatctggaaggggaaggagctcaggtagtcgcggagg

SEQ ID NO: 204310 - DNA, 122 bp, Homo sapiens
gtggttttagtatatacacagagttgtgcaactaccatcacaattttagaacaccttcatcgcccttaaaagaaatgccacacgctttagtggtcactccctatttcccctaaccctccaca

SEQ ID NO: 204311 - DNA, 122 bp, Homo sapiens
aggtgatccgcccgcctcagcctcccaaagtgttgggattacggacgtgagccaccgcgccgagctgacaggttcctcttaaagccctgagtcccagggaagggacctgcaggcccggccac

SEQ ID NO: 204312 - DNA, 122 bp, Homo sapiens
gggcggggcacaggtgggcggggagcatgcaaaacagcccagggcggcggccaatcgcggcgcgcgccgggggtccaggccccggggatccgaggcgccgcccgcgcgcagtctctggtcac

SEQ ID NO: 204313 - DNA, 122 bp, Homo sapiens
gaaagtattgactacttcaatctgcaacggaggagagaacgagacaagttgcgagaagaacgagcacaacggctacatgactgacagggcaacgtcacaagaacagccgcagccacggcaac

SEQ ID NO: 204314 - DNA, 122 bp, Homo sapiens
aaagctcttcccattcatgaacttgcatcctgagtcaggattctcccctgaggaccctcccgtggtccctgcacgatctgggagacacgtggcgctgtgggtgcagagctgcccggagaggg

SEQ ID NO: 204315 - DNA, 122 bp, Homo sapiens
tggcacagggatggaggatggggcaagagccgcaacagcgccgcggagttccaacgctgccggttccctggggtacgagcacagcctcaagcagcctcaagccctaggaagcccccagttca

SEQ ID NO: 204316 - DNA, 122 bp, Homo sapiens
ggacggggccgagtgagctgccacagcccttggcgtcacctggccgaggcccccagcccgcgcacacctgccggagctcactcactcaccgtagctcctcgatctcccggatgtagttctgg

SEQ ID NO: 204317 - DNA, 122 bp, Homo sapiens
tggaccctgaaaacgggctcggacccccgctgcagcgtggactccggtgtggccgcggggcgtgcaacccggaccctggccagctccgtgtcctccagacctttactcatgtccccgcatcg

SEQ ID NO: 204318 - DNA, 122 bp, Homo sapiens
gaatcagaaaccaaagagtttaacagactgaaatgaggaattcaaattaacaaaatataacgtaaacaaagcttgactcattctgtgtggcactggaaaggaggccagaattggtcagtaga

SEQ ID NO: 204319 - DNA, 122 bp, Homo sapiens
gatgatccatcctggatcgatggtgactgttgatggcatatgactcacatatgatgagtacgtatctggaactctgaggtctgtcacagaagaaatctggcctattgcttcagtttcaaatg

SEQ ID NO: 204320 - DNA, 122 bp, Homo sapiens
cacccccttccccagggaggttccaaggagacaccggggaatggacggatcaggctgggccgtggcagagggagggtaggaggcagcgaccagcagcgtggagggagtccagagagctagcc

SEQ ID NO: 204321 - DNA, 122 bp, Homo sapiens
aataatttacagtggttagtgagtcaatgccaagaaccctgaaacaagagtcccaaccttcgcaacgggggaagcctccaggacgcacttggctctgcctgtttgttccgcccccgcggaaa

SEQ ID NO: 204322 - DNA, 122 bp, Homo sapiens
gcggcgccggagtcctaggcgcgcaaggtccagttcccgtcttgggcctgtcctggatagcgttagggagacagttcacaggctcttcaatcttcgagcgagaattagggtgggaagggtga

SEQ ID NO: 204323 - DNA, 122 bp, Homo sapiens
tactgtctgagcaagagtggcagtagcttccttctgcggacagatggcaccctgaaggaacgaggccctgctcggagaccagactcgggaaaacagggtgtggagggaagctagggaactag

SEQ ID NO: 204324 - DNA, 122 bp, Homo sapiens
acactgctatctctaatcagctgggcagctcctgacttcctctgcttttcaaggtattgccgagacctcctctgtggcttttttttggcagacatgaggatcagcccttgctacatttctaa

SEQ ID NO: 204325 - DNA, 122 bp, Homo sapiens
aagtacaactgtaaaaaggaaaagaaggcacgatggaaacagaggctgtgcaggagcgtccgtctgcctcgccgttatctctggggcaaggtgcattggctccctggggttctatgaccaca

SEQ ID NO: 204326 - DNA, 122 bp, Homo sapiens
agtcagtgtggtgtgtgtagtttgaacagtgtgtgcattgagcagcatggatggtgtggacgctgagcattgttctccagggaggagtgtgagcacgagagagtgccagaggggtgtgtggt

SEQ ID NO: 204327 - DNA, 122 bp, Homo sapiens
gctgcataatttaagtgtccctattccttgcagctgcttcctgtgtgctagtcatgtaaacgcccttcttaaatgattgcatccctcacaatacttagaatatattgactgttgattggttg

SEQ ID NO: 204328 - DNA, 122 bp, Homo sapiens
cgaccctagtctggccgtggccgagaagatccggaaagaacccggggggacctgccaagacgaggcccgggttcgctgtccgtggtgctgaatggcgcgctcgggcggggtcggggcttgta

SEQ ID NO: 204329 - DNA, 122 bp, Homo sapiens
ggaagtggtcatggcagtgatctaagagtttaaagagtctatggtgggaaggggaggggacgtgacatgattgagccccactccaatgatggttgatgaaaggctgcaaggggtaggaggta

SEQ ID NO: 204330 - DNA, 122 bp, Homo sapiens
ctgccacccctcctgctcttgtctctcccacacctcccaaactctctcctggccagctctcgccacactcagtcaatgtccactgggggcctcaggggcacctccacctgcccaggtctggg

SEQ ID NO: 204331 - DNA, 122 bp, Homo sapiens
gcaggggacaaatcaaggtgtgtgggtaaatgtgaacatatgaacacacgtgtgtacgcacgtctctaaatgtgtcattcataacattttaaaaatggtcaagtccggccgggcgcggtggc

SEQ ID NO: 204332 - DNA, 122 bp, Homo sapiens
ctcgcgcggtgcctgtcggtagtcgcgtgcggggcggcggggcggcggggcggccggcggcggccatgggagatatcccagccgtgggcctcagctcctggaaggtgacgcggtcgcgggca

SEQ ID NO: 204333 - DNA, 122 bp, Homo sapiens
cctcggtgaggatattgcttcctggacaggaactgcttctcagcctggtctttcatgctgcgacctctccttcctggagacccaccacttaccctgtgtgacaggagctgcagtccttttgc

SEQ ID NO: 204334 - DNA, 122 bp, Homo sapiens
ttccctccagaagggccggttcccaaacggcccctttagacacatccaagcggttgccgacggccctcacgatgaaaactgctgtccgttggtgaaggcagcctcttctgtgctcctcgccg

SEQ ID NO: 204335 - DNA, 122 bp, Homo sapiens
acggctggctgaggtgcaagctccatccgtccccgtcgagcccctagccagaccctgccgcgagttaccagccacagccagctgggcacataggaggaggcagcaacagccgccacagagcg

SEQ ID NO: 204336 - DNA, 122 bp, Homo sapiens
tgttatcaaatgtgtaaaacagtcacgatgaatatacatgccaactgctttcagaggcaacggttagtctcttgcaagtttcaacgtgcacattttggagctgctgtctctgtgggaacctg

SEQ ID NO: 204337 - DNA, 122 bp, Homo sapiens
cagattgaggagagcgaagacgagtggggggtgccccactgcctgaccctccggggccagcggcagtccatcatcgtggccgccaggtaactcgggagcccgccccttgcctgtttcccctt

SEQ ID NO: 204338 - DNA, 122 bp, Homo sapiens
gtggcctcgctttagaaggttttcatcaagccccgccctttctctctcatagtcttaatgcgtctggaccactggggaaaatatttttcttttcaaaaagcagccccttcagtctgcgttcc

SEQ ID NO: 204339 - DNA, 122 bp, Homo sapiens
ctccgtccggggatccgcccgacaattgcctcgtttcccttctttcctaacggactgggtcggtgcggtcttaccctactcggacaccaagcggcctctgctccccaacttccccgcacccc

SEQ ID NO: 204340 - DNA, 122 bp, Homo sapiens
tcaggttcaaagtcccttttataaatgtgcctggatggatgacgacttaaaaatgaatctcgttggaatctgagcaaaacgagtgagcaaaccacttctgtgcagttctgtgaactgaggtc

SEQ ID NO: 204341 - DNA, 122 bp, Homo sapiens
gccctcgcgcggccgccctgggggccgcctccgcgcgctctggaggggcgcgggtggacgcgggacctcaaggcaggggacagacagggacaggcacccggccacctggtcacgatccggaa

SEQ ID NO: 204342 - DNA, 122 bp, Homo sapiens
tcggtaagcggcttgctctggagcttcccagttcccaggactctggggctcttccctggacgcctttggctctacccatgtctctttaccaggctccagtgccaagagctatttagggggct

SEQ ID NO: 204343 - DNA, 122 bp, Homo sapiens
tcaggtgcggaggagcccagggccatgagcgtgaggttggacaccgtctcattccagatgcgaacggtgcccacgctggtctcaccgttggccttggtgatggtgatctccttctcttttga

SEQ ID NO: 204344 - DNA, 122 bp, Homo sapiens
acttattagagcctaagtcaattcctatcccagctgtcgtttactaacctggtttactgtcgtttactttgagcaatttattgggccttccctcatttataaaatccttcaattgacatctt

SEQ ID NO: 204345 - DNA, 122 bp, Homo sapiens
tgttctttggtggcaggaaccatacattgtttacttctgaattttcacagtgttcagagccgtcacatagatgaagtcattggttttttagaggccaagggaaaacttcccctttgccctct

SEQ ID NO: 204346 - DNA, 122 bp, Homo sapiens
tcccatacctgatgctgttgtcgcccctgctggtaaggcttaattggcccctggtggcaacgccgcgtccggatcttgccgccaccgccccctccgactcctccggctcccgaggccatggc

SEQ ID NO: 204347 - DNA, 122 bp, Homo sapiens
gagtttggaggcggcgtggcctgattgattgaggttagcggagagtgcgctggacagacccggctttgttacagcctttggggagggcaagacctctcctctgagtgacctacagtctccat

SEQ ID NO: 204348 - DNA, 122 bp, Homo sapiens
ttctcatccagtgatccctaaccttcttggctataaattcccacttgttcatgctgaattcggagttgagcccaatgtctgttacccactgcaaaatctcacagccgggatcccaataccta

SEQ ID NO: 204349 - DNA, 122 bp, Homo sapiens
cttgatgcggtggaggaaaacggggagacctgtttgcaccaagcagcggccctgggccagcgcaccatctgccactacatcgtggaggccggggccagaccagcagggcgacactccccggc

SEQ ID NO: 204350 - DNA, 122 bp, Homo sapiens
cgtcgttaagcgccagaaaaatttaggacacggacacacaaaaactcctcagtttaggagcggaggtttaataggaagaagagaaagagaaacgggttcctccatagaggaaggggtctccg

SEQ ID NO: 204351 - DNA, 122 bp, Homo sapiens
gcggcgggtcagacttgctgtccccacacacgttgccccgccggatgtccttcaccgacacgttcttcacattgaagccgacgttgtcgccgggcagagcttcgctcagagcctcgtggtgc

SEQ ID NO: 204352 - DNA, 122 bp, Homo sapiens
ggccaagcctagtcccgcggggttctcacccttcactttgccgaaggtgccgacccccagcgtgtcacccagaatgtagtggccgatcttcacccgcccgtcgtgtttctgcttctcggctg

SEQ ID NO: 204353 - DNA, 122 bp, Homo sapiens
gttgagttacacacctcaaaatgattgctagtgcatacacatggaatctaacaaaagtgacgtgttttattctgggaaaggtcgagataaattggtgctagagttgtcttgtttgatcatta

SEQ ID NO: 204354 - DNA, 122 bp, Homo sapiens
gccaggctgcgggcaccagccttcctttctgggaaagaaatggagattcacacgaaggtacgggcagcacaggcagcatcccgaaagcgcccccacgcccatggcatgcttgcggctgtctc

SEQ ID NO: 204355 - DNA, 122 bp, Homo sapiens
accacgctagcgtcgctcgggtgttcgggagcccgaaactccatggcaacagcttttcttcgcagctgaggcttacgtcccgtcgccccggccagaccaccccatgggagcgtgctgagtaa

SEQ ID NO: 204356 - DNA, 122 bp, Homo sapiens
tcccacttgctcagccaatcgctgggctcggccccgcccctttgggcttggtccttctcacgccaccaatccgcgcctcttgtcccgccccctgcccgcgagtccgccaatcccgcccttcg

SEQ ID NO: 204357 - DNA, 122 bp, Homo sapiens
gaagaactagaagtggatgccttgtgacatcgccagcttgtttccctgggcaactgactccgaggggtgagcaaatccctcagagaaatgctcctgacacagttatgtaagtctgtaattgg

SEQ ID NO: 204358 - DNA, 122 bp, Homo sapiens
catccctggcccctgctttgcacgtggcagagccctcctgcacagccagctcctcacccccgtggcgcgcacccccaacgaaagtggctgtgatgagccccacagccctggcgttgcccact

SEQ ID NO: 204359 - DNA, 122 bp, Homo sapiens
gcccattcctgcagctttctgtcctgcctgcacctccccatctcacaccatcattggcatcgtcacaagtaacctcagaaggtgacaaggtaatggctccactgcattccttgctgccgcta

SEQ ID NO: 204360 - DNA, 122 bp, Homo sapiens
gcagctcgcggccagaggtggcggcggtggtgggggcggggagccgcggcggcctggagccggagggagggggcggcgcgctgcggcgactgctggacccgtgaccctgtgcgcccccggcc

SEQ ID NO: 204361 - DNA, 122 bp, Homo sapiens
ctcactgcccacggccggcgggccggctggttgctccaagtgcggggcctgccaagcccacgcccacccagaactcgcgctggcccccaagcgccacgcgcagccctggttcccgaccatgc

SEQ ID NO: 204362 - DNA, 122 bp, Homo sapiens
gatgactcttgggagggaaaggaagcagggaacaaaggcggaaggaagcaaggaaaggagcgtaaccttccctttggcagatgtctgggaaaaggggactctttatgaaatcactggatcaa

SEQ ID NO: 204363 - DNA, 122 bp, Homo sapiens
acattctccttgtttgcgtgctctcaaaacaaaagctctgtcatctgttctgcttcctgccgtgcatcttaacattgtaggtgtagacccaagaacaactgattctcctagtccctgccatg

SEQ ID NO: 204364 - DNA, 122 bp, Homo sapiens
gtcagacgcgtgttcaaattccaggactggcacttgccagcgtggagactcgacaaaatacggaggtttctgcgaccgtcctggcacgagggggaggcggaaacacgtgcggtgcagggctg

SEQ ID NO: 204365 - DNA, 122 bp, Homo sapiens
taggaaactctcctgtcatcatcactttctgctcctctgcattcatttgcttttcttcagcgcagctctcccacttggcagaaggcctatttcctgtttatggtatatgcccccagttaggc

SEQ ID NO: 204366 - DNA, 122 bp, Homo sapiens
aggatcctagtggggagggctgaagctggagatttcttgaaaagtcagagggatttgggccgtagatcctgccaacctaggcaccagggttcgcgtcaatgctggatgagtaattggttctt

SEQ ID NO: 204367 - DNA, 122 bp, Homo sapiens
aacccttgggaaagctttagcttctcaagccaattgcactgcattgtcagtaggggtgtccgtgagctccccctcgtggctgaaggccagcatctctgttaggcttaactgagcccagtctc

SEQ ID NO: 204368 - DNA, 122 bp, Homo sapiens
cgacaacaggttttactcccggggtccgccacccaaacagtcagcacagcctagcccaaccgctgaagtcggggccgcagccaacacatctgaaaactcccgccacccgtgttggcccggga

SEQ ID NO: 204369 - DNA, 122 bp, Homo sapiens
tggcgtcagcgcagcagtggcccccggaatccctgccctttgctcgtggagaagctgcatcgaggccgtcatcgaggctgcagagcagctggaggtgctgcaccccggagacgtcgccgagt

SEQ ID NO: 204370 - DNA, 122 bp, Homo sapiens
tcgggcatcccaacctcgactttggccttcaacttggcgcgctccggagctagagctctgcggtagcgaatctgatcgcgtgtccatgcccgccccctgtcccgcctcctggcttttgaccc

SEQ ID NO: 204371 - DNA, 122 bp, Homo sapiens
atggagcttcccccagagccggctgctggacggctgcagcatcctgctgctgtcctttgccgcctttccaaacagcagcttctggagacagccaataaggtctctgatgcagaaggtgacca

SEQ ID NO: 204372 - DNA, 122 bp, Homo sapiens
ctccccggcgggctccgcggagcattgtactcacatccggggctgggttttgctttaatgcgaaacgtaattaacccggaaaaaagagccgagggacgggagagaaggagggggcactgggg

SEQ ID NO: 204373 - DNA, 122 bp, Homo sapiens
tctccctcctctcggcctcagctgacttactggcagagtggggtcctgggagagctgctgcggacgttcctgtcaagcagtgaatcactaagggcaagcctcgttctggagacatgtgcatc

SEQ ID NO: 204374 - DNA, 122 bp, Homo sapiens
caggccaaatttggtcagcctggctttgttaacaaagttttattggaatgcagccgtccccgttcatttacacatcacctatggctgctttcatgctgtaaaatagaggttagtagttgtag

SEQ ID NO: 204375 - DNA, 122 bp, Homo sapiens
atcctggcgccacggggtgatgcagcagaagttctttttgtctgtggccagggtagagtgcggagccccacggagctgtggcgtggcggctcctcccagacgcgtccggggcgccgctcggg

SEQ ID NO: 204376 - DNA, 122 bp, Homo sapiens
ggcggatttcttctctttcatccaagggaactcgggggccgggggggcagcggggagtggcggcggcggtggcggcggcagagcaggcccatcttcggctcgcttttggctcctgggtctct

SEQ ID NO: 204377 - DNA, 122 bp, Homo sapiens
accagccagccgcacctgctggtgatgtactccacgtaagcgatggcatcttccacacggcgcttctttgtacagaggatgatgcggttgaagttggcgtagatgactgatgaccccaggcg

SEQ ID NO: 204378 - DNA, 122 bp, Homo sapiens
ccgcaccgccgctcgggggtcttgggctgcgcaggtgccgacgtctccatggcaaccgggcgtgggttgctagggctgagcccggccggcgcgccggcgctgcaattggacctagggagccg

SEQ ID NO: 204379 - DNA, 122 bp, Homo sapiens
ttccatatctccatgtggacgttaatcccatctgcacacttcctctacgggcatggactacgcgcaatgccttcagcctgcggtgggctcaggaaccgaggcgctgccgctgctgctgcagt

SEQ ID NO: 204380 - DNA, 122 bp, Homo sapiens
aaacttaggccccagtctgcaggtcggcattcactcgctgaccaatgagagtgaagcctccggggagagccaatggggtccttccttggcgggagggggcggggcgctccaaggtcgtctat

SEQ ID NO: 204381 - DNA, 122 bp, Homo sapiens
gcgaccactgtagcttccatcccttggggtgtgggtcctgtccatgggtgctcctgtagacgctgctcacgggggggtgggttgtggacaaagagctggtgccaggccctagggacccgtga

SEQ ID NO: 204382 - DNA, 122 bp, Homo sapiens
aattaccaaatactctaacttacttatttcaaactgattgtgcatttacatatttatgaacgttatacacagaaagttaagattcatttctcttttgcctaagtctatacatacagtctccc

SEQ ID NO: 204383 - DNA, 122 bp, Homo sapiens
cgccgtcagtagtcggctgaggacggaggcggggctgggcctgggatggggcggggcctgcgctggtggggcgggcgggggaggagacacggccaagcgcccgagtgggggccgttggttgg

SEQ ID NO: 204384 - DNA, 122 bp, Homo sapiens
ctgtttaatacttccctcttaggctacataagcatctaaatcacttagagctagaatttgcgggggcgggggggggggcaggagggagggagagggagagggagagagagagaacacaccag

SEQ ID NO: 204385 - DNA, 122 bp, Homo sapiens
ggctcggcgccggggtgtcgcgcggcggcgggcgggcaggctttggagcggcagttttttcggaaagtgcttttggccgggagtgccgcagaaccccagcgtcacgaggtgaggggtgtcgc

SEQ ID NO: 204386 - DNA, 122 bp, Homo sapiens
cccccgcagcagcagcagccactgcaaccagttcatcctgggagctgctgcgggttcttccgggaatccgcgccactgcgcctgcgcgctgagaaatcagcctctcacttccggactacaag

SEQ ID NO: 204387 - DNA, 122 bp, Homo sapiens
ttgaagataaagtgttgccttatgagtaattggatatgtgggcttgaaaagttgaaatttcgttttgatgttatgcatgtaaatgatgcctgaacaaagggagcaaaatatttttttatctt

SEQ ID NO: 204388 - DNA, 122 bp, Homo sapiens
gatgagcgctgtccttgccctcctggactctctgcgtctgcggttcagccacaaccttagcgtcctgatcagaagtcatgggctccactgggagaagtgtaatgctaacctcaggatgctgt

SEQ ID NO: 204389 - DNA, 122 bp, Homo sapiens
actcccttccctcaggccccaggaagttgcaagagtaccatttgtcgcacactcggggaccgcgggtggccggaggagatgaaaccgtcttggctgcagtgtcgtaaagtcaccagcgccgg

SEQ ID NO: 204390 - DNA, 122 bp, Homo sapiens
agaaaagctcatcatccctcagcctcttaagagcactaaaaaagaaaaagtgagtgaggtcgtatgaaacagggtgaaagacacagaaatattcagatcctcagtgggggttgtttaggaat

SEQ ID NO: 204391 - DNA, 122 bp, Homo sapiens
cctgcaaattcactctcatcagatccccaggctggtctaggatttgtttagatgccctcacgttggggaactcattccttactaagaataaccaccaccaataccaaacagtctcaagtacc

SEQ ID NO: 204392 - DNA, 122 bp, Homo sapiens
tttcatacctaacaaaaccactcactgactttgtgaccctgaccaagacagccttttgctcggagcctcaacttctctgcttgtgaaatgagcagatatatgtgatgcaccccttgaaatgc

SEQ ID NO: 204393 - DNA, 122 bp, Homo sapiens
atccgctaggctgttgggccgtgctccccttgactctgccttcatggtggaaagcagctccgggtggggctaagcagtctcgtgcggggtgtccccatcacatcgtacttgtggacgctgac

SEQ ID NO: 204394 - DNA, 122 bp, Homo sapiens
gagaagggataaaggaaatggtgcctgaggatataaagtgagaggactggaaagtgcaaacggcccaagtcagtggctcccctgagaccaataccagcagttgggatgaagggaatctgcct

SEQ ID NO: 204395 - DNA, 122 bp, Homo sapiens
ggcctggtcctttcggggacctttggggaccgtccaggaataagcccaaagcgcacaacccgtctttcagaaaagcggcgtgacagggaaaacagcgaacagctctaaggggaaaaaaatgc

SEQ ID NO: 204396 - DNA, 122 bp, Homo sapiens
ctaaccccctcccttcagagatttccctgggtgcccacagaaagaaacaggaggccagaccggattgttagttgtttttgtttttaatttgtctccaataagcaatgtcttctgcccatcca

SEQ ID NO: 204397 - DNA, 122 bp, Homo sapiens
atacacacacgtacacactcacccatgtgcacacacacaggcacacacatgagaaagggacggggaaagctagggtgtccaccccagcctgggctcctggtatccctaagggttttggaaga

SEQ ID NO: 204398 - DNA, 122 bp, Homo sapiens
tattatttattatttaggtgcactggcccagtcagattaacatcgaaaaagactgagcaccgaacaaagagtcaagttacattttaagtatttcgtggggtagggggagatctgtgcagggg

SEQ ID NO: 204399 - DNA, 122 bp, Homo sapiens
caccacggcaccgagcgtgggcctcagacagcctccgtgagaaatgaagtgagcggactccgcttgacaggctggattttgggggaagagagtcagcgatgccggtgaggaacgctccagaa

SEQ ID NO: 204400 - DNA, 122 bp, Homo sapiens
agaaggcttttactcttcagcctattccagtggcagagaagctaaggctacaaaggcgaacgcgaacagtcagatctgacttcgaattccgctgtcattgctgccaggcgcaccacgaggac

SEQ ID NO: 204401 - DNA, 122 bp, Homo sapiens
ctggtggtgtgtggctgggaatgcagtttatgcagatgcctgtgctggatgagatgttatcgtcacgtactgtgtctatgtctagttatttaaccttgggcaagtccctccacgcctctgaa

SEQ ID NO: 204402 - DNA, 122 bp, Homo sapiens
tacagatgcattctaagtggcgctggccaaggtgactgagtgacaccctgtggtcctctgcgggcaaacacaatacagaagctattgcttagctccagggcaagaggacaaatgtctgtctc

SEQ ID NO: 204403 - DNA, 122 bp, Homo sapiens
aggggacaaatgaagactcaaggggccccacaggcaccggctgggcccgtgaagtactcacgcctgccccctacgcctcctcggagcagtggaggaagctgctggcctctgggggacagtgg

SEQ ID NO: 204404 - DNA, 122 bp, Homo sapiens
tgaaagaaaaccctgaaataatcgaacaggaaaaagttgccctcaagcctgacctggaaccgttcctcaccttcatcctcaccatgccctgctatctccagctgctgagcagctgaggtgct

SEQ ID NO: 204405 - DNA, 122 bp, Homo sapiens
tcttggggaatgacctgcagcctcccagtgaaagagagaataaaagaaagccccagcaggcgagctgggcagtagagagtcctgtaattccaccttggcaagcaccatttgcaagaacgaac

SEQ ID NO: 204406 - DNA, 122 bp, Homo sapiens
atctggggccccgggggtgtctggagctgtggacttgggcgactctgcccccatccctgccgtctgggtctagcatcctctctgggcgccccccgccgggccaggagggcggagctggagag

SEQ ID NO: 204407 - DNA, 122 bp, Homo sapiens
atcatgctccgagaacgtggacgctgcacctctgaccacatcatgctccgagaacgtggacgctgcacctctgaccgcatcatgctccgagaacgtggacgctgcacctctgatcatgtcac

SEQ ID NO: 204408 - DNA, 122 bp, Homo sapiens
ttatgtctgtttttcacagtttctctatcttcccttataatcagctgtcacttttgccgccgtcttgtgtgcctgcctcctgcaataggtccctaatttgctgcttctaatctgctgtggac

SEQ ID NO: 204409 - DNA, 122 bp, Homo sapiens
cgtgcgcttcaggagccgccaggtccctacgcccgcagctccggcctccccgcctccgaccgaaccctgagaaacgcgcgaacctcccagccgctccggctgcaacccgtggtctaatgagg

SEQ ID NO: 204410 - DNA, 122 bp, Homo sapiens
gtgcgccctgtgccggcccctcggagggctgcccagggacactgggaccgtggccagacccggccattaggagagccttatttagaaacccaaacaatgacttggccatttattaagcgcct

SEQ ID NO: 204411 - DNA, 122 bp, Homo sapiens
ccgcgatggggtggatcctggttctaacaggcgaggaactcctggccaaggcctctggcccgccccgaacggtccctatgacatcaccatcaaccaatcagtcggcgcatcctttcgcccct

SEQ ID NO: 204412 - DNA, 122 bp, Homo sapiens
aaggtgggcgcattgttattacttcccgaccacttaagagtcattcacaggctcagaccccggcttcctaatttccctccttccggaagatgcgttggccttggcggctcccaggcccaagt

SEQ ID NO: 204413 - DNA, 122 bp, Homo sapiens
ggagctcctcagcacacagatcctgtgagtcaggcccagggcccaggcagcgtctcctcacgtctgcctggcaccaggctcagtgcagctggtgaaccggggctgcgcaggtacctctggtc

SEQ ID NO: 204414 - DNA, 122 bp, Homo sapiens
cctttgcgttttgctacccaggacccaggactcaagggcagggtggtcttggcctggggtcgccgtcctctttaaggggcgggtcaagggaccctggctgcccgggcctctgccaccgaccc

SEQ ID NO: 204415 - DNA, 122 bp, Homo sapiens
agaaagatccaccctcaaatgtcagagctatgttccctccagcagtggtattaatactgccggtcacccaggctctggagccagagagacagaccggggttcaagccatggcttcgtcattt

SEQ ID NO: 204416 - DNA, 122 bp, Homo sapiens
agtgaccccaccctcctccctgccccacacaccataaagtgggcccaggttggggagcagcgctccagctgccactaatcatggaagcccagaggcgaaatcagcttcccggggacccagaa

SEQ ID NO: 204417 - DNA, 122 bp, Homo sapiens
gagaagaagaaagctttcccaagcatatttatatacagtatgctcatgtgctccttccttcgtttacagaaggaagttaggaaagtccctgaaggaggagagaaagaattcatcaagtcagt

SEQ ID NO: 204418 - DNA, 122 bp, Homo sapiens
tattagcccttattcttcactctagccagtgccaaaaaaaggattgtgcacccatggtctcgggcataaatgagaagagactgctgaaggccacaagcaaggcccaaacccgtcctgcagag

SEQ ID NO: 204419 - DNA, 122 bp, Homo sapiens
gcaggttgggcgggtggactaagtgggggtgggtggtcactgccagcgtcagagcagaaacgggggtctcacctgccagagacaggaggcgcaaactccccagggccaggaggtgcttcagc

SEQ ID NO: 204420 - DNA, 122 bp, Homo sapiens
gccagccaagtgaggaaacaagcactttgcccagacagaaatgagcacttcacccaaaatcgcacaacaagtcagctccaggggccacatttgaacccaggactgttcaacagcagggctcg

SEQ ID NO: 204421 - DNA, 122 bp, Homo sapiens
aaggaggcttgtgcctccagtgtcctcctgcagtctgggtttctgggcacgtggcctgcgcgtggcgccattgtggagtgtcccgcgcccatgtccttcgtgccttccaagcgcccagaggc

SEQ ID NO: 204422 - DNA, 122 bp, Homo sapiens
cagaggacggtttggttaggcaagggggtggcggtggcattgccatcacgggatgtctcacgctttctcctctagacgtcttaatttccagaaccccttgcttatgtgcagccctcttcctg

SEQ ID NO: 204423 - DNA, 122 bp, Homo sapiens
aagatgtaccaatgtgaaattctgtgttgctgggaccacgggggacccctgggtgcccctcgaatttccagcttcagagctctcccctccaggttctttatgtaacagaccatgaccgggag

SEQ ID NO: 204424 - DNA, 122 bp, Homo sapiens
gcaaagtgtggtttcaggaaactgttaaaagttcacatccttatctgaccctaatcctggcggcccagaacactgtgattcaaggaatgatgtggaagcactcggttgaaccagagcaagag

SEQ ID NO: 204425 - DNA, 122 bp, Homo sapiens
accacaggaaaggcccagtagagcagaggagagtatatgacctcatgcagccagcaaggacgaatgtacctcaggaagaaggagatggggctacatcatgggccactccgccacggacactg

SEQ ID NO: 204426 - DNA, 122 bp, Homo sapiens
ggccgcccaccaggttccctccgggcaaagcggcagggccccgcgcttcctgagccttcacggaggtctagtggtccctctgcctgaaaacctgtctgtttgtcaggaggagttcggagcat

SEQ ID NO: 204427 - DNA, 122 bp, Homo sapiens
agtgaatttagaaataatagcataacaacgtgtaaagatgaaaactcccaagtactgtagcgttctgtgtgaccaaaagccagaacaacaaacaattcggacaacctgttgcagttcaagtg

SEQ ID NO: 204428 - DNA, 122 bp, Homo sapiens
cggttattactgatgaattaaatatcatggcttagtattataagggagtctctcctgtgacgcttaagaggattatgcagctgttctgtggctctttctgaatcccacaaccccaagaaggc

SEQ ID NO: 204429 - DNA, 122 bp, Homo sapiens
cccggggtccgcgagagaccagctctggcagcctaagggcttcagtttctccccggggtccgcgagggaagggggcagccggcggtgagcaggggcgtttgttattttgctccacgcctggg

SEQ ID NO: 204430 - DNA, 122 bp, Homo sapiens
actcctaaactctggaagtcgcgctagacctcaggaggccggaaaatgaccacctggcgtcggtggctccagcagatctgagcccctaggccccctgggctccacgctgagccgcgctctcg

SEQ ID NO: 204431 - DNA, 122 bp, Homo sapiens
ttaggcgtaagcagccaattgggccgtctgggagccgtgcatcctgggagttatagtttccggctccctccttcagattacaagctccacagagccgcgggaggacggttgcctggtattat

SEQ ID NO: 204432 - DNA, 122 bp, Homo sapiens
gggaggcctcctccgccgccgccatcttggaccgggcccggtcagcttccgcggagccatcggcagacgccgcggcctcccttgagccccgacccccgtcgtcagaacaaccccgggcccac

SEQ ID NO: 204433 - DNA, 122 bp, Homo sapiens
ggagggagaaagagggacctagcgcgggccgcgcaggcgcacggtgggcagctgcaatggcgctgtcgtgtacccttaacaggtatctgctcctcatggcgcaggagcatctggagttccgc

SEQ ID NO: 204434 - DNA, 122 bp, Homo sapiens
ggcaattccagactggacttgcagcattggggtggcgtcatgcaggtccgaggctcggtccggcccgcggctctttgcgcccccagaggttcagtggccgggtctcagaggagatgggtgcc

SEQ ID NO: 204435 - DNA, 122 bp, Homo sapiens
ccaagcccctcctcgctcttgcaagtgtgggtgagttgcagtggccaagaccagcagccccgaagctcagcaccccaccttgggcggggggtagcagtaactggcagtagaccgcctttcct

SEQ ID NO: 204436 - DNA, 122 bp, Homo sapiens
tttgagttaggcaagatagatgaggaaaaggcagacagtgaactgctaagatggaatgttcgtgccttatccgagaaatgtccaagtctgcataaccaggagagacagaggatgttctgaga

SEQ ID NO: 204437 - DNA, 122 bp, Homo sapiens
ccagctgcaccctccgcagctgctggcctggttgctaagcccctcactgccctgggcctgcggctctggccagccactcccagtgcagggcgctctgagtccacgcccacccggaactcgca

SEQ ID NO: 204438 - DNA, 122 bp, Homo sapiens
caaaataccccgtctctgacagatgagtcaagccccacgcagtggtcttactatttcccacgtatgacggcacattctctcagcgaccgatagcatcgtctgccaggagttatactggaggg

SEQ ID NO: 204439 - DNA, 122 bp, Homo sapiens
tatggccgcgtttcctgggggtgatgaagtctatattctgggctacaggcacactaaaaacggcagcgccagggcccagcgccgctcgcgcgtgcaccacgcgccggctttttttggttcct

SEQ ID NO: 204440 - DNA, 122 bp, Homo sapiens
agaacgctgcgattggccctcggctgtggcgacagcgacgattggtccctgcgtgcagagcgcggtgagagtgggtggtggccgttggaattcaaaagtggcgggtgtggcgcggggctggt

SEQ ID NO: 204441 - DNA, 122 bp, Homo sapiens
ctcagcttagcggctgaagactgacactgcccgatcgcctcggaagcccctagaccatcacggacgctgagcttcgggtaactctcacagtggaaggtaagcacgtccccttcttaatcaat

SEQ ID NO: 204442 - DNA, 122 bp, Homo sapiens
agccccgggggtctgtgactgtccccgggacatcagtctgagaaacagcgctgagttggacgctgcctggtgtggacactcgccctccacagtcacacaaactcggctttgcaaaatcagtt

SEQ ID NO: 204443 - DNA, 122 bp, Homo sapiens
ttggccctgtggggcagggcggtgggtgcctggcagtggcggcaggcggggtcgctgtggcggcccgcatgcctttgaacgccaggcccggacaataggaccgaaacagcctttgctcgtgg

SEQ ID NO: 204444 - DNA, 122 bp, Homo sapiens
tagcaaacataccttgagtgcaacgtccagagatttgctcgcattcttcctcttcttcaccggagatttacattccagagtaaacgtttctctctctctctctctctctctctctctcttcc

SEQ ID NO: 204445 - DNA, 122 bp, Homo sapiens
cttctgggtgtgtgggcctcgtagcgtgcggcccattgcccgggcaaccgacgccgtgagcggtgcattgtggtctgcaacaaaatgcaggagaaagatcctgagggaaccatggagtcaat

SEQ ID NO: 204446 - DNA, 122 bp, Homo sapiens
gcccgagctgccctcagtttctccccaagtgggactcactgtcggggtgtcccacaagcccgatcccagagcctgctggcccgaccccggcgacgcctccacccgcgctcgccgccctccgg

SEQ ID NO: 204447 - DNA, 122 bp, Homo sapiens
tgtcggcagatctgagctttcttcttggacaccttacacccacagtcatccaggtgtcgacgtagggcaatccgttcccttggcgcacccgactgccgtggggtgtcccagcaaaagctcat

SEQ ID NO: 204448 - DNA, 122 bp, Homo sapiens
tgccttgccaaactgtcatactcttttcttaggttgaatcagcatttaacattttatcatcggcactttcaatattgagaaatattcctttaatgtaaagattttcaccggcgtcacttcct

SEQ ID NO: 204449 - DNA, 122 bp, Homo sapiens
tggcagcagacaacttgatattcaaagacatcataccttctctagtttttgcaatgtacacgtctgagcagtagcaagtggaacctcaagagggagagtgagaaaacatttacataatattt

SEQ ID NO: 204450 - DNA, 122 bp, Homo sapiens
cactccaggctccttcctgagctggcacttccattccccccctcctcctggcatgcgaagcgctttgttcagtgcagcgttgcagaggggttttcccaggctccgccctccacattcattca

SEQ ID NO: 204451 - DNA, 122 bp, Homo sapiens
caaagaaacaaacatgcgtaagcacctcctgcaacccactagcgagctagagagagttggcgtctacacctcaggagcttttcttttttttttttttttttgagatagggtcttgctctgtc

SEQ ID NO: 204452 - DNA, 122 bp, Homo sapiens
cggccaggcagggggtttgtcgcctggaggcccaagaggaacggcctccccccaacttagcgggttatgctggaccgggcggtgaggggaaccgaggccacccggactttccgcggctgagg

SEQ ID NO: 204453 - DNA, 122 bp, Homo sapiens
agtttcctgagtgactctggctccttcctcatgtacagattctgcatccccttcttctctcgaccctgcccctaccacttctaaagagaccccttgcaaaagcacatcagctcaatgacgcc

SEQ ID NO: 204454 - DNA, 122 bp, Homo sapiens
acctcgtgatccacccgcctcggcctccctaagtgctgggattacagacgtgagccaccgcgcccggccagctttggattcttttaccactttcccgaaggaaaaggaactgaaaatatcta

SEQ ID NO: 204455 - DNA, 122 bp, Homo sapiens
tggaggccgtgggccaagcttgcagcgggaccagggctgatatgaaaacttcaaccaaggcggtatggggagaacaaaggagaataaacaaaatttaaacaaacataacccatgataaatca

SEQ ID NO: 204456 - DNA, 122 bp, Homo sapiens
ctgcacccacatctggggtttcactcagagggaacccctctgctcagcaaagggaaatcacgtgctttcttcggaaggaggagagagaggaattgaaatgcccccgccttttcttaaagata

SEQ ID NO: 204457 - DNA, 122 bp, Homo sapiens
ggattagcaagtcccaacaatgcaagcagtctaatgaaagcacatttattttcctagacacggcgtcagagcctaaatatctggccaatttctttgctgtgggttggaatattaataatgat

SEQ ID NO: 204458 - DNA, 122 bp, Homo sapiens
ggctgccctttcctgcacagccagatcccagctgccccctgccttgctttcgtccggccacgtgacctggaagcccaagtggtcccgggtgacgggacacaccagctgcttctcattcaagg

SEQ ID NO: 204459 - DNA, 122 bp, Homo sapiens
agggtgccaggctgggggaaggagggtgtggggagtttgtgtttgctgtttcagagtttccgtttgggaaggtcaaaaagttctggagattggttgcacaacaatgcgaatgtacttactgc

SEQ ID NO: 204460 - DNA, 122 bp, Homo sapiens
gctctcacttgccccggcgctgtctctatggagctcaatgtactgcagtggctaacagtacgatttataatagcactctccccaaaggaaaatccatgacaaactttgatacagatccaaca

SEQ ID NO: 204461 - DNA, 122 bp, Homo sapiens
gctcgcctgcatacttctcccacctcaggtcatcactttcatgggtgatgtagcgctccccgattttgcattccagctctcgcaaatctaaccaggtctgatagtcctgaagaagaaattcc

SEQ ID NO: 204462 - DNA, 122 bp, Homo sapiens
tcacgtggccccaccctctcaccctagacagatgggagcctcctggggtgtccacgtgagcgcgcgtgagtccgcccccccagtcacgtgaccgctgactcggggcgttctccactatcgct

SEQ ID NO: 204463 - DNA, 122 bp, Homo sapiens
taagacgagacctctggttgtgaagacgtcgttgaacaacccatacatcatccgctggagcgctctggagagcgaggatatgcacttcatcctacagacgcttgaggacaggcttaaagcta

SEQ ID NO: 204464 - DNA, 122 bp, Homo sapiens
tggcaagacaattactgatggctttctagacctgcttcaaagcttcctgtaacctggcagcgaatgaaatgcacaaccttccaactcaatgacatttaaggcaaccactcatcggttcaggc

SEQ ID NO: 204465 - DNA, 122 bp, Homo sapiens
caatctccaagaagctctgttgcttttgttctgcaactctcaaaacacaggctggaacaacgtatttttaatttgatggttggcctgatccttcttcaagttctggtttcaataactcccag

SEQ ID NO: 204466 - DNA, 122 bp, Homo sapiens
cctgagcccgcccgggggcctggccccgttttgaacccgggcccggcggctgcgttgggtcgccccaaacccggtgagcgtacgagactgttgcttcgctgtatgtctcatgtgcaccccct

SEQ ID NO: 204467 - DNA, 122 bp, Homo sapiens
cctcccccaccagctgctgctccagcggctgcaagaggagaaagatcgtgaccgggatgccgaccaggagagcaacatcagtggccctttagcaggcagggccggccaaagcaagatcaggt

SEQ ID NO: 204468 - DNA, 122 bp, Homo sapiens
ttcgggtgctccttttccagccgggacgtattaaagggaccggagcggggcagttcccgacgccgcagcgctcgctttcccttccctcctctctggccctccctcctcccacccactggctc

SEQ ID NO: 204469 - DNA, 122 bp, Homo sapiens
gggattacaatgaagcgtgaggtctttttgaagtcatttggccggctctcttggttgtaacgagtctcagctggtttgactacaaaggcaacttcttgaagcagatcctgtttttttgtttt

SEQ ID NO: 204470 - DNA, 122 bp, Homo sapiens
acaagggtgtttagaaacgcggatctccagggctcatgtgcccatttcagagtgcagacacgcagctcacccacagggaagacagagaaagctctgaccccaagagaaaccgacatcataca

SEQ ID NO: 204471 - DNA, 122 bp, Homo sapiens
gggtggctggcgggggtggaccgcttgggtgagcttctgaataccctttaggggagataccgagaaacccacttctcaggggcagccccaccaagggacccagggacacagccccggctcca

SEQ ID NO: 204472 - DNA, 122 bp, Homo sapiens
tccattcctctgggcagctgggcgtggtggcctgtgggtagggccagtcacagctggccacgggcacttcaaagatagcctccatatgaaggtgatggcacaggcagggatgggagtgtcta

SEQ ID NO: 204473 - DNA, 122 bp, Homo sapiens
gcatgaagggcctcggggcagctcagtacaggatgccccagggaggatggagatcagagccggccgctgaagcccccagcaccacacacacctgctggagatggtcgcacagcgtcttcatg

SEQ ID NO: 204474 - DNA, 122 bp, Homo sapiens
atgatattagaaagaagttcctggagataattgacatgaagacatcactggcctgttacacgtactttatttgtcctcttctttttagcacaacttctgcacttcatccaacctgttgtttt

SEQ ID NO: 204475 - DNA, 122 bp, Homo sapiens
cctccccaaaaccgtggaagtttgttctactggtacctccattttgcagaggagaaaaatcggggcttgatgagagtagagccaaaatgtgaacacagggcagcctgtctggggagcctgat

SEQ ID NO: 204476 - DNA, 122 bp, Homo sapiens
gatctttagctctgaggctgactcccaaatcttcttccctccctgaaccattcagatccccgactccgagccttttaggactccaagctctgagcctcctcggactcctactctgggctccc

SEQ ID NO: 204477 - DNA, 122 bp, Homo sapiens
gtgttttccccctgcaacctgagctgctctcctcccttggggacgaggagctgaccctcacggaggctctagtcgggctgagtggcctggaagtgcagagatcgggcccccaatatatgtgg

SEQ ID NO: 204478 - DNA, 122 bp, Homo sapiens
gagggaagaggtattctcttcctttgtaaaacatcagattgacaaaggaatctcctaaaccgcactctgcagcttgggctgctaagacaatcatcccattctagtggctctaaagaattctg

SEQ ID NO: 204479 - DNA, 122 bp, Homo sapiens
aatagaccccaaagtcccagtttccctggagaaccaaaccatccaacacatcctgggcagcggaaaccgaaatggcaaatgaatgaccgcgccggggcgcaagggaggaaaaacaaagccac

SEQ ID NO: 204480 - DNA, 122 bp, Homo sapiens
tccacccaaggtttaccaagactgttgtagttgcaagagtgggcttccggctccacgtaacgatgcgattgggctgtacctctgtctgtctcctgcgcgatgtcccgccccgggaggtgtca

SEQ ID NO: 204481 - DNA, 122 bp, Homo sapiens
tctgcctgtagtcctagctactcaggaggctaggtgagaggatcacctgagcccaggatgcggaggttacagtgcactgacatcgcaccataccactgcactgtagcctgggccacagaatg

SEQ ID NO: 204482 - DNA, 122 bp, Homo sapiens
tcttgctgacattcctacaggaagggagatggtggtggtggtttggagggtgttgaggggcgcagagggcaattgggtatgtagatcatcagggtggaaggtgagcttcctttctaggtggg

SEQ ID NO: 204483 - DNA, 122 bp, Homo sapiens
gtgtgtaacaggggcacccccatgacaaagtcacaggtgcactgcatccgcaccgagaagcgtcacagcagacgagactgctggcacggcagctagagtgcaactcctcggtcactttgggg

SEQ ID NO: 204484 - DNA, 122 bp, Homo sapiens
cattgtagtccttaggaaattagaactaagattttcagtttacttgcttgggaggatcagcgacatttcggtgcaggagcacggaatactgatacaggtaaatccgaagtggcagaacagag

SEQ ID NO: 204485 - DNA, 122 bp, Homo sapiens
gcaggcagctatgagacccggggccctgcagttgggttgaagtcgagggggtgcctgctgcgtgtcagccccacgcctgcccgccagacgcgcagcggggttgggctggggagccgtcagcc

SEQ ID NO: 204486 - DNA, 122 bp, Homo sapiens
gcctcaagcaatcctcccacctgagccccgcaaagtactcggattacaggtgtgagtcaccgcgcctggccgggagctttaatttttcctacttgttaacagcgttatggggctggaaggag

SEQ ID NO: 204487 - DNA, 122 bp, Homo sapiens
gccccgaatttgagggtgacctgacataacctggcaccaggatgattgttcttaatgagacgcgcaggcctggggagacagccgtttctgctctggaaaacatctccagaaaaggtcccaaa

SEQ ID NO: 204488 - DNA, 122 bp, Homo sapiens
gataatgccaagtttacatgaggatctggagaaacaagacccctacacccttgccaggagcgggagtttgtgcgtccactttggggagtgctcaccaggaaaggtgagcgcattcacactgc

SEQ ID NO: 204489 - DNA, 122 bp, Homo sapiens
gcgcgaaggagccttctgattggttgcgctgggggtgccgcggcggccttccccaagggtcggcggggatgcttcttccgcctggtcctagtggcagcggattctttccgcccccaacgctc

SEQ ID NO: 204490 - DNA, 122 bp, Homo sapiens
cagcttttgataagatctagtaataataaggggatgggtgtggctgcaggtgggacatgtcggttctctgtcctgtcacagctaagaactaagaactttagagtctttcagccatagagggt

SEQ ID NO: 204491 - DNA, 122 bp, Homo sapiens
aatctacttcctgtctctacagattttcctattctggactttcatatgaacgggatcaaacgatatgtgacattttgtgactagcttctttatcttaatgttttcttttctttctttttttt

SEQ ID NO: 204492 - DNA, 122 bp, Homo sapiens
tatttttagaactgacaaaatcccagcgttgagagtggggaacagcaatcttctaaaagacgtttaaaataaaaatcaggctgggcatggtgtctcgcacctataatcccagcactttggga

SEQ ID NO: 204493 - DNA, 122 bp, Homo sapiens
acggactccagccccaggctctcctcctgggtttcctgcctgggtgcgcaggggacatggcgaccgcactaccgatttcaaagtgactttgaggctgggctcaggggctcatgcctgtaatc

SEQ ID NO: 204494 - DNA, 122 bp, Homo sapiens
atatagtcctattggaacccagataagcttagtctcaaagcctcccctcttgtcaccacccgactctgccttactcttggtagaaccacagcgatgacagctgcttgggaacataaccacaa

SEQ ID NO: 204495 - DNA, 122 bp, Homo sapiens
ctgttcggcctgggccgcaaccacgaaggaggcggtggaggcgggggccggcgcttcctccgcgccccccacgccgccgctctctcgcgcccctatagaactgggcctcaggcctcgagggg

SEQ ID NO: 204496 - DNA, 122 bp, Homo sapiens
cctgggggcgctggtgccggtgaccgctgtgtgcctgtgcctgttcgtcgtcggggtgagcggcaacgtggtgaccgtgatgctgatcgggcgctaccgggacatgcggaccaccaccaact

SEQ ID NO: 204497 - DNA, 122 bp, Homo sapiens
tcttcacgtcgaagtgaagggttatgaggatggagggatccatctggagtgcaggtccaccggctggtacccccaaccccaaatacagtggagcaacgccaagggagagaacatcccagctg

SEQ ID NO: 204498 - DNA, 122 bp, Homo sapiens
ccgccttctctgcccccttccaagatggctgccctaatgtacacttgggaccttgcctggcgcctcttccgggcttggcagcgggcggggtccattgagtaaagccttgcgtgcctgcgccc

SEQ ID NO: 204499 - DNA, 122 bp, Homo sapiens
actctggagaggaaaactggagtggcgggtgggctttgcctgcagctcaactctccctcgcggcgcgggcgcggctgggttcagcacctcggaaagcgcccctcgcggcgccccgggattac

SEQ ID NO: 204500 - DNA, 122 bp, Homo sapiens
agttatagaaaatggataacgatgcaaatgtttcctgcccatagctatgcaaatgatacccgtgcatgacaatgcaaatgaattttgtctggcagagaatataaatctctgcaaatcaaaat

SEQ ID NO: 204501 - DNA, 122 bp, Homo sapiens
caaaggccctgaggttggattgaactttctgtgtccaaagaaaaaagtttactctaatgacgcattttggtgtttgatgaccacatgccacatccttcttgggtccaaacccccaagcaaac

SEQ ID NO: 204502 - DNA, 122 bp, Homo sapiens
aggtggcctggggcgggcgcgaggttgactctggctggggagatgctcgctgttatgggacgcccccgaccgccccatacctccctgatccccttcctgagtgcccgcggcgtgtgggctgc

SEQ ID NO: 204503 - DNA, 122 bp, Homo sapiens
ctcacaagtgacaaatatcagcacaccacttaactgaggaagccggagtgttcccaggtccgcaagttggagctctttagttggagtgctgggtttagactagagagcgggtgttgcgactc

SEQ ID NO: 204504 - DNA, 122 bp, Homo sapiens
tcatatgatgtacataaagcatgaaacacttgtaaagtataaaatgcctcaccatcatcacgtataggaagaaaatgatatgaaaaagtagataatgctctttaacagccatgaaaagttta

SEQ ID NO: 204505 - DNA, 122 bp, Homo sapiens
atagctccccagcagaaacccggaagttgaaatctcagccattcagtgtttgggtgaagacggaggcgggttctggacagacctacgctgtccgggagtgtttacttcgcctccacttctgt

SEQ ID NO: 204506 - DNA, 122 bp, Homo sapiens
gcagaaatgccccatggaggtgagctccagcaggcaggagttctatctgctttgtgtagccggaagaccagacgccccacagcaggagcaaacacccgggtgcaggagtgaaaggcggaact

SEQ ID NO: 204507 - DNA, 122 bp, Homo sapiens
cgggagaggaagcctgcggacacctgccctttgtgattgaaccgcagacaccaggcctggcggggtcgcttgcctccgctgcccaagctaaggctccactaagctggtcctgagaacatact

SEQ ID NO: 204508 - DNA, 122 bp, Homo sapiens
gtggctgacactgcgttctcattggctgaggctgcatagaggggcggtcccaacagtgggcggggtagagccgcgccgcaggacggagggtctggacactttggggtcacgtgctcattccg

SEQ ID NO: 204509 - DNA, 122 bp, Homo sapiens
ccgcggggggagagtcttggattgcaacatcgctggctcgcgggggtgggggccggcgagcgggcttgttttcggtgccttaaaaccaaaacaagtgtaagttttcttgtgcctctgaagat

SEQ ID NO: 204510 - DNA, 122 bp, Homo sapiens
tcttcatcaccatgaaccccggctacgcaggccgcacggagctgcccgagtcggtgaaggcgctgttcaggcctgtggtcgtgatcgtgcccgacctgcagcagatctgtgagatcatgctc

SEQ ID NO: 204511 - DNA, 122 bp, Homo sapiens
tgtggagctggggaggagggaaaaggtggcagataggtgaaatattatgaaagagctagccgatccttgtttattcactgaggagtaactaatgggtgggcctgagtgggatgtaggggggc

SEQ ID NO: 204512 - DNA, 122 bp, Homo sapiens
gcaggaacgcgactgcacactctcacagctccctggcgttctccacgtgggcgaaggggccgacgggaaggcacccagtgaacatgcgcactgaggctagcacccaaaggtggggagggctg

SEQ ID NO: 204513 - DNA, 122 bp, Homo sapiens
ctagtgtcctcagcgtgtccgcagtgcgcgcgtcctcggctcgtgtcctcagcgcgtgtccgcagtgcgtcctcagcatgtgtcctcagcgcatgtcctcagcgcacgtgtcctcagcgtgc

SEQ ID NO: 204514 - DNA, 122 bp, Homo sapiens
cggacccgccggaagactcggcgagtgcgcgcgcgcaggagcccattttcccgcccgcaacgtggccccgcccttttacccaggccctacgcgagcttcgccgagtacgcgtgcgcagcagc

SEQ ID NO: 204515 - DNA, 122 bp, Homo sapiens
tcatgaccaggaggtaacaagcaggaataaaaggccaccagagtcacagagacgaagctgcggcgttaccgaggtgcgaatcactgtgattcctaggtgcgaatcatcaccagcaatcactt

SEQ ID NO: 204516 - DNA, 122 bp, Homo sapiens
cagcaggtgccatcactctggatgggccagttctggatgctcccagtggcgcagaggcggcgacactggcaggcgtccggctgccgccacctcccgggtgtggcgggtctggggcccggggt

SEQ ID NO: 204517 - DNA, 122 bp, Homo sapiens
caggggcagcatatcacattccattagtagttatcattttgtaccactcgatgcacgtcccggcaagacagctgctggtcaatagatgtgatcaccagccatggaacaaaaaaggctatttc

SEQ ID NO: 204518 - DNA, 122 bp, Homo sapiens
tgcaccaaggacgccgcggctccagcgcagagcgcacgggaaggccgatcccgccgggcccgctgcatcctgcgtccccgcgcggcgcccaggccccacagacacccccagggcgcgggggg

SEQ ID NO: 204519 - DNA, 122 bp, Homo sapiens
ttcctggggtgttttccttgggatcctttctatgagaaatgtaggccgggttttatttttcgggttcctagtggtgaggtaaggtgaggtgcctcaacaagaaaaaggaccagttttggctt

SEQ ID NO: 204520 - DNA, 122 bp, Homo sapiens
ggcggcgagccgagcgggggcggggcagcaaggactgctcaggggcggggcgcgtgcggacgcagtgacatcaccacgctgccctcgctggcttccctgcaagctgagatgtgggagggctg

SEQ ID NO: 204521 - DNA, 122 bp, Homo sapiens
gtataccaaggcggagttatttggcacacagagagtctaagaaagacccatggccgggcgcggtggctcatgcctgtaatcccagcacttgggaggccaaggcaggtggatcacgaggtcag

SEQ ID NO: 204522 - DNA, 122 bp, Homo sapiens
gtctttgactgtaagctcccactgaataccatcaagtgaagggcagacttctggagcccccgtattttccatggagttcacagatgagcctctttgttggtcctcctgtttccttggggcac

SEQ ID NO: 204523 - DNA, 122 bp, Homo sapiens
gccttaattcaagttcacattatcacttgattggattattacaaaagcttccctaccaatcggtcgctcttacaccctgggcagcctcctccgatggcccactccccgcctctttcactttc

SEQ ID NO: 204524 - DNA, 122 bp, Homo sapiens
gctggcagatggcgctcggcttttacgattgacagcctggctttcaaaaattcacccttgcgccggcgcctaaggcagaacccgcatccccctccctaaatcctccttcccaaggacacggc

SEQ ID NO: 204525 - DNA, 122 bp, Homo sapiens
gttaccttgacactgtttttttttttttaagtaacttttttctccatgctaaactttccacgtcttctatctaaaaggtccccaaaggcaccactatttggtgtgaagattttgagcagcac

SEQ ID NO: 204526 - DNA, 122 bp, Homo sapiens
gccgcccaggttggagggtgtccagtgagcgcctgccttggctggctcctcaggcacacccggggctgtggcctgcagctgctcctgcactggggctgagccagcaaacttccggggctggg

SEQ ID NO: 204527 - DNA, 122 bp, Homo sapiens
ctgtaggtggcgatctctatgtccagggccagcttgacgttcatcagctcctggtattcacgcagctgccacgccatgtcctgcttggcccgctgcagggcggcctccagctcggacagctt

SEQ ID NO: 204528 - DNA, 122 bp, Homo sapiens
atgacaggatcagacacaggctggcagctgcgggctgtaggctaggtgtatgaattttgacgaaagttcttgggtggctctgaggcacatgttgggttcacttgaactcactctttgtccct

SEQ ID NO: 204529 - DNA, 122 bp, Homo sapiens
cgtggattctacccctgttcccagcgtcgctgtcgccgtcctcccaacgcccaagcctggcgtcttgtttgcccttatcccgaggcgaggaagaggcgacccctaatctacttgtctaaagg

SEQ ID NO: 204530 - DNA, 122 bp, Homo sapiens
agcgcatcgccgggacaggccattcattagctgaggggggcggtagggaccctggccactcggccctctccgcgccgcctcgcgcgaagcccggcagcctcggggccacagagtcccctccc

SEQ ID NO: 204531 - DNA, 122 bp, Homo sapiens
cctggcccagcctggctgggtcttggaggagcagattccaaggccaggtggccgcagggacgatgcagatgcagagcccacgtcacatgctcgctccaggggtggggctgggctgactctgg

SEQ ID NO: 204532 - DNA, 122 bp, Homo sapiens
gaggggtggccctgccgcattcactttctttttccccagagccagtttcttctggtcctgcgccttcctctcccttctgccttgtgtttccttctggggaactcgacttcttttgactctta

SEQ ID NO: 204533 - DNA, 122 bp, Homo sapiens
tcgccaggccttagctgtctccccgcggggcagggctcgggacctgcagcctgccatgcccgagccttaccccgcggccgtgggctcctgggcagcccaagcctccctgatgagcactgccc

SEQ ID NO: 204534 - DNA, 122 bp, Homo sapiens
ctatcaccggttctggaccttggcctggatcatcttcccctctgctaataccccctaccccgtccgtcacatcagggaggtgtgccctctagctatccacgccccctccttggtcactagtt

SEQ ID NO: 204535 - DNA, 122 bp, Homo sapiens
gagccaaagtgctcagagaccttctatgacacattagtgtcacatggttgcgtgtccagccgaagcagtgtaataaacatctccaatggccactgaatgggagcagttgttacatgtttgat

SEQ ID NO: 204536 - DNA, 122 bp, Homo sapiens
cgttccacattcaacacccagcaaccactcaaaaactgcattgggccacgtgcggcagctcgcacctgcaatcccagcactttgggaagccgaggcaggaggatcgcttgagcccaggagtt

SEQ ID NO: 204537 - DNA, 122 bp, Homo sapiens
gcgcgggccggtccgggtggggttctacgacatcgagggcacgctgggcaagggcaacttcgctgtggtgaagctggggcggcaccggatcaccaagacggaggtgcggcccggggctcggc

SEQ ID NO: 204538 - DNA, 122 bp, Homo sapiens
gagtggagtcctaggacatcagatcctaaagggcttgaataccgtttaaggcttttcttccgggagcaagtaggagccaaagaagggaagttgcgggacttgttttcgtggggccagttgcc

SEQ ID NO: 204539 - DNA, 122 bp, Homo sapiens
cagattctgattcagtaaacctgggttgggagcctgagattctgctttttaacaagctcccgggtaatgttgctgctgctggtcctcattgagtagcaaggatttagatcacctgaggagtg

SEQ ID NO: 204540 - DNA, 122 bp, Homo sapiens
ccctgcgcgggcgccgcaccccgcccgaggcgcgctccctgccggcggggcgacccgccgcgcccgggtatccaagaaactacaagtcccgaaaggcatggcggggaggtggcgcccagggc

SEQ ID NO: 204541 - DNA, 122 bp, Homo sapiens
gggccgtgaagggcgggtcgccagccccatcccccaggtctccgagcggcgaggggactgcgcgggtccccggcacccgatccccccgcccccggccgggccccctcacctcgcgacacgca

SEQ ID NO: 204542 - DNA, 122 bp, Homo sapiens
atgggaccctttcctgtgctgaacccggcccacagagtgggggaaggggcagatccacagcgtttaggcttatcgatctctggtctttttaaatatctcctggcctggccacctcatactcc

SEQ ID NO: 204543 - DNA, 122 bp, Homo sapiens
cgtggcaggcggcctccgggccaggcccaggtagtaggtgagccacagctgcagcgtgagcgtgaagaactcatcaaccagagccaggttgaacaggtagagaagcagggcctggcccaggc

SEQ ID NO: 204544 - DNA, 122 bp, Homo sapiens
aatgacctggcggacaggtgggagccacagcgtacaccccagggttccctctgtgctgtgcgtagtgcctactgcttgcttccaggttaaatttctgtagctttagaggacaggagacttca

SEQ ID NO: 204545 - DNA, 122 bp, Homo sapiens
ggccggggccagcggggggctccagccgcaccagctgagcagctgcgatggggagctggccgtcgcccccctgccagagggggacctccccgggcagttcacacgcgtcatggggaaaggta

SEQ ID NO: 204546 - DNA, 122 bp, Homo sapiens
tatttcaataaagctgatatgagatatacttcacatatcatgcagttcacccattcaactcgtttcgagtggacagttgagtggtttttaggacattcacagataggagctgaggtcaatat

SEQ ID NO: 204547 - DNA, 122 bp, Homo sapiens
actctcaattctaatcaacacaggtgtgggctatggttctgagacaccattcatctcacacgaggtacggcgatacgcgacaccacccagtacaacagctctctctccacctggaacccgga

SEQ ID NO: 204548 - DNA, 122 bp, Homo sapiens
gtgctgtggagcaggggtcagcacaggttggggaggctcaggcagcacaggaacccatggcggggtgaggtggggagcgggagaggggaggaggctcaggcatggcaggctgcaggtcccca

SEQ ID NO: 204549 - DNA, 122 bp, Homo sapiens
gctgcccagccgcgccgagagggcggtgagtggctcccaggtggctgtccccaagggccacgttgaggcaaaacagtctggggtgctcgagacctggctcactttgcgaagtctcacgctgt

SEQ ID NO: 204550 - DNA, 122 bp, Homo sapiens
cgtgcggcatgtggcaaacctgaggggtgactccaagatgcttcactctgtgtgctggaccgggaggctgcccctggcagctgagcctgcaggcgctctggccaaccacccggggtgagccc

SEQ ID NO: 204551 - DNA, 122 bp, Homo sapiens
ggaaagctgggtccagtctcgcccatctgcaccagaggtctccagcgtgactgcagtgggcgccctggctaaaaccaagctctgtttgtgtctgaaaagcagggagaggcacttcctggctc

SEQ ID NO: 204552 - DNA, 122 bp, Homo sapiens
aaatggctctcagtcctcagattgtccttgcatcttgttaaaaccctatctctccagtttcgtcattgctcacactttcatagctgttattatattcgctctttgaaaaccacagaatgggt

SEQ ID NO: 204553 - DNA, 122 bp, Homo sapiens
ctcagcttgcagaagctgctggataccttgggactgactggccatttctgttgttatggccgatgctgttttgaatgctgtcaaagtaccagatggctcccaccccccaccgcttacttctc

SEQ ID NO: 204554 - DNA, 122 bp, Homo sapiens
acaacctcagagaggttaagtcacttgcccaaggtcacacagcgagtctcaagccccagccggtgagcatcacgatcctttgccaatgagccgatgctcgagaaagggtcggatagacaaca

SEQ ID NO: 204555 - DNA, 122 bp, Homo sapiens
aggaagggagctttagcacaagtagctacatagtgttcaaggatcagctttcttgaactccgaggcttggttgcctttgctgaactccaagttagtggattgcagaatggaaacttggcttt

SEQ ID NO: 204556 - DNA, 122 bp, Homo sapiens
cgaccgaacctgcatccctagctccgccttcccggtccctgcacaccccggcagcttccgcgcgattcttcccgcccccgacacccgccgccacacaaaggcgctgcgtcctggcggccagc

SEQ ID NO: 204557 - DNA, 122 bp, Homo sapiens
cacctgtcgccccagcggggactcccaggactcagttaggggccaggagtcacgtgggcccgggcattcagccgcgatccaggtcctagtgggctgacgaggggcccacgctgcgcttacct

SEQ ID NO: 204558 - DNA, 122 bp, Homo sapiens
gatttttagtttgctgacaaatctcttttgtctgctgacaactacttctatgaatctttccgcataccagaccctgacaaaattcacccatatactaaaggtcccaataagaaactcctagc

SEQ ID NO: 204559 - DNA, 122 bp, Homo sapiens
agccctgcccacatgacaaagcaggcgcgagagcagcgagatggggacccaggccgacctcggcccccgacagagccggcagggagaaggacccaggcccacctcggcccccgacggagccg

SEQ ID NO: 204560 - DNA, 122 bp, Homo sapiens
ccgagtgatttgctaaggcacacatctgatctttcacttcctgtttaaaattatttagtacgtcctctcccaagctcctcagcaagaaaggccttccatgcctaggctcctatcacattccc

SEQ ID NO: 204561 - DNA, 122 bp, Homo sapiens
aaagtaacaggaagtttcacacatgctgagattgagctgaagcaacaccactctgtgtctcggaggccttcgggaaggctagggagggttttatgcctgtacaaatgtttcagccaaatatc

SEQ ID NO: 204562 - DNA, 122 bp, Homo sapiens
gcactggccgtttgcttttgggatttctccagtgcagatgtagtcagggggccgctgtcccgggggacaatgattccattggaagctggcctttgacaagacacacacatgacctttgacta

SEQ ID NO: 204563 - DNA, 122 bp, Homo sapiens
accttagacctgacatctggctatcacacagacagaatccaaatgcatgtgcttgttctacgaaccccgaatgcgttgtctttgtggaaatggaacatctcctcatgggagaaactctggta

SEQ ID NO: 204564 - DNA, 122 bp, Homo sapiens
aaagtttcccatctttgtgcagctacctccgcattgctgtgtagtgacccctgcctgtgacgtggaggatcccagcctctgagctgagttggttttatgaaaagctaggaagcaacctttcg

SEQ ID NO: 204565 - DNA, 122 bp, Homo sapiens
gcatattgacacttcagttatcaacaactgtttttatctgctgggagggagatcgcagctcgtggggccggagtaagccacaaatcactgccgccgccgcctctctgcattctcttaattgt

SEQ ID NO: 204566 - DNA, 122 bp, Homo sapiens
tcgtcaaacctgtgacctcacaggtgtcactgctggggatgaggccgaaccagggggccacgtcaggcccgcgtggttctggagaactgggctcggtgagtgcaggtccaggtggacctctc

SEQ ID NO: 204567 - DNA, 122 bp, Homo sapiens
ccgtctaaagccacatacaaaacagtgtgttgctgcacagttagggttgaggaaatctcacgaaaataacgcaaaacattcagagagggtttctctttcctgaaatcattattttaattttc

SEQ ID NO: 204568 - DNA, 122 bp, Homo sapiens
tgagtcattctaacttccatcctgctccgctgcggatgcacatagctgctttcctaggggcgagaggagatgaggggactgggcctgatgaccacaggcgctgccccttcatagcacatttt

SEQ ID NO: 204569 - DNA, 122 bp, Homo sapiens
ctgcccccgtaaggatggttcagcccggtattgaggctccttgagctggctggatggttgcgcccgccctaccccggaatgtgggcctttggagcgagcgaagtgggagggaccgacgcagg

SEQ ID NO: 204570 - DNA, 122 bp, Homo sapiens
acgtttcactcctctcccttttcctcctcagctccggctccgccgccacgattggccagccgaccacccggcctcggccaataagcgccgccctctcgcccccgtgttactgggtagaagaa

SEQ ID NO: 204571 - DNA, 122 bp, Homo sapiens
tgatgggctatttcagaccaaactaaacagcacaggacctgcgcttctggctggggttgtcgctgtgcccaaggagtgttgctttggggacagtcatccaggacggatcccctccctcctcc

SEQ ID NO: 204572 - DNA, 122 bp, Homo sapiens
gggtgcctgccaggagcagggcccaccggggggttgctaggaccaggcctttctggcagccgtggcgtgctgcctggcggagaccgcgaatggatcacactcggcttggtctttggccccca

SEQ ID NO: 204573 - DNA, 122 bp, Homo sapiens
aggaagcagtggaataatcctccatggcacaagggagcggtggaataatcctctgtggcacgcgggggggggtgtggaataatcctccgtggcacgagggggtggtggaataatcctccgtg

SEQ ID NO: 204574 - DNA, 122 bp, Homo sapiens
gcggggcggttgtatatcagggccgcgctgagctgcgccagctgaggtgtgagcagctgccgaagtcagttccttgtggagccggagctgggcgcggattcgccgaggcaccgaggcactca

SEQ ID NO: 204575 - DNA, 122 bp, Homo sapiens
atgctctgggcctgttttctattagaatgaccatcttttcatgctcaggatttaaccctccgggaacttctgaatgtgtgttgcaacttaaaagacatattatttcacaacatttaaggagg

SEQ ID NO: 204576 - DNA, 122 bp, Homo sapiens
gacagtaattaggttttgtcatgaattaaattatttgaaagcaggctatctccccaatcacgcaatttacagcaagattttttttaatctgtgctacagaagggagagagatagaaaatagc

SEQ ID NO: 204577 - DNA, 122 bp, Homo sapiens
cagggctaggccgggcggatggagggggtccccggagcccgggggaagtggcgcagtgggcgtctgcatcggcccgaaggcacttgcgcagaggtccggcaggcagcagagcaccttgtggg

SEQ ID NO: 204578 - DNA, 122 bp, Homo sapiens
cagtggtagggggataagttcttttttaagtattgtgaaatcatgtctaaacagaatcatcgctaggctctagtccacagcttttcattgtcttgggatgcctactcattgaacaccacccc

SEQ ID NO: 204579 - DNA, 122 bp, Homo sapiens
tcactagggagtgccagagagtgggcgcaggtcagtgggtgcagcgcaccgtgcgcgagccgaagcagggcgaggcattgcctcactcgggaagtgcaaggggtcagggagttccctttcct

SEQ ID NO: 204580 - DNA, 122 bp, Homo sapiens
gagcccggatcctcacaggggcggggcggcccgaagcgccgctgcagtccggcgggcgcccgcgagggcgcgagtgccctccgatctcttgcccactgtccggctccacccccctatgcccg

SEQ ID NO: 204581 - DNA, 122 bp, Homo sapiens
atctaagtgtaactcaaaatagaagagagacattctttcccactacgtggcagagcaaggcgtatctgtggtctcttgtgggtgtctgattcagctacaagagatcacagtggttcctaaca

SEQ ID NO: 204582 - DNA, 122 bp, Homo sapiens
cattcccgcctagaatagatcttcccgaaggtttcgcagacagaccagaggggaccgagccgggaaggcgagacagggacaggcgagagacgctgctcccaactcgcagagggagaaagcgt

SEQ ID NO: 204583 - DNA, 122 bp, Homo sapiens
ctccacgctgccctatgtcgtcctgaccatcttcctcatccgaggcctgacgctgaagggcgccaccaatggcatcgtcttcctcttcacgcccaacgtaagtccccgaggctgccctgggc

SEQ ID NO: 204584 - DNA, 122 bp, Homo sapiens
tggaggcggccggggccgagggggtgcgggcgctgggggctccggatacagcctctgctgcgccgcctgtggtgcctggtctcccggccctagcgcccgccaaacctggtggtcctgggcgg

SEQ ID NO: 204585 - DNA, 122 bp, Homo sapiens
taccccttacccctgtcttacactgaggatcgaatggctgggaatatccgtctccccacgcgggctgtgggcctccgagggcacagacgctgccgtattttccctgctagcgtctagacaaa

SEQ ID NO: 204586 - DNA, 122 bp, Homo sapiens
tctaaggttccttaggagcgtaaaaggcacagcgttttctgatcgcagcttcaggtctcccgcccctgtcccggtacctctcctgcaggacggaactctgtgggaacgctcgttgattctga

SEQ ID NO: 204587 - DNA, 122 bp, Homo sapiens
gccgggactcaccgacagctcgctggaaacgaggcatgtggaaattgggcctcgctgaggcgcacataaggcccgggccgcgggtagaccgtgggcgctgaggccctgcgctgcccagcccc

SEQ ID NO: 204588 - DNA, 122 bp, Homo sapiens
tgcctttggttacagtgcccatggccataagggagaaagagcaccagaccatctgaataacgtgaaagtggacacaggaaacaccagacacccagagaaatggagtccaaatgtgagtactt

SEQ ID NO: 204589 - DNA, 122 bp, Homo sapiens
agctggggtggagacgggagccctaactcccggggcgggggtctcgccagcaacaggtcacggccccgttgatgcaactgcatgccatggttgccagagaatcctaggtacgcccggaccct

SEQ ID NO: 204590 - DNA, 122 bp, Homo sapiens
ggtgggattacaggggcatgctgccatgtcctgctaatttttttgtattcttagtagagacggggtttccccacgttggccaggctggtctcgaactcccgacctcaagtgatccacccacc

SEQ ID NO: 204591 - DNA, 122 bp, Homo sapiens
aggagcccggcgagtgttcggcctcggtttctgaggtttcggcgggagcggtgatgcagacgccttcagggcccgggtcgtgtccgtgactcgcgcaggaaggcggatggcgccccccgggc

SEQ ID NO: 204592 - DNA, 122 bp, Homo sapiens
gaagggaaggagggctttgaactctgactgcggtgtggaggctgttatcaggggcccagccgggcagccaggagggaagaatggccgctgccctgcgatggccttaaccgtgagcccccgcc

SEQ ID NO: 204593 - DNA, 122 bp, Homo sapiens
cacatcttctgtcactcagggactgaggaggcggggccttaagcattatccaatcagggacgctgggttggaaaccgtccaatcatgcaggcagctggagcgaagaggaaggctttcgggtt

SEQ ID NO: 204594 - DNA, 122 bp, Homo sapiens
gggcagggccccgggcttggtgcccccgggcaggacggcggccgctgcagcccgggcagccggatcacgggcttaaagttggcccgcgcccgagccacaaggcctcctccccagggcccgct

SEQ ID NO: 204595 - DNA, 122 bp, Homo sapiens
ctagcaacggggcccagcgcgccggaagtgatgccttccaggttggcttggctgcggaagcgactcctgccagggcggggtgcggcacgggagggcggggagcgcggcaatttccgcttccg

SEQ ID NO: 204596 - DNA, 122 bp, Homo sapiens
tcctccaccttacctgctccagccgctgtgacatcacgcaggttccgttccctgcactaccgctggttatgtttccttagtgaccctaggcctcttgcaggagagtccctggtcccagccag

SEQ ID NO: 204597 - DNA, 122 bp, Homo sapiens
tttggaatgacttgcttgcataccaacttgtactcctggagcctgagcccacttcctccccgctcctatcagattttgctttatctgcacagtgggaagctggcatgctggggaaatccagc

SEQ ID NO: 204598 - DNA, 122 bp, Homo sapiens
aacagggggtgaatgatttcaaaagcggaattcagaatttcaggaagagtagcacaccaccgagtagagggcctccccctaacaccccccttttcatcattctcccctcctcagcccagccg

SEQ ID NO: 204599 - DNA, 122 bp, Homo sapiens
ccaatcacaaagtcaaactagtgccccagaaggcgggacgagtcgccttaacaaccagagcgtctgccacagctcccgaacaggagggatggggagtggcttttcctgccaatccgcgggct

SEQ ID NO: 204600 - DNA, 122 bp, Homo sapiens
ggtttcagggaggtgctaggacatgagcgaagccttatgttggtgggtaagattttacaccgatacattccgtatgaaagtggggtaaagccttgggctgagctgacttagctctgcaatgg

SEQ ID NO: 204601 - DNA, 122 bp, Homo sapiens
gcagcaacagcagcggcagcagcgggggtcggcgccgggggccccagcgcagctgcacggcgtggagaggggactctggcgtccggctccccatagcgcccgctcttccctgtcctggggcc

SEQ ID NO: 204602 - DNA, 122 bp, Homo sapiens
tgcggaaacggaggctccgagtggagatgggacttgttcaaggccattcagctggtataccgcagaacttccaacagtcggctgtgcaggtagtgacctcagccagccccgcgaccgaagta

SEQ ID NO: 204603 - DNA, 122 bp, Homo sapiens
gccatccaggcttggctaggattgccggcctggggttgaggcgctcgcagtggtctcttccgggccggggtggatccgggcctctccagcgagtgggcggcgtgcagcctcgtctgggcttc

SEQ ID NO: 204604 - DNA, 122 bp, Homo sapiens
tatcttgatgatgttgctcatgggataatgactttccaaactgaacatttcacaatcagccgactttatacttagttcatgtgtatacctccatcaggaaccgagggcaggcctaaactcca

SEQ ID NO: 204605 - DNA, 122 bp, Homo sapiens
gtgatgccttccaggttggcttggctgcggaagcgactcctgccagggcggggtgcggcacgggagggcggggagcgcggcaatttccgcttccggtccgtcgcctccttctgttgcttccc

SEQ ID NO: 204606 - DNA, 122 bp, Homo sapiens
aaaggctgacctagggcctgaatcacatggtttgacttttgctaagccccggggatggcgcgtgtcaggcccagagtgctgatgccagcgtggatccgagccaggcctcaggggactggcgt

SEQ ID NO: 204607 - DNA, 122 bp, Homo sapiens
aaaaacctagcccctcggtgtccagcgctcagtgcaatgcaccccttttcccaggctccccgccagatgggcaatccccaggtgcgagagacctcctgaaccccttttgccgccccctccgc

SEQ ID NO: 204608 - DNA, 122 bp, Homo sapiens
aagatgctatgggtggggctcctggtgaccttatagtgtggggaagatgggtggggcttccgtgcgtgagctctctccaaaactggtgggggagaagcaggaacagaatgagggttcggggg

SEQ ID NO: 204609 - DNA, 122 bp, Homo sapiens
ctgcctgccacagcctcctcccccttcacaatcacaatggcttagaaagtaatgccgtttcgatagcaacaaagcaccaaattgtacaaagcagggacgacactgtgtgaggagccattcca

SEQ ID NO: 204610 - DNA, 122 bp, Homo sapiens
ctcggggtttctcagggctgctgcgtttcacctcctttaacgcggaggcgcggagttgcacgtgtgggtctcagtggagccgccacaggtcttattacacaacaaagggcagggagggcaag

SEQ ID NO: 204611 - DNA, 122 bp, Homo sapiens
agaaccccctcaaagtgtgcatgtcaattgcttcccagtactctggagatgcttttttgtcggaggtccacagactaatggcagcaactcatccttctagggggtatcacaaacacgttatc

SEQ ID NO: 204612 - DNA, 122 bp, Homo sapiens
agagaggttccgcagccccgggaggacccgccatagagcagaggctccaggaggccagagcgactccgccaggctccgcgcactttctgtgcgtccgttccaccgtccggatccccgccaca

SEQ ID NO: 204613 - DNA, 122 bp, Homo sapiens
ttccataaacacagaatcgcatgaacagcaaacagagagggcctggaggcggacgcagcacggagccaggtcgctgtgagccaggctctgtcgctgcctctcgggcctgttatttattggcg

SEQ ID NO: 204614 - DNA, 122 bp, Homo sapiens
tcggccgggagatgccagggcccgtgggtgccgcgtggccgacctggggtcagggtgctgcggccgagtgggggtgcgctgtgcgctcatgttgtgtgcttggatgtgggaggacgggggag

SEQ ID NO: 204615 - DNA, 122 bp, Homo sapiens
gcagcggcactcaacaactaggtgtggtctagagaccaattacaacctccgcgtggtccccgagctctcagggagctgcgcacaggcgttcctagcccaggcggggcgctggcaaccctgcc

SEQ ID NO: 204616 - DNA, 122 bp, Homo sapiens
taaagaggcacctcccgctttgctttctttcccgatcacttctatcagaagccagctctgcgtgctgagggtctggcgagagcctccgtcatctggcggctgggagctgtaataaagagcag

SEQ ID NO: 204617 - DNA, 122 bp, Homo sapiens
tagctcaatatatcctctggggaccatcaacatttcctattaaagataactacacctggccgagcgcggtggctaacgcctgtaatcccagaactttgggaagccaaggcgggtggatcaca

SEQ ID NO: 204618 - DNA, 122 bp, Homo sapiens
acaaatccgaggtcaggctcgttgaagactgtgttgtggttcctggccctgcttcaggggcgatgtagtctagcgcgagctgccatgcagggcacggagcattcgcttttgtctcgacatcc

SEQ ID NO: 204619 - DNA, 122 bp, Homo sapiens
ctttggggaatggaggtaatacttttgcttggatgtgtgtgtgcctgcaaactcttcaaacgcagggactcagagtacagggaggtaagagaagggtgtgccccagtgggaaggaccttact

SEQ ID NO: 204620 - DNA, 122 bp, Homo sapiens
tctcattgtgattgtggaagaagctcatgtaaaatgatagtcattaatgaggaagtatggcgtggtacttattctgtaagttcagagtatgctgagtgttaatagattatcatattgcctga

SEQ ID NO: 204621 - DNA, 122 bp, Homo sapiens
gccgggctacagcactgttgtgagaatgcagatgaggttgtaaaggtgaagcacgtgtcacgcttctctcaataaagccatcattgctgttaggattgtcattaggaaaggctttgggccgg

SEQ ID NO: 204622 - DNA, 122 bp, Homo sapiens
cactgtgtggtactcctcacatgtgttgtcctggccataccacctgcggggatgggagggcgacaggacgcatgagggttccttgtggcccccagacctcaccatggcagcctcagggtgca

SEQ ID NO: 204623 - DNA, 122 bp, Homo sapiens
gggctttaagacttgcccatggccccacacagggtggggattcccacctgctttgccaaccgctaagcccatgctccaagcactgcaccccgtccacaaggtcagacgggccactcctcggg

SEQ ID NO: 204624 - DNA, 122 bp, Homo sapiens
tggggactcggcctctttttcccatcttctggaggaaccgccgaccatagcagaggggagcgcgtgggaagtcgccccgcggggcagccgcacatctcagagacctgcggggggcgcggggt

SEQ ID NO: 204625 - DNA, 122 bp, Homo sapiens
gctgctggagtacgagggagccaagaagggctccaaggacctctgcctcttctctgagctcgttcttaggcccctctgccgtctgcacgctcctttccagccacccggcctcccgatgccgg

SEQ ID NO: 204626 - DNA, 122 bp, Homo sapiens
aaatggttgaggaagatggaacctcctaacgaccattgttcgggggcaggagtgggtgcccggaagcatgggtggtagtaggggacccacagctgcagctggcctgctgggcttctgttcga

SEQ ID NO: 204627 - DNA, 122 bp, Homo sapiens
tctgcatagatcatttttcactgtcttccttttccactgtaagacactgcaattctttgccgcatctcaaaagaggagactcttctggtggctcactctaaaatctagttcatggggattac

SEQ ID NO: 204628 - DNA, 122 bp, Homo sapiens
tcccagacgagtggccctgagacttggggctgaacgcgcgagcacggaaagaaatcccaccgtaggacggaacccagtctcttcagctccatcctaaacttcgcaagttttctctgagtcta

SEQ ID NO: 204629 - DNA, 122 bp, Homo sapiens
gctttcctgggggctgagccactggtcgcaactgcagaggccatgagagcctggagggagcggcccccacacacaggctgcgaggaaggggccggtgcgtggccaaggccggctgcacggtc

SEQ ID NO: 204630 - DNA, 122 bp, Homo sapiens
gccgcccccacgactctcctcctgaccctacccgcaggccccgccccctctctgcccccgcgcactgccctgggcccgccccgtcttcagtccaggcccggcttccgcacggtctcccggca

SEQ ID NO: 204631 - DNA, 122 bp, Homo sapiens
gtttgcataagtacactctatatttgtgtgatgacaaaactgcttaacaatgcatttctccgaacatagcactatcattaagcggcgcatgactgtacttggtttgtatttcaatcccatac

SEQ ID NO: 204632 - DNA, 122 bp, Homo sapiens
gtgtgattggttggctgtggaggcctcgcaataaaacgtgaattcaagcttatgttgcgtcgttatgaaaccttcgggcgtaggctccgcctgtggtcggagtcagcgcacctgcgcagaac

SEQ ID NO: 204633 - DNA, 122 bp, Homo sapiens
tccccagcctaggtgacagagtgagattcagtctcaaaagaaacaacccaaacaaacaaccgcatgctctctcaaagtctcaggcatactatgctaatgtcaggtatttagcatacaaatga

SEQ ID NO: 204634 - DNA, 122 bp, Homo sapiens
ggccgcgcccttgggcttcctgccttgcaggacctgcctggaggttctccctgggggtggcgggagggggaggcttgaccttttgtcctgaccaggtgggctggaggggacaagccctatcc

SEQ ID NO: 204635 - DNA, 122 bp, Homo sapiens
ggttccaggctgcacagtccctggctcctgactcctgccgggcgcagtgactggaggtttcgggctgcatggtccccggctcacaggagaccctgctgggtgtttccttggtgcagtttagt

SEQ ID NO: 204636 - DNA, 122 bp, Homo sapiens
aggtgcacgtgaattcgggtaaggctagggtccagtaacctttctgtccacatcccagcccgttagcctgggtcctctggaagggggtgcgagtaggtgggggcgtgtggagcttccatggg

SEQ ID NO: 204637 - DNA, 122 bp, Homo sapiens
aacaagaagaagaaagaaagaaatcccacagaaacagataacctaacacagcccgtgcaacgtattttatacaatgctctgaaaatcatagtctcaatctagacagtcttttcctctagttc

SEQ ID NO: 204638 - DNA, 122 bp, Homo sapiens
gcagatggggagaggctgggcagttctcagcacagctggagcatctacctgtcaccacctcggagcctcctggccccgtgggggcggccctgggagcagggtcggcagtgaagagcagagaa

SEQ ID NO: 204639 - DNA, 122 bp, Homo sapiens
ggcccccgagtatgcatcaaagcctgacaccaggtagggagaagcccagctcagcagagccgctcttggccacagctcctactgcctaaagaagctgttctgagacccccgacacaggcttg

SEQ ID NO: 204640 - DNA, 122 bp, Homo sapiens
agggtgattctggatgaacaaaggctgtgtaacccttcatctccatccataaaagatgttcggatgtgtgagtttagttatgtgaattctgacccagcttccccctactgcactccagagct

SEQ ID NO: 204641 - DNA, 122 bp, Homo sapiens
ggtttcctcatcacccaccatctactcagatgagaaacccgacgagaagtggatcctgttcgatggccccgtggacacactgtggatcgagaacatgaactccgtcatggacgataacaagg

SEQ ID NO: 204642 - DNA, 122 bp, Homo sapiens
agcaagctggagggagctaggttgttccatcaaatggggaagcagtcatatagcagttgtcggcatgaaggaacgggatccagtgttgccacttttttcaatttttcaagagaaactggaca

SEQ ID NO: 204643 - DNA, 122 bp, Homo sapiens
aggggaggcaccctgtcgccagaacccccccgcagctaccaaggcaggcactgtgccaagcgctttacggcattggctcattgaatcctcatgaaagtctctggagggaggtactatcatct

SEQ ID NO: 204644 - DNA, 122 bp, Homo sapiens
cttctctgtggagggagccaaggcaggcaggtacccagcagcggcagaatccaagggtgacgagggcccaggaaggctgacaggcagattctctaagtacgggttaaagggcgggcatggga

SEQ ID NO: 204645 - DNA, 122 bp, Homo sapiens
agtttctgatgcagtagaaataggatgggacctgggaatttgcatttctaagaattacctcgtggtgttgatgctgtgagtacaagaattgcactttgaaaccactgtcctacagcatgtta

SEQ ID NO: 204646 - DNA, 122 bp, Homo sapiens
aggcatgagaaggtagcactatcctagatgccctaaaaattgttccttgtcacttttttccgactgaattcagaggtaatttggggactgtgtctaaaatggtcttatattcatgtgccata

SEQ ID NO: 204647 - DNA, 122 bp, Homo sapiens
agcccgcgcgccggggcgggacctagcgggggcggggtccgcagtgattgggcgtaggagcggggccgccagccagagctgggctgcagggccgcgcaggtttcacttcgctccgcgcagcc

SEQ ID NO: 204648 - DNA, 122 bp, Homo sapiens
attaaatttagcccctgccttcctctcctaaaagtggatctgtgttgtccaggtttctgacgctccccctcctctcctggaagtcccctgggcaagacaggagtaagtgcagtggtcgagat

SEQ ID NO: 204649 - DNA, 122 bp, Homo sapiens
cagagcaggcaaccttccagggcttcccatgccaccctgcagcaccacgggctctccccgcgtcctgccacgtgtccagcatcacaggaaatccggcctcctgcgcccttacccgcttcgac

SEQ ID NO: 204650 - DNA, 122 bp, Homo sapiens
gcgtggctagaagcagaactgagggcagtgctggtggaaagggggaggaaagagcgcgcccggcaccgcacccccaattaggggctcgtctagtgaattgggggtattctccttcgaatgag

SEQ ID NO: 204651 - DNA, 122 bp, Homo sapiens
cacctcaaaatttctgaaagcaaccaccagacaggtgttgcccctagaaccaggacgaggcgctgtgtgtggtggggaggactctcggggtctggccctctacaggcctgcattctcggacc

SEQ ID NO: 204652 - DNA, 122 bp, Homo sapiens
tctccgggctgtgccctttgagcaggagtccaagatcatgtttgtggtcaatgcagtgtacgccatggcccatgcgctccacaacatgcaccgtgccctctgccccaacaccacccggctct

SEQ ID NO: 204653 - DNA, 122 bp, Homo sapiens
accgggaggccattttgcgcgtgcgctgctcgcctcgcgccgccctcggctctgcggactcggatcccgccaaatttgaacgcgagattgtcaggccctgaggggcttgaggggcgggggaa

SEQ ID NO: 204654 - DNA, 122 bp, Homo sapiens
gcggggccatccgggagctgcccgcctgcttcgcagttggctttccgggccctcgagcaacgtctgactttgccctttgtttttaaacaccatgcaggatggtttgtgtacaaacgaagccg

SEQ ID NO: 204655 - DNA, 122 bp, Homo sapiens
ggaggtagggagggagggaggacacacaagcagtcctagtgagaaaagcactggcggcatcgatgtccacatgagatgatgttgttctttagctgccacaaaacagcatttgccctgaggct

SEQ ID NO: 204656 - DNA, 122 bp, Homo sapiens
ctgacactataaattgtacattttcatactgagaaaagattagaaggttgatgtagggtacgcatgtcttaaccatcaactcattcacaggcactttgttgtatggcatagggaagagccct

SEQ ID NO: 204657 - DNA, 122 bp, Homo sapiens
aggccggggttgccaagcaaccggtaaacgccgccgtttgaggagcaccggagccgcgaccgtggattgaacgcttccccagagacccagaagcagaaggagcggacccagggtaaggggcg

SEQ ID NO: 204658 - DNA, 122 bp, Homo sapiens
gagaggccgccccctgccgcccggaggccgtcagcctcccggccccgccccggaggcctccggtcgcctggctccggccccaccccgccatcccctggccctggctgactcgccacccccga

SEQ ID NO: 204659 - DNA, 122 bp, Homo sapiens
gtggctaatctagcgagggacctagggctgggggtggaggagctgtcttcacgtgaagcccgggtagtgtctgatgataataaaaagtatttgcaccttgatttgctgactgggaatttgct

SEQ ID NO: 204660 - DNA, 122 bp, Homo sapiens
tttccagatccttattcctcttccctccaggtcatgccctggcccattcttgatcaacttcgagttacagaatcagctctctcatacaagcattctgaacaggtcactggggtatggtagat

SEQ ID NO: 204661 - DNA, 122 bp, Homo sapiens
ccacatagtcaaatcatctcgaaactttccgcagcttctggtagatgaggaatgtgactacgtagcgcctaccgccccaaatgctattataaattccaagtcggcagggtgagcttttccgt

SEQ ID NO: 204662 - DNA, 122 bp, Homo sapiens
cttccccatcccacctccacctgtcaaatgagtgagtcgagggctcagtgccaccgcgtgcgcagctcaggtgcaggcacaggtggggcagaaaagcacaaggcatttatttggtccttgcc

SEQ ID NO: 204663 - DNA, 122 bp, Homo sapiens
tggtggtagcggtggccgcggtctcctgcgtcttcctggccttcgtcatcttgctgctggcgctcaggctgcggcgctggcacaagtcacgcctgctgcaggcttcaggaggcggcttgaca

SEQ ID NO: 204664 - DNA, 122 bp, Homo sapiens
gcgttaagtctgagtgccgctttgagttgttgaatgaagtgaacttcatttgtcagcgttcggtacgcagtctaggcagcgcccttcctgtacctctcttcctttcctgagtcgttggcgca

SEQ ID NO: 204665 - DNA, 122 bp, Homo sapiens
ctttatctggggcattcttagtgtctggaaaggaaaaacttcagagagttcaaatgtacacgagcacaaatgagaacagaaaacaagacaccttttctggattgctttggtatgtgtaccga

SEQ ID NO: 204666 - DNA, 122 bp, Homo sapiens
gcagcagcaagcggctggctgccgggccctgggggagcgcgggcgcgcgcgcggggatggcgaggtaggatggccacccagcgcgacccccgccgccccaacccagcggcccctgggcggtg

SEQ ID NO: 204667 - DNA, 122 bp, Homo sapiens
tcatgcaaagtactgagtgtggccattgcccaataaatacttgtcttttgcctaacatttcgtttccctaatctccttgaaagccaagtttaaatgcgtccttttcctgaagtcttccccaa

SEQ ID NO: 204668 - DNA, 122 bp, Homo sapiens
atgtgggcgaatcacctgaggtcaggggttcgagaccagcctgaccaatatagagaaacccggtctctataaaactacaaaattagtgtgtaggtgtggtggcgcgtggctgtaatctcagc

SEQ ID NO: 204669 - DNA, 122 bp, Homo sapiens
ttccgggggctgaaggcacaggctgaatctgttgcggcagctgaggctacaacaggcctgcgccggcggcagagaggatatcttgggcgggggatgtgagcgctgagcccttggcaggtact

SEQ ID NO: 204670 - DNA, 122 bp, Homo sapiens
ctctctccactcggactaattcgcctcctccgcccccagcgcctcataaacacctccctccgccagatccctccgccgcatccagataacggaacatcgcaaacgagtcccggccaaccccc

SEQ ID NO: 204671 - DNA, 122 bp, Homo sapiens
gcgctggttgcagtttgaaagaatctcccaacggggttcacagtacaacctcggtggggacgaacttccttggccagggccggggcggggagggtgaaaagcgggctgcaagtgcaggagcc

SEQ ID NO: 204672 - DNA, 122 bp, Homo sapiens
ttgctaaaatccgacggacttgttgcagaactcgttttttttgtcgggaaagggcttccccgtgtaactttacagcagttatcgtagataagacttgcaaattacagatgtggacggtgagg

SEQ ID NO: 204673 - DNA, 122 bp, Homo sapiens
gaatttatgcattttccagacaaaacgtgctttcgcagagaggcactgggtcgtcctcaccgcagtcaagtatcgacagtattgatcagacgctccccggctaacaggcaccaatgagtctg

SEQ ID NO: 204674 - DNA, 122 bp, Homo sapiens
tagaatatacagcaccaagaatgggccctaatgtaaactatggactccaggttataatgacgtgccaatgtagattcatcagctgtagcaaatgaaccactctggtggaggatgttgataat

SEQ ID NO: 204675 - DNA, 122 bp, Homo sapiens
ctcgatctcctggcctcgtgatccacccgcctcggcctcccaaagtggtgggattacaggcgtgagccaccgcgcccggcgagcatccaagatttttgcattaattttgattgttttaaaat

SEQ ID NO: 204676 - DNA, 122 bp, Homo sapiens
gtttctttctgggccccatgccccagtgtcttagccctcattcccgagccccgcctgccgcggccgcacctggtccgagtcctcgttctcgctgctgtagcagcaccccatggccggggtcg

SEQ ID NO: 204677 - DNA, 122 bp, Homo sapiens
tcgatacagctcctggctgaagaggtcatcagagcagcagctgtccccaggccagtgtcacgtcactgcgtacagttcctcccgatcgttcttgcagatctgatagtggcaggggaatttct

SEQ ID NO: 204678 - DNA, 122 bp, Homo sapiens
gccacaacccactggccgacctcagtcccttcgctttctcgggcagcaatgccagcgtctcggcccccagtccccttgtggaactgatcctgaaccacatcgtgccccctgaagatgagcgg

SEQ ID NO: 204679 - DNA, 122 bp, Homo sapiens
gcaaagaaagcatcaaagtggcgggtcgggccctaaacccacgatgggagataccacattcggccacaagagggcgcgtcacattttctccaagagaagctgggccgctgatgaaggacggg

SEQ ID NO: 204680 - DNA, 122 bp, Homo sapiens
agccagagtgacaaaacacccccaaaataagaacaccccagaactttagtctcctgtcctcgcggccctcaccttgtttctcccctggggaaaaagcttcttgggtatccatggatacacag

SEQ ID NO: 204681 - DNA, 122 bp, Homo sapiens
cacggttctgagccagtggcctccgaaggccggaatccgctagccccgggtctggcagaacgtcacttgctgcgccctaggcctcttcccgccacgcttagagagagggactggaggctcag

SEQ ID NO: 204682 - DNA, 122 bp, Homo sapiens
gcgcgcatgatcagctccggcttcctgcggggctccgtgtggtccagcaggaagcggaagcgcagcagcgtcagcgccaggaccaccttcatcttcgccatggcgaacgcctgcccgatgca

SEQ ID NO: 204683 - DNA, 122 bp, Homo sapiens
gtggccggaacctggggtagtactggaagctgctcctttggaaatgccagctgctgtggccgcaggggcactcaggggttctatgagtgaccacccggcagagggaagcgcccaggcttcac

SEQ ID NO: 204684 - DNA, 122 bp, Homo sapiens
ggggaagaaagtgatcctggtaattgagctcctaggcctgggagaaaaatgaggtaagctcgatctccgtaggacttatggaaggaaagacatcagagcaatctctcagacagaggggaaat

SEQ ID NO: 204685 - DNA, 122 bp, Homo sapiens
actggaaagtgctgaattttagggctgtctctgccattaagccctcagtgtgcctctgagcgagttccttcctccttctatgcctcagtttcctcatctgtccaattttgagctaacagaca

SEQ ID NO: 204686 - DNA, 122 bp, Homo sapiens
cacggggaccggatcgcgctgcagaacaccgccgggacccggcacccggacgcgcaagggcgacagggcagccctgctgtaaggactgtgccatgagaggttctcattcggtaaacagtggc

SEQ ID NO: 204687 - DNA, 122 bp, Homo sapiens
tgcagccgcggcgcgggctccccctcggccgccccacccccaggcccgtcggtgcagaagcggtgacatcaccccctctgggccgcagcccagggctggaagcctgctttccccctaaagtc

SEQ ID NO: 204688 - DNA, 122 bp, Homo sapiens
catcatttcaccaggcacacggggtagaagcagcgaagagaatcgcagcaccggcaaacacgaggaattccggcactaacacttatataatgaaaaccttctccgctctcactcaccgctgc

SEQ ID NO: 204689 - DNA, 122 bp, Homo sapiens
gatgcattatccatccagggctttgttgtgtggtgacattccagagcagagctcagcccacgggcatctgccagtgcacaggaactctcctttctggcagttattcagtttgattacacacg

SEQ ID NO: 204690 - DNA, 122 bp, Homo sapiens
aaaatgtgaataaaggtaaagctgggagtacccacagcctataacataaataaagaacaacgggggccaggcacggtggttcatgcctgtaatcccagcactttaggtggccgaggcaggtg

SEQ ID NO: 204691 - DNA, 122 bp, Homo sapiens
gtctcagaaatgtcagaccctggaactggaacctggggcttgttcttcagtgctgccatccgcttggcaaagtactcctggatggtgaaggcgctggttgtcgtggtttcgttctcctctgg

SEQ ID NO: 204692 - DNA, 122 bp, Homo sapiens
cgcgaacggcaggattttgctcttttcagctgaagagtaccccatggtgtccacgcacctcgttttctctgtccacacatctgctgatggacagatgcccaggctgattctgcatcttggct

SEQ ID NO: 204693 - DNA, 122 bp, Homo sapiens
tcaggtgcacctcggcgtgatgctgccagccccagctgaggatctggcaggccgagaggccgagaccccgtccccaggcgtccctgaggtctgagggtcaggttgtccatgtgtgggacgaa

SEQ ID NO: 204694 - DNA, 122 bp, Homo sapiens
ttggatcttgtctgtgttagagagggatgggccatagtttcagatcatttggttcaccttcggattcagcttcagcagggctcaggaatccaagcaccataagaatgtgcaagatttagtga

SEQ ID NO: 204695 - DNA, 122 bp, Homo sapiens
gcgcacacttttcaaacaaagatggttctctgtcctaagaatatctggttcttcctacctcgacttctttctataaatattaaaggtaaaaactatgcagtcttagcccagagcttggaatg

SEQ ID NO: 204696 - DNA, 122 bp, Homo sapiens
atgacaggccatgtttggcccgttggaaatgcccaccaccctttgggaagatttactggccgtttatagaaggcctgtgtatataatatgaaaaagcttctctcaactccaccccaaccttt

SEQ ID NO: 204697 - DNA, 122 bp, Homo sapiens
ctggcatttaacagatcaattcaactgttttctaagtaaatacttaaacgcttaaaaaaccgtaatttactgagaaaacaaagctttctttctaggttaagaatttgagaaaacaagaccca

SEQ ID NO: 204698 - DNA, 122 bp, Homo sapiens
ttcattttcagctttcttgaaaactgctcctcagaaactgacagatggtgcatctgtcaccgagtgttttctcttcgttatctctgccagctaatatttcctctgtgcttggctgttgtctg

SEQ ID NO: 204699 - DNA, 122 bp, Homo sapiens
aatgagagctgactcattcaaacagggccacatgtgaactcgccctgagccctgtgtgcccgtgatttgctgcccgagggctcttgtactcacccaccctcagaaccttcctggaaattgtg

SEQ ID NO: 204700 - DNA, 122 bp, Homo sapiens
cctgggcggctcccctcagtgcttgtgcagcagggcacctgcgaggtgattgcggctcaccgctgctgcaaccggaaccgcatcgaggagcgctcccagacggtgaaatgctcctgtttttc

SEQ ID NO: 204701 - DNA, 122 bp, Homo sapiens
gcactgcatctggcctgccacaagggaagtgtggtcctggtgcagctcctgatctggtaccgggtggacgtcatggcccaagatgcccatgggaacacagtgctggcctacacctggcaggc

SEQ ID NO: 204702 - DNA, 122 bp, Homo sapiens
tgcagctcaatgctggagccttcaacctggtgaacagagcaccagctacgcgttagcctgcgcttgctctcttagatgaataactctggaacaatgtaaaaacaacacaaccgtacacaaca

SEQ ID NO: 204703 - DNA, 122 bp, Homo sapiens
gcgtagcaccgcggtgcctgctgcctcattctccggcaccagcgtctggtagttgtactgcggaaactgcgggtggcggtttgcggcgcgacgaaagcgtgcccggttcgccgaggttactt

SEQ ID NO: 204704 - DNA, 122 bp, Homo sapiens
gcgcgggcgcccccgtaggttccggcgggcgcgggtccgagttgtaggctgaaggctctacgggagggaggcgaggaggcccaaggtgggcgggtgtcaacctccggcaccgaagatgggtc

SEQ ID NO: 204705 - DNA, 122 bp, Homo sapiens
aaggtcccagggctgagagggccaacagttttcagtgattttctatggtccttggcgagtcggatacagcttttacaatgatccagctgttcttaaattcttaaatggcatgtgtgtctttt

SEQ ID NO: 204706 - DNA, 122 bp, Homo sapiens
tcccaggccccaaaagcataaccattgagcctctgagccctatttggttaagcattaagacgggtttgggctatgttaaaaagagaacccccagttccagataaaggatgtgtctctattca

SEQ ID NO: 204707 - DNA, 122 bp, Homo sapiens
ggcccgctgctgtgcgctggttgcagcatgaattcgctgggcagggatttgcagtatagacgtagagttgttctggcctctgatgctgcgcccgggccttaaatggaatcgcggtctgtgat

SEQ ID NO: 204708 - DNA, 122 bp, Homo sapiens
gggggcgggagcgagcgctgacgtcagtcaggctaagctgggccaggggctctgaggtcacggcccagccgggcagctccacccgcttcccgctattactcccacccccctcagccagacgg

SEQ ID NO: 204709 - DNA, 122 bp, Homo sapiens
acctctgagtcccatttcttcactcaaatagtcacaataaaaatacttctgggcggatcacgaggtcaggagatcgagaccatcctggctaacatggtgaaacctcatctctactaaaaata

SEQ ID NO: 204710 - DNA, 122 bp, Homo sapiens
catcatgggtatcgttgctggcctggttgtccttgcagctgtagtcactggagctgcggtcgctgctgtgctgtggagaaagaagagctcaggtaaggaaggggtgacaagtggggtctgag

SEQ ID NO: 204711 - DNA, 122 bp, Homo sapiens
cctctgcttgccagctcgatacctcttgtagacatacttgtaaaacagaagtctcctatccgctacccaagcgaacacaacacagatgggaaagaagaagaaagtaagcaaaccttcccaga

SEQ ID NO: 204712 - DNA, 122 bp, Homo sapiens
atgcggaacccagctaccggcccatgggcgctgggaagcggagatgggctaggggtgggccggagaggggcgtctcgcctgggggcagtcaccccactctgcccgcagctgggaagggcctg

SEQ ID NO: 204713 - DNA, 122 bp, Homo sapiens
ggcgcgccggggatttccagcgcgcgagaggaagtgcctgcgcggggctgcgtgagggagcgagggagcgagggagcgcggcgcggccgccgcgtgcgcgagccggggttgcagcccagccg

SEQ ID NO: 204714 - DNA, 122 bp, Homo sapiens
tagtaatcttccaaaatataacggttagaaatgagcacaggtgccctgggtttcagatgccgtgacatcatggtggcatcctctgggtaagggcccctttgtcaaaggccactccaggtgaa

SEQ ID NO: 204715 - DNA, 122 bp, Homo sapiens
ctttctttacaaattaagaagttcatttgtaaaaacaattcaatgaattgcacaaggctacgcagcataacaattgtcatgcacagttgttcttttaaagtactgtctgggcaataaatcat

SEQ ID NO: 204716 - DNA, 122 bp, Homo sapiens
cttatccagcttaaatgagccaaaacactcctgcatcttcctggggttcctggtgaagggcgtgttgtcttttccctttagcccttgttttggaaagctctgaagaggcacccaggaggtca

SEQ ID NO: 204717 - DNA, 122 bp, Homo sapiens
aggcagaacactcccaggcagctctctttctttcttcctcagtgggagactgaggacgcgcgccaccctcaccgagggggaccggtgtgcacaactgccagcctcaggcagcatcggttttg

SEQ ID NO: 204718 - DNA, 122 bp, Homo sapiens
ttctacttaggggaccgcaaagtcccaaagggctacagggagttgaacgagaagagtgcccgacagattgcaggttgtggggaggtgtcaggcatttatttctggagcagaggtgagatgga

SEQ ID NO: 204719 - DNA, 122 bp, Homo sapiens
tggaggtaagtgggtcggggaccaggctgggctcgaggagcgggcccggacacctccctccgggccccagtactcctggccgagttgcatccttgagcccgcgtcgccccccttggaggctt

SEQ ID NO: 204720 - DNA, 122 bp, Homo sapiens
caagcaaagccctgaatgaacactgtcagaatacctcggcacacaaaggagggccggagccgcaggtgaaagagttgtctgggatgtggatccccggagtggatcctgtggcccaagctcct

SEQ ID NO: 204721 - DNA, 122 bp, Homo sapiens
gacattgcaaaggctttgtgcagatggcgataggtaaatgcctcctgtgaagttttccttcggcatgtctttctgaagtttagcgttttcattttaaaaatggcatactggttttgcagatc

SEQ ID NO: 204722 - DNA, 122 bp, Homo sapiens
ctcctggcgcctgctgtggctgtcctcctctgtcatgactgttctgtgctttgcctttgccgcccccgaggttgatgggcgctctccgtctctttctcccagtggtccattctgtgttttag

SEQ ID NO: 204723 - DNA, 122 bp, Homo sapiens
tttttaaagactaagtttcactcttgatgaccaggctggagtgtcaaaccctgtctctaccgaaaatacaaaattagccagatgtggtggtgcatgcctgtaatcccagctacttgggaggc

SEQ ID NO: 204724 - DNA, 122 bp, Homo sapiens
gggcaggggagcagggtggaggttccccggaaggaagggaggggccccacccagccagtccgagcacattccgggaggatgtgttcaaacccggctcccaagtccgtgggggggataacgga

SEQ ID NO: 204725 - DNA, 122 bp, Homo sapiens
gtgggctggtagatgtccaggcgctcgcgagggccactggcatccctccaccggaagctgcggccctggtgctcgtcctgtaggctcacagggctgtccatggcctccagtgggtaggcaca

SEQ ID NO: 204726 - DNA, 122 bp, Homo sapiens
tttactgggacttgcatcggctctgcacacatagcagcaccgtctttgtctgaggttccacgtggcctgatgctgtgcagggcagcttgtcctgatggatcttgccgtgacacgggccattt

SEQ ID NO: 204727 - DNA, 122 bp, Homo sapiens
caacagaagtttattctcacagttccggaggctggaagtccaaaagcaaggtgttggcagcgttggttcctcctgcaggctttcagggagtccgtctcctgcttttctggcttctgcaggtt

SEQ ID NO: 204728 - DNA, 122 bp, Homo sapiens
gccgcgcccacgccaacccaccggcgcacatcggccatccctcgcgcttttacgcgggagcgtccgcagggccggaaggaggcccctgccccgtccaaggctgcaccagctgccccgccgcc

SEQ ID NO: 204729 - DNA, 122 bp, Homo sapiens
gcttgtagacacaccttccatgccagtgacagaccctcttgggccaccacctggtctcagcgaccaatagcacagcctgggaggacccacggcctccttgcctgtcacttgcagtcccatcc

SEQ ID NO: 204730 - DNA, 122 bp, Homo sapiens
ttgtgatgagtgaggcatggagtctggctcatagcagacaattcagtactgattctgaaacgtatctccaattccggaagtaccgtgtcttctaggtggtcaatccactgaaactgagtcac

SEQ ID NO: 204731 - DNA, 122 bp, Homo sapiens
tggggggcatctgactgcttccccccaccctctgccaggcattgctggagaatgttaagacggcgatggagatgccatcaaccccaccctgcagagcatcaccagacaccaccagaccaaat

SEQ ID NO: 204732 - DNA, 122 bp, Homo sapiens
gtatacataaaataagagcttacgtttactgagcacttactacttgccagttgtgttttgcgtgtcatgtaatacacagaaagcctcataaaacctgtgctatcgtggcaggtgttgctggc

SEQ ID NO: 204733 - DNA, 122 bp, Homo sapiens
ttactatgtgataaaatacatatagaatataagatatactatatacattttgtccataaacgttatgctgaatagttgttgaaacagttctcattttgtagtatttaataatctggatggag

SEQ ID NO: 204734 - DNA, 122 bp, Homo sapiens
tttttatgctgctattaaacctgccacaagctgaagccttgcctggtgcaacgtctgtgtcgaggcacctcagggtggactggtgctggggatggcaagcctgggtcctagctccagctctg

SEQ ID NO: 204735 - DNA, 122 bp, Homo sapiens
ttgtaaaagcgctcaaactgcatgctcagcagggtgttttcagtattccttatcacaccacggactccactccctgtcctgttttcaaggtcaaggagtttcattctcatgcacaaagaaca

SEQ ID NO: 204736 - DNA, 122 bp, Homo sapiens
cctcaaaggctagtgattatttggcaaagcccagctcggcatccctcacaccaacaatagcggctgagcgcagaggcctggagagcctgggcgcagacctagctgcccgcacgatgttctga

SEQ ID NO: 204737 - DNA, 122 bp, Homo sapiens
gctccctcgtggccaaggcaggattagggcggcaggagaagcgcgagaaggaggagcagacgcacagcgacccagcccggcctccgccaacgcttaaacagccccgcgcccacctccctcag

SEQ ID NO: 204738 - DNA, 122 bp, Homo sapiens
ctggacgtgggcaagggcttcccctcttgcataccacacttgttctttgggatctgttgccggcaccacgggttgttgttgggataacgaagctatttctgttcctggtgcagcttgacttt

SEQ ID NO: 204739 - DNA, 122 bp, Homo sapiens
tagccatggctgtggctgtagccatggcgggagccttaatcgggtcggagccaggccccgcggaagaacttgccaaactcgagtacctgtctttggtgtcaaaggtttgcactgagctggac

SEQ ID NO: 204740 - DNA, 122 bp, Homo sapiens
cagtcgtacgcgggtgtggtgcagtacagccacagccagatgcaggagcacgtgagcctgcgcagccccagcatccggaacgtgcaggagctcaaggagtgagtgccccacgcggccaggac

SEQ ID NO: 204741 - DNA, 122 bp, Homo sapiens
ttggtaaatgcagatgcagggattctaactgttccttacatgccatgagctcctgagggacgtgggaacacttccctgtgcagggagctccccagttcagggcagccttatgtgagttcagg

SEQ ID NO: 204742 - DNA, 122 bp, Homo sapiens
gaccctcaatcctgggccagctacaccgcaaacctttccagctgtctctcctgcgccctgcgtttcttccccacgtcacttgccagggagccgctaaacagcaagaccgcgcgctctgcggc

SEQ ID NO: 204743 - DNA, 122 bp, Homo sapiens
ggaggctgaggcaggagaatcatttgaacccaggaggcagtggttgcggtgagccaacatcgcaccattgcactccagcctgggcaacaagagggaaactccatctcaaaaaaaaaaagaaa

SEQ ID NO: 204744 - DNA, 122 bp, Homo sapiens
ctggcctcgctctctgcagccacagcagctgttgggaagctctgccaggggagacgtgcccgggagacagggcgctgtggacacggctgcagggctgaggttgcttgtactttcatcatatg

SEQ ID NO: 204745 - DNA, 122 bp, Homo sapiens
ggtccctggatgcatgaggcgctggatgtgcctggcataccaaactgcccgcctctgtgccgcagctactggtaatgaagatcaccggccccgcccagcactgcggacagagccgggcattc

SEQ ID NO: 204746 - DNA, 122 bp, Homo sapiens
ggagctgcccgagcccagcgctcaaggcccagccagaaccgaaccaaggctggctggggccgatgcacgcgaagtgcttgtcccgtttacttctaaatgcccacagggtgttcattagacag

SEQ ID NO: 204747 - DNA, 122 bp, Homo sapiens
ctctagactcacatgtccaactgtttctttactgtctgcacagggatgtttaataagcaccgcacacttagcatgtccaaaggggacctcttgttccctcccctgctgttcccctgcccagc

SEQ ID NO: 204748 - DNA, 122 bp, Homo sapiens
cttgccaccgtatttattcagttgaacaatttcacgtgtatttttaaacattcgattccacgggttagatctgatctgttagaaggggctctgcaggctccttcctgtctcacccccacact

SEQ ID NO: 204749 - DNA, 122 bp, Homo sapiens
gagcctcgctctgtcgcccaggctggagtgcagtggcgcgatctcggttactgcaacctccgcctcccagtttcaagtggttctcctggctccgcctcccgagtatctgggactactggcgt

SEQ ID NO: 204750 - DNA, 122 bp, Homo sapiens
tttatctgggtactgagctccgagtgccatttcagtgcccactgagcaagagaggctgctcgatgctttccaaaggcccattctgggcactggggatagagaagtggaaaagcaaagttctt

SEQ ID NO: 204751 - DNA, 122 bp, Homo sapiens
gtgtgcctggttttctggatacagcatgactgaaccgccccttctcagcaaaggccaacacgtctttctcgagtccaagaccatctcccgttcaagggccctcaccgcgctttgtgagtctg

SEQ ID NO: 204752 - DNA, 122 bp, Homo sapiens
ctcaagtgatccgcccgccttggcctcccaaagtgctgggattacagtcgtgagccatcacgtccagctcgtttagttaactttgaatggcaagtggcaggatggttgattggttggttgag

SEQ ID NO: 204753 - DNA, 122 bp, Homo sapiens
atattgggtcaaagatcttacactataacacatactacactgtgggcacggatcaacagacgagaatactttatacagaagcttctcgacggaagaaggccttggagtgggaaatctaaagg

SEQ ID NO: 204754 - DNA, 122 bp, Homo sapiens
ttttggggttcgaccattcttggcgagaagagcgactttccatcgcaggcacccagcgctcgctccaaggctgagctagttagggatctgcggcatcgtcctttagcacacctggggcaggg

SEQ ID NO: 204755 - DNA, 122 bp, Homo sapiens
gtaggcaagggccaagcgttcctcagcccaggtaggagagggcaagggcctgacttgagacgtgaagtgttagtgactgagggggacagatgcaaagcccgagatgactgattttccagctg

SEQ ID NO: 204756 - DNA, 122 bp, Homo sapiens
ccagtcaccatctagcccagggacgacgcgggacggacgtgccgctgcgcgctgacatcacgctccaggccccgccccaccggccgcccatatagcgaaagcctggcgcgcgcgcgcgccat

SEQ ID NO: 204757 - DNA, 122 bp, Homo sapiens
aatttcctaacgcaaaagctatgatgacaaatctccaaacatcccaaagcagccgtgtcccgaggaacttcctgcggtgtccacaaagcagccgctggctgtcctccggcagaatgggatgg

SEQ ID NO: 204758 - DNA, 122 bp, Homo sapiens
tgacctcgtgatccgcccgcctcggcctcccaaagtgctgggattacaggcgtgagccaccgcgcccggccttaagtaaattcttgtgtctaaccactttataatcggagccgttgtgcggg

SEQ ID NO: 204759 - DNA, 122 bp, Homo sapiens
aacttctgtgctctccattcattctctcaacatctgttgacagttgctatatccaaagtacggggagtgcaacaataaacaagacctggccccatggggcttccagtcctctgaaagagact

SEQ ID NO: 204760 - DNA, 122 bp, Homo sapiens
tgggcattactcagaaagaatcagtggggaaagggtgggcttcatccaggatcagcagttcggtatttcagcctccaggctgttttatgcttgaaagtaggatttcgccagggacccttggc

SEQ ID NO: 204761 - DNA, 122 bp, Homo sapiens
cccctggcccctgacctgccgagagaggccagcggctggctgaggctgtagagcagcgcgcggccgggggcggcgggggcagccagcgcgggaggactcagctgcaccatgcggccgtcgcc

SEQ ID NO: 204762 - DNA, 122 bp, Homo sapiens
ccttcattaaaatctgcatttataggacttgcctctaaggatgtttcaaaaattgttggacgataataggtgttccatgaagaagagcagcaggccctataagtttggttaacactaagttt

SEQ ID NO: 204763 - DNA, 122 bp, Homo sapiens
tgcagatttaactatgtttaatgtcagatagcaataaagtagaagctgccggtcgggccccgcggaaatgggcgagcataatctcctgaatcccgggtttgtggggccgctggtaaacatcc

SEQ ID NO: 204764 - DNA, 122 bp, Homo sapiens
ttcagagcagggagcatccatgttccaggcgtgcgggcacctgtcccgccggacgtggagcgtgcaagtcagtgggcagcagcccaggggacacagagcccccaaggacaaggtgggcacgc

SEQ ID NO: 204765 - DNA, 122 bp, Homo sapiens
gtaattcctccctatgaataataaacggcttacttataaatactgtccagtggccatccccgtagttctgtgcaatttaatttttaattcaggtaggtttaccttgcctttgtttacccatt

SEQ ID NO: 204766 - DNA, 122 bp, Homo sapiens
cagcccacatccattttcccatttcctgatgtcgtatgtccaaacccagaccccacctatcgccctggacccgccccctctccacagccaccgacagcgtctcatctccacaagcctctccc

SEQ ID NO: 204767 - DNA, 122 bp, Homo sapiens
aggatgctgccgctatggcgaaggatgatgccgctgtgacgacagctgctgccgctgtggcgaaggatgctgccgctgtgacgacggatgctgccgctatgatgaaggatgatgccgctgtg

SEQ ID NO: 204768 - DNA, 122 bp, Homo sapiens
ggcgcggacgcggaggccggagcaagtctgagcagccgaattgacaaggcgctaatgcgccgctggccccgcccggccccgcccccggcccggcccggccccgggggggcggcgggccccgc

SEQ ID NO: 204769 - DNA, 122 bp, Homo sapiens
gggtttttgcccccgcccccgttgctttttacccccgccgccgcggctttctgcccctgccgacgagggtttttgcggctttatatccccgctgtcatggctttttgcggccgtggcttttt

SEQ ID NO: 204770 - DNA, 122 bp, Homo sapiens
tcatcaagccctatgtcaggctctggcaatacaaagaggaattagaatgaccctgttcttcgaggagtttatatctagatggggcatagacacaaaaacctaacacataacagagggttgta

SEQ ID NO: 204771 - DNA, 122 bp, Homo sapiens
aaaactatcatattaccaagtggacatggctcctaaggtgccaactgaacacaggtaagtcgggtaaggaaaggcacacagtctcattacttagactaccccgcagccgcttattgaattag

SEQ ID NO: 204772 - DNA, 122 bp, Homo sapiens
ctcattctatcatgcagactggagtgcagtggtgtgatcacagctcattgtaacctccaacgcctggactaaagtgatcctcctaccttggcctctctggtagctgggactacaggtgcatg

SEQ ID NO: 204773 - DNA, 122 bp, Homo sapiens
tcgcgtctcctgccgactgggtaggaaacgggggcttcccccttgccctctcagagcgggcgatcccaaagagacaggttaagccgcaggttgagagggcagctccgcgccggtgccccgcg

SEQ ID NO: 204774 - DNA, 122 bp, Homo sapiens
gagaaaggaaaaagccccttgaaccaatctgaatgtaaaatccaaaagctatggccaccgcgaggaaaacaacagtcatgatgcgggccaggaggccgtcgccgtgggaatgcagtcggccc

SEQ ID NO: 204775 - DNA, 122 bp, Homo sapiens
gccactgggtaaggcgggggcggaatagggggcttgcaatttcacactagaggcgggcaccgtgggggaaagaagagtcacgtctcccacggttcgtagaggaaggcctgcctgagcctgga

SEQ ID NO: 204776 - DNA, 122 bp, Homo sapiens
gtgtttaaaagaaaaccagtcacagttagactccttcataattaccttaaatctgaagctcgtggagcttaagagacagcaaggttgtctgcttgttctaaaattcttccagttttggaatg

SEQ ID NO: 204777 - DNA, 122 bp, Homo sapiens
gacacactccactcttgtttctgcagctagaaagacttgagttagacaagcagcagcacacgcctccctacctcatggcgacagaaaatggagcagttgagctgggaattcagaacccatca

SEQ ID NO: 204778 - DNA, 122 bp, Homo sapiens
ctttagacagagcagatttgaaacactctttttgtggaatttgcaagtggagaattcagccgctttgaagacaatgttagaaaaggaaatatcttcgtagaaaaactagacagaatgattat

SEQ ID NO: 204779 - DNA, 122 bp, Homo sapiens
gcgcctccccaactgaagatctcggtccatctcagggtggcctctgactctccgacccggcgctggtgcaggctgcatgagaagctctggcccattgtccccgcaccccacaccccttatcc

SEQ ID NO: 204780 - DNA, 122 bp, Homo sapiens
cgttcgcgcgagccaggggcgaggatctggtgtgtcgcgaaggtcccggtgcggggaaggcgcagcctctcctgtctggagtcccacacgccagttcccggcgcccctcgcctttctgactc

SEQ ID NO: 204781 - DNA, 122 bp, Homo sapiens
gcaaggtaggctggctgggtaggcagagcccctccttcctgctgctcagggcagaaggaccggggctaatggagttccctcttccttctctcttcagggggcccctggcctggctggcaaga

SEQ ID NO: 204782 - DNA, 122 bp, Homo sapiens
caggcaggggctgccccgtgctgcaggagccagtgggcctgggtcttctggaaccaagcccgggtctcggcctgcaggaacaggcttccttctccaggcacctcctctgccctctcagcatt

SEQ ID NO: 204783 - DNA, 122 bp, Homo sapiens
gacggccacctgtatggaaataagaattacccgggactctcaggcccttctcagccgtaccgacctgtggcttagtgcgctgaaacctgcaaggtcggagccgaaactcctgggcttgcttg

SEQ ID NO: 204784 - DNA, 122 bp, Homo sapiens
gtgatttgtgacagaaggttcccacgatccgagggatttgggggttctctgctgccgccccgcaaagccgaagcacgggaaggagggcacaggattattgactttgatcctgaccaatcacc

SEQ ID NO: 204785 - DNA, 122 bp, Homo sapiens
gtgaatgtgtatggaaaataaagagtctggaaccgcatgggagactcaggagccagagcccggggtggattccatccctgaacctgcagccctggagaggcctgggctcagctgcacccctc

SEQ ID NO: 204786 - DNA, 122 bp, Homo sapiens
ctccacgtggtaggtggtgccgggcctgaggtcgggcaggctgacggtgcgcgtggtgcccggcacagtcagctcaccgccggggccctctgcaggcggctgaggccgccagcgcagcacca

SEQ ID NO: 204787 - DNA, 122 bp, Homo sapiens
atgtgatcatgcgaccgccagcagaagggaaattgtgaaagcgacctgctgtagaaaaggcggcccacagccacctcagcatgcagaggaggcccagctgctgagaggagttgcctgagagt

SEQ ID NO: 204788 - DNA, 122 bp, Homo sapiens
taactaagccaggaaactttaaaagccttctagaaatagaggcactgtatgacttgcaatcgtaggtatagtttataacctgatagcaaaaaacttgaaatattgcagcccagtttaattca

SEQ ID NO: 204789 - DNA, 122 bp, Homo sapiens
gggtcctctgaggccccttgaccaggtgagcggaccctggagctgggccccgggctggggcggaactgcggcctaggggcctagggagcagctgcttcccggcgggtgcagagaatcttccc

SEQ ID NO: 204790 - DNA, 122 bp, Homo sapiens
ccctcctggggctaacatcattgagcagggctggggaacacagaaggacagtaatcagctcgtagtacgtgcagtacagtagtaatgtcgagcgatgtgttacggagcggctggggtggggg

SEQ ID NO: 204791 - DNA, 122 bp, Homo sapiens
gtctgtacttttcttcactgtttgctaagtgtcagtcttccccaattagaatataagttccggccgggcacggtggctgatgactgtaatcccagcactttgggaggccaagtcaggtggat

SEQ ID NO: 204792 - DNA, 122 bp, Homo sapiens
ttttatcaattgtttagaagaaaaatagttttagtggttttctagaaatattgtattttacgttcccaccagcattacttgagagtgtttgttcaggccaggcaaagggggctcatgcctgt

SEQ ID NO: 204793 - DNA, 122 bp, Homo sapiens
aggcttgctctgggtccggcgatccctgtcggagtcctgtccccaccgcttcccttctggcgggattaaccacttcgctgcctggatacacccacatacgttggtgcatcctcttaggaact

SEQ ID NO: 204794 - DNA, 122 bp, Homo sapiens
caatataatcccttttaccatctctttgagccccttttacagagtacaaagagttatgtgcgactcccacatgaggcttcttagagggaagactgttcttcagcagagattcagaactactt

SEQ ID NO: 204795 - DNA, 122 bp, Homo sapiens
gaaccatacttggaccagcacactaattgcatagccaagtcctttgggttttgttggattcggtttgttgttgttgttgttgttgtttgtaaagaaacttgaatgcaaaagggtgaaactga

SEQ ID NO: 204796 - DNA, 122 bp, Homo sapiens
cacgccgccaacgcctctgcttccgccctgcgccgggcacttccgcccgcacccaccaggcgccggccccaggccccgcacttccgccccacgccggcagcactgccgctgggcgttctatc

SEQ ID NO: 204797 - DNA, 122 bp, Homo sapiens
tgagctagaatttaaacccaggcaacataaagggcttcacctgggccaactcatccagcacgaagtggaggtggtgcctagcagccatactacttttaaccccaacagaatgtgttactttc

SEQ ID NO: 204798 - DNA, 122 bp, Homo sapiens
ggaaagtagaaacgccctccgagtgtatgtctatcccagaagaaaacctgtcttaaagttcgcgatttttaccaaaataggccacgaaacacacaaagtcgctaaactttttaaccctttcc

SEQ ID NO: 204799 - DNA, 122 bp, Homo sapiens
ataatcccctctcccttgtccttggaagacatctctaatagatcctagatctccctcccgcgtcatcaccagctgttctctagtcagcactctaattctatgtttgtttgattgtttaactg

SEQ ID NO: 204800 - DNA, 122 bp, Homo sapiens
ggcatcttgtcgaggatggcagggaggtggaggtggtggcggctggggaggaggggggggcgggccctcagcccccagccatggggacccgcgcgaccctggcctcctcccggcccaggaga

SEQ ID NO: 204801 - DNA, 122 bp, Homo sapiens
accgccccccaggacccgcggcgcgcaccccgggagtggggtgcgccccgcgaccctgggcgctcagggccagacacacctcttgggcgccccgcggcccccacagtgcagccttcatcgcc

SEQ ID NO: 204802 - DNA, 122 bp, Homo sapiens
atattcctttcctctttgaagctgtcttctgcaccacatttgtagcttctgcaccacattcgtagaggcacttgcatcccaggacagatttgagagtgagatctagtctccacagcacgttt

SEQ ID NO: 204803 - DNA, 122 bp, Homo sapiens
ctcccgcgcgggcaggaggcccagcaggtattgcacggggagcagcaggtggggaggacccgcgggcgcagggtctgcctagagcccttggagcccccggccaggcggtccccggtgggcgc

SEQ ID NO: 204804 - DNA, 122 bp, Homo sapiens
tcctccgttcattttctgcaccctcttcgcaaagcaccccccgggatcactctccgagggcgactttttgagaaatctcggtggagtagtggaccagagctggggagtttttaaaagccggg

SEQ ID NO: 204805 - DNA, 122 bp, Homo sapiens
cgtattctaaggttccaaagggctttcactgcatatgtcttggaatccttgacccagttccgaggactggagaggggataggtaggtctctaatctccttccccacttctcggagcagaagg

SEQ ID NO: 204806 - DNA, 122 bp, Homo sapiens
ggaatccactctgtgggttaggaaaggccctcaggaggcggagggaaacctgtggaatgccgagaagccgtgtaatgaaataacgtcacgcctgcccctcaccattactctgaccagggttc

SEQ ID NO: 204807 - DNA, 122 bp, Homo sapiens
ttcgggtagcttgtctttggggggcgctggcttgtagctggccagcacggggctccctgacgggctggcatctgaggtcccgctggagctcatgagcttcttcttggcggcgtgcagctggg

SEQ ID NO: 204808 - DNA, 122 bp, Homo sapiens
cgtggcggccgccccagcccgggctgagagagccgagacagtggcggcgaaaactctctgcgttctggagggagggtgcgggcaggaggaggtagaggatgccttgtaagcggagcaaaaac

SEQ ID NO: 204809 - DNA, 122 bp, Homo sapiens
ggcaagggagaaggaaacaggcaataaaacggagagctgagcggcttactggagccaggacgctggggtcggcttaattgctctgaaatgaaaaagattcggggttttcgtgaaatcccata

SEQ ID NO: 204810 - DNA, 122 bp, Homo sapiens
ctccacaaaatattaaaacttatagccacattgtgcaagtaatctcaagagctggcacaacggataatataccaaaaaggaagatcagcttaaatttcagttacaacttcactgccatcact

SEQ ID NO: 204811 - DNA, 122 bp, Homo sapiens
ccgaagccatgaacttccaggcgggcggggggcagagcccgcagcagcagcagagcctggcggctccggggggcggcggcgctgccgcgcagcagctcgtctgcggcgggcagttcggcggc

SEQ ID NO: 204812 - DNA, 122 bp, Homo sapiens
agaactgaaaaggggaagcgctggctgtcttggtggccggggggtgaggctctgccccggcggggctgcgtgaggggaaggggccccccgccctgggaaggttgggctgtcctgggcggcgc

SEQ ID NO: 204813 - DNA, 122 bp, Homo sapiens
tggcaccttcctgagccccggtgccccatggggcagcagagcagatagttttgtgcccagcggttccggggtggaggcctccttggcggtaggcaccagactgccgaacagaaggctgcctc

SEQ ID NO: 204814 - DNA, 122 bp, Homo sapiens
tttcaccagccaccctgtcaggtaggtataattctagccccattttatagatggataatccgaggctcagggaggtgaaataactggtttaagtaattgagagtggggacttgaagcctggt

SEQ ID NO: 204815 - DNA, 122 bp, Homo sapiens
ctcacaggaacccagggccagcaggaggtgaagttctgccagcccccagcctgggcccagcgcccatgtttatgactgtttatttcagagcaagtagaaaggagaaattagagccatgaaag

SEQ ID NO: 204816 - DNA, 122 bp, Homo sapiens
ctctgcaggagcctgggcacccttgcagccacgatcccagctctccctccagcgacttcccgcagcctgaacctcccagctccggctagaaaatccccagctggaggctgcccattcccgag

SEQ ID NO: 204817 - DNA, 122 bp, Homo sapiens
taggatgaaagaaatcaggtctagactgagggccacgagtcccaacacccagggaggatccgtacaggggcggggggactgccccaaaccataaggtcaggaggtggacgctgaccacaggg

SEQ ID NO: 204818 - DNA, 122 bp, Homo sapiens
agtcgtggggccctggcccaaggcaggctggtcggccggacactggcctggaagtggggccgggatcgagtgtcggccaggcggctggatggtccaggaaagagtccggtgtcagcagagtg

SEQ ID NO: 204819 - DNA, 122 bp, Homo sapiens
cttcccgcggggcagggctcgggacctgcagcccgccatgcctgagcctcccaccccctccgtgggctcctgtgcagcccgaggctcccctacgaatgccgccccctgctccacggcgccca

SEQ ID NO: 204820 - DNA, 122 bp, Homo sapiens
cgtcctgcatcgtctgccgctttgggtaaggtggggtcagggtcgggggcgaggcttgcccggtgggcccggtgcggcgcggtgcccgccgttttcgggacggggaggggccgcgccccgcc

SEQ ID NO: 204821 - DNA, 122 bp, Homo sapiens
gctcagtgtctgattcacaataggcgctcaataaaacattattgtcctgaattaaattcccggggaaggcgcgccctcggggacttgggtacttcaggccccgcccaccactcccctggggt

SEQ ID NO: 204822 - DNA, 122 bp, Homo sapiens
tcacggtgacagcacgggatcacgacccagacacagactcacggtgacagcacgggatcacgacccagacacagactcacggtgacagcacgggatcaccacccagacagactcacggtgac

SEQ ID NO: 204823 - DNA, 122 bp, Homo sapiens
ctcggaagctgacgtcacgcccagacgtcccaaggtatgagctgtagatacgcatgtgagcgctggtgggagacgccaggctgggatttccgctcgatctgggaatgagcaatgcaacctaa

SEQ ID NO: 204824 - DNA, 122 bp, Homo sapiens
tgctttcttgctctcaatgcaggtgctcctcgagagtgagaaatggcagtctgcctgcctcggggacactagtgacagtataaagggcaaaggaaaaccgagtatctggccttcacgtaaat

SEQ ID NO: 204825 - DNA, 122 bp, Homo sapiens
ccgcaggccggcacaaaagcagagacttctttcgtgtgggatgaacgtccctgcctcccccgtccccttgctgcctttgaggggggctgagcagtagactcctgaaaatgcacacttgtccc

SEQ ID NO: 204826 - DNA, 122 bp, Homo sapiens
gttgagatatttataccctctgctgcttctgaagttccagctcttagcaggcttcaagaacgctgttccttcctcttggtctttaggtctaggggtagtaacagctccctaatgttaaggct

SEQ ID NO: 204827 - DNA, 122 bp, Homo sapiens
ttgaggaaatttgtgattccacaccaatgaaaaaccaatatttatatcttgaattttccacgtcattactttgaattgttagagttttgaagtcgtattagggagagtcgtgtcttctgata

SEQ ID NO: 204828 - DNA, 122 bp, Homo sapiens
gggagttgcagtcttaggaatgagcggcacaagtctccctgcctggcgccctgcagtaaacgcctcactttctctcgctgcaatctcaatgtcagtgtttggtttcgctgcgtctagtcggc

SEQ ID NO: 204829 - DNA, 122 bp, Homo sapiens
cgcagcgcggcagctgcgccagctgttgacaactgtctcattccaccgccgcagctaccacgccttttgctgcttgctacttgccgtgggagtctgcgagccgggagccccacgcactccgc

SEQ ID NO: 204830 - DNA, 122 bp, Homo sapiens
tcttcacacttccttcacagcttgcctcacaaggggctccaactgtggggggtctgtttccgcagaccgctgactttcctcacacggggcaccaattgaggtattgctcctcacaagagggc

SEQ ID NO: 204831 - DNA, 122 bp, Homo sapiens
aaatatctgatttgaaatggggcttacagaccaatttcttctttccttcagtacatcccacgacccattccccaccccctagcacctagtaacagccatcgcatatgcattaaacaaaagac

SEQ ID NO: 204832 - DNA, 122 bp, Homo sapiens
gagatgcctgttctgcagctgctgcgcgtcccaccgacccgctgctcgccgtccctgggccgtgctggccctccgccctcggcccagacccggaccgggccatgctccacaccaatgggacc

SEQ ID NO: 204833 - DNA, 122 bp, Homo sapiens
gtcagacactaaggtaacagccataaaacgccgcccagaagggggcagtgaccaaaagcacgttcactggcccctgggaaccgcctggcgcctgccttctgcaaagtatcattcccgtgtgg

SEQ ID NO: 204834 - DNA, 122 bp, Homo sapiens
ttcaaatcatggaggtagaagaacgaggcttttggggaaaccgagtcatggggcatggttcgaacatacagcgctgggagtgcagtcagacgtcagatcatgacaggccttgtacatcagtg

SEQ ID NO: 204835 - DNA, 122 bp, Homo sapiens
agatgaccgctttataaggcagccctcggagttgggaggctgcagtctacctgggacactcgaggaggcacacgaggcggaaaagtggacgggtgccccgcgccaccgcctctcccgagggc

SEQ ID NO: 204836 - DNA, 122 bp, Homo sapiens
atacatacactgacacacaaggtagaggaaaagagtatctgtttttggcaaagggacttccgtacaccacatgcaggaatgtattgatcaaggttgaaattattagcttctgtaacagtttt

SEQ ID NO: 204837 - DNA, 122 bp, Homo sapiens
gcgggcgcgagtgtgcgcgggtgtggaaggccggcgtgcgagccgtgaggggtgtgcgcgcgtgagccggagcggggctcgcccctcgccggcgcccgccgcccagccggtgattgctctct

SEQ ID NO: 204838 - DNA, 122 bp, Homo sapiens
gatgaaaagcccgtggaagcggagctgagcagatccgagccgggctggcggcagagaaaccgcagggagagcctcactgctgagcgcccctcgacggcggagcggcagcagcctccgtggcc

SEQ ID NO: 204839 - DNA, 122 bp, Homo sapiens
cgtctgtgcccatccttgtctcgatctcggtccttcttattccgatcccgctccttatctcgttctcgttctttgtgccgtcgttctctggaagaccgcaaatttaagagttcacttggtat

SEQ ID NO: 204840 - DNA, 122 bp, Homo sapiens
gagctgcggcgtcacatggggggccagccggggacaggcgcctggggctgagtctcccggcgaagccaccgcgaaggggccgcatcccccagagaacgaccctgggcgttcgcgaaggcctc

SEQ ID NO: 204841 - DNA, 122 bp, Homo sapiens
agcaacacatccttaattgtaccaaaaagaatttcttggctgtcagtaaatgcccaattacgttcattaattcttcatttagcgtcacttgccaggtttcaaaagccaccatcacattcaat

SEQ ID NO: 204842 - DNA, 122 bp, Homo sapiens
ggcctcacccggccagccttcctccgccctgccctgaggccccacattcagcggaagcgccgaggcacctgctgccagacagggctccatccccgcggaaggggcccctgggcggtgcccct

SEQ ID NO: 204843 - DNA, 122 bp, Homo sapiens
agtgtcatcggttcggtaaagtttctgttctctggtaactagacccgtttttttgattcccgggtggcttggggccggggaggtgggggagagggcgaggggagtggcagcggcctcccctc

SEQ ID NO: 204844 - DNA, 122 bp, Homo sapiens
gcccgtcgcacaaccactctccagcctggcagggcggtctccggcctcgcacgccggacccgcggcgagcagagctgcctcttaaaggaaaccgcacagtgtccccacgggtgctagccacc

SEQ ID NO: 204845 - DNA, 122 bp, Homo sapiens
ccgggtactgcctgctctggcttccgctctcttccgaggctgggcaagtccaaaagttcccgaaaggggggttcaaagaggggcgctcagtgcacgtgatttcgtttcatctagggtgttgg

SEQ ID NO: 204846 - DNA, 122 bp, Homo sapiens
ctgcagttgccggccgggtggaaagtcagggttacgagatgcccagaagggagtgcagcccgaccacagctcttatcgggcggaggctcacacaggttagcctccgtttccgacctccctgc

SEQ ID NO: 204847 - DNA, 122 bp, Homo sapiens
agccaattctggtcatttcctggcttgtggatgcatcactctcatctctgtctctgtcatcgtgtggtgttcttgcctgtgcctatgtgtttgtgttcattctcttcttataaggattccag

SEQ ID NO: 204848 - DNA, 122 bp, Homo sapiens
cgggtccgcagagtttgttcttccagcacagtgggctctgccttccctgccttcgatgtccgcagcctcttgccagcgctggtgcttgggtggcaggagcagccggggaggggaagaggagg

SEQ ID NO: 204849 - DNA, 122 bp, Homo sapiens
gtcgcgccgccccctggcggctcaatgacagagttgaggcccggcggctggcgactgcggcgtctggcagctccaggaaaggatcccccttgtgaagaaacgcccctacgaagactgtcctg

SEQ ID NO: 204850 - DNA, 122 bp, Homo sapiens
agttttcttggcacatactagggcaaattcagactcttgtcgtgatacaagggtcgttggcgtgattttgctgcgactagagcaatttacgttcttgcaaatctgtcgcaaatttttgcaaa

SEQ ID NO: 204851 - DNA, 122 bp, Homo sapiens
gaggagctgcgcgacctctacagcaagcacctggtggcccagctggcccaggagatcttccgcagccacctggagcaccaggacacgctcctgaagccctcggagcgcaggacttccccagt

SEQ ID NO: 204852 - DNA, 122 bp, Homo sapiens
gaatttcatttccttttgatttggtttgtagtagaagtaatatctttcttcctgggaatacgtctctgacggacattttgaggtcattttcttaaatccaagatcctaaagatctgtagtcg

SEQ ID NO: 204853 - DNA, 122 bp, Homo sapiens
ccaaagtgctgggattacaggcatgagccaccgtgcccagccaggaggatctctcgagcccggaagtgtgagactagctgtggtgatagtgagacctgtctaaaaaaaccaaaattagcctg

SEQ ID NO: 204854 - DNA, 122 bp, Homo sapiens
cgtctccgaggttaaagctgtgcaggatctggcggggacgtctggtttgagttaggggaacgtgagagcggggaccgggggcggtgcgtagcgttccctccgccccctccgcgaccccctgg

SEQ ID NO: 204855 - DNA, 122 bp, Homo sapiens
gccacagtcattcacccctgtgcagcagctggccaagaccagcagacacagggcacgcgccgcaccactttatcttctgggattttcttaagcgggacccatggcaataatgcctttcctca

SEQ ID NO: 204856 - DNA, 122 bp, Homo sapiens
gaaggcaaagcttcagccggaaaagacaaggtcaccaattccaggaagtgccccacctgtcggacatgatgacttcacaaataattgtagtggtggtggggcagggtggcctggagtggggg

SEQ ID NO: 204857 - DNA, 122 bp, Homo sapiens
ttatttccctaaacataatatcttccaggtccccccacattgtagcacgtgccagaccctcgctcccgtcgaaggctgatgccatccttcagtgatgtgtggacggacacattccgcgtatc

SEQ ID NO: 204858 - DNA, 122 bp, Homo sapiens
ttttaccttctcctttgccatcttgggattgctctttcttccatatccccaggtgtctctcggtcctgccctgaagccacacaccctactccttgtaactccagaagagctgacacattcaa

SEQ ID NO: 204859 - DNA, 122 bp, Homo sapiens
gtgtagctgttgtctttttttgctgcctgtcagaaggcggcactgactatgagttgacagcgtctccaggacttcttttcccagggggctcccttgcctgctcatttctggctatctgccta

SEQ ID NO: 204860 - DNA, 122 bp, Homo sapiens
gcctgcggcggcttctctcggcggcgccccctagtccagggccggagaggctggcctgcccgcagcgcagacaggaatgtcaccgtggtctcccaggctgaatgacaaaagttcgtggactg

SEQ ID NO: 204861 - DNA, 122 bp, Homo sapiens
tactgccctcaagtaattcacaatgtaatggaaaatccagattagtggacacacacactgcggcgatggttcaagagtcagctaatgtctgtgaatccctggaagagatgcggtttatctgg

SEQ ID NO: 204862 - DNA, 122 bp, Homo sapiens
ggtgggggcgggggcccttcattttctccaccaactgtcacagtcgatttgtggggctgccgcttaggcttttattaaagactctgttaatgctgagggaaagtggcagatctggactggga

SEQ ID NO: 204863 - DNA, 122 bp, Homo sapiens
cttgaacacagcctttgtaatttagaaagccctttcccatgcattgtgtctgtgaactcacgtgacactctgacactatgcaggctcccagggatgaattctcagtgtacccattctgcagc

SEQ ID NO: 204864 - DNA, 122 bp, Homo sapiens
ccgccaacggtttcaaccggccgcggggagcacgtggactcgccgccgccagcccagcgccgcagctacctgcctctcaggcttcgcggtgcagaattcgcttctgaaccacccagcgcgcc

SEQ ID NO: 204865 - DNA, 122 bp, Homo sapiens
cttccgtaaaacatcatggcggcgccctctgctggctctcgggaagaccgcaaaaaatgacgtcacgagcaggcgcgcgtattcgcgtcttgggagcccgggctgcggcctggcattcgcag

SEQ ID NO: 204866 - DNA, 122 bp, Homo sapiens
gtggaggagtctgaggcagctgaatgataagcaaagaactcttttgttcttttcacactacggaatcaaagccatttcagttcacttcccacacctgagatgtttgtcactaagccatttcc

SEQ ID NO: 204867 - DNA, 122 bp, Homo sapiens
ccatgcagctctggaccccacccaccccgccgcaggacgacagcgacatctacctcgactcggtcatgtgtctcatgtatgaagccactcccatcccagaggctaagctgccccctgtgtac

SEQ ID NO: 204868 - DNA, 122 bp, Homo sapiens
gcttgtgatttccatttctgatgtctccagattggcacccctttctagttcaatgcctcacgagatttgccaggggcatccaaggcaaacaatcccaatctttctatataaaatgtattcaa

SEQ ID NO: 204869 - DNA, 122 bp, Homo sapiens
tgccagctccggcaggcattgggcacccgggagtcccgccgctgtggccgcgcagggcaccggatccctccaggatcccaggctcccgacgtccagcagaagtgctctggagtgaggcttca

SEQ ID NO: 204870 - DNA, 122 bp, Homo sapiens
ccttagacccaagtctccttcctctcttcctttggaggaatacaaagtgcctgagtttcacggccccggggtgcaggtcggaggcacgcgcctggaaacttgtcctaacgcctctgactcca

SEQ ID NO: 204871 - DNA, 122 bp, Homo sapiens
aagcgcggcttcaccaagctcgtctaccagaacatcttcaccgccatgcaggccatgatccgggccatggagacgctcaagatcctctacaagtacgagcagaacaaggtgagcccgcgggc

SEQ ID NO: 204872 - DNA, 122 bp, Homo sapiens
gggggtgtgcgcggggcaagtgaccgtgcgtgtaaagggtgaagcgtgtgaggctgccggcggggcggagagtgcaataactcatacttacctggcaggagagataccctggtcacgaaggt

SEQ ID NO: 204873 - DNA, 122 bp, Homo sapiens
ggctgtcatcctgtgcaaaacctgacccctggtgatatcatcaacctaccaagctgtggccgcacaggacccagccacccacaagatgagatccactctgggtccagaaagctctttcactc

SEQ ID NO: 204874 - DNA, 122 bp, Homo sapiens
gtggagctgctgcagcagcagcggtagtcccacttcctggttggcttcctgaaagcctctcgacaaggggctcagggaagtgggtctaagggagaggtgcagacgagagcgactccaggtcc

SEQ ID NO: 204875 - DNA, 122 bp, Homo sapiens
atagtgtgtagaggctgcagaataagacgaggaaatctctccaaatacagcaggagctgccggacccagccacgctcacccaggaggataccctcggaccccctgagaaagagcaaatgaga

SEQ ID NO: 204876 - DNA, 122 bp, Homo sapiens
tgccttccaggttcccagtgtcctgggatctccagctttccccaggacttggggaagccccggctggatgactagtacaaatgaaggcccctgaggttccaggacctgctgaggtcacagga

SEQ ID NO: 204877 - DNA, 122 bp, Homo sapiens
accctctggcagactcggcggcggcgacagcctgggcggacagtgcgccgtgcgcaggcgcggagctagacctcgctgcagcccccatcgcctcggggagtctcacccaccgagtccgcccg

SEQ ID NO: 204878 - DNA, 122 bp, Homo sapiens
ggttcatctcactaaggagtgccagacagtgggtgcaggtcagcgggtgcgcgcaccgtgcgcgagccgaagcagggcgaggcattgcctcacttgggaagcgcaaggggtcagggagttcc

SEQ ID NO: 204879 - DNA, 122 bp, Homo sapiens
cttagggacacagttctttctgtgttgtatcacagctgggctgtggcattcccctgcagccggatgaagcaatagagaaagtggaaagatgaagggaaaaaaagcctgtactgacagtcagc

SEQ ID NO: 204880 - DNA, 122 bp, Homo sapiens
gcagggtggggagtgggcagaggaaggaaagagaagaccagagtggttggaaacaagcctcgcattttactcaggccctccaaccaggtggacattggaagggcccccaagggtggctctca

SEQ ID NO: 204881 - DNA, 122 bp, Homo sapiens
acgctctcggttctggtggctggaagtgcgagatcacggtgtcggcagggggagttccatcggaggcctttctccttggcttgtagatgccatcttctccctgtgtcttcacatgggctgcc

SEQ ID NO: 204882 - DNA, 122 bp, Homo sapiens
aggaggaggcggcgctgggcgtgggcgagcgctgcagggtcaccagggccatggctgcggcgcggtgcgagggcgccacagacgtctcgagctagagccgccaccgccaccgccgcccgggc

SEQ ID NO: 204883 - DNA, 122 bp, Homo sapiens
gaggccggggaaggcaggggtgccgaggggcccccagacctggatgacgtcagtcaaccacgcacaggtgctggaaaggatgttccgggctacaggggccaaagcctgtatgcaggagcggg

SEQ ID NO: 204884 - DNA, 122 bp, Homo sapiens
ccccttctcctccccaccccttcggcgcgcgccttcccgccccccgcgccgccccagccgcgagcgccctggacacccactccgcagccaggctccggagcccgcccccacccacccgccgg

SEQ ID NO: 204885 - DNA, 122 bp, Homo sapiens
atagaatgtttaattttatatgccaaagacctttttcagaattaaaagcaagtttaaatgcggaacaatgattttgtaatacattattttgctcaattagcagattttgatggctttagaat

SEQ ID NO: 204886 - DNA, 122 bp, Homo sapiens
tccctgcccatttacttgtttccgccccatccgggctgtgcttcaagccatagtggctctcgatgctccggagatgctcagcacagagtgtgattcgatggacccaaaagccaaaccccaga

SEQ ID NO: 204887 - DNA, 122 bp, Homo sapiens
gatgagctcgggccgggtgacttaacagatgaggaagtgtctcggggccatcggcggaggcgcagcccaggggtccccagctccccgcctcgccacctggggacagcccacggcccggggct

SEQ ID NO: 204888 - DNA, 122 bp, Homo sapiens
gtgctccctgaagaaaaagttcctggtccttttaagggcttacaactgtaagagggtctgcgtgaaagggttgtgatagacggagcaagtgatctataggcaacacatggttagagttgggg

SEQ ID NO: 204889 - DNA, 122 bp, Homo sapiens
ggggctgcaaggtgccccccatccccaacccccatgtctggagcagcctgggaggaggcccgcctgcatctgccaagagaaagtctgtctgaagtcatgggcttctatcccctctcccacca

SEQ ID NO: 204890 - DNA, 122 bp, Homo sapiens
agaggagtctcgctatgttgctcaggttggtctccaactactgggctcaagtgatcctcacgagtagctagggctacaggcacaggacactatgccaggcttagtgctacaatattctgtct

SEQ ID NO: 204891 - DNA, 122 bp, Homo sapiens
ggcggaggtgggagataccgagcggcagggtggtgggtcagcccatcatgccccctgctccgtgaagccctcatggtcttggactgggccttctgacactctcccgctgattgcaggaagtt

SEQ ID NO: 204892 - DNA, 122 bp, Homo sapiens
ataagtcttttgagaaggatggcatccctacctcagctactgagcatgcgggaaactgcgcgcaagcgcacaacagcgatttcacactgcctctttagactcctgatccgcgggaaaattcc

SEQ ID NO: 204893 - DNA, 122 bp, Homo sapiens
cctgagcgacccggcctaggcagccgggcggcggcgggctctgtccacggtgctggagcgcgtacctgattcaccacgtccatgtccgccagcagcagcatcagcaatgcagggggcgggag

SEQ ID NO: 204894 - DNA, 122 bp, Homo sapiens
gtcgcagtcacgctgcatccggcgacagggggcggtgtgtcctgcgaaaagtcaaaacgccggaagctgcccttagtgtttttcagcctcttggtcttagggaaagtgaggccgtgttttac

SEQ ID NO: 204895 - DNA, 122 bp, Homo sapiens
ctcaacagggtctgcggtcagacgtcactcccaggtgactggcaatcagggatgccgcctcgctcacctggccacccttgaagattgtggatcctgcaccggctagccggctggcagagggc

SEQ ID NO: 204896 - DNA, 122 bp, Homo sapiens
aaagctacagctctgaacctctctctgcgaggtctttttgacaagctgtttggggcaccgcgcagacgtctggcgccgggagccagagctcgggcccgttgctgagccctgtgttcctgcag

SEQ ID NO: 204897 - DNA, 122 bp, Homo sapiens
ttaaagtctaaacgagtgacagagtcacatgcatcgctggcagcatttcccggtgctccacggtgcccactgagaaatgggtgtcttcgaggggacctggcattggccaccgccatttcccg

SEQ ID NO: 204898 - DNA, 122 bp, Homo sapiens
gcagggtgttgagtccagaggtgatgcactgcgacttagatttgaaaagatctttctggccgctgtggacctaggctactgcatcaatccaggtgagcgatgatggtgtgtgaaaccgtggc

SEQ ID NO: 204899 - DNA, 122 bp, Homo sapiens
tggaattggctgtgccctgccacctgcagttggtctcctgggccaggcctctgaacagttcgtaggttcgccccaccttcctgcaaggtggataggctgcatgtctggggagcaggggctgg

SEQ ID NO: 204900 - DNA, 122 bp, Homo sapiens
ggactcttccgggtgacccccgaaatcccagccggactcccttcaccgaggtcggaataacgtccagcctgggtgcagcccacctggacagagtccgaatcctactccatccttcatggaga

SEQ ID NO: 204901 - DNA, 122 bp, Homo sapiens
tgctgctatctcacattgtgaccttgagtggtcactaatctctcactagatactgggcctcggtagcctcgtctgttaaaggggatgactcaacttgggtaagtctaaagttttctcagctt

SEQ ID NO: 204902 - DNA, 122 bp, Homo sapiens
ccatcaatacgaatacgaggtccgaatgcggaccaactgataccattttctgttgctcagcgccctctaagctttggtgtttcacttaatgtatttggcagtgttcatcacaggctagagag

SEQ ID NO: 204903 - DNA, 122 bp, Homo sapiens
cctgtcattgagccaagaaagtccagtttatgacacgtatgtactagtgaacaccgtcctcgatctgtacgaaatgtgaaatgtttagggacatctccatgctgtcacttgtgatttgccct

SEQ ID NO: 204904 - DNA, 122 bp, Homo sapiens
tcacgtgtgacttaccctggtagagaaaccccctgtgcagccaccgtacggaagtgtagccgtagagggatgcgcagtgcatcttgtgatggtgctgacagacgaccatgttgctggtttat

SEQ ID NO: 204905 - DNA, 122 bp, Homo sapiens
gtgttcttcctcctcctttctcttacccgttagaactaattgaataggcccagaagaaatcgcattggtttagaagtcaggccaggattttaatcttcgttctaaatacacttttttttttt

SEQ ID NO: 204906 - DNA, 122 bp, Homo sapiens
agccaccgcaccaggccaggtgtgtaaatgtttaagaggataaatgagagatgtcatgtgcggatatatgtcctattgcaaccagaaagtgcctctattaataaggaactgcatataatagt

SEQ ID NO: 204907 - DNA, 122 bp, Homo sapiens
cggcgatgctggtctaggcggctcgcgggctcgctctttggacacacatttaccgcataccgactctctgcagggcaccctgagggtgacggtgaataaggcacagcccttgcccttgtgag

SEQ ID NO: 204908 - DNA, 122 bp, Homo sapiens
ttgtagacaaatgttaaagtaacatagcctttggagacagactggttcaaatcctgcctccgcacctgcctagctgggtgacctttggcaaactttactttctgtctgtaaaatgggggcaa

SEQ ID NO: 204909 - DNA, 122 bp, Homo sapiens
aggcgtgagcaggtgggcggggccccggggtcgctgcagtgttagtgttcgccgtggaggcgtgagcaggtgggcggggcccgggggtcgctgcagtgttagtgctctccgtggaggcgtga

SEQ ID NO: 204910 - DNA, 122 bp, Homo sapiens
atatttccatgatgtttaaattttaaacaaccaaataaaaccctcaggtattgtgctgcccgtacaattatgatgctcaagtaatgcactctggtattgactgacgcaactgcactgccttt

SEQ ID NO: 204911 - DNA, 122 bp, Homo sapiens
aaatatgaaataataatagttctccaaattcatgtatagtgccagcaccaaacaaacactcgataagtagtacctaatgttcccttgaaacatggattctccacaccaggcccttgctcatt

SEQ ID NO: 204912 - DNA, 122 bp, Homo sapiens
tgtgatccacccacctcggcctcccaaagtgccgggattataggtgtgagccactgcgctcggccaccaaaaggttttgactggtctgtggaaatttttaaccttggagggcagcccgctgg

SEQ ID NO: 204913 - DNA, 122 bp, Homo sapiens
ggaaagctttccaggcgtccgcccagcatgctcactgccgagggcggcaggaaggggaggcggcggccactcccggccaagccctggagtgaagaaatctccgggacttccagtaattgccg

SEQ ID NO: 204914 - DNA, 122 bp, Homo sapiens
tcttaactgtaaggagcagtctttcttctgggtttgggtccaggctgggctcctgggggacgcagggaaggagagaattgtcagccccctagaggttcagaacgaaaggtacaaactcaaca

SEQ ID NO: 204915 - DNA, 122 bp, Homo sapiens
gtgcgcgcgcgctagcagcatcggaggtacagatgtggttctgttcctcacaccaacccgcgttagaccagatctgaaggggtctctggtctgctcctgaccccttgagtctgtgaccttgg

SEQ ID NO: 204916 - DNA, 122 bp, Homo sapiens
agacagtcctggccgcgcggcggcagccgctcccgccctcgcctgccccgcccctgtctccgccccctcccggctcaggccccgccctctggccccggcccggcccgtcccgtccaccgccc

SEQ ID NO: 204917 - DNA, 122 bp, Homo sapiens
ctcttccagtcctatgacttcataatgccaaatcctgaaagattgtctatgttatacctacgaaaatagacttatcattctagtcattaaagaacaaaaatgtgccacagttcttctgtgtt

SEQ ID NO: 204918 - DNA, 122 bp, Homo sapiens
cttgtaggtgacatacagcgtttccagcgggactttgtgtcccgcctgtggctcacataccgccgggacttcccgccccttcctgggggctgcctgacctcggactgtggctgggggtgcat

SEQ ID NO: 204919 - DNA, 122 bp, Homo sapiens
ctgagatccagtctatagagatatttatgtacaaagtaggatagtataataaatatttagcgtgtcttctggtgtggctgtaagccccttcaaaagcagtcttttaagcccatttagtgaat

SEQ ID NO: 204920 - DNA, 122 bp, Homo sapiens
gaagagtcatgcccggtaacccgcccaaggcagtctcaccactcaccgcgccgccctcagcgacctggacatgaaccccgcagtcctgcagcagcagcagccggccctctgtcccgcggaag

SEQ ID NO: 204921 - DNA, 122 bp, Homo sapiens
aaatcttttccccgtggatcaggaaggtgcacgctctttgtggaatacgactgctcaccccgcacagcaagcagcttataagtggccctcctgcctgatttcagccctgggttcaagccctg

SEQ ID NO: 204922 - DNA, 122 bp, Homo sapiens
agtgtttcccagggcccctctttcttggcgtgtcctggagcccaagttttgtctccttaacgccatgagactactgaaagcccagcttctcggccaggtttgcagagtgttgggctcatttc

SEQ ID NO: 204923 - DNA, 122 bp, Homo sapiens
cccatttttaggtgcaccaatgaagagttaaacagtatgcatttgaccacacatactactcgtgatccaactgggaatatatcctaggaaacttggctgcctgtccagtgtgccacatgacc

SEQ ID NO: 204924 - DNA, 122 bp, Homo sapiens
ctcgatctcctgaccttgtgatccacccgcctcagcctcccaaagtgctgggattacaggcgtgagccaccgcacctggccaactatcctacattttgagcttaaccttgcctatttttttt

SEQ ID NO: 204925 - DNA, 122 bp, Homo sapiens
gcagccccggggccgcgccgcagagtcgggcttcctggatacatagaggcttgtgccaggcggggtgggaagactggattttgcagtggaagcagcatctcttccgtctgggacctggctga

SEQ ID NO: 204926 - DNA, 122 bp, Homo sapiens
gcgcattttccagaggctggtgcagggcaggcaagaacacacggtgtcataggacagccccgggcacctccccaacgcgggctcaggagaaacggtgattacggagggaagacctggggagc

SEQ ID NO: 204927 - DNA, 122 bp, Homo sapiens
gcagcctgccagtcagcacccgagaatggggaggagcttgagtgctaccccaggagggggcgggtgggacctttgggttcaagctccactgggcttggcaggaggcccctcccccacagcca

SEQ ID NO: 204928 - DNA, 122 bp, Homo sapiens
gtacgaagggatgaggagaagttggcactctgccctgggctgcagactcgggatctaaggcgctctgcccgccggaatccgttgtacctagggccaccacgtggggtgctggaggtgagccg

SEQ ID NO: 204929 - DNA, 122 bp, Homo sapiens
tttccctaggggacgacgtgggaggttgttaccccagttgggggccagacgcctgggttccggtttcccacgggttctggccttgggggaagggctattcgggccggctggtccctcaaagg

SEQ ID NO: 204930 - DNA, 122 bp, Homo sapiens
ggcgctcgccgcctgcagctcgggtgctgacggcctgaaagactgacagactgacagccccgaaacttcgcggggaggagagggatagacgcgcggggagtcgaagccgggaaacggcgcct

SEQ ID NO: 204931 - DNA, 122 bp, Homo sapiens
ccactacccaggagcctctggagccgcgcctcctggtggggcttgtagtggaagaatgcacgggtgggctcttccggttttcccggtgaggctgaggctccgggatggcattgggcttaccc

SEQ ID NO: 204932 - DNA, 122 bp, Homo sapiens
caaggatttgcattttaaagatcactactgtgcacttaaaattattaggataatagatctcgtgtcaagaattcttaccaaaatgaagcaaaattcgcacacaaaaaaagaataagcaagga

SEQ ID NO: 204933 - DNA, 122 bp, Homo sapiens
ggggcgcccgggggatccctgagcgtcacgccgctgttgtggagcgcgtgttgacaacgtcgccggggagacgggcgggggcggggcccgggagagggggaggcgcggccctggcggcgcgc

SEQ ID NO: 204934 - DNA, 122 bp, Homo sapiens
gcttccctttggggtgacagaaatgttctggaactatatagaggtgatggttgcacaacacggggaattcactaagtatcactcatggtacattttgtgttatgtgtgttttaccacaataa

SEQ ID NO: 204935 - DNA, 122 bp, Homo sapiens
taacgaagtatccttcagcctgaaagaggaatgaagtactcatacatgttacaacacggacgaaccttgaaaactttatgctaagtgaaataagccagacatcaacagataaatagtttatg

SEQ ID NO: 204936 - DNA, 122 bp, Homo sapiens
tgtcaatgtaagagcagcagagtccgcgaaggtggctgttaccattccacagacctgcggcgaggactgtcaatccgattcagcaaataaccccacctctccaagccaggactccagagctg

SEQ ID NO: 204937 - DNA, 122 bp, Homo sapiens
cagtagcaccctggaaggagagaacataggaacagtcagagggagaacagccaactcatccgacccagctgccctcacctgccaccgctgcctggggagaggggagaggctcaacagagagg

SEQ ID NO: 204938 - DNA, 122 bp, Homo sapiens
ttattgatggactagatgtcagaaaccctagccaatcttggttggctctactgcttgcaacgttgtgactgtggacaaataagtcaacagctccgtgcctcagtttcccttatttggaaaat

SEQ ID NO: 204939 - DNA, 122 bp, Homo sapiens
ctcaattcacagcagcccccttggtggctgagaggaggggagaaagcttaaccagattcccgttgtacaaatagtcataaggtgacttttgaatttgtgtgaattgattgacattaatgaaa

SEQ ID NO: 204940 - DNA, 122 bp, Homo sapiens
tgacggtggtatccatggcgatgtcgctaagtcccacgctggccatcttggtgttgtacacggtctggatgagcacggcctccaggctctgcagcacctgcagcagctccgcgcgctgcacc

SEQ ID NO: 204941 - DNA, 122 bp, Homo sapiens
tccatgaaggaaaatcaccgccgcggtggccttccaggtggcgggcacgatggctggcagcggggctgacatgttattgctgcacatacaccggctcagctcacagcgcaaacggaaggaag

SEQ ID NO: 204942 - DNA, 122 bp, Homo sapiens
ttctacgtgggcccggtgcctccgaagcaggtgacatttgccaagctgaatgataacatccgtgaaaacttcctgagggacatgtgcaagaagtatggggaggtggaggaggtggagatttt

SEQ ID NO: 204943 - DNA, 122 bp, Homo sapiens
cagtgagtgagattagtaccaaacatagacacttcttggaattcaatacaccatcagggacggggcaccaatttggttcagtgttttctaatcaccaaatgcaaataaggaaatgggatcat

SEQ ID NO: 204944 - DNA, 122 bp, Homo sapiens
aaaaggaaaatcccgaggagccaggaacgccactggctggctggtgtctgggctggaagccgggaaggcttggctgggggggagcctttggagaggcagggctctcaccaacatctctcacc

SEQ ID NO: 204945 - DNA, 122 bp, Homo sapiens
agggccttttggtttcttggtgaccaggtgttttgcaaatgaacagagagccaagggtggcgcagtagttttcaggtgactcaggaggtagcttgtctgattcttaaggtaaaatcgagatt

SEQ ID NO: 204946 - DNA, 122 bp, Homo sapiens
gaaaacacccaaaagggccgctctacagaggtgacggcaggtgagcagctgcgtgggctgcgctgggaggaatgaggagtgacagctggtgggaatggggttctcttgggggaaccaaagaa

SEQ ID NO: 204947 - DNA, 122 bp, Homo sapiens
cgggggcggaacttcagaggtccacgctggcgcctgcgcgtgtggttgaggatgggctggcggcgggtccgggtccgctgcctggcgctgcgggcggcgggccatggtggtttggattgagc

SEQ ID NO: 204948 - DNA, 122 bp, Homo sapiens
catcgcgggcgcgacgcctgagggacagtctggggtttggctgtccggacggtgcagcggcgaggccggccgcgaagatgccagtggcggtgatggcggaaagcgcctttagtttcaaaaag

SEQ ID NO: 204949 - DNA, 122 bp, Homo sapiens
attaaatgttttgcttgcattttctcatttaactttcatagcaaacctatgaggtggaaacgatatctttatttgacagtgaaggaaactgaggttcagaaaggactagtaacttgcccaag

SEQ ID NO: 204950 - DNA, 122 bp, Homo sapiens
ctctcccaggcagtccatgcctgtaaacttccagaaactgacttccggagcctgtggccccgattgccatggatatgctgtcacactctcacacgtatttgtggttgctacggagaaacatt

SEQ ID NO: 204951 - DNA, 122 bp, Homo sapiens
ttattgtgtgctgggcattttacatagatgagttcagtcaatccacccaatagtctcaagcgggtgctgttgttatccctagtttagagatatcaaagaagttgaacaagccccatcacagg

SEQ ID NO: 204952 - DNA, 122 bp, Homo sapiens
cccgccccgactgcggacggagtggatggggtgcaccgcctcagacccgcttcctggggtcgcgaacttcccgggccccaaggtccctgccacctcttccaaatgctggaggactacgcact

SEQ ID NO: 204953 - DNA, 122 bp, Homo sapiens
tcactgcgagggtccgcggcttcattcttgaagtcagtgagaccaagaacccaccaattccggacacaacatcatcacacaattttagaatgcgaagataatgaaatgggaaaagttccctt

SEQ ID NO: 204954 - DNA, 122 bp, Homo sapiens
tccttcagtaaaaaccctttgtgcccctgcaggcacttcctgtgaatcattgtccggccccggagctaccggctttgcaaactgcaggtttctgcaggaagccacagatgaggtgtgccaat

SEQ ID NO: 204955 - DNA, 122 bp, Homo sapiens
ggtaaggtattttttttggcagggaataaaaaaggtcctgggtctagggaggtaaacaagcgtgagccagctgagttctagcgggggtccctgaacaccaaaaggacaagactgtttctgaa

SEQ ID NO: 204956 - DNA, 122 bp, Homo sapiens
tcatccccaggacgtcccgatagaaacgcgccgtctggaagcggtttcccactttgaatacgaagtgcagagctctgcgagcagccatgattcccgccgcacgcagccgtcacgcgcaccgt

SEQ ID NO: 204957 - DNA, 122 bp, Homo sapiens
gcacaattgcggacacgcaatcgcaaagccagctctgcgatacagccagccacccagggacgggcggagtctcccctggagcccctgccttttgtcagaaccgcctcctggcttttccagtt

SEQ ID NO: 204958 - DNA, 122 bp, Homo sapiens
ggcagctcacgcgaggtgcgctctgtggctccggtgcctttggaggagcccgtggagggccgatcagagtcccggctccggcccccgccgccgtcggagggtgaggaggacgaggagctcga

SEQ ID NO: 204959 - DNA, 122 bp, Homo sapiens
aaggaaaggaatcaccacactctgatgggctctgggttaagagttcttgcatcatcctctcgttctttctccccagtatactgtgctccctagaagacagaggccacatagaagcccagcaa

SEQ ID NO: 204960 - DNA, 122 bp, Homo sapiens
aagccttctccttagaactcagtcactcctccattagcgcttgccacactgtcctggaaccgaatacacggatgcccctcagaccacacagaagaaccatatcttaccatcttttcatgctc

SEQ ID NO: 204961 - DNA, 122 bp, Homo sapiens
ggtggggctgtcccgccggcctgtcacgttgcccttccctgggcttgtgaggattggctccgcttggacctttgcggtgctcccggagccctccaggttgtccctccggtgccggaggccaa

SEQ ID NO: 204962 - DNA, 122 bp, Homo sapiens
attatggcccggaagcatgagtctctccctcctcccaacacacacatatatacacagagacgttgtactcctggttctagctactttaatcaccatgggtattttgtcagaataggtgaggt

SEQ ID NO: 204963 - DNA, 122 bp, Homo sapiens
gaggcggaatttttatggcggccggatccggctttctctgaacagcgagaaggcgcttagcgccctagggaccaggtaactcctgaggtgagcttcttggtggggatcaagcccagggggcg

SEQ ID NO: 204964 - DNA, 122 bp, Homo sapiens
gccagaggctggggccgagtgcagggcccctctgctggcaggatcaggggtttacaaacacgaaaacaggagcctgctgagcagcccccacagcaatcagggctctgtgtccagccagctcc

SEQ ID NO: 204965 - DNA, 122 bp, Homo sapiens
ccagcgatcggccccttccccccgagcctcgccgctccgagcagagtcactctaatccctcgtccaccatttatcgagccatcagagatggtttcagaatctcactacaccgttagcaccag

SEQ ID NO: 204966 - DNA, 122 bp, Homo sapiens
cagagtgtagtcactaggggtggacactttctgcttcttcatctgcacttgcgactgtgccgtgagttgcagcttgatggcgctcgagttgatcttggtggccaccagcagctccttcatgc

SEQ ID NO: 204967 - DNA, 122 bp, Homo sapiens
gatgacctctaagctttttgtgtgtcaaagctgaaactagaagtcccatgcatttttccccgatatttattagaagcctactccatatcatgccacatggcagtgaacacaagacacaaaat

SEQ ID NO: 204968 - DNA, 122 bp, Homo sapiens
cagacagcaatgacagtggaaggaaaagggcaaccctgtgagaaagaaaagcctgagcagcgcagattgtcagagagcatctgcaaaagaaaggtgagagctttctgcaaaagaaaggcgag

SEQ ID NO: 204969 - DNA, 122 bp, Homo sapiens
ccctcccgggttgtggctgagcccacgggaggcgcgtatttcccacgccatcgctggctgcgcttgctcctgtgggtcctgatgtctcctgagtgagcccccggccatggagcacccagcct

SEQ ID NO: 204970 - DNA, 122 bp, Homo sapiens
ccttcatggctgcaggcagcatgctccgggtgggcctgggggcggcgcgggggcttggggcgcgggtcctctggggcgcaagcctggaggggagaagcatcggtcaggagaccccaaagacc

SEQ ID NO: 204971 - DNA, 122 bp, Homo sapiens
actgggactcgaccgattgggatcctactcgcctgcggactggagaaaccacctgggaaccgggcactgtgacaagcaaagggtcagaatcaggtgcgatcgaggaagcacctgaactcctt

SEQ ID NO: 204972 - DNA, 122 bp, Homo sapiens
ctttctttccttttttgagatagggtcttgctctgtcacccaggctggaggtcagtggcgcgtccttggctgcaacatccgcctcccgggccagcgaatgccccccaacattaatccccacc

SEQ ID NO: 204973 - DNA, 122 bp, Homo sapiens
ttacattagggttcactcgttgtgttatacattcaatgggttttgccaaatgcataatgtcgtgtatccactgttacagtatcctgctgaatgatttcactgccctaataatctcctgcggt

SEQ ID NO: 204974 - DNA, 122 bp, Homo sapiens
gggtccggcctctctgacgccttggagggcaggtgcggatgccgaggagagtggtcacctcggccagcgttggttggccagtcaggatgcgaatccggatctatgtccctcgcccagaccga

SEQ ID NO: 204975 - DNA, 122 bp, Homo sapiens
ctggtgaagtctcggcatgtgttgctcggaggtcggattgtgctccgaggtcgccccaaccgaaatttttcacgcaggtttgatagtttagggcctgtggacttgttaagtgttgtttgcgt

SEQ ID NO: 204976 - DNA, 122 bp, Homo sapiens
ccgccctgggctgtggtcatcctcgctgtgacagcaagccaaatgtggcccgacttacagcggccctcccggtgggagacgatggcggggagaaggcagggaggcacagggcatctggcttc

SEQ ID NO: 204977 - DNA, 122 bp, Homo sapiens
ctctcctcgcccacactcgacaggggacaatcttgagtgcacacgagggtgtgagtggggcggggtaaactgaaaaagtgtgtgcccacatcccggccacgccacccgcatacggggggcac

SEQ ID NO: 204978 - DNA, 122 bp, Homo sapiens
tcacattccccaggtgggggcaggattccccattcctctctgacatccccatgcaactgccgtccactttcttgttaccctaggagattgctaggctagtactgacagatgaggagaagagt

SEQ ID NO: 204979 - DNA, 122 bp, Homo sapiens
gggagggactgttctcagtaggaggctggactcagagcggcgcggcgcccggggctgtttcgtgagctggagccagcggctgcccgggcggcggtgcgcgcactctccaggctgagacacga

SEQ ID NO: 204980 - DNA, 122 bp, Homo sapiens
ggtggcacaattggaagtctctaaagaggtctgggctttaaaagggcctctccctctgtccgaaggactgggatttataaatactaaagctgccggccattgtgattgcttttactttggga

SEQ ID NO: 204981 - DNA, 122 bp, Homo sapiens
ggggggaggcagaagcgcgtcccgcgggagaggtggctttgaggagtgagctcccggtcccgcggggacgcgagtgggcccagtgcccgggctgccaggcggggcggggcggggccgggcga

SEQ ID NO: 204982 - DNA, 122 bp, Homo sapiens
ttcaatgtcataatttattttttcctccaacatttattatgaaaaaattcaagtgtaaagcgaagtcgagagaattttacagtggagcagacctcaagagaaggggaaggatggatttcccc

SEQ ID NO: 204983 - DNA, 122 bp, Homo sapiens
aaacaaaaccaaaccaaaaaaacaagcagccaggcagcctaaccagttctcctaagaaaccggtctctggacacaaattagtcccgtcttccctaaaataaaacccggcctgcagacatgag

SEQ ID NO: 204984 - DNA, 122 bp, Homo sapiens
gcctcactgctctgtgatctccaaagaacagggactaggttttatttatttctgcattgccgcagagcctagtatgtgctttatagagaacaggctctcaaaaaaattttaaattaaaagaa

SEQ ID NO: 204985 - DNA, 122 bp, Homo sapiens
ctagcgcagggccgccggggcccgactcacatgactgcaccccacccccagggccccttgcgttaggtctcttcgcggccccaggaaaaagaaggagggaaacctaggggagcagaaggtgt

SEQ ID NO: 204986 - DNA, 122 bp, Homo sapiens
caaagtcctcttcctcgtcctggtgagtattttgttcctggattgcttgtcagccttgtccgcctggagcaatcagtagccagcaggttccccacctttcctggagtccgaggcagctgccc

SEQ ID NO: 204987 - DNA, 122 bp, Homo sapiens
acttcatttccatgagaatggttgctgtggtgattgctgcgtcttcccattggtcattgccgagcgtattgcggttctccgggagggttatattggttcccattccacagcggccgcaacgt

SEQ ID NO: 204988 - DNA, 122 bp, Homo sapiens
ttgacaatactattgcactgctagctgtaaagtacagtagtgcaataaagtcagagcattcgttagcagtaataagtaggaaaggaacacaaaagcatcttgcatcggttgaagcttcagtg

SEQ ID NO: 204989 - DNA, 122 bp, Homo sapiens
cctctccctcttcatgctctctggttccctgccacctaccccacccccgactccaggtcccggaaaatttgccaagggtttgggggaacattcaacctgtcggtgagtttgggcagctcagg

SEQ ID NO: 204990 - DNA, 122 bp, Homo sapiens
gcgccgccacacactcaggtgagcaaggcgctgcgcgagtgtcaactgccccacctaaggcgcctgccttcctcaagccaaagtcgactcctgggacctggaatcagcagctgagaacagac

SEQ ID NO: 204991 - DNA, 122 bp, Homo sapiens
cagccccgggagcaggggagttgtgaaatgggcggctagatctgcccggcgctgtgaattcgccagcgggagcgcgctcgcggccgcgcgttctccgctttcccggctccgtcgctgacgcg

SEQ ID NO: 204992 - DNA, 122 bp, Homo sapiens
gagggaagcccgagcctgagaggggtccagggccaggacgagatgacgaggcaccaagaacggccaggtccaaacgtctccagtcccaatctctcgagaccaacccaagcagggcctggccc

SEQ ID NO: 204993 - DNA, 122 bp, Homo sapiens
ataattgctcacagttcttgatggcatccaatccagaacagaacttcaattccttgaactcgtctccaaatcacgtaacaaaagttcagattctatagtaagtcctttctaatactttctta

SEQ ID NO: 204994 - DNA, 122 bp, Homo sapiens
gccgccgcgaagcgccccaccccctgcccgcgcgcccgcgcgcccgccgcccattggccgcggcgcgcccacatgcaaatgtatcgccgtcgcgctctcccattggccagcgaggtgccgcg

SEQ ID NO: 204995 - DNA, 122 bp, Homo sapiens
aaaacactcgtcacctcaatcaagacgggtacgaaggccaacggacgccttcctttagaacgctcagcacacagagcaacttctcacgcctactctcaaatggcgtactccaaactagcact

SEQ ID NO: 204996 - DNA, 122 bp, Homo sapiens
cagaacgggagcagagaaccgcggtccagtgttgaggggtggctgctctcctaaagtaaacggggatcaaaagtgctaacttctcggatacttcagagtctccgaaacttgttcttgtagcc

SEQ ID NO: 204997 - DNA, 122 bp, Homo sapiens
ttcacatatagttcacgcttttattcgtatagattggggaaaaacaaaaaaaatttaagtcggggagcaaaaaaagcaacgactcttaataaggcaaatataaattaatctgtcagaactac

SEQ ID NO: 204998 - DNA, 122 bp, Homo sapiens
ccgggaatgcccgcaggcgggtcaccgcagtctcctggtggccacaaagtgtcctgggcgcgcgccggagccgtagcagccagggagatgagggcggccgcaggcccagcgctgacaccgcc

SEQ ID NO: 204999 - DNA, 122 bp, Homo sapiens
atatttaacacatttctaagctttacttgtcctcagttcaactgtctgtgaaatggggagcgataaaagcttttcatgtagcatcatggggaatatttcaggaaacaacatatgcaaagtgt

SEQ ID NO: 205000 - DNA, 122 bp, Homo sapiens
ctcacgaaactcccaggcgctgtataggaaacataaatccgttgtcaggcagcagtagcacgctgttgctctcggagcttggctgctcgttcgtgctcgcaaccactaaggtctacgcaaac

SEQ ID NO: 205001 - DNA, 122 bp, Homo sapiens
aataaagggcatttgctcacccttgttcaggaggtaaggagactcgtacactgtcgcagacgttgccctttgccggtggggtccttgaggaatgagaaaattggacctgtactgcctctgac

SEQ ID NO: 205002 - DNA, 122 bp, Homo sapiens
ggggcgaggacatcactggaggctgttaaaatgagtctgtgtgcttgggtcaggcaaggacgcggccagcatcagctgctgctgctcttagcttccctgcctgtgtccctcggctggccctg

SEQ ID NO: 205003 - DNA, 122 bp, Homo sapiens
ccaggcgacgtttcgtggttgtatttggcccactaaatcctaggtcgctcttcctatgtacgactgtagactcaccttctgtatcttatacaggagatgtgtagatggcccataaagggcag

SEQ ID NO: 205004 - DNA, 122 bp, Homo sapiens
gaggcaggttgcagtggccccaaaatgccagcctagggagttcagattttcttcatcttgcgggatggattaaaagggcagcatttgcagtcaagaacattaggccagggcaagctagggtt

SEQ ID NO: 205005 - DNA, 122 bp, Homo sapiens
gtggaacacaaatgaggtaaaatattagagaactgattcagcaaggactaaagattgggacgcaatgccctctgcacagtctggttcttgaggttgcggtgggtgtgtttccagtggcgtag

SEQ ID NO: 205006 - DNA, 122 bp, Homo sapiens
cctgctcccaattccctggtctccttgaagatactctcaggacaaggggtcatcacatctcggcacagctgctcaggggttcctagggaggcagcactttgggtgtgaacctgcctggcagg

SEQ ID NO: 205007 - DNA, 122 bp, Homo sapiens
cggggcatccgggacgcgggaggccggtactgccaggagcaggacctgtgctgccgcggccgtgccgacgactgtgccctgccctacctgggcgccatctgttactgtgacctcttctgcaa

SEQ ID NO: 205008 - DNA, 122 bp, Homo sapiens
caaacccttcccttggatttcagctttccccagccacataatttaggttttgtggtccaccgggaactggaccctgtaaattctacagcgatgctgttggcttccagaagtctccagcctgc

SEQ ID NO: 205009 - DNA, 122 bp, Homo sapiens
ttttgagcccagcccttgggttcttgcctctgattgagcagggcgggttctgaggcggatcgtggggcggggcccgctctgctttttgacagctgtctcttgcacagccgcagccaagtccg

SEQ ID NO: 205010 - DNA, 122 bp, Homo sapiens
ggaactcaagtggctctaatactttgctacatcaaagtcatactttcctgcttgcttttacgacattcctatttggtctctccatttttggcctctaccagactatgtctctgccttcctat

SEQ ID NO: 205011 - DNA, 122 bp, Homo sapiens
gatagcggctgcggcgcctgcagtccagatcctcgcagttctgcgggcgaaggaggcgaacggaatcggcccccagtggggagcgcaacaagccacagtagccaaaccccgcgctcctgccc

SEQ ID NO: 205012 - DNA, 122 bp, Homo sapiens
ctcagttgcatcttccagccgcgggctcctggcccaaacagaatgtgtttgctttcacaccgggacggcaagcggagtccgcctcagtgagcagcgagctgcgcagtccggacgggtgtcgc

SEQ ID NO: 205013 - DNA, 122 bp, Homo sapiens
gttagggagcggggcattttcctgggtggagaaggtaacggggtctgcacccgtggtcctcgccccaagtttcatttcctcactctcccgggtggcttcccattaccccgccactgatccag

SEQ ID NO: 205014 - DNA, 122 bp, Homo sapiens
attctcccctcaccttctgcttgcacttcccatcaatgcaaaagcatatctgggtgctttcgctccacctcagggttgaaggctgtgtcgattcctgtcacacacagattatattttgctgt

SEQ ID NO: 205015 - DNA, 122 bp, Homo sapiens
cattctggcccagctctgcagccaggtcagggtgactcagagggctggctgctgcctccccgccgtggaccctgcttttgaagttcacttagtcttcaaactcacagctgactgagaaagcc

SEQ ID NO: 205016 - DNA, 122 bp, Homo sapiens
tgctggtagtcggggtactcccctcgccgcagcaagtattgttgaccttggtagttgggacgctcatagagcatccagcagccgctctccacccggatggagttgcagcggctgaaatacgg

SEQ ID NO: 205017 - DNA, 122 bp, Homo sapiens
tgatctttatggtttatttgactagagcggcctgagaaaccggctgagcctggttacttacgatactctcgctctgttccaggggctcagtgacagctgccttcctgagccgcttcggttac

SEQ ID NO: 205018 - DNA, 122 bp, Homo sapiens
ggctgcgctcctggcaccgatgtattgtctctgctccccatgatgaagttcttggcaggtcggcttcttccagagccaggcaggttcattactagccagcatgtcaggctgtgaaattaaag

SEQ ID NO: 205019 - DNA, 122 bp, Homo sapiens
accctgagatattttcctagccttggatctctgtgtatagagtccagaagcaccagttaccgcactcccaaatagggacctacaaaaggttctttcagtcactggcaaactttcttcatagc

SEQ ID NO: 205020 - DNA, 122 bp, Homo sapiens
aacaaaagacatggttactacagcacagaagccacttctgtagggtgacactattgccaacggctgtgccagctccgttaggtgccctggtccttcctcttgaacaggggctctggagccgg

SEQ ID NO: 205021 - DNA, 122 bp, Homo sapiens
cacgggcgcctggtctctgagaggtggcatgctgcctgccgccctggtgcctggctgccccggaaggggcccccagtcgccggccccgggaaggtgctccaggctcgcggctcctcgggggt

SEQ ID NO: 205022 - DNA, 122 bp, Homo sapiens
caaggtatcactgagattatccatgttgctccccgagggcgaggaaccggcggggcgaggcgaaggtctctggtgcgggcggcgcggctctgtgtcctccctctacctccgtctctatttat

SEQ ID NO: 205023 - DNA, 122 bp, Homo sapiens
tttgaatcccgtgggcctggggagtctcagctctgctgctgcccacaagcaccccccagccggattagggcaccagcctcaggctgccccctgatcctttcagtggcctctgggctccttat

SEQ ID NO: 205024 - DNA, 122 bp, Homo sapiens
agccgaagagaaatcagtgaatgagactgtgactcaggctgaactcttccccccacccctcgcctgtcacccaagcctctcctccgctccaaacagacacacgcgcacagagacgcgcccgg

SEQ ID NO: 205025 - DNA, 122 bp, Homo sapiens
ggattaaaccagaccgtgttgaaccgagcggacgctttggctaaagacccgaaaatgttgcggagccagtctcagctagacctgtgcaaagactctccctatgaattgaagaaaggtatgtc

SEQ ID NO: 205026 - DNA, 122 bp, Homo sapiens
acctcctccaccttctgccagagctgtctttgcacggcaaagcacctttcagggtccacccgatgggaccagtgccctcgggggtgggcagccctggtccatcccagtgcgccccagctggc

SEQ ID NO: 205027 - DNA, 122 bp, Homo sapiens
tcccattcacaattgcttcaaagagaataaaatacctaggaatccaacttacaagggatgcgagggctgatattttctattctagatgaaagaatacttctcaggcatctgatgaccaaaat

SEQ ID NO: 205028 - DNA, 122 bp, Homo sapiens
atctcttcttcctgtttagagacagtactgaattccagagctggacctgtgaaataccagcgctcctctccctctagggcttagaaacgaatccctgagggtgtttgtgtgtttagacttca

SEQ ID NO: 205029 - DNA, 122 bp, Homo sapiens
tggaagcgcgcgctggtctggacatgacgtaaaccaatgggcaggcccggaagacagaggcgtttgcttccgtggccaaaggcgcttcatttccgggtgaaactggcattgagggtactggg

SEQ ID NO: 205030 - DNA, 122 bp, Homo sapiens
tcctaggtgcattcgccgtgaccaggaaaggccactgttctgtgagtgttcttctcggagcggaaggcctctcgcctagtccttaaagaaatacccacctgcagccgggcgcggtggctcac

SEQ ID NO: 205031 - DNA, 122 bp, Homo sapiens
cacagctaagtttctctttcaagttatccacctgttgtctatacagctgctgtttactgacggctcagcaaagagcagtgggattcttatcctatttttatggtgatttctaacttcttgct

SEQ ID NO: 205032 - DNA, 122 bp, Homo sapiens
cttgcagtgggtgggcacacctgcctggaggtccatgcggaggcgcgggaaccgctgaggcgactcaggcccgggtgcggggatttgggtgtctctcggaggtcgcgagcatccaggcggag

SEQ ID NO: 205033 - DNA, 122 bp, Homo sapiens
ccgaggccaccccacgcggccgcagggccgggcagaggggaactgcagggaggcgcgggccgcatccctcccggaggtctgcgagcttcttgaggcctcacgcccccttttgagccccgctg

SEQ ID NO: 205034 - DNA, 122 bp, Homo sapiens
ccgaggacccccggaggcctggagtgcacggaggggccgcgggcagcgtggggacggcgccgtcatctcccgaagcccggccccgcgctggctccccgggcggtgcagggccggcgtcggga

SEQ ID NO: 205035 - DNA, 122 bp, Homo sapiens
acaaccattctgcaccactctatgtatttgtgtggattcttcctccagaaagtgctggcacgccttactgtgttgttttaaccctgctttcagtttcattatgacagtaactgctacatctg

SEQ ID NO: 205036 - DNA, 122 bp, Homo sapiens
cgcgcgcgcggaggaaccgcggctcggaccgggactgggagctgagcggcactgggagggcgtttaaggggaggacccggcgagcgcgccctcggctggcgagcgcgcgcctggcgattaga

SEQ ID NO: 205037 - DNA, 122 bp, Homo sapiens
ggaatgtgttccctgcttgagcatttagacacattcctggattctatgtctttttctttgcgtgtgtgtgtgtgtgtgtgtgtagtgtttgtttatacacatgcgtctctcctgtgaaactc

SEQ ID NO: 205038 - DNA, 122 bp, Homo sapiens
acagcctacatagaacggtaactgtcaccaggataataaagcacaaagatatgctaataacgttaacaaaagaaaaaaatgtctttataagtacataccttttgtcgtcaaaaaaaatatag

SEQ ID NO: 205039 - DNA, 122 bp, Homo sapiens
ggacacaaagacggggtctcttcctcctcggtgaaatcctagatgggatttcctgctgcccgcccggacgatgagcggatccccaacatggctccaaggccagtgtctcccgctcccgtccc

SEQ ID NO: 205040 - DNA, 122 bp, Homo sapiens
taggtttgggtcactgccatcatatctgcattagagggcacctcaagctcaggaatgctacggctcttgcagactcagaggtaccaccttagtggtcttgcataagatctgagagaatcttt

SEQ ID NO: 205041 - DNA, 122 bp, Homo sapiens
aagatgtcttttgttctttcaggaccagcctgatggaggcagcttaaacaaacacacgaccggagtggcgcaggagttataaagtgccatatgtgaatgaacaaaggggctatactaaagcc

SEQ ID NO: 205042 - DNA, 122 bp, Homo sapiens
tctgctaacccgagggtcatcgatgacgccagggcgaggaagctctccaacgacctgaaacggtgcacgtactacgagacgtgtgctacatacgggctgaatgtggagagggtcttccagga

SEQ ID NO: 205043 - DNA, 122 bp, Homo sapiens
gagtagaaacagctgcgggagtgattcttgtctccatatatgtttataaggcactgagggcgggattagcagctcctgggaagtctggctctagttaccgtgtcagcctgtcctgggggcag

SEQ ID NO: 205044 - DNA, 122 bp, Homo sapiens
gatcaacacacctcctccagcaaatgccagttcctgtcacggcctcccaggctgctggggcgttcctgccccacacccttccctcgggtggtgctggcagggccacccaaggttcagtgggc

SEQ ID NO: 205045 - DNA, 122 bp, Homo sapiens
gccccacatcttcttttattcatccctctcttctgatctgtcagtttttctacctctgctcgtctaaaaacacatgtcctgaatgagtaaaatctaactagtttccttgcatcttcccataa

SEQ ID NO: 205046 - DNA, 122 bp, Homo sapiens
ggccctgtataaatgtaaacggttattactgtaaatgctctaacagagctgcctggggggcgcttccagggaagcgtggcaatctcaggccgggagaggagaggcgtcctgggccagggcgc

SEQ ID NO: 205047 - DNA, 122 bp, Homo sapiens
gccaccgctgtctccacagtgaaccgacactcggggctctgggctgggatgcgggaaagtcgcggaggttttcctcgccccacccactgcggcttggggaaggaggaggaggaggggtgggc

SEQ ID NO: 205048 - DNA, 122 bp, Homo sapiens
atttcccatagcacctattaatatgtgacatacacatttcacttacttgttattgactaccgactaccacccctgaaccgtaaactcagtagggcagaaatgtctgtttctcactgctgtct

SEQ ID NO: 205049 - DNA, 122 bp, Homo sapiens
caggagaaagttactgaaattgatctcttgtccaatcaaagctgtagttagggctggtgtcgcaggaggtcagttagagcctgtgagctggataagctgtaattgtttcaatattgcttatt

SEQ ID NO: 205050 - DNA, 122 bp, Homo sapiens
aggcccataggtttcagagataccctgtgaattcttccttggggtgtcctgaaccgcgatcgtagatctgtgcccccagttccagcggggaaccccattgtccgggaacccagagctcacag

SEQ ID NO: 205051 - DNA, 122 bp, Homo sapiens
gtgcgcggctcgccgcgcgcggcactccctcagcagaggctgattgggaggacgctgacgcggcctcttgcacctgtggctactcctccacagacctggctgccgacctcctgtctgcccct

SEQ ID NO: 205052 - DNA, 122 bp, Homo sapiens
taattattatgattattgtcattatgatgattaaccctggaggacttactctttgccaagcgctcacattaatttagacatttaatcaccgtgactacgctaataatagggactgtaattgt

SEQ ID NO: 205053 - DNA, 122 bp, Homo sapiens
agctacaataagaaagcttaaaattgatcctacaaaagatctaggagatcagccagtaatcgaagtccataatgcaataaaattaacattcttcagaagaaagataatagaatccagaatct

SEQ ID NO: 205054 - DNA, 122 bp, Homo sapiens
acggcccagccagcggagcgcggcggtgagcgctagggaggccggcgcccgggccgcctccgcggccgaccccctgtccccacccgagcaggatttcctgatgtaaacacagcggctctgcg

SEQ ID NO: 205055 - DNA, 122 bp, Homo sapiens
tttctgggggcggggcttccttaaatgctggcggccgtgttttgccctcttcttgaggggcgtggctctgagaagccccgccccacttggggactgtaaccaatcgtgtactttgggtgggg

SEQ ID NO: 205056 - DNA, 122 bp, Homo sapiens
tggaggtggagatgggcacctgacagctttgccttttgctgacacagctccataaagactcgtgctttctcactgctgcgtgtctgcatcttctttcttggggttgcctagtagggattaga

SEQ ID NO: 205057 - DNA, 122 bp, Homo sapiens
tgtttctgggaggcgaggagttggcaggagagctgtttatgttacagtgagccgaacccccgcccagagaccacaaaattaatcagaaagagggcaactggcagggcgccagacctcagaag

SEQ ID NO: 205058 - DNA, 122 bp, Homo sapiens
gcgactgcagctgctacatccctccctgctctgagataaatgttcttcccatgaagcagacggttcacttttgggatggcgctgtctccaggtttggctgtctcagtccagatgatgtttgg

SEQ ID NO: 205059 - DNA, 122 bp, Homo sapiens
gtggccccctcctggaagccaccccacagccatccctaccaatcacaagaaggcttacaacgctctgggatccctacagggatgccaactcaaatggatgtttctgctgagccaggagcaca

SEQ ID NO: 205060 - DNA, 122 bp, Homo sapiens
ttacctgtaaatacacgtccggaccatttcttggaagaggtgacacacaaattaatgtcacgccagaagcaggcctccctcccatcttaaataaaatcgactaattaatgtcacgccagaag

SEQ ID NO: 205061 - DNA, 122 bp, Homo sapiens
cctgttgtccctgggctcaggctgggactgaggcttgggctggtgccactgaggctgggccgggtgcgctgggcaggaggatgagccttgagggagggcaccacgctgagctgcgacccctc

SEQ ID NO: 205062 - DNA, 122 bp, Homo sapiens
tcccctgctgcccctgctgcccctgctgcccctgctctgtcccgggaccccctggcctggcgctgtcccctgagctgtcccattaaacatggccctgtctctctcggtgccctgggtgtcgt

SEQ ID NO: 205063 - DNA, 122 bp, Homo sapiens
gtcctgggagcagagcagagtccaggagagtaagtccagccctgctggtgttcagaagcccggagaaggaggggaggcagcagcaggaggggagggaggctcagcacagacactggagcagc

SEQ ID NO: 205064 - DNA, 122 bp, Homo sapiens
atgctcttaatgtattatgaaatgagaaaaccaggctaccaaactgtaagaatggaatgacgacaatttttagaaaccacagtgtgtgcacacatagatggatgtgtgtgtgaatgtatgtg

SEQ ID NO: 205065 - DNA, 122 bp, Homo sapiens
caaaaacacacaaaaacagagaaaaacaagacagtaatggctcaactcacatagcaccaacgggcgaagcgttcttctgagcgctttccgagtcatcggtcctcagagcagcccctgaggcc

SEQ ID NO: 205066 - DNA, 122 bp, Homo sapiens
ctcacccatcccatgccagatcaccaacggcagcggcgccggcgggtccagatgctgcagcgcccgagaagcgcaggtccatggcaggagagccacagccaagagccacaggcagccgggcg

SEQ ID NO: 205067 - DNA, 122 bp, Homo sapiens
aaatgatgttttgtgaacatagtaaaatagaccattatactatgtgtatgtttgatacagcgtcgccaaaactagtgttctttattagtgcctctcacaaaagatcctggatggaggagtaa

SEQ ID NO: 205068 - DNA, 122 bp, Homo sapiens
atctccaactacacaggggaacggagcagatagagctgcgactgggaagcgtcaccttcccgtccagagcgctttctttcagaccctgcctacctgcaggcagatggaccggagggttttct

SEQ ID NO: 205069 - DNA, 122 bp, Homo sapiens
gagatgacagaaaagggcaaaagagggttcgatgcatccgtgtcgcacccggagggtgagcgcctaggaccctgggctctctcccggcacgcagctttcctggacacttggctctccggtga

SEQ ID NO: 205070 - DNA, 122 bp, Homo sapiens
aggggtttctgttggaaagcagcagtgggccttggtgaaagtccccagattgccctaaaccgcccaaatcggggtttcgtctctggaagaggggagggatgcaccaccggctcctcgtgcag

SEQ ID NO: 205071 - DNA, 122 bp, Homo sapiens
caacatgggtcagcacgttcagttacgggagtgggaaattacatgaggcctgggcctctgcgttcccaagctgtgcgttctggaccagctactgaattattaatctcacttagcgaaagtga

SEQ ID NO: 205072 - DNA, 122 bp, Homo sapiens
atataaaagagttaagagctgagaagtgcctccttggtcaattaaaccacactgacatcccgttttccttttcttctttttcataattagagaggaagtggagggaaaggaaataaataact

SEQ ID NO: 205073 - DNA, 122 bp, Homo sapiens
caggagaaggctatttccgtttccgtacggaagcaaaggagccaagaccatggcgaaagccggggataagagcagcagcagcgggaagaaaagtctaaaacggaaagccgctgccgaagaac

SEQ ID NO: 205074 - DNA, 122 bp, Homo sapiens
tacgtggccagcttccccgtggctctgccactgcagccaccaaccctgcgggccccggagcgagaactcggcacaggagagcagcccttgtcccccacgacggccacgtccccctatggagg

SEQ ID NO: 205075 - DNA, 122 bp, Homo sapiens
tttttaaaaagaaaatgatcaaagaagttccataatcaaggaatgcatttgggtggttggcgctcccagtttattattattaataggggttgacatagacttaaagtgtgtttcctttgaaa

SEQ ID NO: 205076 - DNA, 122 bp, Homo sapiens
aaatgctcctgggaaccgagctgatccgcagggcctgtgccttcgcctataacagtccctcggcctgtgggggaccccaaagctcccagccgccctccccgcagggcctgtgccttcgcctt

SEQ ID NO: 205077 - DNA, 122 bp, Homo sapiens
cctcaacggaggagcgggccggccttggaaacgccgttccagggcccctcgctggttccacggatgcctttttgtggttggataaaggaagctcatgtaggccgcccacagcgcagcatggc

SEQ ID NO: 205078 - DNA, 122 bp, Homo sapiens
cagcagctccagacaggcctggcctgctctcggagactctgtgctccagatggggacagacgggaaagcggcatcgtgcttgtcccatgggggaggaaacgacaagggcagctgattggatg

SEQ ID NO: 205079 - DNA, 122 bp, Homo sapiens
cggccctgcctcctgctctacttcctcagccccgaccctctgagctccagccgtgtgggccgtttgtcagcccctggtccttctgccacaggacctttgcacgtgttgccccctctgtgtgg

SEQ ID NO: 205080 - DNA, 122 bp, Homo sapiens
ttattcctgattttgacgcgctggtacaggtgctccgggaacgccttccgcggaatgaagcggcccatgcccttgttgacgttgatgtttccgtcttcaaagacgatcttgccctggctgat

SEQ ID NO: 205081 - DNA, 122 bp, Homo sapiens
tctgtgtgaggaaggagtttcttcatattctttgaccaatatattgcaacagattgagtgcgaagagaagtatatgattccagctgtcttctattaagccagacattaaagagatttgcaaa

SEQ ID NO: 205082 - DNA, 122 bp, Homo sapiens
ctgtcgactcccgctggaataatcaatctatcaaaacaacccattgatcctgaggcaaaccgctttcaaaaccaccacatagttcctggacgtcctggcttcctcatgacacttggggaaga

SEQ ID NO: 205083 - DNA, 122 bp, Homo sapiens
acctcgggcacataaggacacacacaggccgcagagcctgtcaagggctctgtcatgttccgagtgaacagatgtttatcccacaacattttttttttccttcttggagtttgtccaatgca

SEQ ID NO: 205084 - DNA, 122 bp, Homo sapiens
ccaagacaagttgggtgttgctacgaagtgagtcggggagcccattcttgcggggtgtgacgtcccatgaagtttgttgtaacgagcgacagcccagacatcaatgctgggcgagcacagcc

SEQ ID NO: 205085 - DNA, 122 bp, Homo sapiens
gagccctcagctgagggagcgctctgaaataatacaccattgcagccggggaaagcagagcggcgcaaaagagctctcgccgggtccgcctgctccctctccgcttcgctcctcttctcttc

SEQ ID NO: 205086 - DNA, 122 bp, Homo sapiens
gcactggagggaaaaggcggaagcggaagtcggggggcgcgccagctcgtagcaggggagcgcccgcggcgtcgggtttgggctggaggtcgccatggggcgaggcagcggcaccttcgagc

SEQ ID NO: 205087 - DNA, 122 bp, Homo sapiens
ctagcacgggcaaaggtctgcttctgcatttaagcatctgagccctcaagagttagctcccgggctcctctggagcaaggttccgcccggtcccacgtacctgcctcgtccgccgtgatggt

SEQ ID NO: 205088 - DNA, 122 bp, Homo sapiens
aggcggactctcccacttggctccagttcattggctccggagtttatcctcctggaagaacgtggcacaatagactgaacccttgtattagtctagtcctattgtggtaacccatacaccca

SEQ ID NO: 205089 - DNA, 122 bp, Homo sapiens
cccacccggcggtcacaccgccttgcgcgctcggcatgacgtcactcccaccaggcacctcgccttgtcaggagctgccaggcgccaaccgccgacctctgaccgctacgggtcccggctcg

SEQ ID NO: 205090 - DNA, 122 bp, Homo sapiens
aactgagtctatatttgttggcatcataagaagacaactccatatatagtattctgcccccggatttctgcttcttgtttgaggtgggagcaaagaaatgacaggttcaatccaaaatatct

SEQ ID NO: 205091 - DNA, 122 bp, Homo sapiens
tcgccgccgcccgccgcgccgctgtcccgctcccgcgccgccgccgccgtttccccccgacgactgggtgatgctggacatgggagataggaaagaggtgaaaatgatccccaagtcctcgt

SEQ ID NO: 205092 - DNA, 122 bp, Homo sapiens
cttggaacgtgtggggcctggtccagaggtggggcctggggtcctgctgggagggaggggcgccaaaggacaatggtggccccttttcaagttgcagtcaagtggacggctcacttccctgc

SEQ ID NO: 205093 - DNA, 122 bp, Homo sapiens
gaagtactggggggacagagggactggcaggggttggtgcagaccaggtgagaaagggcacgaagtgggacaaggtcccggtgagaggcacgacactgtcacctgcctcaggccgcgctcgg

SEQ ID NO: 205094 - DNA, 122 bp, Homo sapiens
acagaggactggttgggcggctctgggtgcctccagagtgaggggcagcaggatggccctcgggcttgcataggaaagagggcactgctgcctcttgagtgtgcaaggcccagggtgcgtct

SEQ ID NO: 205095 - DNA, 122 bp, Homo sapiens
tgtgtcccagacactgtgatagggacttcacatgtgttccctaatgtattcctcacacctcgacagacgacactgctgtctccaaaacaaatgcagaagcagatcctgagagctgaagttgc

SEQ ID NO: 205096 - DNA, 122 bp, Homo sapiens
gatttaagtgtaggagttgagccctcggggcgtagagatgcacctgatattcctcctgcccgcagctacgattcatgtgtttgcacccaccgagctgctgcgggcagcctccccagcactgg

SEQ ID NO: 205097 - DNA, 122 bp, Homo sapiens
cctggcatttcctgtcccatagcttccagcgcaacagaggaacgaaaagcaagttttcctcggccctgcgcccacccagccacgatccgcaccatcctccagcgtttccttttctgacacca

SEQ ID NO: 205098 - DNA, 122 bp, Homo sapiens
gcggggagccttatctctggcggtgggttgaaaatccggcgccgggcagatgcccacgttcgctggacccctgcttgccggcgtccgctacaacccaaggaaggtgggcccgacctcgccag

SEQ ID NO: 205099 - DNA, 122 bp, Homo sapiens
acacggaggcgagcttggggaggctgagaggagaatcggggacgtgtttctggcgactgacgtctccaccctgtccccagtctatgtcatgccggggagagaaaccagggattggaagtggc

SEQ ID NO: 205100 - DNA, 122 bp, Homo sapiens
ctttagggctctgtgggtcctttagaaacttctgagccactggccgggtgcagtggctcacgcctgtaatcccagcactttgggaggccgaggagggcggatcactaggtcaggagatcgag

SEQ ID NO: 205101 - DNA, 122 bp, Homo sapiens
tgctggttttcatatcaatgcaaaaaatcagtgacaaccccacaggccacaagcaggaaacgtgacgtctgtttttgaaacagagcctttgctgtgcggtccctggtgtggcctggccatcc

SEQ ID NO: 205102 - DNA, 122 bp, Homo sapiens
gcagcatcaggggtgcggagcctgggaggcacgcgggggccgggccaggccggggctcggcgcacacctgctgccaggctcgtagctcagtcaccaccgcacggcgcccaagcagctgctgc

SEQ ID NO: 205103 - DNA, 122 bp, Homo sapiens
aatcatcccaagaatccagtgatgtaggtactattatctcctttgaacagacaaaaaaatcgaaatgcagacaggttaacttgtccagagtcacatagctagtagtaagtggagaaggtaag

SEQ ID NO: 205104 - DNA, 122 bp, Homo sapiens
ttgtccttagcgagcctgtgcaatttagaaaatggtgcccctccaggtgaatgcagcccccgagctgtgtggattggattttggtgtctgtgcacccagggtgaggtactctgtgaaggaca

SEQ ID NO: 205105 - DNA, 122 bp, Homo sapiens
agccgctgacgggtcggcgggcgggtttgtgtgaacaggcacgcagctgcaggtaagagacgcttagggtatccgcgaagaagaccgcggagtcaccttagtcctatgtttcccagctggct

SEQ ID NO: 205106 - DNA, 122 bp, Homo sapiens
cgtcagttccccgcctcctccgagtctcaggtcctcttcgggatgtttttccacctgcggcgtttttcagaaaccagccggaggcagcccggtgtctccaactcctgactggcaccgggaag

SEQ ID NO: 205107 - DNA, 122 bp, Homo sapiens
tgcccagtccctatcccgtggagctgcttggggctccaggtgcctggagcaccacgtgcacgccgtaactctagcacctaccccacgccgtaaccccaccccaccacacgccctaaccccag

SEQ ID NO: 205108 - DNA, 122 bp, Homo sapiens
tccagcgctgctgctgtcctttcactcccgttcttttccgccccccaacaaccgcgtggtcggcttggaaaggcgaactataattcccagggtgcctcgcgaggccacaaagaactacgatt

SEQ ID NO: 205109 - DNA, 122 bp, Homo sapiens
ggggaaaccaggccggagccggcgggcccacccgcccagaaccgggaattcggcgagccccgcccctgccaccccagcgccggccgctcggtaacaaacacttccacttcctgagcgctagt

SEQ ID NO: 205110 - DNA, 122 bp, Homo sapiens
agacccgcgctccagccagcgcgctgattggtcagctggagtgtcaatcggaatggtgaccgggcgggactcagagcctgaggaggcggggcttttcctccgcccaggaaggaaatgcagaa

SEQ ID NO: 205111 - DNA, 122 bp, Homo sapiens
gttctagacctacattgtaacagcaggtagaaggcaggccctaaaccttttagctattgtcgttgccacctgctcagagtctagttctgaaaggaggcgggtgcggagttatgaaaatttgg

SEQ ID NO: 205112 - DNA, 122 bp, Homo sapiens
cgagggcaggagggtggcagtcctgcactctaaaggctgttcatctgcagatttccaagccgctgatggagaaaaagcgccgggcacgcatcaatgtgtcactggagcagctcaagtcgctg

SEQ ID NO: 205113 - DNA, 122 bp, Homo sapiens
ccggcctacccggtgggtcttgtcctgccccccaactaccctggctggccccacaggggccgccaaccacacaagccagttcctgtccctgaggacttggctcagggactctgggaatgtgg

SEQ ID NO: 205114 - DNA, 122 bp, Homo sapiens
actccgcgccccgactggtggccccacagcgcgcaccacacatggcctcgctgctgttggcggggtaggcccgaaggaggcatctacaaatgcccgagccctttctgatccccacccccccg

SEQ ID NO: 205115 - DNA, 122 bp, Homo sapiens
ggcgggctcagtggcggtgaggatctagaaaagtcttcctgtcctggttctgggctgccccggggcctggggtgatgacccgcaagcccaagggcgctcggactcctggcccgaaattccag

SEQ ID NO: 205116 - DNA, 122 bp, Homo sapiens
ctaatacatactgttttgttttgtttcttttctttttttcttgagtcagagtctcgctgtcgcccaggctggagtgcagtggcacaatcttggctcactgcaacctccgcctcccgagttca

SEQ ID NO: 205117 - DNA, 122 bp, Homo sapiens
ccataatatttcagcctctaccagctttagatgagtgttagcctctgaggtgccccaccccggatcggcccgaaagcacccgagaaaacccagccctcaccttggaagcttgccttcagcaa

SEQ ID NO: 205118 - DNA, 122 bp, Homo sapiens
agaagcctaaaaatacatgcttttgagagcactgccagagtaggttaagaataaagaaggcgtttggagcgcaggcagaagacacttgtgctcttctaagcgcagcgaccgtggcaggaata

SEQ ID NO: 205119 - DNA, 122 bp, Homo sapiens
tattcagggagaggactacacagaatgtgaatcctacacaagggtgtggattgggttatgcgtccccactataaacaagcaaatgaccacattcccttatgtaagtatactttcatcttaca

SEQ ID NO: 205120 - DNA, 122 bp, Homo sapiens
gcctaggagaacgggcctccccggaggcagctgggccttccctatggtgatgagggtgcccgctgcagcgccaggcctccccgtgtgcaggtcgtgccgagcagcgcttcctacgttctctc

SEQ ID NO: 205121 - DNA, 122 bp, Homo sapiens
tgccttcctaacttggaggtgaatcctgggaattcaggagaagagattgggcacagaatgcgtcattgtctgacaacgtcctacagctctgttggttacccaaggcagctattgcatgaaca

SEQ ID NO: 205122 - DNA, 122 bp, Homo sapiens
tggcagtcccgggagaagggatgctcggacaggtcgctatggcaaccgggtggctggtcccgcaccgtggtggtagcagacggggaagagatgagcttgcagggtgggagcgggtgggtctg

SEQ ID NO: 205123 - DNA, 122 bp, Homo sapiens
caccgatctcatggatgggctccgaggggcttgcgggaggggggcgccagtgttcggggccgttttggcggctatgcaggattggcaggagctgcgatgctcacacttgcctcgccgaccgc

SEQ ID NO: 205124 - DNA, 122 bp, Homo sapiens
gcaggtgactgtgttaacttacgtgacagtgtagcaatcaaacagctgcctcgtgagagacgaaggggtggtaagaggctcagccaggtagtttctcttcctcctcctcctcttcctcttta

SEQ ID NO: 205125 - DNA, 122 bp, Homo sapiens
gggtgggggcgccgtccgggccaagcctggctgtcgcgcggcttctctctgagtggtcggcgaggctgctgctccgcgcaagttgtggctcccggcccatctacattggaggaatcctgcac

SEQ ID NO: 205126 - DNA, 122 bp, Homo sapiens
cattaatgcttggcgatccctgagaacttagcgcaggttggtttatcattcagaagacagcgcttcctcagaagcattaggtagacaggagagtaagtgaagttggagacagaatggagaga

SEQ ID NO: 205127 - DNA, 122 bp, Homo sapiens
tacatctaaatggcaccgtcccccgagtgcgccgaccttgtgctacagccagaacagctccgggaaacaagggcagcgggagaaacggcccggaaagggacgaagaggcttccagctttcgc

SEQ ID NO: 205128 - DNA, 122 bp, Homo sapiens
cagccgagtccctcagaggagcatacagtgacacacacaggagggtgcgacacccagctacgtacacaacatgcaaagccagtaacccaccaggcagttgcgtggatacagtcacacagaag

SEQ ID NO: 205129 - DNA, 122 bp, Homo sapiens
tattttaaggacgctattgctgtggaggagtaaccccacttttaggaatccttttccgtgcgaaaggctgtttgagatcaggcgcaacaacttctcccgctcaggttaccctcagaaaggct

SEQ ID NO: 205130 - DNA, 122 bp, Homo sapiens
aaagggtagaggtagcaagagatgcaagcaggagcccgaccatgaagagccaagtcagcccggctaacatgatgaagaatcactcaatgttgtaaacaagggagccacatgatcagctctac

SEQ ID NO: 205131 - DNA, 122 bp, Homo sapiens
tgatcacgtcccataggttccacctcctaatatcttcttgggagttaggatttaaacatacgaatttggtgggggccataaacactcagaccataataatacctaaagagaagtgagggatt

SEQ ID NO: 205132 - DNA, 122 bp, Homo sapiens
tgtaccatgtcagaactagacggtgtctttgttccacaaaactgctcccaacccgcgaaccggagattgcatctgcctctgggtctgagtgccattggtagatctgcagtataatacaagag

SEQ ID NO: 205133 - DNA, 122 bp, Homo sapiens
agttctcttctaaaaagcatttcacctttaccacttggcaggtgcccacagtacatcattcgcctaactcatcatgatccagaagtaactttgattttgtttcattcaacagagggattttt

SEQ ID NO: 205134 - DNA, 122 bp, Homo sapiens
cgtttcctccttggaacctcagtagctgcactctgcttgggtttcctgcagctcatgtcccgagggtctcggcgggaggtccgggtgtcccgagggtctgggcgggaggtccgggtgtcccg

SEQ ID NO: 205135 - DNA, 122 bp, Homo sapiens
agagagagggagagagagagaaagaagagcaggaaagatcccgaaaggaggaagaggtggcgaaaaatcaactgccctgctggatttgtctttctcagcaccttggcgaagccttgggtttc

SEQ ID NO: 205136 - DNA, 122 bp, Homo sapiens
ggacgaccccgccgccaggggcccagtgcgaggtccccgccagcccccagcggccttccccgcccggggcgctcccagagcaaacgaggtccctgagagctccacctagttcacaggataaa

SEQ ID NO: 205137 - DNA, 122 bp, Homo sapiens
tcctgtacagacactgccgccactttcccctgctgcaggacgtgcccccctctaagtgcgcgcagccggtcttcctgctgctggtgatcaagtcctcccctagcaactatgtgcgccgcgag

SEQ ID NO: 205138 - DNA, 122 bp, Homo sapiens
tcatgggtgggctagctacactttcatgggtagttgtaatgtgcagtgaaggtggagaaccgctcatatacgggagaactcatgatatggtcacgtgcacatgaatcacctggggatcttgt

SEQ ID NO: 205139 - DNA, 122 bp, Homo sapiens
cggttccgagtcaggcgcgcgcgggcagggtccccattgcctgctgcgcacccggacgtgcggctcccctcggcctcctcgccatggacgcggacgactcccgggcccccaagggctccttg

SEQ ID NO: 205140 - DNA, 122 bp, Homo sapiens
ccgccgccgccgcgggagaacagcgcgctttgcggaaggggtcaaatgtctgaaatatggcggaggaagtgagagcccgaggacccccccacccgcccgctctcttcagcccgcgtccgccg

SEQ ID NO: 205141 - DNA, 122 bp, Homo sapiens
tgctcctgggagccttggaaacccagacagcgttactgacctggttggcggaggtcaccgcgggcgccaggcgtgcgcgggagctggagcttaacacccagccgctgtcccgcaaaagactt

SEQ ID NO: 205142 - DNA, 122 bp, Homo sapiens
agtggcaatctggccatgcccttctgaagggtcaccctgagccactgttgtcctctctggcgtgggtgctccccaggggctgagacagtgcctggcagacagcgagacactgttgactgcat

SEQ ID NO: 205143 - DNA, 122 bp, Homo sapiens
gtgatctttaggctcaggaggcctgtcttttgggaaagtgctataactcacttctactaccggcaacttaatacgtaagagaatattcttggccctgctctgaggtttaaacaatgttcaac

SEQ ID NO: 205144 - DNA, 122 bp, Homo sapiens
cgtgagcaacacctttgggcaggacttcacactgggccaggtggaggtgagcatggagtacgacactgcctcccacacgctgaacgtggcggtgatgcagggcaaggacctcctggagcggg

SEQ ID NO: 205145 - DNA, 122 bp, Homo sapiens
aggggtggctgtgtggtctggaagtggcggtccaggtcctgggcctctcccactcagcagcggggaggaggggtcggcggggagtaggggccggtcgcccccccttgagctcttccccgtct

SEQ ID NO: 205146 - DNA, 122 bp, Homo sapiens
gaaccaactgccgggagattctgattggctcagccgcgtgcccacgtgaccgaccaaaaccggccaccagggtctcccaactgcctgtcaaacgcacagccctgttgggcccccggagagga

SEQ ID NO: 205147 - DNA, 122 bp, Homo sapiens
tttcctgctctcagtgcgctgacagagggtccgtgagctgggacactgtgacctcggcaccgctgcgattccagcgcaaacctgcgtggcccagggggagggggctggcgcggggctgagga

SEQ ID NO: 205148 - DNA, 122 bp, Homo sapiens
agcccgtccgccacccaccccgccccgaccccacccccggcctcccccacgctctcatgccggctcccagacacactcaccatgctgggtgaagatattgaagccggtctctgtggtgcgcc

SEQ ID NO: 205149 - DNA, 122 bp, Homo sapiens
accatggaaccgagcccctatgtcctgtgcaccacaacagccagccgtgacccactccctcgtccacgaccatggagccagccgtgacccactccctcgtccgcgaccatggaaccgagccc

SEQ ID NO: 205150 - DNA, 122 bp, Homo sapiens
aggagctgtctctgataatcaccttggttcaaggagcatgagtgatttttagatggtgaacgttcagtcaatgtatgatttatgccaggagaagtgggatagtaccctttttggaagggcta

SEQ ID NO: 205151 - DNA, 122 bp, Homo sapiens
gccgggtctccatgagtctgatttcccgcggaaaagcacagaatgcacgggagcaggcggcgctggagatggagacgatggagacggtgcagacggtgcagacgctgccccagcgcattcgg

SEQ ID NO: 205152 - DNA, 122 bp, Homo sapiens
atcatcacccccatcaaaaacctcaccagagggactcaaagcctgggggagccagggctgcgagtcagcggcaattaccctcccactgtgaagtcagcaggacccatggctgacttaacctc

SEQ ID NO: 205153 - DNA, 122 bp, Homo sapiens
aggggcgctgggctgagggccggagaaacagaccaagagacatccgccgcgagggtgcggcgacctaacaagcggctcaggtatccccgactgctttaaagctcccgcttcctccctccgcc

SEQ ID NO: 205154 - DNA, 122 bp, Homo sapiens
gctcgccccttcccagcctgtggtgtcaaatgtcttgccccttgtcaaatgtgcttggatcgatgatgagtcccctataaaaacattccttggaaaagctgaacaaaatgagtgagaactca

SEQ ID NO: 205155 - DNA, 122 bp, Homo sapiens
agagaacacctgccctattccagggccaggaccccagccccgccccgccccgccccgccccgccccgtaggatgcaaggccccgccccagccccgtcgggtcccagagaaactgccccgccc

SEQ ID NO: 205156 - DNA, 122 bp, Homo sapiens
aaatcatgaatgctcctctttgtgcaggataaagacagctggtaatccagccaagtctcccgttgctaccatatttttagtatttgataccacagaaattttctatagcctctgccacagag

SEQ ID NO: 205157 - DNA, 122 bp, Homo sapiens
gactttacctgagaaggaggcatgagtctgggctggagaccagcagaccaggtatgacagcgctgagctggggagtctctggggtgctgaggggtgattgatgggaaccactgcttgggcac

SEQ ID NO: 205158 - DNA, 122 bp, Homo sapiens
catatggaagctggaagcagccagctgtgcctcaggcccctccccaaatccaagggaaggcggtgctcatccccatttaggcttccttggcacatccatttgggctttggccagctccaggg

SEQ ID NO: 205159 - DNA, 122 bp, Homo sapiens
ccttccccaccctccccaccctccccataagcgcccctcccgggttcccaaagcagagggcgtgggggaaaagaaaaaagatcctctctcgctaatctccgcccaccggccctttataatgc

SEQ ID NO: 205160 - DNA, 122 bp, Homo sapiens
gctacatgggagcgcggtgtgagttcccagtgcaccccgacggcgcaagcgccttgcccgcggccccgccgggcctcaggcccggggaccctcagcgctaccttttgcctccggctctggga

SEQ ID NO: 205161 - DNA, 122 bp, Homo sapiens
cttgatctcctgaccttgtgatccgcccacgtcagcctcccaaagtgctgggattacaggcgtgagtcactgcgctcggccaagtatttatatttattatgcatttttttttttaagagaca

SEQ ID NO: 205162 - DNA, 122 bp, Homo sapiens
ggttcctccgtctccgggacttcgccctccgttacctggatggcctgcaaggccattacccgccactccaccctatctgggccatgtcggctgcaagcttggcttccactccgcactcccgg

SEQ ID NO: 205163 - DNA, 122 bp, Homo sapiens
agatgatgaacaccgccaagaccgtgcacaccatccacagcgcccggcgcttgacttcagcgttgcgctgctgctgcaccggctgcatgagcaaggtacggatgatgaccaggttgcagaag

SEQ ID NO: 205164 - DNA, 122 bp, Homo sapiens
ccgaggaccctccccgcccctcaggcctcggtcacccgccccccccacccccgaccccgccgcctcctagggctgcaccacccccgggtcgggaccgtgaatcaccggcccgcggtgccgcc

SEQ ID NO: 205165 - DNA, 122 bp, Homo sapiens
ctaagaaagttagaaccaaaggacagcagaaaatgccaaaaaaccaacaatacagaaacacgtcttatgaacactactcttcaaatattaatgtaagagttaagaggaatgctctagcttct

SEQ ID NO: 205166 - DNA, 122 bp, Homo sapiens
ctactccagatatgcccaggcttcggaccaccagcctgcagccccctaggtagaacctgccgtcttcacagatgggaaaactgaggtcctagctgaggagaatatgcccggcagccacattg

SEQ ID NO: 205167 - DNA, 122 bp, Homo sapiens
gagggatgttttatctctacttctccgaacccagggaggattttacttgtttgaagggggcggagaatggagcggagtcctatttatttccattgatgactcccctggttctcacaggcgct

SEQ ID NO: 205168 - DNA, 122 bp, Homo sapiens
gcgggaagctcaccccgcagtccgcgcagatgaactgcaactccggattgggctcggggacgccctcagccactttgacctccaaaatttcactgctgccaagaagggacccatcttcacca

SEQ ID NO: 205169 - DNA, 122 bp, Homo sapiens
atactaccctcagtcttccagactggtggaaggaggaaatggaataataaaaacaacaatcggtaaggcttacagaaacatttagactattgaggcctacggctcttttatttgcttaactt

SEQ ID NO: 205170 - DNA, 122 bp, Homo sapiens
gtccgcgcgggcgttctggacccgcagagttctcggcgtttccgaagctcttggtgtggccgggacccgggagaaggagcagggctggtggggctgctgcagccggtgagtgtgtgctggcg

SEQ ID NO: 205171 - DNA, 122 bp, Homo sapiens
acagctgccacttctgccctaaagggtgctcccctgggagaaggtagccaagcaggacagcggcttctcttgctggtttcatacatcgtgctttggaaatctttaataaacagaatgtcatg

SEQ ID NO: 205172 - DNA, 122 bp, Homo sapiens
tgggagacttagccctgcgctgcacccgtgcctgcctcctcagccctgccgccagctcggcgatcctctggagcctagagacagggagggaaggaaagcactctttgccatctggttcttat

SEQ ID NO: 205173 - DNA, 122 bp, Homo sapiens
ggccgggagcggcggaacctgcccgccggtgtcttcctgcccacggggctgggccccggacgtcctccaagacctcctgccttggcggctctaaccccagaaacccccggccgggcctccct

SEQ ID NO: 205174 - DNA, 122 bp, Homo sapiens
tggtcactgacaccaccttgtattcctcgcaccgaggacgggctatgaaaagctcccgaacgctggccccctcccacagtctgataaatgattgccaggaagaggaggaccgagcaccagct

SEQ ID NO: 205175 - DNA, 122 bp, Homo sapiens
acaccagccccgccgcggttccccctgaccggctttccgctggccctggcggctgcggaacggtcaactagaccccactagctgaagccggcatcacctgggaagcagccatgccgcccgga

SEQ ID NO: 205176 - DNA, 122 bp, Homo sapiens
agcgggcacggccagcgctgccacaggtgacttgatttctgcgacggtagcttagccacccggggccaatctcgaaacattcttattttcaagtcctttggactgggtgccatctggagaag

SEQ ID NO: 205177 - DNA, 122 bp, Homo sapiens
aaaaaacagctgaatccaggacatttgcgtacagcactgttccatacggacagggcgcctcgcaagcttcccctggctccaggtgaagagaggaagttctggaattaggcagacttgagttc

SEQ ID NO: 205178 - DNA, 122 bp, Homo sapiens
aggcagcagacacaccccccatcccagtctggagtcacaatccgcactcaccttggcggacgtctccccaaacagaggtctgttgtccaggccactggtgccgtaggtcctggtagcaaagt

SEQ ID NO: 205179 - DNA, 122 bp, Homo sapiens
aggttgtgcagggcagcagggccctaggcctggccaaggaaaccatttttccctcctatgcgttggtcctgtgatgggaatggctgctgcaaaggtctctgaaatgccttcaaggccttttc

SEQ ID NO: 205180 - DNA, 122 bp, Homo sapiens
caggggaatgagcaaatctcaaagagctggcgtcttagaactccctggcttatatagcatcgacaaagaacagtaaatttttagagaaacaacaaaacaaagaaaaagagctttgagtctgt

SEQ ID NO: 205181 - DNA, 122 bp, Homo sapiens
tggtgagtagtatgctctcagataagtgagagccaaggaatctctttcaagtctctttgccgtgggcagagttcaaagaatgacactcactcacggctttgaaaggttctagggaagccttt

SEQ ID NO: 205182 - DNA, 122 bp, Homo sapiens
cccacaggcacctaagtccacctgggcctggagcaggacaggttgcaaaagaaaatatctcgggacccccaaactccttatgctaagggaaacatcgagcctgggaactgagccatcaacgc

SEQ ID NO: 205183 - DNA, 122 bp, Homo sapiens
gttctatagttgcatagaggaatagatgaagaccctggaattgctcagctgatgcaatatcgaattgagtagggcatttgtaaaacattgtactaaatatacatagaagggggagtgtctgt

SEQ ID NO: 205184 - DNA, 122 bp, Homo sapiens
ttgtccttgggtcgaggtgtctcgtcggaccctttggggctcagtggaggtaggtgaaggcggctcccattgagggaagcccacactcacacccggccttcctgtgttaatctggcatgctc

SEQ ID NO: 205185 - DNA, 122 bp, Homo sapiens
gggggctgccccgggagctggctgaggcggtggccgggggccgggtgctggtggtgggggcgggcggcatcggctgcgagctcctcaagaatctcgtgctcaccggtttctcccacatcgac

SEQ ID NO: 205186 - DNA, 122 bp, Homo sapiens
aagaggagcgaggcaatcacctagttcatgtaactgcaaaattccaaacaactgtgatgacgaatttttgggcttgacagttttgtttgttgtggcctcatgcaggtacaggataagaaaac

SEQ ID NO: 205187 - DNA, 122 bp, Homo sapiens
ggggcgagcacccccaaactcggcgccccggggacctgcgctgagacacgggccgggcggcgcagcctgaggagaaagccggccaggtctttgacacccagccggaccaactgcgcggagac

SEQ ID NO: 205188 - DNA, 122 bp, Homo sapiens
aagggttgggaggctttaagaggcggggctagattccgctaactccctgtccccgcccaccgccgcttccgtgtcgcctacgtcacctccccatcacgggaccccgccagcctacgtgatga

SEQ ID NO: 205189 - DNA, 122 bp, Homo sapiens
cgcttgagcccaggaggtggaggttgcagtgatccgagatcaggccactgcacgccagcccgggcgacacatgtgacactcgacctcaaaaaaaaaagttactggaatactgaagctgagag

SEQ ID NO: 205190 - DNA, 122 bp, Homo sapiens
attgcttcgcatcatcttgcagcacgcgatgatgtttatgtcccaaatacctcccacagccgacttgctgttttatgataggagggaaacagtagaggggaagaagatctaggtggagggtg

SEQ ID NO: 205191 - DNA, 122 bp, Homo sapiens
ggtggaagtcattccatcatgggacttttttgcggagtttttgtttgacatctgatctggcgccggagtcaggaagaaggggcaggtgtaagtgctgggagggcaacgccgacctgacctgc

SEQ ID NO: 205192 - DNA, 122 bp, Homo sapiens
tggttaaaacagccatggtatatctgtgtcatggaatactcttacttcactggaaacacacgtgtgcacacacacatatgcacatacacacaatagagggctagaaattttgttaagtgaaa

SEQ ID NO: 205193 - DNA, 122 bp, Homo sapiens
gctatggggaggggtaattctgggagacccgggcgggtgtgggatcatctacccaccctgcggctccttcccgctcgcagtgaaggaaggacgctcagaccaacaggggctcaggtattctg

SEQ ID NO: 205194 - DNA, 122 bp, Homo sapiens
tggagctttggagtcaggaggacctgggtacgaactcagccatgtcactggccagctgggcgccctgggcagacacaccatgctcctggtgctggacttgtctgcctgttgaaggggtccaa

SEQ ID NO: 205195 - DNA, 122 bp, Homo sapiens
agacagaaactgaaagatccccaaaaaggtaagtggggagacattgaagatggggagtagcgggggtggacagagatcaagtaccctatctgaggagcaactgggtcctagcagttggtttg

SEQ ID NO: 205196 - DNA, 122 bp, Homo sapiens
gctcccagctggggctggcagcgccgccagggcacgcttccggtcatctgtgcacccccccgccttgtagacttgatttccggtcccaccgccaggttccgggaaccaccgggtggtgacgt

SEQ ID NO: 205197 - DNA, 122 bp, Homo sapiens
attcaatatacagcggtagtaccgcgtgtgccaggcacggcaacatgccctgaaccacggcgatacgtcctatagcagagaagagcgggtcacaagacacgtgtggagtgccgttccacctg

SEQ ID NO: 205198 - DNA, 122 bp, Homo sapiens
gcagctaaaacccctttgcctgaatggagcccctccctcagactccacaggaagagtcggcgctaactcaacagtgcatgtgcccctgggtgtgggggacagggttctggggccagcgatct

SEQ ID NO: 205199 - DNA, 122 bp, Homo sapiens
agctctggcagttggaacactctcccctacgctgagccccaactgagctctgcttttcatcggggtcacccctttaatcagagcacatcaacggtggctttggggagcagtccccccaggtg

SEQ ID NO: 205200 - DNA, 122 bp, Homo sapiens
gccacagaacaggaagagaaaggatgtgatcacactgttactttcatctgcagtcatgttcggcattaaccattatagagatggcagttaccattctctaacatgaaacatttgcgcgcagt

SEQ ID NO: 205201 - DNA, 122 bp, Homo sapiens
tacgaccgcgaggcgctgctgggcgtccaggtgaggcggccaggccggtgctgggagggccgggcctcgcaccgcggctgccgcgggctttgtcccgggacaaaggggggcggccgggcgag

SEQ ID NO: 205202 - DNA, 122 bp, Homo sapiens
cgctgactccagagacagacttcctggctgcaaactcccagctccgccacgaggaaacagcgttgggttgctttctagtacctgtttccccacttagagaacctcaaaacgtgttcaaagaa

SEQ ID NO: 205203 - DNA, 122 bp, Homo sapiens
tcttaaagtttggtggcaaatgataaacccttatcattttgtgaacacagctgccaaactcgattgattaacaggcttttgtttattctgggctggcaaatacacacacgttttaccttaag

SEQ ID NO: 205204 - DNA, 122 bp, Homo sapiens
gaagcaggggcggcgtccgctcacttgaggcccacggagtcctcgccgaggggctcccgccgcttcttcttgctggcctcagacactttgaagccctcagggaaccagagctggccatgctg

SEQ ID NO: 205205 - DNA, 122 bp, Homo sapiens
tgccgagctctgggcctcagtttccccatttctgagaatgggcgtcagaatgatttcttccggcctccctcggagcactggagcgggggagacgggagggagggcacgtgtggaggagaaag

SEQ ID NO: 205206 - DNA, 122 bp, Homo sapiens
gttaactggagaaaaagctccgagggggcggggcgataacagtgttccctagcaaagcctcggcccggcgtccccgactacgcgccggcgcactccgcgcttcccgcctagaggcctgtcgg

SEQ ID NO: 205207 - DNA, 122 bp, Homo sapiens
tggccgacttctgcggagaggggcgtcagcaggacacaggcgtcagcaggacacggggcacgccccgcccccccacaaaaggtgcagcaacagggtgggtcccccgagcacagcccagctcc

SEQ ID NO: 205208 - DNA, 122 bp, Homo sapiens
ccaccagcttttgtgacactagataacctcaggccaatggcatgcccccagtggcagcgacgacccattcaaaaatctgccttatcaactttcgatggtagttgctgtgcctaccacggtga

SEQ ID NO: 205209 - DNA, 122 bp, Homo sapiens
atgagtaccacacaaactgctagctgaatcttgtgagaattctaggaggtagggctataccggccctgaagaaatttcttgatgactgctcagtggttttatggaatgtagcagagtattct

SEQ ID NO: 205210 - DNA, 122 bp, Homo sapiens
cgccaacttggaggggcggggcagaaccagggggcggggcctgcgtggtgcgtgcgtgcgcgttctggaggaggcgccgccgccgctcccgaggcccctgccgccgccgctcccgctgctgt

SEQ ID NO: 205211 - DNA, 122 bp, Homo sapiens
agcgagcggcgcgtgacgaagagcctgagcgacgggtcactttggccaatgatctgcagccgccagggtattgcagccagtggcgagtcgagggggcgggaggcagcaggttaggcagtgag

SEQ ID NO: 205212 - DNA, 122 bp, Homo sapiens
gcgcttccggcgatccgcctgggcggctgggtccgcgaagccaatgcgctgaacggtgcccgagtcttcctaactatcctgtgcttggccgttgccactgggccctggtgactaagcccaag

SEQ ID NO: 205213 - DNA, 122 bp, Homo sapiens
caaggaggaagcttggggtctgagggaccaagggactggtctaaggacactcagttggctcgtggcagggccaggatggacctgagtctcagctactaaatacacaatgacgtcataataaa

SEQ ID NO: 205214 - DNA, 122 bp, Homo sapiens
cactcctcaccagcatggctttaccccgagtactcctggcacaccagggcctggaggagacggctcaccgggcagtggcatcgagtgtccaaagtgcgacactgtgttggggtcttcgaggt

SEQ ID NO: 205215 - DNA, 122 bp, Homo sapiens
cggcacttagctcttcgattcttaaaccataccttggaagggaaagaaaattctttaactcggttttgatagttccttaaggacaagaatggctcccgtattataaatctatcctacatggg

SEQ ID NO: 205216 - DNA, 122 bp, Homo sapiens
aaggcaagtagcggcagaggacggcggtagggcggatcgtggggcgcaatggatgtgccacgttggaaagagcttggactttatgccgtcctcctggaaatgagataacggctggtgtaagc

SEQ ID NO: 205217 - DNA, 122 bp, Homo sapiens
caccagtggaatttgcagctgcagcgttcagccagctccacctgcgccgtgtggaagccgcggccacagcacagcagctcacagccgtcgatggccttggacgtcttgttgcatgtgcggcc

SEQ ID NO: 205218 - DNA, 122 bp, Homo sapiens
ggattcaaacccaagtggcttcattccagagtctgcacttaacgctaccgctatcctgtgcgactcaaatgcagataagggttgcaaaagcctggcacactgggggtaaggaatgtcagtgc

SEQ ID NO: 205219 - DNA, 122 bp, Homo sapiens
gcagctctgggatgagctgggtgaggcccaaaccccggtgcgtggtggacaccgggacttcggctcccatgggggctggcccactccaagattagggtctgttccctgaatccgccctccat

SEQ ID NO: 205220 - DNA, 122 bp, Homo sapiens
aatgcctgtttttttttttaagttgtcaatccaacactttttaacccttgagtataagcgcgggtataccagtttgcagggctactctgagaactcataagttgcataaggaagtactatgg

SEQ ID NO: 205221 - DNA, 122 bp, Homo sapiens
aaacttgtgcagaaaattgtaataccataccctaaggattctgggaaaacggaatgggagcggaataagggaatttaacttgctgtggatgctttaaaatctggctaaactacagcaaacaa

SEQ ID NO: 205222 - DNA, 122 bp, Homo sapiens
gccagcaagggcgtagtgcgcactgcctcctgggagatgtagctcctcgaggcgcgctctcgcccctcatcccggaaaggaagactctgaatgactacaactcccagtactgaagaggctgc

SEQ ID NO: 205223 - DNA, 122 bp, Homo sapiens
tatggtatatatgggactggcttagagtcatcccgtctgtggttatgtaaagccaaaccacgttatcatagctttgttgcacagttattttttttaaaaaagctatggcttgtttgttgccc

SEQ ID NO: 205224 - DNA, 122 bp, Homo sapiens
tgaacgcgcgcccattaatacccttctttcctccactctccctgggactcttgatcaaagcgcggccctttccccagccttagcgaggcgccctgcagcctggtacgcgcgtggcgtggcgg

SEQ ID NO: 205225 - DNA, 122 bp, Homo sapiens
agcgggaactactcgacccacagagccgatcgcggagcggattctgcttttaggagtacccgccaacaagcgggaccgagcaggaatccgtatctgggaacaggtgagagaggatgtgtgct

SEQ ID NO: 205226 - DNA, 122 bp, Homo sapiens
ttgagtgttacagctcttaaaggccgcgcgtctggagttgttcgttcctcctgatgagttcgtggtctccctggcttcaggtgtaaagctgcagaccttcgcggtgagtgttacagctcata

SEQ ID NO: 205227 - DNA, 122 bp, Homo sapiens
gcgacgacgacacgcaggagcacaaggcccaggcgatgctgcgcgtgctctcgcgcttcgcgccgcccaacatgcaggccgccgaggccgtgtcccacatccagagcagcggcccgcgtcgc

SEQ ID NO: 205228 - DNA, 122 bp, Homo sapiens
cgggcccagggaggccagagctggagcaggcctcacccaggcattcccgcgccggcccaccgccccgacccacacgatccagctttcctggctctgagaagcaccacttccgctgctggttg

SEQ ID NO: 205229 - DNA, 122 bp, Homo sapiens
ccagccaaatgcccagcacagagctcagtggatttgactcttccattcagaaactcatagcgattgcacacttcattctcaatcacagggagctgggcttccttgagaaagccagccccaaa

SEQ ID NO: 205230 - DNA, 122 bp, Homo sapiens
gccggtggtgaactcccacaggtaggtccagagcgtgtagatgaggcagcgcaggagcagcgggcagcggccgcgcagccgcaggtacatgcgctccacgatgaggatggaggtgccgtaga

SEQ ID NO: 205231 - DNA, 122 bp, Homo sapiens
cgcgtcagacctgagagttgtggctgggggcgagagctgcacccccctaccgaccccgggcgggaatgttccagaacccctgcgagcagccgttggccgcacagcccccgggccggccgcga

SEQ ID NO: 205232 - DNA, 122 bp, Homo sapiens
ttaggtgataaaagtatgtttaattttgcaggaaattgctgaactgtcttctagaacaaccgtaccgtcttgcattcctgtcagcaatcagtgagaattcctgttgctccgcatcctcacca

SEQ ID NO: 205233 - DNA, 122 bp, Homo sapiens
gcgcggtcggcgcggggctcaccggacttggggtaggtgacgatccacacgtcgctgggccgcaccgggaagttggcgatctcctccatcttcccgcggcagaagggcggcagccgcacgcc

SEQ ID NO: 205234 - DNA, 122 bp, Homo sapiens
caggttcggccgcttggccccgcccctgccgtgcccattggccgccgctgccgcgactgccgcacccgttggctcatgcagacgtccgtcccgggcgttggcacctcccccttcctgcttgg

SEQ ID NO: 205235 - DNA, 122 bp, Homo sapiens
ttagaacatcggctgatgtttcatctggtcagggaaccatccagcgcttagtacacctggcgctaatcggcggggattaatctcacaccccgcagctggcggaaagcagcgggaggaggcac

SEQ ID NO: 205236 - DNA, 122 bp, Homo sapiens
cagctagcttcacccagtggatcgcacaccggggttgctggtggagctgcctgccagtcccgcaccgtgtgcctgcacaccggggctgtaaatggagctgcctgccagtcctgcatcatgtg

SEQ ID NO: 205237 - DNA, 122 bp, Homo sapiens
tcctacagtctgatcctcataaccattaagaaccactctcctactgggcaatctaaagcccgttccactttgactgctcacatcacagtggtgattctcttctttggcccatgcatctttat

SEQ ID NO: 205238 - DNA, 122 bp, Homo sapiens
atctgcctccctgagatgccaggcttggtgatgcagtggaggaatctcagctcccatggccgcaggcagcaggagacgcgttttggaggcttaagtccttgagcatggctggtcctatgagc

SEQ ID NO: 205239 - DNA, 122 bp, Homo sapiens
agagccagctgaataaagaacctttttcagagtaagtgtcaatttggccactgttgccttcgtttctcctaagaactagatcctttcaaattaagcagacaggtggggtggttgtcatacag

SEQ ID NO: 205240 - DNA, 122 bp, Homo sapiens
agtgatatgcctccagtcacgtaccacacagctatgtgactgagccacaggaggcgtcaccggggctgcactagaatgcggaaaaggggcgtggccttaatgctccaagcccattggtcaat

SEQ ID NO: 205241 - DNA, 122 bp, Homo sapiens
cggggcgcggggcgggctaatcccgtatgtaaatggcagccaatggagggtggtgttgcgcggggctgggattagggccggggcgaatggctggcaatcttactgggattacagaacaaaga

SEQ ID NO: 205242 - DNA, 122 bp, Homo sapiens
tctttcgctcttggggtccatactacttttgtgaattacagcactcaccacgaaagcttgcgagaccacgagcctaccgggaggaacgaacaactcccgacgcgctgccttaagagctgtaa

SEQ ID NO: 205243 - DNA, 122 bp, Homo sapiens
gcgggctcgcgggtcactaggctggccaattcgaaggccgagcttgtgtctccctcttgacgcattcacacacacacacacacacacacacacacacacacacactccccgtgcgccagaag

SEQ ID NO: 205244 - DNA, 122 bp, Homo sapiens
gtgcccatgggcaccatccttcagaagacaatacgtctgcaagaaagtatgcgggaacagcgcacggtctttgagagatgcaaagtaacagtattattcagttattcttaaggtaaccacta

SEQ ID NO: 205245 - DNA, 122 bp, Homo sapiens
cttcaccgaaggctctgcggactgctctaggactcgtccgccctggagaagacaaagccacgctttctggagacccctgggaggactgtaggatggaactgaacacacaggcacacacgcat

SEQ ID NO: 205246 - DNA, 122 bp, Homo sapiens
ggaggtgcccggctgtgctgtgggtgtgggaggtgcccggctgtgctgtgagtgtgagcccgagagccgcggagaacacgtggagctcttgcagtggcgaacacgtttcttcctaaaggaga

SEQ ID NO: 205247 - DNA, 122 bp, Homo sapiens
attctttatccggaatttcaagggccgccggagggctgtcgcttctgcagtgcgtaggagcggccggggcgggaggctccgcggagccgaggcgtggaggtaagaggcggatcggcggcggc

SEQ ID NO: 205248 - DNA, 122 bp, Homo sapiens
cttttggactgtaggggagctgatggagctgatccgcagagagggcaggaggatgacggccgctcagccctccgagaccaccgtgggcaacatggtgcggagagtgctcaagattatccggg

SEQ ID NO: 205249 - DNA, 122 bp, Homo sapiens
agtggccattctgctcacagctggaatccaagaagcaggtctttgtgctggagattagaacgctcttaagtgggtactgaagcacctgatttggggcttatagcttgagttgaatgtagatt

SEQ ID NO: 205250 - DNA, 122 bp, Homo sapiens
gagacagaaacatttcatcgaaagggaatcacatgctgtgtgtgggaccctttatgactccggcttcgttactcagcatcacgtcctcacggttcatcccagtggaagccggagtcaggggc

SEQ ID NO: 205251 - DNA, 122 bp, Homo sapiens
ctcggtgccggggctgcttctgggatggtcgtggttggctctgccatcagtgtgacggtccgtccagcacagttgtccacagttggtggaagcacagtgggcctgagaaggcatcgcagact

SEQ ID NO: 205252 - DNA, 122 bp, Homo sapiens
aaaaaataaacagcttgggactccagctcccaaagtaaaactaggtccttcctcctgctccgtgtacttttcatttccccatacccagcacaagctgcaatcagatggctgcatcttcaaca

SEQ ID NO: 205253 - DNA, 122 bp, Homo sapiens
gcttaaataataatgagcttcttatcttatctaacaagaaatgcagtcgcagggcttccacgtcatcagttccttgctgctttctcgctttcagctctgccattttcggtgtgtgggaaaca

SEQ ID NO: 205254 - DNA, 122 bp, Homo sapiens
ggctgcggaggagctggacgcctggcagagtggccgggaactgtaagggagttgggcttgcgggcgcggcggggcactgtggggccgggccgggctgggctcccacctgcatgcctgtcccc

SEQ ID NO: 205255 - DNA, 122 bp, Homo sapiens
gggcgtgtcgcagcgcccaaagatgacgtgttctgccagcgccacgtcatgaggaagtgccggcccactgaagccgtggggacgcgcccagcggagctaatcaggtgccactgaactgaagg

SEQ ID NO: 205256 - DNA, 122 bp, Homo sapiens
atgtataattcttaaaatggaacttcttagatctcatcctccaactcatcatttcctcttcgatcttcttctgtgtattctaggagaacatttcacatttgtcctgtacatcactgggtcaa

SEQ ID NO: 205257 - DNA, 122 bp, Homo sapiens
ggaggcgactgcagtttggaggttggtgacttctacgatgggatggccagagagcaatggcggtgtagtgtttgggggactgactgctttcttttatgacaccaaactgctgctcataagca

SEQ ID NO: 205258 - DNA, 122 bp, Homo sapiens
tagccatgcacatggtccattctgtgaggaggcaccgggcggttctctgttgattttccacgctctagtctcttaaaggagactaaggctgacatgcagggacacagtgggggggtggcccg

SEQ ID NO: 205259 - DNA, 122 bp, Homo sapiens
ctgtttctagatttatgttgttgtagttgaacagcaactgtttttttccctcagtgttaacgaaaggataaagactacctgtattgttgggtatgactatcaaaggatttccggtgattcat

SEQ ID NO: 205260 - DNA, 122 bp, Homo sapiens
ggcgagatctcgcacagaatctgcccttttaaaggctcggctttgtcctcgttaaacttgcgtctggcaacgcgaccgctgcggctcccgagcaagattagagggtttccgctcgcaggggc

SEQ ID NO: 205261 - DNA, 122 bp, Homo sapiens
cacggtggcggcgccgtgctgatcccctcaccttcactgggtgttcggtgttctccgcctcgggctgtcacaaatcgtgctgctgtgagccactgcgtgcaggtctcatcctgggtgtattt

SEQ ID NO: 205262 - DNA, 122 bp, Homo sapiens
gcgagagacaatgggcccgccaaagccggaagccggaaaccgtcctgttcgctacagctgcgtggctgattggacggtttccagcccagcgtccctgattggataatgcttgaggccccgcc

SEQ ID NO: 205263 - DNA, 122 bp, Homo sapiens
catctcctcagagttcgtggcggcctctgagcagttcctgtccaccatggtgccccctggcgtctacatgaggtgagggaggggctcaaaggtgtgtgtgctgggagggatggggctgtcaa

SEQ ID NO: 205264 - DNA, 122 bp, Homo sapiens
aaggttgctaattaactaataaactgtaaaaggtggtgtagtgtagagagagttggcccacgtttccagcttctgtctctatacttggggaaatgaatttatgtatgagattctgggatctt

SEQ ID NO: 205265 - DNA, 122 bp, Homo sapiens
gggtatttgctagtctgttttgtcctactcagtctttgaaatctggtgtctcatgtagtgcgcctcaggtgggagcagctgtgctccggccccggctgccacatcggacagtgcagcctggg

SEQ ID NO: 205266 - DNA, 122 bp, Homo sapiens
gaggtgggggcgcgggatgacccggagttgggggtgctgggtgagcccaaggtgggggcgcggtggcgggccagactcactgcgttctttcgtcgctttgtccatccattcattcattcagg

SEQ ID NO: 205267 - DNA, 122 bp, Homo sapiens
cctcctctcaggtggctgctgcttaatttcccctccactttagtagttcttctcttgcctcgctagaaggactggtgttgggtgcttggaattctggctattttcctcctgccgttccgact

SEQ ID NO: 205268 - DNA, 122 bp, Homo sapiens
tccagactgagcttctccatccctttctttattatacaaataggcagtatacacagtgagcgcccactaagcgctgggctgggggcctccaacccggaacagaagccggccacaaccctcgc

SEQ ID NO: 205269 - DNA, 122 bp, Homo sapiens
taagccttgagtgcttcatggctggggttggccccacagactcacacgaactccagggcccggagcaggccccaggaagcctgccaacccactggcctggagtagacactgtctaatgcaaa

SEQ ID NO: 205270 - DNA, 122 bp, Homo sapiens
tctggcccttccctggcttctatttccagctctccttggctatttatagctgcgaccggccggcaattgcgtcagtcaggggcaggcttcggccggcgatgccaacggtgccaccagtcccc

SEQ ID NO: 205271 - DNA, 122 bp, Homo sapiens
tgggagaccgaagcgaagtggttcccggaagcggctgcagctgggctgctggtggcggggcgggggtagagtggggagagaggttgtgggtcttacaaccaaccaaccccaacacgttttac

SEQ ID NO: 205272 - DNA, 122 bp, Homo sapiens
ttatgtattgtataacagaccaacccaaaatgcagtgacttaaaacgacatgcatttattcgggctcatgagcccatggatcagctgggcagttaggctgtcctggatcagtcttaattgat

SEQ ID NO: 205273 - DNA, 122 bp, Homo sapiens
tcgccgggacgtcccgatggtggcttcgcgcactggggccctgagccctgagtccaagtgcgcagcgcggggcgcgcccccgaaggtgcccgccgggggagtgtgggcgtgcgcacgtgcgg

SEQ ID NO: 205274 - DNA, 122 bp, Homo sapiens
gttattgcaaagcccccaaagagctttctgcaacacagtgcaggcacttcggcacaggcccgtacctttcctggcagggccccaccgcccctcgtacccgcttcctccctggggctcacgtg

SEQ ID NO: 205275 - DNA, 122 bp, Homo sapiens
ccctggccatgcagtgctgggtatttttctagaaagtccctcctttctcccttttgcagacggccgaagccctgcagcccacgctacagccggagatgcagctcgagcacggggccatccag

SEQ ID NO: 205276 - DNA, 122 bp, Homo sapiens
tagtgccatcggtgaaggagggccgcaggaattccacacgctcgcggtagggagccagcacggacacgcccatggatgggttgtagatggccacgttctgcttggagccattggtggacttc

SEQ ID NO: 205277 - DNA, 122 bp, Homo sapiens
atccaaaaatacgttttgaaaagatctctctttggcgctaattttgttgctgtgtcggggcgagtccgctgggctgttggacattgagcttcccctcaccggcctggcggtttctcagctgt

SEQ ID NO: 205278 - DNA, 122 bp, Homo sapiens
cgcccgccgcagcccgactctggggcgtttgggaggtgggcctgaggtttgcctaggactcgagttcctttcaaaggaaggcgagagggagatggggagaaggagactcggagacttctcta

SEQ ID NO: 205279 - DNA, 122 bp, Homo sapiens
ctgcatgctgggcactgtcccgagtacatgaccaccctcacaatactcctgcagagcgcacgcgtttatttccccacgccaaaggtgaggcctcagaggctgaggaatcggcccagcgcccc

SEQ ID NO: 205280 - DNA, 122 bp, Homo sapiens
aagaagggtggacccttcccgttccaggctgctcccgccccacagggatggccgtgttggcggtgaagcctgaggctcagggtccaggcagaaagcgctggttcctccagactgccaagcgc

SEQ ID NO: 205281 - DNA, 122 bp, Homo sapiens
tgggggccctgcatgcgtccggtccggggataggacacgctcctgtgggggccctgcatgcgtcctggggtagtacacgctccagtgggggccctgcatgcgtcctggggtagtacacgctc

SEQ ID NO: 205282 - DNA, 122 bp, Homo sapiens
cccgaggatcggggagaggctgggccagggaaaagccgggcgagggcggatcccccgagccgatcccccagaccagctctctccgggcggtgcgaccccacactggaccccactcgcccgcg

SEQ ID NO: 205283 - DNA, 122 bp, Homo sapiens
tggggttcggggagttttctctgcaccccgcttggagacttcactccccactggatcaatcgctcaggggcgagcaggggcgatcgggggtcgcgagtgcgcgcccccccctccccagcgga

SEQ ID NO: 205284 - DNA, 122 bp, Homo sapiens
aaccccatctctgtgccaggcatagtgctactgtatatacaataactccaattctgaaaccgtcatataaagtagacattgtgatctccattttattggtaatggcctcagaaaggctaagt

SEQ ID NO: 205285 - DNA, 122 bp, Homo sapiens
ttaaaatgaaagggggagcttttaattatgccatgaaaagagacatacgttggggctttccgaggcaaatgtggatgtccagttatgttcgctatgatttcctcaggtggagaggctgtgat

SEQ ID NO: 205286 - DNA, 122 bp, Homo sapiens
ccggaagtcagaaagcggagcctttcttacaccggaagtcaatgaagcgggtctttcctacgctaaaaaccactgagtggagtatttagtacacaggaagtcggccagagaaacatttctca

SEQ ID NO: 205287 - DNA, 122 bp, Homo sapiens
ttttgttaccacgacgtttgaaggtgtgacctttaaagcgacttttgtctcccgctcaaacgcttcttgcccctttcggttttgtgctgaaatcaaagttgattcggttgcaccaaaggcct

SEQ ID NO: 205288 - DNA, 122 bp, Homo sapiens
gaaactgaggctcagaacagcgttggagcgcacgcaaggtctcctgctgtgcacggtgggcgctagtggagccaggcctgccggagcccaagaaccctagactcacagacgctcccctttga

SEQ ID NO: 205289 - DNA, 122 bp, Homo sapiens
agagcagggactggtgagacctgagctcactgaatgagcttgggatgtgatggctgtgctcggattatacctctctgagtacctacctggtctcagattcatttctcacgcccaagcatgat

SEQ ID NO: 205290 - DNA, 122 bp, Homo sapiens
cggtggtcactaggccgactccgactagagtcctgttagcttgaagaggccgtgaggcatcggtcaccgcattgttttagtggaccagttagtagccggaacaatttttggcagaccaccat

SEQ ID NO: 205291 - DNA, 122 bp, Homo sapiens
agataaagaaccaacaattgctcagtgaagtcagacactcccaagctccactacttttcccgcctcccattccccaacatagaaaatcaagactgaaaatgagttaaattcacagttctcaa

SEQ ID NO: 205292 - DNA, 122 bp, Homo sapiens
tgctgccagcactgccacctgcagagagggccacgagtcagacgcgccagggtgagcgtgcgtgggtgcacacgtatgcatgaattgtgcacgtgcacgcatgggagcatgtcagacacact

SEQ ID NO: 205293 - DNA, 122 bp, Homo sapiens
ctcgggccccagcgaggaaaggcgctccaagcctcctcgcggctttcaggtgaaagaaaacgactcctttgctctgccgtttgctgccgtcttgaggctgaacttctagctcggggctgggg

SEQ ID NO: 205294 - DNA, 122 bp, Homo sapiens
ctagaaaccaagcccacggtcttggccgtgaccctgataataaatgggctctctcagaggcgccagcccctccctccccagccggaggcgtcatctctcttctgtaccactagagggagctc

SEQ ID NO: 205295 - DNA, 122 bp, Homo sapiens
cacccgaatactgggcttttccgacgggcttaaaaaacggtgcaccacgagattatatcccgcacctggcttggagggtcctaccccacggagtctcgctggttgctagcacagcagtctga

SEQ ID NO: 205296 - DNA, 122 bp, Homo sapiens
taaaaacaaactctctattggagcgcattactcagccacaggatccctccccggacgtggcggcattcagatgatgggaggtgaggaatgagctcagattacagcgcacattagggaaaaca

SEQ ID NO: 205297 - DNA, 122 bp, Homo sapiens
acagccaacagcctctgcgtcacctgggcactgagattaggccagagttcacagcctgaccggacccgcagaacagactgtgcctgttaacaagaccctagaggccccgcctgccgccccag

SEQ ID NO: 205298 - DNA, 122 bp, Homo sapiens
tcggcgaccctgcagcggtcccggagccagcatccccatcctccagacagggcttgtccacgcgtatctggagagccctgcaggcagccccctccaggcccctgcaatccctttctgatgtt

SEQ ID NO: 205299 - DNA, 122 bp, Homo sapiens
ccatgttctcatccaagaggatgaaacaaggtggcctttaaacccagctactctggaggccgaggtgggaggattgcttgagcccaggagtttgaggctgcagtgactctgtgtctaaaaat

SEQ ID NO: 205300 - DNA, 122 bp, Homo sapiens
accacacgtggcggtagattcttaaacactgtactcgtaagctaagacatcatccacgtgcggctgtagactttgtaaaaactactcgcgagctaagacatcactgcatgaggctgtagatt

SEQ ID NO: 205301 - DNA, 122 bp, Homo sapiens
gctctaagaggggtctcagggtagggaggaaacagctggagacaaagaaagggggtgtagcgaaaagaggtgaaaacaggaaagataagcgaacagaacagaccaaagagagaaaaataaca

SEQ ID NO: 205302 - DNA, 122 bp, Homo sapiens
ggacattcaatggagacccaagaaggatcgtgtcacagtaataggtctaaaccagacatacgctagcagaactagacataccctagcatacccctatgtctaaactagacataccctagcgt

SEQ ID NO: 205303 - DNA, 122 bp, Homo sapiens
cacgcggggctggaggagcgggggtagcccggggcgaggcggcggttgcggcggcggctgcgcgctccccggcctgccggcaggaaccttggaaaaaacccggctgagttctgcagagctgg

SEQ ID NO: 205304 - DNA, 122 bp, Homo sapiens
taccttgcacacacccacttatgcccgcgtgaaaaacctttactccccgccgccggccaccgctgccagggtcacacaccttaaactcacgtctctctgaggaggggagacaggttgacttc

SEQ ID NO: 205305 - DNA, 122 bp, Homo sapiens
gcggggcgggcttggtagggacgctggtcccccgaccgtgggacaggggctgggttgggacgcgggtccccactaggagccgcgggggaggggcagggccggagtccctaccctcgtagggg

SEQ ID NO: 205306 - DNA, 122 bp, Homo sapiens
cacctgttttttagtggttcccctaaatttctcttaatccctttgcagtgaactattttgcgttcttagacttgctctttgtgtattttcactgagacaataagagaatatttcatcattcc

SEQ ID NO: 205307 - DNA, 122 bp, Homo sapiens
gaactccccctcctcccgcctaaatgtacagagcaagacttgaagtcaaaagatagatagcgatcgtgctgaaagtcaggtggaaaacaagactgctaattttatgaaacaacctatcaacc

SEQ ID NO: 205308 - DNA, 122 bp, Homo sapiens
gtaggacgaggtggccgagtggttaaggcgatggactgctaatccattgtgctttgcacgcgtgggttcgaatcccatcctcgtcggccctgttttatagaggttgggggggaagcatctac

SEQ ID NO: 205309 - DNA, 122 bp, Homo sapiens
ccactcgcgggccgggggcggggcctcttgttcaaacccacgcgggcggggcatctgtggcgcgtcttcccgcgctgcggcgacggccgttggggctcgcgcgcgccctcggttgccccgcc

SEQ ID NO: 205310 - DNA, 122 bp, Homo sapiens
cctcccccagcctcgctgccgccttgcagtttgatctcagattgccctgctagcaatcagcgagactccgtgggcgtaggaccctccgagccaggtgcgggatataatctcgtggtgcgctg

SEQ ID NO: 205311 - DNA, 122 bp, Homo sapiens
tcctctccccaaagggccactccaaggcgtgaggtacagcccgccctgccggcagaaaagcgcccccaagcttaaagggaagaagccgcagagtgccggggtcgggggctagcccaggccaa

SEQ ID NO: 205312 - DNA, 122 bp, Homo sapiens
ctggtggtggggcatcctcaggacctctgccgccctccaggacctcctccctcacctggtcgaagcagtatggtgtgttctggaagtccacatgcagcaggttgcccagcccgggcagtggc

SEQ ID NO: 205313 - DNA, 122 bp, Homo sapiens
agccttcagattccccaccttttactgaaaacacaggccggtccccttgtagggatgatacgtcagtttcattggtctactctgctctgaattcttaaaaagtttttggaaaacttccaggg

SEQ ID NO: 205314 - DNA, 122 bp, Homo sapiens
attcctcttcctctgctctgcaaagccatcttccagttccaagtatctgctttctgtcttcgtgtcctgtggtttgggttacaaacccctcatagttttatcactgattgtttctgtttctc

SEQ ID NO: 205315 - DNA, 122 bp, Homo sapiens
agccacctgctgcagttaccatggcatgctgagttgatgcaccaggtggcagcagccatccgttattatttccaatggagacctagcccaggccaaggtaaagttagttaatagcattggga

SEQ ID NO: 205316 - DNA, 122 bp, Homo sapiens
aggcacgctctggagcaggcgtctgcagctccccagagcggaagcaaaccccgaaagtgtcgcttcggggacgaaatgcacagcagcctctccaagcaagggcgcctcccgcgaggaatgga

SEQ ID NO: 205317 - DNA, 122 bp, Homo sapiens
cactgctgcgtcaccggggctcccgcgctccccgcccccgcccccgccccagcccgggcccgcgccccccgcccgctactcgggcccacgccccctgtcccagcaaagggccgcgcccccgc

SEQ ID NO: 205318 - DNA, 122 bp, Homo sapiens
gaccctctgtgacctgcaagcccaggagtgccccgatcaggccagatcatgtgcgctttccggttctgaagacggtcagctggctcattatgagagtcaagaagggcttcgaggattggtac

SEQ ID NO: 205319 - DNA, 122 bp, Homo sapiens
ccctgcctttctagggggccagcgtccccatttataaacagcagggctggacgcagtgggcgctgagatgatatgcttcagcgccacccactgacggggggtctctcagggtcacccttccc

SEQ ID NO: 205320 - DNA, 122 bp, Homo sapiens
cacacggacgaaaaccaccttgtgctgccttgcccgcgtccgcgcacgtcctggcgcccccgtgtgttactttgggggatcgcagtctccgccaatccagagcaggcttcgcgggggcggtg

SEQ ID NO: 205321 - DNA, 122 bp, Homo sapiens
gattgctgggttgaaaaataatgctttcacatcactagtctctccagctatctaactattcgcaaggtaaaaaatggcctcagggtaaagatcaaatcatggttgtgtctgtaagactcttt

SEQ ID NO: 205322 - DNA, 122 bp, Homo sapiens
agtgccagacagtgggcgcaggtcagtgggtgcgtgcacagtgtgtgagccgaagcatggcgaggcattgcctcacttgggaagcgcaaggggtcagggagttccctttccgagtcaaagaa

SEQ ID NO: 205323 - DNA, 122 bp, Homo sapiens
agggccataggcctaaaggggaccaattgctcagccatgggtcatagccttccaaggactcgttcatgtcctgcccccttcccatacctatccctggtctccagaagatcagatggccttcc

SEQ ID NO: 205324 - DNA, 122 bp, Homo sapiens
aaagcctggagtggacactacgaatgccataggtcttgtcgtacagatgtcaggcaagaacgtgctcaaagcacggtaaaaaggaaaaacttgcctttagaggatttcagggatgtagatgt

SEQ ID NO: 205325 - DNA, 122 bp, Homo sapiens
ccatccttatttcttttaatgcagctttggggaaggtgaacagccgctctgagatcatttcgcataacggtctgaaccatcgtcttttaaactgtgacctgtgtgggggtgcctgtctcact

SEQ ID NO: 205326 - DNA, 122 bp, Homo sapiens
cagcaggagttggtgagtaagtgctatccttttctgtctcaacagtctcttccctcttcacgagatgatcatggaaataggaacctgcatgaaagaactctgccttctcagttgcctaggaa

SEQ ID NO: 205327 - DNA, 122 bp, Homo sapiens
ttggaactgaagacctgatgggaaaaaaaccttcaagttctatactgtactgtggataagcggctcagttcagcagagctggagttgaacaactttgttcctctggtgtggtaaattgacct

SEQ ID NO: 205328 - DNA, 122 bp, Homo sapiens
ccgagatgccgagcctcctgcagtcctagagagcatacggcgcagggccagggccacttccggcccagaggactccctgtcaatttgctgcaatggctcctgcaccagggttgggtgggttc

SEQ ID NO: 205329 - DNA, 122 bp, Homo sapiens
tacccaggttaagaaaataaatgtcaccaggtacttgagaaacccctcgattgtctacctcgatcgtacttccttgctacccacccctcccagggacaaccactgtcctgaatttcacgata

SEQ ID NO: 205330 - DNA, 122 bp, Homo sapiens
gtggagctgtccacacagcttcccggactggaagtcacgtgtgtcgctggggactgaccccgggaagcagtggtccagggatgttgggagcgaggatgccccgtgggctctgggacccgccc

SEQ ID NO: 205331 - DNA, 122 bp, Homo sapiens
gagggagactcagtgagagaaatgaaccagttctgcaacaacctggggaccaggcattgtcgataagggtccccaagaggggactggctttggcacggtccagggagaggaggaagcagctg

SEQ ID NO: 205332 - DNA, 122 bp, Homo sapiens
gactgagcacatagctaaagccttaattatttgggaggtgagggggaagggaggtttgaccggaacaagtaaaacctgtatcccactgcttttccggtgaatgtgggtaaatccccacccac

SEQ ID NO: 205333 - DNA, 122 bp, Homo sapiens
ctttttagttattttagttcagagctaattctgtattttttttaaggcagagagacacggcggtggggaagacacctagacttcgggatttccaggactggccctatctcctgctgggtgtg

SEQ ID NO: 205334 - DNA, 122 bp, Homo sapiens
aatcgattaggccaccagagccctccattcctaaactccgcgtacagtcaggtaaaagcacgaagcactagtcacggtcctgcccagacttttcacgcagaggtggaaagttgcagaccccg

SEQ ID NO: 205335 - DNA, 122 bp, Homo sapiens
cactcaacccccggaaagtcgaggctgccgggacctgagatggcgcccctgccctccacccggtgcgacagagccagaccctgccacattcaaaaacacaataaaagaaagaaagaaaagga

SEQ ID NO: 205336 - DNA, 122 bp, Homo sapiens
tttttttgtcaatatctgattttcttagtactggggccatgttcagaatctttattaagacgagttcataaaaataagaaaattattttaaccggatacataattctgtccccctagatcat

SEQ ID NO: 205337 - DNA, 122 bp, Homo sapiens
gcagcttgccccacctctttcaaaaggtggaactgggagaggggcgggcactgtatcttgcgaacgacagaaatggcaaccaactgtgcttctgcattacagaccaccaaccaatgggtggt

SEQ ID NO: 205338 - DNA, 122 bp, Homo sapiens
ctcatctcgactggattcaggttctttatcctagacaggactgtcacagaagggctgctgcggtcttctcaacgcagcacgtctagtggcacacaatttcagcttgtcaatttgtctcatca

SEQ ID NO: 205339 - DNA, 122 bp, Homo sapiens
gttgcaactaatattcaatttttgaattctcattacttttggctggtacctccactagaccgggtggcttgcccataggggtgacccaggccctcattactgtgccatcgaagccctgctca

SEQ ID NO: 205340 - DNA, 122 bp, Homo sapiens
cgcgagcctgcgaggctgagcggccaggagtggggtcttgcaaactcagtagcccgcgggcgcaggcggcctctgcagctctgcgggacttgagagaggcgcaaggcgcgcaggcctcgccc

SEQ ID NO: 205341 - DNA, 122 bp, Homo sapiens
agtaaatatctattcatcaccttttcccaagctccataaagttttttagtttatcccagtcgctaggagacagaagacggaagcggaaatgcctttcacgacaacttccggaagaggtcgcc

SEQ ID NO: 205342 - DNA, 122 bp, Homo sapiens
gcacttgggtctccactaggggacccagccccagccccggccccgttctacacacccagccgtagctacccccaagaagccgtgatcgggagctccgagctcccccagagctgcttcccacg

SEQ ID NO: 205343 - DNA, 122 bp, Homo sapiens
gtgtctccttgggatctgttcccctcttacttcaccccctcccccaacccgcctccaccccgcttcccaggtccctgtccgctgtggggatggagagacactaacagaactgggatgggcga

SEQ ID NO: 205344 - DNA, 122 bp, Homo sapiens
gctctaaggacagtggggaaatgcctgcgtttctcacagaattacaagtacaaatcttgacgctaggtggcagaattaggctgcattaatcttgacctcttttgcttccttatttctttctc

SEQ ID NO: 205345 - DNA, 122 bp, Homo sapiens
tatgcatccggactggaacatggactggaaataatcaacacctcaaaaatatgaccaggccgggcatgatggctcacataatcccagcagtttgggagaccaaggtgggaggattgtttaag

SEQ ID NO: 205346 - DNA, 122 bp, Homo sapiens
agggcaagagagcctttaattctgacgcaaatcctgcccctgtactctttccccattggccggggtccggtcgtacaatctaaacgaatcccggttggctaaacatttgaatttttttacat

SEQ ID NO: 205347 - DNA, 122 bp, Homo sapiens
gacggtcgcccactcctcctgccagtgtctgtgctgctcacggtagctgcatcagcttcacgctgtccgcccttcgccacccaccgcgcctgctgctcaggaatgttccaagcaacttggtg

SEQ ID NO: 205348 - DNA, 122 bp, Homo sapiens
gcgcctgaggctgcggggaaaccgcggggactttcccaaccaccctcagccagggccgcacggcacccacagactgggtgccccagaggcgccagtcttggctggtcagcgctacaggcccc

SEQ ID NO: 205349 - DNA, 122 bp, Homo sapiens
ataggtataaatttaaagctttcaaagtatgcaagaggctcataaaaggaagaaagcaaccgtaaatattcattgaacagttgagggtctcttctggcctctgctgagatgatcttgccaaa

SEQ ID NO: 205350 - DNA, 122 bp, Homo sapiens
aaagtggattctaccaccctggagggagggagatgttagccagcttctgagacgcaggaacggtgaaggattcggagttctaccccgaccagcttgttaagctgttgatcagttacaagtgt

SEQ ID NO: 205351 - DNA, 122 bp, Homo sapiens
atttctcttcggtgactgcacaggatcccttctagctcttttcctgttggagtcgctggacgtctcccaaacagctagttagtcgcctatctctggagcgcaggccttcggaattggattca

SEQ ID NO: 205352 - DNA, 122 bp, Homo sapiens
cctgtctccttgttcttctcttttcttcctataaataactctcctctgtgctgtggctgccgctaagggccactctgaggcccttcatactccaggaggatccccagcagcgcagcctgcgc

SEQ ID NO: 205353 - DNA, 122 bp, Homo sapiens
agggtgagacctttcaaagctgccaagtgggcaagcttccagcagcagtctgggagcgagcgacagagccaccaagctgggcggcagggcattgagcctcgcgtttcaatttctgttcagtt

SEQ ID NO: 205354 - DNA, 122 bp, Homo sapiens
gcagcacccgggaccaggtccggactgtggtcatgaggccctctgtgagctgggagaaagcggggcccgaggaggccaaggcgccagtgagaggcggtgagttcattccaccctcaccaccc

SEQ ID NO: 205355 - DNA, 122 bp, Homo sapiens
cagcagtgacagttggaacaacaatgatgctgctgcctccctggagaactccgcctcctccgacgaggaggacattggctccgagacgagagccatctactccatcgtgctcaagcttccgg

SEQ ID NO: 205356 - DNA, 122 bp, Homo sapiens
cccatttcttccgggcctgcccccgctcctcgcctgcccctcccctccaccagccagtgtcgccccatctgtctgtcctccgggcacttgtcccgcccctcactgcgtgtccctcccccgcc

SEQ ID NO: 205357 - DNA, 122 bp, Homo sapiens
taatggcttgagttggttggcctctaccctctagtgatcttctcacttaaagttcatacacggacagaccatgagttggttaacctgacatccattcccaattgcctgcagctactctagca

SEQ ID NO: 205358 - DNA, 122 bp, Homo sapiens
gcagcatagtaagtgctcagtaaaagttgctattctgatgctattataccattctataatcgttagcacagatacagaggctgagttgccttttggtacacggtcaaatatacaacccccat

SEQ ID NO: 205359 - DNA, 122 bp, Homo sapiens
ataacaatgaaagacacacaccgagagctacgctcatcacctttctctgtgatcgagacgcgggagtgggcttccctgaatatcaggtaggaatgtttgttcctcatcgcgctccctgagga

SEQ ID NO: 205360 - DNA, 122 bp, Homo sapiens
cctgccgagttccgggcccgtgtctgcgcaagctgattggctggagcggtgcccgggctgcgcggctataggtgagcccaggaggggacgggcggggcgggccggaggcccgccccctcccc

SEQ ID NO: 205361 - DNA, 122 bp, Homo sapiens
ggtgtggagggagaggcgcgggcaggaactggagctgcgtgcggtgcttgcgggccagcgcgagttccaggtgggtgtgggctcggcgggccctgcacttggagcgcctgaccggccctggg

SEQ ID NO: 205362 - DNA, 122 bp, Homo sapiens
acttaggaccagaggaagccaaaatgctggatgtgtttgctacggaggggataggggcggcgatcattttaaggaaacttagaagtttgtctttcagcggcgggactctcagccggcccacc

SEQ ID NO: 205363 - DNA, 122 bp, Homo sapiens
cagagtgaaacacacctcaggactgttcaccaaagacacggatgaggggagtatttactccgtctgccaaaccccattggtcaagggttgctctccaggatgttgaatcccttgcactcatg

SEQ ID NO: 205364 - DNA, 122 bp, Homo sapiens
cccggagctggaaccggccctggcccgacggtggcgccggccaccttcctccagagcaggcggctcatggttggtgcagggacccccacgctgggagtcagaacacctggctttgggctcca

SEQ ID NO: 205365 - DNA, 122 bp, Homo sapiens
cctgaggggacgcaatagggggcggctgcaaggcccgccacggcgctagcctggagcggacgaaacccttgcactctgcggtgctccccccaagggcttgtggcccctagtcctcccgccgc

SEQ ID NO: 205366 - DNA, 122 bp, Homo sapiens
aacgctcagacacagcagggctaagttaaggcacacttgtcaatgaggtcctgttccaggcgtgccgagaggggctgtgaaggcctcaccgcacacaggctgctcacgtgtccgtatctggc

SEQ ID NO: 205367 - DNA, 122 bp, Homo sapiens
cgcggagcggccctgctctcttgcctcaagcacagaagcaaatcaccaggctctgcctgccgtcgtgcggtgacatcgggggtcacctccccgaaggcgcaggtctggtgggcgagcagagc

SEQ ID NO: 205368 - DNA, 122 bp, Homo sapiens
gggtagtgctggcgaagaggcgaacctggaggagggtagtccccgaacagctgggactgccgcagggcgatagcttaaaagacggtcagaactcgggttggggtgagaacaataaccgctat

SEQ ID NO: 205369 - DNA, 122 bp, Homo sapiens
gagccaactgcacggaagaggcaggaggccaagccggagccagcgcgaaatccacccctgcggcccctctgcctccaccagctcctgtgtgccagggaatgggctccaccccaagccccagc

SEQ ID NO: 205370 - DNA, 122 bp, Homo sapiens
gcctgggcgcctctcgggggcggccacggccccgcctccgccggcctccctgcccgacggcggcaggaggcctccggactccgccaccatcccagctgccccgggagcaggcgagcagggcg

SEQ ID NO: 205371 - DNA, 122 bp, Homo sapiens
gctggagactccaggagcatgctgttgagcagggatggcatggaattctagtgtgagacacggatgctggcatgaaggaggacacccaccctactcttaggaaaaaccaagtggtagttgtg

SEQ ID NO: 205372 - DNA, 122 bp, Homo sapiens
ccgcgacgcaggccttcccccttctctaccacgcgaccagccggtctcgcctcgggtccccggcctcagtccagtacctgcacgtcttcattgcggagctcgtcgattaaaaccgcgatcgg

SEQ ID NO: 205373 - DNA, 122 bp, Homo sapiens
cgtcatttacagggagagcatgagggcggcgtgaggtcagcggggcaggtggatgctgtgcgcttactgcagccatgcggtgggtgcacgctaccaccgtcttctcctctttttcttgggag

SEQ ID NO: 205374 - DNA, 122 bp, Homo sapiens
cgtttttcccctacttcatctgcacaatggtttgtttgcaaaggtcctagcctggggagccggagtcaccgtggttggaggaaacaaattctcatccaatgtttagtgaccttatcaaaaga

SEQ ID NO: 205375 - DNA, 122 bp, Homo sapiens
agcgccttggacagaccctgccccgcccccgtgcaagcccctggctgcaattctgggttccgtttccatgggacactccgccgccaatcctcgtgtcgaactgctcttcctgacccctcaat

SEQ ID NO: 205376 - DNA, 122 bp, Homo sapiens
cttgcacatggtgctgtgagatgccctccagagaggaagatggaagctgtctccgtgccccgggactgatgaagggcccattccaggcctttgggcacccgggctcactacccttctgggag

SEQ ID NO: 205377 - DNA, 122 bp, Homo sapiens
agtgtcttctgtgtctgaattaccacagtcatgtagtggctcagtgagaactccttgtcccggtcattacaaaaataaaacagaaatctctctgttgctaggttaggaattagatcacaatt

SEQ ID NO: 205378 - DNA, 122 bp, Homo sapiens
cttcctgcactcaggcgcacccaggcgctccttaaaacagcttattgctccacacctcctcgtgttgtctgtggacgcgctcttggggttggaaccgatacaagaaccttacactgctgggc

SEQ ID NO: 205379 - DNA, 122 bp, Homo sapiens
gtagccttttgaggaccagatatattgtcagagcaggaggttgagctcagggaaggatagcgacttgtatactgtcacatagcaggtctgcaggacagcctggggtcacactcttgcctgcc

SEQ ID NO: 205380 - DNA, 122 bp, Homo sapiens
gagagactgttataatacaagtggactgaggcagccgtgagcagagaaaccaggaatgctcgccccgatctctagtcttcagtcttggccctgtttcaactttcagtttcacatgtggaaaa

SEQ ID NO: 205381 - DNA, 122 bp, Homo sapiens
gcaagaaaggcaaaagcgaatcccaggaaaaagactggctcatcaatcacatgttgactgcgctcgcgcgaattgcgcatgcgcatgctgagccccactctccccaaccccggtcccgcctc

SEQ ID NO: 205382 - DNA, 122 bp, Homo sapiens
cgccaggggaggctgcgccgcccgcccagacctgcacgccctgcggtgcccgaggggttgcggtctcagggactcgtgtttgttattaggactggcgtgttaactaaaatgattgtgactga

SEQ ID NO: 205383 - DNA, 122 bp, Homo sapiens
atttctcggagctcaagccaaggaaaggcctatgagaacaagcgcaaaacaggccggcagcggcagaagtggggcatgactattcgatttgactcaagcttcagtagactcagaagaagctt

SEQ ID NO: 205384 - DNA, 122 bp, Homo sapiens
aatgggtggagctggcgcggggtttgaactgcagctgtgtgggtcttgggggtttttccacgtccttgccctaaaaaggctggggacctacaggtgggggaaaggggtctctgtgcctcacc

SEQ ID NO: 205385 - DNA, 122 bp, Homo sapiens
tgccccagcccctggccttcaagaagggctggccctcgctgtagcaccagcttgtcctcacgtctgtccgggctcgagcatggggacattgttatcggaggcctgcttcttggctgtagaga

SEQ ID NO: 205386 - DNA, 122 bp, Homo sapiens
ctggagccagcagtgtgcaacccgtattttgtgaaagcccaaagcagaggaagcgcccagcggcaccaccagcatttgcatccccccatccacacccccagcccctggcattttttaggtca

SEQ ID NO: 205387 - DNA, 122 bp, Homo sapiens
cggagatgttggtgtgggttttcacagcttcgccattctggcgggtccaggagatggtcacgctgtcataggtggtcaggtctgtgaccaggcaggtcaacttggtggacttggtgaggaag

SEQ ID NO: 205388 - DNA, 122 bp, Homo sapiens
tcgcggccgggcggggcgggggctgcagctgcgagaccgaggctgtggtcgccatggaaacgcggctagaggcggggcctcgactctggtcccgcaccctctacccccacccaccgccccgg

SEQ ID NO: 205389 - DNA, 122 bp, Homo sapiens
gggggagccggggtgtacaaatgaatgcgagtgttccttggtctccctggctcccggggccgctggcgccctcctggccggagctgtatgctcagctggcagtggtcccggagaaacgggca

SEQ ID NO: 205390 - DNA, 122 bp, Homo sapiens
cagaggtggggtttggttcgaccccgccccttcatgctcgcttcttaaagggcccgggttcgatgattgaatttaccttggttcccttgaagctgtagggaaaaggctggctgcgcgcacgg

SEQ ID NO: 205391 - DNA, 122 bp, Homo sapiens
ttaataaatgaatgaatgaactatgttatctatttgatttcccaggtggctaggctcctgcgcatgtccttgaatttgctctccaggccctcctgtttggctgccgctctggctcctaagca

SEQ ID NO: 205392 - DNA, 122 bp, Homo sapiens
actgtgccagtgcccatgtttacagaagtcaggggaaggaaggagcctgtgtccctgggacgacagtcaactggagctaggtgttgacctcagaactgcattttatttattaatttataagc

SEQ ID NO: 205393 - DNA, 122 bp, Homo sapiens
aaccaggctgcaagggaagccctcggtgttcgcttttctgaggacacggggaggtgatagcggcgctgtgggcaagagcttttgccaaaggagaatggagaaaaagacggaagcacccaggc

SEQ ID NO: 205394 - DNA, 122 bp, Homo sapiens
agggagcagagaagccagttactctatggggttatctgacaaagaccatcaagtcctcagcggcccagactagggattatgtggagatgtacactgtgcaaatgcaggagcaactcaccaac

SEQ ID NO: 205395 - DNA, 122 bp, Homo sapiens
acccctgcccaagccccgttcttttagggaagagcactgaaatgtcctgcaccctccacgcgatgaagtgtttcctcaggcaggagcaacagcagcactagaaattatataactctcgaatt

SEQ ID NO: 205396 - DNA, 122 bp, Homo sapiens
gtgggcgggaggatgactctgaggctctcggattggctgggaagcctctctctggctgagcgaacggtgggtgctgcgcatgctcatctacagaaacgccgcttggcctttggactacacca

SEQ ID NO: 205397 - DNA, 122 bp, Homo sapiens
attacgggttagtggcacctgggagcagggcgcaaggcgcatgcacagggccagccagggcgcgggcctctgcgcccctccgcagcactcactgccggtacctgttcttctttctgcgcagc

SEQ ID NO: 205398 - DNA, 122 bp, Homo sapiens
ctgtgtccctaacccagggagtcatccatcaagttccacctgcattcccctctgtgccatcgtctggaaactctcacaaaggagtaatctggggcagtcaccagattcacatttggctcctg

SEQ ID NO: 205399 - DNA, 122 bp, Homo sapiens
gcctcctctcctccggcattgcgggcccaggagatccgagccccgcgaggctccgcaggccgcccccggacctgctgcttcgccaacagaagccctcccgcaaacgaagtgcagtgagtcca

SEQ ID NO: 205400 - DNA, 122 bp, Homo sapiens
ttttctgtaaggagggggtaagaacacctgccctcgggtgatgtgagaagcacactcacgcggggaaacaggtcttagtattttcttagactttgttttgttttgttttaaggcagggtctc

SEQ ID NO: 205401 - DNA, 122 bp, Homo sapiens
cgaggggagcgagaggcgcggagagtttggcaggcagacccagaaatccctggagcgcggcggacccggcggccggaggggcgaccccgcccgatgtaacgcgccccgcccgagccccggcc

SEQ ID NO: 205402 - DNA, 122 bp, Homo sapiens
gagccactgtaaaaaaaactgccacaaactgggtggcctgaggaaacagaactctattctcgcacagttccggaggccagagttccaatcgaggtgtgagcagggccacactgcctcagagg

SEQ ID NO: 205403 - DNA, 122 bp, Homo sapiens
ccgttggtgaagtagcacatgcccttaaactggaacacgaaatcctctgcggggaatcaccggccggtcagtcaggccccagcccggccgcccccgcagccgccgccctgacccggcctgga

SEQ ID NO: 205404 - DNA, 122 bp, Homo sapiens
gactgacagtgaacagcaggtgtctgcagaagaagcccaagcctggtgcagggacggcagcgactatccttaatttgaaacaagtgcaaaagatgccacaaatgtggcagtagcatttgaaa

SEQ ID NO: 205405 - DNA, 122 bp, Homo sapiens
ctcgtagataaagcatataaaacatgaaagcttttataactttatagaatgtaaatattacgtattaacataaactctagagtgcacaggtgcatcaaagcagaatgggattgagaaccttt

SEQ ID NO: 205406 - DNA, 122 bp, Homo sapiens
cactaggcgctactgtacacggagccgcagggcggggtcaaagttcccagcaaacagtaacgtttttttgggcagactaagttgtaacacttttcctgggcagctcagaaaggtcgaggctt

SEQ ID NO: 205407 - DNA, 122 bp, Homo sapiens
cgttcataggacccctgcccctacaaataaaacaaaatacaggcagctttaaaatgccagcgttcaactccctacagatgttcctgttaggagcttccccctcagtccaaggggaagggaac

SEQ ID NO: 205408 - DNA, 122 bp, Homo sapiens
tgaggttgtgtgaggatgtgtgtgccagagggacacagagacactccccctcccacccaccgagctgagagtcacctggtgtggcctctgtggggctgtcccgccatcaccgtggccacagg

SEQ ID NO: 205409 - DNA, 122 bp, Homo sapiens
cgtaagaaactcataacaaactgcgcagatctacagtggaaaactgacacactttgatcacgaatacacccgtgaaaccatcaccaccttcgagataatgcagtagcccttatccccaaatc

SEQ ID NO: 205410 - DNA, 122 bp, Homo sapiens
ctacttcccaggtggtcaggaggtttacttaagccagtgtagatgaaagtgcttagcatacgacttgacattgtccttcataaatggctgttgctagaataacaataacaacaacaacagca

SEQ ID NO: 205411 - DNA, 122 bp, Homo sapiens
atgcccgtgaatgagccaggtagagcgccggtgagggtgaacgggtgggcgctggcatagcggagccgcggtactgggcctggggcactggcccgggacgtgggcgtgtctctgtcaggtca

SEQ ID NO: 205412 - DNA, 122 bp, Homo sapiens
aagtgcagttcctgtagtttcagaaaaggcaaacagtgcgctacctgagctacttacacacgtggtacaggagtgaaaggggcaggagagggttcccaagaattcagcgccatccgcccagg

SEQ ID NO: 205413 - DNA, 122 bp, Homo sapiens
atttgcaacttcttaaacgattctaagcctaatgtttctgacaaggatgagcctctcaaacgagatactgggcactaagaccacaccatagcagtgcgtctgggggcagcaccatggcagtg

SEQ ID NO: 205414 - DNA, 122 bp, Homo sapiens
ccccgttcacggagcacccactgcacactgcggcatcccctgtcccggcggccccgttcacggagcacccactgcactgcagcaggcccagcaaaagccctgccaacaccaccagcatctct

SEQ ID NO: 205415 - DNA, 122 bp, Homo sapiens
ccggggccagcagggccggccggctgctcccagtgcgggacccaccaagcccacgcccaccggcaactccagctggcccgcaagcgccgcacgcatccgcacgcagccccagttcctgctcg

SEQ ID NO: 205416 - DNA, 122 bp, Homo sapiens
aagtggatggggcacgacagctgtggaagattaatcacacgccgctgcaagtcaccgggtcgccaggggccgaggaggcttcccttttggtgccccaccggaaggccggatgtgttcctatc

SEQ ID NO: 205417 - DNA, 122 bp, Homo sapiens
cattcatttatcgaagttgctttatgctgtaagtttaactagaccccaataaaataatttcgagagaggtgtaactaactaattccctgccagcttgggaatccccaaatcttattttaata

SEQ ID NO: 205418 - DNA, 122 bp, Homo sapiens
taatcatcaggtcaacccatcaacatgtgggtggctacacatcacagaaagcttgctcctcgtagagagaaaatgtgagtcttggccatatttatagctgcactcataaacaagactcaggt

SEQ ID NO: 205419 - DNA, 122 bp, Homo sapiens
ggggaccctcgggctgcgcctctgcccctcggtccccagcacccctgggaggagctgctgcgatgacacccagtccctgggcgccgccgcatcgccctgccctgagcggaattctccggccc

SEQ ID NO: 205420 - DNA, 122 bp, Homo sapiens
aatcagccgcgcgctgccgaaaagtccttttcggcctgtgagccatggccgaggcccgagcgcccggcgccctagaacccgctgaaccgcaagccgcagcttcagtgcccgccccctagggc

SEQ ID NO: 205421 - DNA, 122 bp, Homo sapiens
agcaaattctgtgattagaaacattgctgtcatgccagtctaatttattttaggatgagccgtgtgactagattgggtgagtccaggacatacagaccaaaatccaggaatgattctgagct

SEQ ID NO: 205422 - DNA, 122 bp, Homo sapiens
gaattttaagataaacctcagcatcctgtccctggcatatacactacctttgagtgtaaacggggactgcgattatgatgtgatagtcattctcatcattgttacctaagacattagccccg

SEQ ID NO: 205423 - DNA, 122 bp, Homo sapiens
acttcgctgttaaaaggaggtaccaaaactcctgaaaagcgcaagttctgcctaggtctccggaaagcagaacgctgtttttctccaggtctgtgtcgtggatcttcaaccagtagctgaag

SEQ ID NO: 205424 - DNA, 122 bp, Homo sapiens
agggaggggaagggccctatgattgggctgtgacgcgtgagcgcattaatgacgtcactgcggctcgggagagcgcgccatgaggtcataagagcctttttcctccaggaagagagataccg

SEQ ID NO: 205425 - DNA, 122 bp, Homo sapiens
aggaggggtgagtcgaggacacaggggcagccggagaatgcggaggagccgggtcctgagcgcggtctaagcgaggctcggctctcgtccaggaactcggacgcgggctcgccggctctccg

SEQ ID NO: 205426 - DNA, 122 bp, Homo sapiens
caagggcggcttttatctttttatttttggggtttctccgggacaatgatgggccttgcgcggcacagagatcggccccacgtcagctgccgcgcttgcaacaagctggccagggagcacca

SEQ ID NO: 205427 - DNA, 122 bp, Homo sapiens
ccagctgatggagatgctgctgtaattattggtggtaataatgggcagcagtgagccacccggtgtgacagtgtaggagaaaacagtccaaactcctgccaaactctctctactgatggcaa

SEQ ID NO: 205428 - DNA, 122 bp, Homo sapiens
cggggccgcgtgagaaagctctgcgggactgagggctgggtgggtcgaccgggaacggcgcgcgctcccgccgccatcgcgcctccgtccccgcctgcggcctgtctgggggtcgcggggcg

SEQ ID NO: 205429 - DNA, 122 bp, Homo sapiens
agcaactaacacgccgctcaggaaagcagcaaaggctgccgggaaatcaagcctttgccacgaagcgagatgctcccaacccttaaaactgccatccacccccgcgcggggcgccgcagggg

SEQ ID NO: 205430 - DNA, 122 bp, Homo sapiens
gcggcgtacggccctgctccgcgcggcagtcgatgatgctgcggtccagcgcatccaacacgaagcgggccaagtgcactttgcccgcctgcatggcctccaggaaggtgcgcgtccccgct

SEQ ID NO: 205431 - DNA, 122 bp, Homo sapiens
tttcactgtcttcaacttattaatgtgaaacaaagaataacgtatatgtgtgtgtaaacacgaatagtaacagcttatatttgtaaacaatgtgccgtgcgcccagcactacattaagcagt

SEQ ID NO: 205432 - DNA, 122 bp, Homo sapiens
cagacaaaagccaaggttagggctgcctggcgcccactcaccggttcttgtcgccgccctcggcctcatccacctcgtctgcactgcaggtagcactggagtcgctgtcctggggggcgccc

SEQ ID NO: 205433 - DNA, 122 bp, Homo sapiens
aagtttacactcctctcatggctcaggaaggctccacagtcaatgtgaggtagaacaggacgtgtctagctgatctgtgggtgtcctgagagcttagagctggatgagagctagcagatgga

SEQ ID NO: 205434 - DNA, 122 bp, Homo sapiens
atcttctgaccctcatcaacacacccttgtagctatctcaattcccgtggcatcccaatccgctccaatcaagtcaaagttccttggaaggcagacacatactttacatagagggtccagca

SEQ ID NO: 205435 - DNA, 122 bp, Homo sapiens
cctagcaccggctctttcacccagacatctttataccctggtccatggacctccgcagggcgatgaacttggccccctcatcggatgaggacattttcctcgcctcagcaaaggcgagaaga

SEQ ID NO: 205436 - DNA, 122 bp, Homo sapiens
caccaggcacacacaaaacccacaaggtattcaaattgttctgtaatatgtcaatctgtccgtacaaatttgcagtttcaaaacaagcgttatagctgaactgactgtatgtgggaacatca

SEQ ID NO: 205437 - DNA, 122 bp, Homo sapiens
ccgttaaatttgaaacacaaactgtctcgcgatgggctgtcctgccaaagaaagcagcagcgaataagtacgtggcagatggtgctgtcgaccagtgtcaagaccaagtttcatgggttcct

SEQ ID NO: 205438 - DNA, 122 bp, Homo sapiens
cactgtcagatccttctccgcagaggtagcgcgccaccccagtcccgcggcggggcggggcgctccccaatcccgcccagctgcgcccccggccggccaacgctgcgccccgccccctaccg

SEQ ID NO: 205439 - DNA, 122 bp, Homo sapiens
ctcttcctttttctctctgcttccttccacggtctggttctttactctttggggaactgccggtcccggtggaggcagctcttctgtgggatcctgaagccctagagaagggatacctggct

SEQ ID NO: 205440 - DNA, 122 bp, Homo sapiens
ggccacaagttactggggaagttaattgttgacaggagcttcgtactcggctcacagccacgcacagtgggcttcctcccagtacccgcccttgcccctgggcctaaccctgccctggaggc

SEQ ID NO: 205441 - DNA, 122 bp, Homo sapiens
catgtaccccaagagggaccccgcaggccacacccgccaaccggccccagggctccgggccggcgtctcgccaactccaccttgcccggaggaaccaccttcacccgccatcgcggccgggc

SEQ ID NO: 205442 - DNA, 122 bp, Homo sapiens
gagagtggcgcctccgctcatgtccgccccctccccgcagagaattaccttttccagggacggcaggaatgctacgcgtttaatgggacacagcgcttcctggagagatacatctacaaccg

SEQ ID NO: 205443 - DNA, 122 bp, Homo sapiens
tgagtctggggcatgggttcagtgggcaagtctagggcagcagagttgactacgcctcggcgtatagaatggccctggcctgggacagctaaggacgacaagaggaggccgaagcctaaaac

SEQ ID NO: 205444 - DNA, 122 bp, Homo sapiens
tccagtgtcctcctcccttcagcccagaagccaggtcaccttttagacttgctctcttggcggggaggaagcgtggagccccctggtccggctaagagcttacgtaaggcccgcgggcggct

SEQ ID NO: 205445 - DNA, 122 bp, Homo sapiens
ctatgtgattccttcctccagccctgccttcatctgtctttcacctgttcagacccttgccgtagagaatggtctcttaagagttttttactcaggaggagcaatgagcttggcttcaagga

SEQ ID NO: 205446 - DNA, 122 bp, Homo sapiens
caccttccacacgctctgctgtcttctggcaatataatcttggtagtttcttaatttctccgtttctcctctgtaaagtgagtttcatagtagtacctaactggtaggggtttcgtgagatt

SEQ ID NO: 205447 - DNA, 122 bp, Homo sapiens
acctgccaggtaccgggttctgcaggcgccgccgccgccgaggcgctgccggcagcgacgcgggccaagggcgtcctgaagacctagggggcccctccgacctcccgacccgcgcggcgccc

SEQ ID NO: 205448 - DNA, 122 bp, Homo sapiens
ttgattgtgtgaccttgacaagtcacagaaactctcccctcagtgctgaaaactgggaggcgcagcatccacgttgcccacttcctgaagcgttgtggagatggagtgagctgctgtgtggg

SEQ ID NO: 205449 - DNA, 122 bp, Homo sapiens
attaataaccatttatttgtaccattcaatattgtgcaaatagtcaaaaaagtctgatttcggaccatgggttgttgcatggagtgtgcttgttttcctggacctcagtgagcattctctat

SEQ ID NO: 205450 - DNA, 122 bp, Homo sapiens
tccggagggtggggggcagagagacctcctgctggggatgggcgagacctgagcctggtgcggaggaggcccgcaaagctggcggaggacctagttccagggacgggatctagggctcctgg

SEQ ID NO: 205451 - DNA, 122 bp, Homo sapiens
tctcgatctcctgacctcgtgatccgcccgcctcggctcccaaagtgctgggattacaggcgtgagccaccgcacccggcctgccgttactttttaatggcaaaaacctcaattacttttgc

SEQ ID NO: 205452 - DNA, 122 bp, Homo sapiens
ctccccaagtcttcccgccatgggctttgcaagaagccagggcccagaggccacgctcaccgttaacactgcacagggcaaaggtggctccaggacaactgcccaaccccaggaacgaccca

SEQ ID NO: 205453 - DNA, 122 bp, Homo sapiens
tggctcctggttgaggtgtgagcctcctatttgcactgaggtcaggaagctggtctgggacggtggtttatctaatccacctccaggaaaggaatcacaccggggccctcctagatctgtgt

SEQ ID NO: 205454 - DNA, 122 bp, Homo sapiens
gtgtatattctcagtgatgaggcagaaagctatacatctcccccttgtggttcctgctaacgtctgcctttggcatgtccatttttttcccagttccagtaagtcccaataaaatgcagcta

SEQ ID NO: 205455 - DNA, 122 bp, Homo sapiens
gtgaacgactctttcaccaccccttgcatcccaaaccttcggttctggcagagttcttgccgcagaggttccttaggagcaccccgcgcggcccgcgcgagcgcgcctgcgcgtcgaacccc

SEQ ID NO: 205456 - DNA, 122 bp, Homo sapiens
aacacccaaccaagcaccctagcccctccgccttttttcttttctttttttttacgaggacgttggatcggccagcaagtgagaaaaaagggccctaaatattaacagcaaccacccaccca

SEQ ID NO: 205457 - DNA, 122 bp, Homo sapiens
tgacattcgagtatcctccaaatgggggagaatgtgctggaagcctgactgtgtgttttgcggcccatgtgcatctggtgacctcttttggaaattcgaggtattgttatggggtggaggga

SEQ ID NO: 205458 - DNA, 122 bp, Homo sapiens
tccactgaagagaaaaggaatgagtcctgaatggaatgctgcccggcagctcccagcgcccgctggtagagtacccgccgctgtccctgggtggctccggggcttcgagcctaacagtcctc

SEQ ID NO: 205459 - DNA, 122 bp, Homo sapiens
cgccttggccctcacctacagggcctgaccccgggccagcccagctaggcaaggcctcctcgcttccgagaccccccagcccccgggtgcagtccccagcatcggctgcccccgccccccgc

SEQ ID NO: 205460 - DNA, 122 bp, Homo sapiens
ccaggtatttcagccatgtcccgcggagatctgagccagagagccaaggatttgagtaaacggagcttctcaagtcagcggccaggcatggaacggcagaatcggcgccctggcccaggggg

SEQ ID NO: 205461 - DNA, 122 bp, Homo sapiens
ccctctgctctgttttctcttccccgacacctcggttcctcttctccctggtgggaggctcgtgccaccccacaccctggatcttctggtcctcctggcaggtcttcattgagcttggtgcc

SEQ ID NO: 205462 - DNA, 122 bp, Homo sapiens
gcgaactccggggctttcggcctcgggaccgggacgacatggtgaggaagatcatcgagccgatggcttgcgatggcctccgcaccatctgcatcgcctaccgggacttctctgcaggccag

SEQ ID NO: 205463 - DNA, 122 bp, Homo sapiens
gcggcgctcccccaccaccacggcgctctgcctcttcagaatgagtgagatccaggcgcgcgccaagagggtcagctgggacttcaagacggccgagagccactgcgtaagtcctgcccccg

SEQ ID NO: 205464 - DNA, 122 bp, Homo sapiens
tggggtaatgcgaacaagccccgttcccctaagccgtgatgcatgcggggttgacgcggccgggctctgtccccataaactgtgacacaggtgtgtgtagacgtctatgagggccatagcgc

SEQ ID NO: 205465 - DNA, 122 bp, Homo sapiens
ggcagacgtgcagagagtgcttgcttgctgcctctggctggctgtgtgcccacctcactccgagtcacccacagctcaggttccagccagcctggggcttctaaatataaggtgtgctcagg

SEQ ID NO: 205466 - DNA, 122 bp, Homo sapiens
caagctcttcaccaaccccaggaggtgagcgtcatgcaaatgataccaatttcccacccccgtcctgtctctgaatagacaggaagtacatgagtcagtagcatttgacactcacagaggaa

SEQ ID NO: 205467 - DNA, 122 bp, Homo sapiens
tggcagcaggggggtgtctgcaagggggatgggcggtgatcagtggctcctgtggcttctcggcagtttccctggtgagggaggtctggggtgagaggtgcatgtgggccgggccacagcgg

SEQ ID NO: 205468 - DNA, 122 bp, Homo sapiens
tgtatactatagcaagtggtaccagtgctgcgggtaccagtgctgcgggtaccagtgctgcgggggaaactggagcagagaggacagaacagaattctgggaggtggctgttttatgcagga

SEQ ID NO: 205469 - DNA, 122 bp, Homo sapiens
gctggaggcggagccgagcctgtctgtcggttgcagcctgcgcaggaaggatgacgctcccgtcaggctgtgcggcgcagacggtcgcccaatggagttgtctttcaggaggttttaacttg

SEQ ID NO: 205470 - DNA, 122 bp, Homo sapiens
gatctgctcctggtagcccttaattttctgcgccagctcctgaggaaacatttcccccaccggggtgtcagagcagcatcaaaaggaaacagaagtagtagcgttcatcttcctgcagggcg

SEQ ID NO: 205471 - DNA, 122 bp, Homo sapiens
cagctggagaacaaggccatgcctcagctcctacgccaggcggaagcgggagaggaaggccgacccccaagagcgccccttcagggggtccatccggccttgatctcagatgggggggtgtt

SEQ ID NO: 205472 - DNA, 122 bp, Homo sapiens
agagtgttccttgttttggttacactcgaaattctgacctagctggagagggctctgggccgagagctttcactaaggggagacttcaggggaggatcaagctttgaaccaaagccaatcac

SEQ ID NO: 205473 - DNA, 122 bp, Homo sapiens
aacctaggccgttcagtcaaaagacatgaatggggtcgtcttagtctctccaggcctaggcgagctgccagatgactgcagccacatgagtaacattatgagtgtcagtgcagtgggtactg

SEQ ID NO: 205474 - DNA, 122 bp, Homo sapiens
ggaagagccctgtgtttctggcctgggcagccaagtattcaggaaccctccctggccacacggtcattgcctgttctgggccaccctcatccgtatatcccctggaccgcagctgttggctg

SEQ ID NO: 205475 - DNA, 122 bp, Homo sapiens
tggcgcgtgcccagccctttatggagcccttccacataagcaaagaaagccgagggacagcgcacagtgttgcggcgactgggaaaggcttcagatgctcgatgtcccccgccctctttcct

SEQ ID NO: 205476 - DNA, 122 bp, Homo sapiens
gcccgtaggacttggcgcttcttgtttatcacagccacatgtggggccactgccagggcccgccccaactctgcagtcattggaggagcttgaagttaaagactcctgctaaaaaccagtac

SEQ ID NO: 205477 - DNA, 122 bp, Homo sapiens
ccggggattacctttccccttccgatctcctcccccagccctcgccccctccttccactgcgcacgccagaactcccaagcgtgcagaagttcatccctgctgcgcggaggctgccagcagc

SEQ ID NO: 205478 - DNA, 122 bp, Homo sapiens
caccgccggcagccacagcttcctcctccgcccgggacctctggccggaagcagtccgttcgccttactagacccgctccaagcctttgagcagttcgtgtgggtccgctcccaagctaggg

SEQ ID NO: 205479 - DNA, 122 bp, Homo sapiens
cagccggccctggcccggtgggaacccagttgatggtgcgcttattagctgtcctgagcgcggggacaaactttctgtacctgggccgctgctgccaccctgcggccaagacctttctctag

SEQ ID NO: 205480 - DNA, 122 bp, Homo sapiens
aggacatgactttttttaatccccagtgcctaagtgtctagagagctgagtgggttgcctcggatcggccaggcctggatatcagcgaacagatgcggatttccaccagggggcgctaggac

SEQ ID NO: 205481 - DNA, 122 bp, Homo sapiens
catctccacctcgtatctccaaacccattagcaatttttcaaggatgggacaaagctttccgtaggcactttggaaggacctgtggcatgagagacgggagcgtattaaaaagtgcagaact

SEQ ID NO: 205482 - DNA, 122 bp, Homo sapiens
ccggcaaccgagccttagagatgaccaggcctagggccagggacaaggcgctttgtcatccggccctgagcttgtggagcagcactccttcgggtgtagaaatggcccagtccagcccgggt

SEQ ID NO: 205483 - DNA, 122 bp, Homo sapiens
cgcgcttgctggagttgcagccggagacacgcttggttgcctggaaggcgctgcaggaggcggaggaagggccgctgcggctccgccgcagacctcggcctccgggtcacctcttctcaccg

SEQ ID NO: 205484 - DNA, 122 bp, Homo sapiens
gagtatttagtttggccccctactgaatgaagacactttgttaaattctccaatgagagacgcttagaggtaggggcgtggaagggggccggggaatttgaggccagataacgggaagtgtg

SEQ ID NO: 205485 - DNA, 122 bp, Homo sapiens
caagtgataccatgttcccataattttccaacatcacatccttatagagatgcctttgagcgtaggtcagacactgccactccctgttagtgaagttcacagctacatcctcaaatgtcact

SEQ ID NO: 205486 - DNA, 122 bp, Homo sapiens
cgtggctaatttttttttctttacttttcagtagagacagtctatgttgcccaggcttgtcgggaactcctgggctcaagagatcctcccggctgggcctcccactgcgccaggcctgttct

SEQ ID NO: 205487 - DNA, 122 bp, Homo sapiens
agggaagctgcttataaaacaacttctgaggattttctggtcagagtccttctggaatcacgaatattttatgttttcaagggcgcctctgtcagatacctcaaggagagagccttttaaag

SEQ ID NO: 205488 - DNA, 122 bp, Homo sapiens
agccacagaaagggggcccccctccccaggaccccgcacagggctggggctgcaggccggcggtgtgtgcggtgcagagccctcccaggggctctaggcttccctgcctttgggatgaagct

SEQ ID NO: 205489 - DNA, 122 bp, Homo sapiens
ggctcctttcttccacgtctaggacctgatggctttctcctgagcagattaaaataaagacgcggaagacaactggaatcaggagagggagggaaccactggatcaaacgcaggaggattgg

SEQ ID NO: 205490 - DNA, 122 bp, Homo sapiens
ttgttagctctaatgacggccgtgtggctgccgcagaatccagccacagccctgtttgttcggtttgcatagacagggcgctttgcaaaacggtgtctttctgttttattttgtggctcagt

SEQ ID NO: 205491 - DNA, 122 bp, Homo sapiens
tcctcagaatcttctcacgctccctgcaccctgcggcattgagcatgctcaggcctttcccgcccacttccggtggagcagccaaccaccgcgctggtcaattgtatgcctaaaactcgaaa

SEQ ID NO: 205492 - DNA, 122 bp, Homo sapiens
aggacgcgactgttaatctaggatccctgaggaggtcgccagggcgctgtcccctgctctcggccacctgcaaggaggaaggcagccaggctgctctgcctggtcttctttctctctcatgt

SEQ ID NO: 205493 - DNA, 122 bp, Homo sapiens
tcaggctcttcgaacatgagggtcgggagggcagggtcgccgagtccccgctcttctccacgtgcacagcgctcctctggaagtcggagcgctcagacctgccagaaccgacccggaaacca

SEQ ID NO: 205494 - DNA, 122 bp, Homo sapiens
ctggtcccgccaggcctggggggggccccggacggcccgtggactcctagggacagccggcgagagttgggggtgcagggccccccccagtggccacagtggcttctctggtccagtcctgg

SEQ ID NO: 205495 - DNA, 122 bp, Homo sapiens
accagggcaggccaccggacccctgagcttgcttaataaccggaggatttgagaaaggcgcgcggcgggcgaaggtaccgagaggggaggagggaggagaggtagcggggaccgagccagag

SEQ ID NO: 205496 - DNA, 122 bp, Homo sapiens
ctgcaagcatcgggagggcaggtccgggggctctgtgtccccactgggcccccagcactgcgcagcgcacacagtgggcgctcaccaagcgctcgctaagggcaacgcgtgaatccgtgtcc

SEQ ID NO: 205497 - DNA, 122 bp, Homo sapiens
gggttttggtgtcattcaggattccaattagatatttgcactgagttcacctacacagggcgggtacacagcgtgtgatcgagtcttcgttcagtcaaattcttttcagtctatgtactttc

SEQ ID NO: 205498 - DNA, 122 bp, Homo sapiens
cttaggggatagccttgccacccttcaggaaatggagactgtatatggagcatgttgtgccgccagctgctgcatgtcccagagccatcttaaaccctacccttctgaacaatggctagtct

SEQ ID NO: 205499 - DNA, 122 bp, Homo sapiens
ttatctattccaagatttcattattattttatagttctcgaacacaccaagagtgctgcccggcggtacctcacacattctgcaactaactaaaacaaagaaaggcagaggcagctctactt

SEQ ID NO: 205500 - DNA, 122 bp, Homo sapiens
gtgggggggagggtctcagcgtgacgccgtgggcgcggctcctgggggggagggtctcagcgtggcggcctggtgccgcccacacacccatgggggcccaccttgactgagagcagccgcgt

SEQ ID NO: 205501 - DNA, 122 bp, Homo sapiens
catggaacccacatccacaaccatctgtatgagccacaggtccacagtcctgaccaattccgtttgacactaatgttactctacatgagtagagttcaatgagggttgatatgggatgtgac

SEQ ID NO: 205502 - DNA, 122 bp, Homo sapiens
gacgggagtcagtgggccgcgccttcccactgcgactccccgtgggtccgcaaaccgacacgtcactcctcggccctcaaccaaactgcttggggcacgttctttccgcgctcttgactcct

SEQ ID NO: 205503 - DNA, 122 bp, Homo sapiens
agcgtatcgctcatgctgcaacagctgttgactctgaggagcagaaaaagcagagggtaacggggactgaaatggaaaacaggaaaacacatgtgtgactctggccggcagcggggaggggc

SEQ ID NO: 205504 - DNA, 122 bp, Homo sapiens
gccggaccttcccccacggtggcacgcacatcatccggcaccatttccgtgccccgaagacgcccgcgcgggacctgggaccgccagtgaagaacccctcctgggctctttaacgagcagca

SEQ ID NO: 205505 - DNA, 122 bp, Homo sapiens
gtcgcagcgccacgtggcccaaggcctcagggaagtggatgcgggtgacggcctcgaaggcggagctcagcgtctgcacatccgcctgcttggagttggcgtctccagggcctgagtccagg

SEQ ID NO: 205506 - DNA, 122 bp, Homo sapiens
caagcgatgatgcgcaggcttggagccatgccagtgacacgcctaggaaagttcacgcaccgcccagcacgcctgcgcatgcctgttcccgctccctggtgccccgggcgcctgcctgtccc

SEQ ID NO: 205507 - DNA, 122 bp, Homo sapiens
cgcagagattgcggggttctccggccgcgtgctgatttatgtgtccaggctgacttggggcggcgcggctgtactttcactgcctccgggcaggcgtcattcggggcggggcgaatcagatc

SEQ ID NO: 205508 - DNA, 122 bp, Homo sapiens
aaggagtcctttgtaatctatgcgtgtactgggggagattcgccgagactgaaaacaccacgtttctctgtgaacgttgccccgatctccgcacccgttggtggatcttccctgcagcatgt

SEQ ID NO: 205509 - DNA, 122 bp, Homo sapiens
atctcggacatcgcccattgagcaaactttccgcgcgtttgctctctcattggctgcggccgctgccactccatgttcccaggctggccttgttggggaaggtggactttccctggtggtca

SEQ ID NO: 205510 - DNA, 122 bp, Homo sapiens
ataaggtgtatttctattgttattctgtatttcagagacagggcaaatccgccgttgtgacgaaagtgcagggacaaagcacaaactcggctctggtggaccggatacggaaaagcggtgcc

SEQ ID NO: 205511 - DNA, 122 bp, Homo sapiens
ctgaggtccgcgtgtagacacagggcgcggggcagacgggaatgcgtttaagacactgggcgcggggcagacgggaatgcgtttagacacagggtgcagggcctcatttgcatttagacaca

SEQ ID NO: 205512 - DNA, 122 bp, Homo sapiens
aaagtgactagtgtcatctgttactgaacatcaagtgctcacacagggaattgtagaaggcgaggcaatcattctgtggactgtcttgcatgctaaaataaaaagttttaatgttatcccct

SEQ ID NO: 205513 - DNA, 122 bp, Homo sapiens
ccctgtcccagtgaaaatgcccactaaatcacctcgatcaaaatgcgtaagtgtcaagtacgcataaatgcagctcaaaacactttgctcaacctcacccccacaggaaacagcagtgataa

SEQ ID NO: 205514 - DNA, 122 bp, Homo sapiens
cgtcttcgcagccgaacaggttgtggacgcccaatcgtttttctgcccgtagtcccaatccgaagctaagctgtgtggttttcccttgaaagctccccagccaggcttgctgcctccacccc

SEQ ID NO: 205515 - DNA, 122 bp, Homo sapiens
tttatcattgccctcactcctgttctagtcaagttgttagaaggtgctccattgccttatcgcatggccctgcatttacatttagcagtgagctggtaatcataagaatatggggtgtagct

SEQ ID NO: 205516 - DNA, 122 bp, Homo sapiens
gtttgtatcccgttccagacaattccagggcttttgagtccatgcgtcagccttcctgggcggtctcaccttcaccacccgaaaacaggtgctaggagagaagctgagaggagcaccggtca

SEQ ID NO: 205517 - DNA, 122 bp, Homo sapiens
gatgcctggaggacagcaaaggcagcagagatggctgctaaggacgcacactggggtccccgaccgactttcgagctccgagggatgtctgctgccaggtggtggcggctgatggggaaacc

SEQ ID NO: 205518 - DNA, 122 bp, Homo sapiens
atccactcacctggtgtctggggcgcccgacgatggaaggaaacacggctcggggagcgtcgtccccagcaaaaccagctttgcacatgccggagccattgtcaatgaccagcgcggcgatc

SEQ ID NO: 205519 - DNA, 122 bp, Homo sapiens
ctccccagaggcggagagcggcgcgtggggggtgctgcaggcgtcctgggagtttgggggcgccgcccttcctcctgccttgggcccaaccggtggatcctgtcgagtctgttgtggtcccc

SEQ ID NO: 205520 - DNA, 122 bp, Homo sapiens
gttgcgtgtggaggctgggaaggtgggaagcggttgacctggggtcggatccgggagccccgtggaatagaggattctctctggagccgcatggaattactgaagggctgctgattctaggg

SEQ ID NO: 205521 - DNA, 122 bp, Homo sapiens
gccatatctcgttcggggacactttggggttgggggttttctgctgactgtgttccagggcgcgaaggtggtgtcgcttgggggggccgggaccagatctgtccaggcctggccggggaagg

SEQ ID NO: 205522 - DNA, 122 bp, Homo sapiens
agtaacccggagagacggacaggggtggcagccaggaggagaccgcaggaacctcgcctccgccgcggccccgcccccacggatccccgcccccgcagttgcggaaccaatgggagctcgga

SEQ ID NO: 205523 - DNA, 122 bp, Homo sapiens
atgtcttgggagttgctgtttctgtctttaaatccgagcgtcagaaggatctgagacacccgatataaatccctggcttgttaatgatgctcacagagagcggccacgcccatagactgcat

SEQ ID NO: 205524 - DNA, 122 bp, Homo sapiens
gggaagctggacacagaacgctcaaagggctgcatagacctctagggcccaaagagcaggcggaccccatccgtggggtaacagtttcctcctggagcacaaagcagcagactggaagtggg

SEQ ID NO: 205525 - DNA, 122 bp, Homo sapiens
gcacctgctcagcttccaagcgggaagacgtcaacaggttggcatccagactgggctcttcgcttcgggaagtgggcggttggacggtgcgggtgttgtccgggaaagaatcaggaaatccc

SEQ ID NO: 205526 - DNA, 122 bp, Homo sapiens
acacgctgcctccacgcatcccggctttcattgtgagggccccactctttattcaaggagcggtctcgggtgtctgaatggatgcttgaaggctccgtctttgcaattaacacgctgctgca

SEQ ID NO: 205527 - DNA, 122 bp, Homo sapiens
ttctcttttttcctttgcccacgtatgatctcagtttgctttgtgacccctgttgagcaacgcagaggactttccagctgtggcctagggccgatgctctagtccctccgtgcctgactgca

SEQ ID NO: 205528 - DNA, 122 bp, Homo sapiens
ccaggcccggacaccccgcctcctgcctcccggcccggcggtgcccggatgccccgcccgcgcccatggcgcagccacacacgacctcggtcccgtacttcgcgcgctctcctgcaccgccg

SEQ ID NO: 205529 - DNA, 122 bp, Homo sapiens
caccacaggcactccactgtgtctgtcctgtcttggggcacagcggcagaggcatgcccacgcagccgggctcagcgcctcttcgagagggaccgctgagtgcggctgtcctctccagtggg

SEQ ID NO: 205530 - DNA, 122 bp, Homo sapiens
atactatggcgtggaggtgcttatgcttcctgcagacagctcattccccaaaggaaaatccgggaacaggactgggctacaaacctaccagtcaagcaactcatcccacctgcctggaagca

SEQ ID NO: 205531 - DNA, 122 bp, Homo sapiens
gaaacactaaggaggtacacctgataggactttttaaagaggagtggccagggttctggccggtttgaagcctggagagaatggaatggcatgagttcagttttggggacattcagtggtaa

SEQ ID NO: 205532 - DNA, 122 bp, Homo sapiens
tctttccagaagtgcgcaggttatggaatagctgcagcatgagaggctgtcactgcttctcgcctcagtcacatttgcagcctgagactctcctgaccactggaaaaacaaaacaaaacaaa

SEQ ID NO: 205533 - DNA, 122 bp, Homo sapiens
aagtggactcattaatataaaatgtccttctctgtccctggcgatgctggtccttcctgtcgtctgtctcatctgccatccatacacctgtgcagcctcctgataacaagtatttctgtggt

SEQ ID NO: 205534 - DNA, 122 bp, Homo sapiens
agccgcgccagcgcctcctgataactggccgcctcccgcacgtgccgctcctcctgctcgcgcatctgcctctccagggactcgttctgtgggatggagccggccggtcccgcggagccccg

SEQ ID NO: 205535 - DNA, 122 bp, Homo sapiens
aattatttatttgcccacaactaacttccttgttatgccattagaagatgagacagttaacgaaagccatactctcagaaatatatgacaccacacatacacatgtgcaaaactagcgaggc

SEQ ID NO: 205536 - DNA, 122 bp, Homo sapiens
cgagtggacccggcagcgggcgataggggggccaggtgcctccacagtcagccatggcagcgctgcgctacgcggggctggacgacacggacagtgaggacgagctgcctccgggctgggag

SEQ ID NO: 205537 - DNA, 122 bp, Homo sapiens
gttccttcaagaaccctgctgacttttgtacagtaaaataataatgttccaatttggaagcgaattttctactgtgacactaatacagccccaggctatcagaggattagatgagtacaaag

SEQ ID NO: 205538 - DNA, 122 bp, Homo sapiens
gggtagatttcaaagcgaagcgctccctcgatgagagcgccaaacgccagccagccgcagcggggcccagccccgcctggcacacagggagttgcagaccaagaaatccagaatcccgaaat

SEQ ID NO: 205539 - DNA, 122 bp, Homo sapiens
ggagttatttaagccatctacagagctgaggaaacagtgtaatgtgtctctgccccattgcgcagctccacccattgtgccccaggccagcccgcgtcacctacacttccttctgtgccctg

SEQ ID NO: 205540 - DNA, 122 bp, Homo sapiens
gcttggccaatgcggagctgggtctggcgcggcaggaaggcgggactgccagtggggcgccggggcggggcggagagccgagcgccaacccgctagcgcctgaatccggcgtgctgcccgct

SEQ ID NO: 205541 - DNA, 122 bp, Homo sapiens
gctgtgtgctgtgctctcccatcggcgccgggcacagccctgggccctgctgcttgtccgcgtcctggtgagcgactccctgttcgtcatctgcgcgctgtctcttgctgcctgcctctgcc

SEQ ID NO: 205542 - DNA, 122 bp, Homo sapiens
ccgctcagtccttccaccggaagtgtccgatcggaatcagccctgtccgagaggtgagtccgggtttggggatccagatgtccagccccgtgtccccctccaaacatccagtccctctcata

SEQ ID NO: 205543 - DNA, 122 bp, Homo sapiens
ggggagtccgaggcacctatgttgtggaaggagaacacaaacggtgcggcagaggttccccgcacaggcgaaagtaccaccccaccacgaatacgcacggcccaggagaccctgagcatcct

SEQ ID NO: 205544 - DNA, 122 bp, Homo sapiens
atttggacttgccctgagtctacagaggacaccaagccagggaacgagatctgaagtgcccggcaatagacagcgtgggtgtggatgagactgagagacagcaggtgcagccgcccagggtg

SEQ ID NO: 205545 - DNA, 122 bp, Homo sapiens
cccttccgggactgtcggtcttacctgtgggtctcatgcatgcagcttccttccctcctccgcctcctccccccgccagtctaacccgcatctgtgcgcgacctctgctgccgccgctgcgc

SEQ ID NO: 205546 - DNA, 122 bp, Homo sapiens
tggggctttttacgcagatcgagtcgcccagggctgcggaggtaaacaggctttctgcaccgctgctaaatgaatcacgagggggaagaaccgagactgctgggcgagggaggcctcgggat

SEQ ID NO: 205547 - DNA, 122 bp, Homo sapiens
gctggtgggcggctccactcgtatccccaagatccagaagctgctgcaggatttcttcaacggcaaggagctgaacaagagcatcaaccccgacgaggcggtggcctatggcgccgcggtgc

SEQ ID NO: 205548 - DNA, 122 bp, Homo sapiens
tacacagactcgcctaggaacgcagtcttgcacacatccttagattgctttctttctacccggaggcaaaggtgacacactgatggggtctcccattgcccaactctcaggcctaggattgg

SEQ ID NO: 205549 - DNA, 122 bp, Homo sapiens
tgagtgattttcattacttgaataatgtagtttcttaaagggatttcacagcaaccatttcgctcttgcattgattcaacatgcacgtttccgatgcatagagaagttgggcaaatgcccgg

SEQ ID NO: 205550 - DNA, 122 bp, Homo sapiens
gagcttccacgtgtctcaggtcggcagagcacgcaatgacaagtcgtgccaatcccctcccgcaaaacagtgcgctcaaatcgtctgccagaaccgtgtggcctagcctaagaatcacccgt

SEQ ID NO: 205551 - DNA, 122 bp, Homo sapiens
ccggcgtccccgcagcggctgcatgtgcagttggagggagcgggtcaaagcctggcaggacgcgctcccaatcccgccattctctgcaccactcgcgataggaccaagaggatcctgcgcag

SEQ ID NO: 205552 - DNA, 122 bp, Homo sapiens
cctcattatggtatttcccactgttggtctacagataaatctatagacaaaatacaatcccggacaacaagaagctcctatagctcctgtagcttcttgtgctctaggattgtattttgttt

SEQ ID NO: 205553 - DNA, 122 bp, Homo sapiens
tcttcctcttctcccccagccccgtctccgcgcctgttctcgctgcctcttgcctcctcacgtccaagcttgtctgctctggcgcattcaggggacctggactggagagaaaaagccacctc

SEQ ID NO: 205554 - DNA, 122 bp, Homo sapiens
aaaaacaaaaaccagtatgggatgttcctgttaggcaactaagggtgaaaaatcagagcacgacgcatagcttctcacagattctggtgtgcgtgccacaccagagaataaggaactccata

SEQ ID NO: 205555 - DNA, 122 bp, Homo sapiens
atttatcaaaatcactctgaataagggatactgacattccggatgactggtgtacaccttcgtgagaaacagcccgaattgactcttctcactgaccttcaacatcatgatttggtgaggag

SEQ ID NO: 205556 - DNA, 122 bp, Homo sapiens
ccaaccccgctgcttaacacgcctgaagagagggtggcctctttccctcctagggctctgcgggaaaagaagcctcagggccaacccatgaggattttactctgggactgttccaatttcca

SEQ ID NO: 205557 - DNA, 122 bp, Homo sapiens
cgttcagacagtgggggctcaagctcagagccatttgaccgtcatgcacctgctatgttacgggaacggggcactccaccggtggatccaaagttggcctgggtaggagatgtcttcaccgc

SEQ ID NO: 205558 - DNA, 122 bp, Homo sapiens
gcagcttccattgtccctctcctgctcctgctccaaccctggactttgtgttggggaggccgactcagggcagcctactctgtagctgattggctgtggggttgttagggctttgggaactt

SEQ ID NO: 205559 - DNA, 122 bp, Homo sapiens
tggaatcctgtcgatctgaaggaatggctaggatgtagtagtttaagggaaatgaaaagtcgaatgtattttgatgtttctgcatcagacctgctcggtggagtccatttctcagcttcggg

SEQ ID NO: 205560 - DNA, 122 bp, Homo sapiens
tcgcacgccccaccttgtgctggcgcagcaggaagggcagcagcatgagcatgccgccgtcgtgcacgatccaccacacgtcgatgtggcccccgccgaagcgctcctggttttgcggaaac

SEQ ID NO: 205561 - DNA, 122 bp, Homo sapiens
agttttacagaacacagaagaatgtgaacatgttgacattgagaatattgatcagtggttcgactctcggagcagtgactcaagctgtcaggtgctgactgacagtgaaagtgctgaggacc

SEQ ID NO: 205562 - DNA, 122 bp, Homo sapiens
gtggacggtcccgtgccaaggtagacactccagccgccatccatcctccctgggattggacggtcccatgccgaggtagacactccagccgccacccatcctccctgggagtggacggtcac

SEQ ID NO: 205563 - DNA, 122 bp, Homo sapiens
caggcctgagaaactaggaggcaaggaccgaggagtcccagctgggcagggcctgggaaacgtggtcctgggcagttctgataatttaaaaaacaccgaggactttgatgaggggccctggc

SEQ ID NO: 205564 - DNA, 122 bp, Homo sapiens
aggagagcgcgcccatgggagacggggcgggcgcggggtcctgaggcacggggtctgggtcgttgtgccccaccctggcgagcacacccggtccgggccctcggcccctcccttgccattcc

SEQ ID NO: 205565 - DNA, 122 bp, Homo sapiens
tctttacggaaaacattcttattttcaaaacagctcaaattaactcattcattcaatgtccgttcttgtgatgggcttgaattattcataatgaagttgaagtgaaacctaaattttcattt

SEQ ID NO: 205566 - DNA, 122 bp, Homo sapiens
aaagcggaagagttatagaccgctaacacctgtcactggccactggtttcccggagttagcggcaacgaccttgcagcctggacactagccaggcgctccctcttctcacagcggcccacgt

SEQ ID NO: 205567 - DNA, 122 bp, Homo sapiens
tgcttccattcccttcctccctggtacagtttcccagtctcctcccttccccttcagcagcgatctcaagataaacagctggggaagaggagctgtggaaacgtccaatcagggaaggttat

SEQ ID NO: 205568 - DNA, 122 bp, Homo sapiens
cccaggtctagagcgcgcgcgccgtggcggccaatgggacgctgaagctaggttgagtgacggacttgagcagccaatgagtgtgcagtttgttgcgatgtggcacccggctccggcattat

SEQ ID NO: 205569 - DNA, 122 bp, Homo sapiens
aaaggatcagcctggcttgtgggaaactgtcacgtatcaaaaacaactttgcttttataccgagaagaaaaaccacgctgtacggtgtggaagccgcagacctctctcttctaataatccaa

SEQ ID NO: 205570 - DNA, 122 bp, Homo sapiens
ccacccagccatgggcattttctccacattttgcaggcatcctacaactgaaaactgggtcgcaggcatttgaattggcccagaggacccctgcaccgcctaagccctcctggctttgtcat

SEQ ID NO: 205571 - DNA, 122 bp, Homo sapiens
cactcctgaagccagcgagactacgagcccaccgggaggaacagacaactccagacgcgccgccctaagaactgtaacactcaccgcgaaggtctgcagcttcacccctaagccagcgagac

SEQ ID NO: 205572 - DNA, 122 bp, Homo sapiens
aggcggggcactgccaggggccgggggtggcggcggcggcagtggaggtggctgggactgcggggtgcctgctgacggcgtgctcaggggtagcggttctggggtggggggcactttagggg

SEQ ID NO: 205573 - DNA, 122 bp, Homo sapiens
ccagaggtccagcgcatgtgcagtgaaatggcctagcccgggaattcgatcggcaaagcacgggtgtgggggcgggggggtgggggggggcgagtggactcgagcaggaagatacacccgat

SEQ ID NO: 205574 - DNA, 122 bp, Homo sapiens
catggagcctggttactcccacttcctcaagcctagggcctggagaagcctttcctggttcgcggcctcacggtctgcaaggtcctcttacttccctgaagccgctccagccccacttcccg

SEQ ID NO: 205575 - DNA, 122 bp, Homo sapiens
accaaggcagccaggcctctgtgcattcttaggagtgcagactccatggcccagactgtgcgcagacagacttcatatctgtcacatgggatggaggcacatccttcggggagtcacattaa

SEQ ID NO: 205576 - DNA, 122 bp, Homo sapiens
ctgtgtaagcatatgagcatctgcccaagcagacaagtgtcaaagtacgcgaatgccgtccgagcactgcctgagcatacacttctctcaaagggttctgctcatcaacggagccggccagt

SEQ ID NO: 205577 - DNA, 122 bp, Homo sapiens
ggagacaaggagccagagctgcatcatttccttcctggggcttggccaggagacacgtaacggtctggaaggaactctcattaggagtcagaaacagcacaacgaactctactttagcccaa

SEQ ID NO: 205578 - DNA, 122 bp, Homo sapiens
agtactcaagcagggtcaggaagtttaaacgtataggtgtttagaagtaaggatcttcagcgaaaagttttgctacccagtaaaatgtttcgaagaagtaaagtgcatggtagttagaaaca

SEQ ID NO: 205579 - DNA, 122 bp, Homo sapiens
attcgtttcagctactttgcacttataggtatgagagatgggaagctttgcctcatgtggcgcattggtgattttcggccaaaccacgtggtagaaggaacagttagagcccaacttctccg

SEQ ID NO: 205580 - DNA, 122 bp, Homo sapiens
ggatgtagataccaggtaaatgttacagttgtgttcatactaacaataaactatggatgacgtggcacagagtcagtcaatgaggaaagatccagagacattctgaggtcacaaaaagaatt

SEQ ID NO: 205581 - DNA, 122 bp, Homo sapiens
aaagggccaacactcctttctcgctggtgccacccggagacgaccacaagtgggaacttgcgcctgcctcccttctccccggccgaaagctctagttcgcctcccctacccccggtccaggc

SEQ ID NO: 205582 - DNA, 122 bp, Homo sapiens
ttggaaggccgtctcgtggttgcgctgcacgccatccccaacccgtcgtaaggtctccagcgccttcctgctggtggccccagacctgcccattggctttgtgtccttggcgccggtggcct

SEQ ID NO: 205583 - DNA, 122 bp, Homo sapiens
ggcttttgaattttcgcttttgcagcacaaaggtagggctgggaaaggaggctgccgaaccgtgcttgttttcgctcagataaacgtgagaaaaagtggaggtgaggaagccagtgtaggca

SEQ ID NO: 205584 - DNA, 122 bp, Homo sapiens
atagatttagcctgagaagtggcccccacagtttaatagcccctgggcacagcaggagaacgagttgaccaagtccccggccagcgtactggcgaaccgagagcagcgggcagctatgcggc

SEQ ID NO: 205585 - DNA, 122 bp, Homo sapiens
ttgagggctctaagggacggtctgacccaggcctctcccagctcccgccgccccgccacccgagttcgcgtggctgctctcctgtgtctgtgtctacagttgccctcttctttttcggataa

SEQ ID NO: 205586 - DNA, 122 bp, Homo sapiens
gaaagcttgtctctcattgcctcagcaagatccctctcccaggccgcagaggccccctggcgagggtacaggacccatcacaccaaggacctgagtcactcagctctgcgatggcatcgtag

SEQ ID NO: 205587 - DNA, 122 bp, Homo sapiens
ccacccagttctctgtgacagcctttgatctttatcacatgtaacattttgcagtcccaccgctgcaggggaaagatgtttgcatgcaatgggaacctgtgattcagtgctgttacactgat

SEQ ID NO: 205588 - DNA, 122 bp, Homo sapiens
gcggggtgagggggatgaatcggcggagaacaggggattcttggggcagtgacgctgctccgtatgataccacagttgggggggccctgtcattctacaggtgcccagacccatagagttca

SEQ ID NO: 205589 - DNA, 122 bp, Homo sapiens
cgggatgaggcagagactgaacagccggcgagcaaatcaacggcatccagaaagccatgtcggactcggcgcccagcgcccaagcgctaacccgctgaaagtttctcagcgaaatctcaggg

SEQ ID NO: 205590 - DNA, 122 bp, Homo sapiens
gatgcaaaaataggcatccccaccctggcttgtgtccttttcttgtccttctttgtaaaacgtcaaggaaagtgctaccatacttggtcctagagaaaaccgtctcagtttatatccctttc

SEQ ID NO: 205591 - DNA, 122 bp, Homo sapiens
gttagaggctttggctgtctcctttcccgcgggtggtgtgggctccctgtggctggaaggcggctgtccttccgacggcttgcttccgcttggctctgctcgctcttcagtcacagccacag

SEQ ID NO: 205592 - DNA, 122 bp, Homo sapiens
aaatatataccaggaaagattgggacccaaacaccaaaactccactgcaagcgtcatcgccgcacacacacaaaaccccactgcaagcgtcatcgcctcacacacacaaaaccccactgcaa

SEQ ID NO: 205593 - DNA, 122 bp, Homo sapiens
acacaacattccgcacttctggcccaagctgctgatgaaggtgactgacctccgcatgatcggggcctgccacgccagccgcttcctccacatgaaagtcgagtgccccaccgaactcttcc

SEQ ID NO: 205594 - DNA, 122 bp, Homo sapiens
gccaaaggcaatactcaccggttcgacagtcgccatcttagatcgatctgatcgcacaaccgctccagaagggggggtaagaggaaaaaaatgagattcaaaccggattggccagcttctgg

SEQ ID NO: 205595 - DNA, 122 bp, Homo sapiens
gagagaaagcaagaaagggccgttcgttccttcccctaagtgatgcccttgacaggagagcgaagaccacggtcgcctgagggggctcagcccgcagtccacacgcggggaccgacccacca

SEQ ID NO: 205596 - DNA, 122 bp, Homo sapiens
ccaagactcgctaccctgacatcttcatgcgggaggaggtggcgctcaagatcaacctgccggagtctagagtccaggtgcgcactccccgggctccagggtctgggtaggggagctgaggc

SEQ ID NO: 205597 - DNA, 122 bp, Homo sapiens
ctgcccctttgggtcctgttgcctggcctcttttgctgtcctgggtagaggagatgagttcgtcgctggctgcaagctgaggccaactgacaatgctgcacagagaaggggcaccgagagtg

SEQ ID NO: 205598 - DNA, 122 bp, Homo sapiens
tgcactcgggtgtctcactataaaagctgcactcgggtgtctcactataaaagctgcactcgggtgtctcactatagaaactgcactcgggtgtctcactgtagaagctgcactcaggtgtc

SEQ ID NO: 205599 - DNA, 122 bp, Homo sapiens
ggctagcaaagacacaagtttatcccctgaggtctccagacatctccattcccaccaaaacggaattcttttaagctgtcagcttcacatcctcagtggcagagaaagtccacagttcttag

SEQ ID NO: 205600 - DNA, 122 bp, Homo sapiens
agaactcccgagggtaaatcagaattgggccagccctcttgctaaattacagctgagttccgataccttggtcatccaaggtacaaggtacactgagccttgaaattggtttaagttggacc

SEQ ID NO: 205601 - DNA, 122 bp, Homo sapiens
cacccccatatgcaggcccactgtgagctcggaggcaggagagcctcgctccctaattcccgctctctgccccctacagaaaacccctaaaggtctcgacccctcttaagcccctccacccc

SEQ ID NO: 205602 - DNA, 122 bp, Homo sapiens
caaaactacacagtcaagactgtgtagttttgcttttctatgcaatccctacacccgaggcgaggctgggaatgcacgactgctcaagagccagggtctggcctgcccttatattcaccaga

SEQ ID NO: 205603 - DNA, 122 bp, Homo sapiens
ctgtgcttttctgatgctcctctttttcctccggaccctgcttgagggcccctccccttccgtctccacacacctagagcctgttcagtcttccaggcccagcttaggtgtcaccttctctg

SEQ ID NO: 205604 - DNA, 122 bp, Homo sapiens
gtcccctggctattgtgaaaaatcgacttaaggtctgtcctattggtacgcaggcagtgacgtcattttacctggtaatgtatgaagttcaaatgcttgggaagtttgccgtataaatcaat

SEQ ID NO: 205605 - DNA, 122 bp, Homo sapiens
gaagctaaagcataggaatataggttaaaatttagcctggttcctcaggcttgtgttgaacgcctctttctgttattctaatgggaagtttcagaacaaaacaattattcattctccacttt

SEQ ID NO: 205606 - DNA, 122 bp, Homo sapiens
cagaaactttaaaataccttttatatccatcactgcttctaaattttgtagtttagtaaacgcgccaccaagtcctgttatttaatgaactagtaaataagtccaagtattactaaatcgta

SEQ ID NO: 205607 - DNA, 122 bp, Homo sapiens
tttgacaggatcgcggagatcaacttcaacatcgacactgacgaggacagtgtgagcgagcggggctgtgcggggtcatgcaggcaccctgttcccaggcagctcaggccgcgcccatggct

SEQ ID NO: 205608 - DNA, 122 bp, Homo sapiens
gctgtaccgaacccagtctccccatggctaccctaaaagtcactccacctctccctcccccgtcagcatggggaggtccctgactcccctgagcctcaaaaggcctcccccttacgacgctg

SEQ ID NO: 205609 - DNA, 122 bp, Homo sapiens
ggggacctcactgagagactacaggcctccagggccaccctggatattcaccttcagggccgattgggacagagtggagactggaatgggtatcatcagcacatgggtttcagagtctaatg

SEQ ID NO: 205610 - DNA, 122 bp, Homo sapiens
ggaagggggcccaggagcagctcagcgtggctgggccggcagggccgaggaggtgggggccgtgagggaggggtgactcggctgtgtggggtgccgggggacacgggctttgctccggctga

SEQ ID NO: 205611 - DNA, 122 bp, Homo sapiens
atggcggggcgtgttgcaggtgtacagttgcacgccgccgggcggggagcgcgggaatggcgaggtgcaggcgcagagacacacgtccccggcggcgcagcgcacagacgggtggaacctga

SEQ ID NO: 205612 - DNA, 122 bp, Homo sapiens
gcataccatatggataaaagctctgcagtggactttgaaaggaaacactcatttacaccacgattatcctgttttccaaaatcactatgtggcccaaagtgttctgaactgagcatttaaac

SEQ ID NO: 205613 - DNA, 122 bp, Homo sapiens
tcccctttccgagaagtaactgcgcagaatgcgcgaggaccctgagggccgggagacagacgggagggctggtgagaagcgcaaggggcgagccctggagccgccgaggggactaggccgag

SEQ ID NO: 205614 - DNA, 122 bp, Homo sapiens
cctgggggaactccttggttcgaggggtatatttccccatgtaaaattattccctagatccgtggaaataaaggctggatccaggaattagctgatacccatataaaccagtatgtgtctgg

SEQ ID NO: 205615 - DNA, 122 bp, Homo sapiens
gaagttactcaactctttcactaaacccagtgctccacccaatgtagctaactttgtcgtcgcgtagcaacagaacctcgccatactggaagcggggcgcgggggggggattttctcgactg

SEQ ID NO: 205616 - DNA, 122 bp, Homo sapiens
ggtccattaataagtggatggccgtcgacagtttccagcatcagagggaagatattactgcggatgggcagcttctctcgaagaaccacagtatgatcaatgctgtttctgtaggagcctga

SEQ ID NO: 205617 - DNA, 122 bp, Homo sapiens
aagggcatctgtgatgggcattgagccacgctggccttcgccgggtgctgtctcagctgacgccccctgaccccatgtgcaaccctcaggccgcaggaacccgggcatccagggctggacgc

SEQ ID NO: 205618 - DNA, 122 bp, Homo sapiens
gagattgaccacgaccgccgggtggtgtacacagagactctggcactggctgggcaggaccgggagctgctgctggctgctgctcagcccactgaggaacaggtgctgagccggcttaccgc

SEQ ID NO: 205619 - DNA, 122 bp, Homo sapiens
taccattttgcataacctacgttactcatctttctttaatttgtgcatatttgtaaacaacgttctattaattcagcctgccatccactacagtgtaatcttaggaaggcagagcaagaatt

SEQ ID NO: 205620 - DNA, 122 bp, Homo sapiens
gggcaggactatcgcggggagatgcaatactactcagttacgaggtgtgtagtgctagcacgagaaacttggaggacgcgctgacaagccgggctgcagtctccgggtcgccccgccccgcc

SEQ ID NO: 205621 - DNA, 122 bp, Homo sapiens
gacacgcctcctgtgtttggagcaggcaagtcactgggaggacagaggaaagggtgccaacggagggaggcagagcccacaccagaacctgacttgcaggtaggaggaacaagctgtgcaga

SEQ ID NO: 205622 - DNA, 122 bp, Homo sapiens
tagctgcatcagaaagagccgggggagagggcgctgtcagagagagaaagagccctgcgacggggccaggacaagtttttgtaagtgttgggatgagagaaagacgacaggggcatcagaga

SEQ ID NO: 205623 - DNA, 122 bp, Homo sapiens
ggcggtgggtgggaggagaggttgggggaggaaggaaagggaagaggcggagcgtgggagcgcacagtgtcaggaatacaatagtgctccgcgccgcctcagccgccgccgccgcccaaccg

SEQ ID NO: 205624 - DNA, 122 bp, Homo sapiens
ccggagcggaagccgctgagtcatggtgggggcaggaatgcagcgcatttggagaaggcccgggacgccggcggctccagcattactgagcagtgacttggcgtccgcaccttcactgcagt

SEQ ID NO: 205625 - DNA, 122 bp, Homo sapiens
ccttgtgggcggggccgggggccggggagtggattttgcccggagcggagcggccgggggcgtggggggctgggggtgagggtggcggctctgcgcgcgggcgccggggccctggaagatgc

SEQ ID NO: 205626 - DNA, 122 bp, Homo sapiens
ccgccaactctgaactgactctgccaagtgttcaccttcccagggaatgtgcaccacccgcgagttatccacccattcatcctatcggcgactgtcaattggcgacttgctgttaacgagtc

SEQ ID NO: 205627 - DNA, 122 bp, Homo sapiens
cttagggcagaaagcagctgagaatttcaggaaggtcttcacctttttgacttttctccccgtttcagactaaaaaggagagggggtgctgtggattgtgactttgcttcttttccccaccc

SEQ ID NO: 205628 - DNA, 122 bp, Homo sapiens
ctgaggccaagtccagacgcctctgagaggaggacggaggcctctggggctcctccacggcggaaggtggcaggaaacgggacatggaacacggaggcctccctcatattcgcggcccggaa

SEQ ID NO: 205629 - DNA, 122 bp, Homo sapiens
tcccggcttcggaagctgctcagtacgactcccccgggggggctcgtgtccaaaagcagccgcaggggccgcgggagcatggccgagtgaaggaatcagcggggtcgggccatgggggcgcc

SEQ ID NO: 205630 - DNA, 122 bp, Homo sapiens
tcttggaccctgaactgcacctctgtcaaggtaggagtgtccgggatgccggagcggacacgcgcggagaaagcgtcgctggggttactcgtgtggccgtgtctccggttttgtgtgcaggc

SEQ ID NO: 205631 - DNA, 122 bp, Homo sapiens
tccaggagatctcgggattgggaagcccggtggccacacagtccactttcaggtcacccccgtagaagactttgtggtcgttctcctccttgtgttcaatcttggccggtttcatcaccaca

SEQ ID NO: 205632 - DNA, 122 bp, Homo sapiens
caaaggaggtagcttctgtgggaaatgaaattttaaaacatccccaaattcatctaccctcgattttcaattcctctctaaccttgccctagaacacagccagctctttttcttaatcccat

SEQ ID NO: 205633 - DNA, 122 bp, Homo sapiens
cgactgactgggagccccagctcagactgggccagctccagctgtgcagcctgaggactgcgcacaaacgcccctccgttccaccccacccccgctgcacgccggtacgcgtctcccctcct

SEQ ID NO: 205634 - DNA, 122 bp, Homo sapiens
ggagcctgctgactgtgggtaggccacgttcccccagtgtcttcatctgcagagggagaccgggagcctctgaagaccgctccagctctgcactgtgggggcggccggccagcaggcaggca

SEQ ID NO: 205635 - DNA, 122 bp, Homo sapiens
ccgagttttccttctgccctggccccaagcttctggctgctctgccaggcagttctgaaacgctgtcctttgaagcagggagtttattttggggccaccgcatgaccaacgttgacaagcca

SEQ ID NO: 205636 - DNA, 122 bp, Homo sapiens
tttctcaagcctactaaattccaagctttctaaaatcttcattgatgcctcaggccacaccgagcaggttctaactccccactaagaatgactataatgggcctggcacatgccctgtaacc

SEQ ID NO: 205637 - DNA, 122 bp, Homo sapiens
caacatggtgaaaccccatccctactaaatatacaaaaattagccggccatagtggtatgcgcctgtaaacccagctacttgggaggctgaggcagaagaatcgcttcaatctaggaggtgg

SEQ ID NO: 205638 - DNA, 122 bp, Homo sapiens
gagtacggaaagcacgcagggctgccgctacctggcgcacgcgcactgagctgcggctgccgagcccgcgccccggtccctgccgctttacctcacccgctcttggatcactggggccggga

SEQ ID NO: 205639 - DNA, 122 bp, Homo sapiens
ccctatggcaaaccgctaaatcgtaagtgagggctgcatcctattgtcagtgaatgatggcggagctgagtggcttgtcatcattctcgaaaattctgagactagtgagctctctccctctc

SEQ ID NO: 205640 - DNA, 122 bp, Homo sapiens
ccgctgtgagtacttccggggcaaaaggcggagccaggcagaagaagtcccacggcgaagcgctcgccctctagcctgaggcggaagacaggaagtggattctagttcccaagccgcaccgc

SEQ ID NO: 205641 - DNA, 122 bp, Homo sapiens
gataccccctcccctgcagaggtggagctgggtggagttaggcgctgaggaccgcggccccggaagcaccctcctccctaggccccctcagtcccacagtccccagccacggccaccggggc

SEQ ID NO: 205642 - DNA, 122 bp, Homo sapiens
ggcgattgaaagagcaaagcggactctctcagttttaacgctgcaacttttgcaggcaggcgggggaacttctttgtgactaatctgaatttcccctttactttctttctttttttttttcc

SEQ ID NO: 205643 - DNA, 122 bp, Homo sapiens
ttaaccttcggtaacatagttacatagtctttgtattgaaaagaactacttggctggccgcggtggcccaggcctgtaatcccagcactttgggaggccgaggcaggtggatcacttgaggt

SEQ ID NO: 205644 - DNA, 122 bp, Homo sapiens
cagagtagtagactgtggttccagctctgcaaagttgagatgtgactttggttgggttaccgaccccatgccatgcatctgaacaaagaagatgttggcctcaaaactcctgagcccctccc

SEQ ID NO: 205645 - DNA, 122 bp, Homo sapiens
taatctggagacagactgcttcccattgagtctcggcccagtgcaagttctgggaaggaacgtctttgtatatatgagggacgtatgctgcctttttaggaaacaacagttgatatcagagg

SEQ ID NO: 205646 - DNA, 122 bp, Homo sapiens
atatgtgtgtgtacctctgtatgtttaattttctttctttctaatcaagtgacctgttctcgtttggttaagtttcaaccacaagacaccactgtatgctttttttttttcaagatacacgt

SEQ ID NO: 205647 - DNA, 122 bp, Homo sapiens
cgggatggttggaatagttggagcgggagactagggcctccgctggcggcgggagcgggacgggcggaggaatgcgagctgaggaacggaatcaggttctaagagtgttgctctctgtttcc

SEQ ID NO: 205648 - DNA, 122 bp, Homo sapiens
cacagaggcataatccagcccagccccatcagcaggtatccgagggtgcactgcacagatcggcgtcaggacgtgcggccacacctactgtgaggagaggatggggctcgggtctgtgcatg

SEQ ID NO: 205649 - DNA, 122 bp, Homo sapiens
gagggcgccttccggagcgcgcgtgtttacacttttgctacaccaggcggaggaaacaagcgctcgctgaccccgggggattccaaaccgttactccgcccgccggggtggggccagcgcaa

SEQ ID NO: 205650 - DNA, 122 bp, Homo sapiens
ctttagagaaggtgaagcccaaaggaaagcaattactggtgaacaatggtatattaacaacgattattcttccagattgggggaccctacattggggttgggatgtgatttaggaagattgc

SEQ ID NO: 205651 - DNA, 122 bp, Homo sapiens
ctcctgaccttggctttgtgtccagttttccactgtgaccctgacctttggacttggcagcgaaactttatttccctaactttgatcttgggcattagtcttcattctcctcagccccacct

SEQ ID NO: 205652 - DNA, 122 bp, Homo sapiens
gttagggcacagtcacttctattagttttctgctttctcttttctcttagaggaaggcagcgtaggggagtgggcaggctctgcagcccaacagatctttgattataacctcggaaaaatta

SEQ ID NO: 205653 - DNA, 122 bp, Homo sapiens
cacacacacaaatcccttcatcaaagcctttttgggaggcagagtaccaagaatggagaacggagaaaatgcagtttctttgttttaaaacacaatttaaacctttgagatcagaaaactgg

SEQ ID NO: 205654 - DNA, 122 bp, Homo sapiens
cctggcacggagcggggggtgcataacacgccccgggacagttacgggcgctagccacgtcggcgatggccaaataataaactaacagtaatattatagtaacagcatccgaaggatgagat

SEQ ID NO: 205655 - DNA, 122 bp, Homo sapiens
ctgggcgacagagggagactcgatctcagaacgatcaaacaaacaaaaaaggcatgtgctcggaacagtctgactctgggaatgaagttgagttgatttaatcatggcattggaaaatcaag

SEQ ID NO: 205656 - DNA, 122 bp, Homo sapiens
actcagcttccttctctggctgggccagggcgggatgcactgtggttggggtctgggtcacgcccacggcaatgacaggccccctcgctcagcagggagggacgcacaggcccctgggcgct

SEQ ID NO: 205657 - DNA, 122 bp, Homo sapiens
gcagcagcacctcagaactattcagagatttgccctcagcaagagtgagcaattgtctgacgcagccggctgaaatccctgggaagggaatgaatgaaactgccgtgaagcaacgcctggcg

SEQ ID NO: 205658 - DNA, 122 bp, Homo sapiens
agcagggcctgttttctctacactatagtgtaggttccagagacctgggcctgagctctccgcattggtacttcatgggtcgtctggattgtgccggacctgtgaccctgccgttgttttct

SEQ ID NO: 205659 - DNA, 122 bp, Homo sapiens
cggctcgccccgccccggtctcggccacgccctcaggacacgccccctcggggctcgccccgcccctgcccttaaaggtacagctcccggggagcttcgtagggtcttcccactctccaccg

SEQ ID NO: 205660 - DNA, 122 bp, Homo sapiens
gtctccaccaaaaaaaaaaccagtcaggcgtggcagcgtgcccctacaatcccaggcactcggcaggctgaggcaggagaatcaggcagggaggttgcagtgagccgaaatcgaggcagtac

SEQ ID NO: 205661 - DNA, 122 bp, Homo sapiens
agctttgggcaaaaagaccctgtgggccaggactaccgatgtgaggagcagctgctctggcgaggaaggtgaggtcagatgcagtcaagtgcatgtgtggtttcctcatgggtggggtgagg

SEQ ID NO: 205662 - DNA, 122 bp, Homo sapiens
ggaagcccgagccgcgcgtcatctgcacgcgccggaagccacgagccgcatttcctgccgcgaggctgagtgtctccagttcctaccggcccggcgaccccgcctttagctagtggccaaga

SEQ ID NO: 205663 - DNA, 122 bp, Homo sapiens
atttttagtagagacgtgttagccaggtttcaccgtgttaccgtgttaccgtattccagccgggctccgcccctggattcggtggacagaccagctttacctccagagactccccctgtctt

SEQ ID NO: 205664 - DNA, 122 bp, Homo sapiens
gaggaatattgggtttttaaaaaaacagtcattgaacattaactctaacttaagacagagcgacatttgggaagcacaaataattccagcaaaagacaaatgaattctgttgtggggtgatc

SEQ ID NO: 205665 - DNA, 122 bp, Homo sapiens
cctggacgtggatggcatcatcgcggaggtcaacgcccagtacgaggagatcgcccactgcggccaggcaaggctaagagtctgcaccaggtcaaggatgaggagttgcagacactggctgg

SEQ ID NO: 205666 - DNA, 122 bp, Homo sapiens
ctttagcctccgtgctctgggcaggaaagctcaacctggccccaaagaaatcgggggcaacgacttcatttccaatacagccacttgcccagtgccatggaagtggccctatgggtcagctg

SEQ ID NO: 205667 - DNA, 122 bp, Homo sapiens
aatgaggagtgcctgcagccgccggctctacggcccatgggcaatacgctgcaggctgcccggccccagcctgatgctgcatcagcctccccagggtcagctgccctcacctacttgcctgt

SEQ ID NO: 205668 - DNA, 122 bp, Homo sapiens
ctctgcgaaccctgctgccaggacacgctgcagaagtgcagcaagtgtggcgaggtggtccgggaccacatcatcagggccccgggccaggccttccaccccgcctgcttcacgtgtgtgac

SEQ ID NO: 205669 - DNA, 122 bp, Homo sapiens
gcagcattgatggaagctaaaatcagcacctaagaaccaaaacggcagagagaaagagcccgttccgaaaccgttacgcagaactggcgaggggaatgtccaacttaccagaccgtggtcca

SEQ ID NO: 205670 - DNA, 122 bp, Homo sapiens
tttctttaccctgaaatacttagtatttcctagaaaacaaggacagtccttgtgtttccacggtataattatcaaaatcaggaaattaacattcatcctatactattatctaatctcaaccc

SEQ ID NO: 205671 - DNA, 122 bp, Homo sapiens
gggcaggggctcaactctgagagaaaaaaaggcaagaaaactccaaagttggacagcaagcgtcaaaagactgcacagcaggaaggcgaaaccgaacagaactgctgctgcgcggcgacagc

SEQ ID NO: 205672 - DNA, 122 bp, Homo sapiens
cgcgggatgctgggtagcaaggagatgacccagctgaacaatgcatttggtccactcctgcgaggggaggagaacgccgagggacaggaactgcgcgccagcaaaagacaccctaacctggg

SEQ ID NO: 205673 - DNA, 122 bp, Homo sapiens
tggggatgaaacgggctctttgcggggggcctgtggggtatgggcctcctgtcagcagcccgtcccggtgggtggggcttgccggccgcccgcgaatgtcaggaaccttggattcctgacac

SEQ ID NO: 205674 - DNA, 122 bp, Homo sapiens
acctacgttgtctcgggtgggagccccggagccactacaaggcatgcagaggtgtgtgtgcgagcgcaggcacgcacaccgaggggacgcgcactctgcctggcttcacgctgacgccattg

SEQ ID NO: 205675 - DNA, 122 bp, Homo sapiens
atctcggtcagtgactcagcagcaaatcaccaggtacctcatctttcaaggagtggctggcgtttggaactccttacaataaaacatactcaaaaggctaaagctgcactgaacccaatgtg

SEQ ID NO: 205676 - DNA, 122 bp, Homo sapiens
gtgagaagtgtctgtaaaatggcccagagagggtacagcatcttgtgggggaggagggaccgggcaacctccagaaaggatctttccatggagcgtgggaggtaggaacaaggaaccggaat

SEQ ID NO: 205677 - DNA, 122 bp, Homo sapiens
gctgggaggccgcgaggacggagaatcgaggcggagacccagcccagcgcccgcgcagctcggtgccctcccgccagtgcccgcactcgggtcacaccgcttgctctcgggagaagccccaa

SEQ ID NO: 205678 - DNA, 122 bp, Homo sapiens
caggcagcagcaccagcaggctcagctccttcctggcgtagggcagctccagcagctgcgcgcgcacctcgcccacgtgggcgagcttaaacgtggcctcctgatacatcatctgcactggc

SEQ ID NO: 205679 - DNA, 122 bp, Homo sapiens
ggatactttgttagggcccctcctgggccctggaggtggagcctcatgttagggtggatgcgcctctgccctgaatctgcaatgggccaagtgcaaagctgtgttgtcagtgccagatggcc

SEQ ID NO: 205680 - DNA, 122 bp, Homo sapiens
ccggctgcactcccctcccgcgacccagggcccgggagcagcccccatgacccacacgcacgtctgcagcagccccgctcacgccccggcgagcctcaacccaggcgtcctgcccctgctct

SEQ ID NO: 205681 - DNA, 122 bp, Homo sapiens
cctacccgcgcgcggagaggaccgacgtgaagaagctgccaaagtataacaagtactacgcgaagggtaggtagggtggagtcccaggcagcgcgtgacggccggatgcccagacgcgcacg

SEQ ID NO: 205682 - DNA, 122 bp, Homo sapiens
ccccactccccgcccccacctttggggggcttatctcctcccctctccgtcccgttcacacgcccaccctcactccgcccgcgtccccgctccggggaccgtctccgcagccccgtgcccac

SEQ ID NO: 205683 - DNA, 122 bp, Homo sapiens
ccaccagacttgccgttgttctggaattgagtggcgtgtgggaacgtgtgtgcgctcctgcgtctgcccctctcccctgtgggatcgtgggcacctgcgttgctcactctcactgccgagcc

SEQ ID NO: 205684 - DNA, 122 bp, Homo sapiens
ctgttttctggctaccgagagggcagccatgaacacccaaaagggttccctcaccataaacgtccacagaggttccctcgccatgagcatccaaaggggttccctcgtcccccgggatatgg

SEQ ID NO: 205685 - DNA, 122 bp, Homo sapiens
gcgcaactaaaatccagggcttgtcgcaggcacaggctcctccttcggtgggtgggacggcggcgcgcactttctctacgccccactgctaggatgtgcggccaccactcctcctccgccgc

SEQ ID NO: 205686 - DNA, 122 bp, Homo sapiens
cccaggcggctcgggctggagaaagcagcgcccggggggccctggtgtcggcggctggtgcgcaggcatagacgttaggcttctgccttcccaacccccctctatggagtaatctggggacc

SEQ ID NO: 205687 - DNA, 122 bp, Homo sapiens
ccggaaggggcggggcggggccggtcactcaccactccgccgagcaggaccgcgggagcccgccccccactcatgcggcctacgctggtacaggagagttgatctcaaaggccacacgtcac

SEQ ID NO: 205688 - DNA, 122 bp, Homo sapiens
aaatttagaaggggtgatttatttttctgaatctgatttgtaatgcctgctattgactgtcgttggatttgctggttcttgaggaggaaaacctcatgggcagaatagaacaaagagggtct

SEQ ID NO: 205689 - DNA, 122 bp, Homo sapiens
aggcgtccatggaacgacttctggcccagctgtgcggcagcagcgcagcgtggccgctcccgctgtgggagggggacaccacaggccactgcttcacccagctggtgctcagcgccctgccc

SEQ ID NO: 205690 - DNA, 122 bp, Homo sapiens
ttcccctggcgccggtgagtggcgggcgaggacagggtccgggagggggataggcgagagcgcttcctgcctccgcccgggcggggctcggccgtctcacctgcccccacccacggcgccgt

SEQ ID NO: 205691 - DNA, 122 bp, Homo sapiens
cgttgttttctccgttactcaggctgccagttgcttggcagtcttgtcgctggctgtggacgctctgcacttcatcaccgtccccagctgcgctttgagccggtctaaggttgcccacagta

SEQ ID NO: 205692 - DNA, 122 bp, Homo sapiens
cgtcccctgggaagtgtagtcggcgtggggccggaggcatgccgggagtggtagttctcccgcggttggcggggtttcggggacagctcgcggcctttcgggggttctcctggcttgggcca

SEQ ID NO: 205693 - DNA, 122 bp, Homo sapiens
ctagtatggcatccaggaatttttattttagaaagacttccatgtgatctttatttgtggcggggttctcagggcaatagtagaagagataaatttaatttttattttatttatttattttt

SEQ ID NO: 205694 - DNA, 122 bp, Homo sapiens
ggccccaaccttcaaagttcaagtagtgatatggatgactccacagaaagggagcagtcacgccttacttcttgccttaagaaaagagaagaaatgaaactgaaggagtgtgtttccatcct

SEQ ID NO: 205695 - DNA, 122 bp, Homo sapiens
cgggcctgcgccgtgggtgcggttgctgaggcgacgctcgcagccgcaagaggtggccttcggttccggggctgccttctaaggctgtggggatgggatgacaggaagagtatcaagacagt

SEQ ID NO: 205696 - DNA, 122 bp, Homo sapiens
aaaggaaagaaagagactgtttctaagggcatttgatcactcctgaccctgttcttccctcgccttctctcaacgtggtggaaaagtgtttccaggactttggttcagagtgaggactggag

SEQ ID NO: 205697 - DNA, 122 bp, Homo sapiens
attaagggcgcctggtcccgaggcaccgagatgatcatgattgcatcagccagacagaagcggagccgggagctgcgcggtgagcgaacgagtgagacaaagccgcccgcgccatctgttta

SEQ ID NO: 205698 - DNA, 122 bp, Homo sapiens
cttgcccccaccccaaatcctccgggatttcaaaatgccgcggactcgggcgcaagtgagcgccaaacccgcaagctgggcgagttggatccgggtcggcagccggctgaaccgccacgctg

SEQ ID NO: 205699 - DNA, 122 bp, Homo sapiens
aggatggagctgtgcgcaggcaggcccgagactgccccctagaggacgccctggggtttgcggacccacatcgccccactcccaggcccagataggacagtaagcgactgccccctggtgcc

SEQ ID NO: 205700 - DNA, 122 bp, Homo sapiens
ttcagaggttccaggggtgagtgttaccgaacaaaagtgattcaatgcattggaagccaacgctatgacactgggtgtttgagaaaaggctttttattgaaatataaatatttaattttaaa

SEQ ID NO: 205701 - DNA, 122 bp, Homo sapiens
atgtggtatcaaaagcaccggcaacaaaagaaaaatagatcagctggtcttcatcaaaatcgaaatcttaagcgcctcaaaggacatcaagaaagtgaaagagaagccacagaatgggagaa

SEQ ID NO: 205702 - DNA, 122 bp, Homo sapiens
ctctccaaacactcgctcttggaggaaatagcgagtcgatttttaaaaaagagtaaaatacgtttgactttttaaaatgataaaagcattgtcattggccctgtactattcttgccaccttt

SEQ ID NO: 205703 - DNA, 122 bp, Homo sapiens
attcacagacacatgaaccccgggcaggcgagtgggaggcggacaggggagcggttcttccggcccccacccgtggcgatcccagcctccaggttcccggcagtcgccccgcctcgcccgtc

SEQ ID NO: 205704 - DNA, 122 bp, Homo sapiens
aggacacaaagacattctaactcacgacaaaaaaaaaagtatacactagtcaatcctttacgcataaaggttttctaaccttgtacctcagggattctggggtagtattttaggacgaactg

SEQ ID NO: 205705 - DNA, 122 bp, Homo sapiens
cgaccctccgcagatgctacacattatgccaggtaaacacattatcaaggagccttgggccgtgttagaggaaggctccttgtgcctgtgaggagtttgcactaatgctatgtgtgtttgtg

SEQ ID NO: 205706 - DNA, 122 bp, Homo sapiens
ggcggcgcccggggctgggatgcgccgggggctcagtggcggcggcggcgttggcggtggcgtcggcggctgcagggggacgagctagcgccgcggcgctgggagccagttgagcccggccg

SEQ ID NO: 205707 - DNA, 122 bp, Homo sapiens
actctggggctcgagcttaggataacttcaggttcagctgaggcctctgaactgtgactccgccccgtggccgcatgcgtcggaactcctacctgccctttgcccttctcgaggccggtgct

SEQ ID NO: 205708 - DNA, 122 bp, Homo sapiens
ctgctctgagaattgagttaatgcgtgtaaaacatgagagctgctctggcacccaccaggcgctcaccgggcgccagcaccaccagtgcatacctcgaccgtgtgtgggcgcacaggcctcc

SEQ ID NO: 205709 - DNA, 122 bp, Homo sapiens
gagccattccataaatctaacgctaagcactgaacagtgcattctgtttaaggcaaaaggcgatgtatccagtcagttcagccaccatcagcccctttccttctcagcatcaagtcagtgtc

SEQ ID NO: 205710 - DNA, 122 bp, Homo sapiens
ctgacctaaggtgatccgtctgcctcagcctcccaaagtgctgggattacaggcgcgagccgccgcgcccggcctgcatcagcacccacagttcttacaggggtctggacacttaggcacct

SEQ ID NO: 205711 - DNA, 122 bp, Homo sapiens
tgccagggttgagagcttagaccctagagtttttgagggggcacctgggctcccctcactcgggatccgttactcctcacagagcccgactctcaggctcttccgtggtccggggactggac

SEQ ID NO: 205712 - DNA, 122 bp, Homo sapiens
tgctgcccaggatcgagtgtagtggcatgatcaatcaacgctcattgcagtttcaacctccgggctcaagcaatcttccaacatcagcttcccaagtagctaggaccacaggtgtgcaccac

SEQ ID NO: 205713 - DNA, 122 bp, Homo sapiens
gcatcttctatgtgccttttctctatcatcagatgggggcccctgcggtgggcagaataacggccactgcaaagatgccaaatcttatccccagagcttccgcagagatcctgcagatgtga

SEQ ID NO: 205714 - DNA, 122 bp, Homo sapiens
cagcgagctgggccctagcccccgggccaggtctaggccaaatctgaaatctgagccagtcggcgccgcctctgcctgggctgcccggccctgcgccccccggccccgggtgggaggtgggg

SEQ ID NO: 205715 - DNA, 122 bp, Homo sapiens
ggaggaggctgtgctgcaccagcacctcttgctccacatctccagagagcccaggtgaggcgcaccctcctgtctgcagggacagagccgcgagcgggcgcgggcggcggggtccatctcac

SEQ ID NO: 205716 - DNA, 122 bp, Homo sapiens
tctccgggcaggtccaggcagcccatggtggggatgcgcccccctcggcgtctccccgcacgggccccaggctcagccagcttctctcgcagctcgcggctgattcgcacctccaccgccag

SEQ ID NO: 205717 - DNA, 122 bp, Homo sapiens
ctccttaagccttactttccttatctgtgtaatgaaggtaataacacaaccagcgtcttacgattgttactgggactaaggggatatttaatgtaaagctattatatgggcctggctcacag

SEQ ID NO: 205718 - DNA, 122 bp, Homo sapiens
gcccgcccactcccggtgacagggagccggaaatgacgtagcacgttgacgcagcagcggcggcggtggcggcggaggggccgtgcggtgggtccgtactatcttttcccagtctcggttcg

SEQ ID NO: 205719 - DNA, 122 bp, Homo sapiens
aacaacagccagattgtttcttcttcacttactgtgcacggtatgggctggcactactgccgcagcttagaaatctcaaatgctgtcatgaaaaacaaactaagccctccagacagaataaa

SEQ ID NO: 205720 - DNA, 122 bp, Homo sapiens
caggaccactggcagccattggcctgagggtccccagttccctcccccaaccccaggcctcggccctggcacagagcacacttggcagcgtcgtgcctggagcaccatggtgagccggctgc

SEQ ID NO: 205721 - DNA, 122 bp, Homo sapiens
agaagattctgaaaggcactcactctattttagtgtatggaatctcttttaattgttcttcggacaatccggatggatccacaagttcttttctgtaaaggaatatgcaagaaaatgatagt

SEQ ID NO: 205722 - DNA, 122 bp, Homo sapiens
gcggccgctgcgcggaggtctgcggagggcgcctggctcggtcggtcgctccttccttggcgggccctcgccgacccacggtgctcagccagccccattcttggcattcaccgcgtgcctta

SEQ ID NO: 205723 - DNA, 122 bp, Homo sapiens
gctggagggttgggctgcgtgggaccctgggccctgctgcttcccggaggatgcgctgtccggggctgcacaggttggctgtgttttttggatgcttgatattttgttttttcttctcttca

SEQ ID NO: 205724 - DNA, 122 bp, Homo sapiens
ctgccgtgatctcggctcactgcaacctgcctgcctcgggctcccatgattctcctgcctcggcctaccgagtgcctgggattccaggcacgtgccaccactcctgactggtttttgtattt

SEQ ID NO: 205725 - DNA, 122 bp, Homo sapiens
gtgaggcttagcttcttcaacaggaaaatgggtgttgcaaacctgtgatgaccgctcaggcgtattgaaccctgacctcacctccagagtgtgggggtcatggcctccagtgaactgatcag

SEQ ID NO: 205726 - DNA, 122 bp, Homo sapiens
ctggcctggcagacccttcgtcaccgaggccaggggatccagggtgccggagcgcagggccgtcggctccaaccccgcctggtacttcaccgaggccaggggatccagggtgctggagctca

SEQ ID NO: 205727 - DNA, 122 bp, Homo sapiens
cagtgccccacacaagatcgagagttgagcccaagaggtcaccttcttctctactggccccgcccctcgcccgccgctgcgggatgaggaccacaggaagggggggcggggagggagaaagg

SEQ ID NO: 205728 - DNA, 122 bp, Homo sapiens
aagtgggaccttgagacaaagtgcaaactctaccgggaggggggctcctggccattccctcgggcggcgcgcccaggtgcaggctcgctctgcggaggagggcgggggccgggcaagcagag

SEQ ID NO: 205729 - DNA, 122 bp, Homo sapiens
gcccattgccgctctcgatcaggctaaaggcttgccattgttcctgcatagctaagttcccgggttcgtcctaactgagctgaacactagtcactgggttccacggttctcttctgcgaccc

SEQ ID NO: 205730 - DNA, 122 bp, Homo sapiens
atctcagctcactgcaacctctgcctcctgggttcaagcagttctcctgtctcagcctcccgggtagctggaattacaggtgtccaccaccacagctggctaattgtttgtatttttagtac

SEQ ID NO: 205731 - DNA, 122 bp, Homo sapiens
ccgccggcggtcgtgggcaagcttcgccatgcagagcactgacctaggcaacaaggagagcggcaagatatggcaccgcaagccgtccccggccacgcgggacgggtaaaggccgtggcggg

SEQ ID NO: 205732 - DNA, 122 bp, Homo sapiens
cccgagtccgctcccggtccctggcccgtcagcgacctggcgaaccaggcgacgctgaagcggcccatggacttcggtacaaagctgctgagtccctgcttccccgaagcagccgtgctgca

SEQ ID NO: 205733 - DNA, 122 bp, Homo sapiens
aggagctgcgggtgccacgggtcaggcaggctgggcacctttgcccgggagccctctgggcggaggcagagatacttacggcggtctcgtcgcggtacacgtcggggtactgaagggacagc

SEQ ID NO: 205734 - DNA, 122 bp, Homo sapiens
gcaagcatccccttcatatacccactcagtggtagtaaaattgatagcgttatacattaacgtgaacttaaacgtgccccaccaaaaattttcttccccctacccccacctcgtgaagtttc

SEQ ID NO: 205735 - DNA, 122 bp, Homo sapiens
ggtgccgtcagtcacccctttctttgattgggtaagggaactccctgaccctttgcttcccgagtgaggcaatgcctcgccctgcttcagctcgtgcacggtgcgcgcacccactgtcctgt

SEQ ID NO: 205736 - DNA, 122 bp, Homo sapiens
tctagccgggtccaggtggcaagcctggcgtcccgactatttttgaaacctgttttctctcgcacctttcccctcgggcttccagagtcccttgggtgcccaggcaaacgacagactcgccg

SEQ ID NO: 205737 - DNA, 122 bp, Homo sapiens
gtgtcaattagcataatttaaaaggcaaggggaaaaacctgatatctatgtgactgctttcgctttaaacttgtccgactttggaggctgattatggccaagtgacccatattttaaaaaca

SEQ ID NO: 205738 - DNA, 122 bp, Homo sapiens
gtggtgcctctggagtttttgttccttctgatgttcggatgtgttcggagtttcttccttcggtgggttcgtggtctcgctggctcaggagtgaagctgcagaccttcccggtgagtgttac

SEQ ID NO: 205739 - DNA, 122 bp, Homo sapiens
tgaaagcacaggagataaactttgcttgggtcacaactagaacccttcgcttcgcctttacgaaaatattgaggcccgttgcaaccctagatgaggttgtctcattttctcgctggagaact

SEQ ID NO: 205740 - DNA, 122 bp, Homo sapiens
ctgcagaggcaaggagagatcgtccaggggcctgctcatgtccaaggccatgaggctacacggcctccagcctctcactccgggtgtggccacagccacaggacagcggccccgccaagggg

SEQ ID NO: 205741 - DNA, 122 bp, Homo sapiens
cccaacggccggaggagccgccggagcccgcctgcccgcccgccgccgaaggagaggagccgcctgcgcagcccccgggcctttgagctgctcccagcgctggtccagagccgatccttgat

SEQ ID NO: 205742 - DNA, 122 bp, Homo sapiens
catggcgctcgttcacaagggcgttttcttgcagtagcaagcttcccccatccccacatccgcctcccagtgaaaccacctcttcggggcatgcagctcggtgacttctctcccctcctcac

SEQ ID NO: 205743 - DNA, 122 bp, Homo sapiens
ggacaaagacaatggggtgactcctggagagaagatgctcacagtcccccatatcacgtgcgaccccccagaagagcggcggctggaccacttctctgtcgacggctatgacagttctggtg

SEQ ID NO: 205744 - DNA, 122 bp, Homo sapiens
accgctgctgaacaagattttagtttaactttctagcaggttctaggtgtacactgtaatcgagtgttgacatggaagatgggtggctgtgaatgatcactcagatgttttctccattcctg

SEQ ID NO: 205745 - DNA, 122 bp, Homo sapiens
cttgttcaaagctgtttgctcctcaaggacctgtaggtagtcaggggaactctgcagtttcgccttcagttcaaaatactcactcttcctttgttccacaacaattttactgtggttgccac

SEQ ID NO: 205746 - DNA, 122 bp, Homo sapiens
ttcccacacccgcctcgggccagccctagtgggcaaggagaggcaccttggaaaggaatgcggggtcctgatctagggacccctggtttaaattcggccttggctgagatcctctccgtgga

SEQ ID NO: 205747 - DNA, 122 bp, Homo sapiens
ccgtggccgggtcttcatgtctggatcactcactaagctactgtggtttagggctgaagacgtggattcacgtcgtgtgtcctgcagacaacagcagtttctcaagtttcacgtgccttcac

SEQ ID NO: 205748 - DNA, 122 bp, Homo sapiens
tagcaagtcttgccaactgacatatcatatgttaatttcattgtttgcctccccctagcccgggtagattaagttctggagacagcaagagctgatttgttctgtacatatctatggcccca

SEQ ID NO: 205749 - DNA, 122 bp, Homo sapiens
tgttcctctttagcgctgcttacttccccagcactgagatttaattagattgattctaaacgctagcccctgaactcattttcatttgcccctggtttctgccgttctaaaacgcaaataat

SEQ ID NO: 205750 - DNA, 122 bp, Homo sapiens
tagaggacacggcgggtcaagagacaccttccgaaacaggcacgctcgcagagatcaagtcggtcaacttttcttggcttggggagaattcctccaatagcgttttataggcctgcgacata

SEQ ID NO: 205751 - DNA, 122 bp, Homo sapiens
agtggagcctggcaagctgggcatcagcccgggctctcattccagggacaggcactgctacggacccaggtccgcccgggctctcattccagggacaggcactgcgacggacccaggtccgc

SEQ ID NO: 205752 - DNA, 122 bp, Homo sapiens
cgactggggtggagaccggatctgggacccggggaggcggcgctgcggtgaaagtcccagcggtggagaacagggcaagcatctaccgcgcgcgccgggacccacgcgtcctccccttcctc

SEQ ID NO: 205753 - DNA, 122 bp, Homo sapiens
aggcctgccgtctctacctctctacctgtgagttttttccctgcatttacttcagtctgccgcgtcttctccccgcccttctctgtaaggtaaatatgtggaggaaataattcctattaaag

SEQ ID NO: 205754 - DNA, 122 bp, Homo sapiens
gtcggtgagaaacttcttacagcaagaggccggcgtgctgggagctgggggctggtgctgcgggggacgattttccacttcacgtgcggcccggctgctgcagtgtctgctctgctcttgtg

SEQ ID NO: 205755 - DNA, 122 bp, Homo sapiens
ttaggttagacacacacccctccatttcgctgtcccagcaactacttgtcgcgcgagcaacgcccgcctcacgtcgccggctccggctacgccagtcaaaacagccgttagagcttcaccaa

SEQ ID NO: 205756 - DNA, 122 bp, Homo sapiens
gaccgcagtttgaggtgaaaggaccagaggagtagaggcaccgagagccaaatctgaggccgaatcagaggtctaggatgttaactgaacagaaagtaaaggaaactggccgaagcgggggt

SEQ ID NO: 205757 - DNA, 122 bp, Homo sapiens
tagcaaacaacctcagcttcataaatccagcagaaaggtccggggtattgttgaaaaggtcggaaggaccaagattatgtccgccagcctaagtgggacgaacaaccaagttgtgcgatgca

SEQ ID NO: 205758 - DNA, 122 bp, Homo sapiens
cgagactctaggaaacatcgccgagacacgaaatgaaccaagaacacaactgaaatggtgcgtcccgctgccaaacacgtccccgccctctcttccgcttccggcctggcgccttcctcccc

SEQ ID NO: 205759 - DNA, 122 bp, Homo sapiens
tccccccgtacctgtgtcccatcgtcactcttttccccattttcgctggtgatttccaggcggataaattttggaggacgccccggccgtcgacctggaccgaatcgcctcttgcctcgtcc

SEQ ID NO: 205760 - DNA, 122 bp, Homo sapiens
ccaggccagagctccgcctagggcaaccctcttccaggtgtggaggcccccgggcagtcccgactcccatgcccatctcaagaacctttcctggggacagagacaccaggcctgagagagga

SEQ ID NO: 205761 - DNA, 122 bp, Homo sapiens
aggtgggcctgagaggggggcgtcgagcactttcgcgccgtatccctccgccccccttcccgacaccctcgcggagagagcggttcttgcagcatcctgcgcagcccctgcccagtttggtg

SEQ ID NO: 205762 - DNA, 122 bp, Homo sapiens
catgctgaccgatggctcggagtgcagggcacgtcttgggcaacccagcagcccccggggcgccttgtcacagccagcactgcccggtgcttgggaggctccccgaggtaatgtgtgtgctg

SEQ ID NO: 205763 - DNA, 122 bp, Homo sapiens
tttgggaggctaaggtgggagaatcacttaaacccaggagttcaagaccagcctaggcaacgtggtgagaccatgtctatacatataatttaaacattagctgggcatggtagtgcatactt

SEQ ID NO: 205764 - DNA, 122 bp, Homo sapiens
ggttagtatgagagtggctccttataagaagacctgcaccttactcaattttgaagaacacggaatgcacctgctaccaggccctggatctactcctaaatgaagccagtcacaccaggggc

SEQ ID NO: 205765 - DNA, 122 bp, Homo sapiens
aggtgggggccttggcgggaagggtctcggtttgctcgccaaccccctgccccccacccgcgccgatttcagctacccctagtttcgttgttttgccgacagggcggagctacagaaggttg

SEQ ID NO: 205766 - DNA, 122 bp, Homo sapiens
ttccaccctgccgtgggctgcttgtggcactgctgccacctcgcagacaggcaggggaggcggagagctcagggcatgcactgtggtcgggaccactgctctgctatccgtgcagaagccct

SEQ ID NO: 205767 - DNA, 122 bp, Homo sapiens
ggttccactggaggatctgggagcccccagcgtgtgggaaaatacagcatgcattgagcacgcactgtgtgaaaagcactgacctggggcagaattctcacagcaacctgtgagggatgtgg

SEQ ID NO: 205768 - DNA, 122 bp, Homo sapiens
catgagttgtttggtgcggtgggtagatacctcgagtttctcctcgcccaccgtaggccccgacccctaaaaaggaaacttttgggacgtcagagtgagaggagaaaagtgtctttttagtt

SEQ ID NO: 205769 - DNA, 122 bp, Homo sapiens
gtttagacctgcgtgcccaggctttgttaggcggttttggctggagaaagctgccactttcgtgggtggcccgggctgcgctgtgctggtagtgggcactgggcggggggcggcggtgttgc

SEQ ID NO: 205770 - DNA, 122 bp, Homo sapiens
gcatctctactcccattagtatgcactccctcactctgggccacgtaatctgtttatgcacgtatgatatcaaaaacaggaggcaggtgctgccgtcttgcgttcctgggagtcagaggagg

SEQ ID NO: 205771 - DNA, 122 bp, Homo sapiens
ggagtgaggtaaatttacatgcagccttcagtcattagtgacagatctattttaaagggacgaggttgtgcaacaagggtacaaaggcagctcatggttctaattgttgggctccattagaa

SEQ ID NO: 205772 - DNA, 122 bp, Homo sapiens
agtctgaaatgcaccttggaaatctgctccagagcgaaggcggcgtcgcagtagctgggccggtgcagatagtcccggtccggcgcggcagcacggcgcagcccccccgtccgtctgcgcct

SEQ ID NO: 205773 - DNA, 122 bp, Homo sapiens
ctcatcaatgattatccctggcacagtacaatagtaaaatgtgtcaccaatggaagggaacgcattagctgcgtgaaatgtcaagcagttgaaatatgcagggaaaacagtaactaaggatt

SEQ ID NO: 205774 - DNA, 122 bp, Homo sapiens
cgccggccgcccccgcgcccgccttgcggacggccccagccccttccgcaccctggcccgcgcttacctgcagcctggcacaggcacagacactgccgtgggttccccgcgctcgctagcaa

SEQ ID NO: 205775 - DNA, 122 bp, Homo sapiens
ttcaccattttaattaggtgactctttactctgacgtctgtctctcctacaaggctgccgcgccctcctgtgatgccttcccccacacgccctgagcacctagcacaggtcctgtgtttcac

SEQ ID NO: 205776 - DNA, 122 bp, Homo sapiens
gccgttggctttgagtatcaaggcaaaacggagaagcacgagtcccagaaaggtgtcttccgttttatcttaccctccagccagcagctagtaatgtgacaggtggtagccacaccggaaaa

SEQ ID NO: 205777 - DNA, 122 bp, Homo sapiens
gttctggttttgcacatctggcaggaatgccaccgagggcaggtgttctgagccccgagccgccctgcctggtgatgttcgctgtggtcacctggatgaggtgtgtctgcaggtttcgctac

SEQ ID NO: 205778 - DNA, 122 bp, Homo sapiens
acccttcatttacaggtgacaaacaggccatgcgcactacgcggcctggtcaggaggacacggcactgggagatcttccccagggtgtgacctttggcaggttaggtccccaccctggcatc

SEQ ID NO: 205779 - DNA, 122 bp, Homo sapiens
gccggagcctgctcactttctccgactctgcggacgctgcgaccacccgcggaaaaacgccgccttcaagctgtggagcccactctggaggccacctagaggccctggagcaggagggtgga

SEQ ID NO: 205780 - DNA, 122 bp, Homo sapiens
cctccctgaccagtgagtgatcctcatcccctctgctctctcacaggtcctggcacaaggcggcccatgcccgcgggtgccagggagaggaagtggcctggatgagggggctgggcctggca

SEQ ID NO: 205781 - DNA, 122 bp, Homo sapiens
agacagagagcttgctgtgcgggaaaacaaaactaagccaacgctcggttggttgtcaagcgctccagcggtgcaatctgcatcctactcacgcggcatctacagccccgccacgcttcttt

SEQ ID NO: 205782 - DNA, 122 bp, Homo sapiens
taatgcaaaagtccatgatgaataaaatatcaaaaattaaagacaggatccgactttgcacgaccctgcctcactcacttcctgctaatccacgggaccggggagggtgactgagttacccc

SEQ ID NO: 205783 - DNA, 122 bp, Homo sapiens
gtcctggtaccctttcaccccatgctgagctgctgccctcaggaagcactgtacatcacacgcctgttctctccacttctcctttccttccctggctgggagagggacaactgtcccagcga

SEQ ID NO: 205784 - DNA, 122 bp, Homo sapiens
ccctttcagcagctcattaggggcccgagcgctgggggcggatggggggacccgtgctaccgcccccgccttcgtcctcgctgccgccgaggctccccccgcccggcgcgcgcgcaggcacc

SEQ ID NO: 205785 - DNA, 122 bp, Homo sapiens
gcaatttcagctcatgatccctgaagagagacagacctcctgagcccaagtccattatgccggaagaatgactgtggccacgtgtggaacaattgtcacccatctcagaagctactgttatc

SEQ ID NO: 205786 - DNA, 122 bp, Homo sapiens
actgggaggaggccttggtggccagggaggccacacaatgctgctggaagctgggcgacacgccggcgttgcagccgagtctctggtgcggcagcttggcggtgccgcccgcgtcggcctca

SEQ ID NO: 205787 - DNA, 122 bp, Homo sapiens
cacagaacagaacagaactcctctccctttctattctccattcacaagggagggagggtccgccctgtgctcagcttcagagacttccctaaagccactgcctggggtgcgggacggagtgc

SEQ ID NO: 205788 - DNA, 122 bp, Homo sapiens
tttaactagaataacgttagactggcaatggcagggcgtcaggaaccctgtgtgtgttcacggaggggtcctgtttcctgtctgccacagtcgacgcagccaaaggcctggaattggaaacc

SEQ ID NO: 205789 - DNA, 122 bp, Homo sapiens
attttcctcttcttgcgatttagaagtttaactgctgtattcaaggtactgtaatgtattcgttctgtgcttgcttggagacttgccgactctgtgtgtctcagctcataccctcttccttc

SEQ ID NO: 205790 - DNA, 122 bp, Homo sapiens
ggggacgagggcctgtccccccactcacccgtgatgcccacggtggacactgggcccacgcgctgcccctcgtggaggccgtacagatgcatcttgtatttgcgcccgggctccaggccccc

SEQ ID NO: 205791 - DNA, 122 bp, Homo sapiens
tttcccgatgcagaggactataagaagagtttacacaaacgtgctaggccctgttctagacgctggagacacagcagtggacaaaatcagcccgtatggaaattacatccttcctaatgaaa

SEQ ID NO: 205792 - DNA, 122 bp, Homo sapiens
agcatcggagcaccggcgggtgagtcccgcgggaaccgcgctcaggggaagtttggggcgcggggtgtagaaccccaagcgcgttagcccagacccgccccccacatccttgagctggaagt

SEQ ID NO: 205793 - DNA, 122 bp, Homo sapiens
ggcccggcggttctggaaccagacctgcgggcacaggggccagtcagcctggacgagggtcggagaacgcacggggtcagcccgcggccgcaaggctcgagtgagatcctggttcggaaaga

SEQ ID NO: 205794 - DNA, 122 bp, Homo sapiens
cacgcccactcaagaaatttccgaaacagaaagtttgtctgcaacagcgcgccgtactgacgtagcagtgcgcaggcgcagtcccggctcctggcggcgtgttcctcttttcctcggttccc

SEQ ID NO: 205795 - DNA, 122 bp, Homo sapiens
ggacctccaggctcccttggctgctgtagctgctgcttcaggggacaacaacgcacttctcgggggcgctgtctgatcatttaggtggactgttgcccaccaggagactgtcagtttcctgg

SEQ ID NO: 205796 - DNA, 122 bp, Homo sapiens
ctacttgctcctcatacacctaaaaaacttttttcttgaaactttctaatgttttccctccgtagctccatgtattttattaatgtgtctgatagcctttgtttttcctcctctagaacctc

SEQ ID NO: 205797 - DNA, 122 bp, Homo sapiens
ggagcacggctccaccaacagggcatgcgcacatctgaggtcgcttagggctcggattaccgcagcccagattttaaagacccgaagggtgttggagggtttaattctttcaggtgttgggt

SEQ ID NO: 205798 - DNA, 122 bp, Homo sapiens
cccactcaaccgcgtgcacccaacccctctcctggtccgaggcaccggagggcgcggcgacgtccaggctgccgtggaggcccggtccacgccaagccagactcagtcccggccaccgggca

SEQ ID NO: 205799 - DNA, 122 bp, Homo sapiens
agcatccgccttcaggctggaaatcaattctagtatacttcgatttccttacttgcagttcgaattcaaatatgattcttttgacattgtgagggtttgcgctatttaaagaatggaggcaa

SEQ ID NO: 205800 - DNA, 122 bp, Homo sapiens
cttgggccgagggggcctcccctcgaggttcctggtggcgagggtggctgggagctgccacgctgtctctggagctgtccctcctccactcaaaagccagctgcccttccctccccctgcaa

SEQ ID NO: 205801 - DNA, 122 bp, Homo sapiens
gcaggatggttaaccactgaaatgcccactagcttgcagaagacagagttggcgatgtcccgactctccctattactacccctcgacggagcacctcctatggtaggcattgtaccagtgct

SEQ ID NO: 205802 - DNA, 122 bp, Homo sapiens
tctgtggtactccaactcttcagctcattcattcattcacctgagatttcttcagcccaacgcaatgctataggtgtaatggtgattaaaagctgacgatctttgctctctgaggcctgctt

SEQ ID NO: 205803 - DNA, 122 bp, Homo sapiens
cacaggggaggggttgggaggtgactgagagtcccattcccgccagctcctggggccggccgggtgcagctcactctgcctctcctgcacctgcacccgtcccccaattagtaagaataacg

SEQ ID NO: 205804 - DNA, 122 bp, Homo sapiens
acagggtcgcacggcggctgtcccctgagccttctctcacagagcagaacggcaccctcacgggggtctcacagcggctgtcccctgagcattctctcacggagcagaacggcaccgtcacg

SEQ ID NO: 205805 - DNA, 122 bp, Homo sapiens
ttctctttctgtattcagataactgctgcctccttccatcttttgcatctaggggtcgtacggcaccccccgcccccacaactcctgcactgtctcttgtggtttccctgtaatgcacacac

SEQ ID NO: 205806 - DNA, 122 bp, Homo sapiens
cctctggctctccttccaggcttgctctcctggctctggggcaccgctctagcagccctgcgtcccctggctgtctgcatttggtagctttcctgtgtttctgccaaacttccctcatgctc

SEQ ID NO: 205807 - DNA, 122 bp, Homo sapiens
ttcgtggcggtgcaggagtggtaccagatggacacctacaacctgtaccagtcggacccacggggcgtgcgctacgcgctggtgctgcaggacgtgcgcagctcacggcaggcggaggagag

SEQ ID NO: 205808 - DNA, 122 bp, Homo sapiens
cggaaagcggggcggggtcgcggtcccggcggagactctgcgcctccggcctacccgccccgcccccatccggcttcgctcgcgaagctgcccccactcgtctctgttcaccgcgtcctcta

SEQ ID NO: 205809 - DNA, 122 bp, Homo sapiens
aagattaacgggcgattttactccttatttgtagggtaaattgggtctgttagcaggagccgggtccagggattcttaacctgaaatctgcggagcctcacgtgcttcctaagtgggtttca

SEQ ID NO: 205810 - DNA, 122 bp, Homo sapiens
cagcactccccgtccaccttcacgtggctcacagggagcgtaaaccaatccagcactccccgtcagccttcacattgctcacagggagcgtaaaccaatccagcactccccgtctgccttca

SEQ ID NO: 205811 - DNA, 122 bp, Homo sapiens
gcaagggcctcattttttcttactgcccccatccggttcggggaggtggcgggaccttggcggcgcccggagccggcgtggcgctcatcgagggacgcccggcccaagtggtaagttgaaaa

SEQ ID NO: 205812 - DNA, 122 bp, Homo sapiens
ctgtgctgggtgccaagatggagacagcggctaccttgctacggcgggacatcgtatttgcggccagcctctacacccagtgaatgccccatgtaaaaacatgatgataaaacagcaaagca

SEQ ID NO: 205813 - DNA, 122 bp, Homo sapiens
aaggagctctcaaagaaaggtacccggggtatcccgggctgtggagcaagcgcggggcgccggggacccgggtttcccacgcagccggggacgccgttgcgtcacggcgcctgcagccaatc

SEQ ID NO: 205814 - DNA, 122 bp, Homo sapiens
tagggctcctgatgagtcagcctcacacgtggcctgctcaggggcccgggaaagagtcagcgctgcacagtcaggcacggggaccctcgcgtgtgagtccacggccttcagaggggtcaggt

SEQ ID NO: 205815 - DNA, 122 bp, Homo sapiens
cttgttccaagcgctgccttctccaactggggtcctggctgcagagctgtctgctccccacgttgggcaactccagccaagattcctacacccaaatgtgaccgtgttgctcacgaagaagg

SEQ ID NO: 205816 - DNA, 122 bp, Homo sapiens
gttaggtttggtggggggaggggaaggtgactttcacaagtcctcttgtacaagggccaccgtgtgaaacctgatgtccagtgaagacacagcaatccaaatagatcactgccttccagccc

SEQ ID NO: 205817 - DNA, 122 bp, Homo sapiens
gttggaaaaagaattactttggtgcagccgcccaagaggagcttggggaggacgctggcccgcgaggctcgtcgcagacaaggtggcggcgatgtccgggagccaggccagtgccgcggcgg

SEQ ID NO: 205818 - DNA, 122 bp, Homo sapiens
ttgcacatttgctggagagttcttccagctgctggcgcggacgagccccgcacatgctaacgctccagcccctcggtcaggcctgactcccagacacagggacggattaaggaatctatttc

SEQ ID NO: 205819 - DNA, 122 bp, Homo sapiens
actacctccttcactcacaccccaagttcagggttcagagcctttaatgtggttggtgtacggcttttcatttattttaaaattttttataattattttctctaactcttatcattcaatat

SEQ ID NO: 205820 - DNA, 122 bp, Homo sapiens
gaaatccctttatacatgttaatagtcttttcccaggagtattgctttatcaatctgaaccgtcttccttttttaccccaaacataatccatggcagagaaggaagctgattctggggtata

SEQ ID NO: 205821 - DNA, 122 bp, Homo sapiens
cgtctccggccgcggggctgcggctccgccaaactttggggcgggcggggcgggctggggcgcccagggggctctgtagaccgagggcggccccctaaccatgatgtttcgcgaccaggtcg

SEQ ID NO: 205822 - DNA, 122 bp, Homo sapiens
cagggagggagctccgtcagacaatggggccggcagcccgcttttatctctggcacaaggcggccggttgaatttccctctcccccgactccaccaccactgggcgcccggggaggccgctg

SEQ ID NO: 205823 - DNA, 122 bp, Homo sapiens
tcaggtattcctgctgccctccaaaagatatactaataaaataaaaacgaaagtctcaatcgcaaaagaagctgtggtttaggtggcaaagcatattaattgttttgtacctttcttctctt

SEQ ID NO: 205824 - DNA, 122 bp, Homo sapiens
tatcaaaattaaaataataatttatttcaatcggccatagttttttccccaacctggtaccgccagagctgggttttatgctggaaggtagcatctcaggctgccagaagagatttccatct

SEQ ID NO: 205825 - DNA, 122 bp, Homo sapiens
atggcatggaaccagaaccgatggcaccgaaccggaacctgacggcacagaaccagaacccgacagctcagaacccaacagcatggaacccgatggcatggaacccaactacagggaactgg

SEQ ID NO: 205826 - DNA, 122 bp, Homo sapiens
cctcctcggtcctggtaaggcacgaaggtggagagtttgagggcgctgctcttggtccggcggctgggagatgactggccaggcatccagcatgtgtcagagtggccaaactcactgcactc

SEQ ID NO: 205827 - DNA, 122 bp, Homo sapiens
aattccaggatctgctccttggtatgtatctctgggttcagccactgacggcaaagttcccgcagttgactcagagcctccctgggcccaggtgtctcctgatagcagaactgcctgaagcg

SEQ ID NO: 205828 - DNA, 122 bp, Homo sapiens
ggagagcgtcccggaggagggcgtccaggaggcatggggctgctgcggacgctggtgcggcgaggggtgagcgttgagaaggcgcaggagactgaccacaatggctggaccagccttaatgt

SEQ ID NO: 205829 - DNA, 122 bp, Homo sapiens
cgagcctaggttgggtttccagggctgggggctcggcggcggctcctgggcgccccctggcggccccgactcaaccgccacggctcccacaatgctcgcgtagccgggcttcggttcctgtg

SEQ ID NO: 205830 - DNA, 122 bp, Homo sapiens
cgggaagtcacgtggccggctgctgcctctttgtggctcccgcgagagtccgccttccgccgcagttgcgacccggcagcttgcggttagccgttctttccgcccagttctttacttccaat

SEQ ID NO: 205831 - DNA, 122 bp, Homo sapiens
cacccccggatgtcgttagcgggtaaggagactcccagctgcggccacacaggacttctccggttccaccctggtcctggcccccgcaccgcctcccgtctgcacccaccaccctcaccgag

SEQ ID NO: 205832 - DNA, 122 bp, Homo sapiens
ttattgaggttactcccatcaattccacggagggaacagtagttattatagaagcatttgcgctttatctaaagattaaaaatagaatctgcttttatttcccaaagtctgtctctgaggtt

SEQ ID NO: 205833 - DNA, 122 bp, Homo sapiens
actgtttttatgagctgtaacactcaccgcgaagatctgcagcttcactcctgaagccagcgagaccacaagcccactgggaggagcgaacaactccagacgcgccgccttaagagctgtaa

SEQ ID NO: 205834 - DNA, 122 bp, Homo sapiens
gcccccgccaccctgtttcataactctggcggtgttgcatttttttttcttttaatctcccgggtagatgggtgtggggttcctgtgttggggagagggcagggcaccttggccaccttcca

SEQ ID NO: 205835 - DNA, 122 bp, Homo sapiens
aggacagtaggaaacggaggcactgggaggtggcagaacttggccaaggttgcagttcggcggcggaggaacacaggctgtaccccagccctgctcatgcagttctcaaaggtgtcaagtta

SEQ ID NO: 205836 - DNA, 122 bp, Homo sapiens
ccaaggtaacacagctagctagttgggcaacttggctccgtaactctctcccttattacacgaaacctcaggaaagagtatggaacatttcataaattggcccaaaagtgaatgatgtgggt

SEQ ID NO: 205837 - DNA, 122 bp, Homo sapiens
gtggggagcagagcggggatcggggtttgctccgggggccggcgggcgattggggccaggcggggaaaaggggggatgggggccgccctccgggggggtcggggccgccgccgccgtcgtcg

SEQ ID NO: 205838 - DNA, 122 bp, Homo sapiens
ggggcaggagcggccccgaagtgtgtggaggaggccgcaacggccggggtgtcagggatccggcggtgagtggctgcactggccgccacgtggccgggaggagaaatgcaaacaaggaaacc

SEQ ID NO: 205839 - DNA, 122 bp, Homo sapiens
tgtgcatgtgaaacagaagatagggagttaagtcaaccaacaggttcagtaagagccccacgtgggaagcagctggtgaaacagctaatgaaacctcagagctatattagtagacagagagt

SEQ ID NO: 205840 - DNA, 122 bp, Homo sapiens
acaggtcatcggcccgcggggcgggagtagggagccgcgcgggcatggggagggcgaggtcgcagaggcctgcgccctgtaactctttccggccccttgcagctcctcccttctcccagaga

SEQ ID NO: 205841 - DNA, 122 bp, Homo sapiens
ccaggggtcaatgaggcgggatagagggaagcatcgtgaaatctgggagccccaggccagcgaaaaatgtggaagggccgtacccgcactctcctagcactgggtgtgaggcagcgtcgttt

SEQ ID NO: 205842 - DNA, 122 bp, Homo sapiens
cactggctagggccgaggaggcaagcactcaagctgccacagaggcgaagcttcctagagcggcccggaagtgcccggctgaagcggccgggcgccgattggtgtctttgagtctagtcttt

SEQ ID NO: 205843 - DNA, 122 bp, Homo sapiens
aatttacatctttaaaggaaatcatcatttgtaaatgcacctctgtctctgcacctaaaccgctaggaagtttaactacagggaagacagtgtcttaaagttaacataacaaaccttgcttg

SEQ ID NO: 205844 - DNA, 122 bp, Homo sapiens
agtacccccacaaccccacataacccacaactgattgcttagttcctatgtatatgtatgcgtgtgtgggtaatcacagtatcttgtccaaaagtcaagacacttatcggaagatgtgcact

SEQ ID NO: 205845 - DNA, 122 bp, Homo sapiens
ggcaagggctcactggcttcttgtgacctgcgagaagatctggccacgtccaggtcactccggtagcagcgtctgccctcagatgcaaggaaatcgtccagccacgccctgatttgctgagc

SEQ ID NO: 205846 - DNA, 122 bp, Homo sapiens
agcacagctctgagcacacaccttcgtccgcatttcagggacaaaagtcgtccaaggaatcgctctccacggaggccacatctttctccgtcaggcccttggtgtgctggcagagcagggtt

SEQ ID NO: 205847 - DNA, 122 bp, Homo sapiens
tttcaaatgaaaggatttaaaatgaatttaaatatttgcctttctaaccctatacgtcaacgctgtaacaagctaagactgtttctcagtgttagcagccttggccataacaggcccgaggc

SEQ ID NO: 205848 - DNA, 122 bp, Homo sapiens
gccttcataccgggtgtgctcccctctgaagacacagaacttcccaaatgggatgtgaaccgtgttaagacaggggacagcaaactattctgtaaagggctaaatattttaggttttgcggg

SEQ ID NO: 205849 - DNA, 122 bp, Homo sapiens
cggcttccgagtccccggccccgcgcgggtaaaggggcaccgaaggcaccttgcagaccgcgccctgcactccctgaccctcggccttgcgcggggcccattccagtcaccgccaccggggg

SEQ ID NO: 205850 - DNA, 122 bp, Homo sapiens
ggcctccagctgcatgtgtggctgcaggggacgtgctctcctccattttcccggctgcatcgagttcatggtctgtctgcacacgtgaggccacctgccaggccacatcccagcacaggcgt

SEQ ID NO: 205851 - DNA, 122 bp, Homo sapiens
cctcaaagagtcattgtgagaataaaatgaaatactgtgcataaagcacagtgcagcatccggctcatacatttgggataagcactggccatcattatgaatgccgtctgatgcaatgctag

SEQ ID NO: 205852 - DNA, 122 bp, Homo sapiens
ccaaggcgcggaggtgactcaatgacattgaccggcctggatgcacgtgggttgctgagccgatgctgggaaggtacggggtttgcccggtgcaggccgccggaactcacgcacgcccctgt

SEQ ID NO: 205853 - DNA, 122 bp, Homo sapiens
tgccctggtttaattatgctgactgtgggagctcgcttcctgagacagcgccctaattaccggtgccaaggtggagaaaggagggtggtagacagaggtggacaccaagaaagggaggaaac

SEQ ID NO: 205854 - DNA, 122 bp, Homo sapiens
ggagggattgcttcacactccggaattgggcccagacacatttagaaatgttttgctggacgtgtgccccgcaagggcgacagcggcagccggcagcctgggtgaagctgcgccgctggtca

SEQ ID NO: 205855 - DNA, 122 bp, Homo sapiens
ccaggtcctaggacgagctctgcacaccccgtgctttcattgacgggtggtcaggcccagcgtcctcgctttccatgactagtcctgcttttcggggtggagagcaggggccttcccggagc

SEQ ID NO: 205856 - DNA, 122 bp, Homo sapiens
ctcggtggactgtctgcagccagacctccgggcctggcggctggcgcgggaggcagaaggcggggctttcctacagggctccgtgccccgccctccccgcgccgccttccacctccggccgc

SEQ ID NO: 205857 - DNA, 122 bp, Homo sapiens
aggcgataagtgggtttattacctggattgtagggatggggacggcttcacaggtgagtgcgtttattacctgattgtagggaggggtacggcttcacaggtgagtgtgtttactacctgga

SEQ ID NO: 205858 - DNA, 122 bp, Homo sapiens
cacatttcccactgtcaatattcctgctacttttaagtcccatatcctgctcttttcttccgtcagtttcccccagaagctccaagaccccaccaggaatccccatccaagtttactttccc

SEQ ID NO: 205859 - DNA, 122 bp, Homo sapiens
ccctttgtggcttcccacttacattgaaattcactcaagtcaggaagaattttcagataccggacagcaaaaatgacaaacttctactatcgtactattatttcctgcattttgtggatgat

SEQ ID NO: 205860 - DNA, 122 bp, Homo sapiens
tgtaggggaactattgcaagaggtgtccggggacagcaaggatgacgcgggcatcagggccgtgtgccagcgcatgtacaacactctgcgtctgtatgtgccagggagtaggggttgatggg

SEQ ID NO: 205861 - DNA, 122 bp, Homo sapiens
agtgggttgctgctcctggctcagctggccagcttttactcccttatttggccccacccacgtcctgttgattggcccatcatgcatttacaaacctttagctagacacagagcgctgattg

SEQ ID NO: 205862 - DNA, 122 bp, Homo sapiens
gacagagcaggagtttatcccagatgctggactgtgggtttacgctctgacccttctatacgccaccgttccctctgctccaagtccttgcagtctgtccttttccagcacttgtcatggag

SEQ ID NO: 205863 - DNA, 122 bp, Homo sapiens
ccccaagaaggcagagctaggggtgaaggctggctccccttccgggaggcccgcaggcagcggtcgcttgtccaggcaggaggatgttctcactgactcggaggaaacagcgtgtcccacat

SEQ ID NO: 205864 - DNA, 122 bp, Homo sapiens
tgtttcgtttcgttttgtttctaatgtggacgatcatttaaaatgcctctggtggccgggcgcggtgactgacgcctgtaatcacagcactttgggaggccgaggcgggcggatcacctgag

SEQ ID NO: 205865 - DNA, 122 bp, Homo sapiens
tttgaacacagtaggagcacactggaaggccattgacagcggaaggacatggagtttggccgggctccagggaaaaaccatctctcttttggctcccccatctgatgagagctacttccact

SEQ ID NO: 205866 - DNA, 122 bp, Homo sapiens
ctacccgccccggcctcctggctcggtcttcccgggacacatcgcccttcccaacacacgcggtcaccgcgatccacagaccccgtcccccgcccgccacgtgattccttctccagcctctc

SEQ ID NO: 205867 - DNA, 122 bp, Homo sapiens
atccattctcttggcttctgtagtccagggtcctgcatgtattgggtgccagcaaatatccgaggagcccatgattgtgtaaatcgagtccagtgtggtgtgcttcgcacagcaacgcccag

SEQ ID NO: 205868 - DNA, 122 bp, Homo sapiens
tttcattaaggttaaatttctaggaatgagggagtcctagttagaggacccaaaagcccacgaagcctcctcagatctcatagtgaaccacccgctctggttctttggagggatcaccgcct

SEQ ID NO: 205869 - DNA, 122 bp, Homo sapiens
gcatcatcagtgggaaagtaagctctctgaggaccaggtctgactgagagatccccacagcgtaatagataatacattttgtgtctcagcgttgcctatgaaacgccatttattcacttggc

SEQ ID NO: 205870 - DNA, 122 bp, Homo sapiens
tttttttttaaataaagaacctttagggtttcctcagcgtcccagaggagggcctgcttccggcaccccgccttcagggctgcctccgcagagcaccaaactcccgtccccgccattccagg

SEQ ID NO: 205871 - DNA, 122 bp, Homo sapiens
aaagagccttgtttacatcctctagagcctgatgaggtggaatatgagccccggggttcccgactgctggtgcggggtcttggtgagcatgagatggaggaggatgaagaggattatgagtc

SEQ ID NO: 205872 - DNA, 122 bp, Homo sapiens
cgcactgcactgcgcacgcgtcgccggtacgccggggcctaagcggccctggtacccgagcgggtctggggctcttggtccccatcggccagaaaggcagacccgctagcctgccaatttgc

SEQ ID NO: 205873 - DNA, 122 bp, Homo sapiens
gctttggggccatgaaaggcctcatgggacagcctgccaccccctgtctttggtggccagcgctatagcatgcacatgggtgtcccaggagaggcccctccataccagctgggttctgtgag

SEQ ID NO: 205874 - DNA, 122 bp, Homo sapiens
ttcccttacaatttccatctcgtttttcatagtctacttaaacgaatgggcatctaactgcgaaactcatattacccaactcagaaaatacgacttagtaatggtgctttcttaacgacact

SEQ ID NO: 205875 - DNA, 122 bp, Homo sapiens
ggtctgcccgttcggacgctggggctcctccgtgggctcctccgtgggctccgtgggctccgtgggctccgcgggctccagctcccgtccgctcggcctccagcccttataacccggagccc

SEQ ID NO: 205876 - DNA, 122 bp, Homo sapiens
ggtcggtgaggagcagtcacaaggcactggggacatgcccacccaggggtcatagcagggcgcacaaaggatgactcaagtttcagggcagggttggtggatccccaggggtggtagagagg

SEQ ID NO: 205877 - DNA, 122 bp, Homo sapiens
gttttccggtagtgccgccaacccctgtcaggcacagaagacacagcgagaaccgtgagccgttacgaaagcctaaaacactgagctcgcgtcctgccaagcagcaggcgcacaaacctaca

SEQ ID NO: 205878 - DNA, 122 bp, Homo sapiens
gggttcggcgtggggtagagaaaggtgtgacgcgggattcagcgccacgtcgctgggtgacggaaggagtacagaagttgagggttcacgtgctcggcaaaaagcaaagattctattggttc

SEQ ID NO: 205879 - DNA, 122 bp, Homo sapiens
tctgatatgggatgaattgtgtccctctctctttgcaaaaacatttatgtcagtaccatccgagccccggatacgtcagaatgtgactgtttttggagatagggcctttaagggggcaatta

SEQ ID NO: 205880 - DNA, 122 bp, Homo sapiens
ggtggggccgagcgagctggggcggagctccgcctcctgccggtcaggtggttccagggccgccatgttgcggagactctcagagatcctagcccgctgctctccctggtctccgcctccaa

SEQ ID NO: 205881 - DNA, 122 bp, Homo sapiens
ggcttttccctttgaccttaacacttttggggttatctctgaggcgaatgctaaaggagacgctccaggactcgacctctgaaggtccttggagccaattccgtaatatgatcatggaaact

SEQ ID NO: 205882 - DNA, 122 bp, Homo sapiens
ggaattcttggactagttgggggcaaaggcacctgtaacccccacctaaccaaatcagcccgcaggaccctgcaacttgagctccaagcggcgcctccatccctgtcccccgccacccccac

SEQ ID NO: 205883 - DNA, 122 bp, Homo sapiens
gggcccctccctgtagactctgctgccccatttccagtgtcttcgcgcccagccagccggcgctgggccacaccccgccgggggagaccacctggtgtttcatcacctcgagcccttggact

SEQ ID NO: 205884 - DNA, 122 bp, Homo sapiens
cgagccccagcggatttgaatcagaccccgcccccagcgccacgtggaccaccacagcctcgcccactgcagcctggctgccgtgaaatcggggcccagctctccgttctcccactcctgcc

SEQ ID NO: 205885 - DNA, 122 bp, Homo sapiens
aggtgctcttgctgtggttgtgcttctgaatctcctctagggtgtagtacttcacggcctcgtccgactgctctgccatctcggttcgccgcgagccaggcccagcacacacagccccgtcg

SEQ ID NO: 205886 - DNA, 122 bp, Homo sapiens
gccagccctcagcagcggacgcaacgccgattttgcatctagattgctttttgctcctagcggggaaaaaggtgggaaaagagcaagttgtgccatacacccgccgggagagtcttgtcccg

SEQ ID NO: 205887 - DNA, 122 bp, Homo sapiens
gcgcgcggagctggcggcgtcgccgactctcccggcggcagcggaggagcagcgccgccgcgtcctccgatattattaagttatgtttttaaatagtatgaaatagcatggaacaatgtata

SEQ ID NO: 205888 - DNA, 122 bp, Homo sapiens
ctccaacctgtgatgaagctgaagagggactggatgtgggcccgatccttgaagtaggagcggctgaggctgttccatatgacatcggagaccttcttcaccagctcacggctggagacacc

SEQ ID NO: 205889 - DNA, 122 bp, Homo sapiens
ggctcctgaagctgtgccttctgaatgtgacaccttgtcctggcgacatctctggagagacgccacacacatcagtgttaagtggtacacatggtccttttcaccacaaatgtcctgaaatc

SEQ ID NO: 205890 - DNA, 122 bp, Homo sapiens
cttcattttctcttatcttggaatagaaaccagttgaaatataagaaataaagaactctgcgatgttatgggctgccatttagtcctccttgcttgtgaagctcactgcagtgaagacccct

SEQ ID NO: 205891 - DNA, 122 bp, Homo sapiens
gccccctggcgctgcacctggagcccagggcctggggggcggtggggggtgccgggggaacggggagaaccagggcgcctcgctcctggcctgctcgcggggctcgattttggagtctgaag

SEQ ID NO: 205892 - DNA, 122 bp, Homo sapiens
ttcatctcctttgatctgtgttaaattgataaaaatacatgcttactcctgtacaaacatcgaacaatgtaattaaatcatcactacttgaaatacttttacatgaataatttatctcttta

SEQ ID NO: 205893 - DNA, 122 bp, Homo sapiens
ggctccgcccctgtcccgaaagccactgggggctgggacccggcagggccaggtttgggccgcgagggccgaggagcagcgaggtgcaggggctgcgagggccgagccgggcgctgagggtc

SEQ ID NO: 205894 - DNA, 122 bp, Homo sapiens
ttcagccatcgtggaaaccacttggggttccccaaatagttaaacactgaaggctgggcacggtggctcatgcctataatccagcactgtgggaggccaaggcaggcagataacttgagttc

SEQ ID NO: 205895 - DNA, 122 bp, Homo sapiens
ccctcccattgcttttagtagaaaatacaaactcctacccgtggactattggggctatcacgatctgggctctgcatctccatcttctcatgccaatcccatcctctgcctccccaacccca

SEQ ID NO: 205896 - DNA, 122 bp, Homo sapiens
agcgttaggggaagggtggtacaaacccttgtgtgagctgcagcaccggggcaagaacaacgggcagcccaggcgggtcttgggtctgcgagaccactaggcgttctgccggcagtcagaac

SEQ ID NO: 205897 - DNA, 122 bp, Homo sapiens
aagcacatggctagctttggataaaattgcaatgtaatcatccgattattttaaagataccgtaaacttttaagctagtgtatgatgagtgcctactccattccaggcatttcccatgcatt

SEQ ID NO: 205898 - DNA, 122 bp, Homo sapiens
gccacattgccctgtgactgcccctcgtcccctcactgcacaccagatttccacggaaaccgagaccttcctctgggttgccccatgtgggtagtgtgagtctctctctgccctggctgtgc

SEQ ID NO: 205899 - DNA, 122 bp, Homo sapiens
ccggcgcccgcgcaggaccgcagaggggctgggggtccagggcgcagtctagttccagggcgcccgcgcagccgcgggtccttccctctgggaaggagctggcggaggctagggagggggcg

SEQ ID NO: 205900 - DNA, 122 bp, Homo sapiens
tctgatctccccgtcccgcccccaatcaccccgccccgccccgattgctggccccgtggacgccctaccccgcctctgatcctgcaggcccgcccagtcctcgatcgccccgccccggtcgc

SEQ ID NO: 205901 - DNA, 122 bp, Homo sapiens
ccgcccacttcggcctcccaaagtgctgggattacaggcgtgagccaccacgcctggccacgagaggcagtattttcagtgctatatattacaatgactggtactatcttttatttatgttg

SEQ ID NO: 205902 - DNA, 122 bp, Homo sapiens
ggccttgtcattgctgtcaactgtcagcagccagagctgccctgcctgggcctgagcgctcgcagaggtggggagcagagccaggaggtgcgatttctgagccaggtcgctctgggggattg

SEQ ID NO: 205903 - DNA, 122 bp, Homo sapiens
actgagttactcttgctctgcccctctagatcccacaacaaaatgaatggtaggttggctcgcgaccggcgtgtgggcccttaactagcgggggagagacgcagggagcggcaggggctcac

SEQ ID NO: 205904 - DNA, 122 bp, Homo sapiens
atggataaagaaactgtggtacagccatacaatggaatagaactcagcaaccagaagaaacgaactactgttacatgcaacaacaagaatggaccacaaacacattatgctaagtcaaagaa

SEQ ID NO: 205905 - DNA, 122 bp, Homo sapiens
ccggctccggatctcagacccgccggaggccgggagggaggagcagagcgaggaggacgccgcggaccgcgcgctgaaatgcagccggttccatttagaaatttctgttgggggcaggggca

SEQ ID NO: 205906 - DNA, 122 bp, Homo sapiens
tgtggggattcatttcccttcctgcaaacaggatgggtaagtggcaggcatttgtttttccggattctctcgttgccttgcgaatttgtttccgtccgaggcagccatgcctcattgcatag

SEQ ID NO: 205907 - DNA, 122 bp, Homo sapiens
gggtcgccagatcaagatctgccagtgccactacctctgcttatctccaggggcaatcatcggctgtctcagcttcctacctttccacccactgtcactgggggtcgggttcattttggggt

SEQ ID NO: 205908 - DNA, 122 bp, Homo sapiens
aagatctgtgaaaataatatcagggttttccgtcagaacgagctttgccctgcactcaggcgtggcgtgatctgacccgacacctccaaccatctgtgctatctatctgccttctgatttac

SEQ ID NO: 205909 - DNA, 122 bp, Homo sapiens
cggagcggctgggcggcgggccgggcccggggccgcttggaatggcgcctcctccgccttcgccccaactgcttctcctggcagccctcgcgaggctcctgggtcccagcgaggtaaggtga

SEQ ID NO: 205910 - DNA, 122 bp, Homo sapiens
ttctccctgcttgtacgttaaaatcataggtggaaatagaagaatccctaaaagagaactcgaggtgtgtgggctgaagatctataacagcttgacccattaatcagaaataggtgcatgta

SEQ ID NO: 205911 - DNA, 122 bp, Homo sapiens
ctgcccgcaccctggcctccaaggatactcctgtgagtcagagggcttgggattctcccacggattggacagatattttgacagtgcccccactgtgcatgctggggcacaaaagtacagaa

SEQ ID NO: 205912 - DNA, 122 bp, Homo sapiens
gcttacaaggtccaggccggcgtccgggtgcactacaggccccccgtccctccttccccacgccagcccctcgctccggattggtccttcaggaaacgctgtggggcgtctcggtccccgct

SEQ ID NO: 205913 - DNA, 122 bp, Homo sapiens
tcaccgcagcccctgcgggagagcggcgcaggcagaagcaagtgataggccgaacgggcgcgctccgaggttacttgccaggttcaggcaggagcactcgatagccgagccaaaagggcagg

SEQ ID NO: 205914 - DNA, 122 bp, Homo sapiens
cagaatttacgcacccttggcttccttggagcctagcggctctccccgcgtccaagatggcggcagaagcagctggtgggaaatacagaagcacagtcagcaaaagcaaagacccctcgggg

SEQ ID NO: 205915 - DNA, 122 bp, Homo sapiens
tggggcaaaaacggtgagggtgtggctgtttgtatcttctggctggtgtttgggtatagccgacaggatttaggtcagaggaagttccccagacagttcagcctcaaccagtcatctggggt

SEQ ID NO: 205916 - DNA, 122 bp, Homo sapiens
aatgaaggaagtgggttctgtcccgtagggttgaggagccgagatgcggggaccaagggacgtcagcgcgttggttctggccgcgggaaaacgggcggtcgctgtgaccgtctctgcgctct

SEQ ID NO: 205917 - DNA, 122 bp, Homo sapiens
tattggaaatcgcctcagagagcattgctgagtgtggcttcttgcaactacacctgagaacgacattcactctgcttcattgaaaacaatctatcccgtgtgtggaagaagcatgccttgct

SEQ ID NO: 205918 - DNA, 122 bp, Homo sapiens
tatccacttccggcttggagggcatgccctcccgtcaccagcatgcactttcgacaaaaccgtggaatctagtattttcctctgacacctttatattttcttcacttccctataattctgac

SEQ ID NO: 205919 - DNA, 122 bp, Homo sapiens
ggtgtacagcgtggccccagcaggcacctgtgctgatgggaaaacacacagacaggccaacgaatacacgtacgcgcacgcacgtacagactccactcagaggcaacttctgggcaaggccc

SEQ ID NO: 205920 - DNA, 122 bp, Homo sapiens
ccctcggctggcaggtgtgggcacagaggcagctgggattggtcgcagctggcggaggcgcgtcccaggctccggcagaccgctggaacagctgagcagagcaggtggactgctgagataga

SEQ ID NO: 205921 - DNA, 122 bp, Homo sapiens
gcggggctctgcagtggagcctgagccgtgccggccgaggcgtggtgtgggggaggctgccggccctctcgcgcgcggggtgttcacgcctagagcgctggggctgggggcctaccacccgg

SEQ ID NO: 205922 - DNA, 122 bp, Homo sapiens
ttttttttttggtttccggttctgtcacctccaggctgagccgggctggcggaagaggcacgtgcgctgctgaatggagctggtcgctggttgctacgagcaggtcctctttgggttcgctg

SEQ ID NO: 205923 - DNA, 122 bp, Homo sapiens
acataataacaggtcatgttataatgaggttttgctgcacatgcttgctctcaatttagacggcaggacctgccaggtcttcctccagctgctggcttcagacctctctttccagaaggata

SEQ ID NO: 205924 - DNA, 122 bp, Homo sapiens
cctagtaaaaagcctggtacacacatagttgataccccttatgctgccgagtgaataaatcgaaacttgaaaccattacaaatctagttcctctgtggtatgcgcttttagtgtcctggagg

SEQ ID NO: 205925 - DNA, 122 bp, Homo sapiens
ttggagttgcagcggcgtctccctcatttccataagggggagcctgtgcgcaggagatcccgtcccagcccgcgcagcctcgccatcctgggacccgctccgtcaggagtggccattcgggt

SEQ ID NO: 205926 - DNA, 122 bp, Homo sapiens
ggtctgcctgccctgtgacgagtccaagtgcgaggagcccaggaactgcccggggagcatcgtgcagggcgtctgcggctgctgctacacgtgcgccagccagaggaacgagagctgcggcg

SEQ ID NO: 205927 - DNA, 122 bp, Homo sapiens
agggagggggagtggaggaagaaccctgattgttagtgtttgcccattctatggtgtaaacgcttccactatagccaatttcaaactaccaatgggatgttactgaacggaactgggatgcg

SEQ ID NO: 205928 - DNA, 122 bp, Homo sapiens
agcgccgcgacccctgcggctccggagagatggggccactgggaagccaagcccttgtggcgtcggaggaggcgttttccgggttcgagttgggaattactcacagtccggaaatggcaatt

SEQ ID NO: 205929 - DNA, 122 bp, Homo sapiens
agaccctggagaggtcttccaggcttgggctcagcacgcgagcacagggagcgggggtgccggcggcggaggcgcgtacggcccgagcagcccccagcccccagcgcgcacacttgggccag

SEQ ID NO: 205930 - DNA, 122 bp, Homo sapiens
caaaaataaagaatttgggttctgtccaaacactggcagcagagggagtgaccgccaccacggcaccagggcacaccaacaacacagacagaagcggcaatgcatctcacgtgccgcgtggg

SEQ ID NO: 205931 - DNA, 122 bp, Homo sapiens
cctacctttggtataagtcagatgttaaactcaattacctacgaaggccaggcagaacagcgttcttctgactttgtttgcatattaagttcatggaacattctctactttcacaaagaaac

SEQ ID NO: 205932 - DNA, 122 bp, Homo sapiens
gctttctgcgaagtcggggagggtgcgggcgttgagaggctgcagcagagggcgctgggtcgccagcctgggccgcgtctcccattggtcggggctggggcgctgggctggagagttggtgg

SEQ ID NO: 205933 - DNA, 122 bp, Homo sapiens
tggaagtacttcgctatttcagcataaggagattgaccctagctaaaggcaattaggagtcgctccctggaggagacagcatccgcccttcattttgaaggctatataggatttggacaatg

SEQ ID NO: 205934 - DNA, 122 bp, Homo sapiens
tccctctagagaaccctgactaatacactcggcaaacaacattactaggcacacaaaaaacgccaaatgccttggtcctgaaaataaaaatggtagaatcgattgtgtgtccagattaggaa

SEQ ID NO: 205935 - DNA, 122 bp, Homo sapiens
ctgtctgagctgtggagtcagacacacatagccaggtgctgcttcacctgtaagcctcttcgtttcatctgtaaaatgggggcattccaccccttctcagaggcaggtggcaagggccgggt

SEQ ID NO: 205936 - DNA, 122 bp, Homo sapiens
tatcagtgtgttggattttttctttatttgtaagagctctttatgtataaggctgttggccgaatctagtggctcagcctgtaatcccaaaactttaggactcagaggcaaggcaggaggat

SEQ ID NO: 205937 - DNA, 122 bp, Homo sapiens
atctgaggccggcgcctgtggcaagacgtagcaatgagccaccaggtccctaaggtactacgttgcatttctcaatctgactttgtttagtttggggaaaacattttttcggtcctgaaaaa

SEQ ID NO: 205938 - DNA, 122 bp, Homo sapiens
cgcgcacacgcagtcaggtgtggatgtacacccgcgcacacccaggcacatgtacacccgcgcgctcacacaccccatccagctacagcagaattctggccaggctgttgaccgcacacctg

SEQ ID NO: 205939 - DNA, 122 bp, Homo sapiens
ctgcctagtggaaatgagccacccccactgcagcccccacctttgtgtcctagagctcagcgtctgcagtcaagtctcttgtattcggtgtccattcagtatcagtattgctgtgatatttt

SEQ ID NO: 205940 - DNA, 122 bp, Homo sapiens
ctaaagttatccaatgaaaggtagcagaggaaggatgctacaggagctcagaaaaggcaacgaaggccagagtctgcagggatttcctggaggacgtggagcttgtccctgcgtctttaaca

SEQ ID NO: 205941 - DNA, 122 bp, Homo sapiens
agaccttgtgtcagaaaaacacccctgacttccttactaatgaaagacagttttcaactccggggccatttacaatgttagatataaactctattcaactgtaaagattttatacagtaata

SEQ ID NO: 205942 - DNA, 122 bp, Homo sapiens
gtgcatggtaaccaaaacagcatggtcctagcataaaactagacacatagatcaatgggacggatgacagagcccagaaagacagccacatagtcttggggcttgtgtctctcctgctgtgc

SEQ ID NO: 205943 - DNA, 122 bp, Homo sapiens
gcgagcaagggtctggggtgtctggcgatactgggtggagggaagggggttctctgtggccggcatcaggtgctccagggcagggcttggagatagccaggcccagccaagggtctcaaacg

SEQ ID NO: 205944 - DNA, 122 bp, Homo sapiens
gaagatgcaggcgttggggctgctcggcgatgatgacatcatcgtgtcacacacaggagccggctgccggggggtttaagagaagagcctttcggaccacaccggcgctcacgctcataccc

SEQ ID NO: 205945 - DNA, 122 bp, Homo sapiens
ggttcatctagtaaatcaaccacccttccaaggccgcgacctaccaggacttccctcttgcgcagagcacgacgtggtgaagcttcagacagtgaacttgccgatgctgacaaagcatctgt

SEQ ID NO: 205946 - DNA, 122 bp, Homo sapiens
cccctttctgtatacgcccaaccacacaaggaagtgtattattgttatcccagttttaggcgcagaaaagttaggggaacgtgacagagaaatcctggctccacatttactagtaggacttt

SEQ ID NO: 205947 - DNA, 122 bp, Homo sapiens
ggaaataggccccaaggctgcactggggggataagccaggctattttcatcacttccttccgcccgctcccgcagcggccacctcagctgtatcccatagagttgccacccaggcctcagcc

SEQ ID NO: 205948 - DNA, 122 bp, Homo sapiens
gaagcgcccatcgcattgaagaccacgtgtgccttgctggggtcccattcagacaagtcccgggtcgttcgctcatcgccctccacgcgaccagggggcgcccgcggtatcggcccggctag

SEQ ID NO: 205949 - DNA, 122 bp, Homo sapiens
gacgcagggacggaggagggatcagatctcttcagtgacgggcatgacccgttttacgaccgatccccttggttcattttagtgggaaggttggtgaggttattgtgagaaaggcgaaaagg

SEQ ID NO: 205950 - DNA, 122 bp, Homo sapiens
ctatttcttgtgcttcccctagacatcagcatggctccctctctcacttccaccaggtcccgttcaaatgttatcttaactgggaggtcttccctgatgaccttatattaaatggcacccac

SEQ ID NO: 205951 - DNA, 122 bp, Homo sapiens
atccacaggacatctctctctgaacaagcaccacaggctcgatggttctgtgcagagcctcgcctgggatggagcactgcttctgtcccggctctgccccctgctagctgttattagtgcaa

SEQ ID NO: 205952 - DNA, 122 bp, Homo sapiens
tcacagttacggaaagagaggcccaggaagttaatttggccgaggtatcacatctggttccgcgggttctggccctagacttgagccttttgactcataatctaatcatcagctgctataca

SEQ ID NO: 205953 - DNA, 122 bp, Homo sapiens
ggactgcgaggccgggagcttggtgggcggggcctgtttggggcggggcctggaggtgggcgggttttcttgagggccgggcccccagtcggagccggcttcaggaaagcaggtccgagagg

SEQ ID NO: 205954 - DNA, 122 bp, Homo sapiens
aaaaatatatcacaaaatttaaaatacagaaaccagctttttacacagaaaattacaacccgcaagtgccacaccgagaggcggctgcagccagtctgagccctggggacgcatgtgctgtg

SEQ ID NO: 205955 - DNA, 122 bp, Homo sapiens
catgggcaatgccacacggctccagggaagcgttcagctttccaaaccagtgtctgggctcgtggccactcctgaaattcagttgccgtctttgaagcttcgaagaaagtttctaggatttt

SEQ ID NO: 205956 - DNA, 122 bp, Homo sapiens
gccgagcaggaggactggggctgcacatcctcccggctcccccagggcggagaggggggccgttctggaagaaaaaattgtttatgcgcaacctccgagggttccgaggagttaggcagtaa

SEQ ID NO: 205957 - DNA, 122 bp, Homo sapiens
ccttcctgatggaatcctaggttttcagcagcttccggaggccgcctggactgcagaaggcgccctgggcgtgtgtacttccacctccgcaggcgctggcatctccaggctgcttcaggccg

SEQ ID NO: 205958 - DNA, 122 bp, Homo sapiens
tcaccctcccctttccgcaagttagggggcggggcatcgggtttctggctcgtgatttgccggagctcctgcgctccccttctccaccccctccggctgtgtgagaggtcagcagaggggcg

SEQ ID NO: 205959 - DNA, 122 bp, Homo sapiens
aaaaatatgtactttcaccacatcaacagtagaattgtctaagcaggcgagtactgaatccggacttcttctaagggcagacaccggaatgttgatgcggctgcagctgcgctctcccacct

SEQ ID NO: 205960 - DNA, 122 bp, Homo sapiens
gctgatggtggtggtaaggcccggctgcgtagccctggtggtagaaggcgaactccttagcgcgggagctgaactcctcggcagctgggccggcggtatccatgtacttgtccgcgaaggcg

SEQ ID NO: 205961 - DNA, 122 bp, Homo sapiens
gaagcaagacatcggggacattctgcagcagataatgaccatcaccgaccagagcctggacgaggcccaggccaagaaacacgccctaaactgccaccgaatgaagcctgctctctttagcg

SEQ ID NO: 205962 - DNA, 122 bp, Homo sapiens
gcactggccactctagcccccgatctaggcctggactctccagctcctgcaaccccaccccgggctcagttgctgctggtggtgcctccagctctcagaccccatgggcttctcccagcctg

SEQ ID NO: 205963 - DNA, 122 bp, Homo sapiens
ccccgctactgcgcagccgcactgaactctggtcccacttagcgggagaaactcgggccacgtgactgtctgaccacgtgagccgcgtcgccgcgacctcttccgctccctaggccctggga

SEQ ID NO: 205964 - DNA, 122 bp, Homo sapiens
tgcttctgaacaggcctggggcagtccatttctattgggaaaccctatcaaagttagccccgggtttcagccaagttcacctcactgctcacagacattcattattaacagactgtttgata

SEQ ID NO: 205965 - DNA, 122 bp, Homo sapiens
taattttgagcgtctcagcttcctgcttctttacttacattctctcaggatccggggagccgagctcggtctcagtctccctgctgtcaggtgccaggttgtgtctggtggctctccttcgt

SEQ ID NO: 205966 - DNA, 122 bp, Homo sapiens
cgtacacgccaacactctccatctgtaggaggggggaaaagagttgcactgtgaaaatgtcgatttgtttccatgttgctcttaagtcgcgtactcgtgctggttgacggtttgtaagaggc

SEQ ID NO: 205967 - DNA, 122 bp, Homo sapiens
agtcggaccgtcctgcgcgccgcctaagtccaggcttgcccgtctgctgccaggcaacaacgcccctagtctctccgttcgggaagacgcgtggccctgcctgccacccaccggaagtgagg

SEQ ID NO: 205968 - DNA, 122 bp, Homo sapiens
ctcaaaagcacaagatccttgcatgcacaccttcctccaccctccaccctgggctgctaccgcttctatttaaggatgtagagagtaatccatagggaccatggtgtcctggctggttcctt

SEQ ID NO: 205969 - DNA, 122 bp, Homo sapiens
tgaaccacaacttggtccagttctttagtcctctagtctcctggtgagactccacagctccgctaacacgaccgggccttcgtgggcctgacaacagacctgacatcccacgggcgggagag

SEQ ID NO: 205970 - DNA, 122 bp, Homo sapiens
gtagtcccggtgagtccagaattcgtgggttcttggtctcaccgactcaaagaatgaagccgaggaccttcacggtgagtgttacagttcttaaaggcggcgtgtcgggagttttttccttc

SEQ ID NO: 205971 - DNA, 122 bp, Homo sapiens
aggaaggaaggaaagaaagaaagaaagaaagaaaaaaagaaagaaagaaagaaaaacatgcgtgcagagagaaataggaagtggaatacaggaacaagggagagagacaaatagatgatcat

SEQ ID NO: 205972 - DNA, 122 bp, Homo sapiens
tcttttcctctgtttttcttttctttcaacacaaaagttgggttgtgaattttccgaggtcgccgccgcctcgcccccaccccccgcctctgatctgcctaactataattaaagtgcgtttt

SEQ ID NO: 205973 - DNA, 122 bp, Homo sapiens
ttcaccccacgcatacactcgcacgctcctgcgggaattcaccccacgcatacactcgcacgctcttgcgggaattcaccctacgcatacactcgcacaggtatacagtggttcatgtctga

SEQ ID NO: 205974 - DNA, 122 bp, Homo sapiens
ggatgcaacgagcctgggtccctccgagctgagtagggcccggagtggcccagaagcgctcgactccgaacgcaaaaaatgcctcccgcaaacttttcccgtgggcgccggagggcctggag

SEQ ID NO: 205975 - DNA, 122 bp, Homo sapiens
ttgcctgcctagctctgcctgattgggattacacattgtgtagtgccaacatcacacgttcggcatctactgtgtgtgcacggcactgcactaagggttttacacccattctccatttaatc

SEQ ID NO: 205976 - DNA, 122 bp, Homo sapiens
gaagttcaccatttatgaggcctagctacagcaagagggaaatggggcaccatgacctagcgtctcctgtcatgccaaaataagtacagtcccactgacacccaggcacgattgagaacaga

SEQ ID NO: 205977 - DNA, 122 bp, Homo sapiens
gcacagtggagaaacctcatataaggaatgagtttcactttggctgggcatggaggctcacgagttgtgtaatcccaacactttgggcagctaatgaagtaccatcacccgaaatcaagagt

SEQ ID NO: 205978 - DNA, 122 bp, Homo sapiens
tttggcatcgtgcctgatgattgtctctcctttttccacagctgctcccaggtgcttagccgggcctaatcctctctcttggaatcccttggtcaagacccgctggtttggagtcagcggag

SEQ ID NO: 205979 - DNA, 122 bp, Homo sapiens
caagtcccagcggcgagtacagggagtgaggtcagtgctgcgctgacgacatgggtggagcgacctctctgctccaacaggacaatgtggaacccattatcatttccagcaggagggaaaac

SEQ ID NO: 205980 - DNA, 122 bp, Homo sapiens
cctccctccctgggaggggcgagggggctagcggcgaccgctggggcgagcgcgcctgcgcgctgggtgattttttcacgtgtcgccagggccggactgcgagtctctttgcggcgctacac

SEQ ID NO: 205981 - DNA, 122 bp, Homo sapiens
tgctgatccaaccacatcctccacccggaccaccaccacgcaaaagcagacttcctatctcgttggctccagcaaaccaaccacaggcttgagtgagccagaggccaggagaatctgctcct

SEQ ID NO: 205982 - DNA, 122 bp, Homo sapiens
ccaatccatatgtacatagcttgctccctcacctatctctggtagttaccccaatgtcaccgtctcagtgagggcttccctcaccctaccagatggcctaattccttccagtgtttcctttt

SEQ ID NO: 205983 - DNA, 122 bp, Homo sapiens
cccgcacggtcgccgtcggcctgcgctgctcggagcttccggagcacccaggctgagccgcgcccgccgcaaccacctagaagaagcccagcctggccctggcacacggtgaaccttaatcg

SEQ ID NO: 205984 - DNA, 122 bp, Homo sapiens
cgagcctggcctggctctggcccggtcctaagctggactcctcctacacaatttatttgacgttttattttggttttccccaccccctcaatctgtcggggagcccctgcccttcacctagc

SEQ ID NO: 205985 - DNA, 122 bp, Homo sapiens
gacagagcaagacgacgtctcaaaaaaaataaataagaaataaaaatggaaaacattagccgggggtggtggcaagcgctcaatagttccaactaccccagaggctgaagtatgaagattgc

SEQ ID NO: 205986 - DNA, 122 bp, Homo sapiens
ccgcggctccattgagaaactgagcgtctcattcacaagctggcggcgaggagggcccggcggagcgaggacgcagtccgggagggggagacagagaggagcccgggcgggggaggggaccg

SEQ ID NO: 205987 - DNA, 122 bp, Homo sapiens
ggaggcgagcccatttcaaggtgcgttgaagtgtggcgagcacagagccgcagaatcatgcgcattgccggggagaaggtggtatagcgtctctgcccgcttctctctcggctcacactgcg

SEQ ID NO: 205988 - DNA, 122 bp, Homo sapiens
gggccggcggagcagacggttggcagagtcgcgcctccgtacctgcactgtgaggggctccgcgcccagctccgaccccaccgacgaccgacgcccaagaccctgcggggccggccccgccc

SEQ ID NO: 205989 - DNA, 122 bp, Homo sapiens
gaacaccagctgagggcctagcactgcggggagccggccaaggccacactggagtcctcccgctcccaggccagcgggatggggtggtgggaagatggcagcaagcaagcttcagaagagac

SEQ ID NO: 205990 - DNA, 122 bp, Homo sapiens
gtgagaggagcaactttaagagctgctagagactgagttgaaacgtttacgccagaaagacgtttggctaaggagctatggagccgggaaagggaagagctcagcggacaaggcaagtgctg

SEQ ID NO: 205991 - DNA, 122 bp, Homo sapiens
gggagcaggggacgcacccccacggacaggggcttttctggttgccaaacgtgcagacgacgggcctgacatccccatttcccaggaactctgtggatgggtgtcctggggctgccgtaaga

SEQ ID NO: 205992 - DNA, 122 bp, Homo sapiens
agagctctctccaagtcacattctgaggctccggccccggaactctgggctagacgaccccgccccggaaccttgtgttaccggcactaaatgcagaagttcctctggttgccaccggacgc

SEQ ID NO: 205993 - DNA, 122 bp, Homo sapiens
actgtgcaaaagttttttagtttgatgtaatcctattcatatacttttgcttttgttatccgtgatctggggttcatatatagcaaagtcacagactcttaagagtatatcccatgaacttc

SEQ ID NO: 205994 - DNA, 122 bp, Homo sapiens
atatagtggtcaggagggtaggtgggaactagcaaagaacccacttctgagttgctaatgcgacagatggagaatcaagagaagagtgggcctggaagccaagtgaatagagcattccagaa

SEQ ID NO: 205995 - DNA, 122 bp, Homo sapiens
agcagcaggtgcaggcctgtgcccccacgggcgcctgaccggggcctctgtgctgcagagcgcaatttaatccggattcagtccaggccgagtgctgacaaacctgcctcccccgggggttg

SEQ ID NO: 205996 - DNA, 122 bp, Homo sapiens
gggtgggcaagtagtgtttcgtggcttaacgtaaggggcaaaagggttgtgggggctttacgcagctggtaacccagaggaggcaaatggcaccatcaccgccattcccttccaggcagtcg

SEQ ID NO: 205997 - DNA, 122 bp, Homo sapiens
ccttctgcgagcccattcggcggtcatcttggtgccacccagctttaatcatctcgctctcgggcttaacaatcccattcttgtctttgcacagggaagcttgactcagcctggccctcctg

SEQ ID NO: 205998 - DNA, 122 bp, Homo sapiens
cacagctctttgctgctaaatttacccgccacgggagtcattatgacccttacggtcccccgagaggaggaatggagacttttctgaactgagccgggccaagagataagaccagctctggc

SEQ ID NO: 205999 - DNA, 122 bp, Homo sapiens
atcctgcagtagcggggttggggtgggagtgagagagtgaggacgctgggctgggggaaacgggaagccgctgcaagtccaccgcctcagctacccagattgggatctgcccaggcccgctt

SEQ ID NO: 206000 - DNA, 122 bp, Homo sapiens
tccctctctcaattaaagctccagcatctaccctgctgtgagtgccagaaatgtgagtcccgattcacctacccctccctgcaaccctctgagtttcgaatcaacttccaaatctgtcactg

SEQ ID NO: 206001 - DNA, 122 bp, Homo sapiens
ggagaagagaaagtgagcatcactcgaagcccttaaatggtgatagcaacatttctcaaccgatttacccctcgcagcccttcagtgaatggtatatattttctttcacttacaacaaaaaa

SEQ ID NO: 206002 - DNA, 122 bp, Homo sapiens
ggtgggttggagctagttttatcagttagaggtaagcaccggaaagttacagttaggagccgtttattgcgggcaggggaagaatgtcataaggtacattatcacaaggttacagagcacag

SEQ ID NO: 206003 - DNA, 122 bp, Homo sapiens
cataggcttggagcgtggcgagtgccaggtagctgctgcgactcttgaaggtgacgggatcggccacgatggcacgcaggccaaagcgagcattgagctcacagtaggtgatgtcaccatcc

SEQ ID NO: 206004 - DNA, 122 bp, Homo sapiens
aaacagtcgggccggatccccggtgtctggggagcggctgccggccgggcccgcgcgagccgcttcactcctacaagcccggctcactagttccaagctgctggactttgaccctcgctggg

SEQ ID NO: 206005 - DNA, 122 bp, Homo sapiens
tcagactaacgcacacccaccaggcagaggcctggagagatgcctcaggggacccaaactcgtgggtacggggccacgggtcacccgcctgtctatcctgtttccagggtcgtccgcgcagg

SEQ ID NO: 206006 - DNA, 122 bp, Homo sapiens
gggcctgggtccgtgcgtgcgtgtgagcgagagtgtcagtcacggtctttgcctgggcatcgcctacaagcagtcggagcggagaggccgcgggtcaggcgcggcgggcggccatactggaa

SEQ ID NO: 206007 - DNA, 122 bp, Homo sapiens
tgacaaagaaaaaaacttattattggactaagtagacattaagaaggtaagagtttccagcggaacagttgacaaagatcaacagagaagccagagaaaaagatggttctttctaggaaaca

SEQ ID NO: 206008 - DNA, 122 bp, Homo sapiens
gacccacaacccaactcttgagcagaggttttacctggggtgtaggcctggctccaataacgaaggaagccacaaaaaacccaagagctgcaggcgagttcaatgagaccggtttccgcccg

SEQ ID NO: 206009 - DNA, 122 bp, Homo sapiens
aggactgaaggattgctccttcttctggctggattttaaatatcccctaatttgattactcgggggagaggcaggcagaaccaacttaaatgagcttcactgttaattattcagagggcttt

SEQ ID NO: 206010 - DNA, 122 bp, Homo sapiens
gtcgccaaatggaacaggccactgctcttgccgcaaaaatctcatttcaggtttcaggaacgcacagcacttactgaggtcagtgccaggcactgtgctaggtattacagattcaacagtga

SEQ ID NO: 206011 - DNA, 122 bp, Homo sapiens
atggcagcagggtcaagttccaggaagggccgattcctggttcacagacccccatcttttcgctgcgtcctcacatggtggaaagagggcagggctgctctctggggtcccttttcttttgg

SEQ ID NO: 206012 - DNA, 122 bp, Homo sapiens
gtccaaggagaagatggttcttgccactttcctgggcttggtggttctagaaccctgtatcgtggaatcatggagattacctagtccattccccacttccaatagctggaagtccttgacct

SEQ ID NO: 206013 - DNA, 122 bp, Homo sapiens
caaacttcatcaccaactctttctgagagcaaaaacatggggccgagtccggcagctgcacgcagaatccaactctctggcagctctcggcaccgacgagctccagatcccgcgttcgcatc

SEQ ID NO: 206014 - DNA, 122 bp, Homo sapiens
aaatccccccgggttggtcggggctgggcggggctcgggggactgggctgaccgcggggtcggggccaggttctcacaccatccagataatgtatggctgcgacgtggggtcggacgggcgc

SEQ ID NO: 206015 - DNA, 122 bp, Homo sapiens
agtgtggtccacgcgcttcacgcggccatattcttccggagcgggggaggccagagaggccgttgggactacgactcccaggcgccctttcggtttgtttttgttcaaaaaaaaaaaacccc

SEQ ID NO: 206016 - DNA, 122 bp, Homo sapiens
tgttggcccaggagttcccgctcatccattttctcttgcacttgggacacttgtactcgccgaagcagcgctttttgccctggtatggagtcaggccctcgcctttggggcgtgcctacagg

SEQ ID NO: 206017 - DNA, 122 bp, Homo sapiens
cactcatgtcctaggccttcacactcactcaccctcattcaccagctcgcccagagcacccgccagccctgcgagctccgttcacggtgagcaccctacgcaggtgcaccgtcttccaccct

SEQ ID NO: 206018 - DNA, 122 bp, Homo sapiens
agcactgggattttcttaaagtttaggagaaaataaatactcggaagagacgcggggtggcgctgcagccttagaagtagcagaaacaaagcacccagccgacgctccttacccagatactc

SEQ ID NO: 206019 - DNA, 122 bp, Homo sapiens
gagaaataaggtagattctcattatcttccagctcattttcccaagaattatgtattctccggccagaaaacgacctccaaacctccaaaccttttcaactacacgcagcaaaaagctaata

SEQ ID NO: 206020 - DNA, 122 bp, Homo sapiens
cctaattgtgacaaaggcagcccctgcacactggatgctggccagcctctgccattaacacgcctacctcctcactggtgtgatcaaattggtactgctcttatgaaattatgtgtgttagc

SEQ ID NO: 206021 - DNA, 122 bp, Homo sapiens
cttccattgtctgcctccccgaagagcaggagactagcaactgggatgatcacatgaaggcgggaaaaacacaactgtcaggctccaaggacaaagcctgctcttaacaataccattcctta

SEQ ID NO: 206022 - DNA, 122 bp, Homo sapiens
ggtttcctcgctttaggaaactctcttggggcaggccccgccccacatccggtgcggcgacgccacttccgcccacgtcatggcagtcgccagactggggcggaaggcaaggaacccaccct

SEQ ID NO: 206023 - DNA, 122 bp, Homo sapiens
caggaatgagaacgaggagtcaacctcaaaggctgaaacctcggaagattcagcatcacgcggggagacaacaggaagatcccagaaagagtttggagagaaacgtgaccaggagggcaaaa

SEQ ID NO: 206024 - DNA, 122 bp, Homo sapiens
cccgccagaactccagcagctccgtggtcggctggagagtgggcagagtcaggcatctgccggctctccacttctgctttctccaggaaatgagcagagacccagctccagtgattcagagt

SEQ ID NO: 206025 - DNA, 122 bp, Homo sapiens
tgaaatcaaataattatgttaaataacagcttagtgtccctctgctcctgatctgtaatacgccgtggtcaatatctttttctgtgtcaatgggagctcattaaatgtaaactctgcagact

SEQ ID NO: 206026 - DNA, 122 bp, Homo sapiens
cggcaccggcgggaagagagcgcctcccggaatctggtgggcaaagagggcggctccttacgtaggcgggcagagacagaagctggcgtggccgggctcctgctcccctattctccgacccc

SEQ ID NO: 206027 - DNA, 122 bp, Homo sapiens
agctgtttcgggccagcagagccttcgctggctcttgacgtccttgcgaggtgatctctgcgaccaccagacaggagagaagacccattttacagatgaggtagtgctatctccaagtcctc

SEQ ID NO: 206028 - DNA, 122 bp, Homo sapiens
gggcaagaagagattatactgggatcagtatagtaaagatcagtaaagagaagataagaacgcggtctgaccctttccaagcccattatgtccatcagaagagatgacgaggagcaggaaac

SEQ ID NO: 206029 - DNA, 122 bp, Homo sapiens
ctgccagaaagccacaaagtacaaagcgaggcatttagagaccatagtagatgcaggtggcgagggaagacaggtggagaaacgcagacgggttcgtgtcggtgcagccactgctttggacc

SEQ ID NO: 206030 - DNA, 122 bp, Homo sapiens
caccttccatttaaaaccaggcctttatctttccttcccctgaactccagtctttgtccacgcgtattcgatgtgggtggagatacggactgtgccaccccatgggccaccctttcctctgg

SEQ ID NO: 206031 - DNA, 122 bp, Homo sapiens
tatcatgagtacagttgtgcagaaagtaacattgactgcttctctagcacagaacaatgtcgtcatcattaccacactgcactgacacagcctgaccgagagtcaactcctcaccttgggta

SEQ ID NO: 206032 - DNA, 122 bp, Homo sapiens
ggtgctgagcccccagggcgactttggtggaatctggtgttgaaatcagagtcccaccgccgggcgcggtggctcacgcctgtaatcccagcactttgggaggccgaggcaggcggatcatg

SEQ ID NO: 206033 - DNA, 122 bp, Homo sapiens
cgaacccttgagcgactgaggactggaatcagtaatgcgaaacaaacctagtgaccgtggcggaaacacacacagcaatgtggcgttctcagcgcctggccctgtctcatctcataagagct

SEQ ID NO: 206034 - DNA, 122 bp, Homo sapiens
cacctgcactgtccccatctttgagggttactccctgccccacgcagtcaccaagctccacgtggcgggcagggacatcacggagctcctcatgcagctgctcctggccagcggccacacct

SEQ ID NO: 206035 - DNA, 122 bp, Homo sapiens
ctcccttgggaagagccatccggaagcggctcttgttcaggacgtggacgcaaccagggccggctgggagcggcgttgtcaacacacacccttggccctcggcaggtatcagatacacaatg

SEQ ID NO: 206036 - DNA, 122 bp, Homo sapiens
atgtgaactatgcctggtaaaacaatcttcggctatatccactgaatgaacccaggaacacggtgtgtcatcgggagagggcagcacactccccctggccacgtccagaagctggtttccct

SEQ ID NO: 206037 - DNA, 122 bp, Homo sapiens
agtccatgtgtgactgcacttataataccacatgaatccagtggtctgtgccatgtaaatcgggcctctgagattttgctcagcctacagtggcatatgggcaaatacgcttctgaccttgc

SEQ ID NO: 206038 - DNA, 122 bp, Homo sapiens
tgggctgccaaatagcaaagggagcaggattggctctctgctatgcagatttagtggtggcggtagcaaactgcttaatttgttcccgtctgtacctctgccacatcccacatacacctgga

SEQ ID NO: 206039 - DNA, 122 bp, Homo sapiens
tgtggcaatgaaccagctgccagcaggcatgaaatcaaagcttggattatcagggctcaacgcataggcctgaattgacacctcagggaagaggtgcgacagggccctagcaggaagctgaa

SEQ ID NO: 206040 - DNA, 122 bp, Homo sapiens
cactgagccgtccagggggttgcgtgggggcggcggctgctccacgcggccctcgtaagccgggctcacatgaagcccgtatttggagtgcagtagcgctagttcctgggcgccttcgcccg

SEQ ID NO: 206041 - DNA, 122 bp, Homo sapiens
actgcactccagcctgggccacagaccgagaccgtctcaaaaaacaaacaaaaactctgacgtcagtttgtgtgcgtgtgtatgtatttgggtttggttttagttttcttgtttctttttca

SEQ ID NO: 206042 - DNA, 122 bp, Homo sapiens
gggcctggagcgctctctgtgcccggaccttgtaattatgtcccacagcccgggaaaccgcgggcctcgcagcatctggctgcggttgcgaacttttgtttcaagatgcgcgactatttata

SEQ ID NO: 206043 - DNA, 122 bp, Homo sapiens
tcttggaataatcttgctcagctgaataatgttgcagactaaaaatagcaaatgcagccccgagccttcctgttgcctctagggcctgtccatcccgtcagcccacggtgcctctacaaaca

SEQ ID NO: 206044 - DNA, 122 bp, Homo sapiens
aaacataccttctagatacagcaacccgtgccgagctgtaagtgactgcacatgcgcacacgctaagcccagctcagacggaggccagtgccagccacgtgttcccaggtgcccacgcgggc

SEQ ID NO: 206045 - DNA, 122 bp, Homo sapiens
cagggcaccggagagaagaggctcctcagggcctgggccagcctgtgcccaagcagagagcgtccggagagctgctcctgacaccactcctctggggttaaagcagcctcactctggccagg

SEQ ID NO: 206046 - DNA, 122 bp, Homo sapiens
tcgtcaccgcatgtgctcccagagaaaggcattagtacagggtcacttatggcagcggggcgagccagcagaccctgcaacacaaacactgaggtttttcttctccttcctcctctcgacgc

SEQ ID NO: 206047 - DNA, 122 bp, Homo sapiens
caggaacccaccagaaggaagaaactctggacacatctgaacatctgaaggaacaaactccggacacaccatctttaagaactgtaacagcgcgagggtccgcggcttcattcttgaagtcg

SEQ ID NO: 206048 - DNA, 122 bp, Homo sapiens
ggtttggggttttattttgatgtcttttcttttggtcggaagtgagtgaaggagccaggtcgccctgaaggttttccaaagggcttggctccagagccacctggcagactgcccgtggccct

SEQ ID NO: 206049 - DNA, 122 bp, Homo sapiens
gcggcctctgagagcgctccaagttcgtcttgcgccacggggtcacgctcgtccgtgggccggggaaaaccgagaagtaagggccatcccaacctcagtcgcgcacaaagggagcccggcca

SEQ ID NO: 206050 - DNA, 122 bp, Homo sapiens
gaagataaccttactaaatagtaacaaacacaactggtaaagttcaatgttccagaaacacggcaggggaaaggagatgcactgtcagctgtcttggtcagagaggccagctctaccctgtc

SEQ ID NO: 206051 - DNA, 122 bp, Homo sapiens
tctgtaaattttaaatgttccttgttttagttttttattttttttcttgaaaagaacttccgccaaggtggaagcagagaatagttgtgttaatgtagcaatatgggtcatcagtaagaaca

SEQ ID NO: 206052 - DNA, 122 bp, Homo sapiens
gttgcccgcgatggcattgaataggtagtcagcatagagccccttgccccgctgagcgggcgtcatccaggagggcatcatcaacttcacgtagtccaggtggcgcttcaagcgccagtaaa

SEQ ID NO: 206053 - DNA, 122 bp, Homo sapiens
ctcccctccgttcctttgcttgcctgggtggtggcccctgggtcagcgctgcagcagcctcgccctctcctttctgggaatttcctgggatttcctcccagcccctccacaggacgtttctc

SEQ ID NO: 206054 - DNA, 122 bp, Homo sapiens
ctgggtctctgcctccctgaggcctctcagcgggctgggggcggcctcaacaagaaggagcggctttacctgtcccctgagaggtgcagaaagaggatccaaaaggtcggaggcatctcatt

SEQ ID NO: 206055 - DNA, 122 bp, Homo sapiens
agtttcgatcccgtctcgggctcacctgggaagccccctcctggcgcccgctttgtttggcgttcctttaaagcccggtgttggcagagcgacccacaatgaaacaaattctcattttatga

SEQ ID NO: 206056 - DNA, 122 bp, Homo sapiens
aaaaaaaaagtaaactgattaaatacactatttctgccaaatatcttgaatttttttactcgaaaaaattttgtgcttaacctaaaacctatgtgaagattaagcagctttcaagagaaatg

SEQ ID NO: 206057 - DNA, 122 bp, Homo sapiens
ccaagagagcacttcctccgcgcggcggtcgcggggcttcgcagcgccccctcccgccgccgccccgcaactcaccccggcggccccgaagtctcagcctcggccacccgatccccgcctcc

SEQ ID NO: 206058 - DNA, 122 bp, Homo sapiens
aatggagcatctacatggcagaaaaatcctccaagaggacatggggccaggcagaataatcgggggagtgctaaggggtggcttcctggcagaaaggggagctggagaccgtcaagcccaga

SEQ ID NO: 206059 - DNA, 122 bp, Homo sapiens
ttcctccaagagaagaacctgtccagacaatagtttcaaagcagcgggaagctctgctcacgtgtccccaaggaccatgctgtgtgaaattcccttctgtaatcacagagcccattgccctg

SEQ ID NO: 206060 - DNA, 122 bp, Homo sapiens
tacctgtgcttaagaaaatcctggctatcctcagctctcttctcagcagaaaatgcaatgcggagactggaagttgggttatgtgcctaccctgcctctgaacctgttacccacttctgccc

SEQ ID NO: 206061 - DNA, 122 bp, Homo sapiens
tttcccggtctgctaagtagcgggtgttgtttcttgacaccttttgctactgctggaccacgatcctcttggtgacgggcgtcttcccagatgctggcatcaccgctagaccaaggagccct

SEQ ID NO: 206062 - DNA, 122 bp, Homo sapiens
tcttgggtgttttgggggagaaaacaagccccatccttcccgcggggtttctgggcttcacgcctgccttgccctctcagacaaaggccaggacttgtgcggcccacactagtgtatcgccc

SEQ ID NO: 206063 - DNA, 122 bp, Homo sapiens
aaaggggatgtaggggaggagggagaggtcggggaataaaaaccagattaggagagcggtcggggtggagaagactgtgcccagagtgaaatattctagcataatggaaaagccctcattgg

SEQ ID NO: 206064 - DNA, 122 bp, Homo sapiens
cttccccgcgggcgtccgggcccctctcctcacctccctgcggacagctcctaggccagtcgagcgccgatttatcagcccctctgaggaccgccaagcctggctaagccgagctccaagca

SEQ ID NO: 206065 - DNA, 122 bp, Homo sapiens
gttgacaatcatactcctttaaggcggagggatctacaggagggcggctgtactgtgcttcgccttatatagggcgacttggggcacgcagtagctctctcgagtcactccggcgcagtgtt

SEQ ID NO: 206066 - DNA, 122 bp, Homo sapiens
tgcagcggccactctcacagcggccccggccacgacagtccccaggacagctgcgcacaccgcagtcctcgccgctgtagcccgcattgcaaacacacacgccgttctcgcagcgcccgcga

SEQ ID NO: 206067 - DNA, 122 bp, Homo sapiens
cacagctccatgagacacccaggcttagtgaggacccctgaaatgtgtacacaggcctcacggttcttcccagccaccctcactctatctctttccagcaaacacctcccaatacaggtgct

SEQ ID NO: 206068 - DNA, 122 bp, Homo sapiens
cagggccatgggagtgggtaccctcgggcctcaaggggcttgaccctgaccaggggcccacgcacctgcacttggggtgggggcttcccaggaggtctcggcagtcgcattcctccttgttc

SEQ ID NO: 206069 - DNA, 122 bp, Homo sapiens
tggccagaggatgagaggcggtcctgtggcctcgagctcctccagggagggagggcaccgcgcttcctctcagccaactgctgcctcatttcctgagcaggaggagggagcggaaaagctgc

SEQ ID NO: 206070 - DNA, 122 bp, Homo sapiens
cttctttttagtttttttagttatctggtctcagagtagctgtgttgggcctgaacaacccgggataaagtttgtacacagctgcagatgaactactgagagcttatccaaatctgcgtcca

SEQ ID NO: 206071 - DNA, 122 bp, Homo sapiens
aatttccaccaacttacttataggcggaccttgccaagtatatctgtgaaaatcaagattcgatctccagtaaactgaaggaatgctgtgaaaaacctctgttggaaaaatcccactgcatt

SEQ ID NO: 206072 - DNA, 122 bp, Homo sapiens
ctttatgtgccagggtgctgcagccggggaatgatggcgcgggcatccccggcttccccacgggccatactgcctatctgggtctgtggaggcctgccttagtaaattaggggtcatttggg

SEQ ID NO: 206073 - DNA, 122 bp, Homo sapiens
tagtctttacatgtgtttcaatctggtttcacactcgttaactgcttaaattgtagaaagcgcattttatttcagtccactagggggaaccagagggattaggcattggagctaacaagcct

SEQ ID NO: 206074 - DNA, 122 bp, Homo sapiens
  misc_feature 116, 117, 118, 119, 120, 121, 122: n = A,T,C or G
acaaaaaatatgctaccagggaattttttgttttctaactaaagattcaatctggccaagcgcagtggcccacacctgtaatcccagcattttgggaggtggaggtgggaggatcnnnnnnn

SEQ ID NO: 206075 - DNA, 122 bp, Homo sapiens
gtcagcacttcggagcagctgggaatcgcgtaccctgcgtatcagctttgaagctgctgccgtgtttctcattagctttagaaagtaacagcaccggcttacgtacaggacagcgctgtgga

SEQ ID NO: 206076 - DNA, 122 bp, Homo sapiens
agctgggactacaggtgcccaccaccacgcctggctaattttttgtatttttagtagagccggggtttcaccgtgttagctgggatggtattgatctcctgaactcgtgatctgcccgcctc

SEQ ID NO: 206077 - DNA, 122 bp, Homo sapiens
accagagggacagcgcaccctccggtcgaagcggggtaggcgttggcaggggaggggcgacgaagactggcgaggttcaggcgccagccaaagaaccactctgctaacttcctggcacttac

SEQ ID NO: 206078 - DNA, 122 bp, Homo sapiens
ccgccgccggcctcgccagctatcccgagctgcgcctcttcgggggcctgctgcgccgcgcgcactgcctcaagcgctgcaagcagggcctgccagccttccgccagtcccagcccagccgc

SEQ ID NO: 206079 - DNA, 122 bp, Homo sapiens
tgcatttcagacctatgagcagaggaaaatcgtggagttcacctgccacacagccttcttcgtcagtatcgtggtggtgcagtgggccgacttggtcatctgtaagaccaggaggaattcgg

SEQ ID NO: 206080 - DNA, 122 bp, Homo sapiens
cagaaatgaaaaatagaacatcagtgacagatttcatccttctgggtctgacggataatccgcaactgcaggttgtgattttctcgttcctatttcttacgtatgtactgagtgttactgga

SEQ ID NO: 206081 - DNA, 122 bp, Homo sapiens
ttctctcaggaaaaaaaacaaggtccccacagcaaagaaaaggaataggatcaagagatacgtggctgctggcagagcaaggtgagtctgcttaatctggtggttggtaactgggagttggt

SEQ ID NO: 206082 - DNA, 122 bp, Homo sapiens
cggggggcggggtgacgggaaacggggcgggctcttaaagggccagagctaggcggcccacgtagacccggcacccgcgcaacggaggaggggcgctgtgccctctccccaacggcggtcag

SEQ ID NO: 206083 - DNA, 122 bp, Homo sapiens
cgctgaggtcgtggggccgtgactcacagagggcgaagtgctagggcttgcataccctcacgcgcccaggccccggggtgggacgcatgtggctgggcctgtgggctcccctgccccagggt

SEQ ID NO: 206084 - DNA, 122 bp, Homo sapiens
cactcagactttagatatagattaaaagaagttaatcacttatgtctttagatgaatgcacgcttacacatggacatatggcttagaaggtatataagctctggaaaactttgtaattttga

SEQ ID NO: 206085 - DNA, 122 bp, Homo sapiens
atcacattagtcacagcctctaagcaagtggcaaataacaacaacaacagcctcagaagtcgccgatcccgaggccgggacgccgggaggcagccgcccgaccctcccggcccccacccggc

SEQ ID NO: 206086 - DNA, 122 bp, Homo sapiens
cacggctttccgtttctagcatttggaacagcaatgctgcgtaatctgtcctttactgcccggagtccccacacggagaaatgcctctgccgcagacagccttccccaggaggcggaaaggg

SEQ ID NO: 206087 - DNA, 122 bp, Homo sapiens
cccatatgagaagtgaggagcccctccgcccggcagccaccccatctgggaagtgaggagcgtctctgcccggcagccaccccatccgggagggaagtgggggtcagcccccgccaggccag

SEQ ID NO: 206088 - DNA, 122 bp, Homo sapiens
aaccattggccacctgtactcagcatgttctcacacatggccattaactctgaaaactaacgcaagccaaacaaagcctaaggaataaatgggttgccataagaaaacaattaaaaagtcac

SEQ ID NO: 206089 - DNA, 122 bp, Homo sapiens
gcggggcctgcaggtttggcccccgcagggagcgcagctggcgccgctgggagctggtggcgcggcgcaggtcccggccgagtgtggcgcagcagtggcggcgcttcccattcgccatgcgc

SEQ ID NO: 206090 - DNA, 122 bp, Homo sapiens
ctggcacttccttgcaaaacaaccaacctaatactgagtttttagttttgcactacaagccgtttgaaacagaataacattctttcctggccaccacttttaaattcggaaggagacaatac

SEQ ID NO: 206091 - DNA, 122 bp, Homo sapiens
cggcagctgccgctgcaccattcattctctcctgcagaagttcaatattgctgcaaatatcgagaaaaaaaaaaaaagcgctgagagggggagggagggagggaggaagggagggacagcga

SEQ ID NO: 206092 - DNA, 122 bp, Homo sapiens
gaggctgaggcaggagaatcgcttgaatccaggaggccaaggttgcagtgggcgagatcacgccactgcactccagcctgggcgacagagcgagatcctgtccccctctcccaaaaaagcac

SEQ ID NO: 206093 - DNA, 122 bp, Homo sapiens
gaaggagcgaggggcggattctgcgcccgtgggaggctgcggcggtggcggggagcggaccgctcggagccgcgcaggggagcgggaccgtggagaaggaggaggcggcggaggaggaaggg

SEQ ID NO: 206094 - DNA, 122 bp, Homo sapiens
cccagagccgggctccctgccctcctgtgcggaaaggacacggacacgcctggtggatggcgtggcctggacagggctgcctggcggcatgtctgtctcctcggcctcccatggcccttctg

SEQ ID NO: 206095 - DNA, 122 bp, Homo sapiens
ccctggaacaccttccagagtatggacttcccggaccagagaaggggggctcccgagccccgcccccggccgccccgaaccgccccgcccgtctcgaatcgcccagcccacaaagtgagccc

SEQ ID NO: 206096 - DNA, 122 bp, Homo sapiens
gctggctcctgacttcctgcctaaaggcaaacaaggagtccaaagcccggatcctcctcccgggccttcttcctggtgaagagcgcattcccacccagcagggaacagaaaaaccagttccc

SEQ ID NO: 206097 - DNA, 122 bp, Homo sapiens
gcaatcacgcgccaggccacacgaggagagcccactgccccggggatgtcagacgcggggcggcctcggcgaccgcacacgccatagaaaggtcaccgaacttggccgcccggccgtcccgg

SEQ ID NO: 206098 - DNA, 122 bp, Homo sapiens
cacatgacccgggctggtcacgtgggccgtgggtttcccaatgcctttacaagcgaaggtcggaataaccacggctgagaaagacactctagtggctaaaccttcgctgctgcagtaaaatg

SEQ ID NO: 206099 - DNA, 122 bp, Homo sapiens
ttcactgtctgtctacatccccagcgagactgagtatcatgaggtcagggactgtaactgcgtcctctgagcctagctcagaagcaggcgcatgtcaagaactgagtaagcaaggactggat

SEQ ID NO: 206100 - DNA, 122 bp, Homo sapiens
cactttctctttaaatgcaaatgaactccctccagcttagctttcacccggtggtgttcccgggaggagagggcggagggcggagggaacttgcaccgaagcatcactcgagaccccaaacc

SEQ ID NO: 206101 - DNA, 122 bp, Homo sapiens
cctgcccagcctatttaaattcaaatttaaattaattaagtaatataaaatgtaaaatgtcgttcttcagtcgcaatagccacatgtcaagtgctcgatagccctacgtggctagtggttac

SEQ ID NO: 206102 - DNA, 122 bp, Homo sapiens
attcctgcaggagaaacctgtatttgcaaaggcaagaatccagacggagtgtgtcaaattcgggaaaagaacaaaattcaaggtggccatattatctctgggaagaagagaggaagggcaag

SEQ ID NO: 206103 - DNA, 122 bp, Homo sapiens
agtgggggacccgggttagcggcagcggcgggggatggaggcgcccttgggctgcaccatcgcccagaaggggtgtcaggggcagcccaggcccccgagctgcagcaaccacaaagtgcgac

SEQ ID NO: 206104 - DNA, 122 bp, Homo sapiens
actcattcctgtctggaggaagagtttaacctgacttcggctgggagtcacaaccaagcacgtagggcatgaatcacaatctgtgagggtggaaaatacctactgatgactctgatatgctt

SEQ ID NO: 206105 - DNA, 122 bp, Homo sapiens
aggaggctgagggggaaggaccacttgagcctggaaggtagaggctgcagtgagctgtgacggtgccatagcccttcggcccaggtgacagagtgagacattgtcttaaattaaaaaaaaaa

SEQ ID NO: 206106 - DNA, 122 bp, Homo sapiens
gcctgccctctagcctctactcttccagttgcggcttattgcatcacagtaattgctgtacgaaggtcagaatcgctacctattgtccaaagcagtcgtaagaagaggtcccaatcccccac

SEQ ID NO: 206107 - DNA, 122 bp, Homo sapiens
gtgtcacccacactacccgagagtcccaaacacgctcagatagtgaccacccacccacagcgccagcatcagtcacgccccacggtttctctcacatacggtgtcgctttctggtgctcagt

SEQ ID NO: 206108 - DNA, 122 bp, Homo sapiens
agttcccaaaaaggtgctttcggcttttgccgggggtagaagtaaatagtccataggcgccgggcagtcacagtgctggagcaagaaaaggtcgtgctcacagccttcctggctgccctaag

SEQ ID NO: 206109 - DNA, 122 bp, Homo sapiens
ttatttggctgcgttcctctatagtttaatctgggaaggagccatagcctaattggagaccgtgaacatcagcctacgctgagtcaccaggcagcgccgcacaaatgggctagggcttcccc

SEQ ID NO: 206110 - DNA, 122 bp, Homo sapiens
ctccgttccggttccggcgcaggtcggttccggttccggcgcgcccctcccccgtcccggcgccgccgccaccgccttagcggcttgttttgtttcgacttctagctaaggccgagggaggc

SEQ ID NO: 206111 - DNA, 122 bp, Homo sapiens
gatctgcccaggatggcgtcgctgggtcgaggggcatgttcagcatgaacagctggtgcccggtgccttctccagagcgggcactggttcactctccccttggcagagcgtgagaagcccag

SEQ ID NO: 206112 - DNA, 122 bp, Homo sapiens
ctcgcccgtttcccgcgggatgggcggtgggacaaatggctccctggattgactgctgcccggactgtcccaagtctggggcctaaacagcctaaccttgccctggataacccccatgctga

SEQ ID NO: 206113 - DNA, 122 bp, Homo sapiens
tctagcggacaggagttgaggggcggggctagacgggagggaggggttaagtgcgcgcgccgctagacttggacagccatcaggaaaagcgcctccaggtgtagagaggtgggctgctcaag

SEQ ID NO: 206114 - DNA, 122 bp, Homo sapiens
taaaactgaaaacaaaaaacgaagaagataacttctgggaatcgggactttcagtggaggcggggtgatgagaaaaggaatatttactgtcatccaacaactttgtcttgtacttttgtcat

SEQ ID NO: 206115 - DNA, 122 bp, Homo sapiens
ataggtgtagcaggggacaggagctcagaaggaggccgccctcctgtgctgcccccaccccgcatttgaggattgcccctcccaggccccacaagcccaccctgctgttgatgctccatcct

SEQ ID NO: 206116 - DNA, 122 bp, Homo sapiens
tatggtagagatttctcgtgttcaccagcatctgtgtccttttcttcttcatgggttctacgttcctcagccctttggaatctagaacaacagaatgtgatcaagcggcaggatcacatagg

SEQ ID NO: 206117 - DNA, 122 bp, Homo sapiens
ctgcctggacctcctgtaagatggctcctacgcgaccacgctaccagagaatcagctctacgtgccaccaacattgccaccaactgtccatagatcgcctgcgtgcctcagcccactgacac

SEQ ID NO: 206118 - DNA, 122 bp, Homo sapiens
cgtgacttcgtgaccgtcacccagctctgcagcacatcccgtgacccagctcatccaggccgcatgcaaacctgttgccaggcgagaaaccagtcaccgcacagctgtggttgcctgaaatg

SEQ ID NO: 206119 - DNA, 122 bp, Homo sapiens
tctccgaagctgtcagtgtccttcctcgtgagaggatgatgaagaggatgtggtttccgccgcctcatccacaggccggctgcccacggagccttagacatcgaggccagagcgactgttgg

SEQ ID NO: 206120 - DNA, 122 bp, Homo sapiens
gggcaaacactgagggggagctccactagccagtgcctttttggctcctcagcgtggcctcgttgcctgttttagagaagcttccagaagatagttgggtgggacattagaggagacagtgg

SEQ ID NO: 206121 - DNA, 122 bp, Homo sapiens
ccggggccgccttggaaaacccggcgcggacataaaattaaagcggacgggctgcggaggcgactgcagattgacctgtgaacttcagacaggccacctacctacgctgagctcctgcttct

SEQ ID NO: 206122 - DNA, 122 bp, Homo sapiens
ccgcccggagcccgaactgcggcccgccgcccgatgagctttcaaacgaacttctttgaacgcgtttttgaaaaagcatttgctccccactggtctgaaacggaaactttaattttcgatgc

SEQ ID NO: 206123 - DNA, 122 bp, Homo sapiens
actgtgcttgaacaccccgcggcttcccactgcattcggattaaaggccctgtcctgaaccgcagggccccacgtcgcctggccgccgtcccctgaccccacgtaacgccccacactgtccc

SEQ ID NO: 206124 - DNA, 122 bp, Homo sapiens
gtgatccgcctgcctcggcctcccggagtgttgggattacaggtatgagccaccatgccccgcctccagcaaccctcttgatgcagatgttgtacattccaggcctggtgcctgcagctgtg

SEQ ID NO: 206125 - DNA, 122 bp, Homo sapiens
cgctgcgatgtgtatcgtaatagcaagggaaggagagggggatgacattactccccgcatcgtggaggagtctatcacagatcgggatactatccaccctctgggatatggggagtacaccc

SEQ ID NO: 206126 - DNA, 122 bp, Homo sapiens
ctcagtgggtgaaatcgaagagactgaggacaataaagaacaaggaaccgaactgccggacgtggtggcatgcacctgtaatcctaccactttgcaaggccaaggtgagaggatcgcttgaa

SEQ ID NO: 206127 - DNA, 122 bp, Homo sapiens
gctcatggccatccacgtagtgaattaataaagctttgttgagtggcacttgcttgacagcgacacttttgtccactctttcaccttgctggatttgtgctgccttccttgctgtaggaagc

SEQ ID NO: 206128 - DNA, 122 bp, Homo sapiens
tgggtccgggctaggaagagcgcaatctcctttcctggggagaccctaactcctggaacccggcttgagggggatccctgctgtccagctgcggtccccgcagtgaccaggcgaggcgctgg

SEQ ID NO: 206129 - DNA, 122 bp, Homo sapiens
cagcacttactttatcttcagtctaacactactgcaagccgaggtctgggatacttatgacgcagtcccaaactggggggagaccgtgggcgggcccagggaggtgcctaaagggaggagcg

SEQ ID NO: 206130 - DNA, 122 bp, Homo sapiens
gggatccgagcatcgggagagcggtgggcacggcaggggcggaggccaagggcgaccacccggcccagcagaagccccgggcgcgggcgcggcgtctacgcggccgcgctgcagggctgggg

SEQ ID NO: 206131 - DNA, 122 bp, Homo sapiens
cttattataccgggtaattaaaagagccactggaatctataagtcacatccttggcctggcgccacttaccctgacagtgcttggctgggctgctccacactgggtggtgttcagggaagct

SEQ ID NO: 206132 - DNA, 122 bp, Homo sapiens
cggagggcggctagagctgggcctgagcccgggaacgcgcctgatcaggggtggcggagccgcggtccccacagccgccccacccgcgccgctgcctcgctggggcccgggcccccttcccg

SEQ ID NO: 206133 - DNA, 122 bp, Homo sapiens
ctgccttgtgccttgttgtgggtactcgctgtgtcttgcagaggatgggacagtggtcctcgtggcgccagggccgagctgttcccagttccccgggactatagacagaaatatgtatattt

SEQ ID NO: 206134 - DNA, 122 bp, Homo sapiens
tggcgtgggtgggcggcagggactcagggtgaagttgaagcaggcagaggggagaagcggcgagaccacaaggaatgttgggatagtcccaagtaagcctctcccaaccaagaagcctccag

SEQ ID NO: 206135 - DNA, 122 bp, Homo sapiens
cccggcccggccacgggccgccggggcttgcagagtgtcagccatcccgggcaggagtcgcgtctccccacaccgacctccactcgcgccgggagctgagcggcagtgtaggtagtgaagac

SEQ ID NO: 206136 - DNA, 122 bp, Homo sapiens
gcagcatctccaccagcaagctgggctgctgggtgggtacttccttcaaagctgagggagcgtcctacgcccacgcgcgcaggagggcgccccccgcaaagcaacgtctaggagaccacagt

SEQ ID NO: 206137 - DNA, 122 bp, Homo sapiens
atagtatttttatgttacccatcatctttaaaaacattataggctgggcatggtggcttacgcctgtaatcccagcactttgggaggccaaggcgggcggatcatgaggtcaggagatcgag

SEQ ID NO: 206138 - DNA, 122 bp, Homo sapiens
gggcgccccttccccggggagcctggaaacccacaaggcaggagccattagagggcagcacgtgcctgtctcataacactgagcagactcgtcttttttttttcttcttccaattacagggt
